United States Patent Application Publication US 2019/0048337 A1 - sequence listing, part 22

SEQ ID NO: 730342 - RNA, 17 nt, Artificial Sequence
  Synthetic
uuggcuaugaucuucaa

SEQ ID NO: 730343 - RNA, 17 nt, Artificial Sequence
  Synthetic
ucaauaacucucuucaa

SEQ ID NO: 730344 - RNA, 17 nt, Artificial Sequence
  Synthetic
cagauggucuucuucaa

SEQ ID NO: 730345 - RNA, 17 nt, Artificial Sequence
  Synthetic
uggcuucaaaaguucaa

SEQ ID NO: 730346 - RNA, 17 nt, Artificial Sequence
  Synthetic
uggcuucgaaaguucaa

SEQ ID NO: 730347 - RNA, 17 nt, Artificial Sequence
  Synthetic
uccucugucaaguucaa

SEQ ID NO: 730348 - RNA, 17 nt, Artificial Sequence
  Synthetic
ugacaacugaaguucaa

SEQ ID NO: 730349 - RNA, 17 nt, Artificial Sequence
  Synthetic
aauauaaaccaguucaa

SEQ ID NO: 730350 - RNA, 17 nt, Artificial Sequence
  Synthetic
cucaaccugcaguucaa

SEQ ID NO: 730351 - RNA, 17 nt, Artificial Sequence
  Synthetic
aaccucauguaguucaa

SEQ ID NO: 730352 - RNA, 17 nt, Artificial Sequence
  Synthetic
agaagcaguuaguucaa

SEQ ID NO: 730353 - RNA, 17 nt, Artificial Sequence
  Synthetic
ugguuaaaaccguucaa

SEQ ID NO: 730354 - RNA, 17 nt, Artificial Sequence
  Synthetic
uuuauuugcccguucaa

SEQ ID NO: 730355 - RNA, 17 nt, Artificial Sequence
  Synthetic
caauucauaagguucaa

SEQ ID NO: 730356 - RNA, 17 nt, Artificial Sequence
  Synthetic
uccgccuccagguucaa

SEQ ID NO: 730357 - RNA, 17 nt, Artificial Sequence
  Synthetic
acagugugcagguucaa

SEQ ID NO: 730358 - RNA, 17 nt, Artificial Sequence
  Synthetic
aggaaguucagguucaa

SEQ ID NO: 730359 - RNA, 17 nt, Artificial Sequence
  Synthetic
ugaguauuaggguucaa

SEQ ID NO: 730360 - RNA, 17 nt, Artificial Sequence
  Synthetic
ccgccuccuggguucaa

SEQ ID NO: 730361 - RNA, 17 nt, Artificial Sequence
  Synthetic
cugccuccuggguucaa

SEQ ID NO: 730362 - RNA, 17 nt, Artificial Sequence
  Synthetic
cugacucccugguucaa

SEQ ID NO: 730363 - RNA, 17 nt, Artificial Sequence
  Synthetic
uaaaagaggugguucaa

SEQ ID NO: 730364 - RNA, 17 nt, Artificial Sequence
  Synthetic
aguuacaguugguucaa

SEQ ID NO: 730365 - RNA, 17 nt, Artificial Sequence
  Synthetic
auuugauuaauguucaa

SEQ ID NO: 730366 - RNA, 17 nt, Artificial Sequence
  Synthetic
cauuccuucauguucaa

SEQ ID NO: 730367 - RNA, 17 nt, Artificial Sequence
  Synthetic
acgggaaagauguucaa

SEQ ID NO: 730368 - RNA, 17 nt, Artificial Sequence
  Synthetic
uaauuuuaucuguucaa

SEQ ID NO: 730369 - RNA, 17 nt, Artificial Sequence
  Synthetic
cccuccauuuuguucaa

SEQ ID NO: 730370 - RNA, 17 nt, Artificial Sequence
  Synthetic
uucucucaaaauuucaa

SEQ ID NO: 730371 - RNA, 17 nt, Artificial Sequence
  Synthetic
cucuucaugaauuucaa

SEQ ID NO: 730372 - RNA, 17 nt, Artificial Sequence
  Synthetic
aaacuaacucauuucaa

SEQ ID NO: 730373 - RNA, 17 nt, Artificial Sequence
  Synthetic
cauuuuauagauuucaa

SEQ ID NO: 730374 - RNA, 17 nt, Artificial Sequence
  Synthetic
aagguuacauauuucaa

SEQ ID NO: 730375 - RNA, 17 nt, Artificial Sequence
  Synthetic
ugaaauuuauauuucaa

SEQ ID NO: 730376 - RNA, 17 nt, Artificial Sequence
  Synthetic
uguaugaacuauuucaa

SEQ ID NO: 730377 - RNA, 17 nt, Artificial Sequence
  Synthetic
augucauguuauuucaa

SEQ ID NO: 730378 - RNA, 17 nt, Artificial Sequence
  Synthetic
aguuguccaacuuucaa

SEQ ID NO: 730379 - RNA, 17 nt, Artificial Sequence
  Synthetic
agguauuucacuuucaa

SEQ ID NO: 730380 - RNA, 17 nt, Artificial Sequence
  Synthetic
uguagucuuacuuucaa

SEQ ID NO: 730381 - RNA, 17 nt, Artificial Sequence
  Synthetic
uguguaaaaccuuucaa

SEQ ID NO: 730382 - RNA, 17 nt, Artificial Sequence
  Synthetic
agucaaugaccuuucaa

SEQ ID NO: 730383 - RNA, 17 nt, Artificial Sequence
  Synthetic
cuguguuugccuuucaa

SEQ ID NO: 730384 - RNA, 17 nt, Artificial Sequence
  Synthetic
ucuugaaaagcuuucaa

SEQ ID NO: 730385 - RNA, 17 nt, Artificial Sequence
  Synthetic
uugagaauuucuuucaa

SEQ ID NO: 730386 - RNA, 17 nt, Artificial Sequence
  Synthetic
caugauuuuucuuucaa

SEQ ID NO: 730387 - RNA, 17 nt, Artificial Sequence
  Synthetic
uaaguuuuuucuuucaa

SEQ ID NO: 730388 - RNA, 17 nt, Artificial Sequence
  Synthetic
cuuuucagaaguuucaa

SEQ ID NO: 730389 - RNA, 17 nt, Artificial Sequence
  Synthetic
uuuaaaguacguuucaa

SEQ ID NO: 730390 - RNA, 17 nt, Artificial Sequence
  Synthetic
aaagucuuucguuucaa

SEQ ID NO: 730391 - RNA, 17 nt, Artificial Sequence
  Synthetic
uaacagugauguuucaa

SEQ ID NO: 730392 - RNA, 17 nt, Artificial Sequence
  Synthetic
uaaucaaaguguuucaa

SEQ ID NO: 730393 - RNA, 17 nt, Artificial Sequence
  Synthetic
aauaucucuuguuucaa

SEQ ID NO: 730394 - RNA, 17 nt, Artificial Sequence
  Synthetic
uuuuccagaauuuucaa

SEQ ID NO: 730395 - RNA, 17 nt, Artificial Sequence
  Synthetic
aaagucugaauuuucaa

SEQ ID NO: 730396 - RNA, 17 nt, Artificial Sequence
  Synthetic
uuaccuuggauuuucaa

SEQ ID NO: 730397 - RNA, 17 nt, Artificial Sequence
  Synthetic
cauucauauauuuucaa

SEQ ID NO: 730398 - RNA, 17 nt, Artificial Sequence
  Synthetic
ucacaacugcuuuucaa

SEQ ID NO: 730399 - RNA, 17 nt, Artificial Sequence
  Synthetic
ugauuuugucuuuucaa

SEQ ID NO: 730400 - RNA, 17 nt, Artificial Sequence
  Synthetic
aacuuuacaguuuucaa

SEQ ID NO: 730401 - RNA, 17 nt, Artificial Sequence
  Synthetic
cuugugccaguuuucaa

SEQ ID NO: 730402 - RNA, 17 nt, Artificial Sequence
  Synthetic
uuaaugggaguuuucaa

SEQ ID NO: 730403 - RNA, 17 nt, Artificial Sequence
  Synthetic
uaacuuaaauuuuucaa

SEQ ID NO: 730404 - RNA, 17 nt, Artificial Sequence
  Synthetic
ucacuuggauuuuucaa

SEQ ID NO: 730405 - RNA, 17 nt, Artificial Sequence
  Synthetic
cagucauuauuuuucaa

SEQ ID NO: 730406 - RNA, 17 nt, Artificial Sequence
  Synthetic
uuauuguacuuuuucaa

SEQ ID NO: 730407 - RNA, 17 nt, Artificial Sequence
  Synthetic
uucaagaaguuuuucaa

SEQ ID NO: 730408 - RNA, 17 nt, Artificial Sequence
  Synthetic
acuaaugguuuuuucaa

SEQ ID NO: 730409 - RNA, 17 nt, Artificial Sequence
  Synthetic
uauuuagaaaaaaagaa

SEQ ID NO: 730410 - RNA, 17 nt, Artificial Sequence
  Synthetic
ucucuugaaaaaaagaa

SEQ ID NO: 730411 - RNA, 17 nt, Artificial Sequence
  Synthetic
uaaacuuuaaaaaagaa

SEQ ID NO: 730412 - RNA, 17 nt, Artificial Sequence
  Synthetic
cccccacacaaaaagaa

SEQ ID NO: 730413 - RNA, 17 nt, Artificial Sequence
  Synthetic
agaagaaagaaaaagaa

SEQ ID NO: 730414 - RNA, 17 nt, Artificial Sequence
  Synthetic
uauauauggaaaaagaa

SEQ ID NO: 730415 - RNA, 17 nt, Artificial Sequence
  Synthetic
uaugaaaugaaaaagaa

SEQ ID NO: 730416 - RNA, 17 nt, Artificial Sequence
  Synthetic
uuacaaaguaaaaagaa

SEQ ID NO: 730417 - RNA, 17 nt, Artificial Sequence
  Synthetic
aggaagaaacaaaagaa

SEQ ID NO: 730418 - RNA, 17 nt, Artificial Sequence
  Synthetic
aauggagaacaaaagaa

SEQ ID NO: 730419 - RNA, 17 nt, Artificial Sequence
  Synthetic
ucgaccaagcaaaagaa

SEQ ID NO: 730420 - RNA, 17 nt, Artificial Sequence
  Synthetic
uauuaucagcaaaagaa

SEQ ID NO: 730421 - RNA, 17 nt, Artificial Sequence
  Synthetic
ccauccauucaaaagaa

SEQ ID NO: 730422 - RNA, 17 nt, Artificial Sequence
  Synthetic
agcaacaaagaaaagaa

SEQ ID NO: 730423 - RNA, 17 nt, Artificial Sequence
  Synthetic
ugcuugaaagaaaagaa

SEQ ID NO: 730424 - RNA, 17 nt, Artificial Sequence
  Synthetic
auggaggaagaaaagaa

SEQ ID NO: 730425 - RNA, 17 nt, Artificial Sequence
  Synthetic
uggagaacagaaaagaa

SEQ ID NO: 730426 - RNA, 17 nt, Artificial Sequence
  Synthetic
cggagaaacgaaaagaa

SEQ ID NO: 730427 - RNA, 17 nt, Artificial Sequence
  Synthetic
ugcaaaacggaaaagaa

SEQ ID NO: 730428 - RNA, 17 nt, Artificial Sequence
  Synthetic
uggaaaggugaaaagaa

SEQ ID NO: 730429 - RNA, 17 nt, Artificial Sequence
  Synthetic
augucauuugaaaagaa

SEQ ID NO: 730430 - RNA, 17 nt, Artificial Sequence
  Synthetic
uacacuaaauaaaagaa

SEQ ID NO: 730431 - RNA, 17 nt, Artificial Sequence
  Synthetic
cagggauaauaaaagaa

SEQ ID NO: 730432 - RNA, 17 nt, Artificial Sequence
  Synthetic
acucccuaauaaaagaa

SEQ ID NO: 730433 - RNA, 17 nt, Artificial Sequence
  Synthetic
acuuaucuuuaaaagaa

SEQ ID NO: 730434 - RNA, 17 nt, Artificial Sequence
  Synthetic
aaggagagaacaaagaa

SEQ ID NO: 730435 - RNA, 17 nt, Artificial Sequence
  Synthetic
cauaugaacacaaagaa

SEQ ID NO: 730436 - RNA, 17 nt, Artificial Sequence
  Synthetic
ucaagaaagacaaagaa

SEQ ID NO: 730437 - RNA, 17 nt, Artificial Sequence
  Synthetic
ucaaaaaauacaaagaa

SEQ ID NO: 730438 - RNA, 17 nt, Artificial Sequence
  Synthetic
cgguggucaccaaagaa

SEQ ID NO: 730439 - RNA, 17 nt, Artificial Sequence
  Synthetic
caccguuuaccaaagaa

SEQ ID NO: 730440 - RNA, 17 nt, Artificial Sequence
  Synthetic
uuucuagauccaaagaa

SEQ ID NO: 730441 - RNA, 17 nt, Artificial Sequence
  Synthetic
auaagcuaggcaaagaa

SEQ ID NO: 730442 - RNA, 17 nt, Artificial Sequence
  Synthetic
uucauuuaggcaaagaa

SEQ ID NO: 730443 - RNA, 17 nt, Artificial Sequence
  Synthetic
auacacauugcaaagaa

SEQ ID NO: 730444 - RNA, 17 nt, Artificial Sequence
  Synthetic
aaugcuuuaucaaagaa

SEQ ID NO: 730445 - RNA, 17 nt, Artificial Sequence
  Synthetic
ugcuauccuucaaagaa

SEQ ID NO: 730446 - RNA, 17 nt, Artificial Sequence
  Synthetic
uuauaaaguucaaagaa

SEQ ID NO: 730447 - RNA, 17 nt, Artificial Sequence
  Synthetic
uguacuaaaagaaagaa

SEQ ID NO: 730448 - RNA, 17 nt, Artificial Sequence
  Synthetic
aagaaagaaagaaagaa

SEQ ID NO: 730449 - RNA, 17 nt, Artificial Sequence
  Synthetic
auaaaacgaagaaagaa

SEQ ID NO: 730450 - RNA, 17 nt, Artificial Sequence
  Synthetic
ucauuuagcagaaagaa

SEQ ID NO: 730451 - RNA, 17 nt, Artificial Sequence
  Synthetic
caugauuauagaaagaa

SEQ ID NO: 730452 - RNA, 17 nt, Artificial Sequence
  Synthetic
agcuaagaaggaaagaa

SEQ ID NO: 730453 - RNA, 17 nt, Artificial Sequence
  Synthetic
aagaagggaggaaagaa

SEQ ID NO: 730454 - RNA, 17 nt, Artificial Sequence
  Synthetic
uucagggggggaaagaa

SEQ ID NO: 730455 - RNA, 17 nt, Artificial Sequence
  Synthetic
cucauuuggggaaagaa

SEQ ID NO: 730456 - RNA, 17 nt, Artificial Sequence
  Synthetic
caccuguuuggaaagaa

SEQ ID NO: 730457 - RNA, 17 nt, Artificial Sequence
  Synthetic
cuacuguccugaaagaa

SEQ ID NO: 730458 - RNA, 17 nt, Artificial Sequence
  Synthetic
uuuagaaugugaaagaa

SEQ ID NO: 730459 - RNA, 17 nt, Artificial Sequence
  Synthetic
aucagaaguugaaagaa

SEQ ID NO: 730460 - RNA, 17 nt, Artificial Sequence
  Synthetic
cugaaaauuugaaagaa

SEQ ID NO: 730461 - RNA, 17 nt, Artificial Sequence
  Synthetic
ccauaauuuugaaagaa

SEQ ID NO: 730462 - RNA, 17 nt, Artificial Sequence
  Synthetic
aauguauuuugaaagaa

SEQ ID NO: 730463 - RNA, 17 nt, Artificial Sequence
  Synthetic
agaagaaaaauaaagaa

SEQ ID NO: 730464 - RNA, 17 nt, Artificial Sequence
  Synthetic
ugcacacaaauaaagaa

SEQ ID NO: 730465 - RNA, 17 nt, Artificial Sequence
  Synthetic
aguaaaggaauaaagaa

SEQ ID NO: 730466 - RNA, 17 nt, Artificial Sequence
  Synthetic
cugcagugcauaaagaa

SEQ ID NO: 730467 - RNA, 17 nt, Artificial Sequence
  Synthetic
ugguuggggauaaagaa

SEQ ID NO: 730468 - RNA, 17 nt, Artificial Sequence
  Synthetic
ucccuuaugauaaagaa

SEQ ID NO: 730469 - RNA, 17 nt, Artificial Sequence
  Synthetic
uuguaagcuauaaagaa

SEQ ID NO: 730470 - RNA, 17 nt, Artificial Sequence
  Synthetic
cagggagguauaaagaa

SEQ ID NO: 730471 - RNA, 17 nt, Artificial Sequence
  Synthetic
agcaauauuguaaagaa

SEQ ID NO: 730472 - RNA, 17 nt, Artificial Sequence
  Synthetic
aaggcaguuguaaagaa

SEQ ID NO: 730473 - RNA, 17 nt, Artificial Sequence
  Synthetic
aauucauucuuaaagaa

SEQ ID NO: 730474 - RNA, 17 nt, Artificial Sequence
  Synthetic
uugaaaagguuaaagaa

SEQ ID NO: 730475 - RNA, 17 nt, Artificial Sequence
  Synthetic
cuuuuggauuuaaagaa

SEQ ID NO: 730476 - RNA, 17 nt, Artificial Sequence
  Synthetic
auaguauuuuuaaagaa

SEQ ID NO: 730477 - RNA, 17 nt, Artificial Sequence
  Synthetic
uccugauacaacaagaa

SEQ ID NO: 730478 - RNA, 17 nt, Artificial Sequence
  Synthetic
uuuaggacccacaagaa

SEQ ID NO: 730479 - RNA, 17 nt, Artificial Sequence
  Synthetic
agaaaaaaagacaagaa

SEQ ID NO: 730480 - RNA, 17 nt, Artificial Sequence
  Synthetic
caggggguugacaagaa

SEQ ID NO: 730481 - RNA, 17 nt, Artificial Sequence
  Synthetic
aaaaaguguuacaagaa

SEQ ID NO: 730482 - RNA, 17 nt, Artificial Sequence
  Synthetic
aagguagaaaccaagaa

SEQ ID NO: 730483 - RNA, 17 nt, Artificial Sequence
  Synthetic
uguacacugaccaagaa

SEQ ID NO: 730484 - RNA, 17 nt, Artificial Sequence
  Synthetic
cauaagggccccaagaa

SEQ ID NO: 730485 - RNA, 17 nt, Artificial Sequence
  Synthetic
cugaugacugccaagaa

SEQ ID NO: 730486 - RNA, 17 nt, Artificial Sequence
  Synthetic
cuaacuagauccaagaa

SEQ ID NO: 730487 - RNA, 17 nt, Artificial Sequence
  Synthetic
ugcccuaaaagcaagaa

SEQ ID NO: 730488 - RNA, 17 nt, Artificial Sequence
  Synthetic
uaugucaucagcaagaa

SEQ ID NO: 730489 - RNA, 17 nt, Artificial Sequence
  Synthetic
uauuucaucagcaagaa

SEQ ID NO: 730490 - RNA, 17 nt, Artificial Sequence
  Synthetic
cagaucuguagcaagaa

SEQ ID NO: 730491 - RNA, 17 nt, Artificial Sequence
  Synthetic
uuauagcaaugcaagaa

SEQ ID NO: 730492 - RNA, 17 nt, Artificial Sequence
  Synthetic
aauccagaaaucaagaa

SEQ ID NO: 730493 - RNA, 17 nt, Artificial Sequence
  Synthetic
aaguaauaacucaagaa

SEQ ID NO: 730494 - RNA, 17 nt, Artificial Sequence
  Synthetic
uauuauguucucaagaa

SEQ ID NO: 730495 - RNA, 17 nt, Artificial Sequence
  Synthetic
auacucaacuucaagaa

SEQ ID NO: 730496 - RNA, 17 nt, Artificial Sequence
  Synthetic
caaaggaacuucaagaa

SEQ ID NO: 730497 - RNA, 17 nt, Artificial Sequence
  Synthetic
uuaacacucuucaagaa

SEQ ID NO: 730498 - RNA, 17 nt, Artificial Sequence
  Synthetic
auucaagucuucaagaa

SEQ ID NO: 730499 - RNA, 17 nt, Artificial Sequence
  Synthetic
uuaggaguuuucaagaa

SEQ ID NO: 730500 - RNA, 17 nt, Artificial Sequence
  Synthetic
uauuguuucaagaagaa

SEQ ID NO: 730501 - RNA, 17 nt, Artificial Sequence
  Synthetic
cuguauuuuaagaagaa

SEQ ID NO: 730502 - RNA, 17 nt, Artificial Sequence
  Synthetic
uaagaaggccagaagaa

SEQ ID NO: 730503 - RNA, 17 nt, Artificial Sequence
  Synthetic
uggagggcucagaagaa

SEQ ID NO: 730504 - RNA, 17 nt, Artificial Sequence
  Synthetic
uaagagagggagaagaa

SEQ ID NO: 730505 - RNA, 17 nt, Artificial Sequence
  Synthetic
ugcuaggaaacgaagaa

SEQ ID NO: 730506 - RNA, 17 nt, Artificial Sequence
  Synthetic
ugccuuuccaggaagaa

SEQ ID NO: 730507 - RNA, 17 nt, Artificial Sequence
  Synthetic
cagcaauagaggaagaa

SEQ ID NO: 730508 - RNA, 17 nt, Artificial Sequence
  Synthetic
agagaaaaagggaagaa

SEQ ID NO: 730509 - RNA, 17 nt, Artificial Sequence
  Synthetic
aagaaccacgggaagaa

SEQ ID NO: 730510 - RNA, 17 nt, Artificial Sequence
  Synthetic
agaaugagcgggaagaa

SEQ ID NO: 730511 - RNA, 17 nt, Artificial Sequence
  Synthetic
agcggagcugggaagaa

SEQ ID NO: 730512 - RNA, 17 nt, Artificial Sequence
  Synthetic
acuuuaaaauggaagaa

SEQ ID NO: 730513 - RNA, 17 nt, Artificial Sequence
  Synthetic
ccauuagaauggaagaa

SEQ ID NO: 730514 - RNA, 17 nt, Artificial Sequence
  Synthetic
uuuacugacuggaagaa

SEQ ID NO: 730515 - RNA, 17 nt, Artificial Sequence
  Synthetic
uauagcuguuggaagaa

SEQ ID NO: 730516 - RNA, 17 nt, Artificial Sequence
  Synthetic
ccuguguuaaugaagaa

SEQ ID NO: 730517 - RNA, 17 nt, Artificial Sequence
  Synthetic
auccacagcaugaagaa

SEQ ID NO: 730518 - RNA, 17 nt, Artificial Sequence
  Synthetic
ccugaaggcaugaagaa

SEQ ID NO: 730519 - RNA, 17 nt, Artificial Sequence
  Synthetic
aaauagacacugaagaa

SEQ ID NO: 730520 - RNA, 17 nt, Artificial Sequence
  Synthetic
cuacaaaaccugaagaa

SEQ ID NO: 730521 - RNA, 17 nt, Artificial Sequence
  Synthetic
accucugcucugaagaa

SEQ ID NO: 730522 - RNA, 17 nt, Artificial Sequence
  Synthetic
uccaauucugugaagaa

SEQ ID NO: 730523 - RNA, 17 nt, Artificial Sequence
  Synthetic
uaggaagauuugaagaa

SEQ ID NO: 730524 - RNA, 17 nt, Artificial Sequence
  Synthetic
uaaagagguuugaagaa

SEQ ID NO: 730525 - RNA, 17 nt, Artificial Sequence
  Synthetic
acuccuguaaauaagaa

SEQ ID NO: 730526 - RNA, 17 nt, Artificial Sequence
  Synthetic
cacauauagaauaagaa

SEQ ID NO: 730527 - RNA, 17 nt, Artificial Sequence
  Synthetic
aagggaaaacauaagaa

SEQ ID NO: 730528 - RNA, 17 nt, Artificial Sequence
  Synthetic
ugaaaguaccauaagaa

SEQ ID NO: 730529 - RNA, 17 nt, Artificial Sequence
  Synthetic
cuaugcagccauaagaa

SEQ ID NO: 730530 - RNA, 17 nt, Artificial Sequence
  Synthetic
ccccucccucauaagaa

SEQ ID NO: 730531 - RNA, 17 nt, Artificial Sequence
  Synthetic
uuccuccuucauaagaa

SEQ ID NO: 730532 - RNA, 17 nt, Artificial Sequence
  Synthetic
cagcuuguggauaagaa

SEQ ID NO: 730533 - RNA, 17 nt, Artificial Sequence
  Synthetic
uagcauacugauaagaa

SEQ ID NO: 730534 - RNA, 17 nt, Artificial Sequence
  Synthetic
uauugcaaauauaagaa

SEQ ID NO: 730535 - RNA, 17 nt, Artificial Sequence
  Synthetic
ucccucccuuauaagaa

SEQ ID NO: 730536 - RNA, 17 nt, Artificial Sequence
  Synthetic
agcuaucuuacuaagaa

SEQ ID NO: 730537 - RNA, 17 nt, Artificial Sequence
  Synthetic
uuuaauaucccuaagaa

SEQ ID NO: 730538 - RNA, 17 nt, Artificial Sequence
  Synthetic
auuucaugcucuaagaa

SEQ ID NO: 730539 - RNA, 17 nt, Artificial Sequence
  Synthetic
cuagggaacaguaagaa

SEQ ID NO: 730540 - RNA, 17 nt, Artificial Sequence
  Synthetic
auuugagcuaguaagaa

SEQ ID NO: 730541 - RNA, 17 nt, Artificial Sequence
  Synthetic
uauuguaguaguaagaa

SEQ ID NO: 730542 - RNA, 17 nt, Artificial Sequence
  Synthetic
uaaagugaugguaagaa

SEQ ID NO: 730543 - RNA, 17 nt, Artificial Sequence
  Synthetic
uguauaagguguaagaa

SEQ ID NO: 730544 - RNA, 17 nt, Artificial Sequence
  Synthetic
caugucaaaauuaagaa

SEQ ID NO: 730545 - RNA, 17 nt, Artificial Sequence
  Synthetic
agagagacaauuaagaa

SEQ ID NO: 730546 - RNA, 17 nt, Artificial Sequence
  Synthetic
uugaagacuauuaagaa

SEQ ID NO: 730547 - RNA, 17 nt, Artificial Sequence
  Synthetic
ucagaaacacuuaagaa

SEQ ID NO: 730548 - RNA, 17 nt, Artificial Sequence
  Synthetic
caaugaacacuuaagaa

SEQ ID NO: 730549 - RNA, 17 nt, Artificial Sequence
  Synthetic
ucuguuugacuuaagaa

SEQ ID NO: 730550 - RNA, 17 nt, Artificial Sequence
  Synthetic
aaucaguuccuuaagaa

SEQ ID NO: 730551 - RNA, 17 nt, Artificial Sequence
  Synthetic
aaagguaaucuuaagaa

SEQ ID NO: 730552 - RNA, 17 nt, Artificial Sequence
  Synthetic
ugagauaaauuuaagaa

SEQ ID NO: 730553 - RNA, 17 nt, Artificial Sequence
  Synthetic
acaguuaucuuuaagaa

SEQ ID NO: 730554 - RNA, 17 nt, Artificial Sequence
  Synthetic
aagcaacauuuuaagaa

SEQ ID NO: 730555 - RNA, 17 nt, Artificial Sequence
  Synthetic
cugaaggauuuuaagaa

SEQ ID NO: 730556 - RNA, 17 nt, Artificial Sequence
  Synthetic
uguuacuguuuuaagaa

SEQ ID NO: 730557 - RNA, 17 nt, Artificial Sequence
  Synthetic
aacuacagaaaacagaa

SEQ ID NO: 730558 - RNA, 17 nt, Artificial Sequence
  Synthetic
ccucccugaaaacagaa

SEQ ID NO: 730559 - RNA, 17 nt, Artificial Sequence
  Synthetic
acuuuucucaaacagaa

SEQ ID NO: 730560 - RNA, 17 nt, Artificial Sequence
  Synthetic
caaaucaugaaacagaa

SEQ ID NO: 730561 - RNA, 17 nt, Artificial Sequence
  Synthetic
acauucucuaaacagaa

SEQ ID NO: 730562 - RNA, 17 nt, Artificial Sequence
  Synthetic
agagacaaccaacagaa

SEQ ID NO: 730563 - RNA, 17 nt, Artificial Sequence
  Synthetic
agcaguggucaacagaa

SEQ ID NO: 730564 - RNA, 17 nt, Artificial Sequence
  Synthetic
uagaaaucagaacagaa

SEQ ID NO: 730565 - RNA, 17 nt, Artificial Sequence
  Synthetic
agaccaauggaacagaa

SEQ ID NO: 730566 - RNA, 17 nt, Artificial Sequence
  Synthetic
aaaaugaguuaacagaa

SEQ ID NO: 730567 - RNA, 17 nt, Artificial Sequence
  Synthetic
caagaagucacacagaa

SEQ ID NO: 730568 - RNA, 17 nt, Artificial Sequence
  Synthetic
augugugauacacagaa

SEQ ID NO: 730569 - RNA, 17 nt, Artificial Sequence
  Synthetic
uuuucuucaccacagaa

SEQ ID NO: 730570 - RNA, 17 nt, Artificial Sequence
  Synthetic
ccagcucagccacagaa

SEQ ID NO: 730571 - RNA, 17 nt, Artificial Sequence
  Synthetic
aaauauuugccacagaa

SEQ ID NO: 730572 - RNA, 17 nt, Artificial Sequence
  Synthetic
uuuagugagucacagaa

SEQ ID NO: 730573 - RNA, 17 nt, Artificial Sequence
  Synthetic
uuuggaaaaagacagaa

SEQ ID NO: 730574 - RNA, 17 nt, Artificial Sequence
  Synthetic
cuacauggaagacagaa

SEQ ID NO: 730575 - RNA, 17 nt, Artificial Sequence
  Synthetic
accauggacagacagaa

SEQ ID NO: 730576 - RNA, 17 nt, Artificial Sequence
  Synthetic
agaucugugagacagaa

SEQ ID NO: 730577 - RNA, 17 nt, Artificial Sequence
  Synthetic
agaaggucaggacagaa

SEQ ID NO: 730578 - RNA, 17 nt, Artificial Sequence
  Synthetic
augcaguagggacagaa

SEQ ID NO: 730579 - RNA, 17 nt, Artificial Sequence
  Synthetic
uauuucuaaugacagaa

SEQ ID NO: 730580 - RNA, 17 nt, Artificial Sequence
  Synthetic
uuaauauauauacagaa

SEQ ID NO: 730581 - RNA, 17 nt, Artificial Sequence
  Synthetic
uauuuauauauacagaa

SEQ ID NO: 730582 - RNA, 17 nt, Artificial Sequence
  Synthetic
acaagcaaccuacagaa

SEQ ID NO: 730583 - RNA, 17 nt, Artificial Sequence
  Synthetic
acaggcagccuacagaa

SEQ ID NO: 730584 - RNA, 17 nt, Artificial Sequence
  Synthetic
aguccuuuuguacagaa

SEQ ID NO: 730585 - RNA, 17 nt, Artificial Sequence
  Synthetic
augacucuguuacagaa

SEQ ID NO: 730586 - RNA, 17 nt, Artificial Sequence
  Synthetic
ucucaccauaaccagaa

SEQ ID NO: 730587 - RNA, 17 nt, Artificial Sequence
  Synthetic
aguuuggcacaccagaa

SEQ ID NO: 730588 - RNA, 17 nt, Artificial Sequence
  Synthetic
agauaaugucaccagaa

SEQ ID NO: 730589 - RNA, 17 nt, Artificial Sequence
  Synthetic
uuuccauaggaccagaa

SEQ ID NO: 730590 - RNA, 17 nt, Artificial Sequence
  Synthetic
cuauaucauuaccagaa

SEQ ID NO: 730591 - RNA, 17 nt, Artificial Sequence
  Synthetic
uacagggccacccagaa

SEQ ID NO: 730592 - RNA, 17 nt, Artificial Sequence
  Synthetic
uccugcugcacccagaa

SEQ ID NO: 730593 - RNA, 17 nt, Artificial Sequence
  Synthetic
uagccacaugcccagaa

SEQ ID NO: 730594 - RNA, 17 nt, Artificial Sequence
  Synthetic
uuuuucucugcccagaa

SEQ ID NO: 730595 - RNA, 17 nt, Artificial Sequence
  Synthetic
acuagccccagccagaa

SEQ ID NO: 730596 - RNA, 17 nt, Artificial Sequence
  Synthetic
uuacaaccaugccagaa

SEQ ID NO: 730597 - RNA, 17 nt, Artificial Sequence
  Synthetic
ugaggccacauccagaa

SEQ ID NO: 730598 - RNA, 17 nt, Artificial Sequence
  Synthetic
uaacaugucauccagaa

SEQ ID NO: 730599 - RNA, 17 nt, Artificial Sequence
  Synthetic
cuucccagccuccagaa

SEQ ID NO: 730600 - RNA, 17 nt, Artificial Sequence
  Synthetic
aauuacaaaguccagaa

SEQ ID NO: 730601 - RNA, 17 nt, Artificial Sequence
  Synthetic
caagccaauguccagaa

SEQ ID NO: 730602 - RNA, 17 nt, Artificial Sequence
  Synthetic
cuucacauuuuccagaa

SEQ ID NO: 730603 - RNA, 17 nt, Artificial Sequence
  Synthetic
uuugaacagaagcagaa

SEQ ID NO: 730604 - RNA, 17 nt, Artificial Sequence
  Synthetic
ugcugcacacagcagaa

SEQ ID NO: 730605 - RNA, 17 nt, Artificial Sequence
  Synthetic
aucugcggagagcagaa

SEQ ID NO: 730606 - RNA, 17 nt, Artificial Sequence
  Synthetic
uucauacucgagcagaa

SEQ ID NO: 730607 - RNA, 17 nt, Artificial Sequence
  Synthetic
ugggaagaggagcagaa

SEQ ID NO: 730608 - RNA, 17 nt, Artificial Sequence
  Synthetic
cauggaaaauagcagaa

SEQ ID NO: 730609 - RNA, 17 nt, Artificial Sequence
  Synthetic
uuucugugauagcagaa

SEQ ID NO: 730610 - RNA, 17 nt, Artificial Sequence
  Synthetic
cuuuuaguauagcagaa

SEQ ID NO: 730611 - RNA, 17 nt, Artificial Sequence
  Synthetic
uccauugauuagcagaa

SEQ ID NO: 730612 - RNA, 17 nt, Artificial Sequence
  Synthetic
uuuccuuauccgcagaa

SEQ ID NO: 730613 - RNA, 17 nt, Artificial Sequence
  Synthetic
cguggcagaaggcagaa

SEQ ID NO: 730614 - RNA, 17 nt, Artificial Sequence
  Synthetic
ucauuguguaggcagaa

SEQ ID NO: 730615 - RNA, 17 nt, Artificial Sequence
  Synthetic
agccaaaaggggcagaa

SEQ ID NO: 730616 - RNA, 17 nt, Artificial Sequence
  Synthetic
acugaaaaggggcagaa

SEQ ID NO: 730617 - RNA, 17 nt, Artificial Sequence
  Synthetic
agcgucugggggcagaa

SEQ ID NO: 730618 - RNA, 17 nt, Artificial Sequence
  Synthetic
cacugauuggggcagaa

SEQ ID NO: 730619 - RNA, 17 nt, Artificial Sequence
  Synthetic
aggauuuccuggcagaa

SEQ ID NO: 730620 - RNA, 17 nt, Artificial Sequence
  Synthetic
uucauaugguggcagaa

SEQ ID NO: 730621 - RNA, 17 nt, Artificial Sequence
  Synthetic
ucagugaaaaugcagaa

SEQ ID NO: 730622 - RNA, 17 nt, Artificial Sequence
  Synthetic
uccccagccaugcagaa

SEQ ID NO: 730623 - RNA, 17 nt, Artificial Sequence
  Synthetic
caagaguagaugcagaa

SEQ ID NO: 730624 - RNA, 17 nt, Artificial Sequence
  Synthetic
augagauauaugcagaa

SEQ ID NO: 730625 - RNA, 17 nt, Artificial Sequence
  Synthetic
cauugaaaacugcagaa

SEQ ID NO: 730626 - RNA, 17 nt, Artificial Sequence
  Synthetic
auccaaggacugcagaa

SEQ ID NO: 730627 - RNA, 17 nt, Artificial Sequence
  Synthetic
caguaaucccugcagaa

SEQ ID NO: 730628 - RNA, 17 nt, Artificial Sequence
  Synthetic
uaggccaagcugcagaa

SEQ ID NO: 730629 - RNA, 17 nt, Artificial Sequence
  Synthetic
cagggaaauuugcagaa

SEQ ID NO: 730630 - RNA, 17 nt, Artificial Sequence
  Synthetic
uuuugguauuugcagaa

SEQ ID NO: 730631 - RNA, 17 nt, Artificial Sequence
  Synthetic
acuaucacaaaucagaa

SEQ ID NO: 730632 - RNA, 17 nt, Artificial Sequence
  Synthetic
cagaucagaaaucagaa

SEQ ID NO: 730633 - RNA, 17 nt, Artificial Sequence
  Synthetic
uguacuuacaaucagaa

SEQ ID NO: 730634 - RNA, 17 nt, Artificial Sequence
  Synthetic
cuuacagagaaucagaa

SEQ ID NO: 730635 - RNA, 17 nt, Artificial Sequence
  Synthetic
uuagaauuuaaucagaa

SEQ ID NO: 730636 - RNA, 17 nt, Artificial Sequence
  Synthetic
aacacauaagaucagaa

SEQ ID NO: 730637 - RNA, 17 nt, Artificial Sequence
  Synthetic
uguggcugggaucagaa

SEQ ID NO: 730638 - RNA, 17 nt, Artificial Sequence
  Synthetic
auuauuaaauaucagaa

SEQ ID NO: 730639 - RNA, 17 nt, Artificial Sequence
  Synthetic
aauaccacauaucagaa

SEQ ID NO: 730640 - RNA, 17 nt, Artificial Sequence
  Synthetic
aggaguagcuaucagaa

SEQ ID NO: 730641 - RNA, 17 nt, Artificial Sequence
  Synthetic
cuacacaucuaucagaa

SEQ ID NO: 730642 - RNA, 17 nt, Artificial Sequence
  Synthetic
aauugguaguaucagaa

SEQ ID NO: 730643 - RNA, 17 nt, Artificial Sequence
  Synthetic
uggaggcuuuaucagaa

SEQ ID NO: 730644 - RNA, 17 nt, Artificial Sequence
  Synthetic
cauuugaaaacucagaa

SEQ ID NO: 730645 - RNA, 17 nt, Artificial Sequence
  Synthetic
aucuccuuaacucagaa

SEQ ID NO: 730646 - RNA, 17 nt, Artificial Sequence
  Synthetic
acuuugaagacucagaa

SEQ ID NO: 730647 - RNA, 17 nt, Artificial Sequence
  Synthetic
acacuggagacucagaa

SEQ ID NO: 730648 - RNA, 17 nt, Artificial Sequence
  Synthetic
agagagaguacucagaa

SEQ ID NO: 730649 - RNA, 17 nt, Artificial Sequence
  Synthetic
cagaaguucccucagaa

SEQ ID NO: 730650 - RNA, 17 nt, Artificial Sequence
  Synthetic
aaagacaauccucagaa

SEQ ID NO: 730651 - RNA, 17 nt, Artificial Sequence
  Synthetic
aucuuucuugcucagaa

SEQ ID NO: 730652 - RNA, 17 nt, Artificial Sequence
  Synthetic
aucaucuuugcucagaa

SEQ ID NO: 730653 - RNA, 17 nt, Artificial Sequence
  Synthetic
uucuaaagaucucagaa

SEQ ID NO: 730654 - RNA, 17 nt, Artificial Sequence
  Synthetic
cagcuuuuaagucagaa

SEQ ID NO: 730655 - RNA, 17 nt, Artificial Sequence
  Synthetic
ucacauaccagucagaa

SEQ ID NO: 730656 - RNA, 17 nt, Artificial Sequence
  Synthetic
auaaccaagggucagaa

SEQ ID NO: 730657 - RNA, 17 nt, Artificial Sequence
  Synthetic
cauguguauggucagaa

SEQ ID NO: 730658 - RNA, 17 nt, Artificial Sequence
  Synthetic
uaagacaaaauucagaa

SEQ ID NO: 730659 - RNA, 17 nt, Artificial Sequence
  Synthetic
agagaaagcauucagaa

SEQ ID NO: 730660 - RNA, 17 nt, Artificial Sequence
  Synthetic
uugcuuugcauucagaa

SEQ ID NO: 730661 - RNA, 17 nt, Artificial Sequence
  Synthetic
cuaaagaugauucagaa

SEQ ID NO: 730662 - RNA, 17 nt, Artificial Sequence
  Synthetic
auggaaagcuuucagaa

SEQ ID NO: 730663 - RNA, 17 nt, Artificial Sequence
  Synthetic
uaguuuaucuuucagaa

SEQ ID NO: 730664 - RNA, 17 nt, Artificial Sequence
  Synthetic
auguguccuuuucagaa

SEQ ID NO: 730665 - RNA, 17 nt, Artificial Sequence
  Synthetic
cuaggaaguuuucagaa

SEQ ID NO: 730666 - RNA, 17 nt, Artificial Sequence
  Synthetic
uggaaaccaaaagagaa

SEQ ID NO: 730667 - RNA, 17 nt, Artificial Sequence
  Synthetic
agaaaaagaaaagagaa

SEQ ID NO: 730668 - RNA, 17 nt, Artificial Sequence
  Synthetic
ugaugaugaaaagagaa

SEQ ID NO: 730669 - RNA, 17 nt, Artificial Sequence
  Synthetic
agauuuauaaaagagaa

SEQ ID NO: 730670 - RNA, 17 nt, Artificial Sequence
  Synthetic
auuguaguaaaagagaa

SEQ ID NO: 730671 - RNA, 17 nt, Artificial Sequence
  Synthetic
ucuaaggacaaagagaa

SEQ ID NO: 730672 - RNA, 17 nt, Artificial Sequence
  Synthetic
caguuacccaaagagaa

SEQ ID NO: 730673 - RNA, 17 nt, Artificial Sequence
  Synthetic
cucccagucaaagagaa

SEQ ID NO: 730674 - RNA, 17 nt, Artificial Sequence
  Synthetic
aaggaggggaaagagaa

SEQ ID NO: 730675 - RNA, 17 nt, Artificial Sequence
  Synthetic
ccaagaauacaagagaa

SEQ ID NO: 730676 - RNA, 17 nt, Artificial Sequence
  Synthetic
uuagucauccaagagaa

SEQ ID NO: 730677 - RNA, 17 nt, Artificial Sequence
  Synthetic
uucagcaagcaagagaa

SEQ ID NO: 730678 - RNA, 17 nt, Artificial Sequence
  Synthetic
uaaaagcagcaagagaa

SEQ ID NO: 730679 - RNA, 17 nt, Artificial Sequence
  Synthetic
aggcugaggcaagagaa

SEQ ID NO: 730680 - RNA, 17 nt, Artificial Sequence
  Synthetic
aagagagaucaagagaa

SEQ ID NO: 730681 - RNA, 17 nt, Artificial Sequence
  Synthetic
agggaaagagaagagaa

SEQ ID NO: 730682 - RNA, 17 nt, Artificial Sequence
  Synthetic
caaaaaauagaagagaa

SEQ ID NO: 730683 - RNA, 17 nt, Artificial Sequence
  Synthetic
auguuaaaggaagagaa

SEQ ID NO: 730684 - RNA, 17 nt, Artificial Sequence
  Synthetic
cuggaguaggaagagaa

SEQ ID NO: 730685 - RNA, 17 nt, Artificial Sequence
  Synthetic
uggagguaggaagagaa

SEQ ID NO: 730686 - RNA, 17 nt, Artificial Sequence
  Synthetic
uguuugaaugaagagaa

SEQ ID NO: 730687 - RNA, 17 nt, Artificial Sequence
  Synthetic
uggagcuuugaagagaa

SEQ ID NO: 730688 - RNA, 17 nt, Artificial Sequence
  Synthetic
uguuguauauaagagaa

SEQ ID NO: 730689 - RNA, 17 nt, Artificial Sequence
  Synthetic
uccuaguaaacagagaa

SEQ ID NO: 730690 - RNA, 17 nt, Artificial Sequence
  Synthetic
uggaauuccacagagaa

SEQ ID NO: 730691 - RNA, 17 nt, Artificial Sequence
  Synthetic
uguuuaauuacagagaa

SEQ ID NO: 730692 - RNA, 17 nt, Artificial Sequence
  Synthetic
aaauguaaagcagagaa

SEQ ID NO: 730693 - RNA, 17 nt, Artificial Sequence
  Synthetic
uaaaaagaagcagagaa

SEQ ID NO: 730694 - RNA, 17 nt, Artificial Sequence
  Synthetic
cuccuacaggcagagaa

SEQ ID NO: 730695 - RNA, 17 nt, Artificial Sequence
  Synthetic
auguccugggcagagaa

SEQ ID NO: 730696 - RNA, 17 nt, Artificial Sequence
  Synthetic
uaggaauaugcagagaa

SEQ ID NO: 730697 - RNA, 17 nt, Artificial Sequence
  Synthetic
caaaccacugcagagaa

SEQ ID NO: 730698 - RNA, 17 nt, Artificial Sequence
  Synthetic
agagaaauaucagagaa

SEQ ID NO: 730699 - RNA, 17 nt, Artificial Sequence
  Synthetic
agggcagccagagagaa

SEQ ID NO: 730700 - RNA, 17 nt, Artificial Sequence
  Synthetic
ugcaacagcagagagaa

SEQ ID NO: 730701 - RNA, 17 nt, Artificial Sequence
  Synthetic
ccaagacagagagagaa

SEQ ID NO: 730702 - RNA, 17 nt, Artificial Sequence
  Synthetic
uugagagagagagagaa

SEQ ID NO: 730703 - RNA, 17 nt, Artificial Sequence
  Synthetic
uaagccaggagagagaa

SEQ ID NO: 730704 - RNA, 17 nt, Artificial Sequence
  Synthetic
ugaaagccuagagagaa

SEQ ID NO: 730705 - RNA, 17 nt, Artificial Sequence
  Synthetic
uaaagcaagggagagaa

SEQ ID NO: 730706 - RNA, 17 nt, Artificial Sequence
  Synthetic
uaggaaaauggagagaa

SEQ ID NO: 730707 - RNA, 17 nt, Artificial Sequence
  Synthetic
uaaaccaugugagagaa

SEQ ID NO: 730708 - RNA, 17 nt, Artificial Sequence
  Synthetic
acucacuguugagagaa

SEQ ID NO: 730709 - RNA, 17 nt, Artificial Sequence
  Synthetic
uacaauucaauagagaa

SEQ ID NO: 730710 - RNA, 17 nt, Artificial Sequence
  Synthetic
uuccuucacauagagaa

SEQ ID NO: 730711 - RNA, 17 nt, Artificial Sequence
  Synthetic
uagacuaugauagagaa

SEQ ID NO: 730712 - RNA, 17 nt, Artificial Sequence
  Synthetic
auggcaacucuagagaa

SEQ ID NO: 730713 - RNA, 17 nt, Artificial Sequence
  Synthetic
aggaaauggguagagaa

SEQ ID NO: 730714 - RNA, 17 nt, Artificial Sequence
  Synthetic
uguguguugguagagaa

SEQ ID NO: 730715 - RNA, 17 nt, Artificial Sequence
  Synthetic
auuaaugauuuagagaa

SEQ ID NO: 730716 - RNA, 17 nt, Artificial Sequence
  Synthetic
aagagugauuuagagaa

SEQ ID NO: 730717 - RNA, 17 nt, Artificial Sequence
  Synthetic
aaugcauauuuagagaa

SEQ ID NO: 730718 - RNA, 17 nt, Artificial Sequence
  Synthetic
cugaaagaaaacgagaa

SEQ ID NO: 730719 - RNA, 17 nt, Artificial Sequence
  Synthetic
uaggggaaaagcgagaa

SEQ ID NO: 730720 - RNA, 17 nt, Artificial Sequence
  Synthetic
augaaaugaagcgagaa

SEQ ID NO: 730721 - RNA, 17 nt, Artificial Sequence
  Synthetic
aggcaggagaaggagaa

SEQ ID NO: 730722 - RNA, 17 nt, Artificial Sequence
  Synthetic
aacaguauuaaggagaa

SEQ ID NO: 730723 - RNA, 17 nt, Artificial Sequence
  Synthetic
auuggagagcaggagaa

SEQ ID NO: 730724 - RNA, 17 nt, Artificial Sequence
  Synthetic
aggaugacgcaggagaa

SEQ ID NO: 730725 - RNA, 17 nt, Artificial Sequence
  Synthetic
agguuaaggcaggagaa

SEQ ID NO: 730726 - RNA, 17 nt, Artificial Sequence
  Synthetic
aggcugaggcaggagaa

SEQ ID NO: 730727 - RNA, 17 nt, Artificial Sequence
  Synthetic
agaaaaauucaggagaa

SEQ ID NO: 730728 - RNA, 17 nt, Artificial Sequence
  Synthetic
cuauuaauucaggagaa

SEQ ID NO: 730729 - RNA, 17 nt, Artificial Sequence
  Synthetic
uuucugugugaggagaa

SEQ ID NO: 730730 - RNA, 17 nt, Artificial Sequence
  Synthetic
uuuaccucuucggagaa

SEQ ID NO: 730731 - RNA, 17 nt, Artificial Sequence
  Synthetic
acagaacgaagggagaa

SEQ ID NO: 730732 - RNA, 17 nt, Artificial Sequence
  Synthetic
ccaagauuaagggagaa

SEQ ID NO: 730733 - RNA, 17 nt, Artificial Sequence
  Synthetic
ucucucagcagggagaa

SEQ ID NO: 730734 - RNA, 17 nt, Artificial Sequence
  Synthetic
caguuuucuagggagaa

SEQ ID NO: 730735 - RNA, 17 nt, Artificial Sequence
  Synthetic
aagcugaggcgggagaa

SEQ ID NO: 730736 - RNA, 17 nt, Artificial Sequence
  Synthetic
acaacaucaggggagaa

SEQ ID NO: 730737 - RNA, 17 nt, Artificial Sequence
  Synthetic
ccugcuucaggggagaa

SEQ ID NO: 730738 - RNA, 17 nt, Artificial Sequence
  Synthetic
aaaggaaggggggagaa

SEQ ID NO: 730739 - RNA, 17 nt, Artificial Sequence
  Synthetic
cagugcugcugggagaa

SEQ ID NO: 730740 - RNA, 17 nt, Artificial Sequence
  Synthetic
ugauagaauugggagaa

SEQ ID NO: 730741 - RNA, 17 nt, Artificial Sequence
  Synthetic
uaugagacaauggagaa

SEQ ID NO: 730742 - RNA, 17 nt, Artificial Sequence
  Synthetic
aaacaagcaauggagaa

SEQ ID NO: 730743 - RNA, 17 nt, Artificial Sequence
  Synthetic
uaagggcccauggagaa

SEQ ID NO: 730744 - RNA, 17 nt, Artificial Sequence
  Synthetic
aaucacaucauggagaa

SEQ ID NO: 730745 - RNA, 17 nt, Artificial Sequence
  Synthetic
agucacaucauggagaa

SEQ ID NO: 730746 - RNA, 17 nt, Artificial Sequence
  Synthetic
aaaaaaaaacuggagaa

SEQ ID NO: 730747 - RNA, 17 nt, Artificial Sequence
  Synthetic
aaauuaugccuggagaa

SEQ ID NO: 730748 - RNA, 17 nt, Artificial Sequence
  Synthetic
aagacccugguggagaa

SEQ ID NO: 730749 - RNA, 17 nt, Artificial Sequence
  Synthetic
agaucaccuguggagaa

SEQ ID NO: 730750 - RNA, 17 nt, Artificial Sequence
  Synthetic
cgcugaaguguggagaa

SEQ ID NO: 730751 - RNA, 17 nt, Artificial Sequence
  Synthetic
aaagccagcuuggagaa

SEQ ID NO: 730752 - RNA, 17 nt, Artificial Sequence
  Synthetic
ugaccugucuuggagaa

SEQ ID NO: 730753 - RNA, 17 nt, Artificial Sequence
  Synthetic
ucuuugaaaaaugagaa

SEQ ID NO: 730754 - RNA, 17 nt, Artificial Sequence
  Synthetic
cagaaucaaaaugagaa

SEQ ID NO: 730755 - RNA, 17 nt, Artificial Sequence
  Synthetic
aaaaucagaaaugagaa

SEQ ID NO: 730756 - RNA, 17 nt, Artificial Sequence
  Synthetic
ugaaaagacaaugagaa

SEQ ID NO: 730757 - RNA, 17 nt, Artificial Sequence
  Synthetic
uaauucuauaaugagaa

SEQ ID NO: 730758 - RNA, 17 nt, Artificial Sequence
  Synthetic
ucauagcagcaugagaa

SEQ ID NO: 730759 - RNA, 17 nt, Artificial Sequence
  Synthetic
acagaagagcaugagaa

SEQ ID NO: 730760 - RNA, 17 nt, Artificial Sequence
  Synthetic
uaaugaaugcaugagaa

SEQ ID NO: 730761 - RNA, 17 nt, Artificial Sequence
  Synthetic
ugcaaugaagaugagaa

SEQ ID NO: 730762 - RNA, 17 nt, Artificial Sequence
  Synthetic
aaaugaugagaugagaa

SEQ ID NO: 730763 - RNA, 17 nt, Artificial Sequence
  Synthetic
ugugaaugcgaugagaa

SEQ ID NO: 730764 - RNA, 17 nt, Artificial Sequence
  Synthetic
caugagaaggaugagaa

SEQ ID NO: 730765 - RNA, 17 nt, Artificial Sequence
  Synthetic
ucaucaagugaugagaa

SEQ ID NO: 730766 - RNA, 17 nt, Artificial Sequence
  Synthetic
agcugaugauaugagaa

SEQ ID NO: 730767 - RNA, 17 nt, Artificial Sequence
  Synthetic
aggauacaaacugagaa

SEQ ID NO: 730768 - RNA, 17 nt, Artificial Sequence
  Synthetic
uauuuacauacugagaa

SEQ ID NO: 730769 - RNA, 17 nt, Artificial Sequence
  Synthetic
aacaguucuacugagaa

SEQ ID NO: 730770 - RNA, 17 nt, Artificial Sequence
  Synthetic
aggaaugggccugagaa

SEQ ID NO: 730771 - RNA, 17 nt, Artificial Sequence
  Synthetic
ucucuggaagcugagaa

SEQ ID NO: 730772 - RNA, 17 nt, Artificial Sequence
  Synthetic
auaugacccagugagaa

SEQ ID NO: 730773 - RNA, 17 nt, Artificial Sequence
  Synthetic
uaaggggcuagugagaa

SEQ ID NO: 730774 - RNA, 17 nt, Artificial Sequence
  Synthetic
augaugcuuggugagaa

SEQ ID NO: 730775 - RNA, 17 nt, Artificial Sequence
  Synthetic
cacagaaguugugagaa

SEQ ID NO: 730776 - RNA, 17 nt, Artificial Sequence
  Synthetic
uucauuuuuugugagaa

SEQ ID NO: 730777 - RNA, 17 nt, Artificial Sequence
  Synthetic
acacauuccauugagaa

SEQ ID NO: 730778 - RNA, 17 nt, Artificial Sequence
  Synthetic
ccuauauggauugagaa

SEQ ID NO: 730779 - RNA, 17 nt, Artificial Sequence
  Synthetic
agaguggguauugagaa

SEQ ID NO: 730780 - RNA, 17 nt, Artificial Sequence
  Synthetic
aauuaaugacuugagaa

SEQ ID NO: 730781 - RNA, 17 nt, Artificial Sequence
  Synthetic
aauugaggccuugagaa

SEQ ID NO: 730782 - RNA, 17 nt, Artificial Sequence
  Synthetic
ucucaggcucuugagaa

SEQ ID NO: 730783 - RNA, 17 nt, Artificial Sequence
  Synthetic
ugcagacuucuugagaa

SEQ ID NO: 730784 - RNA, 17 nt, Artificial Sequence
  Synthetic
ugugaucaaguugagaa

SEQ ID NO: 730785 - RNA, 17 nt, Artificial Sequence
  Synthetic
aauagaaauguugagaa

SEQ ID NO: 730786 - RNA, 17 nt, Artificial Sequence
  Synthetic
augaauaaaaaauagaa

SEQ ID NO: 730787 - RNA, 17 nt, Artificial Sequence
  Synthetic
cauccagagaaauagaa

SEQ ID NO: 730788 - RNA, 17 nt, Artificial Sequence
  Synthetic
cauagcaauaaauagaa

SEQ ID NO: 730789 - RNA, 17 nt, Artificial Sequence
  Synthetic
aauauuccuaaauagaa

SEQ ID NO: 730790 - RNA, 17 nt, Artificial Sequence
  Synthetic
ugcuuccagcaauagaa

SEQ ID NO: 730791 - RNA, 17 nt, Artificial Sequence
  Synthetic
uucauaaaauaauagaa

SEQ ID NO: 730792 - RNA, 17 nt, Artificial Sequence
  Synthetic
ugaugucaauaauagaa

SEQ ID NO: 730793 - RNA, 17 nt, Artificial Sequence
  Synthetic
uguuuugcauaauagaa

SEQ ID NO: 730794 - RNA, 17 nt, Artificial Sequence
  Synthetic
acuagggacuaauagaa

SEQ ID NO: 730795 - RNA, 17 nt, Artificial Sequence
  Synthetic
ucaacauucuaauagaa

SEQ ID NO: 730796 - RNA, 17 nt, Artificial Sequence
  Synthetic
aaagcuggcacauagaa

SEQ ID NO: 730797 - RNA, 17 nt, Artificial Sequence
  Synthetic
agaaacaauacauagaa

SEQ ID NO: 730798 - RNA, 17 nt, Artificial Sequence
  Synthetic
agauuauaaccauagaa

SEQ ID NO: 730799 - RNA, 17 nt, Artificial Sequence
  Synthetic
uauacagggccauagaa

SEQ ID NO: 730800 - RNA, 17 nt, Artificial Sequence
  Synthetic
acuuacuuagcauagaa

SEQ ID NO: 730801 - RNA, 17 nt, Artificial Sequence
  Synthetic
cccugaucugcauagaa

SEQ ID NO: 730802 - RNA, 17 nt, Artificial Sequence
  Synthetic
aauaaguguucauagaa

SEQ ID NO: 730803 - RNA, 17 nt, Artificial Sequence
  Synthetic
aacuacuuuucauagaa

SEQ ID NO: 730804 - RNA, 17 nt, Artificial Sequence
  Synthetic
uggauagaaagauagaa

SEQ ID NO: 730805 - RNA, 17 nt, Artificial Sequence
  Synthetic
agaaugagaagauagaa

SEQ ID NO: 730806 - RNA, 17 nt, Artificial Sequence
  Synthetic
ugaauaaugagauagaa

SEQ ID NO: 730807 - RNA, 17 nt, Artificial Sequence
  Synthetic
aaagacuauagauagaa

SEQ ID NO: 730808 - RNA, 17 nt, Artificial Sequence
  Synthetic
ugugcccugcgauagaa

SEQ ID NO: 730809 - RNA, 17 nt, Artificial Sequence
  Synthetic
ugaugguaaggauagaa

SEQ ID NO: 730810 - RNA, 17 nt, Artificial Sequence
  Synthetic
agagagggaggauagaa

SEQ ID NO: 730811 - RNA, 17 nt, Artificial Sequence
  Synthetic
aaaaaauaucuauagaa

SEQ ID NO: 730812 - RNA, 17 nt, Artificial Sequence
  Synthetic
uuuagcugaguauagaa

SEQ ID NO: 730813 - RNA, 17 nt, Artificial Sequence
  Synthetic
aacaauuaauuauagaa

SEQ ID NO: 730814 - RNA, 17 nt, Artificial Sequence
  Synthetic
uaauguuaguuauagaa

SEQ ID NO: 730815 - RNA, 17 nt, Artificial Sequence
  Synthetic
acuaucaauuuauagaa

SEQ ID NO: 730816 - RNA, 17 nt, Artificial Sequence
  Synthetic
uaauggaagcacuagaa

SEQ ID NO: 730817 - RNA, 17 nt, Artificial Sequence
  Synthetic
uuuuuuuaagacuagaa

SEQ ID NO: 730818 - RNA, 17 nt, Artificial Sequence
  Synthetic
agaucuaaggacuagaa

SEQ ID NO: 730819 - RNA, 17 nt, Artificial Sequence
  Synthetic
uagaguuuggacuagaa

SEQ ID NO: 730820 - RNA, 17 nt, Artificial Sequence
  Synthetic
auugcacaugacuagaa

SEQ ID NO: 730821 - RNA, 17 nt, Artificial Sequence
  Synthetic
auuggggacuacuagaa

SEQ ID NO: 730822 - RNA, 17 nt, Artificial Sequence
  Synthetic
auaaaauucuacuagaa

SEQ ID NO: 730823 - RNA, 17 nt, Artificial Sequence
  Synthetic
aggaaacucaccuagaa

SEQ ID NO: 730824 - RNA, 17 nt, Artificial Sequence
  Synthetic
agcugggcagccuagaa

SEQ ID NO: 730825 - RNA, 17 nt, Artificial Sequence
  Synthetic
acucccagugccuagaa

SEQ ID NO: 730826 - RNA, 17 nt, Artificial Sequence
  Synthetic
aacaccgaguccuagaa

SEQ ID NO: 730827 - RNA, 17 nt, Artificial Sequence
  Synthetic
uaauacaugagcuagaa

SEQ ID NO: 730828 - RNA, 17 nt, Artificial Sequence
  Synthetic
aaaaugaugagcuagaa

SEQ ID NO: 730829 - RNA, 17 nt, Artificial Sequence
  Synthetic
ugaauauaaaucuagaa

SEQ ID NO: 730830 - RNA, 17 nt, Artificial Sequence
  Synthetic
ccuaggcaugucuagaa

SEQ ID NO: 730831 - RNA, 17 nt, Artificial Sequence
  Synthetic
agcaaugacuucuagaa

SEQ ID NO: 730832 - RNA, 17 nt, Artificial Sequence
  Synthetic
ucucuuuauuucuagaa

SEQ ID NO: 730833 - RNA, 17 nt, Artificial Sequence
  Synthetic
aagaaaaaaaaguagaa

SEQ ID NO: 730834 - RNA, 17 nt, Artificial Sequence
  Synthetic
ucugucuucaaguagaa

SEQ ID NO: 730835 - RNA, 17 nt, Artificial Sequence
  Synthetic
ugauucaggaaguagaa

SEQ ID NO: 730836 - RNA, 17 nt, Artificial Sequence
  Synthetic
uauagaacacaguagaa

SEQ ID NO: 730837 - RNA, 17 nt, Artificial Sequence
  Synthetic
uccuccaaagaguagaa

SEQ ID NO: 730838 - RNA, 17 nt, Artificial Sequence
  Synthetic
uacaccacagaguagaa

SEQ ID NO: 730839 - RNA, 17 nt, Artificial Sequence
  Synthetic
ugaaguagagaguagaa

SEQ ID NO: 730840 - RNA, 17 nt, Artificial Sequence
  Synthetic
uacaccugggaguagaa

SEQ ID NO: 730841 - RNA, 17 nt, Artificial Sequence
  Synthetic
uauuagcuugaguagaa

SEQ ID NO: 730842 - RNA, 17 nt, Artificial Sequence
  Synthetic
uauaucuaauaguagaa

SEQ ID NO: 730843 - RNA, 17 nt, Artificial Sequence
  Synthetic
ugaagggcauaguagaa

SEQ ID NO: 730844 - RNA, 17 nt, Artificial Sequence
  Synthetic
aggauuaaguaguagaa

SEQ ID NO: 730845 - RNA, 17 nt, Artificial Sequence
  Synthetic
cuuguacaaagguagaa

SEQ ID NO: 730846 - RNA, 17 nt, Artificial Sequence
  Synthetic
caaggcagaagguagaa

SEQ ID NO: 730847 - RNA, 17 nt, Artificial Sequence
  Synthetic
aaggaaaauagguagaa

SEQ ID NO: 730848 - RNA, 17 nt, Artificial Sequence
  Synthetic
aaaacauugggguagaa

SEQ ID NO: 730849 - RNA, 17 nt, Artificial Sequence
  Synthetic
cagacagagugguagaa

SEQ ID NO: 730850 - RNA, 17 nt, Artificial Sequence
  Synthetic
aaugaggguugguagaa

SEQ ID NO: 730851 - RNA, 17 nt, Artificial Sequence
  Synthetic
cagaugucaauguagaa

SEQ ID NO: 730852 - RNA, 17 nt, Artificial Sequence
  Synthetic
agcauuaccauguagaa

SEQ ID NO: 730853 - RNA, 17 nt, Artificial Sequence
  Synthetic
ccccccgccauguagaa

SEQ ID NO: 730854 - RNA, 17 nt, Artificial Sequence
  Synthetic
ccccuuuucauguagaa

SEQ ID NO: 730855 - RNA, 17 nt, Artificial Sequence
  Synthetic
ugugucacacuguagaa

SEQ ID NO: 730856 - RNA, 17 nt, Artificial Sequence
  Synthetic
acaauguucuuguagaa

SEQ ID NO: 730857 - RNA, 17 nt, Artificial Sequence
  Synthetic
uacagcacuuuguagaa

SEQ ID NO: 730858 - RNA, 17 nt, Artificial Sequence
  Synthetic
cucugcacaaauuagaa

SEQ ID NO: 730859 - RNA, 17 nt, Artificial Sequence
  Synthetic
uagguuuacaauuagaa

SEQ ID NO: 730860 - RNA, 17 nt, Artificial Sequence
  Synthetic
acauuugggaauuagaa

SEQ ID NO: 730861 - RNA, 17 nt, Artificial Sequence
  Synthetic
acagccacccauuagaa

SEQ ID NO: 730862 - RNA, 17 nt, Artificial Sequence
  Synthetic
aaggaucugcauuagaa

SEQ ID NO: 730863 - RNA, 17 nt, Artificial Sequence
  Synthetic
uuuccuagucauuagaa

SEQ ID NO: 730864 - RNA, 17 nt, Artificial Sequence
  Synthetic
agacauccagauuagaa

SEQ ID NO: 730865 - RNA, 17 nt, Artificial Sequence
  Synthetic
ucacuacuagauuagaa

SEQ ID NO: 730866 - RNA, 17 nt, Artificial Sequence
  Synthetic
caaagucacgauuagaa

SEQ ID NO: 730867 - RNA, 17 nt, Artificial Sequence
  Synthetic
ugcaguaaauauuagaa

SEQ ID NO: 730868 - RNA, 17 nt, Artificial Sequence
  Synthetic
cguuaaaaguauuagaa

SEQ ID NO: 730869 - RNA, 17 nt, Artificial Sequence
  Synthetic
auuguauaguauuagaa

SEQ ID NO: 730870 - RNA, 17 nt, Artificial Sequence
  Synthetic
uuauuaaauuauuagaa

SEQ ID NO: 730871 - RNA, 17 nt, Artificial Sequence
  Synthetic
aggaauacaacuuagaa

SEQ ID NO: 730872 - RNA, 17 nt, Artificial Sequence
  Synthetic
auuucaaagacuuagaa

SEQ ID NO: 730873 - RNA, 17 nt, Artificial Sequence
  Synthetic
auucaguagacuuagaa

SEQ ID NO: 730874 - RNA, 17 nt, Artificial Sequence
  Synthetic
cuaccccugccuuagaa

SEQ ID NO: 730875 - RNA, 17 nt, Artificial Sequence
  Synthetic
auaauaauagcuuagaa

SEQ ID NO: 730876 - RNA, 17 nt, Artificial Sequence
  Synthetic
aauggugaugcuuagaa

SEQ ID NO: 730877 - RNA, 17 nt, Artificial Sequence
  Synthetic
auucauggaucuuagaa

SEQ ID NO: 730878 - RNA, 17 nt, Artificial Sequence
  Synthetic
ucucacaccaguuagaa

SEQ ID NO: 730879 - RNA, 17 nt, Artificial Sequence
  Synthetic
ucucacgccaguuagaa

SEQ ID NO: 730880 - RNA, 17 nt, Artificial Sequence
  Synthetic
ucucacuccaguuagaa

SEQ ID NO: 730881 - RNA, 17 nt, Artificial Sequence
  Synthetic
ucucauuccaguuagaa

SEQ ID NO: 730882 - RNA, 17 nt, Artificial Sequence
  Synthetic
ucucacaucaguuagaa

SEQ ID NO: 730883 - RNA, 17 nt, Artificial Sequence
  Synthetic
aaggcaagugguuagaa

SEQ ID NO: 730884 - RNA, 17 nt, Artificial Sequence
  Synthetic
aaauauuaauguuagaa

SEQ ID NO: 730885 - RNA, 17 nt, Artificial Sequence
  Synthetic
ccuuacaccuguuagaa

SEQ ID NO: 730886 - RNA, 17 nt, Artificial Sequence
  Synthetic
uuauauuguauuuagaa

SEQ ID NO: 730887 - RNA, 17 nt, Artificial Sequence
  Synthetic
aguagaccacuuuagaa

SEQ ID NO: 730888 - RNA, 17 nt, Artificial Sequence
  Synthetic
uuaaauucacuuuagaa

SEQ ID NO: 730889 - RNA, 17 nt, Artificial Sequence
  Synthetic
uuuguauuucuuuagaa

SEQ ID NO: 730890 - RNA, 17 nt, Artificial Sequence
  Synthetic
cuaauagaaguuuagaa

SEQ ID NO: 730891 - RNA, 17 nt, Artificial Sequence
  Synthetic
auuccugaaguuuagaa

SEQ ID NO: 730892 - RNA, 17 nt, Artificial Sequence
  Synthetic
caauacacaguuuagaa

SEQ ID NO: 730893 - RNA, 17 nt, Artificial Sequence
  Synthetic
aacguaaugguuuagaa

SEQ ID NO: 730894 - RNA, 17 nt, Artificial Sequence
  Synthetic
auaagaccauuuuagaa

SEQ ID NO: 730895 - RNA, 17 nt, Artificial Sequence
  Synthetic
cagugugcauuuuagaa

SEQ ID NO: 730896 - RNA, 17 nt, Artificial Sequence
  Synthetic
uggucaaacuuuuagaa

SEQ ID NO: 730897 - RNA, 17 nt, Artificial Sequence
  Synthetic
agaacauucuuuuagaa

SEQ ID NO: 730898 - RNA, 17 nt, Artificial Sequence
  Synthetic
aaagauucuuuuuagaa

SEQ ID NO: 730899 - RNA, 17 nt, Artificial Sequence
  Synthetic
uuuuauuuuaaaacgaa

SEQ ID NO: 730900 - RNA, 17 nt, Artificial Sequence
  Synthetic
cugaaaggacaaacgaa

SEQ ID NO: 730901 - RNA, 17 nt, Artificial Sequence
  Synthetic
acuuaaagucaaacgaa

SEQ ID NO: 730902 - RNA, 17 nt, Artificial Sequence
  Synthetic
aaaaugaaagaaacgaa

SEQ ID NO: 730903 - RNA, 17 nt, Artificial Sequence
  Synthetic
aacuacacauaaacgaa

SEQ ID NO: 730904 - RNA, 17 nt, Artificial Sequence
  Synthetic
cuaagagacagaacgaa

SEQ ID NO: 730905 - RNA, 17 nt, Artificial Sequence
  Synthetic
cagugcagaguaacgaa

SEQ ID NO: 730906 - RNA, 17 nt, Artificial Sequence
  Synthetic
aaaacuagagucacgaa

SEQ ID NO: 730907 - RNA, 17 nt, Artificial Sequence
  Synthetic
ccugugaaauucacgaa

SEQ ID NO: 730908 - RNA, 17 nt, Artificial Sequence
  Synthetic
agaugaagaaagacgaa

SEQ ID NO: 730909 - RNA, 17 nt, Artificial Sequence
  Synthetic
uagaauauacauacgaa

SEQ ID NO: 730910 - RNA, 17 nt, Artificial Sequence
  Synthetic
aaacaaaaagauacgaa

SEQ ID NO: 730911 - RNA, 17 nt, Artificial Sequence
  Synthetic
aguagucauuauacgaa

SEQ ID NO: 730912 - RNA, 17 nt, Artificial Sequence
  Synthetic
uaugaauagacuacgaa

SEQ ID NO: 730913 - RNA, 17 nt, Artificial Sequence
  Synthetic
auuuauagcuuuacgaa

SEQ ID NO: 730914 - RNA, 17 nt, Artificial Sequence
  Synthetic
auuucagaguuuacgaa

SEQ ID NO: 730915 - RNA, 17 nt, Artificial Sequence
  Synthetic
aaagaagagcuaccgaa

SEQ ID NO: 730916 - RNA, 17 nt, Artificial Sequence
  Synthetic
aaaacaaacuacccgaa

SEQ ID NO: 730917 - RNA, 17 nt, Artificial Sequence
  Synthetic
agucccagcuacccgaa

SEQ ID NO: 730918 - RNA, 17 nt, Artificial Sequence
  Synthetic
ccuaucuuuuccccgaa

SEQ ID NO: 730919 - RNA, 17 nt, Artificial Sequence
  Synthetic
aaggaauuaagcccgaa

SEQ ID NO: 730920 - RNA, 17 nt, Artificial Sequence
  Synthetic
cagagcaagacuccgaa

SEQ ID NO: 730921 - RNA, 17 nt, Artificial Sequence
  Synthetic
aauacaccuguuccgaa

SEQ ID NO: 730922 - RNA, 17 nt, Artificial Sequence
  Synthetic
accaggggcugggcgaa

SEQ ID NO: 730923 - RNA, 17 nt, Artificial Sequence
  Synthetic
aaaagaagcauggcgaa

SEQ ID NO: 730924 - RNA, 17 nt, Artificial Sequence
  Synthetic
caguccugccuugcgaa

SEQ ID NO: 730925 - RNA, 17 nt, Artificial Sequence
  Synthetic
aauaaauauuaaucgaa

SEQ ID NO: 730926 - RNA, 17 nt, Artificial Sequence
  Synthetic
uuuuuuuuccuaucgaa

SEQ ID NO: 730927 - RNA, 17 nt, Artificial Sequence
  Synthetic
auagccauuuuaucgaa

SEQ ID NO: 730928 - RNA, 17 nt, Artificial Sequence
  Synthetic
ucacgcagacagucgaa

SEQ ID NO: 730929 - RNA, 17 nt, Artificial Sequence
  Synthetic
aggacgugauauucgaa

SEQ ID NO: 730930 - RNA, 17 nt, Artificial Sequence
  Synthetic
uccaaacacuauucgaa

SEQ ID NO: 730931 - RNA, 17 nt, Artificial Sequence
  Synthetic
agaaacaagauuucgaa

SEQ ID NO: 730932 - RNA, 17 nt, Artificial Sequence
  Synthetic
aaauauaauuuuucgaa

SEQ ID NO: 730933 - RNA, 17 nt, Artificial Sequence
  Synthetic
aaaaaaaaaaaaaggaa

SEQ ID NO: 730934 - RNA, 17 nt, Artificial Sequence
  Synthetic
aauuaaaaaaaaaggaa

SEQ ID NO: 730935 - RNA, 17 nt, Artificial Sequence
  Synthetic
auuuaagaaaaaaggaa

SEQ ID NO: 730936 - RNA, 17 nt, Artificial Sequence
  Synthetic
cuuaagagaaaaaggaa

SEQ ID NO: 730937 - RNA, 17 nt, Artificial Sequence
  Synthetic
ugagagagaaaaaggaa

SEQ ID NO: 730938 - RNA, 17 nt, Artificial Sequence
  Synthetic
uaaaaaggaaaaaggaa

SEQ ID NO: 730939 - RNA, 17 nt, Artificial Sequence
  Synthetic
cagauaccuaaaaggaa

SEQ ID NO: 730940 - RNA, 17 nt, Artificial Sequence
  Synthetic
cucuguaguaaaaggaa

SEQ ID NO: 730941 - RNA, 17 nt, Artificial Sequence
  Synthetic
cuuuaaagucaaaggaa

SEQ ID NO: 730942 - RNA, 17 nt, Artificial Sequence
  Synthetic
uuuauauuucaaaggaa

SEQ ID NO: 730943 - RNA, 17 nt, Artificial Sequence
  Synthetic
agguagaaagaaaggaa

SEQ ID NO: 730944 - RNA, 17 nt, Artificial Sequence
  Synthetic
cagaaaacagaaaggaa

SEQ ID NO: 730945 - RNA, 17 nt, Artificial Sequence
  Synthetic
cugcacccagaaaggaa

SEQ ID NO: 730946 - RNA, 17 nt, Artificial Sequence
  Synthetic
ugaaaucgagaaaggaa

SEQ ID NO: 730947 - RNA, 17 nt, Artificial Sequence
  Synthetic
cuggucgaggaaaggaa

SEQ ID NO: 730948 - RNA, 17 nt, Artificial Sequence
  Synthetic
ugagcggaggaaaggaa

SEQ ID NO: 730949 - RNA, 17 nt, Artificial Sequence
  Synthetic
auagaaggggaaaggaa

SEQ ID NO: 730950 - RNA, 17 nt, Artificial Sequence
  Synthetic
uuuauuagugaaaggaa

SEQ ID NO: 730951 - RNA, 17 nt, Artificial Sequence
  Synthetic
ucuguuaaaacaaggaa

SEQ ID NO: 730952 - RNA, 17 nt, Artificial Sequence
  Synthetic
accucuauuacaaggaa

SEQ ID NO: 730953 - RNA, 17 nt, Artificial Sequence
  Synthetic
ccugacuugccaaggaa

SEQ ID NO: 730954 - RNA, 17 nt, Artificial Sequence
  Synthetic
ucugcacuuccaaggaa

SEQ ID NO: 730955 - RNA, 17 nt, Artificial Sequence
  Synthetic
acagaaaucucaaggaa

SEQ ID NO: 730956 - RNA, 17 nt, Artificial Sequence
  Synthetic
aauaaaugaagaaggaa

SEQ ID NO: 730957 - RNA, 17 nt, Artificial Sequence
  Synthetic
aaaaggaacagaaggaa

SEQ ID NO: 730958 - RNA, 17 nt, Artificial Sequence
  Synthetic
uucagcagcagaaggaa

SEQ ID NO: 730959 - RNA, 17 nt, Artificial Sequence
  Synthetic
aauaguuucagaaggaa

SEQ ID NO: 730960 - RNA, 17 nt, Artificial Sequence
  Synthetic
cccuuugagagaaggaa

SEQ ID NO: 730961 - RNA, 17 nt, Artificial Sequence
  Synthetic
uugcucuagagaaggaa

SEQ ID NO: 730962 - RNA, 17 nt, Artificial Sequence
  Synthetic
aagauuuagagaaggaa

SEQ ID NO: 730963 - RNA, 17 nt, Artificial Sequence
  Synthetic
acaaagaaaggaaggaa

SEQ ID NO: 730964 - RNA, 17 nt, Artificial Sequence
  Synthetic
ccuagccaaggaaggaa

SEQ ID NO: 730965 - RNA, 17 nt, Artificial Sequence
  Synthetic
aggaagagaggaaggaa

SEQ ID NO: 730966 - RNA, 17 nt, Artificial Sequence
  Synthetic
aaaggaggaggaaggaa

SEQ ID NO: 730967 - RNA, 17 nt, Artificial Sequence
  Synthetic
augaaccugggaaggaa

SEQ ID NO: 730968 - RNA, 17 nt, Artificial Sequence
  Synthetic
caguggcauggaaggaa

SEQ ID NO: 730969 - RNA, 17 nt, Artificial Sequence
  Synthetic
uacuauacuggaaggaa

SEQ ID NO: 730970 - RNA, 17 nt, Artificial Sequence
  Synthetic
aaccaggugugaaggaa

SEQ ID NO: 730971 - RNA, 17 nt, Artificial Sequence
  Synthetic
uugucacaaauaaggaa

SEQ ID NO: 730972 - RNA, 17 nt, Artificial Sequence
  Synthetic
uauaguagaauaaggaa

SEQ ID NO: 730973 - RNA, 17 nt, Artificial Sequence
  Synthetic
aucugacccuuaaggaa

SEQ ID NO: 730974 - RNA, 17 nt, Artificial Sequence
  Synthetic
ucugauugguuaaggaa

SEQ ID NO: 730975 - RNA, 17 nt, Artificial Sequence
  Synthetic
aucauauuguuaaggaa

SEQ ID NO: 730976 - RNA, 17 nt, Artificial Sequence
  Synthetic
uagcaacauuuaaggaa

SEQ ID NO: 730977 - RNA, 17 nt, Artificial Sequence
  Synthetic
cauaaccacaacaggaa

SEQ ID NO: 730978 - RNA, 17 nt, Artificial Sequence
  Synthetic
acuguagggaacaggaa

SEQ ID NO: 730979 - RNA, 17 nt, Artificial Sequence
  Synthetic
ucacugguuaacaggaa

SEQ ID NO: 730980 - RNA, 17 nt, Artificial Sequence
  Synthetic
acacauggacacaggaa

SEQ ID NO: 730981 - RNA, 17 nt, Artificial Sequence
  Synthetic
ucacauggacacaggaa

SEQ ID NO: 730982 - RNA, 17 nt, Artificial Sequence
  Synthetic
uuaauaugccacaggaa

SEQ ID NO: 730983 - RNA, 17 nt, Artificial Sequence
  Synthetic
acacauggucacaggaa

SEQ ID NO: 730984 - RNA, 17 nt, Artificial Sequence
  Synthetic
uaguuagaagacaggaa

SEQ ID NO: 730985 - RNA, 17 nt, Artificial Sequence
  Synthetic
ccacaugaauacaggaa

SEQ ID NO: 730986 - RNA, 17 nt, Artificial Sequence
  Synthetic
uuaaaauauuacaggaa

SEQ ID NO: 730987 - RNA, 17 nt, Artificial Sequence
  Synthetic
cuggaccccaccaggaa

SEQ ID NO: 730988 - RNA, 17 nt, Artificial Sequence
  Synthetic
caaccugcccccaggaa

SEQ ID NO: 730989 - RNA, 17 nt, Artificial Sequence
  Synthetic
acucuacaucccaggaa

SEQ ID NO: 730990 - RNA, 17 nt, Artificial Sequence
  Synthetic
ucagcauuucccaggaa

SEQ ID NO: 730991 - RNA, 17 nt, Artificial Sequence
  Synthetic
acuucggcugccaggaa

SEQ ID NO: 730992 - RNA, 17 nt, Artificial Sequence
  Synthetic
aaaagggauuccaggaa

SEQ ID NO: 730993 - RNA, 17 nt, Artificial Sequence
  Synthetic
uagcggaauagcaggaa

SEQ ID NO: 730994 - RNA, 17 nt, Artificial Sequence
  Synthetic
uagaaacuuagcaggaa

SEQ ID NO: 730995 - RNA, 17 nt, Artificial Sequence
  Synthetic
acaccuggacgcaggaa

SEQ ID NO: 730996 - RNA, 17 nt, Artificial Sequence
  Synthetic
ccaucuagcugcaggaa

SEQ ID NO: 730997 - RNA, 17 nt, Artificial Sequence
  Synthetic
agugaaggcugcaggaa

SEQ ID NO: 730998 - RNA, 17 nt, Artificial Sequence
  Synthetic
cccauugaacucaggaa

SEQ ID NO: 730999 - RNA, 17 nt, Artificial Sequence
  Synthetic
uugcuaacacucaggaa

SEQ ID NO: 731000 - RNA, 17 nt, Artificial Sequence
  Synthetic
uuccacuaucucaggaa

SEQ ID NO: 731001 - RNA, 17 nt, Artificial Sequence
  Synthetic
cagccaagagucaggaa

SEQ ID NO: 731002 - RNA, 17 nt, Artificial Sequence
  Synthetic
aauaagacauucaggaa

SEQ ID NO: 731003 - RNA, 17 nt, Artificial Sequence
  Synthetic
agccauuacuucaggaa

SEQ ID NO: 731004 - RNA, 17 nt, Artificial Sequence
  Synthetic
aaacgaguaaagaggaa

SEQ ID NO: 731005 - RNA, 17 nt, Artificial Sequence
  Synthetic
uuguaugucaagaggaa

SEQ ID NO: 731006 - RNA, 17 nt, Artificial Sequence
  Synthetic
aauauugcgaagaggaa

SEQ ID NO: 731007 - RNA, 17 nt, Artificial Sequence
  Synthetic
ugggaagggaagaggaa

SEQ ID NO: 731008 - RNA, 17 nt, Artificial Sequence
  Synthetic
aguuacuuuaagaggaa

SEQ ID NO: 731009 - RNA, 17 nt, Artificial Sequence
  Synthetic
agacagagagagaggaa

SEQ ID NO: 731010 - RNA, 17 nt, Artificial Sequence
  Synthetic
aaucaaguggagaggaa

SEQ ID NO: 731011 - RNA, 17 nt, Artificial Sequence
  Synthetic
auucaagguuagaggaa

SEQ ID NO: 731012 - RNA, 17 nt, Artificial Sequence
  Synthetic
aaaggaagaaggaggaa

SEQ ID NO: 731013 - RNA, 17 nt, Artificial Sequence
  Synthetic
uaaccaugaaggaggaa

SEQ ID NO: 731014 - RNA, 17 nt, Artificial Sequence
  Synthetic
uuguaaaagaggaggaa

SEQ ID NO: 731015 - RNA, 17 nt, Artificial Sequence
  Synthetic
auuugggguaggaggaa

SEQ ID NO: 731016 - RNA, 17 nt, Artificial Sequence
  Synthetic
accugugagcggaggaa

SEQ ID NO: 731017 - RNA, 17 nt, Artificial Sequence
  Synthetic
aaagggaaagggaggaa

SEQ ID NO: 731018 - RNA, 17 nt, Artificial Sequence
  Synthetic
agaaaagaagggaggaa

SEQ ID NO: 731019 - RNA, 17 nt, Artificial Sequence
  Synthetic
agagagagagggaggaa

SEQ ID NO: 731020 - RNA, 17 nt, Artificial Sequence
  Synthetic
uguagaugggggaggaa

SEQ ID NO: 731021 - RNA, 17 nt, Artificial Sequence
  Synthetic
uugaggugggggaggaa

SEQ ID NO: 731022 - RNA, 17 nt, Artificial Sequence
  Synthetic
agggagggauggaggaa

SEQ ID NO: 731023 - RNA, 17 nt, Artificial Sequence
  Synthetic
cuguguguaaugaggaa

SEQ ID NO: 731024 - RNA, 17 nt, Artificial Sequence
  Synthetic
ucagagucacugaggaa

SEQ ID NO: 731025 - RNA, 17 nt, Artificial Sequence
  Synthetic
auucauucacugaggaa

SEQ ID NO: 731026 - RNA, 17 nt, Artificial Sequence
  Synthetic
aaaagaggagugaggaa

SEQ ID NO: 731027 - RNA, 17 nt, Artificial Sequence
  Synthetic
agaaauggagugaggaa

SEQ ID NO: 731028 - RNA, 17 nt, Artificial Sequence
  Synthetic
aaagaggcauugaggaa

SEQ ID NO: 731029 - RNA, 17 nt, Artificial Sequence
  Synthetic
aaaauuuccuugaggaa

SEQ ID NO: 731030 - RNA, 17 nt, Artificial Sequence
  Synthetic
aaaugagaaaauaggaa

SEQ ID NO: 731031 - RNA, 17 nt, Artificial Sequence
  Synthetic
aacucuuuaaauaggaa

SEQ ID NO: 731032 - RNA, 17 nt, Artificial Sequence
  Synthetic
agaugaugcaauaggaa

SEQ ID NO: 731033 - RNA, 17 nt, Artificial Sequence
  Synthetic
uuccauuuacauaggaa

SEQ ID NO: 731034 - RNA, 17 nt, Artificial Sequence
  Synthetic
auguuguagcauaggaa

SEQ ID NO: 731035 - RNA, 17 nt, Artificial Sequence
  Synthetic
uuugaauugcauaggaa

SEQ ID NO: 731036 - RNA, 17 nt, Artificial Sequence
  Synthetic
cagagcacugauaggaa

SEQ ID NO: 731037 - RNA, 17 nt, Artificial Sequence
  Synthetic
aacagaagugauaggaa

SEQ ID NO: 731038 - RNA, 17 nt, Artificial Sequence
  Synthetic
augauauaauauaggaa

SEQ ID NO: 731039 - RNA, 17 nt, Artificial Sequence
  Synthetic
agagguaauuauaggaa

SEQ ID NO: 731040 - RNA, 17 nt, Artificial Sequence
  Synthetic
aaaauggagccuaggaa

SEQ ID NO: 731041 - RNA, 17 nt, Artificial Sequence
  Synthetic
acuccuauuucuaggaa

SEQ ID NO: 731042 - RNA, 17 nt, Artificial Sequence
  Synthetic
aacuguauuucuaggaa

SEQ ID NO: 731043 - RNA, 17 nt, Artificial Sequence
  Synthetic
cucagauaaaguaggaa

SEQ ID NO: 731044 - RNA, 17 nt, Artificial Sequence
  Synthetic
uuguuggagaguaggaa

SEQ ID NO: 731045 - RNA, 17 nt, Artificial Sequence
  Synthetic
aaagacucagguaggaa

SEQ ID NO: 731046 - RNA, 17 nt, Artificial Sequence
  Synthetic
uuucacugggguaggaa

SEQ ID NO: 731047 - RNA, 17 nt, Artificial Sequence
  Synthetic
agccuuauggguaggaa

SEQ ID NO: 731048 - RNA, 17 nt, Artificial Sequence
  Synthetic
aauaaaaaguguaggaa

SEQ ID NO: 731049 - RNA, 17 nt, Artificial Sequence
  Synthetic
auaugcuaaauuaggaa

SEQ ID NO: 731050 - RNA, 17 nt, Artificial Sequence
  Synthetic
ucugcucacauuaggaa

SEQ ID NO: 731051 - RNA, 17 nt, Artificial Sequence
  Synthetic
aucuggggcauuaggaa

SEQ ID NO: 731052 - RNA, 17 nt, Artificial Sequence
  Synthetic
cucgucaguauuaggaa

SEQ ID NO: 731053 - RNA, 17 nt, Artificial Sequence
  Synthetic
uccuuagaaguuaggaa

SEQ ID NO: 731054 - RNA, 17 nt, Artificial Sequence
  Synthetic
uaaugggaaguuaggaa

SEQ ID NO: 731055 - RNA, 17 nt, Artificial Sequence
  Synthetic
uuauuuggauuuaggaa

SEQ ID NO: 731056 - RNA, 17 nt, Artificial Sequence
  Synthetic
aucccuuuguuuaggaa

SEQ ID NO: 731057 - RNA, 17 nt, Artificial Sequence
  Synthetic
uaguuggaaucacggaa

SEQ ID NO: 731058 - RNA, 17 nt, Artificial Sequence
  Synthetic
auuccaggaagacggaa

SEQ ID NO: 731059 - RNA, 17 nt, Artificial Sequence
  Synthetic
acacaauagguacggaa

SEQ ID NO: 731060 - RNA, 17 nt, Artificial Sequence
  Synthetic
uuaaggauuuuacggaa

SEQ ID NO: 731061 - RNA, 17 nt, Artificial Sequence
  Synthetic
acauggaaacagcggaa

SEQ ID NO: 731062 - RNA, 17 nt, Artificial Sequence
  Synthetic
aguguaggugggcggaa

SEQ ID NO: 731063 - RNA, 17 nt, Artificial Sequence
  Synthetic
caaaagucaaaucggaa

SEQ ID NO: 731064 - RNA, 17 nt, Artificial Sequence
  Synthetic
aagaaaaaaaaagggaa

SEQ ID NO: 731065 - RNA, 17 nt, Artificial Sequence
  Synthetic
augcuaagaaaagggaa

SEQ ID NO: 731066 - RNA, 17 nt, Artificial Sequence
  Synthetic
ugggaaggaaaagggaa

SEQ ID NO: 731067 - RNA, 17 nt, Artificial Sequence
  Synthetic
uugucaaugaaagggaa

SEQ ID NO: 731068 - RNA, 17 nt, Artificial Sequence
  Synthetic
caaguggugaaagggaa

SEQ ID NO: 731069 - RNA, 17 nt, Artificial Sequence
  Synthetic
agaaguaauaaagggaa

SEQ ID NO: 731070 - RNA, 17 nt, Artificial Sequence
  Synthetic
aaaagcuaccaagggaa

SEQ ID NO: 731071 - RNA, 17 nt, Artificial Sequence
  Synthetic
aucccaugucaagggaa

SEQ ID NO: 731072 - RNA, 17 nt, Artificial Sequence
  Synthetic
cacgugugugaagggaa

SEQ ID NO: 731073 - RNA, 17 nt, Artificial Sequence
  Synthetic
uccuuuaaauaagggaa

SEQ ID NO: 731074 - RNA, 17 nt, Artificial Sequence
  Synthetic
aguuuuaaauaagggaa

SEQ ID NO: 731075 - RNA, 17 nt, Artificial Sequence
  Synthetic
cucacccacacagggaa

SEQ ID NO: 731076 - RNA, 17 nt, Artificial Sequence
  Synthetic
uggaugugaccagggaa

SEQ ID NO: 731077 - RNA, 17 nt, Artificial Sequence
  Synthetic
cagccaauaccagggaa

SEQ ID NO: 731078 - RNA, 17 nt, Artificial Sequence
  Synthetic
agaaugaaagcagggaa

SEQ ID NO: 731079 - RNA, 17 nt, Artificial Sequence
  Synthetic
uugucucuggcagggaa

SEQ ID NO: 731080 - RNA, 17 nt, Artificial Sequence
  Synthetic
uucuuacauucagggaa

SEQ ID NO: 731081 - RNA, 17 nt, Artificial Sequence
  Synthetic
uaagcagcaagagggaa

SEQ ID NO: 731082 - RNA, 17 nt, Artificial Sequence
  Synthetic
ccauaaggcagagggaa

SEQ ID NO: 731083 - RNA, 17 nt, Artificial Sequence
  Synthetic
aauaguuuuagagggaa

SEQ ID NO: 731084 - RNA, 17 nt, Artificial Sequence
  Synthetic
ccggaagcaggagggaa

SEQ ID NO: 731085 - RNA, 17 nt, Artificial Sequence
  Synthetic
aaugagugaggagggaa

SEQ ID NO: 731086 - RNA, 17 nt, Artificial Sequence
  Synthetic
ugagagaggggagggaa

SEQ ID NO: 731087 - RNA, 17 nt, Artificial Sequence
  Synthetic
aaggagaggggagggaa

SEQ ID NO: 731088 - RNA, 17 nt, Artificial Sequence
  Synthetic
aaaaaauauauagggaa

SEQ ID NO: 731089 - RNA, 17 nt, Artificial Sequence
  Synthetic
uaaugaucucuagggaa

SEQ ID NO: 731090 - RNA, 17 nt, Artificial Sequence
  Synthetic
aacacgagauuagggaa

SEQ ID NO: 731091 - RNA, 17 nt, Artificial Sequence
  Synthetic
uguccacaaaacgggaa

SEQ ID NO: 731092 - RNA, 17 nt, Artificial Sequence
  Synthetic
aauaggguacacgggaa

SEQ ID NO: 731093 - RNA, 17 nt, Artificial Sequence
  Synthetic
aucaacagauacgggaa

SEQ ID NO: 731094 - RNA, 17 nt, Artificial Sequence
  Synthetic
caucugagacccgggaa

SEQ ID NO: 731095 - RNA, 17 nt, Artificial Sequence
  Synthetic
ugguuuucccucgggaa

SEQ ID NO: 731096 - RNA, 17 nt, Artificial Sequence
  Synthetic
acacaaaaaaaggggaa

SEQ ID NO: 731097 - RNA, 17 nt, Artificial Sequence
  Synthetic
uaguggugccaggggaa

SEQ ID NO: 731098 - RNA, 17 nt, Artificial Sequence
  Synthetic
ugcugcaugcaggggaa

SEQ ID NO: 731099 - RNA, 17 nt, Artificial Sequence
  Synthetic
aucagaaacuaggggaa

SEQ ID NO: 731100 - RNA, 17 nt, Artificial Sequence
  Synthetic
acaagauauuaggggaa

SEQ ID NO: 731101 - RNA, 17 nt, Artificial Sequence
  Synthetic
aaacaagcaacggggaa

SEQ ID NO: 731102 - RNA, 17 nt, Artificial Sequence
  Synthetic
cagagcaccacggggaa

SEQ ID NO: 731103 - RNA, 17 nt, Artificial Sequence
  Synthetic
aaauauuuagcggggaa

SEQ ID NO: 731104 - RNA, 17 nt, Artificial Sequence
  Synthetic
caggggagaagggggaa

SEQ ID NO: 731105 - RNA, 17 nt, Artificial Sequence
  Synthetic
aauaaagguagggggaa

SEQ ID NO: 731106 - RNA, 17 nt, Artificial Sequence
  Synthetic
aagaaggguagggggaa

SEQ ID NO: 731107 - RNA, 17 nt, Artificial Sequence
  Synthetic
ccagccaauggggggaa

SEQ ID NO: 731108 - RNA, 17 nt, Artificial Sequence
  Synthetic
ugaaaguauggggggaa

SEQ ID NO: 731109 - RNA, 17 nt, Artificial Sequence
  Synthetic
cugugggguggggggaa

SEQ ID NO: 731110 - RNA, 17 nt, Artificial Sequence
  Synthetic
uauuuguaaugggggaa

SEQ ID NO: 731111 - RNA, 17 nt, Artificial Sequence
  Synthetic
ccugugaggugggggaa

SEQ ID NO: 731112 - RNA, 17 nt, Artificial Sequence
  Synthetic
aaaaaaaaaauggggaa

SEQ ID NO: 731113 - RNA, 17 nt, Artificial Sequence
  Synthetic
aaacaagaaauggggaa

SEQ ID NO: 731114 - RNA, 17 nt, Artificial Sequence
  Synthetic
uuaagagaaauggggaa

SEQ ID NO: 731115 - RNA, 17 nt, Artificial Sequence
  Synthetic
aaacaagcaauggggaa

SEQ ID NO: 731116 - RNA, 17 nt, Artificial Sequence
  Synthetic
uaugugcauauggggaa

SEQ ID NO: 731117 - RNA, 17 nt, Artificial Sequence
  Synthetic
acaagaucccuggggaa

SEQ ID NO: 731118 - RNA, 17 nt, Artificial Sequence
  Synthetic
agaugagggcuggggaa

SEQ ID NO: 731119 - RNA, 17 nt, Artificial Sequence
  Synthetic
ucaggaacucuggggaa

SEQ ID NO: 731120 - RNA, 17 nt, Artificial Sequence
  Synthetic
ugaccuuguguggggaa

SEQ ID NO: 731121 - RNA, 17 nt, Artificial Sequence
  Synthetic
agacaacccuuggggaa

SEQ ID NO: 731122 - RNA, 17 nt, Artificial Sequence
  Synthetic
cuuaggcauuuggggaa

SEQ ID NO: 731123 - RNA, 17 nt, Artificial Sequence
  Synthetic
uugcaaauuuuggggaa

SEQ ID NO: 731124 - RNA, 17 nt, Artificial Sequence
  Synthetic
cucucuguaaaugggaa

SEQ ID NO: 731125 - RNA, 17 nt, Artificial Sequence
  Synthetic
cccaaagucaaugggaa

SEQ ID NO: 731126 - RNA, 17 nt, Artificial Sequence
  Synthetic
uucugugguaaugggaa

SEQ ID NO: 731127 - RNA, 17 nt, Artificial Sequence
  Synthetic
aaagaauagcaugggaa

SEQ ID NO: 731128 - RNA, 17 nt, Artificial Sequence
  Synthetic
uuaccugaggaugggaa

SEQ ID NO: 731129 - RNA, 17 nt, Artificial Sequence
  Synthetic
aaugguggugaugggaa

SEQ ID NO: 731130 - RNA, 17 nt, Artificial Sequence
  Synthetic
acugcccaguaugggaa

SEQ ID NO: 731131 - RNA, 17 nt, Artificial Sequence
  Synthetic
uuccaggagacugggaa

SEQ ID NO: 731132 - RNA, 17 nt, Artificial Sequence
  Synthetic
auugcuacuccugggaa

SEQ ID NO: 731133 - RNA, 17 nt, Artificial Sequence
  Synthetic
caacaccgggcugggaa

SEQ ID NO: 731134 - RNA, 17 nt, Artificial Sequence
  Synthetic
ucuuauguggcugggaa

SEQ ID NO: 731135 - RNA, 17 nt, Artificial Sequence
  Synthetic
uuaccugaugcugggaa

SEQ ID NO: 731136 - RNA, 17 nt, Artificial Sequence
  Synthetic
cuguacacugcugggaa

SEQ ID NO: 731137 - RNA, 17 nt, Artificial Sequence
  Synthetic
cuagguucgucugggaa

SEQ ID NO: 731138 - RNA, 17 nt, Artificial Sequence
  Synthetic
ugauagaacagugggaa

SEQ ID NO: 731139 - RNA, 17 nt, Artificial Sequence
  Synthetic
auuuuuaacagugggaa

SEQ ID NO: 731140 - RNA, 17 nt, Artificial Sequence
  Synthetic
uugagaaagagugggaa

SEQ ID NO: 731141 - RNA, 17 nt, Artificial Sequence
  Synthetic
uuuaggggaggugggaa

SEQ ID NO: 731142 - RNA, 17 nt, Artificial Sequence
  Synthetic
ucacucuuaggugggaa

SEQ ID NO: 731143 - RNA, 17 nt, Artificial Sequence
  Synthetic
aacacuccuggugggaa

SEQ ID NO: 731144 - RNA, 17 nt, Artificial Sequence
  Synthetic
ugaagugagauugggaa

SEQ ID NO: 731145 - RNA, 17 nt, Artificial Sequence
  Synthetic
aaaagcaugcuugggaa

SEQ ID NO: 731146 - RNA, 17 nt, Artificial Sequence
  Synthetic
uuuggaggucuugggaa

SEQ ID NO: 731147 - RNA, 17 nt, Artificial Sequence
  Synthetic
uaauauuaaguugggaa

SEQ ID NO: 731148 - RNA, 17 nt, Artificial Sequence
  Synthetic
agaauugggguugggaa

SEQ ID NO: 731149 - RNA, 17 nt, Artificial Sequence
  Synthetic
ugaguugggguugggaa

SEQ ID NO: 731150 - RNA, 17 nt, Artificial Sequence
  Synthetic
uaccauaaguuugggaa

SEQ ID NO: 731151 - RNA, 17 nt, Artificial Sequence
  Synthetic
ugugauuacaaauggaa

SEQ ID NO: 731152 - RNA, 17 nt, Artificial Sequence
  Synthetic
ugccuugagaaauggaa

SEQ ID NO: 731153 - RNA, 17 nt, Artificial Sequence
  Synthetic
aguuggaggaaauggaa

SEQ ID NO: 731154 - RNA, 17 nt, Artificial Sequence
  Synthetic
aggaugaugaaauggaa

SEQ ID NO: 731155 - RNA, 17 nt, Artificial Sequence
  Synthetic
uguauuuugaaauggaa

SEQ ID NO: 731156 - RNA, 17 nt, Artificial Sequence
  Synthetic
acagcccauaaauggaa

SEQ ID NO: 731157 - RNA, 17 nt, Artificial Sequence
  Synthetic
uaaugaagacaauggaa

SEQ ID NO: 731158 - RNA, 17 nt, Artificial Sequence
  Synthetic
ugauuuagagaauggaa

SEQ ID NO: 731159 - RNA, 17 nt, Artificial Sequence
  Synthetic
aaacuaggggaauggaa

SEQ ID NO: 731160 - RNA, 17 nt, Artificial Sequence
  Synthetic
uucuuuguugaauggaa

SEQ ID NO: 731161 - RNA, 17 nt, Artificial Sequence
  Synthetic
auuccauguuaauggaa

SEQ ID NO: 731162 - RNA, 17 nt, Artificial Sequence
  Synthetic
aaucacuaaacauggaa

SEQ ID NO: 731163 - RNA, 17 nt, Artificial Sequence
  Synthetic
aagcgcuaaacauggaa

SEQ ID NO: 731164 - RNA, 17 nt, Artificial Sequence
  Synthetic
uuugaacauacauggaa

SEQ ID NO: 731165 - RNA, 17 nt, Artificial Sequence
  Synthetic
caacagggagcauggaa

SEQ ID NO: 731166 - RNA, 17 nt, Artificial Sequence
  Synthetic
ccucucaaggcauggaa

SEQ ID NO: 731167 - RNA, 17 nt, Artificial Sequence
  Synthetic
caggcucagagauggaa

SEQ ID NO: 731168 - RNA, 17 nt, Artificial Sequence
  Synthetic
uuucucagaggauggaa

SEQ ID NO: 731169 - RNA, 17 nt, Artificial Sequence
  Synthetic
uuggccuggggauggaa

SEQ ID NO: 731170 - RNA, 17 nt, Artificial Sequence
  Synthetic
aaauuacauggauggaa

SEQ ID NO: 731171 - RNA, 17 nt, Artificial Sequence
  Synthetic
aagcacuaaauauggaa

SEQ ID NO: 731172 - RNA, 17 nt, Artificial Sequence
  Synthetic
aggagguaaauauggaa

SEQ ID NO: 731173 - RNA, 17 nt, Artificial Sequence
  Synthetic
cugggguuucuauggaa

SEQ ID NO: 731174 - RNA, 17 nt, Artificial Sequence
  Synthetic
ucugccuaauuauggaa

SEQ ID NO: 731175 - RNA, 17 nt, Artificial Sequence
  Synthetic
auuccaugcuuauggaa

SEQ ID NO: 731176 - RNA, 17 nt, Artificial Sequence
  Synthetic
uuuaaaugacccuggaa

SEQ ID NO: 731177 - RNA, 17 nt, Artificial Sequence
  Synthetic
cauucacuccccuggaa

SEQ ID NO: 731178 - RNA, 17 nt, Artificial Sequence
  Synthetic
ugccauucuuccuggaa

SEQ ID NO: 731179 - RNA, 17 nt, Artificial Sequence
  Synthetic
uggggcucaagcuggaa

SEQ ID NO: 731180 - RNA, 17 nt, Artificial Sequence
  Synthetic
uggaacaccagcuggaa

SEQ ID NO: 731181 - RNA, 17 nt, Artificial Sequence
  Synthetic
ucaaccccaaucuggaa

SEQ ID NO: 731182 - RNA, 17 nt, Artificial Sequence
  Synthetic
acaugcugaaucuggaa

SEQ ID NO: 731183 - RNA, 17 nt, Artificial Sequence
  Synthetic
auaaaguacaucuggaa

SEQ ID NO: 731184 - RNA, 17 nt, Artificial Sequence
  Synthetic
auuucucccaucuggaa

SEQ ID NO: 731185 - RNA, 17 nt, Artificial Sequence
  Synthetic
cuuaauggcaucuggaa

SEQ ID NO: 731186 - RNA, 17 nt, Artificial Sequence
  Synthetic
cuucauggcaucuggaa

SEQ ID NO: 731187 - RNA, 17 nt, Artificial Sequence
  Synthetic
ucaagugagaucuggaa

SEQ ID NO: 731188 - RNA, 17 nt, Artificial Sequence
  Synthetic
aaaaucuuccucuggaa

SEQ ID NO: 731189 - RNA, 17 nt, Artificial Sequence
  Synthetic
agggagguucucuggaa

SEQ ID NO: 731190 - RNA, 17 nt, Artificial Sequence
  Synthetic
agaaaagaggucuggaa

SEQ ID NO: 731191 - RNA, 17 nt, Artificial Sequence
  Synthetic
auuaaguuggucuggaa

SEQ ID NO: 731192 - RNA, 17 nt, Artificial Sequence
  Synthetic
aaguucuccuucuggaa

SEQ ID NO: 731193 - RNA, 17 nt, Artificial Sequence
  Synthetic
cugaaaaucuucuggaa

SEQ ID NO: 731194 - RNA, 17 nt, Artificial Sequence
  Synthetic
ccuaaaauguucuggaa

SEQ ID NO: 731195 - RNA, 17 nt, Artificial Sequence
  Synthetic
ugaggguagaaguggaa

SEQ ID NO: 731196 - RNA, 17 nt, Artificial Sequence
  Synthetic
acucuguagaaguggaa

SEQ ID NO: 731197 - RNA, 17 nt, Artificial Sequence
  Synthetic
caguuacggaaguggaa

SEQ ID NO: 731198 - RNA, 17 nt, Artificial Sequence
  Synthetic
cucuuccuacaguggaa

SEQ ID NO: 731199 - RNA, 17 nt, Artificial Sequence
  Synthetic
aaaacaagccaguggaa

SEQ ID NO: 731200 - RNA, 17 nt, Artificial Sequence
  Synthetic
aauccauaugaguggaa

SEQ ID NO: 731201 - RNA, 17 nt, Artificial Sequence
  Synthetic
auuguaguauaguggaa

SEQ ID NO: 731202 - RNA, 17 nt, Artificial Sequence
  Synthetic
uuugcagccuaguggaa

SEQ ID NO: 731203 - RNA, 17 nt, Artificial Sequence
  Synthetic
uucaaaauguaguggaa

SEQ ID NO: 731204 - RNA, 17 nt, Artificial Sequence
  Synthetic
augaauauguaguggaa

SEQ ID NO: 731205 - RNA, 17 nt, Artificial Sequence
  Synthetic
agaauaagaagguggaa

SEQ ID NO: 731206 - RNA, 17 nt, Artificial Sequence
  Synthetic
ugucccagcagguggaa

SEQ ID NO: 731207 - RNA, 17 nt, Artificial Sequence
  Synthetic
uaaguuaaaauguggaa

SEQ ID NO: 731208 - RNA, 17 nt, Artificial Sequence
  Synthetic
augcauacacuguggaa

SEQ ID NO: 731209 - RNA, 17 nt, Artificial Sequence
  Synthetic
caauauaaucuguggaa

SEQ ID NO: 731210 - RNA, 17 nt, Artificial Sequence
  Synthetic
cgacccucucuguggaa

SEQ ID NO: 731211 - RNA, 17 nt, Artificial Sequence
  Synthetic
agugauaggguguggaa

SEQ ID NO: 731212 - RNA, 17 nt, Artificial Sequence
  Synthetic
auaaauuuuguguggaa

SEQ ID NO: 731213 - RNA, 17 nt, Artificial Sequence
  Synthetic
acccauacauuguggaa

SEQ ID NO: 731214 - RNA, 17 nt, Artificial Sequence
  Synthetic
uuguggucauuguggaa

SEQ ID NO: 731215 - RNA, 17 nt, Artificial Sequence
  Synthetic
ccuggggaaaauuggaa

SEQ ID NO: 731216 - RNA, 17 nt, Artificial Sequence
  Synthetic
acagagacaaauuggaa

SEQ ID NO: 731217 - RNA, 17 nt, Artificial Sequence
  Synthetic
uuugaagcaaauuggaa

SEQ ID NO: 731218 - RNA, 17 nt, Artificial Sequence
  Synthetic
uaauucuacaauuggaa

SEQ ID NO: 731219 - RNA, 17 nt, Artificial Sequence
  Synthetic
uguaccaucaauuggaa

SEQ ID NO: 731220 - RNA, 17 nt, Artificial Sequence
  Synthetic
ugggacagacauuggaa

SEQ ID NO: 731221 - RNA, 17 nt, Artificial Sequence
  Synthetic
cuaaccugagauuggaa

SEQ ID NO: 731222 - RNA, 17 nt, Artificial Sequence
  Synthetic
uuauaaauggauuggaa

SEQ ID NO: 731223 - RNA, 17 nt, Artificial Sequence
  Synthetic
uacauacaugauuggaa

SEQ ID NO: 731224 - RNA, 17 nt, Artificial Sequence
  Synthetic
aguucauguuauuggaa

SEQ ID NO: 731225 - RNA, 17 nt, Artificial Sequence
  Synthetic
auggaaaacacuuggaa

SEQ ID NO: 731226 - RNA, 17 nt, Artificial Sequence
  Synthetic
aagagaugagcuuggaa

SEQ ID NO: 731227 - RNA, 17 nt, Artificial Sequence
  Synthetic
ugcugcuguucuuggaa

SEQ ID NO: 731228 - RNA, 17 nt, Artificial Sequence
  Synthetic
ccauuucuuucuuggaa

SEQ ID NO: 731229 - RNA, 17 nt, Artificial Sequence
  Synthetic
auucaaagagguuggaa

SEQ ID NO: 731230 - RNA, 17 nt, Artificial Sequence
  Synthetic
ugggagccauguuggaa

SEQ ID NO: 731231 - RNA, 17 nt, Artificial Sequence
  Synthetic
cuccacaaguguuggaa

SEQ ID NO: 731232 - RNA, 17 nt, Artificial Sequence
  Synthetic
auacaucaaauuuggaa

SEQ ID NO: 731233 - RNA, 17 nt, Artificial Sequence
  Synthetic
aaugaaugcauuuggaa

SEQ ID NO: 731234 - RNA, 17 nt, Artificial Sequence
  Synthetic
aaaaaaacgcuuuggaa

SEQ ID NO: 731235 - RNA, 17 nt, Artificial Sequence
  Synthetic
accuguauucuuuggaa

SEQ ID NO: 731236 - RNA, 17 nt, Artificial Sequence
  Synthetic
ucuuugcacuuuuggaa

SEQ ID NO: 731237 - RNA, 17 nt, Artificial Sequence
  Synthetic
auaucaaaguuuuggaa

SEQ ID NO: 731238 - RNA, 17 nt, Artificial Sequence
  Synthetic
cccuaggauuuuuggaa

SEQ ID NO: 731239 - RNA, 17 nt, Artificial Sequence
  Synthetic
aagaaagaaaaaaugaa

SEQ ID NO: 731240 - RNA, 17 nt, Artificial Sequence
  Synthetic
cuugugggaaaaaugaa

SEQ ID NO: 731241 - RNA, 17 nt, Artificial Sequence
  Synthetic
aacacauacaaaaugaa

SEQ ID NO: 731242 - RNA, 17 nt, Artificial Sequence
  Synthetic
aaauuagccaaaaugaa

SEQ ID NO: 731243 - RNA, 17 nt, Artificial Sequence
  Synthetic
cccacuugcaaaaugaa

SEQ ID NO: 731244 - RNA, 17 nt, Artificial Sequence
  Synthetic
cuggaucucaaaaugaa

SEQ ID NO: 731245 - RNA, 17 nt, Artificial Sequence
  Synthetic
ucauggcagaaaaugaa

SEQ ID NO: 731246 - RNA, 17 nt, Artificial Sequence
  Synthetic
agacuugagaaaaugaa

SEQ ID NO: 731247 - RNA, 17 nt, Artificial Sequence
  Synthetic
aguccugggaaaaugaa

SEQ ID NO: 731248 - RNA, 17 nt, Artificial Sequence
  Synthetic
auauuuauuaaaaugaa

SEQ ID NO: 731249 - RNA, 17 nt, Artificial Sequence
  Synthetic
uuguuuguuaaaaugaa

SEQ ID NO: 731250 - RNA, 17 nt, Artificial Sequence
  Synthetic
ugaguaaaacaaaugaa

SEQ ID NO: 731251 - RNA, 17 nt, Artificial Sequence
  Synthetic
uaaaaucuccaaaugaa

SEQ ID NO: 731252 - RNA, 17 nt, Artificial Sequence
  Synthetic
augauguugcaaaugaa

SEQ ID NO: 731253 - RNA, 17 nt, Artificial Sequence
  Synthetic
auaaucuaucaaaugaa

SEQ ID NO: 731254 - RNA, 17 nt, Artificial Sequence
  Synthetic
caaagugaagaaaugaa

SEQ ID NO: 731255 - RNA, 17 nt, Artificial Sequence
  Synthetic
uuuagagcagaaaugaa

SEQ ID NO: 731256 - RNA, 17 nt, Artificial Sequence
  Synthetic
uaguauagcgaaaugaa

SEQ ID NO: 731257 - RNA, 17 nt, Artificial Sequence
  Synthetic
ugcucugaugaaaugaa

SEQ ID NO: 731258 - RNA, 17 nt, Artificial Sequence
  Synthetic
aauuggauugaaaugaa

SEQ ID NO: 731259 - RNA, 17 nt, Artificial Sequence
  Synthetic
cauuguuccuaaaugaa

SEQ ID NO: 731260 - RNA, 17 nt, Artificial Sequence
  Synthetic
cuaucugaaacaaugaa

SEQ ID NO: 731261 - RNA, 17 nt, Artificial Sequence
  Synthetic
agacggucaacaaugaa

SEQ ID NO: 731262 - RNA, 17 nt, Artificial Sequence
  Synthetic
ucugccuacacaaugaa

SEQ ID NO: 731263 - RNA, 17 nt, Artificial Sequence
  Synthetic
ucacugacuacaaugaa

SEQ ID NO: 731264 - RNA, 17 nt, Artificial Sequence
  Synthetic
ugaugaucaccaaugaa

SEQ ID NO: 731265 - RNA, 17 nt, Artificial Sequence
  Synthetic
aaacuucucccaaugaa

SEQ ID NO: 731266 - RNA, 17 nt, Artificial Sequence
  Synthetic
ucaaaaauuccaaugaa

SEQ ID NO: 731267 - RNA, 17 nt, Artificial Sequence
  Synthetic
aacuuagaagcaaugaa

SEQ ID NO: 731268 - RNA, 17 nt, Artificial Sequence
  Synthetic
agaugacuggcaaugaa

SEQ ID NO: 731269 - RNA, 17 nt, Artificial Sequence
  Synthetic
aucuuuuacucaaugaa

SEQ ID NO: 731270 - RNA, 17 nt, Artificial Sequence
  Synthetic
uaaaggaagucaaugaa

SEQ ID NO: 731271 - RNA, 17 nt, Artificial Sequence
  Synthetic
uaauauuugucaaugaa

SEQ ID NO: 731272 - RNA, 17 nt, Artificial Sequence
  Synthetic
uauuuuguuucaaugaa

SEQ ID NO: 731273 - RNA, 17 nt, Artificial Sequence
  Synthetic
uaagaaggaagaaugaa

SEQ ID NO: 731274 - RNA, 17 nt, Artificial Sequence
  Synthetic
uauccugaaggaaugaa

SEQ ID NO: 731275 - RNA, 17 nt, Artificial Sequence
  Synthetic
augaugaggggaaugaa

SEQ ID NO: 731276 - RNA, 17 nt, Artificial Sequence
  Synthetic
uagucaacuggaaugaa

SEQ ID NO: 731277 - RNA, 17 nt, Artificial Sequence
  Synthetic
aguccccuuggaaugaa

SEQ ID NO: 731278 - RNA, 17 nt, Artificial Sequence
  Synthetic
auguaguuuggaaugaa

SEQ ID NO: 731279 - RNA, 17 nt, Artificial Sequence
  Synthetic
aaugaagaaugaaugaa

SEQ ID NO: 731280 - RNA, 17 nt, Artificial Sequence
  Synthetic
uuuguagaaugaaugaa

SEQ ID NO: 731281 - RNA, 17 nt, Artificial Sequence
  Synthetic
auuaacacgugaaugaa

SEQ ID NO: 731282 - RNA, 17 nt, Artificial Sequence
  Synthetic
uuggauaaaauaaugaa

SEQ ID NO: 731283 - RNA, 17 nt, Artificial Sequence
  Synthetic
aaaggccagauaaugaa

SEQ ID NO: 731284 - RNA, 17 nt, Artificial Sequence
  Synthetic
cuaaaacauauaaugaa

SEQ ID NO: 731285 - RNA, 17 nt, Artificial Sequence
  Synthetic
ugaaagaaacuaaugaa

SEQ ID NO: 731286 - RNA, 17 nt, Artificial Sequence
  Synthetic
auuuggaaccuaaugaa

SEQ ID NO: 731287 - RNA, 17 nt, Artificial Sequence
  Synthetic
uauuugaaaguaaugaa

SEQ ID NO: 731288 - RNA, 17 nt, Artificial Sequence
  Synthetic
uguauguaaaacaugaa

SEQ ID NO: 731289 - RNA, 17 nt, Artificial Sequence
  Synthetic
agaaagagaaacaugaa

SEQ ID NO: 731290 - RNA, 17 nt, Artificial Sequence
  Synthetic
uagaaguacaacaugaa

SEQ ID NO: 731291 - RNA, 17 nt, Artificial Sequence
  Synthetic
cuauuucccaacaugaa

SEQ ID NO: 731292 - RNA, 17 nt, Artificial Sequence
  Synthetic
aauuaauuuaacaugaa

SEQ ID NO: 731293 - RNA, 17 nt, Artificial Sequence
  Synthetic
auaaaguuuaacaugaa

SEQ ID NO: 731294 - RNA, 17 nt, Artificial Sequence
  Synthetic
aguguuuuuaacaugaa

SEQ ID NO: 731295 - RNA, 17 nt, Artificial Sequence
  Synthetic
acuggagaagacaugaa

SEQ ID NO: 731296 - RNA, 17 nt, Artificial Sequence
  Synthetic
uauuuuuaggacaugaa

SEQ ID NO: 731297 - RNA, 17 nt, Artificial Sequence
  Synthetic
ugauacagauacaugaa

SEQ ID NO: 731298 - RNA, 17 nt, Artificial Sequence
  Synthetic
uuuuccuuguacaugaa

SEQ ID NO: 731299 - RNA, 17 nt, Artificial Sequence
  Synthetic
cucuguuaaaccaugaa

SEQ ID NO: 731300 - RNA, 17 nt, Artificial Sequence
  Synthetic
uugcccuucaccaugaa

SEQ ID NO: 731301 - RNA, 17 nt, Artificial Sequence
  Synthetic
acgguauuuaccaugaa

SEQ ID NO: 731302 - RNA, 17 nt, Artificial Sequence
  Synthetic
cggagugagagcaugaa

SEQ ID NO: 731303 - RNA, 17 nt, Artificial Sequence
  Synthetic
aguuucuuuagcaugaa

SEQ ID NO: 731304 - RNA, 17 nt, Artificial Sequence
  Synthetic
agaguuuuuagcaugaa

SEQ ID NO: 731305 - RNA, 17 nt, Artificial Sequence
  Synthetic
ugaacaaaaugcaugaa

SEQ ID NO: 731306 - RNA, 17 nt, Artificial Sequence
  Synthetic
uguaaaguuugcaugaa

SEQ ID NO: 731307 - RNA, 17 nt, Artificial Sequence
  Synthetic
auagguaccaucaugaa

SEQ ID NO: 731308 - RNA, 17 nt, Artificial Sequence
  Synthetic
uuuaaauccaucaugaa

SEQ ID NO: 731309 - RNA, 17 nt, Artificial Sequence
  Synthetic
auaguuuuuaucaugaa

SEQ ID NO: 731310 - RNA, 17 nt, Artificial Sequence
  Synthetic
aauggaaagcucaugaa

SEQ ID NO: 731311 - RNA, 17 nt, Artificial Sequence
  Synthetic
uguggauuucucaugaa

SEQ ID NO: 731312 - RNA, 17 nt, Artificial Sequence
  Synthetic
aaaaauggagucaugaa

SEQ ID NO: 731313 - RNA, 17 nt, Artificial Sequence
  Synthetic
agcugaaaauucaugaa

SEQ ID NO: 731314 - RNA, 17 nt, Artificial Sequence
  Synthetic
cugauacauuucaugaa

SEQ ID NO: 731315 - RNA, 17 nt, Artificial Sequence
  Synthetic
augggaccaaagaugaa

SEQ ID NO: 731316 - RNA, 17 nt, Artificial Sequence
  Synthetic
agccuaaccaagaugaa

SEQ ID NO: 731317 - RNA, 17 nt, Artificial Sequence
  Synthetic
ucuggaccuaagaugaa

SEQ ID NO: 731318 - RNA, 17 nt, Artificial Sequence
  Synthetic
acuaacuuuaagaugaa

SEQ ID NO: 731319 - RNA, 17 nt, Artificial Sequence
  Synthetic
augugucuucagaugaa

SEQ ID NO: 731320 - RNA, 17 nt, Artificial Sequence
  Synthetic
agggaaaaagagaugaa

SEQ ID NO: 731321 - RNA, 17 nt, Artificial Sequence
  Synthetic
cugagcccagagaugaa

SEQ ID NO: 731322 - RNA, 17 nt, Artificial Sequence
  Synthetic
aagugccaggagaugaa

SEQ ID NO: 731323 - RNA, 17 nt, Artificial Sequence
  Synthetic
cuccagucauagaugaa

SEQ ID NO: 731324 - RNA, 17 nt, Artificial Sequence
  Synthetic
uaccuaauguagaugaa

SEQ ID NO: 731325 - RNA, 17 nt, Artificial Sequence
  Synthetic
uuaguaaauuagaugaa

SEQ ID NO: 731326 - RNA, 17 nt, Artificial Sequence
  Synthetic
cuagagaacaggaugaa

SEQ ID NO: 731327 - RNA, 17 nt, Artificial Sequence
  Synthetic
cucugcuggaggaugaa

SEQ ID NO: 731328 - RNA, 17 nt, Artificial Sequence
  Synthetic
auguuuuggaggaugaa

SEQ ID NO: 731329 - RNA, 17 nt, Artificial Sequence
  Synthetic
aaaauuuauaggaugaa

SEQ ID NO: 731330 - RNA, 17 nt, Artificial Sequence
  Synthetic
cguauggaggggaugaa

SEQ ID NO: 731331 - RNA, 17 nt, Artificial Sequence
  Synthetic
aauagguuugggaugaa

SEQ ID NO: 731332 - RNA, 17 nt, Artificial Sequence
  Synthetic
aguagguuugggaugaa

SEQ ID NO: 731333 - RNA, 17 nt, Artificial Sequence
  Synthetic
auuaauggauggaugaa

SEQ ID NO: 731334 - RNA, 17 nt, Artificial Sequence
  Synthetic
cugcuuaaguggaugaa

SEQ ID NO: 731335 - RNA, 17 nt, Artificial Sequence
  Synthetic
uuccaucaguggaugaa

SEQ ID NO: 731336 - RNA, 17 nt, Artificial Sequence
  Synthetic
ucuaaccuuuggaugaa

SEQ ID NO: 731337 - RNA, 17 nt, Artificial Sequence
  Synthetic
uugguuguuaugaugaa

SEQ ID NO: 731338 - RNA, 17 nt, Artificial Sequence
  Synthetic
uauaaaaugcugaugaa

SEQ ID NO: 731339 - RNA, 17 nt, Artificial Sequence
  Synthetic
ccagguuugcugaugaa

SEQ ID NO: 731340 - RNA, 17 nt, Artificial Sequence
  Synthetic
uucucuugcuugaugaa

SEQ ID NO: 731341 - RNA, 17 nt, Artificial Sequence
  Synthetic
aaguugugguugaugaa

SEQ ID NO: 731342 - RNA, 17 nt, Artificial Sequence
  Synthetic
uuaauccuuuugaugaa

SEQ ID NO: 731343 - RNA, 17 nt, Artificial Sequence
  Synthetic
aaaugaguuuugaugaa

SEQ ID NO: 731344 - RNA, 17 nt, Artificial Sequence
  Synthetic
aaguuuacaaauaugaa

SEQ ID NO: 731345 - RNA, 17 nt, Artificial Sequence
  Synthetic
agaugggagaauaugaa

SEQ ID NO: 731346 - RNA, 17 nt, Artificial Sequence
  Synthetic
aaacuucaacauaugaa

SEQ ID NO: 731347 - RNA, 17 nt, Artificial Sequence
  Synthetic
uucccauuauauaugaa

SEQ ID NO: 731348 - RNA, 17 nt, Artificial Sequence
  Synthetic
agguauugguauaugaa

SEQ ID NO: 731349 - RNA, 17 nt, Artificial Sequence
  Synthetic
auuuuagauuauaugaa

SEQ ID NO: 731350 - RNA, 17 nt, Artificial Sequence
  Synthetic
ccauggguuuauaugaa

SEQ ID NO: 731351 - RNA, 17 nt, Artificial Sequence
  Synthetic
auuucaaagucuaugaa

SEQ ID NO: 731352 - RNA, 17 nt, Artificial Sequence
  Synthetic
uuaugacuuucuaugaa

SEQ ID NO: 731353 - RNA, 17 nt, Artificial Sequence
  Synthetic
aaaaguaccaguaugaa

SEQ ID NO: 731354 - RNA, 17 nt, Artificial Sequence
  Synthetic
auaauagccaguaugaa

SEQ ID NO: 731355 - RNA, 17 nt, Artificial Sequence
  Synthetic
cauguagcuaguaugaa

SEQ ID NO: 731356 - RNA, 17 nt, Artificial Sequence
  Synthetic
cuuuuugaacguaugaa

SEQ ID NO: 731357 - RNA, 17 nt, Artificial Sequence
  Synthetic
uauagaaagcguaugaa

SEQ ID NO: 731358 - RNA, 17 nt, Artificial Sequence
  Synthetic
aaaauggaggguaugaa

SEQ ID NO: 731359 - RNA, 17 nt, Artificial Sequence
  Synthetic
uuggucaaguguaugaa

SEQ ID NO: 731360 - RNA, 17 nt, Artificial Sequence
  Synthetic
auuaucagaauuaugaa

SEQ ID NO: 731361 - RNA, 17 nt, Artificial Sequence
  Synthetic
uaauaaagcauuaugaa

SEQ ID NO: 731362 - RNA, 17 nt, Artificial Sequence
  Synthetic
aaagggaggauuaugaa

SEQ ID NO: 731363 - RNA, 17 nt, Artificial Sequence
  Synthetic
cagcaucaaguuaugaa

SEQ ID NO: 731364 - RNA, 17 nt, Artificial Sequence
  Synthetic
cauuuaucaguuaugaa

SEQ ID NO: 731365 - RNA, 17 nt, Artificial Sequence
  Synthetic
accuauuaauuuaugaa

SEQ ID NO: 731366 - RNA, 17 nt, Artificial Sequence
  Synthetic
aauauauguuuuaugaa

SEQ ID NO: 731367 - RNA, 17 nt, Artificial Sequence
  Synthetic
uguuuacgaaaacugaa

SEQ ID NO: 731368 - RNA, 17 nt, Artificial Sequence
  Synthetic
uugcccugaaaacugaa

SEQ ID NO: 731369 - RNA, 17 nt, Artificial Sequence
  Synthetic
caauuaaugaaacugaa

SEQ ID NO: 731370 - RNA, 17 nt, Artificial Sequence
  Synthetic
ucuuucaaacaacugaa

SEQ ID NO: 731371 - RNA, 17 nt, Artificial Sequence
  Synthetic
uaacaacugcaacugaa

SEQ ID NO: 731372 - RNA, 17 nt, Artificial Sequence
  Synthetic
ccuguucaucaacugaa

SEQ ID NO: 731373 - RNA, 17 nt, Artificial Sequence
  Synthetic
agauugugauaacugaa

SEQ ID NO: 731374 - RNA, 17 nt, Artificial Sequence
  Synthetic
aaaggagaguaacugaa

SEQ ID NO: 731375 - RNA, 17 nt, Artificial Sequence
  Synthetic
cugaagguguaacugaa

SEQ ID NO: 731376 - RNA, 17 nt, Artificial Sequence
  Synthetic
uaaaagacuuaacugaa

SEQ ID NO: 731377 - RNA, 17 nt, Artificial Sequence
  Synthetic
auaauuuccacacugaa

SEQ ID NO: 731378 - RNA, 17 nt, Artificial Sequence
  Synthetic
uaggccaggccacugaa

SEQ ID NO: 731379 - RNA, 17 nt, Artificial Sequence
  Synthetic
aaugggaauccacugaa

SEQ ID NO: 731380 - RNA, 17 nt, Artificial Sequence
  Synthetic
aaaaguacuccacugaa

SEQ ID NO: 731381 - RNA, 17 nt, Artificial Sequence
  Synthetic
agauguugggcacugaa

SEQ ID NO: 731382 - RNA, 17 nt, Artificial Sequence
  Synthetic
aguuucaaaucacugaa

SEQ ID NO: 731383 - RNA, 17 nt, Artificial Sequence
  Synthetic
uuccuauuuucacugaa

SEQ ID NO: 731384 - RNA, 17 nt, Artificial Sequence
  Synthetic
aauaaauuaagacugaa

SEQ ID NO: 731385 - RNA, 17 nt, Artificial Sequence
  Synthetic
ugcucuauacgacugaa

SEQ ID NO: 731386 - RNA, 17 nt, Artificial Sequence
  Synthetic
uuaagggcaggacugaa

SEQ ID NO: 731387 - RNA, 17 nt, Artificial Sequence
  Synthetic
agcugggcaugacugaa

SEQ ID NO: 731388 - RNA, 17 nt, Artificial Sequence
  Synthetic
cuuaaagggugacugaa

SEQ ID NO: 731389 - RNA, 17 nt, Artificial Sequence
  Synthetic
aauaccaagcuacugaa

SEQ ID NO: 731390 - RNA, 17 nt, Artificial Sequence
  Synthetic
agcaagaaucuacugaa

SEQ ID NO: 731391 - RNA, 17 nt, Artificial Sequence
  Synthetic
aauuggcagguacugaa

SEQ ID NO: 731392 - RNA, 17 nt, Artificial Sequence
  Synthetic
ucuaaacucuuacugaa

SEQ ID NO: 731393 - RNA, 17 nt, Artificial Sequence
  Synthetic
uuuccuguuuuacugaa

SEQ ID NO: 731394 - RNA, 17 nt, Artificial Sequence
  Synthetic
agcucuggaaaccugaa

SEQ ID NO: 731395 - RNA, 17 nt, Artificial Sequence
  Synthetic
aaucgcuugaaccugaa

SEQ ID NO: 731396 - RNA, 17 nt, Artificial Sequence
  Synthetic
aucuagcauaaccugaa

SEQ ID NO: 731397 - RNA, 17 nt, Artificial Sequence
  Synthetic
cucuguuuggaccugaa

SEQ ID NO: 731398 - RNA, 17 nt, Artificial Sequence
  Synthetic
aacguccaaucccugaa

SEQ ID NO: 731399 - RNA, 17 nt, Artificial Sequence
  Synthetic
cuuaagaacucccugaa

SEQ ID NO: 731400 - RNA, 17 nt, Artificial Sequence
  Synthetic
cucaggcagucccugaa

SEQ ID NO: 731401 - RNA, 17 nt, Artificial Sequence
  Synthetic
ccaccauugucccugaa

SEQ ID NO: 731402 - RNA, 17 nt, Artificial Sequence
  Synthetic
ccuccucaaggccugaa

SEQ ID NO: 731403 - RNA, 17 nt, Artificial Sequence
  Synthetic
aaauucauaggccugaa

SEQ ID NO: 731404 - RNA, 17 nt, Artificial Sequence
  Synthetic
aagucuaugggccugaa

SEQ ID NO: 731405 - RNA, 17 nt, Artificial Sequence
  Synthetic
caugccuauauccugaa

SEQ ID NO: 731406 - RNA, 17 nt, Artificial Sequence
  Synthetic
caugccuguauccugaa

SEQ ID NO: 731407 - RNA, 17 nt, Artificial Sequence
  Synthetic
caugccuacguccugaa

SEQ ID NO: 731408 - RNA, 17 nt, Artificial Sequence
  Synthetic
cacgccuauguccugaa

SEQ ID NO: 731409 - RNA, 17 nt, Artificial Sequence
  Synthetic
caugccuauguccugaa

SEQ ID NO: 731410 - RNA, 17 nt, Artificial Sequence
  Synthetic
cguacuuguguccugaa

SEQ ID NO: 731411 - RNA, 17 nt, Artificial Sequence
  Synthetic
caugccuuuguccugaa

SEQ ID NO: 731412 - RNA, 17 nt, Artificial Sequence
  Synthetic
cucuucacaaagcugaa

SEQ ID NO: 731413 - RNA, 17 nt, Artificial Sequence
  Synthetic
cugagacucaagcugaa

SEQ ID NO: 731414 - RNA, 17 nt, Artificial Sequence
  Synthetic
ugacaugggaagcugaa

SEQ ID NO: 731415 - RNA, 17 nt, Artificial Sequence
  Synthetic
acaguauuuaagcugaa

SEQ ID NO: 731416 - RNA, 17 nt, Artificial Sequence
  Synthetic
aauacugcacagcugaa

SEQ ID NO: 731417 - RNA, 17 nt, Artificial Sequence
  Synthetic
caaauuucagagcugaa

SEQ ID NO: 731418 - RNA, 17 nt, Artificial Sequence
  Synthetic
aaguguuaaaggcugaa

SEQ ID NO: 731419 - RNA, 17 nt, Artificial Sequence
  Synthetic
ugauuaagaaggcugaa

SEQ ID NO: 731420 - RNA, 17 nt, Artificial Sequence
  Synthetic
aaaaaaagauggcugaa

SEQ ID NO: 731421 - RNA, 17 nt, Artificial Sequence
  Synthetic
uucaguuucuggcugaa

SEQ ID NO: 731422 - RNA, 17 nt, Artificial Sequence
  Synthetic
cuagggaaaaugcugaa

SEQ ID NO: 731423 - RNA, 17 nt, Artificial Sequence
  Synthetic
uauucugaaaugcugaa

SEQ ID NO: 731424 - RNA, 17 nt, Artificial Sequence
  Synthetic
uugcacugaaugcugaa

SEQ ID NO: 731425 - RNA, 17 nt, Artificial Sequence
  Synthetic
cacccucacaugcugaa

SEQ ID NO: 731426 - RNA, 17 nt, Artificial Sequence
  Synthetic
cccaaaccuaugcugaa

SEQ ID NO: 731427 - RNA, 17 nt, Artificial Sequence
  Synthetic
agagaagcaaaucugaa

SEQ ID NO: 731428 - RNA, 17 nt, Artificial Sequence
  Synthetic
acauuuaagaaucugaa

SEQ ID NO: 731429 - RNA, 17 nt, Artificial Sequence
  Synthetic
aagaccuauaaucugaa

SEQ ID NO: 731430 - RNA, 17 nt, Artificial Sequence
  Synthetic
agcacuuuuaaucugaa

SEQ ID NO: 731431 - RNA, 17 nt, Artificial Sequence
  Synthetic
cuuugccuucaucugaa

SEQ ID NO: 731432 - RNA, 17 nt, Artificial Sequence
  Synthetic
acauuaagggaucugaa

SEQ ID NO: 731433 - RNA, 17 nt, Artificial Sequence
  Synthetic
aaaauggagacucugaa

SEQ ID NO: 731434 - RNA, 17 nt, Artificial Sequence
  Synthetic
cucaggacuacucugaa

SEQ ID NO: 731435 - RNA, 17 nt, Artificial Sequence
  Synthetic
uaaaacuuuacucugaa

SEQ ID NO: 731436 - RNA, 17 nt, Artificial Sequence
  Synthetic
aauauaaaugcucugaa

SEQ ID NO: 731437 - RNA, 17 nt, Artificial Sequence
  Synthetic
uaccaaaagagucugaa

SEQ ID NO: 731438 - RNA, 17 nt, Artificial Sequence
  Synthetic
uagauacagugucugaa

SEQ ID NO: 731439 - RNA, 17 nt, Artificial Sequence
  Synthetic
aagaacgauugucugaa

SEQ ID NO: 731440 - RNA, 17 nt, Artificial Sequence
  Synthetic
ugcaacuguugucugaa

SEQ ID NO: 731441 - RNA, 17 nt, Artificial Sequence
  Synthetic
cucaggacaauucugaa

SEQ ID NO: 731442 - RNA, 17 nt, Artificial Sequence
  Synthetic
cuauguaacauucugaa

SEQ ID NO: 731443 - RNA, 17 nt, Artificial Sequence
  Synthetic
agcauauacauucugaa

SEQ ID NO: 731444 - RNA, 17 nt, Artificial Sequence
  Synthetic
ucccaacucauucugaa

SEQ ID NO: 731445 - RNA, 17 nt, Artificial Sequence
  Synthetic
ccaucucucauucugaa

SEQ ID NO: 731446 - RNA, 17 nt, Artificial Sequence
  Synthetic
cuguagaauauucugaa

SEQ ID NO: 731447 - RNA, 17 nt, Artificial Sequence
  Synthetic
cuugaggguauucugaa

SEQ ID NO: 731448 - RNA, 17 nt, Artificial Sequence
  Synthetic
uuccuagcacuucugaa

SEQ ID NO: 731449 - RNA, 17 nt, Artificial Sequence
  Synthetic
aaagaucagguucugaa

SEQ ID NO: 731450 - RNA, 17 nt, Artificial Sequence
  Synthetic
ucauugauguuucugaa

SEQ ID NO: 731451 - RNA, 17 nt, Artificial Sequence
  Synthetic
agauccuguuuucugaa

SEQ ID NO: 731452 - RNA, 17 nt, Artificial Sequence
  Synthetic
uacauuuuuuuucugaa

SEQ ID NO: 731453 - RNA, 17 nt, Artificial Sequence
  Synthetic
aucacuacaaaagugaa

SEQ ID NO: 731454 - RNA, 17 nt, Artificial Sequence
  Synthetic
cguaacauaaaagugaa

SEQ ID NO: 731455 - RNA, 17 nt, Artificial Sequence
  Synthetic
uuagccaugaaagugaa

SEQ ID NO: 731456 - RNA, 17 nt, Artificial Sequence
  Synthetic
uggcuugugaaagugaa

SEQ ID NO: 731457 - RNA, 17 nt, Artificial Sequence
  Synthetic
auaguguuacaagugaa

SEQ ID NO: 731458 - RNA, 17 nt, Artificial Sequence
  Synthetic
aaaagcuuucaagugaa

SEQ ID NO: 731459 - RNA, 17 nt, Artificial Sequence
  Synthetic
ugucauacugaagugaa

SEQ ID NO: 731460 - RNA, 17 nt, Artificial Sequence
  Synthetic
uauauucgugaagugaa

SEQ ID NO: 731461 - RNA, 17 nt, Artificial Sequence
  Synthetic
augaauaaguaagugaa

SEQ ID NO: 731462 - RNA, 17 nt, Artificial Sequence
  Synthetic
aaaaaaaauuaagugaa

SEQ ID NO: 731463 - RNA, 17 nt, Artificial Sequence
  Synthetic
aauaaugguuaagugaa

SEQ ID NO: 731464 - RNA, 17 nt, Artificial Sequence
  Synthetic
uagaaaaagacagugaa

SEQ ID NO: 731465 - RNA, 17 nt, Artificial Sequence
  Synthetic
cauuagacagcagugaa

SEQ ID NO: 731466 - RNA, 17 nt, Artificial Sequence
  Synthetic
agugacucaucagugaa

SEQ ID NO: 731467 - RNA, 17 nt, Artificial Sequence
  Synthetic
uaaagcucaagagugaa

SEQ ID NO: 731468 - RNA, 17 nt, Artificial Sequence
  Synthetic
cuuuccaggggagugaa

SEQ ID NO: 731469 - RNA, 17 nt, Artificial Sequence
  Synthetic
agcugaagaugagugaa

SEQ ID NO: 731470 - RNA, 17 nt, Artificial Sequence
  Synthetic
uuaucaaagugagugaa

SEQ ID NO: 731471 - RNA, 17 nt, Artificial Sequence
  Synthetic
aaaccguguugagugaa

SEQ ID NO: 731472 - RNA, 17 nt, Artificial Sequence
  Synthetic
uuuuuguauauagugaa

SEQ ID NO: 731473 - RNA, 17 nt, Artificial Sequence
  Synthetic
agucuaaagcuagugaa

SEQ ID NO: 731474 - RNA, 17 nt, Artificial Sequence
  Synthetic
aaucauuuauuagugaa

SEQ ID NO: 731475 - RNA, 17 nt, Artificial Sequence
  Synthetic
uuacuucaucucgugaa

SEQ ID NO: 731476 - RNA, 17 nt, Artificial Sequence
  Synthetic
ugggaggccaaggugaa

SEQ ID NO: 731477 - RNA, 17 nt, Artificial Sequence
  Synthetic
ucauggcagaaggugaa

SEQ ID NO: 731478 - RNA, 17 nt, Artificial Sequence
  Synthetic
ucauaguagaaggugaa

SEQ ID NO: 731479 - RNA, 17 nt, Artificial Sequence
  Synthetic
ucaugguggaaggugaa

SEQ ID NO: 731480 - RNA, 17 nt, Artificial Sequence
  Synthetic
aaaccuaguaaggugaa

SEQ ID NO: 731481 - RNA, 17 nt, Artificial Sequence
  Synthetic
aaaugccagcaggugaa

SEQ ID NO: 731482 - RNA, 17 nt, Artificial Sequence
  Synthetic
aaucuccagcaggugaa

SEQ ID NO: 731483 - RNA, 17 nt, Artificial Sequence
  Synthetic
agaacugaagaggugaa

SEQ ID NO: 731484 - RNA, 17 nt, Artificial Sequence
  Synthetic
ugggaggccgaggugaa

SEQ ID NO: 731485 - RNA, 17 nt, Artificial Sequence
  Synthetic
ucauggugggaggugaa

SEQ ID NO: 731486 - RNA, 17 nt, Artificial Sequence
  Synthetic
auuauaagcagggugaa

SEQ ID NO: 731487 - RNA, 17 nt, Artificial Sequence
  Synthetic
uuucccuacggggugaa

SEQ ID NO: 731488 - RNA, 17 nt, Artificial Sequence
  Synthetic
cuuccauucauggugaa

SEQ ID NO: 731489 - RNA, 17 nt, Artificial Sequence
  Synthetic
aaaaugaugauggugaa

SEQ ID NO: 731490 - RNA, 17 nt, Artificial Sequence
  Synthetic
aaauagcagcuggugaa

SEQ ID NO: 731491 - RNA, 17 nt, Artificial Sequence
  Synthetic
uauaacauucuggugaa

SEQ ID NO: 731492 - RNA, 17 nt, Artificial Sequence
  Synthetic
uugaaacaaguggugaa

SEQ ID NO: 731493 - RNA, 17 nt, Artificial Sequence
  Synthetic
uccaucagcuuggugaa

SEQ ID NO: 731494 - RNA, 17 nt, Artificial Sequence
  Synthetic
auucauauguuggugaa

SEQ ID NO: 731495 - RNA, 17 nt, Artificial Sequence
  Synthetic
cuccacucuuuggugaa

SEQ ID NO: 731496 - RNA, 17 nt, Artificial Sequence
  Synthetic
uuuguaaguuuggugaa

SEQ ID NO: 731497 - RNA, 17 nt, Artificial Sequence
  Synthetic
ugguuuugaaaugugaa

SEQ ID NO: 731498 - RNA, 17 nt, Artificial Sequence
  Synthetic
aaaauucagaaugugaa

SEQ ID NO: 731499 - RNA, 17 nt, Artificial Sequence
  Synthetic
augauucauaaugugaa

SEQ ID NO: 731500 - RNA, 17 nt, Artificial Sequence
  Synthetic
uguaaaauuaaugugaa

SEQ ID NO: 731501 - RNA, 17 nt, Artificial Sequence
  Synthetic
cuugcaagggaugugaa

SEQ ID NO: 731502 - RNA, 17 nt, Artificial Sequence
  Synthetic
acuacuagggaugugaa

SEQ ID NO: 731503 - RNA, 17 nt, Artificial Sequence
  Synthetic
uaccucauggaugugaa

SEQ ID NO: 731504 - RNA, 17 nt, Artificial Sequence
  Synthetic
cuuuuccuggaugugaa

SEQ ID NO: 731505 - RNA, 17 nt, Artificial Sequence
  Synthetic
acaacucaugaugugaa

SEQ ID NO: 731506 - RNA, 17 nt, Artificial Sequence
  Synthetic
aaaugucuugaugugaa

SEQ ID NO: 731507 - RNA, 17 nt, Artificial Sequence
  Synthetic
ugguguguguaugugaa

SEQ ID NO: 731508 - RNA, 17 nt, Artificial Sequence
  Synthetic
aagagugugacugugaa

SEQ ID NO: 731509 - RNA, 17 nt, Artificial Sequence
  Synthetic
uuugagauuacugugaa

SEQ ID NO: 731510 - RNA, 17 nt, Artificial Sequence
  Synthetic
agaaguuuuacugugaa

SEQ ID NO: 731511 - RNA, 17 nt, Artificial Sequence
  Synthetic
uuaccagaggcugugaa

SEQ ID NO: 731512 - RNA, 17 nt, Artificial Sequence
  Synthetic
aaauucagaagugugaa

SEQ ID NO: 731513 - RNA, 17 nt, Artificial Sequence
  Synthetic
agggggaggggugugaa

SEQ ID NO: 731514 - RNA, 17 nt, Artificial Sequence
  Synthetic
auaugcacgugugugaa

SEQ ID NO: 731515 - RNA, 17 nt, Artificial Sequence
  Synthetic
uuugaagcaauugugaa

SEQ ID NO: 731516 - RNA, 17 nt, Artificial Sequence
  Synthetic
ugcagaaccauugugaa

SEQ ID NO: 731517 - RNA, 17 nt, Artificial Sequence
  Synthetic
uaaaauaagauugugaa

SEQ ID NO: 731518 - RNA, 17 nt, Artificial Sequence
  Synthetic
agggccuggauugugaa

SEQ ID NO: 731519 - RNA, 17 nt, Artificial Sequence
  Synthetic
uccuaauauuuugugaa

SEQ ID NO: 731520 - RNA, 17 nt, Artificial Sequence
  Synthetic
ucuauuagcaaauugaa

SEQ ID NO: 731521 - RNA, 17 nt, Artificial Sequence
  Synthetic
cacugagcauaauugaa

SEQ ID NO: 731522 - RNA, 17 nt, Artificial Sequence
  Synthetic
aaugcauacuaauugaa

SEQ ID NO: 731523 - RNA, 17 nt, Artificial Sequence
  Synthetic
aguagggaaacauugaa

SEQ ID NO: 731524 - RNA, 17 nt, Artificial Sequence
  Synthetic
augguuuacacauugaa

SEQ ID NO: 731525 - RNA, 17 nt, Artificial Sequence
  Synthetic
aauagcaaaccauugaa

SEQ ID NO: 731526 - RNA, 17 nt, Artificial Sequence
  Synthetic
cccccuuagucauugaa

SEQ ID NO: 731527 - RNA, 17 nt, Artificial Sequence
  Synthetic
uugcagcaaagauugaa

SEQ ID NO: 731528 - RNA, 17 nt, Artificial Sequence
  Synthetic
uagaaauacagauugaa

SEQ ID NO: 731529 - RNA, 17 nt, Artificial Sequence
  Synthetic
uuuuacgucagauugaa

SEQ ID NO: 731530 - RNA, 17 nt, Artificial Sequence
  Synthetic
ugggaagagggauugaa

SEQ ID NO: 731531 - RNA, 17 nt, Artificial Sequence
  Synthetic
uuuucaguuggauugaa

SEQ ID NO: 731532 - RNA, 17 nt, Artificial Sequence
  Synthetic
acgaaacaaugauugaa

SEQ ID NO: 731533 - RNA, 17 nt, Artificial Sequence
  Synthetic
caauguggaauauugaa

SEQ ID NO: 731534 - RNA, 17 nt, Artificial Sequence
  Synthetic
aauauaaauauauugaa

SEQ ID NO: 731535 - RNA, 17 nt, Artificial Sequence
  Synthetic
cucaacaguauauugaa

SEQ ID NO: 731536 - RNA, 17 nt, Artificial Sequence
  Synthetic
aaauauagcguauugaa

SEQ ID NO: 731537 - RNA, 17 nt, Artificial Sequence
  Synthetic
aguugguggguauugaa

SEQ ID NO: 731538 - RNA, 17 nt, Artificial Sequence
  Synthetic
aaaagaaugguauugaa

SEQ ID NO: 731539 - RNA, 17 nt, Artificial Sequence
  Synthetic
agaaacugauuauugaa

SEQ ID NO: 731540 - RNA, 17 nt, Artificial Sequence
  Synthetic
aacuaucauuuauugaa

SEQ ID NO: 731541 - RNA, 17 nt, Artificial Sequence
  Synthetic
acaaguucuuuauugaa

SEQ ID NO: 731542 - RNA, 17 nt, Artificial Sequence
  Synthetic
caacaacuaaacuugaa

SEQ ID NO: 731543 - RNA, 17 nt, Artificial Sequence
  Synthetic
uuuugcagcaacuugaa

SEQ ID NO: 731544 - RNA, 17 nt, Artificial Sequence
  Synthetic
cagcagagacacuugaa

SEQ ID NO: 731545 - RNA, 17 nt, Artificial Sequence
  Synthetic
uauuuucaccacuugaa

SEQ ID NO: 731546 - RNA, 17 nt, Artificial Sequence
  Synthetic
auuaaaauagacuugaa

SEQ ID NO: 731547 - RNA, 17 nt, Artificial Sequence
  Synthetic
uucuagaaugacuugaa

SEQ ID NO: 731548 - RNA, 17 nt, Artificial Sequence
  Synthetic
cauucuaauuacuugaa

SEQ ID NO: 731549 - RNA, 17 nt, Artificial Sequence
  Synthetic
aacuuauguuacuugaa

SEQ ID NO: 731550 - RNA, 17 nt, Artificial Sequence
  Synthetic
cuguuuuguuacuugaa

SEQ ID NO: 731551 - RNA, 17 nt, Artificial Sequence
  Synthetic
uaacucagaaccuugaa

SEQ ID NO: 731552 - RNA, 17 nt, Artificial Sequence
  Synthetic
acuuuaguaaccuugaa

SEQ ID NO: 731553 - RNA, 17 nt, Artificial Sequence
  Synthetic
uucauuuucgccuugaa

SEQ ID NO: 731554 - RNA, 17 nt, Artificial Sequence
  Synthetic
uauaugagcuccuugaa

SEQ ID NO: 731555 - RNA, 17 nt, Artificial Sequence
  Synthetic
cuccagaucuccuugaa

SEQ ID NO: 731556 - RNA, 17 nt, Artificial Sequence
  Synthetic
uauuuuucaagcuugaa

SEQ ID NO: 731557 - RNA, 17 nt, Artificial Sequence
  Synthetic
auaaauaugcgcuugaa

SEQ ID NO: 731558 - RNA, 17 nt, Artificial Sequence
  Synthetic
aagcacaaaugcuugaa

SEQ ID NO: 731559 - RNA, 17 nt, Artificial Sequence
  Synthetic
aaggagaaaugcuugaa

SEQ ID NO: 731560 - RNA, 17 nt, Artificial Sequence
  Synthetic
ucacagugaugcuugaa

SEQ ID NO: 731561 - RNA, 17 nt, Artificial Sequence
  Synthetic
agauacuauugcuugaa

SEQ ID NO: 731562 - RNA, 17 nt, Artificial Sequence
  Synthetic
aaaucaaacaucuugaa

SEQ ID NO: 731563 - RNA, 17 nt, Artificial Sequence
  Synthetic
uggcugugucucuugaa

SEQ ID NO: 731564 - RNA, 17 nt, Artificial Sequence
  Synthetic
uugcaaacugucuugaa

SEQ ID NO: 731565 - RNA, 17 nt, Artificial Sequence
  Synthetic
aaaauuuguuucuugaa

SEQ ID NO: 731566 - RNA, 17 nt, Artificial Sequence
  Synthetic
agauaaugaaaguugaa

SEQ ID NO: 731567 - RNA, 17 nt, Artificial Sequence
  Synthetic
agcauuuuggaguugaa

SEQ ID NO: 731568 - RNA, 17 nt, Artificial Sequence
  Synthetic
auucucuacuaguugaa

SEQ ID NO: 731569 - RNA, 17 nt, Artificial Sequence
  Synthetic
aacaaaaaaccguugaa

SEQ ID NO: 731570 - RNA, 17 nt, Artificial Sequence
  Synthetic
cagguacugccguugaa

SEQ ID NO: 731571 - RNA, 17 nt, Artificial Sequence
  Synthetic
auuuuuuaaucguugaa

SEQ ID NO: 731572 - RNA, 17 nt, Artificial Sequence
  Synthetic
aaaaacacaagguugaa

SEQ ID NO: 731573 - RNA, 17 nt, Artificial Sequence
  Synthetic
uuaaaaaaaugguugaa

SEQ ID NO: 731574 - RNA, 17 nt, Artificial Sequence
  Synthetic
acuaggagcugguugaa

SEQ ID NO: 731575 - RNA, 17 nt, Artificial Sequence
  Synthetic
uaucuggaaauguugaa

SEQ ID NO: 731576 - RNA, 17 nt, Artificial Sequence
  Synthetic
uuucaucccauguugaa

SEQ ID NO: 731577 - RNA, 17 nt, Artificial Sequence
  Synthetic
ccauccaggauguugaa

SEQ ID NO: 731578 - RNA, 17 nt, Artificial Sequence
  Synthetic
ccauauuuucuguugaa

SEQ ID NO: 731579 - RNA, 17 nt, Artificial Sequence
  Synthetic
acaaaaagaguguugaa

SEQ ID NO: 731580 - RNA, 17 nt, Artificial Sequence
  Synthetic
uaaaugcgaguguugaa

SEQ ID NO: 731581 - RNA, 17 nt, Artificial Sequence
  Synthetic
uuguagucauuguugaa

SEQ ID NO: 731582 - RNA, 17 nt, Artificial Sequence
  Synthetic
ccuagagacuuguugaa

SEQ ID NO: 731583 - RNA, 17 nt, Artificial Sequence
  Synthetic
aguaaauaguuguugaa

SEQ ID NO: 731584 - RNA, 17 nt, Artificial Sequence
  Synthetic
uauuuuucuuuguugaa

SEQ ID NO: 731585 - RNA, 17 nt, Artificial Sequence
  Synthetic
auagguuaaaauuugaa

SEQ ID NO: 731586 - RNA, 17 nt, Artificial Sequence
  Synthetic
acaucucuaaauuugaa

SEQ ID NO: 731587 - RNA, 17 nt, Artificial Sequence
  Synthetic
cuuuuugaauauuugaa

SEQ ID NO: 731588 - RNA, 17 nt, Artificial Sequence
  Synthetic
aacacauuuuauuugaa

SEQ ID NO: 731589 - RNA, 17 nt, Artificial Sequence
  Synthetic
caccaacuuacuuugaa

SEQ ID NO: 731590 - RNA, 17 nt, Artificial Sequence
  Synthetic
aaucaggaaccuuugaa

SEQ ID NO: 731591 - RNA, 17 nt, Artificial Sequence
  Synthetic
aguucauguccuuugaa

SEQ ID NO: 731592 - RNA, 17 nt, Artificial Sequence
  Synthetic
uguuuauguccuuugaa

SEQ ID NO: 731593 - RNA, 17 nt, Artificial Sequence
  Synthetic
aggaacauuccuuugaa

SEQ ID NO: 731594 - RNA, 17 nt, Artificial Sequence
  Synthetic
acaacuacugcuuugaa

SEQ ID NO: 731595 - RNA, 17 nt, Artificial Sequence
  Synthetic
aagagucuuucuuugaa

SEQ ID NO: 731596 - RNA, 17 nt, Artificial Sequence
  Synthetic
aaaguguuuucuuugaa

SEQ ID NO: 731597 - RNA, 17 nt, Artificial Sequence
  Synthetic
agccuuuuuucuuugaa

SEQ ID NO: 731598 - RNA, 17 nt, Artificial Sequence
  Synthetic
agcaggacaaguuugaa

SEQ ID NO: 731599 - RNA, 17 nt, Artificial Sequence
  Synthetic
uaaauacuaaguuugaa

SEQ ID NO: 731600 - RNA, 17 nt, Artificial Sequence
  Synthetic
auaaaauagaguuugaa

SEQ ID NO: 731601 - RNA, 17 nt, Artificial Sequence
  Synthetic
aagugggaguguuugaa

SEQ ID NO: 731602 - RNA, 17 nt, Artificial Sequence
  Synthetic
ccauauuaaauuuugaa

SEQ ID NO: 731603 - RNA, 17 nt, Artificial Sequence
  Synthetic
ucacuaauaauuuugaa

SEQ ID NO: 731604 - RNA, 17 nt, Artificial Sequence
  Synthetic
uccaaaaauauuuugaa

SEQ ID NO: 731605 - RNA, 17 nt, Artificial Sequence
  Synthetic
ucuaucggucuuuugaa

SEQ ID NO: 731606 - RNA, 17 nt, Artificial Sequence
  Synthetic
uuagccauucuuuugaa

SEQ ID NO: 731607 - RNA, 17 nt, Artificial Sequence
  Synthetic
cucaggauucuuuugaa

SEQ ID NO: 731608 - RNA, 17 nt, Artificial Sequence
  Synthetic
auucguuuucuuuugaa

SEQ ID NO: 731609 - RNA, 17 nt, Artificial Sequence
  Synthetic
uauuggaggguuuugaa

SEQ ID NO: 731610 - RNA, 17 nt, Artificial Sequence
  Synthetic
aguuuaccuguuuugaa

SEQ ID NO: 731611 - RNA, 17 nt, Artificial Sequence
  Synthetic
cuuccuccuguuuugaa

SEQ ID NO: 731612 - RNA, 17 nt, Artificial Sequence
  Synthetic
aaaauguacuuuuugaa

SEQ ID NO: 731613 - RNA, 17 nt, Artificial Sequence
  Synthetic
uggcuaugcuuuuugaa

SEQ ID NO: 731614 - RNA, 17 nt, Artificial Sequence
  Synthetic
cuauugauguuuuugaa

SEQ ID NO: 731615 - RNA, 17 nt, Artificial Sequence
  Synthetic
caaagaguguuuuugaa

SEQ ID NO: 731616 - RNA, 17 nt, Artificial Sequence
  Synthetic
uucauugauuuuuugaa

SEQ ID NO: 731617 - RNA, 17 nt, Artificial Sequence
  Synthetic
ucauugacuuuuuugaa

SEQ ID NO: 731618 - RNA, 17 nt, Artificial Sequence
  Synthetic
ucauugauuuuuuugaa

SEQ ID NO: 731619 - RNA, 17 nt, Artificial Sequence
  Synthetic
uuugggaaaaaaaauaa

SEQ ID NO: 731620 - RNA, 17 nt, Artificial Sequence
  Synthetic
aaaugugcaaaaaauaa

SEQ ID NO: 731621 - RNA, 17 nt, Artificial Sequence
  Synthetic
cauagucuaaaaaauaa

SEQ ID NO: 731622 - RNA, 17 nt, Artificial Sequence
  Synthetic
auuaauuuaaaaaauaa

SEQ ID NO: 731623 - RNA, 17 nt, Artificial Sequence
  Synthetic
acugaugucaaaaauaa

SEQ ID NO: 731624 - RNA, 17 nt, Artificial Sequence
  Synthetic
uuacuuuucaaaaauaa

SEQ ID NO: 731625 - RNA, 17 nt, Artificial Sequence
  Synthetic
auaagaaagaaaaauaa

SEQ ID NO: 731626 - RNA, 17 nt, Artificial Sequence
  Synthetic
agccaugagaaaaauaa

SEQ ID NO: 731627 - RNA, 17 nt, Artificial Sequence
  Synthetic
cguuucaauaaaaauaa

SEQ ID NO: 731628 - RNA, 17 nt, Artificial Sequence
  Synthetic
uaauaaauacaaaauaa

SEQ ID NO: 731629 - RNA, 17 nt, Artificial Sequence
  Synthetic
aaaguuuuccaaaauaa

SEQ ID NO: 731630 - RNA, 17 nt, Artificial Sequence
  Synthetic
acauaggcucaaaauaa

SEQ ID NO: 731631 - RNA, 17 nt, Artificial Sequence
  Synthetic
uguguguuucaaaauaa

SEQ ID NO: 731632 - RNA, 17 nt, Artificial Sequence
  Synthetic
cuuuucuaagaaaauaa

SEQ ID NO: 731633 - RNA, 17 nt, Artificial Sequence
  Synthetic
uguaagacagaaaauaa

SEQ ID NO: 731634 - RNA, 17 nt, Artificial Sequence
  Synthetic
cugccauuagaaaauaa

SEQ ID NO: 731635 - RNA, 17 nt, Artificial Sequence
  Synthetic
agaugaaaggaaaauaa

SEQ ID NO: 731636 - RNA, 17 nt, Artificial Sequence
  Synthetic
aggauaacugaaaauaa

SEQ ID NO: 731637 - RNA, 17 nt, Artificial Sequence
  Synthetic
ucuuguucugaaaauaa

SEQ ID NO: 731638 - RNA, 17 nt, Artificial Sequence
  Synthetic
caacaaugugaaaauaa

SEQ ID NO: 731639 - RNA, 17 nt, Artificial Sequence
  Synthetic
aaaaaaaaauaaaauaa

SEQ ID NO: 731640 - RNA, 17 nt, Artificial Sequence
  Synthetic
ugguaaaaauaaaauaa

SEQ ID NO: 731641 - RNA, 17 nt, Artificial Sequence
  Synthetic
aauauuucauaaaauaa

SEQ ID NO: 731642 - RNA, 17 nt, Artificial Sequence
  Synthetic
uaggcuugauaaaauaa

SEQ ID NO: 731643 - RNA, 17 nt, Artificial Sequence
  Synthetic
uaguauugcuaaaauaa

SEQ ID NO: 731644 - RNA, 17 nt, Artificial Sequence
  Synthetic
accagccaguaaaauaa

SEQ ID NO: 731645 - RNA, 17 nt, Artificial Sequence
  Synthetic
aaucugcauuaaaauaa

SEQ ID NO: 731646 - RNA, 17 nt, Artificial Sequence
  Synthetic
uuuagcauuuaaaauaa

SEQ ID NO: 731647 - RNA, 17 nt, Artificial Sequence
  Synthetic
uuuuuguuuuaaaauaa

SEQ ID NO: 731648 - RNA, 17 nt, Artificial Sequence
  Synthetic
aacauuuaaacaaauaa

SEQ ID NO: 731649 - RNA, 17 nt, Artificial Sequence
  Synthetic
uaucaaccaacaaauaa

SEQ ID NO: 731650 - RNA, 17 nt, Artificial Sequence
  Synthetic
ucauugagaacaaauaa

SEQ ID NO: 731651 - RNA, 17 nt, Artificial Sequence
  Synthetic
uuaaggaauacaaauaa

SEQ ID NO: 731652 - RNA, 17 nt, Artificial Sequence
  Synthetic
cucaugaauacaaauaa

SEQ ID NO: 731653 - RNA, 17 nt, Artificial Sequence
  Synthetic
agaaaacauccaaauaa

SEQ ID NO: 731654 - RNA, 17 nt, Artificial Sequence
  Synthetic
cauuagguuccaaauaa

SEQ ID NO: 731655 - RNA, 17 nt, Artificial Sequence
  Synthetic
aacuugagagcaaauaa

SEQ ID NO: 731656 - RNA, 17 nt, Artificial Sequence
  Synthetic
acuuuucccucaaauaa

SEQ ID NO: 731657 - RNA, 17 nt, Artificial Sequence
  Synthetic
uauuacuaaagaaauaa

SEQ ID NO: 731658 - RNA, 17 nt, Artificial Sequence
  Synthetic
auuauuugaagaaauaa

SEQ ID NO: 731659 - RNA, 17 nt, Artificial Sequence
  Synthetic
auucaaaugagaaauaa

SEQ ID NO: 731660 - RNA, 17 nt, Artificial Sequence
  Synthetic
agaacggugagaaauaa

SEQ ID NO: 731661 - RNA, 17 nt, Artificial Sequence
  Synthetic
auaacaaaaggaaauaa

SEQ ID NO: 731662 - RNA, 17 nt, Artificial Sequence
  Synthetic
cauaaggaaggaaauaa

SEQ ID NO: 731663 - RNA, 17 nt, Artificial Sequence
  Synthetic
acacagacuggaaauaa

SEQ ID NO: 731664 - RNA, 17 nt, Artificial Sequence
  Synthetic
agaggggcuggaaauaa

SEQ ID NO: 731665 - RNA, 17 nt, Artificial Sequence
  Synthetic
uucuagguaugaaauaa

SEQ ID NO: 731666 - RNA, 17 nt, Artificial Sequence
  Synthetic
auguuugccugaaauaa

SEQ ID NO: 731667 - RNA, 17 nt, Artificial Sequence
  Synthetic
aaugacuggugaaauaa

SEQ ID NO: 731668 - RNA, 17 nt, Artificial Sequence
  Synthetic
aacauacauugaaauaa

SEQ ID NO: 731669 - RNA, 17 nt, Artificial Sequence
  Synthetic
ucaacaucaauaaauaa

SEQ ID NO: 731670 - RNA, 17 nt, Artificial Sequence
  Synthetic
aucuacugaauaaauaa

SEQ ID NO: 731671 - RNA, 17 nt, Artificial Sequence
  Synthetic
agacaauaccuaaauaa

SEQ ID NO: 731672 - RNA, 17 nt, Artificial Sequence
  Synthetic
uaguaagugcuaaauaa

SEQ ID NO: 731673 - RNA, 17 nt, Artificial Sequence
  Synthetic
ucucauuugguaaauaa

SEQ ID NO: 731674 - RNA, 17 nt, Artificial Sequence
  Synthetic
ucucaguauguaaauaa

SEQ ID NO: 731675 - RNA, 17 nt, Artificial Sequence
  Synthetic
cagaaauuuguaaauaa

SEQ ID NO: 731676 - RNA, 17 nt, Artificial Sequence
  Synthetic
acauaaaaauuaaauaa

SEQ ID NO: 731677 - RNA, 17 nt, Artificial Sequence
  Synthetic
cucaaaagauuaaauaa

SEQ ID NO: 731678 - RNA, 17 nt, Artificial Sequence
  Synthetic
acaagaguuuuaaauaa

SEQ ID NO: 731679 - RNA, 17 nt, Artificial Sequence
  Synthetic
uaauuauuuuuaaauaa

SEQ ID NO: 731680 - RNA, 17 nt, Artificial Sequence
  Synthetic
caauacuaaaacaauaa

SEQ ID NO: 731681 - RNA, 17 nt, Artificial Sequence
  Synthetic
auucauauaaacaauaa

SEQ ID NO: 731682 - RNA, 17 nt, Artificial Sequence
  Synthetic
ugggaaguaaacaauaa

SEQ ID NO: 731683 - RNA, 17 nt, Artificial Sequence
  Synthetic
uccuaauaacacaauaa

SEQ ID NO: 731684 - RNA, 17 nt, Artificial Sequence
  Synthetic
cuuggaaaccacaauaa

SEQ ID NO: 731685 - RNA, 17 nt, Artificial Sequence
  Synthetic
ugacugaggcacaauaa

SEQ ID NO: 731686 - RNA, 17 nt, Artificial Sequence
  Synthetic
ucaaaggaugacaauaa

SEQ ID NO: 731687 - RNA, 17 nt, Artificial Sequence
  Synthetic
uauccuuacuacaauaa

SEQ ID NO: 731688 - RNA, 17 nt, Artificial Sequence
  Synthetic
caagacucaaccaauaa

SEQ ID NO: 731689 - RNA, 17 nt, Artificial Sequence
  Synthetic
ugggaaccucccaauaa

SEQ ID NO: 731690 - RNA, 17 nt, Artificial Sequence
  Synthetic
cagcauccaagcaauaa

SEQ ID NO: 731691 - RNA, 17 nt, Artificial Sequence
  Synthetic
auauuaaucaucaauaa

SEQ ID NO: 731692 - RNA, 17 nt, Artificial Sequence
  Synthetic
uuuucuauacucaauaa

SEQ ID NO: 731693 - RNA, 17 nt, Artificial Sequence
  Synthetic
auccucaaauucaauaa

SEQ ID NO: 731694 - RNA, 17 nt, Artificial Sequence
  Synthetic
ucaacacucuucaauaa

SEQ ID NO: 731695 - RNA, 17 nt, Artificial Sequence
  Synthetic
cuauuuuuuuucaauaa

SEQ ID NO: 731696 - RNA, 17 nt, Artificial Sequence
  Synthetic
agaucagagaagaauaa

SEQ ID NO: 731697 - RNA, 17 nt, Artificial Sequence
  Synthetic
aacuagguuaagaauaa

SEQ ID NO: 731698 - RNA, 17 nt, Artificial Sequence
  Synthetic
uaaaaguaucagaauaa

SEQ ID NO: 731699 - RNA, 17 nt, Artificial Sequence
  Synthetic
aggaacagcgagaauaa

SEQ ID NO: 731700 - RNA, 17 nt, Artificial Sequence
  Synthetic
ccauaucaauagaauaa

SEQ ID NO: 731701 - RNA, 17 nt, Artificial Sequence
  Synthetic
uaauucacuuagaauaa

SEQ ID NO: 731702 - RNA, 17 nt, Artificial Sequence
  Synthetic
uacuucacuuagaauaa

SEQ ID NO: 731703 - RNA, 17 nt, Artificial Sequence
  Synthetic
uuuaauucaaggaauaa

SEQ ID NO: 731704 - RNA, 17 nt, Artificial Sequence
  Synthetic
acuugcgucaggaauaa

SEQ ID NO: 731705 - RNA, 17 nt, Artificial Sequence
  Synthetic
cugaggugagggaauaa

SEQ ID NO: 731706 - RNA, 17 nt, Artificial Sequence
  Synthetic
uauuguuuagggaauaa

SEQ ID NO: 731707 - RNA, 17 nt, Artificial Sequence
  Synthetic
aacucaagauggaauaa

SEQ ID NO: 731708 - RNA, 17 nt, Artificial Sequence
  Synthetic
aaagaaguauggaauaa

SEQ ID NO: 731709 - RNA, 17 nt, Artificial Sequence
  Synthetic
acagacaaguggaauaa

SEQ ID NO: 731710 - RNA, 17 nt, Artificial Sequence
  Synthetic
uuguucucaaugaauaa

SEQ ID NO: 731711 - RNA, 17 nt, Artificial Sequence
  Synthetic
uuggcuauaaugaauaa

SEQ ID NO: 731712 - RNA, 17 nt, Artificial Sequence
  Synthetic
aagaaguauaugaauaa

SEQ ID NO: 731713 - RNA, 17 nt, Artificial Sequence
  Synthetic
caugaaucuaugaauaa

SEQ ID NO: 731714 - RNA, 17 nt, Artificial Sequence
  Synthetic
aaguacuuucugaauaa

SEQ ID NO: 731715 - RNA, 17 nt, Artificial Sequence
  Synthetic
cugggaaaggugaauaa

SEQ ID NO: 731716 - RNA, 17 nt, Artificial Sequence
  Synthetic
ccuuacagggugaauaa

SEQ ID NO: 731717 - RNA, 17 nt, Artificial Sequence
  Synthetic
aauugcuacuugaauaa

SEQ ID NO: 731718 - RNA, 17 nt, Artificial Sequence
  Synthetic
ucucauuuguugaauaa

SEQ ID NO: 731719 - RNA, 17 nt, Artificial Sequence
  Synthetic
aauuauaaaaauaauaa

SEQ ID NO: 731720 - RNA, 17 nt, Artificial Sequence
  Synthetic
agacuacaaaauaauaa

SEQ ID NO: 731721 - RNA, 17 nt, Artificial Sequence
  Synthetic
acacuuacaaauaauaa

SEQ ID NO: 731722 - RNA, 17 nt, Artificial Sequence
  Synthetic
ccuuugagaaauaauaa

SEQ ID NO: 731723 - RNA, 17 nt, Artificial Sequence
  Synthetic
uaugcaggaaauaauaa

SEQ ID NO: 731724 - RNA, 17 nt, Artificial Sequence
  Synthetic
aguaacaacaauaauaa

SEQ ID NO: 731725 - RNA, 17 nt, Artificial Sequence
  Synthetic
cucugcaucaauaauaa

SEQ ID NO: 731726 - RNA, 17 nt, Artificial Sequence
  Synthetic
uugaaguagaauaauaa

SEQ ID NO: 731727 - RNA, 17 nt, Artificial Sequence
  Synthetic
aaaaaaaauaauaauaa

SEQ ID NO: 731728 - RNA, 17 nt, Artificial Sequence
  Synthetic
aaauuagaucauaauaa

SEQ ID NO: 731729 - RNA, 17 nt, Artificial Sequence
  Synthetic
augagagcauauaauaa

SEQ ID NO: 731730 - RNA, 17 nt, Artificial Sequence
  Synthetic
auacaaaagacuaauaa

SEQ ID NO: 731731 - RNA, 17 nt, Artificial Sequence
  Synthetic
aauggcauuacuaauaa

SEQ ID NO: 731732 - RNA, 17 nt, Artificial Sequence
  Synthetic
agccauacuccuaauaa

SEQ ID NO: 731733 - RNA, 17 nt, Artificial Sequence
  Synthetic
uuccuuguagcuaauaa

SEQ ID NO: 731734 - RNA, 17 nt, Artificial Sequence
  Synthetic
cauuauguggcuaauaa

SEQ ID NO: 731735 - RNA, 17 nt, Artificial Sequence
  Synthetic
caccuuugugcuaauaa

SEQ ID NO: 731736 - RNA, 17 nt, Artificial Sequence
  Synthetic
uuguguuuaucuaauaa

SEQ ID NO: 731737 - RNA, 17 nt, Artificial Sequence
  Synthetic
aacuaaagaaguaauaa

SEQ ID NO: 731738 - RNA, 17 nt, Artificial Sequence
  Synthetic
uagauguuggguaauaa

SEQ ID NO: 731739 - RNA, 17 nt, Artificial Sequence
  Synthetic
uuuuagugugguaauaa

SEQ ID NO: 731740 - RNA, 17 nt, Artificial Sequence
  Synthetic
aggccccaauguaauaa

SEQ ID NO: 731741 - RNA, 17 nt, Artificial Sequence
  Synthetic
agcaugcacuguaauaa

SEQ ID NO: 731742 - RNA, 17 nt, Artificial Sequence
  Synthetic
acuguuggcuguaauaa

SEQ ID NO: 731743 - RNA, 17 nt, Artificial Sequence
  Synthetic
aauacggaguguaauaa

SEQ ID NO: 731744 - RNA, 17 nt, Artificial Sequence
  Synthetic
aagacguauuguaauaa

SEQ ID NO: 731745 - RNA, 17 nt, Artificial Sequence
  Synthetic
aauaauaaaauuaauaa

SEQ ID NO: 731746 - RNA, 17 nt, Artificial Sequence
  Synthetic
cucccacacauuaauaa

SEQ ID NO: 731747 - RNA, 17 nt, Artificial Sequence
  Synthetic
cuuccacaucuuaauaa

SEQ ID NO: 731748 - RNA, 17 nt, Artificial Sequence
  Synthetic
aacaucuaaguuaauaa

SEQ ID NO: 731749 - RNA, 17 nt, Artificial Sequence
  Synthetic
agccauuuauuuaauaa

SEQ ID NO: 731750 - RNA, 17 nt, Artificial Sequence
  Synthetic
cacaccaaguuuaauaa

SEQ ID NO: 731751 - RNA, 17 nt, Artificial Sequence
  Synthetic
acuuaaguguuuaauaa

SEQ ID NO: 731752 - RNA, 17 nt, Artificial Sequence
  Synthetic
uagcauaauuuuaauaa

SEQ ID NO: 731753 - RNA, 17 nt, Artificial Sequence
  Synthetic
augcuguguuuuaauaa

SEQ ID NO: 731754 - RNA, 17 nt, Artificial Sequence
  Synthetic
uuuuuuuuuuuuaauaa

SEQ ID NO: 731755 - RNA, 17 nt, Artificial Sequence
  Synthetic
uccucguaaaaacauaa

SEQ ID NO: 731756 - RNA, 17 nt, Artificial Sequence
  Synthetic
cauagaagaaaacauaa

SEQ ID NO: 731757 - RNA, 17 nt, Artificial Sequence
  Synthetic
aaaucuuccaaacauaa

SEQ ID NO: 731758 - RNA, 17 nt, Artificial Sequence
  Synthetic
uauuaagaacaacauaa

SEQ ID NO: 731759 - RNA, 17 nt, Artificial Sequence
  Synthetic
ucaccuuuucaacauaa

SEQ ID NO: 731760 - RNA, 17 nt, Artificial Sequence
  Synthetic
uaaauuuuagaacauaa

SEQ ID NO: 731761 - RNA, 17 nt, Artificial Sequence
  Synthetic
acacuucuguaacauaa

SEQ ID NO: 731762 - RNA, 17 nt, Artificial Sequence
  Synthetic
caguauguuuaacauaa

SEQ ID NO: 731763 - RNA, 17 nt, Artificial Sequence
  Synthetic
acuaaauuaacacauaa

SEQ ID NO: 731764 - RNA, 17 nt, Artificial Sequence
  Synthetic
uuggaauacacacauaa

SEQ ID NO: 731765 - RNA, 17 nt, Artificial Sequence
  Synthetic
caaauaccuacacauaa

SEQ ID NO: 731766 - RNA, 17 nt, Artificial Sequence
  Synthetic
uaagggauaccacauaa

SEQ ID NO: 731767 - RNA, 17 nt, Artificial Sequence
  Synthetic
agaagaaugccacauaa

SEQ ID NO: 731768 - RNA, 17 nt, Artificial Sequence
  Synthetic
uggcaaacagcacauaa

SEQ ID NO: 731769 - RNA, 17 nt, Artificial Sequence
  Synthetic
uuacagcaugcacauaa

SEQ ID NO: 731770 - RNA, 17 nt, Artificial Sequence
  Synthetic
uuucuaucaucacauaa

SEQ ID NO: 731771 - RNA, 17 nt, Artificial Sequence
  Synthetic
cuuauucccucacauaa

SEQ ID NO: 731772 - RNA, 17 nt, Artificial Sequence
  Synthetic
cacacacaaagacauaa

SEQ ID NO: 731773 - RNA, 17 nt, Artificial Sequence
  Synthetic
cuguagagcagacauaa

SEQ ID NO: 731774 - RNA, 17 nt, Artificial Sequence
  Synthetic
uaugaauagggacauaa

SEQ ID NO: 731775 - RNA, 17 nt, Artificial Sequence
  Synthetic
acaagcaaccuacauaa

SEQ ID NO: 731776 - RNA, 17 nt, Artificial Sequence
  Synthetic
uucugccugguacauaa

SEQ ID NO: 731777 - RNA, 17 nt, Artificial Sequence
  Synthetic
agaaggccauuacauaa

SEQ ID NO: 731778 - RNA, 17 nt, Artificial Sequence
  Synthetic
aaaaugguauuacauaa

SEQ ID NO: 731779 - RNA, 17 nt, Artificial Sequence
  Synthetic
auauauguaaaccauaa

SEQ ID NO: 731780 - RNA, 17 nt, Artificial Sequence
  Synthetic
agauuuuaugaccauaa

SEQ ID NO: 731781 - RNA, 17 nt, Artificial Sequence
  Synthetic
uucauauaguaccauaa

SEQ ID NO: 731782 - RNA, 17 nt, Artificial Sequence
  Synthetic
cucucucccucccauaa

SEQ ID NO: 731783 - RNA, 17 nt, Artificial Sequence
  Synthetic
aaaagcauuagccauaa

SEQ ID NO: 731784 - RNA, 17 nt, Artificial Sequence
  Synthetic
uugugcucuggccauaa

SEQ ID NO: 731785 - RNA, 17 nt, Artificial Sequence
  Synthetic
cauaccguccuccauaa

SEQ ID NO: 731786 - RNA, 17 nt, Artificial Sequence
  Synthetic
cauacuguucuccauaa

SEQ ID NO: 731787 - RNA, 17 nt, Artificial Sequence
  Synthetic
uaaugccauuuccauaa

SEQ ID NO: 731788 - RNA, 17 nt, Artificial Sequence
  Synthetic
uaugguauuuuccauaa

SEQ ID NO: 731789 - RNA, 17 nt, Artificial Sequence
  Synthetic
aaugaauaaaagcauaa

SEQ ID NO: 731790 - RNA, 17 nt, Artificial Sequence
  Synthetic
aacugaccaaagcauaa

SEQ ID NO: 731791 - RNA, 17 nt, Artificial Sequence
  Synthetic
uucuucucaaagcauaa

SEQ ID NO: 731792 - RNA, 17 nt, Artificial Sequence
  Synthetic
agcuaaagggagcauaa

SEQ ID NO: 731793 - RNA, 17 nt, Artificial Sequence
  Synthetic
caagagagggagcauaa

SEQ ID NO: 731794 - RNA, 17 nt, Artificial Sequence
  Synthetic
cagcuaugugagcauaa

SEQ ID NO: 731795 - RNA, 17 nt, Artificial Sequence
  Synthetic
aaauaauaugggcauaa

SEQ ID NO: 731796 - RNA, 17 nt, Artificial Sequence
  Synthetic
aaugguuaaaugcauaa

SEQ ID NO: 731797 - RNA, 17 nt, Artificial Sequence
  Synthetic
uggaauacuaugcauaa

SEQ ID NO: 731798 - RNA, 17 nt, Artificial Sequence
  Synthetic
ccaccaacagugcauaa

SEQ ID NO: 731799 - RNA, 17 nt, Artificial Sequence
  Synthetic
cuaguuugugugcauaa

SEQ ID NO: 731800 - RNA, 17 nt, Artificial Sequence
  Synthetic
ugaaaucacuugcauaa

SEQ ID NO: 731801 - RNA, 17 nt, Artificial Sequence
  Synthetic
aauuaccaaaaucauaa

SEQ ID NO: 731802 - RNA, 17 nt, Artificial Sequence
  Synthetic
agguaauggaaucauaa

SEQ ID NO: 731803 - RNA, 17 nt, Artificial Sequence
  Synthetic
ucacccaauaaucauaa

SEQ ID NO: 731804 - RNA, 17 nt, Artificial Sequence
  Synthetic
ucuaugcaacaucauaa

SEQ ID NO: 731805 - RNA, 17 nt, Artificial Sequence
  Synthetic
cuuuaugaacaucauaa

SEQ ID NO: 731806 - RNA, 17 nt, Artificial Sequence
  Synthetic
uacauucaccaucauaa

SEQ ID NO: 731807 - RNA, 17 nt, Artificial Sequence
  Synthetic
aacuaauuccaucauaa

SEQ ID NO: 731808 - RNA, 17 nt, Artificial Sequence
  Synthetic
aggaaccuucaucauaa

SEQ ID NO: 731809 - RNA, 17 nt, Artificial Sequence
  Synthetic
aagcaacuggaucauaa

SEQ ID NO: 731810 - RNA, 17 nt, Artificial Sequence
  Synthetic
ccaaguucuuaucauaa

SEQ ID NO: 731811 - RNA, 17 nt, Artificial Sequence
  Synthetic
uccauucuuuaucauaa

SEQ ID NO: 731812 - RNA, 17 nt, Artificial Sequence
  Synthetic
uacuuuccaacucauaa

SEQ ID NO: 731813 - RNA, 17 nt, Artificial Sequence
  Synthetic
ucugaucuuacucauaa

SEQ ID NO: 731814 - RNA, 17 nt, Artificial Sequence
  Synthetic
uauccauuaccucauaa

SEQ ID NO: 731815 - RNA, 17 nt, Artificial Sequence
  Synthetic
cccagaaaaagucauaa

SEQ ID NO: 731816 - RNA, 17 nt, Artificial Sequence
  Synthetic
auuugccagggucauaa

SEQ ID NO: 731817 - RNA, 17 nt, Artificial Sequence
  Synthetic
caggguaaaugucauaa

SEQ ID NO: 731818 - RNA, 17 nt, Artificial Sequence
  Synthetic
aaugcuacuauucauaa

SEQ ID NO: 731819 - RNA, 17 nt, Artificial Sequence
  Synthetic
uuaauacuacuucauaa

SEQ ID NO: 731820 - RNA, 17 nt, Artificial Sequence
  Synthetic
caguaaaugguucauaa

SEQ ID NO: 731821 - RNA, 17 nt, Artificial Sequence
  Synthetic
cuuuaugauguucauaa

SEQ ID NO: 731822 - RNA, 17 nt, Artificial Sequence
  Synthetic
uaauaggaguuucauaa

SEQ ID NO: 731823 - RNA, 17 nt, Artificial Sequence
  Synthetic
agcugaugguuucauaa

SEQ ID NO: 731824 - RNA, 17 nt, Artificial Sequence
  Synthetic
uggaauguuuuucauaa

SEQ ID NO: 731825 - RNA, 17 nt, Artificial Sequence
  Synthetic
uauugauuuuuucauaa

SEQ ID NO: 731826 - RNA, 17 nt, Artificial Sequence
  Synthetic
auucuucuaaaagauaa

SEQ ID NO: 731827 - RNA, 17 nt, Artificial Sequence
  Synthetic
auuuccgagaaagauaa

SEQ ID NO: 731828 - RNA, 17 nt, Artificial Sequence
  Synthetic
ugggaaguccaagauaa

SEQ ID NO: 731829 - RNA, 17 nt, Artificial Sequence
  Synthetic
cuagaaauucaagauaa

SEQ ID NO: 731830 - RNA, 17 nt, Artificial Sequence
  Synthetic
uauccaaaagaagauaa

SEQ ID NO: 731831 - RNA, 17 nt, Artificial Sequence
  Synthetic
uuuucacgagaagauaa

SEQ ID NO: 731832 - RNA, 17 nt, Artificial Sequence
  Synthetic
aauaaaagugaagauaa

SEQ ID NO: 731833 - RNA, 17 nt, Artificial Sequence
  Synthetic
ugguguaaauaagauaa

SEQ ID NO: 731834 - RNA, 17 nt, Artificial Sequence
  Synthetic
cagguuuucuaagauaa

SEQ ID NO: 731835 - RNA, 17 nt, Artificial Sequence
  Synthetic
agaaaugcguaagauaa

SEQ ID NO: 731836 - RNA, 17 nt, Artificial Sequence
  Synthetic
cuucucuauuaagauaa

SEQ ID NO: 731837 - RNA, 17 nt, Artificial Sequence
  Synthetic
ccuuuugcuuaagauaa

SEQ ID NO: 731838 - RNA, 17 nt, Artificial Sequence
  Synthetic
uaaucaguuuaagauaa

SEQ ID NO: 731839 - RNA, 17 nt, Artificial Sequence
  Synthetic
acugaacaaacagauaa

SEQ ID NO: 731840 - RNA, 17 nt, Artificial Sequence
  Synthetic
cuuuaucugacagauaa

SEQ ID NO: 731841 - RNA, 17 nt, Artificial Sequence
  Synthetic
agaaauuaaccagauaa

SEQ ID NO: 731842 - RNA, 17 nt, Artificial Sequence
  Synthetic
uuuauucacccagauaa

SEQ ID NO: 731843 - RNA, 17 nt, Artificial Sequence
  Synthetic
agaaauuauccagauaa

SEQ ID NO: 731844 - RNA, 17 nt, Artificial Sequence
  Synthetic
aguuguccugcagauaa

SEQ ID NO: 731845 - RNA, 17 nt, Artificial Sequence
  Synthetic
cuauauaccucagauaa

SEQ ID NO: 731846 - RNA, 17 nt, Artificial Sequence
  Synthetic
uggucuuucucagauaa

SEQ ID NO: 731847 - RNA, 17 nt, Artificial Sequence
  Synthetic
uucaagggaagagauaa

SEQ ID NO: 731848 - RNA, 17 nt, Artificial Sequence
  Synthetic
agacuuauucgagauaa

SEQ ID NO: 731849 - RNA, 17 nt, Artificial Sequence
  Synthetic
aaaaucagaggagauaa

SEQ ID NO: 731850 - RNA, 17 nt, Artificial Sequence
  Synthetic
ucaagucaaugagauaa

SEQ ID NO: 731851 - RNA, 17 nt, Artificial Sequence
  Synthetic
uauaaggggugagauaa

SEQ ID NO: 731852 - RNA, 17 nt, Artificial Sequence
  Synthetic
accaauguuugagauaa

SEQ ID NO: 731853 - RNA, 17 nt, Artificial Sequence
  Synthetic
auuguccuaauagauaa

SEQ ID NO: 731854 - RNA, 17 nt, Artificial Sequence
  Synthetic
aaaugucagcuagauaa

SEQ ID NO: 731855 - RNA, 17 nt, Artificial Sequence
  Synthetic
caucugagauuagauaa

SEQ ID NO: 731856 - RNA, 17 nt, Artificial Sequence
  Synthetic
agacacugguuagauaa

SEQ ID NO: 731857 - RNA, 17 nt, Artificial Sequence
  Synthetic
caguaccuguuagauaa

SEQ ID NO: 731858 - RNA, 17 nt, Artificial Sequence
  Synthetic
aaccauuuuuuagauaa

SEQ ID NO: 731859 - RNA, 17 nt, Artificial Sequence
  Synthetic
uugcuuaaacacgauaa

SEQ ID NO: 731860 - RNA, 17 nt, Artificial Sequence
  Synthetic
uugaggugagacgauaa

SEQ ID NO: 731861 - RNA, 17 nt, Artificial Sequence
  Synthetic
uaauucauuuacgauaa

SEQ ID NO: 731862 - RNA, 17 nt, Artificial Sequence
  Synthetic
uuaagaaauaucgauaa

SEQ ID NO: 731863 - RNA, 17 nt, Artificial Sequence
  Synthetic
aaugguuaaaaggauaa

SEQ ID NO: 731864 - RNA, 17 nt, Artificial Sequence
  Synthetic
agaaagggaaaggauaa

SEQ ID NO: 731865 - RNA, 17 nt, Artificial Sequence
  Synthetic
uuccauuuaaaggauaa

SEQ ID NO: 731866 - RNA, 17 nt, Artificial Sequence
  Synthetic
ucagguaccaaggauaa

SEQ ID NO: 731867 - RNA, 17 nt, Artificial Sequence
  Synthetic
aaguuugcuaaggauaa

SEQ ID NO: 731868 - RNA, 17 nt, Artificial Sequence
  Synthetic
caagauuuuaaggauaa

SEQ ID NO: 731869 - RNA, 17 nt, Artificial Sequence
  Synthetic
aagaaucuccaggauaa

SEQ ID NO: 731870 - RNA, 17 nt, Artificial Sequence
  Synthetic
uaaucacaucaggauaa

SEQ ID NO: 731871 - RNA, 17 nt, Artificial Sequence
  Synthetic
aauaugcaucaggauaa

SEQ ID NO: 731872 - RNA, 17 nt, Artificial Sequence
  Synthetic
cuuguacuucaggauaa

SEQ ID NO: 731873 - RNA, 17 nt, Artificial Sequence
  Synthetic
cuucuccuucaggauaa

SEQ ID NO: 731874 - RNA, 17 nt, Artificial Sequence
  Synthetic
uguguuguggaggauaa

SEQ ID NO: 731875 - RNA, 17 nt, Artificial Sequence
  Synthetic
uaguuugcugaggauaa

SEQ ID NO: 731876 - RNA, 17 nt, Artificial Sequence
  Synthetic
uauuucaccuaggauaa

SEQ ID NO: 731877 - RNA, 17 nt, Artificial Sequence
  Synthetic
cccagauucuaggauaa

SEQ ID NO: 731878 - RNA, 17 nt, Artificial Sequence
  Synthetic
uaauuugcuuaggauaa

SEQ ID NO: 731879 - RNA, 17 nt, Artificial Sequence
  Synthetic
aacagacuggcggauaa

SEQ ID NO: 731880 - RNA, 17 nt, Artificial Sequence
  Synthetic
cacacauuuagggauaa

SEQ ID NO: 731881 - RNA, 17 nt, Artificial Sequence
  Synthetic
aaaaaugcaggggauaa

SEQ ID NO: 731882 - RNA, 17 nt, Artificial Sequence
  Synthetic
caaaagcugggggauaa

SEQ ID NO: 731883 - RNA, 17 nt, Artificial Sequence
  Synthetic
agagaaaguggggauaa

SEQ ID NO: 731884 - RNA, 17 nt, Artificial Sequence
  Synthetic
aauauaggaauggauaa

SEQ ID NO: 731885 - RNA, 17 nt, Artificial Sequence
  Synthetic
auugaagggauggauaa

SEQ ID NO: 731886 - RNA, 17 nt, Artificial Sequence
  Synthetic
ucaggaguacuggauaa

SEQ ID NO: 731887 - RNA, 17 nt, Artificial Sequence
  Synthetic
cuugauccccuggauaa

SEQ ID NO: 731888 - RNA, 17 nt, Artificial Sequence
  Synthetic
aaaucuccaguggauaa

SEQ ID NO: 731889 - RNA, 17 nt, Artificial Sequence
  Synthetic
uccuauguuguggauaa

SEQ ID NO: 731890 - RNA, 17 nt, Artificial Sequence
  Synthetic
cuggaugaauuggauaa

SEQ ID NO: 731891 - RNA, 17 nt, Artificial Sequence
  Synthetic
ccaaguguuuuggauaa

SEQ ID NO: 731892 - RNA, 17 nt, Artificial Sequence
  Synthetic
aguaaaaaaaaugauaa

SEQ ID NO: 731893 - RNA, 17 nt, Artificial Sequence
  Synthetic
acaagaaaaaaugauaa

SEQ ID NO: 731894 - RNA, 17 nt, Artificial Sequence
  Synthetic
acaauaaaaaaugauaa

SEQ ID NO: 731895 - RNA, 17 nt, Artificial Sequence
  Synthetic
uuugucaagaaugauaa

SEQ ID NO: 731896 - RNA, 17 nt, Artificial Sequence
  Synthetic
auggagaauaaugauaa

SEQ ID NO: 731897 - RNA, 17 nt, Artificial Sequence
  Synthetic
cuaaacucuaaugauaa

SEQ ID NO: 731898 - RNA, 17 nt, Artificial Sequence
  Synthetic
aaggcagaugaugauaa

SEQ ID NO: 731899 - RNA, 17 nt, Artificial Sequence
  Synthetic
aacccuugugaugauaa

SEQ ID NO: 731900 - RNA, 17 nt, Artificial Sequence
  Synthetic
ucuaucauugaugauaa

SEQ ID NO: 731901 - RNA, 17 nt, Artificial Sequence
  Synthetic
auucuuuccuaugauaa

SEQ ID NO: 731902 - RNA, 17 nt, Artificial Sequence
  Synthetic
augguuuucuaugauaa

SEQ ID NO: 731903 - RNA, 17 nt, Artificial Sequence
  Synthetic
cccauucaguaugauaa

SEQ ID NO: 731904 - RNA, 17 nt, Artificial Sequence
  Synthetic
ucaccuguuuaugauaa

SEQ ID NO: 731905 - RNA, 17 nt, Artificial Sequence
  Synthetic
cauguucucacugauaa

SEQ ID NO: 731906 - RNA, 17 nt, Artificial Sequence
  Synthetic
ccaucugcuccugauaa

SEQ ID NO: 731907 - RNA, 17 nt, Artificial Sequence
  Synthetic
aaguucacagcugauaa

SEQ ID NO: 731908 - RNA, 17 nt, Artificial Sequence
  Synthetic
aacaaaagggcugauaa

SEQ ID NO: 731909 - RNA, 17 nt, Artificial Sequence
  Synthetic
accuacucaucugauaa

SEQ ID NO: 731910 - RNA, 17 nt, Artificial Sequence
  Synthetic
auuauuucuucugauaa

SEQ ID NO: 731911 - RNA, 17 nt, Artificial Sequence
  Synthetic
ugacuucacagugauaa

SEQ ID NO: 731912 - RNA, 17 nt, Artificial Sequence
  Synthetic
auuuauuggugugauaa

SEQ ID NO: 731913 - RNA, 17 nt, Artificial Sequence
  Synthetic
cuuguuuaaauugauaa

SEQ ID NO: 731914 - RNA, 17 nt, Artificial Sequence
  Synthetic
accugaaucauugauaa

SEQ ID NO: 731915 - RNA, 17 nt, Artificial Sequence
  Synthetic
ucauuauauauugauaa

SEQ ID NO: 731916 - RNA, 17 nt, Artificial Sequence
  Synthetic
uuuggaagacuugauaa

SEQ ID NO: 731917 - RNA, 17 nt, Artificial Sequence
  Synthetic
ucccaaguacuugauaa

SEQ ID NO: 731918 - RNA, 17 nt, Artificial Sequence
  Synthetic
ucugggcagcuugauaa

SEQ ID NO: 731919 - RNA, 17 nt, Artificial Sequence
  Synthetic
aaagccaggcuugauaa

SEQ ID NO: 731920 - RNA, 17 nt, Artificial Sequence
  Synthetic
ccuaaaggaguugauaa

SEQ ID NO: 731921 - RNA, 17 nt, Artificial Sequence
  Synthetic
uauuuguugguugauaa

SEQ ID NO: 731922 - RNA, 17 nt, Artificial Sequence
  Synthetic
aaguagaucuuugauaa

SEQ ID NO: 731923 - RNA, 17 nt, Artificial Sequence
  Synthetic
cuaaucaaguuugauaa

SEQ ID NO: 731924 - RNA, 17 nt, Artificial Sequence
  Synthetic
aauuuaauuuuugauaa

SEQ ID NO: 731925 - RNA, 17 nt, Artificial Sequence
  Synthetic
auuuucauuuuugauaa

SEQ ID NO: 731926 - RNA, 17 nt, Artificial Sequence
  Synthetic
cagaauauaaaauauaa

SEQ ID NO: 731927 - RNA, 17 nt, Artificial Sequence
  Synthetic
uuagggguaaaauauaa

SEQ ID NO: 731928 - RNA, 17 nt, Artificial Sequence
  Synthetic
aaauaauucaaauauaa

SEQ ID NO: 731929 - RNA, 17 nt, Artificial Sequence
  Synthetic
cugcuggggaaauauaa

SEQ ID NO: 731930 - RNA, 17 nt, Artificial Sequence
  Synthetic
uaucacaugaaauauaa

SEQ ID NO: 731931 - RNA, 17 nt, Artificial Sequence
  Synthetic
cugugaaguaaauauaa

SEQ ID NO: 731932 - RNA, 17 nt, Artificial Sequence
  Synthetic
aaauaaguuaaauauaa

SEQ ID NO: 731933 - RNA, 17 nt, Artificial Sequence
  Synthetic
aaauuuugacaauauaa

SEQ ID NO: 731934 - RNA, 17 nt, Artificial Sequence
  Synthetic
ccugaaggucaauauaa

SEQ ID NO: 731935 - RNA, 17 nt, Artificial Sequence
  Synthetic
uuagacaaagaauauaa

SEQ ID NO: 731936 - RNA, 17 nt, Artificial Sequence
  Synthetic
cuugugauagaauauaa

SEQ ID NO: 731937 - RNA, 17 nt, Artificial Sequence
  Synthetic
aagcaugccuaauauaa

SEQ ID NO: 731938 - RNA, 17 nt, Artificial Sequence
  Synthetic
cauuaacauacauauaa

SEQ ID NO: 731939 - RNA, 17 nt, Artificial Sequence
  Synthetic
uuuggacguacauauaa

SEQ ID NO: 731940 - RNA, 17 nt, Artificial Sequence
  Synthetic
aaaaucacuccauauaa

SEQ ID NO: 731941 - RNA, 17 nt, Artificial Sequence
  Synthetic
auuuuauaagcauauaa

SEQ ID NO: 731942 - RNA, 17 nt, Artificial Sequence
  Synthetic
ccuaauuuagcauauaa

SEQ ID NO: 731943 - RNA, 17 nt, Artificial Sequence
  Synthetic
uuaaauggaagauauaa

SEQ ID NO: 731944 - RNA, 17 nt, Artificial Sequence
  Synthetic
uuucuaaagugauauaa

SEQ ID NO: 731945 - RNA, 17 nt, Artificial Sequence
  Synthetic
aguuuuaaaauauauaa

SEQ ID NO: 731946 - RNA, 17 nt, Artificial Sequence
  Synthetic
cauguugaaauauauaa

SEQ ID NO: 731947 - RNA, 17 nt, Artificial Sequence
  Synthetic
aauuauuacauauauaa

SEQ ID NO: 731948 - RNA, 17 nt, Artificial Sequence
  Synthetic
uuuccauucauauauaa

SEQ ID NO: 731949 - RNA, 17 nt, Artificial Sequence
  Synthetic
aauguccugauauauaa

SEQ ID NO: 731950 - RNA, 17 nt, Artificial Sequence
  Synthetic
agcacaaauauauauaa

SEQ ID NO: 731951 - RNA, 17 nt, Artificial Sequence
  Synthetic
ugcuaccaacuauauaa

SEQ ID NO: 731952 - RNA, 17 nt, Artificial Sequence
  Synthetic
acuaaagaaguauauaa

SEQ ID NO: 731953 - RNA, 17 nt, Artificial Sequence
  Synthetic
uguaucauuguauauaa

SEQ ID NO: 731954 - RNA, 17 nt, Artificial Sequence
  Synthetic
cauuuuuaauuauauaa

SEQ ID NO: 731955 - RNA, 17 nt, Artificial Sequence
  Synthetic
ccuuuguguuuauauaa

SEQ ID NO: 731956 - RNA, 17 nt, Artificial Sequence
  Synthetic
augggcagaaacuauaa

SEQ ID NO: 731957 - RNA, 17 nt, Artificial Sequence
  Synthetic
ugacggauaaacuauaa

SEQ ID NO: 731958 - RNA, 17 nt, Artificial Sequence
  Synthetic
cgccauguaaacuauaa

SEQ ID NO: 731959 - RNA, 17 nt, Artificial Sequence
  Synthetic
uaggguuuuaacuauaa

SEQ ID NO: 731960 - RNA, 17 nt, Artificial Sequence
  Synthetic
aacugagaagacuauaa

SEQ ID NO: 731961 - RNA, 17 nt, Artificial Sequence
  Synthetic
ucugugugauacuauaa

SEQ ID NO: 731962 - RNA, 17 nt, Artificial Sequence
  Synthetic
auauacauauacuauaa

SEQ ID NO: 731963 - RNA, 17 nt, Artificial Sequence
  Synthetic
auggcauuuuacuauaa

SEQ ID NO: 731964 - RNA, 17 nt, Artificial Sequence
  Synthetic
agaagaguccccuauaa

SEQ ID NO: 731965 - RNA, 17 nt, Artificial Sequence
  Synthetic
aagaaaaacugcuauaa

SEQ ID NO: 731966 - RNA, 17 nt, Artificial Sequence
  Synthetic
cauguauguugcuauaa

SEQ ID NO: 731967 - RNA, 17 nt, Artificial Sequence
  Synthetic
cugccuaugcucuauaa

SEQ ID NO: 731968 - RNA, 17 nt, Artificial Sequence
  Synthetic
uuguuuuuugucuauaa

SEQ ID NO: 731969 - RNA, 17 nt, Artificial Sequence
  Synthetic
uaagaauuguucuauaa

SEQ ID NO: 731970 - RNA, 17 nt, Artificial Sequence
  Synthetic
cagcaaacuuucuauaa

SEQ ID NO: 731971 - RNA, 17 nt, Artificial Sequence
  Synthetic
uauauguuaaaguauaa

SEQ ID NO: 731972 - RNA, 17 nt, Artificial Sequence
  Synthetic
agguaaagcaaguauaa

SEQ ID NO: 731973 - RNA, 17 nt, Artificial Sequence
  Synthetic
uagagaaagaaguauaa

SEQ ID NO: 731974 - RNA, 17 nt, Artificial Sequence
  Synthetic
ugagaaucacaguauaa

SEQ ID NO: 731975 - RNA, 17 nt, Artificial Sequence
  Synthetic
cauacugaucaguauaa

SEQ ID NO: 731976 - RNA, 17 nt, Artificial Sequence
  Synthetic
cccauuugagaguauaa

SEQ ID NO: 731977 - RNA, 17 nt, Artificial Sequence
  Synthetic
acuacugccuaguauaa

SEQ ID NO: 731978 - RNA, 17 nt, Artificial Sequence
  Synthetic
aaaagagugagguauaa

SEQ ID NO: 731979 - RNA, 17 nt, Artificial Sequence
  Synthetic
uaaagugcaauguauaa

SEQ ID NO: 731980 - RNA, 17 nt, Artificial Sequence
  Synthetic
aguaguagaauguauaa

SEQ ID NO: 731981 - RNA, 17 nt, Artificial Sequence
  Synthetic
auggaaugacuguauaa

SEQ ID NO: 731982 - RNA, 17 nt, Artificial Sequence
  Synthetic
aagauguuacuguauaa

SEQ ID NO: 731983 - RNA, 17 nt, Artificial Sequence
  Synthetic
uaugaacaucuguauaa

SEQ ID NO: 731984 - RNA, 17 nt, Artificial Sequence
  Synthetic
uuacuuuuucuguauaa

SEQ ID NO: 731985 - RNA, 17 nt, Artificial Sequence
  Synthetic
cauuuuugaguguauaa

SEQ ID NO: 731986 - RNA, 17 nt, Artificial Sequence
  Synthetic
aaaagccacuuguauaa

SEQ ID NO: 731987 - RNA, 17 nt, Artificial Sequence
  Synthetic
aaaguauacuuguauaa

SEQ ID NO: 731988 - RNA, 17 nt, Artificial Sequence
  Synthetic
aguugauucuuguauaa

SEQ ID NO: 731989 - RNA, 17 nt, Artificial Sequence
  Synthetic
ucaacaguguuguauaa

SEQ ID NO: 731990 - RNA, 17 nt, Artificial Sequence
  Synthetic
uuagugucuuuguauaa

SEQ ID NO: 731991 - RNA, 17 nt, Artificial Sequence
  Synthetic
aguugauuuuuguauaa

SEQ ID NO: 731992 - RNA, 17 nt, Artificial Sequence
  Synthetic
auuuuuuuuuuguauaa

SEQ ID NO: 731993 - RNA, 17 nt, Artificial Sequence
  Synthetic
uaaauuauaaauuauaa

SEQ ID NO: 731994 - RNA, 17 nt, Artificial Sequence
  Synthetic
ccugaccagaauuauaa

SEQ ID NO: 731995 - RNA, 17 nt, Artificial Sequence
  Synthetic
uggugcuagaauuauaa

SEQ ID NO: 731996 - RNA, 17 nt, Artificial Sequence
  Synthetic
ugagaagagcauuauaa

SEQ ID NO: 731997 - RNA, 17 nt, Artificial Sequence
  Synthetic
uuggguacucauuauaa

SEQ ID NO: 731998 - RNA, 17 nt, Artificial Sequence
  Synthetic
caugcaccucauuauaa

SEQ ID NO: 731999 - RNA, 17 nt, Artificial Sequence
  Synthetic
augguuuaauauuauaa

SEQ ID NO: 732000 - RNA, 17 nt, Artificial Sequence
  Synthetic
aucuaggacuauuauaa

SEQ ID NO: 732001 - RNA, 17 nt, Artificial Sequence
  Synthetic
cuuuuuucuuauuauaa

SEQ ID NO: 732002 - RNA, 17 nt, Artificial Sequence
  Synthetic
auuuuuucugcuuauaa

SEQ ID NO: 732003 - RNA, 17 nt, Artificial Sequence
  Synthetic
uugugaggaucuuauaa

SEQ ID NO: 732004 - RNA, 17 nt, Artificial Sequence
  Synthetic
auccaucauucuuauaa

SEQ ID NO: 732005 - RNA, 17 nt, Artificial Sequence
  Synthetic
ucuucccuuucuuauaa

SEQ ID NO: 732006 - RNA, 17 nt, Artificial Sequence
  Synthetic
auacauuauaguuauaa

SEQ ID NO: 732007 - RNA, 17 nt, Artificial Sequence
  Synthetic
cuaaacuacuguuauaa

SEQ ID NO: 732008 - RNA, 17 nt, Artificial Sequence
  Synthetic
auuguaauguguuauaa

SEQ ID NO: 732009 - RNA, 17 nt, Artificial Sequence
  Synthetic
acuuccucuuguuauaa

SEQ ID NO: 732010 - RNA, 17 nt, Artificial Sequence
  Synthetic
ugaaaauguuguuauaa

SEQ ID NO: 732011 - RNA, 17 nt, Artificial Sequence
  Synthetic
agugauaggauuuauaa

SEQ ID NO: 732012 - RNA, 17 nt, Artificial Sequence
  Synthetic
aaguguugacuuuauaa

SEQ ID NO: 732013 - RNA, 17 nt, Artificial Sequence
  Synthetic
cuaauuuaucuuuauaa

SEQ ID NO: 732014 - RNA, 17 nt, Artificial Sequence
  Synthetic
ugaagccuuguuuauaa

SEQ ID NO: 732015 - RNA, 17 nt, Artificial Sequence
  Synthetic
uaauaacaauuuuauaa

SEQ ID NO: 732016 - RNA, 17 nt, Artificial Sequence
  Synthetic
augcucacauuuuauaa

SEQ ID NO: 732017 - RNA, 17 nt, Artificial Sequence
  Synthetic
cacaacagauuuuauaa

SEQ ID NO: 732018 - RNA, 17 nt, Artificial Sequence
  Synthetic
caguugugauuuuauaa

SEQ ID NO: 732019 - RNA, 17 nt, Artificial Sequence
  Synthetic
aacucccacuuuuauaa

SEQ ID NO: 732020 - RNA, 17 nt, Artificial Sequence
  Synthetic
agaauuuccuuuuauaa

SEQ ID NO: 732021 - RNA, 17 nt, Artificial Sequence
  Synthetic
uggagccgcuuuuauaa

SEQ ID NO: 732022 - RNA, 17 nt, Artificial Sequence
  Synthetic
ugaggucucuuuuauaa

SEQ ID NO: 732023 - RNA, 17 nt, Artificial Sequence
  Synthetic
uuaauauucuuuuauaa

SEQ ID NO: 732024 - RNA, 17 nt, Artificial Sequence
  Synthetic
uaucauuaguuuuauaa

SEQ ID NO: 732025 - RNA, 17 nt, Artificial Sequence
  Synthetic
auccaaugguuuuauaa

SEQ ID NO: 732026 - RNA, 17 nt, Artificial Sequence
  Synthetic
aucagaugguuuuauaa

SEQ ID NO: 732027 - RNA, 17 nt, Artificial Sequence
  Synthetic
aucugaugguuuuauaa

SEQ ID NO: 732028 - RNA, 17 nt, Artificial Sequence
  Synthetic
auuugaugguuuuauaa

SEQ ID NO: 732029 - RNA, 17 nt, Artificial Sequence
  Synthetic
aucugauuguuuuauaa

SEQ ID NO: 732030 - RNA, 17 nt, Artificial Sequence
  Synthetic
ugacuagagaaaacuaa

SEQ ID NO: 732031 - RNA, 17 nt, Artificial Sequence
  Synthetic
aagucgaaacaaacuaa

SEQ ID NO: 732032 - RNA, 17 nt, Artificial Sequence
  Synthetic
ucauguagccaaacuaa

SEQ ID NO: 732033 - RNA, 17 nt, Artificial Sequence
  Synthetic
agcgagagagaaacuaa

SEQ ID NO: 732034 - RNA, 17 nt, Artificial Sequence
  Synthetic
auuaugggauaaacuaa

SEQ ID NO: 732035 - RNA, 17 nt, Artificial Sequence
  Synthetic
uagguaauauaaacuaa

SEQ ID NO: 732036 - RNA, 17 nt, Artificial Sequence
  Synthetic
uuuuauaauuaaacuaa

SEQ ID NO: 732037 - RNA, 17 nt, Artificial Sequence
  Synthetic
uguagucauuaaacuaa

SEQ ID NO: 732038 - RNA, 17 nt, Artificial Sequence
  Synthetic
aaauuagaaccaacuaa

SEQ ID NO: 732039 - RNA, 17 nt, Artificial Sequence
  Synthetic
augucaugggcaacuaa

SEQ ID NO: 732040 - RNA, 17 nt, Artificial Sequence
  Synthetic
ucaggaaagucaacuaa

SEQ ID NO: 732041 - RNA, 17 nt, Artificial Sequence
  Synthetic
aacagacucagaacuaa

SEQ ID NO: 732042 - RNA, 17 nt, Artificial Sequence
  Synthetic
caguaaggaggaacuaa

SEQ ID NO: 732043 - RNA, 17 nt, Artificial Sequence
  Synthetic
uuuugguugugaacuaa

SEQ ID NO: 732044 - RNA, 17 nt, Artificial Sequence
  Synthetic
ccagaaaaaauaacuaa

SEQ ID NO: 732045 - RNA, 17 nt, Artificial Sequence
  Synthetic
cauuuaaaaauaacuaa

SEQ ID NO: 732046 - RNA, 17 nt, Artificial Sequence
  Synthetic
aaaauaugaauaacuaa

SEQ ID NO: 732047 - RNA, 17 nt, Artificial Sequence
  Synthetic
aucacucugguaacuaa

SEQ ID NO: 732048 - RNA, 17 nt, Artificial Sequence
  Synthetic
ugaauauccuuaacuaa

SEQ ID NO: 732049 - RNA, 17 nt, Artificial Sequence
  Synthetic
auacaguucuuaacuaa

SEQ ID NO: 732050 - RNA, 17 nt, Artificial Sequence
  Synthetic
aggaaggaauacacuaa

SEQ ID NO: 732051 - RNA, 17 nt, Artificial Sequence
  Synthetic
augguaaaaaccacuaa

SEQ ID NO: 732052 - RNA, 17 nt, Artificial Sequence
  Synthetic
acacauguuaccacuaa

SEQ ID NO: 732053 - RNA, 17 nt, Artificial Sequence
  Synthetic
aauggguagcccacuaa

SEQ ID NO: 732054 - RNA, 17 nt, Artificial Sequence
  Synthetic
uuuaucagugccacuaa

SEQ ID NO: 732055 - RNA, 17 nt, Artificial Sequence
  Synthetic
aacaauuuaugcacuaa

SEQ ID NO: 732056 - RNA, 17 nt, Artificial Sequence
  Synthetic
cauuuacauugcacuaa

SEQ ID NO: 732057 - RNA, 17 nt, Artificial Sequence
  Synthetic
uuuaaaaaaaucacuaa

SEQ ID NO: 732058 - RNA, 17 nt, Artificial Sequence
  Synthetic
ugggaaacacucacuaa

SEQ ID NO: 732059 - RNA, 17 nt, Artificial Sequence
  Synthetic
ugugcuucaaagacuaa

SEQ ID NO: 732060 - RNA, 17 nt, Artificial Sequence
  Synthetic
accaccucagagacuaa

SEQ ID NO: 732061 - RNA, 17 nt, Artificial Sequence
  Synthetic
auuuauuucaggacuaa

SEQ ID NO: 732062 - RNA, 17 nt, Artificial Sequence
  Synthetic
acuuaaguagggacuaa

SEQ ID NO: 732063 - RNA, 17 nt, Artificial Sequence
  Synthetic
ccagccaaaaugacuaa

SEQ ID NO: 732064 - RNA, 17 nt, Artificial Sequence
  Synthetic
uuccuuucaaugacuaa

SEQ ID NO: 732065 - RNA, 17 nt, Artificial Sequence
  Synthetic
ucacaucuaaugacuaa

SEQ ID NO: 732066 - RNA, 17 nt, Artificial Sequence
  Synthetic
auuuuuuuaaugacuaa

SEQ ID NO: 732067 - RNA, 17 nt, Artificial Sequence
  Synthetic
uucucuuggaugacuaa

SEQ ID NO: 732068 - RNA, 17 nt, Artificial Sequence
  Synthetic
caaaaauauaugacuaa

SEQ ID NO: 732069 - RNA, 17 nt, Artificial Sequence
  Synthetic
cugacuuuagugacuaa

SEQ ID NO: 732070 - RNA, 17 nt, Artificial Sequence
  Synthetic
uuucuuagggugacuaa

SEQ ID NO: 732071 - RNA, 17 nt, Artificial Sequence
  Synthetic
agcucucucuugacuaa

SEQ ID NO: 732072 - RNA, 17 nt, Artificial Sequence
  Synthetic
auuugguauaauacuaa

SEQ ID NO: 732073 - RNA, 17 nt, Artificial Sequence
  Synthetic
caagcaauacauacuaa

SEQ ID NO: 732074 - RNA, 17 nt, Artificial Sequence
  Synthetic
aaugugguacauacuaa

SEQ ID NO: 732075 - RNA, 17 nt, Artificial Sequence
  Synthetic
aagaacccugauacuaa

SEQ ID NO: 732076 - RNA, 17 nt, Artificial Sequence
  Synthetic
agcauaagugauacuaa

SEQ ID NO: 732077 - RNA, 17 nt, Artificial Sequence
  Synthetic
uacacuguugauacuaa

SEQ ID NO: 732078 - RNA, 17 nt, Artificial Sequence
  Synthetic
uagcuauuauauacuaa

SEQ ID NO: 732079 - RNA, 17 nt, Artificial Sequence
  Synthetic
acuucaaacuauacuaa

SEQ ID NO: 732080 - RNA, 17 nt, Artificial Sequence
  Synthetic
ucuuaauuaacuacuaa

SEQ ID NO: 732081 - RNA, 17 nt, Artificial Sequence
  Synthetic
ugucaaaugccuacuaa

SEQ ID NO: 732082 - RNA, 17 nt, Artificial Sequence
  Synthetic
uuucaggaaaguacuaa

SEQ ID NO: 732083 - RNA, 17 nt, Artificial Sequence
  Synthetic
agaaucacuuguacuaa

SEQ ID NO: 732084 - RNA, 17 nt, Artificial Sequence
  Synthetic
aaaauaagacuuacuaa

SEQ ID NO: 732085 - RNA, 17 nt, Artificial Sequence
  Synthetic
acuauaucaguuacuaa

SEQ ID NO: 732086 - RNA, 17 nt, Artificial Sequence
  Synthetic
cuuguuuucguuacuaa

SEQ ID NO: 732087 - RNA, 17 nt, Artificial Sequence
  Synthetic
ucuguccaagaaccuaa

SEQ ID NO: 732088 - RNA, 17 nt, Artificial Sequence
  Synthetic
agccuagaauaaccuaa

SEQ ID NO: 732089 - RNA, 17 nt, Artificial Sequence
  Synthetic
aacuaugaauaaccuaa

SEQ ID NO: 732090 - RNA, 17 nt, Artificial Sequence
  Synthetic
agccagaugacaccuaa

SEQ ID NO: 732091 - RNA, 17 nt, Artificial Sequence
  Synthetic
uuucaugccccaccuaa

SEQ ID NO: 732092 - RNA, 17 nt, Artificial Sequence
  Synthetic
aagucuuggccaccuaa

SEQ ID NO: 732093 - RNA, 17 nt, Artificial Sequence
  Synthetic
uacauugugucaccuaa

SEQ ID NO: 732094 - RNA, 17 nt, Artificial Sequence
  Synthetic
ucucuuaggggaccuaa

SEQ ID NO: 732095 - RNA, 17 nt, Artificial Sequence
  Synthetic
aauuaauaaugaccuaa

SEQ ID NO: 732096 - RNA, 17 nt, Artificial Sequence
  Synthetic
cugcuaaguguaccuaa

SEQ ID NO: 732097 - RNA, 17 nt, Artificial Sequence
  Synthetic
cuuaaaaacuuaccuaa

SEQ ID NO: 732098 - RNA, 17 nt, Artificial Sequence
  Synthetic
aaaggguaaaacccuaa

SEQ ID NO: 732099 - RNA, 17 nt, Artificial Sequence
  Synthetic
cacauauccuacccuaa

SEQ ID NO: 732100 - RNA, 17 nt, Artificial Sequence
  Synthetic
uguugaaaaugcccuaa

SEQ ID NO: 732101 - RNA, 17 nt, Artificial Sequence
  Synthetic
aaacaugucaucccuaa

SEQ ID NO: 732102 - RNA, 17 nt, Artificial Sequence
  Synthetic
aaaaaucaccucccuaa

SEQ ID NO: 732103 - RNA, 17 nt, Artificial Sequence
  Synthetic
uauauuggccucccuaa

SEQ ID NO: 732104 - RNA, 17 nt, Artificial Sequence
  Synthetic
cacuaaaugcucccuaa

SEQ ID NO: 732105 - RNA, 17 nt, Artificial Sequence
  Synthetic
uccauaaacuucccuaa

SEQ ID NO: 732106 - RNA, 17 nt, Artificial Sequence
  Synthetic
uuacuguucuucccuaa

SEQ ID NO: 732107 - RNA, 17 nt, Artificial Sequence
  Synthetic
acauuuuuuuucccuaa

SEQ ID NO: 732108 - RNA, 17 nt, Artificial Sequence
  Synthetic
cuggauugagagccuaa

SEQ ID NO: 732109 - RNA, 17 nt, Artificial Sequence
  Synthetic
aaugaaaauuagccuaa

SEQ ID NO: 732110 - RNA, 17 nt, Artificial Sequence
  Synthetic
ccuuuguuuuagccuaa

SEQ ID NO: 732111 - RNA, 17 nt, Artificial Sequence
  Synthetic
acaaguaaaaauccuaa

SEQ ID NO: 732112 - RNA, 17 nt, Artificial Sequence
  Synthetic
uaaguggaaaauccuaa

SEQ ID NO: 732113 - RNA, 17 nt, Artificial Sequence
  Synthetic
auaccaggaaauccuaa

SEQ ID NO: 732114 - RNA, 17 nt, Artificial Sequence
  Synthetic
uauuugccuaauccuaa

SEQ ID NO: 732115 - RNA, 17 nt, Artificial Sequence
  Synthetic
cuacuacuuaauccuaa

SEQ ID NO: 732116 - RNA, 17 nt, Artificial Sequence
  Synthetic
uuguuagaauauccuaa

SEQ ID NO: 732117 - RNA, 17 nt, Artificial Sequence
  Synthetic
aagagcaauuauccuaa

SEQ ID NO: 732118 - RNA, 17 nt, Artificial Sequence
  Synthetic
ucuaacuccccuccuaa

SEQ ID NO: 732119 - RNA, 17 nt, Artificial Sequence
  Synthetic
acucugggagcuccuaa

SEQ ID NO: 732120 - RNA, 17 nt, Artificial Sequence
  Synthetic
acuaacaagaguccuaa

SEQ ID NO: 732121 - RNA, 17 nt, Artificial Sequence
  Synthetic
ucucgguggcuuccuaa

SEQ ID NO: 732122 - RNA, 17 nt, Artificial Sequence
  Synthetic
auaauaacucuuccuaa

SEQ ID NO: 732123 - RNA, 17 nt, Artificial Sequence
  Synthetic
uaguaaaguguuccuaa

SEQ ID NO: 732124 - RNA, 17 nt, Artificial Sequence
  Synthetic
ugacaacaguuuccuaa

SEQ ID NO: 732125 - RNA, 17 nt, Artificial Sequence
  Synthetic
acaaaauaaaaagcuaa

SEQ ID NO: 732126 - RNA, 17 nt, Artificial Sequence
  Synthetic
cuuguguaucaagcuaa

SEQ ID NO: 732127 - RNA, 17 nt, Artificial Sequence
  Synthetic
aauauuacagaagcuaa

SEQ ID NO: 732128 - RNA, 17 nt, Artificial Sequence
  Synthetic
cauuaaagcgaagcuaa

SEQ ID NO: 732129 - RNA, 17 nt, Artificial Sequence
  Synthetic
uacaacuauuaagcuaa

SEQ ID NO: 732130 - RNA, 17 nt, Artificial Sequence
  Synthetic
agauauaucacagcuaa

SEQ ID NO: 732131 - RNA, 17 nt, Artificial Sequence
  Synthetic
uaauaugugacagcuaa

SEQ ID NO: 732132 - RNA, 17 nt, Artificial Sequence
  Synthetic
agcugaagagcagcuaa

SEQ ID NO: 732133 - RNA, 17 nt, Artificial Sequence
  Synthetic
cauuuucagucagcuaa

SEQ ID NO: 732134 - RNA, 17 nt, Artificial Sequence
  Synthetic
cacucaucuucagcuaa

SEQ ID NO: 732135 - RNA, 17 nt, Artificial Sequence
  Synthetic
uagaauucaagagcuaa

SEQ ID NO: 732136 - RNA, 17 nt, Artificial Sequence
  Synthetic
aaacucuuacgagcuaa

SEQ ID NO: 732137 - RNA, 17 nt, Artificial Sequence
  Synthetic
caaucuaaaugagcuaa

SEQ ID NO: 732138 - RNA, 17 nt, Artificial Sequence
  Synthetic
ccuucauaaugagcuaa

SEQ ID NO: 732139 - RNA, 17 nt, Artificial Sequence
  Synthetic
acaguauucugagcuaa

SEQ ID NO: 732140 - RNA, 17 nt, Artificial Sequence
  Synthetic
caaagucauauagcuaa

SEQ ID NO: 732141 - RNA, 17 nt, Artificial Sequence
  Synthetic
uguacuucaguagcuaa

SEQ ID NO: 732142 - RNA, 17 nt, Artificial Sequence
  Synthetic
auuuucauauuagcuaa

SEQ ID NO: 732143 - RNA, 17 nt, Artificial Sequence
  Synthetic
auucacaacuuagcuaa

SEQ ID NO: 732144 - RNA, 17 nt, Artificial Sequence
  Synthetic
aaggccugaaaggcuaa

SEQ ID NO: 732145 - RNA, 17 nt, Artificial Sequence
  Synthetic
augcagcuuaaggcuaa

SEQ ID NO: 732146 - RNA, 17 nt, Artificial Sequence
  Synthetic
uggaaacccagggcuaa

SEQ ID NO: 732147 - RNA, 17 nt, Artificial Sequence
  Synthetic
aguuaccaaauggcuaa

SEQ ID NO: 732148 - RNA, 17 nt, Artificial Sequence
  Synthetic
ugaaggcaaauggcuaa

SEQ ID NO: 732149 - RNA, 17 nt, Artificial Sequence
  Synthetic
ccagcuggcauggcuaa

SEQ ID NO: 732150 - RNA, 17 nt, Artificial Sequence
  Synthetic
aagggggggauggcuaa

SEQ ID NO: 732151 - RNA, 17 nt, Artificial Sequence
  Synthetic
uagcguuguauggcuaa

SEQ ID NO: 732152 - RNA, 17 nt, Artificial Sequence
  Synthetic
uagccacagguggcuaa

SEQ ID NO: 732153 - RNA, 17 nt, Artificial Sequence
  Synthetic
cuuagcaugguggcuaa

SEQ ID NO: 732154 - RNA, 17 nt, Artificial Sequence
  Synthetic
caacauuguuuggcuaa

SEQ ID NO: 732155 - RNA, 17 nt, Artificial Sequence
  Synthetic
agugcugugaaugcuaa

SEQ ID NO: 732156 - RNA, 17 nt, Artificial Sequence
  Synthetic
accuuauuuaaugcuaa

SEQ ID NO: 732157 - RNA, 17 nt, Artificial Sequence
  Synthetic
acugugcuggcugcuaa

SEQ ID NO: 732158 - RNA, 17 nt, Artificial Sequence
  Synthetic
cacucgagcucugcuaa

SEQ ID NO: 732159 - RNA, 17 nt, Artificial Sequence
  Synthetic
uuacuuuuuucugcuaa

SEQ ID NO: 732160 - RNA, 17 nt, Artificial Sequence
  Synthetic
aaaaugguaagugcuaa

SEQ ID NO: 732161 - RNA, 17 nt, Artificial Sequence
  Synthetic
aauucagugugugcuaa

SEQ ID NO: 732162 - RNA, 17 nt, Artificial Sequence
  Synthetic
acaauacuacuugcuaa

SEQ ID NO: 732163 - RNA, 17 nt, Artificial Sequence
  Synthetic
uugguuaaucuugcuaa

SEQ ID NO: 732164 - RNA, 17 nt, Artificial Sequence
  Synthetic
acaauggugguugcuaa

SEQ ID NO: 732165 - RNA, 17 nt, Artificial Sequence
  Synthetic
uuguagaccuuugcuaa

SEQ ID NO: 732166 - RNA, 17 nt, Artificial Sequence
  Synthetic
cuuccaaguuuugcuaa

SEQ ID NO: 732167 - RNA, 17 nt, Artificial Sequence
  Synthetic
caauccuguuuugcuaa

SEQ ID NO: 732168 - RNA, 17 nt, Artificial Sequence
  Synthetic
aaacaguaccaaucuaa

SEQ ID NO: 732169 - RNA, 17 nt, Artificial Sequence
  Synthetic
uucucaaaucaaucuaa

SEQ ID NO: 732170 - RNA, 17 nt, Artificial Sequence
  Synthetic
uuaaauacuuaaucuaa

SEQ ID NO: 732171 - RNA, 17 nt, Artificial Sequence
  Synthetic
auucacuguuaaucuaa

SEQ ID NO: 732172 - RNA, 17 nt, Artificial Sequence
  Synthetic
uacuccagcacaucuaa

SEQ ID NO: 732173 - RNA, 17 nt, Artificial Sequence
  Synthetic
cuuuaaaaaccaucuaa

SEQ ID NO: 732174 - RNA, 17 nt, Artificial Sequence
  Synthetic
auuaauaaaucaucuaa

SEQ ID NO: 732175 - RNA, 17 nt, Artificial Sequence
  Synthetic
uucccacuaagaucuaa

SEQ ID NO: 732176 - RNA, 17 nt, Artificial Sequence
  Synthetic
augcaaaaaugaucuaa

SEQ ID NO: 732177 - RNA, 17 nt, Artificial Sequence
  Synthetic
cuauggcccugaucuaa

SEQ ID NO: 732178 - RNA, 17 nt, Artificial Sequence
  Synthetic
aagguaugaauaucuaa

SEQ ID NO: 732179 - RNA, 17 nt, Artificial Sequence
  Synthetic
uugcuugcuauaucuaa

SEQ ID NO: 732180 - RNA, 17 nt, Artificial Sequence
  Synthetic
aguacacaucuaucuaa

SEQ ID NO: 732181 - RNA, 17 nt, Artificial Sequence
  Synthetic
uucuacuuucuaucuaa

SEQ ID NO: 732182 - RNA, 17 nt, Artificial Sequence
  Synthetic
cugcauugauuaucuaa

SEQ ID NO: 732183 - RNA, 17 nt, Artificial Sequence
  Synthetic
acugugggcaacucuaa

SEQ ID NO: 732184 - RNA, 17 nt, Artificial Sequence
  Synthetic
uauaugaggaacucuaa

SEQ ID NO: 732185 - RNA, 17 nt, Artificial Sequence
  Synthetic
aaauaauggaacucuaa

SEQ ID NO: 732186 - RNA, 17 nt, Artificial Sequence
  Synthetic
uuuuugcugaacucuaa

SEQ ID NO: 732187 - RNA, 17 nt, Artificial Sequence
  Synthetic
cauguuaauaacucuaa

SEQ ID NO: 732188 - RNA, 17 nt, Artificial Sequence
  Synthetic
ucagauauuaacucuaa

SEQ ID NO: 732189 - RNA, 17 nt, Artificial Sequence
  Synthetic
ugaaacggacacucuaa

SEQ ID NO: 732190 - RNA, 17 nt, Artificial Sequence
  Synthetic
auuguuccagacucuaa

SEQ ID NO: 732191 - RNA, 17 nt, Artificial Sequence
  Synthetic
uuacauuccuacucuaa

SEQ ID NO: 732192 - RNA, 17 nt, Artificial Sequence
  Synthetic
cuguuauugggcucuaa

SEQ ID NO: 732193 - RNA, 17 nt, Artificial Sequence
  Synthetic
uaauagagaugcucuaa

SEQ ID NO: 732194 - RNA, 17 nt, Artificial Sequence
  Synthetic
auucagcgugucucuaa

SEQ ID NO: 732195 - RNA, 17 nt, Artificial Sequence
  Synthetic
aauuugcauuucucuaa

SEQ ID NO: 732196 - RNA, 17 nt, Artificial Sequence
  Synthetic
uagauuuagaagucuaa

SEQ ID NO: 732197 - RNA, 17 nt, Artificial Sequence
  Synthetic
uuggauaaccagucuaa

SEQ ID NO: 732198 - RNA, 17 nt, Artificial Sequence
  Synthetic
auauauccagagucuaa

SEQ ID NO: 732199 - RNA, 17 nt, Artificial Sequence
  Synthetic
cuccaguuagagucuaa

SEQ ID NO: 732200 - RNA, 17 nt, Artificial Sequence
  Synthetic
augauaauauagucuaa

SEQ ID NO: 732201 - RNA, 17 nt, Artificial Sequence
  Synthetic
ucagugagauggucuaa

SEQ ID NO: 732202 - RNA, 17 nt, Artificial Sequence
  Synthetic
uuucagagaaugucuaa

SEQ ID NO: 732203 - RNA, 17 nt, Artificial Sequence
  Synthetic
uugugacucaugucuaa

SEQ ID NO: 732204 - RNA, 17 nt, Artificial Sequence
  Synthetic
ccuucacugcugucuaa

SEQ ID NO: 732205 - RNA, 17 nt, Artificial Sequence
  Synthetic
cagaggacagugucuaa

SEQ ID NO: 732206 - RNA, 17 nt, Artificial Sequence
  Synthetic
uuugugggagugucuaa

SEQ ID NO: 732207 - RNA, 17 nt, Artificial Sequence
  Synthetic
agacauguuuugucuaa

SEQ ID NO: 732208 - RNA, 17 nt, Artificial Sequence
  Synthetic
uaaaacuuacauucuaa

SEQ ID NO: 732209 - RNA, 17 nt, Artificial Sequence
  Synthetic
ccauucuuccauucuaa

SEQ ID NO: 732210 - RNA, 17 nt, Artificial Sequence
  Synthetic
uuuucagaucauucuaa

SEQ ID NO: 732211 - RNA, 17 nt, Artificial Sequence
  Synthetic
aaauauguucauucuaa

SEQ ID NO: 732212 - RNA, 17 nt, Artificial Sequence
  Synthetic
ucuaaauuuccuucuaa

SEQ ID NO: 732213 - RNA, 17 nt, Artificial Sequence
  Synthetic
ccuguucacaguucuaa

SEQ ID NO: 732214 - RNA, 17 nt, Artificial Sequence
  Synthetic
augggugccaguucuaa

SEQ ID NO: 732215 - RNA, 17 nt, Artificial Sequence
  Synthetic
ucuuguccagguucuaa

SEQ ID NO: 732216 - RNA, 17 nt, Artificial Sequence
  Synthetic
cuauucuuuuguucuaa

SEQ ID NO: 732217 - RNA, 17 nt, Artificial Sequence
  Synthetic
caauaagcaauuucuaa

SEQ ID NO: 732218 - RNA, 17 nt, Artificial Sequence
  Synthetic
cauuucugcauuucuaa

SEQ ID NO: 732219 - RNA, 17 nt, Artificial Sequence
  Synthetic
augcuuuuuauuucuaa

SEQ ID NO: 732220 - RNA, 17 nt, Artificial Sequence
  Synthetic
auaaaauugcuuucuaa

SEQ ID NO: 732221 - RNA, 17 nt, Artificial Sequence
  Synthetic
aaaauauugcuuucuaa

SEQ ID NO: 732222 - RNA, 17 nt, Artificial Sequence
  Synthetic
uguuccuauguuucuaa

SEQ ID NO: 732223 - RNA, 17 nt, Artificial Sequence
  Synthetic
uucuguucauuuucuaa

SEQ ID NO: 732224 - RNA, 17 nt, Artificial Sequence
  Synthetic
uauccuuuauuuucuaa

SEQ ID NO: 732225 - RNA, 17 nt, Artificial Sequence
  Synthetic
ugaauuuuguuuucuaa

SEQ ID NO: 732226 - RNA, 17 nt, Artificial Sequence
  Synthetic
ugaacauauuuuucuaa

SEQ ID NO: 732227 - RNA, 17 nt, Artificial Sequence
  Synthetic
ucaaucacuuuuucuaa

SEQ ID NO: 732228 - RNA, 17 nt, Artificial Sequence
  Synthetic
cugaaacuuuuuucuaa

SEQ ID NO: 732229 - RNA, 17 nt, Artificial Sequence
  Synthetic
uuuacuagaaaaaguaa

SEQ ID NO: 732230 - RNA, 17 nt, Artificial Sequence
  Synthetic
aguagacagaaaaguaa

SEQ ID NO: 732231 - RNA, 17 nt, Artificial Sequence
  Synthetic
uuuaauuagaaaaguaa

SEQ ID NO: 732232 - RNA, 17 nt, Artificial Sequence
  Synthetic
uuaugauauaaaaguaa

SEQ ID NO: 732233 - RNA, 17 nt, Artificial Sequence
  Synthetic
agcauuaagcaaaguaa

SEQ ID NO: 732234 - RNA, 17 nt, Artificial Sequence
  Synthetic
ucauuuuggcaaaguaa

SEQ ID NO: 732235 - RNA, 17 nt, Artificial Sequence
  Synthetic
ucacauauucaaaguaa

SEQ ID NO: 732236 - RNA, 17 nt, Artificial Sequence
  Synthetic
cuaauuggggaaaguaa

SEQ ID NO: 732237 - RNA, 17 nt, Artificial Sequence
  Synthetic
uggaauaaauaaaguaa

SEQ ID NO: 732238 - RNA, 17 nt, Artificial Sequence
  Synthetic
uuacucugcuaaaguaa

SEQ ID NO: 732239 - RNA, 17 nt, Artificial Sequence
  Synthetic
ucuaacauuuaaaguaa

SEQ ID NO: 732240 - RNA, 17 nt, Artificial Sequence
  Synthetic
auuuucucaacaaguaa

SEQ ID NO: 732241 - RNA, 17 nt, Artificial Sequence
  Synthetic
uugauuugaucaaguaa

SEQ ID NO: 732242 - RNA, 17 nt, Artificial Sequence
  Synthetic
ucuuacacuucaaguaa

SEQ ID NO: 732243 - RNA, 17 nt, Artificial Sequence
  Synthetic
acgugagaaagaaguaa

SEQ ID NO: 732244 - RNA, 17 nt, Artificial Sequence
  Synthetic
aggggaaugggaaguaa

SEQ ID NO: 732245 - RNA, 17 nt, Artificial Sequence
  Synthetic
ugccuuuccugaaguaa

SEQ ID NO: 732246 - RNA, 17 nt, Artificial Sequence
  Synthetic
cuuaugaaaauaaguaa

SEQ ID NO: 732247 - RNA, 17 nt, Artificial Sequence
  Synthetic
uagcaacugauaaguaa

SEQ ID NO: 732248 - RNA, 17 nt, Artificial Sequence
  Synthetic
uuaacuaaguuaaguaa

SEQ ID NO: 732249 - RNA, 17 nt, Artificial Sequence
  Synthetic
agucaaggguuaaguaa

SEQ ID NO: 732250 - RNA, 17 nt, Artificial Sequence
  Synthetic
uacaaggcaaacaguaa

SEQ ID NO: 732251 - RNA, 17 nt, Artificial Sequence
  Synthetic
augggaggggacaguaa

SEQ ID NO: 732252 - RNA, 17 nt, Artificial Sequence
  Synthetic
cagccaguggacaguaa

SEQ ID NO: 732253 - RNA, 17 nt, Artificial Sequence
  Synthetic
ugacacguguacaguaa

SEQ ID NO: 732254 - RNA, 17 nt, Artificial Sequence
  Synthetic
aagucaagccccaguaa

SEQ ID NO: 732255 - RNA, 17 nt, Artificial Sequence
  Synthetic
uuggcaugagccaguaa

SEQ ID NO: 732256 - RNA, 17 nt, Artificial Sequence
  Synthetic
aggaagccaggcaguaa

SEQ ID NO: 732257 - RNA, 17 nt, Artificial Sequence
  Synthetic
acaagacagugcaguaa

SEQ ID NO: 732258 - RNA, 17 nt, Artificial Sequence
  Synthetic
ucuaggaggaucaguaa

SEQ ID NO: 732259 - RNA, 17 nt, Artificial Sequence
  Synthetic
cucuuucuucucaguaa

SEQ ID NO: 732260 - RNA, 17 nt, Artificial Sequence
  Synthetic
agauacaaagucaguaa

SEQ ID NO: 732261 - RNA, 17 nt, Artificial Sequence
  Synthetic
aaugggugggucaguaa

SEQ ID NO: 732262 - RNA, 17 nt, Artificial Sequence
  Synthetic
agaagcauugucaguaa

SEQ ID NO: 732263 - RNA, 17 nt, Artificial Sequence
  Synthetic
uacucaagcuucaguaa

SEQ ID NO: 732264 - RNA, 17 nt, Artificial Sequence
  Synthetic
aacaaaugaaagaguaa

SEQ ID NO: 732265 - RNA, 17 nt, Artificial Sequence
  Synthetic
uuucauuuaaagaguaa

SEQ ID NO: 732266 - RNA, 17 nt, Artificial Sequence
  Synthetic
uaaagguacaagaguaa

SEQ ID NO: 732267 - RNA, 17 nt, Artificial Sequence
  Synthetic
ugaggcagacagaguaa

SEQ ID NO: 732268 - RNA, 17 nt, Artificial Sequence
  Synthetic
caugggggacagaguaa

SEQ ID NO: 732269 - RNA, 17 nt, Artificial Sequence
  Synthetic
ugaauuaggcagaguaa

SEQ ID NO: 732270 - RNA, 17 nt, Artificial Sequence
  Synthetic
ugccugggagggaguaa

SEQ ID NO: 732271 - RNA, 17 nt, Artificial Sequence
  Synthetic
uagguaauagggaguaa

SEQ ID NO: 732272 - RNA, 17 nt, Artificial Sequence
  Synthetic
agugcaggauggaguaa

SEQ ID NO: 732273 - RNA, 17 nt, Artificial Sequence
  Synthetic
uguauucuauggaguaa

SEQ ID NO: 732274 - RNA, 17 nt, Artificial Sequence
  Synthetic
auugguaacuggaguaa

SEQ ID NO: 732275 - RNA, 17 nt, Artificial Sequence
  Synthetic
uuuucaaguuggaguaa

SEQ ID NO: 732276 - RNA, 17 nt, Artificial Sequence
  Synthetic
cccacagguuggaguaa

SEQ ID NO: 732277 - RNA, 17 nt, Artificial Sequence
  Synthetic
augugauagaugaguaa

SEQ ID NO: 732278 - RNA, 17 nt, Artificial Sequence
  Synthetic
caggaguuacugaguaa

SEQ ID NO: 732279 - RNA, 17 nt, Artificial Sequence
  Synthetic
ucuuuaucucugaguaa

SEQ ID NO: 732280 - RNA, 17 nt, Artificial Sequence
  Synthetic
uuuaacgcagugaguaa

SEQ ID NO: 732281 - RNA, 17 nt, Artificial Sequence
  Synthetic
cuggagucaaauaguaa

SEQ ID NO: 732282 - RNA, 17 nt, Artificial Sequence
  Synthetic
auuugaguagauaguaa

SEQ ID NO: 732283 - RNA, 17 nt, Artificial Sequence
  Synthetic
aggagcucauauaguaa

SEQ ID NO: 732284 - RNA, 17 nt, Artificial Sequence
  Synthetic
uccuuccaguauaguaa

SEQ ID NO: 732285 - RNA, 17 nt, Artificial Sequence
  Synthetic
cuuuuaaauacuaguaa

SEQ ID NO: 732286 - RNA, 17 nt, Artificial Sequence
  Synthetic
acuuugcuaucuaguaa

SEQ ID NO: 732287 - RNA, 17 nt, Artificial Sequence
  Synthetic
uuuacuuuuucuaguaa

SEQ ID NO: 732288 - RNA, 17 nt, Artificial Sequence
  Synthetic
aaagcaugaaguaguaa

SEQ ID NO: 732289 - RNA, 17 nt, Artificial Sequence
  Synthetic
cuuccucauaguaguaa

SEQ ID NO: 732290 - RNA, 17 nt, Artificial Sequence
  Synthetic
aauuuccaagguaguaa

SEQ ID NO: 732291 - RNA, 17 nt, Artificial Sequence
  Synthetic
uagaacacagguaguaa

SEQ ID NO: 732292 - RNA, 17 nt, Artificial Sequence
  Synthetic
acuaccccagguaguaa

SEQ ID NO: 732293 - RNA, 17 nt, Artificial Sequence
  Synthetic
cuugguaacuguaguaa

SEQ ID NO: 732294 - RNA, 17 nt, Artificial Sequence
  Synthetic
cuuguacauuguaguaa

SEQ ID NO: 732295 - RNA, 17 nt, Artificial Sequence
  Synthetic
cuuugcugaauuaguaa

SEQ ID NO: 732296 - RNA, 17 nt, Artificial Sequence
  Synthetic
agagauuuaauuaguaa

SEQ ID NO: 732297 - RNA, 17 nt, Artificial Sequence
  Synthetic
ucauaauguauuaguaa

SEQ ID NO: 732298 - RNA, 17 nt, Artificial Sequence
  Synthetic
aauuacuaacuuaguaa

SEQ ID NO: 732299 - RNA, 17 nt, Artificial Sequence
  Synthetic
agcuagaaaguuaguaa

SEQ ID NO: 732300 - RNA, 17 nt, Artificial Sequence
  Synthetic
ugcuguggauuuaguaa

SEQ ID NO: 732301 - RNA, 17 nt, Artificial Sequence
  Synthetic
ucuuaagauuuuaguaa

SEQ ID NO: 732302 - RNA, 17 nt, Artificial Sequence
  Synthetic
caaaagccaaaacguaa

SEQ ID NO: 732303 - RNA, 17 nt, Artificial Sequence
  Synthetic
cuguaauguaaacguaa

SEQ ID NO: 732304 - RNA, 17 nt, Artificial Sequence
  Synthetic
cagccuggccaacguaa

SEQ ID NO: 732305 - RNA, 17 nt, Artificial Sequence
  Synthetic
uccucaaaggaacguaa

SEQ ID NO: 732306 - RNA, 17 nt, Artificial Sequence
  Synthetic
auucaagaggcacguaa

SEQ ID NO: 732307 - RNA, 17 nt, Artificial Sequence
  Synthetic
cuuuacaucuuacguaa

SEQ ID NO: 732308 - RNA, 17 nt, Artificial Sequence
  Synthetic
agagaagaaaaccguaa

SEQ ID NO: 732309 - RNA, 17 nt, Artificial Sequence
  Synthetic
ugugucuuguuucguaa

SEQ ID NO: 732310 - RNA, 17 nt, Artificial Sequence
  Synthetic
auaaaauauaaagguaa

SEQ ID NO: 732311 - RNA, 17 nt, Artificial Sequence
  Synthetic
caccucccacaagguaa

SEQ ID NO: 732312 - RNA, 17 nt, Artificial Sequence
  Synthetic
aaaaggggccaagguaa

SEQ ID NO: 732313 - RNA, 17 nt, Artificial Sequence
  Synthetic
agauuggaagaagguaa

SEQ ID NO: 732314 - RNA, 17 nt, Artificial Sequence
  Synthetic
agagaauuagaagguaa

SEQ ID NO: 732315 - RNA, 17 nt, Artificial Sequence
  Synthetic
agucuuguggaagguaa

SEQ ID NO: 732316 - RNA, 17 nt, Artificial Sequence
  Synthetic
uuugaguuguaagguaa

SEQ ID NO: 732317 - RNA, 17 nt, Artificial Sequence
  Synthetic
uguuugucuuaagguaa

SEQ ID NO: 732318 - RNA, 17 nt, Artificial Sequence
  Synthetic
cauucauucccagguaa

SEQ ID NO: 732319 - RNA, 17 nt, Artificial Sequence
  Synthetic
aaugagaguggagguaa

SEQ ID NO: 732320 - RNA, 17 nt, Artificial Sequence
  Synthetic
agaccagguggagguaa

SEQ ID NO: 732321 - RNA, 17 nt, Artificial Sequence
  Synthetic
aacccauuaugagguaa

SEQ ID NO: 732322 - RNA, 17 nt, Artificial Sequence
  Synthetic
aaagcuuucugagguaa

SEQ ID NO: 732323 - RNA, 17 nt, Artificial Sequence
  Synthetic
uuuaguauaauagguaa

SEQ ID NO: 732324 - RNA, 17 nt, Artificial Sequence
  Synthetic
cugaaguucaaggguaa

SEQ ID NO: 732325 - RNA, 17 nt, Artificial Sequence
  Synthetic
aaaguauuuaaggguaa

SEQ ID NO: 732326 - RNA, 17 nt, Artificial Sequence
  Synthetic
aaaaaucaucaggguaa

SEQ ID NO: 732327 - RNA, 17 nt, Artificial Sequence
  Synthetic
agaugguagagggguaa

SEQ ID NO: 732328 - RNA, 17 nt, Artificial Sequence
  Synthetic
uaauugccuagggguaa

SEQ ID NO: 732329 - RNA, 17 nt, Artificial Sequence
  Synthetic
agaaacauuagggguaa

SEQ ID NO: 732330 - RNA, 17 nt, Artificial Sequence
  Synthetic
caaccacaaggggguaa

SEQ ID NO: 732331 - RNA, 17 nt, Artificial Sequence
  Synthetic
uaccugagacuggguaa

SEQ ID NO: 732332 - RNA, 17 nt, Artificial Sequence
  Synthetic
aagaagacccuggguaa

SEQ ID NO: 732333 - RNA, 17 nt, Artificial Sequence
  Synthetic
cucacauaucuggguaa

SEQ ID NO: 732334 - RNA, 17 nt, Artificial Sequence
  Synthetic
uuuugggggguggguaa

SEQ ID NO: 732335 - RNA, 17 nt, Artificial Sequence
  Synthetic
auacuuaaaaaugguaa

SEQ ID NO: 732336 - RNA, 17 nt, Artificial Sequence
  Synthetic
aaacaugaaaaugguaa

SEQ ID NO: 732337 - RNA, 17 nt, Artificial Sequence
  Synthetic
acauuacauaaugguaa

SEQ ID NO: 732338 - RNA, 17 nt, Artificial Sequence
  Synthetic
ccauuacauaaugguaa

SEQ ID NO: 732339 - RNA, 17 nt, Artificial Sequence
  Synthetic
uuuccuuaccaugguaa

SEQ ID NO: 732340 - RNA, 17 nt, Artificial Sequence
  Synthetic
uuuggacaucaugguaa

SEQ ID NO: 732341 - RNA, 17 nt, Artificial Sequence
  Synthetic
caaccuauagaugguaa

SEQ ID NO: 732342 - RNA, 17 nt, Artificial Sequence
  Synthetic
uaccauuuagaugguaa

SEQ ID NO: 732343 - RNA, 17 nt, Artificial Sequence
  Synthetic
uuucuaucggaugguaa

SEQ ID NO: 732344 - RNA, 17 nt, Artificial Sequence
  Synthetic
aagucagccuaugguaa

SEQ ID NO: 732345 - RNA, 17 nt, Artificial Sequence
  Synthetic
ucaagaaacacugguaa

SEQ ID NO: 732346 - RNA, 17 nt, Artificial Sequence
  Synthetic
aaacacuugacugguaa

SEQ ID NO: 732347 - RNA, 17 nt, Artificial Sequence
  Synthetic
uguaaauguucugguaa

SEQ ID NO: 732348 - RNA, 17 nt, Artificial Sequence
  Synthetic
ucuaauagcagugguaa

SEQ ID NO: 732349 - RNA, 17 nt, Artificial Sequence
  Synthetic
uacaccauaggugguaa

SEQ ID NO: 732350 - RNA, 17 nt, Artificial Sequence
  Synthetic
uuuaauuucugugguaa

SEQ ID NO: 732351 - RNA, 17 nt, Artificial Sequence
  Synthetic
agugcaguuugugguaa

SEQ ID NO: 732352 - RNA, 17 nt, Artificial Sequence
  Synthetic
uagugagagauugguaa

SEQ ID NO: 732353 - RNA, 17 nt, Artificial Sequence
  Synthetic
uauuccauuguugguaa

SEQ ID NO: 732354 - RNA, 17 nt, Artificial Sequence
  Synthetic
acugccuacuuugguaa

SEQ ID NO: 732355 - RNA, 17 nt, Artificial Sequence
  Synthetic
ugaagaugguuugguaa

SEQ ID NO: 732356 - RNA, 17 nt, Artificial Sequence
  Synthetic
auaaugaauuuugguaa

SEQ ID NO: 732357 - RNA, 17 nt, Artificial Sequence
  Synthetic
uugacuuuaaaauguaa

SEQ ID NO: 732358 - RNA, 17 nt, Artificial Sequence
  Synthetic
cuuuguacuaaauguaa

SEQ ID NO: 732359 - RNA, 17 nt, Artificial Sequence
  Synthetic
auggcaauccaauguaa

SEQ ID NO: 732360 - RNA, 17 nt, Artificial Sequence
  Synthetic
cucuugggagaauguaa

SEQ ID NO: 732361 - RNA, 17 nt, Artificial Sequence
  Synthetic
auaaacugagaauguaa

SEQ ID NO: 732362 - RNA, 17 nt, Artificial Sequence
  Synthetic
uauuuguaugaauguaa

SEQ ID NO: 732363 - RNA, 17 nt, Artificial Sequence
  Synthetic
auaauuguuuaauguaa

SEQ ID NO: 732364 - RNA, 17 nt, Artificial Sequence
  Synthetic
ugauuuaguacauguaa

SEQ ID NO: 732365 - RNA, 17 nt, Artificial Sequence
  Synthetic
aaauuagaggcauguaa

SEQ ID NO: 732366 - RNA, 17 nt, Artificial Sequence
  Synthetic
aauuuaauggcauguaa

SEQ ID NO: 732367 - RNA, 17 nt, Artificial Sequence
  Synthetic
uccgagccaagauguaa

SEQ ID NO: 732368 - RNA, 17 nt, Artificial Sequence
  Synthetic
auacuuuuuagauguaa

SEQ ID NO: 732369 - RNA, 17 nt, Artificial Sequence
  Synthetic
uguggacacugauguaa

SEQ ID NO: 732370 - RNA, 17 nt, Artificial Sequence
  Synthetic
uuacauaugcuauguaa

SEQ ID NO: 732371 - RNA, 17 nt, Artificial Sequence
  Synthetic
uugccacauguauguaa

SEQ ID NO: 732372 - RNA, 17 nt, Artificial Sequence
  Synthetic
ccuuuaccauuauguaa

SEQ ID NO: 732373 - RNA, 17 nt, Artificial Sequence
  Synthetic
cuucaaugauuauguaa

SEQ ID NO: 732374 - RNA, 17 nt, Artificial Sequence
  Synthetic
uuaucuauguuauguaa

SEQ ID NO: 732375 - RNA, 17 nt, Artificial Sequence
  Synthetic
uugccagguuuauguaa

SEQ ID NO: 732376 - RNA, 17 nt, Artificial Sequence
  Synthetic
cauuuauacaacuguaa

SEQ ID NO: 732377 - RNA, 17 nt, Artificial Sequence
  Synthetic
uacuguggucacuguaa

SEQ ID NO: 732378 - RNA, 17 nt, Artificial Sequence
  Synthetic
cuucaaagagacuguaa

SEQ ID NO: 732379 - RNA, 17 nt, Artificial Sequence
  Synthetic
aaauguguugacuguaa

SEQ ID NO: 732380 - RNA, 17 nt, Artificial Sequence
  Synthetic
agucuuuuuuacuguaa

SEQ ID NO: 732381 - RNA, 17 nt, Artificial Sequence
  Synthetic
caaaaguugaccuguaa

SEQ ID NO: 732382 - RNA, 17 nt, Artificial Sequence
  Synthetic
agaccuucacccuguaa

SEQ ID NO: 732383 - RNA, 17 nt, Artificial Sequence
  Synthetic
auuuaaauuuccuguaa

SEQ ID NO: 732384 - RNA, 17 nt, Artificial Sequence
  Synthetic
caaccuaacagcuguaa

SEQ ID NO: 732385 - RNA, 17 nt, Artificial Sequence
  Synthetic
uugauuuagagcuguaa

SEQ ID NO: 732386 - RNA, 17 nt, Artificial Sequence
  Synthetic
uuauaacagaucuguaa

SEQ ID NO: 732387 - RNA, 17 nt, Artificial Sequence
  Synthetic
uagaggguuaucuguaa

SEQ ID NO: 732388 - RNA, 17 nt, Artificial Sequence
  Synthetic
uuaguuguucucuguaa

SEQ ID NO: 732389 - RNA, 17 nt, Artificial Sequence
  Synthetic
cauuugcuugucuguaa

SEQ ID NO: 732390 - RNA, 17 nt, Artificial Sequence
  Synthetic
auucaaucauucuguaa

SEQ ID NO: 732391 - RNA, 17 nt, Artificial Sequence
  Synthetic
cauuuuuucuucuguaa

SEQ ID NO: 732392 - RNA, 17 nt, Artificial Sequence
  Synthetic
uccugccuuuucuguaa

SEQ ID NO: 732393 - RNA, 17 nt, Artificial Sequence
  Synthetic
ugacauuuacaguguaa

SEQ ID NO: 732394 - RNA, 17 nt, Artificial Sequence
  Synthetic
uccauguuggaguguaa

SEQ ID NO: 732395 - RNA, 17 nt, Artificial Sequence
  Synthetic
auagagagugaguguaa

SEQ ID NO: 732396 - RNA, 17 nt, Artificial Sequence
  Synthetic
uguguggauuaguguaa

SEQ ID NO: 732397 - RNA, 17 nt, Artificial Sequence
  Synthetic
ucauagaguugguguaa

SEQ ID NO: 732398 - RNA, 17 nt, Artificial Sequence
  Synthetic
uagcauguaauguguaa

SEQ ID NO: 732399 - RNA, 17 nt, Artificial Sequence
  Synthetic
ccagauaaccuguguaa

SEQ ID NO: 732400 - RNA, 17 nt, Artificial Sequence
  Synthetic
aucacuuaccuguguaa

SEQ ID NO: 732401 - RNA, 17 nt, Artificial Sequence
  Synthetic
augcauagauuguguaa

SEQ ID NO: 732402 - RNA, 17 nt, Artificial Sequence
  Synthetic
uguagcuucuuguguaa

SEQ ID NO: 732403 - RNA, 17 nt, Artificial Sequence
  Synthetic
accuuccaaaauuguaa

SEQ ID NO: 732404 - RNA, 17 nt, Artificial Sequence
  Synthetic
acuaauagaaauuguaa

SEQ ID NO: 732405 - RNA, 17 nt, Artificial Sequence
  Synthetic
cagcagaguaauuguaa

SEQ ID NO: 732406 - RNA, 17 nt, Artificial Sequence
  Synthetic
uucauucuacauuguaa

SEQ ID NO: 732407 - RNA, 17 nt, Artificial Sequence
  Synthetic
ucgcagccagauuguaa

SEQ ID NO: 732408 - RNA, 17 nt, Artificial Sequence
  Synthetic
aaaaaauaaacuuguaa

SEQ ID NO: 732409 - RNA, 17 nt, Artificial Sequence
  Synthetic
uucuugccaccuuguaa

SEQ ID NO: 732410 - RNA, 17 nt, Artificial Sequence
  Synthetic
uucuaccuuccuuguaa

SEQ ID NO: 732411 - RNA, 17 nt, Artificial Sequence
  Synthetic
augucucuggcuuguaa

SEQ ID NO: 732412 - RNA, 17 nt, Artificial Sequence
  Synthetic
acaucuguggcuuguaa

SEQ ID NO: 732413 - RNA, 17 nt, Artificial Sequence
  Synthetic
ugaagaauguguuguaa

SEQ ID NO: 732414 - RNA, 17 nt, Artificial Sequence
  Synthetic
auuucucccauuuguaa

SEQ ID NO: 732415 - RNA, 17 nt, Artificial Sequence
  Synthetic
aaugugauuauuuguaa

SEQ ID NO: 732416 - RNA, 17 nt, Artificial Sequence
  Synthetic
auuccauaaguuuguaa

SEQ ID NO: 732417 - RNA, 17 nt, Artificial Sequence
  Synthetic
uugggccucuuuuguaa

SEQ ID NO: 732418 - RNA, 17 nt, Artificial Sequence
  Synthetic
uacuacauguuuuguaa

SEQ ID NO: 732419 - RNA, 17 nt, Artificial Sequence
  Synthetic
acaacuuuuuuuuguaa

SEQ ID NO: 732420 - RNA, 17 nt, Artificial Sequence
  Synthetic
aagugauaaaaaauuaa

SEQ ID NO: 732421 - RNA, 17 nt, Artificial Sequence
  Synthetic
aauucagagaaaauuaa

SEQ ID NO: 732422 - RNA, 17 nt, Artificial Sequence
  Synthetic
uuugcaaugaaaauuaa

SEQ ID NO: 732423 - RNA, 17 nt, Artificial Sequence
  Synthetic
ccuaaguauaaaauuaa

SEQ ID NO: 732424 - RNA, 17 nt, Artificial Sequence
  Synthetic
uuugccaugcaaauuaa

SEQ ID NO: 732425 - RNA, 17 nt, Artificial Sequence
  Synthetic
uuagaaguggaaauuaa

SEQ ID NO: 732426 - RNA, 17 nt, Artificial Sequence
  Synthetic
aaucagugauaaauuaa

SEQ ID NO: 732427 - RNA, 17 nt, Artificial Sequence
  Synthetic
caauuuggguaaauuaa

SEQ ID NO: 732428 - RNA, 17 nt, Artificial Sequence
  Synthetic
augggugugacaauuaa

SEQ ID NO: 732429 - RNA, 17 nt, Artificial Sequence
  Synthetic
augggcagcccaauuaa

SEQ ID NO: 732430 - RNA, 17 nt, Artificial Sequence
  Synthetic
cuaccauuaucaauuaa

SEQ ID NO: 732431 - RNA, 17 nt, Artificial Sequence
  Synthetic
agaaagaagucaauuaa

SEQ ID NO: 732432 - RNA, 17 nt, Artificial Sequence
  Synthetic
agcuaaaaaagaauuaa

SEQ ID NO: 732433 - RNA, 17 nt, Artificial Sequence
  Synthetic
cuucacaaaagaauuaa

SEQ ID NO: 732434 - RNA, 17 nt, Artificial Sequence
  Synthetic
cuuccacauagaauuaa

SEQ ID NO: 732435 - RNA, 17 nt, Artificial Sequence
  Synthetic
augaaaacaugaauuaa

SEQ ID NO: 732436 - RNA, 17 nt, Artificial Sequence
  Synthetic
aacauuuggugaauuaa

SEQ ID NO: 732437 - RNA, 17 nt, Artificial Sequence
  Synthetic
aauacagauugaauuaa

SEQ ID NO: 732438 - RNA, 17 nt, Artificial Sequence
  Synthetic
aaucaauuuugaauuaa

SEQ ID NO: 732439 - RNA, 17 nt, Artificial Sequence
  Synthetic
uucauguaauuaauuaa

SEQ ID NO: 732440 - RNA, 17 nt, Artificial Sequence
  Synthetic
aauuuucuguuaauuaa

SEQ ID NO: 732441 - RNA, 17 nt, Artificial Sequence
  Synthetic
aggcucacaaacauuaa

SEQ ID NO: 732442 - RNA, 17 nt, Artificial Sequence
  Synthetic
uauaaagcaaacauuaa

SEQ ID NO: 732443 - RNA, 17 nt, Artificial Sequence
  Synthetic
cauuacccuaacauuaa

SEQ ID NO: 732444 - RNA, 17 nt, Artificial Sequence
  Synthetic
auuguagcuaacauuaa

SEQ ID NO: 732445 - RNA, 17 nt, Artificial Sequence
  Synthetic
aaaaauggacacauuaa

SEQ ID NO: 732446 - RNA, 17 nt, Artificial Sequence
  Synthetic
aacagccugcacauuaa

SEQ ID NO: 732447 - RNA, 17 nt, Artificial Sequence
  Synthetic
cagaauacauacauuaa

SEQ ID NO: 732448 - RNA, 17 nt, Artificial Sequence
  Synthetic
augcaucuuuacauuaa

SEQ ID NO: 732449 - RNA, 17 nt, Artificial Sequence
  Synthetic
uauaagaaaaccauuaa

SEQ ID NO: 732450 - RNA, 17 nt, Artificial Sequence
  Synthetic
auuaaaaacaccauuaa

SEQ ID NO: 732451 - RNA, 17 nt, Artificial Sequence
  Synthetic
auccuguccaccauuaa

SEQ ID NO: 732452 - RNA, 17 nt, Artificial Sequence
  Synthetic
accuaggugcccauuaa

SEQ ID NO: 732453 - RNA, 17 nt, Artificial Sequence
  Synthetic
uuucuaagucccauuaa

SEQ ID NO: 732454 - RNA, 17 nt, Artificial Sequence
  Synthetic
ccuccaggagccauuaa

SEQ ID NO: 732455 - RNA, 17 nt, Artificial Sequence
  Synthetic
agaacugagagcauuaa

SEQ ID NO: 732456 - RNA, 17 nt, Artificial Sequence
  Synthetic
uguuuugcaaucauuaa

SEQ ID NO: 732457 - RNA, 17 nt, Artificial Sequence
  Synthetic
agcuucugaaucauuaa

SEQ ID NO: 732458 - RNA, 17 nt, Artificial Sequence
  Synthetic
aguugacuaaucauuaa

SEQ ID NO: 732459 - RNA, 17 nt, Artificial Sequence
  Synthetic
ucuuugaguaucauuaa

SEQ ID NO: 732460 - RNA, 17 nt, Artificial Sequence
  Synthetic
caaaaagguaucauuaa

SEQ ID NO: 732461 - RNA, 17 nt, Artificial Sequence
  Synthetic
auugugggugucauuaa

SEQ ID NO: 732462 - RNA, 17 nt, Artificial Sequence
  Synthetic
uugaaagcauucauuaa

SEQ ID NO: 732463 - RNA, 17 nt, Artificial Sequence
  Synthetic
aaaaaaauguucauuaa

SEQ ID NO: 732464 - RNA, 17 nt, Artificial Sequence
  Synthetic
aaugcaauguucauuaa

SEQ ID NO: 732465 - RNA, 17 nt, Artificial Sequence
  Synthetic
uaaggaacaaagauuaa

SEQ ID NO: 732466 - RNA, 17 nt, Artificial Sequence
  Synthetic
uauuagucaaagauuaa

SEQ ID NO: 732467 - RNA, 17 nt, Artificial Sequence
  Synthetic
uuuaggagaaagauuaa

SEQ ID NO: 732468 - RNA, 17 nt, Artificial Sequence
  Synthetic
acauuaaccaagauuaa

SEQ ID NO: 732469 - RNA, 17 nt, Artificial Sequence
  Synthetic
aggaagacgaagauuaa

SEQ ID NO: 732470 - RNA, 17 nt, Artificial Sequence
  Synthetic
uuuagaaaaccgauuaa

SEQ ID NO: 732471 - RNA, 17 nt, Artificial Sequence
  Synthetic
cacuguucuaggauuaa

SEQ ID NO: 732472 - RNA, 17 nt, Artificial Sequence
  Synthetic
acuacccuuaggauuaa

SEQ ID NO: 732473 - RNA, 17 nt, Artificial Sequence
  Synthetic
ucuguggaugggauuaa

SEQ ID NO: 732474 - RNA, 17 nt, Artificial Sequence
  Synthetic
ucaaaucauuggauuaa

SEQ ID NO: 732475 - RNA, 17 nt, Artificial Sequence
  Synthetic
cuuuaaacaaugauuaa

SEQ ID NO: 732476 - RNA, 17 nt, Artificial Sequence
  Synthetic
uuauuggaacugauuaa

SEQ ID NO: 732477 - RNA, 17 nt, Artificial Sequence
  Synthetic
cagcagucauugauuaa

SEQ ID NO: 732478 - RNA, 17 nt, Artificial Sequence
  Synthetic
uuacugcuguugauuaa

SEQ ID NO: 732479 - RNA, 17 nt, Artificial Sequence
  Synthetic
aacugaaguuugauuaa

SEQ ID NO: 732480 - RNA, 17 nt, Artificial Sequence
  Synthetic
uguguaugaaauauuaa

SEQ ID NO: 732481 - RNA, 17 nt, Artificial Sequence
  Synthetic
uuuuugaggaauauuaa

SEQ ID NO: 732482 - RNA, 17 nt, Artificial Sequence
  Synthetic
uaacuccuuaauauuaa

SEQ ID NO: 732483 - RNA, 17 nt, Artificial Sequence
  Synthetic
cuaaauguuaauauuaa

SEQ ID NO: 732484 - RNA, 17 nt, Artificial Sequence
  Synthetic
uuuaaauaacauauuaa

SEQ ID NO: 732485 - RNA, 17 nt, Artificial Sequence
  Synthetic
aauuauucccauauuaa

SEQ ID NO: 732486 - RNA, 17 nt, Artificial Sequence
  Synthetic
auauuuucagauauuaa

SEQ ID NO: 732487 - RNA, 17 nt, Artificial Sequence
  Synthetic
aaacaaugcuauauuaa

SEQ ID NO: 732488 - RNA, 17 nt, Artificial Sequence
  Synthetic
auuuagacuuauauuaa

SEQ ID NO: 732489 - RNA, 17 nt, Artificial Sequence
  Synthetic
aauuuaauuuauauuaa

SEQ ID NO: 732490 - RNA, 17 nt, Artificial Sequence
  Synthetic
uuugaacuuuauauuaa

SEQ ID NO: 732491 - RNA, 17 nt, Artificial Sequence
  Synthetic
ucucaaaugacuauuaa

SEQ ID NO: 732492 - RNA, 17 nt, Artificial Sequence
  Synthetic
ugauguuaugcuauuaa

SEQ ID NO: 732493 - RNA, 17 nt, Artificial Sequence
  Synthetic
caagagcuaucuauuaa

SEQ ID NO: 732494 - RNA, 17 nt, Artificial Sequence
  Synthetic
augauacuaaguauuaa

SEQ ID NO: 732495 - RNA, 17 nt, Artificial Sequence
  Synthetic
cauugugacaguauuaa

SEQ ID NO: 732496 - RNA, 17 nt, Artificial Sequence
  Synthetic
uggggcuuuuguauuaa

SEQ ID NO: 732497 - RNA, 17 nt, Artificial Sequence
  Synthetic
uauuuuucaauuauuaa

SEQ ID NO: 732498 - RNA, 17 nt, Artificial Sequence
  Synthetic
ugaaucuguauuauuaa

SEQ ID NO: 732499 - RNA, 17 nt, Artificial Sequence
  Synthetic
auauuuuaaguuauuaa

SEQ ID NO: 732500 - RNA, 17 nt, Artificial Sequence
  Synthetic
uuucagugcuuuauuaa

SEQ ID NO: 732501 - RNA, 17 nt, Artificial Sequence
  Synthetic
aaagccuauuuuauuaa

SEQ ID NO: 732502 - RNA, 17 nt, Artificial Sequence
  Synthetic
cugaauauuuuuauuaa

SEQ ID NO: 732503 - RNA, 17 nt, Artificial Sequence
  Synthetic
aauggagaaaaacuuaa

SEQ ID NO: 732504 - RNA, 17 nt, Artificial Sequence
  Synthetic
uacagggcaaaacuuaa

SEQ ID NO: 732505 - RNA, 17 nt, Artificial Sequence
  Synthetic
uaggauaaucaacuuaa

SEQ ID NO: 732506 - RNA, 17 nt, Artificial Sequence
  Synthetic
caacacucucaacuuaa

SEQ ID NO: 732507 - RNA, 17 nt, Artificial Sequence
  Synthetic
uaccacacggaacuuaa

SEQ ID NO: 732508 - RNA, 17 nt, Artificial Sequence
  Synthetic
agucaguaauaacuuaa

SEQ ID NO: 732509 - RNA, 17 nt, Artificial Sequence
  Synthetic
accacaaaguaacuuaa

SEQ ID NO: 732510 - RNA, 17 nt, Artificial Sequence
  Synthetic
auuuuuauuuaacuuaa

SEQ ID NO: 732511 - RNA, 17 nt, Artificial Sequence
  Synthetic
uaaaaaauaacacuuaa

SEQ ID NO: 732512 - RNA, 17 nt, Artificial Sequence
  Synthetic
cuuuugcuaacacuuaa

SEQ ID NO: 732513 - RNA, 17 nt, Artificial Sequence
  Synthetic
cagcaccuagcacuuaa

SEQ ID NO: 732514 - RNA, 17 nt, Artificial Sequence
  Synthetic
cucaagcaggcacuuaa

SEQ ID NO: 732515 - RNA, 17 nt, Artificial Sequence
  Synthetic
uuggcaauaucacuuaa

SEQ ID NO: 732516 - RNA, 17 nt, Artificial Sequence
  Synthetic
agcuuaaaaagacuuaa

SEQ ID NO: 732517 - RNA, 17 nt, Artificial Sequence
  Synthetic
aaugauuacagacuuaa

SEQ ID NO: 732518 - RNA, 17 nt, Artificial Sequence
  Synthetic
agauuuuaaauacuuaa

SEQ ID NO: 732519 - RNA, 17 nt, Artificial Sequence
  Synthetic
augucgucaauacuuaa

SEQ ID NO: 732520 - RNA, 17 nt, Artificial Sequence
  Synthetic
uuagcuuuaauacuuaa

SEQ ID NO: 732521 - RNA, 17 nt, Artificial Sequence
  Synthetic
cugguuuaacuacuuaa

SEQ ID NO: 732522 - RNA, 17 nt, Artificial Sequence
  Synthetic
cuucucuuccuacuuaa

SEQ ID NO: 732523 - RNA, 17 nt, Artificial Sequence
  Synthetic
acaccagugcuacuuaa

SEQ ID NO: 732524 - RNA, 17 nt, Artificial Sequence
  Synthetic
cuucagccucuacuuaa

SEQ ID NO: 732525 - RNA, 17 nt, Artificial Sequence
  Synthetic
accuguuugguacuuaa

SEQ ID NO: 732526 - RNA, 17 nt, Artificial Sequence
  Synthetic
uucguaaauguacuuaa

SEQ ID NO: 732527 - RNA, 17 nt, Artificial Sequence
  Synthetic
uauacuuguguacuuaa

SEQ ID NO: 732528 - RNA, 17 nt, Artificial Sequence
  Synthetic
agugagaaauuacuuaa

SEQ ID NO: 732529 - RNA, 17 nt, Artificial Sequence
  Synthetic
agaacuuuaaaccuuaa

SEQ ID NO: 732530 - RNA, 17 nt, Artificial Sequence
  Synthetic
auuagaaccaaccuuaa

SEQ ID NO: 732531 - RNA, 17 nt, Artificial Sequence
  Synthetic
aaaugcaauaaccuuaa

SEQ ID NO: 732532 - RNA, 17 nt, Artificial Sequence
  Synthetic
auuuacuaccaccuuaa

SEQ ID NO: 732533 - RNA, 17 nt, Artificial Sequence
  Synthetic
aauagucucacccuuaa

SEQ ID NO: 732534 - RNA, 17 nt, Artificial Sequence
  Synthetic
uaaucuaagacccuuaa

SEQ ID NO: 732535 - RNA, 17 nt, Artificial Sequence
  Synthetic
auaaugggaagccuuaa

SEQ ID NO: 732536 - RNA, 17 nt, Artificial Sequence
  Synthetic
aaauguuugagccuuaa

SEQ ID NO: 732537 - RNA, 17 nt, Artificial Sequence
  Synthetic
uccaaauaaugccuuaa

SEQ ID NO: 732538 - RNA, 17 nt, Artificial Sequence
  Synthetic
uuccguaaaauccuuaa

SEQ ID NO: 732539 - RNA, 17 nt, Artificial Sequence
  Synthetic
acuccuuuuauccuuaa

SEQ ID NO: 732540 - RNA, 17 nt, Artificial Sequence
  Synthetic
ucuauaggucuccuuaa

SEQ ID NO: 732541 - RNA, 17 nt, Artificial Sequence
  Synthetic
cuuuguaucuuccuuaa

SEQ ID NO: 732542 - RNA, 17 nt, Artificial Sequence
  Synthetic
agguuucaguuccuuaa

SEQ ID NO: 732543 - RNA, 17 nt, Artificial Sequence
  Synthetic
caagaaacuuuccuuaa

SEQ ID NO: 732544 - RNA, 17 nt, Artificial Sequence
  Synthetic
cuccuuccuuuccuuaa

SEQ ID NO: 732545 - RNA, 17 nt, Artificial Sequence
  Synthetic
cccaauuagaagcuuaa

SEQ ID NO: 732546 - RNA, 17 nt, Artificial Sequence
  Synthetic
uccuaccugaagcuuaa

SEQ ID NO: 732547 - RNA, 17 nt, Artificial Sequence
  Synthetic
ugguacuuggagcuuaa

SEQ ID NO: 732548 - RNA, 17 nt, Artificial Sequence
  Synthetic
cuggaauuauagcuuaa

SEQ ID NO: 732549 - RNA, 17 nt, Artificial Sequence
  Synthetic
aguaaaaagaggcuuaa

SEQ ID NO: 732550 - RNA, 17 nt, Artificial Sequence
  Synthetic
uuggagguggggcuuaa

SEQ ID NO: 732551 - RNA, 17 nt, Artificial Sequence
  Synthetic
ugugcagccuggcuuaa

SEQ ID NO: 732552 - RNA, 17 nt, Artificial Sequence
  Synthetic
acuccagaaaugcuuaa

SEQ ID NO: 732553 - RNA, 17 nt, Artificial Sequence
  Synthetic
ucagguuucaugcuuaa

SEQ ID NO: 732554 - RNA, 17 nt, Artificial Sequence
  Synthetic
auaucuaaacugcuuaa

SEQ ID NO: 732555 - RNA, 17 nt, Artificial Sequence
  Synthetic
cacaaccaucugcuuaa

SEQ ID NO: 732556 - RNA, 17 nt, Artificial Sequence
  Synthetic
uguauuccucugcuuaa

SEQ ID NO: 732557 - RNA, 17 nt, Artificial Sequence
  Synthetic
uacagagaagugcuuaa

SEQ ID NO: 732558 - RNA, 17 nt, Artificial Sequence
  Synthetic
uccacagcagugcuuaa

SEQ ID NO: 732559 - RNA, 17 nt, Artificial Sequence
  Synthetic
acauagagggugcuuaa

SEQ ID NO: 732560 - RNA, 17 nt, Artificial Sequence
  Synthetic
ucuucuacugugcuuaa

SEQ ID NO: 732561 - RNA, 17 nt, Artificial Sequence
  Synthetic
cacccaugauugcuuaa

SEQ ID NO: 732562 - RNA, 17 nt, Artificial Sequence
  Synthetic
uuugugcuguugcuuaa

SEQ ID NO: 732563 - RNA, 17 nt, Artificial Sequence
  Synthetic
uuauaguuguugcuuaa

SEQ ID NO: 732564 - RNA, 17 nt, Artificial Sequence
  Synthetic
aacauuauuuugcuuaa

SEQ ID NO: 732565 - RNA, 17 nt, Artificial Sequence
  Synthetic
cagauuucaaaucuuaa

SEQ ID NO: 732566 - RNA, 17 nt, Artificial Sequence
  Synthetic
agacacgucaaucuuaa

SEQ ID NO: 732567 - RNA, 17 nt, Artificial Sequence
  Synthetic
uauuagcauaaucuuaa

SEQ ID NO: 732568 - RNA, 17 nt, Artificial Sequence
  Synthetic
acuucauuuaaucuuaa

SEQ ID NO: 732569 - RNA, 17 nt, Artificial Sequence
  Synthetic
uguuauuuuaaucuuaa

SEQ ID NO: 732570 - RNA, 17 nt, Artificial Sequence
  Synthetic
caauucauagaucuuaa

SEQ ID NO: 732571 - RNA, 17 nt, Artificial Sequence
  Synthetic
ccggaaauggaucuuaa

SEQ ID NO: 732572 - RNA, 17 nt, Artificial Sequence
  Synthetic
cuuguuucugaucuuaa

SEQ ID NO: 732573 - RNA, 17 nt, Artificial Sequence
  Synthetic
aaaacuuucuaucuuaa

SEQ ID NO: 732574 - RNA, 17 nt, Artificial Sequence
  Synthetic
augcaaucaccucuuaa

SEQ ID NO: 732575 - RNA, 17 nt, Artificial Sequence
  Synthetic
acuggauaagcucuuaa

SEQ ID NO: 732576 - RNA, 17 nt, Artificial Sequence
  Synthetic
acuguuacagcucuuaa

SEQ ID NO: 732577 - RNA, 17 nt, Artificial Sequence
  Synthetic
cagacuauggcucuuaa

SEQ ID NO: 732578 - RNA, 17 nt, Artificial Sequence
  Synthetic
auaucagagucucuuaa

SEQ ID NO: 732579 - RNA, 17 nt, Artificial Sequence
  Synthetic
ccaaccucuucucuuaa

SEQ ID NO: 732580 - RNA, 17 nt, Artificial Sequence
  Synthetic
caccauccaagucuuaa

SEQ ID NO: 732581 - RNA, 17 nt, Artificial Sequence
  Synthetic
ugaauuuucagucuuaa

SEQ ID NO: 732582 - RNA, 17 nt, Artificial Sequence
  Synthetic
caugucagaggucuuaa

SEQ ID NO: 732583 - RNA, 17 nt, Artificial Sequence
  Synthetic
ucugggaugggucuuaa

SEQ ID NO: 732584 - RNA, 17 nt, Artificial Sequence
  Synthetic
uguaguaacugucuuaa

SEQ ID NO: 732585 - RNA, 17 nt, Artificial Sequence
  Synthetic
agcaguaagugucuuaa

SEQ ID NO: 732586 - RNA, 17 nt, Artificial Sequence
  Synthetic
uauuuauggugucuuaa

SEQ ID NO: 732587 - RNA, 17 nt, Artificial Sequence
  Synthetic
uaaguuagaauucuuaa

SEQ ID NO: 732588 - RNA, 17 nt, Artificial Sequence
  Synthetic
auaaucuucauucuuaa

SEQ ID NO: 732589 - RNA, 17 nt, Artificial Sequence
  Synthetic
uaagaacagauucuuaa

SEQ ID NO: 732590 - RNA, 17 nt, Artificial Sequence
  Synthetic
uacuuaaaacuucuuaa

SEQ ID NO: 732591 - RNA, 17 nt, Artificial Sequence
  Synthetic
auagguugccuucuuaa

SEQ ID NO: 732592 - RNA, 17 nt, Artificial Sequence
  Synthetic
aaugccuuccuucuuaa

SEQ ID NO: 732593 - RNA, 17 nt, Artificial Sequence
  Synthetic
accaauuaucuucuuaa

SEQ ID NO: 732594 - RNA, 17 nt, Artificial Sequence
  Synthetic
accuagugauuucuuaa

SEQ ID NO: 732595 - RNA, 17 nt, Artificial Sequence
  Synthetic
aucacaaauuuucuuaa

SEQ ID NO: 732596 - RNA, 17 nt, Artificial Sequence
  Synthetic
uuauuccuuuuucuuaa

SEQ ID NO: 732597 - RNA, 17 nt, Artificial Sequence
  Synthetic
uuacagcaaaaaguuaa

SEQ ID NO: 732598 - RNA, 17 nt, Artificial Sequence
  Synthetic
uguaaaugacaaguuaa

SEQ ID NO: 732599 - RNA, 17 nt, Artificial Sequence
  Synthetic
uuuaucuuccaaguuaa

SEQ ID NO: 732600 - RNA, 17 nt, Artificial Sequence
  Synthetic
cauauggcugaaguuaa

SEQ ID NO: 732601 - RNA, 17 nt, Artificial Sequence
  Synthetic
augagucuugaaguuaa

SEQ ID NO: 732602 - RNA, 17 nt, Artificial Sequence
  Synthetic
uguauaguuuaaguuaa

SEQ ID NO: 732603 - RNA, 17 nt, Artificial Sequence
  Synthetic
aauaaaaaaacaguuaa

SEQ ID NO: 732604 - RNA, 17 nt, Artificial Sequence
  Synthetic
uuauaacugccaguuaa

SEQ ID NO: 732605 - RNA, 17 nt, Artificial Sequence
  Synthetic
ugcuacaugucaguuaa

SEQ ID NO: 732606 - RNA, 17 nt, Artificial Sequence
  Synthetic
auuucaggaagaguuaa

SEQ ID NO: 732607 - RNA, 17 nt, Artificial Sequence
  Synthetic
caauacuagagaguuaa

SEQ ID NO: 732608 - RNA, 17 nt, Artificial Sequence
  Synthetic
uguaaaugacgaguuaa

SEQ ID NO: 732609 - RNA, 17 nt, Artificial Sequence
  Synthetic
caaggcauaggaguuaa

SEQ ID NO: 732610 - RNA, 17 nt, Artificial Sequence
  Synthetic
ucuuacuuaggaguuaa

SEQ ID NO: 732611 - RNA, 17 nt, Artificial Sequence
  Synthetic
acaaucauaugaguuaa

SEQ ID NO: 732612 - RNA, 17 nt, Artificial Sequence
  Synthetic
aguuccagcugaguuaa

SEQ ID NO: 732613 - RNA, 17 nt, Artificial Sequence
  Synthetic
ugguuuaauauaguuaa

SEQ ID NO: 732614 - RNA, 17 nt, Artificial Sequence
  Synthetic
agaaaauauauaguuaa

SEQ ID NO: 732615 - RNA, 17 nt, Artificial Sequence
  Synthetic
uucuacacuauaguuaa

SEQ ID NO: 732616 - RNA, 17 nt, Artificial Sequence
  Synthetic
aguuuauuccuaguuaa

SEQ ID NO: 732617 - RNA, 17 nt, Artificial Sequence
  Synthetic
aacauacaucuaguuaa

SEQ ID NO: 732618 - RNA, 17 nt, Artificial Sequence
  Synthetic
uuggagaaguuaguuaa

SEQ ID NO: 732619 - RNA, 17 nt, Artificial Sequence
  Synthetic
aaaaaacaucacguuaa

SEQ ID NO: 732620 - RNA, 17 nt, Artificial Sequence
  Synthetic
cuucuuucucacguuaa

SEQ ID NO: 732621 - RNA, 17 nt, Artificial Sequence
  Synthetic
caauauuuucucguuaa

SEQ ID NO: 732622 - RNA, 17 nt, Artificial Sequence
  Synthetic
uagucaaaauagguuaa

SEQ ID NO: 732623 - RNA, 17 nt, Artificial Sequence
  Synthetic
auaaauuaauagguuaa

SEQ ID NO: 732624 - RNA, 17 nt, Artificial Sequence
  Synthetic
acccuaacaaggguuaa

SEQ ID NO: 732625 - RNA, 17 nt, Artificial Sequence
  Synthetic
aacugcuuugggguuaa

SEQ ID NO: 732626 - RNA, 17 nt, Artificial Sequence
  Synthetic
aucuaagugcugguuaa

SEQ ID NO: 732627 - RNA, 17 nt, Artificial Sequence
  Synthetic
acaagaagaaauguuaa

SEQ ID NO: 732628 - RNA, 17 nt, Artificial Sequence
  Synthetic
uuuauuuauaauguuaa

SEQ ID NO: 732629 - RNA, 17 nt, Artificial Sequence
  Synthetic
ucagaggguaauguuaa

SEQ ID NO: 732630 - RNA, 17 nt, Artificial Sequence
  Synthetic
auaaaacuagauguuaa

SEQ ID NO: 732631 - RNA, 17 nt, Artificial Sequence
  Synthetic
ucauuuuuggauguuaa

SEQ ID NO: 732632 - RNA, 17 nt, Artificial Sequence
  Synthetic
ucucugguugauguuaa

SEQ ID NO: 732633 - RNA, 17 nt, Artificial Sequence
  Synthetic
aaauguguugauguuaa

SEQ ID NO: 732634 - RNA, 17 nt, Artificial Sequence
  Synthetic
uugcgguacuauguuaa

SEQ ID NO: 732635 - RNA, 17 nt, Artificial Sequence
  Synthetic
uaaaguuucuauguuaa

SEQ ID NO: 732636 - RNA, 17 nt, Artificial Sequence
  Synthetic
uaaucuagguauguuaa

SEQ ID NO: 732637 - RNA, 17 nt, Artificial Sequence
  Synthetic
uuugauacuuauguuaa

SEQ ID NO: 732638 - RNA, 17 nt, Artificial Sequence
  Synthetic
cuucacugcccuguuaa

SEQ ID NO: 732639 - RNA, 17 nt, Artificial Sequence
  Synthetic
uauugaaugccuguuaa

SEQ ID NO: 732640 - RNA, 17 nt, Artificial Sequence
  Synthetic
uauguauuuccuguuaa

SEQ ID NO: 732641 - RNA, 17 nt, Artificial Sequence
  Synthetic
aaaccagaaucuguuaa

SEQ ID NO: 732642 - RNA, 17 nt, Artificial Sequence
  Synthetic
uuugagucaaguguuaa

SEQ ID NO: 732643 - RNA, 17 nt, Artificial Sequence
  Synthetic
agauauuucaguguuaa

SEQ ID NO: 732644 - RNA, 17 nt, Artificial Sequence
  Synthetic
ucuggaaaauguguuaa

SEQ ID NO: 732645 - RNA, 17 nt, Artificial Sequence
  Synthetic
uucuuuauauguguuaa

SEQ ID NO: 732646 - RNA, 17 nt, Artificial Sequence
  Synthetic
caauuauuuuguguuaa

SEQ ID NO: 732647 - RNA, 17 nt, Artificial Sequence
  Synthetic
uuaagagaaauuguuaa

SEQ ID NO: 732648 - RNA, 17 nt, Artificial Sequence
  Synthetic
ucugguuauauuguuaa

SEQ ID NO: 732649 - RNA, 17 nt, Artificial Sequence
  Synthetic
cuauugauuauuguuaa

SEQ ID NO: 732650 - RNA, 17 nt, Artificial Sequence
  Synthetic
cuaauaaugguuguuaa

SEQ ID NO: 732651 - RNA, 17 nt, Artificial Sequence
  Synthetic
caauggauauuuguuaa

SEQ ID NO: 732652 - RNA, 17 nt, Artificial Sequence
  Synthetic
uucagagcuuuuguuaa

SEQ ID NO: 732653 - RNA, 17 nt, Artificial Sequence
  Synthetic
ccauaaaaaaaauuuaa

SEQ ID NO: 732654 - RNA, 17 nt, Artificial Sequence
  Synthetic
uauuuccaaaaauuuaa

SEQ ID NO: 732655 - RNA, 17 nt, Artificial Sequence
  Synthetic
ugcugaaacaaauuuaa

SEQ ID NO: 732656 - RNA, 17 nt, Artificial Sequence
  Synthetic
uugccucacaaauuuaa

SEQ ID NO: 732657 - RNA, 17 nt, Artificial Sequence
  Synthetic
uagauuucgaaauuuaa

SEQ ID NO: 732658 - RNA, 17 nt, Artificial Sequence
  Synthetic
uuuacuuugaaauuuaa

SEQ ID NO: 732659 - RNA, 17 nt, Artificial Sequence
  Synthetic
agagguacacaauuuaa

SEQ ID NO: 732660 - RNA, 17 nt, Artificial Sequence
  Synthetic
uaauuaugacaauuuaa

SEQ ID NO: 732661 - RNA, 17 nt, Artificial Sequence
  Synthetic
acagugacagaauuuaa

SEQ ID NO: 732662 - RNA, 17 nt, Artificial Sequence
  Synthetic
ucuuaaaaauaauuuaa

SEQ ID NO: 732663 - RNA, 17 nt, Artificial Sequence
  Synthetic
auacuguuauaauuuaa

SEQ ID NO: 732664 - RNA, 17 nt, Artificial Sequence
  Synthetic
uagaacuuguaauuuaa

SEQ ID NO: 732665 - RNA, 17 nt, Artificial Sequence
  Synthetic
aaauagaaaacauuuaa

SEQ ID NO: 732666 - RNA, 17 nt, Artificial Sequence
  Synthetic
cauuguuuaacauuuaa

SEQ ID NO: 732667 - RNA, 17 nt, Artificial Sequence
  Synthetic
aguuguaucacauuuaa

SEQ ID NO: 732668 - RNA, 17 nt, Artificial Sequence
  Synthetic
uuauuauauacauuuaa

SEQ ID NO: 732669 - RNA, 17 nt, Artificial Sequence
  Synthetic
uuaugaaauccauuuaa

SEQ ID NO: 732670 - RNA, 17 nt, Artificial Sequence
  Synthetic
auuccauuuccauuuaa

SEQ ID NO: 732671 - RNA, 17 nt, Artificial Sequence
  Synthetic
aauccuguggcauuuaa

SEQ ID NO: 732672 - RNA, 17 nt, Artificial Sequence
  Synthetic
aaccucaaugcauuuaa

SEQ ID NO: 732673 - RNA, 17 nt, Artificial Sequence
  Synthetic
uacagcuaugcauuuaa

SEQ ID NO: 732674 - RNA, 17 nt, Artificial Sequence
  Synthetic
aaacaaccugcauuuaa

SEQ ID NO: 732675 - RNA, 17 nt, Artificial Sequence
  Synthetic
agauuuucuucauuuaa

SEQ ID NO: 732676 - RNA, 17 nt, Artificial Sequence
  Synthetic
caugauaaaagauuuaa

SEQ ID NO: 732677 - RNA, 17 nt, Artificial Sequence
  Synthetic
uacuugaacagauuuaa

SEQ ID NO: 732678 - RNA, 17 nt, Artificial Sequence
  Synthetic
uaaaaucagagauuuaa

SEQ ID NO: 732679 - RNA, 17 nt, Artificial Sequence
  Synthetic
aggaaagauagauuuaa

SEQ ID NO: 732680 - RNA, 17 nt, Artificial Sequence
  Synthetic
ucugagccuagauuuaa

SEQ ID NO: 732681 - RNA, 17 nt, Artificial Sequence
  Synthetic
uauuguuuuagauuuaa

SEQ ID NO: 732682 - RNA, 17 nt, Artificial Sequence
  Synthetic
uaugcugaaggauuuaa

SEQ ID NO: 732683 - RNA, 17 nt, Artificial Sequence
  Synthetic
uggggaaaaugauuuaa

SEQ ID NO: 732684 - RNA, 17 nt, Artificial Sequence
  Synthetic
aagauguacugauuuaa

SEQ ID NO: 732685 - RNA, 17 nt, Artificial Sequence
  Synthetic
aaaauaaguugauuuaa

SEQ ID NO: 732686 - RNA, 17 nt, Artificial Sequence
  Synthetic
cuaauaaaaauauuuaa

SEQ ID NO: 732687 - RNA, 17 nt, Artificial Sequence
  Synthetic
ucaugugaaauauuuaa

SEQ ID NO: 732688 - RNA, 17 nt, Artificial Sequence
  Synthetic
agaacauuaauauuuaa

SEQ ID NO: 732689 - RNA, 17 nt, Artificial Sequence
  Synthetic
aaagucaacauauuuaa

SEQ ID NO: 732690 - RNA, 17 nt, Artificial Sequence
  Synthetic
uuauuguauauauuuaa

SEQ ID NO: 732691 - RNA, 17 nt, Artificial Sequence
  Synthetic
uacuuagguauauuuaa

SEQ ID NO: 732692 - RNA, 17 nt, Artificial Sequence
  Synthetic
uggguaagacuauuuaa

SEQ ID NO: 732693 - RNA, 17 nt, Artificial Sequence
  Synthetic
uuuuauuagcuauuuaa

SEQ ID NO: 732694 - RNA, 17 nt, Artificial Sequence
  Synthetic
aaguuagugcuauuuaa

SEQ ID NO: 732695 - RNA, 17 nt, Artificial Sequence
  Synthetic
aaaccuaaaguauuuaa

SEQ ID NO: 732696 - RNA, 17 nt, Artificial Sequence
  Synthetic
ugaagaaauguauuuaa

SEQ ID NO: 732697 - RNA, 17 nt, Artificial Sequence
  Synthetic
cuugauaauguauuuaa

SEQ ID NO: 732698 - RNA, 17 nt, Artificial Sequence
  Synthetic
acuugcuuuguauuuaa

SEQ ID NO: 732699 - RNA, 17 nt, Artificial Sequence
  Synthetic
uuuacagaauuauuuaa

SEQ ID NO: 732700 - RNA, 17 nt, Artificial Sequence
  Synthetic
uuauaauacuuauuuaa

SEQ ID NO: 732701 - RNA, 17 nt, Artificial Sequence
  Synthetic
acccuucccuuauuuaa

SEQ ID NO: 732702 - RNA, 17 nt, Artificial Sequence
  Synthetic
uugccauuuuuauuuaa

SEQ ID NO: 732703 - RNA, 17 nt, Artificial Sequence
  Synthetic
augaccuuuuuauuuaa

SEQ ID NO: 732704 - RNA, 17 nt, Artificial Sequence
  Synthetic
auaguuuuuuuauuuaa

SEQ ID NO: 732705 - RNA, 17 nt, Artificial Sequence
  Synthetic
cuuagcuggaacuuuaa

SEQ ID NO: 732706 - RNA, 17 nt, Artificial Sequence
  Synthetic
agaaccauugacuuuaa

SEQ ID NO: 732707 - RNA, 17 nt, Artificial Sequence
  Synthetic
cugcagcuguacuuuaa

SEQ ID NO: 732708 - RNA, 17 nt, Artificial Sequence
  Synthetic
cauaauauuuacuuuaa

SEQ ID NO: 732709 - RNA, 17 nt, Artificial Sequence
  Synthetic
cuuaauuaccccuuuaa

SEQ ID NO: 732710 - RNA, 17 nt, Artificial Sequence
  Synthetic
cuagauggccccuuuaa

SEQ ID NO: 732711 - RNA, 17 nt, Artificial Sequence
  Synthetic
uaguaaaaauccuuuaa

SEQ ID NO: 732712 - RNA, 17 nt, Artificial Sequence
  Synthetic
cugugguuuuccuuuaa

SEQ ID NO: 732713 - RNA, 17 nt, Artificial Sequence
  Synthetic
auaaaaaaaagcuuuaa

SEQ ID NO: 732714 - RNA, 17 nt, Artificial Sequence
  Synthetic
uuuacuuagagcuuuaa

SEQ ID NO: 732715 - RNA, 17 nt, Artificial Sequence
  Synthetic
uuuuuuaacaucuuuaa

SEQ ID NO: 732716 - RNA, 17 nt, Artificial Sequence
  Synthetic
ucuacuuccaucuuuaa

SEQ ID NO: 732717 - RNA, 17 nt, Artificial Sequence
  Synthetic
uuuaaaauugucuuuaa

SEQ ID NO: 732718 - RNA, 17 nt, Artificial Sequence
  Synthetic
uauagcuauuucuuuaa

SEQ ID NO: 732719 - RNA, 17 nt, Artificial Sequence
  Synthetic
uacauaucaaaguuuaa

SEQ ID NO: 732720 - RNA, 17 nt, Artificial Sequence
  Synthetic
aagagguacaaguuuaa

SEQ ID NO: 732721 - RNA, 17 nt, Artificial Sequence
  Synthetic
aggaaaaagaaguuuaa

SEQ ID NO: 732722 - RNA, 17 nt, Artificial Sequence
  Synthetic
uauuccuagaaguuuaa

SEQ ID NO: 732723 - RNA, 17 nt, Artificial Sequence
  Synthetic
aggacacugaaguuuaa

SEQ ID NO: 732724 - RNA, 17 nt, Artificial Sequence
  Synthetic
uagcauaaucaguuuaa

SEQ ID NO: 732725 - RNA, 17 nt, Artificial Sequence
  Synthetic
ugacacugagaguuuaa

SEQ ID NO: 732726 - RNA, 17 nt, Artificial Sequence
  Synthetic
acuuuaaaugaguuuaa

SEQ ID NO: 732727 - RNA, 17 nt, Artificial Sequence
  Synthetic
auggaauuuuaguuuaa

SEQ ID NO: 732728 - RNA, 17 nt, Artificial Sequence
  Synthetic
cccucuucugcguuuaa

SEQ ID NO: 732729 - RNA, 17 nt, Artificial Sequence
  Synthetic
agauuguacagguuuaa

SEQ ID NO: 732730 - RNA, 17 nt, Artificial Sequence
  Synthetic
ugaguguccagguuuaa

SEQ ID NO: 732731 - RNA, 17 nt, Artificial Sequence
  Synthetic
aaaagaaagagguuuaa

SEQ ID NO: 732732 - RNA, 17 nt, Artificial Sequence
  Synthetic
aaaggaaagagguuuaa

SEQ ID NO: 732733 - RNA, 17 nt, Artificial Sequence
  Synthetic
aaaacuaugagguuuaa

SEQ ID NO: 732734 - RNA, 17 nt, Artificial Sequence
  Synthetic
aauauuaaaauguuuaa

SEQ ID NO: 732735 - RNA, 17 nt, Artificial Sequence
  Synthetic
uuaaaacaaauguuuaa

SEQ ID NO: 732736 - RNA, 17 nt, Artificial Sequence
  Synthetic
caugccacaauguuuaa

SEQ ID NO: 732737 - RNA, 17 nt, Artificial Sequence
  Synthetic
aagcauuugauguuuaa

SEQ ID NO: 732738 - RNA, 17 nt, Artificial Sequence
  Synthetic
auaaacuauguguuuaa

SEQ ID NO: 732739 - RNA, 17 nt, Artificial Sequence
  Synthetic
cauuaaucauuguuuaa

SEQ ID NO: 732740 - RNA, 17 nt, Artificial Sequence
  Synthetic
acugcccauuuguuuaa

SEQ ID NO: 732741 - RNA, 17 nt, Artificial Sequence
  Synthetic
uuuuuguuuuuguuuaa

SEQ ID NO: 732742 - RNA, 17 nt, Artificial Sequence
  Synthetic
acucuuccaaauuuuaa

SEQ ID NO: 732743 - RNA, 17 nt, Artificial Sequence
  Synthetic
uuugaacuaaauuuuaa

SEQ ID NO: 732744 - RNA, 17 nt, Artificial Sequence
  Synthetic
uuuuacuuaaauuuuaa

SEQ ID NO: 732745 - RNA, 17 nt, Artificial Sequence
  Synthetic
cuuguaagcaauuuuaa

SEQ ID NO: 732746 - RNA, 17 nt, Artificial Sequence
  Synthetic
acaaaagagaauuuuaa

SEQ ID NO: 732747 - RNA, 17 nt, Artificial Sequence
  Synthetic
aaucaccuuaauuuuaa

SEQ ID NO: 732748 - RNA, 17 nt, Artificial Sequence
  Synthetic
aaaagaagacauuuuaa

SEQ ID NO: 732749 - RNA, 17 nt, Artificial Sequence
  Synthetic
aacuauugacauuuuaa

SEQ ID NO: 732750 - RNA, 17 nt, Artificial Sequence
  Synthetic
uuccaguaccauuuuaa

SEQ ID NO: 732751 - RNA, 17 nt, Artificial Sequence
  Synthetic
auuauuuuccauuuuaa

SEQ ID NO: 732752 - RNA, 17 nt, Artificial Sequence
  Synthetic
uuuuucaagcauuuuaa

SEQ ID NO: 732753 - RNA, 17 nt, Artificial Sequence
  Synthetic
ugucucucucauuuuaa

SEQ ID NO: 732754 - RNA, 17 nt, Artificial Sequence
  Synthetic
aguuugggucauuuuaa

SEQ ID NO: 732755 - RNA, 17 nt, Artificial Sequence
  Synthetic
aaauauauucauuuuaa

SEQ ID NO: 732756 - RNA, 17 nt, Artificial Sequence
  Synthetic
ucaggcagagauuuuaa

SEQ ID NO: 732757 - RNA, 17 nt, Artificial Sequence
  Synthetic
cacuuuuaggauuuuaa

SEQ ID NO: 732758 - RNA, 17 nt, Artificial Sequence
  Synthetic
cuuaucaaauauuuuaa

SEQ ID NO: 732759 - RNA, 17 nt, Artificial Sequence
  Synthetic
cuuccuaaauauuuuaa

SEQ ID NO: 732760 - RNA, 17 nt, Artificial Sequence
  Synthetic
acuauuuaauauuuuaa

SEQ ID NO: 732761 - RNA, 17 nt, Artificial Sequence
  Synthetic
caugguugauauuuuaa

SEQ ID NO: 732762 - RNA, 17 nt, Artificial Sequence
  Synthetic
caacaaauauauuuuaa

SEQ ID NO: 732763 - RNA, 17 nt, Artificial Sequence
  Synthetic
uuguaaaccuauuuuaa

SEQ ID NO: 732764 - RNA, 17 nt, Artificial Sequence
  Synthetic
aaacaagucuauuuuaa

SEQ ID NO: 732765 - RNA, 17 nt, Artificial Sequence
  Synthetic
uuaauauguuauuuuaa

SEQ ID NO: 732766 - RNA, 17 nt, Artificial Sequence
  Synthetic
uuguuagucacuuuuaa

SEQ ID NO: 732767 - RNA, 17 nt, Artificial Sequence
  Synthetic
cugccugguacuuuuaa

SEQ ID NO: 732768 - RNA, 17 nt, Artificial Sequence
  Synthetic
aacagaguaccuuuuaa

SEQ ID NO: 732769 - RNA, 17 nt, Artificial Sequence
  Synthetic
uaccucuacccuuuuaa

SEQ ID NO: 732770 - RNA, 17 nt, Artificial Sequence
  Synthetic
auuugguuuccuuuuaa

SEQ ID NO: 732771 - RNA, 17 nt, Artificial Sequence
  Synthetic
aguaugacagcuuuuaa

SEQ ID NO: 732772 - RNA, 17 nt, Artificial Sequence
  Synthetic
aacucugcugcuuuuaa

SEQ ID NO: 732773 - RNA, 17 nt, Artificial Sequence
  Synthetic
uuugccauugcuuuuaa

SEQ ID NO: 732774 - RNA, 17 nt, Artificial Sequence
  Synthetic
aaucaaacuucuuuuaa

SEQ ID NO: 732775 - RNA, 17 nt, Artificial Sequence
  Synthetic
uaguuaaguucuuuuaa

SEQ ID NO: 732776 - RNA, 17 nt, Artificial Sequence
  Synthetic
ccuagagagaguuuuaa

SEQ ID NO: 732777 - RNA, 17 nt, Artificial Sequence
  Synthetic
uuuccagauaguuuuaa

SEQ ID NO: 732778 - RNA, 17 nt, Artificial Sequence
  Synthetic
aaaaaguguaguuuuaa

SEQ ID NO: 732779 - RNA, 17 nt, Artificial Sequence
  Synthetic
aguuaucuuaguuuuaa

SEQ ID NO: 732780 - RNA, 17 nt, Artificial Sequence
  Synthetic
ccagaaguagguuuuaa

SEQ ID NO: 732781 - RNA, 17 nt, Artificial Sequence
  Synthetic
uacaaaaaugguuuuaa

SEQ ID NO: 732782 - RNA, 17 nt, Artificial Sequence
  Synthetic
uuggaacuuuguuuuaa

SEQ ID NO: 732783 - RNA, 17 nt, Artificial Sequence
  Synthetic
uuuguagcaauuuuuaa

SEQ ID NO: 732784 - RNA, 17 nt, Artificial Sequence
  Synthetic
ugcaaaauaauuuuuaa

SEQ ID NO: 732785 - RNA, 17 nt, Artificial Sequence
  Synthetic
agaaugauaauuuuuaa

SEQ ID NO: 732786 - RNA, 17 nt, Artificial Sequence
  Synthetic
uuuuuguucauuuuuaa

SEQ ID NO: 732787 - RNA, 17 nt, Artificial Sequence
  Synthetic
cgaacaaagauuuuuaa

SEQ ID NO: 732788 - RNA, 17 nt, Artificial Sequence
  Synthetic
ugugcacguauuuuuaa

SEQ ID NO: 732789 - RNA, 17 nt, Artificial Sequence
  Synthetic
aggcccuguauuuuuaa

SEQ ID NO: 732790 - RNA, 17 nt, Artificial Sequence
  Synthetic
cauuuuuguauuuuuaa

SEQ ID NO: 732791 - RNA, 17 nt, Artificial Sequence
  Synthetic
acaacuauuauuuuuaa

SEQ ID NO: 732792 - RNA, 17 nt, Artificial Sequence
  Synthetic
caaaaauuuauuuuuaa

SEQ ID NO: 732793 - RNA, 17 nt, Artificial Sequence
  Synthetic
ucuaaagcacuuuuuaa

SEQ ID NO: 732794 - RNA, 17 nt, Artificial Sequence
  Synthetic
auuuauuuccuuuuuaa

SEQ ID NO: 732795 - RNA, 17 nt, Artificial Sequence
  Synthetic
caagggaagcuuuuuaa

SEQ ID NO: 732796 - RNA, 17 nt, Artificial Sequence
  Synthetic
uuguuuuugcuuuuuaa

SEQ ID NO: 732797 - RNA, 17 nt, Artificial Sequence
  Synthetic
aauuucauucuuuuuaa

SEQ ID NO: 732798 - RNA, 17 nt, Artificial Sequence
  Synthetic
aaauuauuucuuuuuaa

SEQ ID NO: 732799 - RNA, 17 nt, Artificial Sequence
  Synthetic
auuauguuucuuuuuaa

SEQ ID NO: 732800 - RNA, 17 nt, Artificial Sequence
  Synthetic
cuugugccaguuuuuaa

SEQ ID NO: 732801 - RNA, 17 nt, Artificial Sequence
  Synthetic
cuugugccgguuuuuaa

SEQ ID NO: 732802 - RNA, 17 nt, Artificial Sequence
  Synthetic
agauaauugguuuuuaa

SEQ ID NO: 732803 - RNA, 17 nt, Artificial Sequence
  Synthetic
accucacaauuuuuuaa

SEQ ID NO: 732804 - RNA, 17 nt, Artificial Sequence
  Synthetic
aaauauacauuuuuuaa

SEQ ID NO: 732805 - RNA, 17 nt, Artificial Sequence
  Synthetic
uauguuuuauuuuuuaa

SEQ ID NO: 732806 - RNA, 17 nt, Artificial Sequence
  Synthetic
auauaaaucuuuuuuaa

SEQ ID NO: 732807 - RNA, 17 nt, Artificial Sequence
  Synthetic
auuucagauuuuuuuaa

SEQ ID NO: 732808 - RNA, 17 nt, Artificial Sequence
  Synthetic
uuuuuguauuuuuuuaa

SEQ ID NO: 732809 - RNA, 17 nt, Artificial Sequence
  Synthetic
caauaggguuuuuuuaa

SEQ ID NO: 732810 - RNA, 17 nt, Artificial Sequence
  Synthetic
aaaaugauuuuuuuuaa

SEQ ID NO: 732811 - RNA, 17 nt, Artificial Sequence
  Synthetic
uaagcuuuuuuuuuuaa

SEQ ID NO: 732812 - RNA, 17 nt, Artificial Sequence
  Synthetic
auaaguuuuuuuuuuaa

SEQ ID NO: 732813 - RNA, 17 nt, Artificial Sequence
  Synthetic
aaauaaaaaaaaaaaca

SEQ ID NO: 732814 - RNA, 17 nt, Artificial Sequence
  Synthetic
uuguccuucaaaaaaca

SEQ ID NO: 732815 - RNA, 17 nt, Artificial Sequence
  Synthetic
aaagaaaagaaaaaaca

SEQ ID NO: 732816 - RNA, 17 nt, Artificial Sequence
  Synthetic
agaguagagaaaaaaca

SEQ ID NO: 732817 - RNA, 17 nt, Artificial Sequence
  Synthetic
cuuuucaauaaaaaaca

SEQ ID NO: 732818 - RNA, 17 nt, Artificial Sequence
  Synthetic
aagagggauaaaaaaca

SEQ ID NO: 732819 - RNA, 17 nt, Artificial Sequence
  Synthetic
uaaacaagacaaaaaca

SEQ ID NO: 732820 - RNA, 17 nt, Artificial Sequence
  Synthetic
agacucagacaaaaaca

SEQ ID NO: 732821 - RNA, 17 nt, Artificial Sequence
  Synthetic
aaauuuuuacaaaaaca

SEQ ID NO: 732822 - RNA, 17 nt, Artificial Sequence
  Synthetic
uguaguucagaaaaaca

SEQ ID NO: 732823 - RNA, 17 nt, Artificial Sequence
  Synthetic
auaauucuagaaaaaca

SEQ ID NO: 732824 - RNA, 17 nt, Artificial Sequence
  Synthetic
caguaggaauaaaaaca

SEQ ID NO: 732825 - RNA, 17 nt, Artificial Sequence
  Synthetic
cucagaaacuaaaaaca

SEQ ID NO: 732826 - RNA, 17 nt, Artificial Sequence
  Synthetic
ugugggagcuaaaaaca

SEQ ID NO: 732827 - RNA, 17 nt, Artificial Sequence
  Synthetic
uacagcuucuaaaaaca

SEQ ID NO: 732828 - RNA, 17 nt, Artificial Sequence
  Synthetic
aacuugaaguaaaaaca

SEQ ID NO: 732829 - RNA, 17 nt, Artificial Sequence
  Synthetic
cagaaauauuaaaaaca

SEQ ID NO: 732830 - RNA, 17 nt, Artificial Sequence
  Synthetic
agagaaaguuaaaaaca

SEQ ID NO: 732831 - RNA, 17 nt, Artificial Sequence
  Synthetic
auaaucuuaccaaaaca

SEQ ID NO: 732832 - RNA, 17 nt, Artificial Sequence
  Synthetic
cacugcuuuccaaaaca

SEQ ID NO: 732833 - RNA, 17 nt, Artificial Sequence
  Synthetic
auuaagaaggcaaaaca

SEQ ID NO: 732834 - RNA, 17 nt, Artificial Sequence
  Synthetic
aucauacaaucaaaaca

SEQ ID NO: 732835 - RNA, 17 nt, Artificial Sequence
  Synthetic
ucuggugucucaaaaca

SEQ ID NO: 732836 - RNA, 17 nt, Artificial Sequence
  Synthetic
aagaauccuucaaaaca

SEQ ID NO: 732837 - RNA, 17 nt, Artificial Sequence
  Synthetic
uguuaauacagaaaaca

SEQ ID NO: 732838 - RNA, 17 nt, Artificial Sequence
  Synthetic
cucugaggcagaaaaca

SEQ ID NO: 732839 - RNA, 17 nt, Artificial Sequence
  Synthetic
cacaaaaagagaaaaca

SEQ ID NO: 732840 - RNA, 17 nt, Artificial Sequence
  Synthetic
aguuggcagagaaaaca

SEQ ID NO: 732841 - RNA, 17 nt, Artificial Sequence
  Synthetic
uguaucuagagaaaaca

SEQ ID NO: 732842 - RNA, 17 nt, Artificial Sequence
  Synthetic
cuacauaugagaaaaca

SEQ ID NO: 732843 - RNA, 17 nt, Artificial Sequence
  Synthetic
uacaagaaaggaaaaca

SEQ ID NO: 732844 - RNA, 17 nt, Artificial Sequence
  Synthetic
aggguuaauggaaaaca

SEQ ID NO: 732845 - RNA, 17 nt, Artificial Sequence
  Synthetic
accacuuuaugaaaaca

SEQ ID NO: 732846 - RNA, 17 nt, Artificial Sequence
  Synthetic
uggguccccugaaaaca

SEQ ID NO: 732847 - RNA, 17 nt, Artificial Sequence
  Synthetic
uaaucauaaauaaaaca

SEQ ID NO: 732848 - RNA, 17 nt, Artificial Sequence
  Synthetic
cuaaccacuauaaaaca

SEQ ID NO: 732849 - RNA, 17 nt, Artificial Sequence
  Synthetic
aguauuuaucuaaaaca

SEQ ID NO: 732850 - RNA, 17 nt, Artificial Sequence
  Synthetic
auaaaggcucuaaaaca

SEQ ID NO: 732851 - RNA, 17 nt, Artificial Sequence
  Synthetic
uuucauauaguaaaaca

SEQ ID NO: 732852 - RNA, 17 nt, Artificial Sequence
  Synthetic
uaagcacaauuaaaaca

SEQ ID NO: 732853 - RNA, 17 nt, Artificial Sequence
  Synthetic
auagacacauuaaaaca

SEQ ID NO: 732854 - RNA, 17 nt, Artificial Sequence
  Synthetic
ucugugguauuaaaaca

SEQ ID NO: 732855 - RNA, 17 nt, Artificial Sequence
  Synthetic
acugagaacuuaaaaca

SEQ ID NO: 732856 - RNA, 17 nt, Artificial Sequence
  Synthetic
aaauaaguuuuaaaaca

SEQ ID NO: 732857 - RNA, 17 nt, Artificial Sequence
  Synthetic
cauauuuaaaacaaaca

SEQ ID NO: 732858 - RNA, 17 nt, Artificial Sequence
  Synthetic
uaucuaggaaacaaaca

SEQ ID NO: 732859 - RNA, 17 nt, Artificial Sequence
  Synthetic
ugaaaaaaacacaaaca

SEQ ID NO: 732860 - RNA, 17 nt, Artificial Sequence
  Synthetic
acacacacacacaaaca

SEQ ID NO: 732861 - RNA, 17 nt, Artificial Sequence
  Synthetic
aaacugggacacaaaca

SEQ ID NO: 732862 - RNA, 17 nt, Artificial Sequence
  Synthetic
auuacuagugacaaaca

SEQ ID NO: 732863 - RNA, 17 nt, Artificial Sequence
  Synthetic
cauuuaaucuacaaaca

SEQ ID NO: 732864 - RNA, 17 nt, Artificial Sequence
  Synthetic
cagacacuuuacaaaca

SEQ ID NO: 732865 - RNA, 17 nt, Artificial Sequence
  Synthetic
aacaugugacccaaaca

SEQ ID NO: 732866 - RNA, 17 nt, Artificial Sequence
  Synthetic
aaucuauuauccaaaca

SEQ ID NO: 732867 - RNA, 17 nt, Artificial Sequence
  Synthetic
uuuauucauuccaaaca

SEQ ID NO: 732868 - RNA, 17 nt, Artificial Sequence
  Synthetic
acaaaacaaagcaaaca

SEQ ID NO: 732869 - RNA, 17 nt, Artificial Sequence
  Synthetic
uauuuggaaagcaaaca

SEQ ID NO: 732870 - RNA, 17 nt, Artificial Sequence
  Synthetic
uaaccauacagcaaaca

SEQ ID NO: 732871 - RNA, 17 nt, Artificial Sequence
  Synthetic
ugauacucaggcaaaca

SEQ ID NO: 732872 - RNA, 17 nt, Artificial Sequence
  Synthetic
auuauuucaggcaaaca

SEQ ID NO: 732873 - RNA, 17 nt, Artificial Sequence
  Synthetic
aauggggaaugcaaaca

SEQ ID NO: 732874 - RNA, 17 nt, Artificial Sequence
  Synthetic
uuguggugaugcaaaca

SEQ ID NO: 732875 - RNA, 17 nt, Artificial Sequence
  Synthetic
caugucgucugcaaaca

SEQ ID NO: 732876 - RNA, 17 nt, Artificial Sequence
  Synthetic
uaccuuagaaucaaaca

SEQ ID NO: 732877 - RNA, 17 nt, Artificial Sequence
  Synthetic
acaacauuuaucaaaca

SEQ ID NO: 732878 - RNA, 17 nt, Artificial Sequence
  Synthetic
caaauuuugcucaaaca

SEQ ID NO: 732879 - RNA, 17 nt, Artificial Sequence
  Synthetic
ccaggccaucucaaaca

SEQ ID NO: 732880 - RNA, 17 nt, Artificial Sequence
  Synthetic
aaauaagaggucaaaca

SEQ ID NO: 732881 - RNA, 17 nt, Artificial Sequence
  Synthetic
cuaggaaaauucaaaca

SEQ ID NO: 732882 - RNA, 17 nt, Artificial Sequence
  Synthetic
cugucuuguuucaaaca

SEQ ID NO: 732883 - RNA, 17 nt, Artificial Sequence
  Synthetic
auucucauuuucaaaca

SEQ ID NO: 732884 - RNA, 17 nt, Artificial Sequence
  Synthetic
uguuugcuuuucaaaca

SEQ ID NO: 732885 - RNA, 17 nt, Artificial Sequence
  Synthetic
aaugaugaaaagaaaca

SEQ ID NO: 732886 - RNA, 17 nt, Artificial Sequence
  Synthetic
ccuucugaaaagaaaca

SEQ ID NO: 732887 - RNA, 17 nt, Artificial Sequence
  Synthetic
uguuuuacaaagaaaca

SEQ ID NO: 732888 - RNA, 17 nt, Artificial Sequence
  Synthetic
ugugcuaggaagaaaca

SEQ ID NO: 732889 - RNA, 17 nt, Artificial Sequence
  Synthetic
uggcaguggaagaaaca

SEQ ID NO: 732890 - RNA, 17 nt, Artificial Sequence
  Synthetic
aaauaaggagagaaaca

SEQ ID NO: 732891 - RNA, 17 nt, Artificial Sequence
  Synthetic
aauauaugggagaaaca

SEQ ID NO: 732892 - RNA, 17 nt, Artificial Sequence
  Synthetic
ucucauuaauagaaaca

SEQ ID NO: 732893 - RNA, 17 nt, Artificial Sequence
  Synthetic
uauuuuuaguagaaaca

SEQ ID NO: 732894 - RNA, 17 nt, Artificial Sequence
  Synthetic
uccaggcagaggaaaca

SEQ ID NO: 732895 - RNA, 17 nt, Artificial Sequence
  Synthetic
uuaugguaggggaaaca

SEQ ID NO: 732896 - RNA, 17 nt, Artificial Sequence
  Synthetic
agagucuucuggaaaca

SEQ ID NO: 732897 - RNA, 17 nt, Artificial Sequence
  Synthetic
auccacucaaugaaaca

SEQ ID NO: 732898 - RNA, 17 nt, Artificial Sequence
  Synthetic
ugauaucaacugaaaca

SEQ ID NO: 732899 - RNA, 17 nt, Artificial Sequence
  Synthetic
uuaucauccuugaaaca

SEQ ID NO: 732900 - RNA, 17 nt, Artificial Sequence
  Synthetic
cuauauuguuugaaaca

SEQ ID NO: 732901 - RNA, 17 nt, Artificial Sequence
  Synthetic
ucuucuuaaaauaaaca

SEQ ID NO: 732902 - RNA, 17 nt, Artificial Sequence
  Synthetic
aaaugcuacaauaaaca

SEQ ID NO: 732903 - RNA, 17 nt, Artificial Sequence
  Synthetic
uagagcugcaauaaaca

SEQ ID NO: 732904 - RNA, 17 nt, Artificial Sequence
  Synthetic
uagcgcugcaauaaaca

SEQ ID NO: 732905 - RNA, 17 nt, Artificial Sequence
  Synthetic
uaaugcugcaauaaaca

SEQ ID NO: 732906 - RNA, 17 nt, Artificial Sequence
  Synthetic
aaauaaaauaauaaaca

SEQ ID NO: 732907 - RNA, 17 nt, Artificial Sequence
  Synthetic
uuaacuguuaauaaaca

SEQ ID NO: 732908 - RNA, 17 nt, Artificial Sequence
  Synthetic
uucugaagagauaaaca

SEQ ID NO: 732909 - RNA, 17 nt, Artificial Sequence
  Synthetic
cuuuucuuauauaaaca

SEQ ID NO: 732910 - RNA, 17 nt, Artificial Sequence
  Synthetic
uaagacccuuauaaaca

SEQ ID NO: 732911 - RNA, 17 nt, Artificial Sequence
  Synthetic
uuagguguuuauaaaca

SEQ ID NO: 732912 - RNA, 17 nt, Artificial Sequence
  Synthetic
auauuuaaaacuaaaca

SEQ ID NO: 732913 - RNA, 17 nt, Artificial Sequence
  Synthetic
caaaguagcacuaaaca

SEQ ID NO: 732914 - RNA, 17 nt, Artificial Sequence
  Synthetic
aucagcugcacuaaaca

SEQ ID NO: 732915 - RNA, 17 nt, Artificial Sequence
  Synthetic
agauuuccuacuaaaca

SEQ ID NO: 732916 - RNA, 17 nt, Artificial Sequence
  Synthetic
ugauuauaugcuaaaca

SEQ ID NO: 732917 - RNA, 17 nt, Artificial Sequence
  Synthetic
uuauaugacucuaaaca

SEQ ID NO: 732918 - RNA, 17 nt, Artificial Sequence
  Synthetic
cccccucaaaguaaaca

SEQ ID NO: 732919 - RNA, 17 nt, Artificial Sequence
  Synthetic
aagugcugcaguaaaca

SEQ ID NO: 732920 - RNA, 17 nt, Artificial Sequence
  Synthetic
aaguacuaguguaaaca

SEQ ID NO: 732921 - RNA, 17 nt, Artificial Sequence
  Synthetic
uaauuuaaaauuaaaca

SEQ ID NO: 732922 - RNA, 17 nt, Artificial Sequence
  Synthetic
auguguucaauuaaaca

SEQ ID NO: 732923 - RNA, 17 nt, Artificial Sequence
  Synthetic
auuuuucugauuaaaca

SEQ ID NO: 732924 - RNA, 17 nt, Artificial Sequence
  Synthetic
ucauagacuauuaaaca

SEQ ID NO: 732925 - RNA, 17 nt, Artificial Sequence
  Synthetic
aguuaaagucuuaaaca

SEQ ID NO: 732926 - RNA, 17 nt, Artificial Sequence
  Synthetic
caguacuaaguuaaaca

SEQ ID NO: 732927 - RNA, 17 nt, Artificial Sequence
  Synthetic
cacaaggcauuuaaaca

SEQ ID NO: 732928 - RNA, 17 nt, Artificial Sequence
  Synthetic
auauguaauuuuaaaca

SEQ ID NO: 732929 - RNA, 17 nt, Artificial Sequence
  Synthetic
caacgaaaaaaacaaca

SEQ ID NO: 732930 - RNA, 17 nt, Artificial Sequence
  Synthetic
auagaaacaaaacaaca

SEQ ID NO: 732931 - RNA, 17 nt, Artificial Sequence
  Synthetic
caguaaccaaaacaaca

SEQ ID NO: 732932 - RNA, 17 nt, Artificial Sequence
  Synthetic
uagggcugcaaacaaca

SEQ ID NO: 732933 - RNA, 17 nt, Artificial Sequence
  Synthetic
aagucuaagaaacaaca

SEQ ID NO: 732934 - RNA, 17 nt, Artificial Sequence
  Synthetic
uggccugugcaacaaca

SEQ ID NO: 732935 - RNA, 17 nt, Artificial Sequence
  Synthetic
ugucauuugcaacaaca

SEQ ID NO: 732936 - RNA, 17 nt, Artificial Sequence
  Synthetic
auuauuguguaacaaca

SEQ ID NO: 732937 - RNA, 17 nt, Artificial Sequence
  Synthetic
auagggugaccacaaca

SEQ ID NO: 732938 - RNA, 17 nt, Artificial Sequence
  Synthetic
uauucgauagcacaaca

SEQ ID NO: 732939 - RNA, 17 nt, Artificial Sequence
  Synthetic
uauuugauagcacaaca

SEQ ID NO: 732940 - RNA, 17 nt, Artificial Sequence
  Synthetic
uauuugcuagcacaaca

SEQ ID NO: 732941 - RNA, 17 nt, Artificial Sequence
  Synthetic
aggaguccgggacaaca

SEQ ID NO: 732942 - RNA, 17 nt, Artificial Sequence
  Synthetic
ugucauuuaugacaaca

SEQ ID NO: 732943 - RNA, 17 nt, Artificial Sequence
  Synthetic
ugugcuuccugacaaca

SEQ ID NO: 732944 - RNA, 17 nt, Artificial Sequence
  Synthetic
acaggcaaccuacaaca

SEQ ID NO: 732945 - RNA, 17 nt, Artificial Sequence
  Synthetic
acagggaaccuacaaca

SEQ ID NO: 732946 - RNA, 17 nt, Artificial Sequence
  Synthetic
uuuccuaugcuacaaca

SEQ ID NO: 732947 - RNA, 17 nt, Artificial Sequence
  Synthetic
aacauguuaguacaaca

SEQ ID NO: 732948 - RNA, 17 nt, Artificial Sequence
  Synthetic
auggcaaauguacaaca

SEQ ID NO: 732949 - RNA, 17 nt, Artificial Sequence
  Synthetic
agaccuauuguacaaca

SEQ ID NO: 732950 - RNA, 17 nt, Artificial Sequence
  Synthetic
uaaccaaucaaccaaca

SEQ ID NO: 732951 - RNA, 17 nt, Artificial Sequence
  Synthetic
uuacauucccaccaaca

SEQ ID NO: 732952 - RNA, 17 nt, Artificial Sequence
  Synthetic
cccccccccccccaaca

SEQ ID NO: 732953 - RNA, 17 nt, Artificial Sequence
  Synthetic
caaucguugccccaaca

SEQ ID NO: 732954 - RNA, 17 nt, Artificial Sequence
  Synthetic
ugucauuugucccaaca

SEQ ID NO: 732955 - RNA, 17 nt, Artificial Sequence
  Synthetic
aaguugacuucccaaca

SEQ ID NO: 732956 - RNA, 17 nt, Artificial Sequence
  Synthetic
uggaaguggggccaaca

SEQ ID NO: 732957 - RNA, 17 nt, Artificial Sequence
  Synthetic
caccagccuggccaaca

SEQ ID NO: 732958 - RNA, 17 nt, Artificial Sequence
  Synthetic
aggcagccuggccaaca

SEQ ID NO: 732959 - RNA, 17 nt, Artificial Sequence
  Synthetic
caccauccuggccaaca

SEQ ID NO: 732960 - RNA, 17 nt, Artificial Sequence
  Synthetic
agaccaucuggccaaca

SEQ ID NO: 732961 - RNA, 17 nt, Artificial Sequence
  Synthetic
aauuuaacucuccaaca

SEQ ID NO: 732962 - RNA, 17 nt, Artificial Sequence
  Synthetic
accugugcuguccaaca

SEQ ID NO: 732963 - RNA, 17 nt, Artificial Sequence
  Synthetic
cugugauccuuccaaca

SEQ ID NO: 732964 - RNA, 17 nt, Artificial Sequence
  Synthetic
aucuagccuuuccaaca

SEQ ID NO: 732965 - RNA, 17 nt, Artificial Sequence
  Synthetic
uuuacucuaaagcaaca

SEQ ID NO: 732966 - RNA, 17 nt, Artificial Sequence
  Synthetic
uugauugagaagcaaca

SEQ ID NO: 732967 - RNA, 17 nt, Artificial Sequence
  Synthetic
uguccuuugcagcaaca

SEQ ID NO: 732968 - RNA, 17 nt, Artificial Sequence
  Synthetic
uguucuuugcagcaaca

SEQ ID NO: 732969 - RNA, 17 nt, Artificial Sequence
  Synthetic
ugucuuuugcagcaaca

SEQ ID NO: 732970 - RNA, 17 nt, Artificial Sequence
  Synthetic
aaguuucuucagcaaca

SEQ ID NO: 732971 - RNA, 17 nt, Artificial Sequence
  Synthetic
cuauuaauuuagcaaca

SEQ ID NO: 732972 - RNA, 17 nt, Artificial Sequence
  Synthetic
uuguggaacucgcaaca

SEQ ID NO: 732973 - RNA, 17 nt, Artificial Sequence
  Synthetic
acuuuguggaggcaaca

SEQ ID NO: 732974 - RNA, 17 nt, Artificial Sequence
  Synthetic
aaacagaaauggcaaca

SEQ ID NO: 732975 - RNA, 17 nt, Artificial Sequence
  Synthetic
ugaguagaauggcaaca

SEQ ID NO: 732976 - RNA, 17 nt, Artificial Sequence
  Synthetic
uuucuguucuggcaaca

SEQ ID NO: 732977 - RNA, 17 nt, Artificial Sequence
  Synthetic
cuucaauaaaugcaaca

SEQ ID NO: 732978 - RNA, 17 nt, Artificial Sequence
  Synthetic
uaaaauuauaugcaaca

SEQ ID NO: 732979 - RNA, 17 nt, Artificial Sequence
  Synthetic
uauuugauagugcaaca

SEQ ID NO: 732980 - RNA, 17 nt, Artificial Sequence
  Synthetic
aaaauguuuuugcaaca

SEQ ID NO: 732981 - RNA, 17 nt, Artificial Sequence
  Synthetic
uccaggacacaucaaca

SEQ ID NO: 732982 - RNA, 17 nt, Artificial Sequence
  Synthetic
auugaaggacaucaaca

SEQ ID NO: 732983 - RNA, 17 nt, Artificial Sequence
  Synthetic
ucugaagucuaucaaca

SEQ ID NO: 732984 - RNA, 17 nt, Artificial Sequence
  Synthetic
ucacccuucacucaaca

SEQ ID NO: 732985 - RNA, 17 nt, Artificial Sequence
  Synthetic
ucuuuugucccucaaca

SEQ ID NO: 732986 - RNA, 17 nt, Artificial Sequence
  Synthetic
uuccuguggucucaaca

SEQ ID NO: 732987 - RNA, 17 nt, Artificial Sequence
  Synthetic
cagauuuguagucaaca

SEQ ID NO: 732988 - RNA, 17 nt, Artificial Sequence
  Synthetic
cacuaauuaauucaaca

SEQ ID NO: 732989 - RNA, 17 nt, Artificial Sequence
  Synthetic
uacauguucauucaaca

SEQ ID NO: 732990 - RNA, 17 nt, Artificial Sequence
  Synthetic
ugaccuagacuucaaca

SEQ ID NO: 732991 - RNA, 17 nt, Artificial Sequence
  Synthetic
cuagccuaccuucaaca

SEQ ID NO: 732992 - RNA, 17 nt, Artificial Sequence
  Synthetic
aacuuacauguucaaca

SEQ ID NO: 732993 - RNA, 17 nt, Artificial Sequence
  Synthetic
aagaaugaaaaagaaca

SEQ ID NO: 732994 - RNA, 17 nt, Artificial Sequence
  Synthetic
uccccagugaaagaaca

SEQ ID NO: 732995 - RNA, 17 nt, Artificial Sequence
  Synthetic
cuagagcauaaagaaca

SEQ ID NO: 732996 - RNA, 17 nt, Artificial Sequence
  Synthetic
caugaggguaaagaaca

SEQ ID NO: 732997 - RNA, 17 nt, Artificial Sequence
  Synthetic
ccagaguuuaaagaaca

SEQ ID NO: 732998 - RNA, 17 nt, Artificial Sequence
  Synthetic
auauaggaagaagaaca

SEQ ID NO: 732999 - RNA, 17 nt, Artificial Sequence
  Synthetic
acaacuaaggaagaaca

SEQ ID NO: 733000 - RNA, 17 nt, Artificial Sequence
  Synthetic
ucaucacuggaagaaca

SEQ ID NO: 733001 - RNA, 17 nt, Artificial Sequence
  Synthetic
agauucuugacagaaca

SEQ ID NO: 733002 - RNA, 17 nt, Artificial Sequence
  Synthetic
auaaggcuagcagaaca

SEQ ID NO: 733003 - RNA, 17 nt, Artificial Sequence
  Synthetic
caguaaguagcagaaca

SEQ ID NO: 733004 - RNA, 17 nt, Artificial Sequence
  Synthetic
aaggacaaggcagaaca

SEQ ID NO: 733005 - RNA, 17 nt, Artificial Sequence
  Synthetic
cucauaaaaagagaaca

SEQ ID NO: 733006 - RNA, 17 nt, Artificial Sequence
  Synthetic
caauggguaagagaaca

SEQ ID NO: 733007 - RNA, 17 nt, Artificial Sequence
  Synthetic
acuuauaaaugagaaca

SEQ ID NO: 733008 - RNA, 17 nt, Artificial Sequence
  Synthetic
cgcagacccugagaaca

SEQ ID NO: 733009 - RNA, 17 nt, Artificial Sequence
  Synthetic
uuugaagccugagaaca

SEQ ID NO: 733010 - RNA, 17 nt, Artificial Sequence
  Synthetic
acuuauaagugagaaca

SEQ ID NO: 733011 - RNA, 17 nt, Artificial Sequence
  Synthetic
uauuucaguugagaaca

SEQ ID NO: 733012 - RNA, 17 nt, Artificial Sequence
  Synthetic
aauauugcaauagaaca

SEQ ID NO: 733013 - RNA, 17 nt, Artificial Sequence
  Synthetic
uuggauuacauagaaca

SEQ ID NO: 733014 - RNA, 17 nt, Artificial Sequence
  Synthetic
uaaauauuuauagaaca

SEQ ID NO: 733015 - RNA, 17 nt, Artificial Sequence
  Synthetic
uguacuuuuauagaaca

SEQ ID NO: 733016 - RNA, 17 nt, Artificial Sequence
  Synthetic
cauugauggcuagaaca

SEQ ID NO: 733017 - RNA, 17 nt, Artificial Sequence
  Synthetic
uuuaaacuauuagaaca

SEQ ID NO: 733018 - RNA, 17 nt, Artificial Sequence
  Synthetic
agacggaauuuagaaca

SEQ ID NO: 733019 - RNA, 17 nt, Artificial Sequence
  Synthetic
ugaagacauuuagaaca

SEQ ID NO: 733020 - RNA, 17 nt, Artificial Sequence
  Synthetic
aucauugguuuagaaca

SEQ ID NO: 733021 - RNA, 17 nt, Artificial Sequence
  Synthetic
aaaacaaagcacgaaca

SEQ ID NO: 733022 - RNA, 17 nt, Artificial Sequence
  Synthetic
aaguauauaaaggaaca

SEQ ID NO: 733023 - RNA, 17 nt, Artificial Sequence
  Synthetic
cauagaggcaaggaaca

SEQ ID NO: 733024 - RNA, 17 nt, Artificial Sequence
  Synthetic
agggaagagcaggaaca

SEQ ID NO: 733025 - RNA, 17 nt, Artificial Sequence
  Synthetic
uguccuuugcaggaaca

SEQ ID NO: 733026 - RNA, 17 nt, Artificial Sequence
  Synthetic
aacuagggagaggaaca

SEQ ID NO: 733027 - RNA, 17 nt, Artificial Sequence
  Synthetic
uuuggaaaugaggaaca

SEQ ID NO: 733028 - RNA, 17 nt, Artificial Sequence
  Synthetic
augaaugaauaggaaca

SEQ ID NO: 733029 - RNA, 17 nt, Artificial Sequence
  Synthetic
cgccuuuuguaggaaca

SEQ ID NO: 733030 - RNA, 17 nt, Artificial Sequence
  Synthetic
uauuccaagagggaaca

SEQ ID NO: 733031 - RNA, 17 nt, Artificial Sequence
  Synthetic
agcucuuugggggaaca

SEQ ID NO: 733032 - RNA, 17 nt, Artificial Sequence
  Synthetic
agguuugcuggggaaca

SEQ ID NO: 733033 - RNA, 17 nt, Artificial Sequence
  Synthetic
cuauucugcugggaaca

SEQ ID NO: 733034 - RNA, 17 nt, Artificial Sequence
  Synthetic
aggacagaaauggaaca

SEQ ID NO: 733035 - RNA, 17 nt, Artificial Sequence
  Synthetic
uucugaaugauggaaca

SEQ ID NO: 733036 - RNA, 17 nt, Artificial Sequence
  Synthetic
auagauuaacuggaaca

SEQ ID NO: 733037 - RNA, 17 nt, Artificial Sequence
  Synthetic
agauaauuguuggaaca

SEQ ID NO: 733038 - RNA, 17 nt, Artificial Sequence
  Synthetic
aagguuaguuuggaaca

SEQ ID NO: 733039 - RNA, 17 nt, Artificial Sequence
  Synthetic
uugaugggaaaugaaca

SEQ ID NO: 733040 - RNA, 17 nt, Artificial Sequence
  Synthetic
uagaaccaacaugaaca

SEQ ID NO: 733041 - RNA, 17 nt, Artificial Sequence
  Synthetic
aaagaauaacaugaaca

SEQ ID NO: 733042 - RNA, 17 nt, Artificial Sequence
  Synthetic
uaagagagacaugaaca

SEQ ID NO: 733043 - RNA, 17 nt, Artificial Sequence
  Synthetic
aacuaaaugcaugaaca

SEQ ID NO: 733044 - RNA, 17 nt, Artificial Sequence
  Synthetic
agauaguugcaugaaca

SEQ ID NO: 733045 - RNA, 17 nt, Artificial Sequence
  Synthetic
cuuccaauucaugaaca

SEQ ID NO: 733046 - RNA, 17 nt, Artificial Sequence
  Synthetic
caauaguuugaugaaca

SEQ ID NO: 733047 - RNA, 17 nt, Artificial Sequence
  Synthetic
cuaauagaguaugaaca

SEQ ID NO: 733048 - RNA, 17 nt, Artificial Sequence
  Synthetic
accucacauuaugaaca

SEQ ID NO: 733049 - RNA, 17 nt, Artificial Sequence
  Synthetic
aauauaguuuaugaaca

SEQ ID NO: 733050 - RNA, 17 nt, Artificial Sequence
  Synthetic
agggcagcagcugaaca

SEQ ID NO: 733051 - RNA, 17 nt, Artificial Sequence
  Synthetic
aauugucaugcugaaca

SEQ ID NO: 733052 - RNA, 17 nt, Artificial Sequence
  Synthetic
uaccaucagagugaaca

SEQ ID NO: 733053 - RNA, 17 nt, Artificial Sequence
  Synthetic
agggauaugagugaaca

SEQ ID NO: 733054 - RNA, 17 nt, Artificial Sequence
  Synthetic
agacacaaacgugaaca

SEQ ID NO: 733055 - RNA, 17 nt, Artificial Sequence
  Synthetic
ucucucugaauugaaca

SEQ ID NO: 733056 - RNA, 17 nt, Artificial Sequence
  Synthetic
uuuuggugacuugaaca

SEQ ID NO: 733057 - RNA, 17 nt, Artificial Sequence
  Synthetic
acauguucauuugaaca

SEQ ID NO: 733058 - RNA, 17 nt, Artificial Sequence
  Synthetic
auggcauuguuugaaca

SEQ ID NO: 733059 - RNA, 17 nt, Artificial Sequence
  Synthetic
caaauggaaaaauaaca

SEQ ID NO: 733060 - RNA, 17 nt, Artificial Sequence
  Synthetic
aggucugaaaaauaaca

SEQ ID NO: 733061 - RNA, 17 nt, Artificial Sequence
  Synthetic
uacaaagcaaaauaaca

SEQ ID NO: 733062 - RNA, 17 nt, Artificial Sequence
  Synthetic
acaaaaguaaaauaaca

SEQ ID NO: 733063 - RNA, 17 nt, Artificial Sequence
  Synthetic
ucucuguuuaaauaaca

SEQ ID NO: 733064 - RNA, 17 nt, Artificial Sequence
  Synthetic
agaaaggaacaauaaca

SEQ ID NO: 733065 - RNA, 17 nt, Artificial Sequence
  Synthetic
aagaauagcgaauaaca

SEQ ID NO: 733066 - RNA, 17 nt, Artificial Sequence
  Synthetic
ugucuuuuugaauaaca

SEQ ID NO: 733067 - RNA, 17 nt, Artificial Sequence
  Synthetic
aaagaggaauaauaaca

SEQ ID NO: 733068 - RNA, 17 nt, Artificial Sequence
  Synthetic
auucaaacuuaauaaca

SEQ ID NO: 733069 - RNA, 17 nt, Artificial Sequence
  Synthetic
aguuaccgaacauaaca

SEQ ID NO: 733070 - RNA, 17 nt, Artificial Sequence
  Synthetic
auacuuggcacauaaca

SEQ ID NO: 733071 - RNA, 17 nt, Artificial Sequence
  Synthetic
auuauugcagcauaaca

SEQ ID NO: 733072 - RNA, 17 nt, Artificial Sequence
  Synthetic
uaaggauauucauaaca

SEQ ID NO: 733073 - RNA, 17 nt, Artificial Sequence
  Synthetic
aaaauggcaagauaaca

SEQ ID NO: 733074 - RNA, 17 nt, Artificial Sequence
  Synthetic
uucuuuuagggauaaca

SEQ ID NO: 733075 - RNA, 17 nt, Artificial Sequence
  Synthetic
uaaguggaaauauaaca

SEQ ID NO: 733076 - RNA, 17 nt, Artificial Sequence
  Synthetic
uaagaaaccauauaaca

SEQ ID NO: 733077 - RNA, 17 nt, Artificial Sequence
  Synthetic
ugggagcaacuauaaca

SEQ ID NO: 733078 - RNA, 17 nt, Artificial Sequence
  Synthetic
cucauuuaauuauaaca

SEQ ID NO: 733079 - RNA, 17 nt, Artificial Sequence
  Synthetic
aaaagcagauuauaaca

SEQ ID NO: 733080 - RNA, 17 nt, Artificial Sequence
  Synthetic
aguggagaguuauaaca

SEQ ID NO: 733081 - RNA, 17 nt, Artificial Sequence
  Synthetic
cuaaaucuaaacuaaca

SEQ ID NO: 733082 - RNA, 17 nt, Artificial Sequence
  Synthetic
uacuaugcucacuaaca

SEQ ID NO: 733083 - RNA, 17 nt, Artificial Sequence
  Synthetic
uuaggauacaccuaaca

SEQ ID NO: 733084 - RNA, 17 nt, Artificial Sequence
  Synthetic
uauuucucacccuaaca

SEQ ID NO: 733085 - RNA, 17 nt, Artificial Sequence
  Synthetic
uauaagaaauccuaaca

SEQ ID NO: 733086 - RNA, 17 nt, Artificial Sequence
  Synthetic
uaguagccauccuaaca

SEQ ID NO: 733087 - RNA, 17 nt, Artificial Sequence
  Synthetic
ccaucagacagcuaaca

SEQ ID NO: 733088 - RNA, 17 nt, Artificial Sequence
  Synthetic
aaguugggaggcuaaca

SEQ ID NO: 733089 - RNA, 17 nt, Artificial Sequence
  Synthetic
acugaagagggcuaaca

SEQ ID NO: 733090 - RNA, 17 nt, Artificial Sequence
  Synthetic
aaccagccuggcuaaca

SEQ ID NO: 733091 - RNA, 17 nt, Artificial Sequence
  Synthetic
caccauccuggcuaaca

SEQ ID NO: 733092 - RNA, 17 nt, Artificial Sequence
  Synthetic
gaccauccuggcuaaca

SEQ ID NO: 733093 - RNA, 17 nt, Artificial Sequence
  Synthetic
uuaaaugaaaucuaaca

SEQ ID NO: 733094 - RNA, 17 nt, Artificial Sequence
  Synthetic
uccuucggucucuaaca

SEQ ID NO: 733095 - RNA, 17 nt, Artificial Sequence
  Synthetic
auauaacuucucuaaca

SEQ ID NO: 733096 - RNA, 17 nt, Artificial Sequence
  Synthetic
auuugugauuucuaaca

SEQ ID NO: 733097 - RNA, 17 nt, Artificial Sequence
  Synthetic
aaguugucuuucuaaca

SEQ ID NO: 733098 - RNA, 17 nt, Artificial Sequence
  Synthetic
aaguuuauuuucuaaca

SEQ ID NO: 733099 - RNA, 17 nt, Artificial Sequence
  Synthetic
ugagcagggaaguaaca

SEQ ID NO: 733100 - RNA, 17 nt, Artificial Sequence
  Synthetic
uauuuuaagcaguaaca

SEQ ID NO: 733101 - RNA, 17 nt, Artificial Sequence
  Synthetic
cauuuucuugaguaaca

SEQ ID NO: 733102 - RNA, 17 nt, Artificial Sequence
  Synthetic
aggggcuccagguaaca

SEQ ID NO: 733103 - RNA, 17 nt, Artificial Sequence
  Synthetic
auguuaccaugguaaca

SEQ ID NO: 733104 - RNA, 17 nt, Artificial Sequence
  Synthetic
aucuguaauauguaaca

SEQ ID NO: 733105 - RNA, 17 nt, Artificial Sequence
  Synthetic
uuuggaaguauguaaca

SEQ ID NO: 733106 - RNA, 17 nt, Artificial Sequence
  Synthetic
uuauucaguauguaaca

SEQ ID NO: 733107 - RNA, 17 nt, Artificial Sequence
  Synthetic
aacaaaaaacuguaaca

SEQ ID NO: 733108 - RNA, 17 nt, Artificial Sequence
  Synthetic
uguuuaucuguguaaca

SEQ ID NO: 733109 - RNA, 17 nt, Artificial Sequence
  Synthetic
uagagugcuuuguaaca

SEQ ID NO: 733110 - RNA, 17 nt, Artificial Sequence
  Synthetic
aaaucugaaaauuaaca

SEQ ID NO: 733111 - RNA, 17 nt, Artificial Sequence
  Synthetic
aacuaggcaaauuaaca

SEQ ID NO: 733112 - RNA, 17 nt, Artificial Sequence
  Synthetic
cuuccuuuccauuaaca

SEQ ID NO: 733113 - RNA, 17 nt, Artificial Sequence
  Synthetic
cuuauaaugccuuaaca

SEQ ID NO: 733114 - RNA, 17 nt, Artificial Sequence
  Synthetic
auuucacgggcuuaaca

SEQ ID NO: 733115 - RNA, 17 nt, Artificial Sequence
  Synthetic
ucaucaugaucuuaaca

SEQ ID NO: 733116 - RNA, 17 nt, Artificial Sequence
  Synthetic
cacagguauucuuaaca

SEQ ID NO: 733117 - RNA, 17 nt, Artificial Sequence
  Synthetic
uuaugguuuucuuaaca

SEQ ID NO: 733118 - RNA, 17 nt, Artificial Sequence
  Synthetic
aaaacuguggguuaaca

SEQ ID NO: 733119 - RNA, 17 nt, Artificial Sequence
  Synthetic
aaaaaaauguguuaaca

SEQ ID NO: 733120 - RNA, 17 nt, Artificial Sequence
  Synthetic
aauuugcauauuuaaca

SEQ ID NO: 733121 - RNA, 17 nt, Artificial Sequence
  Synthetic
aaugaauuacuuuaaca

SEQ ID NO: 733122 - RNA, 17 nt, Artificial Sequence
  Synthetic
uuaaaacaucuuuaaca

SEQ ID NO: 733123 - RNA, 17 nt, Artificial Sequence
  Synthetic
uauguacuauuuuaaca

SEQ ID NO: 733124 - RNA, 17 nt, Artificial Sequence
  Synthetic
aacugucuguuuuaaca

SEQ ID NO: 733125 - RNA, 17 nt, Artificial Sequence
  Synthetic
uauucccauuuuuaaca

SEQ ID NO: 733126 - RNA, 17 nt, Artificial Sequence
  Synthetic
cuuccugauuuuuaaca

SEQ ID NO: 733127 - RNA, 17 nt, Artificial Sequence
  Synthetic
uucucuauaaaaacaca

SEQ ID NO: 733128 - RNA, 17 nt, Artificial Sequence
  Synthetic
uuaccucugaaaacaca

SEQ ID NO: 733129 - RNA, 17 nt, Artificial Sequence
  Synthetic
aaaacuauacaaacaca

SEQ ID NO: 733130 - RNA, 17 nt, Artificial Sequence
  Synthetic
agugauagccaaacaca

SEQ ID NO: 733131 - RNA, 17 nt, Artificial Sequence
  Synthetic
aguuccaagcaaacaca

SEQ ID NO: 733132 - RNA, 17 nt, Artificial Sequence
  Synthetic
ugaugccucccaacaca

SEQ ID NO: 733133 - RNA, 17 nt, Artificial Sequence
  Synthetic
uuuuucuauucaacaca

SEQ ID NO: 733134 - RNA, 17 nt, Artificial Sequence
  Synthetic
aucuuuuuuucaacaca

SEQ ID NO: 733135 - RNA, 17 nt, Artificial Sequence
  Synthetic
aaaagugcaagaacaca

SEQ ID NO: 733136 - RNA, 17 nt, Artificial Sequence
  Synthetic
uauuaguuaagaacaca

SEQ ID NO: 733137 - RNA, 17 nt, Artificial Sequence
  Synthetic
ugaacaaugagaacaca

SEQ ID NO: 733138 - RNA, 17 nt, Artificial Sequence
  Synthetic
ugagcaaugagaacaca

SEQ ID NO: 733139 - RNA, 17 nt, Artificial Sequence
  Synthetic
ugaacgaugagaacaca

SEQ ID NO: 733140 - RNA, 17 nt, Artificial Sequence
  Synthetic
uaaaugaugagaacaca

SEQ ID NO: 733141 - RNA, 17 nt, Artificial Sequence
  Synthetic
uaagugaugagaacaca

SEQ ID NO: 733142 - RNA, 17 nt, Artificial Sequence
  Synthetic
augaagucaggaacaca

SEQ ID NO: 733143 - RNA, 17 nt, Artificial Sequence
  Synthetic
uguuuaaggugaacaca

SEQ ID NO: 733144 - RNA, 17 nt, Artificial Sequence
  Synthetic
uacacaguucuaacaca

SEQ ID NO: 733145 - RNA, 17 nt, Artificial Sequence
  Synthetic
aaaugaaucuuaacaca

SEQ ID NO: 733146 - RNA, 17 nt, Artificial Sequence
  Synthetic
uacauugauuuaacaca

SEQ ID NO: 733147 - RNA, 17 nt, Artificial Sequence
  Synthetic
cccuuuuuuuuaacaca

SEQ ID NO: 733148 - RNA, 17 nt, Artificial Sequence
  Synthetic
ccauauacccacacaca

SEQ ID NO: 733149 - RNA, 17 nt, Artificial Sequence
  Synthetic
agggcuucccacacaca

SEQ ID NO: 733150 - RNA, 17 nt, Artificial Sequence
  Synthetic
aaaacaugagacacaca

SEQ ID NO: 733151 - RNA, 17 nt, Artificial Sequence
  Synthetic
cugacuacuaccacaca

SEQ ID NO: 733152 - RNA, 17 nt, Artificial Sequence
  Synthetic
cacuucauuaccacaca

SEQ ID NO: 733153 - RNA, 17 nt, Artificial Sequence
  Synthetic
ucagacccacccacaca

SEQ ID NO: 733154 - RNA, 17 nt, Artificial Sequence
  Synthetic
caacucucacccacaca

SEQ ID NO: 733155 - RNA, 17 nt, Artificial Sequence
  Synthetic
caauauagggccacaca

SEQ ID NO: 733156 - RNA, 17 nt, Artificial Sequence
  Synthetic
uuuuuuuuuuccacaca

SEQ ID NO: 733157 - RNA, 17 nt, Artificial Sequence
  Synthetic
uaagcacugagcacaca

SEQ ID NO: 733158 - RNA, 17 nt, Artificial Sequence
  Synthetic
uaacuccacugcacaca

SEQ ID NO: 733159 - RNA, 17 nt, Artificial Sequence
  Synthetic
cuaauaauaaucacaca

SEQ ID NO: 733160 - RNA, 17 nt, Artificial Sequence
  Synthetic
aagucugaacucacaca

SEQ ID NO: 733161 - RNA, 17 nt, Artificial Sequence
  Synthetic
cucggaaaccucacaca

SEQ ID NO: 733162 - RNA, 17 nt, Artificial Sequence
  Synthetic
agucagagggucacaca

SEQ ID NO: 733163 - RNA, 17 nt, Artificial Sequence
  Synthetic
uuugugguugucacaca

SEQ ID NO: 733164 - RNA, 17 nt, Artificial Sequence
  Synthetic
uuugaaguauucacaca

SEQ ID NO: 733165 - RNA, 17 nt, Artificial Sequence
  Synthetic
accugcaagaagacaca

SEQ ID NO: 733166 - RNA, 17 nt, Artificial Sequence
  Synthetic
cuuuuucagaagacaca

SEQ ID NO: 733167 - RNA, 17 nt, Artificial Sequence
  Synthetic
uaaacuaggcagacaca

SEQ ID NO: 733168 - RNA, 17 nt, Artificial Sequence
  Synthetic
agcauauaucagacaca

SEQ ID NO: 733169 - RNA, 17 nt, Artificial Sequence
  Synthetic
aaaaauuuucagacaca

SEQ ID NO: 733170 - RNA, 17 nt, Artificial Sequence
  Synthetic
aagccaaaggagacaca

SEQ ID NO: 733171 - RNA, 17 nt, Artificial Sequence
  Synthetic
uucaugaaggagacaca

SEQ ID NO: 733172 - RNA, 17 nt, Artificial Sequence
  Synthetic
cauguugaguagacaca

SEQ ID NO: 733173 - RNA, 17 nt, Artificial Sequence
  Synthetic
aaucuaugguagacaca

SEQ ID NO: 733174 - RNA, 17 nt, Artificial Sequence
  Synthetic
ccuaacaccacgacaca

SEQ ID NO: 733175 - RNA, 17 nt, Artificial Sequence
  Synthetic
uagggcuggaggacaca

SEQ ID NO: 733176 - RNA, 17 nt, Artificial Sequence
  Synthetic
uacugggauaggacaca

SEQ ID NO: 733177 - RNA, 17 nt, Artificial Sequence
  Synthetic
aauauaguuaggacaca

SEQ ID NO: 733178 - RNA, 17 nt, Artificial Sequence
  Synthetic
aaaacaauguggacaca

SEQ ID NO: 733179 - RNA, 17 nt, Artificial Sequence
  Synthetic
aggauaaauuggacaca

SEQ ID NO: 733180 - RNA, 17 nt, Artificial Sequence
  Synthetic
uauagcugaaugacaca

SEQ ID NO: 733181 - RNA, 17 nt, Artificial Sequence
  Synthetic
ugugagggccugacaca

SEQ ID NO: 733182 - RNA, 17 nt, Artificial Sequence
  Synthetic
cacugugauuugacaca

SEQ ID NO: 733183 - RNA, 17 nt, Artificial Sequence
  Synthetic
aguauucaaaauacaca

SEQ ID NO: 733184 - RNA, 17 nt, Artificial Sequence
  Synthetic
uuauuuucaaauacaca

SEQ ID NO: 733185 - RNA, 17 nt, Artificial Sequence
  Synthetic
agccucggaaauacaca

SEQ ID NO: 733186 - RNA, 17 nt, Artificial Sequence
  Synthetic
agaacuuuaaauacaca

SEQ ID NO: 733187 - RNA, 17 nt, Artificial Sequence
  Synthetic
ucucuacacaauacaca

SEQ ID NO: 733188 - RNA, 17 nt, Artificial Sequence
  Synthetic
accauaccccauacaca

SEQ ID NO: 733189 - RNA, 17 nt, Artificial Sequence
  Synthetic
auucacuaucauacaca

SEQ ID NO: 733190 - RNA, 17 nt, Artificial Sequence
  Synthetic
ccuaaaauagauacaca

SEQ ID NO: 733191 - RNA, 17 nt, Artificial Sequence
  Synthetic
acaauuucauauacaca

SEQ ID NO: 733192 - RNA, 17 nt, Artificial Sequence
  Synthetic
uucugauucacuacaca

SEQ ID NO: 733193 - RNA, 17 nt, Artificial Sequence
  Synthetic
uguguuaauacuacaca

SEQ ID NO: 733194 - RNA, 17 nt, Artificial Sequence
  Synthetic
acacccugcaguacaca

SEQ ID NO: 733195 - RNA, 17 nt, Artificial Sequence
  Synthetic
agacagacacguacaca

SEQ ID NO: 733196 - RNA, 17 nt, Artificial Sequence
  Synthetic
uuucagcuugguacaca

SEQ ID NO: 733197 - RNA, 17 nt, Artificial Sequence
  Synthetic
aaaacaaaauguacaca

SEQ ID NO: 733198 - RNA, 17 nt, Artificial Sequence
  Synthetic
aggaaauaauguacaca

SEQ ID NO: 733199 - RNA, 17 nt, Artificial Sequence
  Synthetic
uauuugauaauuacaca

SEQ ID NO: 733200 - RNA, 17 nt, Artificial Sequence
  Synthetic
acacauauaauuacaca

SEQ ID NO: 733201 - RNA, 17 nt, Artificial Sequence
  Synthetic
auauugcuccuuacaca

SEQ ID NO: 733202 - RNA, 17 nt, Artificial Sequence
  Synthetic
uugucagcaguuacaca

SEQ ID NO: 733203 - RNA, 17 nt, Artificial Sequence
  Synthetic
auaagccacguuacaca

SEQ ID NO: 733204 - RNA, 17 nt, Artificial Sequence
  Synthetic
ucauauuguuuuacaca

SEQ ID NO: 733205 - RNA, 17 nt, Artificial Sequence
  Synthetic
caacgacaaaaaccaca

SEQ ID NO: 733206 - RNA, 17 nt, Artificial Sequence
  Synthetic
ugcaaaucaaaaccaca

SEQ ID NO: 733207 - RNA, 17 nt, Artificial Sequence
  Synthetic
ugcaaaugaaaaccaca

SEQ ID NO: 733208 - RNA, 17 nt, Artificial Sequence
  Synthetic
uuacuuauccaaccaca

SEQ ID NO: 733209 - RNA, 17 nt, Artificial Sequence
  Synthetic
caaaguugucaaccaca

SEQ ID NO: 733210 - RNA, 17 nt, Artificial Sequence
  Synthetic
acaggcucaacaccaca

SEQ ID NO: 733211 - RNA, 17 nt, Artificial Sequence
  Synthetic
caaugguguacaccaca

SEQ ID NO: 733212 - RNA, 17 nt, Artificial Sequence
  Synthetic
auauucucaccaccaca

SEQ ID NO: 733213 - RNA, 17 nt, Artificial Sequence
  Synthetic
ccucagcacccaccaca

SEQ ID NO: 733214 - RNA, 17 nt, Artificial Sequence
  Synthetic
uguuuucuuucaccaca

SEQ ID NO: 733215 - RNA, 17 nt, Artificial Sequence
  Synthetic
caauauuucagaccaca

SEQ ID NO: 733216 - RNA, 17 nt, Artificial Sequence
  Synthetic
ucaaguucgagaccaca

SEQ ID NO: 733217 - RNA, 17 nt, Artificial Sequence
  Synthetic
ugaucauagugaccaca

SEQ ID NO: 733218 - RNA, 17 nt, Artificial Sequence
  Synthetic
ugaaaagggugaccaca

SEQ ID NO: 733219 - RNA, 17 nt, Artificial Sequence
  Synthetic
caaggcgggugaccaca

SEQ ID NO: 733220 - RNA, 17 nt, Artificial Sequence
  Synthetic
ugauucugccuaccaca

SEQ ID NO: 733221 - RNA, 17 nt, Artificial Sequence
  Synthetic
uacccugcaaacccaca

SEQ ID NO: 733222 - RNA, 17 nt, Artificial Sequence
  Synthetic
caguccaauaacccaca

SEQ ID NO: 733223 - RNA, 17 nt, Artificial Sequence
  Synthetic
cuggagauacacccaca

SEQ ID NO: 733224 - RNA, 17 nt, Artificial Sequence
  Synthetic
uuuuuguauaccccaca

SEQ ID NO: 733225 - RNA, 17 nt, Artificial Sequence
  Synthetic
uucaguuaccucccaca

SEQ ID NO: 733226 - RNA, 17 nt, Artificial Sequence
  Synthetic
ccucaggugcucccaca

SEQ ID NO: 733227 - RNA, 17 nt, Artificial Sequence
  Synthetic
uccugagacuucccaca

SEQ ID NO: 733228 - RNA, 17 nt, Artificial Sequence
  Synthetic
uguucuuuguucccaca

SEQ ID NO: 733229 - RNA, 17 nt, Artificial Sequence
  Synthetic
aaaaacccaaagccaca

SEQ ID NO: 733230 - RNA, 17 nt, Artificial Sequence
  Synthetic
uacccugcaaagccaca

SEQ ID NO: 733231 - RNA, 17 nt, Artificial Sequence
  Synthetic
aaugaauugaagccaca

SEQ ID NO: 733232 - RNA, 17 nt, Artificial Sequence
  Synthetic
uuaaguaagcagccaca

SEQ ID NO: 733233 - RNA, 17 nt, Artificial Sequence
  Synthetic
aaacgaaaagagccaca

SEQ ID NO: 733234 - RNA, 17 nt, Artificial Sequence
  Synthetic
acaagcucagagccaca

SEQ ID NO: 733235 - RNA, 17 nt, Artificial Sequence
  Synthetic
uguuacuuauagccaca

SEQ ID NO: 733236 - RNA, 17 nt, Artificial Sequence
  Synthetic
uaauuuuguuagccaca

SEQ ID NO: 733237 - RNA, 17 nt, Artificial Sequence
  Synthetic
cuugaggaaucgccaca

SEQ ID NO: 733238 - RNA, 17 nt, Artificial Sequence
  Synthetic
cuauaccucaggccaca

SEQ ID NO: 733239 - RNA, 17 nt, Artificial Sequence
  Synthetic
ugguggugagggccaca

SEQ ID NO: 733240 - RNA, 17 nt, Artificial Sequence
  Synthetic
uuuauugaauggccaca

SEQ ID NO: 733241 - RNA, 17 nt, Artificial Sequence
  Synthetic
agaccauccuggccaca

SEQ ID NO: 733242 - RNA, 17 nt, Artificial Sequence
  Synthetic
uguuacauguggccaca

SEQ ID NO: 733243 - RNA, 17 nt, Artificial Sequence
  Synthetic
cauuggcuuuggccaca

SEQ ID NO: 733244 - RNA, 17 nt, Artificial Sequence
  Synthetic
aagugcugaaugccaca

SEQ ID NO: 733245 - RNA, 17 nt, Artificial Sequence
  Synthetic
uagaccucucugccaca

SEQ ID NO: 733246 - RNA, 17 nt, Artificial Sequence
  Synthetic
aaaccaugucugccaca

SEQ ID NO: 733247 - RNA, 17 nt, Artificial Sequence
  Synthetic
aauccaacaaauccaca

SEQ ID NO: 733248 - RNA, 17 nt, Artificial Sequence
  Synthetic
aaaucuguuaauccaca

SEQ ID NO: 733249 - RNA, 17 nt, Artificial Sequence
  Synthetic
aaguugacagauccaca

SEQ ID NO: 733250 - RNA, 17 nt, Artificial Sequence
  Synthetic
cucucaagggauccaca

SEQ ID NO: 733251 - RNA, 17 nt, Artificial Sequence
  Synthetic
uaggauagcccuccaca

SEQ ID NO: 733252 - RNA, 17 nt, Artificial Sequence
  Synthetic
caaugaaagccuccaca

SEQ ID NO: 733253 - RNA, 17 nt, Artificial Sequence
  Synthetic
cucagccuggcuccaca

SEQ ID NO: 733254 - RNA, 17 nt, Artificial Sequence
  Synthetic
acuucuuggucuccaca

SEQ ID NO: 733255 - RNA, 17 nt, Artificial Sequence
  Synthetic
cuaccuacaauuccaca

SEQ ID NO: 733256 - RNA, 17 nt, Artificial Sequence
  Synthetic
ucccuucuacuuccaca

SEQ ID NO: 733257 - RNA, 17 nt, Artificial Sequence
  Synthetic
cuaacauuccuuccaca

SEQ ID NO: 733258 - RNA, 17 nt, Artificial Sequence
  Synthetic
aagguuguucuuccaca

SEQ ID NO: 733259 - RNA, 17 nt, Artificial Sequence
  Synthetic
ugacucacaguuccaca

SEQ ID NO: 733260 - RNA, 17 nt, Artificial Sequence
  Synthetic
auggcuucaguuccaca

SEQ ID NO: 733261 - RNA, 17 nt, Artificial Sequence
  Synthetic
aacaucugauuuccaca

SEQ ID NO: 733262 - RNA, 17 nt, Artificial Sequence
  Synthetic
cagccucccaaagcaca

SEQ ID NO: 733263 - RNA, 17 nt, Artificial Sequence
  Synthetic
uuguuaagacaagcaca

SEQ ID NO: 733264 - RNA, 17 nt, Artificial Sequence
  Synthetic
augggaaaagaagcaca

SEQ ID NO: 733265 - RNA, 17 nt, Artificial Sequence
  Synthetic
cucaccccggaagcaca

SEQ ID NO: 733266 - RNA, 17 nt, Artificial Sequence
  Synthetic
uuguauuuggaagcaca

SEQ ID NO: 733267 - RNA, 17 nt, Artificial Sequence
  Synthetic
uauuuaaaugaagcaca

SEQ ID NO: 733268 - RNA, 17 nt, Artificial Sequence
  Synthetic
aagugugcugaagcaca

SEQ ID NO: 733269 - RNA, 17 nt, Artificial Sequence
  Synthetic
cuggggcuuuaagcaca

SEQ ID NO: 733270 - RNA, 17 nt, Artificial Sequence
  Synthetic
uugcugcuuuaagcaca

SEQ ID NO: 733271 - RNA, 17 nt, Artificial Sequence
  Synthetic
aaaaccuuggcagcaca

SEQ ID NO: 733272 - RNA, 17 nt, Artificial Sequence
  Synthetic
aaccugagcucagcaca

SEQ ID NO: 733273 - RNA, 17 nt, Artificial Sequence
  Synthetic
aggaagagaagagcaca

SEQ ID NO: 733274 - RNA, 17 nt, Artificial Sequence
  Synthetic
acaguuucaugagcaca

SEQ ID NO: 733275 - RNA, 17 nt, Artificial Sequence
  Synthetic
ccucucaaacuagcaca

SEQ ID NO: 733276 - RNA, 17 nt, Artificial Sequence
  Synthetic
uaugacagaguagcaca

SEQ ID NO: 733277 - RNA, 17 nt, Artificial Sequence
  Synthetic
aaagaaagaaaggcaca

SEQ ID NO: 733278 - RNA, 17 nt, Artificial Sequence
  Synthetic
cccauuccuaaggcaca

SEQ ID NO: 733279 - RNA, 17 nt, Artificial Sequence
  Synthetic
uucacgggccaggcaca

SEQ ID NO: 733280 - RNA, 17 nt, Artificial Sequence
  Synthetic
uuuuuaaaauaggcaca

SEQ ID NO: 733281 - RNA, 17 nt, Artificial Sequence
  Synthetic
uaaccacaauaggcaca

SEQ ID NO: 733282 - RNA, 17 nt, Artificial Sequence
  Synthetic
auacuaauauaggcaca

SEQ ID NO: 733283 - RNA, 17 nt, Artificial Sequence
  Synthetic
ccauuuagcuaggcaca

SEQ ID NO: 733284 - RNA, 17 nt, Artificial Sequence
  Synthetic
uguccuuuguaggcaca

SEQ ID NO: 733285 - RNA, 17 nt, Artificial Sequence
  Synthetic
aaagcauuccgggcaca

SEQ ID NO: 733286 - RNA, 17 nt, Artificial Sequence
  Synthetic
ugagauuugggggcaca

SEQ ID NO: 733287 - RNA, 17 nt, Artificial Sequence
  Synthetic
aaaguugacugggcaca

SEQ ID NO: 733288 - RNA, 17 nt, Artificial Sequence
  Synthetic
ucagcaauuugggcaca

SEQ ID NO: 733289 - RNA, 17 nt, Artificial Sequence
  Synthetic
uauuauuacauggcaca

SEQ ID NO: 733290 - RNA, 17 nt, Artificial Sequence
  Synthetic
cauugcaucauggcaca

SEQ ID NO: 733291 - RNA, 17 nt, Artificial Sequence
  Synthetic
cugggcaugguggcaca

SEQ ID NO: 733292 - RNA, 17 nt, Artificial Sequence
  Synthetic
uggcuguuccaugcaca

SEQ ID NO: 733293 - RNA, 17 nt, Artificial Sequence
  Synthetic
agagcucagcaugcaca

SEQ ID NO: 733294 - RNA, 17 nt, Artificial Sequence
  Synthetic
cagagauuggaugcaca

SEQ ID NO: 733295 - RNA, 17 nt, Artificial Sequence
  Synthetic
cugaaagucacugcaca

SEQ ID NO: 733296 - RNA, 17 nt, Artificial Sequence
  Synthetic
agcuagaggacugcaca

SEQ ID NO: 733297 - RNA, 17 nt, Artificial Sequence
  Synthetic
uaaacauugagugcaca

SEQ ID NO: 733298 - RNA, 17 nt, Artificial Sequence
  Synthetic
aaugcuaaaugugcaca

SEQ ID NO: 733299 - RNA, 17 nt, Artificial Sequence
  Synthetic
aauuaggagauugcaca

SEQ ID NO: 733300 - RNA, 17 nt, Artificial Sequence
  Synthetic
aagagcccccuugcaca

SEQ ID NO: 733301 - RNA, 17 nt, Artificial Sequence
  Synthetic
uuuuuucagcuugcaca

SEQ ID NO: 733302 - RNA, 17 nt, Artificial Sequence
  Synthetic
cacccuauaaaaucaca

SEQ ID NO: 733303 - RNA, 17 nt, Artificial Sequence
  Synthetic
uagacugccaaaucaca

SEQ ID NO: 733304 - RNA, 17 nt, Artificial Sequence
  Synthetic
aaccaaagcaaaucaca

SEQ ID NO: 733305 - RNA, 17 nt, Artificial Sequence
  Synthetic
ugcuaaagcaaaucaca

SEQ ID NO: 733306 - RNA, 17 nt, Artificial Sequence
  Synthetic
aucuuaggcaaaucaca

SEQ ID NO: 733307 - RNA, 17 nt, Artificial Sequence
  Synthetic
acagaacuuaaaucaca

SEQ ID NO: 733308 - RNA, 17 nt, Artificial Sequence
  Synthetic
uaauguguguaaucaca

SEQ ID NO: 733309 - RNA, 17 nt, Artificial Sequence
  Synthetic
cuuucaucuuaaucaca

SEQ ID NO: 733310 - RNA, 17 nt, Artificial Sequence
  Synthetic
uaacucccaacaucaca

SEQ ID NO: 733311 - RNA, 17 nt, Artificial Sequence
  Synthetic
cuaacuguaacaucaca

SEQ ID NO: 733312 - RNA, 17 nt, Artificial Sequence
  Synthetic
uuuuaaauugcaucaca

SEQ ID NO: 733313 - RNA, 17 nt, Artificial Sequence
  Synthetic
auuccauuaucaucaca

SEQ ID NO: 733314 - RNA, 17 nt, Artificial Sequence
  Synthetic
caggcgggcagaucaca

SEQ ID NO: 733315 - RNA, 17 nt, Artificial Sequence
  Synthetic
ugaacaaugagaucaca

SEQ ID NO: 733316 - RNA, 17 nt, Artificial Sequence
  Synthetic
auuugucuaggaucaca

SEQ ID NO: 733317 - RNA, 17 nt, Artificial Sequence
  Synthetic
agucauacaugaucaca

SEQ ID NO: 733318 - RNA, 17 nt, Artificial Sequence
  Synthetic
ucucuuggcauaucaca

SEQ ID NO: 733319 - RNA, 17 nt, Artificial Sequence
  Synthetic
cucagcaaacuaucaca

SEQ ID NO: 733320 - RNA, 17 nt, Artificial Sequence
  Synthetic
cugagcaaacuaucaca

SEQ ID NO: 733321 - RNA, 17 nt, Artificial Sequence
  Synthetic
acucacucacuaucaca

SEQ ID NO: 733322 - RNA, 17 nt, Artificial Sequence
  Synthetic
uggcauauucuaucaca

SEQ ID NO: 733323 - RNA, 17 nt, Artificial Sequence
  Synthetic
caucaauauuuaucaca

SEQ ID NO: 733324 - RNA, 17 nt, Artificial Sequence
  Synthetic
uuuugaauuuuaucaca

SEQ ID NO: 733325 - RNA, 17 nt, Artificial Sequence
  Synthetic
uauuuguaaaacucaca

SEQ ID NO: 733326 - RNA, 17 nt, Artificial Sequence
  Synthetic
ugcuacacaaacucaca

SEQ ID NO: 733327 - RNA, 17 nt, Artificial Sequence
  Synthetic
uaagacaacaacucaca

SEQ ID NO: 733328 - RNA, 17 nt, Artificial Sequence
  Synthetic
cuuuaccauaacucaca

SEQ ID NO: 733329 - RNA, 17 nt, Artificial Sequence
  Synthetic
acacauaaacacucaca

SEQ ID NO: 733330 - RNA, 17 nt, Artificial Sequence
  Synthetic
cugauaauccacucaca

SEQ ID NO: 733331 - RNA, 17 nt, Artificial Sequence
  Synthetic
auauucauagacucaca

SEQ ID NO: 733332 - RNA, 17 nt, Artificial Sequence
  Synthetic
caaauuguggacucaca

SEQ ID NO: 733333 - RNA, 17 nt, Artificial Sequence
  Synthetic
cucacuguaaccucaca

SEQ ID NO: 733334 - RNA, 17 nt, Artificial Sequence
  Synthetic
agccugugagccucaca

SEQ ID NO: 733335 - RNA, 17 nt, Artificial Sequence
  Synthetic
aaauuacccaucucaca

SEQ ID NO: 733336 - RNA, 17 nt, Artificial Sequence
  Synthetic
aaugcauuuaucucaca

SEQ ID NO: 733337 - RNA, 17 nt, Artificial Sequence
  Synthetic
auuuugagacucucaca

SEQ ID NO: 733338 - RNA, 17 nt, Artificial Sequence
  Synthetic
cacuaucaucucucaca

SEQ ID NO: 733339 - RNA, 17 nt, Artificial Sequence
  Synthetic
ucauauggauucucaca

SEQ ID NO: 733340 - RNA, 17 nt, Artificial Sequence
  Synthetic
agacaaaaccagucaca

SEQ ID NO: 733341 - RNA, 17 nt, Artificial Sequence
  Synthetic
ugagacuuucagucaca

SEQ ID NO: 733342 - RNA, 17 nt, Artificial Sequence
  Synthetic
acauacguauagucaca

SEQ ID NO: 733343 - RNA, 17 nt, Artificial Sequence
  Synthetic
uauuuggacuagucaca

SEQ ID NO: 733344 - RNA, 17 nt, Artificial Sequence
  Synthetic
cucacaaacccgucaca

SEQ ID NO: 733345 - RNA, 17 nt, Artificial Sequence
  Synthetic
cucugaaucaggucaca

SEQ ID NO: 733346 - RNA, 17 nt, Artificial Sequence
  Synthetic
uuaugcccgaggucaca

SEQ ID NO: 733347 - RNA, 17 nt, Artificial Sequence
  Synthetic
aggcuugaguggucaca

SEQ ID NO: 733348 - RNA, 17 nt, Artificial Sequence
  Synthetic
caaacuaaaaugucaca

SEQ ID NO: 733349 - RNA, 17 nt, Artificial Sequence
  Synthetic
cauucuaaaaugucaca

SEQ ID NO: 733350 - RNA, 17 nt, Artificial Sequence
  Synthetic
aauaacgcuaugucaca

SEQ ID NO: 733351 - RNA, 17 nt, Artificial Sequence
  Synthetic
auagugucuaugucaca

SEQ ID NO: 733352 - RNA, 17 nt, Artificial Sequence
  Synthetic
auggaaugacugucaca

SEQ ID NO: 733353 - RNA, 17 nt, Artificial Sequence
  Synthetic
ccagugucccugucaca

SEQ ID NO: 733354 - RNA, 17 nt, Artificial Sequence
  Synthetic
augucuagccugucaca

SEQ ID NO: 733355 - RNA, 17 nt, Artificial Sequence
  Synthetic
cacagagagcugucaca

SEQ ID NO: 733356 - RNA, 17 nt, Artificial Sequence
  Synthetic
ucugguugagugucaca

SEQ ID NO: 733357 - RNA, 17 nt, Artificial Sequence
  Synthetic
uguacaggcuugucaca

SEQ ID NO: 733358 - RNA, 17 nt, Artificial Sequence
  Synthetic
caaauuaauuugucaca

SEQ ID NO: 733359 - RNA, 17 nt, Artificial Sequence
  Synthetic
cauuagauacauucaca

SEQ ID NO: 733360 - RNA, 17 nt, Artificial Sequence
  Synthetic
uucagucuucauucaca

SEQ ID NO: 733361 - RNA, 17 nt, Artificial Sequence
  Synthetic
aggaagaauuauucaca

SEQ ID NO: 733362 - RNA, 17 nt, Artificial Sequence
  Synthetic
auuauauuuacuucaca

SEQ ID NO: 733363 - RNA, 17 nt, Artificial Sequence
  Synthetic
aaggaagcaccuucaca

SEQ ID NO: 733364 - RNA, 17 nt, Artificial Sequence
  Synthetic
ccugcuguaucuucaca

SEQ ID NO: 733365 - RNA, 17 nt, Artificial Sequence
  Synthetic
cuucugcugucuucaca

SEQ ID NO: 733366 - RNA, 17 nt, Artificial Sequence
  Synthetic
caagcaucuucuucaca

SEQ ID NO: 733367 - RNA, 17 nt, Artificial Sequence
  Synthetic
acaccuucuucuucaca

SEQ ID NO: 733368 - RNA, 17 nt, Artificial Sequence
  Synthetic
uguagcacugguucaca

SEQ ID NO: 733369 - RNA, 17 nt, Artificial Sequence
  Synthetic
uuuaauggugguucaca

SEQ ID NO: 733370 - RNA, 17 nt, Artificial Sequence
  Synthetic
agcacuuaauguucaca

SEQ ID NO: 733371 - RNA, 17 nt, Artificial Sequence
  Synthetic
auauuuuaauguucaca

SEQ ID NO: 733372 - RNA, 17 nt, Artificial Sequence
  Synthetic
aucuuuuaauguucaca

SEQ ID NO: 733373 - RNA, 17 nt, Artificial Sequence
  Synthetic
acaaagcacuguucaca

SEQ ID NO: 733374 - RNA, 17 nt, Artificial Sequence
  Synthetic
auauuaaauuguucaca

SEQ ID NO: 733375 - RNA, 17 nt, Artificial Sequence
  Synthetic
aauuuacacauuucaca

SEQ ID NO: 733376 - RNA, 17 nt, Artificial Sequence
  Synthetic
cuggacaugauuucaca

SEQ ID NO: 733377 - RNA, 17 nt, Artificial Sequence
  Synthetic
auaauauauauuucaca

SEQ ID NO: 733378 - RNA, 17 nt, Artificial Sequence
  Synthetic
auagggaaauuuucaca

SEQ ID NO: 733379 - RNA, 17 nt, Artificial Sequence
  Synthetic
cugccuucauuuucaca

SEQ ID NO: 733380 - RNA, 17 nt, Artificial Sequence
  Synthetic
caguuuugauuuucaca

SEQ ID NO: 733381 - RNA, 17 nt, Artificial Sequence
  Synthetic
uccauggaaaaaagaca

SEQ ID NO: 733382 - RNA, 17 nt, Artificial Sequence
  Synthetic
ucucaaauaaaaagaca

SEQ ID NO: 733383 - RNA, 17 nt, Artificial Sequence
  Synthetic
auacaguaacaaagaca

SEQ ID NO: 733384 - RNA, 17 nt, Artificial Sequence
  Synthetic
ucccaauaccaaagaca

SEQ ID NO: 733385 - RNA, 17 nt, Artificial Sequence
  Synthetic
caauagaagcaaagaca

SEQ ID NO: 733386 - RNA, 17 nt, Artificial Sequence
  Synthetic
ucacaauagcaaagaca

SEQ ID NO: 733387 - RNA, 17 nt, Artificial Sequence
  Synthetic
agaaagucucaaagaca

SEQ ID NO: 733388 - RNA, 17 nt, Artificial Sequence
  Synthetic
cagccuguucaaagaca

SEQ ID NO: 733389 - RNA, 17 nt, Artificial Sequence
  Synthetic
agccuuuaagaaagaca

SEQ ID NO: 733390 - RNA, 17 nt, Artificial Sequence
  Synthetic
ccucaagaugaaagaca

SEQ ID NO: 733391 - RNA, 17 nt, Artificial Sequence
  Synthetic
uuuaccccugaaagaca

SEQ ID NO: 733392 - RNA, 17 nt, Artificial Sequence
  Synthetic
ucuauuaauuaaagaca

SEQ ID NO: 733393 - RNA, 17 nt, Artificial Sequence
  Synthetic
uauauauuuuaaagaca

SEQ ID NO: 733394 - RNA, 17 nt, Artificial Sequence
  Synthetic
agaacaugaacaagaca

SEQ ID NO: 733395 - RNA, 17 nt, Artificial Sequence
  Synthetic
aaaaccggcacaagaca

SEQ ID NO: 733396 - RNA, 17 nt, Artificial Sequence
  Synthetic
aaaacuggcacaagaca

SEQ ID NO: 733397 - RNA, 17 nt, Artificial Sequence
  Synthetic
uuuauuggcacaagaca

SEQ ID NO: 733398 - RNA, 17 nt, Artificial Sequence
  Synthetic
uaaaggcaagcaagaca

SEQ ID NO: 733399 - RNA, 17 nt, Artificial Sequence
  Synthetic
aaaagcaaggcaagaca

SEQ ID NO: 733400 - RNA, 17 nt, Artificial Sequence
  Synthetic
augaaauccucaagaca

SEQ ID NO: 733401 - RNA, 17 nt, Artificial Sequence
  Synthetic
ugagauagaagaagaca

SEQ ID NO: 733402 - RNA, 17 nt, Artificial Sequence
  Synthetic
aagcagauucgaagaca

SEQ ID NO: 733403 - RNA, 17 nt, Artificial Sequence
  Synthetic
agagaagcaggaagaca

SEQ ID NO: 733404 - RNA, 17 nt, Artificial Sequence
  Synthetic
acaucaggaggaagaca

SEQ ID NO: 733405 - RNA, 17 nt, Artificial Sequence
  Synthetic
aaauaucauugaagaca

SEQ ID NO: 733406 - RNA, 17 nt, Artificial Sequence
  Synthetic
uugcuuuuuugaagaca

SEQ ID NO: 733407 - RNA, 17 nt, Artificial Sequence
  Synthetic
aagcccaccauaagaca

SEQ ID NO: 733408 - RNA, 17 nt, Artificial Sequence
  Synthetic
caagaacagauaagaca

SEQ ID NO: 733409 - RNA, 17 nt, Artificial Sequence
  Synthetic
ugagaguugauaagaca

SEQ ID NO: 733410 - RNA, 17 nt, Artificial Sequence
  Synthetic
cggcccagacuaagaca

SEQ ID NO: 733411 - RNA, 17 nt, Artificial Sequence
  Synthetic
cgaaaaggacuaagaca

SEQ ID NO: 733412 - RNA, 17 nt, Artificial Sequence
  Synthetic
uuucuaucauuaagaca

SEQ ID NO: 733413 - RNA, 17 nt, Artificial Sequence
  Synthetic
uuaaagucaaacagaca

SEQ ID NO: 733414 - RNA, 17 nt, Artificial Sequence
  Synthetic
agcugggaccacagaca

SEQ ID NO: 733415 - RNA, 17 nt, Artificial Sequence
  Synthetic
auucaaaugcacagaca

SEQ ID NO: 733416 - RNA, 17 nt, Artificial Sequence
  Synthetic
uauuuuuaguacagaca

SEQ ID NO: 733417 - RNA, 17 nt, Artificial Sequence
  Synthetic
uuuuuuuaguacagaca

SEQ ID NO: 733418 - RNA, 17 nt, Artificial Sequence
  Synthetic
ugcugaaauuacagaca

SEQ ID NO: 733419 - RNA, 17 nt, Artificial Sequence
  Synthetic
acaaaauuagccagaca

SEQ ID NO: 733420 - RNA, 17 nt, Artificial Sequence
  Synthetic
ucuuugaaaagcagaca

SEQ ID NO: 733421 - RNA, 17 nt, Artificial Sequence
  Synthetic
caaauguuaagcagaca

SEQ ID NO: 733422 - RNA, 17 nt, Artificial Sequence
  Synthetic
caugggcugagcagaca

SEQ ID NO: 733423 - RNA, 17 nt, Artificial Sequence
  Synthetic
agauacagccgcagaca

SEQ ID NO: 733424 - RNA, 17 nt, Artificial Sequence
  Synthetic
uguccuuguggcagaca

SEQ ID NO: 733425 - RNA, 17 nt, Artificial Sequence
  Synthetic
cagcauauauucagaca

SEQ ID NO: 733426 - RNA, 17 nt, Artificial Sequence
  Synthetic
auuuuauuuuucagaca

SEQ ID NO: 733427 - RNA, 17 nt, Artificial Sequence
  Synthetic
auuauuuugaagagaca

SEQ ID NO: 733428 - RNA, 17 nt, Artificial Sequence
  Synthetic
uauuuuuaacagagaca

SEQ ID NO: 733429 - RNA, 17 nt, Artificial Sequence
  Synthetic
cugcagaaagagagaca

SEQ ID NO: 733430 - RNA, 17 nt, Artificial Sequence
  Synthetic
uauuuuuaauagagaca

SEQ ID NO: 733431 - RNA, 17 nt, Artificial Sequence
  Synthetic
uguuuucaguagagaca

SEQ ID NO: 733432 - RNA, 17 nt, Artificial Sequence
  Synthetic
uaucuuuaguagagaca

SEQ ID NO: 733433 - RNA, 17 nt, Artificial Sequence
  Synthetic
uacuuuuaguagagaca

SEQ ID NO: 733434 - RNA, 17 nt, Artificial Sequence
  Synthetic
cauuuuuaguagagaca

SEQ ID NO: 733435 - RNA, 17 nt, Artificial Sequence
  Synthetic
uauuuuuaguagagaca

SEQ ID NO: 733436 - RNA, 17 nt, Artificial Sequence
  Synthetic
uguuuuuaguagagaca

SEQ ID NO: 733437 - RNA, 17 nt, Artificial Sequence
  Synthetic
uguucuuuguagagaca

SEQ ID NO: 733438 - RNA, 17 nt, Artificial Sequence
  Synthetic
uguuauuauuagagaca

SEQ ID NO: 733439 - RNA, 17 nt, Artificial Sequence
  Synthetic
uggauaagaaggagaca

SEQ ID NO: 733440 - RNA, 17 nt, Artificial Sequence
  Synthetic
cucacggguaggagaca

SEQ ID NO: 733441 - RNA, 17 nt, Artificial Sequence
  Synthetic
aaggaaagggggagaca

SEQ ID NO: 733442 - RNA, 17 nt, Artificial Sequence
  Synthetic
uauuuuuaauggagaca

SEQ ID NO: 733443 - RNA, 17 nt, Artificial Sequence
  Synthetic
uucuggggcuggagaca

SEQ ID NO: 733444 - RNA, 17 nt, Artificial Sequence
  Synthetic
uuuucuuucuggagaca

SEQ ID NO: 733445 - RNA, 17 nt, Artificial Sequence
  Synthetic
uuguuuuucuggagaca

SEQ ID NO: 733446 - RNA, 17 nt, Artificial Sequence
  Synthetic
agcuuucaguggagaca

SEQ ID NO: 733447 - RNA, 17 nt, Artificial Sequence
  Synthetic
auuuuuuuguggagaca

SEQ ID NO: 733448 - RNA, 17 nt, Artificial Sequence
  Synthetic
ccuuuuuuuuggagaca

SEQ ID NO: 733449 - RNA, 17 nt, Artificial Sequence
  Synthetic
uacguaugaaugagaca

SEQ ID NO: 733450 - RNA, 17 nt, Artificial Sequence
  Synthetic
caggguaauaugagaca

SEQ ID NO: 733451 - RNA, 17 nt, Artificial Sequence
  Synthetic
cacauuuaccugagaca

SEQ ID NO: 733452 - RNA, 17 nt, Artificial Sequence
  Synthetic
aaguagacccugagaca

SEQ ID NO: 733453 - RNA, 17 nt, Artificial Sequence
  Synthetic
aagcaaauccugagaca

SEQ ID NO: 733454 - RNA, 17 nt, Artificial Sequence
  Synthetic
aagucucaucugagaca

SEQ ID NO: 733455 - RNA, 17 nt, Artificial Sequence
  Synthetic
auauauaguuugagaca

SEQ ID NO: 733456 - RNA, 17 nt, Artificial Sequence
  Synthetic
uuauuuauuuugagaca

SEQ ID NO: 733457 - RNA, 17 nt, Artificial Sequence
  Synthetic
uuuuuucuuuugagaca

SEQ ID NO: 733458 - RNA, 17 nt, Artificial Sequence
  Synthetic
uuuuuauuuuugagaca

SEQ ID NO: 733459 - RNA, 17 nt, Artificial Sequence
  Synthetic
auauauuuuuugagaca

SEQ ID NO: 733460 - RNA, 17 nt, Artificial Sequence
  Synthetic
uuuguuuuuuugagaca

SEQ ID NO: 733461 - RNA, 17 nt, Artificial Sequence
  Synthetic
uuuuuuuuuuugagaca

SEQ ID NO: 733462 - RNA, 17 nt, Artificial Sequence
  Synthetic
uauggaagaaauagaca

SEQ ID NO: 733463 - RNA, 17 nt, Artificial Sequence
  Synthetic
agaaugcacaauagaca

SEQ ID NO: 733464 - RNA, 17 nt, Artificial Sequence
  Synthetic
auggcugaccauagaca

SEQ ID NO: 733465 - RNA, 17 nt, Artificial Sequence
  Synthetic
accccaugagauagaca

SEQ ID NO: 733466 - RNA, 17 nt, Artificial Sequence
  Synthetic
uauuuguuagauagaca

SEQ ID NO: 733467 - RNA, 17 nt, Artificial Sequence
  Synthetic
aaaagucuauauagaca

SEQ ID NO: 733468 - RNA, 17 nt, Artificial Sequence
  Synthetic
auauaaaucuauagaca

SEQ ID NO: 733469 - RNA, 17 nt, Artificial Sequence
  Synthetic
uuauaaaauuauagaca

SEQ ID NO: 733470 - RNA, 17 nt, Artificial Sequence
  Synthetic
acacccuuuuauagaca

SEQ ID NO: 733471 - RNA, 17 nt, Artificial Sequence
  Synthetic
aaugacaucacuagaca

SEQ ID NO: 733472 - RNA, 17 nt, Artificial Sequence
  Synthetic
uuuaaaagagcuagaca

SEQ ID NO: 733473 - RNA, 17 nt, Artificial Sequence
  Synthetic
cugucagaaaguagaca

SEQ ID NO: 733474 - RNA, 17 nt, Artificial Sequence
  Synthetic
aauuuuccagguagaca

SEQ ID NO: 733475 - RNA, 17 nt, Artificial Sequence
  Synthetic
uugauaauugguagaca

SEQ ID NO: 733476 - RNA, 17 nt, Artificial Sequence
  Synthetic
ccacauuguauuagaca

SEQ ID NO: 733477 - RNA, 17 nt, Artificial Sequence
  Synthetic
cagaguuaucuuagaca

SEQ ID NO: 733478 - RNA, 17 nt, Artificial Sequence
  Synthetic
ugcccuguucuuagaca

SEQ ID NO: 733479 - RNA, 17 nt, Artificial Sequence
  Synthetic
acuuuaaauguuagaca

SEQ ID NO: 733480 - RNA, 17 nt, Artificial Sequence
  Synthetic
cugcuuuuauuuagaca

SEQ ID NO: 733481 - RNA, 17 nt, Artificial Sequence
  Synthetic
uaaaaacacuuacgaca

SEQ ID NO: 733482 - RNA, 17 nt, Artificial Sequence
  Synthetic
auguacaaggaccgaca

SEQ ID NO: 733483 - RNA, 17 nt, Artificial Sequence
  Synthetic
uguccuuugcagcgaca

SEQ ID NO: 733484 - RNA, 17 nt, Artificial Sequence
  Synthetic
augaggauacaucgaca

SEQ ID NO: 733485 - RNA, 17 nt, Artificial Sequence
  Synthetic
uaugauuuguaucgaca

SEQ ID NO: 733486 - RNA, 17 nt, Artificial Sequence
  Synthetic
auugaagaugaaggaca

SEQ ID NO: 733487 - RNA, 17 nt, Artificial Sequence
  Synthetic
aaucuucuugaaggaca

SEQ ID NO: 733488 - RNA, 17 nt, Artificial Sequence
  Synthetic
aucggguuugaaggaca

SEQ ID NO: 733489 - RNA, 17 nt, Artificial Sequence
  Synthetic
cuguuuuuugaaggaca

SEQ ID NO: 733490 - RNA, 17 nt, Artificial Sequence
  Synthetic
accucuggauaaggaca

SEQ ID NO: 733491 - RNA, 17 nt, Artificial Sequence
  Synthetic
uguccuuuguaaggaca

SEQ ID NO: 733492 - RNA, 17 nt, Artificial Sequence
  Synthetic
ccacugacuacaggaca

SEQ ID NO: 733493 - RNA, 17 nt, Artificial Sequence
  Synthetic
cagacaucuacaggaca

SEQ ID NO: 733494 - RNA, 17 nt, Artificial Sequence
  Synthetic
ccaaagcuaagaggaca

SEQ ID NO: 733495 - RNA, 17 nt, Artificial Sequence
  Synthetic
aaagcuuccugaggaca

SEQ ID NO: 733496 - RNA, 17 nt, Artificial Sequence
  Synthetic
ccaaagugauuaggaca

SEQ ID NO: 733497 - RNA, 17 nt, Artificial Sequence
  Synthetic
aucugucauuuaggaca

SEQ ID NO: 733498 - RNA, 17 nt, Artificial Sequence
  Synthetic
cuucaucuuuuaggaca

SEQ ID NO: 733499 - RNA, 17 nt, Artificial Sequence
  Synthetic
uguccuuugcacggaca

SEQ ID NO: 733500 - RNA, 17 nt, Artificial Sequence
  Synthetic
cacagaucucucggaca

SEQ ID NO: 733501 - RNA, 17 nt, Artificial Sequence
  Synthetic
accuaaauaaagggaca

SEQ ID NO: 733502 - RNA, 17 nt, Artificial Sequence
  Synthetic
aucacaggcaagggaca

SEQ ID NO: 733503 - RNA, 17 nt, Artificial Sequence
  Synthetic
uguccuuugaagggaca

SEQ ID NO: 733504 - RNA, 17 nt, Artificial Sequence
  Synthetic
uguccuuggcagggaca

SEQ ID NO: 733505 - RNA, 17 nt, Artificial Sequence
  Synthetic
uguccuuugcagggaca

SEQ ID NO: 733506 - RNA, 17 nt, Artificial Sequence
  Synthetic
accugugaagagggaca

SEQ ID NO: 733507 - RNA, 17 nt, Artificial Sequence
  Synthetic
uguccguuguagggaca

SEQ ID NO: 733508 - RNA, 17 nt, Artificial Sequence
  Synthetic
aauacuuuguagggaca

SEQ ID NO: 733509 - RNA, 17 nt, Artificial Sequence
  Synthetic
cauccuuuguagggaca

SEQ ID NO: 733510 - RNA, 17 nt, Artificial Sequence
  Synthetic
cguccuuuguagggaca

SEQ ID NO: 733511 - RNA, 17 nt, Artificial Sequence
  Synthetic
uguccuuuguagggaca

SEQ ID NO: 733512 - RNA, 17 nt, Artificial Sequence
  Synthetic
cuaacucugaggggaca

SEQ ID NO: 733513 - RNA, 17 nt, Artificial Sequence
  Synthetic
uauaaaauuaggggaca

SEQ ID NO: 733514 - RNA, 17 nt, Artificial Sequence
  Synthetic
aacuuucuggggggaca

SEQ ID NO: 733515 - RNA, 17 nt, Artificial Sequence
  Synthetic
cucccacuguggggaca

SEQ ID NO: 733516 - RNA, 17 nt, Artificial Sequence
  Synthetic
uguuugcaaaugggaca

SEQ ID NO: 733517 - RNA, 17 nt, Artificial Sequence
  Synthetic
uaaucuugccugggaca

SEQ ID NO: 733518 - RNA, 17 nt, Artificial Sequence
  Synthetic
ucaacugauuugggaca

SEQ ID NO: 733519 - RNA, 17 nt, Artificial Sequence
  Synthetic
uuuuaaaguuugggaca

SEQ ID NO: 733520 - RNA, 17 nt, Artificial Sequence
  Synthetic
accauauaacauggaca

SEQ ID NO: 733521 - RNA, 17 nt, Artificial Sequence
  Synthetic
cucugaucucauggaca

SEQ ID NO: 733522 - RNA, 17 nt, Artificial Sequence
  Synthetic
caguagagagcuggaca

SEQ ID NO: 733523 - RNA, 17 nt, Artificial Sequence
  Synthetic
aaaaaauuagcuggaca

SEQ ID NO: 733524 - RNA, 17 nt, Artificial Sequence
  Synthetic
ccacaucacaguggaca

SEQ ID NO: 733525 - RNA, 17 nt, Artificial Sequence
  Synthetic
aggggcugcaguggaca

SEQ ID NO: 733526 - RNA, 17 nt, Artificial Sequence
  Synthetic
acauccuauaguggaca

SEQ ID NO: 733527 - RNA, 17 nt, Artificial Sequence
  Synthetic
uaagggagugguggaca

SEQ ID NO: 733528 - RNA, 17 nt, Artificial Sequence
  Synthetic
cuuaugacauguggaca

SEQ ID NO: 733529 - RNA, 17 nt, Artificial Sequence
  Synthetic
cauauaguaauuggaca

SEQ ID NO: 733530 - RNA, 17 nt, Artificial Sequence
  Synthetic
ugggggaaacuuggaca

SEQ ID NO: 733531 - RNA, 17 nt, Artificial Sequence
  Synthetic
aggcaugaacuuggaca

SEQ ID NO: 733532 - RNA, 17 nt, Artificial Sequence
  Synthetic
ugauaguggcuuggaca

SEQ ID NO: 733533 - RNA, 17 nt, Artificial Sequence
  Synthetic
auuucgguauuuggaca

SEQ ID NO: 733534 - RNA, 17 nt, Artificial Sequence
  Synthetic
uacaaacaguuuggaca

SEQ ID NO: 733535 - RNA, 17 nt, Artificial Sequence
  Synthetic
caguucaauuuuggaca

SEQ ID NO: 733536 - RNA, 17 nt, Artificial Sequence
  Synthetic
uaccaggaaaaaugaca

SEQ ID NO: 733537 - RNA, 17 nt, Artificial Sequence
  Synthetic
auugacaccaaaugaca

SEQ ID NO: 733538 - RNA, 17 nt, Artificial Sequence
  Synthetic
agaauaagucaaugaca

SEQ ID NO: 733539 - RNA, 17 nt, Artificial Sequence
  Synthetic
aaaccaaaagaaugaca

SEQ ID NO: 733540 - RNA, 17 nt, Artificial Sequence
  Synthetic
uagguaaugacaugaca

SEQ ID NO: 733541 - RNA, 17 nt, Artificial Sequence
  Synthetic
uuuugugugccaugaca

SEQ ID NO: 733542 - RNA, 17 nt, Artificial Sequence
  Synthetic
uaggaagcagcaugaca

SEQ ID NO: 733543 - RNA, 17 nt, Artificial Sequence
  Synthetic
cuuguuuggagaugaca

SEQ ID NO: 733544 - RNA, 17 nt, Artificial Sequence
  Synthetic
uucuuccagugaugaca

SEQ ID NO: 733545 - RNA, 17 nt, Artificial Sequence
  Synthetic
agauuaaggugaugaca

SEQ ID NO: 733546 - RNA, 17 nt, Artificial Sequence
  Synthetic
aaauuggcaauaugaca

SEQ ID NO: 733547 - RNA, 17 nt, Artificial Sequence
  Synthetic
ugaccaucaauaugaca

SEQ ID NO: 733548 - RNA, 17 nt, Artificial Sequence
  Synthetic
aaucauaucauaugaca

SEQ ID NO: 733549 - RNA, 17 nt, Artificial Sequence
  Synthetic
aaggccauuauaugaca

SEQ ID NO: 733550 - RNA, 17 nt, Artificial Sequence
  Synthetic
uuucuaguacuaugaca

SEQ ID NO: 733551 - RNA, 17 nt, Artificial Sequence
  Synthetic
uuugaaaagcuaugaca

SEQ ID NO: 733552 - RNA, 17 nt, Artificial Sequence
  Synthetic
auauaaguauuaugaca

SEQ ID NO: 733553 - RNA, 17 nt, Artificial Sequence
  Synthetic
ucuuucaaaaacugaca

SEQ ID NO: 733554 - RNA, 17 nt, Artificial Sequence
  Synthetic
agacuuugaaacugaca

SEQ ID NO: 733555 - RNA, 17 nt, Artificial Sequence
  Synthetic
uauuugaaacacugaca

SEQ ID NO: 733556 - RNA, 17 nt, Artificial Sequence
  Synthetic
acagugccacacugaca

SEQ ID NO: 733557 - RNA, 17 nt, Artificial Sequence
  Synthetic
uucacauagcacugaca

SEQ ID NO: 733558 - RNA, 17 nt, Artificial Sequence
  Synthetic
cgcauuuuugacugaca

SEQ ID NO: 733559 - RNA, 17 nt, Artificial Sequence
  Synthetic
cuaaagauaggcugaca

SEQ ID NO: 733560 - RNA, 17 nt, Artificial Sequence
  Synthetic
aaagacacaugcugaca

SEQ ID NO: 733561 - RNA, 17 nt, Artificial Sequence
  Synthetic
uggaaucaccucugaca

SEQ ID NO: 733562 - RNA, 17 nt, Artificial Sequence
  Synthetic
cauauauagcucugaca

SEQ ID NO: 733563 - RNA, 17 nt, Artificial Sequence
  Synthetic
ugucaaaaugucugaca

SEQ ID NO: 733564 - RNA, 17 nt, Artificial Sequence
  Synthetic
uucuagauauucugaca

SEQ ID NO: 733565 - RNA, 17 nt, Artificial Sequence
  Synthetic
uucugugaguucugaca

SEQ ID NO: 733566 - RNA, 17 nt, Artificial Sequence
  Synthetic
augucuacuuucugaca

SEQ ID NO: 733567 - RNA, 17 nt, Artificial Sequence
  Synthetic
ccaagcccaaagugaca

SEQ ID NO: 733568 - RNA, 17 nt, Artificial Sequence
  Synthetic
aaaaauggaaagugaca

SEQ ID NO: 733569 - RNA, 17 nt, Artificial Sequence
  Synthetic
aguuuauuugagugaca

SEQ ID NO: 733570 - RNA, 17 nt, Artificial Sequence
  Synthetic
cagcuuuguuagugaca

SEQ ID NO: 733571 - RNA, 17 nt, Artificial Sequence
  Synthetic
uaguucaaaaggugaca

SEQ ID NO: 733572 - RNA, 17 nt, Artificial Sequence
  Synthetic
aguccuugaaggugaca

SEQ ID NO: 733573 - RNA, 17 nt, Artificial Sequence
  Synthetic
uguguuuaacggugaca

SEQ ID NO: 733574 - RNA, 17 nt, Artificial Sequence
  Synthetic
ucagcaaaccggugaca

SEQ ID NO: 733575 - RNA, 17 nt, Artificial Sequence
  Synthetic
ccucaacaagggugaca

SEQ ID NO: 733576 - RNA, 17 nt, Artificial Sequence
  Synthetic
aucugcuuagggugaca

SEQ ID NO: 733577 - RNA, 17 nt, Artificial Sequence
  Synthetic
cuccagccugggugaca

SEQ ID NO: 733578 - RNA, 17 nt, Artificial Sequence
  Synthetic
auugcaugcuggugaca

SEQ ID NO: 733579 - RNA, 17 nt, Artificial Sequence
  Synthetic
cuucagcccaugugaca

SEQ ID NO: 733580 - RNA, 17 nt, Artificial Sequence
  Synthetic
ucuggucaucugugaca

SEQ ID NO: 733581 - RNA, 17 nt, Artificial Sequence
  Synthetic
uaugaaaaugugugaca

SEQ ID NO: 733582 - RNA, 17 nt, Artificial Sequence
  Synthetic
uucacccuaaauugaca

SEQ ID NO: 733583 - RNA, 17 nt, Artificial Sequence
  Synthetic
uacaaaaguaauugaca

SEQ ID NO: 733584 - RNA, 17 nt, Artificial Sequence
  Synthetic
uagcucauauauugaca

SEQ ID NO: 733585 - RNA, 17 nt, Artificial Sequence
  Synthetic
cuaaaugucuauugaca

SEQ ID NO: 733586 - RNA, 17 nt, Artificial Sequence
  Synthetic
cagugcaugacuugaca

SEQ ID NO: 733587 - RNA, 17 nt, Artificial Sequence
  Synthetic
aguuaaaaaucuugaca

SEQ ID NO: 733588 - RNA, 17 nt, Artificial Sequence
  Synthetic
aauaaucaaaguugaca

SEQ ID NO: 733589 - RNA, 17 nt, Artificial Sequence
  Synthetic
cacaaaaccaguugaca

SEQ ID NO: 733590 - RNA, 17 nt, Artificial Sequence
  Synthetic
acuuaugccaguugaca

SEQ ID NO: 733591 - RNA, 17 nt, Artificial Sequence
  Synthetic
aaguuucaauguugaca

SEQ ID NO: 733592 - RNA, 17 nt, Artificial Sequence
  Synthetic
uugcucuccuguugaca

SEQ ID NO: 733593 - RNA, 17 nt, Artificial Sequence
  Synthetic
uuuuguguuauuugaca

SEQ ID NO: 733594 - RNA, 17 nt, Artificial Sequence
  Synthetic
uuucuugauguuugaca

SEQ ID NO: 733595 - RNA, 17 nt, Artificial Sequence
  Synthetic
caaacauuuguuugaca

SEQ ID NO: 733596 - RNA, 17 nt, Artificial Sequence
  Synthetic
ucaacugauuuuugaca

SEQ ID NO: 733597 - RNA, 17 nt, Artificial Sequence
  Synthetic
auaaaauaaaaaauaca

SEQ ID NO: 733598 - RNA, 17 nt, Artificial Sequence
  Synthetic
acauuugcaaaaauaca

SEQ ID NO: 733599 - RNA, 17 nt, Artificial Sequence
  Synthetic
aaauaaauaaaaauaca

SEQ ID NO: 733600 - RNA, 17 nt, Artificial Sequence
  Synthetic
agaaacauaaaaauaca

SEQ ID NO: 733601 - RNA, 17 nt, Artificial Sequence
  Synthetic
uugucagauaaaauaca

SEQ ID NO: 733602 - RNA, 17 nt, Artificial Sequence
  Synthetic
auaaugauuaaaauaca

SEQ ID NO: 733603 - RNA, 17 nt, Artificial Sequence
  Synthetic
uuuaacuuuaaaauaca

SEQ ID NO: 733604 - RNA, 17 nt, Artificial Sequence
  Synthetic
aggacaugucaaauaca

SEQ ID NO: 733605 - RNA, 17 nt, Artificial Sequence
  Synthetic
aagugacuucaaauaca

SEQ ID NO: 733606 - RNA, 17 nt, Artificial Sequence
  Synthetic
aucagguaugaaauaca

SEQ ID NO: 733607 - RNA, 17 nt, Artificial Sequence
  Synthetic
aaucacauugaaauaca

SEQ ID NO: 733608 - RNA, 17 nt, Artificial Sequence
  Synthetic
ccuuaugaauaaauaca

SEQ ID NO: 733609 - RNA, 17 nt, Artificial Sequence
  Synthetic
aagaaaagauaaauaca

SEQ ID NO: 733610 - RNA, 17 nt, Artificial Sequence
  Synthetic
aaacaacacacaauaca

SEQ ID NO: 733611 - RNA, 17 nt, Artificial Sequence
  Synthetic
ugagcaaaaccaauaca

SEQ ID NO: 733612 - RNA, 17 nt, Artificial Sequence
  Synthetic
acuacagaagcaauaca

SEQ ID NO: 733613 - RNA, 17 nt, Artificial Sequence
  Synthetic
ugacacccagcaauaca

SEQ ID NO: 733614 - RNA, 17 nt, Artificial Sequence
  Synthetic
cuuuguuuagcaauaca

SEQ ID NO: 733615 - RNA, 17 nt, Artificial Sequence
  Synthetic
ugcaaauggucaauaca

SEQ ID NO: 733616 - RNA, 17 nt, Artificial Sequence
  Synthetic
caaccagugucaauaca

SEQ ID NO: 733617 - RNA, 17 nt, Artificial Sequence
  Synthetic
aaugauguuucaauaca

SEQ ID NO: 733618 - RNA, 17 nt, Artificial Sequence
  Synthetic
aucucuuucagaauaca

SEQ ID NO: 733619 - RNA, 17 nt, Artificial Sequence
  Synthetic
agaugagagggaauaca

SEQ ID NO: 733620 - RNA, 17 nt, Artificial Sequence
  Synthetic
aagcaauagugaauaca

SEQ ID NO: 733621 - RNA, 17 nt, Artificial Sequence
  Synthetic
aagucauuuauaauaca

SEQ ID NO: 733622 - RNA, 17 nt, Artificial Sequence
  Synthetic
ucuguaagucuaauaca

SEQ ID NO: 733623 - RNA, 17 nt, Artificial Sequence
  Synthetic
cucucaguucuaauaca

SEQ ID NO: 733624 - RNA, 17 nt, Artificial Sequence
  Synthetic
acuuccuguguaauaca

SEQ ID NO: 733625 - RNA, 17 nt, Artificial Sequence
  Synthetic
augcauauuguaauaca

SEQ ID NO: 733626 - RNA, 17 nt, Artificial Sequence
  Synthetic
augcguauuguaauaca

SEQ ID NO: 733627 - RNA, 17 nt, Artificial Sequence
  Synthetic
uauaaaauauuaauaca

SEQ ID NO: 733628 - RNA, 17 nt, Artificial Sequence
  Synthetic
aucaguuuaaacauaca

SEQ ID NO: 733629 - RNA, 17 nt, Artificial Sequence
  Synthetic
aaauguuugaacauaca

SEQ ID NO: 733630 - RNA, 17 nt, Artificial Sequence
  Synthetic
cacuggaauaacauaca

SEQ ID NO: 733631 - RNA, 17 nt, Artificial Sequence
  Synthetic
acacauggacacauaca

SEQ ID NO: 733632 - RNA, 17 nt, Artificial Sequence
  Synthetic
ucccauguagacauaca

SEQ ID NO: 733633 - RNA, 17 nt, Artificial Sequence
  Synthetic
uauaaacaguacauaca

SEQ ID NO: 733634 - RNA, 17 nt, Artificial Sequence
  Synthetic
acaaagauguacauaca

SEQ ID NO: 733635 - RNA, 17 nt, Artificial Sequence
  Synthetic
agauauaccugcauaca

SEQ ID NO: 733636 - RNA, 17 nt, Artificial Sequence
  Synthetic
ccaagaagucucauaca

SEQ ID NO: 733637 - RNA, 17 nt, Artificial Sequence
  Synthetic
ugugguguauucauaca

SEQ ID NO: 733638 - RNA, 17 nt, Artificial Sequence
  Synthetic
auaaauauguucauaca

SEQ ID NO: 733639 - RNA, 17 nt, Artificial Sequence
  Synthetic
auagacacuuucauaca

SEQ ID NO: 733640 - RNA, 17 nt, Artificial Sequence
  Synthetic
ccauagcaaaagauaca

SEQ ID NO: 733641 - RNA, 17 nt, Artificial Sequence
  Synthetic
acagggugaaagauaca

SEQ ID NO: 733642 - RNA, 17 nt, Artificial Sequence
  Synthetic
aaauaaccagagauaca

SEQ ID NO: 733643 - RNA, 17 nt, Artificial Sequence
  Synthetic
aaggcuaaagggauaca

SEQ ID NO: 733644 - RNA, 17 nt, Artificial Sequence
  Synthetic
caaagggcauggauaca

SEQ ID NO: 733645 - RNA, 17 nt, Artificial Sequence
  Synthetic
uuucacauuuggauaca

SEQ ID NO: 733646 - RNA, 17 nt, Artificial Sequence
  Synthetic
caagcagcuaugauaca

SEQ ID NO: 733647 - RNA, 17 nt, Artificial Sequence
  Synthetic
acaacgucccugauaca

SEQ ID NO: 733648 - RNA, 17 nt, Artificial Sequence
  Synthetic
caaggggcucugauaca

SEQ ID NO: 733649 - RNA, 17 nt, Artificial Sequence
  Synthetic
aaucacugcuugauaca

SEQ ID NO: 733650 - RNA, 17 nt, Artificial Sequence
  Synthetic
accccuauuuugauaca

SEQ ID NO: 733651 - RNA, 17 nt, Artificial Sequence
  Synthetic
aauauccaaaauauaca

SEQ ID NO: 733652 - RNA, 17 nt, Artificial Sequence
  Synthetic
uguaugcaaaauauaca

SEQ ID NO: 733653 - RNA, 17 nt, Artificial Sequence
  Synthetic
acugcagauaauauaca

SEQ ID NO: 733654 - RNA, 17 nt, Artificial Sequence
  Synthetic
uaagauacccauauaca

SEQ ID NO: 733655 - RNA, 17 nt, Artificial Sequence
  Synthetic
aaaauacugcauauaca

SEQ ID NO: 733656 - RNA, 17 nt, Artificial Sequence
  Synthetic
uuauugauuuauauaca

SEQ ID NO: 733657 - RNA, 17 nt, Artificial Sequence
  Synthetic
agguaacacucuauaca

SEQ ID NO: 733658 - RNA, 17 nt, Artificial Sequence
  Synthetic
uccaccaacaguauaca

SEQ ID NO: 733659 - RNA, 17 nt, Artificial Sequence
  Synthetic
uuucaguacaguauaca

SEQ ID NO: 733660 - RNA, 17 nt, Artificial Sequence
  Synthetic
caaaaaaaagguauaca

SEQ ID NO: 733661 - RNA, 17 nt, Artificial Sequence
  Synthetic
aacucccaagguauaca

SEQ ID NO: 733662 - RNA, 17 nt, Artificial Sequence
  Synthetic
uaaagaacugguauaca

SEQ ID NO: 733663 - RNA, 17 nt, Artificial Sequence
  Synthetic
cauuuauauauuauaca

SEQ ID NO: 733664 - RNA, 17 nt, Artificial Sequence
  Synthetic
augacuuauguuauaca

SEQ ID NO: 733665 - RNA, 17 nt, Artificial Sequence
  Synthetic
uuaaagucuguuauaca

SEQ ID NO: 733666 - RNA, 17 nt, Artificial Sequence
  Synthetic
auuuuuauuuuuauaca

SEQ ID NO: 733667 - RNA, 17 nt, Artificial Sequence
  Synthetic
ucaaaccuaaaacuaca

SEQ ID NO: 733668 - RNA, 17 nt, Artificial Sequence
  Synthetic
ugaauuuucaaacuaca

SEQ ID NO: 733669 - RNA, 17 nt, Artificial Sequence
  Synthetic
aaaaccacacaacuaca

SEQ ID NO: 733670 - RNA, 17 nt, Artificial Sequence
  Synthetic
cugcuuugacaacuaca

SEQ ID NO: 733671 - RNA, 17 nt, Artificial Sequence
  Synthetic
ucgccauagcaacuaca

SEQ ID NO: 733672 - RNA, 17 nt, Artificial Sequence
  Synthetic
aaaguuuugcaacuaca

SEQ ID NO: 733673 - RNA, 17 nt, Artificial Sequence
  Synthetic
aaagccgcucaacuaca

SEQ ID NO: 733674 - RNA, 17 nt, Artificial Sequence
  Synthetic
accaguagagaacuaca

SEQ ID NO: 733675 - RNA, 17 nt, Artificial Sequence
  Synthetic
acaguuccaacacuaca

SEQ ID NO: 733676 - RNA, 17 nt, Artificial Sequence
  Synthetic
caggcaaagacacuaca

SEQ ID NO: 733677 - RNA, 17 nt, Artificial Sequence
  Synthetic
uaacugccuccacuaca

SEQ ID NO: 733678 - RNA, 17 nt, Artificial Sequence
  Synthetic
ccuuaaaauggacuaca

SEQ ID NO: 733679 - RNA, 17 nt, Artificial Sequence
  Synthetic
ugaaaucuaugacuaca

SEQ ID NO: 733680 - RNA, 17 nt, Artificial Sequence
  Synthetic
aauuuccugugacuaca

SEQ ID NO: 733681 - RNA, 17 nt, Artificial Sequence
  Synthetic
aggauuuugugacuaca

SEQ ID NO: 733682 - RNA, 17 nt, Artificial Sequence
  Synthetic
aauagcaaaauacuaca

SEQ ID NO: 733683 - RNA, 17 nt, Artificial Sequence
  Synthetic
uaaaaauauauacuaca

SEQ ID NO: 733684 - RNA, 17 nt, Artificial Sequence
  Synthetic
cuucaaacuauacuaca

SEQ ID NO: 733685 - RNA, 17 nt, Artificial Sequence
  Synthetic
acuaagaaacuacuaca

SEQ ID NO: 733686 - RNA, 17 nt, Artificial Sequence
  Synthetic
agaguggcuguacuaca

SEQ ID NO: 733687 - RNA, 17 nt, Artificial Sequence
  Synthetic
aauuaguacaaccuaca

SEQ ID NO: 733688 - RNA, 17 nt, Artificial Sequence
  Synthetic
aacaaaugacaccuaca

SEQ ID NO: 733689 - RNA, 17 nt, Artificial Sequence
  Synthetic
uaggacagccaccuaca

SEQ ID NO: 733690 - RNA, 17 nt, Artificial Sequence
  Synthetic
uuaucuuaugaccuaca

SEQ ID NO: 733691 - RNA, 17 nt, Artificial Sequence
  Synthetic
aauuuaaauuaccuaca

SEQ ID NO: 733692 - RNA, 17 nt, Artificial Sequence
  Synthetic
agagggaauuaccuaca

SEQ ID NO: 733693 - RNA, 17 nt, Artificial Sequence
  Synthetic
aucauaacagcccuaca

SEQ ID NO: 733694 - RNA, 17 nt, Artificial Sequence
  Synthetic
augagccuaggccuaca

SEQ ID NO: 733695 - RNA, 17 nt, Artificial Sequence
  Synthetic
cguuagaauugccuaca

SEQ ID NO: 733696 - RNA, 17 nt, Artificial Sequence
  Synthetic
ugccuaucccuccuaca

SEQ ID NO: 733697 - RNA, 17 nt, Artificial Sequence
  Synthetic
uuaaauagaaagcuaca

SEQ ID NO: 733698 - RNA, 17 nt, Artificial Sequence
  Synthetic
aaggaagaacagcuaca

SEQ ID NO: 733699 - RNA, 17 nt, Artificial Sequence
  Synthetic
cuguagucccagcuaca

SEQ ID NO: 733700 - RNA, 17 nt, Artificial Sequence
  Synthetic
uauggagaauagcuaca

SEQ ID NO: 733701 - RNA, 17 nt, Artificial Sequence
  Synthetic
ucccuuuauuagcuaca

SEQ ID NO: 733702 - RNA, 17 nt, Artificial Sequence
  Synthetic
aacuugacugggcuaca

SEQ ID NO: 733703 - RNA, 17 nt, Artificial Sequence
  Synthetic
auaauuacuaugcuaca

SEQ ID NO: 733704 - RNA, 17 nt, Artificial Sequence
  Synthetic
uuauuauaugugcuaca

SEQ ID NO: 733705 - RNA, 17 nt, Artificial Sequence
  Synthetic
cugaagucauugcuaca

SEQ ID NO: 733706 - RNA, 17 nt, Artificial Sequence
  Synthetic
aaauucagucaucuaca

SEQ ID NO: 733707 - RNA, 17 nt, Artificial Sequence
  Synthetic
agugaaagaucucuaca

SEQ ID NO: 733708 - RNA, 17 nt, Artificial Sequence
  Synthetic
ugacaguagagucuaca

SEQ ID NO: 733709 - RNA, 17 nt, Artificial Sequence
  Synthetic
aacaucacaggucuaca

SEQ ID NO: 733710 - RNA, 17 nt, Artificial Sequence
  Synthetic
ugccuuguaugucuaca

SEQ ID NO: 733711 - RNA, 17 nt, Artificial Sequence
  Synthetic
aauggaucgugucuaca

SEQ ID NO: 733712 - RNA, 17 nt, Artificial Sequence
  Synthetic
uuccaaauaauucuaca

SEQ ID NO: 733713 - RNA, 17 nt, Artificial Sequence
  Synthetic
caaaaacacauucuaca

SEQ ID NO: 733714 - RNA, 17 nt, Artificial Sequence
  Synthetic
cauaauaccauucuaca

SEQ ID NO: 733715 - RNA, 17 nt, Artificial Sequence
  Synthetic
uccaagcucauucuaca

SEQ ID NO: 733716 - RNA, 17 nt, Artificial Sequence
  Synthetic
agaucauauauucuaca

SEQ ID NO: 733717 - RNA, 17 nt, Artificial Sequence
  Synthetic
uuugaacuuauucuaca

SEQ ID NO: 733718 - RNA, 17 nt, Artificial Sequence
  Synthetic
ugagaucgauuucuaca

SEQ ID NO: 733719 - RNA, 17 nt, Artificial Sequence
  Synthetic
auauuucaaaaaguaca

SEQ ID NO: 733720 - RNA, 17 nt, Artificial Sequence
  Synthetic
agguuauaaaaaguaca

SEQ ID NO: 733721 - RNA, 17 nt, Artificial Sequence
  Synthetic
agcuagaagaaaguaca

SEQ ID NO: 733722 - RNA, 17 nt, Artificial Sequence
  Synthetic
uugaaagaggaaguaca

SEQ ID NO: 733723 - RNA, 17 nt, Artificial Sequence
  Synthetic
aguuauuaggaaguaca

SEQ ID NO: 733724 - RNA, 17 nt, Artificial Sequence
  Synthetic
uuaaaauaugaaguaca

SEQ ID NO: 733725 - RNA, 17 nt, Artificial Sequence
  Synthetic
ccuuauccugaaguaca

SEQ ID NO: 733726 - RNA, 17 nt, Artificial Sequence
  Synthetic
uuggugagugcaguaca

SEQ ID NO: 733727 - RNA, 17 nt, Artificial Sequence
  Synthetic
ucaacuaccagaguaca

SEQ ID NO: 733728 - RNA, 17 nt, Artificial Sequence
  Synthetic
cuaccagucagaguaca

SEQ ID NO: 733729 - RNA, 17 nt, Artificial Sequence
  Synthetic
cagacuaagagaguaca

SEQ ID NO: 733730 - RNA, 17 nt, Artificial Sequence
  Synthetic
acugcaacgggaguaca

SEQ ID NO: 733731 - RNA, 17 nt, Artificial Sequence
  Synthetic
uaauauacgugaguaca

SEQ ID NO: 733732 - RNA, 17 nt, Artificial Sequence
  Synthetic
uuaucuuugugaguaca

SEQ ID NO: 733733 - RNA, 17 nt, Artificial Sequence
  Synthetic
aaugcuucuauaguaca

SEQ ID NO: 733734 - RNA, 17 nt, Artificial Sequence
  Synthetic
cacccuucccuaguaca

SEQ ID NO: 733735 - RNA, 17 nt, Artificial Sequence
  Synthetic
aucaacagucuaguaca

SEQ ID NO: 733736 - RNA, 17 nt, Artificial Sequence
  Synthetic
ucauauucuguaguaca

SEQ ID NO: 733737 - RNA, 17 nt, Artificial Sequence
  Synthetic
aggagaaagcacguaca

SEQ ID NO: 733738 - RNA, 17 nt, Artificial Sequence
  Synthetic
ccugcacacuacguaca

SEQ ID NO: 733739 - RNA, 17 nt, Artificial Sequence
  Synthetic
aaagaaaacaucguaca

SEQ ID NO: 733740 - RNA, 17 nt, Artificial Sequence
  Synthetic
auucuaccagagguaca

SEQ ID NO: 733741 - RNA, 17 nt, Artificial Sequence
  Synthetic
aaacaaugagagguaca

SEQ ID NO: 733742 - RNA, 17 nt, Artificial Sequence
  Synthetic
cuuaagaguuagguaca

SEQ ID NO: 733743 - RNA, 17 nt, Artificial Sequence
  Synthetic
uggggggaaaggguaca

SEQ ID NO: 733744 - RNA, 17 nt, Artificial Sequence
  Synthetic
agauuaaauaggguaca

SEQ ID NO: 733745 - RNA, 17 nt, Artificial Sequence
  Synthetic
aacugucuagggguaca

SEQ ID NO: 733746 - RNA, 17 nt, Artificial Sequence
  Synthetic
aagacaagcaugguaca

SEQ ID NO: 733747 - RNA, 17 nt, Artificial Sequence
  Synthetic
cccucuuaccugguaca

SEQ ID NO: 733748 - RNA, 17 nt, Artificial Sequence
  Synthetic
augcaucaucugguaca

SEQ ID NO: 733749 - RNA, 17 nt, Artificial Sequence
  Synthetic
ucacuuuucuugguaca

SEQ ID NO: 733750 - RNA, 17 nt, Artificial Sequence
  Synthetic
auuaaaaauuugguaca

SEQ ID NO: 733751 - RNA, 17 nt, Artificial Sequence
  Synthetic
aguuaacaaaauguaca

SEQ ID NO: 733752 - RNA, 17 nt, Artificial Sequence
  Synthetic
augacuccucauguaca

SEQ ID NO: 733753 - RNA, 17 nt, Artificial Sequence
  Synthetic
uuuuguucucauguaca

SEQ ID NO: 733754 - RNA, 17 nt, Artificial Sequence
  Synthetic
auacagauucauguaca

SEQ ID NO: 733755 - RNA, 17 nt, Artificial Sequence
  Synthetic
aagucccuucauguaca

SEQ ID NO: 733756 - RNA, 17 nt, Artificial Sequence
  Synthetic
cguauucuguauguaca

SEQ ID NO: 733757 - RNA, 17 nt, Artificial Sequence
  Synthetic
aaagagugaacuguaca

SEQ ID NO: 733758 - RNA, 17 nt, Artificial Sequence
  Synthetic
agaguuauagcuguaca

SEQ ID NO: 733759 - RNA, 17 nt, Artificial Sequence
  Synthetic
cuuuucuuugguguaca

SEQ ID NO: 733760 - RNA, 17 nt, Artificial Sequence
  Synthetic
auacauucauguguaca

SEQ ID NO: 733761 - RNA, 17 nt, Artificial Sequence
  Synthetic
uguaaugucuguguaca

SEQ ID NO: 733762 - RNA, 17 nt, Artificial Sequence
  Synthetic
aucaugggaauuguaca

SEQ ID NO: 733763 - RNA, 17 nt, Artificial Sequence
  Synthetic
cccaucaacauuguaca

SEQ ID NO: 733764 - RNA, 17 nt, Artificial Sequence
  Synthetic
cuugacucuauuguaca

SEQ ID NO: 733765 - RNA, 17 nt, Artificial Sequence
  Synthetic
cgcaugugacuuguaca

SEQ ID NO: 733766 - RNA, 17 nt, Artificial Sequence
  Synthetic
uuguguucuguuguaca

SEQ ID NO: 733767 - RNA, 17 nt, Artificial Sequence
  Synthetic
agggcagcauuuguaca

SEQ ID NO: 733768 - RNA, 17 nt, Artificial Sequence
  Synthetic
uguccuagcuuuguaca

SEQ ID NO: 733769 - RNA, 17 nt, Artificial Sequence
  Synthetic
uaaaggagaaaauuaca

SEQ ID NO: 733770 - RNA, 17 nt, Artificial Sequence
  Synthetic
acauucauaaaauuaca

SEQ ID NO: 733771 - RNA, 17 nt, Artificial Sequence
  Synthetic
uaugacaugaaauuaca

SEQ ID NO: 733772 - RNA, 17 nt, Artificial Sequence
  Synthetic
uucauaacuaaauuaca

SEQ ID NO: 733773 - RNA, 17 nt, Artificial Sequence
  Synthetic
aagacuaaacaauuaca

SEQ ID NO: 733774 - RNA, 17 nt, Artificial Sequence
  Synthetic
uauugaugccaauuaca

SEQ ID NO: 733775 - RNA, 17 nt, Artificial Sequence
  Synthetic
ucugccugagaauuaca

SEQ ID NO: 733776 - RNA, 17 nt, Artificial Sequence
  Synthetic
aacacaugggaauuaca

SEQ ID NO: 733777 - RNA, 17 nt, Artificial Sequence
  Synthetic
aaaauuuucuaauuaca

SEQ ID NO: 733778 - RNA, 17 nt, Artificial Sequence
  Synthetic
ugauugaauuaauuaca

SEQ ID NO: 733779 - RNA, 17 nt, Artificial Sequence
  Synthetic
auuuuuucuuaauuaca

SEQ ID NO: 733780 - RNA, 17 nt, Artificial Sequence
  Synthetic
uaaauaucaacauuaca

SEQ ID NO: 733781 - RNA, 17 nt, Artificial Sequence
  Synthetic
aauagucccacauuaca

SEQ ID NO: 733782 - RNA, 17 nt, Artificial Sequence
  Synthetic
uugcaaaggacauuaca

SEQ ID NO: 733783 - RNA, 17 nt, Artificial Sequence
  Synthetic
cagugcaggacauuaca

SEQ ID NO: 733784 - RNA, 17 nt, Artificial Sequence
  Synthetic
uccuauuccccauuaca

SEQ ID NO: 733785 - RNA, 17 nt, Artificial Sequence
  Synthetic
auugacucagcauuaca

SEQ ID NO: 733786 - RNA, 17 nt, Artificial Sequence
  Synthetic
caagugacacgauuaca

SEQ ID NO: 733787 - RNA, 17 nt, Artificial Sequence
  Synthetic
aaguagcugggauuaca

SEQ ID NO: 733788 - RNA, 17 nt, Artificial Sequence
  Synthetic
ucucucuuuggauuaca

SEQ ID NO: 733789 - RNA, 17 nt, Artificial Sequence
  Synthetic
auuuuuugaauauuaca

SEQ ID NO: 733790 - RNA, 17 nt, Artificial Sequence
  Synthetic
cccucagagcuauuaca

SEQ ID NO: 733791 - RNA, 17 nt, Artificial Sequence
  Synthetic
aauggaauauuauuaca

SEQ ID NO: 733792 - RNA, 17 nt, Artificial Sequence
  Synthetic
caaauuauauuauuaca

SEQ ID NO: 733793 - RNA, 17 nt, Artificial Sequence
  Synthetic
uacaaauacaacuuaca

SEQ ID NO: 733794 - RNA, 17 nt, Artificial Sequence
  Synthetic
uaggaauacaacuuaca

SEQ ID NO: 733795 - RNA, 17 nt, Artificial Sequence
  Synthetic
uaggaauccaacuuaca

SEQ ID NO: 733796 - RNA, 17 nt, Artificial Sequence
  Synthetic
uaggaaugcaacuuaca

SEQ ID NO: 733797 - RNA, 17 nt, Artificial Sequence
  Synthetic
cagcugauacacuuaca

SEQ ID NO: 733798 - RNA, 17 nt, Artificial Sequence
  Synthetic
caaaacugggacuuaca

SEQ ID NO: 733799 - RNA, 17 nt, Artificial Sequence
  Synthetic
agcaugauauacuuaca

SEQ ID NO: 733800 - RNA, 17 nt, Artificial Sequence
  Synthetic
ugaaagcucaccuuaca

SEQ ID NO: 733801 - RNA, 17 nt, Artificial Sequence
  Synthetic
uucgguguguccuuaca

SEQ ID NO: 733802 - RNA, 17 nt, Artificial Sequence
  Synthetic
augaagccuuccuuaca

SEQ ID NO: 733803 - RNA, 17 nt, Artificial Sequence
  Synthetic
caaaggcauggcuuaca

SEQ ID NO: 733804 - RNA, 17 nt, Artificial Sequence
  Synthetic
cuaaagcagugcuuaca

SEQ ID NO: 733805 - RNA, 17 nt, Artificial Sequence
  Synthetic
auuauggugugcuuaca

SEQ ID NO: 733806 - RNA, 17 nt, Artificial Sequence
  Synthetic
ucuacuugacucuuaca

SEQ ID NO: 733807 - RNA, 17 nt, Artificial Sequence
  Synthetic
uuauuuucugucuuaca

SEQ ID NO: 733808 - RNA, 17 nt, Artificial Sequence
  Synthetic
acaacaguugucuuaca

SEQ ID NO: 733809 - RNA, 17 nt, Artificial Sequence
  Synthetic
auauuaaaacaguuaca

SEQ ID NO: 733810 - RNA, 17 nt, Artificial Sequence
  Synthetic
uaguuuuuagaguuaca

SEQ ID NO: 733811 - RNA, 17 nt, Artificial Sequence
  Synthetic
uaguggauauaguuaca

SEQ ID NO: 733812 - RNA, 17 nt, Artificial Sequence
  Synthetic
aaagccaacuaguuaca

SEQ ID NO: 733813 - RNA, 17 nt, Artificial Sequence
  Synthetic
aacagacauggguuaca

SEQ ID NO: 733814 - RNA, 17 nt, Artificial Sequence
  Synthetic
cuccagccuggguuaca

SEQ ID NO: 733815 - RNA, 17 nt, Artificial Sequence
  Synthetic
cucauuaagugguuaca

SEQ ID NO: 733816 - RNA, 17 nt, Artificial Sequence
  Synthetic
auggucuuuugguuaca

SEQ ID NO: 733817 - RNA, 17 nt, Artificial Sequence
  Synthetic
uuggaaacuauguuaca

SEQ ID NO: 733818 - RNA, 17 nt, Artificial Sequence
  Synthetic
aucaaacguauguuaca

SEQ ID NO: 733819 - RNA, 17 nt, Artificial Sequence
  Synthetic
uauucagauguguuaca

SEQ ID NO: 733820 - RNA, 17 nt, Artificial Sequence
  Synthetic
uaugcaggauuguuaca

SEQ ID NO: 733821 - RNA, 17 nt, Artificial Sequence
  Synthetic
ugugcagguuuguuaca

SEQ ID NO: 733822 - RNA, 17 nt, Artificial Sequence
  Synthetic
uguguugguuuguuaca

SEQ ID NO: 733823 - RNA, 17 nt, Artificial Sequence
  Synthetic
aauauauguuuguuaca

SEQ ID NO: 733824 - RNA, 17 nt, Artificial Sequence
  Synthetic
uaggacauuuuguuaca

SEQ ID NO: 733825 - RNA, 17 nt, Artificial Sequence
  Synthetic
aguacauuuuuguuaca

SEQ ID NO: 733826 - RNA, 17 nt, Artificial Sequence
  Synthetic
ugaaugcucaauuuaca

SEQ ID NO: 733827 - RNA, 17 nt, Artificial Sequence
  Synthetic
aguggaaauaauuuaca

SEQ ID NO: 733828 - RNA, 17 nt, Artificial Sequence
  Synthetic
ucuuuccaccauuuaca

SEQ ID NO: 733829 - RNA, 17 nt, Artificial Sequence
  Synthetic
aucaaucagcauuuaca

SEQ ID NO: 733830 - RNA, 17 nt, Artificial Sequence
  Synthetic
aaaccccaauauuuaca

SEQ ID NO: 733831 - RNA, 17 nt, Artificial Sequence
  Synthetic
cuaauuauguauuuaca

SEQ ID NO: 733832 - RNA, 17 nt, Artificial Sequence
  Synthetic
aggagucuuuauuuaca

SEQ ID NO: 733833 - RNA, 17 nt, Artificial Sequence
  Synthetic
acuucuacaacuuuaca

SEQ ID NO: 733834 - RNA, 17 nt, Artificial Sequence
  Synthetic
agaaucugaccuuuaca

SEQ ID NO: 733835 - RNA, 17 nt, Artificial Sequence
  Synthetic
uguguucacccuuuaca

SEQ ID NO: 733836 - RNA, 17 nt, Artificial Sequence
  Synthetic
aaggcaccuccuuuaca

SEQ ID NO: 733837 - RNA, 17 nt, Artificial Sequence
  Synthetic
uccuuuugcaguuuaca

SEQ ID NO: 733838 - RNA, 17 nt, Artificial Sequence
  Synthetic
auccuuuauaguuuaca

SEQ ID NO: 733839 - RNA, 17 nt, Artificial Sequence
  Synthetic
caauauaaacguuuaca

SEQ ID NO: 733840 - RNA, 17 nt, Artificial Sequence
  Synthetic
aauuucugaauuuuaca

SEQ ID NO: 733841 - RNA, 17 nt, Artificial Sequence
  Synthetic
auuauccucauuuuaca

SEQ ID NO: 733842 - RNA, 17 nt, Artificial Sequence
  Synthetic
acauccuucauuuuaca

SEQ ID NO: 733843 - RNA, 17 nt, Artificial Sequence
  Synthetic
ugaaccuggauuuuaca

SEQ ID NO: 733844 - RNA, 17 nt, Artificial Sequence
  Synthetic
uuauuuaauauuuuaca

SEQ ID NO: 733845 - RNA, 17 nt, Artificial Sequence
  Synthetic
uucauucguauuuuaca

SEQ ID NO: 733846 - RNA, 17 nt, Artificial Sequence
  Synthetic
uccaaauuuauuuuaca

SEQ ID NO: 733847 - RNA, 17 nt, Artificial Sequence
  Synthetic
aaaaugucccuuuuaca

SEQ ID NO: 733848 - RNA, 17 nt, Artificial Sequence
  Synthetic
uuguagcugcuuuuaca

SEQ ID NO: 733849 - RNA, 17 nt, Artificial Sequence
  Synthetic
ccccucuuucuuuuaca

SEQ ID NO: 733850 - RNA, 17 nt, Artificial Sequence
  Synthetic
aguauucuauuuuuaca

SEQ ID NO: 733851 - RNA, 17 nt, Artificial Sequence
  Synthetic
cuuuggguauuuuuaca

SEQ ID NO: 733852 - RNA, 17 nt, Artificial Sequence
  Synthetic
cucgacaacuuuuuaca

SEQ ID NO: 733853 - RNA, 17 nt, Artificial Sequence
  Synthetic
uuugcccacuuuuuaca

SEQ ID NO: 733854 - RNA, 17 nt, Artificial Sequence
  Synthetic
ugaauuaaguuuuuaca

SEQ ID NO: 733855 - RNA, 17 nt, Artificial Sequence
  Synthetic
ugaaaauauuuuuuaca

SEQ ID NO: 733856 - RNA, 17 nt, Artificial Sequence
  Synthetic
aaaaaaaaaaaaaacca

SEQ ID NO: 733857 - RNA, 17 nt, Artificial Sequence
  Synthetic
agucagcagcaaaacca

SEQ ID NO: 733858 - RNA, 17 nt, Artificial Sequence
  Synthetic
uuuaauuaagaaaacca

SEQ ID NO: 733859 - RNA, 17 nt, Artificial Sequence
  Synthetic
auaguacuugaaaacca

SEQ ID NO: 733860 - RNA, 17 nt, Artificial Sequence
  Synthetic
acuuaaaaaacaaacca

SEQ ID NO: 733861 - RNA, 17 nt, Artificial Sequence
  Synthetic
augagaacuacaaacca

SEQ ID NO: 733862 - RNA, 17 nt, Artificial Sequence
  Synthetic
ugaaaugcaccaaacca

SEQ ID NO: 733863 - RNA, 17 nt, Artificial Sequence
  Synthetic
auuuuuucaccaaacca

SEQ ID NO: 733864 - RNA, 17 nt, Artificial Sequence
  Synthetic
agcagcaguucaaacca

SEQ ID NO: 733865 - RNA, 17 nt, Artificial Sequence
  Synthetic
uaaaaaaagagaaacca

SEQ ID NO: 733866 - RNA, 17 nt, Artificial Sequence
  Synthetic
cauaaacauagaaacca

SEQ ID NO: 733867 - RNA, 17 nt, Artificial Sequence
  Synthetic
auaaauuauagaaacca

SEQ ID NO: 733868 - RNA, 17 nt, Artificial Sequence
  Synthetic
aaaguagaaggaaacca

SEQ ID NO: 733869 - RNA, 17 nt, Artificial Sequence
  Synthetic
uguuucaugugaaacca

SEQ ID NO: 733870 - RNA, 17 nt, Artificial Sequence
  Synthetic
uugaauuguugaaacca

SEQ ID NO: 733871 - RNA, 17 nt, Artificial Sequence
  Synthetic
acuuuucuaauaaacca

SEQ ID NO: 733872 - RNA, 17 nt, Artificial Sequence
  Synthetic
uuuguuuuaauaaacca

SEQ ID NO: 733873 - RNA, 17 nt, Artificial Sequence
  Synthetic
aauguauacauaaacca

SEQ ID NO: 733874 - RNA, 17 nt, Artificial Sequence
  Synthetic
cauuuccccauaaacca

SEQ ID NO: 733875 - RNA, 17 nt, Artificial Sequence
  Synthetic
cucagauucauaaacca

SEQ ID NO: 733876 - RNA, 17 nt, Artificial Sequence
  Synthetic
aucauaguccuaaacca

SEQ ID NO: 733877 - RNA, 17 nt, Artificial Sequence
  Synthetic
uuuuauuagcuaaacca

SEQ ID NO: 733878 - RNA, 17 nt, Artificial Sequence
  Synthetic
auuuaucaauuaaacca

SEQ ID NO: 733879 - RNA, 17 nt, Artificial Sequence
  Synthetic
uuaacuauauuaaacca

SEQ ID NO: 733880 - RNA, 17 nt, Artificial Sequence
  Synthetic
cucuagcuauuaaacca

SEQ ID NO: 733881 - RNA, 17 nt, Artificial Sequence
  Synthetic
agaauuauuuuaaacca

SEQ ID NO: 733882 - RNA, 17 nt, Artificial Sequence
  Synthetic
acagucagucacaacca

SEQ ID NO: 733883 - RNA, 17 nt, Artificial Sequence
  Synthetic
aaguuuacaaccaacca

SEQ ID NO: 733884 - RNA, 17 nt, Artificial Sequence
  Synthetic
auaggcauggccaacca

SEQ ID NO: 733885 - RNA, 17 nt, Artificial Sequence
  Synthetic
aaaaggcacuccaacca

SEQ ID NO: 733886 - RNA, 17 nt, Artificial Sequence
  Synthetic
aaccuaaauuccaacca

SEQ ID NO: 733887 - RNA, 17 nt, Artificial Sequence
  Synthetic
aaacauggcugcaacca

SEQ ID NO: 733888 - RNA, 17 nt, Artificial Sequence
  Synthetic
uaguugguucucaacca

SEQ ID NO: 733889 - RNA, 17 nt, Artificial Sequence
  Synthetic
cuggauggugucaacca

SEQ ID NO: 733890 - RNA, 17 nt, Artificial Sequence
  Synthetic
uuaacgaaauucaacca

SEQ ID NO: 733891 - RNA, 17 nt, Artificial Sequence
  Synthetic
cucaaguuaaagaacca

SEQ ID NO: 733892 - RNA, 17 nt, Artificial Sequence
  Synthetic
aaagacauucagaacca

SEQ ID NO: 733893 - RNA, 17 nt, Artificial Sequence
  Synthetic
aauuuuauugagaacca

SEQ ID NO: 733894 - RNA, 17 nt, Artificial Sequence
  Synthetic
agaaaacuuuagaacca

SEQ ID NO: 733895 - RNA, 17 nt, Artificial Sequence
  Synthetic
auagagugaaggaacca

SEQ ID NO: 733896 - RNA, 17 nt, Artificial Sequence
  Synthetic
cuuucauacaggaacca

SEQ ID NO: 733897 - RNA, 17 nt, Artificial Sequence
  Synthetic
auugcaaagaggaacca

SEQ ID NO: 733898 - RNA, 17 nt, Artificial Sequence
  Synthetic
uauuguucugggaacca

SEQ ID NO: 733899 - RNA, 17 nt, Artificial Sequence
  Synthetic
ccauuuucauggaacca

SEQ ID NO: 733900 - RNA, 17 nt, Artificial Sequence
  Synthetic
uuuacauucaugaacca

SEQ ID NO: 733901 - RNA, 17 nt, Artificial Sequence
  Synthetic
agaaauaauaugaacca

SEQ ID NO: 733902 - RNA, 17 nt, Artificial Sequence
  Synthetic
ucuugaaaagugaacca

SEQ ID NO: 733903 - RNA, 17 nt, Artificial Sequence
  Synthetic
cuggggccagugaacca

SEQ ID NO: 733904 - RNA, 17 nt, Artificial Sequence
  Synthetic
ucaaucacuaauaacca

SEQ ID NO: 733905 - RNA, 17 nt, Artificial Sequence
  Synthetic
uauagaugagauaacca

SEQ ID NO: 733906 - RNA, 17 nt, Artificial Sequence
  Synthetic
aaaaaaauauauaacca

SEQ ID NO: 733907 - RNA, 17 nt, Artificial Sequence
  Synthetic
auuugccaugcuaacca

SEQ ID NO: 733908 - RNA, 17 nt, Artificial Sequence
  Synthetic
uagaaugauaguaacca

SEQ ID NO: 733909 - RNA, 17 nt, Artificial Sequence
  Synthetic
acuuacuguaguaacca

SEQ ID NO: 733910 - RNA, 17 nt, Artificial Sequence
  Synthetic
agguggguggguaacca

SEQ ID NO: 733911 - RNA, 17 nt, Artificial Sequence
  Synthetic
acacaagcauguaacca

SEQ ID NO: 733912 - RNA, 17 nt, Artificial Sequence
  Synthetic
auuagcaagauuaacca

SEQ ID NO: 733913 - RNA, 17 nt, Artificial Sequence
  Synthetic
uugcuggagcuuaacca

SEQ ID NO: 733914 - RNA, 17 nt, Artificial Sequence
  Synthetic
agcaucuccuuuaacca

SEQ ID NO: 733915 - RNA, 17 nt, Artificial Sequence
  Synthetic
uugaacgguuuuaacca

SEQ ID NO: 733916 - RNA, 17 nt, Artificial Sequence
  Synthetic
uaauuuuuuuuuaacca

SEQ ID NO: 733917 - RNA, 17 nt, Artificial Sequence
  Synthetic
cuggccauaaaacacca

SEQ ID NO: 733918 - RNA, 17 nt, Artificial Sequence
  Synthetic
aaauggcuggaacacca

SEQ ID NO: 733919 - RNA, 17 nt, Artificial Sequence
  Synthetic
auuacuuaugaacacca

SEQ ID NO: 733920 - RNA, 17 nt, Artificial Sequence
  Synthetic
augaaguguuaacacca

SEQ ID NO: 733921 - RNA, 17 nt, Artificial Sequence
  Synthetic
agaaacuucccacacca

SEQ ID NO: 733922 - RNA, 17 nt, Artificial Sequence
  Synthetic
aggacagaaucacacca

SEQ ID NO: 733923 - RNA, 17 nt, Artificial Sequence
  Synthetic
acugaaauaucacacca

SEQ ID NO: 733924 - RNA, 17 nt, Artificial Sequence
  Synthetic
aaaaaaaaaggacacca

SEQ ID NO: 733925 - RNA, 17 nt, Artificial Sequence
  Synthetic
uugacacauauacacca

SEQ ID NO: 733926 - RNA, 17 nt, Artificial Sequence
  Synthetic
uuggcacauauacacca

SEQ ID NO: 733927 - RNA, 17 nt, Artificial Sequence
  Synthetic
acggugcauauacacca

SEQ ID NO: 733928 - RNA, 17 nt, Artificial Sequence
  Synthetic
ccuugcaugcuacacca

SEQ ID NO: 733929 - RNA, 17 nt, Artificial Sequence
  Synthetic
ugggagaaaguacacca

SEQ ID NO: 733930 - RNA, 17 nt, Artificial Sequence
  Synthetic
cucucuuaaaaccacca

SEQ ID NO: 733931 - RNA, 17 nt, Artificial Sequence
  Synthetic
ugugcagcaaaccacca

SEQ ID NO: 733932 - RNA, 17 nt, Artificial Sequence
  Synthetic
aagaugaagaaccacca

SEQ ID NO: 733933 - RNA, 17 nt, Artificial Sequence
  Synthetic
aucucugguaaccacca

SEQ ID NO: 733934 - RNA, 17 nt, Artificial Sequence
  Synthetic
uguauauaaucccacca

SEQ ID NO: 733935 - RNA, 17 nt, Artificial Sequence
  Synthetic
uuagagucuucccacca

SEQ ID NO: 733936 - RNA, 17 nt, Artificial Sequence
  Synthetic
acaggcgugagccacca

SEQ ID NO: 733937 - RNA, 17 nt, Artificial Sequence
  Synthetic
agugaguuuggccacca

SEQ ID NO: 733938 - RNA, 17 nt, Artificial Sequence
  Synthetic
aacagucaaugccacca

SEQ ID NO: 733939 - RNA, 17 nt, Artificial Sequence
  Synthetic
uuuggucagugccacca

SEQ ID NO: 733940 - RNA, 17 nt, Artificial Sequence
  Synthetic
uugcccuuucuccacca

SEQ ID NO: 733941 - RNA, 17 nt, Artificial Sequence
  Synthetic
cccuuugccuuccacca

SEQ ID NO: 733942 - RNA, 17 nt, Artificial Sequence
  Synthetic
uaaacucuuuuccacca

SEQ ID NO: 733943 - RNA, 17 nt, Artificial Sequence
  Synthetic
ucacaagaacagcacca

SEQ ID NO: 733944 - RNA, 17 nt, Artificial Sequence
  Synthetic
ugcucuauacagcacca

SEQ ID NO: 733945 - RNA, 17 nt, Artificial Sequence
  Synthetic
ccugggacagagcacca

SEQ ID NO: 733946 - RNA, 17 nt, Artificial Sequence
  Synthetic
ugugacuccaggcacca

SEQ ID NO: 733947 - RNA, 17 nt, Artificial Sequence
  Synthetic
aauguggcauggcacca

SEQ ID NO: 733948 - RNA, 17 nt, Artificial Sequence
  Synthetic
ucucugagaaugcacca

SEQ ID NO: 733949 - RNA, 17 nt, Artificial Sequence
  Synthetic
auuuuguuaaugcacca

SEQ ID NO: 733950 - RNA, 17 nt, Artificial Sequence
  Synthetic
uauauauauaugcacca

SEQ ID NO: 733951 - RNA, 17 nt, Artificial Sequence
  Synthetic
aacucagcucugcacca

SEQ ID NO: 733952 - RNA, 17 nt, Artificial Sequence
  Synthetic
aaauguauaaaucacca

SEQ ID NO: 733953 - RNA, 17 nt, Artificial Sequence
  Synthetic
ccaaauguuaaucacca

SEQ ID NO: 733954 - RNA, 17 nt, Artificial Sequence
  Synthetic
caggcucaucaucacca

SEQ ID NO: 733955 - RNA, 17 nt, Artificial Sequence
  Synthetic
aagcuuuacuaucacca

SEQ ID NO: 733956 - RNA, 17 nt, Artificial Sequence
  Synthetic
cccugcccuccucacca

SEQ ID NO: 733957 - RNA, 17 nt, Artificial Sequence
  Synthetic
cuaauuucuccucacca

SEQ ID NO: 733958 - RNA, 17 nt, Artificial Sequence
  Synthetic
cugggugauggucacca

SEQ ID NO: 733959 - RNA, 17 nt, Artificial Sequence
  Synthetic
uauuaaauaugucacca

SEQ ID NO: 733960 - RNA, 17 nt, Artificial Sequence
  Synthetic
aauaaucggauucacca

SEQ ID NO: 733961 - RNA, 17 nt, Artificial Sequence
  Synthetic
aauccacauauucacca

SEQ ID NO: 733962 - RNA, 17 nt, Artificial Sequence
  Synthetic
aauuuugaaguucacca

SEQ ID NO: 733963 - RNA, 17 nt, Artificial Sequence
  Synthetic
uuuuuggcauuucacca

SEQ ID NO: 733964 - RNA, 17 nt, Artificial Sequence
  Synthetic
ucuaucauuuuucacca

SEQ ID NO: 733965 - RNA, 17 nt, Artificial Sequence
  Synthetic
agugaugaaaaagacca

SEQ ID NO: 733966 - RNA, 17 nt, Artificial Sequence
  Synthetic
auagauggaaaagacca

SEQ ID NO: 733967 - RNA, 17 nt, Artificial Sequence
  Synthetic
uuagagaguaaagacca

SEQ ID NO: 733968 - RNA, 17 nt, Artificial Sequence
  Synthetic
aaucaaauucaagacca

SEQ ID NO: 733969 - RNA, 17 nt, Artificial Sequence
  Synthetic
caauaugaggaagacca

SEQ ID NO: 733970 - RNA, 17 nt, Artificial Sequence
  Synthetic
cagaggaaaacagacca

SEQ ID NO: 733971 - RNA, 17 nt, Artificial Sequence
  Synthetic
agcacuuugagagacca

SEQ ID NO: 733972 - RNA, 17 nt, Artificial Sequence
  Synthetic
uggcaggauggagacca

SEQ ID NO: 733973 - RNA, 17 nt, Artificial Sequence
  Synthetic
cuuugaccaauagacca

SEQ ID NO: 733974 - RNA, 17 nt, Artificial Sequence
  Synthetic
ucugggauauacgacca

SEQ ID NO: 733975 - RNA, 17 nt, Artificial Sequence
  Synthetic
aagaaagaauucgacca

SEQ ID NO: 733976 - RNA, 17 nt, Artificial Sequence
  Synthetic
augguugccagggacca

SEQ ID NO: 733977 - RNA, 17 nt, Artificial Sequence
  Synthetic
uagucacucggggacca

SEQ ID NO: 733978 - RNA, 17 nt, Artificial Sequence
  Synthetic
ugaaaacuucuggacca

SEQ ID NO: 733979 - RNA, 17 nt, Artificial Sequence
  Synthetic
uauuucugaguggacca

SEQ ID NO: 733980 - RNA, 17 nt, Artificial Sequence
  Synthetic
agacaugcaaaugacca

SEQ ID NO: 733981 - RNA, 17 nt, Artificial Sequence
  Synthetic
cauaaaggcacugacca

SEQ ID NO: 733982 - RNA, 17 nt, Artificial Sequence
  Synthetic
agcuggagcagugacca

SEQ ID NO: 733983 - RNA, 17 nt, Artificial Sequence
  Synthetic
uaaaguauaggugacca

SEQ ID NO: 733984 - RNA, 17 nt, Artificial Sequence
  Synthetic
uguggagggggugacca

SEQ ID NO: 733985 - RNA, 17 nt, Artificial Sequence
  Synthetic
aaaaguggaugugacca

SEQ ID NO: 733986 - RNA, 17 nt, Artificial Sequence
  Synthetic
cagacagcaguugacca

SEQ ID NO: 733987 - RNA, 17 nt, Artificial Sequence
  Synthetic
uaaguauucuuugacca

SEQ ID NO: 733988 - RNA, 17 nt, Artificial Sequence
  Synthetic
cuguuuggguuugacca

SEQ ID NO: 733989 - RNA, 17 nt, Artificial Sequence
  Synthetic
uuuauucagaaauacca

SEQ ID NO: 733990 - RNA, 17 nt, Artificial Sequence
  Synthetic
ccaaaaauuaaauacca

SEQ ID NO: 733991 - RNA, 17 nt, Artificial Sequence
  Synthetic
augaugcuauaauacca

SEQ ID NO: 733992 - RNA, 17 nt, Artificial Sequence
  Synthetic
augugaacuacauacca

SEQ ID NO: 733993 - RNA, 17 nt, Artificial Sequence
  Synthetic
uccagguuuacauacca

SEQ ID NO: 733994 - RNA, 17 nt, Artificial Sequence
  Synthetic
uacugugacccauacca

SEQ ID NO: 733995 - RNA, 17 nt, Artificial Sequence
  Synthetic
agcaauaagccauacca

SEQ ID NO: 733996 - RNA, 17 nt, Artificial Sequence
  Synthetic
agauguaagagauacca

SEQ ID NO: 733997 - RNA, 17 nt, Artificial Sequence
  Synthetic
cacauuuauugauacca

SEQ ID NO: 733998 - RNA, 17 nt, Artificial Sequence
  Synthetic
uucaaauggauauacca

SEQ ID NO: 733999 - RNA, 17 nt, Artificial Sequence
  Synthetic
uaucuagguauauacca

SEQ ID NO: 734000 - RNA, 17 nt, Artificial Sequence
  Synthetic
cuauuuaaccuauacca

SEQ ID NO: 734001 - RNA, 17 nt, Artificial Sequence
  Synthetic
cagcccucaguauacca

SEQ ID NO: 734002 - RNA, 17 nt, Artificial Sequence
  Synthetic
aacaucacuaacuacca

SEQ ID NO: 734003 - RNA, 17 nt, Artificial Sequence
  Synthetic
ccaugauguaccuacca

SEQ ID NO: 734004 - RNA, 17 nt, Artificial Sequence
  Synthetic
uguaaauauuccuacca

SEQ ID NO: 734005 - RNA, 17 nt, Artificial Sequence
  Synthetic
caucuuuauugcuacca

SEQ ID NO: 734006 - RNA, 17 nt, Artificial Sequence
  Synthetic
uuauuacacaucuacca

SEQ ID NO: 734007 - RNA, 17 nt, Artificial Sequence
  Synthetic
ugagaggaagucuacca

SEQ ID NO: 734008 - RNA, 17 nt, Artificial Sequence
  Synthetic
uaucuucucuucuacca

SEQ ID NO: 734009 - RNA, 17 nt, Artificial Sequence
  Synthetic
uuuaguaauuucuacca

SEQ ID NO: 734010 - RNA, 17 nt, Artificial Sequence
  Synthetic
uccuccaaauaguacca

SEQ ID NO: 734011 - RNA, 17 nt, Artificial Sequence
  Synthetic
agggugaucagguacca

SEQ ID NO: 734012 - RNA, 17 nt, Artificial Sequence
  Synthetic
cacauucugagguacca

SEQ ID NO: 734013 - RNA, 17 nt, Artificial Sequence
  Synthetic
auccugcacauguacca

SEQ ID NO: 734014 - RNA, 17 nt, Artificial Sequence
  Synthetic
aggaucuauuuguacca

SEQ ID NO: 734015 - RNA, 17 nt, Artificial Sequence
  Synthetic
aaaaauucaaauuacca

SEQ ID NO: 734016 - RNA, 17 nt, Artificial Sequence
  Synthetic
uugaauaccaauuacca

SEQ ID NO: 734017 - RNA, 17 nt, Artificial Sequence
  Synthetic
cguacuuuuaauuacca

SEQ ID NO: 734018 - RNA, 17 nt, Artificial Sequence
  Synthetic
auuuaaauccauuacca

SEQ ID NO: 734019 - RNA, 17 nt, Artificial Sequence
  Synthetic
aaugaauuauauuacca

SEQ ID NO: 734020 - RNA, 17 nt, Artificial Sequence
  Synthetic
uucucucauuauuacca

SEQ ID NO: 734021 - RNA, 17 nt, Artificial Sequence
  Synthetic
ucagcuuuaccuuacca

SEQ ID NO: 734022 - RNA, 17 nt, Artificial Sequence
  Synthetic
uaucauaacucuuacca

SEQ ID NO: 734023 - RNA, 17 nt, Artificial Sequence
  Synthetic
ucuuguugcaguuacca

SEQ ID NO: 734024 - RNA, 17 nt, Artificial Sequence
  Synthetic
uguccaaucaguuacca

SEQ ID NO: 734025 - RNA, 17 nt, Artificial Sequence
  Synthetic
uuaaacagugguuacca

SEQ ID NO: 734026 - RNA, 17 nt, Artificial Sequence
  Synthetic
uuuggaccauguuacca

SEQ ID NO: 734027 - RNA, 17 nt, Artificial Sequence
  Synthetic
caugguucauguuacca

SEQ ID NO: 734028 - RNA, 17 nt, Artificial Sequence
  Synthetic
uucuucuauuguuacca

SEQ ID NO: 734029 - RNA, 17 nt, Artificial Sequence
  Synthetic
acauucuauauuuacca

SEQ ID NO: 734030 - RNA, 17 nt, Artificial Sequence
  Synthetic
uaaaacuuuauuuacca

SEQ ID NO: 734031 - RNA, 17 nt, Artificial Sequence
  Synthetic
uccauagugcuuuacca

SEQ ID NO: 734032 - RNA, 17 nt, Artificial Sequence
  Synthetic
auuaaaauucuuuacca

SEQ ID NO: 734033 - RNA, 17 nt, Artificial Sequence
  Synthetic
ucaucccccuuuuacca

SEQ ID NO: 734034 - RNA, 17 nt, Artificial Sequence
  Synthetic
uuguuauguuuuuacca

SEQ ID NO: 734035 - RNA, 17 nt, Artificial Sequence
  Synthetic
cacugcacuaaaaccca

SEQ ID NO: 734036 - RNA, 17 nt, Artificial Sequence
  Synthetic
cacuuggguaaaaccca

SEQ ID NO: 734037 - RNA, 17 nt, Artificial Sequence
  Synthetic
aaguagaaagaaaccca

SEQ ID NO: 734038 - RNA, 17 nt, Artificial Sequence
  Synthetic
cagggguuggaaaccca

SEQ ID NO: 734039 - RNA, 17 nt, Artificial Sequence
  Synthetic
uuugugcuugaaaccca

SEQ ID NO: 734040 - RNA, 17 nt, Artificial Sequence
  Synthetic
ccauucauauaaaccca

SEQ ID NO: 734041 - RNA, 17 nt, Artificial Sequence
  Synthetic
acacugggcuaaaccca

SEQ ID NO: 734042 - RNA, 17 nt, Artificial Sequence
  Synthetic
aagaucaaaacaaccca

SEQ ID NO: 734043 - RNA, 17 nt, Artificial Sequence
  Synthetic
caaugauauccaaccca

SEQ ID NO: 734044 - RNA, 17 nt, Artificial Sequence
  Synthetic
acuaacuuugcaaccca

SEQ ID NO: 734045 - RNA, 17 nt, Artificial Sequence
  Synthetic
uauugggaaagaaccca

SEQ ID NO: 734046 - RNA, 17 nt, Artificial Sequence
  Synthetic
cacaaauguggaaccca

SEQ ID NO: 734047 - RNA, 17 nt, Artificial Sequence
  Synthetic
ucuucugagugaaccca

SEQ ID NO: 734048 - RNA, 17 nt, Artificial Sequence
  Synthetic
uaagaucaaauaaccca

SEQ ID NO: 734049 - RNA, 17 nt, Artificial Sequence
  Synthetic
uaaagucugauaaccca

SEQ ID NO: 734050 - RNA, 17 nt, Artificial Sequence
  Synthetic
auucaauauauaaccca

SEQ ID NO: 734051 - RNA, 17 nt, Artificial Sequence
  Synthetic
agcaauuuucacaccca

SEQ ID NO: 734052 - RNA, 17 nt, Artificial Sequence
  Synthetic
caauaacauuacaccca

SEQ ID NO: 734053 - RNA, 17 nt, Artificial Sequence
  Synthetic
ucuguggaaaccaccca

SEQ ID NO: 734054 - RNA, 17 nt, Artificial Sequence
  Synthetic
uuuuucuaaaccaccca

SEQ ID NO: 734055 - RNA, 17 nt, Artificial Sequence
  Synthetic
uuuuaaagauccaccca

SEQ ID NO: 734056 - RNA, 17 nt, Artificial Sequence
  Synthetic
aggcccaauuccaccca

SEQ ID NO: 734057 - RNA, 17 nt, Artificial Sequence
  Synthetic
aaucucugaagcaccca

SEQ ID NO: 734058 - RNA, 17 nt, Artificial Sequence
  Synthetic
auagcuguaagcaccca

SEQ ID NO: 734059 - RNA, 17 nt, Artificial Sequence
  Synthetic
aacucuguuugcaccca

SEQ ID NO: 734060 - RNA, 17 nt, Artificial Sequence
  Synthetic
uguggugauaucaccca

SEQ ID NO: 734061 - RNA, 17 nt, Artificial Sequence
  Synthetic
uuuacucuucucaccca

SEQ ID NO: 734062 - RNA, 17 nt, Artificial Sequence
  Synthetic
acagacacaaagaccca

SEQ ID NO: 734063 - RNA, 17 nt, Artificial Sequence
  Synthetic
acaugaaagaagaccca

SEQ ID NO: 734064 - RNA, 17 nt, Artificial Sequence
  Synthetic
agacucaagaagaccca

SEQ ID NO: 734065 - RNA, 17 nt, Artificial Sequence
  Synthetic
agucucccuaagaccca

SEQ ID NO: 734066 - RNA, 17 nt, Artificial Sequence
  Synthetic
caagacagccagaccca

SEQ ID NO: 734067 - RNA, 17 nt, Artificial Sequence
  Synthetic
cucaaaaucuagaccca

SEQ ID NO: 734068 - RNA, 17 nt, Artificial Sequence
  Synthetic
cuugagaaggggaccca

SEQ ID NO: 734069 - RNA, 17 nt, Artificial Sequence
  Synthetic
agugacagugggaccca

SEQ ID NO: 734070 - RNA, 17 nt, Artificial Sequence
  Synthetic
uuuacuccuaugaccca

SEQ ID NO: 734071 - RNA, 17 nt, Artificial Sequence
  Synthetic
cuggaacuucugaccca

SEQ ID NO: 734072 - RNA, 17 nt, Artificial Sequence
  Synthetic
ccaguuucagugaccca

SEQ ID NO: 734073 - RNA, 17 nt, Artificial Sequence
  Synthetic
aauguaggagugaccca

SEQ ID NO: 734074 - RNA, 17 nt, Artificial Sequence
  Synthetic
uagauuuuugugaccca

SEQ ID NO: 734075 - RNA, 17 nt, Artificial Sequence
  Synthetic
aaacucaaauauaccca

SEQ ID NO: 734076 - RNA, 17 nt, Artificial Sequence
  Synthetic
uaugauacaacuaccca

SEQ ID NO: 734077 - RNA, 17 nt, Artificial Sequence
  Synthetic
uggagguguccuaccca

SEQ ID NO: 734078 - RNA, 17 nt, Artificial Sequence
  Synthetic
aggaguggagcuaccca

SEQ ID NO: 734079 - RNA, 17 nt, Artificial Sequence
  Synthetic
uuaaauagucuuaccca

SEQ ID NO: 734080 - RNA, 17 nt, Artificial Sequence
  Synthetic
uuucaguuaguuaccca

SEQ ID NO: 734081 - RNA, 17 nt, Artificial Sequence
  Synthetic
ucuggagaauuuaccca

SEQ ID NO: 734082 - RNA, 17 nt, Artificial Sequence
  Synthetic
aucuuuuccuuuaccca

SEQ ID NO: 734083 - RNA, 17 nt, Artificial Sequence
  Synthetic
auagaugagaaacccca

SEQ ID NO: 734084 - RNA, 17 nt, Artificial Sequence
  Synthetic
agaaucugauaacccca

SEQ ID NO: 734085 - RNA, 17 nt, Artificial Sequence
  Synthetic
cagauaaugacacccca

SEQ ID NO: 734086 - RNA, 17 nt, Artificial Sequence
  Synthetic
auagcagcaccacccca

SEQ ID NO: 734087 - RNA, 17 nt, Artificial Sequence
  Synthetic
ugauggaaaugacccca

SEQ ID NO: 734088 - RNA, 17 nt, Artificial Sequence
  Synthetic
cacucuuccugacccca

SEQ ID NO: 734089 - RNA, 17 nt, Artificial Sequence
  Synthetic
uggugauucauacccca

SEQ ID NO: 734090 - RNA, 17 nt, Artificial Sequence
  Synthetic
ugauaguaccuacccca

SEQ ID NO: 734091 - RNA, 17 nt, Artificial Sequence
  Synthetic
uagauuuuucuacccca

SEQ ID NO: 734092 - RNA, 17 nt, Artificial Sequence
  Synthetic
uaccacuacaaccccca

SEQ ID NO: 734093 - RNA, 17 nt, Artificial Sequence
  Synthetic
uuuuaaaauaaccccca

SEQ ID NO: 734094 - RNA, 17 nt, Artificial Sequence
  Synthetic
ucuccgugcuaccccca

SEQ ID NO: 734095 - RNA, 17 nt, Artificial Sequence
  Synthetic
uuuucucaaauccccca

SEQ ID NO: 734096 - RNA, 17 nt, Artificial Sequence
  Synthetic
cuggaaccaauccccca

SEQ ID NO: 734097 - RNA, 17 nt, Artificial Sequence
  Synthetic
acagcugagaagcccca

SEQ ID NO: 734098 - RNA, 17 nt, Artificial Sequence
  Synthetic
uuucucacaucgcccca

SEQ ID NO: 734099 - RNA, 17 nt, Artificial Sequence
  Synthetic
uuucacaaaaggcccca

SEQ ID NO: 734100 - RNA, 17 nt, Artificial Sequence
  Synthetic
acuggucuguggcccca

SEQ ID NO: 734101 - RNA, 17 nt, Artificial Sequence
  Synthetic
uaauuuauuuggcccca

SEQ ID NO: 734102 - RNA, 17 nt, Artificial Sequence
  Synthetic
ucauugccacugcccca

SEQ ID NO: 734103 - RNA, 17 nt, Artificial Sequence
  Synthetic
cauacacuccugcccca

SEQ ID NO: 734104 - RNA, 17 nt, Artificial Sequence
  Synthetic
uguagauaaaaucccca

SEQ ID NO: 734105 - RNA, 17 nt, Artificial Sequence
  Synthetic
uuguaagacaaucccca

SEQ ID NO: 734106 - RNA, 17 nt, Artificial Sequence
  Synthetic
uuuauucagcaucccca

SEQ ID NO: 734107 - RNA, 17 nt, Artificial Sequence
  Synthetic
ugguuccaggaucccca

SEQ ID NO: 734108 - RNA, 17 nt, Artificial Sequence
  Synthetic
aggggcgguuaucccca

SEQ ID NO: 734109 - RNA, 17 nt, Artificial Sequence
  Synthetic
aagguguuuacucccca

SEQ ID NO: 734110 - RNA, 17 nt, Artificial Sequence
  Synthetic
uuuugaaaagcucccca

SEQ ID NO: 734111 - RNA, 17 nt, Artificial Sequence
  Synthetic
ucaaaauacagucccca

SEQ ID NO: 734112 - RNA, 17 nt, Artificial Sequence
  Synthetic
aaucagaugagucccca

SEQ ID NO: 734113 - RNA, 17 nt, Artificial Sequence
  Synthetic
cccucuaguagucccca

SEQ ID NO: 734114 - RNA, 17 nt, Artificial Sequence
  Synthetic
accucuuucggucccca

SEQ ID NO: 734115 - RNA, 17 nt, Artificial Sequence
  Synthetic
agauuauguggucccca

SEQ ID NO: 734116 - RNA, 17 nt, Artificial Sequence
  Synthetic
acuuaacaaauucccca

SEQ ID NO: 734117 - RNA, 17 nt, Artificial Sequence
  Synthetic
uucuccaccauucccca

SEQ ID NO: 734118 - RNA, 17 nt, Artificial Sequence
  Synthetic
cuucauuccauucccca

SEQ ID NO: 734119 - RNA, 17 nt, Artificial Sequence
  Synthetic
aguugcucuauucccca

SEQ ID NO: 734120 - RNA, 17 nt, Artificial Sequence
  Synthetic
ucagcauuccuucccca

SEQ ID NO: 734121 - RNA, 17 nt, Artificial Sequence
  Synthetic
uggaagcugcuucccca

SEQ ID NO: 734122 - RNA, 17 nt, Artificial Sequence
  Synthetic
uuacuacauuuucccca

SEQ ID NO: 734123 - RNA, 17 nt, Artificial Sequence
  Synthetic
uauggcauaaaagccca

SEQ ID NO: 734124 - RNA, 17 nt, Artificial Sequence
  Synthetic
cccacucgcaaagccca

SEQ ID NO: 734125 - RNA, 17 nt, Artificial Sequence
  Synthetic
uguucacuuaaagccca

SEQ ID NO: 734126 - RNA, 17 nt, Artificial Sequence
  Synthetic
aauaaugagcaagccca

SEQ ID NO: 734127 - RNA, 17 nt, Artificial Sequence
  Synthetic
ccccaacuugaagccca

SEQ ID NO: 734128 - RNA, 17 nt, Artificial Sequence
  Synthetic
cccaggcuugaagccca

SEQ ID NO: 734129 - RNA, 17 nt, Artificial Sequence
  Synthetic
aaaaaaaaauaagccca

SEQ ID NO: 734130 - RNA, 17 nt, Artificial Sequence
  Synthetic
aaugucuguacagccca

SEQ ID NO: 734131 - RNA, 17 nt, Artificial Sequence
  Synthetic
ccauggcgcccagccca

SEQ ID NO: 734132 - RNA, 17 nt, Artificial Sequence
  Synthetic
cuuaagaggccagccca

SEQ ID NO: 734133 - RNA, 17 nt, Artificial Sequence
  Synthetic
caauuuuguccagccca

SEQ ID NO: 734134 - RNA, 17 nt, Artificial Sequence
  Synthetic
agaguuucagcagccca

SEQ ID NO: 734135 - RNA, 17 nt, Artificial Sequence
  Synthetic
agauagagcucagccca

SEQ ID NO: 734136 - RNA, 17 nt, Artificial Sequence
  Synthetic
ugaacaacgagagccca

SEQ ID NO: 734137 - RNA, 17 nt, Artificial Sequence
  Synthetic
auggagaugggagccca

SEQ ID NO: 734138 - RNA, 17 nt, Artificial Sequence
  Synthetic
aggaucaccugagccca

SEQ ID NO: 734139 - RNA, 17 nt, Artificial Sequence
  Synthetic
aggaucaucugagccca

SEQ ID NO: 734140 - RNA, 17 nt, Artificial Sequence
  Synthetic
aggauugcuugagccca

SEQ ID NO: 734141 - RNA, 17 nt, Artificial Sequence
  Synthetic
uuugggcugcuagccca

SEQ ID NO: 734142 - RNA, 17 nt, Artificial Sequence
  Synthetic
agaguugcaguagccca

SEQ ID NO: 734143 - RNA, 17 nt, Artificial Sequence
  Synthetic
aaauguucucaggccca

SEQ ID NO: 734144 - RNA, 17 nt, Artificial Sequence
  Synthetic
cagaauagggaggccca

SEQ ID NO: 734145 - RNA, 17 nt, Artificial Sequence
  Synthetic
uacuacaucuaggccca

SEQ ID NO: 734146 - RNA, 17 nt, Artificial Sequence
  Synthetic
aucagaauaagggccca

SEQ ID NO: 734147 - RNA, 17 nt, Artificial Sequence
  Synthetic
aaccaauacagggccca

SEQ ID NO: 734148 - RNA, 17 nt, Artificial Sequence
  Synthetic
uggaucaggggggccca

SEQ ID NO: 734149 - RNA, 17 nt, Artificial Sequence
  Synthetic
ugaaagcauggggccca

SEQ ID NO: 734150 - RNA, 17 nt, Artificial Sequence
  Synthetic
auggaaggaauggccca

SEQ ID NO: 734151 - RNA, 17 nt, Artificial Sequence
  Synthetic
ucuuccaguguggccca

SEQ ID NO: 734152 - RNA, 17 nt, Artificial Sequence
  Synthetic
uggguguaauuggccca

SEQ ID NO: 734153 - RNA, 17 nt, Artificial Sequence
  Synthetic
uuuuucuuuuuggccca

SEQ ID NO: 734154 - RNA, 17 nt, Artificial Sequence
  Synthetic
acuaacuauaaugccca

SEQ ID NO: 734155 - RNA, 17 nt, Artificial Sequence
  Synthetic
ucaauuaugcaugccca

SEQ ID NO: 734156 - RNA, 17 nt, Artificial Sequence
  Synthetic
aauccauuugaugccca

SEQ ID NO: 734157 - RNA, 17 nt, Artificial Sequence
  Synthetic
aauggccauacugccca

SEQ ID NO: 734158 - RNA, 17 nt, Artificial Sequence
  Synthetic
aauggucauacugccca

SEQ ID NO: 734159 - RNA, 17 nt, Artificial Sequence
  Synthetic
caauaaucuccugccca

SEQ ID NO: 734160 - RNA, 17 nt, Artificial Sequence
  Synthetic
aagggcagagcugccca

SEQ ID NO: 734161 - RNA, 17 nt, Artificial Sequence
  Synthetic
ucuugagcaucugccca

SEQ ID NO: 734162 - RNA, 17 nt, Artificial Sequence
  Synthetic
aaacucugcucugccca

SEQ ID NO: 734163 - RNA, 17 nt, Artificial Sequence
  Synthetic
aaaauggcaagugccca

SEQ ID NO: 734164 - RNA, 17 nt, Artificial Sequence
  Synthetic
acgacagagugugccca

SEQ ID NO: 734165 - RNA, 17 nt, Artificial Sequence
  Synthetic
acuuaaaguauugccca

SEQ ID NO: 734166 - RNA, 17 nt, Artificial Sequence
  Synthetic
auaaauccacuugccca

SEQ ID NO: 734167 - RNA, 17 nt, Artificial Sequence
  Synthetic
cuuauguuacuugccca

SEQ ID NO: 734168 - RNA, 17 nt, Artificial Sequence
  Synthetic
aguacaggaguugccca

SEQ ID NO: 734169 - RNA, 17 nt, Artificial Sequence
  Synthetic
uuugaaacauuugccca

SEQ ID NO: 734170 - RNA, 17 nt, Artificial Sequence
  Synthetic
caguuuuucuuugccca

SEQ ID NO: 734171 - RNA, 17 nt, Artificial Sequence
  Synthetic
aauggagaacaauccca

SEQ ID NO: 734172 - RNA, 17 nt, Artificial Sequence
  Synthetic
ucuucaggacaauccca

SEQ ID NO: 734173 - RNA, 17 nt, Artificial Sequence
  Synthetic
ucaugccuguaauccca

SEQ ID NO: 734174 - RNA, 17 nt, Artificial Sequence
  Synthetic
aagugcccuacauccca

SEQ ID NO: 734175 - RNA, 17 nt, Artificial Sequence
  Synthetic
accagccuggcauccca

SEQ ID NO: 734176 - RNA, 17 nt, Artificial Sequence
  Synthetic
accagccuugcauccca

SEQ ID NO: 734177 - RNA, 17 nt, Artificial Sequence
  Synthetic
accagcuuugcauccca

SEQ ID NO: 734178 - RNA, 17 nt, Artificial Sequence
  Synthetic
ugauugacuagauccca

SEQ ID NO: 734179 - RNA, 17 nt, Artificial Sequence
  Synthetic
aaacagugcauauccca

SEQ ID NO: 734180 - RNA, 17 nt, Artificial Sequence
  Synthetic
cucuuaaugauauccca

SEQ ID NO: 734181 - RNA, 17 nt, Artificial Sequence
  Synthetic
aacaaccuucuauccca

SEQ ID NO: 734182 - RNA, 17 nt, Artificial Sequence
  Synthetic
auauuuacuguauccca

SEQ ID NO: 734183 - RNA, 17 nt, Artificial Sequence
  Synthetic
ucucaagacuuauccca

SEQ ID NO: 734184 - RNA, 17 nt, Artificial Sequence
  Synthetic
cuuaguuuccacuccca

SEQ ID NO: 734185 - RNA, 17 nt, Artificial Sequence
  Synthetic
uuccuaggccccuccca

SEQ ID NO: 734186 - RNA, 17 nt, Artificial Sequence
  Synthetic
agagacugccccuccca

SEQ ID NO: 734187 - RNA, 17 nt, Artificial Sequence
  Synthetic
uuucuucaugccuccca

SEQ ID NO: 734188 - RNA, 17 nt, Artificial Sequence
  Synthetic
agccacugcuccuccca

SEQ ID NO: 734189 - RNA, 17 nt, Artificial Sequence
  Synthetic
caagaggugggcuccca

SEQ ID NO: 734190 - RNA, 17 nt, Artificial Sequence
  Synthetic
uuuauagauaucuccca

SEQ ID NO: 734191 - RNA, 17 nt, Artificial Sequence
  Synthetic
aaucuuuaacucuccca

SEQ ID NO: 734192 - RNA, 17 nt, Artificial Sequence
  Synthetic
aagucccaugucuccca

SEQ ID NO: 734193 - RNA, 17 nt, Artificial Sequence
  Synthetic
aauaugaaauucuccca

SEQ ID NO: 734194 - RNA, 17 nt, Artificial Sequence
  Synthetic
uaucuaacagaguccca

SEQ ID NO: 734195 - RNA, 17 nt, Artificial Sequence
  Synthetic
acacucaaguaguccca

SEQ ID NO: 734196 - RNA, 17 nt, Artificial Sequence
  Synthetic
cguggugcucuguccca

SEQ ID NO: 734197 - RNA, 17 nt, Artificial Sequence
  Synthetic
uuucuaucaaauuccca

SEQ ID NO: 734198 - RNA, 17 nt, Artificial Sequence
  Synthetic
ugaucugggaauuccca

SEQ ID NO: 734199 - RNA, 17 nt, Artificial Sequence
  Synthetic
ccuuugguuaauuccca

SEQ ID NO: 734200 - RNA, 17 nt, Artificial Sequence
  Synthetic
ucuucagaccauuccca

SEQ ID NO: 734201 - RNA, 17 nt, Artificial Sequence
  Synthetic
auaaauacagauuccca

SEQ ID NO: 734202 - RNA, 17 nt, Artificial Sequence
  Synthetic
uacccuccagauuccca

SEQ ID NO: 734203 - RNA, 17 nt, Artificial Sequence
  Synthetic
agcuauuaaucuuccca

SEQ ID NO: 734204 - RNA, 17 nt, Artificial Sequence
  Synthetic
agguaacucucuuccca

SEQ ID NO: 734205 - RNA, 17 nt, Artificial Sequence
  Synthetic
agacucuagucuuccca

SEQ ID NO: 734206 - RNA, 17 nt, Artificial Sequence
  Synthetic
uguauugauucuuccca

SEQ ID NO: 734207 - RNA, 17 nt, Artificial Sequence
  Synthetic
ucaaguccaaguuccca

SEQ ID NO: 734208 - RNA, 17 nt, Artificial Sequence
  Synthetic
ccccacaacaguuccca

SEQ ID NO: 734209 - RNA, 17 nt, Artificial Sequence
  Synthetic
caagagguggguuccca

SEQ ID NO: 734210 - RNA, 17 nt, Artificial Sequence
  Synthetic
caaagcggugguuccca

SEQ ID NO: 734211 - RNA, 17 nt, Artificial Sequence
  Synthetic
uuguaaugauguuccca

SEQ ID NO: 734212 - RNA, 17 nt, Artificial Sequence
  Synthetic
ugcagaaggcuuuccca

SEQ ID NO: 734213 - RNA, 17 nt, Artificial Sequence
  Synthetic
cagucugcucuuuccca

SEQ ID NO: 734214 - RNA, 17 nt, Artificial Sequence
  Synthetic
auagaaacauuuuccca

SEQ ID NO: 734215 - RNA, 17 nt, Artificial Sequence
  Synthetic
ucacaauagaaaagcca

SEQ ID NO: 734216 - RNA, 17 nt, Artificial Sequence
  Synthetic
agccucaaacaaagcca

SEQ ID NO: 734217 - RNA, 17 nt, Artificial Sequence
  Synthetic
cagaauagucaaagcca

SEQ ID NO: 734218 - RNA, 17 nt, Artificial Sequence
  Synthetic
cugaucccagaaagcca

SEQ ID NO: 734219 - RNA, 17 nt, Artificial Sequence
  Synthetic
caguuccaugaaagcca

SEQ ID NO: 734220 - RNA, 17 nt, Artificial Sequence
  Synthetic
ucgcagcuauaaagcca

SEQ ID NO: 734221 - RNA, 17 nt, Artificial Sequence
  Synthetic
auuaaccacuaaagcca

SEQ ID NO: 734222 - RNA, 17 nt, Artificial Sequence
  Synthetic
caagguagaacaagcca

SEQ ID NO: 734223 - RNA, 17 nt, Artificial Sequence
  Synthetic
uauucuaucacaagcca

SEQ ID NO: 734224 - RNA, 17 nt, Artificial Sequence
  Synthetic
uuguaacugacaagcca

SEQ ID NO: 734225 - RNA, 17 nt, Artificial Sequence
  Synthetic
cugcccucgccaagcca

SEQ ID NO: 734226 - RNA, 17 nt, Artificial Sequence
  Synthetic
uccucuuugccaagcca

SEQ ID NO: 734227 - RNA, 17 nt, Artificial Sequence
  Synthetic
cucgaaaucagaagcca

SEQ ID NO: 734228 - RNA, 17 nt, Artificial Sequence
  Synthetic
cucuuugggagaagcca

SEQ ID NO: 734229 - RNA, 17 nt, Artificial Sequence
  Synthetic
uaacagaugagaagcca

SEQ ID NO: 734230 - RNA, 17 nt, Artificial Sequence
  Synthetic
cuucaagaacgaagcca

SEQ ID NO: 734231 - RNA, 17 nt, Artificial Sequence
  Synthetic
aaucuaaaaggaagcca

SEQ ID NO: 734232 - RNA, 17 nt, Artificial Sequence
  Synthetic
aaagaaggaggaagcca

SEQ ID NO: 734233 - RNA, 17 nt, Artificial Sequence
  Synthetic
caaugucugggaagcca

SEQ ID NO: 734234 - RNA, 17 nt, Artificial Sequence
  Synthetic
aaaaaucaaugaagcca

SEQ ID NO: 734235 - RNA, 17 nt, Artificial Sequence
  Synthetic
ucagaggacugaagcca

SEQ ID NO: 734236 - RNA, 17 nt, Artificial Sequence
  Synthetic
caacaaaucugaagcca

SEQ ID NO: 734237 - RNA, 17 nt, Artificial Sequence
  Synthetic
uagauaaaacuaagcca

SEQ ID NO: 734238 - RNA, 17 nt, Artificial Sequence
  Synthetic
aacaagcauguaagcca

SEQ ID NO: 734239 - RNA, 17 nt, Artificial Sequence
  Synthetic
aauucccccaacagcca

SEQ ID NO: 734240 - RNA, 17 nt, Artificial Sequence
  Synthetic
uggggccucaccagcca

SEQ ID NO: 734241 - RNA, 17 nt, Artificial Sequence
  Synthetic
aaaacugguaccagcca

SEQ ID NO: 734242 - RNA, 17 nt, Artificial Sequence
  Synthetic
ucuuaaaaacccagcca

SEQ ID NO: 734243 - RNA, 17 nt, Artificial Sequence
  Synthetic
cccagccacuccagcca

SEQ ID NO: 734244 - RNA, 17 nt, Artificial Sequence
  Synthetic
ccacugcacuccagcca

SEQ ID NO: 734245 - RNA, 17 nt, Artificial Sequence
  Synthetic
cauucacgcuccagcca

SEQ ID NO: 734246 - RNA, 17 nt, Artificial Sequence
  Synthetic
ccacugcauuccagcca

SEQ ID NO: 734247 - RNA, 17 nt, Artificial Sequence
  Synthetic
ugacuuuugagcagcca

SEQ ID NO: 734248 - RNA, 17 nt, Artificial Sequence
  Synthetic
auucuaacgugcagcca

SEQ ID NO: 734249 - RNA, 17 nt, Artificial Sequence
  Synthetic
uauacuauuugcagcca

SEQ ID NO: 734250 - RNA, 17 nt, Artificial Sequence
  Synthetic
cuggaaguuugcagcca

SEQ ID NO: 734251 - RNA, 17 nt, Artificial Sequence
  Synthetic
aauuuaguuaucagcca

SEQ ID NO: 734252 - RNA, 17 nt, Artificial Sequence
  Synthetic
ucuuuagaacucagcca

SEQ ID NO: 734253 - RNA, 17 nt, Artificial Sequence
  Synthetic
cccuacaugcucagcca

SEQ ID NO: 734254 - RNA, 17 nt, Artificial Sequence
  Synthetic
aaugucgcucucagcca

SEQ ID NO: 734255 - RNA, 17 nt, Artificial Sequence
  Synthetic
acagugguucucagcca

SEQ ID NO: 734256 - RNA, 17 nt, Artificial Sequence
  Synthetic
agcaugucagucagcca

SEQ ID NO: 734257 - RNA, 17 nt, Artificial Sequence
  Synthetic
aagggugcauucagcca

SEQ ID NO: 734258 - RNA, 17 nt, Artificial Sequence
  Synthetic
augcuucucaagagcca

SEQ ID NO: 734259 - RNA, 17 nt, Artificial Sequence
  Synthetic
uguacuucacagagcca

SEQ ID NO: 734260 - RNA, 17 nt, Artificial Sequence
  Synthetic
cauacaaggcagagcca

SEQ ID NO: 734261 - RNA, 17 nt, Artificial Sequence
  Synthetic
agguguaaaaggagcca

SEQ ID NO: 734262 - RNA, 17 nt, Artificial Sequence
  Synthetic
aauaaaucagggagcca

SEQ ID NO: 734263 - RNA, 17 nt, Artificial Sequence
  Synthetic
ucaaauggugggagcca

SEQ ID NO: 734264 - RNA, 17 nt, Artificial Sequence
  Synthetic
agaaagugguggagcca

SEQ ID NO: 734265 - RNA, 17 nt, Artificial Sequence
  Synthetic
cauaacucucugagcca

SEQ ID NO: 734266 - RNA, 17 nt, Artificial Sequence
  Synthetic
auuacaggcgugagcca

SEQ ID NO: 734267 - RNA, 17 nt, Artificial Sequence
  Synthetic
auuacuggugugagcca

SEQ ID NO: 734268 - RNA, 17 nt, Artificial Sequence
  Synthetic
ucuauucacaauagcca

SEQ ID NO: 734269 - RNA, 17 nt, Artificial Sequence
  Synthetic
cuuuucagcaauagcca

SEQ ID NO: 734270 - RNA, 17 nt, Artificial Sequence
  Synthetic
uaaaaagaucauagcca

SEQ ID NO: 734271 - RNA, 17 nt, Artificial Sequence
  Synthetic
uuugaagaucauagcca

SEQ ID NO: 734272 - RNA, 17 nt, Artificial Sequence
  Synthetic
acagagagaccuagcca

SEQ ID NO: 734273 - RNA, 17 nt, Artificial Sequence
  Synthetic
aaggagaaaucuagcca

SEQ ID NO: 734274 - RNA, 17 nt, Artificial Sequence
  Synthetic
augaauuguucuagcca

SEQ ID NO: 734275 - RNA, 17 nt, Artificial Sequence
  Synthetic
agaaccaaaaguagcca

SEQ ID NO: 734276 - RNA, 17 nt, Artificial Sequence
  Synthetic
cuuauuuuagguagcca

SEQ ID NO: 734277 - RNA, 17 nt, Artificial Sequence
  Synthetic
ugcacccucuguagcca

SEQ ID NO: 734278 - RNA, 17 nt, Artificial Sequence
  Synthetic
cacugugaguguagcca

SEQ ID NO: 734279 - RNA, 17 nt, Artificial Sequence
  Synthetic
ugaugcugaauuagcca

SEQ ID NO: 734280 - RNA, 17 nt, Artificial Sequence
  Synthetic
ugguacuaccuuagcca

SEQ ID NO: 734281 - RNA, 17 nt, Artificial Sequence
  Synthetic
augauucucuuuagcca

SEQ ID NO: 734282 - RNA, 17 nt, Artificial Sequence
  Synthetic
uuggcuccuuuuagcca

SEQ ID NO: 734283 - RNA, 17 nt, Artificial Sequence
  Synthetic
ugucucucuucccgcca

SEQ ID NO: 734284 - RNA, 17 nt, Artificial Sequence
  Synthetic
ccuugggcugggcgcca

SEQ ID NO: 734285 - RNA, 17 nt, Artificial Sequence
  Synthetic
cauuuccauaaaggcca

SEQ ID NO: 734286 - RNA, 17 nt, Artificial Sequence
  Synthetic
agagcugcccaaggcca

SEQ ID NO: 734287 - RNA, 17 nt, Artificial Sequence
  Synthetic
auugaaaagcaaggcca

SEQ ID NO: 734288 - RNA, 17 nt, Artificial Sequence
  Synthetic
cagugugagcaaggcca

SEQ ID NO: 734289 - RNA, 17 nt, Artificial Sequence
  Synthetic
agguccuuggaaggcca

SEQ ID NO: 734290 - RNA, 17 nt, Artificial Sequence
  Synthetic
caucauguugaaggcca

SEQ ID NO: 734291 - RNA, 17 nt, Artificial Sequence
  Synthetic
accauaaccccaggcca

SEQ ID NO: 734292 - RNA, 17 nt, Artificial Sequence
  Synthetic
agcacguugucaggcca

SEQ ID NO: 734293 - RNA, 17 nt, Artificial Sequence
  Synthetic
acuggaaguucaggcca

SEQ ID NO: 734294 - RNA, 17 nt, Artificial Sequence
  Synthetic
acucuaagaagaggcca

SEQ ID NO: 734295 - RNA, 17 nt, Artificial Sequence
  Synthetic
caagugggcagaggcca

SEQ ID NO: 734296 - RNA, 17 nt, Artificial Sequence
  Synthetic
cuaggcucuagaggcca

SEQ ID NO: 734297 - RNA, 17 nt, Artificial Sequence
  Synthetic
agggccuuaggaggcca

SEQ ID NO: 734298 - RNA, 17 nt, Artificial Sequence
  Synthetic
agcacuuagggaggcca

SEQ ID NO: 734299 - RNA, 17 nt, Artificial Sequence
  Synthetic
agcacuucgggaggcca

SEQ ID NO: 734300 - RNA, 17 nt, Artificial Sequence
  Synthetic
agcacugugggaggcca

SEQ ID NO: 734301 - RNA, 17 nt, Artificial Sequence
  Synthetic
aacacuuugggaggcca

SEQ ID NO: 734302 - RNA, 17 nt, Artificial Sequence
  Synthetic
uccacuuugggaggcca

SEQ ID NO: 734303 - RNA, 17 nt, Artificial Sequence
  Synthetic
agcacuuugggaggcca

SEQ ID NO: 734304 - RNA, 17 nt, Artificial Sequence
  Synthetic
cgcacuuugggaggcca

SEQ ID NO: 734305 - RNA, 17 nt, Artificial Sequence
  Synthetic
aggacuuugggaggcca

SEQ ID NO: 734306 - RNA, 17 nt, Artificial Sequence
  Synthetic
agugcuuugggaggcca

SEQ ID NO: 734307 - RNA, 17 nt, Artificial Sequence
  Synthetic
agcauuuuuggaggcca

SEQ ID NO: 734308 - RNA, 17 nt, Artificial Sequence
  Synthetic
ccaccuaugugaggcca

SEQ ID NO: 734309 - RNA, 17 nt, Artificial Sequence
  Synthetic
uugcugaagauaggcca

SEQ ID NO: 734310 - RNA, 17 nt, Artificial Sequence
  Synthetic
cacagaucucuaggcca

SEQ ID NO: 734311 - RNA, 17 nt, Artificial Sequence
  Synthetic
auaaggcuucuaggcca

SEQ ID NO: 734312 - RNA, 17 nt, Artificial Sequence
  Synthetic
uguuucaaacacggcca

SEQ ID NO: 734313 - RNA, 17 nt, Artificial Sequence
  Synthetic
aaaaauugaggcggcca

SEQ ID NO: 734314 - RNA, 17 nt, Artificial Sequence
  Synthetic
uaaggagggaucggcca

SEQ ID NO: 734315 - RNA, 17 nt, Artificial Sequence
  Synthetic
caucgaaaagucggcca

SEQ ID NO: 734316 - RNA, 17 nt, Artificial Sequence
  Synthetic
ccuucaaaaaggggcca

SEQ ID NO: 734317 - RNA, 17 nt, Artificial Sequence
  Synthetic
auggauaaaaggggcca

SEQ ID NO: 734318 - RNA, 17 nt, Artificial Sequence
  Synthetic
ccauuugggaggggcca

SEQ ID NO: 734319 - RNA, 17 nt, Artificial Sequence
  Synthetic
cccuccugucugggcca

SEQ ID NO: 734320 - RNA, 17 nt, Artificial Sequence
  Synthetic
aauucccuaaauggcca

SEQ ID NO: 734321 - RNA, 17 nt, Artificial Sequence
  Synthetic
augugaaagaauggcca

SEQ ID NO: 734322 - RNA, 17 nt, Artificial Sequence
  Synthetic
caaugguaauauggcca

SEQ ID NO: 734323 - RNA, 17 nt, Artificial Sequence
  Synthetic
cucauggcaacuggcca

SEQ ID NO: 734324 - RNA, 17 nt, Artificial Sequence
  Synthetic
ccagaccagccuggcca

SEQ ID NO: 734325 - RNA, 17 nt, Artificial Sequence
  Synthetic
auuggaaguccuggcca

SEQ ID NO: 734326 - RNA, 17 nt, Artificial Sequence
  Synthetic
ugaguagcagcuggcca

SEQ ID NO: 734327 - RNA, 17 nt, Artificial Sequence
  Synthetic
aaugguuucucuggcca

SEQ ID NO: 734328 - RNA, 17 nt, Artificial Sequence
  Synthetic
cuugccuugucuggcca

SEQ ID NO: 734329 - RNA, 17 nt, Artificial Sequence
  Synthetic
caguaaaacaguggcca

SEQ ID NO: 734330 - RNA, 17 nt, Artificial Sequence
  Synthetic
uauaaauauuguggcca

SEQ ID NO: 734331 - RNA, 17 nt, Artificial Sequence
  Synthetic
cagccagccauuggcca

SEQ ID NO: 734332 - RNA, 17 nt, Artificial Sequence
  Synthetic
cucuaugugcuuggcca

SEQ ID NO: 734333 - RNA, 17 nt, Artificial Sequence
  Synthetic
aguagguaucuuggcca

SEQ ID NO: 734334 - RNA, 17 nt, Artificial Sequence
  Synthetic
acacuagguguuggcca

SEQ ID NO: 734335 - RNA, 17 nt, Artificial Sequence
  Synthetic
aaaaaaaaaaaaugcca

SEQ ID NO: 734336 - RNA, 17 nt, Artificial Sequence
  Synthetic
ccagguagaaaaugcca

SEQ ID NO: 734337 - RNA, 17 nt, Artificial Sequence
  Synthetic
uccuaugugaaaugcca

SEQ ID NO: 734338 - RNA, 17 nt, Artificial Sequence
  Synthetic
ugcugugaagaaugcca

SEQ ID NO: 734339 - RNA, 17 nt, Artificial Sequence
  Synthetic
cauuaaaaauaaugcca

SEQ ID NO: 734340 - RNA, 17 nt, Artificial Sequence
  Synthetic
aaauguauguaaugcca

SEQ ID NO: 734341 - RNA, 17 nt, Artificial Sequence
  Synthetic
uagguauacacaugcca

SEQ ID NO: 734342 - RNA, 17 nt, Artificial Sequence
  Synthetic
aaaauguguucaugcca

SEQ ID NO: 734343 - RNA, 17 nt, Artificial Sequence
  Synthetic
uauguugugugaugcca

SEQ ID NO: 734344 - RNA, 17 nt, Artificial Sequence
  Synthetic
aucaauuaaauaugcca

SEQ ID NO: 734345 - RNA, 17 nt, Artificial Sequence
  Synthetic
uuuauuugaauaugcca

SEQ ID NO: 734346 - RNA, 17 nt, Artificial Sequence
  Synthetic
auaaugugccuaugcca

SEQ ID NO: 734347 - RNA, 17 nt, Artificial Sequence
  Synthetic
auuagaaauguaugcca

SEQ ID NO: 734348 - RNA, 17 nt, Artificial Sequence
  Synthetic
aggcuugccuuaugcca

SEQ ID NO: 734349 - RNA, 17 nt, Artificial Sequence
  Synthetic
aacacaaucaacugcca

SEQ ID NO: 734350 - RNA, 17 nt, Artificial Sequence
  Synthetic
uuaauucccuacugcca

SEQ ID NO: 734351 - RNA, 17 nt, Artificial Sequence
  Synthetic
uuuuuuaaguacugcca

SEQ ID NO: 734352 - RNA, 17 nt, Artificial Sequence
  Synthetic
cauccaugucccugcca

SEQ ID NO: 734353 - RNA, 17 nt, Artificial Sequence
  Synthetic
uguacugaauccugcca

SEQ ID NO: 734354 - RNA, 17 nt, Artificial Sequence
  Synthetic
uacaauauuagcugcca

SEQ ID NO: 734355 - RNA, 17 nt, Artificial Sequence
  Synthetic
uaugcuguaggcugcca

SEQ ID NO: 734356 - RNA, 17 nt, Artificial Sequence
  Synthetic
caaacuuauggcugcca

SEQ ID NO: 734357 - RNA, 17 nt, Artificial Sequence
  Synthetic
cuccccaugugcugcca

SEQ ID NO: 734358 - RNA, 17 nt, Artificial Sequence
  Synthetic
auccauucuugcugcca

SEQ ID NO: 734359 - RNA, 17 nt, Artificial Sequence
  Synthetic
uaaguuucacucugcca

SEQ ID NO: 734360 - RNA, 17 nt, Artificial Sequence
  Synthetic
cuaaugccagucugcca

SEQ ID NO: 734361 - RNA, 17 nt, Artificial Sequence
  Synthetic
ugauuugcauucugcca

SEQ ID NO: 734362 - RNA, 17 nt, Artificial Sequence
  Synthetic
cauuauaguuucugcca

SEQ ID NO: 734363 - RNA, 17 nt, Artificial Sequence
  Synthetic
uagguauacacgugcca

SEQ ID NO: 734364 - RNA, 17 nt, Artificial Sequence
  Synthetic
cugggaguugggugcca

SEQ ID NO: 734365 - RNA, 17 nt, Artificial Sequence
  Synthetic
ucuccaaaaaugugcca

SEQ ID NO: 734366 - RNA, 17 nt, Artificial Sequence
  Synthetic
uagguaaacaugugcca

SEQ ID NO: 734367 - RNA, 17 nt, Artificial Sequence
  Synthetic
uagguauacaugugcca

SEQ ID NO: 734368 - RNA, 17 nt, Artificial Sequence
  Synthetic
agcuagaauaugugcca

SEQ ID NO: 734369 - RNA, 17 nt, Artificial Sequence
  Synthetic
auaguuacuaugugcca

SEQ ID NO: 734370 - RNA, 17 nt, Artificial Sequence
  Synthetic
ugaaggaaugugugcca

SEQ ID NO: 734371 - RNA, 17 nt, Artificial Sequence
  Synthetic
aagcccuuuuugugcca

SEQ ID NO: 734372 - RNA, 17 nt, Artificial Sequence
  Synthetic
ucaauucuccauugcca

SEQ ID NO: 734373 - RNA, 17 nt, Artificial Sequence
  Synthetic
accugauuucauugcca

SEQ ID NO: 734374 - RNA, 17 nt, Artificial Sequence
  Synthetic
cuaaaauuauauugcca

SEQ ID NO: 734375 - RNA, 17 nt, Artificial Sequence
  Synthetic
aucauccugacuugcca

SEQ ID NO: 734376 - RNA, 17 nt, Artificial Sequence
  Synthetic
caccuuuugacuugcca

SEQ ID NO: 734377 - RNA, 17 nt, Artificial Sequence
  Synthetic
uuccaaauuccuugcca

SEQ ID NO: 734378 - RNA, 17 nt, Artificial Sequence
  Synthetic
aauaauuuuucuugcca

SEQ ID NO: 734379 - RNA, 17 nt, Artificial Sequence
  Synthetic
cuucucuagaguugcca

SEQ ID NO: 734380 - RNA, 17 nt, Artificial Sequence
  Synthetic
uaguggugggguugcca

SEQ ID NO: 734381 - RNA, 17 nt, Artificial Sequence
  Synthetic
uaguugcaugguugcca

SEQ ID NO: 734382 - RNA, 17 nt, Artificial Sequence
  Synthetic
uggacuggugguugcca

SEQ ID NO: 734383 - RNA, 17 nt, Artificial Sequence
  Synthetic
cucagagacuguugcca

SEQ ID NO: 734384 - RNA, 17 nt, Artificial Sequence
  Synthetic
ucuugguucuguugcca

SEQ ID NO: 734385 - RNA, 17 nt, Artificial Sequence
  Synthetic
ccaucgaguuguugcca

SEQ ID NO: 734386 - RNA, 17 nt, Artificial Sequence
  Synthetic
uagguauacauuugcca

SEQ ID NO: 734387 - RNA, 17 nt, Artificial Sequence
  Synthetic
uuguuuaacguuugcca

SEQ ID NO: 734388 - RNA, 17 nt, Artificial Sequence
  Synthetic
aagccacugguuugcca

SEQ ID NO: 734389 - RNA, 17 nt, Artificial Sequence
  Synthetic
cacauuuuuuuuugcca

SEQ ID NO: 734390 - RNA, 17 nt, Artificial Sequence
  Synthetic
ucuccuuugaaaaucca

SEQ ID NO: 734391 - RNA, 17 nt, Artificial Sequence
  Synthetic
aauucuaauaaaaucca

SEQ ID NO: 734392 - RNA, 17 nt, Artificial Sequence
  Synthetic
auaaucaguaaaaucca

SEQ ID NO: 734393 - RNA, 17 nt, Artificial Sequence
  Synthetic
uaucugggccaaaucca

SEQ ID NO: 734394 - RNA, 17 nt, Artificial Sequence
  Synthetic
auuuuucuccaaaucca

SEQ ID NO: 734395 - RNA, 17 nt, Artificial Sequence
  Synthetic
cucagauuuuaaaucca

SEQ ID NO: 734396 - RNA, 17 nt, Artificial Sequence
  Synthetic
aaaaucaucccaaucca

SEQ ID NO: 734397 - RNA, 17 nt, Artificial Sequence
  Synthetic
auuuuacuugcaaucca

SEQ ID NO: 734398 - RNA, 17 nt, Artificial Sequence
  Synthetic
uguggucagucaaucca

SEQ ID NO: 734399 - RNA, 17 nt, Artificial Sequence
  Synthetic
ugaugucacagaaucca

SEQ ID NO: 734400 - RNA, 17 nt, Artificial Sequence
  Synthetic
uuucagcauagaaucca

SEQ ID NO: 734401 - RNA, 17 nt, Artificial Sequence
  Synthetic
uauuuccuacgaaucca

SEQ ID NO: 734402 - RNA, 17 nt, Artificial Sequence
  Synthetic
ccccaugacugaaucca

SEQ ID NO: 734403 - RNA, 17 nt, Artificial Sequence
  Synthetic
uauucacauauaaucca

SEQ ID NO: 734404 - RNA, 17 nt, Artificial Sequence
  Synthetic
uaguggugacuaaucca

SEQ ID NO: 734405 - RNA, 17 nt, Artificial Sequence
  Synthetic
auuucaucgcuaaucca

SEQ ID NO: 734406 - RNA, 17 nt, Artificial Sequence
  Synthetic
aaugcaacugacaucca

SEQ ID NO: 734407 - RNA, 17 nt, Artificial Sequence
  Synthetic
uaccaaagguccaucca

SEQ ID NO: 734408 - RNA, 17 nt, Artificial Sequence
  Synthetic
aauauuccuagcaucca

SEQ ID NO: 734409 - RNA, 17 nt, Artificial Sequence
  Synthetic
caauccacuugcaucca

SEQ ID NO: 734410 - RNA, 17 nt, Artificial Sequence
  Synthetic
augauauaaaucaucca

SEQ ID NO: 734411 - RNA, 17 nt, Artificial Sequence
  Synthetic
auauauaaagucaucca

SEQ ID NO: 734412 - RNA, 17 nt, Artificial Sequence
  Synthetic
uacaauggagucaucca

SEQ ID NO: 734413 - RNA, 17 nt, Artificial Sequence
  Synthetic
aagaguaauuucaucca

SEQ ID NO: 734414 - RNA, 17 nt, Artificial Sequence
  Synthetic
ucugaccauuucaucca

SEQ ID NO: 734415 - RNA, 17 nt, Artificial Sequence
  Synthetic
caugcaucuuucaucca

SEQ ID NO: 734416 - RNA, 17 nt, Artificial Sequence
  Synthetic
caaggaagacagaucca

SEQ ID NO: 734417 - RNA, 17 nt, Artificial Sequence
  Synthetic
uguaaauacaggaucca

SEQ ID NO: 734418 - RNA, 17 nt, Artificial Sequence
  Synthetic
aaaaguagaaugaucca

SEQ ID NO: 734419 - RNA, 17 nt, Artificial Sequence
  Synthetic
ucuuugggaaugaucca

SEQ ID NO: 734420 - RNA, 17 nt, Artificial Sequence
  Synthetic
cacccgccccugaucca

SEQ ID NO: 734421 - RNA, 17 nt, Artificial Sequence
  Synthetic
agugacuucuugaucca

SEQ ID NO: 734422 - RNA, 17 nt, Artificial Sequence
  Synthetic
ccccauuucuugaucca

SEQ ID NO: 734423 - RNA, 17 nt, Artificial Sequence
  Synthetic
agggcuaagaauaucca

SEQ ID NO: 734424 - RNA, 17 nt, Artificial Sequence
  Synthetic
uccaaucagaauaucca

SEQ ID NO: 734425 - RNA, 17 nt, Artificial Sequence
  Synthetic
uauuaucuagauaucca

SEQ ID NO: 734426 - RNA, 17 nt, Artificial Sequence
  Synthetic
ccguugguugauaucca

SEQ ID NO: 734427 - RNA, 17 nt, Artificial Sequence
  Synthetic
aucaugcacuauaucca

SEQ ID NO: 734428 - RNA, 17 nt, Artificial Sequence
  Synthetic
acagcuuuggcuaucca

SEQ ID NO: 734429 - RNA, 17 nt, Artificial Sequence
  Synthetic
uugucccucaguaucca

SEQ ID NO: 734430 - RNA, 17 nt, Artificial Sequence
  Synthetic
aauugcaaacguaucca

SEQ ID NO: 734431 - RNA, 17 nt, Artificial Sequence
  Synthetic
aauugcaaugguaucca

SEQ ID NO: 734432 - RNA, 17 nt, Artificial Sequence
  Synthetic
uuggcccucuguaucca

SEQ ID NO: 734433 - RNA, 17 nt, Artificial Sequence
  Synthetic
acgauaaugcuuaucca

SEQ ID NO: 734434 - RNA, 17 nt, Artificial Sequence
  Synthetic
aucucaagauuuaucca

SEQ ID NO: 734435 - RNA, 17 nt, Artificial Sequence
  Synthetic
uaaucuuccuuuaucca

SEQ ID NO: 734436 - RNA, 17 nt, Artificial Sequence
  Synthetic
caggggaauuuuaucca

SEQ ID NO: 734437 - RNA, 17 nt, Artificial Sequence
  Synthetic
uuggccccuuuuaucca

SEQ ID NO: 734438 - RNA, 17 nt, Artificial Sequence
  Synthetic
caaugcacuaaacucca

SEQ ID NO: 734439 - RNA, 17 nt, Artificial Sequence
  Synthetic
uaacugccucaacucca

SEQ ID NO: 734440 - RNA, 17 nt, Artificial Sequence
  Synthetic
ucuuuugaagaacucca

SEQ ID NO: 734441 - RNA, 17 nt, Artificial Sequence
  Synthetic
auaagcaucuaacucca

SEQ ID NO: 734442 - RNA, 17 nt, Artificial Sequence
  Synthetic
auuucaugguaacucca

SEQ ID NO: 734443 - RNA, 17 nt, Artificial Sequence
  Synthetic
ugggccuggacacucca

SEQ ID NO: 734444 - RNA, 17 nt, Artificial Sequence
  Synthetic
ccucuacacagacucca

SEQ ID NO: 734445 - RNA, 17 nt, Artificial Sequence
  Synthetic
uaauacuaaugacucca

SEQ ID NO: 734446 - RNA, 17 nt, Artificial Sequence
  Synthetic
caacuguuaugacucca

SEQ ID NO: 734447 - RNA, 17 nt, Artificial Sequence
  Synthetic
cuugaucucugacucca

SEQ ID NO: 734448 - RNA, 17 nt, Artificial Sequence
  Synthetic
auacaacugguacucca

SEQ ID NO: 734449 - RNA, 17 nt, Artificial Sequence
  Synthetic
ucuuucuuuuuacucca

SEQ ID NO: 734450 - RNA, 17 nt, Artificial Sequence
  Synthetic
uauuucaguacccucca

SEQ ID NO: 734451 - RNA, 17 nt, Artificial Sequence
  Synthetic
aggugaucugcccucca

SEQ ID NO: 734452 - RNA, 17 nt, Artificial Sequence
  Synthetic
uaccuuccuucccucca

SEQ ID NO: 734453 - RNA, 17 nt, Artificial Sequence
  Synthetic
cuaguuggaagccucca

SEQ ID NO: 734454 - RNA, 17 nt, Artificial Sequence
  Synthetic
cccaacuuaugccucca

SEQ ID NO: 734455 - RNA, 17 nt, Artificial Sequence
  Synthetic
uacauagccugccucca

SEQ ID NO: 734456 - RNA, 17 nt, Artificial Sequence
  Synthetic
cccucacgcugccucca

SEQ ID NO: 734457 - RNA, 17 nt, Artificial Sequence
  Synthetic
ugcaaacucugccucca

SEQ ID NO: 734458 - RNA, 17 nt, Artificial Sequence
  Synthetic
aauucaggaauccucca

SEQ ID NO: 734459 - RNA, 17 nt, Artificial Sequence
  Synthetic
auguaggaacuccucca

SEQ ID NO: 734460 - RNA, 17 nt, Artificial Sequence
  Synthetic
uuucuaugacuccucca

SEQ ID NO: 734461 - RNA, 17 nt, Artificial Sequence
  Synthetic
uccuacuuaguccucca

SEQ ID NO: 734462 - RNA, 17 nt, Artificial Sequence
  Synthetic
uggggcacauuccucca

SEQ ID NO: 734463 - RNA, 17 nt, Artificial Sequence
  Synthetic
ucuccuauauuccucca

SEQ ID NO: 734464 - RNA, 17 nt, Artificial Sequence
  Synthetic
ugucaauuauuccucca

SEQ ID NO: 734465 - RNA, 17 nt, Artificial Sequence
  Synthetic
ucuuaaggcuuccucca

SEQ ID NO: 734466 - RNA, 17 nt, Artificial Sequence
  Synthetic
auccuuuuguuccucca

SEQ ID NO: 734467 - RNA, 17 nt, Artificial Sequence
  Synthetic
uguauaauagggcucca

SEQ ID NO: 734468 - RNA, 17 nt, Artificial Sequence
  Synthetic
cagaaaacauggcucca

SEQ ID NO: 734469 - RNA, 17 nt, Artificial Sequence
  Synthetic
aagcccaaacugcucca

SEQ ID NO: 734470 - RNA, 17 nt, Artificial Sequence
  Synthetic
ucucuccagcugcucca

SEQ ID NO: 734471 - RNA, 17 nt, Artificial Sequence
  Synthetic
acugagaaaaaucucca

SEQ ID NO: 734472 - RNA, 17 nt, Artificial Sequence
  Synthetic
uacagaucuaaucucca

SEQ ID NO: 734473 - RNA, 17 nt, Artificial Sequence
  Synthetic
agcugaaaacaucucca

SEQ ID NO: 734474 - RNA, 17 nt, Artificial Sequence
  Synthetic
agagacuggcaucucca

SEQ ID NO: 734475 - RNA, 17 nt, Artificial Sequence
  Synthetic
augaauucucaucucca

SEQ ID NO: 734476 - RNA, 17 nt, Artificial Sequence
  Synthetic
uaaaauggcuaucucca

SEQ ID NO: 734477 - RNA, 17 nt, Artificial Sequence
  Synthetic
aauuggcuguaucucca

SEQ ID NO: 734478 - RNA, 17 nt, Artificial Sequence
  Synthetic
ucauguggaccucucca

SEQ ID NO: 734479 - RNA, 17 nt, Artificial Sequence
  Synthetic
uugugaccagcucucca

SEQ ID NO: 734480 - RNA, 17 nt, Artificial Sequence
  Synthetic
augacauaaucucucca

SEQ ID NO: 734481 - RNA, 17 nt, Artificial Sequence
  Synthetic
uacauguggagucucca

SEQ ID NO: 734482 - RNA, 17 nt, Artificial Sequence
  Synthetic
uguauacugagucucca

SEQ ID NO: 734483 - RNA, 17 nt, Artificial Sequence
  Synthetic
uggggaaaaugucucca

SEQ ID NO: 734484 - RNA, 17 nt, Artificial Sequence
  Synthetic
cagcagaaaugucucca

SEQ ID NO: 734485 - RNA, 17 nt, Artificial Sequence
  Synthetic
aucuggaaaugucucca

SEQ ID NO: 734486 - RNA, 17 nt, Artificial Sequence
  Synthetic
uggggaagaugucucca

SEQ ID NO: 734487 - RNA, 17 nt, Artificial Sequence
  Synthetic
ucuucccaaauucucca

SEQ ID NO: 734488 - RNA, 17 nt, Artificial Sequence
  Synthetic
uuuuugauacuucucca

SEQ ID NO: 734489 - RNA, 17 nt, Artificial Sequence
  Synthetic
uauuuccuccuucucca

SEQ ID NO: 734490 - RNA, 17 nt, Artificial Sequence
  Synthetic
aaaugucuccuucucca

SEQ ID NO: 734491 - RNA, 17 nt, Artificial Sequence
  Synthetic
aagggcagaguucucca

SEQ ID NO: 734492 - RNA, 17 nt, Artificial Sequence
  Synthetic
uuauuugaauuucucca

SEQ ID NO: 734493 - RNA, 17 nt, Artificial Sequence
  Synthetic
ucucagugauuucucca

SEQ ID NO: 734494 - RNA, 17 nt, Artificial Sequence
  Synthetic
uugagacuauuucucca

SEQ ID NO: 734495 - RNA, 17 nt, Artificial Sequence
  Synthetic
uucccagacuuucucca

SEQ ID NO: 734496 - RNA, 17 nt, Artificial Sequence
  Synthetic
uaaaccaccuuucucca

SEQ ID NO: 734497 - RNA, 17 nt, Artificial Sequence
  Synthetic
cagccaaauuuucucca

SEQ ID NO: 734498 - RNA, 17 nt, Artificial Sequence
  Synthetic
augcacccuuuucucca

SEQ ID NO: 734499 - RNA, 17 nt, Artificial Sequence
  Synthetic
uugaauguuuuucucca

SEQ ID NO: 734500 - RNA, 17 nt, Artificial Sequence
  Synthetic
aaaacuuaaaaagucca

SEQ ID NO: 734501 - RNA, 17 nt, Artificial Sequence
  Synthetic
auugccaaagaagucca

SEQ ID NO: 734502 - RNA, 17 nt, Artificial Sequence
  Synthetic
uuuuuaggaacagucca

SEQ ID NO: 734503 - RNA, 17 nt, Artificial Sequence
  Synthetic
agcacuuugggagucca

SEQ ID NO: 734504 - RNA, 17 nt, Artificial Sequence
  Synthetic
aggacuuugggagucca

SEQ ID NO: 734505 - RNA, 17 nt, Artificial Sequence
  Synthetic
agcccaggaugagucca

SEQ ID NO: 734506 - RNA, 17 nt, Artificial Sequence
  Synthetic
uuuaugaacauagucca

SEQ ID NO: 734507 - RNA, 17 nt, Artificial Sequence
  Synthetic
aguguucucauagucca

SEQ ID NO: 734508 - RNA, 17 nt, Artificial Sequence
  Synthetic
cuauucaggcuagucca

SEQ ID NO: 734509 - RNA, 17 nt, Artificial Sequence
  Synthetic
uaacauuuuuuagucca

SEQ ID NO: 734510 - RNA, 17 nt, Artificial Sequence
  Synthetic
cgaacucuugacgucca

SEQ ID NO: 734511 - RNA, 17 nt, Artificial Sequence
  Synthetic
ucacugaagcaggucca

SEQ ID NO: 734512 - RNA, 17 nt, Artificial Sequence
  Synthetic
acaaggcagcaggucca

SEQ ID NO: 734513 - RNA, 17 nt, Artificial Sequence
  Synthetic
acuaaauugcaggucca

SEQ ID NO: 734514 - RNA, 17 nt, Artificial Sequence
  Synthetic
uccuccaacccggucca

SEQ ID NO: 734515 - RNA, 17 nt, Artificial Sequence
  Synthetic
aaauguucaggggucca

SEQ ID NO: 734516 - RNA, 17 nt, Artificial Sequence
  Synthetic
cagcaaacuauggucca

SEQ ID NO: 734517 - RNA, 17 nt, Artificial Sequence
  Synthetic
cuggugcugcuggucca

SEQ ID NO: 734518 - RNA, 17 nt, Artificial Sequence
  Synthetic
ccuucuuuuguggucca

SEQ ID NO: 734519 - RNA, 17 nt, Artificial Sequence
  Synthetic
agaauauaauuggucca

SEQ ID NO: 734520 - RNA, 17 nt, Artificial Sequence
  Synthetic
aaauauguauuggucca

SEQ ID NO: 734521 - RNA, 17 nt, Artificial Sequence
  Synthetic
aauauuguauuggucca

SEQ ID NO: 734522 - RNA, 17 nt, Artificial Sequence
  Synthetic
uaucauuagaaugucca

SEQ ID NO: 734523 - RNA, 17 nt, Artificial Sequence
  Synthetic
aaucugccagaugucca

SEQ ID NO: 734524 - RNA, 17 nt, Artificial Sequence
  Synthetic
aucauucuagaugucca

SEQ ID NO: 734525 - RNA, 17 nt, Artificial Sequence
  Synthetic
aacaagauauaugucca

SEQ ID NO: 734526 - RNA, 17 nt, Artificial Sequence
  Synthetic
ugccucggagcugucca

SEQ ID NO: 734527 - RNA, 17 nt, Artificial Sequence
  Synthetic
ucccuucugucugucca

SEQ ID NO: 734528 - RNA, 17 nt, Artificial Sequence
  Synthetic
ucccgucccugugucca

SEQ ID NO: 734529 - RNA, 17 nt, Artificial Sequence
  Synthetic
ccacugagcugugucca

SEQ ID NO: 734530 - RNA, 17 nt, Artificial Sequence
  Synthetic
uaugacuauugugucca

SEQ ID NO: 734531 - RNA, 17 nt, Artificial Sequence
  Synthetic
aguggguggauugucca

SEQ ID NO: 734532 - RNA, 17 nt, Artificial Sequence
  Synthetic
ucaaaaacauuugucca

SEQ ID NO: 734533 - RNA, 17 nt, Artificial Sequence
  Synthetic
aaugacuccuuugucca

SEQ ID NO: 734534 - RNA, 17 nt, Artificial Sequence
  Synthetic
aacugauauaaauucca

SEQ ID NO: 734535 - RNA, 17 nt, Artificial Sequence
  Synthetic
uguucacaagaauucca

SEQ ID NO: 734536 - RNA, 17 nt, Artificial Sequence
  Synthetic
ugaaguaacuaauucca

SEQ ID NO: 734537 - RNA, 17 nt, Artificial Sequence
  Synthetic
aaaauucauuaauucca

SEQ ID NO: 734538 - RNA, 17 nt, Artificial Sequence
  Synthetic
cacauuucuuaauucca

SEQ ID NO: 734539 - RNA, 17 nt, Artificial Sequence
  Synthetic
uacaugaaggcauucca

SEQ ID NO: 734540 - RNA, 17 nt, Artificial Sequence
  Synthetic
aauagccauucauucca

SEQ ID NO: 734541 - RNA, 17 nt, Artificial Sequence
  Synthetic
acucugauaagauucca

SEQ ID NO: 734542 - RNA, 17 nt, Artificial Sequence
  Synthetic
uuccauuguggauucca

SEQ ID NO: 734543 - RNA, 17 nt, Artificial Sequence
  Synthetic
augguauuuggauucca

SEQ ID NO: 734544 - RNA, 17 nt, Artificial Sequence
  Synthetic
aauuucaaaugauucca

SEQ ID NO: 734545 - RNA, 17 nt, Artificial Sequence
  Synthetic
uaccacagaugauucca

SEQ ID NO: 734546 - RNA, 17 nt, Artificial Sequence
  Synthetic
acugaauuaugauucca

SEQ ID NO: 734547 - RNA, 17 nt, Artificial Sequence
  Synthetic
cagguuuggugauucca

SEQ ID NO: 734548 - RNA, 17 nt, Artificial Sequence
  Synthetic
ucuugaauuugauucca

SEQ ID NO: 734549 - RNA, 17 nt, Artificial Sequence
  Synthetic
aaacacacaauauucca

SEQ ID NO: 734550 - RNA, 17 nt, Artificial Sequence
  Synthetic
agcaauuugauauucca

SEQ ID NO: 734551 - RNA, 17 nt, Artificial Sequence
  Synthetic
aguuuuccuauauucca

SEQ ID NO: 734552 - RNA, 17 nt, Artificial Sequence
  Synthetic
aagauucaauuauucca

SEQ ID NO: 734553 - RNA, 17 nt, Artificial Sequence
  Synthetic
uauauagguuuauucca

SEQ ID NO: 734554 - RNA, 17 nt, Artificial Sequence
  Synthetic
uuggcugcaaacuucca

SEQ ID NO: 734555 - RNA, 17 nt, Artificial Sequence
  Synthetic
caaaugugaaacuucca

SEQ ID NO: 734556 - RNA, 17 nt, Artificial Sequence
  Synthetic
auuauuuacaacuucca

SEQ ID NO: 734557 - RNA, 17 nt, Artificial Sequence
  Synthetic
aaauucaauaacuucca

SEQ ID NO: 734558 - RNA, 17 nt, Artificial Sequence
  Synthetic
uguguuaggcacuucca

SEQ ID NO: 734559 - RNA, 17 nt, Artificial Sequence
  Synthetic
acuugucugcacuucca

SEQ ID NO: 734560 - RNA, 17 nt, Artificial Sequence
  Synthetic
auuuuggcauacuucca

SEQ ID NO: 734561 - RNA, 17 nt, Artificial Sequence
  Synthetic
uuaaauguauacuucca

SEQ ID NO: 734562 - RNA, 17 nt, Artificial Sequence
  Synthetic
ucuuuuuccaccuucca

SEQ ID NO: 734563 - RNA, 17 nt, Artificial Sequence
  Synthetic
ucucacugcaccuucca

SEQ ID NO: 734564 - RNA, 17 nt, Artificial Sequence
  Synthetic
cucucccuggccuucca

SEQ ID NO: 734565 - RNA, 17 nt, Artificial Sequence
  Synthetic
acaaauguugccuucca

SEQ ID NO: 734566 - RNA, 17 nt, Artificial Sequence
  Synthetic
ucaguuaaaagcuucca

SEQ ID NO: 734567 - RNA, 17 nt, Artificial Sequence
  Synthetic
uaucauagcagcuucca

SEQ ID NO: 734568 - RNA, 17 nt, Artificial Sequence
  Synthetic
cuguagcagagcuucca

SEQ ID NO: 734569 - RNA, 17 nt, Artificial Sequence
  Synthetic
acuauguguagcuucca

SEQ ID NO: 734570 - RNA, 17 nt, Artificial Sequence
  Synthetic
auuugggaaugcuucca

SEQ ID NO: 734571 - RNA, 17 nt, Artificial Sequence
  Synthetic
ucacaacauaucuucca

SEQ ID NO: 734572 - RNA, 17 nt, Artificial Sequence
  Synthetic
uggaacuuucucuucca

SEQ ID NO: 734573 - RNA, 17 nt, Artificial Sequence
  Synthetic
ucccaucaauucuucca

SEQ ID NO: 734574 - RNA, 17 nt, Artificial Sequence
  Synthetic
ucuugucacuucuucca

SEQ ID NO: 734575 - RNA, 17 nt, Artificial Sequence
  Synthetic
ucuuauuuguucuucca

SEQ ID NO: 734576 - RNA, 17 nt, Artificial Sequence
  Synthetic
uaagguuaaaaguucca

SEQ ID NO: 734577 - RNA, 17 nt, Artificial Sequence
  Synthetic
auuuuuuuaaaguucca

SEQ ID NO: 734578 - RNA, 17 nt, Artificial Sequence
  Synthetic
aacacucagaaguucca

SEQ ID NO: 734579 - RNA, 17 nt, Artificial Sequence
  Synthetic
ccagggcaacaguucca

SEQ ID NO: 734580 - RNA, 17 nt, Artificial Sequence
  Synthetic
uaacucauucaguucca

SEQ ID NO: 734581 - RNA, 17 nt, Artificial Sequence
  Synthetic
ugcauuuuucaguucca

SEQ ID NO: 734582 - RNA, 17 nt, Artificial Sequence
  Synthetic
uagguguacacguucca

SEQ ID NO: 734583 - RNA, 17 nt, Artificial Sequence
  Synthetic
aggucagacagguucca

SEQ ID NO: 734584 - RNA, 17 nt, Artificial Sequence
  Synthetic
cagaugaagagguucca

SEQ ID NO: 734585 - RNA, 17 nt, Artificial Sequence
  Synthetic
aguuagaagugguucca

SEQ ID NO: 734586 - RNA, 17 nt, Artificial Sequence
  Synthetic
acuaaaaacauguucca

SEQ ID NO: 734587 - RNA, 17 nt, Artificial Sequence
  Synthetic
ugaguggcacuguucca

SEQ ID NO: 734588 - RNA, 17 nt, Artificial Sequence
  Synthetic
aauuaugugguguucca

SEQ ID NO: 734589 - RNA, 17 nt, Artificial Sequence
  Synthetic
cagaauuauguguucca

SEQ ID NO: 734590 - RNA, 17 nt, Artificial Sequence
  Synthetic
aaaauaucguuguucca

SEQ ID NO: 734591 - RNA, 17 nt, Artificial Sequence
  Synthetic
ccaaacucaaauuucca

SEQ ID NO: 734592 - RNA, 17 nt, Artificial Sequence
  Synthetic
aucagagucaauuucca

SEQ ID NO: 734593 - RNA, 17 nt, Artificial Sequence
  Synthetic
aaaguguugaauuucca

SEQ ID NO: 734594 - RNA, 17 nt, Artificial Sequence
  Synthetic
uugaucaguaauuucca

SEQ ID NO: 734595 - RNA, 17 nt, Artificial Sequence
  Synthetic
auguuaucacauuucca

SEQ ID NO: 734596 - RNA, 17 nt, Artificial Sequence
  Synthetic
uagcaguuacauuucca

SEQ ID NO: 734597 - RNA, 17 nt, Artificial Sequence
  Synthetic
uuaauuaaugauuucca

SEQ ID NO: 734598 - RNA, 17 nt, Artificial Sequence
  Synthetic
acuucuuaauauuucca

SEQ ID NO: 734599 - RNA, 17 nt, Artificial Sequence
  Synthetic
aucuuagucuauuucca

SEQ ID NO: 734600 - RNA, 17 nt, Artificial Sequence
  Synthetic
caugaccauuauuucca

SEQ ID NO: 734601 - RNA, 17 nt, Artificial Sequence
  Synthetic
aacaugguuuauuucca

SEQ ID NO: 734602 - RNA, 17 nt, Artificial Sequence
  Synthetic
acaagguuuacuuucca

SEQ ID NO: 734603 - RNA, 17 nt, Artificial Sequence
  Synthetic
uaaacuccaccuuucca

SEQ ID NO: 734604 - RNA, 17 nt, Artificial Sequence
  Synthetic
cuucaguccccuuucca

SEQ ID NO: 734605 - RNA, 17 nt, Artificial Sequence
  Synthetic
ccucugcuuccuuucca

SEQ ID NO: 734606 - RNA, 17 nt, Artificial Sequence
  Synthetic
auuccuuuggcuuucca

SEQ ID NO: 734607 - RNA, 17 nt, Artificial Sequence
  Synthetic
cuauguuuaucuuucca

SEQ ID NO: 734608 - RNA, 17 nt, Artificial Sequence
  Synthetic
ugaaugggcucuuucca

SEQ ID NO: 734609 - RNA, 17 nt, Artificial Sequence
  Synthetic
uuguaacauaguuucca

SEQ ID NO: 734610 - RNA, 17 nt, Artificial Sequence
  Synthetic
aguguuuguaguuucca

SEQ ID NO: 734611 - RNA, 17 nt, Artificial Sequence
  Synthetic
auauaggcagguuucca

SEQ ID NO: 734612 - RNA, 17 nt, Artificial Sequence
  Synthetic
uacacaaaugguuucca

SEQ ID NO: 734613 - RNA, 17 nt, Artificial Sequence
  Synthetic
ccuaucagugguuucca

SEQ ID NO: 734614 - RNA, 17 nt, Artificial Sequence
  Synthetic
uagaauggugguuucca

SEQ ID NO: 734615 - RNA, 17 nt, Artificial Sequence
  Synthetic
cuuuauugugguuucca

SEQ ID NO: 734616 - RNA, 17 nt, Artificial Sequence
  Synthetic
aucuucagauguuucca

SEQ ID NO: 734617 - RNA, 17 nt, Artificial Sequence
  Synthetic
aguguuagcuguuucca

SEQ ID NO: 734618 - RNA, 17 nt, Artificial Sequence
  Synthetic
uaaaguuaguguuucca

SEQ ID NO: 734619 - RNA, 17 nt, Artificial Sequence
  Synthetic
auucaugaaauuuucca

SEQ ID NO: 734620 - RNA, 17 nt, Artificial Sequence
  Synthetic
caaaaaagaauuuucca

SEQ ID NO: 734621 - RNA, 17 nt, Artificial Sequence
  Synthetic
acccaucucauuuucca

SEQ ID NO: 734622 - RNA, 17 nt, Artificial Sequence
  Synthetic
uccuggaggauuuucca

SEQ ID NO: 734623 - RNA, 17 nt, Artificial Sequence
  Synthetic
cuuucugcuauuuucca

SEQ ID NO: 734624 - RNA, 17 nt, Artificial Sequence
  Synthetic
agcaauugacuuuucca

SEQ ID NO: 734625 - RNA, 17 nt, Artificial Sequence
  Synthetic
ucuuaaaaccuuuucca

SEQ ID NO: 734626 - RNA, 17 nt, Artificial Sequence
  Synthetic
uucucuagucuuuucca

SEQ ID NO: 734627 - RNA, 17 nt, Artificial Sequence
  Synthetic
uugaaucuucuuuucca

SEQ ID NO: 734628 - RNA, 17 nt, Artificial Sequence
  Synthetic
ugacuccccuuuuucca

SEQ ID NO: 734629 - RNA, 17 nt, Artificial Sequence
  Synthetic
ucaaagaauuuuuucca

SEQ ID NO: 734630 - RNA, 17 nt, Artificial Sequence
  Synthetic
ucccugucuuuuuucca

SEQ ID NO: 734631 - RNA, 17 nt, Artificial Sequence
  Synthetic
uuuuuuuuuuuuuucca

SEQ ID NO: 734632 - RNA, 17 nt, Artificial Sequence
  Synthetic
aggauaaaaaaaaagca

SEQ ID NO: 734633 - RNA, 17 nt, Artificial Sequence
  Synthetic
ugacugauaaaaaagca

SEQ ID NO: 734634 - RNA, 17 nt, Artificial Sequence
  Synthetic
augggugauaaaaagca

SEQ ID NO: 734635 - RNA, 17 nt, Artificial Sequence
  Synthetic
aaguaucuacaaaagca

SEQ ID NO: 734636 - RNA, 17 nt, Artificial Sequence
  Synthetic
uuugugaaccaaaagca

SEQ ID NO: 734637 - RNA, 17 nt, Artificial Sequence
  Synthetic
cuaaaacaccaaaagca

SEQ ID NO: 734638 - RNA, 17 nt, Artificial Sequence
  Synthetic
auaaauagccaaaagca

SEQ ID NO: 734639 - RNA, 17 nt, Artificial Sequence
  Synthetic
aacagcaugcaaaagca

SEQ ID NO: 734640 - RNA, 17 nt, Artificial Sequence
  Synthetic
ucauccaaggaaaagca

SEQ ID NO: 734641 - RNA, 17 nt, Artificial Sequence
  Synthetic
uauuauaaugaaaagca

SEQ ID NO: 734642 - RNA, 17 nt, Artificial Sequence
  Synthetic
uuuggcuaugaaaagca

SEQ ID NO: 734643 - RNA, 17 nt, Artificial Sequence
  Synthetic
aagucuauugaaaagca

SEQ ID NO: 734644 - RNA, 17 nt, Artificial Sequence
  Synthetic
cuguguuuugaaaagca

SEQ ID NO: 734645 - RNA, 17 nt, Artificial Sequence
  Synthetic
auaaauauguaaaagca

SEQ ID NO: 734646 - RNA, 17 nt, Artificial Sequence
  Synthetic
aucaaugccacaaagca

SEQ ID NO: 734647 - RNA, 17 nt, Artificial Sequence
  Synthetic
cuuuaagagacaaagca

SEQ ID NO: 734648 - RNA, 17 nt, Artificial Sequence
  Synthetic
ccgcaccugacaaagca

SEQ ID NO: 734649 - RNA, 17 nt, Artificial Sequence
  Synthetic
aaagcuucuacaaagca

SEQ ID NO: 734650 - RNA, 17 nt, Artificial Sequence
  Synthetic
auauuagauccaaagca

SEQ ID NO: 734651 - RNA, 17 nt, Artificial Sequence
  Synthetic
agaucauaagcaaagca

SEQ ID NO: 734652 - RNA, 17 nt, Artificial Sequence
  Synthetic
ugggauuaggcaaagca

SEQ ID NO: 734653 - RNA, 17 nt, Artificial Sequence
  Synthetic
ugaagcucuucaaagca

SEQ ID NO: 734654 - RNA, 17 nt, Artificial Sequence
  Synthetic
agcaagcgaagaaagca

SEQ ID NO: 734655 - RNA, 17 nt, Artificial Sequence
  Synthetic
uacaacugaagaaagca

SEQ ID NO: 734656 - RNA, 17 nt, Artificial Sequence
  Synthetic
cucugaaucagaaagca

SEQ ID NO: 734657 - RNA, 17 nt, Artificial Sequence
  Synthetic
uggugccugagaaagca

SEQ ID NO: 734658 - RNA, 17 nt, Artificial Sequence
  Synthetic
aauaaaugaggaaagca

SEQ ID NO: 734659 - RNA, 17 nt, Artificial Sequence
  Synthetic
aaccuauguggaaagca

SEQ ID NO: 734660 - RNA, 17 nt, Artificial Sequence
  Synthetic
aaugaagaaugaaagca

SEQ ID NO: 734661 - RNA, 17 nt, Artificial Sequence
  Synthetic
ugcgagugcugaaagca

SEQ ID NO: 734662 - RNA, 17 nt, Artificial Sequence
  Synthetic
cuuugccuuugaaagca

SEQ ID NO: 734663 - RNA, 17 nt, Artificial Sequence
  Synthetic
augauucaaauaaagca

SEQ ID NO: 734664 - RNA, 17 nt, Artificial Sequence
  Synthetic
auauuuguuauaaagca

SEQ ID NO: 734665 - RNA, 17 nt, Artificial Sequence
  Synthetic
aggauccuacuaaagca

SEQ ID NO: 734666 - RNA, 17 nt, Artificial Sequence
  Synthetic
acaagguagcuaaagca

SEQ ID NO: 734667 - RNA, 17 nt, Artificial Sequence
  Synthetic
aaggggcagguaaagca

SEQ ID NO: 734668 - RNA, 17 nt, Artificial Sequence
  Synthetic
uaaguacaauuaaagca

SEQ ID NO: 734669 - RNA, 17 nt, Artificial Sequence
  Synthetic
auugaagcauuaaagca

SEQ ID NO: 734670 - RNA, 17 nt, Artificial Sequence
  Synthetic
ugcaguguguuaaagca

SEQ ID NO: 734671 - RNA, 17 nt, Artificial Sequence
  Synthetic
cugaaagguuuaaagca

SEQ ID NO: 734672 - RNA, 17 nt, Artificial Sequence
  Synthetic
aauuaauuuuuaaagca

SEQ ID NO: 734673 - RNA, 17 nt, Artificial Sequence
  Synthetic
aaguuuuuuaacaagca

SEQ ID NO: 734674 - RNA, 17 nt, Artificial Sequence
  Synthetic
aaaagaaugcacaagca

SEQ ID NO: 734675 - RNA, 17 nt, Artificial Sequence
  Synthetic
agcaucaaagacaagca

SEQ ID NO: 734676 - RNA, 17 nt, Artificial Sequence
  Synthetic
aaaaaaaaugacaagca

SEQ ID NO: 734677 - RNA, 17 nt, Artificial Sequence
  Synthetic
ucaguuaagaccaagca

SEQ ID NO: 734678 - RNA, 17 nt, Artificial Sequence
  Synthetic
cccaccaggcccaagca

SEQ ID NO: 734679 - RNA, 17 nt, Artificial Sequence
  Synthetic
cccuugccaggcaagca

SEQ ID NO: 734680 - RNA, 17 nt, Artificial Sequence
  Synthetic
uaaaguuuagucaagca

SEQ ID NO: 734681 - RNA, 17 nt, Artificial Sequence
  Synthetic
uaaaauugcuucaagca

SEQ ID NO: 734682 - RNA, 17 nt, Artificial Sequence
  Synthetic
uaaagauguuucaagca

SEQ ID NO: 734683 - RNA, 17 nt, Artificial Sequence
  Synthetic
cauuauauuuucaagca

SEQ ID NO: 734684 - RNA, 17 nt, Artificial Sequence
  Synthetic
ucuaagcaaaagaagca

SEQ ID NO: 734685 - RNA, 17 nt, Artificial Sequence
  Synthetic
uacugugugaagaagca

SEQ ID NO: 734686 - RNA, 17 nt, Artificial Sequence
  Synthetic
uaacuuauuaagaagca

SEQ ID NO: 734687 - RNA, 17 nt, Artificial Sequence
  Synthetic
uuaaauuuuaagaagca

SEQ ID NO: 734688 - RNA, 17 nt, Artificial Sequence
  Synthetic
cagagggcgcagaagca

SEQ ID NO: 734689 - RNA, 17 nt, Artificial Sequence
  Synthetic
acauauggucagaagca

SEQ ID NO: 734690 - RNA, 17 nt, Artificial Sequence
  Synthetic
aguaaaucagagaagca

SEQ ID NO: 734691 - RNA, 17 nt, Artificial Sequence
  Synthetic
cuggccuucuagaagca

SEQ ID NO: 734692 - RNA, 17 nt, Artificial Sequence
  Synthetic
aaugggagacggaagca

SEQ ID NO: 734693 - RNA, 17 nt, Artificial Sequence
  Synthetic
uguccuuugcggaagca

SEQ ID NO: 734694 - RNA, 17 nt, Artificial Sequence
  Synthetic
agagagggagggaagca

SEQ ID NO: 734695 - RNA, 17 nt, Artificial Sequence
  Synthetic
aaggaaaaauggaagca

SEQ ID NO: 734696 - RNA, 17 nt, Artificial Sequence
  Synthetic
caggcuuaauggaagca

SEQ ID NO: 734697 - RNA, 17 nt, Artificial Sequence
  Synthetic
uauuuacuauggaagca

SEQ ID NO: 734698 - RNA, 17 nt, Artificial Sequence
  Synthetic
aggaaaaaaaugaagca

SEQ ID NO: 734699 - RNA, 17 nt, Artificial Sequence
  Synthetic
acaaggaaaaugaagca

SEQ ID NO: 734700 - RNA, 17 nt, Artificial Sequence
  Synthetic
uauaaaauaaugaagca

SEQ ID NO: 734701 - RNA, 17 nt, Artificial Sequence
  Synthetic
acagccaccaugaagca

SEQ ID NO: 734702 - RNA, 17 nt, Artificial Sequence
  Synthetic
uauuaccguaugaagca

SEQ ID NO: 734703 - RNA, 17 nt, Artificial Sequence
  Synthetic
cuaauugcacugaagca

SEQ ID NO: 734704 - RNA, 17 nt, Artificial Sequence
  Synthetic
caguggacagugaagca

SEQ ID NO: 734705 - RNA, 17 nt, Artificial Sequence
  Synthetic
cuucuaaaauugaagca

SEQ ID NO: 734706 - RNA, 17 nt, Artificial Sequence
  Synthetic
cacgcugaauugaagca

SEQ ID NO: 734707 - RNA, 17 nt, Artificial Sequence
  Synthetic
uaaauggaaaauaagca

SEQ ID NO: 734708 - RNA, 17 nt, Artificial Sequence
  Synthetic
uacacuuaaaauaagca

SEQ ID NO: 734709 - RNA, 17 nt, Artificial Sequence
  Synthetic
cacccagauaauaagca

SEQ ID NO: 734710 - RNA, 17 nt, Artificial Sequence
  Synthetic
cuuccuuuccauaagca

SEQ ID NO: 734711 - RNA, 17 nt, Artificial Sequence
  Synthetic
cccccagugcauaagca

SEQ ID NO: 734712 - RNA, 17 nt, Artificial Sequence
  Synthetic
aaaucacaagauaagca

SEQ ID NO: 734713 - RNA, 17 nt, Artificial Sequence
  Synthetic
cauauuacagauaagca

SEQ ID NO: 734714 - RNA, 17 nt, Artificial Sequence
  Synthetic
ugaaaacuagauaagca

SEQ ID NO: 734715 - RNA, 17 nt, Artificial Sequence
  Synthetic
uucucaccugauaagca

SEQ ID NO: 734716 - RNA, 17 nt, Artificial Sequence
  Synthetic
uccucuuuauauaagca

SEQ ID NO: 734717 - RNA, 17 nt, Artificial Sequence
  Synthetic
augagagauuauaagca

SEQ ID NO: 734718 - RNA, 17 nt, Artificial Sequence
  Synthetic
cagagaacaacuaagca

SEQ ID NO: 734719 - RNA, 17 nt, Artificial Sequence
  Synthetic
acagugucuccuaagca

SEQ ID NO: 734720 - RNA, 17 nt, Artificial Sequence
  Synthetic
uagccuaguucuaagca

SEQ ID NO: 734721 - RNA, 17 nt, Artificial Sequence
  Synthetic
uaugcccucaguaagca

SEQ ID NO: 734722 - RNA, 17 nt, Artificial Sequence
  Synthetic
uguaauuuuaguaagca

SEQ ID NO: 734723 - RNA, 17 nt, Artificial Sequence
  Synthetic
aauaacucacguaagca

SEQ ID NO: 734724 - RNA, 17 nt, Artificial Sequence
  Synthetic
aguguugcauguaagca

SEQ ID NO: 734725 - RNA, 17 nt, Artificial Sequence
  Synthetic
uauccaugacuuaagca

SEQ ID NO: 734726 - RNA, 17 nt, Artificial Sequence
  Synthetic
caguaaccaaaacagca

SEQ ID NO: 734727 - RNA, 17 nt, Artificial Sequence
  Synthetic
cgguaaccaaaacagca

SEQ ID NO: 734728 - RNA, 17 nt, Artificial Sequence
  Synthetic
cuguaaccaaaacagca

SEQ ID NO: 734729 - RNA, 17 nt, Artificial Sequence
  Synthetic
uaauaaucaaaacagca

SEQ ID NO: 734730 - RNA, 17 nt, Artificial Sequence
  Synthetic
cacaugggaaaacagca

SEQ ID NO: 734731 - RNA, 17 nt, Artificial Sequence
  Synthetic
cuggcauccaaacagca

SEQ ID NO: 734732 - RNA, 17 nt, Artificial Sequence
  Synthetic
cuaucacgacaacagca

SEQ ID NO: 734733 - RNA, 17 nt, Artificial Sequence
  Synthetic
cuaucacgagaacagca

SEQ ID NO: 734734 - RNA, 17 nt, Artificial Sequence
  Synthetic
cuaucaggagaacagca

SEQ ID NO: 734735 - RNA, 17 nt, Artificial Sequence
  Synthetic
cuaucaugagaacagca

SEQ ID NO: 734736 - RNA, 17 nt, Artificial Sequence
  Synthetic
uggcagguagaacagca

SEQ ID NO: 734737 - RNA, 17 nt, Artificial Sequence
  Synthetic
aaaagacaugaacagca

SEQ ID NO: 734738 - RNA, 17 nt, Artificial Sequence
  Synthetic
aaaaaaaaaacacagca

SEQ ID NO: 734739 - RNA, 17 nt, Artificial Sequence
  Synthetic
uuuuccaguacacagca

SEQ ID NO: 734740 - RNA, 17 nt, Artificial Sequence
  Synthetic
cuggggugaccacagca

SEQ ID NO: 734741 - RNA, 17 nt, Artificial Sequence
  Synthetic
acuaagugggcacagca

SEQ ID NO: 734742 - RNA, 17 nt, Artificial Sequence
  Synthetic
ucacacuuugcacagca

SEQ ID NO: 734743 - RNA, 17 nt, Artificial Sequence
  Synthetic
ucugagagaucacagca

SEQ ID NO: 734744 - RNA, 17 nt, Artificial Sequence
  Synthetic
ccaccaaauagacagca

SEQ ID NO: 734745 - RNA, 17 nt, Artificial Sequence
  Synthetic
cucacucagggacagca

SEQ ID NO: 734746 - RNA, 17 nt, Artificial Sequence
  Synthetic
agaucuaauguacagca

SEQ ID NO: 734747 - RNA, 17 nt, Artificial Sequence
  Synthetic
uuccugucauuacagca

SEQ ID NO: 734748 - RNA, 17 nt, Artificial Sequence
  Synthetic
auuaaaauauuacagca

SEQ ID NO: 734749 - RNA, 17 nt, Artificial Sequence
  Synthetic
cacaucucuuuacagca

SEQ ID NO: 734750 - RNA, 17 nt, Artificial Sequence
  Synthetic
aagugugagaaccagca

SEQ ID NO: 734751 - RNA, 17 nt, Artificial Sequence
  Synthetic
uaaaugucagaccagca

SEQ ID NO: 734752 - RNA, 17 nt, Artificial Sequence
  Synthetic
uauuugugggaccagca

SEQ ID NO: 734753 - RNA, 17 nt, Artificial Sequence
  Synthetic
agccaccucacccagca

SEQ ID NO: 734754 - RNA, 17 nt, Artificial Sequence
  Synthetic
uaaagaagggcccagca

SEQ ID NO: 734755 - RNA, 17 nt, Artificial Sequence
  Synthetic
cagacauaaucccagca

SEQ ID NO: 734756 - RNA, 17 nt, Artificial Sequence
  Synthetic
uaucuucaaagccagca

SEQ ID NO: 734757 - RNA, 17 nt, Artificial Sequence
  Synthetic
aaaaaaacaggccagca

SEQ ID NO: 734758 - RNA, 17 nt, Artificial Sequence
  Synthetic
acugacugaggccagca

SEQ ID NO: 734759 - RNA, 17 nt, Artificial Sequence
  Synthetic
gagaaugagugccagca

SEQ ID NO: 734760 - RNA, 17 nt, Artificial Sequence
  Synthetic
caccaucaucuccagca

SEQ ID NO: 734761 - RNA, 17 nt, Artificial Sequence
  Synthetic
acaacuccucuccagca

SEQ ID NO: 734762 - RNA, 17 nt, Artificial Sequence
  Synthetic
cccuacaauguccagca

SEQ ID NO: 734763 - RNA, 17 nt, Artificial Sequence
  Synthetic
ucauaagaacagcagca

SEQ ID NO: 734764 - RNA, 17 nt, Artificial Sequence
  Synthetic
cacaguucccagcagca

SEQ ID NO: 734765 - RNA, 17 nt, Artificial Sequence
  Synthetic
uugguaaagcagcagca

SEQ ID NO: 734766 - RNA, 17 nt, Artificial Sequence
  Synthetic
aacaaacaggagcagca

SEQ ID NO: 734767 - RNA, 17 nt, Artificial Sequence
  Synthetic
uugcugccugagcagca

SEQ ID NO: 734768 - RNA, 17 nt, Artificial Sequence
  Synthetic
agugaggaguagcagca

SEQ ID NO: 734769 - RNA, 17 nt, Artificial Sequence
  Synthetic
cuccagcuugggcagca

SEQ ID NO: 734770 - RNA, 17 nt, Artificial Sequence
  Synthetic
ucauccuuugggcagca

SEQ ID NO: 734771 - RNA, 17 nt, Artificial Sequence
  Synthetic
cauucuacauggcagca

SEQ ID NO: 734772 - RNA, 17 nt, Artificial Sequence
  Synthetic
cauuggaacuggcagca

SEQ ID NO: 734773 - RNA, 17 nt, Artificial Sequence
  Synthetic
uucugcugugugcagca

SEQ ID NO: 734774 - RNA, 17 nt, Artificial Sequence
  Synthetic
uguccugaguugcagca

SEQ ID NO: 734775 - RNA, 17 nt, Artificial Sequence
  Synthetic
agaaaguaaaaucagca

SEQ ID NO: 734776 - RNA, 17 nt, Artificial Sequence
  Synthetic
aaccucacuaaucagca

SEQ ID NO: 734777 - RNA, 17 nt, Artificial Sequence
  Synthetic
agggaauaugaucagca

SEQ ID NO: 734778 - RNA, 17 nt, Artificial Sequence
  Synthetic
caaaaguaugaucagca

SEQ ID NO: 734779 - RNA, 17 nt, Artificial Sequence
  Synthetic
uccucugauuaucagca

SEQ ID NO: 734780 - RNA, 17 nt, Artificial Sequence
  Synthetic
aaccugcuuuaucagca

SEQ ID NO: 734781 - RNA, 17 nt, Artificial Sequence
  Synthetic
ucaguuguaucucagca

SEQ ID NO: 734782 - RNA, 17 nt, Artificial Sequence
  Synthetic
cuggaaggcucucagca

SEQ ID NO: 734783 - RNA, 17 nt, Artificial Sequence
  Synthetic
ucagcugugucucagca

SEQ ID NO: 734784 - RNA, 17 nt, Artificial Sequence
  Synthetic
agagguuacagucagca

SEQ ID NO: 734785 - RNA, 17 nt, Artificial Sequence
  Synthetic
uagaacauaugucagca

SEQ ID NO: 734786 - RNA, 17 nt, Artificial Sequence
  Synthetic
uuuaucuucugucagca

SEQ ID NO: 734787 - RNA, 17 nt, Artificial Sequence
  Synthetic
agagcauaucuucagca

SEQ ID NO: 734788 - RNA, 17 nt, Artificial Sequence
  Synthetic
ugacacacaguucagca

SEQ ID NO: 734789 - RNA, 17 nt, Artificial Sequence
  Synthetic
ugacucacaguucagca

SEQ ID NO: 734790 - RNA, 17 nt, Artificial Sequence
  Synthetic
ugacucauaguucagca

SEQ ID NO: 734791 - RNA, 17 nt, Artificial Sequence
  Synthetic
uguacauuauuucagca

SEQ ID NO: 734792 - RNA, 17 nt, Artificial Sequence
  Synthetic
ucauccccaaaagagca

SEQ ID NO: 734793 - RNA, 17 nt, Artificial Sequence
  Synthetic
ucccagaauaaagagca

SEQ ID NO: 734794 - RNA, 17 nt, Artificial Sequence
  Synthetic
uauugagaccaagagca

SEQ ID NO: 734795 - RNA, 17 nt, Artificial Sequence
  Synthetic
aagggcaaggaagagca

SEQ ID NO: 734796 - RNA, 17 nt, Artificial Sequence
  Synthetic
auguuauaugaagagca

SEQ ID NO: 734797 - RNA, 17 nt, Artificial Sequence
  Synthetic
uucuccagugaagagca

SEQ ID NO: 734798 - RNA, 17 nt, Artificial Sequence
  Synthetic
ugaaguugcuaagagca

SEQ ID NO: 734799 - RNA, 17 nt, Artificial Sequence
  Synthetic
augccugguacagagca

SEQ ID NO: 734800 - RNA, 17 nt, Artificial Sequence
  Synthetic
aagccuaauccagagca

SEQ ID NO: 734801 - RNA, 17 nt, Artificial Sequence
  Synthetic
agaacaaaaagagagca

SEQ ID NO: 734802 - RNA, 17 nt, Artificial Sequence
  Synthetic
aaccucuguagagagca

SEQ ID NO: 734803 - RNA, 17 nt, Artificial Sequence
  Synthetic
uggcgaacaggagagca

SEQ ID NO: 734804 - RNA, 17 nt, Artificial Sequence
  Synthetic
cuuuggaggggagagca

SEQ ID NO: 734805 - RNA, 17 nt, Artificial Sequence
  Synthetic
uuggcugcaugagagca

SEQ ID NO: 734806 - RNA, 17 nt, Artificial Sequence
  Synthetic
cugcacauaugagagca

SEQ ID NO: 734807 - RNA, 17 nt, Artificial Sequence
  Synthetic
uccuccugaauagagca

SEQ ID NO: 734808 - RNA, 17 nt, Artificial Sequence
  Synthetic
uuuaacacuauagagca

SEQ ID NO: 734809 - RNA, 17 nt, Artificial Sequence
  Synthetic
aaaaaaauuauagagca

SEQ ID NO: 734810 - RNA, 17 nt, Artificial Sequence
  Synthetic
auuuaagaaguagagca

SEQ ID NO: 734811 - RNA, 17 nt, Artificial Sequence
  Synthetic
auucuuaugguagagca

SEQ ID NO: 734812 - RNA, 17 nt, Artificial Sequence
  Synthetic
augauaauauuagagca

SEQ ID NO: 734813 - RNA, 17 nt, Artificial Sequence
  Synthetic
ccaacaaacuuagagca

SEQ ID NO: 734814 - RNA, 17 nt, Artificial Sequence
  Synthetic
cacccagguagcgagca

SEQ ID NO: 734815 - RNA, 17 nt, Artificial Sequence
  Synthetic
uaguacaacagggagca

SEQ ID NO: 734816 - RNA, 17 nt, Artificial Sequence
  Synthetic
cugggacacugggagca

SEQ ID NO: 734817 - RNA, 17 nt, Artificial Sequence
  Synthetic
auguaacugugggagca

SEQ ID NO: 734818 - RNA, 17 nt, Artificial Sequence
  Synthetic
ucagaagcaauggagca

SEQ ID NO: 734819 - RNA, 17 nt, Artificial Sequence
  Synthetic
uguuuuuuacuggagca

SEQ ID NO: 734820 - RNA, 17 nt, Artificial Sequence
  Synthetic
aaaagugagcuggagca

SEQ ID NO: 734821 - RNA, 17 nt, Artificial Sequence
  Synthetic
auggauuucuuggagca

SEQ ID NO: 734822 - RNA, 17 nt, Artificial Sequence
  Synthetic
acauaccugaaugagca

SEQ ID NO: 734823 - RNA, 17 nt, Artificial Sequence
  Synthetic
cuuccuacccaugagca

SEQ ID NO: 734824 - RNA, 17 nt, Artificial Sequence
  Synthetic
cuuccuauccaugagca

SEQ ID NO: 734825 - RNA, 17 nt, Artificial Sequence
  Synthetic
cuagucagauaugagca

SEQ ID NO: 734826 - RNA, 17 nt, Artificial Sequence
  Synthetic
aauuugguuuaugagca

SEQ ID NO: 734827 - RNA, 17 nt, Artificial Sequence
  Synthetic
aggaaagaaacugagca

SEQ ID NO: 734828 - RNA, 17 nt, Artificial Sequence
  Synthetic
caaaaauuagcugagca

SEQ ID NO: 734829 - RNA, 17 nt, Artificial Sequence
  Synthetic
aauguagcaucugagca

SEQ ID NO: 734830 - RNA, 17 nt, Artificial Sequence
  Synthetic
auugguugaagugagca

SEQ ID NO: 734831 - RNA, 17 nt, Artificial Sequence
  Synthetic
agaaugcagagugagca

SEQ ID NO: 734832 - RNA, 17 nt, Artificial Sequence
  Synthetic
aaaacccagugugagca

SEQ ID NO: 734833 - RNA, 17 nt, Artificial Sequence
  Synthetic
aagaaacuccuugagca

SEQ ID NO: 734834 - RNA, 17 nt, Artificial Sequence
  Synthetic
uuuuucaaauuugagca

SEQ ID NO: 734835 - RNA, 17 nt, Artificial Sequence
  Synthetic
cuuuugugcuuugagca

SEQ ID NO: 734836 - RNA, 17 nt, Artificial Sequence
  Synthetic
uuaggguauuuugagca

SEQ ID NO: 734837 - RNA, 17 nt, Artificial Sequence
  Synthetic
uaaaagaaaaaauagca

SEQ ID NO: 734838 - RNA, 17 nt, Artificial Sequence
  Synthetic
cuagccaacaaauagca

SEQ ID NO: 734839 - RNA, 17 nt, Artificial Sequence
  Synthetic
uucaacuagaaauagca

SEQ ID NO: 734840 - RNA, 17 nt, Artificial Sequence
  Synthetic
auaaauuugaaauagca

SEQ ID NO: 734841 - RNA, 17 nt, Artificial Sequence
  Synthetic
caaaggaaacaauagca

SEQ ID NO: 734842 - RNA, 17 nt, Artificial Sequence
  Synthetic
aauguguggcaauagca

SEQ ID NO: 734843 - RNA, 17 nt, Artificial Sequence
  Synthetic
agguaaaaagaauagca

SEQ ID NO: 734844 - RNA, 17 nt, Artificial Sequence
  Synthetic
cuaucaugagaauagca

SEQ ID NO: 734845 - RNA, 17 nt, Artificial Sequence
  Synthetic
aaugagaaaacauagca

SEQ ID NO: 734846 - RNA, 17 nt, Artificial Sequence
  Synthetic
cuaggcugcacauagca

SEQ ID NO: 734847 - RNA, 17 nt, Artificial Sequence
  Synthetic
uuauaggggacauagca

SEQ ID NO: 734848 - RNA, 17 nt, Artificial Sequence
  Synthetic
auaacauugucauagca

SEQ ID NO: 734849 - RNA, 17 nt, Artificial Sequence
  Synthetic
aaaaaaaacugauagca

SEQ ID NO: 734850 - RNA, 17 nt, Artificial Sequence
  Synthetic
cuagacuguugauagca

SEQ ID NO: 734851 - RNA, 17 nt, Artificial Sequence
  Synthetic
agaggggauauauagca

SEQ ID NO: 734852 - RNA, 17 nt, Artificial Sequence
  Synthetic
agucaagcacuauagca

SEQ ID NO: 734853 - RNA, 17 nt, Artificial Sequence
  Synthetic
auaauuugaguauagca

SEQ ID NO: 734854 - RNA, 17 nt, Artificial Sequence
  Synthetic
aaucacacuguauagca

SEQ ID NO: 734855 - RNA, 17 nt, Artificial Sequence
  Synthetic
ccaaaaaguguauagca

SEQ ID NO: 734856 - RNA, 17 nt, Artificial Sequence
  Synthetic
cauaauaccuuauagca

SEQ ID NO: 734857 - RNA, 17 nt, Artificial Sequence
  Synthetic
agcauguaguuauagca

SEQ ID NO: 734858 - RNA, 17 nt, Artificial Sequence
  Synthetic
ccagagagacacuagca

SEQ ID NO: 734859 - RNA, 17 nt, Artificial Sequence
  Synthetic
uucuguucagacuagca

SEQ ID NO: 734860 - RNA, 17 nt, Artificial Sequence
  Synthetic
uacucuuauagcuagca

SEQ ID NO: 734861 - RNA, 17 nt, Artificial Sequence
  Synthetic
aggaacacaggcuagca

SEQ ID NO: 734862 - RNA, 17 nt, Artificial Sequence
  Synthetic
aacaccagaugcuagca

SEQ ID NO: 734863 - RNA, 17 nt, Artificial Sequence
  Synthetic
auaacaaucaucuagca

SEQ ID NO: 734864 - RNA, 17 nt, Artificial Sequence
  Synthetic
acuuaaaugaucuagca

SEQ ID NO: 734865 - RNA, 17 nt, Artificial Sequence
  Synthetic
auugcaaaacucuagca

SEQ ID NO: 734866 - RNA, 17 nt, Artificial Sequence
  Synthetic
uucacauguuucuagca

SEQ ID NO: 734867 - RNA, 17 nt, Artificial Sequence
  Synthetic
aaauucuuugaguagca

SEQ ID NO: 734868 - RNA, 17 nt, Artificial Sequence
  Synthetic
aaagcauuauaguagca

SEQ ID NO: 734869 - RNA, 17 nt, Artificial Sequence
  Synthetic
acuuggugguaguagca

SEQ ID NO: 734870 - RNA, 17 nt, Artificial Sequence
  Synthetic
uuugcaaggucguagca

SEQ ID NO: 734871 - RNA, 17 nt, Artificial Sequence
  Synthetic
aaacucacaagguagca

SEQ ID NO: 734872 - RNA, 17 nt, Artificial Sequence
  Synthetic
uccuggaggugguagca

SEQ ID NO: 734873 - RNA, 17 nt, Artificial Sequence
  Synthetic
ucaggguaaauguagca

SEQ ID NO: 734874 - RNA, 17 nt, Artificial Sequence
  Synthetic
auuauucccauguagca

SEQ ID NO: 734875 - RNA, 17 nt, Artificial Sequence
  Synthetic
uaaacugaaguguagca

SEQ ID NO: 734876 - RNA, 17 nt, Artificial Sequence
  Synthetic
cuauuuuguguguagca

SEQ ID NO: 734877 - RNA, 17 nt, Artificial Sequence
  Synthetic
cuguggucuuuguagca

SEQ ID NO: 734878 - RNA, 17 nt, Artificial Sequence
  Synthetic
uacaaaaaaaauuagca

SEQ ID NO: 734879 - RNA, 17 nt, Artificial Sequence
  Synthetic
aauacaaaaaauuagca

SEQ ID NO: 734880 - RNA, 17 nt, Artificial Sequence
  Synthetic
aaauacaaaaauuagca

SEQ ID NO: 734881 - RNA, 17 nt, Artificial Sequence
  Synthetic
ccaugcagcaauuagca

SEQ ID NO: 734882 - RNA, 17 nt, Artificial Sequence
  Synthetic
cucaugcaucauuagca

SEQ ID NO: 734883 - RNA, 17 nt, Artificial Sequence
  Synthetic
cauuuugcucauuagca

SEQ ID NO: 734884 - RNA, 17 nt, Artificial Sequence
  Synthetic
aaggaaggugauuagca

SEQ ID NO: 734885 - RNA, 17 nt, Artificial Sequence
  Synthetic
aaaugcaaaacuuagca

SEQ ID NO: 734886 - RNA, 17 nt, Artificial Sequence
  Synthetic
uuacaaauaacuuagca

SEQ ID NO: 734887 - RNA, 17 nt, Artificial Sequence
  Synthetic
cugagaguggcuuagca

SEQ ID NO: 734888 - RNA, 17 nt, Artificial Sequence
  Synthetic
uuuaagaucucuuagca

SEQ ID NO: 734889 - RNA, 17 nt, Artificial Sequence
  Synthetic
agcuggaagucuuagca

SEQ ID NO: 734890 - RNA, 17 nt, Artificial Sequence
  Synthetic
aagggaaggaguuagca

SEQ ID NO: 734891 - RNA, 17 nt, Artificial Sequence
  Synthetic
aauucccuugguuagca

SEQ ID NO: 734892 - RNA, 17 nt, Artificial Sequence
  Synthetic
ugcccugauuguuagca

SEQ ID NO: 734893 - RNA, 17 nt, Artificial Sequence
  Synthetic
agaaaaacacuuuagca

SEQ ID NO: 734894 - RNA, 17 nt, Artificial Sequence
  Synthetic
ucuagggaaguuuagca

SEQ ID NO: 734895 - RNA, 17 nt, Artificial Sequence
  Synthetic
cacucuuauuuuuagca

SEQ ID NO: 734896 - RNA, 17 nt, Artificial Sequence
  Synthetic
ugaaaaaugaaaacgca

SEQ ID NO: 734897 - RNA, 17 nt, Artificial Sequence
  Synthetic
ugggugguucuaacgca

SEQ ID NO: 734898 - RNA, 17 nt, Artificial Sequence
  Synthetic
uucaaugaaaugacgca

SEQ ID NO: 734899 - RNA, 17 nt, Artificial Sequence
  Synthetic
aaaugagauuguacgca

SEQ ID NO: 734900 - RNA, 17 nt, Artificial Sequence
  Synthetic
ugcaaaucaaaaccgca

SEQ ID NO: 734901 - RNA, 17 nt, Artificial Sequence
  Synthetic
uuuccuuuugacccgca

SEQ ID NO: 734902 - RNA, 17 nt, Artificial Sequence
  Synthetic
aacuuggcugggccgca

SEQ ID NO: 734903 - RNA, 17 nt, Artificial Sequence
  Synthetic
agacucacaguuccgca

SEQ ID NO: 734904 - RNA, 17 nt, Artificial Sequence
  Synthetic
agcuugggccaagcgca

SEQ ID NO: 734905 - RNA, 17 nt, Artificial Sequence
  Synthetic
ccguguguagcagcgca

SEQ ID NO: 734906 - RNA, 17 nt, Artificial Sequence
  Synthetic
ugcccaugacuggcgca

SEQ ID NO: 734907 - RNA, 17 nt, Artificial Sequence
  Synthetic
aaaagaguaccugcgca

SEQ ID NO: 734908 - RNA, 17 nt, Artificial Sequence
  Synthetic
cucagcaaacuaucgca

SEQ ID NO: 734909 - RNA, 17 nt, Artificial Sequence
  Synthetic
cucaguaaacuaucgca

SEQ ID NO: 734910 - RNA, 17 nt, Artificial Sequence
  Synthetic
acuaugugcccuucgca

SEQ ID NO: 734911 - RNA, 17 nt, Artificial Sequence
  Synthetic
aaaagcuggaaaaggca

SEQ ID NO: 734912 - RNA, 17 nt, Artificial Sequence
  Synthetic
uaaugcuggaaaaggca

SEQ ID NO: 734913 - RNA, 17 nt, Artificial Sequence
  Synthetic
cauucaggacaaaggca

SEQ ID NO: 734914 - RNA, 17 nt, Artificial Sequence
  Synthetic
aagggguagcaaaggca

SEQ ID NO: 734915 - RNA, 17 nt, Artificial Sequence
  Synthetic
uccuugccucaaaggca

SEQ ID NO: 734916 - RNA, 17 nt, Artificial Sequence
  Synthetic
cgaggaaaggaaaggca

SEQ ID NO: 734917 - RNA, 17 nt, Artificial Sequence
  Synthetic
uuugaaauggaaaggca

SEQ ID NO: 734918 - RNA, 17 nt, Artificial Sequence
  Synthetic
cgggccaaauaaaggca

SEQ ID NO: 734919 - RNA, 17 nt, Artificial Sequence
  Synthetic
acaaggggguaaaggca

SEQ ID NO: 734920 - RNA, 17 nt, Artificial Sequence
  Synthetic
cuuacccucucaaggca

SEQ ID NO: 734921 - RNA, 17 nt, Artificial Sequence
  Synthetic
aaucuuggcagaaggca

SEQ ID NO: 734922 - RNA, 17 nt, Artificial Sequence
  Synthetic
cuagucaugagaaggca

SEQ ID NO: 734923 - RNA, 17 nt, Artificial Sequence
  Synthetic
acauuaagaauaaggca

SEQ ID NO: 734924 - RNA, 17 nt, Artificial Sequence
  Synthetic
agcuugggaauaaggca

SEQ ID NO: 734925 - RNA, 17 nt, Artificial Sequence
  Synthetic
uccacccuucuaaggca

SEQ ID NO: 734926 - RNA, 17 nt, Artificial Sequence
  Synthetic
agcauaauaaacaggca

SEQ ID NO: 734927 - RNA, 17 nt, Artificial Sequence
  Synthetic
uagccuagccacaggca

SEQ ID NO: 734928 - RNA, 17 nt, Artificial Sequence
  Synthetic
uucacuaaucacaggca

SEQ ID NO: 734929 - RNA, 17 nt, Artificial Sequence
  Synthetic
ugacugggagacaggca

SEQ ID NO: 734930 - RNA, 17 nt, Artificial Sequence
  Synthetic
cauucaggauacaggca

SEQ ID NO: 734931 - RNA, 17 nt, Artificial Sequence
  Synthetic
cacagggaguacaggca

SEQ ID NO: 734932 - RNA, 17 nt, Artificial Sequence
  Synthetic
auaauccccaccaggca

SEQ ID NO: 734933 - RNA, 17 nt, Artificial Sequence
  Synthetic
aacuauggcaccaggca

SEQ ID NO: 734934 - RNA, 17 nt, Artificial Sequence
  Synthetic
agugucucgaccaggca

SEQ ID NO: 734935 - RNA, 17 nt, Artificial Sequence
  Synthetic
cccaauaggaccaggca

SEQ ID NO: 734936 - RNA, 17 nt, Artificial Sequence
  Synthetic
ucuaaguggaccaggca

SEQ ID NO: 734937 - RNA, 17 nt, Artificial Sequence
  Synthetic
auacacacagccaggca

SEQ ID NO: 734938 - RNA, 17 nt, Artificial Sequence
  Synthetic
acaaaaucagccaggca

SEQ ID NO: 734939 - RNA, 17 nt, Artificial Sequence
  Synthetic
aggcuuucagccaggca

SEQ ID NO: 734940 - RNA, 17 nt, Artificial Sequence
  Synthetic
agauagauagccaggca

SEQ ID NO: 734941 - RNA, 17 nt, Artificial Sequence
  Synthetic
aaaaaauuagccaggca

SEQ ID NO: 734942 - RNA, 17 nt, Artificial Sequence
  Synthetic
caaaaauuagccaggca

SEQ ID NO: 734943 - RNA, 17 nt, Artificial Sequence
  Synthetic
acaaaauuagccaggca

SEQ ID NO: 734944 - RNA, 17 nt, Artificial Sequence
  Synthetic
aaaggagaggccaggca

SEQ ID NO: 734945 - RNA, 17 nt, Artificial Sequence
  Synthetic
ugauucagggccaggca

SEQ ID NO: 734946 - RNA, 17 nt, Artificial Sequence
  Synthetic
uaagcuugggccaggca

SEQ ID NO: 734947 - RNA, 17 nt, Artificial Sequence
  Synthetic
ccaaucuuggccaggca

SEQ ID NO: 734948 - RNA, 17 nt, Artificial Sequence
  Synthetic
auccaguuggccaggca

SEQ ID NO: 734949 - RNA, 17 nt, Artificial Sequence
  Synthetic
caccuaugugccaggca

SEQ ID NO: 734950 - RNA, 17 nt, Artificial Sequence
  Synthetic
aaaaaauuugccaggca

SEQ ID NO: 734951 - RNA, 17 nt, Artificial Sequence
  Synthetic
cccuccacuagcaggca

SEQ ID NO: 734952 - RNA, 17 nt, Artificial Sequence
  Synthetic
agccugcgaugcaggca

SEQ ID NO: 734953 - RNA, 17 nt, Artificial Sequence
  Synthetic
uuuuucuacugcaggca

SEQ ID NO: 734954 - RNA, 17 nt, Artificial Sequence
  Synthetic
acugcuggcugcaggca

SEQ ID NO: 734955 - RNA, 17 nt, Artificial Sequence
  Synthetic
uuuacagggaucaggca

SEQ ID NO: 734956 - RNA, 17 nt, Artificial Sequence
  Synthetic
uuuauacagcucaggca

SEQ ID NO: 734957 - RNA, 17 nt, Artificial Sequence
  Synthetic
uagcuucagcucaggca

SEQ ID NO: 734958 - RNA, 17 nt, Artificial Sequence
  Synthetic
cucaguauuuucaggca

SEQ ID NO: 734959 - RNA, 17 nt, Artificial Sequence
  Synthetic
ucaaucuagaagaggca

SEQ ID NO: 734960 - RNA, 17 nt, Artificial Sequence
  Synthetic
agaagcuggaagaggca

SEQ ID NO: 734961 - RNA, 17 nt, Artificial Sequence
  Synthetic
ugaauguaggagaggca

SEQ ID NO: 734962 - RNA, 17 nt, Artificial Sequence
  Synthetic
ucaugaucauagaggca

SEQ ID NO: 734963 - RNA, 17 nt, Artificial Sequence
  Synthetic
uuguacacuuagaggca

SEQ ID NO: 734964 - RNA, 17 nt, Artificial Sequence
  Synthetic
aacuggagcaggaggca

SEQ ID NO: 734965 - RNA, 17 nt, Artificial Sequence
  Synthetic
cucccagucaggaggca

SEQ ID NO: 734966 - RNA, 17 nt, Artificial Sequence
  Synthetic
aggacaagccggaggca

SEQ ID NO: 734967 - RNA, 17 nt, Artificial Sequence
  Synthetic
caaaaauuagggaggca

SEQ ID NO: 734968 - RNA, 17 nt, Artificial Sequence
  Synthetic
uggcucugauggaggca

SEQ ID NO: 734969 - RNA, 17 nt, Artificial Sequence
  Synthetic
uuccaauguuggaggca

SEQ ID NO: 734970 - RNA, 17 nt, Artificial Sequence
  Synthetic
ucucaaagaaugaggca

SEQ ID NO: 734971 - RNA, 17 nt, Artificial Sequence
  Synthetic
aggacugagaugaggca

SEQ ID NO: 734972 - RNA, 17 nt, Artificial Sequence
  Synthetic
cucaggaggcugaggca

SEQ ID NO: 734973 - RNA, 17 nt, Artificial Sequence
  Synthetic
cuucggaggcugaggca

SEQ ID NO: 734974 - RNA, 17 nt, Artificial Sequence
  Synthetic
cuugggaggcugaggca

SEQ ID NO: 734975 - RNA, 17 nt, Artificial Sequence
  Synthetic
augagacaggugaggca

SEQ ID NO: 734976 - RNA, 17 nt, Artificial Sequence
  Synthetic
uccuugccuuugaggca

SEQ ID NO: 734977 - RNA, 17 nt, Artificial Sequence
  Synthetic
ugggucuaaaauaggca

SEQ ID NO: 734978 - RNA, 17 nt, Artificial Sequence
  Synthetic
ugcuuguugaauaggca

SEQ ID NO: 734979 - RNA, 17 nt, Artificial Sequence
  Synthetic
cauucaggacauaggca

SEQ ID NO: 734980 - RNA, 17 nt, Artificial Sequence
  Synthetic
uguacucuacauaggca

SEQ ID NO: 734981 - RNA, 17 nt, Artificial Sequence
  Synthetic
aaugggagagauaggca

SEQ ID NO: 734982 - RNA, 17 nt, Artificial Sequence
  Synthetic
uguaggagggauaggca

SEQ ID NO: 734983 - RNA, 17 nt, Artificial Sequence
  Synthetic
cauucaggauauaggca

SEQ ID NO: 734984 - RNA, 17 nt, Artificial Sequence
  Synthetic
aggugcaaguauaggca

SEQ ID NO: 734985 - RNA, 17 nt, Artificial Sequence
  Synthetic
agcugggauuauaggca

SEQ ID NO: 734986 - RNA, 17 nt, Artificial Sequence
  Synthetic
uucuuaugugcuaggca

SEQ ID NO: 734987 - RNA, 17 nt, Artificial Sequence
  Synthetic
auguaaaacucuaggca

SEQ ID NO: 734988 - RNA, 17 nt, Artificial Sequence
  Synthetic
auauuuaucaguaggca

SEQ ID NO: 734989 - RNA, 17 nt, Artificial Sequence
  Synthetic
cauucaggacguaggca

SEQ ID NO: 734990 - RNA, 17 nt, Artificial Sequence
  Synthetic
uauuaugcaauuaggca

SEQ ID NO: 734991 - RNA, 17 nt, Artificial Sequence
  Synthetic
agcgagggaauuaggca

SEQ ID NO: 734992 - RNA, 17 nt, Artificial Sequence
  Synthetic
ccacucuagguuaggca

SEQ ID NO: 734993 - RNA, 17 nt, Artificial Sequence
  Synthetic
acaaguauauuuaggca

SEQ ID NO: 734994 - RNA, 17 nt, Artificial Sequence
  Synthetic
cuuuuacaguuuaggca

SEQ ID NO: 734995 - RNA, 17 nt, Artificial Sequence
  Synthetic
cuccugcaggcccggca

SEQ ID NO: 734996 - RNA, 17 nt, Artificial Sequence
  Synthetic
accacugcacuccggca

SEQ ID NO: 734997 - RNA, 17 nt, Artificial Sequence
  Synthetic
ugccuuuuaaaagggca

SEQ ID NO: 734998 - RNA, 17 nt, Artificial Sequence
  Synthetic
cuggaagccaaagggca

SEQ ID NO: 734999 - RNA, 17 nt, Artificial Sequence
  Synthetic
uuacuuagcaaagggca

SEQ ID NO: 735000 - RNA, 17 nt, Artificial Sequence
  Synthetic
cagcaaaagaaagggca

SEQ ID NO: 735001 - RNA, 17 nt, Artificial Sequence
  Synthetic
cagaggaaacaagggca

SEQ ID NO: 735002 - RNA, 17 nt, Artificial Sequence
  Synthetic
cauggggcccaagggca

SEQ ID NO: 735003 - RNA, 17 nt, Artificial Sequence
  Synthetic
cucugagaucaagggca

SEQ ID NO: 735004 - RNA, 17 nt, Artificial Sequence
  Synthetic
auuagaucugaagggca

SEQ ID NO: 735005 - RNA, 17 nt, Artificial Sequence
  Synthetic
ccuucaaguuaagggca

SEQ ID NO: 735006 - RNA, 17 nt, Artificial Sequence
  Synthetic
caauaacauacagggca

SEQ ID NO: 735007 - RNA, 17 nt, Artificial Sequence
  Synthetic
agcaucugagcagggca

SEQ ID NO: 735008 - RNA, 17 nt, Artificial Sequence
  Synthetic
caaaaauuagcagggca

SEQ ID NO: 735009 - RNA, 17 nt, Artificial Sequence
  Synthetic
ugugaaaagucagggca

SEQ ID NO: 735010 - RNA, 17 nt, Artificial Sequence
  Synthetic
acugcgaauagagggca

SEQ ID NO: 735011 - RNA, 17 nt, Artificial Sequence
  Synthetic
cccuggugaggagggca

SEQ ID NO: 735012 - RNA, 17 nt, Artificial Sequence
  Synthetic
ugcacucagggagggca

SEQ ID NO: 735013 - RNA, 17 nt, Artificial Sequence
  Synthetic
uacauggugggagggca

SEQ ID NO: 735014 - RNA, 17 nt, Artificial Sequence
  Synthetic
ugccuggaaauagggca

SEQ ID NO: 735015 - RNA, 17 nt, Artificial Sequence
  Synthetic
auggggguaauagggca

SEQ ID NO: 735016 - RNA, 17 nt, Artificial Sequence
  Synthetic
auauuggcagccgggca

SEQ ID NO: 735017 - RNA, 17 nt, Artificial Sequence
  Synthetic
aaaaaauuagccgggca

SEQ ID NO: 735018 - RNA, 17 nt, Artificial Sequence
  Synthetic
caaaaauuagccgggca

SEQ ID NO: 735019 - RNA, 17 nt, Artificial Sequence
  Synthetic
acaaaauuagccgggca

SEQ ID NO: 735020 - RNA, 17 nt, Artificial Sequence
  Synthetic
uuuuuggaggccgggca

SEQ ID NO: 735021 - RNA, 17 nt, Artificial Sequence
  Synthetic
aucuuaugggccgggca

SEQ ID NO: 735022 - RNA, 17 nt, Artificial Sequence
  Synthetic
aaaaaacuggccgggca

SEQ ID NO: 735023 - RNA, 17 nt, Artificial Sequence
  Synthetic
aauggugaauccgggca

SEQ ID NO: 735024 - RNA, 17 nt, Artificial Sequence
  Synthetic
auucuuucaaaggggca

SEQ ID NO: 735025 - RNA, 17 nt, Artificial Sequence
  Synthetic
agggacggaaaggggca

SEQ ID NO: 735026 - RNA, 17 nt, Artificial Sequence
  Synthetic
aguuugcugcaggggca

SEQ ID NO: 735027 - RNA, 17 nt, Artificial Sequence
  Synthetic
uuauguugggaggggca

SEQ ID NO: 735028 - RNA, 17 nt, Artificial Sequence
  Synthetic
ucaaggggugaggggca

SEQ ID NO: 735029 - RNA, 17 nt, Artificial Sequence
  Synthetic
cacuguuccagggggca

SEQ ID NO: 735030 - RNA, 17 nt, Artificial Sequence
  Synthetic
uauuccuuccgggggca

SEQ ID NO: 735031 - RNA, 17 nt, Artificial Sequence
  Synthetic
ucgcgagguggggggca

SEQ ID NO: 735032 - RNA, 17 nt, Artificial Sequence
  Synthetic
uuggcggguggggggca

SEQ ID NO: 735033 - RNA, 17 nt, Artificial Sequence
  Synthetic
cacaguaggauggggca

SEQ ID NO: 735034 - RNA, 17 nt, Artificial Sequence
  Synthetic
aagcaaaaacuggggca

SEQ ID NO: 735035 - RNA, 17 nt, Artificial Sequence
  Synthetic
ucaaaaugucuggggca

SEQ ID NO: 735036 - RNA, 17 nt, Artificial Sequence
  Synthetic
ugcaagcagguggggca

SEQ ID NO: 735037 - RNA, 17 nt, Artificial Sequence
  Synthetic
ugauuuuaaaaugggca

SEQ ID NO: 735038 - RNA, 17 nt, Artificial Sequence
  Synthetic
acauaaacgaaugggca

SEQ ID NO: 735039 - RNA, 17 nt, Artificial Sequence
  Synthetic
ucauccacucaugggca

SEQ ID NO: 735040 - RNA, 17 nt, Artificial Sequence
  Synthetic
caaaaauuagaugggca

SEQ ID NO: 735041 - RNA, 17 nt, Artificial Sequence
  Synthetic
aacaugucauaugggca

SEQ ID NO: 735042 - RNA, 17 nt, Artificial Sequence
  Synthetic
ugggaaacuacugggca

SEQ ID NO: 735043 - RNA, 17 nt, Artificial Sequence
  Synthetic
aaaaaaauagcugggca

SEQ ID NO: 735044 - RNA, 17 nt, Artificial Sequence
  Synthetic
aaaaaauuagcugggca

SEQ ID NO: 735045 - RNA, 17 nt, Artificial Sequence
  Synthetic
caaaaauuagcugggca

SEQ ID NO: 735046 - RNA, 17 nt, Artificial Sequence
  Synthetic
acaaaauuagcugggca

SEQ ID NO: 735047 - RNA, 17 nt, Artificial Sequence
  Synthetic
ucaauuucggcugggca

SEQ ID NO: 735048 - RNA, 17 nt, Artificial Sequence
  Synthetic
aaaagaggggcugggca

SEQ ID NO: 735049 - RNA, 17 nt, Artificial Sequence
  Synthetic
aucaaguuggcugggca

SEQ ID NO: 735050 - RNA, 17 nt, Artificial Sequence
  Synthetic
aaaagucuugcugggca

SEQ ID NO: 735051 - RNA, 17 nt, Artificial Sequence
  Synthetic
uuccuucucucugggca

SEQ ID NO: 735052 - RNA, 17 nt, Artificial Sequence
  Synthetic
aggcacucuucugggca

SEQ ID NO: 735053 - RNA, 17 nt, Artificial Sequence
  Synthetic
aacacacugagugggca

SEQ ID NO: 735054 - RNA, 17 nt, Artificial Sequence
  Synthetic
accugggguagugggca

SEQ ID NO: 735055 - RNA, 17 nt, Artificial Sequence
  Synthetic
caccugcaaggugggca

SEQ ID NO: 735056 - RNA, 17 nt, Artificial Sequence
  Synthetic
caaacauuaggugggca

SEQ ID NO: 735057 - RNA, 17 nt, Artificial Sequence
  Synthetic
cacagauggggugggca

SEQ ID NO: 735058 - RNA, 17 nt, Artificial Sequence
  Synthetic
auacucaggauugggca

SEQ ID NO: 735059 - RNA, 17 nt, Artificial Sequence
  Synthetic
aaaaaauuaguugggca

SEQ ID NO: 735060 - RNA, 17 nt, Artificial Sequence
  Synthetic
ugaggaagaaaauggca

SEQ ID NO: 735061 - RNA, 17 nt, Artificial Sequence
  Synthetic
aucuacagcaaauggca

SEQ ID NO: 735062 - RNA, 17 nt, Artificial Sequence
  Synthetic
cagggaacuaaauggca

SEQ ID NO: 735063 - RNA, 17 nt, Artificial Sequence
  Synthetic
agugcagugcaauggca

SEQ ID NO: 735064 - RNA, 17 nt, Artificial Sequence
  Synthetic
acuuuuucucaauggca

SEQ ID NO: 735065 - RNA, 17 nt, Artificial Sequence
  Synthetic
uccaacucauaauggca

SEQ ID NO: 735066 - RNA, 17 nt, Artificial Sequence
  Synthetic
uagccaaacuaauggca

SEQ ID NO: 735067 - RNA, 17 nt, Artificial Sequence
  Synthetic
ucagagugcuaauggca

SEQ ID NO: 735068 - RNA, 17 nt, Artificial Sequence
  Synthetic
uuaauagaaacauggca

SEQ ID NO: 735069 - RNA, 17 nt, Artificial Sequence
  Synthetic
ccaggauguacauggca

SEQ ID NO: 735070 - RNA, 17 nt, Artificial Sequence
  Synthetic
uuucuuggagcauggca

SEQ ID NO: 735071 - RNA, 17 nt, Artificial Sequence
  Synthetic
aucaaaugaagauggca

SEQ ID NO: 735072 - RNA, 17 nt, Artificial Sequence
  Synthetic
agaggaguaagauggca

SEQ ID NO: 735073 - RNA, 17 nt, Artificial Sequence
  Synthetic
agaagggguagauggca

SEQ ID NO: 735074 - RNA, 17 nt, Artificial Sequence
  Synthetic
cucagcaaacuauggca

SEQ ID NO: 735075 - RNA, 17 nt, Artificial Sequence
  Synthetic
uguauuauccuauggca

SEQ ID NO: 735076 - RNA, 17 nt, Artificial Sequence
  Synthetic
aaggucuuccuauggca

SEQ ID NO: 735077 - RNA, 17 nt, Artificial Sequence
  Synthetic
aagugaagucuauggca

SEQ ID NO: 735078 - RNA, 17 nt, Artificial Sequence
  Synthetic
uuggauuguguauggca

SEQ ID NO: 735079 - RNA, 17 nt, Artificial Sequence
  Synthetic
uauaguauuuuauggca

SEQ ID NO: 735080 - RNA, 17 nt, Artificial Sequence
  Synthetic
auauauguuaacuggca

SEQ ID NO: 735081 - RNA, 17 nt, Artificial Sequence
  Synthetic
aggagccaacacuggca

SEQ ID NO: 735082 - RNA, 17 nt, Artificial Sequence
  Synthetic
caguuuauucccuggca

SEQ ID NO: 735083 - RNA, 17 nt, Artificial Sequence
  Synthetic
aauuuauuucccuggca

SEQ ID NO: 735084 - RNA, 17 nt, Artificial Sequence
  Synthetic
agacagguggccuggca

SEQ ID NO: 735085 - RNA, 17 nt, Artificial Sequence
  Synthetic
uggcaaagugccuggca

SEQ ID NO: 735086 - RNA, 17 nt, Artificial Sequence
  Synthetic
uccuugcuugccuggca

SEQ ID NO: 735087 - RNA, 17 nt, Artificial Sequence
  Synthetic
acaaaagccuccuggca

SEQ ID NO: 735088 - RNA, 17 nt, Artificial Sequence
  Synthetic
caaaaugcaagcuggca

SEQ ID NO: 735089 - RNA, 17 nt, Artificial Sequence
  Synthetic
cucccaugcagcuggca

SEQ ID NO: 735090 - RNA, 17 nt, Artificial Sequence
  Synthetic
aauaacaugugcuggca

SEQ ID NO: 735091 - RNA, 17 nt, Artificial Sequence
  Synthetic
acauuuugucucuggca

SEQ ID NO: 735092 - RNA, 17 nt, Artificial Sequence
  Synthetic
uuucuuaaugucuggca

SEQ ID NO: 735093 - RNA, 17 nt, Artificial Sequence
  Synthetic
ugcuuccccuucuggca

SEQ ID NO: 735094 - RNA, 17 nt, Artificial Sequence
  Synthetic
ugggugcugaaguggca

SEQ ID NO: 735095 - RNA, 17 nt, Artificial Sequence
  Synthetic
uaaaaguugaaguggca

SEQ ID NO: 735096 - RNA, 17 nt, Artificial Sequence
  Synthetic
uaggucaaacaguggca

SEQ ID NO: 735097 - RNA, 17 nt, Artificial Sequence
  Synthetic
cgaaggaaacaguggca

SEQ ID NO: 735098 - RNA, 17 nt, Artificial Sequence
  Synthetic
uuuuucaaccaguggca

SEQ ID NO: 735099 - RNA, 17 nt, Artificial Sequence
  Synthetic
uaggcagugcaguggca

SEQ ID NO: 735100 - RNA, 17 nt, Artificial Sequence
  Synthetic
ugaauuugauaguggca

SEQ ID NO: 735101 - RNA, 17 nt, Artificial Sequence
  Synthetic
agcccccaguaguggca

SEQ ID NO: 735102 - RNA, 17 nt, Artificial Sequence
  Synthetic
cugaaaaauagguggca

SEQ ID NO: 735103 - RNA, 17 nt, Artificial Sequence
  Synthetic
uauuuuaaaauguggca

SEQ ID NO: 735104 - RNA, 17 nt, Artificial Sequence
  Synthetic
acagaagagauguggca

SEQ ID NO: 735105 - RNA, 17 nt, Artificial Sequence
  Synthetic
uuagcaggucuguggca

SEQ ID NO: 735106 - RNA, 17 nt, Artificial Sequence
  Synthetic
auugaaaguuuguggca

SEQ ID NO: 735107 - RNA, 17 nt, Artificial Sequence
  Synthetic
uacuuccaaaauuggca

SEQ ID NO: 735108 - RNA, 17 nt, Artificial Sequence
  Synthetic
uauuguuaaaauuggca

SEQ ID NO: 735109 - RNA, 17 nt, Artificial Sequence
  Synthetic
uuggguuuccauuggca

SEQ ID NO: 735110 - RNA, 17 nt, Artificial Sequence
  Synthetic
uucugguguuauuggca

SEQ ID NO: 735111 - RNA, 17 nt, Artificial Sequence
  Synthetic
aguucauguccuuggca

SEQ ID NO: 735112 - RNA, 17 nt, Artificial Sequence
  Synthetic
cccaugagagcuuggca

SEQ ID NO: 735113 - RNA, 17 nt, Artificial Sequence
  Synthetic
aauguguuuucuuggca

SEQ ID NO: 735114 - RNA, 17 nt, Artificial Sequence
  Synthetic
uugugaguaaguuggca

SEQ ID NO: 735115 - RNA, 17 nt, Artificial Sequence
  Synthetic
uauauuguaaguuggca

SEQ ID NO: 735116 - RNA, 17 nt, Artificial Sequence
  Synthetic
aaaugaaaguguuggca

SEQ ID NO: 735117 - RNA, 17 nt, Artificial Sequence
  Synthetic
agucaggcaauuuggca

SEQ ID NO: 735118 - RNA, 17 nt, Artificial Sequence
  Synthetic
auucuuuaacuuuggca

SEQ ID NO: 735119 - RNA, 17 nt, Artificial Sequence
  Synthetic
auaguccaucuuuggca

SEQ ID NO: 735120 - RNA, 17 nt, Artificial Sequence
  Synthetic
uuaaaguacguuuggca

SEQ ID NO: 735121 - RNA, 17 nt, Artificial Sequence
  Synthetic
uuugagaugguuuggca

SEQ ID NO: 735122 - RNA, 17 nt, Artificial Sequence
  Synthetic
aauggauacuuuuggca

SEQ ID NO: 735123 - RNA, 17 nt, Artificial Sequence
  Synthetic
uaugaaaaaaaaaugca

SEQ ID NO: 735124 - RNA, 17 nt, Artificial Sequence
  Synthetic
ugaaaguaaaaaaugca

SEQ ID NO: 735125 - RNA, 17 nt, Artificial Sequence
  Synthetic
uacuuuuaaaaaaugca

SEQ ID NO: 735126 - RNA, 17 nt, Artificial Sequence
  Synthetic
cuaaaauuaaaaaugca

SEQ ID NO: 735127 - RNA, 17 nt, Artificial Sequence
  Synthetic
aucauuucgaaaaugca

SEQ ID NO: 735128 - RNA, 17 nt, Artificial Sequence
  Synthetic
cuacuguuuaaaaugca

SEQ ID NO: 735129 - RNA, 17 nt, Artificial Sequence
  Synthetic
aaauaauagcaaaugca

SEQ ID NO: 735130 - RNA, 17 nt, Artificial Sequence
  Synthetic
acauucggagaaaugca

SEQ ID NO: 735131 - RNA, 17 nt, Artificial Sequence
  Synthetic
auuucuauugaaaugca

SEQ ID NO: 735132 - RNA, 17 nt, Artificial Sequence
  Synthetic
uccagaauauaaaugca

SEQ ID NO: 735133 - RNA, 17 nt, Artificial Sequence
  Synthetic
ugucuguuuuaaaugca

SEQ ID NO: 735134 - RNA, 17 nt, Artificial Sequence
  Synthetic
uguucuaacccaaugca

SEQ ID NO: 735135 - RNA, 17 nt, Artificial Sequence
  Synthetic
ucaaguuaagcaaugca

SEQ ID NO: 735136 - RNA, 17 nt, Artificial Sequence
  Synthetic
agucugauggcaaugca

SEQ ID NO: 735137 - RNA, 17 nt, Artificial Sequence
  Synthetic
caggguaaaagaaugca

SEQ ID NO: 735138 - RNA, 17 nt, Artificial Sequence
  Synthetic
cacuaugaaagaaugca

SEQ ID NO: 735139 - RNA, 17 nt, Artificial Sequence
  Synthetic
acagagacaagaaugca

SEQ ID NO: 735140 - RNA, 17 nt, Artificial Sequence
  Synthetic
aagaagaauagaaugca

SEQ ID NO: 735141 - RNA, 17 nt, Artificial Sequence
  Synthetic
cauagauugggaaugca

SEQ ID NO: 735142 - RNA, 17 nt, Artificial Sequence
  Synthetic
acauucccgugaaugca

SEQ ID NO: 735143 - RNA, 17 nt, Artificial Sequence
  Synthetic
aggaacauuugaaugca

SEQ ID NO: 735144 - RNA, 17 nt, Artificial Sequence
  Synthetic
uugugacccauaaugca

SEQ ID NO: 735145 - RNA, 17 nt, Artificial Sequence
  Synthetic
uacuagaaauuaaugca

SEQ ID NO: 735146 - RNA, 17 nt, Artificial Sequence
  Synthetic
auuaagugauuaaugca

SEQ ID NO: 735147 - RNA, 17 nt, Artificial Sequence
  Synthetic
aauaaauuauuaaugca

SEQ ID NO: 735148 - RNA, 17 nt, Artificial Sequence
  Synthetic
aauccagguuuaaugca

SEQ ID NO: 735149 - RNA, 17 nt, Artificial Sequence
  Synthetic
aaauugacucacaugca

SEQ ID NO: 735150 - RNA, 17 nt, Artificial Sequence
  Synthetic
auuggauuugacaugca

SEQ ID NO: 735151 - RNA, 17 nt, Artificial Sequence
  Synthetic
ugggaggggagcaugca

SEQ ID NO: 735152 - RNA, 17 nt, Artificial Sequence
  Synthetic
ccuugguguagcaugca

SEQ ID NO: 735153 - RNA, 17 nt, Artificial Sequence
  Synthetic
cacuagugcugcaugca

SEQ ID NO: 735154 - RNA, 17 nt, Artificial Sequence
  Synthetic
cugauucagaucaugca

SEQ ID NO: 735155 - RNA, 17 nt, Artificial Sequence
  Synthetic
ugugaacuacucaugca

SEQ ID NO: 735156 - RNA, 17 nt, Artificial Sequence
  Synthetic
cauggaugaaagaugca

SEQ ID NO: 735157 - RNA, 17 nt, Artificial Sequence
  Synthetic
cagcuuuucuagaugca

SEQ ID NO: 735158 - RNA, 17 nt, Artificial Sequence
  Synthetic
agccuuugacggaugca

SEQ ID NO: 735159 - RNA, 17 nt, Artificial Sequence
  Synthetic
uucaucccugggaugca

SEQ ID NO: 735160 - RNA, 17 nt, Artificial Sequence
  Synthetic
uucauccuugggaugca

SEQ ID NO: 735161 - RNA, 17 nt, Artificial Sequence
  Synthetic
auugucaaauggaugca

SEQ ID NO: 735162 - RNA, 17 nt, Artificial Sequence
  Synthetic
caagggcuacugaugca

SEQ ID NO: 735163 - RNA, 17 nt, Artificial Sequence
  Synthetic
caggucacgcugaugca

SEQ ID NO: 735164 - RNA, 17 nt, Artificial Sequence
  Synthetic
uuuaacccucugaugca

SEQ ID NO: 735165 - RNA, 17 nt, Artificial Sequence
  Synthetic
ugucauuaagugaugca

SEQ ID NO: 735166 - RNA, 17 nt, Artificial Sequence
  Synthetic
uagacuugcuugaugca

SEQ ID NO: 735167 - RNA, 17 nt, Artificial Sequence
  Synthetic
aauccagguuugaugca

SEQ ID NO: 735168 - RNA, 17 nt, Artificial Sequence
  Synthetic
ugaauauuuuugaugca

SEQ ID NO: 735169 - RNA, 17 nt, Artificial Sequence
  Synthetic
agccuucacaauaugca

SEQ ID NO: 735170 - RNA, 17 nt, Artificial Sequence
  Synthetic
uguuauugccauaugca

SEQ ID NO: 735171 - RNA, 17 nt, Artificial Sequence
  Synthetic
caaggauuugauaugca

SEQ ID NO: 735172 - RNA, 17 nt, Artificial Sequence
  Synthetic
uggaagaaaacuaugca

SEQ ID NO: 735173 - RNA, 17 nt, Artificial Sequence
  Synthetic
cucuucacugcuaugca

SEQ ID NO: 735174 - RNA, 17 nt, Artificial Sequence
  Synthetic
agaacuaacaguaugca

SEQ ID NO: 735175 - RNA, 17 nt, Artificial Sequence
  Synthetic
acuuuuuugauuaugca

SEQ ID NO: 735176 - RNA, 17 nt, Artificial Sequence
  Synthetic
aucaacacuauuaugca

SEQ ID NO: 735177 - RNA, 17 nt, Artificial Sequence
  Synthetic
cucuuuuaucuuaugca

SEQ ID NO: 735178 - RNA, 17 nt, Artificial Sequence
  Synthetic
acaaacugauuuaugca

SEQ ID NO: 735179 - RNA, 17 nt, Artificial Sequence
  Synthetic
uugacaguauuuaugca

SEQ ID NO: 735180 - RNA, 17 nt, Artificial Sequence
  Synthetic
uuuaugcauuuuaugca

SEQ ID NO: 735181 - RNA, 17 nt, Artificial Sequence
  Synthetic
ccugaugacaaacugca

SEQ ID NO: 735182 - RNA, 17 nt, Artificial Sequence
  Synthetic
uuucacuucaaacugca

SEQ ID NO: 735183 - RNA, 17 nt, Artificial Sequence
  Synthetic
ccaacucugaaacugca

SEQ ID NO: 735184 - RNA, 17 nt, Artificial Sequence
  Synthetic
acugguucagaacugca

SEQ ID NO: 735185 - RNA, 17 nt, Artificial Sequence
  Synthetic
cccucugaugaacugca

SEQ ID NO: 735186 - RNA, 17 nt, Artificial Sequence
  Synthetic
uugaguuuaacacugca

SEQ ID NO: 735187 - RNA, 17 nt, Artificial Sequence
  Synthetic
cucacagaaccacugca

SEQ ID NO: 735188 - RNA, 17 nt, Artificial Sequence
  Synthetic
uccauuugugcacugca

SEQ ID NO: 735189 - RNA, 17 nt, Artificial Sequence
  Synthetic
cccuacccaagacugca

SEQ ID NO: 735190 - RNA, 17 nt, Artificial Sequence
  Synthetic
uuagaaacaggacugca

SEQ ID NO: 735191 - RNA, 17 nt, Artificial Sequence
  Synthetic
ugucuguuaauacugca

SEQ ID NO: 735192 - RNA, 17 nt, Artificial Sequence
  Synthetic
uaucccaagauacugca

SEQ ID NO: 735193 - RNA, 17 nt, Artificial Sequence
  Synthetic
uucugcuagauacugca

SEQ ID NO: 735194 - RNA, 17 nt, Artificial Sequence
  Synthetic
aaggagacuauacugca

SEQ ID NO: 735195 - RNA, 17 nt, Artificial Sequence
  Synthetic
augcuccuuauacugca

SEQ ID NO: 735196 - RNA, 17 nt, Artificial Sequence
  Synthetic
cuacccuguguacugca

SEQ ID NO: 735197 - RNA, 17 nt, Artificial Sequence
  Synthetic
uguuuccaauuacugca

SEQ ID NO: 735198 - RNA, 17 nt, Artificial Sequence
  Synthetic
aagcuaucuuuacugca

SEQ ID NO: 735199 - RNA, 17 nt, Artificial Sequence
  Synthetic
cuauggauccaccugca

SEQ ID NO: 735200 - RNA, 17 nt, Artificial Sequence
  Synthetic
agacuacaugaccugca

SEQ ID NO: 735201 - RNA, 17 nt, Artificial Sequence
  Synthetic
uaaucccaaucccugca

SEQ ID NO: 735202 - RNA, 17 nt, Artificial Sequence
  Synthetic
uaacuguugucccugca

SEQ ID NO: 735203 - RNA, 17 nt, Artificial Sequence
  Synthetic
aaucaucugagccugca

SEQ ID NO: 735204 - RNA, 17 nt, Artificial Sequence
  Synthetic
uuuagaaagugccugca

SEQ ID NO: 735205 - RNA, 17 nt, Artificial Sequence
  Synthetic
ucuucagaaaagcugca

SEQ ID NO: 735206 - RNA, 17 nt, Artificial Sequence
  Synthetic
uuaacugaaaagcugca

SEQ ID NO: 735207 - RNA, 17 nt, Artificial Sequence
  Synthetic
ucaggaggugagcugca

SEQ ID NO: 735208 - RNA, 17 nt, Artificial Sequence
  Synthetic
aaugcugaauagcugca

SEQ ID NO: 735209 - RNA, 17 nt, Artificial Sequence
  Synthetic
ucagaacacuagcugca

SEQ ID NO: 735210 - RNA, 17 nt, Artificial Sequence
  Synthetic
aaggcugcaaggcugca

SEQ ID NO: 735211 - RNA, 17 nt, Artificial Sequence
  Synthetic
augcagggcaggcugca

SEQ ID NO: 735212 - RNA, 17 nt, Artificial Sequence
  Synthetic
ugggggaacuggcugca

SEQ ID NO: 735213 - RNA, 17 nt, Artificial Sequence
  Synthetic
ucugagaaguggcugca

SEQ ID NO: 735214 - RNA, 17 nt, Artificial Sequence
  Synthetic
auaauuguuaugcugca

SEQ ID NO: 735215 - RNA, 17 nt, Artificial Sequence
  Synthetic
acacauuugcugcugca

SEQ ID NO: 735216 - RNA, 17 nt, Artificial Sequence
  Synthetic
ccuugcuaauugcugca

SEQ ID NO: 735217 - RNA, 17 nt, Artificial Sequence
  Synthetic
acaacaggcaaucugca

SEQ ID NO: 735218 - RNA, 17 nt, Artificial Sequence
  Synthetic
cuaagaaaccaucugca

SEQ ID NO: 735219 - RNA, 17 nt, Artificial Sequence
  Synthetic
aauugcugggaucugca

SEQ ID NO: 735220 - RNA, 17 nt, Artificial Sequence
  Synthetic
caaguaauaacucugca

SEQ ID NO: 735221 - RNA, 17 nt, Artificial Sequence
  Synthetic
cacugaacagcucugca

SEQ ID NO: 735222 - RNA, 17 nt, Artificial Sequence
  Synthetic
ugauacauugcucugca

SEQ ID NO: 735223 - RNA, 17 nt, Artificial Sequence
  Synthetic
ugauucaccauucugca

SEQ ID NO: 735224 - RNA, 17 nt, Artificial Sequence
  Synthetic
aauaaagagcuucugca

SEQ ID NO: 735225 - RNA, 17 nt, Artificial Sequence
  Synthetic
uucuagaaaguucugca

SEQ ID NO: 735226 - RNA, 17 nt, Artificial Sequence
  Synthetic
uugccucaauuucugca

SEQ ID NO: 735227 - RNA, 17 nt, Artificial Sequence
  Synthetic
uuguauauauuucugca

SEQ ID NO: 735228 - RNA, 17 nt, Artificial Sequence
  Synthetic
acugcagccuuucugca

SEQ ID NO: 735229 - RNA, 17 nt, Artificial Sequence
  Synthetic
uauaacauaaaagugca

SEQ ID NO: 735230 - RNA, 17 nt, Artificial Sequence
  Synthetic
uggaucaguaaagugca

SEQ ID NO: 735231 - RNA, 17 nt, Artificial Sequence
  Synthetic
uauucaauuaaagugca

SEQ ID NO: 735232 - RNA, 17 nt, Artificial Sequence
  Synthetic
aaauggagagaagugca

SEQ ID NO: 735233 - RNA, 17 nt, Artificial Sequence
  Synthetic
aggcaaggggaagugca

SEQ ID NO: 735234 - RNA, 17 nt, Artificial Sequence
  Synthetic
uaauguacugaagugca

SEQ ID NO: 735235 - RNA, 17 nt, Artificial Sequence
  Synthetic
acacuuggaacagugca

SEQ ID NO: 735236 - RNA, 17 nt, Artificial Sequence
  Synthetic
uucuggauaucagugca

SEQ ID NO: 735237 - RNA, 17 nt, Artificial Sequence
  Synthetic
auaagaaagagagugca

SEQ ID NO: 735238 - RNA, 17 nt, Artificial Sequence
  Synthetic
cuauuuuaaauagugca

SEQ ID NO: 735239 - RNA, 17 nt, Artificial Sequence
  Synthetic
agggaccuccuagugca

SEQ ID NO: 735240 - RNA, 17 nt, Artificial Sequence
  Synthetic
aaagccagucuagugca

SEQ ID NO: 735241 - RNA, 17 nt, Artificial Sequence
  Synthetic
agucaagucuuagugca

SEQ ID NO: 735242 - RNA, 17 nt, Artificial Sequence
  Synthetic
caaaaauuagccgugca

SEQ ID NO: 735243 - RNA, 17 nt, Artificial Sequence
  Synthetic
agguggugacaggugca

SEQ ID NO: 735244 - RNA, 17 nt, Artificial Sequence
  Synthetic
ucauugagcuaggugca

SEQ ID NO: 735245 - RNA, 17 nt, Artificial Sequence
  Synthetic
uguuagaggauggugca

SEQ ID NO: 735246 - RNA, 17 nt, Artificial Sequence
  Synthetic
aaacacacaguggugca

SEQ ID NO: 735247 - RNA, 17 nt, Artificial Sequence
  Synthetic
agugguagaguggugca

SEQ ID NO: 735248 - RNA, 17 nt, Artificial Sequence
  Synthetic
ccaggcgugguggugca

SEQ ID NO: 735249 - RNA, 17 nt, Artificial Sequence
  Synthetic
acucuaaaaaaugugca

SEQ ID NO: 735250 - RNA, 17 nt, Artificial Sequence
  Synthetic
cucuauuugaaugugca

SEQ ID NO: 735251 - RNA, 17 nt, Artificial Sequence
  Synthetic
ugugcuuaacaugugca

SEQ ID NO: 735252 - RNA, 17 nt, Artificial Sequence
  Synthetic
cagucagugccugugca

SEQ ID NO: 735253 - RNA, 17 nt, Artificial Sequence
  Synthetic
uacagcauagcugugca

SEQ ID NO: 735254 - RNA, 17 nt, Artificial Sequence
  Synthetic
ccuaccaacagugugca

SEQ ID NO: 735255 - RNA, 17 nt, Artificial Sequence
  Synthetic
ugugcuuacagugugca

SEQ ID NO: 735256 - RNA, 17 nt, Artificial Sequence
  Synthetic
aagugugggggugugca

SEQ ID NO: 735257 - RNA, 17 nt, Artificial Sequence
  Synthetic
cuguuucuaauugugca

SEQ ID NO: 735258 - RNA, 17 nt, Artificial Sequence
  Synthetic
uuuguagugauugugca

SEQ ID NO: 735259 - RNA, 17 nt, Artificial Sequence
  Synthetic
agucaugaccuugugca

SEQ ID NO: 735260 - RNA, 17 nt, Artificial Sequence
  Synthetic
ucugggaaccaauugca

SEQ ID NO: 735261 - RNA, 17 nt, Artificial Sequence
  Synthetic
uuuccuucuccauugca

SEQ ID NO: 735262 - RNA, 17 nt, Artificial Sequence
  Synthetic
aaacuuaauagauugca

SEQ ID NO: 735263 - RNA, 17 nt, Artificial Sequence
  Synthetic
ucauuauuuagauugca

SEQ ID NO: 735264 - RNA, 17 nt, Artificial Sequence
  Synthetic
acagauuggugauugca

SEQ ID NO: 735265 - RNA, 17 nt, Artificial Sequence
  Synthetic
agguacagcauauugca

SEQ ID NO: 735266 - RNA, 17 nt, Artificial Sequence
  Synthetic
cucagcaaacuauugca

SEQ ID NO: 735267 - RNA, 17 nt, Artificial Sequence
  Synthetic
uugguaguuuuauugca

SEQ ID NO: 735268 - RNA, 17 nt, Artificial Sequence
  Synthetic
uaggaauacaacuugca

SEQ ID NO: 735269 - RNA, 17 nt, Artificial Sequence
  Synthetic
cccuaccuccacuugca

SEQ ID NO: 735270 - RNA, 17 nt, Artificial Sequence
  Synthetic
cauaucaaagacuugca

SEQ ID NO: 735271 - RNA, 17 nt, Artificial Sequence
  Synthetic
cauuucaaacccuugca

SEQ ID NO: 735272 - RNA, 17 nt, Artificial Sequence
  Synthetic
ccaaagaggcccuugca

SEQ ID NO: 735273 - RNA, 17 nt, Artificial Sequence
  Synthetic
aauguuucuagcuugca

SEQ ID NO: 735274 - RNA, 17 nt, Artificial Sequence
  Synthetic
ugcaaaacaggcuugca

SEQ ID NO: 735275 - RNA, 17 nt, Artificial Sequence
  Synthetic
uccagcuucugcuugca

SEQ ID NO: 735276 - RNA, 17 nt, Artificial Sequence
  Synthetic
acagcuaaaaucuugca

SEQ ID NO: 735277 - RNA, 17 nt, Artificial Sequence
  Synthetic
acacacacgaucuugca

SEQ ID NO: 735278 - RNA, 17 nt, Artificial Sequence
  Synthetic
aguuguauuuucuugca

SEQ ID NO: 735279 - RNA, 17 nt, Artificial Sequence
  Synthetic
aguuuaguaaaguugca

SEQ ID NO: 735280 - RNA, 17 nt, Artificial Sequence
  Synthetic
aaauauaggaaguugca

SEQ ID NO: 735281 - RNA, 17 nt, Artificial Sequence
  Synthetic
aucuguguucaguugca

SEQ ID NO: 735282 - RNA, 17 nt, Artificial Sequence
  Synthetic
aaaaaaauagaguugca

SEQ ID NO: 735283 - RNA, 17 nt, Artificial Sequence
  Synthetic
uuagacaaauaguugca

SEQ ID NO: 735284 - RNA, 17 nt, Artificial Sequence
  Synthetic
uuuacuuauuaguugca

SEQ ID NO: 735285 - RNA, 17 nt, Artificial Sequence
  Synthetic
uauggcaguuaguugca

SEQ ID NO: 735286 - RNA, 17 nt, Artificial Sequence
  Synthetic
auuaucuugacguugca

SEQ ID NO: 735287 - RNA, 17 nt, Artificial Sequence
  Synthetic
acuccuuuggcguugca

SEQ ID NO: 735288 - RNA, 17 nt, Artificial Sequence
  Synthetic
cagcuauuaugguugca

SEQ ID NO: 735289 - RNA, 17 nt, Artificial Sequence
  Synthetic
uuaagaguaauguugca

SEQ ID NO: 735290 - RNA, 17 nt, Artificial Sequence
  Synthetic
acagcucuacuguugca

SEQ ID NO: 735291 - RNA, 17 nt, Artificial Sequence
  Synthetic
cuuccccaaaauuugca

SEQ ID NO: 735292 - RNA, 17 nt, Artificial Sequence
  Synthetic
aaauccuaaaauuugca

SEQ ID NO: 735293 - RNA, 17 nt, Artificial Sequence
  Synthetic
cuguaucucaauuugca

SEQ ID NO: 735294 - RNA, 17 nt, Artificial Sequence
  Synthetic
uuuauuaguaauuugca

SEQ ID NO: 735295 - RNA, 17 nt, Artificial Sequence
  Synthetic
uacaccauuaauuugca

SEQ ID NO: 735296 - RNA, 17 nt, Artificial Sequence
  Synthetic
uuuaguuuuaauuugca

SEQ ID NO: 735297 - RNA, 17 nt, Artificial Sequence
  Synthetic
uguugggcacauuugca

SEQ ID NO: 735298 - RNA, 17 nt, Artificial Sequence
  Synthetic
uuugguucccauuugca

SEQ ID NO: 735299 - RNA, 17 nt, Artificial Sequence
  Synthetic
uuugguuuccauuugca

SEQ ID NO: 735300 - RNA, 17 nt, Artificial Sequence
  Synthetic
uuugaauucgauuugca

SEQ ID NO: 735301 - RNA, 17 nt, Artificial Sequence
  Synthetic
uucccgcaauauuugca

SEQ ID NO: 735302 - RNA, 17 nt, Artificial Sequence
  Synthetic
agagugauguauuugca

SEQ ID NO: 735303 - RNA, 17 nt, Artificial Sequence
  Synthetic
caguaaaauccuuugca

SEQ ID NO: 735304 - RNA, 17 nt, Artificial Sequence
  Synthetic
acauuugguccuuugca

SEQ ID NO: 735305 - RNA, 17 nt, Artificial Sequence
  Synthetic
agaucauguccuuugca

SEQ ID NO: 735306 - RNA, 17 nt, Artificial Sequence
  Synthetic
acuucauguccuuugca

SEQ ID NO: 735307 - RNA, 17 nt, Artificial Sequence
  Synthetic
aguucauguccuuugca

SEQ ID NO: 735308 - RNA, 17 nt, Artificial Sequence
  Synthetic
uuuagguaagcuuugca

SEQ ID NO: 735309 - RNA, 17 nt, Artificial Sequence
  Synthetic
uugaauugagcuuugca

SEQ ID NO: 735310 - RNA, 17 nt, Artificial Sequence
  Synthetic
uccugcauggcuuugca

SEQ ID NO: 735311 - RNA, 17 nt, Artificial Sequence
  Synthetic
accccuguggguuugca

SEQ ID NO: 735312 - RNA, 17 nt, Artificial Sequence
  Synthetic
ugacucacugguuugca

SEQ ID NO: 735313 - RNA, 17 nt, Artificial Sequence
  Synthetic
caccuugaauguuugca

SEQ ID NO: 735314 - RNA, 17 nt, Artificial Sequence
  Synthetic
ugguaauguuguuugca

SEQ ID NO: 735315 - RNA, 17 nt, Artificial Sequence
  Synthetic
caauauuagauuuugca

SEQ ID NO: 735316 - RNA, 17 nt, Artificial Sequence
  Synthetic
ugaaauaauauuuugca

SEQ ID NO: 735317 - RNA, 17 nt, Artificial Sequence
  Synthetic
agacaucuaguuuugca

SEQ ID NO: 735318 - RNA, 17 nt, Artificial Sequence
  Synthetic
auuuagucauuuuugca

SEQ ID NO: 735319 - RNA, 17 nt, Artificial Sequence
  Synthetic
uguacuauauuuuugca

SEQ ID NO: 735320 - RNA, 17 nt, Artificial Sequence
  Synthetic
uuacugaacuuuuugca

SEQ ID NO: 735321 - RNA, 17 nt, Artificial Sequence
  Synthetic
cauucaagguuuuugca

SEQ ID NO: 735322 - RNA, 17 nt, Artificial Sequence
  Synthetic
agcacagaaaaaaauca

SEQ ID NO: 735323 - RNA, 17 nt, Artificial Sequence
  Synthetic
aaacaauaaaaaaauca

SEQ ID NO: 735324 - RNA, 17 nt, Artificial Sequence
  Synthetic
uuauggcuaaaaaauca

SEQ ID NO: 735325 - RNA, 17 nt, Artificial Sequence
  Synthetic
uguugucucaaaaauca

SEQ ID NO: 735326 - RNA, 17 nt, Artificial Sequence
  Synthetic
aaaaaggagaaaaauca

SEQ ID NO: 735327 - RNA, 17 nt, Artificial Sequence
  Synthetic
uggacuaauaaaaauca

SEQ ID NO: 735328 - RNA, 17 nt, Artificial Sequence
  Synthetic
aaaaacuaacaaaauca

SEQ ID NO: 735329 - RNA, 17 nt, Artificial Sequence
  Synthetic
cuagguguccaaaauca

SEQ ID NO: 735330 - RNA, 17 nt, Artificial Sequence
  Synthetic
cagcggcaucaaaauca

SEQ ID NO: 735331 - RNA, 17 nt, Artificial Sequence
  Synthetic
aaaagagaucaaaauca

SEQ ID NO: 735332 - RNA, 17 nt, Artificial Sequence
  Synthetic
uuugagucucaaaauca

SEQ ID NO: 735333 - RNA, 17 nt, Artificial Sequence
  Synthetic
auuaaagaauaaaauca

SEQ ID NO: 735334 - RNA, 17 nt, Artificial Sequence
  Synthetic
aaaugaagauaaaauca

SEQ ID NO: 735335 - RNA, 17 nt, Artificial Sequence
  Synthetic
uugaaauuguaaaauca

SEQ ID NO: 735336 - RNA, 17 nt, Artificial Sequence
  Synthetic
caggaaacuuaaaauca

SEQ ID NO: 735337 - RNA, 17 nt, Artificial Sequence
  Synthetic
uauagaaucgcaaauca

SEQ ID NO: 735338 - RNA, 17 nt, Artificial Sequence
  Synthetic
uuaaaagagucaaauca

SEQ ID NO: 735339 - RNA, 17 nt, Artificial Sequence
  Synthetic
aaaagaaaaagaaauca

SEQ ID NO: 735340 - RNA, 17 nt, Artificial Sequence
  Synthetic
uccaggagaagaaauca

SEQ ID NO: 735341 - RNA, 17 nt, Artificial Sequence
  Synthetic
uauaaauacagaaauca

SEQ ID NO: 735342 - RNA, 17 nt, Artificial Sequence
  Synthetic
auuuguuucagaaauca

SEQ ID NO: 735343 - RNA, 17 nt, Artificial Sequence
  Synthetic
acuagaucaugaaauca

SEQ ID NO: 735344 - RNA, 17 nt, Artificial Sequence
  Synthetic
agucaaaccugaaauca

SEQ ID NO: 735345 - RNA, 17 nt, Artificial Sequence
  Synthetic
ugugcugcuugaaauca

SEQ ID NO: 735346 - RNA, 17 nt, Artificial Sequence
  Synthetic
agcuugcaaauaaauca

SEQ ID NO: 735347 - RNA, 17 nt, Artificial Sequence
  Synthetic
ucauauuaaauaaauca

SEQ ID NO: 735348 - RNA, 17 nt, Artificial Sequence
  Synthetic
ucugauuccauaaauca

SEQ ID NO: 735349 - RNA, 17 nt, Artificial Sequence
  Synthetic
auauuggggauaaauca

SEQ ID NO: 735350 - RNA, 17 nt, Artificial Sequence
  Synthetic
uccuguuagcuaaauca

SEQ ID NO: 735351 - RNA, 17 nt, Artificial Sequence
  Synthetic
auuuauggaguaaauca

SEQ ID NO: 735352 - RNA, 17 nt, Artificial Sequence
  Synthetic
agaagucuuuuaaauca

SEQ ID NO: 735353 - RNA, 17 nt, Artificial Sequence
  Synthetic
cuuucagaaaacaauca

SEQ ID NO: 735354 - RNA, 17 nt, Artificial Sequence
  Synthetic
auaagcaccaacaauca

SEQ ID NO: 735355 - RNA, 17 nt, Artificial Sequence
  Synthetic
agccaugcuaacaauca

SEQ ID NO: 735356 - RNA, 17 nt, Artificial Sequence
  Synthetic
ugacauugacacaauca

SEQ ID NO: 735357 - RNA, 17 nt, Artificial Sequence
  Synthetic
uccaccugggacaauca

SEQ ID NO: 735358 - RNA, 17 nt, Artificial Sequence
  Synthetic
caggaaacuuacaauca

SEQ ID NO: 735359 - RNA, 17 nt, Artificial Sequence
  Synthetic
ccggaaacuuacaauca

SEQ ID NO: 735360 - RNA, 17 nt, Artificial Sequence
  Synthetic
uaccuauaacccaauca

SEQ ID NO: 735361 - RNA, 17 nt, Artificial Sequence
  Synthetic
cacauagcacccaauca

SEQ ID NO: 735362 - RNA, 17 nt, Artificial Sequence
  Synthetic
uagcucagccccaauca

SEQ ID NO: 735363 - RNA, 17 nt, Artificial Sequence
  Synthetic
uaggguuuggccaauca

SEQ ID NO: 735364 - RNA, 17 nt, Artificial Sequence
  Synthetic
auuacguuaagcaauca

SEQ ID NO: 735365 - RNA, 17 nt, Artificial Sequence
  Synthetic
ucuuuguuaagcaauca

SEQ ID NO: 735366 - RNA, 17 nt, Artificial Sequence
  Synthetic
ucaccuuuaagcaauca

SEQ ID NO: 735367 - RNA, 17 nt, Artificial Sequence
  Synthetic
agugaaaagagcaauca

SEQ ID NO: 735368 - RNA, 17 nt, Artificial Sequence
  Synthetic
ucccuaauuagcaauca

SEQ ID NO: 735369 - RNA, 17 nt, Artificial Sequence
  Synthetic
uuggugcagugcaauca

SEQ ID NO: 735370 - RNA, 17 nt, Artificial Sequence
  Synthetic
uauaacaacaucaauca

SEQ ID NO: 735371 - RNA, 17 nt, Artificial Sequence
  Synthetic
caagugaaguucaauca

SEQ ID NO: 735372 - RNA, 17 nt, Artificial Sequence
  Synthetic
uauaaaagguucaauca

SEQ ID NO: 735373 - RNA, 17 nt, Artificial Sequence
  Synthetic
aaugugaguuucaauca

SEQ ID NO: 735374 - RNA, 17 nt, Artificial Sequence
  Synthetic
aaugacccaaagaauca

SEQ ID NO: 735375 - RNA, 17 nt, Artificial Sequence
  Synthetic
auaggagguaagaauca

SEQ ID NO: 735376 - RNA, 17 nt, Artificial Sequence
  Synthetic
ugugguaggcagaauca

SEQ ID NO: 735377 - RNA, 17 nt, Artificial Sequence
  Synthetic
ugguaaccugggaauca

SEQ ID NO: 735378 - RNA, 17 nt, Artificial Sequence
  Synthetic
uuguuaggauggaauca

SEQ ID NO: 735379 - RNA, 17 nt, Artificial Sequence
  Synthetic
aaauguaguuggaauca

SEQ ID NO: 735380 - RNA, 17 nt, Artificial Sequence
  Synthetic
cuguaaaagaugaauca

SEQ ID NO: 735381 - RNA, 17 nt, Artificial Sequence
  Synthetic
uggagguaacugaauca

SEQ ID NO: 735382 - RNA, 17 nt, Artificial Sequence
  Synthetic
ugauaacaagugaauca

SEQ ID NO: 735383 - RNA, 17 nt, Artificial Sequence
  Synthetic
ugcagauaauugaauca

SEQ ID NO: 735384 - RNA, 17 nt, Artificial Sequence
  Synthetic
uggagauaauugaauca

SEQ ID NO: 735385 - RNA, 17 nt, Artificial Sequence
  Synthetic
gggagguaauugaauca

SEQ ID NO: 735386 - RNA, 17 nt, Artificial Sequence
  Synthetic
uggagguaauugaauca

SEQ ID NO: 735387 - RNA, 17 nt, Artificial Sequence
  Synthetic
auuacucuaaauaauca

SEQ ID NO: 735388 - RNA, 17 nt, Artificial Sequence
  Synthetic
aauaacaauaauaauca

SEQ ID NO: 735389 - RNA, 17 nt, Artificial Sequence
  Synthetic
uuuguucgacauaauca

SEQ ID NO: 735390 - RNA, 17 nt, Artificial Sequence
  Synthetic
aaccauccccauaauca

SEQ ID NO: 735391 - RNA, 17 nt, Artificial Sequence
  Synthetic
uucacagugcauaauca

SEQ ID NO: 735392 - RNA, 17 nt, Artificial Sequence
  Synthetic
cagccuaaguauaauca

SEQ ID NO: 735393 - RNA, 17 nt, Artificial Sequence
  Synthetic
caggaaacuuauaauca

SEQ ID NO: 735394 - RNA, 17 nt, Artificial Sequence
  Synthetic
aacuucauuuauaauca

SEQ ID NO: 735395 - RNA, 17 nt, Artificial Sequence
  Synthetic
ccauuuugaacuaauca

SEQ ID NO: 735396 - RNA, 17 nt, Artificial Sequence
  Synthetic
uggugcaaaaguaauca

SEQ ID NO: 735397 - RNA, 17 nt, Artificial Sequence
  Synthetic
aguaaggccaguaauca

SEQ ID NO: 735398 - RNA, 17 nt, Artificial Sequence
  Synthetic
uuguagaaagguaauca

SEQ ID NO: 735399 - RNA, 17 nt, Artificial Sequence
  Synthetic
cugagauccuguaauca

SEQ ID NO: 735400 - RNA, 17 nt, Artificial Sequence
  Synthetic
uaucuaguucuuaauca

SEQ ID NO: 735401 - RNA, 17 nt, Artificial Sequence
  Synthetic
ccucucaaaaaacauca

SEQ ID NO: 735402 - RNA, 17 nt, Artificial Sequence
  Synthetic
aguuuuuaaaaacauca

SEQ ID NO: 735403 - RNA, 17 nt, Artificial Sequence
  Synthetic
ugcaugagaaaacauca

SEQ ID NO: 735404 - RNA, 17 nt, Artificial Sequence
  Synthetic
uaacaaauaaaacauca

SEQ ID NO: 735405 - RNA, 17 nt, Artificial Sequence
  Synthetic
auuaagaggaaacauca

SEQ ID NO: 735406 - RNA, 17 nt, Artificial Sequence
  Synthetic
cuucuauuacaacauca

SEQ ID NO: 735407 - RNA, 17 nt, Artificial Sequence
  Synthetic
ucccuaguccaacauca

SEQ ID NO: 735408 - RNA, 17 nt, Artificial Sequence
  Synthetic
uuucauuugcaacauca

SEQ ID NO: 735409 - RNA, 17 nt, Artificial Sequence
  Synthetic
auuauguuauaacauca

SEQ ID NO: 735410 - RNA, 17 nt, Artificial Sequence
  Synthetic
caacucugaacacauca

SEQ ID NO: 735411 - RNA, 17 nt, Artificial Sequence
  Synthetic
aggaaaaagacacauca

SEQ ID NO: 735412 - RNA, 17 nt, Artificial Sequence
  Synthetic
uaauuaaagacacauca

SEQ ID NO: 735413 - RNA, 17 nt, Artificial Sequence
  Synthetic
uacagauuuacacauca

SEQ ID NO: 735414 - RNA, 17 nt, Artificial Sequence
  Synthetic
uaaaacuucccacauca

SEQ ID NO: 735415 - RNA, 17 nt, Artificial Sequence
  Synthetic
uacaguacugcacauca

SEQ ID NO: 735416 - RNA, 17 nt, Artificial Sequence
  Synthetic
augaaauagucacauca

SEQ ID NO: 735417 - RNA, 17 nt, Artificial Sequence
  Synthetic
ugcucuuggucacauca

SEQ ID NO: 735418 - RNA, 17 nt, Artificial Sequence
  Synthetic
auagguuuuggacauca

SEQ ID NO: 735419 - RNA, 17 nt, Artificial Sequence
  Synthetic
auauuugaccuacauca

SEQ ID NO: 735420 - RNA, 17 nt, Artificial Sequence
  Synthetic
ugcuuaaggcuacauca

SEQ ID NO: 735421 - RNA, 17 nt, Artificial Sequence
  Synthetic
cccugguagguacauca

SEQ ID NO: 735422 - RNA, 17 nt, Artificial Sequence
  Synthetic
augaauucuaaccauca

SEQ ID NO: 735423 - RNA, 17 nt, Artificial Sequence
  Synthetic
aggagaugucaccauca

SEQ ID NO: 735424 - RNA, 17 nt, Artificial Sequence
  Synthetic
uccagcugggaccauca

SEQ ID NO: 735425 - RNA, 17 nt, Artificial Sequence
  Synthetic
aaguucuaugcccauca

SEQ ID NO: 735426 - RNA, 17 nt, Artificial Sequence
  Synthetic
aguggcuugggccauca

SEQ ID NO: 735427 - RNA, 17 nt, Artificial Sequence
  Synthetic
aaugcaugaugccauca

SEQ ID NO: 735428 - RNA, 17 nt, Artificial Sequence
  Synthetic
ucuucuauacuccauca

SEQ ID NO: 735429 - RNA, 17 nt, Artificial Sequence
  Synthetic
augcuuacuguccauca

SEQ ID NO: 735430 - RNA, 17 nt, Artificial Sequence
  Synthetic
ucuuccaccuuccauca

SEQ ID NO: 735431 - RNA, 17 nt, Artificial Sequence
  Synthetic
acauaggguuuccauca

SEQ ID NO: 735432 - RNA, 17 nt, Artificial Sequence
  Synthetic
aaaagaaaaaagcauca

SEQ ID NO: 735433 - RNA, 17 nt, Artificial Sequence
  Synthetic
caauaugaaaagcauca

SEQ ID NO: 735434 - RNA, 17 nt, Artificial Sequence
  Synthetic
auacuccuaaagcauca

SEQ ID NO: 735435 - RNA, 17 nt, Artificial Sequence
  Synthetic
uauuuccccuagcauca

SEQ ID NO: 735436 - RNA, 17 nt, Artificial Sequence
  Synthetic
uugauaaauuagcauca

SEQ ID NO: 735437 - RNA, 17 nt, Artificial Sequence
  Synthetic
aaaauucauuggcauca

SEQ ID NO: 735438 - RNA, 17 nt, Artificial Sequence
  Synthetic
uaauccaacaugcauca

SEQ ID NO: 735439 - RNA, 17 nt, Artificial Sequence
  Synthetic
ugguguggucugcauca

SEQ ID NO: 735440 - RNA, 17 nt, Artificial Sequence
  Synthetic
aaaagaacauugcauca

SEQ ID NO: 735441 - RNA, 17 nt, Artificial Sequence
  Synthetic
uuuaucauguugcauca

SEQ ID NO: 735442 - RNA, 17 nt, Artificial Sequence
  Synthetic
cauuugaaaaaucauca

SEQ ID NO: 735443 - RNA, 17 nt, Artificial Sequence
  Synthetic
caaagugacaaucauca

SEQ ID NO: 735444 - RNA, 17 nt, Artificial Sequence
  Synthetic
aggugacuggaucauca

SEQ ID NO: 735445 - RNA, 17 nt, Artificial Sequence
  Synthetic
ccucugagguaucauca

SEQ ID NO: 735446 - RNA, 17 nt, Artificial Sequence
  Synthetic
caaauguauuaucauca

SEQ ID NO: 735447 - RNA, 17 nt, Artificial Sequence
  Synthetic
aucauccuuacucauca

SEQ ID NO: 735448 - RNA, 17 nt, Artificial Sequence
  Synthetic
acccccaccccucauca

SEQ ID NO: 735449 - RNA, 17 nt, Artificial Sequence
  Synthetic
accccuuugccucauca

SEQ ID NO: 735450 - RNA, 17 nt, Artificial Sequence
  Synthetic
augaauagagcucauca

SEQ ID NO: 735451 - RNA, 17 nt, Artificial Sequence
  Synthetic
aucuuucuaucucauca

SEQ ID NO: 735452 - RNA, 17 nt, Artificial Sequence
  Synthetic
agcaucacuagucauca

SEQ ID NO: 735453 - RNA, 17 nt, Artificial Sequence
  Synthetic
ucugggcgaggucauca

SEQ ID NO: 735454 - RNA, 17 nt, Artificial Sequence
  Synthetic
aaagcuauaugucauca

SEQ ID NO: 735455 - RNA, 17 nt, Artificial Sequence
  Synthetic
auuaauugaauucauca

SEQ ID NO: 735456 - RNA, 17 nt, Artificial Sequence
  Synthetic
ucucaugagauucauca

SEQ ID NO: 735457 - RNA, 17 nt, Artificial Sequence
  Synthetic
agacauacaguucauca

SEQ ID NO: 735458 - RNA, 17 nt, Artificial Sequence
  Synthetic
ugcaucgauguucauca

SEQ ID NO: 735459 - RNA, 17 nt, Artificial Sequence
  Synthetic
cgcauugauguucauca

SEQ ID NO: 735460 - RNA, 17 nt, Artificial Sequence
  Synthetic
aagacaagcuuucauca

SEQ ID NO: 735461 - RNA, 17 nt, Artificial Sequence
  Synthetic
uaaugaaaaaaagauca

SEQ ID NO: 735462 - RNA, 17 nt, Artificial Sequence
  Synthetic
aaagcuauuaaagauca

SEQ ID NO: 735463 - RNA, 17 nt, Artificial Sequence
  Synthetic
uggaauguuaaagauca

SEQ ID NO: 735464 - RNA, 17 nt, Artificial Sequence
  Synthetic
ugagaaguacaagauca

SEQ ID NO: 735465 - RNA, 17 nt, Artificial Sequence
  Synthetic
ugcgaaguccaagauca

SEQ ID NO: 735466 - RNA, 17 nt, Artificial Sequence
  Synthetic
cugggauuccaagauca

SEQ ID NO: 735467 - RNA, 17 nt, Artificial Sequence
  Synthetic
ugggaaguucaagauca

SEQ ID NO: 735468 - RNA, 17 nt, Artificial Sequence
  Synthetic
cagacaauguaagauca

SEQ ID NO: 735469 - RNA, 17 nt, Artificial Sequence
  Synthetic
ugaacccuuacagauca

SEQ ID NO: 735470 - RNA, 17 nt, Artificial Sequence
  Synthetic
uucugaaugccagauca

SEQ ID NO: 735471 - RNA, 17 nt, Artificial Sequence
  Synthetic
ccuuucuaugcagauca

SEQ ID NO: 735472 - RNA, 17 nt, Artificial Sequence
  Synthetic
cuuauugccagagauca

SEQ ID NO: 735473 - RNA, 17 nt, Artificial Sequence
  Synthetic
agauucuucagagauca

SEQ ID NO: 735474 - RNA, 17 nt, Artificial Sequence
  Synthetic
uacuuacaaggagauca

SEQ ID NO: 735475 - RNA, 17 nt, Artificial Sequence
  Synthetic
aucuaagcaggagauca

SEQ ID NO: 735476 - RNA, 17 nt, Artificial Sequence
  Synthetic
uugaaccugggagauca

SEQ ID NO: 735477 - RNA, 17 nt, Artificial Sequence
  Synthetic
uguauucucugagauca

SEQ ID NO: 735478 - RNA, 17 nt, Artificial Sequence
  Synthetic
auagaagucugagauca

SEQ ID NO: 735479 - RNA, 17 nt, Artificial Sequence
  Synthetic
uaauucaaaauagauca

SEQ ID NO: 735480 - RNA, 17 nt, Artificial Sequence
  Synthetic
aauuaagcccuagauca

SEQ ID NO: 735481 - RNA, 17 nt, Artificial Sequence
  Synthetic
uuggaaaaaguagauca

SEQ ID NO: 735482 - RNA, 17 nt, Artificial Sequence
  Synthetic
aggguagguuuagauca

SEQ ID NO: 735483 - RNA, 17 nt, Artificial Sequence
  Synthetic
uuuucaaagcacgauca

SEQ ID NO: 735484 - RNA, 17 nt, Artificial Sequence
  Synthetic
aacaguauacaggauca

SEQ ID NO: 735485 - RNA, 17 nt, Artificial Sequence
  Synthetic
uguacuucauaggauca

SEQ ID NO: 735486 - RNA, 17 nt, Artificial Sequence
  Synthetic
aaaagucacuaggauca

SEQ ID NO: 735487 - RNA, 17 nt, Artificial Sequence
  Synthetic
aagacuagaagggauca

SEQ ID NO: 735488 - RNA, 17 nt, Artificial Sequence
  Synthetic
uguaguggaauggauca

SEQ ID NO: 735489 - RNA, 17 nt, Artificial Sequence
  Synthetic
aauuuuuccauggauca

SEQ ID NO: 735490 - RNA, 17 nt, Artificial Sequence
  Synthetic
cuccaaaugguggauca

SEQ ID NO: 735491 - RNA, 17 nt, Artificial Sequence
  Synthetic
uucagguuuuuggauca

SEQ ID NO: 735492 - RNA, 17 nt, Artificial Sequence
  Synthetic
agaaaagagaaugauca

SEQ ID NO: 735493 - RNA, 17 nt, Artificial Sequence
  Synthetic
uuuucacagcaugauca

SEQ ID NO: 735494 - RNA, 17 nt, Artificial Sequence
  Synthetic
aacaauaaauaugauca

SEQ ID NO: 735495 - RNA, 17 nt, Artificial Sequence
  Synthetic
ugagugcuguaugauca

SEQ ID NO: 735496 - RNA, 17 nt, Artificial Sequence
  Synthetic
cuuaaagauacugauca

SEQ ID NO: 735497 - RNA, 17 nt, Artificial Sequence
  Synthetic
aaacauucaccugauca

SEQ ID NO: 735498 - RNA, 17 nt, Artificial Sequence
  Synthetic
auuuccuauucugauca

SEQ ID NO: 735499 - RNA, 17 nt, Artificial Sequence
  Synthetic
cauuguacuagugauca

SEQ ID NO: 735500 - RNA, 17 nt, Artificial Sequence
  Synthetic
ugcuuguguggugauca

SEQ ID NO: 735501 - RNA, 17 nt, Artificial Sequence
  Synthetic
cuugcaaauugugauca

SEQ ID NO: 735502 - RNA, 17 nt, Artificial Sequence
  Synthetic
uggcugcugauugauca

SEQ ID NO: 735503 - RNA, 17 nt, Artificial Sequence
  Synthetic
ugaagcccacuugauca

SEQ ID NO: 735504 - RNA, 17 nt, Artificial Sequence
  Synthetic
auaacaaguguugauca

SEQ ID NO: 735505 - RNA, 17 nt, Artificial Sequence
  Synthetic
uaacccaccaaauauca

SEQ ID NO: 735506 - RNA, 17 nt, Artificial Sequence
  Synthetic
aagguuauccaauauca

SEQ ID NO: 735507 - RNA, 17 nt, Artificial Sequence
  Synthetic
cuagcgggucaauauca

SEQ ID NO: 735508 - RNA, 17 nt, Artificial Sequence
  Synthetic
agacaauaguaauauca

SEQ ID NO: 735509 - RNA, 17 nt, Artificial Sequence
  Synthetic
aaaauauguuaauauca

SEQ ID NO: 735510 - RNA, 17 nt, Artificial Sequence
  Synthetic
ccauaaauuacauauca

SEQ ID NO: 735511 - RNA, 17 nt, Artificial Sequence
  Synthetic
agguugauuccauauca

SEQ ID NO: 735512 - RNA, 17 nt, Artificial Sequence
  Synthetic
ccaagcaggagauauca

SEQ ID NO: 735513 - RNA, 17 nt, Artificial Sequence
  Synthetic
auaaaagaaugauauca

SEQ ID NO: 735514 - RNA, 17 nt, Artificial Sequence
  Synthetic
caagccaaaauauauca

SEQ ID NO: 735515 - RNA, 17 nt, Artificial Sequence
  Synthetic
aagaaaggaauauauca

SEQ ID NO: 735516 - RNA, 17 nt, Artificial Sequence
  Synthetic
caucauguaauauauca

SEQ ID NO: 735517 - RNA, 17 nt, Artificial Sequence
  Synthetic
aauuuaugcauauauca

SEQ ID NO: 735518 - RNA, 17 nt, Artificial Sequence
  Synthetic
auauguuggauauauca

SEQ ID NO: 735519 - RNA, 17 nt, Artificial Sequence
  Synthetic
auauccaaacuauauca

SEQ ID NO: 735520 - RNA, 17 nt, Artificial Sequence
  Synthetic
auuucaaaaaccuauca

SEQ ID NO: 735521 - RNA, 17 nt, Artificial Sequence
  Synthetic
ugcuaaugaagcuauca

SEQ ID NO: 735522 - RNA, 17 nt, Artificial Sequence
  Synthetic
ccucccagcugcuauca

SEQ ID NO: 735523 - RNA, 17 nt, Artificial Sequence
  Synthetic
caguccaaaaucuauca

SEQ ID NO: 735524 - RNA, 17 nt, Artificial Sequence
  Synthetic
uaggcaugcaaguauca

SEQ ID NO: 735525 - RNA, 17 nt, Artificial Sequence
  Synthetic
acguauaaugaguauca

SEQ ID NO: 735526 - RNA, 17 nt, Artificial Sequence
  Synthetic
aauaucccuuaguauca

SEQ ID NO: 735527 - RNA, 17 nt, Artificial Sequence
  Synthetic
uuuuaaauaggguauca

SEQ ID NO: 735528 - RNA, 17 nt, Artificial Sequence
  Synthetic
acaagaauuggguauca

SEQ ID NO: 735529 - RNA, 17 nt, Artificial Sequence
  Synthetic
uagguauacauguauca

SEQ ID NO: 735530 - RNA, 17 nt, Artificial Sequence
  Synthetic
ugaaagaggcuguauca

SEQ ID NO: 735531 - RNA, 17 nt, Artificial Sequence
  Synthetic
cugaaauugcuguauca

SEQ ID NO: 735532 - RNA, 17 nt, Artificial Sequence
  Synthetic
uuacagagacauuauca

SEQ ID NO: 735533 - RNA, 17 nt, Artificial Sequence
  Synthetic
augguuccauauuauca

SEQ ID NO: 735534 - RNA, 17 nt, Artificial Sequence
  Synthetic
ugauuacuuuauuauca

SEQ ID NO: 735535 - RNA, 17 nt, Artificial Sequence
  Synthetic
augcagaauacuuauca

SEQ ID NO: 735536 - RNA, 17 nt, Artificial Sequence
  Synthetic
agguacuaugcuuauca

SEQ ID NO: 735537 - RNA, 17 nt, Artificial Sequence
  Synthetic
cuaucaaaaucuuauca

SEQ ID NO: 735538 - RNA, 17 nt, Artificial Sequence
  Synthetic
uugauuacuucuuauca

SEQ ID NO: 735539 - RNA, 17 nt, Artificial Sequence
  Synthetic
agguuaauggguuauca

SEQ ID NO: 735540 - RNA, 17 nt, Artificial Sequence
  Synthetic
aaaggagaaauuuauca

SEQ ID NO: 735541 - RNA, 17 nt, Artificial Sequence
  Synthetic
uuccuacucauuuauca

SEQ ID NO: 735542 - RNA, 17 nt, Artificial Sequence
  Synthetic
cagcagcaacuuuauca

SEQ ID NO: 735543 - RNA, 17 nt, Artificial Sequence
  Synthetic
caauuuauaguuuauca

SEQ ID NO: 735544 - RNA, 17 nt, Artificial Sequence
  Synthetic
ugagcuggauuuuauca

SEQ ID NO: 735545 - RNA, 17 nt, Artificial Sequence
  Synthetic
aucuguugguuuuauca

SEQ ID NO: 735546 - RNA, 17 nt, Artificial Sequence
  Synthetic
aaaaaauuguuuuauca

SEQ ID NO: 735547 - RNA, 17 nt, Artificial Sequence
  Synthetic
ugcauauuguuuuauca

SEQ ID NO: 735548 - RNA, 17 nt, Artificial Sequence
  Synthetic
aagaugccuuuuuauca

SEQ ID NO: 735549 - RNA, 17 nt, Artificial Sequence
  Synthetic
cuuaaaaaaaaaacuca

SEQ ID NO: 735550 - RNA, 17 nt, Artificial Sequence
  Synthetic
auguuucagaaaacuca

SEQ ID NO: 735551 - RNA, 17 nt, Artificial Sequence
  Synthetic
cuuccagagaaaacuca

SEQ ID NO: 735552 - RNA, 17 nt, Artificial Sequence
  Synthetic
aaauguagucaaacuca

SEQ ID NO: 735553 - RNA, 17 nt, Artificial Sequence
  Synthetic
cagcaauuauaaacuca

SEQ ID NO: 735554 - RNA, 17 nt, Artificial Sequence
  Synthetic
aauaccaacuaaacuca

SEQ ID NO: 735555 - RNA, 17 nt, Artificial Sequence
  Synthetic
ugacuugccccaacuca

SEQ ID NO: 735556 - RNA, 17 nt, Artificial Sequence
  Synthetic
ugacagugcucaacuca

SEQ ID NO: 735557 - RNA, 17 nt, Artificial Sequence
  Synthetic
caagcuuguucaacuca

SEQ ID NO: 735558 - RNA, 17 nt, Artificial Sequence
  Synthetic
uaugaaaacagaacuca

SEQ ID NO: 735559 - RNA, 17 nt, Artificial Sequence
  Synthetic
acugaaauaggaacuca

SEQ ID NO: 735560 - RNA, 17 nt, Artificial Sequence
  Synthetic
caaaacaauggaacuca

SEQ ID NO: 735561 - RNA, 17 nt, Artificial Sequence
  Synthetic
aaaucauagugaacuca

SEQ ID NO: 735562 - RNA, 17 nt, Artificial Sequence
  Synthetic
caaaacaauugaacuca

SEQ ID NO: 735563 - RNA, 17 nt, Artificial Sequence
  Synthetic
uaaaacuauugaacuca

SEQ ID NO: 735564 - RNA, 17 nt, Artificial Sequence
  Synthetic
aucuaagcaauaacuca

SEQ ID NO: 735565 - RNA, 17 nt, Artificial Sequence
  Synthetic
ucuucucaucuaacuca

SEQ ID NO: 735566 - RNA, 17 nt, Artificial Sequence
  Synthetic
aagaaaauaguaacuca

SEQ ID NO: 735567 - RNA, 17 nt, Artificial Sequence
  Synthetic
acuauucagguaacuca

SEQ ID NO: 735568 - RNA, 17 nt, Artificial Sequence
  Synthetic
uuaucuguuguaacuca

SEQ ID NO: 735569 - RNA, 17 nt, Artificial Sequence
  Synthetic
ccucccaagaacacuca

SEQ ID NO: 735570 - RNA, 17 nt, Artificial Sequence
  Synthetic
uugaaaccuaacacuca

SEQ ID NO: 735571 - RNA, 17 nt, Artificial Sequence
  Synthetic
caagggaugcacacuca

SEQ ID NO: 735572 - RNA, 17 nt, Artificial Sequence
  Synthetic
ugagguccuuacacuca

SEQ ID NO: 735573 - RNA, 17 nt, Artificial Sequence
  Synthetic
uauagcguuuacacuca

SEQ ID NO: 735574 - RNA, 17 nt, Artificial Sequence
  Synthetic
auuuauaaagccacuca

SEQ ID NO: 735575 - RNA, 17 nt, Artificial Sequence
  Synthetic
uaaacauugggcacuca

SEQ ID NO: 735576 - RNA, 17 nt, Artificial Sequence
  Synthetic
acuugaaacugcacuca

SEQ ID NO: 735577 - RNA, 17 nt, Artificial Sequence
  Synthetic
agaggguggugcacuca

SEQ ID NO: 735578 - RNA, 17 nt, Artificial Sequence
  Synthetic
cuuaaacauugcacuca

SEQ ID NO: 735579 - RNA, 17 nt, Artificial Sequence
  Synthetic
uuggaagucaucacuca

SEQ ID NO: 735580 - RNA, 17 nt, Artificial Sequence
  Synthetic
cagcagaagcucacuca

SEQ ID NO: 735581 - RNA, 17 nt, Artificial Sequence
  Synthetic
ugcuaaggauucacuca

SEQ ID NO: 735582 - RNA, 17 nt, Artificial Sequence
  Synthetic
ccaaacaguaagacuca

SEQ ID NO: 735583 - RNA, 17 nt, Artificial Sequence
  Synthetic
uuuuuaauguagacuca

SEQ ID NO: 735584 - RNA, 17 nt, Artificial Sequence
  Synthetic
ugcagucugaugacuca

SEQ ID NO: 735585 - RNA, 17 nt, Artificial Sequence
  Synthetic
auuccagugaugacuca

SEQ ID NO: 735586 - RNA, 17 nt, Artificial Sequence
  Synthetic
agacauuuuaugacuca

SEQ ID NO: 735587 - RNA, 17 nt, Artificial Sequence
  Synthetic
uccuucacagugacuca

SEQ ID NO: 735588 - RNA, 17 nt, Artificial Sequence
  Synthetic
uaugaggauuugacuca

SEQ ID NO: 735589 - RNA, 17 nt, Artificial Sequence
  Synthetic
aaccuauauuugacuca

SEQ ID NO: 735590 - RNA, 17 nt, Artificial Sequence
  Synthetic
aaaugcacaaauacuca

SEQ ID NO: 735591 - RNA, 17 nt, Artificial Sequence
  Synthetic
caucaugcagauacuca

SEQ ID NO: 735592 - RNA, 17 nt, Artificial Sequence
  Synthetic
aguuccaaggauacuca

SEQ ID NO: 735593 - RNA, 17 nt, Artificial Sequence
  Synthetic
uuauuuaauuauacuca

SEQ ID NO: 735594 - RNA, 17 nt, Artificial Sequence
  Synthetic
uucuucguuuauacuca

SEQ ID NO: 735595 - RNA, 17 nt, Artificial Sequence
  Synthetic
cuuggcaaaacuacuca

SEQ ID NO: 735596 - RNA, 17 nt, Artificial Sequence
  Synthetic
caaacauugacuacuca

SEQ ID NO: 735597 - RNA, 17 nt, Artificial Sequence
  Synthetic
uauauguaauguacuca

SEQ ID NO: 735598 - RNA, 17 nt, Artificial Sequence
  Synthetic
cuuugcuuuuguacuca

SEQ ID NO: 735599 - RNA, 17 nt, Artificial Sequence
  Synthetic
auuuugagucuuacuca

SEQ ID NO: 735600 - RNA, 17 nt, Artificial Sequence
  Synthetic
auaacauuucuuacuca

SEQ ID NO: 735601 - RNA, 17 nt, Artificial Sequence
  Synthetic
uucucauuucuuacuca

SEQ ID NO: 735602 - RNA, 17 nt, Artificial Sequence
  Synthetic
uaacuuuauguuacuca

SEQ ID NO: 735603 - RNA, 17 nt, Artificial Sequence
  Synthetic
cacauccucuuuacuca

SEQ ID NO: 735604 - RNA, 17 nt, Artificial Sequence
  Synthetic
aaauccuucuuuacuca

SEQ ID NO: 735605 - RNA, 17 nt, Artificial Sequence
  Synthetic
cagggagcuuuuacuca

SEQ ID NO: 735606 - RNA, 17 nt, Artificial Sequence
  Synthetic
caacauagcaaaccuca

SEQ ID NO: 735607 - RNA, 17 nt, Artificial Sequence
  Synthetic
agaaggcugaaaccuca

SEQ ID NO: 735608 - RNA, 17 nt, Artificial Sequence
  Synthetic
cugucauaucaaccuca

SEQ ID NO: 735609 - RNA, 17 nt, Artificial Sequence
  Synthetic
uuuuaacagacaccuca

SEQ ID NO: 735610 - RNA, 17 nt, Artificial Sequence
  Synthetic
aaacuauuaccaccuca

SEQ ID NO: 735611 - RNA, 17 nt, Artificial Sequence
  Synthetic
aaucccaguucaccuca

SEQ ID NO: 735612 - RNA, 17 nt, Artificial Sequence
  Synthetic
caggaaugaagaccuca

SEQ ID NO: 735613 - RNA, 17 nt, Artificial Sequence
  Synthetic
uauggguugggaccuca

SEQ ID NO: 735614 - RNA, 17 nt, Artificial Sequence
  Synthetic
ugugcuucuggaccuca

SEQ ID NO: 735615 - RNA, 17 nt, Artificial Sequence
  Synthetic
cucuccuuaugaccuca

SEQ ID NO: 735616 - RNA, 17 nt, Artificial Sequence
  Synthetic
ccauagacuugaccuca

SEQ ID NO: 735617 - RNA, 17 nt, Artificial Sequence
  Synthetic
aaauuucagauaccuca

SEQ ID NO: 735618 - RNA, 17 nt, Artificial Sequence
  Synthetic
ucucagagacuaccuca

SEQ ID NO: 735619 - RNA, 17 nt, Artificial Sequence
  Synthetic
aaugauauacuaccuca

SEQ ID NO: 735620 - RNA, 17 nt, Artificial Sequence
  Synthetic
ugguuuucuuuaccuca

SEQ ID NO: 735621 - RNA, 17 nt, Artificial Sequence
  Synthetic
ugaaauccucacccuca

SEQ ID NO: 735622 - RNA, 17 nt, Artificial Sequence
  Synthetic
cuuguucuuuacccuca

SEQ ID NO: 735623 - RNA, 17 nt, Artificial Sequence
  Synthetic
aaaaggacgcccccuca

SEQ ID NO: 735624 - RNA, 17 nt, Artificial Sequence
  Synthetic
augaccaaugccccuca

SEQ ID NO: 735625 - RNA, 17 nt, Artificial Sequence
  Synthetic
aaucugccuuccccuca

SEQ ID NO: 735626 - RNA, 17 nt, Artificial Sequence
  Synthetic
uuauuucaaagcccuca

SEQ ID NO: 735627 - RNA, 17 nt, Artificial Sequence
  Synthetic
uucuccuucagcccuca

SEQ ID NO: 735628 - RNA, 17 nt, Artificial Sequence
  Synthetic
caaagaaggagcccuca

SEQ ID NO: 735629 - RNA, 17 nt, Artificial Sequence
  Synthetic
ugugcuuaaggcccuca

SEQ ID NO: 735630 - RNA, 17 nt, Artificial Sequence
  Synthetic
caggggcagggcccuca

SEQ ID NO: 735631 - RNA, 17 nt, Artificial Sequence
  Synthetic
caaaaucucugcccuca

SEQ ID NO: 735632 - RNA, 17 nt, Artificial Sequence
  Synthetic
uggggacagaucccuca

SEQ ID NO: 735633 - RNA, 17 nt, Artificial Sequence
  Synthetic
cagggcacagucccuca

SEQ ID NO: 735634 - RNA, 17 nt, Artificial Sequence
  Synthetic
aaauuaacuuucccuca

SEQ ID NO: 735635 - RNA, 17 nt, Artificial Sequence
  Synthetic
uagcugcuaaagccuca

SEQ ID NO: 735636 - RNA, 17 nt, Artificial Sequence
  Synthetic
uaaacgaagaagccuca

SEQ ID NO: 735637 - RNA, 17 nt, Artificial Sequence
  Synthetic
cguuauccacagccuca

SEQ ID NO: 735638 - RNA, 17 nt, Artificial Sequence
  Synthetic
aggcucuggcagccuca

SEQ ID NO: 735639 - RNA, 17 nt, Artificial Sequence
  Synthetic
cugaacacagagccuca

SEQ ID NO: 735640 - RNA, 17 nt, Artificial Sequence
  Synthetic
ucuucuauauagccuca

SEQ ID NO: 735641 - RNA, 17 nt, Artificial Sequence
  Synthetic
aacuuuaccaggccuca

SEQ ID NO: 735642 - RNA, 17 nt, Artificial Sequence
  Synthetic
cuccuggggaggccuca

SEQ ID NO: 735643 - RNA, 17 nt, Artificial Sequence
  Synthetic
uggcuggggaggccuca

SEQ ID NO: 735644 - RNA, 17 nt, Artificial Sequence
  Synthetic
uuucuggggaggccuca

SEQ ID NO: 735645 - RNA, 17 nt, Artificial Sequence
  Synthetic
cacaggcaauggccuca

SEQ ID NO: 735646 - RNA, 17 nt, Artificial Sequence
  Synthetic
uugaacuucuggccuca

SEQ ID NO: 735647 - RNA, 17 nt, Artificial Sequence
  Synthetic
aaaaagauuuggccuca

SEQ ID NO: 735648 - RNA, 17 nt, Artificial Sequence
  Synthetic
uguccugcacugccuca

SEQ ID NO: 735649 - RNA, 17 nt, Artificial Sequence
  Synthetic
cagcaaucccugccuca

SEQ ID NO: 735650 - RNA, 17 nt, Artificial Sequence
  Synthetic
acuacacuccugccuca

SEQ ID NO: 735651 - RNA, 17 nt, Artificial Sequence
  Synthetic
cauuucccucugccuca

SEQ ID NO: 735652 - RNA, 17 nt, Artificial Sequence
  Synthetic
ugaaauuugcauccuca

SEQ ID NO: 735653 - RNA, 17 nt, Artificial Sequence
  Synthetic
aaacuuuugcauccuca

SEQ ID NO: 735654 - RNA, 17 nt, Artificial Sequence
  Synthetic
cagauauaucauccuca

SEQ ID NO: 735655 - RNA, 17 nt, Artificial Sequence
  Synthetic
ucucguugauauccuca

SEQ ID NO: 735656 - RNA, 17 nt, Artificial Sequence
  Synthetic
agaagucuuuauccuca

SEQ ID NO: 735657 - RNA, 17 nt, Artificial Sequence
  Synthetic
caauauuugaguccuca

SEQ ID NO: 735658 - RNA, 17 nt, Artificial Sequence
  Synthetic
acauauucguguccuca

SEQ ID NO: 735659 - RNA, 17 nt, Artificial Sequence
  Synthetic
aaauuuuauuguccuca

SEQ ID NO: 735660 - RNA, 17 nt, Artificial Sequence
  Synthetic
aguguggcaauuccuca

SEQ ID NO: 735661 - RNA, 17 nt, Artificial Sequence
  Synthetic
aagacucccauuccuca

SEQ ID NO: 735662 - RNA, 17 nt, Artificial Sequence
  Synthetic
agugugcagauuccuca

SEQ ID NO: 735663 - RNA, 17 nt, Artificial Sequence
  Synthetic
aguguggcgauuccuca

SEQ ID NO: 735664 - RNA, 17 nt, Artificial Sequence
  Synthetic
cguguggcgauuccuca

SEQ ID NO: 735665 - RNA, 17 nt, Artificial Sequence
  Synthetic
uuuggacauauuccuca

SEQ ID NO: 735666 - RNA, 17 nt, Artificial Sequence
  Synthetic
uaauaccaccuuccuca

SEQ ID NO: 735667 - RNA, 17 nt, Artificial Sequence
  Synthetic
caagauaugguuccuca

SEQ ID NO: 735668 - RNA, 17 nt, Artificial Sequence
  Synthetic
uguaauucuguuccuca

SEQ ID NO: 735669 - RNA, 17 nt, Artificial Sequence
  Synthetic
acacugugauuuccuca

SEQ ID NO: 735670 - RNA, 17 nt, Artificial Sequence
  Synthetic
uucuuuuuauuuccuca

SEQ ID NO: 735671 - RNA, 17 nt, Artificial Sequence
  Synthetic
uacaucuuguuuccuca

SEQ ID NO: 735672 - RNA, 17 nt, Artificial Sequence
  Synthetic
cauaugaagaaagcuca

SEQ ID NO: 735673 - RNA, 17 nt, Artificial Sequence
  Synthetic
ugaauuugucaagcuca

SEQ ID NO: 735674 - RNA, 17 nt, Artificial Sequence
  Synthetic
uucuguauucaagcuca

SEQ ID NO: 735675 - RNA, 17 nt, Artificial Sequence
  Synthetic
aguguuacagaagcuca

SEQ ID NO: 735676 - RNA, 17 nt, Artificial Sequence
  Synthetic
acaaaaugugaagcuca

SEQ ID NO: 735677 - RNA, 17 nt, Artificial Sequence
  Synthetic
aagcuuccuuaagcuca

SEQ ID NO: 735678 - RNA, 17 nt, Artificial Sequence
  Synthetic
aacaacacaacagcuca

SEQ ID NO: 735679 - RNA, 17 nt, Artificial Sequence
  Synthetic
uugguugucacagcuca

SEQ ID NO: 735680 - RNA, 17 nt, Artificial Sequence
  Synthetic
cucugauccccagcuca

SEQ ID NO: 735681 - RNA, 17 nt, Artificial Sequence
  Synthetic
uucauguccccagcuca

SEQ ID NO: 735682 - RNA, 17 nt, Artificial Sequence
  Synthetic
aaagagguugcagcuca

SEQ ID NO: 735683 - RNA, 17 nt, Artificial Sequence
  Synthetic
aggaucaccagagcuca

SEQ ID NO: 735684 - RNA, 17 nt, Artificial Sequence
  Synthetic
uuacaugguguagcuca

SEQ ID NO: 735685 - RNA, 17 nt, Artificial Sequence
  Synthetic
uagcuuuuuguagcuca

SEQ ID NO: 735686 - RNA, 17 nt, Artificial Sequence
  Synthetic
uuuuaaagggccgcuca

SEQ ID NO: 735687 - RNA, 17 nt, Artificial Sequence
  Synthetic
cuagcagcaaaggcuca

SEQ ID NO: 735688 - RNA, 17 nt, Artificial Sequence
  Synthetic
aaacaaacugaggcuca

SEQ ID NO: 735689 - RNA, 17 nt, Artificial Sequence
  Synthetic
agguuauucuaggcuca

SEQ ID NO: 735690 - RNA, 17 nt, Artificial Sequence
  Synthetic
uccagcuugggggcuca

SEQ ID NO: 735691 - RNA, 17 nt, Artificial Sequence
  Synthetic
uggucucagugggcuca

SEQ ID NO: 735692 - RNA, 17 nt, Artificial Sequence
  Synthetic
uuguacuuccuggcuca

SEQ ID NO: 735693 - RNA, 17 nt, Artificial Sequence
  Synthetic
aagguuuauuuggcuca

SEQ ID NO: 735694 - RNA, 17 nt, Artificial Sequence
  Synthetic
auaaccaaaaaugcuca

SEQ ID NO: 735695 - RNA, 17 nt, Artificial Sequence
  Synthetic
agaacauuccaugcuca

SEQ ID NO: 735696 - RNA, 17 nt, Artificial Sequence
  Synthetic
agaauauuccaugcuca

SEQ ID NO: 735697 - RNA, 17 nt, Artificial Sequence
  Synthetic
aagaaauuucaugcuca

SEQ ID NO: 735698 - RNA, 17 nt, Artificial Sequence
  Synthetic
aguagagaugaugcuca

SEQ ID NO: 735699 - RNA, 17 nt, Artificial Sequence
  Synthetic
cuaccacaauaugcuca

SEQ ID NO: 735700 - RNA, 17 nt, Artificial Sequence
  Synthetic
auuaucuaauaugcuca

SEQ ID NO: 735701 - RNA, 17 nt, Artificial Sequence
  Synthetic
aggauuucuuaugcuca

SEQ ID NO: 735702 - RNA, 17 nt, Artificial Sequence
  Synthetic
cuacaaaccacugcuca

SEQ ID NO: 735703 - RNA, 17 nt, Artificial Sequence
  Synthetic
uuuuaauggccugcuca

SEQ ID NO: 735704 - RNA, 17 nt, Artificial Sequence
  Synthetic
agugcauggccugcuca

SEQ ID NO: 735705 - RNA, 17 nt, Artificial Sequence
  Synthetic
ucaucuccugcugcuca

SEQ ID NO: 735706 - RNA, 17 nt, Artificial Sequence
  Synthetic
uuucuagcaagugcuca

SEQ ID NO: 735707 - RNA, 17 nt, Artificial Sequence
  Synthetic
cacauagugagugcuca

SEQ ID NO: 735708 - RNA, 17 nt, Artificial Sequence
  Synthetic
agaacauuccgugcuca

SEQ ID NO: 735709 - RNA, 17 nt, Artificial Sequence
  Synthetic
auguugauaauugcuca

SEQ ID NO: 735710 - RNA, 17 nt, Artificial Sequence
  Synthetic
uuuaagagacuugcuca

SEQ ID NO: 735711 - RNA, 17 nt, Artificial Sequence
  Synthetic
agaaaaaagcuugcuca

SEQ ID NO: 735712 - RNA, 17 nt, Artificial Sequence
  Synthetic
agcuuaguucuugcuca

SEQ ID NO: 735713 - RNA, 17 nt, Artificial Sequence
  Synthetic
agcagucacuuugcuca

SEQ ID NO: 735714 - RNA, 17 nt, Artificial Sequence
  Synthetic
aaucuacaguuugcuca

SEQ ID NO: 735715 - RNA, 17 nt, Artificial Sequence
  Synthetic
cgauucccuuuugcuca

SEQ ID NO: 735716 - RNA, 17 nt, Artificial Sequence
  Synthetic
uagagccuuuuugcuca

SEQ ID NO: 735717 - RNA, 17 nt, Artificial Sequence
  Synthetic
cagggaguuuuugcuca

SEQ ID NO: 735718 - RNA, 17 nt, Artificial Sequence
  Synthetic
uuugaacagaaaucuca

SEQ ID NO: 735719 - RNA, 17 nt, Artificial Sequence
  Synthetic
acaggugagaaaucuca

SEQ ID NO: 735720 - RNA, 17 nt, Artificial Sequence
  Synthetic
cuugguuuuaaaucuca

SEQ ID NO: 735721 - RNA, 17 nt, Artificial Sequence
  Synthetic
ugcucaccucaaucuca

SEQ ID NO: 735722 - RNA, 17 nt, Artificial Sequence
  Synthetic
cuuucuaaaacaucuca

SEQ ID NO: 735723 - RNA, 17 nt, Artificial Sequence
  Synthetic
uacuagagcacaucuca

SEQ ID NO: 735724 - RNA, 17 nt, Artificial Sequence
  Synthetic
cuuccauugccaucuca

SEQ ID NO: 735725 - RNA, 17 nt, Artificial Sequence
  Synthetic
uacucaaaagcaucuca

SEQ ID NO: 735726 - RNA, 17 nt, Artificial Sequence
  Synthetic
auuuuaacaagaucuca

SEQ ID NO: 735727 - RNA, 17 nt, Artificial Sequence
  Synthetic
aauagaaaaggaucuca

SEQ ID NO: 735728 - RNA, 17 nt, Artificial Sequence
  Synthetic
ugcucucauggaucuca

SEQ ID NO: 735729 - RNA, 17 nt, Artificial Sequence
  Synthetic
aaacaucucugaucuca

SEQ ID NO: 735730 - RNA, 17 nt, Artificial Sequence
  Synthetic
cuggaucucugaucuca

SEQ ID NO: 735731 - RNA, 17 nt, Artificial Sequence
  Synthetic
uaacagaaaauaucuca

SEQ ID NO: 735732 - RNA, 17 nt, Artificial Sequence
  Synthetic
cacuuauaacuaucuca

SEQ ID NO: 735733 - RNA, 17 nt, Artificial Sequence
  Synthetic
aaaccaugucuaucuca

SEQ ID NO: 735734 - RNA, 17 nt, Artificial Sequence
  Synthetic
cuuacacauguaucuca

SEQ ID NO: 735735 - RNA, 17 nt, Artificial Sequence
  Synthetic
aagugcuauguaucuca

SEQ ID NO: 735736 - RNA, 17 nt, Artificial Sequence
  Synthetic
augagcuguguaucuca

SEQ ID NO: 735737 - RNA, 17 nt, Artificial Sequence
  Synthetic
cuuagaaacuuaucuca

SEQ ID NO: 735738 - RNA, 17 nt, Artificial Sequence
  Synthetic
cuuaucaauuuaucuca

SEQ ID NO: 735739 - RNA, 17 nt, Artificial Sequence
  Synthetic
caauaagauuuaucuca

SEQ ID NO: 735740 - RNA, 17 nt, Artificial Sequence
  Synthetic
auuugagacaacucuca

SEQ ID NO: 735741 - RNA, 17 nt, Artificial Sequence
  Synthetic
agucuugaccacucuca

SEQ ID NO: 735742 - RNA, 17 nt, Artificial Sequence
  Synthetic
auuacaugauacucuca

SEQ ID NO: 735743 - RNA, 17 nt, Artificial Sequence
  Synthetic
ccuauggccuacucuca

SEQ ID NO: 735744 - RNA, 17 nt, Artificial Sequence
  Synthetic
aaaaguucuuacucuca

SEQ ID NO: 735745 - RNA, 17 nt, Artificial Sequence
  Synthetic
uuacauuguuacucuca

SEQ ID NO: 735746 - RNA, 17 nt, Artificial Sequence
  Synthetic
uaagacauuaccucuca

SEQ ID NO: 735747 - RNA, 17 nt, Artificial Sequence
  Synthetic
cucauuccacccucuca

SEQ ID NO: 735748 - RNA, 17 nt, Artificial Sequence
  Synthetic
uuaaucuuacccucuca

SEQ ID NO: 735749 - RNA, 17 nt, Artificial Sequence
  Synthetic
cacaccggggccucuca

SEQ ID NO: 735750 - RNA, 17 nt, Artificial Sequence
  Synthetic
auauguccuuccucuca

SEQ ID NO: 735751 - RNA, 17 nt, Artificial Sequence
  Synthetic
accuugccaagcucuca

SEQ ID NO: 735752 - RNA, 17 nt, Artificial Sequence
  Synthetic
acggcagugagcucuca

SEQ ID NO: 735753 - RNA, 17 nt, Artificial Sequence
  Synthetic
uacaguuccugcucuca

SEQ ID NO: 735754 - RNA, 17 nt, Artificial Sequence
  Synthetic
ugagaauugugcucuca

SEQ ID NO: 735755 - RNA, 17 nt, Artificial Sequence
  Synthetic
ugaaaucuuugcucuca

SEQ ID NO: 735756 - RNA, 17 nt, Artificial Sequence
  Synthetic
uaucuuaacaucucuca

SEQ ID NO: 735757 - RNA, 17 nt, Artificial Sequence
  Synthetic
aaaucauacaucucuca

SEQ ID NO: 735758 - RNA, 17 nt, Artificial Sequence
  Synthetic
auuacaaugaucucuca

SEQ ID NO: 735759 - RNA, 17 nt, Artificial Sequence
  Synthetic
ucaccagugaucucuca

SEQ ID NO: 735760 - RNA, 17 nt, Artificial Sequence
  Synthetic
uuccugcauaucucuca

SEQ ID NO: 735761 - RNA, 17 nt, Artificial Sequence
  Synthetic
aagaugaguaucucuca

SEQ ID NO: 735762 - RNA, 17 nt, Artificial Sequence
  Synthetic
uaaaaagguaucucuca

SEQ ID NO: 735763 - RNA, 17 nt, Artificial Sequence
  Synthetic
agucugugacucucuca

SEQ ID NO: 735764 - RNA, 17 nt, Artificial Sequence
  Synthetic
auuaaucaucucucuca

SEQ ID NO: 735765 - RNA, 17 nt, Artificial Sequence
  Synthetic
cuguuuuccuucucuca

SEQ ID NO: 735766 - RNA, 17 nt, Artificial Sequence
  Synthetic
caacuguaguucucuca

SEQ ID NO: 735767 - RNA, 17 nt, Artificial Sequence
  Synthetic
aaauuaccccagucuca

SEQ ID NO: 735768 - RNA, 17 nt, Artificial Sequence
  Synthetic
aacucccucuagucuca

SEQ ID NO: 735769 - RNA, 17 nt, Artificial Sequence
  Synthetic
aacacaucaucgucuca

SEQ ID NO: 735770 - RNA, 17 nt, Artificial Sequence
  Synthetic
ccacugcaugggucuca

SEQ ID NO: 735771 - RNA, 17 nt, Artificial Sequence
  Synthetic
agaaacuuugggucuca

SEQ ID NO: 735772 - RNA, 17 nt, Artificial Sequence
  Synthetic
aaaauaugacugucuca

SEQ ID NO: 735773 - RNA, 17 nt, Artificial Sequence
  Synthetic
aguuacaaagugucuca

SEQ ID NO: 735774 - RNA, 17 nt, Artificial Sequence
  Synthetic
aacaucugagugucuca

SEQ ID NO: 735775 - RNA, 17 nt, Artificial Sequence
  Synthetic
ccugagcucgugucuca

SEQ ID NO: 735776 - RNA, 17 nt, Artificial Sequence
  Synthetic
aauauuguugugucuca

SEQ ID NO: 735777 - RNA, 17 nt, Artificial Sequence
  Synthetic
uuuaaauccuugucuca

SEQ ID NO: 735778 - RNA, 17 nt, Artificial Sequence
  Synthetic
agucaucuaaauucuca

SEQ ID NO: 735779 - RNA, 17 nt, Artificial Sequence
  Synthetic
aagguaaauaauucuca

SEQ ID NO: 735780 - RNA, 17 nt, Artificial Sequence
  Synthetic
uuaagacaacauucuca

SEQ ID NO: 735781 - RNA, 17 nt, Artificial Sequence
  Synthetic
acugugacccauucuca

SEQ ID NO: 735782 - RNA, 17 nt, Artificial Sequence
  Synthetic
ucaggguuucauucuca

SEQ ID NO: 735783 - RNA, 17 nt, Artificial Sequence
  Synthetic
aacacaauagauucuca

SEQ ID NO: 735784 - RNA, 17 nt, Artificial Sequence
  Synthetic
aggccugcauauucuca

SEQ ID NO: 735785 - RNA, 17 nt, Artificial Sequence
  Synthetic
auuacaugguauucuca

SEQ ID NO: 735786 - RNA, 17 nt, Artificial Sequence
  Synthetic
uaucagagcacuucuca

SEQ ID NO: 735787 - RNA, 17 nt, Artificial Sequence
  Synthetic
cuaacuuauacuucuca

SEQ ID NO: 735788 - RNA, 17 nt, Artificial Sequence
  Synthetic
uacucauuuacuucuca

SEQ ID NO: 735789 - RNA, 17 nt, Artificial Sequence
  Synthetic
auacacgcaccuucuca

SEQ ID NO: 735790 - RNA, 17 nt, Artificial Sequence
  Synthetic
cauggguccccuucuca

SEQ ID NO: 735791 - RNA, 17 nt, Artificial Sequence
  Synthetic
uccacuaggccuucuca

SEQ ID NO: 735792 - RNA, 17 nt, Artificial Sequence
  Synthetic
uguccacugccuucuca

SEQ ID NO: 735793 - RNA, 17 nt, Artificial Sequence
  Synthetic
agaaaguuuccuucuca

SEQ ID NO: 735794 - RNA, 17 nt, Artificial Sequence
  Synthetic
aagcugcaagcuucuca

SEQ ID NO: 735795 - RNA, 17 nt, Artificial Sequence
  Synthetic
aggagcucagcuucuca

SEQ ID NO: 735796 - RNA, 17 nt, Artificial Sequence
  Synthetic
uuggguugcucuucuca

SEQ ID NO: 735797 - RNA, 17 nt, Artificial Sequence
  Synthetic
caauaucuuucuucuca

SEQ ID NO: 735798 - RNA, 17 nt, Artificial Sequence
  Synthetic
ucucuaacaaguucuca

SEQ ID NO: 735799 - RNA, 17 nt, Artificial Sequence
  Synthetic
uauuaacuaaguucuca

SEQ ID NO: 735800 - RNA, 17 nt, Artificial Sequence
  Synthetic
auuacucacaguucuca

SEQ ID NO: 735801 - RNA, 17 nt, Artificial Sequence
  Synthetic
ucucucuguaguucuca

SEQ ID NO: 735802 - RNA, 17 nt, Artificial Sequence
  Synthetic
uaucagaaagguucuca

SEQ ID NO: 735803 - RNA, 17 nt, Artificial Sequence
  Synthetic
uuuuuuaaugguucuca

SEQ ID NO: 735804 - RNA, 17 nt, Artificial Sequence
  Synthetic
cccccauacuguucuca

SEQ ID NO: 735805 - RNA, 17 nt, Artificial Sequence
  Synthetic
cuagaccccuguucuca

SEQ ID NO: 735806 - RNA, 17 nt, Artificial Sequence
  Synthetic
aaauaucaguguucuca

SEQ ID NO: 735807 - RNA, 17 nt, Artificial Sequence
  Synthetic
uccuggagaauuucuca

SEQ ID NO: 735808 - RNA, 17 nt, Artificial Sequence
  Synthetic
ucuuuucagauuucuca

SEQ ID NO: 735809 - RNA, 17 nt, Artificial Sequence
  Synthetic
uaaaguucuauuucuca

SEQ ID NO: 735810 - RNA, 17 nt, Artificial Sequence
  Synthetic
aggaauaaacuuucuca

SEQ ID NO: 735811 - RNA, 17 nt, Artificial Sequence
  Synthetic
acuuuucugcuuucuca

SEQ ID NO: 735812 - RNA, 17 nt, Artificial Sequence
  Synthetic
aucagggugguuucuca

SEQ ID NO: 735813 - RNA, 17 nt, Artificial Sequence
  Synthetic
ccaguaaaauuuucuca

SEQ ID NO: 735814 - RNA, 17 nt, Artificial Sequence
  Synthetic
aaccauuauuuuucuca

SEQ ID NO: 735815 - RNA, 17 nt, Artificial Sequence
  Synthetic
cauagugacaaaaguca

SEQ ID NO: 735816 - RNA, 17 nt, Artificial Sequence
  Synthetic
acuuguaccaaaaguca

SEQ ID NO: 735817 - RNA, 17 nt, Artificial Sequence
  Synthetic
cuuacugugaaaaguca

SEQ ID NO: 735818 - RNA, 17 nt, Artificial Sequence
  Synthetic
agucacucuaaaaguca

SEQ ID NO: 735819 - RNA, 17 nt, Artificial Sequence
  Synthetic
aauacacuacaaaguca

SEQ ID NO: 735820 - RNA, 17 nt, Artificial Sequence
  Synthetic
uauaggaggcaaaguca

SEQ ID NO: 735821 - RNA, 17 nt, Artificial Sequence
  Synthetic
aggaaagaagaaaguca

SEQ ID NO: 735822 - RNA, 17 nt, Artificial Sequence
  Synthetic
ucaccucgagaaaguca

SEQ ID NO: 735823 - RNA, 17 nt, Artificial Sequence
  Synthetic
uucaauuuauaaaguca

SEQ ID NO: 735824 - RNA, 17 nt, Artificial Sequence
  Synthetic
aaccccaucacaaguca

SEQ ID NO: 735825 - RNA, 17 nt, Artificial Sequence
  Synthetic
aaagcuugagcaaguca

SEQ ID NO: 735826 - RNA, 17 nt, Artificial Sequence
  Synthetic
agaccuaaaucaaguca

SEQ ID NO: 735827 - RNA, 17 nt, Artificial Sequence
  Synthetic
ugaauguguucaaguca

SEQ ID NO: 735828 - RNA, 17 nt, Artificial Sequence
  Synthetic
agcaaccaaggaaguca

SEQ ID NO: 735829 - RNA, 17 nt, Artificial Sequence
  Synthetic
uugagccugggaaguca

SEQ ID NO: 735830 - RNA, 17 nt, Artificial Sequence
  Synthetic
aaaggggacugaaguca

SEQ ID NO: 735831 - RNA, 17 nt, Artificial Sequence
  Synthetic
auuuucaugugaaguca

SEQ ID NO: 735832 - RNA, 17 nt, Artificial Sequence
  Synthetic
aaagcuuuuugaaguca

SEQ ID NO: 735833 - RNA, 17 nt, Artificial Sequence
  Synthetic
aaauugagaauaaguca

SEQ ID NO: 735834 - RNA, 17 nt, Artificial Sequence
  Synthetic
agacagaaucuaaguca

SEQ ID NO: 735835 - RNA, 17 nt, Artificial Sequence
  Synthetic
caaauuauucuaaguca

SEQ ID NO: 735836 - RNA, 17 nt, Artificial Sequence
  Synthetic
aacaggguuguaaguca

SEQ ID NO: 735837 - RNA, 17 nt, Artificial Sequence
  Synthetic
aaaggaugauuaaguca

SEQ ID NO: 735838 - RNA, 17 nt, Artificial Sequence
  Synthetic
uuaccuugcuuaaguca

SEQ ID NO: 735839 - RNA, 17 nt, Artificial Sequence
  Synthetic
auuucaauguacaguca

SEQ ID NO: 735840 - RNA, 17 nt, Artificial Sequence
  Synthetic
uaaaaauuagccaguca

SEQ ID NO: 735841 - RNA, 17 nt, Artificial Sequence
  Synthetic
caucccugcgccaguca

SEQ ID NO: 735842 - RNA, 17 nt, Artificial Sequence
  Synthetic
cagaaacaggccaguca

SEQ ID NO: 735843 - RNA, 17 nt, Artificial Sequence
  Synthetic
aaaagauagggcaguca

SEQ ID NO: 735844 - RNA, 17 nt, Artificial Sequence
  Synthetic
auauucugaaucaguca

SEQ ID NO: 735845 - RNA, 17 nt, Artificial Sequence
  Synthetic
augucaggcaucaguca

SEQ ID NO: 735846 - RNA, 17 nt, Artificial Sequence
  Synthetic
ugacccuaccucaguca

SEQ ID NO: 735847 - RNA, 17 nt, Artificial Sequence
  Synthetic
ccaacacaagucaguca

SEQ ID NO: 735848 - RNA, 17 nt, Artificial Sequence
  Synthetic
cccagcugagucaguca

SEQ ID NO: 735849 - RNA, 17 nt, Artificial Sequence
  Synthetic
ccccucaaugucaguca

SEQ ID NO: 735850 - RNA, 17 nt, Artificial Sequence
  Synthetic
ucccguggauucaguca

SEQ ID NO: 735851 - RNA, 17 nt, Artificial Sequence
  Synthetic
augaugugacagaguca

SEQ ID NO: 735852 - RNA, 17 nt, Artificial Sequence
  Synthetic
uggggccaagagaguca

SEQ ID NO: 735853 - RNA, 17 nt, Artificial Sequence
  Synthetic
uaugauguggagaguca

SEQ ID NO: 735854 - RNA, 17 nt, Artificial Sequence
  Synthetic
uaggguguugagaguca

SEQ ID NO: 735855 - RNA, 17 nt, Artificial Sequence
  Synthetic
cauguacaauagaguca

SEQ ID NO: 735856 - RNA, 17 nt, Artificial Sequence
  Synthetic
uggggacgguggaguca

SEQ ID NO: 735857 - RNA, 17 nt, Artificial Sequence
  Synthetic
uagcaggauuggaguca

SEQ ID NO: 735858 - RNA, 17 nt, Artificial Sequence
  Synthetic
acuaguugcaugaguca

SEQ ID NO: 735859 - RNA, 17 nt, Artificial Sequence
  Synthetic
aguagacuuuugaguca

SEQ ID NO: 735860 - RNA, 17 nt, Artificial Sequence
  Synthetic
cauacacaaaauaguca

SEQ ID NO: 735861 - RNA, 17 nt, Artificial Sequence
  Synthetic
auaaacaggaauaguca

SEQ ID NO: 735862 - RNA, 17 nt, Artificial Sequence
  Synthetic
uugcagcauaauaguca

SEQ ID NO: 735863 - RNA, 17 nt, Artificial Sequence
  Synthetic
caacuauaaccuaguca

SEQ ID NO: 735864 - RNA, 17 nt, Artificial Sequence
  Synthetic
uuaagagcugcuaguca

SEQ ID NO: 735865 - RNA, 17 nt, Artificial Sequence
  Synthetic
uuugcugcaauuaguca

SEQ ID NO: 735866 - RNA, 17 nt, Artificial Sequence
  Synthetic
agugaguguauuaguca

SEQ ID NO: 735867 - RNA, 17 nt, Artificial Sequence
  Synthetic
ucuaucuuuauuaguca

SEQ ID NO: 735868 - RNA, 17 nt, Artificial Sequence
  Synthetic
uaagaaggacuuaguca

SEQ ID NO: 735869 - RNA, 17 nt, Artificial Sequence
  Synthetic
uuaaaaauauuuaguca

SEQ ID NO: 735870 - RNA, 17 nt, Artificial Sequence
  Synthetic
agacaagaaagucguca

SEQ ID NO: 735871 - RNA, 17 nt, Artificial Sequence
  Synthetic
aaagaaaagaaagguca

SEQ ID NO: 735872 - RNA, 17 nt, Artificial Sequence
  Synthetic
aucuugaggaaagguca

SEQ ID NO: 735873 - RNA, 17 nt, Artificial Sequence
  Synthetic
aaguguaggaaagguca

SEQ ID NO: 735874 - RNA, 17 nt, Artificial Sequence
  Synthetic
uuuaaaauacaagguca

SEQ ID NO: 735875 - RNA, 17 nt, Artificial Sequence
  Synthetic
agauguuuccaagguca

SEQ ID NO: 735876 - RNA, 17 nt, Artificial Sequence
  Synthetic
aaagcuggucaagguca

SEQ ID NO: 735877 - RNA, 17 nt, Artificial Sequence
  Synthetic
caagaaugcgaagguca

SEQ ID NO: 735878 - RNA, 17 nt, Artificial Sequence
  Synthetic
cacaaacgugaagguca

SEQ ID NO: 735879 - RNA, 17 nt, Artificial Sequence
  Synthetic
uguacaguugaagguca

SEQ ID NO: 735880 - RNA, 17 nt, Artificial Sequence
  Synthetic
caaacucccacagguca

SEQ ID NO: 735881 - RNA, 17 nt, Artificial Sequence
  Synthetic
uauauacucacagguca

SEQ ID NO: 735882 - RNA, 17 nt, Artificial Sequence
  Synthetic
caagauggaccagguca

SEQ ID NO: 735883 - RNA, 17 nt, Artificial Sequence
  Synthetic
ucauuuuccccagguca

SEQ ID NO: 735884 - RNA, 17 nt, Artificial Sequence
  Synthetic
aaauuucuuucagguca

SEQ ID NO: 735885 - RNA, 17 nt, Artificial Sequence
  Synthetic
uugagcccaggagguca

SEQ ID NO: 735886 - RNA, 17 nt, Artificial Sequence
  Synthetic
cuuauuucaggagguca

SEQ ID NO: 735887 - RNA, 17 nt, Artificial Sequence
  Synthetic
ugagcccagggagguca

SEQ ID NO: 735888 - RNA, 17 nt, Artificial Sequence
  Synthetic
uugagccugggagguca

SEQ ID NO: 735889 - RNA, 17 nt, Artificial Sequence
  Synthetic
uuucaaaaaugagguca

SEQ ID NO: 735890 - RNA, 17 nt, Artificial Sequence
  Synthetic
cagugacauauagguca

SEQ ID NO: 735891 - RNA, 17 nt, Artificial Sequence
  Synthetic
cacagaucucuagguca

SEQ ID NO: 735892 - RNA, 17 nt, Artificial Sequence
  Synthetic
uuucaaagucuagguca

SEQ ID NO: 735893 - RNA, 17 nt, Artificial Sequence
  Synthetic
ugggaacauuuagguca

SEQ ID NO: 735894 - RNA, 17 nt, Artificial Sequence
  Synthetic
aaccagagcuucgguca

SEQ ID NO: 735895 - RNA, 17 nt, Artificial Sequence
  Synthetic
uggugccaaaaggguca

SEQ ID NO: 735896 - RNA, 17 nt, Artificial Sequence
  Synthetic
agugguuaccaggguca

SEQ ID NO: 735897 - RNA, 17 nt, Artificial Sequence
  Synthetic
acccaaagagaggguca

SEQ ID NO: 735898 - RNA, 17 nt, Artificial Sequence
  Synthetic
agaauucaaagggguca

SEQ ID NO: 735899 - RNA, 17 nt, Artificial Sequence
  Synthetic
ucagggagacgggguca

SEQ ID NO: 735900 - RNA, 17 nt, Artificial Sequence
  Synthetic
acacaagggugggguca

SEQ ID NO: 735901 - RNA, 17 nt, Artificial Sequence
  Synthetic
cgggaagugugggguca

SEQ ID NO: 735902 - RNA, 17 nt, Artificial Sequence
  Synthetic
acuagaggaguggguca

SEQ ID NO: 735903 - RNA, 17 nt, Artificial Sequence
  Synthetic
ucuuauucuguggguca

SEQ ID NO: 735904 - RNA, 17 nt, Artificial Sequence
  Synthetic
ccuucaaagaaugguca

SEQ ID NO: 735905 - RNA, 17 nt, Artificial Sequence
  Synthetic
cauggugcuuaugguca

SEQ ID NO: 735906 - RNA, 17 nt, Artificial Sequence
  Synthetic
agcuacucuucugguca

SEQ ID NO: 735907 - RNA, 17 nt, Artificial Sequence
  Synthetic
cuggucucucgugguca

SEQ ID NO: 735908 - RNA, 17 nt, Artificial Sequence
  Synthetic
accauuucuggugguca

SEQ ID NO: 735909 - RNA, 17 nt, Artificial Sequence
  Synthetic
ugucuauagugugguca

SEQ ID NO: 735910 - RNA, 17 nt, Artificial Sequence
  Synthetic
ucuauuaacauugguca

SEQ ID NO: 735911 - RNA, 17 nt, Artificial Sequence
  Synthetic
uacaagcauauugguca

SEQ ID NO: 735912 - RNA, 17 nt, Artificial Sequence
  Synthetic
uaaaucccucuugguca

SEQ ID NO: 735913 - RNA, 17 nt, Artificial Sequence
  Synthetic
uggauggauuuugguca

SEQ ID NO: 735914 - RNA, 17 nt, Artificial Sequence
  Synthetic
aaagugaguaaauguca

SEQ ID NO: 735915 - RNA, 17 nt, Artificial Sequence
  Synthetic
ugcccagaccaauguca

SEQ ID NO: 735916 - RNA, 17 nt, Artificial Sequence
  Synthetic
ucucccaggcaauguca

SEQ ID NO: 735917 - RNA, 17 nt, Artificial Sequence
  Synthetic
acaauccccacauguca

SEQ ID NO: 735918 - RNA, 17 nt, Artificial Sequence
  Synthetic
uagguaaacucauguca

SEQ ID NO: 735919 - RNA, 17 nt, Artificial Sequence
  Synthetic
aauuuucuuucauguca

SEQ ID NO: 735920 - RNA, 17 nt, Artificial Sequence
  Synthetic
auaauccccagauguca

SEQ ID NO: 735921 - RNA, 17 nt, Artificial Sequence
  Synthetic
aagacucggagauguca

SEQ ID NO: 735922 - RNA, 17 nt, Artificial Sequence
  Synthetic
cuaaaacauagauguca

SEQ ID NO: 735923 - RNA, 17 nt, Artificial Sequence
  Synthetic
uuuaaguguggauguca

SEQ ID NO: 735924 - RNA, 17 nt, Artificial Sequence
  Synthetic
uaguuagcuugauguca

SEQ ID NO: 735925 - RNA, 17 nt, Artificial Sequence
  Synthetic
acacuauuuauauguca

SEQ ID NO: 735926 - RNA, 17 nt, Artificial Sequence
  Synthetic
uuugaagagcuauguca

SEQ ID NO: 735927 - RNA, 17 nt, Artificial Sequence
  Synthetic
aaaaaaaaauuauguca

SEQ ID NO: 735928 - RNA, 17 nt, Artificial Sequence
  Synthetic
aaaauuauuuuauguca

SEQ ID NO: 735929 - RNA, 17 nt, Artificial Sequence
  Synthetic
agcuuucuuuuauguca

SEQ ID NO: 735930 - RNA, 17 nt, Artificial Sequence
  Synthetic
cacaccggggccuguca

SEQ ID NO: 735931 - RNA, 17 nt, Artificial Sequence
  Synthetic
cacacuggggccuguca

SEQ ID NO: 735932 - RNA, 17 nt, Artificial Sequence
  Synthetic
uguagaagaugcuguca

SEQ ID NO: 735933 - RNA, 17 nt, Artificial Sequence
  Synthetic
aauaucaauugcuguca

SEQ ID NO: 735934 - RNA, 17 nt, Artificial Sequence
  Synthetic
acauugaaaaucuguca

SEQ ID NO: 735935 - RNA, 17 nt, Artificial Sequence
  Synthetic
cagugucaagucuguca

SEQ ID NO: 735936 - RNA, 17 nt, Artificial Sequence
  Synthetic
caugagccagucuguca

SEQ ID NO: 735937 - RNA, 17 nt, Artificial Sequence
  Synthetic
uuccugggagucuguca

SEQ ID NO: 735938 - RNA, 17 nt, Artificial Sequence
  Synthetic
aagagaaaggucuguca

SEQ ID NO: 735939 - RNA, 17 nt, Artificial Sequence
  Synthetic
aucuccaccuucuguca

SEQ ID NO: 735940 - RNA, 17 nt, Artificial Sequence
  Synthetic
cagguuaucuucuguca

SEQ ID NO: 735941 - RNA, 17 nt, Artificial Sequence
  Synthetic
uuguugaauuucuguca

SEQ ID NO: 735942 - RNA, 17 nt, Artificial Sequence
  Synthetic
ugucugugaaaguguca

SEQ ID NO: 735943 - RNA, 17 nt, Artificial Sequence
  Synthetic
cagaguuccaaguguca

SEQ ID NO: 735944 - RNA, 17 nt, Artificial Sequence
  Synthetic
aagacagugaaguguca

SEQ ID NO: 735945 - RNA, 17 nt, Artificial Sequence
  Synthetic
ccuucugugaaguguca

SEQ ID NO: 735946 - RNA, 17 nt, Artificial Sequence
  Synthetic
aguggcuggcaguguca

SEQ ID NO: 735947 - RNA, 17 nt, Artificial Sequence
  Synthetic
augaagacagaguguca

SEQ ID NO: 735948 - RNA, 17 nt, Artificial Sequence
  Synthetic
uucagguaguaguguca

SEQ ID NO: 735949 - RNA, 17 nt, Artificial Sequence
  Synthetic
auaauccccacguguca

SEQ ID NO: 735950 - RNA, 17 nt, Artificial Sequence
  Synthetic
aauuacuguacguguca

SEQ ID NO: 735951 - RNA, 17 nt, Artificial Sequence
  Synthetic
aaaauccccagguguca

SEQ ID NO: 735952 - RNA, 17 nt, Artificial Sequence
  Synthetic
cguagcuuaugguguca

SEQ ID NO: 735953 - RNA, 17 nt, Artificial Sequence
  Synthetic
cuuacauacauguguca

SEQ ID NO: 735954 - RNA, 17 nt, Artificial Sequence
  Synthetic
auaauccccauguguca

SEQ ID NO: 735955 - RNA, 17 nt, Artificial Sequence
  Synthetic
ugaggagcgauguguca

SEQ ID NO: 735956 - RNA, 17 nt, Artificial Sequence
  Synthetic
agcaccaggauguguca

SEQ ID NO: 735957 - RNA, 17 nt, Artificial Sequence
  Synthetic
acaccuuuuauguguca

SEQ ID NO: 735958 - RNA, 17 nt, Artificial Sequence
  Synthetic
aaacauccaguguguca

SEQ ID NO: 735959 - RNA, 17 nt, Artificial Sequence
  Synthetic
auaauccccguguguca

SEQ ID NO: 735960 - RNA, 17 nt, Artificial Sequence
  Synthetic
aaauauucauuguguca

SEQ ID NO: 735961 - RNA, 17 nt, Artificial Sequence
  Synthetic
uagguaaacuuguguca

SEQ ID NO: 735962 - RNA, 17 nt, Artificial Sequence
  Synthetic
aauaaauaaaauuguca

SEQ ID NO: 735963 - RNA, 17 nt, Artificial Sequence
  Synthetic
ccccaaguaaauuguca

SEQ ID NO: 735964 - RNA, 17 nt, Artificial Sequence
  Synthetic
uaaagacagaauuguca

SEQ ID NO: 735965 - RNA, 17 nt, Artificial Sequence
  Synthetic
ugauuguauaauuguca

SEQ ID NO: 735966 - RNA, 17 nt, Artificial Sequence
  Synthetic
auaauacaauauuguca

SEQ ID NO: 735967 - RNA, 17 nt, Artificial Sequence
  Synthetic
aaauuguauuauuguca

SEQ ID NO: 735968 - RNA, 17 nt, Artificial Sequence
  Synthetic
uuggaguacuguuguca

SEQ ID NO: 735969 - RNA, 17 nt, Artificial Sequence
  Synthetic
cccagcaaaauuuguca

SEQ ID NO: 735970 - RNA, 17 nt, Artificial Sequence
  Synthetic
uguauuucauuuuguca

SEQ ID NO: 735971 - RNA, 17 nt, Artificial Sequence
  Synthetic
auuaucuccuuuuguca

SEQ ID NO: 735972 - RNA, 17 nt, Artificial Sequence
  Synthetic
uucaauaauuuuuguca

SEQ ID NO: 735973 - RNA, 17 nt, Artificial Sequence
  Synthetic
aaauguaguuuuuguca

SEQ ID NO: 735974 - RNA, 17 nt, Artificial Sequence
  Synthetic
acaagcuguuuuuguca

SEQ ID NO: 735975 - RNA, 17 nt, Artificial Sequence
  Synthetic
cuuucuaaaaaaauuca

SEQ ID NO: 735976 - RNA, 17 nt, Artificial Sequence
  Synthetic
uguuugauaaaaauuca

SEQ ID NO: 735977 - RNA, 17 nt, Artificial Sequence
  Synthetic
uucaaaaauaaaauuca

SEQ ID NO: 735978 - RNA, 17 nt, Artificial Sequence
  Synthetic
uguaugacuaaaauuca

SEQ ID NO: 735979 - RNA, 17 nt, Artificial Sequence
  Synthetic
uaaugauuuaaaauuca

SEQ ID NO: 735980 - RNA, 17 nt, Artificial Sequence
  Synthetic
acaggaauacaaauuca

SEQ ID NO: 735981 - RNA, 17 nt, Artificial Sequence
  Synthetic
cuagauaaucaaauuca

SEQ ID NO: 735982 - RNA, 17 nt, Artificial Sequence
  Synthetic
aaaaaaauagaaauuca

SEQ ID NO: 735983 - RNA, 17 nt, Artificial Sequence
  Synthetic
auaagaauagaaauuca

SEQ ID NO: 735984 - RNA, 17 nt, Artificial Sequence
  Synthetic
caugaaguauaaauuca

SEQ ID NO: 735985 - RNA, 17 nt, Artificial Sequence
  Synthetic
agcccacccuaaauuca

SEQ ID NO: 735986 - RNA, 17 nt, Artificial Sequence
  Synthetic
auauuggauuaaauuca

SEQ ID NO: 735987 - RNA, 17 nt, Artificial Sequence
  Synthetic
ccacaggcuuaaauuca

SEQ ID NO: 735988 - RNA, 17 nt, Artificial Sequence
  Synthetic
uuggagauuacaauuca

SEQ ID NO: 735989 - RNA, 17 nt, Artificial Sequence
  Synthetic
acagggauuacaauuca

SEQ ID NO: 735990 - RNA, 17 nt, Artificial Sequence
  Synthetic
uuaaaaccagcaauuca

SEQ ID NO: 735991 - RNA, 17 nt, Artificial Sequence
  Synthetic
auuuuuaaaucaauuca

SEQ ID NO: 735992 - RNA, 17 nt, Artificial Sequence
  Synthetic
uuuuagaacucaauuca

SEQ ID NO: 735993 - RNA, 17 nt, Artificial Sequence
  Synthetic
cuguaacugucaauuca

SEQ ID NO: 735994 - RNA, 17 nt, Artificial Sequence
  Synthetic
aauaagaauucaauuca

SEQ ID NO: 735995 - RNA, 17 nt, Artificial Sequence
  Synthetic
aaaaggaaaagaauuca

SEQ ID NO: 735996 - RNA, 17 nt, Artificial Sequence
  Synthetic
uuaacuuagagaauuca

SEQ ID NO: 735997 - RNA, 17 nt, Artificial Sequence
  Synthetic
agauuaaggagaauuca

SEQ ID NO: 735998 - RNA, 17 nt, Artificial Sequence
  Synthetic
agaucuacaggaauuca

SEQ ID NO: 735999 - RNA, 17 nt, Artificial Sequence
  Synthetic
uugagcccaggaauuca

SEQ ID NO: 736000 - RNA, 17 nt, Artificial Sequence
  Synthetic
acccuaaguggaauuca

SEQ ID NO: 736001 - RNA, 17 nt, Artificial Sequence
  Synthetic
uuuuauucaugaauuca

SEQ ID NO: 736002 - RNA, 17 nt, Artificial Sequence
  Synthetic
ccaccugaaguaauuca

SEQ ID NO: 736003 - RNA, 17 nt, Artificial Sequence
  Synthetic
cucuacccaguaauuca

SEQ ID NO: 736004 - RNA, 17 nt, Artificial Sequence
  Synthetic
aaagaggauguaauuca

SEQ ID NO: 736005 - RNA, 17 nt, Artificial Sequence
  Synthetic
aagagaaauuuaauuca

SEQ ID NO: 736006 - RNA, 17 nt, Artificial Sequence
  Synthetic
uguguuauuuuaauuca

SEQ ID NO: 736007 - RNA, 17 nt, Artificial Sequence
  Synthetic
auggagaaaaacauuca

SEQ ID NO: 736008 - RNA, 17 nt, Artificial Sequence
  Synthetic
agaaggggccacauuca

SEQ ID NO: 736009 - RNA, 17 nt, Artificial Sequence
  Synthetic
uguuguuuucacauuca

SEQ ID NO: 736010 - RNA, 17 nt, Artificial Sequence
  Synthetic
aaaucuggugacauuca

SEQ ID NO: 736011 - RNA, 17 nt, Artificial Sequence
  Synthetic
ccuguuucuuacauuca

SEQ ID NO: 736012 - RNA, 17 nt, Artificial Sequence
  Synthetic
aagcauucauccauuca

SEQ ID NO: 736013 - RNA, 17 nt, Artificial Sequence
  Synthetic
ccugcaagcuccauuca

SEQ ID NO: 736014 - RNA, 17 nt, Artificial Sequence
  Synthetic
augaaaaucuccauuca

SEQ ID NO: 736015 - RNA, 17 nt, Artificial Sequence
  Synthetic
caggcuucuuccauuca

SEQ ID NO: 736016 - RNA, 17 nt, Artificial Sequence
  Synthetic
aucaaaaauagcauuca

SEQ ID NO: 736017 - RNA, 17 nt, Artificial Sequence
  Synthetic
uugucuccuugcauuca

SEQ ID NO: 736018 - RNA, 17 nt, Artificial Sequence
  Synthetic
auuuaauagaucauuca

SEQ ID NO: 736019 - RNA, 17 nt, Artificial Sequence
  Synthetic
ugcugcucccucauuca

SEQ ID NO: 736020 - RNA, 17 nt, Artificial Sequence
  Synthetic
aguaggaaggucauuca

SEQ ID NO: 736021 - RNA, 17 nt, Artificial Sequence
  Synthetic
aagggcugugucauuca

SEQ ID NO: 736022 - RNA, 17 nt, Artificial Sequence
  Synthetic
acacuccccuucauuca

SEQ ID NO: 736023 - RNA, 17 nt, Artificial Sequence
  Synthetic
accauuugcuucauuca

SEQ ID NO: 736024 - RNA, 17 nt, Artificial Sequence
  Synthetic
agaauccucuucauuca

SEQ ID NO: 736025 - RNA, 17 nt, Artificial Sequence
  Synthetic
auuaacuauuucauuca

SEQ ID NO: 736026 - RNA, 17 nt, Artificial Sequence
  Synthetic
aaauucuuaaagauuca

SEQ ID NO: 736027 - RNA, 17 nt, Artificial Sequence
  Synthetic
cuugauucuaagauuca

SEQ ID NO: 736028 - RNA, 17 nt, Artificial Sequence
  Synthetic
acugaacaauagauuca

SEQ ID NO: 736029 - RNA, 17 nt, Artificial Sequence
  Synthetic
acuggacaauagauuca

SEQ ID NO: 736030 - RNA, 17 nt, Artificial Sequence
  Synthetic
auagaaaaguagauuca

SEQ ID NO: 736031 - RNA, 17 nt, Artificial Sequence
  Synthetic
cuuugauuuuagauuca

SEQ ID NO: 736032 - RNA, 17 nt, Artificial Sequence
  Synthetic
aagccauggccgauuca

SEQ ID NO: 736033 - RNA, 17 nt, Artificial Sequence
  Synthetic
uguuugacaaggauuca

SEQ ID NO: 736034 - RNA, 17 nt, Artificial Sequence
  Synthetic
augaaccaagggauuca

SEQ ID NO: 736035 - RNA, 17 nt, Artificial Sequence
  Synthetic
ugaaaguaugggauuca

SEQ ID NO: 736036 - RNA, 17 nt, Artificial Sequence
  Synthetic
uuaauuugauggauuca

SEQ ID NO: 736037 - RNA, 17 nt, Artificial Sequence
  Synthetic
aggugguccuggauuca

SEQ ID NO: 736038 - RNA, 17 nt, Artificial Sequence
  Synthetic
ucucaauucaugauuca

SEQ ID NO: 736039 - RNA, 17 nt, Artificial Sequence
  Synthetic
aguuuccaagugauuca

SEQ ID NO: 736040 - RNA, 17 nt, Artificial Sequence
  Synthetic
uuuuaaguugugauuca

SEQ ID NO: 736041 - RNA, 17 nt, Artificial Sequence
  Synthetic
aaaagauuuuugauuca

SEQ ID NO: 736042 - RNA, 17 nt, Artificial Sequence
  Synthetic
ugauggaaaaauauuca

SEQ ID NO: 736043 - RNA, 17 nt, Artificial Sequence
  Synthetic
ucauuuacaaauauuca

SEQ ID NO: 736044 - RNA, 17 nt, Artificial Sequence
  Synthetic
uaacaugacaauauuca

SEQ ID NO: 736045 - RNA, 17 nt, Artificial Sequence
  Synthetic
uacaauuucaauauuca

SEQ ID NO: 736046 - RNA, 17 nt, Artificial Sequence
  Synthetic
cccacagaacauauuca

SEQ ID NO: 736047 - RNA, 17 nt, Artificial Sequence
  Synthetic
acaaguuaacauauuca

SEQ ID NO: 736048 - RNA, 17 nt, Artificial Sequence
  Synthetic
auguguacacauauuca

SEQ ID NO: 736049 - RNA, 17 nt, Artificial Sequence
  Synthetic
auaauuguacauauuca

SEQ ID NO: 736050 - RNA, 17 nt, Artificial Sequence
  Synthetic
aggcaggcccauauuca

SEQ ID NO: 736051 - RNA, 17 nt, Artificial Sequence
  Synthetic
ugaccaauccauauuca

SEQ ID NO: 736052 - RNA, 17 nt, Artificial Sequence
  Synthetic
acugggauucauauuca

SEQ ID NO: 736053 - RNA, 17 nt, Artificial Sequence
  Synthetic
auugcugccgauauuca

SEQ ID NO: 736054 - RNA, 17 nt, Artificial Sequence
  Synthetic
aagaaggcugauauuca

SEQ ID NO: 736055 - RNA, 17 nt, Artificial Sequence
  Synthetic
aggauuugauauauuca

SEQ ID NO: 736056 - RNA, 17 nt, Artificial Sequence
  Synthetic
aagguuguauauauuca

SEQ ID NO: 736057 - RNA, 17 nt, Artificial Sequence
  Synthetic
caacucaccuauauuca

SEQ ID NO: 736058 - RNA, 17 nt, Artificial Sequence
  Synthetic
agauaaggaacuauuca

SEQ ID NO: 736059 - RNA, 17 nt, Artificial Sequence
  Synthetic
aauuuucacccuauuca

SEQ ID NO: 736060 - RNA, 17 nt, Artificial Sequence
  Synthetic
uauuucuucccuauuca

SEQ ID NO: 736061 - RNA, 17 nt, Artificial Sequence
  Synthetic
aggaaguagccuauuca

SEQ ID NO: 736062 - RNA, 17 nt, Artificial Sequence
  Synthetic
aauuuacuuccuauuca

SEQ ID NO: 736063 - RNA, 17 nt, Artificial Sequence
  Synthetic
agcuaucaagcuauuca

SEQ ID NO: 736064 - RNA, 17 nt, Artificial Sequence
  Synthetic
cguuauuggucuauuca

SEQ ID NO: 736065 - RNA, 17 nt, Artificial Sequence
  Synthetic
uguuauuggucuauuca

SEQ ID NO: 736066 - RNA, 17 nt, Artificial Sequence
  Synthetic
aguguggaaaguauuca

SEQ ID NO: 736067 - RNA, 17 nt, Artificial Sequence
  Synthetic
aaaacuguauguauuca

SEQ ID NO: 736068 - RNA, 17 nt, Artificial Sequence
  Synthetic
agggucucuuguauuca

SEQ ID NO: 736069 - RNA, 17 nt, Artificial Sequence
  Synthetic
cccuaaaaaauuauuca

SEQ ID NO: 736070 - RNA, 17 nt, Artificial Sequence
  Synthetic
aaggauaaaauuauuca

SEQ ID NO: 736071 - RNA, 17 nt, Artificial Sequence
  Synthetic
ugaaacaacauuauuca

SEQ ID NO: 736072 - RNA, 17 nt, Artificial Sequence
  Synthetic
ugaacaugacuuauuca

SEQ ID NO: 736073 - RNA, 17 nt, Artificial Sequence
  Synthetic
aagcauaaaguuauuca

SEQ ID NO: 736074 - RNA, 17 nt, Artificial Sequence
  Synthetic
caaaaugauguuauuca

SEQ ID NO: 736075 - RNA, 17 nt, Artificial Sequence
  Synthetic
auacuccaauuuauuca

SEQ ID NO: 736076 - RNA, 17 nt, Artificial Sequence
  Synthetic
caauauugauuuauuca

SEQ ID NO: 736077 - RNA, 17 nt, Artificial Sequence
  Synthetic
uuucuauacuuuauuca

SEQ ID NO: 736078 - RNA, 17 nt, Artificial Sequence
  Synthetic
accaauuacuuuauuca

SEQ ID NO: 736079 - RNA, 17 nt, Artificial Sequence
  Synthetic
uugguauguuuuauuca

SEQ ID NO: 736080 - RNA, 17 nt, Artificial Sequence
  Synthetic
aggaacauaaaacuuca

SEQ ID NO: 736081 - RNA, 17 nt, Artificial Sequence
  Synthetic
cacucacuaaaacuuca

SEQ ID NO: 736082 - RNA, 17 nt, Artificial Sequence
  Synthetic
ugauaccuuaaacuuca

SEQ ID NO: 736083 - RNA, 17 nt, Artificial Sequence
  Synthetic
cuggaaauacaacuuca

SEQ ID NO: 736084 - RNA, 17 nt, Artificial Sequence
  Synthetic
cccagcagugaacuuca

SEQ ID NO: 736085 - RNA, 17 nt, Artificial Sequence
  Synthetic
cuuuuuuuugaacuuca

SEQ ID NO: 736086 - RNA, 17 nt, Artificial Sequence
  Synthetic
uggguuuuaucacuuca

SEQ ID NO: 736087 - RNA, 17 nt, Artificial Sequence
  Synthetic
ucuaccacuucacuuca

SEQ ID NO: 736088 - RNA, 17 nt, Artificial Sequence
  Synthetic
auaauguuaagacuuca

SEQ ID NO: 736089 - RNA, 17 nt, Artificial Sequence
  Synthetic
uuugcaugacgacuuca

SEQ ID NO: 736090 - RNA, 17 nt, Artificial Sequence
  Synthetic
cuuuuaaagggacuuca

SEQ ID NO: 736091 - RNA, 17 nt, Artificial Sequence
  Synthetic
aaagucacuggacuuca

SEQ ID NO: 736092 - RNA, 17 nt, Artificial Sequence
  Synthetic
aauccggcuggacuuca

SEQ ID NO: 736093 - RNA, 17 nt, Artificial Sequence
  Synthetic
ucaucuuucugacuuca

SEQ ID NO: 736094 - RNA, 17 nt, Artificial Sequence
  Synthetic
aaguguuggugacuuca

SEQ ID NO: 736095 - RNA, 17 nt, Artificial Sequence
  Synthetic
aaguguacuugacuuca

SEQ ID NO: 736096 - RNA, 17 nt, Artificial Sequence
  Synthetic
cuuuugucccuacuuca

SEQ ID NO: 736097 - RNA, 17 nt, Artificial Sequence
  Synthetic
ugaaguggucuacuuca

SEQ ID NO: 736098 - RNA, 17 nt, Artificial Sequence
  Synthetic
uaauucucuuuacuuca

SEQ ID NO: 736099 - RNA, 17 nt, Artificial Sequence
  Synthetic
aauuuccaccaccuuca

SEQ ID NO: 736100 - RNA, 17 nt, Artificial Sequence
  Synthetic
aaguagucccaccuuca

SEQ ID NO: 736101 - RNA, 17 nt, Artificial Sequence
  Synthetic
aaucccugucaccuuca

SEQ ID NO: 736102 - RNA, 17 nt, Artificial Sequence
  Synthetic
uaaaucuucuaccuuca

SEQ ID NO: 736103 - RNA, 17 nt, Artificial Sequence
  Synthetic
aacugucagucccuuca

SEQ ID NO: 736104 - RNA, 17 nt, Artificial Sequence
  Synthetic
uauguuuauagccuuca

SEQ ID NO: 736105 - RNA, 17 nt, Artificial Sequence
  Synthetic
aaaaucaaaugccuuca

SEQ ID NO: 736106 - RNA, 17 nt, Artificial Sequence
  Synthetic
acgaggugaugccuuca

SEQ ID NO: 736107 - RNA, 17 nt, Artificial Sequence
  Synthetic
acccccuacugccuuca

SEQ ID NO: 736108 - RNA, 17 nt, Artificial Sequence
  Synthetic
acuuacaagugccuuca

SEQ ID NO: 736109 - RNA, 17 nt, Artificial Sequence
  Synthetic
aauauaucuugccuuca

SEQ ID NO: 736110 - RNA, 17 nt, Artificial Sequence
  Synthetic
aucuaugaaauccuuca

SEQ ID NO: 736111 - RNA, 17 nt, Artificial Sequence
  Synthetic
ucuccauuccuccuuca

SEQ ID NO: 736112 - RNA, 17 nt, Artificial Sequence
  Synthetic
aauacuacucuccuuca

SEQ ID NO: 736113 - RNA, 17 nt, Artificial Sequence
  Synthetic
aaccugccaguccuuca

SEQ ID NO: 736114 - RNA, 17 nt, Artificial Sequence
  Synthetic
ccaccuucaguccuuca

SEQ ID NO: 736115 - RNA, 17 nt, Artificial Sequence
  Synthetic
cuagaaacauuccuuca

SEQ ID NO: 736116 - RNA, 17 nt, Artificial Sequence
  Synthetic
caacauaccuuccuuca

SEQ ID NO: 736117 - RNA, 17 nt, Artificial Sequence
  Synthetic
ugugucacuuuccuuca

SEQ ID NO: 736118 - RNA, 17 nt, Artificial Sequence
  Synthetic
auuacauuuuuccuuca

SEQ ID NO: 736119 - RNA, 17 nt, Artificial Sequence
  Synthetic
ucacagagcuagcuuca

SEQ ID NO: 736120 - RNA, 17 nt, Artificial Sequence
  Synthetic
uaaacaaacacgcuuca

SEQ ID NO: 736121 - RNA, 17 nt, Artificial Sequence
  Synthetic
aaucaaggaaggcuuca

SEQ ID NO: 736122 - RNA, 17 nt, Artificial Sequence
  Synthetic
cuguaaggaaggcuuca

SEQ ID NO: 736123 - RNA, 17 nt, Artificial Sequence
  Synthetic
caguuuuugaggcuuca

SEQ ID NO: 736124 - RNA, 17 nt, Artificial Sequence
  Synthetic
cacccucuggggcuuca

SEQ ID NO: 736125 - RNA, 17 nt, Artificial Sequence
  Synthetic
uuagccacauggcuuca

SEQ ID NO: 736126 - RNA, 17 nt, Artificial Sequence
  Synthetic
aagaccagauggcuuca

SEQ ID NO: 736127 - RNA, 17 nt, Artificial Sequence
  Synthetic
aagguaaccaugcuuca

SEQ ID NO: 736128 - RNA, 17 nt, Artificial Sequence
  Synthetic
ucucaugaccugcuuca

SEQ ID NO: 736129 - RNA, 17 nt, Artificial Sequence
  Synthetic
ucuacuucuuugcuuca

SEQ ID NO: 736130 - RNA, 17 nt, Artificial Sequence
  Synthetic
uuggcacuuuugcuuca

SEQ ID NO: 736131 - RNA, 17 nt, Artificial Sequence
  Synthetic
uuaccaaaccaucuuca

SEQ ID NO: 736132 - RNA, 17 nt, Artificial Sequence
  Synthetic
cuauauuagcaucuuca

SEQ ID NO: 736133 - RNA, 17 nt, Artificial Sequence
  Synthetic
ugccuuagagaucuuca

SEQ ID NO: 736134 - RNA, 17 nt, Artificial Sequence
  Synthetic
uccaaaggguaucuuca

SEQ ID NO: 736135 - RNA, 17 nt, Artificial Sequence
  Synthetic
uucugaaaaacucuuca

SEQ ID NO: 736136 - RNA, 17 nt, Artificial Sequence
  Synthetic
uccuaaucaccucuuca

SEQ ID NO: 736137 - RNA, 17 nt, Artificial Sequence
  Synthetic
ugugaaagaccucuuca

SEQ ID NO: 736138 - RNA, 17 nt, Artificial Sequence
  Synthetic
ugugaaggaccucuuca

SEQ ID NO: 736139 - RNA, 17 nt, Artificial Sequence
  Synthetic
ugagcucuaccucuuca

SEQ ID NO: 736140 - RNA, 17 nt, Artificial Sequence
  Synthetic
ugugaagggccucuuca

SEQ ID NO: 736141 - RNA, 17 nt, Artificial Sequence
  Synthetic
ugcaagggggcucuuca

SEQ ID NO: 736142 - RNA, 17 nt, Artificial Sequence
  Synthetic
agaugcuaugcucuuca

SEQ ID NO: 736143 - RNA, 17 nt, Artificial Sequence
  Synthetic
cucagacucucucuuca

SEQ ID NO: 736144 - RNA, 17 nt, Artificial Sequence
  Synthetic
ccacuggaaggucuuca

SEQ ID NO: 736145 - RNA, 17 nt, Artificial Sequence
  Synthetic
uuuguguauggucuuca

SEQ ID NO: 736146 - RNA, 17 nt, Artificial Sequence
  Synthetic
uuagcauaaugucuuca

SEQ ID NO: 736147 - RNA, 17 nt, Artificial Sequence
  Synthetic
aaguaagucugucuuca

SEQ ID NO: 736148 - RNA, 17 nt, Artificial Sequence
  Synthetic
auauguuuuugucuuca

SEQ ID NO: 736149 - RNA, 17 nt, Artificial Sequence
  Synthetic
caagaaacaauucuuca

SEQ ID NO: 736150 - RNA, 17 nt, Artificial Sequence
  Synthetic
uuugacugaauucuuca

SEQ ID NO: 736151 - RNA, 17 nt, Artificial Sequence
  Synthetic
acuuuucguauucuuca

SEQ ID NO: 736152 - RNA, 17 nt, Artificial Sequence
  Synthetic
ugauuuuagcuucuuca

SEQ ID NO: 736153 - RNA, 17 nt, Artificial Sequence
  Synthetic
ccagauggucuucuuca

SEQ ID NO: 736154 - RNA, 17 nt, Artificial Sequence
  Synthetic
acacacuuuguucuuca

SEQ ID NO: 736155 - RNA, 17 nt, Artificial Sequence
  Synthetic
uguuggggcuuucuuca

SEQ ID NO: 736156 - RNA, 17 nt, Artificial Sequence
  Synthetic
cugguuuucuuucuuca

SEQ ID NO: 736157 - RNA, 17 nt, Artificial Sequence
  Synthetic
ccaucaucguuucuuca

SEQ ID NO: 736158 - RNA, 17 nt, Artificial Sequence
  Synthetic
aucaugaauuuucuuca

SEQ ID NO: 736159 - RNA, 17 nt, Artificial Sequence
  Synthetic
uuuuaauuuuuucuuca

SEQ ID NO: 736160 - RNA, 17 nt, Artificial Sequence
  Synthetic
aucugugaaaaaguuca

SEQ ID NO: 736161 - RNA, 17 nt, Artificial Sequence
  Synthetic
caggcacauaaaguuca

SEQ ID NO: 736162 - RNA, 17 nt, Artificial Sequence
  Synthetic
aaaggcggacaaguuca

SEQ ID NO: 736163 - RNA, 17 nt, Artificial Sequence
  Synthetic
uauagcuuagaaguuca

SEQ ID NO: 736164 - RNA, 17 nt, Artificial Sequence
  Synthetic
uugaaaaaggaaguuca

SEQ ID NO: 736165 - RNA, 17 nt, Artificial Sequence
  Synthetic
uugacaacugaaguuca

SEQ ID NO: 736166 - RNA, 17 nt, Artificial Sequence
  Synthetic
cauuuugguuaaguuca

SEQ ID NO: 736167 - RNA, 17 nt, Artificial Sequence
  Synthetic
uuucacuuuuaaguuca

SEQ ID NO: 736168 - RNA, 17 nt, Artificial Sequence
  Synthetic
aacagcugcccaguuca

SEQ ID NO: 736169 - RNA, 17 nt, Artificial Sequence
  Synthetic
ccacguauuccaguuca

SEQ ID NO: 736170 - RNA, 17 nt, Artificial Sequence
  Synthetic
ccuaggaguucaguuca

SEQ ID NO: 736171 - RNA, 17 nt, Artificial Sequence
  Synthetic
uugagccccagaguuca

SEQ ID NO: 736172 - RNA, 17 nt, Artificial Sequence
  Synthetic
aaaccccucagaguuca

SEQ ID NO: 736173 - RNA, 17 nt, Artificial Sequence
  Synthetic
ugagcccaaggaguuca

SEQ ID NO: 736174 - RNA, 17 nt, Artificial Sequence
  Synthetic
cugaggucaggaguuca

SEQ ID NO: 736175 - RNA, 17 nt, Artificial Sequence
  Synthetic
cugagguccggaguuca

SEQ ID NO: 736176 - RNA, 17 nt, Artificial Sequence
  Synthetic
cauuuugccugaguuca

SEQ ID NO: 736177 - RNA, 17 nt, Artificial Sequence
  Synthetic
ucucccuagauaguuca

SEQ ID NO: 736178 - RNA, 17 nt, Artificial Sequence
  Synthetic
uugcacuguauaguuca

SEQ ID NO: 736179 - RNA, 17 nt, Artificial Sequence
  Synthetic
uccaggacucuaguuca

SEQ ID NO: 736180 - RNA, 17 nt, Artificial Sequence
  Synthetic
aaaccucauguaguuca

SEQ ID NO: 736181 - RNA, 17 nt, Artificial Sequence
  Synthetic
cuuaagacuguaguuca

SEQ ID NO: 736182 - RNA, 17 nt, Artificial Sequence
  Synthetic
ugguuauucaacguuca

SEQ ID NO: 736183 - RNA, 17 nt, Artificial Sequence
  Synthetic
aucuauccauacguuca

SEQ ID NO: 736184 - RNA, 17 nt, Artificial Sequence
  Synthetic
ccucagcugaccguuca

SEQ ID NO: 736185 - RNA, 17 nt, Artificial Sequence
  Synthetic
cccagccaaagcguuca

SEQ ID NO: 736186 - RNA, 17 nt, Artificial Sequence
  Synthetic
cucagggucugcguuca

SEQ ID NO: 736187 - RNA, 17 nt, Artificial Sequence
  Synthetic
auaugggaccagguuca

SEQ ID NO: 736188 - RNA, 17 nt, Artificial Sequence
  Synthetic
auuccuucccagguuca

SEQ ID NO: 736189 - RNA, 17 nt, Artificial Sequence
  Synthetic
cuccgccuccagguuca

SEQ ID NO: 736190 - RNA, 17 nt, Artificial Sequence
  Synthetic
auaaagacucagguuca

SEQ ID NO: 736191 - RNA, 17 nt, Artificial Sequence
  Synthetic
acccaucgcuagguuca

SEQ ID NO: 736192 - RNA, 17 nt, Artificial Sequence
  Synthetic
cuuuuaaauuagguuca

SEQ ID NO: 736193 - RNA, 17 nt, Artificial Sequence
  Synthetic
aaauucauagggguuca

SEQ ID NO: 736194 - RNA, 17 nt, Artificial Sequence
  Synthetic
uccgccuccuggguuca

SEQ ID NO: 736195 - RNA, 17 nt, Artificial Sequence
  Synthetic
ucugccuccuggguuca

SEQ ID NO: 736196 - RNA, 17 nt, Artificial Sequence
  Synthetic
uccaguuccuggguuca

SEQ ID NO: 736197 - RNA, 17 nt, Artificial Sequence
  Synthetic
cucuuccucgugguuca

SEQ ID NO: 736198 - RNA, 17 nt, Artificial Sequence
  Synthetic
agaaucacugugguuca

SEQ ID NO: 736199 - RNA, 17 nt, Artificial Sequence
  Synthetic
uucuuguccuugguuca

SEQ ID NO: 736200 - RNA, 17 nt, Artificial Sequence
  Synthetic
caauuauaaaauguuca

SEQ ID NO: 736201 - RNA, 17 nt, Artificial Sequence
  Synthetic
uacaaaagaaauguuca

SEQ ID NO: 736202 - RNA, 17 nt, Artificial Sequence
  Synthetic
cauacuugaaauguuca

SEQ ID NO: 736203 - RNA, 17 nt, Artificial Sequence
  Synthetic
ucauuacuaaauguuca

SEQ ID NO: 736204 - RNA, 17 nt, Artificial Sequence
  Synthetic
uggccucuaaauguuca

SEQ ID NO: 736205 - RNA, 17 nt, Artificial Sequence
  Synthetic
agucuaacgcauguuca

SEQ ID NO: 736206 - RNA, 17 nt, Artificial Sequence
  Synthetic
uaauuuuaauauguuca

SEQ ID NO: 736207 - RNA, 17 nt, Artificial Sequence
  Synthetic
ucauucuucuauguuca

SEQ ID NO: 736208 - RNA, 17 nt, Artificial Sequence
  Synthetic
cguuacugguauguuca

SEQ ID NO: 736209 - RNA, 17 nt, Artificial Sequence
  Synthetic
uauuuuccuacuguuca

SEQ ID NO: 736210 - RNA, 17 nt, Artificial Sequence
  Synthetic
uuauauucuacuguuca

SEQ ID NO: 736211 - RNA, 17 nt, Artificial Sequence
  Synthetic
acuugcacagcuguuca

SEQ ID NO: 736212 - RNA, 17 nt, Artificial Sequence
  Synthetic
auaauuuuaucuguuca

SEQ ID NO: 736213 - RNA, 17 nt, Artificial Sequence
  Synthetic
uguccucuaaguguuca

SEQ ID NO: 736214 - RNA, 17 nt, Artificial Sequence
  Synthetic
ucugcucuagguguuca

SEQ ID NO: 736215 - RNA, 17 nt, Artificial Sequence
  Synthetic
ugggaggaugguguuca

SEQ ID NO: 736216 - RNA, 17 nt, Artificial Sequence
  Synthetic
uugaggcucuguguuca

SEQ ID NO: 736217 - RNA, 17 nt, Artificial Sequence
  Synthetic
aucauuuucauuguuca

SEQ ID NO: 736218 - RNA, 17 nt, Artificial Sequence
  Synthetic
ucgaggucauuuguuca

SEQ ID NO: 736219 - RNA, 17 nt, Artificial Sequence
  Synthetic
acccuccauuuuguuca

SEQ ID NO: 736220 - RNA, 17 nt, Artificial Sequence
  Synthetic
uuuaaaauaaaauuuca

SEQ ID NO: 736221 - RNA, 17 nt, Artificial Sequence
  Synthetic
cacaaagagcaauuuca

SEQ ID NO: 736222 - RNA, 17 nt, Artificial Sequence
  Synthetic
acaguaggagaauuuca

SEQ ID NO: 736223 - RNA, 17 nt, Artificial Sequence
  Synthetic
uaggauugagaauuuca

SEQ ID NO: 736224 - RNA, 17 nt, Artificial Sequence
  Synthetic
acucuucaugaauuuca

SEQ ID NO: 736225 - RNA, 17 nt, Artificial Sequence
  Synthetic
uuacccuccuaauuuca

SEQ ID NO: 736226 - RNA, 17 nt, Artificial Sequence
  Synthetic
uacaguaauuaauuuca

SEQ ID NO: 736227 - RNA, 17 nt, Artificial Sequence
  Synthetic
ccuaaugucacauuuca

SEQ ID NO: 736228 - RNA, 17 nt, Artificial Sequence
  Synthetic
acugaaaagacauuuca

SEQ ID NO: 736229 - RNA, 17 nt, Artificial Sequence
  Synthetic
cuacauaucccauuuca

SEQ ID NO: 736230 - RNA, 17 nt, Artificial Sequence
  Synthetic
uuagugaaaucauuuca

SEQ ID NO: 736231 - RNA, 17 nt, Artificial Sequence
  Synthetic
auucuauccucauuuca

SEQ ID NO: 736232 - RNA, 17 nt, Artificial Sequence
  Synthetic
uguauuuggucauuuca

SEQ ID NO: 736233 - RNA, 17 nt, Artificial Sequence
  Synthetic
caagaagauucauuuca

SEQ ID NO: 736234 - RNA, 17 nt, Artificial Sequence
  Synthetic
uguacuuauucauuuca

SEQ ID NO: 736235 - RNA, 17 nt, Artificial Sequence
  Synthetic
uagacuuguucauuuca

SEQ ID NO: 736236 - RNA, 17 nt, Artificial Sequence
  Synthetic
cuauucauuucauuuca

SEQ ID NO: 736237 - RNA, 17 nt, Artificial Sequence
  Synthetic
aauagauacagauuuca

SEQ ID NO: 736238 - RNA, 17 nt, Artificial Sequence
  Synthetic
cuuacugcuagauuuca

SEQ ID NO: 736239 - RNA, 17 nt, Artificial Sequence
  Synthetic
uuuaucaguagauuuca

SEQ ID NO: 736240 - RNA, 17 nt, Artificial Sequence
  Synthetic
cuaaggauuagauuuca

SEQ ID NO: 736241 - RNA, 17 nt, Artificial Sequence
  Synthetic
ucagaauauggauuuca

SEQ ID NO: 736242 - RNA, 17 nt, Artificial Sequence
  Synthetic
uaggcauugugauuuca

SEQ ID NO: 736243 - RNA, 17 nt, Artificial Sequence
  Synthetic
aggccacuuugauuuca

SEQ ID NO: 736244 - RNA, 17 nt, Artificial Sequence
  Synthetic
aaauaauaaauauuuca

SEQ ID NO: 736245 - RNA, 17 nt, Artificial Sequence
  Synthetic
accuguguaauauuuca

SEQ ID NO: 736246 - RNA, 17 nt, Artificial Sequence
  Synthetic
augaaauacauauuuca

SEQ ID NO: 736247 - RNA, 17 nt, Artificial Sequence
  Synthetic
auauuagauauauuuca

SEQ ID NO: 736248 - RNA, 17 nt, Artificial Sequence
  Synthetic
uauuuaaaucuauuuca

SEQ ID NO: 736249 - RNA, 17 nt, Artificial Sequence
  Synthetic
auucagucauuauuuca

SEQ ID NO: 736250 - RNA, 17 nt, Artificial Sequence
  Synthetic
aauuguggauuauuuca

SEQ ID NO: 736251 - RNA, 17 nt, Artificial Sequence
  Synthetic
caugucauguuauuuca

SEQ ID NO: 736252 - RNA, 17 nt, Artificial Sequence
  Synthetic
ucuuuguuguuauuuca

SEQ ID NO: 736253 - RNA, 17 nt, Artificial Sequence
  Synthetic
agaaaaaauuuauuuca

SEQ ID NO: 736254 - RNA, 17 nt, Artificial Sequence
  Synthetic
ugauugucuuuauuuca

SEQ ID NO: 736255 - RNA, 17 nt, Artificial Sequence
  Synthetic
cuuccuucuaacuuuca

SEQ ID NO: 736256 - RNA, 17 nt, Artificial Sequence
  Synthetic
aauuggauuaacuuuca

SEQ ID NO: 736257 - RNA, 17 nt, Artificial Sequence
  Synthetic
ccaccccuucacuuuca

SEQ ID NO: 736258 - RNA, 17 nt, Artificial Sequence
  Synthetic
uauuauucuuacuuuca

SEQ ID NO: 736259 - RNA, 17 nt, Artificial Sequence
  Synthetic
ucuacuugacccuuuca

SEQ ID NO: 736260 - RNA, 17 nt, Artificial Sequence
  Synthetic
uucuuuucucccuuuca

SEQ ID NO: 736261 - RNA, 17 nt, Artificial Sequence
  Synthetic
uuucguauauccuuuca

SEQ ID NO: 736262 - RNA, 17 nt, Artificial Sequence
  Synthetic
uuauaauacuccuuuca

SEQ ID NO: 736263 - RNA, 17 nt, Artificial Sequence
  Synthetic
caaacgcuguccuuuca

SEQ ID NO: 736264 - RNA, 17 nt, Artificial Sequence
  Synthetic
ccucuuuuguccuuuca

SEQ ID NO: 736265 - RNA, 17 nt, Artificial Sequence
  Synthetic
cuaaaaccuuccuuuca

SEQ ID NO: 736266 - RNA, 17 nt, Artificial Sequence
  Synthetic
cucuugaaaagcuuuca

SEQ ID NO: 736267 - RNA, 17 nt, Artificial Sequence
  Synthetic
uguauuagaagcuuuca

SEQ ID NO: 736268 - RNA, 17 nt, Artificial Sequence
  Synthetic
auuguacauagcuuuca

SEQ ID NO: 736269 - RNA, 17 nt, Artificial Sequence
  Synthetic
cucuuccuuggcuuuca

SEQ ID NO: 736270 - RNA, 17 nt, Artificial Sequence
  Synthetic
aauguucuuggcuuuca

SEQ ID NO: 736271 - RNA, 17 nt, Artificial Sequence
  Synthetic
cuugguuugcucuuuca

SEQ ID NO: 736272 - RNA, 17 nt, Artificial Sequence
  Synthetic
acuucuccucucuuuca

SEQ ID NO: 736273 - RNA, 17 nt, Artificial Sequence
  Synthetic
acuagccaugucuuuca

SEQ ID NO: 736274 - RNA, 17 nt, Artificial Sequence
  Synthetic
aagaaugcugucuuuca

SEQ ID NO: 736275 - RNA, 17 nt, Artificial Sequence
  Synthetic
auuagguacuucuuuca

SEQ ID NO: 736276 - RNA, 17 nt, Artificial Sequence
  Synthetic
cauuuggucuucuuuca

SEQ ID NO: 736277 - RNA, 17 nt, Artificial Sequence
  Synthetic
ucacuuauguucuuuca

SEQ ID NO: 736278 - RNA, 17 nt, Artificial Sequence
  Synthetic
uaaugucuuuucuuuca

SEQ ID NO: 736279 - RNA, 17 nt, Artificial Sequence
  Synthetic
ccuauucaaaaguuuca

SEQ ID NO: 736280 - RNA, 17 nt, Artificial Sequence
  Synthetic
aaaauggcaaaguuuca

SEQ ID NO: 736281 - RNA, 17 nt, Artificial Sequence
  Synthetic
uuuaugauaaaguuuca

SEQ ID NO: 736282 - RNA, 17 nt, Artificial Sequence
  Synthetic
cuacagcuaaaguuuca

SEQ ID NO: 736283 - RNA, 17 nt, Artificial Sequence
  Synthetic
auauucuuaaaguuuca

SEQ ID NO: 736284 - RNA, 17 nt, Artificial Sequence
  Synthetic
cauuucuagaaguuuca

SEQ ID NO: 736285 - RNA, 17 nt, Artificial Sequence
  Synthetic
uaaaacauucaguuuca

SEQ ID NO: 736286 - RNA, 17 nt, Artificial Sequence
  Synthetic
uucaaaugagaguuuca

SEQ ID NO: 736287 - RNA, 17 nt, Artificial Sequence
  Synthetic
cuauuuuaauaguuuca

SEQ ID NO: 736288 - RNA, 17 nt, Artificial Sequence
  Synthetic
cucuuguaguaguuuca

SEQ ID NO: 736289 - RNA, 17 nt, Artificial Sequence
  Synthetic
uggaaugaaagguuuca

SEQ ID NO: 736290 - RNA, 17 nt, Artificial Sequence
  Synthetic
ugacauucaagguuuca

SEQ ID NO: 736291 - RNA, 17 nt, Artificial Sequence
  Synthetic
ucacuucugggguuuca

SEQ ID NO: 736292 - RNA, 17 nt, Artificial Sequence
  Synthetic
aggaaaacaugguuuca

SEQ ID NO: 736293 - RNA, 17 nt, Artificial Sequence
  Synthetic
uuauggggaugguuuca

SEQ ID NO: 736294 - RNA, 17 nt, Artificial Sequence
  Synthetic
ccauuuggaugguuuca

SEQ ID NO: 736295 - RNA, 17 nt, Artificial Sequence
  Synthetic
aaauuuaauugguuuca

SEQ ID NO: 736296 - RNA, 17 nt, Artificial Sequence
  Synthetic
auuauauccauguuuca

SEQ ID NO: 736297 - RNA, 17 nt, Artificial Sequence
  Synthetic
caauuuggcauguuuca

SEQ ID NO: 736298 - RNA, 17 nt, Artificial Sequence
  Synthetic
caaccaaauauguuuca

SEQ ID NO: 736299 - RNA, 17 nt, Artificial Sequence
  Synthetic
aaggaaauacuguuuca

SEQ ID NO: 736300 - RNA, 17 nt, Artificial Sequence
  Synthetic
ugcucaugauuguuuca

SEQ ID NO: 736301 - RNA, 17 nt, Artificial Sequence
  Synthetic
augaaauuguuguuuca

SEQ ID NO: 736302 - RNA, 17 nt, Artificial Sequence
  Synthetic
uaauggcauuuguuuca

SEQ ID NO: 736303 - RNA, 17 nt, Artificial Sequence
  Synthetic
uaggagggaaauuuuca

SEQ ID NO: 736304 - RNA, 17 nt, Artificial Sequence
  Synthetic
auuuuccagaauuuuca

SEQ ID NO: 736305 - RNA, 17 nt, Artificial Sequence
  Synthetic
uaaagucugaauuuuca

SEQ ID NO: 736306 - RNA, 17 nt, Artificial Sequence
  Synthetic
acuuuucuuaauuuuca

SEQ ID NO: 736307 - RNA, 17 nt, Artificial Sequence
  Synthetic
auuauguuuaauuuuca

SEQ ID NO: 736308 - RNA, 17 nt, Artificial Sequence
  Synthetic
ugauuaccacauuuuca

SEQ ID NO: 736309 - RNA, 17 nt, Artificial Sequence
  Synthetic
uuguauucacauuuuca

SEQ ID NO: 736310 - RNA, 17 nt, Artificial Sequence
  Synthetic
aaaggaggccauuuuca

SEQ ID NO: 736311 - RNA, 17 nt, Artificial Sequence
  Synthetic
cagacugagcauuuuca

SEQ ID NO: 736312 - RNA, 17 nt, Artificial Sequence
  Synthetic
cgggugcugcauuuuca

SEQ ID NO: 736313 - RNA, 17 nt, Artificial Sequence
  Synthetic
acuuuuucucauuuuca

SEQ ID NO: 736314 - RNA, 17 nt, Artificial Sequence
  Synthetic
uacugaagucauuuuca

SEQ ID NO: 736315 - RNA, 17 nt, Artificial Sequence
  Synthetic
aucaauucagauuuuca

SEQ ID NO: 736316 - RNA, 17 nt, Artificial Sequence
  Synthetic
aaggcuacugauuuuca

SEQ ID NO: 736317 - RNA, 17 nt, Artificial Sequence
  Synthetic
ucagcauaauauuuuca

SEQ ID NO: 736318 - RNA, 17 nt, Artificial Sequence
  Synthetic
uauaaccuauauuuuca

SEQ ID NO: 736319 - RNA, 17 nt, Artificial Sequence
  Synthetic
uuauuuagcuauuuuca

SEQ ID NO: 736320 - RNA, 17 nt, Artificial Sequence
  Synthetic
agaucacgguauuuuca

SEQ ID NO: 736321 - RNA, 17 nt, Artificial Sequence
  Synthetic
uccccacuguauuuuca

SEQ ID NO: 736322 - RNA, 17 nt, Artificial Sequence
  Synthetic
uugcagaauuauuuuca

SEQ ID NO: 736323 - RNA, 17 nt, Artificial Sequence
  Synthetic
uaaaagccuuauuuuca

SEQ ID NO: 736324 - RNA, 17 nt, Artificial Sequence
  Synthetic
auguuuagcacuuuuca

SEQ ID NO: 736325 - RNA, 17 nt, Artificial Sequence
  Synthetic
acacaggugacuuuuca

SEQ ID NO: 736326 - RNA, 17 nt, Artificial Sequence
  Synthetic
acauuaccuacuuuuca

SEQ ID NO: 736327 - RNA, 17 nt, Artificial Sequence
  Synthetic
uuuugugcuccuuuuca

SEQ ID NO: 736328 - RNA, 17 nt, Artificial Sequence
  Synthetic
agcucaguuccuuuuca

SEQ ID NO: 736329 - RNA, 17 nt, Artificial Sequence
  Synthetic
uauuaagcaucuuuuca

SEQ ID NO: 736330 - RNA, 17 nt, Artificial Sequence
  Synthetic
cucccacacucuuuuca

SEQ ID NO: 736331 - RNA, 17 nt, Artificial Sequence
  Synthetic
augauuuugucuuuuca

SEQ ID NO: 736332 - RNA, 17 nt, Artificial Sequence
  Synthetic
cuguaguuuucuuuuca

SEQ ID NO: 736333 - RNA, 17 nt, Artificial Sequence
  Synthetic
aaugccagaaguuuuca

SEQ ID NO: 736334 - RNA, 17 nt, Artificial Sequence
  Synthetic
cuuugaggaaguuuuca

SEQ ID NO: 736335 - RNA, 17 nt, Artificial Sequence
  Synthetic
ucauucagcaguuuuca

SEQ ID NO: 736336 - RNA, 17 nt, Artificial Sequence
  Synthetic
cuuccguucaguuuuca

SEQ ID NO: 736337 - RNA, 17 nt, Artificial Sequence
  Synthetic
uauugacauaguuuuca

SEQ ID NO: 736338 - RNA, 17 nt, Artificial Sequence
  Synthetic
acgugugaauguuuuca

SEQ ID NO: 736339 - RNA, 17 nt, Artificial Sequence
  Synthetic
uccaggcccuguuuuca

SEQ ID NO: 736340 - RNA, 17 nt, Artificial Sequence
  Synthetic
uggccauucuguuuuca

SEQ ID NO: 736341 - RNA, 17 nt, Artificial Sequence
  Synthetic
uugagaaauuguuuuca

SEQ ID NO: 736342 - RNA, 17 nt, Artificial Sequence
  Synthetic
aauguaauaauuuuuca

SEQ ID NO: 736343 - RNA, 17 nt, Artificial Sequence
  Synthetic
uuuugucucauuuuuca

SEQ ID NO: 736344 - RNA, 17 nt, Artificial Sequence
  Synthetic
aggguuaauauuuuuca

SEQ ID NO: 736345 - RNA, 17 nt, Artificial Sequence
  Synthetic
cagaggccuauuuuuca

SEQ ID NO: 736346 - RNA, 17 nt, Artificial Sequence
  Synthetic
ucacccaaacuuuuuca

SEQ ID NO: 736347 - RNA, 17 nt, Artificial Sequence
  Synthetic
acuaaggcucuuuuuca

SEQ ID NO: 736348 - RNA, 17 nt, Artificial Sequence
  Synthetic
cauaauuauguuuuuca

SEQ ID NO: 736349 - RNA, 17 nt, Artificial Sequence
  Synthetic
caggcaguuguuuuuca

SEQ ID NO: 736350 - RNA, 17 nt, Artificial Sequence
  Synthetic
cuugucuucuuuuuuca

SEQ ID NO: 736351 - RNA, 17 nt, Artificial Sequence
  Synthetic
auguuguucuuuuuuca

SEQ ID NO: 736352 - RNA, 17 nt, Artificial Sequence
  Synthetic
auuacccauuuuuuuca

SEQ ID NO: 736353 - RNA, 17 nt, Artificial Sequence
  Synthetic
aaaaccuauuuuuuuca

SEQ ID NO: 736354 - RNA, 17 nt, Artificial Sequence
  Synthetic
uuugagcuuuuuuuuca

SEQ ID NO: 736355 - RNA, 17 nt, Artificial Sequence
  Synthetic
uccauuuuuuuuuuuca

SEQ ID NO: 736356 - RNA, 17 nt, Artificial Sequence
  Synthetic
aaaaaaaaaaaaaaaga

SEQ ID NO: 736357 - RNA, 17 nt, Artificial Sequence
  Synthetic
aaagagaaaaaaaaaga

SEQ ID NO: 736358 - RNA, 17 nt, Artificial Sequence
  Synthetic
ucggccacaaaaaaaga

SEQ ID NO: 736359 - RNA, 17 nt, Artificial Sequence
  Synthetic
agaaaagcaaaaaaaga

SEQ ID NO: 736360 - RNA, 17 nt, Artificial Sequence
  Synthetic
uuuccuggaaaaaaaga

SEQ ID NO: 736361 - RNA, 17 nt, Artificial Sequence
  Synthetic
uugaaauauaaaaaaga

SEQ ID NO: 736362 - RNA, 17 nt, Artificial Sequence
  Synthetic
uuccaucuuaaaaaaga

SEQ ID NO: 736363 - RNA, 17 nt, Artificial Sequence
  Synthetic
aggaaaagacaaaaaga

SEQ ID NO: 736364 - RNA, 17 nt, Artificial Sequence
  Synthetic
aguuucauacaaaaaga

SEQ ID NO: 736365 - RNA, 17 nt, Artificial Sequence
  Synthetic
aauauuagagaaaaaga

SEQ ID NO: 736366 - RNA, 17 nt, Artificial Sequence
  Synthetic
caaucaauagaaaaaga

SEQ ID NO: 736367 - RNA, 17 nt, Artificial Sequence
  Synthetic
aaagacuuagaaaaaga

SEQ ID NO: 736368 - RNA, 17 nt, Artificial Sequence
  Synthetic
uuaauccuggaaaaaga

SEQ ID NO: 736369 - RNA, 17 nt, Artificial Sequence
  Synthetic
uggaagguggaaaaaga

SEQ ID NO: 736370 - RNA, 17 nt, Artificial Sequence
  Synthetic
ucaccauuugaaaaaga

SEQ ID NO: 736371 - RNA, 17 nt, Artificial Sequence
  Synthetic
uuuagaauauaaaaaga

SEQ ID NO: 736372 - RNA, 17 nt, Artificial Sequence
  Synthetic
auauaaaaguaaaaaga

SEQ ID NO: 736373 - RNA, 17 nt, Artificial Sequence
  Synthetic
uaacgaaaguaaaaaga

SEQ ID NO: 736374 - RNA, 17 nt, Artificial Sequence
  Synthetic
uuuauauuuuaaaaaga

SEQ ID NO: 736375 - RNA, 17 nt, Artificial Sequence
  Synthetic
uaauggagaacaaaaga

SEQ ID NO: 736376 - RNA, 17 nt, Artificial Sequence
  Synthetic
ccuuggaccacaaaaga

SEQ ID NO: 736377 - RNA, 17 nt, Artificial Sequence
  Synthetic
ucuggggugacaaaaga

SEQ ID NO: 736378 - RNA, 17 nt, Artificial Sequence
  Synthetic
uaugaauugacaaaaga

SEQ ID NO: 736379 - RNA, 17 nt, Artificial Sequence
  Synthetic
uggcacucaccaaaaga

SEQ ID NO: 736380 - RNA, 17 nt, Artificial Sequence
  Synthetic
augaacaucccaaaaga

SEQ ID NO: 736381 - RNA, 17 nt, Artificial Sequence
  Synthetic
uuccaagcagcaaaaga

SEQ ID NO: 736382 - RNA, 17 nt, Artificial Sequence
  Synthetic
ccuccagaggcaaaaga

SEQ ID NO: 736383 - RNA, 17 nt, Artificial Sequence
  Synthetic
ugauuauaggcaaaaga

SEQ ID NO: 736384 - RNA, 17 nt, Artificial Sequence
  Synthetic
uauaugagugcaaaaga

SEQ ID NO: 736385 - RNA, 17 nt, Artificial Sequence
  Synthetic
ugcuagaugucaaaaga

SEQ ID NO: 736386 - RNA, 17 nt, Artificial Sequence
  Synthetic
cugcauccuucaaaaga

SEQ ID NO: 736387 - RNA, 17 nt, Artificial Sequence
  Synthetic
uuaauuaguucaaaaga

SEQ ID NO: 736388 - RNA, 17 nt, Artificial Sequence
  Synthetic
auuuaaaaaagaaaaga

SEQ ID NO: 736389 - RNA, 17 nt, Artificial Sequence
  Synthetic
aggaaagaaagaaaaga

SEQ ID NO: 736390 - RNA, 17 nt, Artificial Sequence
  Synthetic
cuaugugaaagaaaaga

SEQ ID NO: 736391 - RNA, 17 nt, Artificial Sequence
  Synthetic
aauggaggaagaaaaga

SEQ ID NO: 736392 - RNA, 17 nt, Artificial Sequence
  Synthetic
aaugcauuaagaaaaga

SEQ ID NO: 736393 - RNA, 17 nt, Artificial Sequence
  Synthetic
cuggagaacagaaaaga

SEQ ID NO: 736394 - RNA, 17 nt, Artificial Sequence
  Synthetic
aaaagccagagaaaaga

SEQ ID NO: 736395 - RNA, 17 nt, Artificial Sequence
  Synthetic
aauuccuggagaaaaga

SEQ ID NO: 736396 - RNA, 17 nt, Artificial Sequence
  Synthetic
cuagaagguagaaaaga

SEQ ID NO: 736397 - RNA, 17 nt, Artificial Sequence
  Synthetic
agguuaaugcgaaaaga

SEQ ID NO: 736398 - RNA, 17 nt, Artificial Sequence
  Synthetic
cuggguaaaggaaaaga

SEQ ID NO: 736399 - RNA, 17 nt, Artificial Sequence
  Synthetic
ucaaaggcaggaaaaga

SEQ ID NO: 736400 - RNA, 17 nt, Artificial Sequence
  Synthetic
uaaacaauaggaaaaga

SEQ ID NO: 736401 - RNA, 17 nt, Artificial Sequence
  Synthetic
aacacagcuggaaaaga

SEQ ID NO: 736402 - RNA, 17 nt, Artificial Sequence
  Synthetic
agguugcuuggaaaaga

SEQ ID NO: 736403 - RNA, 17 nt, Artificial Sequence
  Synthetic
aaagaaaaaugaaaaga

SEQ ID NO: 736404 - RNA, 17 nt, Artificial Sequence
  Synthetic
auaagcacaugaaaaga

SEQ ID NO: 736405 - RNA, 17 nt, Artificial Sequence
  Synthetic
cucucugacugaaaaga

SEQ ID NO: 736406 - RNA, 17 nt, Artificial Sequence
  Synthetic
uacuacuucugaaaaga

SEQ ID NO: 736407 - RNA, 17 nt, Artificial Sequence
  Synthetic
ugaagugugugaaaaga

SEQ ID NO: 736408 - RNA, 17 nt, Artificial Sequence
  Synthetic
agacauauuugaaaaga

SEQ ID NO: 736409 - RNA, 17 nt, Artificial Sequence
  Synthetic
aaaggugaaauaaaaga

SEQ ID NO: 736410 - RNA, 17 nt, Artificial Sequence
  Synthetic
cacucccuaauaaaaga

SEQ ID NO: 736411 - RNA, 17 nt, Artificial Sequence
  Synthetic
uggacugugauaaaaga

SEQ ID NO: 736412 - RNA, 17 nt, Artificial Sequence
  Synthetic
auaugugaacuaaaaga

SEQ ID NO: 736413 - RNA, 17 nt, Artificial Sequence
  Synthetic
acaaucagacuaaaaga

SEQ ID NO: 736414 - RNA, 17 nt, Artificial Sequence
  Synthetic
aaagaugggcuaaaaga

SEQ ID NO: 736415 - RNA, 17 nt, Artificial Sequence
  Synthetic
auacaucugcuaaaaga

SEQ ID NO: 736416 - RNA, 17 nt, Artificial Sequence
  Synthetic
auaggagggguaaaaga

SEQ ID NO: 736417 - RNA, 17 nt, Artificial Sequence
  Synthetic
acagaagcauuaaaaga

SEQ ID NO: 736418 - RNA, 17 nt, Artificial Sequence
  Synthetic
cauaguguauuaaaaga

SEQ ID NO: 736419 - RNA, 17 nt, Artificial Sequence
  Synthetic
agcaacagcuuaaaaga

SEQ ID NO: 736420 - RNA, 17 nt, Artificial Sequence
  Synthetic
uuugaaaucuuaaaaga

SEQ ID NO: 736421 - RNA, 17 nt, Artificial Sequence
  Synthetic
aacuuaucuuuaaaaga

SEQ ID NO: 736422 - RNA, 17 nt, Artificial Sequence
  Synthetic
cuaguaaguaacaaaga

SEQ ID NO: 736423 - RNA, 17 nt, Artificial Sequence
  Synthetic
auuuuuauuaacaaaga

SEQ ID NO: 736424 - RNA, 17 nt, Artificial Sequence
  Synthetic
acauaugaacacaaaga

SEQ ID NO: 736425 - RNA, 17 nt, Artificial Sequence
  Synthetic
cuaaaaagacacaaaga

SEQ ID NO: 736426 - RNA, 17 nt, Artificial Sequence
  Synthetic
acauauggacacaaaga

SEQ ID NO: 736427 - RNA, 17 nt, Artificial Sequence
  Synthetic
cccuuguggcacaaaga

SEQ ID NO: 736428 - RNA, 17 nt, Artificial Sequence
  Synthetic
aucaagaaagacaaaga

SEQ ID NO: 736429 - RNA, 17 nt, Artificial Sequence
  Synthetic
aucaaaagagacaaaga

SEQ ID NO: 736430 - RNA, 17 nt, Artificial Sequence
  Synthetic
uggaagcuagacaaaga

SEQ ID NO: 736431 - RNA, 17 nt, Artificial Sequence
  Synthetic
uaagauuuauacaaaga

SEQ ID NO: 736432 - RNA, 17 nt, Artificial Sequence
  Synthetic
uagggcuguuacaaaga

SEQ ID NO: 736433 - RNA, 17 nt, Artificial Sequence
  Synthetic
uagggugaugccaaaga

SEQ ID NO: 736434 - RNA, 17 nt, Artificial Sequence
  Synthetic
auaaagcuguccaaaga

SEQ ID NO: 736435 - RNA, 17 nt, Artificial Sequence
  Synthetic
acacaagguuccaaaga

SEQ ID NO: 736436 - RNA, 17 nt, Artificial Sequence
  Synthetic
caggagggaagcaaaga

SEQ ID NO: 736437 - RNA, 17 nt, Artificial Sequence
  Synthetic
cacuagcugagcaaaga

SEQ ID NO: 736438 - RNA, 17 nt, Artificial Sequence
  Synthetic
ccagagaacaucaaaga

SEQ ID NO: 736439 - RNA, 17 nt, Artificial Sequence
  Synthetic
acagugcugaucaaaga

SEQ ID NO: 736440 - RNA, 17 nt, Artificial Sequence
  Synthetic
ccaugauaucucaaaga

SEQ ID NO: 736441 - RNA, 17 nt, Artificial Sequence
  Synthetic
ccuaugggucucaaaga

SEQ ID NO: 736442 - RNA, 17 nt, Artificial Sequence
  Synthetic
ugaacaugucucaaaga

SEQ ID NO: 736443 - RNA, 17 nt, Artificial Sequence
  Synthetic
uucaagguugucaaaga

SEQ ID NO: 736444 - RNA, 17 nt, Artificial Sequence
  Synthetic
ugaauacaauucaaaga

SEQ ID NO: 736445 - RNA, 17 nt, Artificial Sequence
  Synthetic
agugguuaauucaaaga

SEQ ID NO: 736446 - RNA, 17 nt, Artificial Sequence
  Synthetic
agagaagguuucaaaga

SEQ ID NO: 736447 - RNA, 17 nt, Artificial Sequence
  Synthetic
ucuuuuauuuucaaaga

SEQ ID NO: 736448 - RNA, 17 nt, Artificial Sequence
  Synthetic
aagaaaaaaaagaaaga

SEQ ID NO: 736449 - RNA, 17 nt, Artificial Sequence
  Synthetic
auaauaaaaaagaaaga

SEQ ID NO: 736450 - RNA, 17 nt, Artificial Sequence
  Synthetic
cccuuguaaaagaaaga

SEQ ID NO: 736451 - RNA, 17 nt, Artificial Sequence
  Synthetic
uagcauauaaagaaaga

SEQ ID NO: 736452 - RNA, 17 nt, Artificial Sequence
  Synthetic
uuuccauuaaagaaaga

SEQ ID NO: 736453 - RNA, 17 nt, Artificial Sequence
  Synthetic
auucaacagaagaaaga

SEQ ID NO: 736454 - RNA, 17 nt, Artificial Sequence
  Synthetic
aauugaucacagaaaga

SEQ ID NO: 736455 - RNA, 17 nt, Artificial Sequence
  Synthetic
ugagagauacagaaaga

SEQ ID NO: 736456 - RNA, 17 nt, Artificial Sequence
  Synthetic
aaguggugccagaaaga

SEQ ID NO: 736457 - RNA, 17 nt, Artificial Sequence
  Synthetic
aggcaaauucagaaaga

SEQ ID NO: 736458 - RNA, 17 nt, Artificial Sequence
  Synthetic
caacagauucagaaaga

SEQ ID NO: 736459 - RNA, 17 nt, Artificial Sequence
  Synthetic
ccauaaaaagagaaaga

SEQ ID NO: 736460 - RNA, 17 nt, Artificial Sequence
  Synthetic
ugaauuucagagaaaga

SEQ ID NO: 736461 - RNA, 17 nt, Artificial Sequence
  Synthetic
uaaaagagagagaaaga

SEQ ID NO: 736462 - RNA, 17 nt, Artificial Sequence
  Synthetic
cugcacagauagaaaga

SEQ ID NO: 736463 - RNA, 17 nt, Artificial Sequence
  Synthetic
cauuuuggauagaaaga

SEQ ID NO: 736464 - RNA, 17 nt, Artificial Sequence
  Synthetic
aaaguccucuagaaaga

SEQ ID NO: 736465 - RNA, 17 nt, Artificial Sequence
  Synthetic
uucgaauauuagaaaga

SEQ ID NO: 736466 - RNA, 17 nt, Artificial Sequence
  Synthetic
cagaagaaaaggaaaga

SEQ ID NO: 736467 - RNA, 17 nt, Artificial Sequence
  Synthetic
aaaauguaaaggaaaga

SEQ ID NO: 736468 - RNA, 17 nt, Artificial Sequence
  Synthetic
ucuauuuggaggaaaga

SEQ ID NO: 736469 - RNA, 17 nt, Artificial Sequence
  Synthetic
ccugagcaacggaaaga

SEQ ID NO: 736470 - RNA, 17 nt, Artificial Sequence
  Synthetic
cuuacugaguggaaaga

SEQ ID NO: 736471 - RNA, 17 nt, Artificial Sequence
  Synthetic
ccaccuguuuggaaaga

SEQ ID NO: 736472 - RNA, 17 nt, Artificial Sequence
  Synthetic
cuuaugacaaugaaaga

SEQ ID NO: 736473 - RNA, 17 nt, Artificial Sequence
  Synthetic
cacaugggaaugaaaga

SEQ ID NO: 736474 - RNA, 17 nt, Artificial Sequence
  Synthetic
cucuauacuaugaaaga

SEQ ID NO: 736475 - RNA, 17 nt, Artificial Sequence
  Synthetic
auguguuuuaugaaaga

SEQ ID NO: 736476 - RNA, 17 nt, Artificial Sequence
  Synthetic
cccaaagcagugaaaga

SEQ ID NO: 736477 - RNA, 17 nt, Artificial Sequence
  Synthetic
aguuugugagugaaaga

SEQ ID NO: 736478 - RNA, 17 nt, Artificial Sequence
  Synthetic
acugaauuugugaaaga

SEQ ID NO: 736479 - RNA, 17 nt, Artificial Sequence
  Synthetic
ucagaacaauugaaaga

SEQ ID NO: 736480 - RNA, 17 nt, Artificial Sequence
  Synthetic
caucagaaguugaaaga

SEQ ID NO: 736481 - RNA, 17 nt, Artificial Sequence
  Synthetic
uagaagaaaaauaaaga

SEQ ID NO: 736482 - RNA, 17 nt, Artificial Sequence
  Synthetic
caugguagcaauaaaga

SEQ ID NO: 736483 - RNA, 17 nt, Artificial Sequence
  Synthetic
uguaacaugaauaaaga

SEQ ID NO: 736484 - RNA, 17 nt, Artificial Sequence
  Synthetic
auuugauauaauaaaga

SEQ ID NO: 736485 - RNA, 17 nt, Artificial Sequence
  Synthetic
aauuguuuuaauaaaga

SEQ ID NO: 736486 - RNA, 17 nt, Artificial Sequence
  Synthetic
cagcaaggacauaaaga

SEQ ID NO: 736487 - RNA, 17 nt, Artificial Sequence
  Synthetic
acucauggacauaaaga

SEQ ID NO: 736488 - RNA, 17 nt, Artificial Sequence
  Synthetic
auuucaaaagauaaaga

SEQ ID NO: 736489 - RNA, 17 nt, Artificial Sequence
  Synthetic
uagaaauacgauaaaga

SEQ ID NO: 736490 - RNA, 17 nt, Artificial Sequence
  Synthetic
agggggcaugauaaaga

SEQ ID NO: 736491 - RNA, 17 nt, Artificial Sequence
  Synthetic
ugcaaaugauauaaaga

SEQ ID NO: 736492 - RNA, 17 nt, Artificial Sequence
  Synthetic
uuuguaagcuauaaaga

SEQ ID NO: 736493 - RNA, 17 nt, Artificial Sequence
  Synthetic
aguuauucaacuaaaga

SEQ ID NO: 736494 - RNA, 17 nt, Artificial Sequence
  Synthetic
cccauuuuuacuaaaga

SEQ ID NO: 736495 - RNA, 17 nt, Artificial Sequence
  Synthetic
aauacauuaccuaaaga

SEQ ID NO: 736496 - RNA, 17 nt, Artificial Sequence
  Synthetic
aaguuuccaaguaaaga

SEQ ID NO: 736497 - RNA, 17 nt, Artificial Sequence
  Synthetic
uaaaauaggaguaaaga

SEQ ID NO: 736498 - RNA, 17 nt, Artificial Sequence
  Synthetic
aucuagaauaguaaaga

SEQ ID NO: 736499 - RNA, 17 nt, Artificial Sequence
  Synthetic
uuacaggauaguaaaga

SEQ ID NO: 736500 - RNA, 17 nt, Artificial Sequence
  Synthetic
uguaguuuuaguaaaga

SEQ ID NO: 736501 - RNA, 17 nt, Artificial Sequence
  Synthetic
acuauuuuuaguaaaga

SEQ ID NO: 736502 - RNA, 17 nt, Artificial Sequence
  Synthetic
aauaggggcgguaaaga

SEQ ID NO: 736503 - RNA, 17 nt, Artificial Sequence
  Synthetic
ugagcuguggguaaaga

SEQ ID NO: 736504 - RNA, 17 nt, Artificial Sequence
  Synthetic
aggaaugaaauuaaaga

SEQ ID NO: 736505 - RNA, 17 nt, Artificial Sequence
  Synthetic
aguccugaaauuaaaga

SEQ ID NO: 736506 - RNA, 17 nt, Artificial Sequence
  Synthetic
auaagaaggauuaaaga

SEQ ID NO: 736507 - RNA, 17 nt, Artificial Sequence
  Synthetic
auuauuauuauuaaaga

SEQ ID NO: 736508 - RNA, 17 nt, Artificial Sequence
  Synthetic
aagaguguuauuaaaga

SEQ ID NO: 736509 - RNA, 17 nt, Artificial Sequence
  Synthetic
ugaagugaucuuaaaga

SEQ ID NO: 736510 - RNA, 17 nt, Artificial Sequence
  Synthetic
uaaccuacaguuaaaga

SEQ ID NO: 736511 - RNA, 17 nt, Artificial Sequence
  Synthetic
uguuuaguuuuuaaaga

SEQ ID NO: 736512 - RNA, 17 nt, Artificial Sequence
  Synthetic
aauugauuuuuuaaaga

SEQ ID NO: 736513 - RNA, 17 nt, Artificial Sequence
  Synthetic
aaagcaacaaaacaaga

SEQ ID NO: 736514 - RNA, 17 nt, Artificial Sequence
  Synthetic
acaaaggcaaaacaaga

SEQ ID NO: 736515 - RNA, 17 nt, Artificial Sequence
  Synthetic
acauaugcaaaacaaga

SEQ ID NO: 736516 - RNA, 17 nt, Artificial Sequence
  Synthetic
ccucagaagaaacaaga

SEQ ID NO: 736517 - RNA, 17 nt, Artificial Sequence
  Synthetic
aucaugacacaacaaga

SEQ ID NO: 736518 - RNA, 17 nt, Artificial Sequence
  Synthetic
aucaagcaccaacaaga

SEQ ID NO: 736519 - RNA, 17 nt, Artificial Sequence
  Synthetic
cuccaaagggaacaaga

SEQ ID NO: 736520 - RNA, 17 nt, Artificial Sequence
  Synthetic
aguacaguugaacaaga

SEQ ID NO: 736521 - RNA, 17 nt, Artificial Sequence
  Synthetic
aaaguuggaacacaaga

SEQ ID NO: 736522 - RNA, 17 nt, Artificial Sequence
  Synthetic
ugaagucucacacaaga

SEQ ID NO: 736523 - RNA, 17 nt, Artificial Sequence
  Synthetic
ucaaauaacccacaaga

SEQ ID NO: 736524 - RNA, 17 nt, Artificial Sequence
  Synthetic
aaguuauacucacaaga

SEQ ID NO: 736525 - RNA, 17 nt, Artificial Sequence
  Synthetic
ccgauguagucacaaga

SEQ ID NO: 736526 - RNA, 17 nt, Artificial Sequence
  Synthetic
aaugaaaaucgacaaga

SEQ ID NO: 736527 - RNA, 17 nt, Artificial Sequence
  Synthetic
agaucugaaugacaaga

SEQ ID NO: 736528 - RNA, 17 nt, Artificial Sequence
  Synthetic
uacucuaacugacaaga

SEQ ID NO: 736529 - RNA, 17 nt, Artificial Sequence
  Synthetic
aggagaaagauacaaga

SEQ ID NO: 736530 - RNA, 17 nt, Artificial Sequence
  Synthetic
acuggagcuguacaaga

SEQ ID NO: 736531 - RNA, 17 nt, Artificial Sequence
  Synthetic
uuucucaaauuacaaga

SEQ ID NO: 736532 - RNA, 17 nt, Artificial Sequence
  Synthetic
ugcuggacaaaccaaga

SEQ ID NO: 736533 - RNA, 17 nt, Artificial Sequence
  Synthetic
aaccaaccaaaccaaga

SEQ ID NO: 736534 - RNA, 17 nt, Artificial Sequence
  Synthetic
aaagguagaaaccaaga

SEQ ID NO: 736535 - RNA, 17 nt, Artificial Sequence
  Synthetic
uaaauacccaaccaaga

SEQ ID NO: 736536 - RNA, 17 nt, Artificial Sequence
  Synthetic
acuuuggguaaccaaga

SEQ ID NO: 736537 - RNA, 17 nt, Artificial Sequence
  Synthetic
cagaccuuccaccaaga

SEQ ID NO: 736538 - RNA, 17 nt, Artificial Sequence
  Synthetic
cauuuuugucaccaaga

SEQ ID NO: 736539 - RNA, 17 nt, Artificial Sequence
  Synthetic
auucaccaugaccaaga

SEQ ID NO: 736540 - RNA, 17 nt, Artificial Sequence
  Synthetic
cacagagaaagccaaga

SEQ ID NO: 736541 - RNA, 17 nt, Artificial Sequence
  Synthetic
aaacuuaagagccaaga

SEQ ID NO: 736542 - RNA, 17 nt, Artificial Sequence
  Synthetic
auaacaggaggccaaga

SEQ ID NO: 736543 - RNA, 17 nt, Artificial Sequence
  Synthetic
acauugggaggccaaga

SEQ ID NO: 736544 - RNA, 17 nt, Artificial Sequence
  Synthetic
auguagaauggccaaga

SEQ ID NO: 736545 - RNA, 17 nt, Artificial Sequence
  Synthetic
cagaauaaaauccaaga

SEQ ID NO: 736546 - RNA, 17 nt, Artificial Sequence
  Synthetic
auaguggacauccaaga

SEQ ID NO: 736547 - RNA, 17 nt, Artificial Sequence
  Synthetic
auuucucugauccaaga

SEQ ID NO: 736548 - RNA, 17 nt, Artificial Sequence
  Synthetic
cagaaguauauccaaga

SEQ ID NO: 736549 - RNA, 17 nt, Artificial Sequence
  Synthetic
ucauuggaaguccaaga

SEQ ID NO: 736550 - RNA, 17 nt, Artificial Sequence
  Synthetic
uaaguagaauuccaaga

SEQ ID NO: 736551 - RNA, 17 nt, Artificial Sequence
  Synthetic
acauccacauuccaaga

SEQ ID NO: 736552 - RNA, 17 nt, Artificial Sequence
  Synthetic
auuugcauauuccaaga

SEQ ID NO: 736553 - RNA, 17 nt, Artificial Sequence
  Synthetic
aggauucacuuccaaga

SEQ ID NO: 736554 - RNA, 17 nt, Artificial Sequence
  Synthetic
cuuucuuauuuccaaga

SEQ ID NO: 736555 - RNA, 17 nt, Artificial Sequence
  Synthetic
auaagcaggaagcaaga

SEQ ID NO: 736556 - RNA, 17 nt, Artificial Sequence
  Synthetic
uauuauaagcagcaaga

SEQ ID NO: 736557 - RNA, 17 nt, Artificial Sequence
  Synthetic
uuaugucaucagcaaga

SEQ ID NO: 736558 - RNA, 17 nt, Artificial Sequence
  Synthetic
agaaguggcuggcaaga

SEQ ID NO: 736559 - RNA, 17 nt, Artificial Sequence
  Synthetic
uuuacaagguggcaaga

SEQ ID NO: 736560 - RNA, 17 nt, Artificial Sequence
  Synthetic
uguauaacuuggcaaga

SEQ ID NO: 736561 - RNA, 17 nt, Artificial Sequence
  Synthetic
auccacauguugcaaga

SEQ ID NO: 736562 - RNA, 17 nt, Artificial Sequence
  Synthetic
aaaugacaucaucaaga

SEQ ID NO: 736563 - RNA, 17 nt, Artificial Sequence
  Synthetic
ugugggugugaucaaga

SEQ ID NO: 736564 - RNA, 17 nt, Artificial Sequence
  Synthetic
caaaaauuaacucaaga

SEQ ID NO: 736565 - RNA, 17 nt, Artificial Sequence
  Synthetic
uugacugacccucaaga

SEQ ID NO: 736566 - RNA, 17 nt, Artificial Sequence
  Synthetic
uuaaagaaagcucaaga

SEQ ID NO: 736567 - RNA, 17 nt, Artificial Sequence
  Synthetic
auauuccuggcucaaga

SEQ ID NO: 736568 - RNA, 17 nt, Artificial Sequence
  Synthetic
aagguaauuucucaaga

SEQ ID NO: 736569 - RNA, 17 nt, Artificial Sequence
  Synthetic
uaaaauaaaggucaaga

SEQ ID NO: 736570 - RNA, 17 nt, Artificial Sequence
  Synthetic
uagacaaauggucaaga

SEQ ID NO: 736571 - RNA, 17 nt, Artificial Sequence
  Synthetic
ucuuuguugugucaaga

SEQ ID NO: 736572 - RNA, 17 nt, Artificial Sequence
  Synthetic
aaaugaaauugucaaga

SEQ ID NO: 736573 - RNA, 17 nt, Artificial Sequence
  Synthetic
aguaguuaaauucaaga

SEQ ID NO: 736574 - RNA, 17 nt, Artificial Sequence
  Synthetic
caaaaaucaauucaaga

SEQ ID NO: 736575 - RNA, 17 nt, Artificial Sequence
  Synthetic
aguugcagaauucaaga

SEQ ID NO: 736576 - RNA, 17 nt, Artificial Sequence
  Synthetic
caaaaauuaauucaaga

SEQ ID NO: 736577 - RNA, 17 nt, Artificial Sequence
  Synthetic
aauuaauuaauucaaga

SEQ ID NO: 736578 - RNA, 17 nt, Artificial Sequence
  Synthetic
cauuaagccauucaaga

SEQ ID NO: 736579 - RNA, 17 nt, Artificial Sequence
  Synthetic
ccagccccuauucaaga

SEQ ID NO: 736580 - RNA, 17 nt, Artificial Sequence
  Synthetic
uauacucaacuucaaga

SEQ ID NO: 736581 - RNA, 17 nt, Artificial Sequence
  Synthetic
uguaagucacuucaaga

SEQ ID NO: 736582 - RNA, 17 nt, Artificial Sequence
  Synthetic
auucugucacuucaaga

SEQ ID NO: 736583 - RNA, 17 nt, Artificial Sequence
  Synthetic
uucaguucacuucaaga

SEQ ID NO: 736584 - RNA, 17 nt, Artificial Sequence
  Synthetic
uucacaggccuucaaga

SEQ ID NO: 736585 - RNA, 17 nt, Artificial Sequence
  Synthetic
aauuaagaauuucaaga

SEQ ID NO: 736586 - RNA, 17 nt, Artificial Sequence
  Synthetic
ugcuacauuuuucaaga

SEQ ID NO: 736587 - RNA, 17 nt, Artificial Sequence
  Synthetic
ugugaaaaaaaagaaga

SEQ ID NO: 736588 - RNA, 17 nt, Artificial Sequence
  Synthetic
aagacacacaaagaaga

SEQ ID NO: 736589 - RNA, 17 nt, Artificial Sequence
  Synthetic
ccuacacagaaagaaga

SEQ ID NO: 736590 - RNA, 17 nt, Artificial Sequence
  Synthetic
agagaagguaaagaaga

SEQ ID NO: 736591 - RNA, 17 nt, Artificial Sequence
  Synthetic
aggauacagcaagaaga

SEQ ID NO: 736592 - RNA, 17 nt, Artificial Sequence
  Synthetic
aaauauagucaagaaga

SEQ ID NO: 736593 - RNA, 17 nt, Artificial Sequence
  Synthetic
uaagaagaagaagaaga

SEQ ID NO: 736594 - RNA, 17 nt, Artificial Sequence
  Synthetic
uggcuuagagaagaaga

SEQ ID NO: 736595 - RNA, 17 nt, Artificial Sequence
  Synthetic
uggcaaugagaagaaga

SEQ ID NO: 736596 - RNA, 17 nt, Artificial Sequence
  Synthetic
auuuuuagugaagaaga

SEQ ID NO: 736597 - RNA, 17 nt, Artificial Sequence
  Synthetic
cugccaugugaagaaga

SEQ ID NO: 736598 - RNA, 17 nt, Artificial Sequence
  Synthetic
aaugggaaguaagaaga

SEQ ID NO: 736599 - RNA, 17 nt, Artificial Sequence
  Synthetic
agaaguggaacagaaga

SEQ ID NO: 736600 - RNA, 17 nt, Artificial Sequence
  Synthetic
aaauaauacacagaaga

SEQ ID NO: 736601 - RNA, 17 nt, Artificial Sequence
  Synthetic
ugauagaagccagaaga

SEQ ID NO: 736602 - RNA, 17 nt, Artificial Sequence
  Synthetic
aaugguaggccagaaga

SEQ ID NO: 736603 - RNA, 17 nt, Artificial Sequence
  Synthetic
aauaagaugccagaaga

SEQ ID NO: 736604 - RNA, 17 nt, Artificial Sequence
  Synthetic
aauacagcagcagaaga

SEQ ID NO: 736605 - RNA, 17 nt, Artificial Sequence
  Synthetic
agguacagagcagaaga

SEQ ID NO: 736606 - RNA, 17 nt, Artificial Sequence
  Synthetic
ccuuuaaacgcagaaga

SEQ ID NO: 736607 - RNA, 17 nt, Artificial Sequence
  Synthetic
uuggagccaucagaaga

SEQ ID NO: 736608 - RNA, 17 nt, Artificial Sequence
  Synthetic
ucuuauucaucagaaga

SEQ ID NO: 736609 - RNA, 17 nt, Artificial Sequence
  Synthetic
uucucuauuucagaaga

SEQ ID NO: 736610 - RNA, 17 nt, Artificial Sequence
  Synthetic
uauuccucaagagaaga

SEQ ID NO: 736611 - RNA, 17 nt, Artificial Sequence
  Synthetic
cguagaauaagagaaga

SEQ ID NO: 736612 - RNA, 17 nt, Artificial Sequence
  Synthetic
ugacgcuguagagaaga

SEQ ID NO: 736613 - RNA, 17 nt, Artificial Sequence
  Synthetic
uacccaaggggagaaga

SEQ ID NO: 736614 - RNA, 17 nt, Artificial Sequence
  Synthetic
cuauacacuggagaaga

SEQ ID NO: 736615 - RNA, 17 nt, Artificial Sequence
  Synthetic
cguauagaaugagaaga

SEQ ID NO: 736616 - RNA, 17 nt, Artificial Sequence
  Synthetic
ugaguuagaugagaaga

SEQ ID NO: 736617 - RNA, 17 nt, Artificial Sequence
  Synthetic
uuagcuggaugagaaga

SEQ ID NO: 736618 - RNA, 17 nt, Artificial Sequence
  Synthetic
ucagccuucugagaaga

SEQ ID NO: 736619 - RNA, 17 nt, Artificial Sequence
  Synthetic
cuauugacaauagaaga

SEQ ID NO: 736620 - RNA, 17 nt, Artificial Sequence
  Synthetic
ucacuucucauagaaga

SEQ ID NO: 736621 - RNA, 17 nt, Artificial Sequence
  Synthetic
acaaggacacuagaaga

SEQ ID NO: 736622 - RNA, 17 nt, Artificial Sequence
  Synthetic
uagaguguaguagaaga

SEQ ID NO: 736623 - RNA, 17 nt, Artificial Sequence
  Synthetic
uucuccuuuugcgaaga

SEQ ID NO: 736624 - RNA, 17 nt, Artificial Sequence
  Synthetic
aaguagucaaaggaaga

SEQ ID NO: 736625 - RNA, 17 nt, Artificial Sequence
  Synthetic
aaagacagaaaggaaga

SEQ ID NO: 736626 - RNA, 17 nt, Artificial Sequence
  Synthetic
aggaaaggaaaggaaga

SEQ ID NO: 736627 - RNA, 17 nt, Artificial Sequence
  Synthetic
ugccaagccaaggaaga

SEQ ID NO: 736628 - RNA, 17 nt, Artificial Sequence
  Synthetic
aggguauuccaggaaga

SEQ ID NO: 736629 - RNA, 17 nt, Artificial Sequence
  Synthetic
cucuuccaaagggaaga

SEQ ID NO: 736630 - RNA, 17 nt, Artificial Sequence
  Synthetic
uuagcugccagggaaga

SEQ ID NO: 736631 - RNA, 17 nt, Artificial Sequence
  Synthetic
uguuuugggagggaaga

SEQ ID NO: 736632 - RNA, 17 nt, Artificial Sequence
  Synthetic
uaaaaguuucgggaaga

SEQ ID NO: 736633 - RNA, 17 nt, Artificial Sequence
  Synthetic
cugagcuaaggggaaga

SEQ ID NO: 736634 - RNA, 17 nt, Artificial Sequence
  Synthetic
aaauauugaggggaaga

SEQ ID NO: 736635 - RNA, 17 nt, Artificial Sequence
  Synthetic
uccuuaauaggggaaga

SEQ ID NO: 736636 - RNA, 17 nt, Artificial Sequence
  Synthetic
agaagcuuaggggaaga

SEQ ID NO: 736637 - RNA, 17 nt, Artificial Sequence
  Synthetic
uagggguuaggggaaga

SEQ ID NO: 736638 - RNA, 17 nt, Artificial Sequence
  Synthetic
ugaaaaccuggggaaga

SEQ ID NO: 736639 - RNA, 17 nt, Artificial Sequence
  Synthetic
agggagagaugggaaga

SEQ ID NO: 736640 - RNA, 17 nt, Artificial Sequence
  Synthetic
uacuuuaaaauggaaga

SEQ ID NO: 736641 - RNA, 17 nt, Artificial Sequence
  Synthetic
aaggaggaaauggaaga

SEQ ID NO: 736642 - RNA, 17 nt, Artificial Sequence
  Synthetic
aacacuggucuggaaga

SEQ ID NO: 736643 - RNA, 17 nt, Artificial Sequence
  Synthetic
uuccacucuguggaaga

SEQ ID NO: 736644 - RNA, 17 nt, Artificial Sequence
  Synthetic
agaaagagauuggaaga

SEQ ID NO: 736645 - RNA, 17 nt, Artificial Sequence
  Synthetic
cagugaauaaaugaaga

SEQ ID NO: 736646 - RNA, 17 nt, Artificial Sequence
  Synthetic
auacugaucaaugaaga

SEQ ID NO: 736647 - RNA, 17 nt, Artificial Sequence
  Synthetic
caacaaguuaaugaaga

SEQ ID NO: 736648 - RNA, 17 nt, Artificial Sequence
  Synthetic
uccuguguuaaugaaga

SEQ ID NO: 736649 - RNA, 17 nt, Artificial Sequence
  Synthetic
aauauauuuaaugaaga

SEQ ID NO: 736650 - RNA, 17 nt, Artificial Sequence
  Synthetic
uaccuacugcaugaaga

SEQ ID NO: 736651 - RNA, 17 nt, Artificial Sequence
  Synthetic
uuucuaauucaugaaga

SEQ ID NO: 736652 - RNA, 17 nt, Artificial Sequence
  Synthetic
caacaguuagaugaaga

SEQ ID NO: 736653 - RNA, 17 nt, Artificial Sequence
  Synthetic
auaauagaggaugaaga

SEQ ID NO: 736654 - RNA, 17 nt, Artificial Sequence
  Synthetic
uagaugacggaugaaga

SEQ ID NO: 736655 - RNA, 17 nt, Artificial Sequence
  Synthetic
acaaagaaauaugaaga

SEQ ID NO: 736656 - RNA, 17 nt, Artificial Sequence
  Synthetic
aaagaugaauaugaaga

SEQ ID NO: 736657 - RNA, 17 nt, Artificial Sequence
  Synthetic
cugccaccauaugaaga

SEQ ID NO: 736658 - RNA, 17 nt, Artificial Sequence
  Synthetic
caaggucauuaugaaga

SEQ ID NO: 736659 - RNA, 17 nt, Artificial Sequence
  Synthetic
aacaucuacccugaaga

SEQ ID NO: 736660 - RNA, 17 nt, Artificial Sequence
  Synthetic
ugagauauuccugaaga

SEQ ID NO: 736661 - RNA, 17 nt, Artificial Sequence
  Synthetic
ugggaccuuccugaaga

SEQ ID NO: 736662 - RNA, 17 nt, Artificial Sequence
  Synthetic
ugcauuguuccugaaga

SEQ ID NO: 736663 - RNA, 17 nt, Artificial Sequence
  Synthetic
cuucacaaagcugaaga

SEQ ID NO: 736664 - RNA, 17 nt, Artificial Sequence
  Synthetic
uggcugugagcugaaga

SEQ ID NO: 736665 - RNA, 17 nt, Artificial Sequence
  Synthetic
uuucuauauucugaaga

SEQ ID NO: 736666 - RNA, 17 nt, Artificial Sequence
  Synthetic
aauucuguuagugaaga

SEQ ID NO: 736667 - RNA, 17 nt, Artificial Sequence
  Synthetic
agccaagaaggugaaga

SEQ ID NO: 736668 - RNA, 17 nt, Artificial Sequence
  Synthetic
uucagauaaggugaaga

SEQ ID NO: 736669 - RNA, 17 nt, Artificial Sequence
  Synthetic
aaguacaccugugaaga

SEQ ID NO: 736670 - RNA, 17 nt, Artificial Sequence
  Synthetic
ccugccaccugugaaga

SEQ ID NO: 736671 - RNA, 17 nt, Artificial Sequence
  Synthetic
cugccaccuugugaaga

SEQ ID NO: 736672 - RNA, 17 nt, Artificial Sequence
  Synthetic
agaauuuaaauugaaga

SEQ ID NO: 736673 - RNA, 17 nt, Artificial Sequence
  Synthetic
acuuauagaauugaaga

SEQ ID NO: 736674 - RNA, 17 nt, Artificial Sequence
  Synthetic
ccuauguggauugaaga

SEQ ID NO: 736675 - RNA, 17 nt, Artificial Sequence
  Synthetic
ccuauauugauugaaga

SEQ ID NO: 736676 - RNA, 17 nt, Artificial Sequence
  Synthetic
ucuucuuuuauugaaga

SEQ ID NO: 736677 - RNA, 17 nt, Artificial Sequence
  Synthetic
uaaucaguucuugaaga

SEQ ID NO: 736678 - RNA, 17 nt, Artificial Sequence
  Synthetic
aaucacuagguugaaga

SEQ ID NO: 736679 - RNA, 17 nt, Artificial Sequence
  Synthetic
ugggaaucauuugaaga

SEQ ID NO: 736680 - RNA, 17 nt, Artificial Sequence
  Synthetic
aaaaagguguuugaaga

SEQ ID NO: 736681 - RNA, 17 nt, Artificial Sequence
  Synthetic
acuacaauaaaauaaga

SEQ ID NO: 736682 - RNA, 17 nt, Artificial Sequence
  Synthetic
ugagaggggaaauaaga

SEQ ID NO: 736683 - RNA, 17 nt, Artificial Sequence
  Synthetic
aacuccuguaaauaaga

SEQ ID NO: 736684 - RNA, 17 nt, Artificial Sequence
  Synthetic
aaauguugucaauaaga

SEQ ID NO: 736685 - RNA, 17 nt, Artificial Sequence
  Synthetic
aggcauggagaauaaga

SEQ ID NO: 736686 - RNA, 17 nt, Artificial Sequence
  Synthetic
ccacauauagaauaaga

SEQ ID NO: 736687 - RNA, 17 nt, Artificial Sequence
  Synthetic
uacaucucuuaauaaga

SEQ ID NO: 736688 - RNA, 17 nt, Artificial Sequence
  Synthetic
uaaagccccacauaaga

SEQ ID NO: 736689 - RNA, 17 nt, Artificial Sequence
  Synthetic
augaaaguaccauaaga

SEQ ID NO: 736690 - RNA, 17 nt, Artificial Sequence
  Synthetic
uguuaaauagcauaaga

SEQ ID NO: 736691 - RNA, 17 nt, Artificial Sequence
  Synthetic
aaacgcugggcauaaga

SEQ ID NO: 736692 - RNA, 17 nt, Artificial Sequence
  Synthetic
uguuuucuugcauaaga

SEQ ID NO: 736693 - RNA, 17 nt, Artificial Sequence
  Synthetic
acaauguugucauaaga

SEQ ID NO: 736694 - RNA, 17 nt, Artificial Sequence
  Synthetic
cauauuucuucauaaga

SEQ ID NO: 736695 - RNA, 17 nt, Artificial Sequence
  Synthetic
uacuuauuuucauaaga

SEQ ID NO: 736696 - RNA, 17 nt, Artificial Sequence
  Synthetic
augagacucagauaaga

SEQ ID NO: 736697 - RNA, 17 nt, Artificial Sequence
  Synthetic
aaaaaggucagauaaga

SEQ ID NO: 736698 - RNA, 17 nt, Artificial Sequence
  Synthetic
aaaagaauaugauaaga

SEQ ID NO: 736699 - RNA, 17 nt, Artificial Sequence
  Synthetic
auaauagggauauaaga

SEQ ID NO: 736700 - RNA, 17 nt, Artificial Sequence
  Synthetic
ccuaaguagguauaaga

SEQ ID NO: 736701 - RNA, 17 nt, Artificial Sequence
  Synthetic
cauagaucauuauaaga

SEQ ID NO: 736702 - RNA, 17 nt, Artificial Sequence
  Synthetic
ugaaggguuuuauaaga

SEQ ID NO: 736703 - RNA, 17 nt, Artificial Sequence
  Synthetic
auaaggcaaaacuaaga

SEQ ID NO: 736704 - RNA, 17 nt, Artificial Sequence
  Synthetic
cuucccaaagacuaaga

SEQ ID NO: 736705 - RNA, 17 nt, Artificial Sequence
  Synthetic
aaguaaugaaccuaaga

SEQ ID NO: 736706 - RNA, 17 nt, Artificial Sequence
  Synthetic
auuuaauaucccuaaga

SEQ ID NO: 736707 - RNA, 17 nt, Artificial Sequence
  Synthetic
ucuuaaacucccuaaga

SEQ ID NO: 736708 - RNA, 17 nt, Artificial Sequence
  Synthetic
caaaagcagugcuaaga

SEQ ID NO: 736709 - RNA, 17 nt, Artificial Sequence
  Synthetic
aucgucauuugcuaaga

SEQ ID NO: 736710 - RNA, 17 nt, Artificial Sequence
  Synthetic
acauacuggcucuaaga

SEQ ID NO: 736711 - RNA, 17 nt, Artificial Sequence
  Synthetic
cuaguagaugucuaaga

SEQ ID NO: 736712 - RNA, 17 nt, Artificial Sequence
  Synthetic
ucuuaauuguucuaaga

SEQ ID NO: 736713 - RNA, 17 nt, Artificial Sequence
  Synthetic
ucuagggaacaguaaga

SEQ ID NO: 736714 - RNA, 17 nt, Artificial Sequence
  Synthetic
ugggcaucucaguaaga

SEQ ID NO: 736715 - RNA, 17 nt, Artificial Sequence
  Synthetic
auauuuagagaguaaga

SEQ ID NO: 736716 - RNA, 17 nt, Artificial Sequence
  Synthetic
ugagaagaggaguaaga

SEQ ID NO: 736717 - RNA, 17 nt, Artificial Sequence
  Synthetic
cuggaugccuaguaaga

SEQ ID NO: 736718 - RNA, 17 nt, Artificial Sequence
  Synthetic
aauuugagcuaguaaga

SEQ ID NO: 736719 - RNA, 17 nt, Artificial Sequence
  Synthetic
agcuugaguuaguaaga

SEQ ID NO: 736720 - RNA, 17 nt, Artificial Sequence
  Synthetic
cccuguaccagguaaga

SEQ ID NO: 736721 - RNA, 17 nt, Artificial Sequence
  Synthetic
cagaauuuuagguaaga

SEQ ID NO: 736722 - RNA, 17 nt, Artificial Sequence
  Synthetic
ccaagaaggauguaaga

SEQ ID NO: 736723 - RNA, 17 nt, Artificial Sequence
  Synthetic
aauaacaauauguaaga

SEQ ID NO: 736724 - RNA, 17 nt, Artificial Sequence
  Synthetic
uucacagcucuguaaga

SEQ ID NO: 736725 - RNA, 17 nt, Artificial Sequence
  Synthetic
aggagaagaguguaaga

SEQ ID NO: 736726 - RNA, 17 nt, Artificial Sequence
  Synthetic
acaauccucuuguaaga

SEQ ID NO: 736727 - RNA, 17 nt, Artificial Sequence
  Synthetic
ucuaauccaaauuaaga

SEQ ID NO: 736728 - RNA, 17 nt, Artificial Sequence
  Synthetic
cuaugaagaaauuaaga

SEQ ID NO: 736729 - RNA, 17 nt, Artificial Sequence
  Synthetic
agaaaaugcaauuaaga

SEQ ID NO: 736730 - RNA, 17 nt, Artificial Sequence
  Synthetic
caaaagggacauuaaga

SEQ ID NO: 736731 - RNA, 17 nt, Artificial Sequence
  Synthetic
uguaaaacccauuaaga

SEQ ID NO: 736732 - RNA, 17 nt, Artificial Sequence
  Synthetic
uuugguaagcauuaaga

SEQ ID NO: 736733 - RNA, 17 nt, Artificial Sequence
  Synthetic
ugaaaaaaagauuaaga

SEQ ID NO: 736734 - RNA, 17 nt, Artificial Sequence
  Synthetic
uguuuauuagauuaaga

SEQ ID NO: 736735 - RNA, 17 nt, Artificial Sequence
  Synthetic
uuaggaaaugauuaaga

SEQ ID NO: 736736 - RNA, 17 nt, Artificial Sequence
  Synthetic
uacaacuuugauuaaga

SEQ ID NO: 736737 - RNA, 17 nt, Artificial Sequence
  Synthetic
aaauaaacauauuaaga

SEQ ID NO: 736738 - RNA, 17 nt, Artificial Sequence
  Synthetic
auuggugauuauuaaga

SEQ ID NO: 736739 - RNA, 17 nt, Artificial Sequence
  Synthetic
cuuaaaauuuauuaaga

SEQ ID NO: 736740 - RNA, 17 nt, Artificial Sequence
  Synthetic
caauuaguuuauuaaga

SEQ ID NO: 736741 - RNA, 17 nt, Artificial Sequence
  Synthetic
ucaaugaacacuuaaga

SEQ ID NO: 736742 - RNA, 17 nt, Artificial Sequence
  Synthetic
aucuguuugacuuaaga

SEQ ID NO: 736743 - RNA, 17 nt, Artificial Sequence
  Synthetic
augcagucaaguuaaga

SEQ ID NO: 736744 - RNA, 17 nt, Artificial Sequence
  Synthetic
agcugauaugguuaaga

SEQ ID NO: 736745 - RNA, 17 nt, Artificial Sequence
  Synthetic
acuauauaaauuuaaga

SEQ ID NO: 736746 - RNA, 17 nt, Artificial Sequence
  Synthetic
uugcuucuuguuuaaga

SEQ ID NO: 736747 - RNA, 17 nt, Artificial Sequence
  Synthetic
acugaaggauuuuaaga

SEQ ID NO: 736748 - RNA, 17 nt, Artificial Sequence
  Synthetic
aauuccaaguuuuaaga

SEQ ID NO: 736749 - RNA, 17 nt, Artificial Sequence
  Synthetic
uuguuacuguuuuaaga

SEQ ID NO: 736750 - RNA, 17 nt, Artificial Sequence
  Synthetic
agccaucuuuuuuaaga

SEQ ID NO: 736751 - RNA, 17 nt, Artificial Sequence
  Synthetic
aaaaagcuaaaaacaga

SEQ ID NO: 736752 - RNA, 17 nt, Artificial Sequence
  Synthetic
augugcaacaaaacaga

SEQ ID NO: 736753 - RNA, 17 nt, Artificial Sequence
  Synthetic
uacaaaaaucaaacaga

SEQ ID NO: 736754 - RNA, 17 nt, Artificial Sequence
  Synthetic
uacuuuucucaaacaga

SEQ ID NO: 736755 - RNA, 17 nt, Artificial Sequence
  Synthetic
ucccaacaagaaacaga

SEQ ID NO: 736756 - RNA, 17 nt, Artificial Sequence
  Synthetic
acaaauucugaaacaga

SEQ ID NO: 736757 - RNA, 17 nt, Artificial Sequence
  Synthetic
auccuuaucccaacaga

SEQ ID NO: 736758 - RNA, 17 nt, Artificial Sequence
  Synthetic
cagugaagggcaacaga

SEQ ID NO: 736759 - RNA, 17 nt, Artificial Sequence
  Synthetic
aaguaggucucaacaga

SEQ ID NO: 736760 - RNA, 17 nt, Artificial Sequence
  Synthetic
aauuggaauucaacaga

SEQ ID NO: 736761 - RNA, 17 nt, Artificial Sequence
  Synthetic
agaaugcagagaacaga

SEQ ID NO: 736762 - RNA, 17 nt, Artificial Sequence
  Synthetic
agucaucagagaacaga

SEQ ID NO: 736763 - RNA, 17 nt, Artificial Sequence
  Synthetic
auugaggagagaacaga

SEQ ID NO: 736764 - RNA, 17 nt, Artificial Sequence
  Synthetic
ugacagaauagaacaga

SEQ ID NO: 736765 - RNA, 17 nt, Artificial Sequence
  Synthetic
aaaggaaaaggaacaga

SEQ ID NO: 736766 - RNA, 17 nt, Artificial Sequence
  Synthetic
aaaagcccaggaacaga

SEQ ID NO: 736767 - RNA, 17 nt, Artificial Sequence
  Synthetic
agaaaggagauaacaga

SEQ ID NO: 736768 - RNA, 17 nt, Artificial Sequence
  Synthetic
ugagugcaucuaacaga

SEQ ID NO: 736769 - RNA, 17 nt, Artificial Sequence
  Synthetic
uauucaaguuuaacaga

SEQ ID NO: 736770 - RNA, 17 nt, Artificial Sequence
  Synthetic
caaucagcaaacacaga

SEQ ID NO: 736771 - RNA, 17 nt, Artificial Sequence
  Synthetic
agugagaucaacacaga

SEQ ID NO: 736772 - RNA, 17 nt, Artificial Sequence
  Synthetic
uaugccaggcacacaga

SEQ ID NO: 736773 - RNA, 17 nt, Artificial Sequence
  Synthetic
cauucauggcacacaga

SEQ ID NO: 736774 - RNA, 17 nt, Artificial Sequence
  Synthetic
aaggaaaaucacacaga

SEQ ID NO: 736775 - RNA, 17 nt, Artificial Sequence
  Synthetic
agaugacuagacacaga

SEQ ID NO: 736776 - RNA, 17 nt, Artificial Sequence
  Synthetic
uaaaggaaaaccacaga

SEQ ID NO: 736777 - RNA, 17 nt, Artificial Sequence
  Synthetic
uauuuauaaaccacaga

SEQ ID NO: 736778 - RNA, 17 nt, Artificial Sequence
  Synthetic
auuuucuucaccacaga

SEQ ID NO: 736779 - RNA, 17 nt, Artificial Sequence
  Synthetic
ugggugcagcccacaga

SEQ ID NO: 736780 - RNA, 17 nt, Artificial Sequence
  Synthetic
cuuccauaucccacaga

SEQ ID NO: 736781 - RNA, 17 nt, Artificial Sequence
  Synthetic
acccucaccuccacaga

SEQ ID NO: 736782 - RNA, 17 nt, Artificial Sequence
  Synthetic
cccgaagccuccacaga

SEQ ID NO: 736783 - RNA, 17 nt, Artificial Sequence
  Synthetic
cuacugcaaagcacaga

SEQ ID NO: 736784 - RNA, 17 nt, Artificial Sequence
  Synthetic
uuuuacuucugcacaga

SEQ ID NO: 736785 - RNA, 17 nt, Artificial Sequence
  Synthetic
agguaaagaaucacaga

SEQ ID NO: 736786 - RNA, 17 nt, Artificial Sequence
  Synthetic
agauuucccaucacaga

SEQ ID NO: 736787 - RNA, 17 nt, Artificial Sequence
  Synthetic
aagagucaacucacaga

SEQ ID NO: 736788 - RNA, 17 nt, Artificial Sequence
  Synthetic
uuuauacgggucacaga

SEQ ID NO: 736789 - RNA, 17 nt, Artificial Sequence
  Synthetic
auaaaagaauucacaga

SEQ ID NO: 736790 - RNA, 17 nt, Artificial Sequence
  Synthetic
cugaaaucauucacaga

SEQ ID NO: 736791 - RNA, 17 nt, Artificial Sequence
  Synthetic
ucagaaugauucacaga

SEQ ID NO: 736792 - RNA, 17 nt, Artificial Sequence
  Synthetic
aaccagauauucacaga

SEQ ID NO: 736793 - RNA, 17 nt, Artificial Sequence
  Synthetic
ccaugacacuucacaga

SEQ ID NO: 736794 - RNA, 17 nt, Artificial Sequence
  Synthetic
ucaaaaaauuucacaga

SEQ ID NO: 736795 - RNA, 17 nt, Artificial Sequence
  Synthetic
acaugaacaaagacaga

SEQ ID NO: 736796 - RNA, 17 nt, Artificial Sequence
  Synthetic
agggcauuucagacaga

SEQ ID NO: 736797 - RNA, 17 nt, Artificial Sequence
  Synthetic
aauuuauuagagacaga

SEQ ID NO: 736798 - RNA, 17 nt, Artificial Sequence
  Synthetic
ugaaccugggagacaga

SEQ ID NO: 736799 - RNA, 17 nt, Artificial Sequence
  Synthetic
auuuguugggagacaga

SEQ ID NO: 736800 - RNA, 17 nt, Artificial Sequence
  Synthetic
caaaagagugagacaga

SEQ ID NO: 736801 - RNA, 17 nt, Artificial Sequence
  Synthetic
cagaucugugagacaga

SEQ ID NO: 736802 - RNA, 17 nt, Artificial Sequence
  Synthetic
aaaagagaauagacaga

SEQ ID NO: 736803 - RNA, 17 nt, Artificial Sequence
  Synthetic
aguuucaacuagacaga

SEQ ID NO: 736804 - RNA, 17 nt, Artificial Sequence
  Synthetic
ccagccugggcgacaga

SEQ ID NO: 736805 - RNA, 17 nt, Artificial Sequence
  Synthetic
agaguaucaaggacaga

SEQ ID NO: 736806 - RNA, 17 nt, Artificial Sequence
  Synthetic
agaacaggaaggacaga

SEQ ID NO: 736807 - RNA, 17 nt, Artificial Sequence
  Synthetic
cuguauugggggacaga

SEQ ID NO: 736808 - RNA, 17 nt, Artificial Sequence
  Synthetic
agucaaaaugggacaga

SEQ ID NO: 736809 - RNA, 17 nt, Artificial Sequence
  Synthetic
agggaaaaauggacaga

SEQ ID NO: 736810 - RNA, 17 nt, Artificial Sequence
  Synthetic
augggauuguggacaga

SEQ ID NO: 736811 - RNA, 17 nt, Artificial Sequence
  Synthetic
ucagccuggaugacaga

SEQ ID NO: 736812 - RNA, 17 nt, Artificial Sequence
  Synthetic
ugaauacugaugacaga

SEQ ID NO: 736813 - RNA, 17 nt, Artificial Sequence
  Synthetic
auugaaucugugacaga

SEQ ID NO: 736814 - RNA, 17 nt, Artificial Sequence
  Synthetic
cugagugaauugacaga

SEQ ID NO: 736815 - RNA, 17 nt, Artificial Sequence
  Synthetic
ugaauuuugaauacaga

SEQ ID NO: 736816 - RNA, 17 nt, Artificial Sequence
  Synthetic
uauuuuuaucauacaga

SEQ ID NO: 736817 - RNA, 17 nt, Artificial Sequence
  Synthetic
acaaauucucauacaga

SEQ ID NO: 736818 - RNA, 17 nt, Artificial Sequence
  Synthetic
caacuuuuagauacaga

SEQ ID NO: 736819 - RNA, 17 nt, Artificial Sequence
  Synthetic
auaaagaaauauacaga

SEQ ID NO: 736820 - RNA, 17 nt, Artificial Sequence
  Synthetic
auauguguauauacaga

SEQ ID NO: 736821 - RNA, 17 nt, Artificial Sequence
  Synthetic
uuuauuuuauauacaga

SEQ ID NO: 736822 - RNA, 17 nt, Artificial Sequence
  Synthetic
caaagaauggcuacaga

SEQ ID NO: 736823 - RNA, 17 nt, Artificial Sequence
  Synthetic
cagcccauggcuacaga

SEQ ID NO: 736824 - RNA, 17 nt, Artificial Sequence
  Synthetic
uguguuuuuaguacaga

SEQ ID NO: 736825 - RNA, 17 nt, Artificial Sequence
  Synthetic
aacacugugauuacaga

SEQ ID NO: 736826 - RNA, 17 nt, Artificial Sequence
  Synthetic
ccuagaaauauuacaga

SEQ ID NO: 736827 - RNA, 17 nt, Artificial Sequence
  Synthetic
cagggaugacuuacaga

SEQ ID NO: 736828 - RNA, 17 nt, Artificial Sequence
  Synthetic
uaugacucuguuacaga

SEQ ID NO: 736829 - RNA, 17 nt, Artificial Sequence
  Synthetic
uaagaagacaaaccaga

SEQ ID NO: 736830 - RNA, 17 nt, Artificial Sequence
  Synthetic
aagagacauaaaccaga

SEQ ID NO: 736831 - RNA, 17 nt, Artificial Sequence
  Synthetic
ccaggaagagaaccaga

SEQ ID NO: 736832 - RNA, 17 nt, Artificial Sequence
  Synthetic
aaaauaugggcaccaga

SEQ ID NO: 736833 - RNA, 17 nt, Artificial Sequence
  Synthetic
aucugagaaagaccaga

SEQ ID NO: 736834 - RNA, 17 nt, Artificial Sequence
  Synthetic
aggaguuugagaccaga

SEQ ID NO: 736835 - RNA, 17 nt, Artificial Sequence
  Synthetic
aaaagcccaggaccaga

SEQ ID NO: 736836 - RNA, 17 nt, Artificial Sequence
  Synthetic
aaaaguccaggaccaga

SEQ ID NO: 736837 - RNA, 17 nt, Artificial Sequence
  Synthetic
aagaguccaggaccaga

SEQ ID NO: 736838 - RNA, 17 nt, Artificial Sequence
  Synthetic
cuuuucucucuaccaga

SEQ ID NO: 736839 - RNA, 17 nt, Artificial Sequence
  Synthetic
agguuccaaaacccaga

SEQ ID NO: 736840 - RNA, 17 nt, Artificial Sequence
  Synthetic
acuggaaagaacccaga

SEQ ID NO: 736841 - RNA, 17 nt, Artificial Sequence
  Synthetic
cuugagaaucacccaga

SEQ ID NO: 736842 - RNA, 17 nt, Artificial Sequence
  Synthetic
agagaaagagacccaga

SEQ ID NO: 736843 - RNA, 17 nt, Artificial Sequence
  Synthetic
auuuggagauacccaga

SEQ ID NO: 736844 - RNA, 17 nt, Artificial Sequence
  Synthetic
ucccaucaccccccaga

SEQ ID NO: 736845 - RNA, 17 nt, Artificial Sequence
  Synthetic
ucagaugagcccccaga

SEQ ID NO: 736846 - RNA, 17 nt, Artificial Sequence
  Synthetic
accccugaagccccaga

SEQ ID NO: 736847 - RNA, 17 nt, Artificial Sequence
  Synthetic
ugguuucuagccccaga

SEQ ID NO: 736848 - RNA, 17 nt, Artificial Sequence
  Synthetic
auacaaauguccccaga

SEQ ID NO: 736849 - RNA, 17 nt, Artificial Sequence
  Synthetic
ucaccauaaagcccaga

SEQ ID NO: 736850 - RNA, 17 nt, Artificial Sequence
  Synthetic
uguacuuuuagcccaga

SEQ ID NO: 736851 - RNA, 17 nt, Artificial Sequence
  Synthetic
uuuuuucucugcccaga

SEQ ID NO: 736852 - RNA, 17 nt, Artificial Sequence
  Synthetic
auagaugggugcccaga

SEQ ID NO: 736853 - RNA, 17 nt, Artificial Sequence
  Synthetic
aauauacuaaucccaga

SEQ ID NO: 736854 - RNA, 17 nt, Artificial Sequence
  Synthetic
uuuuucugcaucccaga

SEQ ID NO: 736855 - RNA, 17 nt, Artificial Sequence
  Synthetic
agcuagcuggucccaga

SEQ ID NO: 736856 - RNA, 17 nt, Artificial Sequence
  Synthetic
ucuaaugaauucccaga

SEQ ID NO: 736857 - RNA, 17 nt, Artificial Sequence
  Synthetic
cccuuuuccuucccaga

SEQ ID NO: 736858 - RNA, 17 nt, Artificial Sequence
  Synthetic
aauuaaaacaagccaga

SEQ ID NO: 736859 - RNA, 17 nt, Artificial Sequence
  Synthetic
acagguagacagccaga

SEQ ID NO: 736860 - RNA, 17 nt, Artificial Sequence
  Synthetic
aacuagccccagccaga

SEQ ID NO: 736861 - RNA, 17 nt, Artificial Sequence
  Synthetic
uaaagucaucagccaga

SEQ ID NO: 736862 - RNA, 17 nt, Artificial Sequence
  Synthetic
aaaaaaucuuagccaga

SEQ ID NO: 736863 - RNA, 17 nt, Artificial Sequence
  Synthetic
aaggaacagacgccaga

SEQ ID NO: 736864 - RNA, 17 nt, Artificial Sequence
  Synthetic
acagggaaaaggccaga

SEQ ID NO: 736865 - RNA, 17 nt, Artificial Sequence
  Synthetic
uccugccuugggccaga

SEQ ID NO: 736866 - RNA, 17 nt, Artificial Sequence
  Synthetic
uuguaaucuuggccaga

SEQ ID NO: 736867 - RNA, 17 nt, Artificial Sequence
  Synthetic
ucaccguguuggccaga

SEQ ID NO: 736868 - RNA, 17 nt, Artificial Sequence
  Synthetic
acauuuuaaaugccaga

SEQ ID NO: 736869 - RNA, 17 nt, Artificial Sequence
  Synthetic
cuuacaaccaugccaga

SEQ ID NO: 736870 - RNA, 17 nt, Artificial Sequence
  Synthetic
acaaagaugaugccaga

SEQ ID NO: 736871 - RNA, 17 nt, Artificial Sequence
  Synthetic
acccccaagaauccaga

SEQ ID NO: 736872 - RNA, 17 nt, Artificial Sequence
  Synthetic
uggaucagucauccaga

SEQ ID NO: 736873 - RNA, 17 nt, Artificial Sequence
  Synthetic
auaacaugucauccaga

SEQ ID NO: 736874 - RNA, 17 nt, Artificial Sequence
  Synthetic
aacuuuuaagauccaga

SEQ ID NO: 736875 - RNA, 17 nt, Artificial Sequence
  Synthetic
ucauuuugagauccaga

SEQ ID NO: 736876 - RNA, 17 nt, Artificial Sequence
  Synthetic
uagauaaaauauccaga

SEQ ID NO: 736877 - RNA, 17 nt, Artificial Sequence
  Synthetic
uuaacuacuuauccaga

SEQ ID NO: 736878 - RNA, 17 nt, Artificial Sequence
  Synthetic
aacauauaaacuccaga

SEQ ID NO: 736879 - RNA, 17 nt, Artificial Sequence
  Synthetic
cauugcagaacuccaga

SEQ ID NO: 736880 - RNA, 17 nt, Artificial Sequence
  Synthetic
cugggaaggacuccaga

SEQ ID NO: 736881 - RNA, 17 nt, Artificial Sequence
  Synthetic
ugcugaacagcuccaga

SEQ ID NO: 736882 - RNA, 17 nt, Artificial Sequence
  Synthetic
uggugaacagcuccaga

SEQ ID NO: 736883 - RNA, 17 nt, Artificial Sequence
  Synthetic
caguuuuugaguccaga

SEQ ID NO: 736884 - RNA, 17 nt, Artificial Sequence
  Synthetic
uucuauaacgguccaga

SEQ ID NO: 736885 - RNA, 17 nt, Artificial Sequence
  Synthetic
cuaauaauguguccaga

SEQ ID NO: 736886 - RNA, 17 nt, Artificial Sequence
  Synthetic
acuuacugaauuccaga

SEQ ID NO: 736887 - RNA, 17 nt, Artificial Sequence
  Synthetic
aauacacccauuccaga

SEQ ID NO: 736888 - RNA, 17 nt, Artificial Sequence
  Synthetic
ugcaaucagauuccaga

SEQ ID NO: 736889 - RNA, 17 nt, Artificial Sequence
  Synthetic
cauuauuuccuuccaga

SEQ ID NO: 736890 - RNA, 17 nt, Artificial Sequence
  Synthetic
aggcaagggcuuccaga

SEQ ID NO: 736891 - RNA, 17 nt, Artificial Sequence
  Synthetic
cuggggaaaguuccaga

SEQ ID NO: 736892 - RNA, 17 nt, Artificial Sequence
  Synthetic
uuuauuaaauuuccaga

SEQ ID NO: 736893 - RNA, 17 nt, Artificial Sequence
  Synthetic
uaacucaguuuuccaga

SEQ ID NO: 736894 - RNA, 17 nt, Artificial Sequence
  Synthetic
ugauuuuaaaaagcaga

SEQ ID NO: 736895 - RNA, 17 nt, Artificial Sequence
  Synthetic
agacuuugaaaagcaga

SEQ ID NO: 736896 - RNA, 17 nt, Artificial Sequence
  Synthetic
augaaaguaaaagcaga

SEQ ID NO: 736897 - RNA, 17 nt, Artificial Sequence
  Synthetic
uuaacucagaaagcaga

SEQ ID NO: 736898 - RNA, 17 nt, Artificial Sequence
  Synthetic
auaaaacuccaagcaga

SEQ ID NO: 736899 - RNA, 17 nt, Artificial Sequence
  Synthetic
accaacuggcaagcaga

SEQ ID NO: 736900 - RNA, 17 nt, Artificial Sequence
  Synthetic
uuuaguugucaagcaga

SEQ ID NO: 736901 - RNA, 17 nt, Artificial Sequence
  Synthetic
cuuucucuggaagcaga

SEQ ID NO: 736902 - RNA, 17 nt, Artificial Sequence
  Synthetic
auuaaccauuaagcaga

SEQ ID NO: 736903 - RNA, 17 nt, Artificial Sequence
  Synthetic
ccacauguaacagcaga

SEQ ID NO: 736904 - RNA, 17 nt, Artificial Sequence
  Synthetic
uugcugcacacagcaga

SEQ ID NO: 736905 - RNA, 17 nt, Artificial Sequence
  Synthetic
uuuuaaaaaccagcaga

SEQ ID NO: 736906 - RNA, 17 nt, Artificial Sequence
  Synthetic
uugguuucagcagcaga

SEQ ID NO: 736907 - RNA, 17 nt, Artificial Sequence
  Synthetic
agcagaccugcagcaga

SEQ ID NO: 736908 - RNA, 17 nt, Artificial Sequence
  Synthetic
acauucuuaucagcaga

SEQ ID NO: 736909 - RNA, 17 nt, Artificial Sequence
  Synthetic
uacuccucaagagcaga

SEQ ID NO: 736910 - RNA, 17 nt, Artificial Sequence
  Synthetic
aaaaagugaagagcaga

SEQ ID NO: 736911 - RNA, 17 nt, Artificial Sequence
  Synthetic
uaaauauccagagcaga

SEQ ID NO: 736912 - RNA, 17 nt, Artificial Sequence
  Synthetic
cuguuccagagagcaga

SEQ ID NO: 736913 - RNA, 17 nt, Artificial Sequence
  Synthetic
uaucugcggagagcaga

SEQ ID NO: 736914 - RNA, 17 nt, Artificial Sequence
  Synthetic
uacuuuuguagagcaga

SEQ ID NO: 736915 - RNA, 17 nt, Artificial Sequence
  Synthetic
ccauuaucaggagcaga

SEQ ID NO: 736916 - RNA, 17 nt, Artificial Sequence
  Synthetic
caacugaugggagcaga

SEQ ID NO: 736917 - RNA, 17 nt, Artificial Sequence
  Synthetic
auuuaucacauagcaga

SEQ ID NO: 736918 - RNA, 17 nt, Artificial Sequence
  Synthetic
cuagcaaguauagcaga

SEQ ID NO: 736919 - RNA, 17 nt, Artificial Sequence
  Synthetic
auucaaaagcuagcaga

SEQ ID NO: 736920 - RNA, 17 nt, Artificial Sequence
  Synthetic
agcccaaaguuagcaga

SEQ ID NO: 736921 - RNA, 17 nt, Artificial Sequence
  Synthetic
auacagaaaaaggcaga

SEQ ID NO: 736922 - RNA, 17 nt, Artificial Sequence
  Synthetic
uaucuucacaaggcaga

SEQ ID NO: 736923 - RNA, 17 nt, Artificial Sequence
  Synthetic
uuauuuaccaaggcaga

SEQ ID NO: 736924 - RNA, 17 nt, Artificial Sequence
  Synthetic
ugcacccauaaggcaga

SEQ ID NO: 736925 - RNA, 17 nt, Artificial Sequence
  Synthetic
aggacaucccaggcaga

SEQ ID NO: 736926 - RNA, 17 nt, Artificial Sequence
  Synthetic
agggcaauccaggcaga

SEQ ID NO: 736927 - RNA, 17 nt, Artificial Sequence
  Synthetic
caaacaaagcaggcaga

SEQ ID NO: 736928 - RNA, 17 nt, Artificial Sequence
  Synthetic
agacuauuucaggcaga

SEQ ID NO: 736929 - RNA, 17 nt, Artificial Sequence
  Synthetic
aggaggagagaggcaga

SEQ ID NO: 736930 - RNA, 17 nt, Artificial Sequence
  Synthetic
ugggaggccgaggcaga

SEQ ID NO: 736931 - RNA, 17 nt, Artificial Sequence
  Synthetic
agaaaagaggaggcaga

SEQ ID NO: 736932 - RNA, 17 nt, Artificial Sequence
  Synthetic
aauuaccaugaggcaga

SEQ ID NO: 736933 - RNA, 17 nt, Artificial Sequence
  Synthetic
ugggaggcugaggcaga

SEQ ID NO: 736934 - RNA, 17 nt, Artificial Sequence
  Synthetic
aaggucuuugcggcaga

SEQ ID NO: 736935 - RNA, 17 nt, Artificial Sequence
  Synthetic
uuuguaaaaagggcaga

SEQ ID NO: 736936 - RNA, 17 nt, Artificial Sequence
  Synthetic
caacguguaggggcaga

SEQ ID NO: 736937 - RNA, 17 nt, Artificial Sequence
  Synthetic
ucacugauuggggcaga

SEQ ID NO: 736938 - RNA, 17 nt, Artificial Sequence
  Synthetic
caggagacuugggcaga

SEQ ID NO: 736939 - RNA, 17 nt, Artificial Sequence
  Synthetic
aaauuaggaauggcaga

SEQ ID NO: 736940 - RNA, 17 nt, Artificial Sequence
  Synthetic
cuuacaugaauggcaga

SEQ ID NO: 736941 - RNA, 17 nt, Artificial Sequence
  Synthetic
aaggcuugcauggcaga

SEQ ID NO: 736942 - RNA, 17 nt, Artificial Sequence
  Synthetic
cucacaaucauggcaga

SEQ ID NO: 736943 - RNA, 17 nt, Artificial Sequence
  Synthetic
cuuacaaucauggcaga

SEQ ID NO: 736944 - RNA, 17 nt, Artificial Sequence
  Synthetic
uuuuugcucauggcaga

SEQ ID NO: 736945 - RNA, 17 nt, Artificial Sequence
  Synthetic
cuuccagucguggcaga

SEQ ID NO: 736946 - RNA, 17 nt, Artificial Sequence
  Synthetic
aaggcaacuguggcaga

SEQ ID NO: 736947 - RNA, 17 nt, Artificial Sequence
  Synthetic
cucacaaucuuggcaga

SEQ ID NO: 736948 - RNA, 17 nt, Artificial Sequence
  Synthetic
aucagugaaaaugcaga

SEQ ID NO: 736949 - RNA, 17 nt, Artificial Sequence
  Synthetic
aaaacauaaaaugcaga

SEQ ID NO: 736950 - RNA, 17 nt, Artificial Sequence
  Synthetic
aaaaaacagaaugcaga

SEQ ID NO: 736951 - RNA, 17 nt, Artificial Sequence
  Synthetic
agagauuuccaugcaga

SEQ ID NO: 736952 - RNA, 17 nt, Artificial Sequence
  Synthetic
cucauaagggaugcaga

SEQ ID NO: 736953 - RNA, 17 nt, Artificial Sequence
  Synthetic
caaaauaauuaugcaga

SEQ ID NO: 736954 - RNA, 17 nt, Artificial Sequence
  Synthetic
ucauugaaaacugcaga

SEQ ID NO: 736955 - RNA, 17 nt, Artificial Sequence
  Synthetic
uauguuaacacugcaga

SEQ ID NO: 736956 - RNA, 17 nt, Artificial Sequence
  Synthetic
auaggccaagcugcaga

SEQ ID NO: 736957 - RNA, 17 nt, Artificial Sequence
  Synthetic
acaaaaauaucugcaga

SEQ ID NO: 736958 - RNA, 17 nt, Artificial Sequence
  Synthetic
ugcugggacagugcaga

SEQ ID NO: 736959 - RNA, 17 nt, Artificial Sequence
  Synthetic
uguucuuugagugcaga

SEQ ID NO: 736960 - RNA, 17 nt, Artificial Sequence
  Synthetic
aaaggagguggugcaga

SEQ ID NO: 736961 - RNA, 17 nt, Artificial Sequence
  Synthetic
cugguugaaauugcaga

SEQ ID NO: 736962 - RNA, 17 nt, Artificial Sequence
  Synthetic
ucaagccacauugcaga

SEQ ID NO: 736963 - RNA, 17 nt, Artificial Sequence
  Synthetic
aagguugugauugcaga

SEQ ID NO: 736964 - RNA, 17 nt, Artificial Sequence
  Synthetic
caauuggcuauugcaga

SEQ ID NO: 736965 - RNA, 17 nt, Artificial Sequence
  Synthetic
uuuuuuugauuugcaga

SEQ ID NO: 736966 - RNA, 17 nt, Artificial Sequence
  Synthetic
uagcacuuauuugcaga

SEQ ID NO: 736967 - RNA, 17 nt, Artificial Sequence
  Synthetic
uauauuuuauuugcaga

SEQ ID NO: 736968 - RNA, 17 nt, Artificial Sequence
  Synthetic
ucuuauuacuuugcaga

SEQ ID NO: 736969 - RNA, 17 nt, Artificial Sequence
  Synthetic
ucuuccugguuugcaga

SEQ ID NO: 736970 - RNA, 17 nt, Artificial Sequence
  Synthetic
aauuuggcaaaaucaga

SEQ ID NO: 736971 - RNA, 17 nt, Artificial Sequence
  Synthetic
aacuaucacaaaucaga

SEQ ID NO: 736972 - RNA, 17 nt, Artificial Sequence
  Synthetic
acagaaacgaaaucaga

SEQ ID NO: 736973 - RNA, 17 nt, Artificial Sequence
  Synthetic
aaagccuaggcaucaga

SEQ ID NO: 736974 - RNA, 17 nt, Artificial Sequence
  Synthetic
augguccuugcaucaga

SEQ ID NO: 736975 - RNA, 17 nt, Artificial Sequence
  Synthetic
uucucacacucaucaga

SEQ ID NO: 736976 - RNA, 17 nt, Artificial Sequence
  Synthetic
auugaaaugucaucaga

SEQ ID NO: 736977 - RNA, 17 nt, Artificial Sequence
  Synthetic
ccaugcaguucaucaga

SEQ ID NO: 736978 - RNA, 17 nt, Artificial Sequence
  Synthetic
cuuuguuaaagaucaga

SEQ ID NO: 736979 - RNA, 17 nt, Artificial Sequence
  Synthetic
ugugauuggagaucaga

SEQ ID NO: 736980 - RNA, 17 nt, Artificial Sequence
  Synthetic
ugaaucaugagaucaga

SEQ ID NO: 736981 - RNA, 17 nt, Artificial Sequence
  Synthetic
auuaugacuugaucaga

SEQ ID NO: 736982 - RNA, 17 nt, Artificial Sequence
  Synthetic
auuauuuuuugaucaga

SEQ ID NO: 736983 - RNA, 17 nt, Artificial Sequence
  Synthetic
uaauaccacauaucaga

SEQ ID NO: 736984 - RNA, 17 nt, Artificial Sequence
  Synthetic
caauggggccuaucaga

SEQ ID NO: 736985 - RNA, 17 nt, Artificial Sequence
  Synthetic
uggugaaugguaucaga

SEQ ID NO: 736986 - RNA, 17 nt, Artificial Sequence
  Synthetic
aaaaaaauuguaucaga

SEQ ID NO: 736987 - RNA, 17 nt, Artificial Sequence
  Synthetic
aaauauugcuuaucaga

SEQ ID NO: 736988 - RNA, 17 nt, Artificial Sequence
  Synthetic
acacaucagaacucaga

SEQ ID NO: 736989 - RNA, 17 nt, Artificial Sequence
  Synthetic
aaucuccuuaacucaga

SEQ ID NO: 736990 - RNA, 17 nt, Artificial Sequence
  Synthetic
aaaucaagugacucaga

SEQ ID NO: 736991 - RNA, 17 nt, Artificial Sequence
  Synthetic
aagacucgugacucaga

SEQ ID NO: 736992 - RNA, 17 nt, Artificial Sequence
  Synthetic
uuauacccauacucaga

SEQ ID NO: 736993 - RNA, 17 nt, Artificial Sequence
  Synthetic
agauaccacuacucaga

SEQ ID NO: 736994 - RNA, 17 nt, Artificial Sequence
  Synthetic
aaucccagcuacucaga

SEQ ID NO: 736995 - RNA, 17 nt, Artificial Sequence
  Synthetic
cagagagaguacucaga

SEQ ID NO: 736996 - RNA, 17 nt, Artificial Sequence
  Synthetic
aauguuacuuacucaga

SEQ ID NO: 736997 - RNA, 17 nt, Artificial Sequence
  Synthetic
caaacaaaaaccucaga

SEQ ID NO: 736998 - RNA, 17 nt, Artificial Sequence
  Synthetic
auuaauaaaaccucaga

SEQ ID NO: 736999 - RNA, 17 nt, Artificial Sequence
  Synthetic
uaacuccagaccucaga

SEQ ID NO: 737000 - RNA, 17 nt, Artificial Sequence
  Synthetic
ccuuccgagcccucaga

SEQ ID NO: 737001 - RNA, 17 nt, Artificial Sequence
  Synthetic
cuggaagggagcucaga

SEQ ID NO: 737002 - RNA, 17 nt, Artificial Sequence
  Synthetic
uucuggacaugcucaga

SEQ ID NO: 737003 - RNA, 17 nt, Artificial Sequence
  Synthetic
uuaaaaaccugcucaga

SEQ ID NO: 737004 - RNA, 17 nt, Artificial Sequence
  Synthetic
cagaacagaaucucaga

SEQ ID NO: 737005 - RNA, 17 nt, Artificial Sequence
  Synthetic
cauuaucuaaucucaga

SEQ ID NO: 737006 - RNA, 17 nt, Artificial Sequence
  Synthetic
agacaauucaucucaga

SEQ ID NO: 737007 - RNA, 17 nt, Artificial Sequence
  Synthetic
acugagguggucucaga

SEQ ID NO: 737008 - RNA, 17 nt, Artificial Sequence
  Synthetic
cuguaggcauucucaga

SEQ ID NO: 737009 - RNA, 17 nt, Artificial Sequence
  Synthetic
aaucccaucuucucaga

SEQ ID NO: 737010 - RNA, 17 nt, Artificial Sequence
  Synthetic
agaacacuguucucaga

SEQ ID NO: 737011 - RNA, 17 nt, Artificial Sequence
  Synthetic
auguagaauuucucaga

SEQ ID NO: 737012 - RNA, 17 nt, Artificial Sequence
  Synthetic
cccaagucuuucucaga

SEQ ID NO: 737013 - RNA, 17 nt, Artificial Sequence
  Synthetic
auaagaaggaagucaga

SEQ ID NO: 737014 - RNA, 17 nt, Artificial Sequence
  Synthetic
caacaugaagagucaga

SEQ ID NO: 737015 - RNA, 17 nt, Artificial Sequence
  Synthetic
uuaagaauggagucaga

SEQ ID NO: 737016 - RNA, 17 nt, Artificial Sequence
  Synthetic
ugagaaguggagucaga

SEQ ID NO: 737017 - RNA, 17 nt, Artificial Sequence
  Synthetic
agaacaggcaggucaga

SEQ ID NO: 737018 - RNA, 17 nt, Artificial Sequence
  Synthetic
ugcauauucaggucaga

SEQ ID NO: 737019 - RNA, 17 nt, Artificial Sequence
  Synthetic
uuuauucagaggucaga

SEQ ID NO: 737020 - RNA, 17 nt, Artificial Sequence
  Synthetic
aaucacuaugggucaga

SEQ ID NO: 737021 - RNA, 17 nt, Artificial Sequence
  Synthetic
aauacgcuaaugucaga

SEQ ID NO: 737022 - RNA, 17 nt, Artificial Sequence
  Synthetic
cugaaacaagugucaga

SEQ ID NO: 737023 - RNA, 17 nt, Artificial Sequence
  Synthetic
auacaugaugugucaga

SEQ ID NO: 737024 - RNA, 17 nt, Artificial Sequence
  Synthetic
aauagcccuuugucaga

SEQ ID NO: 737025 - RNA, 17 nt, Artificial Sequence
  Synthetic
auuagcccuuugucaga

SEQ ID NO: 737026 - RNA, 17 nt, Artificial Sequence
  Synthetic
cuaagacaaaauucaga

SEQ ID NO: 737027 - RNA, 17 nt, Artificial Sequence
  Synthetic
aauauaaagaauucaga

SEQ ID NO: 737028 - RNA, 17 nt, Artificial Sequence
  Synthetic
cuugcuuugcauucaga

SEQ ID NO: 737029 - RNA, 17 nt, Artificial Sequence
  Synthetic
uaucaaacagauucaga

SEQ ID NO: 737030 - RNA, 17 nt, Artificial Sequence
  Synthetic
aaguaaaaauauucaga

SEQ ID NO: 737031 - RNA, 17 nt, Artificial Sequence
  Synthetic
auuugagaaacuucaga

SEQ ID NO: 737032 - RNA, 17 nt, Artificial Sequence
  Synthetic
aaauuauucacuucaga

SEQ ID NO: 737033 - RNA, 17 nt, Artificial Sequence
  Synthetic
agcagcuugacuucaga

SEQ ID NO: 737034 - RNA, 17 nt, Artificial Sequence
  Synthetic
uacacaacaccuucaga

SEQ ID NO: 737035 - RNA, 17 nt, Artificial Sequence
  Synthetic
uguuggugaccuucaga

SEQ ID NO: 737036 - RNA, 17 nt, Artificial Sequence
  Synthetic
uccccagagccuucaga

SEQ ID NO: 737037 - RNA, 17 nt, Artificial Sequence
  Synthetic
cggaaguaggcuucaga

SEQ ID NO: 737038 - RNA, 17 nt, Artificial Sequence
  Synthetic
uccccaaaugcuucaga

SEQ ID NO: 737039 - RNA, 17 nt, Artificial Sequence
  Synthetic
cggaccauugcuucaga

SEQ ID NO: 737040 - RNA, 17 nt, Artificial Sequence
  Synthetic
caggcuguugcuucaga

SEQ ID NO: 737041 - RNA, 17 nt, Artificial Sequence
  Synthetic
cucuaagcuucuucaga

SEQ ID NO: 737042 - RNA, 17 nt, Artificial Sequence
  Synthetic
auuaaucguucuucaga

SEQ ID NO: 737043 - RNA, 17 nt, Artificial Sequence
  Synthetic
ugugaucaggguucaga

SEQ ID NO: 737044 - RNA, 17 nt, Artificial Sequence
  Synthetic
aggcuaugaauuucaga

SEQ ID NO: 737045 - RNA, 17 nt, Artificial Sequence
  Synthetic
uuacuuuacauuucaga

SEQ ID NO: 737046 - RNA, 17 nt, Artificial Sequence
  Synthetic
cucuggacuauuucaga

SEQ ID NO: 737047 - RNA, 17 nt, Artificial Sequence
  Synthetic
auauuguggcuuucaga

SEQ ID NO: 737048 - RNA, 17 nt, Artificial Sequence
  Synthetic
uagcccucaguuucaga

SEQ ID NO: 737049 - RNA, 17 nt, Artificial Sequence
  Synthetic
uuuagaauaguuucaga

SEQ ID NO: 737050 - RNA, 17 nt, Artificial Sequence
  Synthetic
auuggaauaguuucaga

SEQ ID NO: 737051 - RNA, 17 nt, Artificial Sequence
  Synthetic
aacaacucuguuucaga

SEQ ID NO: 737052 - RNA, 17 nt, Artificial Sequence
  Synthetic
augauaaguguuucaga

SEQ ID NO: 737053 - RNA, 17 nt, Artificial Sequence
  Synthetic
ccauguuucuuuucaga

SEQ ID NO: 737054 - RNA, 17 nt, Artificial Sequence
  Synthetic
acuaggaaguuuucaga

SEQ ID NO: 737055 - RNA, 17 nt, Artificial Sequence
  Synthetic
cuuaagacuuuuucaga

SEQ ID NO: 737056 - RNA, 17 nt, Artificial Sequence
  Synthetic
ucuauggaaaaaagaga

SEQ ID NO: 737057 - RNA, 17 nt, Artificial Sequence
  Synthetic
uuaaaauaaaaaagaga

SEQ ID NO: 737058 - RNA, 17 nt, Artificial Sequence
  Synthetic
uuucuaggaaaaagaga

SEQ ID NO: 737059 - RNA, 17 nt, Artificial Sequence
  Synthetic
ugaaauaacaaaagaga

SEQ ID NO: 737060 - RNA, 17 nt, Artificial Sequence
  Synthetic
uauauagccaaaagaga

SEQ ID NO: 737061 - RNA, 17 nt, Artificial Sequence
  Synthetic
auauuaaucaaaagaga

SEQ ID NO: 737062 - RNA, 17 nt, Artificial Sequence
  Synthetic
cagaaaaagaaaagaga

SEQ ID NO: 737063 - RNA, 17 nt, Artificial Sequence
  Synthetic
auaaaacagaaaagaga

SEQ ID NO: 737064 - RNA, 17 nt, Artificial Sequence
  Synthetic
uguggugggaaaagaga

SEQ ID NO: 737065 - RNA, 17 nt, Artificial Sequence
  Synthetic
aauuguaguaaaagaga

SEQ ID NO: 737066 - RNA, 17 nt, Artificial Sequence
  Synthetic
auggauggacaaagaga

SEQ ID NO: 737067 - RNA, 17 nt, Artificial Sequence
  Synthetic
aguugaacccaaagaga

SEQ ID NO: 737068 - RNA, 17 nt, Artificial Sequence
  Synthetic
aacuugagagaaagaga

SEQ ID NO: 737069 - RNA, 17 nt, Artificial Sequence
  Synthetic
cagagagaugaaagaga

SEQ ID NO: 737070 - RNA, 17 nt, Artificial Sequence
  Synthetic
aaggguugugaaagaga

SEQ ID NO: 737071 - RNA, 17 nt, Artificial Sequence
  Synthetic
ugucugauugaaagaga

SEQ ID NO: 737072 - RNA, 17 nt, Artificial Sequence
  Synthetic
uucuagaaauaaagaga

SEQ ID NO: 737073 - RNA, 17 nt, Artificial Sequence
  Synthetic
caauagggauaaagaga

SEQ ID NO: 737074 - RNA, 17 nt, Artificial Sequence
  Synthetic
aaagguaggacaagaga

SEQ ID NO: 737075 - RNA, 17 nt, Artificial Sequence
  Synthetic
uacauaacuacaagaga

SEQ ID NO: 737076 - RNA, 17 nt, Artificial Sequence
  Synthetic
uuuagucauccaagaga

SEQ ID NO: 737077 - RNA, 17 nt, Artificial Sequence
  Synthetic
auucagcaagcaagaga

SEQ ID NO: 737078 - RNA, 17 nt, Artificial Sequence
  Synthetic
agguuugcugcaagaga

SEQ ID NO: 737079 - RNA, 17 nt, Artificial Sequence
  Synthetic
uaaaguuaaucaagaga

SEQ ID NO: 737080 - RNA, 17 nt, Artificial Sequence
  Synthetic
agcaggccaucaagaga

SEQ ID NO: 737081 - RNA, 17 nt, Artificial Sequence
  Synthetic
acagaaaucucaagaga

SEQ ID NO: 737082 - RNA, 17 nt, Artificial Sequence
  Synthetic
aauacauauucaagaga

SEQ ID NO: 737083 - RNA, 17 nt, Artificial Sequence
  Synthetic
ugagaaaaaagaagaga

SEQ ID NO: 737084 - RNA, 17 nt, Artificial Sequence
  Synthetic
aaucaauucagaagaga

SEQ ID NO: 737085 - RNA, 17 nt, Artificial Sequence
  Synthetic
aagggaaagagaagaga

SEQ ID NO: 737086 - RNA, 17 nt, Artificial Sequence
  Synthetic
cagagggugagaagaga

SEQ ID NO: 737087 - RNA, 17 nt, Artificial Sequence
  Synthetic
aaaacggcuagaagaga

SEQ ID NO: 737088 - RNA, 17 nt, Artificial Sequence
  Synthetic
uguauuuuuagaagaga

SEQ ID NO: 737089 - RNA, 17 nt, Artificial Sequence
  Synthetic
uuucaacagcgaagaga

SEQ ID NO: 737090 - RNA, 17 nt, Artificial Sequence
  Synthetic
agaugcagaggaagaga

SEQ ID NO: 737091 - RNA, 17 nt, Artificial Sequence
  Synthetic
cuggagguaggaagaga

SEQ ID NO: 737092 - RNA, 17 nt, Artificial Sequence
  Synthetic
acaugugacggaagaga

SEQ ID NO: 737093 - RNA, 17 nt, Artificial Sequence
  Synthetic
aaaguggauggaagaga

SEQ ID NO: 737094 - RNA, 17 nt, Artificial Sequence
  Synthetic
accuaaaucugaagaga

SEQ ID NO: 737095 - RNA, 17 nt, Artificial Sequence
  Synthetic
cuagcucugugaagaga

SEQ ID NO: 737096 - RNA, 17 nt, Artificial Sequence
  Synthetic
uagauuauuugaagaga

SEQ ID NO: 737097 - RNA, 17 nt, Artificial Sequence
  Synthetic
aaggguaaaauaagaga

SEQ ID NO: 737098 - RNA, 17 nt, Artificial Sequence
  Synthetic
cccgggagaauaagaga

SEQ ID NO: 737099 - RNA, 17 nt, Artificial Sequence
  Synthetic
aauggagaccuaagaga

SEQ ID NO: 737100 - RNA, 17 nt, Artificial Sequence
  Synthetic
acugucaaucuaagaga

SEQ ID NO: 737101 - RNA, 17 nt, Artificial Sequence
  Synthetic
aaaguuagcuuaagaga

SEQ ID NO: 737102 - RNA, 17 nt, Artificial Sequence
  Synthetic
accaaaagguuaagaga

SEQ ID NO: 737103 - RNA, 17 nt, Artificial Sequence
  Synthetic
ucaguaucuuuaagaga

SEQ ID NO: 737104 - RNA, 17 nt, Artificial Sequence
  Synthetic
aauuuaauuuuaagaga

SEQ ID NO: 737105 - RNA, 17 nt, Artificial Sequence
  Synthetic
uuccuaguaaacagaga

SEQ ID NO: 737106 - RNA, 17 nt, Artificial Sequence
  Synthetic
cuggggcccaacagaga

SEQ ID NO: 737107 - RNA, 17 nt, Artificial Sequence
  Synthetic
uugaucaagaacagaga

SEQ ID NO: 737108 - RNA, 17 nt, Artificial Sequence
  Synthetic
uugaaugaccacagaga

SEQ ID NO: 737109 - RNA, 17 nt, Artificial Sequence
  Synthetic
acgccauuccacagaga

SEQ ID NO: 737110 - RNA, 17 nt, Artificial Sequence
  Synthetic
agugccuggcacagaga

SEQ ID NO: 737111 - RNA, 17 nt, Artificial Sequence
  Synthetic
ucccuauuucacagaga

SEQ ID NO: 737112 - RNA, 17 nt, Artificial Sequence
  Synthetic
caaacaagcgacagaga

SEQ ID NO: 737113 - RNA, 17 nt, Artificial Sequence
  Synthetic
aagacucaguacagaga

SEQ ID NO: 737114 - RNA, 17 nt, Artificial Sequence
  Synthetic
agccuauuuuacagaga

SEQ ID NO: 737115 - RNA, 17 nt, Artificial Sequence
  Synthetic
ucucucgaaaccagaga

SEQ ID NO: 737116 - RNA, 17 nt, Artificial Sequence
  Synthetic
cacuguacaaccagaga

SEQ ID NO: 737117 - RNA, 17 nt, Artificial Sequence
  Synthetic
uuccgcuuugccagaga

SEQ ID NO: 737118 - RNA, 17 nt, Artificial Sequence
  Synthetic
aaacgaagauccagaga

SEQ ID NO: 737119 - RNA, 17 nt, Artificial Sequence
  Synthetic
auguuccacagcagaga

SEQ ID NO: 737120 - RNA, 17 nt, Artificial Sequence
  Synthetic
uguauuuuuagcagaga

SEQ ID NO: 737121 - RNA, 17 nt, Artificial Sequence
  Synthetic
agcacuugcugcagaga

SEQ ID NO: 737122 - RNA, 17 nt, Artificial Sequence
  Synthetic
aggaaccucugcagaga

SEQ ID NO: 737123 - RNA, 17 nt, Artificial Sequence
  Synthetic
ccuccuuugugcagaga

SEQ ID NO: 737124 - RNA, 17 nt, Artificial Sequence
  Synthetic
uucuaguauugcagaga

SEQ ID NO: 737125 - RNA, 17 nt, Artificial Sequence
  Synthetic
aacuucacaaucagaga

SEQ ID NO: 737126 - RNA, 17 nt, Artificial Sequence
  Synthetic
aaacugagaaucagaga

SEQ ID NO: 737127 - RNA, 17 nt, Artificial Sequence
  Synthetic
augaguaagaucagaga

SEQ ID NO: 737128 - RNA, 17 nt, Artificial Sequence
  Synthetic
cuaucuaauaucagaga

SEQ ID NO: 737129 - RNA, 17 nt, Artificial Sequence
  Synthetic
uuuugcaggcucagaga

SEQ ID NO: 737130 - RNA, 17 nt, Artificial Sequence
  Synthetic
cagaacauggucagaga

SEQ ID NO: 737131 - RNA, 17 nt, Artificial Sequence
  Synthetic
agcacggucuucagaga

SEQ ID NO: 737132 - RNA, 17 nt, Artificial Sequence
  Synthetic
aggcaggacaagagaga

SEQ ID NO: 737133 - RNA, 17 nt, Artificial Sequence
  Synthetic
ccagaccucaagagaga

SEQ ID NO: 737134 - RNA, 17 nt, Artificial Sequence
  Synthetic
ucugcaaggaagagaga

SEQ ID NO: 737135 - RNA, 17 nt, Artificial Sequence
  Synthetic
uagugaaugaagagaga

SEQ ID NO: 737136 - RNA, 17 nt, Artificial Sequence
  Synthetic
aguccuccuaagagaga

SEQ ID NO: 737137 - RNA, 17 nt, Artificial Sequence
  Synthetic
ugaggcucacagagaga

SEQ ID NO: 737138 - RNA, 17 nt, Artificial Sequence
  Synthetic
ugcccugcccagagaga

SEQ ID NO: 737139 - RNA, 17 nt, Artificial Sequence
  Synthetic
cugcaacagcagagaga

SEQ ID NO: 737140 - RNA, 17 nt, Artificial Sequence
  Synthetic
cuucagaaucagagaga

SEQ ID NO: 737141 - RNA, 17 nt, Artificial Sequence
  Synthetic
cuguguaaagagagaga

SEQ ID NO: 737142 - RNA, 17 nt, Artificial Sequence
  Synthetic
cauaaacaagagagaga

SEQ ID NO: 737143 - RNA, 17 nt, Artificial Sequence
  Synthetic
caguuggcagagagaga

SEQ ID NO: 737144 - RNA, 17 nt, Artificial Sequence
  Synthetic
agagcaagagagagaga

SEQ ID NO: 737145 - RNA, 17 nt, Artificial Sequence
  Synthetic
aaagagagagagagaga

SEQ ID NO: 737146 - RNA, 17 nt, Artificial Sequence
  Synthetic
agagagagagagagaga

SEQ ID NO: 737147 - RNA, 17 nt, Artificial Sequence
  Synthetic
acaaguggagagagaga

SEQ ID NO: 737148 - RNA, 17 nt, Artificial Sequence
  Synthetic
uuuaauugagagagaga

SEQ ID NO: 737149 - RNA, 17 nt, Artificial Sequence
  Synthetic
cauagaggugagagaga

SEQ ID NO: 737150 - RNA, 17 nt, Artificial Sequence
  Synthetic
uaggggugauagagaga

SEQ ID NO: 737151 - RNA, 17 nt, Artificial Sequence
  Synthetic
cucugagacuagagaga

SEQ ID NO: 737152 - RNA, 17 nt, Artificial Sequence
  Synthetic
aggauagaaaggagaga

SEQ ID NO: 737153 - RNA, 17 nt, Artificial Sequence
  Synthetic
caauuucccaggagaga

SEQ ID NO: 737154 - RNA, 17 nt, Artificial Sequence
  Synthetic
acaggaggcaggagaga

SEQ ID NO: 737155 - RNA, 17 nt, Artificial Sequence
  Synthetic
aaagagcaagggagaga

SEQ ID NO: 737156 - RNA, 17 nt, Artificial Sequence
  Synthetic
agggaggaagggagaga

SEQ ID NO: 737157 - RNA, 17 nt, Artificial Sequence
  Synthetic
agagagagagggagaga

SEQ ID NO: 737158 - RNA, 17 nt, Artificial Sequence
  Synthetic
agggagagagggagaga

SEQ ID NO: 737159 - RNA, 17 nt, Artificial Sequence
  Synthetic
ugggagggagggagaga

SEQ ID NO: 737160 - RNA, 17 nt, Artificial Sequence
  Synthetic
cacuuaggugggagaga

SEQ ID NO: 737161 - RNA, 17 nt, Artificial Sequence
  Synthetic
uuaggaaaauggagaga

SEQ ID NO: 737162 - RNA, 17 nt, Artificial Sequence
  Synthetic
caaaaaacuuggagaga

SEQ ID NO: 737163 - RNA, 17 nt, Artificial Sequence
  Synthetic
ccuuucagaaugagaga

SEQ ID NO: 737164 - RNA, 17 nt, Artificial Sequence
  Synthetic
auacugaagaugagaga

SEQ ID NO: 737165 - RNA, 17 nt, Artificial Sequence
  Synthetic
uaaaaauggaugagaga

SEQ ID NO: 737166 - RNA, 17 nt, Artificial Sequence
  Synthetic
aaugggauucugagaga

SEQ ID NO: 737167 - RNA, 17 nt, Artificial Sequence
  Synthetic
cuuuucugagugagaga

SEQ ID NO: 737168 - RNA, 17 nt, Artificial Sequence
  Synthetic
auaggagcggugagaga

SEQ ID NO: 737169 - RNA, 17 nt, Artificial Sequence
  Synthetic
ugggguauggugagaga

SEQ ID NO: 737170 - RNA, 17 nt, Artificial Sequence
  Synthetic
auaggaguggugagaga

SEQ ID NO: 737171 - RNA, 17 nt, Artificial Sequence
  Synthetic
aacuuuguggugagaga

SEQ ID NO: 737172 - RNA, 17 nt, Artificial Sequence
  Synthetic
cucuaaugugugagaga

SEQ ID NO: 737173 - RNA, 17 nt, Artificial Sequence
  Synthetic
cuugccccuuugagaga

SEQ ID NO: 737174 - RNA, 17 nt, Artificial Sequence
  Synthetic
caggauucuaauagaga

SEQ ID NO: 737175 - RNA, 17 nt, Artificial Sequence
  Synthetic
uguauuuuuaauagaga

SEQ ID NO: 737176 - RNA, 17 nt, Artificial Sequence
  Synthetic
agacaaaaucauagaga

SEQ ID NO: 737177 - RNA, 17 nt, Artificial Sequence
  Synthetic
uagcauuuucauagaga

SEQ ID NO: 737178 - RNA, 17 nt, Artificial Sequence
  Synthetic
uauggaguggauagaga

SEQ ID NO: 737179 - RNA, 17 nt, Artificial Sequence
  Synthetic
aauacauuauauagaga

SEQ ID NO: 737180 - RNA, 17 nt, Artificial Sequence
  Synthetic
cuuuuauguuauagaga

SEQ ID NO: 737181 - RNA, 17 nt, Artificial Sequence
  Synthetic
uuguguuuuuauagaga

SEQ ID NO: 737182 - RNA, 17 nt, Artificial Sequence
  Synthetic
ucaaauaaugcuagaga

SEQ ID NO: 737183 - RNA, 17 nt, Artificial Sequence
  Synthetic
uuccuaauaucuagaga

SEQ ID NO: 737184 - RNA, 17 nt, Artificial Sequence
  Synthetic
cauggcaacucuagaga

SEQ ID NO: 737185 - RNA, 17 nt, Artificial Sequence
  Synthetic
uuugaagucucuagaga

SEQ ID NO: 737186 - RNA, 17 nt, Artificial Sequence
  Synthetic
ugaaaacauucuagaga

SEQ ID NO: 737187 - RNA, 17 nt, Artificial Sequence
  Synthetic
acgaugcaaaguagaga

SEQ ID NO: 737188 - RNA, 17 nt, Artificial Sequence
  Synthetic
uguauuuuaaguagaga

SEQ ID NO: 737189 - RNA, 17 nt, Artificial Sequence
  Synthetic
uguauuuucaguagaga

SEQ ID NO: 737190 - RNA, 17 nt, Artificial Sequence
  Synthetic
uuuauuuucaguagaga

SEQ ID NO: 737191 - RNA, 17 nt, Artificial Sequence
  Synthetic
aaauagaguaguagaga

SEQ ID NO: 737192 - RNA, 17 nt, Artificial Sequence
  Synthetic
uguaucuuuaguagaga

SEQ ID NO: 737193 - RNA, 17 nt, Artificial Sequence
  Synthetic
uguaauuuuaguagaga

SEQ ID NO: 737194 - RNA, 17 nt, Artificial Sequence
  Synthetic
ugcauuuuuaguagaga

SEQ ID NO: 737195 - RNA, 17 nt, Artificial Sequence
  Synthetic
cauauuuuuaguagaga

SEQ ID NO: 737196 - RNA, 17 nt, Artificial Sequence
  Synthetic
uauauuuuuaguagaga

SEQ ID NO: 737197 - RNA, 17 nt, Artificial Sequence
  Synthetic
ucuauuuuuaguagaga

SEQ ID NO: 737198 - RNA, 17 nt, Artificial Sequence
  Synthetic
uguauuuuuaguagaga

SEQ ID NO: 737199 - RNA, 17 nt, Artificial Sequence
  Synthetic
uuuauuuuuaguagaga

SEQ ID NO: 737200 - RNA, 17 nt, Artificial Sequence
  Synthetic
uguguuuuuaguagaga

SEQ ID NO: 737201 - RNA, 17 nt, Artificial Sequence
  Synthetic
uauuuuuuuaguagaga

SEQ ID NO: 737202 - RNA, 17 nt, Artificial Sequence
  Synthetic
uguauuuuugguagaga

SEQ ID NO: 737203 - RNA, 17 nt, Artificial Sequence
  Synthetic
aauuuuuuugguagaga

SEQ ID NO: 737204 - RNA, 17 nt, Artificial Sequence
  Synthetic
ugcugucaauguagaga

SEQ ID NO: 737205 - RNA, 17 nt, Artificial Sequence
  Synthetic
uuaauuuuauguagaga

SEQ ID NO: 737206 - RNA, 17 nt, Artificial Sequence
  Synthetic
acauuuuuauguagaga

SEQ ID NO: 737207 - RNA, 17 nt, Artificial Sequence
  Synthetic
uuuguuuucuguagaga

SEQ ID NO: 737208 - RNA, 17 nt, Artificial Sequence
  Synthetic
ugaauucuuuguagaga

SEQ ID NO: 737209 - RNA, 17 nt, Artificial Sequence
  Synthetic
ugcauuuuuuguagaga

SEQ ID NO: 737210 - RNA, 17 nt, Artificial Sequence
  Synthetic
uuuuuuuuuuguagaga

SEQ ID NO: 737211 - RNA, 17 nt, Artificial Sequence
  Synthetic
aaucaaacaauuagaga

SEQ ID NO: 737212 - RNA, 17 nt, Artificial Sequence
  Synthetic
aacaguagcauuagaga

SEQ ID NO: 737213 - RNA, 17 nt, Artificial Sequence
  Synthetic
acagagaagauuagaga

SEQ ID NO: 737214 - RNA, 17 nt, Artificial Sequence
  Synthetic
aggguuagacuuagaga

SEQ ID NO: 737215 - RNA, 17 nt, Artificial Sequence
  Synthetic
aacuuaucauuuagaga

SEQ ID NO: 737216 - RNA, 17 nt, Artificial Sequence
  Synthetic
uaaaaaagauuuagaga

SEQ ID NO: 737217 - RNA, 17 nt, Artificial Sequence
  Synthetic
uauaauggauuuagaga

SEQ ID NO: 737218 - RNA, 17 nt, Artificial Sequence
  Synthetic
aaaugcauauuuagaga

SEQ ID NO: 737219 - RNA, 17 nt, Artificial Sequence
  Synthetic
aaaugugauuuuagaga

SEQ ID NO: 737220 - RNA, 17 nt, Artificial Sequence
  Synthetic
agcuagauaaaacgaga

SEQ ID NO: 737221 - RNA, 17 nt, Artificial Sequence
  Synthetic
aggcaacagagacgaga

SEQ ID NO: 737222 - RNA, 17 nt, Artificial Sequence
  Synthetic
uuuuuuuuuucccgaga

SEQ ID NO: 737223 - RNA, 17 nt, Artificial Sequence
  Synthetic
aggagacggagccgaga

SEQ ID NO: 737224 - RNA, 17 nt, Artificial Sequence
  Synthetic
acuuugggaggccgaga

SEQ ID NO: 737225 - RNA, 17 nt, Artificial Sequence
  Synthetic
aggcagaaauuccgaga

SEQ ID NO: 737226 - RNA, 17 nt, Artificial Sequence
  Synthetic
uuuuuuuuuuuccgaga

SEQ ID NO: 737227 - RNA, 17 nt, Artificial Sequence
  Synthetic
aaugaaaugaagcgaga

SEQ ID NO: 737228 - RNA, 17 nt, Artificial Sequence
  Synthetic
ugaguuagaaggcgaga

SEQ ID NO: 737229 - RNA, 17 nt, Artificial Sequence
  Synthetic
uuuuuuuuuuugcgaga

SEQ ID NO: 737230 - RNA, 17 nt, Artificial Sequence
  Synthetic
uucuguugaguucgaga

SEQ ID NO: 737231 - RNA, 17 nt, Artificial Sequence
  Synthetic
ugcuaaaauaaaggaga

SEQ ID NO: 737232 - RNA, 17 nt, Artificial Sequence
  Synthetic
ccaacaaauaaaggaga

SEQ ID NO: 737233 - RNA, 17 nt, Artificial Sequence
  Synthetic
ucugcuuauaaaggaga

SEQ ID NO: 737234 - RNA, 17 nt, Artificial Sequence
  Synthetic
cauuggauuaaaggaga

SEQ ID NO: 737235 - RNA, 17 nt, Artificial Sequence
  Synthetic
cauaaagaacaaggaga

SEQ ID NO: 737236 - RNA, 17 nt, Artificial Sequence
  Synthetic
uuagaaguucaaggaga

SEQ ID NO: 737237 - RNA, 17 nt, Artificial Sequence
  Synthetic
aagggggaggaaggaga

SEQ ID NO: 737238 - RNA, 17 nt, Artificial Sequence
  Synthetic
aagggaagggaaggaga

SEQ ID NO: 737239 - RNA, 17 nt, Artificial Sequence
  Synthetic
aaaggucaugaaggaga

SEQ ID NO: 737240 - RNA, 17 nt, Artificial Sequence
  Synthetic
caucaaagguaaggaga

SEQ ID NO: 737241 - RNA, 17 nt, Artificial Sequence
  Synthetic
aaaagaaaaacaggaga

SEQ ID NO: 737242 - RNA, 17 nt, Artificial Sequence
  Synthetic
uacauaauaacaggaga

SEQ ID NO: 737243 - RNA, 17 nt, Artificial Sequence
  Synthetic
aaacaaaacacaggaga

SEQ ID NO: 737244 - RNA, 17 nt, Artificial Sequence
  Synthetic
aggggaaacacaggaga

SEQ ID NO: 737245 - RNA, 17 nt, Artificial Sequence
  Synthetic
aaaagaccgacaggaga

SEQ ID NO: 737246 - RNA, 17 nt, Artificial Sequence
  Synthetic
ugcuugaacccaggaga

SEQ ID NO: 737247 - RNA, 17 nt, Artificial Sequence
  Synthetic
uaaaagcagccaggaga

SEQ ID NO: 737248 - RNA, 17 nt, Artificial Sequence
  Synthetic
agaaaugcuccaggaga

SEQ ID NO: 737249 - RNA, 17 nt, Artificial Sequence
  Synthetic
agaagagaggcaggaga

SEQ ID NO: 737250 - RNA, 17 nt, Artificial Sequence
  Synthetic
ccagcugaggcaggaga

SEQ ID NO: 737251 - RNA, 17 nt, Artificial Sequence
  Synthetic
ccaagcuaaagaggaga

SEQ ID NO: 737252 - RNA, 17 nt, Artificial Sequence
  Synthetic
ucaucaagcagaggaga

SEQ ID NO: 737253 - RNA, 17 nt, Artificial Sequence
  Synthetic
acaaggcucagaggaga

SEQ ID NO: 737254 - RNA, 17 nt, Artificial Sequence
  Synthetic
cagcaaaagagaggaga

SEQ ID NO: 737255 - RNA, 17 nt, Artificial Sequence
  Synthetic
cacucuaguagaggaga

SEQ ID NO: 737256 - RNA, 17 nt, Artificial Sequence
  Synthetic
agagggacgggaggaga

SEQ ID NO: 737257 - RNA, 17 nt, Artificial Sequence
  Synthetic
auuucugugugaggaga

SEQ ID NO: 737258 - RNA, 17 nt, Artificial Sequence
  Synthetic
ugaaaagcaauaggaga

SEQ ID NO: 737259 - RNA, 17 nt, Artificial Sequence
  Synthetic
agauuguuccuaggaga

SEQ ID NO: 737260 - RNA, 17 nt, Artificial Sequence
  Synthetic
uuuguuuauuuaggaga

SEQ ID NO: 737261 - RNA, 17 nt, Artificial Sequence
  Synthetic
acccagcuucacggaga

SEQ ID NO: 737262 - RNA, 17 nt, Artificial Sequence
  Synthetic
agcuagagauacggaga

SEQ ID NO: 737263 - RNA, 17 nt, Artificial Sequence
  Synthetic
cuuuuauguuacggaga

SEQ ID NO: 737264 - RNA, 17 nt, Artificial Sequence
  Synthetic
uuggggcagaagggaga

SEQ ID NO: 737265 - RNA, 17 nt, Artificial Sequence
  Synthetic
uguugagagaagggaga

SEQ ID NO: 737266 - RNA, 17 nt, Artificial Sequence
  Synthetic
accaagauuaagggaga

SEQ ID NO: 737267 - RNA, 17 nt, Artificial Sequence
  Synthetic
ugacagagacagggaga

SEQ ID NO: 737268 - RNA, 17 nt, Artificial Sequence
  Synthetic
acaacuaagcagggaga

SEQ ID NO: 737269 - RNA, 17 nt, Artificial Sequence
  Synthetic
cucucucagcagggaga

SEQ ID NO: 737270 - RNA, 17 nt, Artificial Sequence
  Synthetic
uuuuaccuucagggaga

SEQ ID NO: 737271 - RNA, 17 nt, Artificial Sequence
  Synthetic
agagaggcagagggaga

SEQ ID NO: 737272 - RNA, 17 nt, Artificial Sequence
  Synthetic
agacagggagagggaga

SEQ ID NO: 737273 - RNA, 17 nt, Artificial Sequence
  Synthetic
cccaaaaaggagggaga

SEQ ID NO: 737274 - RNA, 17 nt, Artificial Sequence
  Synthetic
uuacauaaggagggaga

SEQ ID NO: 737275 - RNA, 17 nt, Artificial Sequence
  Synthetic
uauuuaggggagggaga

SEQ ID NO: 737276 - RNA, 17 nt, Artificial Sequence
  Synthetic
ucaguuuucuagggaga

SEQ ID NO: 737277 - RNA, 17 nt, Artificial Sequence
  Synthetic
aaauaggaguagggaga

SEQ ID NO: 737278 - RNA, 17 nt, Artificial Sequence
  Synthetic
aucuaguuaaggggaga

SEQ ID NO: 737279 - RNA, 17 nt, Artificial Sequence
  Synthetic
agagucuacaggggaga

SEQ ID NO: 737280 - RNA, 17 nt, Artificial Sequence
  Synthetic
uacaacaucaggggaga

SEQ ID NO: 737281 - RNA, 17 nt, Artificial Sequence
  Synthetic
accugcuucaggggaga

SEQ ID NO: 737282 - RNA, 17 nt, Artificial Sequence
  Synthetic
aaaucacugaggggaga

SEQ ID NO: 737283 - RNA, 17 nt, Artificial Sequence
  Synthetic
aagcuauucuggggaga

SEQ ID NO: 737284 - RNA, 17 nt, Artificial Sequence
  Synthetic
uccucgggguggggaga

SEQ ID NO: 737285 - RNA, 17 nt, Artificial Sequence
  Synthetic
aacaugacuuggggaga

SEQ ID NO: 737286 - RNA, 17 nt, Artificial Sequence
  Synthetic
cccucauguuggggaga

SEQ ID NO: 737287 - RNA, 17 nt, Artificial Sequence
  Synthetic
aaaguuugaaugggaga

SEQ ID NO: 737288 - RNA, 17 nt, Artificial Sequence
  Synthetic
aaugaccuaaugggaga

SEQ ID NO: 737289 - RNA, 17 nt, Artificial Sequence
  Synthetic
caauaggagaugggaga

SEQ ID NO: 737290 - RNA, 17 nt, Artificial Sequence
  Synthetic
aguacuuggaugggaga

SEQ ID NO: 737291 - RNA, 17 nt, Artificial Sequence
  Synthetic
cacuagacgcugggaga

SEQ ID NO: 737292 - RNA, 17 nt, Artificial Sequence
  Synthetic
auacgaguggugggaga

SEQ ID NO: 737293 - RNA, 17 nt, Artificial Sequence
  Synthetic
cuacaguuugugggaga

SEQ ID NO: 737294 - RNA, 17 nt, Artificial Sequence
  Synthetic
aucacgagguugggaga

SEQ ID NO: 737295 - RNA, 17 nt, Artificial Sequence
  Synthetic
ugcuuaucuuugggaga

SEQ ID NO: 737296 - RNA, 17 nt, Artificial Sequence
  Synthetic
cuucaguuaaauggaga

SEQ ID NO: 737297 - RNA, 17 nt, Artificial Sequence
  Synthetic
ccuucaaccaauggaga

SEQ ID NO: 737298 - RNA, 17 nt, Artificial Sequence
  Synthetic
augagaacacauggaga

SEQ ID NO: 737299 - RNA, 17 nt, Artificial Sequence
  Synthetic
uauuguuaccauggaga

SEQ ID NO: 737300 - RNA, 17 nt, Artificial Sequence
  Synthetic
agaagguuccauggaga

SEQ ID NO: 737301 - RNA, 17 nt, Artificial Sequence
  Synthetic
acagagagaacuggaga

SEQ ID NO: 737302 - RNA, 17 nt, Artificial Sequence
  Synthetic
uggcuagccacuggaga

SEQ ID NO: 737303 - RNA, 17 nt, Artificial Sequence
  Synthetic
aaauuuugcacuggaga

SEQ ID NO: 737304 - RNA, 17 nt, Artificial Sequence
  Synthetic
agaaauaugacuggaga

SEQ ID NO: 737305 - RNA, 17 nt, Artificial Sequence
  Synthetic
agguucauaccuggaga

SEQ ID NO: 737306 - RNA, 17 nt, Artificial Sequence
  Synthetic
aaggagaguccuggaga

SEQ ID NO: 737307 - RNA, 17 nt, Artificial Sequence
  Synthetic
cagaaggaagcuggaga

SEQ ID NO: 737308 - RNA, 17 nt, Artificial Sequence
  Synthetic
aacaucuaggcuggaga

SEQ ID NO: 737309 - RNA, 17 nt, Artificial Sequence
  Synthetic
agcuuccuggcuggaga

SEQ ID NO: 737310 - RNA, 17 nt, Artificial Sequence
  Synthetic
uuucuucagucuggaga

SEQ ID NO: 737311 - RNA, 17 nt, Artificial Sequence
  Synthetic
auccucaguucuggaga

SEQ ID NO: 737312 - RNA, 17 nt, Artificial Sequence
  Synthetic
cacgacuucaguggaga

SEQ ID NO: 737313 - RNA, 17 nt, Artificial Sequence
  Synthetic
uuguacuuuaguggaga

SEQ ID NO: 737314 - RNA, 17 nt, Artificial Sequence
  Synthetic
uguaucuuuaguggaga

SEQ ID NO: 737315 - RNA, 17 nt, Artificial Sequence
  Synthetic
uguauuuuuaguggaga

SEQ ID NO: 737316 - RNA, 17 nt, Artificial Sequence
  Synthetic
aaccuccucuguggaga

SEQ ID NO: 737317 - RNA, 17 nt, Artificial Sequence
  Synthetic
auagcauucuguggaga

SEQ ID NO: 737318 - RNA, 17 nt, Artificial Sequence
  Synthetic
auccuuaucauuggaga

SEQ ID NO: 737319 - RNA, 17 nt, Artificial Sequence
  Synthetic
ucaaaauugauuggaga

SEQ ID NO: 737320 - RNA, 17 nt, Artificial Sequence
  Synthetic
ucuaaauugguuggaga

SEQ ID NO: 737321 - RNA, 17 nt, Artificial Sequence
  Synthetic
agguuauuuuuuggaga

SEQ ID NO: 737322 - RNA, 17 nt, Artificial Sequence
  Synthetic
ucagaaucaaaaugaga

SEQ ID NO: 737323 - RNA, 17 nt, Artificial Sequence
  Synthetic
auccuuggaaaaugaga

SEQ ID NO: 737324 - RNA, 17 nt, Artificial Sequence
  Synthetic
uggauuauuaaaugaga

SEQ ID NO: 737325 - RNA, 17 nt, Artificial Sequence
  Synthetic
aggagugaucaaugaga

SEQ ID NO: 737326 - RNA, 17 nt, Artificial Sequence
  Synthetic
cucuuaucucaaugaga

SEQ ID NO: 737327 - RNA, 17 nt, Artificial Sequence
  Synthetic
cagguuucucaaugaga

SEQ ID NO: 737328 - RNA, 17 nt, Artificial Sequence
  Synthetic
ugaaaauaagaaugaga

SEQ ID NO: 737329 - RNA, 17 nt, Artificial Sequence
  Synthetic
uugaaaucagaaugaga

SEQ ID NO: 737330 - RNA, 17 nt, Artificial Sequence
  Synthetic
uuuuaaucugaaugaga

SEQ ID NO: 737331 - RNA, 17 nt, Artificial Sequence
  Synthetic
aagcaucuugaaugaga

SEQ ID NO: 737332 - RNA, 17 nt, Artificial Sequence
  Synthetic
uuaauucuauaaugaga

SEQ ID NO: 737333 - RNA, 17 nt, Artificial Sequence
  Synthetic
uguuucuauuaaugaga

SEQ ID NO: 737334 - RNA, 17 nt, Artificial Sequence
  Synthetic
aucaaugaaacaugaga

SEQ ID NO: 737335 - RNA, 17 nt, Artificial Sequence
  Synthetic
ccgcaguaaacaugaga

SEQ ID NO: 737336 - RNA, 17 nt, Artificial Sequence
  Synthetic
ugggagggaacaugaga

SEQ ID NO: 737337 - RNA, 17 nt, Artificial Sequence
  Synthetic
aaagaaaccacaugaga

SEQ ID NO: 737338 - RNA, 17 nt, Artificial Sequence
  Synthetic
aguuugagagcaugaga

SEQ ID NO: 737339 - RNA, 17 nt, Artificial Sequence
  Synthetic
auuauagaggcaugaga

SEQ ID NO: 737340 - RNA, 17 nt, Artificial Sequence
  Synthetic
ucaauggccucaugaga

SEQ ID NO: 737341 - RNA, 17 nt, Artificial Sequence
  Synthetic
cugagcuagucaugaga

SEQ ID NO: 737342 - RNA, 17 nt, Artificial Sequence
  Synthetic
caaggccaaagaugaga

SEQ ID NO: 737343 - RNA, 17 nt, Artificial Sequence
  Synthetic
agaaugagcagaugaga

SEQ ID NO: 737344 - RNA, 17 nt, Artificial Sequence
  Synthetic
caaagcaggagaugaga

SEQ ID NO: 737345 - RNA, 17 nt, Artificial Sequence
  Synthetic
uuaagaucaggaugaga

SEQ ID NO: 737346 - RNA, 17 nt, Artificial Sequence
  Synthetic
acugcacucauaugaga

SEQ ID NO: 737347 - RNA, 17 nt, Artificial Sequence
  Synthetic
aagcugaugauaugaga

SEQ ID NO: 737348 - RNA, 17 nt, Artificial Sequence
  Synthetic
acugcauuuguaugaga

SEQ ID NO: 737349 - RNA, 17 nt, Artificial Sequence
  Synthetic
augaaucuauuaugaga

SEQ ID NO: 737350 - RNA, 17 nt, Artificial Sequence
  Synthetic
aucauuuaguuaugaga

SEQ ID NO: 737351 - RNA, 17 nt, Artificial Sequence
  Synthetic
uuuauuuauuuaugaga

SEQ ID NO: 737352 - RNA, 17 nt, Artificial Sequence
  Synthetic
cuacuaaugaacugaga

SEQ ID NO: 737353 - RNA, 17 nt, Artificial Sequence
  Synthetic
aaaaagagguacugaga

SEQ ID NO: 737354 - RNA, 17 nt, Artificial Sequence
  Synthetic
uaugauuguuacugaga

SEQ ID NO: 737355 - RNA, 17 nt, Artificial Sequence
  Synthetic
aagaaaagucccugaga

SEQ ID NO: 737356 - RNA, 17 nt, Artificial Sequence
  Synthetic
uuuaaggggagcugaga

SEQ ID NO: 737357 - RNA, 17 nt, Artificial Sequence
  Synthetic
caaacauauagcugaga

SEQ ID NO: 737358 - RNA, 17 nt, Artificial Sequence
  Synthetic
uacucaggaggcugaga

SEQ ID NO: 737359 - RNA, 17 nt, Artificial Sequence
  Synthetic
acuuugggaggcugaga

SEQ ID NO: 737360 - RNA, 17 nt, Artificial Sequence
  Synthetic
ccaucccagggcugaga

SEQ ID NO: 737361 - RNA, 17 nt, Artificial Sequence
  Synthetic
aggagcuauggcugaga

SEQ ID NO: 737362 - RNA, 17 nt, Artificial Sequence
  Synthetic
uaagcuaguugcugaga

SEQ ID NO: 737363 - RNA, 17 nt, Artificial Sequence
  Synthetic
uuuuuuuucuucugaga

SEQ ID NO: 737364 - RNA, 17 nt, Artificial Sequence
  Synthetic
augacuuauuucugaga

SEQ ID NO: 737365 - RNA, 17 nt, Artificial Sequence
  Synthetic
auuuucuuuuucugaga

SEQ ID NO: 737366 - RNA, 17 nt, Artificial Sequence
  Synthetic
uuuuuuuuuuucugaga

SEQ ID NO: 737367 - RNA, 17 nt, Artificial Sequence
  Synthetic
aauucaaaaaagugaga

SEQ ID NO: 737368 - RNA, 17 nt, Artificial Sequence
  Synthetic
cauggcagaaagugaga

SEQ ID NO: 737369 - RNA, 17 nt, Artificial Sequence
  Synthetic
cauaugacccagugaga

SEQ ID NO: 737370 - RNA, 17 nt, Artificial Sequence
  Synthetic
uauaaugagcagugaga

SEQ ID NO: 737371 - RNA, 17 nt, Artificial Sequence
  Synthetic
aacaaauagcagugaga

SEQ ID NO: 737372 - RNA, 17 nt, Artificial Sequence
  Synthetic
aucaaaggucagugaga

SEQ ID NO: 737373 - RNA, 17 nt, Artificial Sequence
  Synthetic
aaaguaagagagugaga

SEQ ID NO: 737374 - RNA, 17 nt, Artificial Sequence
  Synthetic
uucuaacuggagugaga

SEQ ID NO: 737375 - RNA, 17 nt, Artificial Sequence
  Synthetic
aacaaaggauagugaga

SEQ ID NO: 737376 - RNA, 17 nt, Artificial Sequence
  Synthetic
uuuaucuacuagugaga

SEQ ID NO: 737377 - RNA, 17 nt, Artificial Sequence
  Synthetic
aaaucaggcuagugaga

SEQ ID NO: 737378 - RNA, 17 nt, Artificial Sequence
  Synthetic
aguagauuguagugaga

SEQ ID NO: 737379 - RNA, 17 nt, Artificial Sequence
  Synthetic
ugucucugcacgugaga

SEQ ID NO: 737380 - RNA, 17 nt, Artificial Sequence
  Synthetic
uucuaacuggcgugaga

SEQ ID NO: 737381 - RNA, 17 nt, Artificial Sequence
  Synthetic
cguggcauaaggugaga

SEQ ID NO: 737382 - RNA, 17 nt, Artificial Sequence
  Synthetic
acaugaugcaggugaga

SEQ ID NO: 737383 - RNA, 17 nt, Artificial Sequence
  Synthetic
cuucugaggaggugaga

SEQ ID NO: 737384 - RNA, 17 nt, Artificial Sequence
  Synthetic
aagaauucagggugaga

SEQ ID NO: 737385 - RNA, 17 nt, Artificial Sequence
  Synthetic
aggaacugggggugaga

SEQ ID NO: 737386 - RNA, 17 nt, Artificial Sequence
  Synthetic
uagguuuaugggugaga

SEQ ID NO: 737387 - RNA, 17 nt, Artificial Sequence
  Synthetic
auauuguuauggugaga

SEQ ID NO: 737388 - RNA, 17 nt, Artificial Sequence
  Synthetic
aagagaaaaaugugaga

SEQ ID NO: 737389 - RNA, 17 nt, Artificial Sequence
  Synthetic
agaaugaaaaugugaga

SEQ ID NO: 737390 - RNA, 17 nt, Artificial Sequence
  Synthetic
auguuagaaaugugaga

SEQ ID NO: 737391 - RNA, 17 nt, Artificial Sequence
  Synthetic
uguguuugcaugugaga

SEQ ID NO: 737392 - RNA, 17 nt, Artificial Sequence
  Synthetic
uucuaacugaugugaga

SEQ ID NO: 737393 - RNA, 17 nt, Artificial Sequence
  Synthetic
uaauagagacugugaga

SEQ ID NO: 737394 - RNA, 17 nt, Artificial Sequence
  Synthetic
ucgacuuuucugugaga

SEQ ID NO: 737395 - RNA, 17 nt, Artificial Sequence
  Synthetic
uucuaacuggugugaga

SEQ ID NO: 737396 - RNA, 17 nt, Artificial Sequence
  Synthetic
uucugacuggugugaga

SEQ ID NO: 737397 - RNA, 17 nt, Artificial Sequence
  Synthetic
aacaaaugugugugaga

SEQ ID NO: 737398 - RNA, 17 nt, Artificial Sequence
  Synthetic
auuaaucccuugugaga

SEQ ID NO: 737399 - RNA, 17 nt, Artificial Sequence
  Synthetic
uuucauuuuuugugaga

SEQ ID NO: 737400 - RNA, 17 nt, Artificial Sequence
  Synthetic
uuuuuuuuuuugugaga

SEQ ID NO: 737401 - RNA, 17 nt, Artificial Sequence
  Synthetic
caaaaaaaaaauugaga

SEQ ID NO: 737402 - RNA, 17 nt, Artificial Sequence
  Synthetic
uaacaaugaaauugaga

SEQ ID NO: 737403 - RNA, 17 nt, Artificial Sequence
  Synthetic
caaugaaaacauugaga

SEQ ID NO: 737404 - RNA, 17 nt, Artificial Sequence
  Synthetic
cacacauuccauugaga

SEQ ID NO: 737405 - RNA, 17 nt, Artificial Sequence
  Synthetic
aaaagcacucauugaga

SEQ ID NO: 737406 - RNA, 17 nt, Artificial Sequence
  Synthetic
ugacugauucauugaga

SEQ ID NO: 737407 - RNA, 17 nt, Artificial Sequence
  Synthetic
auguaauuucauugaga

SEQ ID NO: 737408 - RNA, 17 nt, Artificial Sequence
  Synthetic
cuguagagauauugaga

SEQ ID NO: 737409 - RNA, 17 nt, Artificial Sequence
  Synthetic
uagaguggguauugaga

SEQ ID NO: 737410 - RNA, 17 nt, Artificial Sequence
  Synthetic
uaugauuauuauugaga

SEQ ID NO: 737411 - RNA, 17 nt, Artificial Sequence
  Synthetic
uuauuuauuuauugaga

SEQ ID NO: 737412 - RNA, 17 nt, Artificial Sequence
  Synthetic
caggaccccacuugaga

SEQ ID NO: 737413 - RNA, 17 nt, Artificial Sequence
  Synthetic
uaaagaaauacuugaga

SEQ ID NO: 737414 - RNA, 17 nt, Artificial Sequence
  Synthetic
agcacagguacuugaga

SEQ ID NO: 737415 - RNA, 17 nt, Artificial Sequence
  Synthetic
aguuaugcaccuugaga

SEQ ID NO: 737416 - RNA, 17 nt, Artificial Sequence
  Synthetic
auugucaacccuugaga

SEQ ID NO: 737417 - RNA, 17 nt, Artificial Sequence
  Synthetic
uguguguucccuugaga

SEQ ID NO: 737418 - RNA, 17 nt, Artificial Sequence
  Synthetic
uagaccaagccuugaga

SEQ ID NO: 737419 - RNA, 17 nt, Artificial Sequence
  Synthetic
aaauugaggccuugaga

SEQ ID NO: 737420 - RNA, 17 nt, Artificial Sequence
  Synthetic
cauuccaugccuugaga

SEQ ID NO: 737421 - RNA, 17 nt, Artificial Sequence
  Synthetic
auuaacacaucuugaga

SEQ ID NO: 737422 - RNA, 17 nt, Artificial Sequence
  Synthetic
cugugaucaaguugaga

SEQ ID NO: 737423 - RNA, 17 nt, Artificial Sequence
  Synthetic
uugguuauaaguugaga

SEQ ID NO: 737424 - RNA, 17 nt, Artificial Sequence
  Synthetic
aaguaaaucaguugaga

SEQ ID NO: 737425 - RNA, 17 nt, Artificial Sequence
  Synthetic
agaaaagucaguugaga

SEQ ID NO: 737426 - RNA, 17 nt, Artificial Sequence
  Synthetic
agcuuucaaauuugaga

SEQ ID NO: 737427 - RNA, 17 nt, Artificial Sequence
  Synthetic
ucaaaaagaauuugaga

SEQ ID NO: 737428 - RNA, 17 nt, Artificial Sequence
  Synthetic
uucugaagaauuugaga

SEQ ID NO: 737429 - RNA, 17 nt, Artificial Sequence
  Synthetic
uauguauguauuugaga

SEQ ID NO: 737430 - RNA, 17 nt, Artificial Sequence
  Synthetic
auuauuauuauuugaga

SEQ ID NO: 737431 - RNA, 17 nt, Artificial Sequence
  Synthetic
uauuuauuuauuugaga

SEQ ID NO: 737432 - RNA, 17 nt, Artificial Sequence
  Synthetic
cugcauaaacuuugaga

SEQ ID NO: 737433 - RNA, 17 nt, Artificial Sequence
  Synthetic
auauacugacuuugaga

SEQ ID NO: 737434 - RNA, 17 nt, Artificial Sequence
  Synthetic
agcaggugacuuugaga

SEQ ID NO: 737435 - RNA, 17 nt, Artificial Sequence
  Synthetic
acccucccuguuugaga

SEQ ID NO: 737436 - RNA, 17 nt, Artificial Sequence
  Synthetic
uguuuguuuguuugaga

SEQ ID NO: 737437 - RNA, 17 nt, Artificial Sequence
  Synthetic
uuuuguuuuguuugaga

SEQ ID NO: 737438 - RNA, 17 nt, Artificial Sequence
  Synthetic
auauauauauuuugaga

SEQ ID NO: 737439 - RNA, 17 nt, Artificial Sequence
  Synthetic
uuuuguuccuuuugaga

SEQ ID NO: 737440 - RNA, 17 nt, Artificial Sequence
  Synthetic
uuguuuuuguuuugaga

SEQ ID NO: 737441 - RNA, 17 nt, Artificial Sequence
  Synthetic
uuuuguuauuuuugaga

SEQ ID NO: 737442 - RNA, 17 nt, Artificial Sequence
  Synthetic
uguauuuauuuuugaga

SEQ ID NO: 737443 - RNA, 17 nt, Artificial Sequence
  Synthetic
uuuauuuauuuuugaga

SEQ ID NO: 737444 - RNA, 17 nt, Artificial Sequence
  Synthetic
uuuuuuucuuuuugaga

SEQ ID NO: 737445 - RNA, 17 nt, Artificial Sequence
  Synthetic
uuuauuuguuuuugaga

SEQ ID NO: 737446 - RNA, 17 nt, Artificial Sequence
  Synthetic
uuuguuuguuuuugaga

SEQ ID NO: 737447 - RNA, 17 nt, Artificial Sequence
  Synthetic
uuauuuauuuuuugaga

SEQ ID NO: 737448 - RNA, 17 nt, Artificial Sequence
  Synthetic
cuuuuuauuuuuugaga

SEQ ID NO: 737449 - RNA, 17 nt, Artificial Sequence
  Synthetic
aacuuucuuuuuugaga

SEQ ID NO: 737450 - RNA, 17 nt, Artificial Sequence
  Synthetic
caugauguuuuuugaga

SEQ ID NO: 737451 - RNA, 17 nt, Artificial Sequence
  Synthetic
auuuuauuuuuuugaga

SEQ ID NO: 737452 - RNA, 17 nt, Artificial Sequence
  Synthetic
uuuuccuuuuuuugaga

SEQ ID NO: 737453 - RNA, 17 nt, Artificial Sequence
  Synthetic
uuuuucuuuuuuugaga

SEQ ID NO: 737454 - RNA, 17 nt, Artificial Sequence
  Synthetic
uuaauuuuuuuuugaga

SEQ ID NO: 737455 - RNA, 17 nt, Artificial Sequence
  Synthetic
cuucuuuuuuuuugaga

SEQ ID NO: 737456 - RNA, 17 nt, Artificial Sequence
  Synthetic
cuuuuuuuuuuuugaga

SEQ ID NO: 737457 - RNA, 17 nt, Artificial Sequence
  Synthetic
uuuuuuuuuuuuugaga

SEQ ID NO: 737458 - RNA, 17 nt, Artificial Sequence
  Synthetic
uuucacuuaaaaauaga

SEQ ID NO: 737459 - RNA, 17 nt, Artificial Sequence
  Synthetic
aggauuagacaaauaga

SEQ ID NO: 737460 - RNA, 17 nt, Artificial Sequence
  Synthetic
aagagacaucaaauaga

SEQ ID NO: 737461 - RNA, 17 nt, Artificial Sequence
  Synthetic
aaauacagggaaauaga

SEQ ID NO: 737462 - RNA, 17 nt, Artificial Sequence
  Synthetic
cagaucuuguaaauaga

SEQ ID NO: 737463 - RNA, 17 nt, Artificial Sequence
  Synthetic
cucauuguuuaaauaga

SEQ ID NO: 737464 - RNA, 17 nt, Artificial Sequence
  Synthetic
cauccuuuuccaauaga

SEQ ID NO: 737465 - RNA, 17 nt, Artificial Sequence
  Synthetic
uucuguacuucaauaga

SEQ ID NO: 737466 - RNA, 17 nt, Artificial Sequence
  Synthetic
caugguaguucaauaga

SEQ ID NO: 737467 - RNA, 17 nt, Artificial Sequence
  Synthetic
aacaaaugaagaauaga

SEQ ID NO: 737468 - RNA, 17 nt, Artificial Sequence
  Synthetic
cauccuccuagaauaga

SEQ ID NO: 737469 - RNA, 17 nt, Artificial Sequence
  Synthetic
uugaauaaaugaauaga

SEQ ID NO: 737470 - RNA, 17 nt, Artificial Sequence
  Synthetic
uuuauugcaugaauaga

SEQ ID NO: 737471 - RNA, 17 nt, Artificial Sequence
  Synthetic
uuugucagaugaauaga

SEQ ID NO: 737472 - RNA, 17 nt, Artificial Sequence
  Synthetic
uagaaucucugaauaga

SEQ ID NO: 737473 - RNA, 17 nt, Artificial Sequence
  Synthetic
uaagacccaauaauaga

SEQ ID NO: 737474 - RNA, 17 nt, Artificial Sequence
  Synthetic
auuaguaauauaauaga

SEQ ID NO: 737475 - RNA, 17 nt, Artificial Sequence
  Synthetic
aacuagggacuaauaga

SEQ ID NO: 737476 - RNA, 17 nt, Artificial Sequence
  Synthetic
aaccaaagccacauaga

SEQ ID NO: 737477 - RNA, 17 nt, Artificial Sequence
  Synthetic
cuuugcagggacauaga

SEQ ID NO: 737478 - RNA, 17 nt, Artificial Sequence
  Synthetic
uaaaaacuugacauaga

SEQ ID NO: 737479 - RNA, 17 nt, Artificial Sequence
  Synthetic
auuagaacaaccauaga

SEQ ID NO: 737480 - RNA, 17 nt, Artificial Sequence
  Synthetic
aaggaaaacaucauaga

SEQ ID NO: 737481 - RNA, 17 nt, Artificial Sequence
  Synthetic
uaaagggugaucauaga

SEQ ID NO: 737482 - RNA, 17 nt, Artificial Sequence
  Synthetic
cugaaugacuucauaga

SEQ ID NO: 737483 - RNA, 17 nt, Artificial Sequence
  Synthetic
aaaauacauuucauaga

SEQ ID NO: 737484 - RNA, 17 nt, Artificial Sequence
  Synthetic
uaacuacuuuucauaga

SEQ ID NO: 737485 - RNA, 17 nt, Artificial Sequence
  Synthetic
acuuacacaaagauaga

SEQ ID NO: 737486 - RNA, 17 nt, Artificial Sequence
  Synthetic
auggauagaaagauaga

SEQ ID NO: 737487 - RNA, 17 nt, Artificial Sequence
  Synthetic
auacaacagaagauaga

SEQ ID NO: 737488 - RNA, 17 nt, Artificial Sequence
  Synthetic
cagaaauaagagauaga

SEQ ID NO: 737489 - RNA, 17 nt, Artificial Sequence
  Synthetic
aguaacaaggagauaga

SEQ ID NO: 737490 - RNA, 17 nt, Artificial Sequence
  Synthetic
agaguuuuggagauaga

SEQ ID NO: 737491 - RNA, 17 nt, Artificial Sequence
  Synthetic
augaauaaugagauaga

SEQ ID NO: 737492 - RNA, 17 nt, Artificial Sequence
  Synthetic
augcacagagggauaga

SEQ ID NO: 737493 - RNA, 17 nt, Artificial Sequence
  Synthetic
agauagugagggauaga

SEQ ID NO: 737494 - RNA, 17 nt, Artificial Sequence
  Synthetic
ugcauauuggggauaga

SEQ ID NO: 737495 - RNA, 17 nt, Artificial Sequence
  Synthetic
uuuaucccugggauaga

SEQ ID NO: 737496 - RNA, 17 nt, Artificial Sequence
  Synthetic
acaauagugaugauaga

SEQ ID NO: 737497 - RNA, 17 nt, Artificial Sequence
  Synthetic
ugcaaaaauaugauaga

SEQ ID NO: 737498 - RNA, 17 nt, Artificial Sequence
  Synthetic
agguuguuuaugauaga

SEQ ID NO: 737499 - RNA, 17 nt, Artificial Sequence
  Synthetic
aauaacauauugauaga

SEQ ID NO: 737500 - RNA, 17 nt, Artificial Sequence
  Synthetic
cuucaguuguugauaga

SEQ ID NO: 737501 - RNA, 17 nt, Artificial Sequence
  Synthetic
cuagacauacauauaga

SEQ ID NO: 737502 - RNA, 17 nt, Artificial Sequence
  Synthetic
uggcuucaauauauaga

SEQ ID NO: 737503 - RNA, 17 nt, Artificial Sequence
  Synthetic
uuuaaaguuuauauaga

SEQ ID NO: 737504 - RNA, 17 nt, Artificial Sequence
  Synthetic
uguaaacagccuauaga

SEQ ID NO: 737505 - RNA, 17 nt, Artificial Sequence
  Synthetic
aaaaaaauaucuauaga

SEQ ID NO: 737506 - RNA, 17 nt, Artificial Sequence
  Synthetic
agugccugccguauaga

SEQ ID NO: 737507 - RNA, 17 nt, Artificial Sequence
  Synthetic
uuaauuggagguauaga

SEQ ID NO: 737508 - RNA, 17 nt, Artificial Sequence
  Synthetic
auugagaguuguauaga

SEQ ID NO: 737509 - RNA, 17 nt, Artificial Sequence
  Synthetic
ucagcuggaauuauaga

SEQ ID NO: 737510 - RNA, 17 nt, Artificial Sequence
  Synthetic
uaacaauuaauuauaga

SEQ ID NO: 737511 - RNA, 17 nt, Artificial Sequence
  Synthetic
aagcuugucauuauaga

SEQ ID NO: 737512 - RNA, 17 nt, Artificial Sequence
  Synthetic
cuaaccaaaguuauaga

SEQ ID NO: 737513 - RNA, 17 nt, Artificial Sequence
  Synthetic
auaauguuaguuauaga

SEQ ID NO: 737514 - RNA, 17 nt, Artificial Sequence
  Synthetic
ugccugugauuuauaga

SEQ ID NO: 737515 - RNA, 17 nt, Artificial Sequence
  Synthetic
aauaaaaugaaacuaga

SEQ ID NO: 737516 - RNA, 17 nt, Artificial Sequence
  Synthetic
auuguuucacaacuaga

SEQ ID NO: 737517 - RNA, 17 nt, Artificial Sequence
  Synthetic
ucagucagcccacuaga

SEQ ID NO: 737518 - RNA, 17 nt, Artificial Sequence
  Synthetic
auaauggaagcacuaga

SEQ ID NO: 737519 - RNA, 17 nt, Artificial Sequence
  Synthetic
auuuuuuuaagacuaga

SEQ ID NO: 737520 - RNA, 17 nt, Artificial Sequence
  Synthetic
ccaacccugagacuaga

SEQ ID NO: 737521 - RNA, 17 nt, Artificial Sequence
  Synthetic
cuagaguuuggacuaga

SEQ ID NO: 737522 - RNA, 17 nt, Artificial Sequence
  Synthetic
uuaauuuggugacuaga

SEQ ID NO: 737523 - RNA, 17 nt, Artificial Sequence
  Synthetic
cccuggggacuacuaga

SEQ ID NO: 737524 - RNA, 17 nt, Artificial Sequence
  Synthetic
cauuggggacuacuaga

SEQ ID NO: 737525 - RNA, 17 nt, Artificial Sequence
  Synthetic
uuauauaaauuacuaga

SEQ ID NO: 737526 - RNA, 17 nt, Artificial Sequence
  Synthetic
ccuaucaaaaaccuaga

SEQ ID NO: 737527 - RNA, 17 nt, Artificial Sequence
  Synthetic
acuuacacaaaccuaga

SEQ ID NO: 737528 - RNA, 17 nt, Artificial Sequence
  Synthetic
cuuucuuagaaccuaga

SEQ ID NO: 737529 - RNA, 17 nt, Artificial Sequence
  Synthetic
cauaacugcuaccuaga

SEQ ID NO: 737530 - RNA, 17 nt, Artificial Sequence
  Synthetic
cacccaagagcccuaga

SEQ ID NO: 737531 - RNA, 17 nt, Artificial Sequence
  Synthetic
ugaacucaaagccuaga

SEQ ID NO: 737532 - RNA, 17 nt, Artificial Sequence
  Synthetic
cagcugggcagccuaga

SEQ ID NO: 737533 - RNA, 17 nt, Artificial Sequence
  Synthetic
cagguucuaugccuaga

SEQ ID NO: 737534 - RNA, 17 nt, Artificial Sequence
  Synthetic
cuuaauuucugccuaga

SEQ ID NO: 737535 - RNA, 17 nt, Artificial Sequence
  Synthetic
uuucucucaguccuaga

SEQ ID NO: 737536 - RNA, 17 nt, Artificial Sequence
  Synthetic
agguggggauuccuaga

SEQ ID NO: 737537 - RNA, 17 nt, Artificial Sequence
  Synthetic
cuguaaugauuccuaga

SEQ ID NO: 737538 - RNA, 17 nt, Artificial Sequence
  Synthetic
ucaaauaacuuccuaga

SEQ ID NO: 737539 - RNA, 17 nt, Artificial Sequence
  Synthetic
uuaaaguggaagcuaga

SEQ ID NO: 737540 - RNA, 17 nt, Artificial Sequence
  Synthetic
uaugaccuacagcuaga

SEQ ID NO: 737541 - RNA, 17 nt, Artificial Sequence
  Synthetic
ccuuuccugcagcuaga

SEQ ID NO: 737542 - RNA, 17 nt, Artificial Sequence
  Synthetic
agugaacaggagcuaga

SEQ ID NO: 737543 - RNA, 17 nt, Artificial Sequence
  Synthetic
uuaauacaugagcuaga

SEQ ID NO: 737544 - RNA, 17 nt, Artificial Sequence
  Synthetic
aguuucaaauggcuaga

SEQ ID NO: 737545 - RNA, 17 nt, Artificial Sequence
  Synthetic
uucauuuguuggcuaga

SEQ ID NO: 737546 - RNA, 17 nt, Artificial Sequence
  Synthetic
ucucuuggauugcuaga

SEQ ID NO: 737547 - RNA, 17 nt, Artificial Sequence
  Synthetic
acuacuuauaaucuaga

SEQ ID NO: 737548 - RNA, 17 nt, Artificial Sequence
  Synthetic
uuggggaagucucuaga

SEQ ID NO: 737549 - RNA, 17 nt, Artificial Sequence
  Synthetic
aaagccaauagucuaga

SEQ ID NO: 737550 - RNA, 17 nt, Artificial Sequence
  Synthetic
uacacccugcuucuaga

SEQ ID NO: 737551 - RNA, 17 nt, Artificial Sequence
  Synthetic
uaauaucuauuucuaga

SEQ ID NO: 737552 - RNA, 17 nt, Artificial Sequence
  Synthetic
ucaccaagaaaaguaga

SEQ ID NO: 737553 - RNA, 17 nt, Artificial Sequence
  Synthetic
ccauucugaaaaguaga

SEQ ID NO: 737554 - RNA, 17 nt, Artificial Sequence
  Synthetic
acuuacauaaaaguaga

SEQ ID NO: 737555 - RNA, 17 nt, Artificial Sequence
  Synthetic
ugugagcauaaaguaga

SEQ ID NO: 737556 - RNA, 17 nt, Artificial Sequence
  Synthetic
uuaagggauaaaguaga

SEQ ID NO: 737557 - RNA, 17 nt, Artificial Sequence
  Synthetic
ucagcaucccaaguaga

SEQ ID NO: 737558 - RNA, 17 nt, Artificial Sequence
  Synthetic
ugaagcaaagaaguaga

SEQ ID NO: 737559 - RNA, 17 nt, Artificial Sequence
  Synthetic
ugccuuguggaaguaga

SEQ ID NO: 737560 - RNA, 17 nt, Artificial Sequence
  Synthetic
aguugaacgccaguaga

SEQ ID NO: 737561 - RNA, 17 nt, Artificial Sequence
  Synthetic
uucagaauggcaguaga

SEQ ID NO: 737562 - RNA, 17 nt, Artificial Sequence
  Synthetic
acauuugaaucaguaga

SEQ ID NO: 737563 - RNA, 17 nt, Artificial Sequence
  Synthetic
uaaaaccacagaguaga

SEQ ID NO: 737564 - RNA, 17 nt, Artificial Sequence
  Synthetic
auacaccacagaguaga

SEQ ID NO: 737565 - RNA, 17 nt, Artificial Sequence
  Synthetic
uggacauagagaguaga

SEQ ID NO: 737566 - RNA, 17 nt, Artificial Sequence
  Synthetic
caauaagggagaguaga

SEQ ID NO: 737567 - RNA, 17 nt, Artificial Sequence
  Synthetic
ccaaaaaagggaguaga

SEQ ID NO: 737568 - RNA, 17 nt, Artificial Sequence
  Synthetic
ucagccuccugaguaga

SEQ ID NO: 737569 - RNA, 17 nt, Artificial Sequence
  Synthetic
aauuuuugaauaguaga

SEQ ID NO: 737570 - RNA, 17 nt, Artificial Sequence
  Synthetic
cuuacaaucauaguaga

SEQ ID NO: 737571 - RNA, 17 nt, Artificial Sequence
  Synthetic
auaaaaauuauaguaga

SEQ ID NO: 737572 - RNA, 17 nt, Artificial Sequence
  Synthetic
cagguaaagcuaguaga

SEQ ID NO: 737573 - RNA, 17 nt, Artificial Sequence
  Synthetic
uaggauuaaguaguaga

SEQ ID NO: 737574 - RNA, 17 nt, Artificial Sequence
  Synthetic
caaacugucuuaguaga

SEQ ID NO: 737575 - RNA, 17 nt, Artificial Sequence
  Synthetic
caacaguaaaacguaga

SEQ ID NO: 737576 - RNA, 17 nt, Artificial Sequence
  Synthetic
augccaauuaacguaga

SEQ ID NO: 737577 - RNA, 17 nt, Artificial Sequence
  Synthetic
acacauggacacguaga

SEQ ID NO: 737578 - RNA, 17 nt, Artificial Sequence
  Synthetic
aucaagagaaagguaga

SEQ ID NO: 737579 - RNA, 17 nt, Artificial Sequence
  Synthetic
acaaggcagaagguaga

SEQ ID NO: 737580 - RNA, 17 nt, Artificial Sequence
  Synthetic
cuaaauaguaagguaga

SEQ ID NO: 737581 - RNA, 17 nt, Artificial Sequence
  Synthetic
agacacaacgagguaga

SEQ ID NO: 737582 - RNA, 17 nt, Artificial Sequence
  Synthetic
cagcucugggagguaga

SEQ ID NO: 737583 - RNA, 17 nt, Artificial Sequence
  Synthetic
cgggagccugagguaga

SEQ ID NO: 737584 - RNA, 17 nt, Artificial Sequence
  Synthetic
cagccuagaaggguaga

SEQ ID NO: 737585 - RNA, 17 nt, Artificial Sequence
  Synthetic
ucuagagaagggguaga

SEQ ID NO: 737586 - RNA, 17 nt, Artificial Sequence
  Synthetic
uaaaacauugggguaga

SEQ ID NO: 737587 - RNA, 17 nt, Artificial Sequence
  Synthetic
uuucccaaauggguaga

SEQ ID NO: 737588 - RNA, 17 nt, Artificial Sequence
  Synthetic
aaugggauauggguaga

SEQ ID NO: 737589 - RNA, 17 nt, Artificial Sequence
  Synthetic
uuaaauaauuggguaga

SEQ ID NO: 737590 - RNA, 17 nt, Artificial Sequence
  Synthetic
augggaaguuggguaga

SEQ ID NO: 737591 - RNA, 17 nt, Artificial Sequence
  Synthetic
auugagaaaaugguaga

SEQ ID NO: 737592 - RNA, 17 nt, Artificial Sequence
  Synthetic
aauagccaaaugguaga

SEQ ID NO: 737593 - RNA, 17 nt, Artificial Sequence
  Synthetic
auaucagagaugguaga

SEQ ID NO: 737594 - RNA, 17 nt, Artificial Sequence
  Synthetic
ucaaguuagaugguaga

SEQ ID NO: 737595 - RNA, 17 nt, Artificial Sequence
  Synthetic
uggagaucagugguaga

SEQ ID NO: 737596 - RNA, 17 nt, Artificial Sequence
  Synthetic
agcuuuggggugguaga

SEQ ID NO: 737597 - RNA, 17 nt, Artificial Sequence
  Synthetic
ugauggugggugguaga

SEQ ID NO: 737598 - RNA, 17 nt, Artificial Sequence
  Synthetic
ucaaaaauaaauguaga

SEQ ID NO: 737599 - RNA, 17 nt, Artificial Sequence
  Synthetic
ucaaaaacuaauguaga

SEQ ID NO: 737600 - RNA, 17 nt, Artificial Sequence
  Synthetic
ugagaucgugauguaga

SEQ ID NO: 737601 - RNA, 17 nt, Artificial Sequence
  Synthetic
aucuauuuuuauguaga

SEQ ID NO: 737602 - RNA, 17 nt, Artificial Sequence
  Synthetic
cugauacuaccuguaga

SEQ ID NO: 737603 - RNA, 17 nt, Artificial Sequence
  Synthetic
cuuuauucuccuguaga

SEQ ID NO: 737604 - RNA, 17 nt, Artificial Sequence
  Synthetic
uuuucaauagcuguaga

SEQ ID NO: 737605 - RNA, 17 nt, Artificial Sequence
  Synthetic
uacacuguaucuguaga

SEQ ID NO: 737606 - RNA, 17 nt, Artificial Sequence
  Synthetic
uuucaguuuucuguaga

SEQ ID NO: 737607 - RNA, 17 nt, Artificial Sequence
  Synthetic
uguauuuuuaguguaga

SEQ ID NO: 737608 - RNA, 17 nt, Artificial Sequence
  Synthetic
uucaggugacguguaga

SEQ ID NO: 737609 - RNA, 17 nt, Artificial Sequence
  Synthetic
ucaaagcaguguguaga

SEQ ID NO: 737610 - RNA, 17 nt, Artificial Sequence
  Synthetic
aaaaguauguguguaga

SEQ ID NO: 737611 - RNA, 17 nt, Artificial Sequence
  Synthetic
aaaaugaagcuuguaga

SEQ ID NO: 737612 - RNA, 17 nt, Artificial Sequence
  Synthetic
auucaucuucuuguaga

SEQ ID NO: 737613 - RNA, 17 nt, Artificial Sequence
  Synthetic
auaaacaugguuguaga

SEQ ID NO: 737614 - RNA, 17 nt, Artificial Sequence
  Synthetic
aaaauacaaaaauuaga

SEQ ID NO: 737615 - RNA, 17 nt, Artificial Sequence
  Synthetic
agguauuugaaauuaga

SEQ ID NO: 737616 - RNA, 17 nt, Artificial Sequence
  Synthetic
aaguaaacuaaauuaga

SEQ ID NO: 737617 - RNA, 17 nt, Artificial Sequence
  Synthetic
auagguuuacaauuaga

SEQ ID NO: 737618 - RNA, 17 nt, Artificial Sequence
  Synthetic
caauaaagucaauuaga

SEQ ID NO: 737619 - RNA, 17 nt, Artificial Sequence
  Synthetic
caaugcacugaauuaga

SEQ ID NO: 737620 - RNA, 17 nt, Artificial Sequence
  Synthetic
augugucuauaauuaga

SEQ ID NO: 737621 - RNA, 17 nt, Artificial Sequence
  Synthetic
uuuauguuuccauuaga

SEQ ID NO: 737622 - RNA, 17 nt, Artificial Sequence
  Synthetic
accucauaagcauuaga

SEQ ID NO: 737623 - RNA, 17 nt, Artificial Sequence
  Synthetic
caaggaucugcauuaga

SEQ ID NO: 737624 - RNA, 17 nt, Artificial Sequence
  Synthetic
uucaagcccagauuaga

SEQ ID NO: 737625 - RNA, 17 nt, Artificial Sequence
  Synthetic
aaaugacugggauuaga

SEQ ID NO: 737626 - RNA, 17 nt, Artificial Sequence
  Synthetic
aaaaccuguggauuaga

SEQ ID NO: 737627 - RNA, 17 nt, Artificial Sequence
  Synthetic
uugcaguaaauauuaga

SEQ ID NO: 737628 - RNA, 17 nt, Artificial Sequence
  Synthetic
ccacugucaauauuaga

SEQ ID NO: 737629 - RNA, 17 nt, Artificial Sequence
  Synthetic
agguauugucuauuaga

SEQ ID NO: 737630 - RNA, 17 nt, Artificial Sequence
  Synthetic
uauuguauaguauuaga

SEQ ID NO: 737631 - RNA, 17 nt, Artificial Sequence
  Synthetic
aaggugaugguauuaga

SEQ ID NO: 737632 - RNA, 17 nt, Artificial Sequence
  Synthetic
uuuaauaguuuauuaga

SEQ ID NO: 737633 - RNA, 17 nt, Artificial Sequence
  Synthetic
uaggaauacaacuuaga

SEQ ID NO: 737634 - RNA, 17 nt, Artificial Sequence
  Synthetic
auuucuaagaacuuaga

SEQ ID NO: 737635 - RNA, 17 nt, Artificial Sequence
  Synthetic
uagcaaaggcacuuaga

SEQ ID NO: 737636 - RNA, 17 nt, Artificial Sequence
  Synthetic
caggaccaagacuuaga

SEQ ID NO: 737637 - RNA, 17 nt, Artificial Sequence
  Synthetic
aaaaugacuuacuuaga

SEQ ID NO: 737638 - RNA, 17 nt, Artificial Sequence
  Synthetic
agucauaggcccuuaga

SEQ ID NO: 737639 - RNA, 17 nt, Artificial Sequence
  Synthetic
ucuaccccugccuuaga

SEQ ID NO: 737640 - RNA, 17 nt, Artificial Sequence
  Synthetic
cucauuaacuccuuaga

SEQ ID NO: 737641 - RNA, 17 nt, Artificial Sequence
  Synthetic
aaaacagaaugcuuaga

SEQ ID NO: 737642 - RNA, 17 nt, Artificial Sequence
  Synthetic
cagugcccccucuuaga

SEQ ID NO: 737643 - RNA, 17 nt, Artificial Sequence
  Synthetic
ccaauugagcucuuaga

SEQ ID NO: 737644 - RNA, 17 nt, Artificial Sequence
  Synthetic
uuuccaugaaaguuaga

SEQ ID NO: 737645 - RNA, 17 nt, Artificial Sequence
  Synthetic
agaaggaucaaguuaga

SEQ ID NO: 737646 - RNA, 17 nt, Artificial Sequence
  Synthetic
uccugagggaaguuaga

SEQ ID NO: 737647 - RNA, 17 nt, Artificial Sequence
  Synthetic
cucaugaaugaguuaga

SEQ ID NO: 737648 - RNA, 17 nt, Artificial Sequence
  Synthetic
ccugauuuuuaguuaga

SEQ ID NO: 737649 - RNA, 17 nt, Artificial Sequence
  Synthetic
auuuucaaaagguuaga

SEQ ID NO: 737650 - RNA, 17 nt, Artificial Sequence
  Synthetic
aggugaggaauguuaga

SEQ ID NO: 737651 - RNA, 17 nt, Artificial Sequence
  Synthetic
cgcaagcagauguuaga

SEQ ID NO: 737652 - RNA, 17 nt, Artificial Sequence
  Synthetic
ugcuuugcacuguuaga

SEQ ID NO: 737653 - RNA, 17 nt, Artificial Sequence
  Synthetic
aaaaaccuccuguuaga

SEQ ID NO: 737654 - RNA, 17 nt, Artificial Sequence
  Synthetic
uaaaaauagguguuaga

SEQ ID NO: 737655 - RNA, 17 nt, Artificial Sequence
  Synthetic
auuucauugguguuaga

SEQ ID NO: 737656 - RNA, 17 nt, Artificial Sequence
  Synthetic
agcuaaggaaauuuaga

SEQ ID NO: 737657 - RNA, 17 nt, Artificial Sequence
  Synthetic
uugacaauaaauuuaga

SEQ ID NO: 737658 - RNA, 17 nt, Artificial Sequence
  Synthetic
aacaaauagaauuuaga

SEQ ID NO: 737659 - RNA, 17 nt, Artificial Sequence
  Synthetic
auagaauauaauuuaga

SEQ ID NO: 737660 - RNA, 17 nt, Artificial Sequence
  Synthetic
uagauaucuaauuuaga

SEQ ID NO: 737661 - RNA, 17 nt, Artificial Sequence
  Synthetic
uaaguuuaccauuuaga

SEQ ID NO: 737662 - RNA, 17 nt, Artificial Sequence
  Synthetic
ucugguuaagauuuaga

SEQ ID NO: 737663 - RNA, 17 nt, Artificial Sequence
  Synthetic
aaguucugauauuuaga

SEQ ID NO: 737664 - RNA, 17 nt, Artificial Sequence
  Synthetic
cuaaagcaguauuuaga

SEQ ID NO: 737665 - RNA, 17 nt, Artificial Sequence
  Synthetic
auaaauauuuauuuaga

SEQ ID NO: 737666 - RNA, 17 nt, Artificial Sequence
  Synthetic
aauuugacaacuuuaga

SEQ ID NO: 737667 - RNA, 17 nt, Artificial Sequence
  Synthetic
acaaaguugacuuuaga

SEQ ID NO: 737668 - RNA, 17 nt, Artificial Sequence
  Synthetic
uucaugcauacuuuaga

SEQ ID NO: 737669 - RNA, 17 nt, Artificial Sequence
  Synthetic
aaauauaguacuuuaga

SEQ ID NO: 737670 - RNA, 17 nt, Artificial Sequence
  Synthetic
uucacuacuccuuuaga

SEQ ID NO: 737671 - RNA, 17 nt, Artificial Sequence
  Synthetic
uaaacuuuagcuuuaga

SEQ ID NO: 737672 - RNA, 17 nt, Artificial Sequence
  Synthetic
cagucacacucuuuaga

SEQ ID NO: 737673 - RNA, 17 nt, Artificial Sequence
  Synthetic
aaugagcuuucuuuaga

SEQ ID NO: 737674 - RNA, 17 nt, Artificial Sequence
  Synthetic
aauuccugaaguuuaga

SEQ ID NO: 737675 - RNA, 17 nt, Artificial Sequence
  Synthetic
cauaugguggguuuaga

SEQ ID NO: 737676 - RNA, 17 nt, Artificial Sequence
  Synthetic
aaacguaaugguuuaga

SEQ ID NO: 737677 - RNA, 17 nt, Artificial Sequence
  Synthetic
aacucuucugguuuaga

SEQ ID NO: 737678 - RNA, 17 nt, Artificial Sequence
  Synthetic
auggucaaacuuuuaga

SEQ ID NO: 737679 - RNA, 17 nt, Artificial Sequence
  Synthetic
ccuuaauaacuuuuaga

SEQ ID NO: 737680 - RNA, 17 nt, Artificial Sequence
  Synthetic
uucuacuggcuuuuaga

SEQ ID NO: 737681 - RNA, 17 nt, Artificial Sequence
  Synthetic
aauaaacuucuuuuaga

SEQ ID NO: 737682 - RNA, 17 nt, Artificial Sequence
  Synthetic
auuggaauaguuuuaga

SEQ ID NO: 737683 - RNA, 17 nt, Artificial Sequence
  Synthetic
cuuggaauaguuuuaga

SEQ ID NO: 737684 - RNA, 17 nt, Artificial Sequence
  Synthetic
cuauuucuaguuuuaga

SEQ ID NO: 737685 - RNA, 17 nt, Artificial Sequence
  Synthetic
cauauuuggguuuuaga

SEQ ID NO: 737686 - RNA, 17 nt, Artificial Sequence
  Synthetic
uguucuuauguuuuaga

SEQ ID NO: 737687 - RNA, 17 nt, Artificial Sequence
  Synthetic
acgcuagguguuuuaga

SEQ ID NO: 737688 - RNA, 17 nt, Artificial Sequence
  Synthetic
auggcuuccuuuuuaga

SEQ ID NO: 737689 - RNA, 17 nt, Artificial Sequence
  Synthetic
caaagauucuuuuuaga

SEQ ID NO: 737690 - RNA, 17 nt, Artificial Sequence
  Synthetic
ucuuuuuuuuuuuuaga

SEQ ID NO: 737691 - RNA, 17 nt, Artificial Sequence
  Synthetic
uuuuuuuuuuuuuuaga

SEQ ID NO: 737692 - RNA, 17 nt, Artificial Sequence
  Synthetic
ugagccaagaaaaacga

SEQ ID NO: 737693 - RNA, 17 nt, Artificial Sequence
  Synthetic
aacaugggaagaaacga

SEQ ID NO: 737694 - RNA, 17 nt, Artificial Sequence
  Synthetic
acaucuguuagaaacga

SEQ ID NO: 737695 - RNA, 17 nt, Artificial Sequence
  Synthetic
aauagcaugguaaacga

SEQ ID NO: 737696 - RNA, 17 nt, Artificial Sequence
  Synthetic
uacauaguuaccaacga

SEQ ID NO: 737697 - RNA, 17 nt, Artificial Sequence
  Synthetic
ucuaagagacagaacga

SEQ ID NO: 737698 - RNA, 17 nt, Artificial Sequence
  Synthetic
uaguuugcugagaacga

SEQ ID NO: 737699 - RNA, 17 nt, Artificial Sequence
  Synthetic
aggaaaagcaauaacga

SEQ ID NO: 737700 - RNA, 17 nt, Artificial Sequence
  Synthetic
aggcaauuggaacacga

SEQ ID NO: 737701 - RNA, 17 nt, Artificial Sequence
  Synthetic
agacaaccuacacacga

SEQ ID NO: 737702 - RNA, 17 nt, Artificial Sequence
  Synthetic
ucagaaaagauacacga

SEQ ID NO: 737703 - RNA, 17 nt, Artificial Sequence
  Synthetic
uuucuuuugauacacga

SEQ ID NO: 737704 - RNA, 17 nt, Artificial Sequence
  Synthetic
auuuaagguguacacga

SEQ ID NO: 737705 - RNA, 17 nt, Artificial Sequence
  Synthetic
acugucuuuguacacga

SEQ ID NO: 737706 - RNA, 17 nt, Artificial Sequence
  Synthetic
aggacauuauaccacga

SEQ ID NO: 737707 - RNA, 17 nt, Artificial Sequence
  Synthetic
aucauuugagcccacga

SEQ ID NO: 737708 - RNA, 17 nt, Artificial Sequence
  Synthetic
cucaccuuaugccacga

SEQ ID NO: 737709 - RNA, 17 nt, Artificial Sequence
  Synthetic
augaaggacaggcacga

SEQ ID NO: 737710 - RNA, 17 nt, Artificial Sequence
  Synthetic
aaaacacaggugcacga

SEQ ID NO: 737711 - RNA, 17 nt, Artificial Sequence
  Synthetic
caauuuuuacaucacga

SEQ ID NO: 737712 - RNA, 17 nt, Artificial Sequence
  Synthetic
uagaugaagaaagacga

SEQ ID NO: 737713 - RNA, 17 nt, Artificial Sequence
  Synthetic
aagaaccagaaagacga

SEQ ID NO: 737714 - RNA, 17 nt, Artificial Sequence
  Synthetic
uacuuuuucuaagacga

SEQ ID NO: 737715 - RNA, 17 nt, Artificial Sequence
  Synthetic
auuccaaugagagacga

SEQ ID NO: 737716 - RNA, 17 nt, Artificial Sequence
  Synthetic
auuuugggcugagacga

SEQ ID NO: 737717 - RNA, 17 nt, Artificial Sequence
  Synthetic
uuuuugggcugagacga

SEQ ID NO: 737718 - RNA, 17 nt, Artificial Sequence
  Synthetic
auuuuggguugagacga

SEQ ID NO: 737719 - RNA, 17 nt, Artificial Sequence
  Synthetic
acccauauuauagacga

SEQ ID NO: 737720 - RNA, 17 nt, Artificial Sequence
  Synthetic
cugaaguacaaggacga

SEQ ID NO: 737721 - RNA, 17 nt, Artificial Sequence
  Synthetic
uucuuuuuuaaugacga

SEQ ID NO: 737722 - RNA, 17 nt, Artificial Sequence
  Synthetic
cuagaauauacauacga

SEQ ID NO: 737723 - RNA, 17 nt, Artificial Sequence
  Synthetic
aaaacaaaaagauacga

SEQ ID NO: 737724 - RNA, 17 nt, Artificial Sequence
  Synthetic
cuguacuaaauauacga

SEQ ID NO: 737725 - RNA, 17 nt, Artificial Sequence
  Synthetic
acaaacacaguauacga

SEQ ID NO: 737726 - RNA, 17 nt, Artificial Sequence
  Synthetic
uuuccuaauuuauacga

SEQ ID NO: 737727 - RNA, 17 nt, Artificial Sequence
  Synthetic
aguuagcagaauuacga

SEQ ID NO: 737728 - RNA, 17 nt, Artificial Sequence
  Synthetic
aguggaggcaguuacga

SEQ ID NO: 737729 - RNA, 17 nt, Artificial Sequence
  Synthetic
uauuuauuuauuuacga

SEQ ID NO: 737730 - RNA, 17 nt, Artificial Sequence
  Synthetic
aacagcagauaaaccga

SEQ ID NO: 737731 - RNA, 17 nt, Artificial Sequence
  Synthetic
auaaaaaaggcaaccga

SEQ ID NO: 737732 - RNA, 17 nt, Artificial Sequence
  Synthetic
aauauuuucuccaccga

SEQ ID NO: 737733 - RNA, 17 nt, Artificial Sequence
  Synthetic
cugagaugcuggaccga

SEQ ID NO: 737734 - RNA, 17 nt, Artificial Sequence
  Synthetic
uuuggaagaaauaccga

SEQ ID NO: 737735 - RNA, 17 nt, Artificial Sequence
  Synthetic
uaaagaagagcuaccga

SEQ ID NO: 737736 - RNA, 17 nt, Artificial Sequence
  Synthetic
ucuuaagaaguuaccga

SEQ ID NO: 737737 - RNA, 17 nt, Artificial Sequence
  Synthetic
aaaagcuugggacccga

SEQ ID NO: 737738 - RNA, 17 nt, Artificial Sequence
  Synthetic
accuaucuuuuccccga

SEQ ID NO: 737739 - RNA, 17 nt, Artificial Sequence
  Synthetic
aaguuuucugaggccga

SEQ ID NO: 737740 - RNA, 17 nt, Artificial Sequence
  Synthetic
uuugaccaaaaugccga

SEQ ID NO: 737741 - RNA, 17 nt, Artificial Sequence
  Synthetic
uagaaaaggggugccga

SEQ ID NO: 737742 - RNA, 17 nt, Artificial Sequence
  Synthetic
uggcaguagcaauccga

SEQ ID NO: 737743 - RNA, 17 nt, Artificial Sequence
  Synthetic
cuacuuauagaauccga

SEQ ID NO: 737744 - RNA, 17 nt, Artificial Sequence
  Synthetic
uacuuguuccaguccga

SEQ ID NO: 737745 - RNA, 17 nt, Artificial Sequence
  Synthetic
uacauauuggauuccga

SEQ ID NO: 737746 - RNA, 17 nt, Artificial Sequence
  Synthetic
uagaaauaaagaagcga

SEQ ID NO: 737747 - RNA, 17 nt, Artificial Sequence
  Synthetic
aucuuggcaagaagcga

SEQ ID NO: 737748 - RNA, 17 nt, Artificial Sequence
  Synthetic
uugggaggcugaagcga

SEQ ID NO: 737749 - RNA, 17 nt, Artificial Sequence
  Synthetic
aacauugaguacagcga

SEQ ID NO: 737750 - RNA, 17 nt, Artificial Sequence
  Synthetic
agaaugagaaggagcga

SEQ ID NO: 737751 - RNA, 17 nt, Artificial Sequence
  Synthetic
caucaaaaagugagcga

SEQ ID NO: 737752 - RNA, 17 nt, Artificial Sequence
  Synthetic
agccaugaaccuagcga

SEQ ID NO: 737753 - RNA, 17 nt, Artificial Sequence
  Synthetic
uauaaucugaaaggcga

SEQ ID NO: 737754 - RNA, 17 nt, Artificial Sequence
  Synthetic
aucauggcagaaggcga

SEQ ID NO: 737755 - RNA, 17 nt, Artificial Sequence
  Synthetic
ucccauuuuacaggcga

SEQ ID NO: 737756 - RNA, 17 nt, Artificial Sequence
  Synthetic
aagaugagcccaggcga

SEQ ID NO: 737757 - RNA, 17 nt, Artificial Sequence
  Synthetic
aggugcgugggaggcga

SEQ ID NO: 737758 - RNA, 17 nt, Artificial Sequence
  Synthetic
auaugcagaaugggcga

SEQ ID NO: 737759 - RNA, 17 nt, Artificial Sequence
  Synthetic
cgcuccaaccugggcga

SEQ ID NO: 737760 - RNA, 17 nt, Artificial Sequence
  Synthetic
aaccaggggcugggcga

SEQ ID NO: 737761 - RNA, 17 nt, Artificial Sequence
  Synthetic
caucaaaaagugggcga

SEQ ID NO: 737762 - RNA, 17 nt, Artificial Sequence
  Synthetic
cauccaaaagugggcga

SEQ ID NO: 737763 - RNA, 17 nt, Artificial Sequence
  Synthetic
caaaagaagcauggcga

SEQ ID NO: 737764 - RNA, 17 nt, Artificial Sequence
  Synthetic
augugguuugcuggcga

SEQ ID NO: 737765 - RNA, 17 nt, Artificial Sequence
  Synthetic
agccuucaugguggcga

SEQ ID NO: 737766 - RNA, 17 nt, Artificial Sequence
  Synthetic
uuuccuuggcuuggcga

SEQ ID NO: 737767 - RNA, 17 nt, Artificial Sequence
  Synthetic
ugcauagcuguuggcga

SEQ ID NO: 737768 - RNA, 17 nt, Artificial Sequence
  Synthetic
auuauuccaaacugcga

SEQ ID NO: 737769 - RNA, 17 nt, Artificial Sequence
  Synthetic
accacuguuagcugcga

SEQ ID NO: 737770 - RNA, 17 nt, Artificial Sequence
  Synthetic
uguuugaaugucugcga

SEQ ID NO: 737771 - RNA, 17 nt, Artificial Sequence
  Synthetic
ucaguccugccuugcga

SEQ ID NO: 737772 - RNA, 17 nt, Artificial Sequence
  Synthetic
auuuauagcaaaaucga

SEQ ID NO: 737773 - RNA, 17 nt, Artificial Sequence
  Synthetic
aucuguggaaggaucga

SEQ ID NO: 737774 - RNA, 17 nt, Artificial Sequence
  Synthetic
auuuuuuuuccuaucga

SEQ ID NO: 737775 - RNA, 17 nt, Artificial Sequence
  Synthetic
acuuaucuaucuaucga

SEQ ID NO: 737776 - RNA, 17 nt, Artificial Sequence
  Synthetic
ccuuggcaacaacucga

SEQ ID NO: 737777 - RNA, 17 nt, Artificial Sequence
  Synthetic
cuuucuucauaccucga

SEQ ID NO: 737778 - RNA, 17 nt, Artificial Sequence
  Synthetic
aucuguggguggcucga

SEQ ID NO: 737779 - RNA, 17 nt, Artificial Sequence
  Synthetic
uuucuuccuagucucga

SEQ ID NO: 737780 - RNA, 17 nt, Artificial Sequence
  Synthetic
ugugagcauaaagucga

SEQ ID NO: 737781 - RNA, 17 nt, Artificial Sequence
  Synthetic
ucuuaaauuccagucga

SEQ ID NO: 737782 - RNA, 17 nt, Artificial Sequence
  Synthetic
agaggagagugagucga

SEQ ID NO: 737783 - RNA, 17 nt, Artificial Sequence
  Synthetic
uuucuucauagggucga

SEQ ID NO: 737784 - RNA, 17 nt, Artificial Sequence
  Synthetic
auccauucauuggucga

SEQ ID NO: 737785 - RNA, 17 nt, Artificial Sequence
  Synthetic
auccagaaaaaugucga

SEQ ID NO: 737786 - RNA, 17 nt, Artificial Sequence
  Synthetic
acaccggggccugucga

SEQ ID NO: 737787 - RNA, 17 nt, Artificial Sequence
  Synthetic
aauuuuuauggugucga

SEQ ID NO: 737788 - RNA, 17 nt, Artificial Sequence
  Synthetic
auaaaauagguugucga

SEQ ID NO: 737789 - RNA, 17 nt, Artificial Sequence
  Synthetic
uauuagaaugaauucga

SEQ ID NO: 737790 - RNA, 17 nt, Artificial Sequence
  Synthetic
aggggucauauauucga

SEQ ID NO: 737791 - RNA, 17 nt, Artificial Sequence
  Synthetic
uccugcagcauguucga

SEQ ID NO: 737792 - RNA, 17 nt, Artificial Sequence
  Synthetic
aaaaaucaguuguucga

SEQ ID NO: 737793 - RNA, 17 nt, Artificial Sequence
  Synthetic
aaauaggcaauuuucga

SEQ ID NO: 737794 - RNA, 17 nt, Artificial Sequence
  Synthetic
aaaaaaaaaaaaaagga

SEQ ID NO: 737795 - RNA, 17 nt, Artificial Sequence
  Synthetic
aaauuaaaaaaaaagga

SEQ ID NO: 737796 - RNA, 17 nt, Artificial Sequence
  Synthetic
agaaaaaccaaaaagga

SEQ ID NO: 737797 - RNA, 17 nt, Artificial Sequence
  Synthetic
aaugggcucaaaaagga

SEQ ID NO: 737798 - RNA, 17 nt, Artificial Sequence
  Synthetic
auaaaaaggaaaaagga

SEQ ID NO: 737799 - RNA, 17 nt, Artificial Sequence
  Synthetic
uacucaaaagaaaagga

SEQ ID NO: 737800 - RNA, 17 nt, Artificial Sequence
  Synthetic
augcucuaagaaaagga

SEQ ID NO: 737801 - RNA, 17 nt, Artificial Sequence
  Synthetic
uaaagguaagaaaagga

SEQ ID NO: 737802 - RNA, 17 nt, Artificial Sequence
  Synthetic
aaguccccagaaaagga

SEQ ID NO: 737803 - RNA, 17 nt, Artificial Sequence
  Synthetic
uacauuggggaaaagga

SEQ ID NO: 737804 - RNA, 17 nt, Artificial Sequence
  Synthetic
agguugcccuaaaagga

SEQ ID NO: 737805 - RNA, 17 nt, Artificial Sequence
  Synthetic
cacuugugguaaaagga

SEQ ID NO: 737806 - RNA, 17 nt, Artificial Sequence
  Synthetic
aauaccuauacaaagga

SEQ ID NO: 737807 - RNA, 17 nt, Artificial Sequence
  Synthetic
aggaccucaccaaagga

SEQ ID NO: 737808 - RNA, 17 nt, Artificial Sequence
  Synthetic
ucuugguugccaaagga

SEQ ID NO: 737809 - RNA, 17 nt, Artificial Sequence
  Synthetic
agucuuugggcaaagga

SEQ ID NO: 737810 - RNA, 17 nt, Artificial Sequence
  Synthetic
cacuauugcucaaagga

SEQ ID NO: 737811 - RNA, 17 nt, Artificial Sequence
  Synthetic
aagaaagaaagaaagga

SEQ ID NO: 737812 - RNA, 17 nt, Artificial Sequence
  Synthetic
aaaaaggaaagaaagga

SEQ ID NO: 737813 - RNA, 17 nt, Artificial Sequence
  Synthetic
ugaaaaaugagaaagga

SEQ ID NO: 737814 - RNA, 17 nt, Artificial Sequence
  Synthetic
uaaauuauuagaaagga

SEQ ID NO: 737815 - RNA, 17 nt, Artificial Sequence
  Synthetic
agaaaggaaggaaagga

SEQ ID NO: 737816 - RNA, 17 nt, Artificial Sequence
  Synthetic
agugguaacugaaagga

SEQ ID NO: 737817 - RNA, 17 nt, Artificial Sequence
  Synthetic
caaagugagugaaagga

SEQ ID NO: 737818 - RNA, 17 nt, Artificial Sequence
  Synthetic
cuuagucauugaaagga

SEQ ID NO: 737819 - RNA, 17 nt, Artificial Sequence
  Synthetic
uuuucgccuugaaagga

SEQ ID NO: 737820 - RNA, 17 nt, Artificial Sequence
  Synthetic
uugaauauuugaaagga

SEQ ID NO: 737821 - RNA, 17 nt, Artificial Sequence
  Synthetic
aacuggaucauaaagga

SEQ ID NO: 737822 - RNA, 17 nt, Artificial Sequence
  Synthetic
aaaugguucauaaagga

SEQ ID NO: 737823 - RNA, 17 nt, Artificial Sequence
  Synthetic
acugguuagauaaagga

SEQ ID NO: 737824 - RNA, 17 nt, Artificial Sequence
  Synthetic
ucugcauuucuaaagga

SEQ ID NO: 737825 - RNA, 17 nt, Artificial Sequence
  Synthetic
caauccaauguaaagga

SEQ ID NO: 737826 - RNA, 17 nt, Artificial Sequence
  Synthetic
aaauuuccuguaaagga

SEQ ID NO: 737827 - RNA, 17 nt, Artificial Sequence
  Synthetic
cagugcuacuuaaagga

SEQ ID NO: 737828 - RNA, 17 nt, Artificial Sequence
  Synthetic
cacugaaguuuaaagga

SEQ ID NO: 737829 - RNA, 17 nt, Artificial Sequence
  Synthetic
ugacagcuuuuaaagga

SEQ ID NO: 737830 - RNA, 17 nt, Artificial Sequence
  Synthetic
cuuuuuuuuuuaaagga

SEQ ID NO: 737831 - RNA, 17 nt, Artificial Sequence
  Synthetic
uaauuuagcaacaagga

SEQ ID NO: 737832 - RNA, 17 nt, Artificial Sequence
  Synthetic
ucugcugggaacaagga

SEQ ID NO: 737833 - RNA, 17 nt, Artificial Sequence
  Synthetic
auuaacuggaacaagga

SEQ ID NO: 737834 - RNA, 17 nt, Artificial Sequence
  Synthetic
uuuaauucacacaagga

SEQ ID NO: 737835 - RNA, 17 nt, Artificial Sequence
  Synthetic
uaacagcccuacaagga

SEQ ID NO: 737836 - RNA, 17 nt, Artificial Sequence
  Synthetic
auuccccauuacaagga

SEQ ID NO: 737837 - RNA, 17 nt, Artificial Sequence
  Synthetic
uaccucuauuacaagga

SEQ ID NO: 737838 - RNA, 17 nt, Artificial Sequence
  Synthetic
uacuugaaaaccaagga

SEQ ID NO: 737839 - RNA, 17 nt, Artificial Sequence
  Synthetic
cuuuuaccacccaagga

SEQ ID NO: 737840 - RNA, 17 nt, Artificial Sequence
  Synthetic
cccaugucucccaagga

SEQ ID NO: 737841 - RNA, 17 nt, Artificial Sequence
  Synthetic
auguauuuucccaagga

SEQ ID NO: 737842 - RNA, 17 nt, Artificial Sequence
  Synthetic
aaggaggaagccaagga

SEQ ID NO: 737843 - RNA, 17 nt, Artificial Sequence
  Synthetic
agagaccuagccaagga

SEQ ID NO: 737844 - RNA, 17 nt, Artificial Sequence
  Synthetic
cuuugggaggccaagga

SEQ ID NO: 737845 - RNA, 17 nt, Artificial Sequence
  Synthetic
cugaauccugccaagga

SEQ ID NO: 737846 - RNA, 17 nt, Artificial Sequence
  Synthetic
auuugauauuccaagga

SEQ ID NO: 737847 - RNA, 17 nt, Artificial Sequence
  Synthetic
aagcaauaacucaagga

SEQ ID NO: 737848 - RNA, 17 nt, Artificial Sequence
  Synthetic
aauaauagacucaagga

SEQ ID NO: 737849 - RNA, 17 nt, Artificial Sequence
  Synthetic
aacagaaaucucaagga

SEQ ID NO: 737850 - RNA, 17 nt, Artificial Sequence
  Synthetic
agacagagugucaagga

SEQ ID NO: 737851 - RNA, 17 nt, Artificial Sequence
  Synthetic
aagaaagaaaagaagga

SEQ ID NO: 737852 - RNA, 17 nt, Artificial Sequence
  Synthetic
agaguuuuaaagaagga

SEQ ID NO: 737853 - RNA, 17 nt, Artificial Sequence
  Synthetic
agaagaaacaagaagga

SEQ ID NO: 737854 - RNA, 17 nt, Artificial Sequence
  Synthetic
uuuuaaggcaagaagga

SEQ ID NO: 737855 - RNA, 17 nt, Artificial Sequence
  Synthetic
aaggaaaggaagaagga

SEQ ID NO: 737856 - RNA, 17 nt, Artificial Sequence
  Synthetic
aauucccuuaagaagga

SEQ ID NO: 737857 - RNA, 17 nt, Artificial Sequence
  Synthetic
uccuaaaaacagaagga

SEQ ID NO: 737858 - RNA, 17 nt, Artificial Sequence
  Synthetic
aaaacacaggagaagga

SEQ ID NO: 737859 - RNA, 17 nt, Artificial Sequence
  Synthetic
agaaaaagauagaagga

SEQ ID NO: 737860 - RNA, 17 nt, Artificial Sequence
  Synthetic
aaaugaaacuagaagga

SEQ ID NO: 737861 - RNA, 17 nt, Artificial Sequence
  Synthetic
cauagagaguagaagga

SEQ ID NO: 737862 - RNA, 17 nt, Artificial Sequence
  Synthetic
aggaaggaaaggaagga

SEQ ID NO: 737863 - RNA, 17 nt, Artificial Sequence
  Synthetic
accuagccaaggaagga

SEQ ID NO: 737864 - RNA, 17 nt, Artificial Sequence
  Synthetic
aagaaaagaaggaagga

SEQ ID NO: 737865 - RNA, 17 nt, Artificial Sequence
  Synthetic
aaaggaagaaggaagga

SEQ ID NO: 737866 - RNA, 17 nt, Artificial Sequence
  Synthetic
aggaaaggaaggaagga

SEQ ID NO: 737867 - RNA, 17 nt, Artificial Sequence
  Synthetic
aaggaaggaaggaagga

SEQ ID NO: 737868 - RNA, 17 nt, Artificial Sequence
  Synthetic
uagcugcacaggaagga

SEQ ID NO: 737869 - RNA, 17 nt, Artificial Sequence
  Synthetic
caggaaggcaggaagga

SEQ ID NO: 737870 - RNA, 17 nt, Artificial Sequence
  Synthetic
agguuggugaggaagga

SEQ ID NO: 737871 - RNA, 17 nt, Artificial Sequence
  Synthetic
ucaaauaguaggaagga

SEQ ID NO: 737872 - RNA, 17 nt, Artificial Sequence
  Synthetic
aggcaguaagggaagga

SEQ ID NO: 737873 - RNA, 17 nt, Artificial Sequence
  Synthetic
agagagugagggaagga

SEQ ID NO: 737874 - RNA, 17 nt, Artificial Sequence
  Synthetic
agcaggauagggaagga

SEQ ID NO: 737875 - RNA, 17 nt, Artificial Sequence
  Synthetic
aguagaugugggaagga

SEQ ID NO: 737876 - RNA, 17 nt, Artificial Sequence
  Synthetic
cuguccaacuggaagga

SEQ ID NO: 737877 - RNA, 17 nt, Artificial Sequence
  Synthetic
ucacagcagcugaagga

SEQ ID NO: 737878 - RNA, 17 nt, Artificial Sequence
  Synthetic
uucaaguuagugaagga

SEQ ID NO: 737879 - RNA, 17 nt, Artificial Sequence
  Synthetic
aaaccaggugugaagga

SEQ ID NO: 737880 - RNA, 17 nt, Artificial Sequence
  Synthetic
uaagaggaaaauaagga

SEQ ID NO: 737881 - RNA, 17 nt, Artificial Sequence
  Synthetic
auaaaaagaaauaagga

SEQ ID NO: 737882 - RNA, 17 nt, Artificial Sequence
  Synthetic
cugaagauaaauaagga

SEQ ID NO: 737883 - RNA, 17 nt, Artificial Sequence
  Synthetic
auaauaguaaauaagga

SEQ ID NO: 737884 - RNA, 17 nt, Artificial Sequence
  Synthetic
aggcuauuacauaagga

SEQ ID NO: 737885 - RNA, 17 nt, Artificial Sequence
  Synthetic
cgaaggaagcauaagga

SEQ ID NO: 737886 - RNA, 17 nt, Artificial Sequence
  Synthetic
aggggaagagauaagga

SEQ ID NO: 737887 - RNA, 17 nt, Artificial Sequence
  Synthetic
uguauaugguauaagga

SEQ ID NO: 737888 - RNA, 17 nt, Artificial Sequence
  Synthetic
agauguauguauaagga

SEQ ID NO: 737889 - RNA, 17 nt, Artificial Sequence
  Synthetic
uuacaacugaguaagga

SEQ ID NO: 737890 - RNA, 17 nt, Artificial Sequence
  Synthetic
ugauaagcacguaagga

SEQ ID NO: 737891 - RNA, 17 nt, Artificial Sequence
  Synthetic
uguauaagggguaagga

SEQ ID NO: 737892 - RNA, 17 nt, Artificial Sequence
  Synthetic
cugaaaauugguaagga

SEQ ID NO: 737893 - RNA, 17 nt, Artificial Sequence
  Synthetic
uauucacccuguaagga

SEQ ID NO: 737894 - RNA, 17 nt, Artificial Sequence
  Synthetic
uguauaagguguaagga

SEQ ID NO: 737895 - RNA, 17 nt, Artificial Sequence
  Synthetic
uguauaugguguaagga

SEQ ID NO: 737896 - RNA, 17 nt, Artificial Sequence
  Synthetic
acugaaaaaauuaagga

SEQ ID NO: 737897 - RNA, 17 nt, Artificial Sequence
  Synthetic
caucauauuguuaagga

SEQ ID NO: 737898 - RNA, 17 nt, Artificial Sequence
  Synthetic
aauucagacuuuaagga

SEQ ID NO: 737899 - RNA, 17 nt, Artificial Sequence
  Synthetic
uauccaagguuuaagga

SEQ ID NO: 737900 - RNA, 17 nt, Artificial Sequence
  Synthetic
aaacuaaagcaacagga

SEQ ID NO: 737901 - RNA, 17 nt, Artificial Sequence
  Synthetic
agagagggagaacagga

SEQ ID NO: 737902 - RNA, 17 nt, Artificial Sequence
  Synthetic
cagaguuacacacagga

SEQ ID NO: 737903 - RNA, 17 nt, Artificial Sequence
  Synthetic
aacacauggacacagga

SEQ ID NO: 737904 - RNA, 17 nt, Artificial Sequence
  Synthetic
aucacauggacacagga

SEQ ID NO: 737905 - RNA, 17 nt, Artificial Sequence
  Synthetic
uuuacagcuacacagga

SEQ ID NO: 737906 - RNA, 17 nt, Artificial Sequence
  Synthetic
agaagggcuacacagga

SEQ ID NO: 737907 - RNA, 17 nt, Artificial Sequence
  Synthetic
uuuaauaugccacagga

SEQ ID NO: 737908 - RNA, 17 nt, Artificial Sequence
  Synthetic
uuuuuauaggcacagga

SEQ ID NO: 737909 - RNA, 17 nt, Artificial Sequence
  Synthetic
uauauagcugcacagga

SEQ ID NO: 737910 - RNA, 17 nt, Artificial Sequence
  Synthetic
aucucaggugcacagga

SEQ ID NO: 737911 - RNA, 17 nt, Artificial Sequence
  Synthetic
aacacauggucacagga

SEQ ID NO: 737912 - RNA, 17 nt, Artificial Sequence
  Synthetic
ccuuggcccagacagga

SEQ ID NO: 737913 - RNA, 17 nt, Artificial Sequence
  Synthetic
cuacaacuaugacagga

SEQ ID NO: 737914 - RNA, 17 nt, Artificial Sequence
  Synthetic
auaaaugcuugacagga

SEQ ID NO: 737915 - RNA, 17 nt, Artificial Sequence
  Synthetic
accacaugaauacagga

SEQ ID NO: 737916 - RNA, 17 nt, Artificial Sequence
  Synthetic
uaagaaauuauacagga

SEQ ID NO: 737917 - RNA, 17 nt, Artificial Sequence
  Synthetic
ucuuacuuauuacagga

SEQ ID NO: 737918 - RNA, 17 nt, Artificial Sequence
  Synthetic
ucugucuuguuacagga

SEQ ID NO: 737919 - RNA, 17 nt, Artificial Sequence
  Synthetic
cuuuuaauuuuacagga

SEQ ID NO: 737920 - RNA, 17 nt, Artificial Sequence
  Synthetic
aacagaagccaccagga

SEQ ID NO: 737921 - RNA, 17 nt, Artificial Sequence
  Synthetic
uguggagaucaccagga

SEQ ID NO: 737922 - RNA, 17 nt, Artificial Sequence
  Synthetic
caccauguucaccagga

SEQ ID NO: 737923 - RNA, 17 nt, Artificial Sequence
  Synthetic
ccaaaaacagaccagga

SEQ ID NO: 737924 - RNA, 17 nt, Artificial Sequence
  Synthetic
aaauucccagaccagga

SEQ ID NO: 737925 - RNA, 17 nt, Artificial Sequence
  Synthetic
ugcagccaggaccagga

SEQ ID NO: 737926 - RNA, 17 nt, Artificial Sequence
  Synthetic
aucgcuugaacccagga

SEQ ID NO: 737927 - RNA, 17 nt, Artificial Sequence
  Synthetic
auugcuugaacccagga

SEQ ID NO: 737928 - RNA, 17 nt, Artificial Sequence
  Synthetic
ucaaccugcccccagga

SEQ ID NO: 737929 - RNA, 17 nt, Artificial Sequence
  Synthetic
uuacuuugaucccagga

SEQ ID NO: 737930 - RNA, 17 nt, Artificial Sequence
  Synthetic
ccacaugcgucccagga

SEQ ID NO: 737931 - RNA, 17 nt, Artificial Sequence
  Synthetic
ugugaaagcagccagga

SEQ ID NO: 737932 - RNA, 17 nt, Artificial Sequence
  Synthetic
aggaaaaagagccagga

SEQ ID NO: 737933 - RNA, 17 nt, Artificial Sequence
  Synthetic
caccauguuagccagga

SEQ ID NO: 737934 - RNA, 17 nt, Artificial Sequence
  Synthetic
caccguguuagccagga

SEQ ID NO: 737935 - RNA, 17 nt, Artificial Sequence
  Synthetic
uaccguguuagccagga

SEQ ID NO: 737936 - RNA, 17 nt, Artificial Sequence
  Synthetic
cacuguguuagccagga

SEQ ID NO: 737937 - RNA, 17 nt, Artificial Sequence
  Synthetic
cuccuuguuagccagga

SEQ ID NO: 737938 - RNA, 17 nt, Artificial Sequence
  Synthetic
caccguguucgccagga

SEQ ID NO: 737939 - RNA, 17 nt, Artificial Sequence
  Synthetic
ucaccuuguggccagga

SEQ ID NO: 737940 - RNA, 17 nt, Artificial Sequence
  Synthetic
caccauguuggccagga

SEQ ID NO: 737941 - RNA, 17 nt, Artificial Sequence
  Synthetic
cgccauguuggccagga

SEQ ID NO: 737942 - RNA, 17 nt, Artificial Sequence
  Synthetic
caucauguuggccagga

SEQ ID NO: 737943 - RNA, 17 nt, Artificial Sequence
  Synthetic
caccuuguuggccagga

SEQ ID NO: 737944 - RNA, 17 nt, Artificial Sequence
  Synthetic
uaauaucagugccagga

SEQ ID NO: 737945 - RNA, 17 nt, Artificial Sequence
  Synthetic
uuacaggaacuccagga

SEQ ID NO: 737946 - RNA, 17 nt, Artificial Sequence
  Synthetic
ugugggcuacuccagga

SEQ ID NO: 737947 - RNA, 17 nt, Artificial Sequence
  Synthetic
aagugaguuguccagga

SEQ ID NO: 737948 - RNA, 17 nt, Artificial Sequence
  Synthetic
agacagcagaagcagga

SEQ ID NO: 737949 - RNA, 17 nt, Artificial Sequence
  Synthetic
agaguugggaagcagga

SEQ ID NO: 737950 - RNA, 17 nt, Artificial Sequence
  Synthetic
uucacauggcagcagga

SEQ ID NO: 737951 - RNA, 17 nt, Artificial Sequence
  Synthetic
cuagcggaauagcagga

SEQ ID NO: 737952 - RNA, 17 nt, Artificial Sequence
  Synthetic
aggagaugauagcagga

SEQ ID NO: 737953 - RNA, 17 nt, Artificial Sequence
  Synthetic
aauauagcuuagcagga

SEQ ID NO: 737954 - RNA, 17 nt, Artificial Sequence
  Synthetic
aacaccuggacgcagga

SEQ ID NO: 737955 - RNA, 17 nt, Artificial Sequence
  Synthetic
uucacaaggccgcagga

SEQ ID NO: 737956 - RNA, 17 nt, Artificial Sequence
  Synthetic
aaggcaggaaggcagga

SEQ ID NO: 737957 - RNA, 17 nt, Artificial Sequence
  Synthetic
acaagagggaggcagga

SEQ ID NO: 737958 - RNA, 17 nt, Artificial Sequence
  Synthetic
agugaguggaggcagga

SEQ ID NO: 737959 - RNA, 17 nt, Artificial Sequence
  Synthetic
accugugugaggcagga

SEQ ID NO: 737960 - RNA, 17 nt, Artificial Sequence
  Synthetic
aagaguaaugggcagga

SEQ ID NO: 737961 - RNA, 17 nt, Artificial Sequence
  Synthetic
ccaaaagccuggcagga

SEQ ID NO: 737962 - RNA, 17 nt, Artificial Sequence
  Synthetic
uucacaagguggcagga

SEQ ID NO: 737963 - RNA, 17 nt, Artificial Sequence
  Synthetic
uucacaggguggcagga

SEQ ID NO: 737964 - RNA, 17 nt, Artificial Sequence
  Synthetic
cuauucaagcugcagga

SEQ ID NO: 737965 - RNA, 17 nt, Artificial Sequence
  Synthetic
uuccucacagugcagga

SEQ ID NO: 737966 - RNA, 17 nt, Artificial Sequence
  Synthetic
uccuuuguagugcagga

SEQ ID NO: 737967 - RNA, 17 nt, Artificial Sequence
  Synthetic
aagagaggaaaucagga

SEQ ID NO: 737968 - RNA, 17 nt, Artificial Sequence
  Synthetic
aguacuagauaucagga

SEQ ID NO: 737969 - RNA, 17 nt, Artificial Sequence
  Synthetic
uuugcuaacacucagga

SEQ ID NO: 737970 - RNA, 17 nt, Artificial Sequence
  Synthetic
uugucacuugcucagga

SEQ ID NO: 737971 - RNA, 17 nt, Artificial Sequence
  Synthetic
ugcaucaagucucagga

SEQ ID NO: 737972 - RNA, 17 nt, Artificial Sequence
  Synthetic
aagcauagaagucagga

SEQ ID NO: 737973 - RNA, 17 nt, Artificial Sequence
  Synthetic
agaucaaggugucagga

SEQ ID NO: 737974 - RNA, 17 nt, Artificial Sequence
  Synthetic
auguuggcaauucagga

SEQ ID NO: 737975 - RNA, 17 nt, Artificial Sequence
  Synthetic
aagaaacagauucagga

SEQ ID NO: 737976 - RNA, 17 nt, Artificial Sequence
  Synthetic
uugacauuuauucagga

SEQ ID NO: 737977 - RNA, 17 nt, Artificial Sequence
  Synthetic
ugugaagaucuucagga

SEQ ID NO: 737978 - RNA, 17 nt, Artificial Sequence
  Synthetic
auaugaaguguucagga

SEQ ID NO: 737979 - RNA, 17 nt, Artificial Sequence
  Synthetic
uauaaaucauuucagga

SEQ ID NO: 737980 - RNA, 17 nt, Artificial Sequence
  Synthetic
uucucuauauuucagga

SEQ ID NO: 737981 - RNA, 17 nt, Artificial Sequence
  Synthetic
acuucucccuuucagga

SEQ ID NO: 737982 - RNA, 17 nt, Artificial Sequence
  Synthetic
cacuugguuuuucagga

SEQ ID NO: 737983 - RNA, 17 nt, Artificial Sequence
  Synthetic
agaagaaagaaagagga

SEQ ID NO: 737984 - RNA, 17 nt, Artificial Sequence
  Synthetic
auugcacagaaagagga

SEQ ID NO: 737985 - RNA, 17 nt, Artificial Sequence
  Synthetic
uggaaaacuaaagagga

SEQ ID NO: 737986 - RNA, 17 nt, Artificial Sequence
  Synthetic
agaaaauaacaagagga

SEQ ID NO: 737987 - RNA, 17 nt, Artificial Sequence
  Synthetic
aaguuuaaagaagagga

SEQ ID NO: 737988 - RNA, 17 nt, Artificial Sequence
  Synthetic
ccucaauuagaagagga

SEQ ID NO: 737989 - RNA, 17 nt, Artificial Sequence
  Synthetic
uaugaauuuuaagagga

SEQ ID NO: 737990 - RNA, 17 nt, Artificial Sequence
  Synthetic
cuggggacuacagagga

SEQ ID NO: 737991 - RNA, 17 nt, Artificial Sequence
  Synthetic
augaagcuuccagagga

SEQ ID NO: 737992 - RNA, 17 nt, Artificial Sequence
  Synthetic
caaguguuuccagagga

SEQ ID NO: 737993 - RNA, 17 nt, Artificial Sequence
  Synthetic
ugugacucagcagagga

SEQ ID NO: 737994 - RNA, 17 nt, Artificial Sequence
  Synthetic
aaagcaugggcagagga

SEQ ID NO: 737995 - RNA, 17 nt, Artificial Sequence
  Synthetic
cucuuuuucucagagga

SEQ ID NO: 737996 - RNA, 17 nt, Artificial Sequence
  Synthetic
aucugauagucagagga

SEQ ID NO: 737997 - RNA, 17 nt, Artificial Sequence
  Synthetic
aaagaaggaagagagga

SEQ ID NO: 737998 - RNA, 17 nt, Artificial Sequence
  Synthetic
uuuuucaagagagagga

SEQ ID NO: 737999 - RNA, 17 nt, Artificial Sequence
  Synthetic
cggcccuagggagagga

SEQ ID NO: 738000 - RNA, 17 nt, Artificial Sequence
  Synthetic
acaggugcuggagagga

SEQ ID NO: 738001 - RNA, 17 nt, Artificial Sequence
  Synthetic
aaaucaaguggagagga

SEQ ID NO: 738002 - RNA, 17 nt, Artificial Sequence
  Synthetic
cagauccccugagagga

SEQ ID NO: 738003 - RNA, 17 nt, Artificial Sequence
  Synthetic
uugaauuugauagagga

SEQ ID NO: 738004 - RNA, 17 nt, Artificial Sequence
  Synthetic
uauucaagguuagagga

SEQ ID NO: 738005 - RNA, 17 nt, Artificial Sequence
  Synthetic
agaauaauguuagagga

SEQ ID NO: 738006 - RNA, 17 nt, Artificial Sequence
  Synthetic
cuuugggaggccgagga

SEQ ID NO: 738007 - RNA, 17 nt, Artificial Sequence
  Synthetic
aaagagaacaaggagga

SEQ ID NO: 738008 - RNA, 17 nt, Artificial Sequence
  Synthetic
acuucccacaaggagga

SEQ ID NO: 738009 - RNA, 17 nt, Artificial Sequence
  Synthetic
aagggaaggaaggagga

SEQ ID NO: 738010 - RNA, 17 nt, Artificial Sequence
  Synthetic
uagugagggaaggagga

SEQ ID NO: 738011 - RNA, 17 nt, Artificial Sequence
  Synthetic
aggggugugaaggagga

SEQ ID NO: 738012 - RNA, 17 nt, Artificial Sequence
  Synthetic
uggaaugauaaggagga

SEQ ID NO: 738013 - RNA, 17 nt, Artificial Sequence
  Synthetic
agacagcgacaggagga

SEQ ID NO: 738014 - RNA, 17 nt, Artificial Sequence
  Synthetic
cugugguagcaggagga

SEQ ID NO: 738015 - RNA, 17 nt, Artificial Sequence
  Synthetic
aggcugaggcaggagga

SEQ ID NO: 738016 - RNA, 17 nt, Artificial Sequence
  Synthetic
uggggagaagaggagga

SEQ ID NO: 738017 - RNA, 17 nt, Artificial Sequence
  Synthetic
uuccauuaagaggagga

SEQ ID NO: 738018 - RNA, 17 nt, Artificial Sequence
  Synthetic
cacugaaaggaggagga

SEQ ID NO: 738019 - RNA, 17 nt, Artificial Sequence
  Synthetic
ugauuaggugaggagga

SEQ ID NO: 738020 - RNA, 17 nt, Artificial Sequence
  Synthetic
uuggaaggguaggagga

SEQ ID NO: 738021 - RNA, 17 nt, Artificial Sequence
  Synthetic
auggauggaucggagga

SEQ ID NO: 738022 - RNA, 17 nt, Artificial Sequence
  Synthetic
ugaauggaaagggagga

SEQ ID NO: 738023 - RNA, 17 nt, Artificial Sequence
  Synthetic
agaggaaggagggagga

SEQ ID NO: 738024 - RNA, 17 nt, Artificial Sequence
  Synthetic
uacuagaagggggagga

SEQ ID NO: 738025 - RNA, 17 nt, Artificial Sequence
  Synthetic
aguuuagugggggagga

SEQ ID NO: 738026 - RNA, 17 nt, Artificial Sequence
  Synthetic
agaagguaaugggagga

SEQ ID NO: 738027 - RNA, 17 nt, Artificial Sequence
  Synthetic
uggggagggugggagga

SEQ ID NO: 738028 - RNA, 17 nt, Artificial Sequence
  Synthetic
cauaaaaugugggagga

SEQ ID NO: 738029 - RNA, 17 nt, Artificial Sequence
  Synthetic
acauccgauugggagga

SEQ ID NO: 738030 - RNA, 17 nt, Artificial Sequence
  Synthetic
aaugauuauugggagga

SEQ ID NO: 738031 - RNA, 17 nt, Artificial Sequence
  Synthetic
cuuacaaucauggagga

SEQ ID NO: 738032 - RNA, 17 nt, Artificial Sequence
  Synthetic
aagguucucauggagga

SEQ ID NO: 738033 - RNA, 17 nt, Artificial Sequence
  Synthetic
acacacaugauggagga

SEQ ID NO: 738034 - RNA, 17 nt, Artificial Sequence
  Synthetic
acauccauuauggagga

SEQ ID NO: 738035 - RNA, 17 nt, Artificial Sequence
  Synthetic
ugcuaagggcuggagga

SEQ ID NO: 738036 - RNA, 17 nt, Artificial Sequence
  Synthetic
caggaaugaguggagga

SEQ ID NO: 738037 - RNA, 17 nt, Artificial Sequence
  Synthetic
ugucauuuaguggagga

SEQ ID NO: 738038 - RNA, 17 nt, Artificial Sequence
  Synthetic
ugcacaaccuuggagga

SEQ ID NO: 738039 - RNA, 17 nt, Artificial Sequence
  Synthetic
uggaccggguuggagga

SEQ ID NO: 738040 - RNA, 17 nt, Artificial Sequence
  Synthetic
ugaagagaaaaugagga

SEQ ID NO: 738041 - RNA, 17 nt, Artificial Sequence
  Synthetic
cuaaaugaaaaugagga

SEQ ID NO: 738042 - RNA, 17 nt, Artificial Sequence
  Synthetic
uggaaguuaaaugagga

SEQ ID NO: 738043 - RNA, 17 nt, Artificial Sequence
  Synthetic
cugggaaugaaugagga

SEQ ID NO: 738044 - RNA, 17 nt, Artificial Sequence
  Synthetic
aguauugugaaugagga

SEQ ID NO: 738045 - RNA, 17 nt, Artificial Sequence
  Synthetic
aacgggguacaugagga

SEQ ID NO: 738046 - RNA, 17 nt, Artificial Sequence
  Synthetic
acucaucaucaugagga

SEQ ID NO: 738047 - RNA, 17 nt, Artificial Sequence
  Synthetic
augcccagugaugagga

SEQ ID NO: 738048 - RNA, 17 nt, Artificial Sequence
  Synthetic
ucuaguuaaacugagga

SEQ ID NO: 738049 - RNA, 17 nt, Artificial Sequence
  Synthetic
aucuccagaacugagga

SEQ ID NO: 738050 - RNA, 17 nt, Artificial Sequence
  Synthetic
uaauccuggacugagga

SEQ ID NO: 738051 - RNA, 17 nt, Artificial Sequence
  Synthetic
cuuugggaagcugagga

SEQ ID NO: 738052 - RNA, 17 nt, Artificial Sequence
  Synthetic
cuuugggaggcugagga

SEQ ID NO: 738053 - RNA, 17 nt, Artificial Sequence
  Synthetic
ucuugccucagugagga

SEQ ID NO: 738054 - RNA, 17 nt, Artificial Sequence
  Synthetic
agaugguagagugagga

SEQ ID NO: 738055 - RNA, 17 nt, Artificial Sequence
  Synthetic
aggagaaugagugagga

SEQ ID NO: 738056 - RNA, 17 nt, Artificial Sequence
  Synthetic
uuggaguguagugagga

SEQ ID NO: 738057 - RNA, 17 nt, Artificial Sequence
  Synthetic
uuuaucccuggugagga

SEQ ID NO: 738058 - RNA, 17 nt, Artificial Sequence
  Synthetic
auuaagauuggugagga

SEQ ID NO: 738059 - RNA, 17 nt, Artificial Sequence
  Synthetic
cuuuggucuugugagga

SEQ ID NO: 738060 - RNA, 17 nt, Artificial Sequence
  Synthetic
cucucuuguugugagga

SEQ ID NO: 738061 - RNA, 17 nt, Artificial Sequence
  Synthetic
aggauaggaauugagga

SEQ ID NO: 738062 - RNA, 17 nt, Artificial Sequence
  Synthetic
caaaagucccuugagga

SEQ ID NO: 738063 - RNA, 17 nt, Artificial Sequence
  Synthetic
augauguuguuugagga

SEQ ID NO: 738064 - RNA, 17 nt, Artificial Sequence
  Synthetic
uagucagaaaaauagga

SEQ ID NO: 738065 - RNA, 17 nt, Artificial Sequence
  Synthetic
aaguaugaaaaauagga

SEQ ID NO: 738066 - RNA, 17 nt, Artificial Sequence
  Synthetic
uagaugaugcaauagga

SEQ ID NO: 738067 - RNA, 17 nt, Artificial Sequence
  Synthetic
uaucaaauucaauagga

SEQ ID NO: 738068 - RNA, 17 nt, Artificial Sequence
  Synthetic
uccccuauugaauagga

SEQ ID NO: 738069 - RNA, 17 nt, Artificial Sequence
  Synthetic
agauugaagacauagga

SEQ ID NO: 738070 - RNA, 17 nt, Artificial Sequence
  Synthetic
auuagcuucagauagga

SEQ ID NO: 738071 - RNA, 17 nt, Artificial Sequence
  Synthetic
caaauccagagauagga

SEQ ID NO: 738072 - RNA, 17 nt, Artificial Sequence
  Synthetic
uaacagaagugauagga

SEQ ID NO: 738073 - RNA, 17 nt, Artificial Sequence
  Synthetic
acagugcccauauagga

SEQ ID NO: 738074 - RNA, 17 nt, Artificial Sequence
  Synthetic
uuaaaagcgauauagga

SEQ ID NO: 738075 - RNA, 17 nt, Artificial Sequence
  Synthetic
aaauguccucuauagga

SEQ ID NO: 738076 - RNA, 17 nt, Artificial Sequence
  Synthetic
uagguaugauuauagga

SEQ ID NO: 738077 - RNA, 17 nt, Artificial Sequence
  Synthetic
cuucaugguuuauagga

SEQ ID NO: 738078 - RNA, 17 nt, Artificial Sequence
  Synthetic
uugcaaauaaacuagga

SEQ ID NO: 738079 - RNA, 17 nt, Artificial Sequence
  Synthetic
ucaucuguaaacuagga

SEQ ID NO: 738080 - RNA, 17 nt, Artificial Sequence
  Synthetic
cuugauuuaaacuagga

SEQ ID NO: 738081 - RNA, 17 nt, Artificial Sequence
  Synthetic
uagaaaagcaacuagga

SEQ ID NO: 738082 - RNA, 17 nt, Artificial Sequence
  Synthetic
cuuuuuacccacuagga

SEQ ID NO: 738083 - RNA, 17 nt, Artificial Sequence
  Synthetic
ucuaguuaucacuagga

SEQ ID NO: 738084 - RNA, 17 nt, Artificial Sequence
  Synthetic
ccuggggaaggcuagga

SEQ ID NO: 738085 - RNA, 17 nt, Artificial Sequence
  Synthetic
ugguuguacaucuagga

SEQ ID NO: 738086 - RNA, 17 nt, Artificial Sequence
  Synthetic
cuugcuuuugucuagga

SEQ ID NO: 738087 - RNA, 17 nt, Artificial Sequence
  Synthetic
uguuacuuuuucuagga

SEQ ID NO: 738088 - RNA, 17 nt, Artificial Sequence
  Synthetic
uuauaaaguaaguagga

SEQ ID NO: 738089 - RNA, 17 nt, Artificial Sequence
  Synthetic
cagacaucacaguagga

SEQ ID NO: 738090 - RNA, 17 nt, Artificial Sequence
  Synthetic
agaauuuuccaguagga

SEQ ID NO: 738091 - RNA, 17 nt, Artificial Sequence
  Synthetic
aagggacaagaguagga

SEQ ID NO: 738092 - RNA, 17 nt, Artificial Sequence
  Synthetic
uuucuggacacguagga

SEQ ID NO: 738093 - RNA, 17 nt, Artificial Sequence
  Synthetic
agaaugaugacguagga

SEQ ID NO: 738094 - RNA, 17 nt, Artificial Sequence
  Synthetic
aaaagacucagguagga

SEQ ID NO: 738095 - RNA, 17 nt, Artificial Sequence
  Synthetic
aggaagcugagguagga

SEQ ID NO: 738096 - RNA, 17 nt, Artificial Sequence
  Synthetic
uagcuuuuuagguagga

SEQ ID NO: 738097 - RNA, 17 nt, Artificial Sequence
  Synthetic
auuaggcauggguagga

SEQ ID NO: 738098 - RNA, 17 nt, Artificial Sequence
  Synthetic
uuuaggcauggguagga

SEQ ID NO: 738099 - RNA, 17 nt, Artificial Sequence
  Synthetic
cguuacacaugguagga

SEQ ID NO: 738100 - RNA, 17 nt, Artificial Sequence
  Synthetic
uccuuuuauauguagga

SEQ ID NO: 738101 - RNA, 17 nt, Artificial Sequence
  Synthetic
uaguuucccuuguagga

SEQ ID NO: 738102 - RNA, 17 nt, Artificial Sequence
  Synthetic
uuaccaugaaauuagga

SEQ ID NO: 738103 - RNA, 17 nt, Artificial Sequence
  Synthetic
aauaccaagaauuagga

SEQ ID NO: 738104 - RNA, 17 nt, Artificial Sequence
  Synthetic
cuagaaguccauuagga

SEQ ID NO: 738105 - RNA, 17 nt, Artificial Sequence
  Synthetic
ccacauuuuuauuagga

SEQ ID NO: 738106 - RNA, 17 nt, Artificial Sequence
  Synthetic
ccacucacaacuuagga

SEQ ID NO: 738107 - RNA, 17 nt, Artificial Sequence
  Synthetic
ucggcuggcacuuagga

SEQ ID NO: 738108 - RNA, 17 nt, Artificial Sequence
  Synthetic
ccaguaaggacuuagga

SEQ ID NO: 738109 - RNA, 17 nt, Artificial Sequence
  Synthetic
ugcuccucaccuuagga

SEQ ID NO: 738110 - RNA, 17 nt, Artificial Sequence
  Synthetic
aaggaucauccuuagga

SEQ ID NO: 738111 - RNA, 17 nt, Artificial Sequence
  Synthetic
agaugaaacaguuagga

SEQ ID NO: 738112 - RNA, 17 nt, Artificial Sequence
  Synthetic
auuaagcuugguuagga

SEQ ID NO: 738113 - RNA, 17 nt, Artificial Sequence
  Synthetic
ucucaccccuguuagga

SEQ ID NO: 738114 - RNA, 17 nt, Artificial Sequence
  Synthetic
agguguuggcuuuagga

SEQ ID NO: 738115 - RNA, 17 nt, Artificial Sequence
  Synthetic
uccuucuguuuuuagga

SEQ ID NO: 738116 - RNA, 17 nt, Artificial Sequence
  Synthetic
aacaaugaauaaacgga

SEQ ID NO: 738117 - RNA, 17 nt, Artificial Sequence
  Synthetic
ccugaaaacugaacgga

SEQ ID NO: 738118 - RNA, 17 nt, Artificial Sequence
  Synthetic
aauuuguaaauaacgga

SEQ ID NO: 738119 - RNA, 17 nt, Artificial Sequence
  Synthetic
cagugccugugcacgga

SEQ ID NO: 738120 - RNA, 17 nt, Artificial Sequence
  Synthetic
uucuuucccacaccgga

SEQ ID NO: 738121 - RNA, 17 nt, Artificial Sequence
  Synthetic
aaaauugaaugaccgga

SEQ ID NO: 738122 - RNA, 17 nt, Artificial Sequence
  Synthetic
uuccccuugcccccgga

SEQ ID NO: 738123 - RNA, 17 nt, Artificial Sequence
  Synthetic
aguggggaagaagcgga

SEQ ID NO: 738124 - RNA, 17 nt, Artificial Sequence
  Synthetic
cagaggcuacuagcgga

SEQ ID NO: 738125 - RNA, 17 nt, Artificial Sequence
  Synthetic
uaggaaggagaggcgga

SEQ ID NO: 738126 - RNA, 17 nt, Artificial Sequence
  Synthetic
ucaggcucauaggcgga

SEQ ID NO: 738127 - RNA, 17 nt, Artificial Sequence
  Synthetic
uugcauuuucuaucgga

SEQ ID NO: 738128 - RNA, 17 nt, Artificial Sequence
  Synthetic
ccuucugagggcucgga

SEQ ID NO: 738129 - RNA, 17 nt, Artificial Sequence
  Synthetic
ugaaauggggucucgga

SEQ ID NO: 738130 - RNA, 17 nt, Artificial Sequence
  Synthetic
aaagaaaaaaaaaggga

SEQ ID NO: 738131 - RNA, 17 nt, Artificial Sequence
  Synthetic
ucacugauaaaaaggga

SEQ ID NO: 738132 - RNA, 17 nt, Artificial Sequence
  Synthetic
acaaaagccaaaaggga

SEQ ID NO: 738133 - RNA, 17 nt, Artificial Sequence
  Synthetic
ucuaggcagaaaaggga

SEQ ID NO: 738134 - RNA, 17 nt, Artificial Sequence
  Synthetic
aggagaaugaaaaggga

SEQ ID NO: 738135 - RNA, 17 nt, Artificial Sequence
  Synthetic
uuuggccuuaaaaggga

SEQ ID NO: 738136 - RNA, 17 nt, Artificial Sequence
  Synthetic
aauccuccccaaaggga

SEQ ID NO: 738137 - RNA, 17 nt, Artificial Sequence
  Synthetic
uggcaaccucaaaggga

SEQ ID NO: 738138 - RNA, 17 nt, Artificial Sequence
  Synthetic
uucaauagagaaaggga

SEQ ID NO: 738139 - RNA, 17 nt, Artificial Sequence
  Synthetic
agggaaagggaaaggga

SEQ ID NO: 738140 - RNA, 17 nt, Artificial Sequence
  Synthetic
agcaggagggaaaggga

SEQ ID NO: 738141 - RNA, 17 nt, Artificial Sequence
  Synthetic
aaaaaaggggaaaggga

SEQ ID NO: 738142 - RNA, 17 nt, Artificial Sequence
  Synthetic
cacugcugggaaaggga

SEQ ID NO: 738143 - RNA, 17 nt, Artificial Sequence
  Synthetic
acaaguggugaaaggga

SEQ ID NO: 738144 - RNA, 17 nt, Artificial Sequence
  Synthetic
aaggaguuugaaaggga

SEQ ID NO: 738145 - RNA, 17 nt, Artificial Sequence
  Synthetic
cugcuaccuuaaaggga

SEQ ID NO: 738146 - RNA, 17 nt, Artificial Sequence
  Synthetic
agagucucuuaaaggga

SEQ ID NO: 738147 - RNA, 17 nt, Artificial Sequence
  Synthetic
uuagcuaaaccaaggga

SEQ ID NO: 738148 - RNA, 17 nt, Artificial Sequence
  Synthetic
caaauaguaccaaggga

SEQ ID NO: 738149 - RNA, 17 nt, Artificial Sequence
  Synthetic
auuauauugccaaggga

SEQ ID NO: 738150 - RNA, 17 nt, Artificial Sequence
  Synthetic
uguugccuuccaaggga

SEQ ID NO: 738151 - RNA, 17 nt, Artificial Sequence
  Synthetic
agcaacccagcaaggga

SEQ ID NO: 738152 - RNA, 17 nt, Artificial Sequence
  Synthetic
accugggaaucaaggga

SEQ ID NO: 738153 - RNA, 17 nt, Artificial Sequence
  Synthetic
cuuccuggcucaaggga

SEQ ID NO: 738154 - RNA, 17 nt, Artificial Sequence
  Synthetic
agaaugagaagaaggga

SEQ ID NO: 738155 - RNA, 17 nt, Artificial Sequence
  Synthetic
aaagaaaagagaaggga

SEQ ID NO: 738156 - RNA, 17 nt, Artificial Sequence
  Synthetic
caucaggggagaaggga

SEQ ID NO: 738157 - RNA, 17 nt, Artificial Sequence
  Synthetic
aguguucauagaaggga

SEQ ID NO: 738158 - RNA, 17 nt, Artificial Sequence
  Synthetic
agaaaggaaggaaggga

SEQ ID NO: 738159 - RNA, 17 nt, Artificial Sequence
  Synthetic
agaggggagggaaggga

SEQ ID NO: 738160 - RNA, 17 nt, Artificial Sequence
  Synthetic
aagguagggggaaggga

SEQ ID NO: 738161 - RNA, 17 nt, Artificial Sequence
  Synthetic
uuguuucauugaaggga

SEQ ID NO: 738162 - RNA, 17 nt, Artificial Sequence
  Synthetic
agaaaugcuugaaggga

SEQ ID NO: 738163 - RNA, 17 nt, Artificial Sequence
  Synthetic
aaagaguguugaaggga

SEQ ID NO: 738164 - RNA, 17 nt, Artificial Sequence
  Synthetic
uauuuuuaaauaaggga

SEQ ID NO: 738165 - RNA, 17 nt, Artificial Sequence
  Synthetic
cccuuucuuauaaggga

SEQ ID NO: 738166 - RNA, 17 nt, Artificial Sequence
  Synthetic
agccaggcaguaaggga

SEQ ID NO: 738167 - RNA, 17 nt, Artificial Sequence
  Synthetic
uucuucucaguaaggga

SEQ ID NO: 738168 - RNA, 17 nt, Artificial Sequence
  Synthetic
auguuaauauuaaggga

SEQ ID NO: 738169 - RNA, 17 nt, Artificial Sequence
  Synthetic
agcaggcacuuaaggga

SEQ ID NO: 738170 - RNA, 17 nt, Artificial Sequence
  Synthetic
cuagguauguuaaggga

SEQ ID NO: 738171 - RNA, 17 nt, Artificial Sequence
  Synthetic
aaauagggaaacaggga

SEQ ID NO: 738172 - RNA, 17 nt, Artificial Sequence
  Synthetic
cauuguuugaacaggga

SEQ ID NO: 738173 - RNA, 17 nt, Artificial Sequence
  Synthetic
acacauggacacaggga

SEQ ID NO: 738174 - RNA, 17 nt, Artificial Sequence
  Synthetic
acauauggacacaggga

SEQ ID NO: 738175 - RNA, 17 nt, Artificial Sequence
  Synthetic
caucuuaaucacaggga

SEQ ID NO: 738176 - RNA, 17 nt, Artificial Sequence
  Synthetic
uuauuuuuauacaggga

SEQ ID NO: 738177 - RNA, 17 nt, Artificial Sequence
  Synthetic
auggcugcaaccaggga

SEQ ID NO: 738178 - RNA, 17 nt, Artificial Sequence
  Synthetic
uugccagggaccaggga

SEQ ID NO: 738179 - RNA, 17 nt, Artificial Sequence
  Synthetic
aaggcaauuuccaggga

SEQ ID NO: 738180 - RNA, 17 nt, Artificial Sequence
  Synthetic
aagaaugaaagcaggga

SEQ ID NO: 738181 - RNA, 17 nt, Artificial Sequence
  Synthetic
caaaacuaaagcaggga

SEQ ID NO: 738182 - RNA, 17 nt, Artificial Sequence
  Synthetic
caaauagacagcaggga

SEQ ID NO: 738183 - RNA, 17 nt, Artificial Sequence
  Synthetic
cauguuucuagcaggga

SEQ ID NO: 738184 - RNA, 17 nt, Artificial Sequence
  Synthetic
caugacuggcgcaggga

SEQ ID NO: 738185 - RNA, 17 nt, Artificial Sequence
  Synthetic
ccaaggauacucaggga

SEQ ID NO: 738186 - RNA, 17 nt, Artificial Sequence
  Synthetic
aagaagaaagucaggga

SEQ ID NO: 738187 - RNA, 17 nt, Artificial Sequence
  Synthetic
aauuucuuagucaggga

SEQ ID NO: 738188 - RNA, 17 nt, Artificial Sequence
  Synthetic
auuaacggggucaggga

SEQ ID NO: 738189 - RNA, 17 nt, Artificial Sequence
  Synthetic
aaaaaaagaaagaggga

SEQ ID NO: 738190 - RNA, 17 nt, Artificial Sequence
  Synthetic
uugggagggaagaggga

SEQ ID NO: 738191 - RNA, 17 nt, Artificial Sequence
  Synthetic
aggaaauggaagaggga

SEQ ID NO: 738192 - RNA, 17 nt, Artificial Sequence
  Synthetic
caaaguuagcagaggga

SEQ ID NO: 738193 - RNA, 17 nt, Artificial Sequence
  Synthetic
auuggggggcagaggga

SEQ ID NO: 738194 - RNA, 17 nt, Artificial Sequence
  Synthetic
caacuguggcagaggga

SEQ ID NO: 738195 - RNA, 17 nt, Artificial Sequence
  Synthetic
ugagagaaagagaggga

SEQ ID NO: 738196 - RNA, 17 nt, Artificial Sequence
  Synthetic
agagagagagagaggga

SEQ ID NO: 738197 - RNA, 17 nt, Artificial Sequence
  Synthetic
aggaagggagagaggga

SEQ ID NO: 738198 - RNA, 17 nt, Artificial Sequence
  Synthetic
cacagaugagagaggga

SEQ ID NO: 738199 - RNA, 17 nt, Artificial Sequence
  Synthetic
aggaagcuggagaggga

SEQ ID NO: 738200 - RNA, 17 nt, Artificial Sequence
  Synthetic
aaaucaguugagaggga

SEQ ID NO: 738201 - RNA, 17 nt, Artificial Sequence
  Synthetic
agaaugaauucgaggga

SEQ ID NO: 738202 - RNA, 17 nt, Artificial Sequence
  Synthetic
agaaccagaaggaggga

SEQ ID NO: 738203 - RNA, 17 nt, Artificial Sequence
  Synthetic
agugagggaaggaggga

SEQ ID NO: 738204 - RNA, 17 nt, Artificial Sequence
  Synthetic
uggaaagggaggaggga

SEQ ID NO: 738205 - RNA, 17 nt, Artificial Sequence
  Synthetic
acuagagggaggaggga

SEQ ID NO: 738206 - RNA, 17 nt, Artificial Sequence
  Synthetic
aaggggaaagggaggga

SEQ ID NO: 738207 - RNA, 17 nt, Artificial Sequence
  Synthetic
aggaaggaagggaggga

SEQ ID NO: 738208 - RNA, 17 nt, Artificial Sequence
  Synthetic
agaaagucagggaggga

SEQ ID NO: 738209 - RNA, 17 nt, Artificial Sequence
  Synthetic
aaagaaagagggaggga

SEQ ID NO: 738210 - RNA, 17 nt, Artificial Sequence
  Synthetic
aggaagggagggaggga

SEQ ID NO: 738211 - RNA, 17 nt, Artificial Sequence
  Synthetic
agucagggagggaggga

SEQ ID NO: 738212 - RNA, 17 nt, Artificial Sequence
  Synthetic
aaggagggagggaggga

SEQ ID NO: 738213 - RNA, 17 nt, Artificial Sequence
  Synthetic
agggagggagggaggga

SEQ ID NO: 738214 - RNA, 17 nt, Artificial Sequence
  Synthetic
aaggaggaggggaggga

SEQ ID NO: 738215 - RNA, 17 nt, Artificial Sequence
  Synthetic
acuagaguggggaggga

SEQ ID NO: 738216 - RNA, 17 nt, Artificial Sequence
  Synthetic
aguacggcugggaggga

SEQ ID NO: 738217 - RNA, 17 nt, Artificial Sequence
  Synthetic
uuuuauguauggaggga

SEQ ID NO: 738218 - RNA, 17 nt, Artificial Sequence
  Synthetic
ugugugagguggaggga

SEQ ID NO: 738219 - RNA, 17 nt, Artificial Sequence
  Synthetic
ugguugggguggaggga

SEQ ID NO: 738220 - RNA, 17 nt, Artificial Sequence
  Synthetic
aauucagugaugaggga

SEQ ID NO: 738221 - RNA, 17 nt, Artificial Sequence
  Synthetic
cccuuucuuaugaggga

SEQ ID NO: 738222 - RNA, 17 nt, Artificial Sequence
  Synthetic
agaaagagagugaggga

SEQ ID NO: 738223 - RNA, 17 nt, Artificial Sequence
  Synthetic
ugugagguagugaggga

SEQ ID NO: 738224 - RNA, 17 nt, Artificial Sequence
  Synthetic
uguggcaaugugaggga

SEQ ID NO: 738225 - RNA, 17 nt, Artificial Sequence
  Synthetic
uuauauacacauaggga

SEQ ID NO: 738226 - RNA, 17 nt, Artificial Sequence
  Synthetic
ugaaagcaggauaggga

SEQ ID NO: 738227 - RNA, 17 nt, Artificial Sequence
  Synthetic
uacugguaggauaggga

SEQ ID NO: 738228 - RNA, 17 nt, Artificial Sequence
  Synthetic
uugaauaagacuaggga

SEQ ID NO: 738229 - RNA, 17 nt, Artificial Sequence
  Synthetic
cagcagcgggcuaggga

SEQ ID NO: 738230 - RNA, 17 nt, Artificial Sequence
  Synthetic
uuaaugaucucuaggga

SEQ ID NO: 738231 - RNA, 17 nt, Artificial Sequence
  Synthetic
uguauuuuuaguaggga

SEQ ID NO: 738232 - RNA, 17 nt, Artificial Sequence
  Synthetic
uccuagugagguaggga

SEQ ID NO: 738233 - RNA, 17 nt, Artificial Sequence
  Synthetic
aucaaacaugguaggga

SEQ ID NO: 738234 - RNA, 17 nt, Artificial Sequence
  Synthetic
ugauugcuaauuaggga

SEQ ID NO: 738235 - RNA, 17 nt, Artificial Sequence
  Synthetic
aaacacgagauuaggga

SEQ ID NO: 738236 - RNA, 17 nt, Artificial Sequence
  Synthetic
agucauuuccuuaggga

SEQ ID NO: 738237 - RNA, 17 nt, Artificial Sequence
  Synthetic
uagcauuuucuuaggga

SEQ ID NO: 738238 - RNA, 17 nt, Artificial Sequence
  Synthetic
auuauuauaguuaggga

SEQ ID NO: 738239 - RNA, 17 nt, Artificial Sequence
  Synthetic
uuguauuuauuuaggga

SEQ ID NO: 738240 - RNA, 17 nt, Artificial Sequence
  Synthetic
ccucuuguaagacggga

SEQ ID NO: 738241 - RNA, 17 nt, Artificial Sequence
  Synthetic
acacauggacaccggga

SEQ ID NO: 738242 - RNA, 17 nt, Artificial Sequence
  Synthetic
ugcucaggccagcggga

SEQ ID NO: 738243 - RNA, 17 nt, Artificial Sequence
  Synthetic
uucaaguagcagcggga

SEQ ID NO: 738244 - RNA, 17 nt, Artificial Sequence
  Synthetic
aaguuucaaaggcggga

SEQ ID NO: 738245 - RNA, 17 nt, Artificial Sequence
  Synthetic
aagcaggaaaaagggga

SEQ ID NO: 738246 - RNA, 17 nt, Artificial Sequence
  Synthetic
uuucagcccaaagggga

SEQ ID NO: 738247 - RNA, 17 nt, Artificial Sequence
  Synthetic
aguggagaggaagggga

SEQ ID NO: 738248 - RNA, 17 nt, Artificial Sequence
  Synthetic
accucauuauaagggga

SEQ ID NO: 738249 - RNA, 17 nt, Artificial Sequence
  Synthetic
cugaaaggcuaagggga

SEQ ID NO: 738250 - RNA, 17 nt, Artificial Sequence
  Synthetic
caggcauuaacagggga

SEQ ID NO: 738251 - RNA, 17 nt, Artificial Sequence
  Synthetic
aauccacucacagggga

SEQ ID NO: 738252 - RNA, 17 nt, Artificial Sequence
  Synthetic
aagagcuagacagggga

SEQ ID NO: 738253 - RNA, 17 nt, Artificial Sequence
  Synthetic
cuauaaugcccagggga

SEQ ID NO: 738254 - RNA, 17 nt, Artificial Sequence
  Synthetic
agaaacauggcagggga

SEQ ID NO: 738255 - RNA, 17 nt, Artificial Sequence
  Synthetic
aggaauauaucagggga

SEQ ID NO: 738256 - RNA, 17 nt, Artificial Sequence
  Synthetic
aggauucacucagggga

SEQ ID NO: 738257 - RNA, 17 nt, Artificial Sequence
  Synthetic
cccuuuugcucagggga

SEQ ID NO: 738258 - RNA, 17 nt, Artificial Sequence
  Synthetic
cggggccucucagggga

SEQ ID NO: 738259 - RNA, 17 nt, Artificial Sequence
  Synthetic
auacucaagucagggga

SEQ ID NO: 738260 - RNA, 17 nt, Artificial Sequence
  Synthetic
uguuauuaaagagggga

SEQ ID NO: 738261 - RNA, 17 nt, Artificial Sequence
  Synthetic
augugugagagagggga

SEQ ID NO: 738262 - RNA, 17 nt, Artificial Sequence
  Synthetic
aagggaaggagagggga

SEQ ID NO: 738263 - RNA, 17 nt, Artificial Sequence
  Synthetic
ccgaaaggaggagggga

SEQ ID NO: 738264 - RNA, 17 nt, Artificial Sequence
  Synthetic
aagggaaggggagggga

SEQ ID NO: 738265 - RNA, 17 nt, Artificial Sequence
  Synthetic
aaggggaggggagggga

SEQ ID NO: 738266 - RNA, 17 nt, Artificial Sequence
  Synthetic
cccaagggaugagggga

SEQ ID NO: 738267 - RNA, 17 nt, Artificial Sequence
  Synthetic
uuaaggcccugagggga

SEQ ID NO: 738268 - RNA, 17 nt, Artificial Sequence
  Synthetic
auagcuaugugagggga

SEQ ID NO: 738269 - RNA, 17 nt, Artificial Sequence
  Synthetic
uucuguuggcuagggga

SEQ ID NO: 738270 - RNA, 17 nt, Artificial Sequence
  Synthetic
uaacuggcucuagggga

SEQ ID NO: 738271 - RNA, 17 nt, Artificial Sequence
  Synthetic
uugagcuauuuagggga

SEQ ID NO: 738272 - RNA, 17 nt, Artificial Sequence
  Synthetic
acagagcaccacgggga

SEQ ID NO: 738273 - RNA, 17 nt, Artificial Sequence
  Synthetic
uaauugaaucacgggga

SEQ ID NO: 738274 - RNA, 17 nt, Artificial Sequence
  Synthetic
ucaaggacagacgggga

SEQ ID NO: 738275 - RNA, 17 nt, Artificial Sequence
  Synthetic
aaaauauuuagcgggga

SEQ ID NO: 738276 - RNA, 17 nt, Artificial Sequence
  Synthetic
aguggaggagucgggga

SEQ ID NO: 738277 - RNA, 17 nt, Artificial Sequence
  Synthetic
ucaggggagaaggggga

SEQ ID NO: 738278 - RNA, 17 nt, Artificial Sequence
  Synthetic
auuuuggggaaggggga

SEQ ID NO: 738279 - RNA, 17 nt, Artificial Sequence
  Synthetic
aggggugugaaggggga

SEQ ID NO: 738280 - RNA, 17 nt, Artificial Sequence
  Synthetic
aguggaaauaaggggga

SEQ ID NO: 738281 - RNA, 17 nt, Artificial Sequence
  Synthetic
cucuguguucaggggga

SEQ ID NO: 738282 - RNA, 17 nt, Artificial Sequence
  Synthetic
uucuggucugaggggga

SEQ ID NO: 738283 - RNA, 17 nt, Artificial Sequence
  Synthetic
uuuugguucuaggggga

SEQ ID NO: 738284 - RNA, 17 nt, Artificial Sequence
  Synthetic
aaauaaagguaggggga

SEQ ID NO: 738285 - RNA, 17 nt, Artificial Sequence
  Synthetic
uuggucagguaggggga

SEQ ID NO: 738286 - RNA, 17 nt, Artificial Sequence
  Synthetic
agggggaaaggggggga

SEQ ID NO: 738287 - RNA, 17 nt, Artificial Sequence
  Synthetic
augaaaguaugggggga

SEQ ID NO: 738288 - RNA, 17 nt, Artificial Sequence
  Synthetic
ccacagaccugggggga

SEQ ID NO: 738289 - RNA, 17 nt, Artificial Sequence
  Synthetic
uuuuggcucugggggga

SEQ ID NO: 738290 - RNA, 17 nt, Artificial Sequence
  Synthetic
uguucaaggugggggga

SEQ ID NO: 738291 - RNA, 17 nt, Artificial Sequence
  Synthetic
ugauuggcuugggggga

SEQ ID NO: 738292 - RNA, 17 nt, Artificial Sequence
  Synthetic
cacauggagauggggga

SEQ ID NO: 738293 - RNA, 17 nt, Artificial Sequence
  Synthetic
uaacuugauauggggga

SEQ ID NO: 738294 - RNA, 17 nt, Artificial Sequence
  Synthetic
caucaaaaaguggggga

SEQ ID NO: 738295 - RNA, 17 nt, Artificial Sequence
  Synthetic
ugagagaaaguggggga

SEQ ID NO: 738296 - RNA, 17 nt, Artificial Sequence
  Synthetic
uguugugggguggggga

SEQ ID NO: 738297 - RNA, 17 nt, Artificial Sequence
  Synthetic
aaaaaaaauguggggga

SEQ ID NO: 738298 - RNA, 17 nt, Artificial Sequence
  Synthetic
cuggucaaauuggggga

SEQ ID NO: 738299 - RNA, 17 nt, Artificial Sequence
  Synthetic
agcugaggguuggggga

SEQ ID NO: 738300 - RNA, 17 nt, Artificial Sequence
  Synthetic
aaccagauguuggggga

SEQ ID NO: 738301 - RNA, 17 nt, Artificial Sequence
  Synthetic
uagguuuguuuggggga

SEQ ID NO: 738302 - RNA, 17 nt, Artificial Sequence
  Synthetic
auuuacugagaugggga

SEQ ID NO: 738303 - RNA, 17 nt, Artificial Sequence
  Synthetic
ugguagcuugaugggga

SEQ ID NO: 738304 - RNA, 17 nt, Artificial Sequence
  Synthetic
uaccuugauuaugggga

SEQ ID NO: 738305 - RNA, 17 nt, Artificial Sequence
  Synthetic
agagauccuccugggga

SEQ ID NO: 738306 - RNA, 17 nt, Artificial Sequence
  Synthetic
aacaauuuagcugggga

SEQ ID NO: 738307 - RNA, 17 nt, Artificial Sequence
  Synthetic
uagaugagggcugggga

SEQ ID NO: 738308 - RNA, 17 nt, Artificial Sequence
  Synthetic
cacagaaacucugggga

SEQ ID NO: 738309 - RNA, 17 nt, Artificial Sequence
  Synthetic
aucaggaacucugggga

SEQ ID NO: 738310 - RNA, 17 nt, Artificial Sequence
  Synthetic
aucagaaucucugggga

SEQ ID NO: 738311 - RNA, 17 nt, Artificial Sequence
  Synthetic
cagaagcucucugggga

SEQ ID NO: 738312 - RNA, 17 nt, Artificial Sequence
  Synthetic
uuggggaggucugggga

SEQ ID NO: 738313 - RNA, 17 nt, Artificial Sequence
  Synthetic
uaucaguaaagugggga

SEQ ID NO: 738314 - RNA, 17 nt, Artificial Sequence
  Synthetic
cacuaaccaagugggga

SEQ ID NO: 738315 - RNA, 17 nt, Artificial Sequence
  Synthetic
caagcuuagugugggga

SEQ ID NO: 738316 - RNA, 17 nt, Artificial Sequence
  Synthetic
ugcacacauugugggga

SEQ ID NO: 738317 - RNA, 17 nt, Artificial Sequence
  Synthetic
acaaaaagacuugggga

SEQ ID NO: 738318 - RNA, 17 nt, Artificial Sequence
  Synthetic
ccauauacccuugggga

SEQ ID NO: 738319 - RNA, 17 nt, Artificial Sequence
  Synthetic
agucauagaguugggga

SEQ ID NO: 738320 - RNA, 17 nt, Artificial Sequence
  Synthetic
aagauuuucuuugggga

SEQ ID NO: 738321 - RNA, 17 nt, Artificial Sequence
  Synthetic
cuugcaaauuuugggga

SEQ ID NO: 738322 - RNA, 17 nt, Artificial Sequence
  Synthetic
aaaucuauaaaauggga

SEQ ID NO: 738323 - RNA, 17 nt, Artificial Sequence
  Synthetic
uaugagaacaaauggga

SEQ ID NO: 738324 - RNA, 17 nt, Artificial Sequence
  Synthetic
acagagggagaauggga

SEQ ID NO: 738325 - RNA, 17 nt, Artificial Sequence
  Synthetic
uauacccaguaauggga

SEQ ID NO: 738326 - RNA, 17 nt, Artificial Sequence
  Synthetic
uuucugugguaauggga

SEQ ID NO: 738327 - RNA, 17 nt, Artificial Sequence
  Synthetic
agaaauggaacauggga

SEQ ID NO: 738328 - RNA, 17 nt, Artificial Sequence
  Synthetic
agauauugcacauggga

SEQ ID NO: 738329 - RNA, 17 nt, Artificial Sequence
  Synthetic
auuauuauuacauggga

SEQ ID NO: 738330 - RNA, 17 nt, Artificial Sequence
  Synthetic
auucauaaaccauggga

SEQ ID NO: 738331 - RNA, 17 nt, Artificial Sequence
  Synthetic
acgagaacagcauggga

SEQ ID NO: 738332 - RNA, 17 nt, Artificial Sequence
  Synthetic
ccccagaugucauggga

SEQ ID NO: 738333 - RNA, 17 nt, Artificial Sequence
  Synthetic
ccccaggugucauggga

SEQ ID NO: 738334 - RNA, 17 nt, Artificial Sequence
  Synthetic
auaacuuuuagauggga

SEQ ID NO: 738335 - RNA, 17 nt, Artificial Sequence
  Synthetic
cugguccuaugauggga

SEQ ID NO: 738336 - RNA, 17 nt, Artificial Sequence
  Synthetic
cugggcuugugauggga

SEQ ID NO: 738337 - RNA, 17 nt, Artificial Sequence
  Synthetic
ucaagagaaauauggga

SEQ ID NO: 738338 - RNA, 17 nt, Artificial Sequence
  Synthetic
aauuaaaagauauggga

SEQ ID NO: 738339 - RNA, 17 nt, Artificial Sequence
  Synthetic
cagagcagccuauggga

SEQ ID NO: 738340 - RNA, 17 nt, Artificial Sequence
  Synthetic
ugaugucaucuauggga

SEQ ID NO: 738341 - RNA, 17 nt, Artificial Sequence
  Synthetic
uacuugccauuauggga

SEQ ID NO: 738342 - RNA, 17 nt, Artificial Sequence
  Synthetic
ucccauguguuauggga

SEQ ID NO: 738343 - RNA, 17 nt, Artificial Sequence
  Synthetic
uauaagcuuuuauggga

SEQ ID NO: 738344 - RNA, 17 nt, Artificial Sequence
  Synthetic
acuuaaaaaaacuggga

SEQ ID NO: 738345 - RNA, 17 nt, Artificial Sequence
  Synthetic
caaaaaauuaacuggga

SEQ ID NO: 738346 - RNA, 17 nt, Artificial Sequence
  Synthetic
caagggaagcacuggga

SEQ ID NO: 738347 - RNA, 17 nt, Artificial Sequence
  Synthetic
agugucauucacuggga

SEQ ID NO: 738348 - RNA, 17 nt, Artificial Sequence
  Synthetic
uuuccaggagacuggga

SEQ ID NO: 738349 - RNA, 17 nt, Artificial Sequence
  Synthetic
aaaaauuaauacuggga

SEQ ID NO: 738350 - RNA, 17 nt, Artificial Sequence
  Synthetic
uguagagcauacuggga

SEQ ID NO: 738351 - RNA, 17 nt, Artificial Sequence
  Synthetic
cauuugagcuacuggga

SEQ ID NO: 738352 - RNA, 17 nt, Artificial Sequence
  Synthetic
uguccaugaaccuggga

SEQ ID NO: 738353 - RNA, 17 nt, Artificial Sequence
  Synthetic
cccucucagcccuggga

SEQ ID NO: 738354 - RNA, 17 nt, Artificial Sequence
  Synthetic
auuagcuagcccuggga

SEQ ID NO: 738355 - RNA, 17 nt, Artificial Sequence
  Synthetic
aagaaaaaugccuggga

SEQ ID NO: 738356 - RNA, 17 nt, Artificial Sequence
  Synthetic
ccccacacguccuggga

SEQ ID NO: 738357 - RNA, 17 nt, Artificial Sequence
  Synthetic
caugauagcagcuggga

SEQ ID NO: 738358 - RNA, 17 nt, Artificial Sequence
  Synthetic
ugccauguuggcuggga

SEQ ID NO: 738359 - RNA, 17 nt, Artificial Sequence
  Synthetic
aagacaugaugcuggga

SEQ ID NO: 738360 - RNA, 17 nt, Artificial Sequence
  Synthetic
aguucugacugcuggga

SEQ ID NO: 738361 - RNA, 17 nt, Artificial Sequence
  Synthetic
cuuaaguccaucuggga

SEQ ID NO: 738362 - RNA, 17 nt, Artificial Sequence
  Synthetic
auucaguagaucuggga

SEQ ID NO: 738363 - RNA, 17 nt, Artificial Sequence
  Synthetic
uguaaaauuaucuggga

SEQ ID NO: 738364 - RNA, 17 nt, Artificial Sequence
  Synthetic
cuggagaaagucuggga

SEQ ID NO: 738365 - RNA, 17 nt, Artificial Sequence
  Synthetic
ugucaguuggucuggga

SEQ ID NO: 738366 - RNA, 17 nt, Artificial Sequence
  Synthetic
agaaaagaaaaguggga

SEQ ID NO: 738367 - RNA, 17 nt, Artificial Sequence
  Synthetic
uuugagcugaaguggga

SEQ ID NO: 738368 - RNA, 17 nt, Artificial Sequence
  Synthetic
cuugaaauuaaguggga

SEQ ID NO: 738369 - RNA, 17 nt, Artificial Sequence
  Synthetic
aguggcucucaguggga

SEQ ID NO: 738370 - RNA, 17 nt, Artificial Sequence
  Synthetic
aauacaugaucguggga

SEQ ID NO: 738371 - RNA, 17 nt, Artificial Sequence
  Synthetic
uuuugaaaaagguggga

SEQ ID NO: 738372 - RNA, 17 nt, Artificial Sequence
  Synthetic
agggcgagaggguggga

SEQ ID NO: 738373 - RNA, 17 nt, Artificial Sequence
  Synthetic
acuucuuagggguggga

SEQ ID NO: 738374 - RNA, 17 nt, Artificial Sequence
  Synthetic
caaaaaacgggguggga

SEQ ID NO: 738375 - RNA, 17 nt, Artificial Sequence
  Synthetic
aaacacuccugguggga

SEQ ID NO: 738376 - RNA, 17 nt, Artificial Sequence
  Synthetic
agaugaaauauguggga

SEQ ID NO: 738377 - RNA, 17 nt, Artificial Sequence
  Synthetic
uggauguguguguggga

SEQ ID NO: 738378 - RNA, 17 nt, Artificial Sequence
  Synthetic
uccuacauguuguggga

SEQ ID NO: 738379 - RNA, 17 nt, Artificial Sequence
  Synthetic
ccccacguguuguggga

SEQ ID NO: 738380 - RNA, 17 nt, Artificial Sequence
  Synthetic
ucccauguguuguggga

SEQ ID NO: 738381 - RNA, 17 nt, Artificial Sequence
  Synthetic
uccuacuuguuguggga

SEQ ID NO: 738382 - RNA, 17 nt, Artificial Sequence
  Synthetic
cugagggaaaauuggga

SEQ ID NO: 738383 - RNA, 17 nt, Artificial Sequence
  Synthetic
augaagugagauuggga

SEQ ID NO: 738384 - RNA, 17 nt, Artificial Sequence
  Synthetic
ucugcugacacuuggga

SEQ ID NO: 738385 - RNA, 17 nt, Artificial Sequence
  Synthetic
uaaacuggagcuuggga

SEQ ID NO: 738386 - RNA, 17 nt, Artificial Sequence
  Synthetic
acuggucucucuuggga

SEQ ID NO: 738387 - RNA, 17 nt, Artificial Sequence
  Synthetic
cugguuuagucuuggga

SEQ ID NO: 738388 - RNA, 17 nt, Artificial Sequence
  Synthetic
auuuucuggucuuggga

SEQ ID NO: 738389 - RNA, 17 nt, Artificial Sequence
  Synthetic
ugaauucuuucuuggga

SEQ ID NO: 738390 - RNA, 17 nt, Artificial Sequence
  Synthetic
acagcugcugguuggga

SEQ ID NO: 738391 - RNA, 17 nt, Artificial Sequence
  Synthetic
cuuagauuauguuggga

SEQ ID NO: 738392 - RNA, 17 nt, Artificial Sequence
  Synthetic
uugagugacuguuggga

SEQ ID NO: 738393 - RNA, 17 nt, Artificial Sequence
  Synthetic
uugggugacuguuggga

SEQ ID NO: 738394 - RNA, 17 nt, Artificial Sequence
  Synthetic
agacgugccauuuggga

SEQ ID NO: 738395 - RNA, 17 nt, Artificial Sequence
  Synthetic
ugacaugagauuuggga

SEQ ID NO: 738396 - RNA, 17 nt, Artificial Sequence
  Synthetic
uccauguuccuuuggga

SEQ ID NO: 738397 - RNA, 17 nt, Artificial Sequence
  Synthetic
uuaccauaaguuuggga

SEQ ID NO: 738398 - RNA, 17 nt, Artificial Sequence
  Synthetic
agcaccuuaguuuggga

SEQ ID NO: 738399 - RNA, 17 nt, Artificial Sequence
  Synthetic
aagagcaagguuuggga

SEQ ID NO: 738400 - RNA, 17 nt, Artificial Sequence
  Synthetic
caagaagauuuuuggga

SEQ ID NO: 738401 - RNA, 17 nt, Artificial Sequence
  Synthetic
agucuuaaaaaaaugga

SEQ ID NO: 738402 - RNA, 17 nt, Artificial Sequence
  Synthetic
agggauauaaaaaugga

SEQ ID NO: 738403 - RNA, 17 nt, Artificial Sequence
  Synthetic
agcuaauuaaaaaugga

SEQ ID NO: 738404 - RNA, 17 nt, Artificial Sequence
  Synthetic
cccuugaacaaaaugga

SEQ ID NO: 738405 - RNA, 17 nt, Artificial Sequence
  Synthetic
cuaccgcucaaaaugga

SEQ ID NO: 738406 - RNA, 17 nt, Artificial Sequence
  Synthetic
cucuaaaagaaaaugga

SEQ ID NO: 738407 - RNA, 17 nt, Artificial Sequence
  Synthetic
aaaaagccuaaaaugga

SEQ ID NO: 738408 - RNA, 17 nt, Artificial Sequence
  Synthetic
aggaggaaauaaaugga

SEQ ID NO: 738409 - RNA, 17 nt, Artificial Sequence
  Synthetic
uauaauauauaaaugga

SEQ ID NO: 738410 - RNA, 17 nt, Artificial Sequence
  Synthetic
uagaagcaguaaaugga

SEQ ID NO: 738411 - RNA, 17 nt, Artificial Sequence
  Synthetic
agcugauuuuaaaugga

SEQ ID NO: 738412 - RNA, 17 nt, Artificial Sequence
  Synthetic
ucguuugaaucaaugga

SEQ ID NO: 738413 - RNA, 17 nt, Artificial Sequence
  Synthetic
aauuuauaaagaaugga

SEQ ID NO: 738414 - RNA, 17 nt, Artificial Sequence
  Synthetic
cuggcagcaagaaugga

SEQ ID NO: 738415 - RNA, 17 nt, Artificial Sequence
  Synthetic
cauaagaucagaaugga

SEQ ID NO: 738416 - RNA, 17 nt, Artificial Sequence
  Synthetic
aaggacaaacgaaugga

SEQ ID NO: 738417 - RNA, 17 nt, Artificial Sequence
  Synthetic
uaagaaaagggaaugga

SEQ ID NO: 738418 - RNA, 17 nt, Artificial Sequence
  Synthetic
ccauucuuuugaaugga

SEQ ID NO: 738419 - RNA, 17 nt, Artificial Sequence
  Synthetic
ugagagcaaauaaugga

SEQ ID NO: 738420 - RNA, 17 nt, Artificial Sequence
  Synthetic
auaauuuuaauaaugga

SEQ ID NO: 738421 - RNA, 17 nt, Artificial Sequence
  Synthetic
uuuggugaauuaaugga

SEQ ID NO: 738422 - RNA, 17 nt, Artificial Sequence
  Synthetic
cgucaauacuuaaugga

SEQ ID NO: 738423 - RNA, 17 nt, Artificial Sequence
  Synthetic
auuugcaacaacaugga

SEQ ID NO: 738424 - RNA, 17 nt, Artificial Sequence
  Synthetic
auuugucccaacaugga

SEQ ID NO: 738425 - RNA, 17 nt, Artificial Sequence
  Synthetic
cuuugcagcaacaugga

SEQ ID NO: 738426 - RNA, 17 nt, Artificial Sequence
  Synthetic
uuuugcagcaacaugga

SEQ ID NO: 738427 - RNA, 17 nt, Artificial Sequence
  Synthetic
aggaagaagaacaugga

SEQ ID NO: 738428 - RNA, 17 nt, Artificial Sequence
  Synthetic
acguauagucacaugga

SEQ ID NO: 738429 - RNA, 17 nt, Artificial Sequence
  Synthetic
cuagccugucacaugga

SEQ ID NO: 738430 - RNA, 17 nt, Artificial Sequence
  Synthetic
cuuugcagcgacaugga

SEQ ID NO: 738431 - RNA, 17 nt, Artificial Sequence
  Synthetic
ugccacacugacaugga

SEQ ID NO: 738432 - RNA, 17 nt, Artificial Sequence
  Synthetic
uugcaaaaauacaugga

SEQ ID NO: 738433 - RNA, 17 nt, Artificial Sequence
  Synthetic
cuagcuggcuacaugga

SEQ ID NO: 738434 - RNA, 17 nt, Artificial Sequence
  Synthetic
acaugaaauuacaugga

SEQ ID NO: 738435 - RNA, 17 nt, Artificial Sequence
  Synthetic
ugucuuuuuuccaugga

SEQ ID NO: 738436 - RNA, 17 nt, Artificial Sequence
  Synthetic
ucugagcagggcaugga

SEQ ID NO: 738437 - RNA, 17 nt, Artificial Sequence
  Synthetic
ucaaccaguggcaugga

SEQ ID NO: 738438 - RNA, 17 nt, Artificial Sequence
  Synthetic
aaugucugaugcaugga

SEQ ID NO: 738439 - RNA, 17 nt, Artificial Sequence
  Synthetic
auuugcaacaucaugga

SEQ ID NO: 738440 - RNA, 17 nt, Artificial Sequence
  Synthetic
cuauaugucaucaugga

SEQ ID NO: 738441 - RNA, 17 nt, Artificial Sequence
  Synthetic
ucuucagagaucaugga

SEQ ID NO: 738442 - RNA, 17 nt, Artificial Sequence
  Synthetic
acacauggacucaugga

SEQ ID NO: 738443 - RNA, 17 nt, Artificial Sequence
  Synthetic
cacauaaaguucaugga

SEQ ID NO: 738444 - RNA, 17 nt, Artificial Sequence
  Synthetic
uuuggucauuucaugga

SEQ ID NO: 738445 - RNA, 17 nt, Artificial Sequence
  Synthetic
uggucuucuuucaugga

SEQ ID NO: 738446 - RNA, 17 nt, Artificial Sequence
  Synthetic
uggacacaaaagaugga

SEQ ID NO: 738447 - RNA, 17 nt, Artificial Sequence
  Synthetic
ucucuuaauaagaugga

SEQ ID NO: 738448 - RNA, 17 nt, Artificial Sequence
  Synthetic
agcuggucccagaugga

SEQ ID NO: 738449 - RNA, 17 nt, Artificial Sequence
  Synthetic
ccaggccuccagaugga

SEQ ID NO: 738450 - RNA, 17 nt, Artificial Sequence
  Synthetic
uuuuuaguagagaugga

SEQ ID NO: 738451 - RNA, 17 nt, Artificial Sequence
  Synthetic
agaguucuggagaugga

SEQ ID NO: 738452 - RNA, 17 nt, Artificial Sequence
  Synthetic
aucuauuaugagaugga

SEQ ID NO: 738453 - RNA, 17 nt, Artificial Sequence
  Synthetic
uaguuaccaacgaugga

SEQ ID NO: 738454 - RNA, 17 nt, Artificial Sequence
  Synthetic
uggaaaagaucgaugga

SEQ ID NO: 738455 - RNA, 17 nt, Artificial Sequence
  Synthetic
uuuucucagaggaugga

SEQ ID NO: 738456 - RNA, 17 nt, Artificial Sequence
  Synthetic
uccagagauaggaugga

SEQ ID NO: 738457 - RNA, 17 nt, Artificial Sequence
  Synthetic
cauuauaaggggaugga

SEQ ID NO: 738458 - RNA, 17 nt, Artificial Sequence
  Synthetic
auuggccuggggaugga

SEQ ID NO: 738459 - RNA, 17 nt, Artificial Sequence
  Synthetic
auaaguggauggaugga

SEQ ID NO: 738460 - RNA, 17 nt, Artificial Sequence
  Synthetic
augaauaaguggaugga

SEQ ID NO: 738461 - RNA, 17 nt, Artificial Sequence
  Synthetic
ugcauuguuuggaugga

SEQ ID NO: 738462 - RNA, 17 nt, Artificial Sequence
  Synthetic
uucaaaauaaugaugga

SEQ ID NO: 738463 - RNA, 17 nt, Artificial Sequence
  Synthetic
caugauuccaugaugga

SEQ ID NO: 738464 - RNA, 17 nt, Artificial Sequence
  Synthetic
uuuugaacuaugaugga

SEQ ID NO: 738465 - RNA, 17 nt, Artificial Sequence
  Synthetic
aaaugaaggcugaugga

SEQ ID NO: 738466 - RNA, 17 nt, Artificial Sequence
  Synthetic
agaaagaugcugaugga

SEQ ID NO: 738467 - RNA, 17 nt, Artificial Sequence
  Synthetic
aucuuuuugcugaugga

SEQ ID NO: 738468 - RNA, 17 nt, Artificial Sequence
  Synthetic
uaggagauucugaugga

SEQ ID NO: 738469 - RNA, 17 nt, Artificial Sequence
  Synthetic
uaugauugauugaugga

SEQ ID NO: 738470 - RNA, 17 nt, Artificial Sequence
  Synthetic
aggcuacgcuugaugga

SEQ ID NO: 738471 - RNA, 17 nt, Artificial Sequence
  Synthetic
aaggagguaaauaugga

SEQ ID NO: 738472 - RNA, 17 nt, Artificial Sequence
  Synthetic
auaugaaacaauaugga

SEQ ID NO: 738473 - RNA, 17 nt, Artificial Sequence
  Synthetic
auacagaggcauaugga

SEQ ID NO: 738474 - RNA, 17 nt, Artificial Sequence
  Synthetic
aaaggagcagauaugga

SEQ ID NO: 738475 - RNA, 17 nt, Artificial Sequence
  Synthetic
ugacuauaggauaugga

SEQ ID NO: 738476 - RNA, 17 nt, Artificial Sequence
  Synthetic
agaaugauggauaugga

SEQ ID NO: 738477 - RNA, 17 nt, Artificial Sequence
  Synthetic
ucuucauuuuauaugga

SEQ ID NO: 738478 - RNA, 17 nt, Artificial Sequence
  Synthetic
ugacaauugacuaugga

SEQ ID NO: 738479 - RNA, 17 nt, Artificial Sequence
  Synthetic
uggcaucacccuaugga

SEQ ID NO: 738480 - RNA, 17 nt, Artificial Sequence
  Synthetic
ucugggguuucuaugga

SEQ ID NO: 738481 - RNA, 17 nt, Artificial Sequence
  Synthetic
aagauacugaguaugga

SEQ ID NO: 738482 - RNA, 17 nt, Artificial Sequence
  Synthetic
agaugaagauguaugga

SEQ ID NO: 738483 - RNA, 17 nt, Artificial Sequence
  Synthetic
agacuuuuauguaugga

SEQ ID NO: 738484 - RNA, 17 nt, Artificial Sequence
  Synthetic
ugucuccaguguaugga

SEQ ID NO: 738485 - RNA, 17 nt, Artificial Sequence
  Synthetic
ugcuacuauuuuaugga

SEQ ID NO: 738486 - RNA, 17 nt, Artificial Sequence
  Synthetic
aagggaacaaaacugga

SEQ ID NO: 738487 - RNA, 17 nt, Artificial Sequence
  Synthetic
aauuacuugaaacugga

SEQ ID NO: 738488 - RNA, 17 nt, Artificial Sequence
  Synthetic
caaccuguccaacugga

SEQ ID NO: 738489 - RNA, 17 nt, Artificial Sequence
  Synthetic
aagaaauuauaacugga

SEQ ID NO: 738490 - RNA, 17 nt, Artificial Sequence
  Synthetic
ugcucugauuaacugga

SEQ ID NO: 738491 - RNA, 17 nt, Artificial Sequence
  Synthetic
agagagaagacacugga

SEQ ID NO: 738492 - RNA, 17 nt, Artificial Sequence
  Synthetic
uaacuuagaccacugga

SEQ ID NO: 738493 - RNA, 17 nt, Artificial Sequence
  Synthetic
ugcugucccccacugga

SEQ ID NO: 738494 - RNA, 17 nt, Artificial Sequence
  Synthetic
cuccguuucccacugga

SEQ ID NO: 738495 - RNA, 17 nt, Artificial Sequence
  Synthetic
aaggaaacaucacugga

SEQ ID NO: 738496 - RNA, 17 nt, Artificial Sequence
  Synthetic
cucaacuccucacugga

SEQ ID NO: 738497 - RNA, 17 nt, Artificial Sequence
  Synthetic
ucucuuuuaugacugga

SEQ ID NO: 738498 - RNA, 17 nt, Artificial Sequence
  Synthetic
uuuaaaaugguacugga

SEQ ID NO: 738499 - RNA, 17 nt, Artificial Sequence
  Synthetic
accagguuuguacugga

SEQ ID NO: 738500 - RNA, 17 nt, Artificial Sequence
  Synthetic
aaaugaaacuuacugga

SEQ ID NO: 738501 - RNA, 17 nt, Artificial Sequence
  Synthetic
uggggcuagaaccugga

SEQ ID NO: 738502 - RNA, 17 nt, Artificial Sequence
  Synthetic
ucaucuuggaaccugga

SEQ ID NO: 738503 - RNA, 17 nt, Artificial Sequence
  Synthetic
auauguaugaaccugga

SEQ ID NO: 738504 - RNA, 17 nt, Artificial Sequence
  Synthetic
caucagaaucaccugga

SEQ ID NO: 738505 - RNA, 17 nt, Artificial Sequence
  Synthetic
cuguaucuugaccugga

SEQ ID NO: 738506 - RNA, 17 nt, Artificial Sequence
  Synthetic
cauauuugcuaccugga

SEQ ID NO: 738507 - RNA, 17 nt, Artificial Sequence
  Synthetic
ucaguugccacccugga

SEQ ID NO: 738508 - RNA, 17 nt, Artificial Sequence
  Synthetic
caagucagcccccugga

SEQ ID NO: 738509 - RNA, 17 nt, Artificial Sequence
  Synthetic
cauacuguuccccugga

SEQ ID NO: 738510 - RNA, 17 nt, Artificial Sequence
  Synthetic
accgcaccugcccugga

SEQ ID NO: 738511 - RNA, 17 nt, Artificial Sequence
  Synthetic
cagugugugucccugga

SEQ ID NO: 738512 - RNA, 17 nt, Artificial Sequence
  Synthetic
ccauucaacauccugga

SEQ ID NO: 738513 - RNA, 17 nt, Artificial Sequence
  Synthetic
ucaaucaauauccugga

SEQ ID NO: 738514 - RNA, 17 nt, Artificial Sequence
  Synthetic
uguuuaacucuccugga

SEQ ID NO: 738515 - RNA, 17 nt, Artificial Sequence
  Synthetic
uuuuuuuuuuuccugga

SEQ ID NO: 738516 - RNA, 17 nt, Artificial Sequence
  Synthetic
auggaacaccagcugga

SEQ ID NO: 738517 - RNA, 17 nt, Artificial Sequence
  Synthetic
caucagaaucagcugga

SEQ ID NO: 738518 - RNA, 17 nt, Artificial Sequence
  Synthetic
cgucagaaucagcugga

SEQ ID NO: 738519 - RNA, 17 nt, Artificial Sequence
  Synthetic
ucauagauucagcugga

SEQ ID NO: 738520 - RNA, 17 nt, Artificial Sequence
  Synthetic
ugccucugggagcugga

SEQ ID NO: 738521 - RNA, 17 nt, Artificial Sequence
  Synthetic
agugccugguagcugga

SEQ ID NO: 738522 - RNA, 17 nt, Artificial Sequence
  Synthetic
cuguugcccaggcugga

SEQ ID NO: 738523 - RNA, 17 nt, Artificial Sequence
  Synthetic
ccaaacucugggcugga

SEQ ID NO: 738524 - RNA, 17 nt, Artificial Sequence
  Synthetic
cugucauucuggcugga

SEQ ID NO: 738525 - RNA, 17 nt, Artificial Sequence
  Synthetic
aaaagauuaaugcugga

SEQ ID NO: 738526 - RNA, 17 nt, Artificial Sequence
  Synthetic
cugguuagccugcugga

SEQ ID NO: 738527 - RNA, 17 nt, Artificial Sequence
  Synthetic
aauuuuacguugcugga

SEQ ID NO: 738528 - RNA, 17 nt, Artificial Sequence
  Synthetic
aguaugauguugcugga

SEQ ID NO: 738529 - RNA, 17 nt, Artificial Sequence
  Synthetic
auguuucacaaucugga

SEQ ID NO: 738530 - RNA, 17 nt, Artificial Sequence
  Synthetic
ucccuugggaaucugga

SEQ ID NO: 738531 - RNA, 17 nt, Artificial Sequence
  Synthetic
cacaugcugaaucugga

SEQ ID NO: 738532 - RNA, 17 nt, Artificial Sequence
  Synthetic
aauaaaguacaucugga

SEQ ID NO: 738533 - RNA, 17 nt, Artificial Sequence
  Synthetic
augucuauagaucugga

SEQ ID NO: 738534 - RNA, 17 nt, Artificial Sequence
  Synthetic
auggaucuggaucugga

SEQ ID NO: 738535 - RNA, 17 nt, Artificial Sequence
  Synthetic
ugguaguauuaucugga

SEQ ID NO: 738536 - RNA, 17 nt, Artificial Sequence
  Synthetic
accagcucuacucugga

SEQ ID NO: 738537 - RNA, 17 nt, Artificial Sequence
  Synthetic
ugcuuaaucccucugga

SEQ ID NO: 738538 - RNA, 17 nt, Artificial Sequence
  Synthetic
uguuuggcuccucugga

SEQ ID NO: 738539 - RNA, 17 nt, Artificial Sequence
  Synthetic
cuucucucugcucugga

SEQ ID NO: 738540 - RNA, 17 nt, Artificial Sequence
  Synthetic
cauaagaacucucugga

SEQ ID NO: 738541 - RNA, 17 nt, Artificial Sequence
  Synthetic
caauggacuucucugga

SEQ ID NO: 738542 - RNA, 17 nt, Artificial Sequence
  Synthetic
agagagguaagucugga

SEQ ID NO: 738543 - RNA, 17 nt, Artificial Sequence
  Synthetic
aagucauggagucugga

SEQ ID NO: 738544 - RNA, 17 nt, Artificial Sequence
  Synthetic
uccuguagcugucugga

SEQ ID NO: 738545 - RNA, 17 nt, Artificial Sequence
  Synthetic
acuauucucauucugga

SEQ ID NO: 738546 - RNA, 17 nt, Artificial Sequence
  Synthetic
uauucauuaguucugga

SEQ ID NO: 738547 - RNA, 17 nt, Artificial Sequence
  Synthetic
uuacuguguguucugga

SEQ ID NO: 738548 - RNA, 17 nt, Artificial Sequence
  Synthetic
cguuucaaauuucugga

SEQ ID NO: 738549 - RNA, 17 nt, Artificial Sequence
  Synthetic
aggaaagguuuucugga

SEQ ID NO: 738550 - RNA, 17 nt, Artificial Sequence
  Synthetic
aggaagaacaaagugga

SEQ ID NO: 738551 - RNA, 17 nt, Artificial Sequence
  Synthetic
uaagaaaagaaagugga

SEQ ID NO: 738552 - RNA, 17 nt, Artificial Sequence
  Synthetic
uuauucaacuaagugga

SEQ ID NO: 738553 - RNA, 17 nt, Artificial Sequence
  Synthetic
acaaugguguaagugga

SEQ ID NO: 738554 - RNA, 17 nt, Artificial Sequence
  Synthetic
augaugguaacagugga

SEQ ID NO: 738555 - RNA, 17 nt, Artificial Sequence
  Synthetic
acucuuccuacagugga

SEQ ID NO: 738556 - RNA, 17 nt, Artificial Sequence
  Synthetic
caaaacaagccagugga

SEQ ID NO: 738557 - RNA, 17 nt, Artificial Sequence
  Synthetic
agagcaauuucagugga

SEQ ID NO: 738558 - RNA, 17 nt, Artificial Sequence
  Synthetic
ugcugccugagagugga

SEQ ID NO: 738559 - RNA, 17 nt, Artificial Sequence
  Synthetic
agaaguaacugagugga

SEQ ID NO: 738560 - RNA, 17 nt, Artificial Sequence
  Synthetic
ucugagcucugagugga

SEQ ID NO: 738561 - RNA, 17 nt, Artificial Sequence
  Synthetic
cagaauguuugagugga

SEQ ID NO: 738562 - RNA, 17 nt, Artificial Sequence
  Synthetic
cccugccugcuagugga

SEQ ID NO: 738563 - RNA, 17 nt, Artificial Sequence
  Synthetic
uuuggguaauuagugga

SEQ ID NO: 738564 - RNA, 17 nt, Artificial Sequence
  Synthetic
augcuauguuuagugga

SEQ ID NO: 738565 - RNA, 17 nt, Artificial Sequence
  Synthetic
agcuuccacaacgugga

SEQ ID NO: 738566 - RNA, 17 nt, Artificial Sequence
  Synthetic
aaucacuugaacgugga

SEQ ID NO: 738567 - RNA, 17 nt, Artificial Sequence
  Synthetic
cuuugggaggccgugga

SEQ ID NO: 738568 - RNA, 17 nt, Artificial Sequence
  Synthetic
ccuaagcuguccgugga

SEQ ID NO: 738569 - RNA, 17 nt, Artificial Sequence
  Synthetic
agagagauaggcgugga

SEQ ID NO: 738570 - RNA, 17 nt, Artificial Sequence
  Synthetic
caaauggcucucgugga

SEQ ID NO: 738571 - RNA, 17 nt, Artificial Sequence
  Synthetic
cacuagguacaggugga

SEQ ID NO: 738572 - RNA, 17 nt, Artificial Sequence
  Synthetic
uugucccagcaggugga

SEQ ID NO: 738573 - RNA, 17 nt, Artificial Sequence
  Synthetic
uaggcugaggaggugga

SEQ ID NO: 738574 - RNA, 17 nt, Artificial Sequence
  Synthetic
ugggaggcugaggugga

SEQ ID NO: 738575 - RNA, 17 nt, Artificial Sequence
  Synthetic
uaugugugugaggugga

SEQ ID NO: 738576 - RNA, 17 nt, Artificial Sequence
  Synthetic
aguuguauguaggugga

SEQ ID NO: 738577 - RNA, 17 nt, Artificial Sequence
  Synthetic
uggagauagagggugga

SEQ ID NO: 738578 - RNA, 17 nt, Artificial Sequence
  Synthetic
aucuacucuagggugga

SEQ ID NO: 738579 - RNA, 17 nt, Artificial Sequence
  Synthetic
auucaugguagggugga

SEQ ID NO: 738580 - RNA, 17 nt, Artificial Sequence
  Synthetic
ucacauggaggggugga

SEQ ID NO: 738581 - RNA, 17 nt, Artificial Sequence
  Synthetic
aggcugaggugggugga

SEQ ID NO: 738582 - RNA, 17 nt, Artificial Sequence
  Synthetic
cugcaguggugggugga

SEQ ID NO: 738583 - RNA, 17 nt, Artificial Sequence
  Synthetic
caaccaaccauggugga

SEQ ID NO: 738584 - RNA, 17 nt, Artificial Sequence
  Synthetic
uagccaggcauggugga

SEQ ID NO: 738585 - RNA, 17 nt, Artificial Sequence
  Synthetic
cucacaaucauggugga

SEQ ID NO: 738586 - RNA, 17 nt, Artificial Sequence
  Synthetic
cuuuuacucauggugga

SEQ ID NO: 738587 - RNA, 17 nt, Artificial Sequence
  Synthetic
cugcauuaacuggugga

SEQ ID NO: 738588 - RNA, 17 nt, Artificial Sequence
  Synthetic
caacuauuccuggugga

SEQ ID NO: 738589 - RNA, 17 nt, Artificial Sequence
  Synthetic
uugcccuugcuggugga

SEQ ID NO: 738590 - RNA, 17 nt, Artificial Sequence
  Synthetic
uuagggcaucuggugga

SEQ ID NO: 738591 - RNA, 17 nt, Artificial Sequence
  Synthetic
acuaaguguguggugga

SEQ ID NO: 738592 - RNA, 17 nt, Artificial Sequence
  Synthetic
ugacuggcaaaugugga

SEQ ID NO: 738593 - RNA, 17 nt, Artificial Sequence
  Synthetic
auguagagcaaugugga

SEQ ID NO: 738594 - RNA, 17 nt, Artificial Sequence
  Synthetic
ucucauugucaugugga

SEQ ID NO: 738595 - RNA, 17 nt, Artificial Sequence
  Synthetic
auguuagucuaugugga

SEQ ID NO: 738596 - RNA, 17 nt, Artificial Sequence
  Synthetic
cuuuaauucuaugugga

SEQ ID NO: 738597 - RNA, 17 nt, Artificial Sequence
  Synthetic
auuauauucuaugugga

SEQ ID NO: 738598 - RNA, 17 nt, Artificial Sequence
  Synthetic
uagccagacacugugga

SEQ ID NO: 738599 - RNA, 17 nt, Artificial Sequence
  Synthetic
acagaaaauacugugga

SEQ ID NO: 738600 - RNA, 17 nt, Artificial Sequence
  Synthetic
aggggccugccugugga

SEQ ID NO: 738601 - RNA, 17 nt, Artificial Sequence
  Synthetic
acugggcaugcugugga

SEQ ID NO: 738602 - RNA, 17 nt, Artificial Sequence
  Synthetic
aaccuggcaucugugga

SEQ ID NO: 738603 - RNA, 17 nt, Artificial Sequence
  Synthetic
uuuuaguuaucugugga

SEQ ID NO: 738604 - RNA, 17 nt, Artificial Sequence
  Synthetic
ucucuuugcucugugga

SEQ ID NO: 738605 - RNA, 17 nt, Artificial Sequence
  Synthetic
uagugauagggugugga

SEQ ID NO: 738606 - RNA, 17 nt, Artificial Sequence
  Synthetic
uuaugagugggugugga

SEQ ID NO: 738607 - RNA, 17 nt, Artificial Sequence
  Synthetic
cccacccacauugugga

SEQ ID NO: 738608 - RNA, 17 nt, Artificial Sequence
  Synthetic
ugucuguucauugugga

SEQ ID NO: 738609 - RNA, 17 nt, Artificial Sequence
  Synthetic
aguguccagauugugga

SEQ ID NO: 738610 - RNA, 17 nt, Artificial Sequence
  Synthetic
aaauaauuccuugugga

SEQ ID NO: 738611 - RNA, 17 nt, Artificial Sequence
  Synthetic
uauuauuuccuugugga

SEQ ID NO: 738612 - RNA, 17 nt, Artificial Sequence
  Synthetic
uguguaccucuugugga

SEQ ID NO: 738613 - RNA, 17 nt, Artificial Sequence
  Synthetic
aaaaacagucuugugga

SEQ ID NO: 738614 - RNA, 17 nt, Artificial Sequence
  Synthetic
uuauggagucuugugga

SEQ ID NO: 738615 - RNA, 17 nt, Artificial Sequence
  Synthetic
uaauucuugguugugga

SEQ ID NO: 738616 - RNA, 17 nt, Artificial Sequence
  Synthetic
augggaaaauuugugga

SEQ ID NO: 738617 - RNA, 17 nt, Artificial Sequence
  Synthetic
aaaagucaauuugugga

SEQ ID NO: 738618 - RNA, 17 nt, Artificial Sequence
  Synthetic
uuaauucaauuugugga

SEQ ID NO: 738619 - RNA, 17 nt, Artificial Sequence
  Synthetic
aguaaggaauuugugga

SEQ ID NO: 738620 - RNA, 17 nt, Artificial Sequence
  Synthetic
uuauuucuauuugugga

SEQ ID NO: 738621 - RNA, 17 nt, Artificial Sequence
  Synthetic
aauggugcguuugugga

SEQ ID NO: 738622 - RNA, 17 nt, Artificial Sequence
  Synthetic
uguauugaaaaauugga

SEQ ID NO: 738623 - RNA, 17 nt, Artificial Sequence
  Synthetic
aauauuguaaaauugga

SEQ ID NO: 738624 - RNA, 17 nt, Artificial Sequence
  Synthetic
augcaagauaaauugga

SEQ ID NO: 738625 - RNA, 17 nt, Artificial Sequence
  Synthetic
aaaauucuacaauugga

SEQ ID NO: 738626 - RNA, 17 nt, Artificial Sequence
  Synthetic
auaccauugcaauugga

SEQ ID NO: 738627 - RNA, 17 nt, Artificial Sequence
  Synthetic
cuuccuagagaauugga

SEQ ID NO: 738628 - RNA, 17 nt, Artificial Sequence
  Synthetic
agcagaagggcauugga

SEQ ID NO: 738629 - RNA, 17 nt, Artificial Sequence
  Synthetic
aaaaugagggcauugga

SEQ ID NO: 738630 - RNA, 17 nt, Artificial Sequence
  Synthetic
cacaaucuugcauugga

SEQ ID NO: 738631 - RNA, 17 nt, Artificial Sequence
  Synthetic
caugucuucucauugga

SEQ ID NO: 738632 - RNA, 17 nt, Artificial Sequence
  Synthetic
uaacuuggaagauugga

SEQ ID NO: 738633 - RNA, 17 nt, Artificial Sequence
  Synthetic
uagaaugggagauugga

SEQ ID NO: 738634 - RNA, 17 nt, Artificial Sequence
  Synthetic
agguaggugagauugga

SEQ ID NO: 738635 - RNA, 17 nt, Artificial Sequence
  Synthetic
uuggagaguagauugga

SEQ ID NO: 738636 - RNA, 17 nt, Artificial Sequence
  Synthetic
aaaagaaggggauugga

SEQ ID NO: 738637 - RNA, 17 nt, Artificial Sequence
  Synthetic
cuuuagcauauauugga

SEQ ID NO: 738638 - RNA, 17 nt, Artificial Sequence
  Synthetic
agaugggaguuauugga

SEQ ID NO: 738639 - RNA, 17 nt, Artificial Sequence
  Synthetic
uaggguaauuuauugga

SEQ ID NO: 738640 - RNA, 17 nt, Artificial Sequence
  Synthetic
uauggaaaacacuugga

SEQ ID NO: 738641 - RNA, 17 nt, Artificial Sequence
  Synthetic
ucaauaccucacuugga

SEQ ID NO: 738642 - RNA, 17 nt, Artificial Sequence
  Synthetic
agccuuuaagacuugga

SEQ ID NO: 738643 - RNA, 17 nt, Artificial Sequence
  Synthetic
uaaaauacugacuugga

SEQ ID NO: 738644 - RNA, 17 nt, Artificial Sequence
  Synthetic
aaucccagcuacuugga

SEQ ID NO: 738645 - RNA, 17 nt, Artificial Sequence
  Synthetic
ccugguuaguacuugga

SEQ ID NO: 738646 - RNA, 17 nt, Artificial Sequence
  Synthetic
ugaaagcuugccuugga

SEQ ID NO: 738647 - RNA, 17 nt, Artificial Sequence
  Synthetic
aucuugagguccuugga

SEQ ID NO: 738648 - RNA, 17 nt, Artificial Sequence
  Synthetic
acuuaagccagcuugga

SEQ ID NO: 738649 - RNA, 17 nt, Artificial Sequence
  Synthetic
agacacuggagcuugga

SEQ ID NO: 738650 - RNA, 17 nt, Artificial Sequence
  Synthetic
agggaauucugcuugga

SEQ ID NO: 738651 - RNA, 17 nt, Artificial Sequence
  Synthetic
auuugcaacaucuugga

SEQ ID NO: 738652 - RNA, 17 nt, Artificial Sequence
  Synthetic
ugugaacuuaucuugga

SEQ ID NO: 738653 - RNA, 17 nt, Artificial Sequence
  Synthetic
agugaauagcucuugga

SEQ ID NO: 738654 - RNA, 17 nt, Artificial Sequence
  Synthetic
auauacaugcucuugga

SEQ ID NO: 738655 - RNA, 17 nt, Artificial Sequence
  Synthetic
uacauccuauucuugga

SEQ ID NO: 738656 - RNA, 17 nt, Artificial Sequence
  Synthetic
uaaaaaaacuucuugga

SEQ ID NO: 738657 - RNA, 17 nt, Artificial Sequence
  Synthetic
uuauguuuguucuugga

SEQ ID NO: 738658 - RNA, 17 nt, Artificial Sequence
  Synthetic
uccauuucuuucuugga

SEQ ID NO: 738659 - RNA, 17 nt, Artificial Sequence
  Synthetic
uuauuuuuuuucuugga

SEQ ID NO: 738660 - RNA, 17 nt, Artificial Sequence
  Synthetic
uuucuuuagcaguugga

SEQ ID NO: 738661 - RNA, 17 nt, Artificial Sequence
  Synthetic
ugucucuaggaguugga

SEQ ID NO: 738662 - RNA, 17 nt, Artificial Sequence
  Synthetic
uaacuugaauaguugga

SEQ ID NO: 738663 - RNA, 17 nt, Artificial Sequence
  Synthetic
uucacacaguaguugga

SEQ ID NO: 738664 - RNA, 17 nt, Artificial Sequence
  Synthetic
auucugauuuaguugga

SEQ ID NO: 738665 - RNA, 17 nt, Artificial Sequence
  Synthetic
cauucaaagagguugga

SEQ ID NO: 738666 - RNA, 17 nt, Artificial Sequence
  Synthetic
uagaaggugagguugga

SEQ ID NO: 738667 - RNA, 17 nt, Artificial Sequence
  Synthetic
aaccuuaauagguugga

SEQ ID NO: 738668 - RNA, 17 nt, Artificial Sequence
  Synthetic
aggcuguugggguugga

SEQ ID NO: 738669 - RNA, 17 nt, Artificial Sequence
  Synthetic
uaucuucccauguugga

SEQ ID NO: 738670 - RNA, 17 nt, Artificial Sequence
  Synthetic
ucuccacaaguguugga

SEQ ID NO: 738671 - RNA, 17 nt, Artificial Sequence
  Synthetic
auaccuaucaauuugga

SEQ ID NO: 738672 - RNA, 17 nt, Artificial Sequence
  Synthetic
uuuuguuauaauuugga

SEQ ID NO: 738673 - RNA, 17 nt, Artificial Sequence
  Synthetic
uggaucuuacauuugga

SEQ ID NO: 738674 - RNA, 17 nt, Artificial Sequence
  Synthetic
agguuauaccauuugga

SEQ ID NO: 738675 - RNA, 17 nt, Artificial Sequence
  Synthetic
ucaacaugagauuugga

SEQ ID NO: 738676 - RNA, 17 nt, Artificial Sequence
  Synthetic
ucaagaugagauuugga

SEQ ID NO: 738677 - RNA, 17 nt, Artificial Sequence
  Synthetic
ucgaagauauauuugga

SEQ ID NO: 738678 - RNA, 17 nt, Artificial Sequence
  Synthetic
ucuaaguuguauuugga

SEQ ID NO: 738679 - RNA, 17 nt, Artificial Sequence
  Synthetic
agaaacaaaacuuugga

SEQ ID NO: 738680 - RNA, 17 nt, Artificial Sequence
  Synthetic
auauuauacacuuugga

SEQ ID NO: 738681 - RNA, 17 nt, Artificial Sequence
  Synthetic
aaucccagcacuuugga

SEQ ID NO: 738682 - RNA, 17 nt, Artificial Sequence
  Synthetic
cuuguccuaccuuugga

SEQ ID NO: 738683 - RNA, 17 nt, Artificial Sequence
  Synthetic
acagagcagccuuugga

SEQ ID NO: 738684 - RNA, 17 nt, Artificial Sequence
  Synthetic
uuccuggccucuuugga

SEQ ID NO: 738685 - RNA, 17 nt, Artificial Sequence
  Synthetic
uucaccuuuucuuugga

SEQ ID NO: 738686 - RNA, 17 nt, Artificial Sequence
  Synthetic
cuugccacaaguuugga

SEQ ID NO: 738687 - RNA, 17 nt, Artificial Sequence
  Synthetic
agucauagggguuugga

SEQ ID NO: 738688 - RNA, 17 nt, Artificial Sequence
  Synthetic
uggaagcuauguuugga

SEQ ID NO: 738689 - RNA, 17 nt, Artificial Sequence
  Synthetic
aagucuaaguguuugga

SEQ ID NO: 738690 - RNA, 17 nt, Artificial Sequence
  Synthetic
aaucugcauuguuugga

SEQ ID NO: 738691 - RNA, 17 nt, Artificial Sequence
  Synthetic
accucugaaauuuugga

SEQ ID NO: 738692 - RNA, 17 nt, Artificial Sequence
  Synthetic
cccauuacaauuuugga

SEQ ID NO: 738693 - RNA, 17 nt, Artificial Sequence
  Synthetic
aacauacacauuuugga

SEQ ID NO: 738694 - RNA, 17 nt, Artificial Sequence
  Synthetic
uuuauuuauauuuugga

SEQ ID NO: 738695 - RNA, 17 nt, Artificial Sequence
  Synthetic
cuucgcccacuuuugga

SEQ ID NO: 738696 - RNA, 17 nt, Artificial Sequence
  Synthetic
aucuuugcacuuuugga

SEQ ID NO: 738697 - RNA, 17 nt, Artificial Sequence
  Synthetic
aagagagagcuuuugga

SEQ ID NO: 738698 - RNA, 17 nt, Artificial Sequence
  Synthetic
uuagugcaucuuuugga

SEQ ID NO: 738699 - RNA, 17 nt, Artificial Sequence
  Synthetic
ugggaaugucuuuugga

SEQ ID NO: 738700 - RNA, 17 nt, Artificial Sequence
  Synthetic
ucaacaucaguuuugga

SEQ ID NO: 738701 - RNA, 17 nt, Artificial Sequence
  Synthetic
uucuggguauuuuugga

SEQ ID NO: 738702 - RNA, 17 nt, Artificial Sequence
  Synthetic
ugcuccaacuuuuugga

SEQ ID NO: 738703 - RNA, 17 nt, Artificial Sequence
  Synthetic
acagaagacuuuuugga

SEQ ID NO: 738704 - RNA, 17 nt, Artificial Sequence
  Synthetic
auuaaaaaaaaaaauga

SEQ ID NO: 738705 - RNA, 17 nt, Artificial Sequence
  Synthetic
ccuguuaccaaaaauga

SEQ ID NO: 738706 - RNA, 17 nt, Artificial Sequence
  Synthetic
acacuuuagaaaaauga

SEQ ID NO: 738707 - RNA, 17 nt, Artificial Sequence
  Synthetic
auguccaggaaaaauga

SEQ ID NO: 738708 - RNA, 17 nt, Artificial Sequence
  Synthetic
acuugugggaaaaauga

SEQ ID NO: 738709 - RNA, 17 nt, Artificial Sequence
  Synthetic
uauucgacacaaaauga

SEQ ID NO: 738710 - RNA, 17 nt, Artificial Sequence
  Synthetic
uuacuuugccaaaauga

SEQ ID NO: 738711 - RNA, 17 nt, Artificial Sequence
  Synthetic
ugcuaucaucaaaauga

SEQ ID NO: 738712 - RNA, 17 nt, Artificial Sequence
  Synthetic
ucuggaucucaaaauga

SEQ ID NO: 738713 - RNA, 17 nt, Artificial Sequence
  Synthetic
aucauggcagaaaauga

SEQ ID NO: 738714 - RNA, 17 nt, Artificial Sequence
  Synthetic
uuuuaaucagaaaauga

SEQ ID NO: 738715 - RNA, 17 nt, Artificial Sequence
  Synthetic
ugugggaaggaaaauga

SEQ ID NO: 738716 - RNA, 17 nt, Artificial Sequence
  Synthetic
aguaagccggaaaauga

SEQ ID NO: 738717 - RNA, 17 nt, Artificial Sequence
  Synthetic
augccaugugaaaauga

SEQ ID NO: 738718 - RNA, 17 nt, Artificial Sequence
  Synthetic
aaaaucaaauaaaauga

SEQ ID NO: 738719 - RNA, 17 nt, Artificial Sequence
  Synthetic
uuuguuuguuaaaauga

SEQ ID NO: 738720 - RNA, 17 nt, Artificial Sequence
  Synthetic
aaugcagaaacaaauga

SEQ ID NO: 738721 - RNA, 17 nt, Artificial Sequence
  Synthetic
aguaauaacacaaauga

SEQ ID NO: 738722 - RNA, 17 nt, Artificial Sequence
  Synthetic
cagacucugacaaauga

SEQ ID NO: 738723 - RNA, 17 nt, Artificial Sequence
  Synthetic
auacagaagccaaauga

SEQ ID NO: 738724 - RNA, 17 nt, Artificial Sequence
  Synthetic
auaaaaucuccaaauga

SEQ ID NO: 738725 - RNA, 17 nt, Artificial Sequence
  Synthetic
ccuucguuggcaaauga

SEQ ID NO: 738726 - RNA, 17 nt, Artificial Sequence
  Synthetic
cauaaucuaucaaauga

SEQ ID NO: 738727 - RNA, 17 nt, Artificial Sequence
  Synthetic
acuauaaauucaaauga

SEQ ID NO: 738728 - RNA, 17 nt, Artificial Sequence
  Synthetic
aguuacacaagaaauga

SEQ ID NO: 738729 - RNA, 17 nt, Artificial Sequence
  Synthetic
agggaaggaagaaauga

SEQ ID NO: 738730 - RNA, 17 nt, Artificial Sequence
  Synthetic
acacagcuaagaaauga

SEQ ID NO: 738731 - RNA, 17 nt, Artificial Sequence
  Synthetic
auuggagacagaaauga

SEQ ID NO: 738732 - RNA, 17 nt, Artificial Sequence
  Synthetic
aucugagacagaaauga

SEQ ID NO: 738733 - RNA, 17 nt, Artificial Sequence
  Synthetic
auaguucuuggaaauga

SEQ ID NO: 738734 - RNA, 17 nt, Artificial Sequence
  Synthetic
uuccccuuuggaaauga

SEQ ID NO: 738735 - RNA, 17 nt, Artificial Sequence
  Synthetic
aaauuggauugaaauga

SEQ ID NO: 738736 - RNA, 17 nt, Artificial Sequence
  Synthetic
ucaccaaguugaaauga

SEQ ID NO: 738737 - RNA, 17 nt, Artificial Sequence
  Synthetic
caccaagguugaaauga

SEQ ID NO: 738738 - RNA, 17 nt, Artificial Sequence
  Synthetic
aaaugggagauaaauga

SEQ ID NO: 738739 - RNA, 17 nt, Artificial Sequence
  Synthetic
auaagguggauaaauga

SEQ ID NO: 738740 - RNA, 17 nt, Artificial Sequence
  Synthetic
agauaaaugauaaauga

SEQ ID NO: 738741 - RNA, 17 nt, Artificial Sequence
  Synthetic
uauauauuuauaaauga

SEQ ID NO: 738742 - RNA, 17 nt, Artificial Sequence
  Synthetic
acaugcuuccuaaauga

SEQ ID NO: 738743 - RNA, 17 nt, Artificial Sequence
  Synthetic
uuuaagauucuaaauga

SEQ ID NO: 738744 - RNA, 17 nt, Artificial Sequence
  Synthetic
aaucacugaguaaauga

SEQ ID NO: 738745 - RNA, 17 nt, Artificial Sequence
  Synthetic
uccagauagguaaauga

SEQ ID NO: 738746 - RNA, 17 nt, Artificial Sequence
  Synthetic
uucagggugguaaauga

SEQ ID NO: 738747 - RNA, 17 nt, Artificial Sequence
  Synthetic
caaggaaauguaaauga

SEQ ID NO: 738748 - RNA, 17 nt, Artificial Sequence
  Synthetic
auguuauaauuaaauga

SEQ ID NO: 738749 - RNA, 17 nt, Artificial Sequence
  Synthetic
cccaauuaguuaaauga

SEQ ID NO: 738750 - RNA, 17 nt, Artificial Sequence
  Synthetic
ucauacugaaacaauga

SEQ ID NO: 738751 - RNA, 17 nt, Artificial Sequence
  Synthetic
auuaaaaauaacaauga

SEQ ID NO: 738752 - RNA, 17 nt, Artificial Sequence
  Synthetic
ucccuaaauaacaauga

SEQ ID NO: 738753 - RNA, 17 nt, Artificial Sequence
  Synthetic
aucacugacuacaauga

SEQ ID NO: 738754 - RNA, 17 nt, Artificial Sequence
  Synthetic
agaaaucuaaccaauga

SEQ ID NO: 738755 - RNA, 17 nt, Artificial Sequence
  Synthetic
aagcauuuagccaauga

SEQ ID NO: 738756 - RNA, 17 nt, Artificial Sequence
  Synthetic
cauuuaaccuccaauga

SEQ ID NO: 738757 - RNA, 17 nt, Artificial Sequence
  Synthetic
aggggagaaggcaauga

SEQ ID NO: 738758 - RNA, 17 nt, Artificial Sequence
  Synthetic
cagaugacuggcaauga

SEQ ID NO: 738759 - RNA, 17 nt, Artificial Sequence
  Synthetic
uuacuuaaaugcaauga

SEQ ID NO: 738760 - RNA, 17 nt, Artificial Sequence
  Synthetic
uuuaucacaaucaauga

SEQ ID NO: 738761 - RNA, 17 nt, Artificial Sequence
  Synthetic
cuaucauacaucaauga

SEQ ID NO: 738762 - RNA, 17 nt, Artificial Sequence
  Synthetic
uuaugagcacucaauga

SEQ ID NO: 738763 - RNA, 17 nt, Artificial Sequence
  Synthetic
uucaaaaaagucaauga

SEQ ID NO: 738764 - RNA, 17 nt, Artificial Sequence
  Synthetic
cagccaagcaagaauga

SEQ ID NO: 738765 - RNA, 17 nt, Artificial Sequence
  Synthetic
ugccuuuauaagaauga

SEQ ID NO: 738766 - RNA, 17 nt, Artificial Sequence
  Synthetic
uaguuugcuaagaauga

SEQ ID NO: 738767 - RNA, 17 nt, Artificial Sequence
  Synthetic
caauuugaacagaauga

SEQ ID NO: 738768 - RNA, 17 nt, Artificial Sequence
  Synthetic
cauugcuuccagaauga

SEQ ID NO: 738769 - RNA, 17 nt, Artificial Sequence
  Synthetic
aagaucaugcagaauga

SEQ ID NO: 738770 - RNA, 17 nt, Artificial Sequence
  Synthetic
uaguuugcucagaauga

SEQ ID NO: 738771 - RNA, 17 nt, Artificial Sequence
  Synthetic
uaguuuacugagaauga

SEQ ID NO: 738772 - RNA, 17 nt, Artificial Sequence
  Synthetic
uaguuugcugagaauga

SEQ ID NO: 738773 - RNA, 17 nt, Artificial Sequence
  Synthetic
uaagcaugaccgaauga

SEQ ID NO: 738774 - RNA, 17 nt, Artificial Sequence
  Synthetic
cuuuucuuaaggaauga

SEQ ID NO: 738775 - RNA, 17 nt, Artificial Sequence
  Synthetic
cuccuccauaggaauga

SEQ ID NO: 738776 - RNA, 17 nt, Artificial Sequence
  Synthetic
cugagagguaggaauga

SEQ ID NO: 738777 - RNA, 17 nt, Artificial Sequence
  Synthetic
caaaguagugggaauga

SEQ ID NO: 738778 - RNA, 17 nt, Artificial Sequence
  Synthetic
uugagaggguggaauga

SEQ ID NO: 738779 - RNA, 17 nt, Artificial Sequence
  Synthetic
aacaaauaaaugaauga

SEQ ID NO: 738780 - RNA, 17 nt, Artificial Sequence
  Synthetic
auuuguagaaugaauga

SEQ ID NO: 738781 - RNA, 17 nt, Artificial Sequence
  Synthetic
aauacgugaaugaauga

SEQ ID NO: 738782 - RNA, 17 nt, Artificial Sequence
  Synthetic
uuuguuaucaugaauga

SEQ ID NO: 738783 - RNA, 17 nt, Artificial Sequence
  Synthetic
caucagucacugaauga

SEQ ID NO: 738784 - RNA, 17 nt, Artificial Sequence
  Synthetic
aaggauucccugaauga

SEQ ID NO: 738785 - RNA, 17 nt, Artificial Sequence
  Synthetic
uuuaaauuccugaauga

SEQ ID NO: 738786 - RNA, 17 nt, Artificial Sequence
  Synthetic
uaauaaaagcugaauga

SEQ ID NO: 738787 - RNA, 17 nt, Artificial Sequence
  Synthetic
agagcauuucugaauga

SEQ ID NO: 738788 - RNA, 17 nt, Artificial Sequence
  Synthetic
uggagccccuugaauga

SEQ ID NO: 738789 - RNA, 17 nt, Artificial Sequence
  Synthetic
uacauucaaaauaauga

SEQ ID NO: 738790 - RNA, 17 nt, Artificial Sequence
  Synthetic
caugaaaauaauaauga

SEQ ID NO: 738791 - RNA, 17 nt, Artificial Sequence
  Synthetic
ugucauggacauaauga

SEQ ID NO: 738792 - RNA, 17 nt, Artificial Sequence
  Synthetic
aaaauuacagauaauga

SEQ ID NO: 738793 - RNA, 17 nt, Artificial Sequence
  Synthetic
agaaaaagugauaauga

SEQ ID NO: 738794 - RNA, 17 nt, Artificial Sequence
  Synthetic
ugaggcaccuauaauga

SEQ ID NO: 738795 - RNA, 17 nt, Artificial Sequence
  Synthetic
ugcaauaaaccuaauga

SEQ ID NO: 738796 - RNA, 17 nt, Artificial Sequence
  Synthetic
agaguucuugcuaauga

SEQ ID NO: 738797 - RNA, 17 nt, Artificial Sequence
  Synthetic
acaagagcuucuaauga

SEQ ID NO: 738798 - RNA, 17 nt, Artificial Sequence
  Synthetic
uuccuugcuucuaauga

SEQ ID NO: 738799 - RNA, 17 nt, Artificial Sequence
  Synthetic
auauuugaaaguaauga

SEQ ID NO: 738800 - RNA, 17 nt, Artificial Sequence
  Synthetic
agugaaugcaguaauga

SEQ ID NO: 738801 - RNA, 17 nt, Artificial Sequence
  Synthetic
cagcuggaagguaauga

SEQ ID NO: 738802 - RNA, 17 nt, Artificial Sequence
  Synthetic
caacauaaugguaauga

SEQ ID NO: 738803 - RNA, 17 nt, Artificial Sequence
  Synthetic
cgcacugauuguaauga

SEQ ID NO: 738804 - RNA, 17 nt, Artificial Sequence
  Synthetic
uuaauacuacuuaauga

SEQ ID NO: 738805 - RNA, 17 nt, Artificial Sequence
  Synthetic
aauaaugaguuuaauga

SEQ ID NO: 738806 - RNA, 17 nt, Artificial Sequence
  Synthetic
uauuacccaaaacauga

SEQ ID NO: 738807 - RNA, 17 nt, Artificial Sequence
  Synthetic
uggcuaaaacaacauga

SEQ ID NO: 738808 - RNA, 17 nt, Artificial Sequence
  Synthetic
ccuucuccccaacauga

SEQ ID NO: 738809 - RNA, 17 nt, Artificial Sequence
  Synthetic
uuaaaaaugcaacauga

SEQ ID NO: 738810 - RNA, 17 nt, Artificial Sequence
  Synthetic
agcacucuagaacauga

SEQ ID NO: 738811 - RNA, 17 nt, Artificial Sequence
  Synthetic
uauuccauugaacauga

SEQ ID NO: 738812 - RNA, 17 nt, Artificial Sequence
  Synthetic
auugaaaaguaacauga

SEQ ID NO: 738813 - RNA, 17 nt, Artificial Sequence
  Synthetic
uaagcagaaacacauga

SEQ ID NO: 738814 - RNA, 17 nt, Artificial Sequence
  Synthetic
uaucaggauacacauga

SEQ ID NO: 738815 - RNA, 17 nt, Artificial Sequence
  Synthetic
uugagaacaccacauga

SEQ ID NO: 738816 - RNA, 17 nt, Artificial Sequence
  Synthetic
uguagaaggccacauga

SEQ ID NO: 738817 - RNA, 17 nt, Artificial Sequence
  Synthetic
ucacugauggcacauga

SEQ ID NO: 738818 - RNA, 17 nt, Artificial Sequence
  Synthetic
cauccuuugucacauga

SEQ ID NO: 738819 - RNA, 17 nt, Artificial Sequence
  Synthetic
agagaaguaggacauga

SEQ ID NO: 738820 - RNA, 17 nt, Artificial Sequence
  Synthetic
aggugauuaggacauga

SEQ ID NO: 738821 - RNA, 17 nt, Artificial Sequence
  Synthetic
uuucacucuggacauga

SEQ ID NO: 738822 - RNA, 17 nt, Artificial Sequence
  Synthetic
uauuauugaauacauga

SEQ ID NO: 738823 - RNA, 17 nt, Artificial Sequence
  Synthetic
uauaagucuauacauga

SEQ ID NO: 738824 - RNA, 17 nt, Artificial Sequence
  Synthetic
ccaaauuuuauacauga

SEQ ID NO: 738825 - RNA, 17 nt, Artificial Sequence
  Synthetic
aaccugggaguacauga

SEQ ID NO: 738826 - RNA, 17 nt, Artificial Sequence
  Synthetic
acacaauugguacauga

SEQ ID NO: 738827 - RNA, 17 nt, Artificial Sequence
  Synthetic
auuuuccuuguacauga

SEQ ID NO: 738828 - RNA, 17 nt, Artificial Sequence
  Synthetic
uaaauuuauuuacauga

SEQ ID NO: 738829 - RNA, 17 nt, Artificial Sequence
  Synthetic
acaauacaaaaccauga

SEQ ID NO: 738830 - RNA, 17 nt, Artificial Sequence
  Synthetic
uuacagugaaaccauga

SEQ ID NO: 738831 - RNA, 17 nt, Artificial Sequence
  Synthetic
aaagcugaacaccauga

SEQ ID NO: 738832 - RNA, 17 nt, Artificial Sequence
  Synthetic
aaccaucgccaccauga

SEQ ID NO: 738833 - RNA, 17 nt, Artificial Sequence
  Synthetic
ugauguaagcaccauga

SEQ ID NO: 738834 - RNA, 17 nt, Artificial Sequence
  Synthetic
agugguuaucaccauga

SEQ ID NO: 738835 - RNA, 17 nt, Artificial Sequence
  Synthetic
aaggaggaugaccauga

SEQ ID NO: 738836 - RNA, 17 nt, Artificial Sequence
  Synthetic
aaguaauuugaccauga

SEQ ID NO: 738837 - RNA, 17 nt, Artificial Sequence
  Synthetic
agacucaaauaccauga

SEQ ID NO: 738838 - RNA, 17 nt, Artificial Sequence
  Synthetic
uguaaugaguaccauga

SEQ ID NO: 738839 - RNA, 17 nt, Artificial Sequence
  Synthetic
aauaacugaagccauga

SEQ ID NO: 738840 - RNA, 17 nt, Artificial Sequence
  Synthetic
auaucaagcagccauga

SEQ ID NO: 738841 - RNA, 17 nt, Artificial Sequence
  Synthetic
uuuuuauuucgccauga

SEQ ID NO: 738842 - RNA, 17 nt, Artificial Sequence
  Synthetic
uggugauuaggccauga

SEQ ID NO: 738843 - RNA, 17 nt, Artificial Sequence
  Synthetic
uaaucuaaaugccauga

SEQ ID NO: 738844 - RNA, 17 nt, Artificial Sequence
  Synthetic
acugaaacaugccauga

SEQ ID NO: 738845 - RNA, 17 nt, Artificial Sequence
  Synthetic
auaagauaaauccauga

SEQ ID NO: 738846 - RNA, 17 nt, Artificial Sequence
  Synthetic
uauugugagcuccauga

SEQ ID NO: 738847 - RNA, 17 nt, Artificial Sequence
  Synthetic
aagaaauaucuccauga

SEQ ID NO: 738848 - RNA, 17 nt, Artificial Sequence
  Synthetic
cucaucuaauuccauga

SEQ ID NO: 738849 - RNA, 17 nt, Artificial Sequence
  Synthetic
aggaagucuuuccauga

SEQ ID NO: 738850 - RNA, 17 nt, Artificial Sequence
  Synthetic
agagagguuuuccauga

SEQ ID NO: 738851 - RNA, 17 nt, Artificial Sequence
  Synthetic
uaguacuuuuuccauga

SEQ ID NO: 738852 - RNA, 17 nt, Artificial Sequence
  Synthetic
ucacaagaacagcauga

SEQ ID NO: 738853 - RNA, 17 nt, Artificial Sequence
  Synthetic
acggagugagagcauga

SEQ ID NO: 738854 - RNA, 17 nt, Artificial Sequence
  Synthetic
cagugggaggagcauga

SEQ ID NO: 738855 - RNA, 17 nt, Artificial Sequence
  Synthetic
auccugaaugagcauga

SEQ ID NO: 738856 - RNA, 17 nt, Artificial Sequence
  Synthetic
uugaaacaugagcauga

SEQ ID NO: 738857 - RNA, 17 nt, Artificial Sequence
  Synthetic
auuagaaauuagcauga

SEQ ID NO: 738858 - RNA, 17 nt, Artificial Sequence
  Synthetic
aaauuagcugggcauga

SEQ ID NO: 738859 - RNA, 17 nt, Artificial Sequence
  Synthetic
cuuaaaaagaugcauga

SEQ ID NO: 738860 - RNA, 17 nt, Artificial Sequence
  Synthetic
uggcuuuagaugcauga

SEQ ID NO: 738861 - RNA, 17 nt, Artificial Sequence
  Synthetic
acaugcugagugcauga

SEQ ID NO: 738862 - RNA, 17 nt, Artificial Sequence
  Synthetic
ugcaucuuugugcauga

SEQ ID NO: 738863 - RNA, 17 nt, Artificial Sequence
  Synthetic
auuuguaccuugcauga

SEQ ID NO: 738864 - RNA, 17 nt, Artificial Sequence
  Synthetic
agagaaaagaaucauga

SEQ ID NO: 738865 - RNA, 17 nt, Artificial Sequence
  Synthetic
aaaccaauuaaucauga

SEQ ID NO: 738866 - RNA, 17 nt, Artificial Sequence
  Synthetic
aggaaaacacaucauga

SEQ ID NO: 738867 - RNA, 17 nt, Artificial Sequence
  Synthetic
uauagguaccaucauga

SEQ ID NO: 738868 - RNA, 17 nt, Artificial Sequence
  Synthetic
ugaaaauuccaucauga

SEQ ID NO: 738869 - RNA, 17 nt, Artificial Sequence
  Synthetic
auauuuuuccaucauga

SEQ ID NO: 738870 - RNA, 17 nt, Artificial Sequence
  Synthetic
aauuguaugcaucauga

SEQ ID NO: 738871 - RNA, 17 nt, Artificial Sequence
  Synthetic
aggugauugcaucauga

SEQ ID NO: 738872 - RNA, 17 nt, Artificial Sequence
  Synthetic
ucuccugcucaucauga

SEQ ID NO: 738873 - RNA, 17 nt, Artificial Sequence
  Synthetic
cuuugcagucaucauga

SEQ ID NO: 738874 - RNA, 17 nt, Artificial Sequence
  Synthetic
auuacauuucaucauga

SEQ ID NO: 738875 - RNA, 17 nt, Artificial Sequence
  Synthetic
uuuugauucuaucauga

SEQ ID NO: 738876 - RNA, 17 nt, Artificial Sequence
  Synthetic
cauuuuuaguaucauga

SEQ ID NO: 738877 - RNA, 17 nt, Artificial Sequence
  Synthetic
ugaaaaaauuaucauga

SEQ ID NO: 738878 - RNA, 17 nt, Artificial Sequence
  Synthetic
cuguaauuuuaucauga

SEQ ID NO: 738879 - RNA, 17 nt, Artificial Sequence
  Synthetic
caaaaauuaacucauga

SEQ ID NO: 738880 - RNA, 17 nt, Artificial Sequence
  Synthetic
uuaccuguuccucauga

SEQ ID NO: 738881 - RNA, 17 nt, Artificial Sequence
  Synthetic
auauuauucucucauga

SEQ ID NO: 738882 - RNA, 17 nt, Artificial Sequence
  Synthetic
cuaccaacuucucauga

SEQ ID NO: 738883 - RNA, 17 nt, Artificial Sequence
  Synthetic
cagaggaaaggucauga

SEQ ID NO: 738884 - RNA, 17 nt, Artificial Sequence
  Synthetic
acuucucaaggucauga

SEQ ID NO: 738885 - RNA, 17 nt, Artificial Sequence
  Synthetic
cuccuggaaauucauga

SEQ ID NO: 738886 - RNA, 17 nt, Artificial Sequence
  Synthetic
cucauaggcauucauga

SEQ ID NO: 738887 - RNA, 17 nt, Artificial Sequence
  Synthetic
aaagggaucauucauga

SEQ ID NO: 738888 - RNA, 17 nt, Artificial Sequence
  Synthetic
uuucagguacuucauga

SEQ ID NO: 738889 - RNA, 17 nt, Artificial Sequence
  Synthetic
ugugggucccuucauga

SEQ ID NO: 738890 - RNA, 17 nt, Artificial Sequence
  Synthetic
uacugccugcuucauga

SEQ ID NO: 738891 - RNA, 17 nt, Artificial Sequence
  Synthetic
cuccuccccguucauga

SEQ ID NO: 738892 - RNA, 17 nt, Artificial Sequence
  Synthetic
ugcuaauccguucauga

SEQ ID NO: 738893 - RNA, 17 nt, Artificial Sequence
  Synthetic
aaucagacauuucauga

SEQ ID NO: 738894 - RNA, 17 nt, Artificial Sequence
  Synthetic
ccugauacauuucauga

SEQ ID NO: 738895 - RNA, 17 nt, Artificial Sequence
  Synthetic
auuuuaaguuuucauga

SEQ ID NO: 738896 - RNA, 17 nt, Artificial Sequence
  Synthetic
uauaacuucaaagauga

SEQ ID NO: 738897 - RNA, 17 nt, Artificial Sequence
  Synthetic
aaguaggaacaagauga

SEQ ID NO: 738898 - RNA, 17 nt, Artificial Sequence
  Synthetic
uuuaggcaggaagauga

SEQ ID NO: 738899 - RNA, 17 nt, Artificial Sequence
  Synthetic
acuggcauugaagauga

SEQ ID NO: 738900 - RNA, 17 nt, Artificial Sequence
  Synthetic
aagagucuugaagauga

SEQ ID NO: 738901 - RNA, 17 nt, Artificial Sequence
  Synthetic
cucuggaccuaagauga

SEQ ID NO: 738902 - RNA, 17 nt, Artificial Sequence
  Synthetic
caaaaaacaacagauga

SEQ ID NO: 738903 - RNA, 17 nt, Artificial Sequence
  Synthetic
acccagaucacagauga

SEQ ID NO: 738904 - RNA, 17 nt, Artificial Sequence
  Synthetic
cugauuaagacagauga

SEQ ID NO: 738905 - RNA, 17 nt, Artificial Sequence
  Synthetic
uacagcuuuccagauga

SEQ ID NO: 738906 - RNA, 17 nt, Artificial Sequence
  Synthetic
cucuguguugcagauga

SEQ ID NO: 738907 - RNA, 17 nt, Artificial Sequence
  Synthetic
agccagcucucagauga

SEQ ID NO: 738908 - RNA, 17 nt, Artificial Sequence
  Synthetic
ugauuccauucagauga

SEQ ID NO: 738909 - RNA, 17 nt, Artificial Sequence
  Synthetic
cagggaaaaagagauga

SEQ ID NO: 738910 - RNA, 17 nt, Artificial Sequence
  Synthetic
agaaaagauagagauga

SEQ ID NO: 738911 - RNA, 17 nt, Artificial Sequence
  Synthetic
uaagugccaggagauga

SEQ ID NO: 738912 - RNA, 17 nt, Artificial Sequence
  Synthetic
agccugagaggagauga

SEQ ID NO: 738913 - RNA, 17 nt, Artificial Sequence
  Synthetic
auccaugcuggagauga

SEQ ID NO: 738914 - RNA, 17 nt, Artificial Sequence
  Synthetic
agaacuuucugagauga

SEQ ID NO: 738915 - RNA, 17 nt, Artificial Sequence
  Synthetic
agagucaggugagauga

SEQ ID NO: 738916 - RNA, 17 nt, Artificial Sequence
  Synthetic
auaaauacuugagauga

SEQ ID NO: 738917 - RNA, 17 nt, Artificial Sequence
  Synthetic
uacugugaaauagauga

SEQ ID NO: 738918 - RNA, 17 nt, Artificial Sequence
  Synthetic
acacaucucauagauga

SEQ ID NO: 738919 - RNA, 17 nt, Artificial Sequence
  Synthetic
uaccuaaugcuagauga

SEQ ID NO: 738920 - RNA, 17 nt, Artificial Sequence
  Synthetic
acucuuguucuagauga

SEQ ID NO: 738921 - RNA, 17 nt, Artificial Sequence
  Synthetic
auaccuaauguagauga

SEQ ID NO: 738922 - RNA, 17 nt, Artificial Sequence
  Synthetic
ccgugaagaaacgauga

SEQ ID NO: 738923 - RNA, 17 nt, Artificial Sequence
  Synthetic
uuuuaguggaacgauga

SEQ ID NO: 738924 - RNA, 17 nt, Artificial Sequence
  Synthetic
ugucuugccugcgauga

SEQ ID NO: 738925 - RNA, 17 nt, Artificial Sequence
  Synthetic
auuugccuuaucgauga

SEQ ID NO: 738926 - RNA, 17 nt, Artificial Sequence
  Synthetic
cugucugucuucgauga

SEQ ID NO: 738927 - RNA, 17 nt, Artificial Sequence
  Synthetic
ugaaguggcaaggauga

SEQ ID NO: 738928 - RNA, 17 nt, Artificial Sequence
  Synthetic
aucaaaucccaggauga

SEQ ID NO: 738929 - RNA, 17 nt, Artificial Sequence
  Synthetic
aauguuuuggaggauga

SEQ ID NO: 738930 - RNA, 17 nt, Artificial Sequence
  Synthetic
uaguuugcugaggauga

SEQ ID NO: 738931 - RNA, 17 nt, Artificial Sequence
  Synthetic
aaguucucuuaggauga

SEQ ID NO: 738932 - RNA, 17 nt, Artificial Sequence
  Synthetic
cuaggcccaagggauga

SEQ ID NO: 738933 - RNA, 17 nt, Artificial Sequence
  Synthetic
uuguuauuuagggauga

SEQ ID NO: 738934 - RNA, 17 nt, Artificial Sequence
  Synthetic
caauagguuugggauga

SEQ ID NO: 738935 - RNA, 17 nt, Artificial Sequence
  Synthetic
caguagguuugggauga

SEQ ID NO: 738936 - RNA, 17 nt, Artificial Sequence
  Synthetic
aaagaucagguggauga

SEQ ID NO: 738937 - RNA, 17 nt, Artificial Sequence
  Synthetic
accuauuauguggauga

SEQ ID NO: 738938 - RNA, 17 nt, Artificial Sequence
  Synthetic
cucuaaccuuuggauga

SEQ ID NO: 738939 - RNA, 17 nt, Artificial Sequence
  Synthetic
uucugggguuuggauga

SEQ ID NO: 738940 - RNA, 17 nt, Artificial Sequence
  Synthetic
aaagcaauuuuggauga

SEQ ID NO: 738941 - RNA, 17 nt, Artificial Sequence
  Synthetic
uuuggagccaaugauga

SEQ ID NO: 738942 - RNA, 17 nt, Artificial Sequence
  Synthetic
aauaguaauaaugauga

SEQ ID NO: 738943 - RNA, 17 nt, Artificial Sequence
  Synthetic
uugcagagccaugauga

SEQ ID NO: 738944 - RNA, 17 nt, Artificial Sequence
  Synthetic
uaugaaccucaugauga

SEQ ID NO: 738945 - RNA, 17 nt, Artificial Sequence
  Synthetic
aauaucuaagaugauga

SEQ ID NO: 738946 - RNA, 17 nt, Artificial Sequence
  Synthetic
aguagaugggaugauga

SEQ ID NO: 738947 - RNA, 17 nt, Artificial Sequence
  Synthetic
ccuuuguaugaugauga

SEQ ID NO: 738948 - RNA, 17 nt, Artificial Sequence
  Synthetic
uugaauaauuaugauga

SEQ ID NO: 738949 - RNA, 17 nt, Artificial Sequence
  Synthetic
agaucauuaacugauga

SEQ ID NO: 738950 - RNA, 17 nt, Artificial Sequence
  Synthetic
cauucagugacugauga

SEQ ID NO: 738951 - RNA, 17 nt, Artificial Sequence
  Synthetic
auaccaccuccugauga

SEQ ID NO: 738952 - RNA, 17 nt, Artificial Sequence
  Synthetic
augaugauggcugauga

SEQ ID NO: 738953 - RNA, 17 nt, Artificial Sequence
  Synthetic
aaugccaccagugauga

SEQ ID NO: 738954 - RNA, 17 nt, Artificial Sequence
  Synthetic
acagaauucagugauga

SEQ ID NO: 738955 - RNA, 17 nt, Artificial Sequence
  Synthetic
aaucaucuuggugauga

SEQ ID NO: 738956 - RNA, 17 nt, Artificial Sequence
  Synthetic
caagugucuugugauga

SEQ ID NO: 738957 - RNA, 17 nt, Artificial Sequence
  Synthetic
uaacauaauauugauga

SEQ ID NO: 738958 - RNA, 17 nt, Artificial Sequence
  Synthetic
aaugaggaauuugauga

SEQ ID NO: 738959 - RNA, 17 nt, Artificial Sequence
  Synthetic
augauuuucuuugauga

SEQ ID NO: 738960 - RNA, 17 nt, Artificial Sequence
  Synthetic
cugaggaauuuugauga

SEQ ID NO: 738961 - RNA, 17 nt, Artificial Sequence
  Synthetic
auuuuaggaaaauauga

SEQ ID NO: 738962 - RNA, 17 nt, Artificial Sequence
  Synthetic
uacuuuuugaaauauga

SEQ ID NO: 738963 - RNA, 17 nt, Artificial Sequence
  Synthetic
ucuguuccuaaauauga

SEQ ID NO: 738964 - RNA, 17 nt, Artificial Sequence
  Synthetic
cuuccuuaacaauauga

SEQ ID NO: 738965 - RNA, 17 nt, Artificial Sequence
  Synthetic
auacuuuaacaauauga

SEQ ID NO: 738966 - RNA, 17 nt, Artificial Sequence
  Synthetic
uguguuucacaauauga

SEQ ID NO: 738967 - RNA, 17 nt, Artificial Sequence
  Synthetic
ucaccuacucaauauga

SEQ ID NO: 738968 - RNA, 17 nt, Artificial Sequence
  Synthetic
uuaaauauucaauauga

SEQ ID NO: 738969 - RNA, 17 nt, Artificial Sequence
  Synthetic
aguaaacgugaauauga

SEQ ID NO: 738970 - RNA, 17 nt, Artificial Sequence
  Synthetic
cauaacaucuaauauga

SEQ ID NO: 738971 - RNA, 17 nt, Artificial Sequence
  Synthetic
aggcugcagucauauga

SEQ ID NO: 738972 - RNA, 17 nt, Artificial Sequence
  Synthetic
uauugagccagauauga

SEQ ID NO: 738973 - RNA, 17 nt, Artificial Sequence
  Synthetic
uugacaucuagauauga

SEQ ID NO: 738974 - RNA, 17 nt, Artificial Sequence
  Synthetic
aacagccaaggauauga

SEQ ID NO: 738975 - RNA, 17 nt, Artificial Sequence
  Synthetic
aaguucaucugauauga

SEQ ID NO: 738976 - RNA, 17 nt, Artificial Sequence
  Synthetic
uauuggaggugauauga

SEQ ID NO: 738977 - RNA, 17 nt, Artificial Sequence
  Synthetic
uauucagaaauauauga

SEQ ID NO: 738978 - RNA, 17 nt, Artificial Sequence
  Synthetic
uauuuuuaaguauauga

SEQ ID NO: 738979 - RNA, 17 nt, Artificial Sequence
  Synthetic
uguucuucaguauauga

SEQ ID NO: 738980 - RNA, 17 nt, Artificial Sequence
  Synthetic
uuuuguguauuauauga

SEQ ID NO: 738981 - RNA, 17 nt, Artificial Sequence
  Synthetic
aaauguaucuuauauga

SEQ ID NO: 738982 - RNA, 17 nt, Artificial Sequence
  Synthetic
uagaguguguuauauga

SEQ ID NO: 738983 - RNA, 17 nt, Artificial Sequence
  Synthetic
cuuucuuuuuuauauga

SEQ ID NO: 738984 - RNA, 17 nt, Artificial Sequence
  Synthetic
caccuuuugaacuauga

SEQ ID NO: 738985 - RNA, 17 nt, Artificial Sequence
  Synthetic
uauugaauacacuauga

SEQ ID NO: 738986 - RNA, 17 nt, Artificial Sequence
  Synthetic
uaggccaaugacuauga

SEQ ID NO: 738987 - RNA, 17 nt, Artificial Sequence
  Synthetic
uuucaaaggcccuauga

SEQ ID NO: 738988 - RNA, 17 nt, Artificial Sequence
  Synthetic
cucaugaaugccuauga

SEQ ID NO: 738989 - RNA, 17 nt, Artificial Sequence
  Synthetic
ugucucuaaugcuauga

SEQ ID NO: 738990 - RNA, 17 nt, Artificial Sequence
  Synthetic
uuucuucuacucuauga

SEQ ID NO: 738991 - RNA, 17 nt, Artificial Sequence
  Synthetic
uuuggcauugucuauga

SEQ ID NO: 738992 - RNA, 17 nt, Artificial Sequence
  Synthetic
aggccaguugucuauga

SEQ ID NO: 738993 - RNA, 17 nt, Artificial Sequence
  Synthetic
auuaugacuuucuauga

SEQ ID NO: 738994 - RNA, 17 nt, Artificial Sequence
  Synthetic
ugagguuuggaguauga

SEQ ID NO: 738995 - RNA, 17 nt, Artificial Sequence
  Synthetic
auguuuucaacguauga

SEQ ID NO: 738996 - RNA, 17 nt, Artificial Sequence
  Synthetic
uuuaagcaagcguauga

SEQ ID NO: 738997 - RNA, 17 nt, Artificial Sequence
  Synthetic
uuuaagauuggguauga

SEQ ID NO: 738998 - RNA, 17 nt, Artificial Sequence
  Synthetic
acuuccuuuugguauga

SEQ ID NO: 738999 - RNA, 17 nt, Artificial Sequence
  Synthetic
uuaugaacaauguauga

SEQ ID NO: 739000 - RNA, 17 nt, Artificial Sequence
  Synthetic
agagcucuccuguauga

SEQ ID NO: 739001 - RNA, 17 nt, Artificial Sequence
  Synthetic
ugcuuguagcuguauga

SEQ ID NO: 739002 - RNA, 17 nt, Artificial Sequence
  Synthetic
uaucaucacuuguauga

SEQ ID NO: 739003 - RNA, 17 nt, Artificial Sequence
  Synthetic
caauuuagcuuguauga

SEQ ID NO: 739004 - RNA, 17 nt, Artificial Sequence
  Synthetic
uggguuugcuuguauga

SEQ ID NO: 739005 - RNA, 17 nt, Artificial Sequence
  Synthetic
acaauucagaauuauga

SEQ ID NO: 739006 - RNA, 17 nt, Artificial Sequence
  Synthetic
ugauggaaacauuauga

SEQ ID NO: 739007 - RNA, 17 nt, Artificial Sequence
  Synthetic
aucauuuaccauuauga

SEQ ID NO: 739008 - RNA, 17 nt, Artificial Sequence
  Synthetic
cccuuagcucauuauga

SEQ ID NO: 739009 - RNA, 17 nt, Artificial Sequence
  Synthetic
caaagggaggauuauga

SEQ ID NO: 739010 - RNA, 17 nt, Artificial Sequence
  Synthetic
aaaucuauuuauuauga

SEQ ID NO: 739011 - RNA, 17 nt, Artificial Sequence
  Synthetic
auauuuucaacuuauga

SEQ ID NO: 739012 - RNA, 17 nt, Artificial Sequence
  Synthetic
auguuuucaacuuauga

SEQ ID NO: 739013 - RNA, 17 nt, Artificial Sequence
  Synthetic
uaauaaaauacuuauga

SEQ ID NO: 739014 - RNA, 17 nt, Artificial Sequence
  Synthetic
ucuuggggcccuuauga

SEQ ID NO: 739015 - RNA, 17 nt, Artificial Sequence
  Synthetic
acuuauuuagcuuauga

SEQ ID NO: 739016 - RNA, 17 nt, Artificial Sequence
  Synthetic
ugcuccucaucuuauga

SEQ ID NO: 739017 - RNA, 17 nt, Artificial Sequence
  Synthetic
ucauauaauucuuauga

SEQ ID NO: 739018 - RNA, 17 nt, Artificial Sequence
  Synthetic
uguucccuuucuuauga

SEQ ID NO: 739019 - RNA, 17 nt, Artificial Sequence
  Synthetic
ucuuuccuuucuuauga

SEQ ID NO: 739020 - RNA, 17 nt, Artificial Sequence
  Synthetic
caccagugaaguuauga

SEQ ID NO: 739021 - RNA, 17 nt, Artificial Sequence
  Synthetic
ccucaccaagguuauga

SEQ ID NO: 739022 - RNA, 17 nt, Artificial Sequence
  Synthetic
ucaucaguugguuauga

SEQ ID NO: 739023 - RNA, 17 nt, Artificial Sequence
  Synthetic
ugagguaaauguuauga

SEQ ID NO: 739024 - RNA, 17 nt, Artificial Sequence
  Synthetic
uaaccagcauguuauga

SEQ ID NO: 739025 - RNA, 17 nt, Artificial Sequence
  Synthetic
ucuuaaaaaauuuauga

SEQ ID NO: 739026 - RNA, 17 nt, Artificial Sequence
  Synthetic
acauuuucaauuuauga

SEQ ID NO: 739027 - RNA, 17 nt, Artificial Sequence
  Synthetic
ucucauggaauuuauga

SEQ ID NO: 739028 - RNA, 17 nt, Artificial Sequence
  Synthetic
aguaagaagauuuauga

SEQ ID NO: 739029 - RNA, 17 nt, Artificial Sequence
  Synthetic
uuaacccagauuuauga

SEQ ID NO: 739030 - RNA, 17 nt, Artificial Sequence
  Synthetic
auuuuuugacuuuauga

SEQ ID NO: 739031 - RNA, 17 nt, Artificial Sequence
  Synthetic
uuucucgaaguuuauga

SEQ ID NO: 739032 - RNA, 17 nt, Artificial Sequence
  Synthetic
uuguucucuuuuuauga

SEQ ID NO: 739033 - RNA, 17 nt, Artificial Sequence
  Synthetic
auguuuacgaaaacuga

SEQ ID NO: 739034 - RNA, 17 nt, Artificial Sequence
  Synthetic
uuuuuuuuacaaacuga

SEQ ID NO: 739035 - RNA, 17 nt, Artificial Sequence
  Synthetic
caagauggagaaacuga

SEQ ID NO: 739036 - RNA, 17 nt, Artificial Sequence
  Synthetic
uaagacgaggaaacuga

SEQ ID NO: 739037 - RNA, 17 nt, Artificial Sequence
  Synthetic
uugcccucugaaacuga

SEQ ID NO: 739038 - RNA, 17 nt, Artificial Sequence
  Synthetic
agcauaacauaaacuga

SEQ ID NO: 739039 - RNA, 17 nt, Artificial Sequence
  Synthetic
uuguguugauaaacuga

SEQ ID NO: 739040 - RNA, 17 nt, Artificial Sequence
  Synthetic
aauaagugcuaaacuga

SEQ ID NO: 739041 - RNA, 17 nt, Artificial Sequence
  Synthetic
auagaccucuaaacuga

SEQ ID NO: 739042 - RNA, 17 nt, Artificial Sequence
  Synthetic
aacauacacacaacuga

SEQ ID NO: 739043 - RNA, 17 nt, Artificial Sequence
  Synthetic
uguaacaagucaacuga

SEQ ID NO: 739044 - RNA, 17 nt, Artificial Sequence
  Synthetic
uuuugaagaagaacuga

SEQ ID NO: 739045 - RNA, 17 nt, Artificial Sequence
  Synthetic
aaucagagcagaacuga

SEQ ID NO: 739046 - RNA, 17 nt, Artificial Sequence
  Synthetic
caggauccuagaacuga

SEQ ID NO: 739047 - RNA, 17 nt, Artificial Sequence
  Synthetic
auuuuaauuagaacuga

SEQ ID NO: 739048 - RNA, 17 nt, Artificial Sequence
  Synthetic
uccugccaaugaacuga

SEQ ID NO: 739049 - RNA, 17 nt, Artificial Sequence
  Synthetic
uucuugaagugaacuga

SEQ ID NO: 739050 - RNA, 17 nt, Artificial Sequence
  Synthetic
aaaaaaguaauaacuga

SEQ ID NO: 739051 - RNA, 17 nt, Artificial Sequence
  Synthetic
cggugaagcauaacuga

SEQ ID NO: 739052 - RNA, 17 nt, Artificial Sequence
  Synthetic
cugcaaaauguaacuga

SEQ ID NO: 739053 - RNA, 17 nt, Artificial Sequence
  Synthetic
aguguguaauuaacuga

SEQ ID NO: 739054 - RNA, 17 nt, Artificial Sequence
  Synthetic
caacagagaaacacuga

SEQ ID NO: 739055 - RNA, 17 nt, Artificial Sequence
  Synthetic
uuuucuuucaacacuga

SEQ ID NO: 739056 - RNA, 17 nt, Artificial Sequence
  Synthetic
ugaauacaccacacuga

SEQ ID NO: 739057 - RNA, 17 nt, Artificial Sequence
  Synthetic
aaauaaucccacacuga

SEQ ID NO: 739058 - RNA, 17 nt, Artificial Sequence
  Synthetic
aauaauuuccacacuga

SEQ ID NO: 739059 - RNA, 17 nt, Artificial Sequence
  Synthetic
ugaauacagcacacuga

SEQ ID NO: 739060 - RNA, 17 nt, Artificial Sequence
  Synthetic
ugccccacagacacuga

SEQ ID NO: 739061 - RNA, 17 nt, Artificial Sequence
  Synthetic
uaccucugagacacuga

SEQ ID NO: 739062 - RNA, 17 nt, Artificial Sequence
  Synthetic
cucaucaaggacacuga

SEQ ID NO: 739063 - RNA, 17 nt, Artificial Sequence
  Synthetic
uuuuauuuauacacuga

SEQ ID NO: 739064 - RNA, 17 nt, Artificial Sequence
  Synthetic
aaccguaagaccacuga

SEQ ID NO: 739065 - RNA, 17 nt, Artificial Sequence
  Synthetic
auaggccaggccacuga

SEQ ID NO: 739066 - RNA, 17 nt, Artificial Sequence
  Synthetic
cuccagucugccacuga

SEQ ID NO: 739067 - RNA, 17 nt, Artificial Sequence
  Synthetic
uucaauucauccacuga

SEQ ID NO: 739068 - RNA, 17 nt, Artificial Sequence
  Synthetic
auccauucauccacuga

SEQ ID NO: 739069 - RNA, 17 nt, Artificial Sequence
  Synthetic
uucuuaauauccacuga

SEQ ID NO: 739070 - RNA, 17 nt, Artificial Sequence
  Synthetic
uguggugaguccacuga

SEQ ID NO: 739071 - RNA, 17 nt, Artificial Sequence
  Synthetic
cuauuuaaaggcacuga

SEQ ID NO: 739072 - RNA, 17 nt, Artificial Sequence
  Synthetic
uuguuuuaaaucacuga

SEQ ID NO: 739073 - RNA, 17 nt, Artificial Sequence
  Synthetic
auccaguccaucacuga

SEQ ID NO: 739074 - RNA, 17 nt, Artificial Sequence
  Synthetic
agcuaaagcaucacuga

SEQ ID NO: 739075 - RNA, 17 nt, Artificial Sequence
  Synthetic
auccagucuaucacuga

SEQ ID NO: 739076 - RNA, 17 nt, Artificial Sequence
  Synthetic
cucuacuuagucacuga

SEQ ID NO: 739077 - RNA, 17 nt, Artificial Sequence
  Synthetic
uucugcauuuucacuga

SEQ ID NO: 739078 - RNA, 17 nt, Artificial Sequence
  Synthetic
uuuccuauuuucacuga

SEQ ID NO: 739079 - RNA, 17 nt, Artificial Sequence
  Synthetic
agagcauuuuucacuga

SEQ ID NO: 739080 - RNA, 17 nt, Artificial Sequence
  Synthetic
augguguaaaagacuga

SEQ ID NO: 739081 - RNA, 17 nt, Artificial Sequence
  Synthetic
cauccaguaaagacuga

SEQ ID NO: 739082 - RNA, 17 nt, Artificial Sequence
  Synthetic
aguaguggagagacuga

SEQ ID NO: 739083 - RNA, 17 nt, Artificial Sequence
  Synthetic
ccaagaguggagacuga

SEQ ID NO: 739084 - RNA, 17 nt, Artificial Sequence
  Synthetic
aggaagguuuagacuga

SEQ ID NO: 739085 - RNA, 17 nt, Artificial Sequence
  Synthetic
uuagucaggaggacuga

SEQ ID NO: 739086 - RNA, 17 nt, Artificial Sequence
  Synthetic
uucaccucagggacuga

SEQ ID NO: 739087 - RNA, 17 nt, Artificial Sequence
  Synthetic
caaaaagacuggacuga

SEQ ID NO: 739088 - RNA, 17 nt, Artificial Sequence
  Synthetic
uacccaccccugacuga

SEQ ID NO: 739089 - RNA, 17 nt, Artificial Sequence
  Synthetic
ucuagugggcugacuga

SEQ ID NO: 739090 - RNA, 17 nt, Artificial Sequence
  Synthetic
uuggcaugauugacuga

SEQ ID NO: 739091 - RNA, 17 nt, Artificial Sequence
  Synthetic
uuucuuauauugacuga

SEQ ID NO: 739092 - RNA, 17 nt, Artificial Sequence
  Synthetic
uucucccaaaauacuga

SEQ ID NO: 739093 - RNA, 17 nt, Artificial Sequence
  Synthetic
cauucuacaaauacuga

SEQ ID NO: 739094 - RNA, 17 nt, Artificial Sequence
  Synthetic
augguggagaauacuga

SEQ ID NO: 739095 - RNA, 17 nt, Artificial Sequence
  Synthetic
auaacauagcauacuga

SEQ ID NO: 739096 - RNA, 17 nt, Artificial Sequence
  Synthetic
ucccccauggauacuga

SEQ ID NO: 739097 - RNA, 17 nt, Artificial Sequence
  Synthetic
ugaguuaaugauacuga

SEQ ID NO: 739098 - RNA, 17 nt, Artificial Sequence
  Synthetic
accagguacuauacuga

SEQ ID NO: 739099 - RNA, 17 nt, Artificial Sequence
  Synthetic
uuucccugguauacuga

SEQ ID NO: 739100 - RNA, 17 nt, Artificial Sequence
  Synthetic
auagguaagacuacuga

SEQ ID NO: 739101 - RNA, 17 nt, Artificial Sequence
  Synthetic
aaauaccaagcuacuga

SEQ ID NO: 739102 - RNA, 17 nt, Artificial Sequence
  Synthetic
cuacgggaagcuacuga

SEQ ID NO: 739103 - RNA, 17 nt, Artificial Sequence
  Synthetic
aagcaagaaucuacuga

SEQ ID NO: 739104 - RNA, 17 nt, Artificial Sequence
  Synthetic
agagauuuaucuacuga

SEQ ID NO: 739105 - RNA, 17 nt, Artificial Sequence
  Synthetic
aauaaauuagguacuga

SEQ ID NO: 739106 - RNA, 17 nt, Artificial Sequence
  Synthetic
caaauaagaauuacuga

SEQ ID NO: 739107 - RNA, 17 nt, Artificial Sequence
  Synthetic
aagagaugaauuacuga

SEQ ID NO: 739108 - RNA, 17 nt, Artificial Sequence
  Synthetic
auaauacuaauuacuga

SEQ ID NO: 739109 - RNA, 17 nt, Artificial Sequence
  Synthetic
caacugucauuuacuga

SEQ ID NO: 739110 - RNA, 17 nt, Artificial Sequence
  Synthetic
aucgagucuuuuacuga

SEQ ID NO: 739111 - RNA, 17 nt, Artificial Sequence
  Synthetic
augagggaaaaaccuga

SEQ ID NO: 739112 - RNA, 17 nt, Artificial Sequence
  Synthetic
caauggaucaaaccuga

SEQ ID NO: 739113 - RNA, 17 nt, Artificial Sequence
  Synthetic
agcaugauggaaccuga

SEQ ID NO: 739114 - RNA, 17 nt, Artificial Sequence
  Synthetic
ccuaacaucacaccuga

SEQ ID NO: 739115 - RNA, 17 nt, Artificial Sequence
  Synthetic
ugcguccugccaccuga

SEQ ID NO: 739116 - RNA, 17 nt, Artificial Sequence
  Synthetic
acuucaaaagcaccuga

SEQ ID NO: 739117 - RNA, 17 nt, Artificial Sequence
  Synthetic
aagcuugaagcaccuga

SEQ ID NO: 739118 - RNA, 17 nt, Artificial Sequence
  Synthetic
uugaugaggucaccuga

SEQ ID NO: 739119 - RNA, 17 nt, Artificial Sequence
  Synthetic
ucucuguuuggaccuga

SEQ ID NO: 739120 - RNA, 17 nt, Artificial Sequence
  Synthetic
uuguaaaauauaccuga

SEQ ID NO: 739121 - RNA, 17 nt, Artificial Sequence
  Synthetic
cagucugcauuaccuga

SEQ ID NO: 739122 - RNA, 17 nt, Artificial Sequence
  Synthetic
acagacacauccccuga

SEQ ID NO: 739123 - RNA, 17 nt, Artificial Sequence
  Synthetic
ccaccugcguccccuga

SEQ ID NO: 739124 - RNA, 17 nt, Artificial Sequence
  Synthetic
ucccacguguccccuga

SEQ ID NO: 739125 - RNA, 17 nt, Artificial Sequence
  Synthetic
uauuuuuuuuccccuga

SEQ ID NO: 739126 - RNA, 17 nt, Artificial Sequence
  Synthetic
acauuuuaaggcccuga

SEQ ID NO: 739127 - RNA, 17 nt, Artificial Sequence
  Synthetic
agaggagguggcccuga

SEQ ID NO: 739128 - RNA, 17 nt, Artificial Sequence
  Synthetic
uuguauaauaucccuga

SEQ ID NO: 739129 - RNA, 17 nt, Artificial Sequence
  Synthetic
auguuucgccucccuga

SEQ ID NO: 739130 - RNA, 17 nt, Artificial Sequence
  Synthetic
ugaccccgucucccuga

SEQ ID NO: 739131 - RNA, 17 nt, Artificial Sequence
  Synthetic
cagacacuguucccuga

SEQ ID NO: 739132 - RNA, 17 nt, Artificial Sequence
  Synthetic
acucuauuguucccuga

SEQ ID NO: 739133 - RNA, 17 nt, Artificial Sequence
  Synthetic
aauaaaguggagccuga

SEQ ID NO: 739134 - RNA, 17 nt, Artificial Sequence
  Synthetic
agaauagcugagccuga

SEQ ID NO: 739135 - RNA, 17 nt, Artificial Sequence
  Synthetic
uuauugugauagccuga

SEQ ID NO: 739136 - RNA, 17 nt, Artificial Sequence
  Synthetic
aaaauucauaggccuga

SEQ ID NO: 739137 - RNA, 17 nt, Artificial Sequence
  Synthetic
cagaaauacuggccuga

SEQ ID NO: 739138 - RNA, 17 nt, Artificial Sequence
  Synthetic
ugcaugggcuggccuga

SEQ ID NO: 739139 - RNA, 17 nt, Artificial Sequence
  Synthetic
agcauuucauugccuga

SEQ ID NO: 739140 - RNA, 17 nt, Artificial Sequence
  Synthetic
auaccagagaauccuga

SEQ ID NO: 739141 - RNA, 17 nt, Artificial Sequence
  Synthetic
aucauuaaacauccuga

SEQ ID NO: 739142 - RNA, 17 nt, Artificial Sequence
  Synthetic
uggcauauauauccuga

SEQ ID NO: 739143 - RNA, 17 nt, Artificial Sequence
  Synthetic
uucccccauuauccuga

SEQ ID NO: 739144 - RNA, 17 nt, Artificial Sequence
  Synthetic
cuaauagacacuccuga

SEQ ID NO: 739145 - RNA, 17 nt, Artificial Sequence
  Synthetic
aguuaaaagccuccuga

SEQ ID NO: 739146 - RNA, 17 nt, Artificial Sequence
  Synthetic
ccuaaaagagcuccuga

SEQ ID NO: 739147 - RNA, 17 nt, Artificial Sequence
  Synthetic
cuuacaagagcuccuga

SEQ ID NO: 739148 - RNA, 17 nt, Artificial Sequence
  Synthetic
ucguacauaucuccuga

SEQ ID NO: 739149 - RNA, 17 nt, Artificial Sequence
  Synthetic
ccauauuuauuuccuga

SEQ ID NO: 739150 - RNA, 17 nt, Artificial Sequence
  Synthetic
uuaaauuauuuuccuga

SEQ ID NO: 739151 - RNA, 17 nt, Artificial Sequence
  Synthetic
aacuccuguuuuccuga

SEQ ID NO: 739152 - RNA, 17 nt, Artificial Sequence
  Synthetic
cagaauacaaaagcuga

SEQ ID NO: 739153 - RNA, 17 nt, Artificial Sequence
  Synthetic
cuaaagaagaaagcuga

SEQ ID NO: 739154 - RNA, 17 nt, Artificial Sequence
  Synthetic
cauucaccacaagcuga

SEQ ID NO: 739155 - RNA, 17 nt, Artificial Sequence
  Synthetic
auuuagcaccaagcuga

SEQ ID NO: 739156 - RNA, 17 nt, Artificial Sequence
  Synthetic
accauucaccaagcuga

SEQ ID NO: 739157 - RNA, 17 nt, Artificial Sequence
  Synthetic
ucugagacucaagcuga

SEQ ID NO: 739158 - RNA, 17 nt, Artificial Sequence
  Synthetic
aaacaguuugaagcuga

SEQ ID NO: 739159 - RNA, 17 nt, Artificial Sequence
  Synthetic
ugcagaagauaagcuga

SEQ ID NO: 739160 - RNA, 17 nt, Artificial Sequence
  Synthetic
cuucuuugauaagcuga

SEQ ID NO: 739161 - RNA, 17 nt, Artificial Sequence
  Synthetic
caagggcugacagcuga

SEQ ID NO: 739162 - RNA, 17 nt, Artificial Sequence
  Synthetic
uuguuaccuacagcuga

SEQ ID NO: 739163 - RNA, 17 nt, Artificial Sequence
  Synthetic
uuccccuuuacagcuga

SEQ ID NO: 739164 - RNA, 17 nt, Artificial Sequence
  Synthetic
aaugggcugccagcuga

SEQ ID NO: 739165 - RNA, 17 nt, Artificial Sequence
  Synthetic
accaucacagcagcuga

SEQ ID NO: 739166 - RNA, 17 nt, Artificial Sequence
  Synthetic
cuaaaacugagagcuga

SEQ ID NO: 739167 - RNA, 17 nt, Artificial Sequence
  Synthetic
aaacagcuuugagcuga

SEQ ID NO: 739168 - RNA, 17 nt, Artificial Sequence
  Synthetic
uuaccuaccauagcuga

SEQ ID NO: 739169 - RNA, 17 nt, Artificial Sequence
  Synthetic
uguauagagauagcuga

SEQ ID NO: 739170 - RNA, 17 nt, Artificial Sequence
  Synthetic
auuuauucauuagcuga

SEQ ID NO: 739171 - RNA, 17 nt, Artificial Sequence
  Synthetic
cuguauagcuuagcuga

SEQ ID NO: 739172 - RNA, 17 nt, Artificial Sequence
  Synthetic
auucugcugcacgcuga

SEQ ID NO: 739173 - RNA, 17 nt, Artificial Sequence
  Synthetic
ugguaguggaaggcuga

SEQ ID NO: 739174 - RNA, 17 nt, Artificial Sequence
  Synthetic
acaaauuggaaggcuga

SEQ ID NO: 739175 - RNA, 17 nt, Artificial Sequence
  Synthetic
ugacaaaugaaggcuga

SEQ ID NO: 739176 - RNA, 17 nt, Artificial Sequence
  Synthetic
cugggaaaucaggcuga

SEQ ID NO: 739177 - RNA, 17 nt, Artificial Sequence
  Synthetic
ucuguaugagaggcuga

SEQ ID NO: 739178 - RNA, 17 nt, Artificial Sequence
  Synthetic
caggaggccgaggcuga

SEQ ID NO: 739179 - RNA, 17 nt, Artificial Sequence
  Synthetic
ucugaauaugaggcuga

SEQ ID NO: 739180 - RNA, 17 nt, Artificial Sequence
  Synthetic
ucggaugcugaggcuga

SEQ ID NO: 739181 - RNA, 17 nt, Artificial Sequence
  Synthetic
uguauggcaagggcuga

SEQ ID NO: 739182 - RNA, 17 nt, Artificial Sequence
  Synthetic
aauuuguggagggcuga

SEQ ID NO: 739183 - RNA, 17 nt, Artificial Sequence
  Synthetic
ugguccuugagggcuga

SEQ ID NO: 739184 - RNA, 17 nt, Artificial Sequence
  Synthetic
acuaauuugugggcuga

SEQ ID NO: 739185 - RNA, 17 nt, Artificial Sequence
  Synthetic
uuaaaaucaauggcuga

SEQ ID NO: 739186 - RNA, 17 nt, Artificial Sequence
  Synthetic
ucggggaccauggcuga

SEQ ID NO: 739187 - RNA, 17 nt, Artificial Sequence
  Synthetic
uuuugcuucauggcuga

SEQ ID NO: 739188 - RNA, 17 nt, Artificial Sequence
  Synthetic
cucuuaaaccuggcuga

SEQ ID NO: 739189 - RNA, 17 nt, Artificial Sequence
  Synthetic
aaaguuuaauuggcuga

SEQ ID NO: 739190 - RNA, 17 nt, Artificial Sequence
  Synthetic
cuuuucuuguuggcuga

SEQ ID NO: 739191 - RNA, 17 nt, Artificial Sequence
  Synthetic
ucuagggaaaaugcuga

SEQ ID NO: 739192 - RNA, 17 nt, Artificial Sequence
  Synthetic
ugauaaagaaaugcuga

SEQ ID NO: 739193 - RNA, 17 nt, Artificial Sequence
  Synthetic
agccaacccaaugcuga

SEQ ID NO: 739194 - RNA, 17 nt, Artificial Sequence
  Synthetic
uuucaaauugaugcuga

SEQ ID NO: 739195 - RNA, 17 nt, Artificial Sequence
  Synthetic
uaacuuuuauaugcuga

SEQ ID NO: 739196 - RNA, 17 nt, Artificial Sequence
  Synthetic
ugaaaauauuaugcuga

SEQ ID NO: 739197 - RNA, 17 nt, Artificial Sequence
  Synthetic
caucgcugugcugcuga

SEQ ID NO: 739198 - RNA, 17 nt, Artificial Sequence
  Synthetic
agagcaacaagugcuga

SEQ ID NO: 739199 - RNA, 17 nt, Artificial Sequence
  Synthetic
aagugaagaagugcuga

SEQ ID NO: 739200 - RNA, 17 nt, Artificial Sequence
  Synthetic
aauuuacuuagugcuga

SEQ ID NO: 739201 - RNA, 17 nt, Artificial Sequence
  Synthetic
auacaaaguugugcuga

SEQ ID NO: 739202 - RNA, 17 nt, Artificial Sequence
  Synthetic
caggcuggaauugcuga

SEQ ID NO: 739203 - RNA, 17 nt, Artificial Sequence
  Synthetic
uagcaacacguugcuga

SEQ ID NO: 739204 - RNA, 17 nt, Artificial Sequence
  Synthetic
aggguggcgguugcuga

SEQ ID NO: 739205 - RNA, 17 nt, Artificial Sequence
  Synthetic
aauuagaaauuugcuga

SEQ ID NO: 739206 - RNA, 17 nt, Artificial Sequence
  Synthetic
auauagauauuugcuga

SEQ ID NO: 739207 - RNA, 17 nt, Artificial Sequence
  Synthetic
cuuuugcuuuuugcuga

SEQ ID NO: 739208 - RNA, 17 nt, Artificial Sequence
  Synthetic
cuuaaucuuuuugcuga

SEQ ID NO: 739209 - RNA, 17 nt, Artificial Sequence
  Synthetic
auucucccaaaaucuga

SEQ ID NO: 739210 - RNA, 17 nt, Artificial Sequence
  Synthetic
cggaagagaaaaucuga

SEQ ID NO: 739211 - RNA, 17 nt, Artificial Sequence
  Synthetic
aaaccuggaaaaucuga

SEQ ID NO: 739212 - RNA, 17 nt, Artificial Sequence
  Synthetic
uucagaauaaaaucuga

SEQ ID NO: 739213 - RNA, 17 nt, Artificial Sequence
  Synthetic
cuaagaaagaaaucuga

SEQ ID NO: 739214 - RNA, 17 nt, Artificial Sequence
  Synthetic
aagaaauuucaaucuga

SEQ ID NO: 739215 - RNA, 17 nt, Artificial Sequence
  Synthetic
cuaaggucagaaucuga

SEQ ID NO: 739216 - RNA, 17 nt, Artificial Sequence
  Synthetic
auacaaauggaaucuga

SEQ ID NO: 739217 - RNA, 17 nt, Artificial Sequence
  Synthetic
aaaauacuggaaucuga

SEQ ID NO: 739218 - RNA, 17 nt, Artificial Sequence
  Synthetic
uucuaucuggaaucuga

SEQ ID NO: 739219 - RNA, 17 nt, Artificial Sequence
  Synthetic
cugccacgguaaucuga

SEQ ID NO: 739220 - RNA, 17 nt, Artificial Sequence
  Synthetic
cuauauuugacaucuga

SEQ ID NO: 739221 - RNA, 17 nt, Artificial Sequence
  Synthetic
acaaaaaccccaucuga

SEQ ID NO: 739222 - RNA, 17 nt, Artificial Sequence
  Synthetic
cuuuagcauccaucuga

SEQ ID NO: 739223 - RNA, 17 nt, Artificial Sequence
  Synthetic
aauauaaaaucaucuga

SEQ ID NO: 739224 - RNA, 17 nt, Artificial Sequence
  Synthetic
ucaguuucuucaucuga

SEQ ID NO: 739225 - RNA, 17 nt, Artificial Sequence
  Synthetic
uuuaaguaaagaucuga

SEQ ID NO: 739226 - RNA, 17 nt, Artificial Sequence
  Synthetic
agucucaggagaucuga

SEQ ID NO: 739227 - RNA, 17 nt, Artificial Sequence
  Synthetic
uuucacaugagaucuga

SEQ ID NO: 739228 - RNA, 17 nt, Artificial Sequence
  Synthetic
agucucaugagaucuga

SEQ ID NO: 739229 - RNA, 17 nt, Artificial Sequence
  Synthetic
aacauuaagggaucuga

SEQ ID NO: 739230 - RNA, 17 nt, Artificial Sequence
  Synthetic
agaaaugauggaucuga

SEQ ID NO: 739231 - RNA, 17 nt, Artificial Sequence
  Synthetic
uauugaaaaugaucuga

SEQ ID NO: 739232 - RNA, 17 nt, Artificial Sequence
  Synthetic
ucuuagcccugaucuga

SEQ ID NO: 739233 - RNA, 17 nt, Artificial Sequence
  Synthetic
accauaucuugaucuga

SEQ ID NO: 739234 - RNA, 17 nt, Artificial Sequence
  Synthetic
ccaaacaaaauaucuga

SEQ ID NO: 739235 - RNA, 17 nt, Artificial Sequence
  Synthetic
agaguugaacuaucuga

SEQ ID NO: 739236 - RNA, 17 nt, Artificial Sequence
  Synthetic
aauucaguccuaucuga

SEQ ID NO: 739237 - RNA, 17 nt, Artificial Sequence
  Synthetic
ugauuguucuuaucuga

SEQ ID NO: 739238 - RNA, 17 nt, Artificial Sequence
  Synthetic
cuuaguugaaacucuga

SEQ ID NO: 739239 - RNA, 17 nt, Artificial Sequence
  Synthetic
aaaagagacaacucuga

SEQ ID NO: 739240 - RNA, 17 nt, Artificial Sequence
  Synthetic
uggaccagcaacucuga

SEQ ID NO: 739241 - RNA, 17 nt, Artificial Sequence
  Synthetic
caagcccugaacucuga

SEQ ID NO: 739242 - RNA, 17 nt, Artificial Sequence
  Synthetic
uucccuguucacucuga

SEQ ID NO: 739243 - RNA, 17 nt, Artificial Sequence
  Synthetic
cugccuguucacucuga

SEQ ID NO: 739244 - RNA, 17 nt, Artificial Sequence
  Synthetic
uugccuguucacucuga

SEQ ID NO: 739245 - RNA, 17 nt, Artificial Sequence
  Synthetic
uugcuuguucacucuga

SEQ ID NO: 739246 - RNA, 17 nt, Artificial Sequence
  Synthetic
ucucaggacuacucuga

SEQ ID NO: 739247 - RNA, 17 nt, Artificial Sequence
  Synthetic
uguaaaucuaccucuga

SEQ ID NO: 739248 - RNA, 17 nt, Artificial Sequence
  Synthetic
cagcaugaauccucuga

SEQ ID NO: 739249 - RNA, 17 nt, Artificial Sequence
  Synthetic
ccuuguaauagcucuga

SEQ ID NO: 739250 - RNA, 17 nt, Artificial Sequence
  Synthetic
agugaucauggcucuga

SEQ ID NO: 739251 - RNA, 17 nt, Artificial Sequence
  Synthetic
uugaaaauaugcucuga

SEQ ID NO: 739252 - RNA, 17 nt, Artificial Sequence
  Synthetic
cauauuaacugcucuga

SEQ ID NO: 739253 - RNA, 17 nt, Artificial Sequence
  Synthetic
cugaggagaaucucuga

SEQ ID NO: 739254 - RNA, 17 nt, Artificial Sequence
  Synthetic
aucuuguuucucucuga

SEQ ID NO: 739255 - RNA, 17 nt, Artificial Sequence
  Synthetic
acauauguggucucuga

SEQ ID NO: 739256 - RNA, 17 nt, Artificial Sequence
  Synthetic
uugauaguauucucuga

SEQ ID NO: 739257 - RNA, 17 nt, Artificial Sequence
  Synthetic
uuuauaguauucucuga

SEQ ID NO: 739258 - RNA, 17 nt, Artificial Sequence
  Synthetic
uuuguaguauucucuga

SEQ ID NO: 739259 - RNA, 17 nt, Artificial Sequence
  Synthetic
caaaagaucuucucuga

SEQ ID NO: 739260 - RNA, 17 nt, Artificial Sequence
  Synthetic
aguuuucauuucucuga

SEQ ID NO: 739261 - RNA, 17 nt, Artificial Sequence
  Synthetic
uuuccuguuuucucuga

SEQ ID NO: 739262 - RNA, 17 nt, Artificial Sequence
  Synthetic
uguuuguuuuucucuga

SEQ ID NO: 739263 - RNA, 17 nt, Artificial Sequence
  Synthetic
uugugguuaaagucuga

SEQ ID NO: 739264 - RNA, 17 nt, Artificial Sequence
  Synthetic
uaacaaagccagucuga

SEQ ID NO: 739265 - RNA, 17 nt, Artificial Sequence
  Synthetic
uagaagacucagucuga

SEQ ID NO: 739266 - RNA, 17 nt, Artificial Sequence
  Synthetic
auccacuguuagucuga

SEQ ID NO: 739267 - RNA, 17 nt, Artificial Sequence
  Synthetic
auccgcuguuagucuga

SEQ ID NO: 739268 - RNA, 17 nt, Artificial Sequence
  Synthetic
acuuugcaugggucuga

SEQ ID NO: 739269 - RNA, 17 nt, Artificial Sequence
  Synthetic
auuaacuucuggucuga

SEQ ID NO: 739270 - RNA, 17 nt, Artificial Sequence
  Synthetic
cuagagcaacugucuga

SEQ ID NO: 739271 - RNA, 17 nt, Artificial Sequence
  Synthetic
ccauguuagcugucuga

SEQ ID NO: 739272 - RNA, 17 nt, Artificial Sequence
  Synthetic
ccagagaugcugucuga

SEQ ID NO: 739273 - RNA, 17 nt, Artificial Sequence
  Synthetic
aagaaaauucugucuga

SEQ ID NO: 739274 - RNA, 17 nt, Artificial Sequence
  Synthetic
aggucaaaagugucuga

SEQ ID NO: 739275 - RNA, 17 nt, Artificial Sequence
  Synthetic
auuagaucuuugucuga

SEQ ID NO: 739276 - RNA, 17 nt, Artificial Sequence
  Synthetic
uuucugccaaauucuga

SEQ ID NO: 739277 - RNA, 17 nt, Artificial Sequence
  Synthetic
acucaggacaauucuga

SEQ ID NO: 739278 - RNA, 17 nt, Artificial Sequence
  Synthetic
auuuacaugaauucuga

SEQ ID NO: 739279 - RNA, 17 nt, Artificial Sequence
  Synthetic
acuauguaacauucuga

SEQ ID NO: 739280 - RNA, 17 nt, Artificial Sequence
  Synthetic
aucuacugccauucuga

SEQ ID NO: 739281 - RNA, 17 nt, Artificial Sequence
  Synthetic
cuuuauccucauucuga

SEQ ID NO: 739282 - RNA, 17 nt, Artificial Sequence
  Synthetic
ucccuaggagauucuga

SEQ ID NO: 739283 - RNA, 17 nt, Artificial Sequence
  Synthetic
cccuacuaugauucuga

SEQ ID NO: 739284 - RNA, 17 nt, Artificial Sequence
  Synthetic
ucuguagaauauucuga

SEQ ID NO: 739285 - RNA, 17 nt, Artificial Sequence
  Synthetic
cuggauaguuauucuga

SEQ ID NO: 739286 - RNA, 17 nt, Artificial Sequence
  Synthetic
ucauugucaacuucuga

SEQ ID NO: 739287 - RNA, 17 nt, Artificial Sequence
  Synthetic
uuuccuagcacuucuga

SEQ ID NO: 739288 - RNA, 17 nt, Artificial Sequence
  Synthetic
ugcggcguuacuucuga

SEQ ID NO: 739289 - RNA, 17 nt, Artificial Sequence
  Synthetic
uuugaaagcccuucuga

SEQ ID NO: 739290 - RNA, 17 nt, Artificial Sequence
  Synthetic
uuacuaccaucuucuga

SEQ ID NO: 739291 - RNA, 17 nt, Artificial Sequence
  Synthetic
uucucucccucuucuga

SEQ ID NO: 739292 - RNA, 17 nt, Artificial Sequence
  Synthetic
caaagacugucuucuga

SEQ ID NO: 739293 - RNA, 17 nt, Artificial Sequence
  Synthetic
aauuuauauucuucuga

SEQ ID NO: 739294 - RNA, 17 nt, Artificial Sequence
  Synthetic
cuccacuacaguucuga

SEQ ID NO: 739295 - RNA, 17 nt, Artificial Sequence
  Synthetic
uaaagaucagguucuga

SEQ ID NO: 739296 - RNA, 17 nt, Artificial Sequence
  Synthetic
cuuuaaguagguucuga

SEQ ID NO: 739297 - RNA, 17 nt, Artificial Sequence
  Synthetic
aacucuauuuguucuga

SEQ ID NO: 739298 - RNA, 17 nt, Artificial Sequence
  Synthetic
cuuugggucauuucuga

SEQ ID NO: 739299 - RNA, 17 nt, Artificial Sequence
  Synthetic
cucuccuauauuucuga

SEQ ID NO: 739300 - RNA, 17 nt, Artificial Sequence
  Synthetic
ugcggcauuauuucuga

SEQ ID NO: 739301 - RNA, 17 nt, Artificial Sequence
  Synthetic
uguggcguuauuucuga

SEQ ID NO: 739302 - RNA, 17 nt, Artificial Sequence
  Synthetic
uguuccaaacuuucuga

SEQ ID NO: 739303 - RNA, 17 nt, Artificial Sequence
  Synthetic
aaugugaaacuuucuga

SEQ ID NO: 739304 - RNA, 17 nt, Artificial Sequence
  Synthetic
cuuagcccacuuucuga

SEQ ID NO: 739305 - RNA, 17 nt, Artificial Sequence
  Synthetic
cuuugcccacuuucuga

SEQ ID NO: 739306 - RNA, 17 nt, Artificial Sequence
  Synthetic
aaaaucuugcuuucuga

SEQ ID NO: 739307 - RNA, 17 nt, Artificial Sequence
  Synthetic
ucaugaauucuuucuga

SEQ ID NO: 739308 - RNA, 17 nt, Artificial Sequence
  Synthetic
uauuuggcaguuucuga

SEQ ID NO: 739309 - RNA, 17 nt, Artificial Sequence
  Synthetic
auuccccuaguuucuga

SEQ ID NO: 739310 - RNA, 17 nt, Artificial Sequence
  Synthetic
acugauccuguuucuga

SEQ ID NO: 739311 - RNA, 17 nt, Artificial Sequence
  Synthetic
agagaugauuuuucuga

SEQ ID NO: 739312 - RNA, 17 nt, Artificial Sequence
  Synthetic
accaaggucaaaaguga

SEQ ID NO: 739313 - RNA, 17 nt, Artificial Sequence
  Synthetic
aaaaaguugaaaaguga

SEQ ID NO: 739314 - RNA, 17 nt, Artificial Sequence
  Synthetic
aacuuacuuaaaaguga

SEQ ID NO: 739315 - RNA, 17 nt, Artificial Sequence
  Synthetic
aaaugaaaacaaaguga

SEQ ID NO: 739316 - RNA, 17 nt, Artificial Sequence
  Synthetic
agugaauaacaaaguga

SEQ ID NO: 739317 - RNA, 17 nt, Artificial Sequence
  Synthetic
acagaagcccaaaguga

SEQ ID NO: 739318 - RNA, 17 nt, Artificial Sequence
  Synthetic
auuagccaugaaaguga

SEQ ID NO: 739319 - RNA, 17 nt, Artificial Sequence
  Synthetic
aaauuucaauaaaguga

SEQ ID NO: 739320 - RNA, 17 nt, Artificial Sequence
  Synthetic
agaaaauccuaaaguga

SEQ ID NO: 739321 - RNA, 17 nt, Artificial Sequence
  Synthetic
aaguaaaagacaaguga

SEQ ID NO: 739322 - RNA, 17 nt, Artificial Sequence
  Synthetic
uugaaaaauccaaguga

SEQ ID NO: 739323 - RNA, 17 nt, Artificial Sequence
  Synthetic
aggcaaccaucaaguga

SEQ ID NO: 739324 - RNA, 17 nt, Artificial Sequence
  Synthetic
uuugaucucagaaguga

SEQ ID NO: 739325 - RNA, 17 nt, Artificial Sequence
  Synthetic
uggagucagagaaguga

SEQ ID NO: 739326 - RNA, 17 nt, Artificial Sequence
  Synthetic
augacaucgagaaguga

SEQ ID NO: 739327 - RNA, 17 nt, Artificial Sequence
  Synthetic
agaaguugacgaaguga

SEQ ID NO: 739328 - RNA, 17 nt, Artificial Sequence
  Synthetic
agaucugaaggaaguga

SEQ ID NO: 739329 - RNA, 17 nt, Artificial Sequence
  Synthetic
uauuuauaaggaaguga

SEQ ID NO: 739330 - RNA, 17 nt, Artificial Sequence
  Synthetic
ccacgcauuugaaguga

SEQ ID NO: 739331 - RNA, 17 nt, Artificial Sequence
  Synthetic
ugaaagaacauaaguga

SEQ ID NO: 739332 - RNA, 17 nt, Artificial Sequence
  Synthetic
cuaagcuucauaaguga

SEQ ID NO: 739333 - RNA, 17 nt, Artificial Sequence
  Synthetic
acuguucuccuaaguga

SEQ ID NO: 739334 - RNA, 17 nt, Artificial Sequence
  Synthetic
aaaaauaugcuaaguga

SEQ ID NO: 739335 - RNA, 17 nt, Artificial Sequence
  Synthetic
ugguucuguuuaaguga

SEQ ID NO: 739336 - RNA, 17 nt, Artificial Sequence
  Synthetic
uagcauaggaacaguga

SEQ ID NO: 739337 - RNA, 17 nt, Artificial Sequence
  Synthetic
aauagggugaacaguga

SEQ ID NO: 739338 - RNA, 17 nt, Artificial Sequence
  Synthetic
uauuuuauucacaguga

SEQ ID NO: 739339 - RNA, 17 nt, Artificial Sequence
  Synthetic
caaaauuaucccaguga

SEQ ID NO: 739340 - RNA, 17 nt, Artificial Sequence
  Synthetic
cguuagggucccaguga

SEQ ID NO: 739341 - RNA, 17 nt, Artificial Sequence
  Synthetic
agccacucagccaguga

SEQ ID NO: 739342 - RNA, 17 nt, Artificial Sequence
  Synthetic
acucugauggccaguga

SEQ ID NO: 739343 - RNA, 17 nt, Artificial Sequence
  Synthetic
ucucugauggccaguga

SEQ ID NO: 739344 - RNA, 17 nt, Artificial Sequence
  Synthetic
uugugaaacagcaguga

SEQ ID NO: 739345 - RNA, 17 nt, Artificial Sequence
  Synthetic
ccauuagacagcaguga

SEQ ID NO: 739346 - RNA, 17 nt, Artificial Sequence
  Synthetic
aggggcuguagcaguga

SEQ ID NO: 739347 - RNA, 17 nt, Artificial Sequence
  Synthetic
aauuggguaugcaguga

SEQ ID NO: 739348 - RNA, 17 nt, Artificial Sequence
  Synthetic
agguuaaugugcaguga

SEQ ID NO: 739349 - RNA, 17 nt, Artificial Sequence
  Synthetic
uugaaacaaaucaguga

SEQ ID NO: 739350 - RNA, 17 nt, Artificial Sequence
  Synthetic
caaaugcccaucaguga

SEQ ID NO: 739351 - RNA, 17 nt, Artificial Sequence
  Synthetic
aaugucuguaucaguga

SEQ ID NO: 739352 - RNA, 17 nt, Artificial Sequence
  Synthetic
ugggcaguauucaguga

SEQ ID NO: 739353 - RNA, 17 nt, Artificial Sequence
  Synthetic
uuuuuuugcuucaguga

SEQ ID NO: 739354 - RNA, 17 nt, Artificial Sequence
  Synthetic
uugaauaaguucaguga

SEQ ID NO: 739355 - RNA, 17 nt, Artificial Sequence
  Synthetic
acucuucauuucaguga

SEQ ID NO: 739356 - RNA, 17 nt, Artificial Sequence
  Synthetic
auuugauguuucaguga

SEQ ID NO: 739357 - RNA, 17 nt, Artificial Sequence
  Synthetic
uagcagggucagaguga

SEQ ID NO: 739358 - RNA, 17 nt, Artificial Sequence
  Synthetic
aggaagaaagagaguga

SEQ ID NO: 739359 - RNA, 17 nt, Artificial Sequence
  Synthetic
agauaauaggagaguga

SEQ ID NO: 739360 - RNA, 17 nt, Artificial Sequence
  Synthetic
acaacaccugagaguga

SEQ ID NO: 739361 - RNA, 17 nt, Artificial Sequence
  Synthetic
aucucaaaauagaguga

SEQ ID NO: 739362 - RNA, 17 nt, Artificial Sequence
  Synthetic
ccucccucauagaguga

SEQ ID NO: 739363 - RNA, 17 nt, Artificial Sequence
  Synthetic
ccuauuacuuagaguga

SEQ ID NO: 739364 - RNA, 17 nt, Artificial Sequence
  Synthetic
uaucuuuuggggaguga

SEQ ID NO: 739365 - RNA, 17 nt, Artificial Sequence
  Synthetic
cuugggagguggaguga

SEQ ID NO: 739366 - RNA, 17 nt, Artificial Sequence
  Synthetic
aguuucacuuggaguga

SEQ ID NO: 739367 - RNA, 17 nt, Artificial Sequence
  Synthetic
uagcugaagaugaguga

SEQ ID NO: 739368 - RNA, 17 nt, Artificial Sequence
  Synthetic
caggaaccuaugaguga

SEQ ID NO: 739369 - RNA, 17 nt, Artificial Sequence
  Synthetic
agcucuuaacugaguga

SEQ ID NO: 739370 - RNA, 17 nt, Artificial Sequence
  Synthetic
aaaaccguguugaguga

SEQ ID NO: 739371 - RNA, 17 nt, Artificial Sequence
  Synthetic
aaacaguaaaauaguga

SEQ ID NO: 739372 - RNA, 17 nt, Artificial Sequence
  Synthetic
agaucaggaaauaguga

SEQ ID NO: 739373 - RNA, 17 nt, Artificial Sequence
  Synthetic
auaugcaaacauaguga

SEQ ID NO: 739374 - RNA, 17 nt, Artificial Sequence
  Synthetic
uauuuuauacauaguga

SEQ ID NO: 739375 - RNA, 17 nt, Artificial Sequence
  Synthetic
cuaaacauagauaguga

SEQ ID NO: 739376 - RNA, 17 nt, Artificial Sequence
  Synthetic
uagagagaggauaguga

SEQ ID NO: 739377 - RNA, 17 nt, Artificial Sequence
  Synthetic
agaggaggauauaguga

SEQ ID NO: 739378 - RNA, 17 nt, Artificial Sequence
  Synthetic
caaaagauuuauaguga

SEQ ID NO: 739379 - RNA, 17 nt, Artificial Sequence
  Synthetic
aaaugaccuccuaguga

SEQ ID NO: 739380 - RNA, 17 nt, Artificial Sequence
  Synthetic
uucuaaaggaguaguga

SEQ ID NO: 739381 - RNA, 17 nt, Artificial Sequence
  Synthetic
uuuuugugagguaguga

SEQ ID NO: 739382 - RNA, 17 nt, Artificial Sequence
  Synthetic
uuauuucucuguaguga

SEQ ID NO: 739383 - RNA, 17 nt, Artificial Sequence
  Synthetic
uucaucagaauuaguga

SEQ ID NO: 739384 - RNA, 17 nt, Artificial Sequence
  Synthetic
ucuauucaaguuaguga

SEQ ID NO: 739385 - RNA, 17 nt, Artificial Sequence
  Synthetic
uauucucauuuuaguga

SEQ ID NO: 739386 - RNA, 17 nt, Artificial Sequence
  Synthetic
ccauaugcacaacguga

SEQ ID NO: 739387 - RNA, 17 nt, Artificial Sequence
  Synthetic
uaauuccaguuacguga

SEQ ID NO: 739388 - RNA, 17 nt, Artificial Sequence
  Synthetic
acacaaaacuaccguga

SEQ ID NO: 739389 - RNA, 17 nt, Artificial Sequence
  Synthetic
ccauggaggcagcguga

SEQ ID NO: 739390 - RNA, 17 nt, Artificial Sequence
  Synthetic
aaauuagccaggcguga

SEQ ID NO: 739391 - RNA, 17 nt, Artificial Sequence
  Synthetic
accaaacccacucguga

SEQ ID NO: 739392 - RNA, 17 nt, Artificial Sequence
  Synthetic
uuugcaacuucucguga

SEQ ID NO: 739393 - RNA, 17 nt, Artificial Sequence
  Synthetic
acacagggaaaagguga

SEQ ID NO: 739394 - RNA, 17 nt, Artificial Sequence
  Synthetic
ccuaacacucaagguga

SEQ ID NO: 739395 - RNA, 17 nt, Artificial Sequence
  Synthetic
aucauggcagaagguga

SEQ ID NO: 739396 - RNA, 17 nt, Artificial Sequence
  Synthetic
aucauaguagaagguga

SEQ ID NO: 739397 - RNA, 17 nt, Artificial Sequence
  Synthetic
aucaugguggaagguga

SEQ ID NO: 739398 - RNA, 17 nt, Artificial Sequence
  Synthetic
augaaugcaacagguga

SEQ ID NO: 739399 - RNA, 17 nt, Artificial Sequence
  Synthetic
uguggagagccagguga

SEQ ID NO: 739400 - RNA, 17 nt, Artificial Sequence
  Synthetic
caaaugccagcagguga

SEQ ID NO: 739401 - RNA, 17 nt, Artificial Sequence
  Synthetic
cgaaggaauagagguga

SEQ ID NO: 739402 - RNA, 17 nt, Artificial Sequence
  Synthetic
auacauauaggagguga

SEQ ID NO: 739403 - RNA, 17 nt, Artificial Sequence
  Synthetic
accgucuguggagguga

SEQ ID NO: 739404 - RNA, 17 nt, Artificial Sequence
  Synthetic
auagguuacugagguga

SEQ ID NO: 739405 - RNA, 17 nt, Artificial Sequence
  Synthetic
agguguuacugagguga

SEQ ID NO: 739406 - RNA, 17 nt, Artificial Sequence
  Synthetic
agugggaccugagguga

SEQ ID NO: 739407 - RNA, 17 nt, Artificial Sequence
  Synthetic
auaauugcuugagguga

SEQ ID NO: 739408 - RNA, 17 nt, Artificial Sequence
  Synthetic
aagcccaaaauagguga

SEQ ID NO: 739409 - RNA, 17 nt, Artificial Sequence
  Synthetic
auacgucucauagguga

SEQ ID NO: 739410 - RNA, 17 nt, Artificial Sequence
  Synthetic
aaguacaggauagguga

SEQ ID NO: 739411 - RNA, 17 nt, Artificial Sequence
  Synthetic
uauauaucucuagguga

SEQ ID NO: 739412 - RNA, 17 nt, Artificial Sequence
  Synthetic
uacucaguuguagguga

SEQ ID NO: 739413 - RNA, 17 nt, Artificial Sequence
  Synthetic
acugaucaaaaggguga

SEQ ID NO: 739414 - RNA, 17 nt, Artificial Sequence
  Synthetic
cagguucugaaggguga

SEQ ID NO: 739415 - RNA, 17 nt, Artificial Sequence
  Synthetic
cacccuuuacaggguga

SEQ ID NO: 739416 - RNA, 17 nt, Artificial Sequence
  Synthetic
acuaaaauucaggguga

SEQ ID NO: 739417 - RNA, 17 nt, Artificial Sequence
  Synthetic
accaagcccuaggguga

SEQ ID NO: 739418 - RNA, 17 nt, Artificial Sequence
  Synthetic
auuucuacuucggguga

SEQ ID NO: 739419 - RNA, 17 nt, Artificial Sequence
  Synthetic
uacagguggagggguga

SEQ ID NO: 739420 - RNA, 17 nt, Artificial Sequence
  Synthetic
ucccaucugggggguga

SEQ ID NO: 739421 - RNA, 17 nt, Artificial Sequence
  Synthetic
caugaguauggggguga

SEQ ID NO: 739422 - RNA, 17 nt, Artificial Sequence
  Synthetic
cacuccagccuggguga

SEQ ID NO: 739423 - RNA, 17 nt, Artificial Sequence
  Synthetic
ugguuaccucuggguga

SEQ ID NO: 739424 - RNA, 17 nt, Artificial Sequence
  Synthetic
uuucuuggucuggguga

SEQ ID NO: 739425 - RNA, 17 nt, Artificial Sequence
  Synthetic
caucaaaaaguggguga

SEQ ID NO: 739426 - RNA, 17 nt, Artificial Sequence
  Synthetic
caaauaggguuggguga

SEQ ID NO: 739427 - RNA, 17 nt, Artificial Sequence
  Synthetic
ucuuccauucaugguga

SEQ ID NO: 739428 - RNA, 17 nt, Artificial Sequence
  Synthetic
cucucucuucaugguga

SEQ ID NO: 739429 - RNA, 17 nt, Artificial Sequence
  Synthetic
uauaacuguuaugguga

SEQ ID NO: 739430 - RNA, 17 nt, Artificial Sequence
  Synthetic
ccgguauacacugguga

SEQ ID NO: 739431 - RNA, 17 nt, Artificial Sequence
  Synthetic
agaucagggccugguga

SEQ ID NO: 739432 - RNA, 17 nt, Artificial Sequence
  Synthetic
cauauuucuccugguga

SEQ ID NO: 739433 - RNA, 17 nt, Artificial Sequence
  Synthetic
uuugaugccgcugguga

SEQ ID NO: 739434 - RNA, 17 nt, Artificial Sequence
  Synthetic
acuccacaaucugguga

SEQ ID NO: 739435 - RNA, 17 nt, Artificial Sequence
  Synthetic
cauuuggugucugguga

SEQ ID NO: 739436 - RNA, 17 nt, Artificial Sequence
  Synthetic
agaaggaucagugguga

SEQ ID NO: 739437 - RNA, 17 nt, Artificial Sequence
  Synthetic
ucagaggugagugguga

SEQ ID NO: 739438 - RNA, 17 nt, Artificial Sequence
  Synthetic
auauuuuauagugguga

SEQ ID NO: 739439 - RNA, 17 nt, Artificial Sequence
  Synthetic
aagcuaaaaggugguga

SEQ ID NO: 739440 - RNA, 17 nt, Artificial Sequence
  Synthetic
ccagugucaggugguga

SEQ ID NO: 739441 - RNA, 17 nt, Artificial Sequence
  Synthetic
aggaggaauggugguga

SEQ ID NO: 739442 - RNA, 17 nt, Artificial Sequence
  Synthetic
aacccucauggugguga

SEQ ID NO: 739443 - RNA, 17 nt, Artificial Sequence
  Synthetic
aagcaucagcuugguga

SEQ ID NO: 739444 - RNA, 17 nt, Artificial Sequence
  Synthetic
auuacauguguugguga

SEQ ID NO: 739445 - RNA, 17 nt, Artificial Sequence
  Synthetic
uugauugacuuugguga

SEQ ID NO: 739446 - RNA, 17 nt, Artificial Sequence
  Synthetic
ugaguggauuuugguga

SEQ ID NO: 739447 - RNA, 17 nt, Artificial Sequence
  Synthetic
uggcaugauuuugguga

SEQ ID NO: 739448 - RNA, 17 nt, Artificial Sequence
  Synthetic
uaacaaacuuuugguga

SEQ ID NO: 739449 - RNA, 17 nt, Artificial Sequence
  Synthetic
uauuuuuauaaauguga

SEQ ID NO: 739450 - RNA, 17 nt, Artificial Sequence
  Synthetic
aaggauuguaaauguga

SEQ ID NO: 739451 - RNA, 17 nt, Artificial Sequence
  Synthetic
acccucaaacaauguga

SEQ ID NO: 739452 - RNA, 17 nt, Artificial Sequence
  Synthetic
cugggacaacaauguga

SEQ ID NO: 739453 - RNA, 17 nt, Artificial Sequence
  Synthetic
ugcauccugcaauguga

SEQ ID NO: 739454 - RNA, 17 nt, Artificial Sequence
  Synthetic
cuggggccagaauguga

SEQ ID NO: 739455 - RNA, 17 nt, Artificial Sequence
  Synthetic
caaaauucagaauguga

SEQ ID NO: 739456 - RNA, 17 nt, Artificial Sequence
  Synthetic
caugauucauaauguga

SEQ ID NO: 739457 - RNA, 17 nt, Artificial Sequence
  Synthetic
acauuuaacacauguga

SEQ ID NO: 739458 - RNA, 17 nt, Artificial Sequence
  Synthetic
uugugggguacauguga

SEQ ID NO: 739459 - RNA, 17 nt, Artificial Sequence
  Synthetic
cuccuuucagcauguga

SEQ ID NO: 739460 - RNA, 17 nt, Artificial Sequence
  Synthetic
aaauaaauaucauguga

SEQ ID NO: 739461 - RNA, 17 nt, Artificial Sequence
  Synthetic
ccccaugugucauguga

SEQ ID NO: 739462 - RNA, 17 nt, Artificial Sequence
  Synthetic
ucaugggguucauguga

SEQ ID NO: 739463 - RNA, 17 nt, Artificial Sequence
  Synthetic
acuuacaagcgauguga

SEQ ID NO: 739464 - RNA, 17 nt, Artificial Sequence
  Synthetic
acuuacaagggauguga

SEQ ID NO: 739465 - RNA, 17 nt, Artificial Sequence
  Synthetic
acuugcaagggauguga

SEQ ID NO: 739466 - RNA, 17 nt, Artificial Sequence
  Synthetic
augcuacaaugauguga

SEQ ID NO: 739467 - RNA, 17 nt, Artificial Sequence
  Synthetic
uauauauauauauguga

SEQ ID NO: 739468 - RNA, 17 nt, Artificial Sequence
  Synthetic
uugauauagcuauguga

SEQ ID NO: 739469 - RNA, 17 nt, Artificial Sequence
  Synthetic
uuccuuucucuauguga

SEQ ID NO: 739470 - RNA, 17 nt, Artificial Sequence
  Synthetic
uucugacugguauguga

SEQ ID NO: 739471 - RNA, 17 nt, Artificial Sequence
  Synthetic
aacucaaaauuauguga

SEQ ID NO: 739472 - RNA, 17 nt, Artificial Sequence
  Synthetic
ugauagcuguuauguga

SEQ ID NO: 739473 - RNA, 17 nt, Artificial Sequence
  Synthetic
ugccugccuuuauguga

SEQ ID NO: 739474 - RNA, 17 nt, Artificial Sequence
  Synthetic
ugguucuguuuauguga

SEQ ID NO: 739475 - RNA, 17 nt, Artificial Sequence
  Synthetic
cuuuguuuacacuguga

SEQ ID NO: 739476 - RNA, 17 nt, Artificial Sequence
  Synthetic
ucccugagucacuguga

SEQ ID NO: 739477 - RNA, 17 nt, Artificial Sequence
  Synthetic
aagaaguuuuacuguga

SEQ ID NO: 739478 - RNA, 17 nt, Artificial Sequence
  Synthetic
cugcaaaagaccuguga

SEQ ID NO: 739479 - RNA, 17 nt, Artificial Sequence
  Synthetic
uacaguauuuccuguga

SEQ ID NO: 739480 - RNA, 17 nt, Artificial Sequence
  Synthetic
aaggcagaaagcuguga

SEQ ID NO: 739481 - RNA, 17 nt, Artificial Sequence
  Synthetic
acagcaucaagcuguga

SEQ ID NO: 739482 - RNA, 17 nt, Artificial Sequence
  Synthetic
aaguuagcuggcuguga

SEQ ID NO: 739483 - RNA, 17 nt, Artificial Sequence
  Synthetic
uccuucagcugcuguga

SEQ ID NO: 739484 - RNA, 17 nt, Artificial Sequence
  Synthetic
caggcacugugcuguga

SEQ ID NO: 739485 - RNA, 17 nt, Artificial Sequence
  Synthetic
ucuagauguugcuguga

SEQ ID NO: 739486 - RNA, 17 nt, Artificial Sequence
  Synthetic
uacaguaaaaucuguga

SEQ ID NO: 739487 - RNA, 17 nt, Artificial Sequence
  Synthetic
ucuuguauuaucuguga

SEQ ID NO: 739488 - RNA, 17 nt, Artificial Sequence
  Synthetic
uucuuuuuucucuguga

SEQ ID NO: 739489 - RNA, 17 nt, Artificial Sequence
  Synthetic
cuuguucuagucuguga

SEQ ID NO: 739490 - RNA, 17 nt, Artificial Sequence
  Synthetic
uuccuauccuucuguga

SEQ ID NO: 739491 - RNA, 17 nt, Artificial Sequence
  Synthetic
uuacuuaauuucuguga

SEQ ID NO: 739492 - RNA, 17 nt, Artificial Sequence
  Synthetic
cacuaccaaaaguguga

SEQ ID NO: 739493 - RNA, 17 nt, Artificial Sequence
  Synthetic
cugucucggaaguguga

SEQ ID NO: 739494 - RNA, 17 nt, Artificial Sequence
  Synthetic
acccucaaacaguguga

SEQ ID NO: 739495 - RNA, 17 nt, Artificial Sequence
  Synthetic
cuugaaaccagguguga

SEQ ID NO: 739496 - RNA, 17 nt, Artificial Sequence
  Synthetic
aagggggagggguguga

SEQ ID NO: 739497 - RNA, 17 nt, Artificial Sequence
  Synthetic
auaugcuggggguguga

SEQ ID NO: 739498 - RNA, 17 nt, Artificial Sequence
  Synthetic
cuuuacuagcuguguga

SEQ ID NO: 739499 - RNA, 17 nt, Artificial Sequence
  Synthetic
uauaugcacguguguga

SEQ ID NO: 739500 - RNA, 17 nt, Artificial Sequence
  Synthetic
cccuauccauuguguga

SEQ ID NO: 739501 - RNA, 17 nt, Artificial Sequence
  Synthetic
uaccuguggaauuguga

SEQ ID NO: 739502 - RNA, 17 nt, Artificial Sequence
  Synthetic
auuuggacacauuguga

SEQ ID NO: 739503 - RNA, 17 nt, Artificial Sequence
  Synthetic
agccuacuugauuguga

SEQ ID NO: 739504 - RNA, 17 nt, Artificial Sequence
  Synthetic
ugcccugcauauuguga

SEQ ID NO: 739505 - RNA, 17 nt, Artificial Sequence
  Synthetic
uaauacucauauuguga

SEQ ID NO: 739506 - RNA, 17 nt, Artificial Sequence
  Synthetic
acaugaauaacuuguga

SEQ ID NO: 739507 - RNA, 17 nt, Artificial Sequence
  Synthetic
uguuccuugacuuguga

SEQ ID NO: 739508 - RNA, 17 nt, Artificial Sequence
  Synthetic
uuauauuguacuuguga

SEQ ID NO: 739509 - RNA, 17 nt, Artificial Sequence
  Synthetic
cuauguacaccuuguga

SEQ ID NO: 739510 - RNA, 17 nt, Artificial Sequence
  Synthetic
cuccugcugccuuguga

SEQ ID NO: 739511 - RNA, 17 nt, Artificial Sequence
  Synthetic
uccacacuuccuuguga

SEQ ID NO: 739512 - RNA, 17 nt, Artificial Sequence
  Synthetic
uauugaagcucuuguga

SEQ ID NO: 739513 - RNA, 17 nt, Artificial Sequence
  Synthetic
ucuucagguuguuguga

SEQ ID NO: 739514 - RNA, 17 nt, Artificial Sequence
  Synthetic
aaaaacacauuuuguga

SEQ ID NO: 739515 - RNA, 17 nt, Artificial Sequence
  Synthetic
acaucauaaaaaauuga

SEQ ID NO: 739516 - RNA, 17 nt, Artificial Sequence
  Synthetic
uuccacaacaaaauuga

SEQ ID NO: 739517 - RNA, 17 nt, Artificial Sequence
  Synthetic
augauccagaaaauuga

SEQ ID NO: 739518 - RNA, 17 nt, Artificial Sequence
  Synthetic
uaaagauuuaaaauuga

SEQ ID NO: 739519 - RNA, 17 nt, Artificial Sequence
  Synthetic
ucacaugaacaaauuga

SEQ ID NO: 739520 - RNA, 17 nt, Artificial Sequence
  Synthetic
agguuugcugaaauuga

SEQ ID NO: 739521 - RNA, 17 nt, Artificial Sequence
  Synthetic
aguagagaauaaauuga

SEQ ID NO: 739522 - RNA, 17 nt, Artificial Sequence
  Synthetic
uagaaagaguaaauuga

SEQ ID NO: 739523 - RNA, 17 nt, Artificial Sequence
  Synthetic
uaaaaaugguaaauuga

SEQ ID NO: 739524 - RNA, 17 nt, Artificial Sequence
  Synthetic
cucaaaguguaaauuga

SEQ ID NO: 739525 - RNA, 17 nt, Artificial Sequence
  Synthetic
aaaaaguauccaauuga

SEQ ID NO: 739526 - RNA, 17 nt, Artificial Sequence
  Synthetic
agccccuuuccaauuga

SEQ ID NO: 739527 - RNA, 17 nt, Artificial Sequence
  Synthetic
agcccuggaagaauuga

SEQ ID NO: 739528 - RNA, 17 nt, Artificial Sequence
  Synthetic
uagcagcacagaauuga

SEQ ID NO: 739529 - RNA, 17 nt, Artificial Sequence
  Synthetic
uggcaauggagaauuga

SEQ ID NO: 739530 - RNA, 17 nt, Artificial Sequence
  Synthetic
ugaguuugacgaauuga

SEQ ID NO: 739531 - RNA, 17 nt, Artificial Sequence
  Synthetic
ucuuuagcaggaauuga

SEQ ID NO: 739532 - RNA, 17 nt, Artificial Sequence
  Synthetic
cguaaaaguggaauuga

SEQ ID NO: 739533 - RNA, 17 nt, Artificial Sequence
  Synthetic
auguaaaaaugaauuga

SEQ ID NO: 739534 - RNA, 17 nt, Artificial Sequence
  Synthetic
auaauguuaauaauuga

SEQ ID NO: 739535 - RNA, 17 nt, Artificial Sequence
  Synthetic
ugauagcauauaauuga

SEQ ID NO: 739536 - RNA, 17 nt, Artificial Sequence
  Synthetic
aagcaucuaguaauuga

SEQ ID NO: 739537 - RNA, 17 nt, Artificial Sequence
  Synthetic
aguaacaauguaauuga

SEQ ID NO: 739538 - RNA, 17 nt, Artificial Sequence
  Synthetic
cucgguaaauuaauuga

SEQ ID NO: 739539 - RNA, 17 nt, Artificial Sequence
  Synthetic
caguagggaaacauuga

SEQ ID NO: 739540 - RNA, 17 nt, Artificial Sequence
  Synthetic
aaugguuuacacauuga

SEQ ID NO: 739541 - RNA, 17 nt, Artificial Sequence
  Synthetic
cugaaguagcacauuga

SEQ ID NO: 739542 - RNA, 17 nt, Artificial Sequence
  Synthetic
ugaacaucagacauuga

SEQ ID NO: 739543 - RNA, 17 nt, Artificial Sequence
  Synthetic
cuacaaauagacauuga

SEQ ID NO: 739544 - RNA, 17 nt, Artificial Sequence
  Synthetic
accuugacugacauuga

SEQ ID NO: 739545 - RNA, 17 nt, Artificial Sequence
  Synthetic
aucuaacaauacauuga

SEQ ID NO: 739546 - RNA, 17 nt, Artificial Sequence
  Synthetic
aaaauggccuacauuga

SEQ ID NO: 739547 - RNA, 17 nt, Artificial Sequence
  Synthetic
aaguacagaaccauuga

SEQ ID NO: 739548 - RNA, 17 nt, Artificial Sequence
  Synthetic
auccaguccaccauuga

SEQ ID NO: 739549 - RNA, 17 nt, Artificial Sequence
  Synthetic
aucugaucuaccauuga

SEQ ID NO: 739550 - RNA, 17 nt, Artificial Sequence
  Synthetic
ugcaaagcaugcauuga

SEQ ID NO: 739551 - RNA, 17 nt, Artificial Sequence
  Synthetic
auccaguauaucauuga

SEQ ID NO: 739552 - RNA, 17 nt, Artificial Sequence
  Synthetic
auccagucuaucauuga

SEQ ID NO: 739553 - RNA, 17 nt, Artificial Sequence
  Synthetic
auccggucuaucauuga

SEQ ID NO: 739554 - RNA, 17 nt, Artificial Sequence
  Synthetic
agauuaagacucauuga

SEQ ID NO: 739555 - RNA, 17 nt, Artificial Sequence
  Synthetic
cuguacuaugucauuga

SEQ ID NO: 739556 - RNA, 17 nt, Artificial Sequence
  Synthetic
agaugggaauucauuga

SEQ ID NO: 739557 - RNA, 17 nt, Artificial Sequence
  Synthetic
aacuuucuccagauuga

SEQ ID NO: 739558 - RNA, 17 nt, Artificial Sequence
  Synthetic
acacaaucagagauuga

SEQ ID NO: 739559 - RNA, 17 nt, Artificial Sequence
  Synthetic
uaguuugcugagauuga

SEQ ID NO: 739560 - RNA, 17 nt, Artificial Sequence
  Synthetic
cagaucccauagauuga

SEQ ID NO: 739561 - RNA, 17 nt, Artificial Sequence
  Synthetic
aucuacuugucgauuga

SEQ ID NO: 739562 - RNA, 17 nt, Artificial Sequence
  Synthetic
aggugauuaaggauuga

SEQ ID NO: 739563 - RNA, 17 nt, Artificial Sequence
  Synthetic
cuucuguccaggauuga

SEQ ID NO: 739564 - RNA, 17 nt, Artificial Sequence
  Synthetic
agaaacccuaggauuga

SEQ ID NO: 739565 - RNA, 17 nt, Artificial Sequence
  Synthetic
uucuguuuuaggauuga

SEQ ID NO: 739566 - RNA, 17 nt, Artificial Sequence
  Synthetic
cucaguaaugggauuga

SEQ ID NO: 739567 - RNA, 17 nt, Artificial Sequence
  Synthetic
agaaaauucaugauuga

SEQ ID NO: 739568 - RNA, 17 nt, Artificial Sequence
  Synthetic
aaaauaugauugauuga

SEQ ID NO: 739569 - RNA, 17 nt, Artificial Sequence
  Synthetic
agggauggaaauauuga

SEQ ID NO: 739570 - RNA, 17 nt, Artificial Sequence
  Synthetic
uaccaacuaaauauuga

SEQ ID NO: 739571 - RNA, 17 nt, Artificial Sequence
  Synthetic
uugugggcacauauuga

SEQ ID NO: 739572 - RNA, 17 nt, Artificial Sequence
  Synthetic
acugcuguacauauuga

SEQ ID NO: 739573 - RNA, 17 nt, Artificial Sequence
  Synthetic
auuccuugucauauuga

SEQ ID NO: 739574 - RNA, 17 nt, Artificial Sequence
  Synthetic
auagaaaaugauauuga

SEQ ID NO: 739575 - RNA, 17 nt, Artificial Sequence
  Synthetic
acauacacugauauuga

SEQ ID NO: 739576 - RNA, 17 nt, Artificial Sequence
  Synthetic
ucagguaauuauauuga

SEQ ID NO: 739577 - RNA, 17 nt, Artificial Sequence
  Synthetic
cacuccaaaccuauuga

SEQ ID NO: 739578 - RNA, 17 nt, Artificial Sequence
  Synthetic
cugggauuuaguauuga

SEQ ID NO: 739579 - RNA, 17 nt, Artificial Sequence
  Synthetic
aauaaauuagguauuga

SEQ ID NO: 739580 - RNA, 17 nt, Artificial Sequence
  Synthetic
uaauaaaaauguauuga

SEQ ID NO: 739581 - RNA, 17 nt, Artificial Sequence
  Synthetic
acuuugaaauguauuga

SEQ ID NO: 739582 - RNA, 17 nt, Artificial Sequence
  Synthetic
cccuuggaauguauuga

SEQ ID NO: 739583 - RNA, 17 nt, Artificial Sequence
  Synthetic
agacugcuauguauuga

SEQ ID NO: 739584 - RNA, 17 nt, Artificial Sequence
  Synthetic
cucugccuguguauuga

SEQ ID NO: 739585 - RNA, 17 nt, Artificial Sequence
  Synthetic
auccagucuauuauuga

SEQ ID NO: 739586 - RNA, 17 nt, Artificial Sequence
  Synthetic
agcugugaacuuauuga

SEQ ID NO: 739587 - RNA, 17 nt, Artificial Sequence
  Synthetic
accauaucaguuauuga

SEQ ID NO: 739588 - RNA, 17 nt, Artificial Sequence
  Synthetic
aauaaacuaguuauuga

SEQ ID NO: 739589 - RNA, 17 nt, Artificial Sequence
  Synthetic
ugacagacauuuauuga

SEQ ID NO: 739590 - RNA, 17 nt, Artificial Sequence
  Synthetic
caacagccauuuauuga

SEQ ID NO: 739591 - RNA, 17 nt, Artificial Sequence
  Synthetic
aaccguucauuuauuga

SEQ ID NO: 739592 - RNA, 17 nt, Artificial Sequence
  Synthetic
uugccucaguuuauuga

SEQ ID NO: 739593 - RNA, 17 nt, Artificial Sequence
  Synthetic
aagagauauuuuauuga

SEQ ID NO: 739594 - RNA, 17 nt, Artificial Sequence
  Synthetic
agugauaguuuuauuga

SEQ ID NO: 739595 - RNA, 17 nt, Artificial Sequence
  Synthetic
aaugagauaaaacuuga

SEQ ID NO: 739596 - RNA, 17 nt, Artificial Sequence
  Synthetic
ucagagggacaacuuga

SEQ ID NO: 739597 - RNA, 17 nt, Artificial Sequence
  Synthetic
ccaugcccuuaacuuga

SEQ ID NO: 739598 - RNA, 17 nt, Artificial Sequence
  Synthetic
cugaaagauacacuuga

SEQ ID NO: 739599 - RNA, 17 nt, Artificial Sequence
  Synthetic
caaaaguaagcacuuga

SEQ ID NO: 739600 - RNA, 17 nt, Artificial Sequence
  Synthetic
ugagguucugcacuuga

SEQ ID NO: 739601 - RNA, 17 nt, Artificial Sequence
  Synthetic
aauuugaccagacuuga

SEQ ID NO: 739602 - RNA, 17 nt, Artificial Sequence
  Synthetic
uugaagaugagacuuga

SEQ ID NO: 739603 - RNA, 17 nt, Artificial Sequence
  Synthetic
aacggaaguagacuuga

SEQ ID NO: 739604 - RNA, 17 nt, Artificial Sequence
  Synthetic
auauauaugggacuuga

SEQ ID NO: 739605 - RNA, 17 nt, Artificial Sequence
  Synthetic
uaauuaugcauacuuga

SEQ ID NO: 739606 - RNA, 17 nt, Artificial Sequence
  Synthetic
ugcuggcauauacuuga

SEQ ID NO: 739607 - RNA, 17 nt, Artificial Sequence
  Synthetic
ccugguaguauacuuga

SEQ ID NO: 739608 - RNA, 17 nt, Artificial Sequence
  Synthetic
uucuggauguuacuuga

SEQ ID NO: 739609 - RNA, 17 nt, Artificial Sequence
  Synthetic
uauuaggagcaccuuga

SEQ ID NO: 739610 - RNA, 17 nt, Artificial Sequence
  Synthetic
uaaugucaucaccuuga

SEQ ID NO: 739611 - RNA, 17 nt, Artificial Sequence
  Synthetic
aauuuaaucuaccuuga

SEQ ID NO: 739612 - RNA, 17 nt, Artificial Sequence
  Synthetic
aaaaaaaaaacccuuga

SEQ ID NO: 739613 - RNA, 17 nt, Artificial Sequence
  Synthetic
cccaugguuucccuuga

SEQ ID NO: 739614 - RNA, 17 nt, Artificial Sequence
  Synthetic
cuuggcuugagccuuga

SEQ ID NO: 739615 - RNA, 17 nt, Artificial Sequence
  Synthetic
auuacguguagccuuga

SEQ ID NO: 739616 - RNA, 17 nt, Artificial Sequence
  Synthetic
aauuucaagugccuuga

SEQ ID NO: 739617 - RNA, 17 nt, Artificial Sequence
  Synthetic
cuuagguguugccuuga

SEQ ID NO: 739618 - RNA, 17 nt, Artificial Sequence
  Synthetic
auucucaugcuccuuga

SEQ ID NO: 739619 - RNA, 17 nt, Artificial Sequence
  Synthetic
uuuuggcugguccuuga

SEQ ID NO: 739620 - RNA, 17 nt, Artificial Sequence
  Synthetic
ugcugccauaagcuuga

SEQ ID NO: 739621 - RNA, 17 nt, Artificial Sequence
  Synthetic
auccucucacagcuuga

SEQ ID NO: 739622 - RNA, 17 nt, Artificial Sequence
  Synthetic
aaaggagcccagcuuga

SEQ ID NO: 739623 - RNA, 17 nt, Artificial Sequence
  Synthetic
ucaugcuuugagcuuga

SEQ ID NO: 739624 - RNA, 17 nt, Artificial Sequence
  Synthetic
aaauguggauagcuuga

SEQ ID NO: 739625 - RNA, 17 nt, Artificial Sequence
  Synthetic
agucaaugguagcuuga

SEQ ID NO: 739626 - RNA, 17 nt, Artificial Sequence
  Synthetic
aggcauugguagcuuga

SEQ ID NO: 739627 - RNA, 17 nt, Artificial Sequence
  Synthetic
agucauugguagcuuga

SEQ ID NO: 739628 - RNA, 17 nt, Artificial Sequence
  Synthetic
aauuuaaauuagcuuga

SEQ ID NO: 739629 - RNA, 17 nt, Artificial Sequence
  Synthetic
caggcuuuuuggcuuga

SEQ ID NO: 739630 - RNA, 17 nt, Artificial Sequence
  Synthetic
aaagcacaaaugcuuga

SEQ ID NO: 739631 - RNA, 17 nt, Artificial Sequence
  Synthetic
aaaggagaaaugcuuga

SEQ ID NO: 739632 - RNA, 17 nt, Artificial Sequence
  Synthetic
aaagaauaaaugcuuga

SEQ ID NO: 739633 - RNA, 17 nt, Artificial Sequence
  Synthetic
aacagaaaugugcuuga

SEQ ID NO: 739634 - RNA, 17 nt, Artificial Sequence
  Synthetic
aaagaauaauugcuuga

SEQ ID NO: 739635 - RNA, 17 nt, Artificial Sequence
  Synthetic
agcaauccauugcuuga

SEQ ID NO: 739636 - RNA, 17 nt, Artificial Sequence
  Synthetic
aagauacuauugcuuga

SEQ ID NO: 739637 - RNA, 17 nt, Artificial Sequence
  Synthetic
ugaucuuauuugcuuga

SEQ ID NO: 739638 - RNA, 17 nt, Artificial Sequence
  Synthetic
cauucagagaaucuuga

SEQ ID NO: 739639 - RNA, 17 nt, Artificial Sequence
  Synthetic
uucaaagaagaucuuga

SEQ ID NO: 739640 - RNA, 17 nt, Artificial Sequence
  Synthetic
caacuauuagaucuuga

SEQ ID NO: 739641 - RNA, 17 nt, Artificial Sequence
  Synthetic
aggcaauuggaucuuga

SEQ ID NO: 739642 - RNA, 17 nt, Artificial Sequence
  Synthetic
uuucaauucccucuuga

SEQ ID NO: 739643 - RNA, 17 nt, Artificial Sequence
  Synthetic
uuuauaccugcucuuga

SEQ ID NO: 739644 - RNA, 17 nt, Artificial Sequence
  Synthetic
augugcucuucucuuga

SEQ ID NO: 739645 - RNA, 17 nt, Artificial Sequence
  Synthetic
uuugaucagggucuuga

SEQ ID NO: 739646 - RNA, 17 nt, Artificial Sequence
  Synthetic
auuaauaucugucuuga

SEQ ID NO: 739647 - RNA, 17 nt, Artificial Sequence
  Synthetic
cuuaucuaaauucuuga

SEQ ID NO: 739648 - RNA, 17 nt, Artificial Sequence
  Synthetic
uuuaacaacauucuuga

SEQ ID NO: 739649 - RNA, 17 nt, Artificial Sequence
  Synthetic
ugugaauacauucuuga

SEQ ID NO: 739650 - RNA, 17 nt, Artificial Sequence
  Synthetic
aggaaagugauucuuga

SEQ ID NO: 739651 - RNA, 17 nt, Artificial Sequence
  Synthetic
caguuagaacuucuuga

SEQ ID NO: 739652 - RNA, 17 nt, Artificial Sequence
  Synthetic
auucauauacuucuuga

SEQ ID NO: 739653 - RNA, 17 nt, Artificial Sequence
  Synthetic
cccaaaaaucuucuuga

SEQ ID NO: 739654 - RNA, 17 nt, Artificial Sequence
  Synthetic
uaaauauuucuucuuga

SEQ ID NO: 739655 - RNA, 17 nt, Artificial Sequence
  Synthetic
uaauucucauuucuuga

SEQ ID NO: 739656 - RNA, 17 nt, Artificial Sequence
  Synthetic
aauacuucauuucuuga

SEQ ID NO: 739657 - RNA, 17 nt, Artificial Sequence
  Synthetic
cgucccauauuucuuga

SEQ ID NO: 739658 - RNA, 17 nt, Artificial Sequence
  Synthetic
uaaaauuuguuucuuga

SEQ ID NO: 739659 - RNA, 17 nt, Artificial Sequence
  Synthetic
cgugagcauaaaguuga

SEQ ID NO: 739660 - RNA, 17 nt, Artificial Sequence
  Synthetic
uaaaagacagaaguuga

SEQ ID NO: 739661 - RNA, 17 nt, Artificial Sequence
  Synthetic
auuacuugggaaguuga

SEQ ID NO: 739662 - RNA, 17 nt, Artificial Sequence
  Synthetic
ugauaauguacaguuga

SEQ ID NO: 739663 - RNA, 17 nt, Artificial Sequence
  Synthetic
uuuacaaacccaguuga

SEQ ID NO: 739664 - RNA, 17 nt, Artificial Sequence
  Synthetic
uuuuguugaagaguuga

SEQ ID NO: 739665 - RNA, 17 nt, Artificial Sequence
  Synthetic
uuaguauggagaguuga

SEQ ID NO: 739666 - RNA, 17 nt, Artificial Sequence
  Synthetic
agggaagugagaguuga

SEQ ID NO: 739667 - RNA, 17 nt, Artificial Sequence
  Synthetic
auuuuaguaggaguuga

SEQ ID NO: 739668 - RNA, 17 nt, Artificial Sequence
  Synthetic
uuugcccagggaguuga

SEQ ID NO: 739669 - RNA, 17 nt, Artificial Sequence
  Synthetic
uagcauuuuggaguuga

SEQ ID NO: 739670 - RNA, 17 nt, Artificial Sequence
  Synthetic
ucuuuaaaucuaguuga

SEQ ID NO: 739671 - RNA, 17 nt, Artificial Sequence
  Synthetic
uuaauaaugguaguuga

SEQ ID NO: 739672 - RNA, 17 nt, Artificial Sequence
  Synthetic
acaacaggauuaguuga

SEQ ID NO: 739673 - RNA, 17 nt, Artificial Sequence
  Synthetic
aaagucuguuuaguuga

SEQ ID NO: 739674 - RNA, 17 nt, Artificial Sequence
  Synthetic
auccaauccaacguuga

SEQ ID NO: 739675 - RNA, 17 nt, Artificial Sequence
  Synthetic
uucacuuuacucguuga

SEQ ID NO: 739676 - RNA, 17 nt, Artificial Sequence
  Synthetic
uuuuguauaaagguuga

SEQ ID NO: 739677 - RNA, 17 nt, Artificial Sequence
  Synthetic
uguagaugacagguuga

SEQ ID NO: 739678 - RNA, 17 nt, Artificial Sequence
  Synthetic
cagguaaaagagguuga

SEQ ID NO: 739679 - RNA, 17 nt, Artificial Sequence
  Synthetic
uguagaugaaggguuga

SEQ ID NO: 739680 - RNA, 17 nt, Artificial Sequence
  Synthetic
ccuagaugacggguuga

SEQ ID NO: 739681 - RNA, 17 nt, Artificial Sequence
  Synthetic
uguagaugacggguuga

SEQ ID NO: 739682 - RNA, 17 nt, Artificial Sequence
  Synthetic
aacuaggagcugguuga

SEQ ID NO: 739683 - RNA, 17 nt, Artificial Sequence
  Synthetic
ccaucuccauugguuga

SEQ ID NO: 739684 - RNA, 17 nt, Artificial Sequence
  Synthetic
uagauccuauugguuga

SEQ ID NO: 739685 - RNA, 17 nt, Artificial Sequence
  Synthetic
augcauugcuugguuga

SEQ ID NO: 739686 - RNA, 17 nt, Artificial Sequence
  Synthetic
aaagucuacaauguuga

SEQ ID NO: 739687 - RNA, 17 nt, Artificial Sequence
  Synthetic
cccuuguacaauguuga

SEQ ID NO: 739688 - RNA, 17 nt, Artificial Sequence
  Synthetic
uguucugaccauguuga

SEQ ID NO: 739689 - RNA, 17 nt, Artificial Sequence
  Synthetic
uggcaggcccauguuga

SEQ ID NO: 739690 - RNA, 17 nt, Artificial Sequence
  Synthetic
auccauucgcauguuga

SEQ ID NO: 739691 - RNA, 17 nt, Artificial Sequence
  Synthetic
uauucuuggcauguuga

SEQ ID NO: 739692 - RNA, 17 nt, Artificial Sequence
  Synthetic
acugcugugcauguuga

SEQ ID NO: 739693 - RNA, 17 nt, Artificial Sequence
  Synthetic
uaaggacaucauguuga

SEQ ID NO: 739694 - RNA, 17 nt, Artificial Sequence
  Synthetic
aauaaaauggauguuga

SEQ ID NO: 739695 - RNA, 17 nt, Artificial Sequence
  Synthetic
aaauaagugacuguuga

SEQ ID NO: 739696 - RNA, 17 nt, Artificial Sequence
  Synthetic
uuucuuaaugcuguuga

SEQ ID NO: 739697 - RNA, 17 nt, Artificial Sequence
  Synthetic
cugcaaggaaguguuga

SEQ ID NO: 739698 - RNA, 17 nt, Artificial Sequence
  Synthetic
uuggcaaacaguguuga

SEQ ID NO: 739699 - RNA, 17 nt, Artificial Sequence
  Synthetic
uacaaaaagaguguuga

SEQ ID NO: 739700 - RNA, 17 nt, Artificial Sequence
  Synthetic
uuugaucuugguguuga

SEQ ID NO: 739701 - RNA, 17 nt, Artificial Sequence
  Synthetic
ccagugagcauuguuga

SEQ ID NO: 739702 - RNA, 17 nt, Artificial Sequence
  Synthetic
cagguuucuguuguuga

SEQ ID NO: 739703 - RNA, 17 nt, Artificial Sequence
  Synthetic
auauuauguguuguuga

SEQ ID NO: 739704 - RNA, 17 nt, Artificial Sequence
  Synthetic
auccauucauuuguuga

SEQ ID NO: 739705 - RNA, 17 nt, Artificial Sequence
  Synthetic
uauucagauuuuguuga

SEQ ID NO: 739706 - RNA, 17 nt, Artificial Sequence
  Synthetic
auuuaauauuuuguuga

SEQ ID NO: 739707 - RNA, 17 nt, Artificial Sequence
  Synthetic
agaugcauaaaauuuga

SEQ ID NO: 739708 - RNA, 17 nt, Artificial Sequence
  Synthetic
uggaagaaacaauuuga

SEQ ID NO: 739709 - RNA, 17 nt, Artificial Sequence
  Synthetic
aauagcugagaauuuga

SEQ ID NO: 739710 - RNA, 17 nt, Artificial Sequence
  Synthetic
ucaacauaggaauuuga

SEQ ID NO: 739711 - RNA, 17 nt, Artificial Sequence
  Synthetic
aaaauaauauaauuuga

SEQ ID NO: 739712 - RNA, 17 nt, Artificial Sequence
  Synthetic
aacaguagguaauuuga

SEQ ID NO: 739713 - RNA, 17 nt, Artificial Sequence
  Synthetic
aguuuuucaacauuuga

SEQ ID NO: 739714 - RNA, 17 nt, Artificial Sequence
  Synthetic
auaaaaggugcauuuga

SEQ ID NO: 739715 - RNA, 17 nt, Artificial Sequence
  Synthetic
uaguagaaaucauuuga

SEQ ID NO: 739716 - RNA, 17 nt, Artificial Sequence
  Synthetic
uuuaaggcaggauuuga

SEQ ID NO: 739717 - RNA, 17 nt, Artificial Sequence
  Synthetic
aucauccugggauuuga

SEQ ID NO: 739718 - RNA, 17 nt, Artificial Sequence
  Synthetic
ugaccacauugauuuga

SEQ ID NO: 739719 - RNA, 17 nt, Artificial Sequence
  Synthetic
acacuguaaauauuuga

SEQ ID NO: 739720 - RNA, 17 nt, Artificial Sequence
  Synthetic
uucacauuuauauuuga

SEQ ID NO: 739721 - RNA, 17 nt, Artificial Sequence
  Synthetic
uacuguaaauuauuuga

SEQ ID NO: 739722 - RNA, 17 nt, Artificial Sequence
  Synthetic
uguauucccuuauuuga

SEQ ID NO: 739723 - RNA, 17 nt, Artificial Sequence
  Synthetic
uaauuuaucuuauuuga

SEQ ID NO: 739724 - RNA, 17 nt, Artificial Sequence
  Synthetic
ucucugcucuuauuuga

SEQ ID NO: 739725 - RNA, 17 nt, Artificial Sequence
  Synthetic
aaacacauuuuauuuga

SEQ ID NO: 739726 - RNA, 17 nt, Artificial Sequence
  Synthetic
caguaaauaaacuuuga

SEQ ID NO: 739727 - RNA, 17 nt, Artificial Sequence
  Synthetic
uggaccagcaacuuuga

SEQ ID NO: 739728 - RNA, 17 nt, Artificial Sequence
  Synthetic
uuuugcagcaacuuuga

SEQ ID NO: 739729 - RNA, 17 nt, Artificial Sequence
  Synthetic
cuuguggaagacuuuga

SEQ ID NO: 739730 - RNA, 17 nt, Artificial Sequence
  Synthetic
aaggacugagacuuuga

SEQ ID NO: 739731 - RNA, 17 nt, Artificial Sequence
  Synthetic
cucaucaaugacuuuga

SEQ ID NO: 739732 - RNA, 17 nt, Artificial Sequence
  Synthetic
uuuagauaauacuuuga

SEQ ID NO: 739733 - RNA, 17 nt, Artificial Sequence
  Synthetic
agcaauuauuacuuuga

SEQ ID NO: 739734 - RNA, 17 nt, Artificial Sequence
  Synthetic
ucaccaacuuacuuuga

SEQ ID NO: 739735 - RNA, 17 nt, Artificial Sequence
  Synthetic
uucccuguuuacuuuga

SEQ ID NO: 739736 - RNA, 17 nt, Artificial Sequence
  Synthetic
cuucuccuuaccuuuga

SEQ ID NO: 739737 - RNA, 17 nt, Artificial Sequence
  Synthetic
uaagaaauucccuuuga

SEQ ID NO: 739738 - RNA, 17 nt, Artificial Sequence
  Synthetic
auuaaguaagccuuuga

SEQ ID NO: 739739 - RNA, 17 nt, Artificial Sequence
  Synthetic
uuguuuauguccuuuga

SEQ ID NO: 739740 - RNA, 17 nt, Artificial Sequence
  Synthetic
aacuagaauuccuuuga

SEQ ID NO: 739741 - RNA, 17 nt, Artificial Sequence
  Synthetic
aucucgggaagcuuuga

SEQ ID NO: 739742 - RNA, 17 nt, Artificial Sequence
  Synthetic
uuuguacauagcuuuga

SEQ ID NO: 739743 - RNA, 17 nt, Artificial Sequence
  Synthetic
caaaggacaggcuuuga

SEQ ID NO: 739744 - RNA, 17 nt, Artificial Sequence
  Synthetic
aacagaaauggcuuuga

SEQ ID NO: 739745 - RNA, 17 nt, Artificial Sequence
  Synthetic
cuauuggggugcuuuga

SEQ ID NO: 739746 - RNA, 17 nt, Artificial Sequence
  Synthetic
ccuuacagucucuuuga

SEQ ID NO: 739747 - RNA, 17 nt, Artificial Sequence
  Synthetic
cccugaccauucuuuga

SEQ ID NO: 739748 - RNA, 17 nt, Artificial Sequence
  Synthetic
caagagucuuucuuuga

SEQ ID NO: 739749 - RNA, 17 nt, Artificial Sequence
  Synthetic
caaaguguuuucuuuga

SEQ ID NO: 739750 - RNA, 17 nt, Artificial Sequence
  Synthetic
aagccuuuuuucuuuga

SEQ ID NO: 739751 - RNA, 17 nt, Artificial Sequence
  Synthetic
aagcaggacaaguuuga

SEQ ID NO: 739752 - RNA, 17 nt, Artificial Sequence
  Synthetic
aucacccauaaguuuga

SEQ ID NO: 739753 - RNA, 17 nt, Artificial Sequence
  Synthetic
cccaugucccaguuuga

SEQ ID NO: 739754 - RNA, 17 nt, Artificial Sequence
  Synthetic
cuggcugcugaguuuga

SEQ ID NO: 739755 - RNA, 17 nt, Artificial Sequence
  Synthetic
aacagaggauaguuuga

SEQ ID NO: 739756 - RNA, 17 nt, Artificial Sequence
  Synthetic
auguguaucggguuuga

SEQ ID NO: 739757 - RNA, 17 nt, Artificial Sequence
  Synthetic
aguacauacugguuuga

SEQ ID NO: 739758 - RNA, 17 nt, Artificial Sequence
  Synthetic
uuacaugcuugguuuga

SEQ ID NO: 739759 - RNA, 17 nt, Artificial Sequence
  Synthetic
acugugauuugguuuga

SEQ ID NO: 739760 - RNA, 17 nt, Artificial Sequence
  Synthetic
ugucuucaaauguuuga

SEQ ID NO: 739761 - RNA, 17 nt, Artificial Sequence
  Synthetic
uucacgcagauguuuga

SEQ ID NO: 739762 - RNA, 17 nt, Artificial Sequence
  Synthetic
acccucacacuguuuga

SEQ ID NO: 739763 - RNA, 17 nt, Artificial Sequence
  Synthetic
cuuauugggcuguuuga

SEQ ID NO: 739764 - RNA, 17 nt, Artificial Sequence
  Synthetic
caaaaggaaguguuuga

SEQ ID NO: 739765 - RNA, 17 nt, Artificial Sequence
  Synthetic
acccucacauuguuuga

SEQ ID NO: 739766 - RNA, 17 nt, Artificial Sequence
  Synthetic
uuucuucaguuguuuga

SEQ ID NO: 739767 - RNA, 17 nt, Artificial Sequence
  Synthetic
uuuuaagauuuguuuga

SEQ ID NO: 739768 - RNA, 17 nt, Artificial Sequence
  Synthetic
caacaaauaaauuuuga

SEQ ID NO: 739769 - RNA, 17 nt, Artificial Sequence
  Synthetic
cuuuccaauaauuuuga

SEQ ID NO: 739770 - RNA, 17 nt, Artificial Sequence
  Synthetic
caaucacgacauuuuga

SEQ ID NO: 739771 - RNA, 17 nt, Artificial Sequence
  Synthetic
ucccagugagauuuuga

SEQ ID NO: 739772 - RNA, 17 nt, Artificial Sequence
  Synthetic
uugggucuagauuuuga

SEQ ID NO: 739773 - RNA, 17 nt, Artificial Sequence
  Synthetic
uuuccaguugauuuuga

SEQ ID NO: 739774 - RNA, 17 nt, Artificial Sequence
  Synthetic
ucuuuguguuauuuuga

SEQ ID NO: 739775 - RNA, 17 nt, Artificial Sequence
  Synthetic
caggugaaaacuuuuga

SEQ ID NO: 739776 - RNA, 17 nt, Artificial Sequence
  Synthetic
uaaugugaaccuuuuga

SEQ ID NO: 739777 - RNA, 17 nt, Artificial Sequence
  Synthetic
aaacucuacccuuuuga

SEQ ID NO: 739778 - RNA, 17 nt, Artificial Sequence
  Synthetic
uauuacccgccuuuuga

SEQ ID NO: 739779 - RNA, 17 nt, Artificial Sequence
  Synthetic
aucuauucuccuuuuga

SEQ ID NO: 739780 - RNA, 17 nt, Artificial Sequence
  Synthetic
uucaugaaugcuuuuga

SEQ ID NO: 739781 - RNA, 17 nt, Artificial Sequence
  Synthetic
uauuuucuugcuuuuga

SEQ ID NO: 739782 - RNA, 17 nt, Artificial Sequence
  Synthetic
aaagaaccaucuuuuga

SEQ ID NO: 739783 - RNA, 17 nt, Artificial Sequence
  Synthetic
aucuccaccucuuuuga

SEQ ID NO: 739784 - RNA, 17 nt, Artificial Sequence
  Synthetic
uugaaugggaguuuuga

SEQ ID NO: 739785 - RNA, 17 nt, Artificial Sequence
  Synthetic
uguuuguauaguuuuga

SEQ ID NO: 739786 - RNA, 17 nt, Artificial Sequence
  Synthetic
agaagagaggguuuuga

SEQ ID NO: 739787 - RNA, 17 nt, Artificial Sequence
  Synthetic
uucuucuaggguuuuga

SEQ ID NO: 739788 - RNA, 17 nt, Artificial Sequence
  Synthetic
auugugauguguuuuga

SEQ ID NO: 739789 - RNA, 17 nt, Artificial Sequence
  Synthetic
cuuccuuuguguuuuga

SEQ ID NO: 739790 - RNA, 17 nt, Artificial Sequence
  Synthetic
uguguccuuuguuuuga

SEQ ID NO: 739791 - RNA, 17 nt, Artificial Sequence
  Synthetic
cccccacagauuuuuga

SEQ ID NO: 739792 - RNA, 17 nt, Artificial Sequence
  Synthetic
ucaauaaauauuuuuga

SEQ ID NO: 739793 - RNA, 17 nt, Artificial Sequence
  Synthetic
uuuaccuauauuuuuga

SEQ ID NO: 739794 - RNA, 17 nt, Artificial Sequence
  Synthetic
cauggcaguauuuuuga

SEQ ID NO: 739795 - RNA, 17 nt, Artificial Sequence
  Synthetic
aucuagaaacuuuuuga

SEQ ID NO: 739796 - RNA, 17 nt, Artificial Sequence
  Synthetic
cuucacccacuuuuuga

SEQ ID NO: 739797 - RNA, 17 nt, Artificial Sequence
  Synthetic
cuucccccacuuuuuga

SEQ ID NO: 739798 - RNA, 17 nt, Artificial Sequence
  Synthetic
cuucgcccacuuuuuga

SEQ ID NO: 739799 - RNA, 17 nt, Artificial Sequence
  Synthetic
cuucgcucacuuuuuga

SEQ ID NO: 739800 - RNA, 17 nt, Artificial Sequence
  Synthetic
ccuuggccccuuuuuga

SEQ ID NO: 739801 - RNA, 17 nt, Artificial Sequence
  Synthetic
aaucucuguguuuuuga

SEQ ID NO: 739802 - RNA, 17 nt, Artificial Sequence
  Synthetic
agucacgaauuuuuuga

SEQ ID NO: 739803 - RNA, 17 nt, Artificial Sequence
  Synthetic
ugccuaacauuuuuuga

SEQ ID NO: 739804 - RNA, 17 nt, Artificial Sequence
  Synthetic
auucauugauuuuuuga

SEQ ID NO: 739805 - RNA, 17 nt, Artificial Sequence
  Synthetic
cuucauugauuuuuuga

SEQ ID NO: 739806 - RNA, 17 nt, Artificial Sequence
  Synthetic
uucauugacuuuuuuga

SEQ ID NO: 739807 - RNA, 17 nt, Artificial Sequence
  Synthetic
auucuuugcuuuuuuga

SEQ ID NO: 739808 - RNA, 17 nt, Artificial Sequence
  Synthetic
augacccuguuuuuuga

SEQ ID NO: 739809 - RNA, 17 nt, Artificial Sequence
  Synthetic
uucauugauuuuuuuga

SEQ ID NO: 739810 - RNA, 17 nt, Artificial Sequence
  Synthetic
auuaugaguuuuuuuga

SEQ ID NO: 739811 - RNA, 17 nt, Artificial Sequence
  Synthetic
uugcccauuuuuuuuga

SEQ ID NO: 739812 - RNA, 17 nt, Artificial Sequence
  Synthetic
uucuuuuuuuuuuuuga

SEQ ID NO: 739813 - RNA, 17 nt, Artificial Sequence
  Synthetic
augcugaaaaaaaaaua

SEQ ID NO: 739814 - RNA, 17 nt, Artificial Sequence
  Synthetic
uuuugggaaaaaaaaua

SEQ ID NO: 739815 - RNA, 17 nt, Artificial Sequence
  Synthetic
ucaaguugaaaaaaaua

SEQ ID NO: 739816 - RNA, 17 nt, Artificial Sequence
  Synthetic
cauuuuuuaaaaaaaua

SEQ ID NO: 739817 - RNA, 17 nt, Artificial Sequence
  Synthetic
acaaauggcaaaaaaua

SEQ ID NO: 739818 - RNA, 17 nt, Artificial Sequence
  Synthetic
cauuuagggaaaaaaua

SEQ ID NO: 739819 - RNA, 17 nt, Artificial Sequence
  Synthetic
aggagacauaaaaaaua

SEQ ID NO: 739820 - RNA, 17 nt, Artificial Sequence
  Synthetic
uucuauuguaaaaaaua

SEQ ID NO: 739821 - RNA, 17 nt, Artificial Sequence
  Synthetic
uaacaauuuaaaaaaua

SEQ ID NO: 739822 - RNA, 17 nt, Artificial Sequence
  Synthetic
uuuugcuuuaaaaaaua

SEQ ID NO: 739823 - RNA, 17 nt, Artificial Sequence
  Synthetic
ugucauucacaaaaaua

SEQ ID NO: 739824 - RNA, 17 nt, Artificial Sequence
  Synthetic
uaauuuuaccaaaaaua

SEQ ID NO: 739825 - RNA, 17 nt, Artificial Sequence
  Synthetic
cauaagaaagaaaaaua

SEQ ID NO: 739826 - RNA, 17 nt, Artificial Sequence
  Synthetic
auuugcuaagaaaaaua

SEQ ID NO: 739827 - RNA, 17 nt, Artificial Sequence
  Synthetic
agagagggagaaaaaua

SEQ ID NO: 739828 - RNA, 17 nt, Artificial Sequence
  Synthetic
ccugcaagugaaaaaua

SEQ ID NO: 739829 - RNA, 17 nt, Artificial Sequence
  Synthetic
ucaugaaaauaaaaaua

SEQ ID NO: 739830 - RNA, 17 nt, Artificial Sequence
  Synthetic
ucguuucaauaaaaaua

SEQ ID NO: 739831 - RNA, 17 nt, Artificial Sequence
  Synthetic
uuaaaugaauaaaaaua

SEQ ID NO: 739832 - RNA, 17 nt, Artificial Sequence
  Synthetic
uauacuacauaaaaaua

SEQ ID NO: 739833 - RNA, 17 nt, Artificial Sequence
  Synthetic
acauggugauaaaaaua

SEQ ID NO: 739834 - RNA, 17 nt, Artificial Sequence
  Synthetic
auauagcuauaaaaaua

SEQ ID NO: 739835 - RNA, 17 nt, Artificial Sequence
  Synthetic
aguuuaggcuaaaaaua

SEQ ID NO: 739836 - RNA, 17 nt, Artificial Sequence
  Synthetic
ucuccauauuaaaaaua

SEQ ID NO: 739837 - RNA, 17 nt, Artificial Sequence
  Synthetic
uuucuaucuuaaaaaua

SEQ ID NO: 739838 - RNA, 17 nt, Artificial Sequence
  Synthetic
uauaaauuuuaaaaaua

SEQ ID NO: 739839 - RNA, 17 nt, Artificial Sequence
  Synthetic
uugcuacacacaaaaua

SEQ ID NO: 739840 - RNA, 17 nt, Artificial Sequence
  Synthetic
ccagugugcacaaaaua

SEQ ID NO: 739841 - RNA, 17 nt, Artificial Sequence
  Synthetic
uuaauaaauacaaaaua

SEQ ID NO: 739842 - RNA, 17 nt, Artificial Sequence
  Synthetic
aauucauauacaaaaua

SEQ ID NO: 739843 - RNA, 17 nt, Artificial Sequence
  Synthetic
aauugcuucccaaaaua

SEQ ID NO: 739844 - RNA, 17 nt, Artificial Sequence
  Synthetic
uauaccacuccaaaaua

SEQ ID NO: 739845 - RNA, 17 nt, Artificial Sequence
  Synthetic
acugauagagcaaaaua

SEQ ID NO: 739846 - RNA, 17 nt, Artificial Sequence
  Synthetic
uauaacuuugcaaaaua

SEQ ID NO: 739847 - RNA, 17 nt, Artificial Sequence
  Synthetic
uaccauguaucaaaaua

SEQ ID NO: 739848 - RNA, 17 nt, Artificial Sequence
  Synthetic
aucucuuugucaaaaua

SEQ ID NO: 739849 - RNA, 17 nt, Artificial Sequence
  Synthetic
acuggagaaagaaaaua

SEQ ID NO: 739850 - RNA, 17 nt, Artificial Sequence
  Synthetic
ccguucaacagaaaaua

SEQ ID NO: 739851 - RNA, 17 nt, Artificial Sequence
  Synthetic
aaaauguucagaaaaua

SEQ ID NO: 739852 - RNA, 17 nt, Artificial Sequence
  Synthetic
caaauugagagaaaaua

SEQ ID NO: 739853 - RNA, 17 nt, Artificial Sequence
  Synthetic
uuugggaguagaaaaua

SEQ ID NO: 739854 - RNA, 17 nt, Artificial Sequence
  Synthetic
cugagaaaccgaaaaua

SEQ ID NO: 739855 - RNA, 17 nt, Artificial Sequence
  Synthetic
uaguggcaaggaaaaua

SEQ ID NO: 739856 - RNA, 17 nt, Artificial Sequence
  Synthetic
agcauaagaggaaaaua

SEQ ID NO: 739857 - RNA, 17 nt, Artificial Sequence
  Synthetic
acaaaaaagggaaaaua

SEQ ID NO: 739858 - RNA, 17 nt, Artificial Sequence
  Synthetic
aaauggcagggaaaaua

SEQ ID NO: 739859 - RNA, 17 nt, Artificial Sequence
  Synthetic
acuugcaugggaaaaua

SEQ ID NO: 739860 - RNA, 17 nt, Artificial Sequence
  Synthetic
uuuuucuuuggaaaaua

SEQ ID NO: 739861 - RNA, 17 nt, Artificial Sequence
  Synthetic
uauuuucaaugaaaaua

SEQ ID NO: 739862 - RNA, 17 nt, Artificial Sequence
  Synthetic
uaaaaguaaugaaaaua

SEQ ID NO: 739863 - RNA, 17 nt, Artificial Sequence
  Synthetic
uagcuaauaugaaaaua

SEQ ID NO: 739864 - RNA, 17 nt, Artificial Sequence
  Synthetic
agagcgauaugaaaaua

SEQ ID NO: 739865 - RNA, 17 nt, Artificial Sequence
  Synthetic
ugagagaauugaaaaua

SEQ ID NO: 739866 - RNA, 17 nt, Artificial Sequence
  Synthetic
uuggaacauugaaaaua

SEQ ID NO: 739867 - RNA, 17 nt, Artificial Sequence
  Synthetic
uaaagaauuugaaaaua

SEQ ID NO: 739868 - RNA, 17 nt, Artificial Sequence
  Synthetic
aauuugcuuugaaaaua

SEQ ID NO: 739869 - RNA, 17 nt, Artificial Sequence
  Synthetic
uuuucucuuugaaaaua

SEQ ID NO: 739870 - RNA, 17 nt, Artificial Sequence
  Synthetic
aguauaaaaauaaaaua

SEQ ID NO: 739871 - RNA, 17 nt, Artificial Sequence
  Synthetic
uggcuaaaaauaaaaua

SEQ ID NO: 739872 - RNA, 17 nt, Artificial Sequence
  Synthetic
agaaaagaaauaaaaua

SEQ ID NO: 739873 - RNA, 17 nt, Artificial Sequence
  Synthetic
caagcauccauaaaaua

SEQ ID NO: 739874 - RNA, 17 nt, Artificial Sequence
  Synthetic
cauggcuaccuaaaaua

SEQ ID NO: 739875 - RNA, 17 nt, Artificial Sequence
  Synthetic
cccaaggcccuaaaaua

SEQ ID NO: 739876 - RNA, 17 nt, Artificial Sequence
  Synthetic
ugucacauccuaaaaua

SEQ ID NO: 739877 - RNA, 17 nt, Artificial Sequence
  Synthetic
uugaguauucuaaaaua

SEQ ID NO: 739878 - RNA, 17 nt, Artificial Sequence
  Synthetic
uuaaaaacaguaaaaua

SEQ ID NO: 739879 - RNA, 17 nt, Artificial Sequence
  Synthetic
aaccagccaguaaaaua

SEQ ID NO: 739880 - RNA, 17 nt, Artificial Sequence
  Synthetic
ucuuuacuaguaaaaua

SEQ ID NO: 739881 - RNA, 17 nt, Artificial Sequence
  Synthetic
aggggcuggguaaaaua

SEQ ID NO: 739882 - RNA, 17 nt, Artificial Sequence
  Synthetic
acaaggucuguaaaaua

SEQ ID NO: 739883 - RNA, 17 nt, Artificial Sequence
  Synthetic
aguaacucguuaaaaua

SEQ ID NO: 739884 - RNA, 17 nt, Artificial Sequence
  Synthetic
aagaggaauuuaaaaua

SEQ ID NO: 739885 - RNA, 17 nt, Artificial Sequence
  Synthetic
uugaggaauuuaaaaua

SEQ ID NO: 739886 - RNA, 17 nt, Artificial Sequence
  Synthetic
aauucaauaaacaaaua

SEQ ID NO: 739887 - RNA, 17 nt, Artificial Sequence
  Synthetic
uuucguugucacaaaua

SEQ ID NO: 739888 - RNA, 17 nt, Artificial Sequence
  Synthetic
caaacacuucacaaaua

SEQ ID NO: 739889 - RNA, 17 nt, Artificial Sequence
  Synthetic
aguucugcuuacaaaua

SEQ ID NO: 739890 - RNA, 17 nt, Artificial Sequence
  Synthetic
caaacagaaaccaaaua

SEQ ID NO: 739891 - RNA, 17 nt, Artificial Sequence
  Synthetic
aaguuuuuucccaaaua

SEQ ID NO: 739892 - RNA, 17 nt, Artificial Sequence
  Synthetic
caaaaacauuccaaaua

SEQ ID NO: 739893 - RNA, 17 nt, Artificial Sequence
  Synthetic
aguccucuuuccaaaua

SEQ ID NO: 739894 - RNA, 17 nt, Artificial Sequence
  Synthetic
aaggaauaccgcaaaua

SEQ ID NO: 739895 - RNA, 17 nt, Artificial Sequence
  Synthetic
aaagauuuuggcaaaua

SEQ ID NO: 739896 - RNA, 17 nt, Artificial Sequence
  Synthetic
auguacuaaugcaaaua

SEQ ID NO: 739897 - RNA, 17 nt, Artificial Sequence
  Synthetic
auguaagacugcaaaua

SEQ ID NO: 739898 - RNA, 17 nt, Artificial Sequence
  Synthetic
cugucaccuugcaaaua

SEQ ID NO: 739899 - RNA, 17 nt, Artificial Sequence
  Synthetic
uguguaauuaucaaaua

SEQ ID NO: 739900 - RNA, 17 nt, Artificial Sequence
  Synthetic
uacuuuucccucaaaua

SEQ ID NO: 739901 - RNA, 17 nt, Artificial Sequence
  Synthetic
uucucuuuccucaaaua

SEQ ID NO: 739902 - RNA, 17 nt, Artificial Sequence
  Synthetic
uagaaauuagucaaaua

SEQ ID NO: 739903 - RNA, 17 nt, Artificial Sequence
  Synthetic
auacauauugucaaaua

SEQ ID NO: 739904 - RNA, 17 nt, Artificial Sequence
  Synthetic
auaaaaaucuucaaaua

SEQ ID NO: 739905 - RNA, 17 nt, Artificial Sequence
  Synthetic
aauugccauuucaaaua

SEQ ID NO: 739906 - RNA, 17 nt, Artificial Sequence
  Synthetic
agcuuucuuuucaaaua

SEQ ID NO: 739907 - RNA, 17 nt, Artificial Sequence
  Synthetic
agagauaaaaagaaaua

SEQ ID NO: 739908 - RNA, 17 nt, Artificial Sequence
  Synthetic
caguuuacaaagaaaua

SEQ ID NO: 739909 - RNA, 17 nt, Artificial Sequence
  Synthetic
aaagccuccaagaaaua

SEQ ID NO: 739910 - RNA, 17 nt, Artificial Sequence
  Synthetic
aaagccuucaagaaaua

SEQ ID NO: 739911 - RNA, 17 nt, Artificial Sequence
  Synthetic
auccuggaacagaaaua

SEQ ID NO: 739912 - RNA, 17 nt, Artificial Sequence
  Synthetic
cauuuuuuacagaaaua

SEQ ID NO: 739913 - RNA, 17 nt, Artificial Sequence
  Synthetic
aaggcagaccagaaaua

SEQ ID NO: 739914 - RNA, 17 nt, Artificial Sequence
  Synthetic
caaaggaaagagaaaua

SEQ ID NO: 739915 - RNA, 17 nt, Artificial Sequence
  Synthetic
uggaaucaagagaaaua

SEQ ID NO: 739916 - RNA, 17 nt, Artificial Sequence
  Synthetic
cuaaacagagagaaaua

SEQ ID NO: 739917 - RNA, 17 nt, Artificial Sequence
  Synthetic
cuucaccaggagaaaua

SEQ ID NO: 739918 - RNA, 17 nt, Artificial Sequence
  Synthetic
ugaaguuaugagaaaua

SEQ ID NO: 739919 - RNA, 17 nt, Artificial Sequence
  Synthetic
uucuugccugagaaaua

SEQ ID NO: 739920 - RNA, 17 nt, Artificial Sequence
  Synthetic
aaaauagaauagaaaua

SEQ ID NO: 739921 - RNA, 17 nt, Artificial Sequence
  Synthetic
aguuaaacauagaaaua

SEQ ID NO: 739922 - RNA, 17 nt, Artificial Sequence
  Synthetic
agcauuuacuagaaaua

SEQ ID NO: 739923 - RNA, 17 nt, Artificial Sequence
  Synthetic
auaaacauuuagaaaua

SEQ ID NO: 739924 - RNA, 17 nt, Artificial Sequence
  Synthetic
cuggcauuuuagaaaua

SEQ ID NO: 739925 - RNA, 17 nt, Artificial Sequence
  Synthetic
auuuucaucaggaaaua

SEQ ID NO: 739926 - RNA, 17 nt, Artificial Sequence
  Synthetic
uucaaauucaggaaaua

SEQ ID NO: 739927 - RNA, 17 nt, Artificial Sequence
  Synthetic
cauuuucuuaggaaaua

SEQ ID NO: 739928 - RNA, 17 nt, Artificial Sequence
  Synthetic
cuuuggggagggaaaua

SEQ ID NO: 739929 - RNA, 17 nt, Artificial Sequence
  Synthetic
ucuguugccuggaaaua

SEQ ID NO: 739930 - RNA, 17 nt, Artificial Sequence
  Synthetic
aguucuaaguggaaaua

SEQ ID NO: 739931 - RNA, 17 nt, Artificial Sequence
  Synthetic
caccagauuuggaaaua

SEQ ID NO: 739932 - RNA, 17 nt, Artificial Sequence
  Synthetic
uaaacuuaaaugaaaua

SEQ ID NO: 739933 - RNA, 17 nt, Artificial Sequence
  Synthetic
aauuuuucaaugaaaua

SEQ ID NO: 739934 - RNA, 17 nt, Artificial Sequence
  Synthetic
aaaaaaggaaugaaaua

SEQ ID NO: 739935 - RNA, 17 nt, Artificial Sequence
  Synthetic
cuuaauagcaugaaaua

SEQ ID NO: 739936 - RNA, 17 nt, Artificial Sequence
  Synthetic
uuucuagguaugaaaua

SEQ ID NO: 739937 - RNA, 17 nt, Artificial Sequence
  Synthetic
uaugggauuaugaaaua

SEQ ID NO: 739938 - RNA, 17 nt, Artificial Sequence
  Synthetic
caugguagccugaaaua

SEQ ID NO: 739939 - RNA, 17 nt, Artificial Sequence
  Synthetic
ugagaagaagugaaaua

SEQ ID NO: 739940 - RNA, 17 nt, Artificial Sequence
  Synthetic
uaugguuuggugaaaua

SEQ ID NO: 739941 - RNA, 17 nt, Artificial Sequence
  Synthetic
cuacucuaugugaaaua

SEQ ID NO: 739942 - RNA, 17 nt, Artificial Sequence
  Synthetic
uccuucucugugaaaua

SEQ ID NO: 739943 - RNA, 17 nt, Artificial Sequence
  Synthetic
uccacuuacuugaaaua

SEQ ID NO: 739944 - RNA, 17 nt, Artificial Sequence
  Synthetic
uaugagcauuugaaaua

SEQ ID NO: 739945 - RNA, 17 nt, Artificial Sequence
  Synthetic
acagaguguuugaaaua

SEQ ID NO: 739946 - RNA, 17 nt, Artificial Sequence
  Synthetic
ccuucaggaaauaaaua

SEQ ID NO: 739947 - RNA, 17 nt, Artificial Sequence
  Synthetic
uugagacucaauaaaua

SEQ ID NO: 739948 - RNA, 17 nt, Artificial Sequence
  Synthetic
acacauggacauaaaua

SEQ ID NO: 739949 - RNA, 17 nt, Artificial Sequence
  Synthetic
ucaaaaauacauaaaua

SEQ ID NO: 739950 - RNA, 17 nt, Artificial Sequence
  Synthetic
cccaccagccauaaaua

SEQ ID NO: 739951 - RNA, 17 nt, Artificial Sequence
  Synthetic
cuaauauuucauaaaua

SEQ ID NO: 739952 - RNA, 17 nt, Artificial Sequence
  Synthetic
aaugcugaagauaaaua

SEQ ID NO: 739953 - RNA, 17 nt, Artificial Sequence
  Synthetic
aaaggugaagauaaaua

SEQ ID NO: 739954 - RNA, 17 nt, Artificial Sequence
  Synthetic
ugacugcuggauaaaua

SEQ ID NO: 739955 - RNA, 17 nt, Artificial Sequence
  Synthetic
uauaucucauauaaaua

SEQ ID NO: 739956 - RNA, 17 nt, Artificial Sequence
  Synthetic
agaaaauuauauaaaua

SEQ ID NO: 739957 - RNA, 17 nt, Artificial Sequence
  Synthetic
ugauuuguguauaaaua

SEQ ID NO: 739958 - RNA, 17 nt, Artificial Sequence
  Synthetic
aauugacuuuauaaaua

SEQ ID NO: 739959 - RNA, 17 nt, Artificial Sequence
  Synthetic
cauccaauuacuaaaua

SEQ ID NO: 739960 - RNA, 17 nt, Artificial Sequence
  Synthetic
cuaguaagugcuaaaua

SEQ ID NO: 739961 - RNA, 17 nt, Artificial Sequence
  Synthetic
aggagguaaucuaaaua

SEQ ID NO: 739962 - RNA, 17 nt, Artificial Sequence
  Synthetic
cugaaugacucuaaaua

SEQ ID NO: 739963 - RNA, 17 nt, Artificial Sequence
  Synthetic
aaccaaugcucuaaaua

SEQ ID NO: 739964 - RNA, 17 nt, Artificial Sequence
  Synthetic
agugggcuaaguaaaua

SEQ ID NO: 739965 - RNA, 17 nt, Artificial Sequence
  Synthetic
aaaaauaauaguaaaua

SEQ ID NO: 739966 - RNA, 17 nt, Artificial Sequence
  Synthetic
uuggaaggagguaaaua

SEQ ID NO: 739967 - RNA, 17 nt, Artificial Sequence
  Synthetic
auaauauuagguaaaua

SEQ ID NO: 739968 - RNA, 17 nt, Artificial Sequence
  Synthetic
auacauugauguaaaua

SEQ ID NO: 739969 - RNA, 17 nt, Artificial Sequence
  Synthetic
uucucaguauguaaaua

SEQ ID NO: 739970 - RNA, 17 nt, Artificial Sequence
  Synthetic
aaucaaaguuguaaaua

SEQ ID NO: 739971 - RNA, 17 nt, Artificial Sequence
  Synthetic
accauuagcauuaaaua

SEQ ID NO: 739972 - RNA, 17 nt, Artificial Sequence
  Synthetic
uuucugaggauuaaaua

SEQ ID NO: 739973 - RNA, 17 nt, Artificial Sequence
  Synthetic
uaauaaacuauuaaaua

SEQ ID NO: 739974 - RNA, 17 nt, Artificial Sequence
  Synthetic
caaaaauguauuaaaua

SEQ ID NO: 739975 - RNA, 17 nt, Artificial Sequence
  Synthetic
acaccauuuauuaaaua

SEQ ID NO: 739976 - RNA, 17 nt, Artificial Sequence
  Synthetic
ugaugcuuuauuaaaua

SEQ ID NO: 739977 - RNA, 17 nt, Artificial Sequence
  Synthetic
uuagagacacuuaaaua

SEQ ID NO: 739978 - RNA, 17 nt, Artificial Sequence
  Synthetic
auauguggucuuaaaua

SEQ ID NO: 739979 - RNA, 17 nt, Artificial Sequence
  Synthetic
uaaacugagguuaaaua

SEQ ID NO: 739980 - RNA, 17 nt, Artificial Sequence
  Synthetic
aaaucugguguuaaaua

SEQ ID NO: 739981 - RNA, 17 nt, Artificial Sequence
  Synthetic
ucauucagauuuaaaua

SEQ ID NO: 739982 - RNA, 17 nt, Artificial Sequence
  Synthetic
ugcauguccuuuaaaua

SEQ ID NO: 739983 - RNA, 17 nt, Artificial Sequence
  Synthetic
ugaagcuuguuuaaaua

SEQ ID NO: 739984 - RNA, 17 nt, Artificial Sequence
  Synthetic
auauaaaauuuuaaaua

SEQ ID NO: 739985 - RNA, 17 nt, Artificial Sequence
  Synthetic
cauuccaauuuuaaaua

SEQ ID NO: 739986 - RNA, 17 nt, Artificial Sequence
  Synthetic
uacaagaguuuuaaaua

SEQ ID NO: 739987 - RNA, 17 nt, Artificial Sequence
  Synthetic
auaauuauuuuuaaaua

SEQ ID NO: 739988 - RNA, 17 nt, Artificial Sequence
  Synthetic
uuagaaagaaaacaaua

SEQ ID NO: 739989 - RNA, 17 nt, Artificial Sequence
  Synthetic
uuuuguggaaaacaaua

SEQ ID NO: 739990 - RNA, 17 nt, Artificial Sequence
  Synthetic
ugcaauaugaaacaaua

SEQ ID NO: 739991 - RNA, 17 nt, Artificial Sequence
  Synthetic
aaaggaagagaacaaua

SEQ ID NO: 739992 - RNA, 17 nt, Artificial Sequence
  Synthetic
auguaaaucuaacaaua

SEQ ID NO: 739993 - RNA, 17 nt, Artificial Sequence
  Synthetic
ucuccauauuaacaaua

SEQ ID NO: 739994 - RNA, 17 nt, Artificial Sequence
  Synthetic
agcaagaacacacaaua

SEQ ID NO: 739995 - RNA, 17 nt, Artificial Sequence
  Synthetic
cuuuaauucacacaaua

SEQ ID NO: 739996 - RNA, 17 nt, Artificial Sequence
  Synthetic
cuccaaaauccacaaua

SEQ ID NO: 739997 - RNA, 17 nt, Artificial Sequence
  Synthetic
uguuucauagcacaaua

SEQ ID NO: 739998 - RNA, 17 nt, Artificial Sequence
  Synthetic
caaaagcaugcacaaua

SEQ ID NO: 739999 - RNA, 17 nt, Artificial Sequence
  Synthetic
uguaaagaaucacaaua

SEQ ID NO: 740000 - RNA, 17 nt, Artificial Sequence
  Synthetic
cacuauacuucacaaua

SEQ ID NO: 740001 - RNA, 17 nt, Artificial Sequence
  Synthetic
augaguaguucacaaua

SEQ ID NO: 740002 - RNA, 17 nt, Artificial Sequence
  Synthetic
caauaauuuagacaaua

SEQ ID NO: 740003 - RNA, 17 nt, Artificial Sequence
  Synthetic
aggaugaggugacaaua

SEQ ID NO: 740004 - RNA, 17 nt, Artificial Sequence
  Synthetic
ugugaaaaaauacaaua

SEQ ID NO: 740005 - RNA, 17 nt, Artificial Sequence
  Synthetic
aggaaaacgauacaaua

SEQ ID NO: 740006 - RNA, 17 nt, Artificial Sequence
  Synthetic
auucuagggauacaaua

SEQ ID NO: 740007 - RNA, 17 nt, Artificial Sequence
  Synthetic
ucuucucuuauacaaua

SEQ ID NO: 740008 - RNA, 17 nt, Artificial Sequence
  Synthetic
agaaagcugcuacaaua

SEQ ID NO: 740009 - RNA, 17 nt, Artificial Sequence
  Synthetic
agugaggggcaccaaua

SEQ ID NO: 740010 - RNA, 17 nt, Artificial Sequence
  Synthetic
uaggagguugaccaaua

SEQ ID NO: 740011 - RNA, 17 nt, Artificial Sequence
  Synthetic
aggcacaaauaccaaua

SEQ ID NO: 740012 - RNA, 17 nt, Artificial Sequence
  Synthetic
caagaaguuacccaaua

SEQ ID NO: 740013 - RNA, 17 nt, Artificial Sequence
  Synthetic
caucaaacagcccaaua

SEQ ID NO: 740014 - RNA, 17 nt, Artificial Sequence
  Synthetic
cuucucuuuucccaaua

SEQ ID NO: 740015 - RNA, 17 nt, Artificial Sequence
  Synthetic
acaacaauaagccaaua

SEQ ID NO: 740016 - RNA, 17 nt, Artificial Sequence
  Synthetic
uaucugcagagccaaua

SEQ ID NO: 740017 - RNA, 17 nt, Artificial Sequence
  Synthetic
aaacagccuagccaaua

SEQ ID NO: 740018 - RNA, 17 nt, Artificial Sequence
  Synthetic
aagucuuaaauccaaua

SEQ ID NO: 740019 - RNA, 17 nt, Artificial Sequence
  Synthetic
cagcuuuauuuccaaua

SEQ ID NO: 740020 - RNA, 17 nt, Artificial Sequence
  Synthetic
auuaaguguuuccaaua

SEQ ID NO: 740021 - RNA, 17 nt, Artificial Sequence
  Synthetic
agaagagaaaagcaaua

SEQ ID NO: 740022 - RNA, 17 nt, Artificial Sequence
  Synthetic
cauuuccaauagcaaua

SEQ ID NO: 740023 - RNA, 17 nt, Artificial Sequence
  Synthetic
ucaggacaaaggcaaua

SEQ ID NO: 740024 - RNA, 17 nt, Artificial Sequence
  Synthetic
auucaugaaaggcaaua

SEQ ID NO: 740025 - RNA, 17 nt, Artificial Sequence
  Synthetic
uauuuaaaugggcaaua

SEQ ID NO: 740026 - RNA, 17 nt, Artificial Sequence
  Synthetic
agucccaaauggcaaua

SEQ ID NO: 740027 - RNA, 17 nt, Artificial Sequence
  Synthetic
acgcucuugcugcaaua

SEQ ID NO: 740028 - RNA, 17 nt, Artificial Sequence
  Synthetic
aucaguuguuugcaaua

SEQ ID NO: 740029 - RNA, 17 nt, Artificial Sequence
  Synthetic
cauuggguuuugcaaua

SEQ ID NO: 740030 - RNA, 17 nt, Artificial Sequence
  Synthetic
aaaaccugaaaucaaua

SEQ ID NO: 740031 - RNA, 17 nt, Artificial Sequence
  Synthetic
ugcagaaggaaucaaua

SEQ ID NO: 740032 - RNA, 17 nt, Artificial Sequence
  Synthetic
acaaacaauaaucaaua

SEQ ID NO: 740033 - RNA, 17 nt, Artificial Sequence
  Synthetic
auuuaaauuaaucaaua

SEQ ID NO: 740034 - RNA, 17 nt, Artificial Sequence
  Synthetic
aaacacgaagaucaaua

SEQ ID NO: 740035 - RNA, 17 nt, Artificial Sequence
  Synthetic
auuuuucaguaucaaua

SEQ ID NO: 740036 - RNA, 17 nt, Artificial Sequence
  Synthetic
uugcaaauguaucaaua

SEQ ID NO: 740037 - RNA, 17 nt, Artificial Sequence
  Synthetic
uauuauauaacucaaua

SEQ ID NO: 740038 - RNA, 17 nt, Artificial Sequence
  Synthetic
ccuuaaauaccucaaua

SEQ ID NO: 740039 - RNA, 17 nt, Artificial Sequence
  Synthetic
cuaacugcuucucaaua

SEQ ID NO: 740040 - RNA, 17 nt, Artificial Sequence
  Synthetic
uuacugaaaagucaaua

SEQ ID NO: 740041 - RNA, 17 nt, Artificial Sequence
  Synthetic
aaacaaguaagucaaua

SEQ ID NO: 740042 - RNA, 17 nt, Artificial Sequence
  Synthetic
auaaauaccagucaaua

SEQ ID NO: 740043 - RNA, 17 nt, Artificial Sequence
  Synthetic
uguaauaucugucaaua

SEQ ID NO: 740044 - RNA, 17 nt, Artificial Sequence
  Synthetic
caggacaacauucaaua

SEQ ID NO: 740045 - RNA, 17 nt, Artificial Sequence
  Synthetic
uagcaucaccuucaaua

SEQ ID NO: 740046 - RNA, 17 nt, Artificial Sequence
  Synthetic
uucaacacucuucaaua

SEQ ID NO: 740047 - RNA, 17 nt, Artificial Sequence
  Synthetic
ugacucacaguucaaua

SEQ ID NO: 740048 - RNA, 17 nt, Artificial Sequence
  Synthetic
uacaguucauuucaaua

SEQ ID NO: 740049 - RNA, 17 nt, Artificial Sequence
  Synthetic
cagagauugaaagaaua

SEQ ID NO: 740050 - RNA, 17 nt, Artificial Sequence
  Synthetic
ugcucuuauaaagaaua

SEQ ID NO: 740051 - RNA, 17 nt, Artificial Sequence
  Synthetic
aggcaaugccaagaaua

SEQ ID NO: 740052 - RNA, 17 nt, Artificial Sequence
  Synthetic
aaguguuggcaagaaua

SEQ ID NO: 740053 - RNA, 17 nt, Artificial Sequence
  Synthetic
uagaucagagaagaaua

SEQ ID NO: 740054 - RNA, 17 nt, Artificial Sequence
  Synthetic
ugggugauugaagaaua

SEQ ID NO: 740055 - RNA, 17 nt, Artificial Sequence
  Synthetic
aggggacauuaagaaua

SEQ ID NO: 740056 - RNA, 17 nt, Artificial Sequence
  Synthetic
uuuaauuuaccagaaua

SEQ ID NO: 740057 - RNA, 17 nt, Artificial Sequence
  Synthetic
uuaaaaguaucagaaua

SEQ ID NO: 740058 - RNA, 17 nt, Artificial Sequence
  Synthetic
uguugugucucagaaua

SEQ ID NO: 740059 - RNA, 17 nt, Artificial Sequence
  Synthetic
cacuguacuucagaaua

SEQ ID NO: 740060 - RNA, 17 nt, Artificial Sequence
  Synthetic
aagaaaaaaagagaaua

SEQ ID NO: 740061 - RNA, 17 nt, Artificial Sequence
  Synthetic
uuagaggcaagagaaua

SEQ ID NO: 740062 - RNA, 17 nt, Artificial Sequence
  Synthetic
ugaggauacagagaaua

SEQ ID NO: 740063 - RNA, 17 nt, Artificial Sequence
  Synthetic
aaggaacagcgagaaua

SEQ ID NO: 740064 - RNA, 17 nt, Artificial Sequence
  Synthetic
uaaauaagaggagaaua

SEQ ID NO: 740065 - RNA, 17 nt, Artificial Sequence
  Synthetic
ucacuaaaaugagaaua

SEQ ID NO: 740066 - RNA, 17 nt, Artificial Sequence
  Synthetic
aaauuacuuugagaaua

SEQ ID NO: 740067 - RNA, 17 nt, Artificial Sequence
  Synthetic
uuccagauaauagaaua

SEQ ID NO: 740068 - RNA, 17 nt, Artificial Sequence
  Synthetic
caaaugcucauagaaua

SEQ ID NO: 740069 - RNA, 17 nt, Artificial Sequence
  Synthetic
aaaauaaaacuagaaua

SEQ ID NO: 740070 - RNA, 17 nt, Artificial Sequence
  Synthetic
cuuuucauucuagaaua

SEQ ID NO: 740071 - RNA, 17 nt, Artificial Sequence
  Synthetic
uaggauauaguagaaua

SEQ ID NO: 740072 - RNA, 17 nt, Artificial Sequence
  Synthetic
cgugaaaucuuagaaua

SEQ ID NO: 740073 - RNA, 17 nt, Artificial Sequence
  Synthetic
auguaccucuuagaaua

SEQ ID NO: 740074 - RNA, 17 nt, Artificial Sequence
  Synthetic
cacguucauuuagaaua

SEQ ID NO: 740075 - RNA, 17 nt, Artificial Sequence
  Synthetic
auugaauguuuagaaua

SEQ ID NO: 740076 - RNA, 17 nt, Artificial Sequence
  Synthetic
aguuuuuuuuuagaaua

SEQ ID NO: 740077 - RNA, 17 nt, Artificial Sequence
  Synthetic
uaacucuuuaacgaaua

SEQ ID NO: 740078 - RNA, 17 nt, Artificial Sequence
  Synthetic
aaaaaaaaaaaggaaua

SEQ ID NO: 740079 - RNA, 17 nt, Artificial Sequence
  Synthetic
uggagcuuaaaggaaua

SEQ ID NO: 740080 - RNA, 17 nt, Artificial Sequence
  Synthetic
agggaauggaaggaaua

SEQ ID NO: 740081 - RNA, 17 nt, Artificial Sequence
  Synthetic
caucgcccccaggaaua

SEQ ID NO: 740082 - RNA, 17 nt, Artificial Sequence
  Synthetic
aggauuggggaggaaua

SEQ ID NO: 740083 - RNA, 17 nt, Artificial Sequence
  Synthetic
aucucagaugaggaaua

SEQ ID NO: 740084 - RNA, 17 nt, Artificial Sequence
  Synthetic
agaaagccugaggaaua

SEQ ID NO: 740085 - RNA, 17 nt, Artificial Sequence
  Synthetic
ucuauuuaauaggaaua

SEQ ID NO: 740086 - RNA, 17 nt, Artificial Sequence
  Synthetic
ucuguuuacuaggaaua

SEQ ID NO: 740087 - RNA, 17 nt, Artificial Sequence
  Synthetic
uugugucucagggaaua

SEQ ID NO: 740088 - RNA, 17 nt, Artificial Sequence
  Synthetic
cuuuaugugagggaaua

SEQ ID NO: 740089 - RNA, 17 nt, Artificial Sequence
  Synthetic
agacaggcaggggaaua

SEQ ID NO: 740090 - RNA, 17 nt, Artificial Sequence
  Synthetic
uucaugaacauggaaua

SEQ ID NO: 740091 - RNA, 17 nt, Artificial Sequence
  Synthetic
caaagaaguauggaaua

SEQ ID NO: 740092 - RNA, 17 nt, Artificial Sequence
  Synthetic
cuguuucugcuggaaua

SEQ ID NO: 740093 - RNA, 17 nt, Artificial Sequence
  Synthetic
agaucuacaguggaaua

SEQ ID NO: 740094 - RNA, 17 nt, Artificial Sequence
  Synthetic
cuuuugaaaaaugaaua

SEQ ID NO: 740095 - RNA, 17 nt, Artificial Sequence
  Synthetic
aaucguagaaaugaaua

SEQ ID NO: 740096 - RNA, 17 nt, Artificial Sequence
  Synthetic
uaauaaggaaaugaaua

SEQ ID NO: 740097 - RNA, 17 nt, Artificial Sequence
  Synthetic
augaaauccaaugaaua

SEQ ID NO: 740098 - RNA, 17 nt, Artificial Sequence
  Synthetic
uuuguucucaaugaaua

SEQ ID NO: 740099 - RNA, 17 nt, Artificial Sequence
  Synthetic
uuccccuagaaugaaua

SEQ ID NO: 740100 - RNA, 17 nt, Artificial Sequence
  Synthetic
uaucuucauaaugaaua

SEQ ID NO: 740101 - RNA, 17 nt, Artificial Sequence
  Synthetic
acuuagccccaugaaua

SEQ ID NO: 740102 - RNA, 17 nt, Artificial Sequence
  Synthetic
uauccucuccaugaaua

SEQ ID NO: 740103 - RNA, 17 nt, Artificial Sequence
  Synthetic
agggcagggcaugaaua

SEQ ID NO: 740104 - RNA, 17 nt, Artificial Sequence
  Synthetic
uuaaggaaauaugaaua

SEQ ID NO: 740105 - RNA, 17 nt, Artificial Sequence
  Synthetic
caagaaguauaugaaua

SEQ ID NO: 740106 - RNA, 17 nt, Artificial Sequence
  Synthetic
agagccuacuaugaaua

SEQ ID NO: 740107 - RNA, 17 nt, Artificial Sequence
  Synthetic
ugaaugaauacugaaua

SEQ ID NO: 740108 - RNA, 17 nt, Artificial Sequence
  Synthetic
ucccuaaucccugaaua

SEQ ID NO: 740109 - RNA, 17 nt, Artificial Sequence
  Synthetic
aauaacauagcugaaua

SEQ ID NO: 740110 - RNA, 17 nt, Artificial Sequence
  Synthetic
cuucuucaggcugaaua

SEQ ID NO: 740111 - RNA, 17 nt, Artificial Sequence
  Synthetic
cucuugcuugcugaaua

SEQ ID NO: 740112 - RNA, 17 nt, Artificial Sequence
  Synthetic
cuggugagaucugaaua

SEQ ID NO: 740113 - RNA, 17 nt, Artificial Sequence
  Synthetic
auagauuccucugaaua

SEQ ID NO: 740114 - RNA, 17 nt, Artificial Sequence
  Synthetic
uaaucuuugggugaaua

SEQ ID NO: 740115 - RNA, 17 nt, Artificial Sequence
  Synthetic
ucuucaugcauugaaua

SEQ ID NO: 740116 - RNA, 17 nt, Artificial Sequence
  Synthetic
aagggcaaacuugaaua

SEQ ID NO: 740117 - RNA, 17 nt, Artificial Sequence
  Synthetic
ucuccacuccuugaaua

SEQ ID NO: 740118 - RNA, 17 nt, Artificial Sequence
  Synthetic
caacuccaucuugaaua

SEQ ID NO: 740119 - RNA, 17 nt, Artificial Sequence
  Synthetic
cucucauuuguugaaua

SEQ ID NO: 740120 - RNA, 17 nt, Artificial Sequence
  Synthetic
aaauggaaauuugaaua

SEQ ID NO: 740121 - RNA, 17 nt, Artificial Sequence
  Synthetic
acugucagcaaauaaua

SEQ ID NO: 740122 - RNA, 17 nt, Artificial Sequence
  Synthetic
aacuugaucaaauaaua

SEQ ID NO: 740123 - RNA, 17 nt, Artificial Sequence
  Synthetic
uuagaaaauaaauaaua

SEQ ID NO: 740124 - RNA, 17 nt, Artificial Sequence
  Synthetic
cagaaauguaaauaaua

SEQ ID NO: 740125 - RNA, 17 nt, Artificial Sequence
  Synthetic
aacuacauacaauaaua

SEQ ID NO: 740126 - RNA, 17 nt, Artificial Sequence
  Synthetic
ucucugcaucaauaaua

SEQ ID NO: 740127 - RNA, 17 nt, Artificial Sequence
  Synthetic
ugucauuuggaauaaua

SEQ ID NO: 740128 - RNA, 17 nt, Artificial Sequence
  Synthetic
uuaucucaguaauaaua

SEQ ID NO: 740129 - RNA, 17 nt, Artificial Sequence
  Synthetic
uuuuauuacacauaaua

SEQ ID NO: 740130 - RNA, 17 nt, Artificial Sequence
  Synthetic
cucaacuucucauaaua

SEQ ID NO: 740131 - RNA, 17 nt, Artificial Sequence
  Synthetic
ugagaggugucauaaua

SEQ ID NO: 740132 - RNA, 17 nt, Artificial Sequence
  Synthetic
uggacagugggauaaua

SEQ ID NO: 740133 - RNA, 17 nt, Artificial Sequence
  Synthetic
auuuuaaaaugauaaua

SEQ ID NO: 740134 - RNA, 17 nt, Artificial Sequence
  Synthetic
cuaaguccaugauaaua

SEQ ID NO: 740135 - RNA, 17 nt, Artificial Sequence
  Synthetic
uacuguaccauauaaua

SEQ ID NO: 740136 - RNA, 17 nt, Artificial Sequence
  Synthetic
uaugagagcauauaaua

SEQ ID NO: 740137 - RNA, 17 nt, Artificial Sequence
  Synthetic
aaccacgugauauaaua

SEQ ID NO: 740138 - RNA, 17 nt, Artificial Sequence
  Synthetic
ugacacucgcuauaaua

SEQ ID NO: 740139 - RNA, 17 nt, Artificial Sequence
  Synthetic
acuaccacaguauaaua

SEQ ID NO: 740140 - RNA, 17 nt, Artificial Sequence
  Synthetic
ucaagagagguauaaua

SEQ ID NO: 740141 - RNA, 17 nt, Artificial Sequence
  Synthetic
ugaaugacuguauaaua

SEQ ID NO: 740142 - RNA, 17 nt, Artificial Sequence
  Synthetic
agugauuaguuauaaua

SEQ ID NO: 740143 - RNA, 17 nt, Artificial Sequence
  Synthetic
uacugcgguuuauaaua

SEQ ID NO: 740144 - RNA, 17 nt, Artificial Sequence
  Synthetic
uacaccuuuuuauaaua

SEQ ID NO: 740145 - RNA, 17 nt, Artificial Sequence
  Synthetic
ugauauguucacuaaua

SEQ ID NO: 740146 - RNA, 17 nt, Artificial Sequence
  Synthetic
uguuuauucuacuaaua

SEQ ID NO: 740147 - RNA, 17 nt, Artificial Sequence
  Synthetic
uuauugaacaccuaaua

SEQ ID NO: 740148 - RNA, 17 nt, Artificial Sequence
  Synthetic
uuuauaaaagccuaaua

SEQ ID NO: 740149 - RNA, 17 nt, Artificial Sequence
  Synthetic
ucaaggugcuccuaaua

SEQ ID NO: 740150 - RNA, 17 nt, Artificial Sequence
  Synthetic
caaaagaugagcuaaua

SEQ ID NO: 740151 - RNA, 17 nt, Artificial Sequence
  Synthetic
ucauuauguggcuaaua

SEQ ID NO: 740152 - RNA, 17 nt, Artificial Sequence
  Synthetic
agaaaaacaugcuaaua

SEQ ID NO: 740153 - RNA, 17 nt, Artificial Sequence
  Synthetic
aggaccaagugcuaaua

SEQ ID NO: 740154 - RNA, 17 nt, Artificial Sequence
  Synthetic
uuauaauuugucuaaua

SEQ ID NO: 740155 - RNA, 17 nt, Artificial Sequence
  Synthetic
uguaacuucuucuaaua

SEQ ID NO: 740156 - RNA, 17 nt, Artificial Sequence
  Synthetic
caaacuacuuucuaaua

SEQ ID NO: 740157 - RNA, 17 nt, Artificial Sequence
  Synthetic
uguuucuuuuucuaaua

SEQ ID NO: 740158 - RNA, 17 nt, Artificial Sequence
  Synthetic
cauugcuugaaguaaua

SEQ ID NO: 740159 - RNA, 17 nt, Artificial Sequence
  Synthetic
caguagaaagaguaaua

SEQ ID NO: 740160 - RNA, 17 nt, Artificial Sequence
  Synthetic
cuuguauggggguaaua

SEQ ID NO: 740161 - RNA, 17 nt, Artificial Sequence
  Synthetic
acugagcaaugguaaua

SEQ ID NO: 740162 - RNA, 17 nt, Artificial Sequence
  Synthetic
cacauauugugguaaua

SEQ ID NO: 740163 - RNA, 17 nt, Artificial Sequence
  Synthetic
uauagguaaauguaaua

SEQ ID NO: 740164 - RNA, 17 nt, Artificial Sequence
  Synthetic
aggaaagcaauguaaua

SEQ ID NO: 740165 - RNA, 17 nt, Artificial Sequence
  Synthetic
aagcaugcacuguaaua

SEQ ID NO: 740166 - RNA, 17 nt, Artificial Sequence
  Synthetic
uucaagaaucuguaaua

SEQ ID NO: 740167 - RNA, 17 nt, Artificial Sequence
  Synthetic
uuuucuccucuguaaua

SEQ ID NO: 740168 - RNA, 17 nt, Artificial Sequence
  Synthetic
caacucauuguguaaua

SEQ ID NO: 740169 - RNA, 17 nt, Artificial Sequence
  Synthetic
cuaaguuauuuguaaua

SEQ ID NO: 740170 - RNA, 17 nt, Artificial Sequence
  Synthetic
aauucauaaaauuaaua

SEQ ID NO: 740171 - RNA, 17 nt, Artificial Sequence
  Synthetic
uucugugagcauuaaua

SEQ ID NO: 740172 - RNA, 17 nt, Artificial Sequence
  Synthetic
uucucuuuugauuaaua

SEQ ID NO: 740173 - RNA, 17 nt, Artificial Sequence
  Synthetic
auggaaaccacuuaaua

SEQ ID NO: 740174 - RNA, 17 nt, Artificial Sequence
  Synthetic
cucucauuuacuuaaua

SEQ ID NO: 740175 - RNA, 17 nt, Artificial Sequence
  Synthetic
aaaucagagccuuaaua

SEQ ID NO: 740176 - RNA, 17 nt, Artificial Sequence
  Synthetic
acucuucuuccuuaaua

SEQ ID NO: 740177 - RNA, 17 nt, Artificial Sequence
  Synthetic
cauuuccucucuuaaua

SEQ ID NO: 740178 - RNA, 17 nt, Artificial Sequence
  Synthetic
uguuuugcuucuuaaua

SEQ ID NO: 740179 - RNA, 17 nt, Artificial Sequence
  Synthetic
ccucagagcaguuaaua

SEQ ID NO: 740180 - RNA, 17 nt, Artificial Sequence
  Synthetic
aacuucaccgguuaaua

SEQ ID NO: 740181 - RNA, 17 nt, Artificial Sequence
  Synthetic
uuauuccaauguuaaua

SEQ ID NO: 740182 - RNA, 17 nt, Artificial Sequence
  Synthetic
uaugguuuauguuaaua

SEQ ID NO: 740183 - RNA, 17 nt, Artificial Sequence
  Synthetic
uuaaacaucuguuaaua

SEQ ID NO: 740184 - RNA, 17 nt, Artificial Sequence
  Synthetic
cuuauccaguguuaaua

SEQ ID NO: 740185 - RNA, 17 nt, Artificial Sequence
  Synthetic
cagccuuauuguuaaua

SEQ ID NO: 740186 - RNA, 17 nt, Artificial Sequence
  Synthetic
ccauucaaaauuuaaua

SEQ ID NO: 740187 - RNA, 17 nt, Artificial Sequence
  Synthetic
acagguuaaauuuaaua

SEQ ID NO: 740188 - RNA, 17 nt, Artificial Sequence
  Synthetic
aagagagggauuuaaua

SEQ ID NO: 740189 - RNA, 17 nt, Artificial Sequence
  Synthetic
uaaaaaauuauuuaaua

SEQ ID NO: 740190 - RNA, 17 nt, Artificial Sequence
  Synthetic
aagccauuuauuuaaua

SEQ ID NO: 740191 - RNA, 17 nt, Artificial Sequence
  Synthetic
auaacaaaccuuuaaua

SEQ ID NO: 740192 - RNA, 17 nt, Artificial Sequence
  Synthetic
caaaaaaacuuuuaaua

SEQ ID NO: 740193 - RNA, 17 nt, Artificial Sequence
  Synthetic
auuuguaaguuuuaaua

SEQ ID NO: 740194 - RNA, 17 nt, Artificial Sequence
  Synthetic
acuggucauuuuuaaua

SEQ ID NO: 740195 - RNA, 17 nt, Artificial Sequence
  Synthetic
cggccuuauuuuuaaua

SEQ ID NO: 740196 - RNA, 17 nt, Artificial Sequence
  Synthetic
uuuuuuuuuuuuuaaua

SEQ ID NO: 740197 - RNA, 17 nt, Artificial Sequence
  Synthetic
ucauagaagaaaacaua

SEQ ID NO: 740198 - RNA, 17 nt, Artificial Sequence
  Synthetic
uaaacaaugaaaacaua

SEQ ID NO: 740199 - RNA, 17 nt, Artificial Sequence
  Synthetic
ugaacaaugaaaacaua

SEQ ID NO: 740200 - RNA, 17 nt, Artificial Sequence
  Synthetic
uuugguaauaaaacaua

SEQ ID NO: 740201 - RNA, 17 nt, Artificial Sequence
  Synthetic
augaggauuaaaacaua

SEQ ID NO: 740202 - RNA, 17 nt, Artificial Sequence
  Synthetic
ccaauugaccaaacaua

SEQ ID NO: 740203 - RNA, 17 nt, Artificial Sequence
  Synthetic
uaccuuggugaaacaua

SEQ ID NO: 740204 - RNA, 17 nt, Artificial Sequence
  Synthetic
auguggaaauaaacaua

SEQ ID NO: 740205 - RNA, 17 nt, Artificial Sequence
  Synthetic
augucaguauaaacaua

SEQ ID NO: 740206 - RNA, 17 nt, Artificial Sequence
  Synthetic
aagaaagcaagaacaua

SEQ ID NO: 740207 - RNA, 17 nt, Artificial Sequence
  Synthetic
uaaaugaugagaacaua

SEQ ID NO: 740208 - RNA, 17 nt, Artificial Sequence
  Synthetic
uuacgagugagaacaua

SEQ ID NO: 740209 - RNA, 17 nt, Artificial Sequence
  Synthetic
auuccuuauagaacaua

SEQ ID NO: 740210 - RNA, 17 nt, Artificial Sequence
  Synthetic
cuacuuaguggaacaua

SEQ ID NO: 740211 - RNA, 17 nt, Artificial Sequence
  Synthetic
agguacuuaugaacaua

SEQ ID NO: 740212 - RNA, 17 nt, Artificial Sequence
  Synthetic
auuuuuuauugaacaua

SEQ ID NO: 740213 - RNA, 17 nt, Artificial Sequence
  Synthetic
auaggcagcauaacaua

SEQ ID NO: 740214 - RNA, 17 nt, Artificial Sequence
  Synthetic
accugugcuauaacaua

SEQ ID NO: 740215 - RNA, 17 nt, Artificial Sequence
  Synthetic
uagcaagggguaacaua

SEQ ID NO: 740216 - RNA, 17 nt, Artificial Sequence
  Synthetic
auuuugcaauuaacaua

SEQ ID NO: 740217 - RNA, 17 nt, Artificial Sequence
  Synthetic
uagcccaauuuaacaua

SEQ ID NO: 740218 - RNA, 17 nt, Artificial Sequence
  Synthetic
cugaugucuuuaacaua

SEQ ID NO: 740219 - RNA, 17 nt, Artificial Sequence
  Synthetic
cuuugcaggaacacaua

SEQ ID NO: 740220 - RNA, 17 nt, Artificial Sequence
  Synthetic
uacuaaauuaacacaua

SEQ ID NO: 740221 - RNA, 17 nt, Artificial Sequence
  Synthetic
uaaccacuagacacaua

SEQ ID NO: 740222 - RNA, 17 nt, Artificial Sequence
  Synthetic
uauuuuauauacacaua

SEQ ID NO: 740223 - RNA, 17 nt, Artificial Sequence
  Synthetic
acaaauaccuacacaua

SEQ ID NO: 740224 - RNA, 17 nt, Artificial Sequence
  Synthetic
aaggaaaugaccacaua

SEQ ID NO: 740225 - RNA, 17 nt, Artificial Sequence
  Synthetic
uucuaccaaaucacaua

SEQ ID NO: 740226 - RNA, 17 nt, Artificial Sequence
  Synthetic
cucucuaugaucacaua

SEQ ID NO: 740227 - RNA, 17 nt, Artificial Sequence
  Synthetic
cucgcauuuaucacaua

SEQ ID NO: 740228 - RNA, 17 nt, Artificial Sequence
  Synthetic
aacuguacaaagacaua

SEQ ID NO: 740229 - RNA, 17 nt, Artificial Sequence
  Synthetic
caaaggaggaagacaua

SEQ ID NO: 740230 - RNA, 17 nt, Artificial Sequence
  Synthetic
agugaaauugagacaua

SEQ ID NO: 740231 - RNA, 17 nt, Artificial Sequence
  Synthetic
auuuacugaaggacaua

SEQ ID NO: 740232 - RNA, 17 nt, Artificial Sequence
  Synthetic
uguagcucauggacaua

SEQ ID NO: 740233 - RNA, 17 nt, Artificial Sequence
  Synthetic
caguaguggcugacaua

SEQ ID NO: 740234 - RNA, 17 nt, Artificial Sequence
  Synthetic
auucugucagugacaua

SEQ ID NO: 740235 - RNA, 17 nt, Artificial Sequence
  Synthetic
uuugaucaaaauacaua

SEQ ID NO: 740236 - RNA, 17 nt, Artificial Sequence
  Synthetic
uaagcaaauaauacaua

SEQ ID NO: 740237 - RNA, 17 nt, Artificial Sequence
  Synthetic
cuuuaaaguaauacaua

SEQ ID NO: 740238 - RNA, 17 nt, Artificial Sequence
  Synthetic
caaagugaagauacaua

SEQ ID NO: 740239 - RNA, 17 nt, Artificial Sequence
  Synthetic
uacuuuaaauauacaua

SEQ ID NO: 740240 - RNA, 17 nt, Artificial Sequence
  Synthetic
caucuaaauuauacaua

SEQ ID NO: 740241 - RNA, 17 nt, Artificial Sequence
  Synthetic
ccccccaauuauacaua

SEQ ID NO: 740242 - RNA, 17 nt, Artificial Sequence
  Synthetic
aucuucccaacuacaua

SEQ ID NO: 740243 - RNA, 17 nt, Artificial Sequence
  Synthetic
uuucagcucucuacaua

SEQ ID NO: 740244 - RNA, 17 nt, Artificial Sequence
  Synthetic
ugggugcauucuacaua

SEQ ID NO: 740245 - RNA, 17 nt, Artificial Sequence
  Synthetic
uuucagcuuucuacaua

SEQ ID NO: 740246 - RNA, 17 nt, Artificial Sequence
  Synthetic
agagaaacaaguacaua

SEQ ID NO: 740247 - RNA, 17 nt, Artificial Sequence
  Synthetic
acuucacacaguacaua

SEQ ID NO: 740248 - RNA, 17 nt, Artificial Sequence
  Synthetic
uuucugccugguacaua

SEQ ID NO: 740249 - RNA, 17 nt, Artificial Sequence
  Synthetic
aggagcagugguacaua

SEQ ID NO: 740250 - RNA, 17 nt, Artificial Sequence
  Synthetic
caaaucugcauuacaua

SEQ ID NO: 740251 - RNA, 17 nt, Artificial Sequence
  Synthetic
aggaauuauauuacaua

SEQ ID NO: 740252 - RNA, 17 nt, Artificial Sequence
  Synthetic
ucacaggcuauuacaua

SEQ ID NO: 740253 - RNA, 17 nt, Artificial Sequence
  Synthetic
aagaagaaacuuacaua

SEQ ID NO: 740254 - RNA, 17 nt, Artificial Sequence
  Synthetic
uuacaauaucuuacaua

SEQ ID NO: 740255 - RNA, 17 nt, Artificial Sequence
  Synthetic
uucacaaaauuuacaua

SEQ ID NO: 740256 - RNA, 17 nt, Artificial Sequence
  Synthetic
caguuauuauuuacaua

SEQ ID NO: 740257 - RNA, 17 nt, Artificial Sequence
  Synthetic
agacauuauuuuacaua

SEQ ID NO: 740258 - RNA, 17 nt, Artificial Sequence
  Synthetic
uuguaacaaaaaccaua

SEQ ID NO: 740259 - RNA, 17 nt, Artificial Sequence
  Synthetic
ccaaacagaaaaccaua

SEQ ID NO: 740260 - RNA, 17 nt, Artificial Sequence
  Synthetic
auguagaugaaaccaua

SEQ ID NO: 740261 - RNA, 17 nt, Artificial Sequence
  Synthetic
uacaacuauuaaccaua

SEQ ID NO: 740262 - RNA, 17 nt, Artificial Sequence
  Synthetic
cauagucauacaccaua

SEQ ID NO: 740263 - RNA, 17 nt, Artificial Sequence
  Synthetic
aaggaugagagaccaua

SEQ ID NO: 740264 - RNA, 17 nt, Artificial Sequence
  Synthetic
ugaaguaaaugaccaua

SEQ ID NO: 740265 - RNA, 17 nt, Artificial Sequence
  Synthetic
agcuaaugacuaccaua

SEQ ID NO: 740266 - RNA, 17 nt, Artificial Sequence
  Synthetic
cucuugaccaacccaua

SEQ ID NO: 740267 - RNA, 17 nt, Artificial Sequence
  Synthetic
aaucacuugaacccaua

SEQ ID NO: 740268 - RNA, 17 nt, Artificial Sequence
  Synthetic
aucccuuccuacccaua

SEQ ID NO: 740269 - RNA, 17 nt, Artificial Sequence
  Synthetic
cauuuacuuuacccaua

SEQ ID NO: 740270 - RNA, 17 nt, Artificial Sequence
  Synthetic
ccagccacuuccccaua

SEQ ID NO: 740271 - RNA, 17 nt, Artificial Sequence
  Synthetic
ugggcgcagagcccaua

SEQ ID NO: 740272 - RNA, 17 nt, Artificial Sequence
  Synthetic
aaacucaagggcccaua

SEQ ID NO: 740273 - RNA, 17 nt, Artificial Sequence
  Synthetic
auugucuauggcccaua

SEQ ID NO: 740274 - RNA, 17 nt, Artificial Sequence
  Synthetic
agccccagaugcccaua

SEQ ID NO: 740275 - RNA, 17 nt, Artificial Sequence
  Synthetic
cuagaaaagugcccaua

SEQ ID NO: 740276 - RNA, 17 nt, Artificial Sequence
  Synthetic
auguauugcuucccaua

SEQ ID NO: 740277 - RNA, 17 nt, Artificial Sequence
  Synthetic
agcugaaauuucccaua

SEQ ID NO: 740278 - RNA, 17 nt, Artificial Sequence
  Synthetic
acauuuucacagccaua

SEQ ID NO: 740279 - RNA, 17 nt, Artificial Sequence
  Synthetic
ccuuaacuucagccaua

SEQ ID NO: 740280 - RNA, 17 nt, Artificial Sequence
  Synthetic
aauccucauuagccaua

SEQ ID NO: 740281 - RNA, 17 nt, Artificial Sequence
  Synthetic
aggcuuugcgggccaua

SEQ ID NO: 740282 - RNA, 17 nt, Artificial Sequence
  Synthetic
agaauguucuggccaua

SEQ ID NO: 740283 - RNA, 17 nt, Artificial Sequence
  Synthetic
uacuugaauuggccaua

SEQ ID NO: 740284 - RNA, 17 nt, Artificial Sequence
  Synthetic
uaauacauaaugccaua

SEQ ID NO: 740285 - RNA, 17 nt, Artificial Sequence
  Synthetic
aagccacagaugccaua

SEQ ID NO: 740286 - RNA, 17 nt, Artificial Sequence
  Synthetic
acuuauucacugccaua

SEQ ID NO: 740287 - RNA, 17 nt, Artificial Sequence
  Synthetic
ucuuacccuuugccaua

SEQ ID NO: 740288 - RNA, 17 nt, Artificial Sequence
  Synthetic
auagacaguuugccaua

SEQ ID NO: 740289 - RNA, 17 nt, Artificial Sequence
  Synthetic
cuggcagugaauccaua

SEQ ID NO: 740290 - RNA, 17 nt, Artificial Sequence
  Synthetic
aaaucuaaacauccaua

SEQ ID NO: 740291 - RNA, 17 nt, Artificial Sequence
  Synthetic
aaccuuuuagauccaua

SEQ ID NO: 740292 - RNA, 17 nt, Artificial Sequence
  Synthetic
ccugcaugauauccaua

SEQ ID NO: 740293 - RNA, 17 nt, Artificial Sequence
  Synthetic
aauuuaaucuauccaua

SEQ ID NO: 740294 - RNA, 17 nt, Artificial Sequence
  Synthetic
aacugcucuacuccaua

SEQ ID NO: 740295 - RNA, 17 nt, Artificial Sequence
  Synthetic
uucaccucugcuccaua

SEQ ID NO: 740296 - RNA, 17 nt, Artificial Sequence
  Synthetic
auacgugcaucuccaua

SEQ ID NO: 740297 - RNA, 17 nt, Artificial Sequence
  Synthetic
uagaccucugguccaua

SEQ ID NO: 740298 - RNA, 17 nt, Artificial Sequence
  Synthetic
agaaugagguguccaua

SEQ ID NO: 740299 - RNA, 17 nt, Artificial Sequence
  Synthetic
augcauugaauuccaua

SEQ ID NO: 740300 - RNA, 17 nt, Artificial Sequence
  Synthetic
cugcauaauauuccaua

SEQ ID NO: 740301 - RNA, 17 nt, Artificial Sequence
  Synthetic
aaugucacuauuccaua

SEQ ID NO: 740302 - RNA, 17 nt, Artificial Sequence
  Synthetic
auuucaucuauuccaua

SEQ ID NO: 740303 - RNA, 17 nt, Artificial Sequence
  Synthetic
uuugaggaacuuccaua

SEQ ID NO: 740304 - RNA, 17 nt, Artificial Sequence
  Synthetic
ugucuauuucuuccaua

SEQ ID NO: 740305 - RNA, 17 nt, Artificial Sequence
  Synthetic
acagacuuucuuccaua

SEQ ID NO: 740306 - RNA, 17 nt, Artificial Sequence
  Synthetic
ugggacucuuuuccaua

SEQ ID NO: 740307 - RNA, 17 nt, Artificial Sequence
  Synthetic
cacuucaguuuuccaua

SEQ ID NO: 740308 - RNA, 17 nt, Artificial Sequence
  Synthetic
acguauauuuuuccaua

SEQ ID NO: 740309 - RNA, 17 nt, Artificial Sequence
  Synthetic
uuuaagaaaaaagcaua

SEQ ID NO: 740310 - RNA, 17 nt, Artificial Sequence
  Synthetic
auuugugcaaaagcaua

SEQ ID NO: 740311 - RNA, 17 nt, Artificial Sequence
  Synthetic
cugcagguaaaagcaua

SEQ ID NO: 740312 - RNA, 17 nt, Artificial Sequence
  Synthetic
caacugaccaaagcaua

SEQ ID NO: 740313 - RNA, 17 nt, Artificial Sequence
  Synthetic
uuucuucucaaagcaua

SEQ ID NO: 740314 - RNA, 17 nt, Artificial Sequence
  Synthetic
augaugaauaaagcaua

SEQ ID NO: 740315 - RNA, 17 nt, Artificial Sequence
  Synthetic
acauguccuaaagcaua

SEQ ID NO: 740316 - RNA, 17 nt, Artificial Sequence
  Synthetic
auaagaacacaagcaua

SEQ ID NO: 740317 - RNA, 17 nt, Artificial Sequence
  Synthetic
agcucgaaggaagcaua

SEQ ID NO: 740318 - RNA, 17 nt, Artificial Sequence
  Synthetic
ugugaagaaacagcaua

SEQ ID NO: 740319 - RNA, 17 nt, Artificial Sequence
  Synthetic
aauagggaaacagcaua

SEQ ID NO: 740320 - RNA, 17 nt, Artificial Sequence
  Synthetic
agaguuaucagagcaua

SEQ ID NO: 740321 - RNA, 17 nt, Artificial Sequence
  Synthetic
aauaagucaggagcaua

SEQ ID NO: 740322 - RNA, 17 nt, Artificial Sequence
  Synthetic
ccagcuaugugagcaua

SEQ ID NO: 740323 - RNA, 17 nt, Artificial Sequence
  Synthetic
uagaauaagauagcaua

SEQ ID NO: 740324 - RNA, 17 nt, Artificial Sequence
  Synthetic
cucaugauuauagcaua

SEQ ID NO: 740325 - RNA, 17 nt, Artificial Sequence
  Synthetic
agacauacacuagcaua

SEQ ID NO: 740326 - RNA, 17 nt, Artificial Sequence
  Synthetic
auucaaugacuagcaua

SEQ ID NO: 740327 - RNA, 17 nt, Artificial Sequence
  Synthetic
uuuuaugaccuagcaua

SEQ ID NO: 740328 - RNA, 17 nt, Artificial Sequence
  Synthetic
ugcaguacuguagcaua

SEQ ID NO: 740329 - RNA, 17 nt, Artificial Sequence
  Synthetic
auccacauuguagcaua

SEQ ID NO: 740330 - RNA, 17 nt, Artificial Sequence
  Synthetic
uuauuucauuuagcaua

SEQ ID NO: 740331 - RNA, 17 nt, Artificial Sequence
  Synthetic
uuagaagacagcgcaua

SEQ ID NO: 740332 - RNA, 17 nt, Artificial Sequence
  Synthetic
auuaggggaaaggcaua

SEQ ID NO: 740333 - RNA, 17 nt, Artificial Sequence
  Synthetic
agggauacagaggcaua

SEQ ID NO: 740334 - RNA, 17 nt, Artificial Sequence
  Synthetic
ucgaccaaggaggcaua

SEQ ID NO: 740335 - RNA, 17 nt, Artificial Sequence
  Synthetic
uuguuuuaugaggcaua

SEQ ID NO: 740336 - RNA, 17 nt, Artificial Sequence
  Synthetic
caguaaaauuaggcaua

SEQ ID NO: 740337 - RNA, 17 nt, Artificial Sequence
  Synthetic
cguagaacuuaggcaua

SEQ ID NO: 740338 - RNA, 17 nt, Artificial Sequence
  Synthetic
ugugugaguuaggcaua

SEQ ID NO: 740339 - RNA, 17 nt, Artificial Sequence
  Synthetic
uggaauugaagggcaua

SEQ ID NO: 740340 - RNA, 17 nt, Artificial Sequence
  Synthetic
aagcuacauagggcaua

SEQ ID NO: 740341 - RNA, 17 nt, Artificial Sequence
  Synthetic
cacagugugcuggcaua

SEQ ID NO: 740342 - RNA, 17 nt, Artificial Sequence
  Synthetic
caucugguucuggcaua

SEQ ID NO: 740343 - RNA, 17 nt, Artificial Sequence
  Synthetic
cuuaccaucguggcaua

SEQ ID NO: 740344 - RNA, 17 nt, Artificial Sequence
  Synthetic
uagacucuuuuggcaua

SEQ ID NO: 740345 - RNA, 17 nt, Artificial Sequence
  Synthetic
auuaguauaaaugcaua

SEQ ID NO: 740346 - RNA, 17 nt, Artificial Sequence
  Synthetic
agguucaugaaugcaua

SEQ ID NO: 740347 - RNA, 17 nt, Artificial Sequence
  Synthetic
agaugaagagaugcaua

SEQ ID NO: 740348 - RNA, 17 nt, Artificial Sequence
  Synthetic
uucacuguuuaugcaua

SEQ ID NO: 740349 - RNA, 17 nt, Artificial Sequence
  Synthetic
uaaauaauaacugcaua

SEQ ID NO: 740350 - RNA, 17 nt, Artificial Sequence
  Synthetic
uuaaauguuacugcaua

SEQ ID NO: 740351 - RNA, 17 nt, Artificial Sequence
  Synthetic
aauaguacagcugcaua

SEQ ID NO: 740352 - RNA, 17 nt, Artificial Sequence
  Synthetic
caguuaugugcugcaua

SEQ ID NO: 740353 - RNA, 17 nt, Artificial Sequence
  Synthetic
cuccccauaucugcaua

SEQ ID NO: 740354 - RNA, 17 nt, Artificial Sequence
  Synthetic
uagauucauucugcaua

SEQ ID NO: 740355 - RNA, 17 nt, Artificial Sequence
  Synthetic
auucacucuucugcaua

SEQ ID NO: 740356 - RNA, 17 nt, Artificial Sequence
  Synthetic
uugcauucuucugcaua

SEQ ID NO: 740357 - RNA, 17 nt, Artificial Sequence
  Synthetic
uuuccguuuucugcaua

SEQ ID NO: 740358 - RNA, 17 nt, Artificial Sequence
  Synthetic
cccaccaacagugcaua

SEQ ID NO: 740359 - RNA, 17 nt, Artificial Sequence
  Synthetic
uuuguuguaugugcaua

SEQ ID NO: 740360 - RNA, 17 nt, Artificial Sequence
  Synthetic
agagaguugugugcaua

SEQ ID NO: 740361 - RNA, 17 nt, Artificial Sequence
  Synthetic
uuuccuaucauugcaua

SEQ ID NO: 740362 - RNA, 17 nt, Artificial Sequence
  Synthetic
uguaguucuauugcaua

SEQ ID NO: 740363 - RNA, 17 nt, Artificial Sequence
  Synthetic
uucuaucacuuugcaua

SEQ ID NO: 740364 - RNA, 17 nt, Artificial Sequence
  Synthetic
acuaugauguuugcaua

SEQ ID NO: 740365 - RNA, 17 nt, Artificial Sequence
  Synthetic
aaagucaaaaaaucaua

SEQ ID NO: 740366 - RNA, 17 nt, Artificial Sequence
  Synthetic
uuacuaagaaaaucaua

SEQ ID NO: 740367 - RNA, 17 nt, Artificial Sequence
  Synthetic
agcuuagccaaaucaua

SEQ ID NO: 740368 - RNA, 17 nt, Artificial Sequence
  Synthetic
ugauugacuaaaucaua

SEQ ID NO: 740369 - RNA, 17 nt, Artificial Sequence
  Synthetic
aagauugcuaaaucaua

SEQ ID NO: 740370 - RNA, 17 nt, Artificial Sequence
  Synthetic
auuuguggggaaucaua

SEQ ID NO: 740371 - RNA, 17 nt, Artificial Sequence
  Synthetic
aaugcacuugaaucaua

SEQ ID NO: 740372 - RNA, 17 nt, Artificial Sequence
  Synthetic
uuuaauuagccaucaua

SEQ ID NO: 740373 - RNA, 17 nt, Artificial Sequence
  Synthetic
uaaaucagcucaucaua

SEQ ID NO: 740374 - RNA, 17 nt, Artificial Sequence
  Synthetic
uuauuaaaaugaucaua

SEQ ID NO: 740375 - RNA, 17 nt, Artificial Sequence
  Synthetic
ugaaaaauaauaucaua

SEQ ID NO: 740376 - RNA, 17 nt, Artificial Sequence
  Synthetic
ucuugacacauaucaua

SEQ ID NO: 740377 - RNA, 17 nt, Artificial Sequence
  Synthetic
aaugaaaugauaucaua

SEQ ID NO: 740378 - RNA, 17 nt, Artificial Sequence
  Synthetic
uauauauauauaucaua

SEQ ID NO: 740379 - RNA, 17 nt, Artificial Sequence
  Synthetic
cuuuuuaggcuaucaua

SEQ ID NO: 740380 - RNA, 17 nt, Artificial Sequence
  Synthetic
agucuaccucuaucaua

SEQ ID NO: 740381 - RNA, 17 nt, Artificial Sequence
  Synthetic
uaugcuacgguaucaua

SEQ ID NO: 740382 - RNA, 17 nt, Artificial Sequence
  Synthetic
cuccauucuuuaucaua

SEQ ID NO: 740383 - RNA, 17 nt, Artificial Sequence
  Synthetic
aguacauuccacucaua

SEQ ID NO: 740384 - RNA, 17 nt, Artificial Sequence
  Synthetic
ucuccauuccacucaua

SEQ ID NO: 740385 - RNA, 17 nt, Artificial Sequence
  Synthetic
aaggguacauacucaua

SEQ ID NO: 740386 - RNA, 17 nt, Artificial Sequence
  Synthetic
cucugaucuuacucaua

SEQ ID NO: 740387 - RNA, 17 nt, Artificial Sequence
  Synthetic
agauuaaugaccucaua

SEQ ID NO: 740388 - RNA, 17 nt, Artificial Sequence
  Synthetic
uuucuuauagccucaua

SEQ ID NO: 740389 - RNA, 17 nt, Artificial Sequence
  Synthetic
uauuuguauuccucaua

SEQ ID NO: 740390 - RNA, 17 nt, Artificial Sequence
  Synthetic
uauuucaaaugcucaua

SEQ ID NO: 740391 - RNA, 17 nt, Artificial Sequence
  Synthetic
ugagaauaaaucucaua

SEQ ID NO: 740392 - RNA, 17 nt, Artificial Sequence
  Synthetic
agcauuagauucucaua

SEQ ID NO: 740393 - RNA, 17 nt, Artificial Sequence
  Synthetic
acccagaaaaagucaua

SEQ ID NO: 740394 - RNA, 17 nt, Artificial Sequence
  Synthetic
ugagaaguugagucaua

SEQ ID NO: 740395 - RNA, 17 nt, Artificial Sequence
  Synthetic
acauucuuaaggucaua

SEQ ID NO: 740396 - RNA, 17 nt, Artificial Sequence
  Synthetic
aguauugucaggucaua

SEQ ID NO: 740397 - RNA, 17 nt, Artificial Sequence
  Synthetic
aagaccaugaggucaua

SEQ ID NO: 740398 - RNA, 17 nt, Artificial Sequence
  Synthetic
aagguaauuaggucaua

SEQ ID NO: 740399 - RNA, 17 nt, Artificial Sequence
  Synthetic
cuucucacugggucaua

SEQ ID NO: 740400 - RNA, 17 nt, Artificial Sequence
  Synthetic
acaggguaaaugucaua

SEQ ID NO: 740401 - RNA, 17 nt, Artificial Sequence
  Synthetic
cucuauuaaaugucaua

SEQ ID NO: 740402 - RNA, 17 nt, Artificial Sequence
  Synthetic
uuauauaacaugucaua

SEQ ID NO: 740403 - RNA, 17 nt, Artificial Sequence
  Synthetic
ccuguccacaugucaua

SEQ ID NO: 740404 - RNA, 17 nt, Artificial Sequence
  Synthetic
agugugguacugucaua

SEQ ID NO: 740405 - RNA, 17 nt, Artificial Sequence
  Synthetic
agaaugguuuugucaua

SEQ ID NO: 740406 - RNA, 17 nt, Artificial Sequence
  Synthetic
uccucuuaaaauucaua

SEQ ID NO: 740407 - RNA, 17 nt, Artificial Sequence
  Synthetic
ucuaaagcaaauucaua

SEQ ID NO: 740408 - RNA, 17 nt, Artificial Sequence
  Synthetic
agacuugacaauucaua

SEQ ID NO: 740409 - RNA, 17 nt, Artificial Sequence
  Synthetic
acugaauagaauucaua

SEQ ID NO: 740410 - RNA, 17 nt, Artificial Sequence
  Synthetic
uuuuaaaaacauucaua

SEQ ID NO: 740411 - RNA, 17 nt, Artificial Sequence
  Synthetic
acauucauucauucaua

SEQ ID NO: 740412 - RNA, 17 nt, Artificial Sequence
  Synthetic
uauaaauaauauucaua

SEQ ID NO: 740413 - RNA, 17 nt, Artificial Sequence
  Synthetic
ucaagucuauauucaua

SEQ ID NO: 740414 - RNA, 17 nt, Artificial Sequence
  Synthetic
ccauguauuuauucaua

SEQ ID NO: 740415 - RNA, 17 nt, Artificial Sequence
  Synthetic
accuuccuugcuucaua

SEQ ID NO: 740416 - RNA, 17 nt, Artificial Sequence
  Synthetic
ccuuuguucucuucaua

SEQ ID NO: 740417 - RNA, 17 nt, Artificial Sequence
  Synthetic
aguaugaauucuucaua

SEQ ID NO: 740418 - RNA, 17 nt, Artificial Sequence
  Synthetic
aaccuugauucuucaua

SEQ ID NO: 740419 - RNA, 17 nt, Artificial Sequence
  Synthetic
ucacauccuucuucaua

SEQ ID NO: 740420 - RNA, 17 nt, Artificial Sequence
  Synthetic
cgugagcuuucuucaua

SEQ ID NO: 740421 - RNA, 17 nt, Artificial Sequence
  Synthetic
cuacuuuaaaguucaua

SEQ ID NO: 740422 - RNA, 17 nt, Artificial Sequence
  Synthetic
uaaaagcaauguucaua

SEQ ID NO: 740423 - RNA, 17 nt, Artificial Sequence
  Synthetic
cuacuuuaaauuucaua

SEQ ID NO: 740424 - RNA, 17 nt, Artificial Sequence
  Synthetic
cuacuuuacauuucaua

SEQ ID NO: 740425 - RNA, 17 nt, Artificial Sequence
  Synthetic
uaacuuccuauuucaua

SEQ ID NO: 740426 - RNA, 17 nt, Artificial Sequence
  Synthetic
uuugguaguauuucaua

SEQ ID NO: 740427 - RNA, 17 nt, Artificial Sequence
  Synthetic
aauuugcaacuuucaua

SEQ ID NO: 740428 - RNA, 17 nt, Artificial Sequence
  Synthetic
ccagggucuuuuucaua

SEQ ID NO: 740429 - RNA, 17 nt, Artificial Sequence
  Synthetic
uugucuacaaaaagaua

SEQ ID NO: 740430 - RNA, 17 nt, Artificial Sequence
  Synthetic
aaauuggacaaaagaua

SEQ ID NO: 740431 - RNA, 17 nt, Artificial Sequence
  Synthetic
ccauaaauuaaaagaua

SEQ ID NO: 740432 - RNA, 17 nt, Artificial Sequence
  Synthetic
aaccaaccacaaagaua

SEQ ID NO: 740433 - RNA, 17 nt, Artificial Sequence
  Synthetic
auguauccacaaagaua

SEQ ID NO: 740434 - RNA, 17 nt, Artificial Sequence
  Synthetic
caauuacuacaaagaua

SEQ ID NO: 740435 - RNA, 17 nt, Artificial Sequence
  Synthetic
ucacaguugcaaagaua

SEQ ID NO: 740436 - RNA, 17 nt, Artificial Sequence
  Synthetic
uagcauuuucaaagaua

SEQ ID NO: 740437 - RNA, 17 nt, Artificial Sequence
  Synthetic
uauuuccgagaaagaua

SEQ ID NO: 740438 - RNA, 17 nt, Artificial Sequence
  Synthetic
uccauguucuaaagaua

SEQ ID NO: 740439 - RNA, 17 nt, Artificial Sequence
  Synthetic
ucuuguaacccaagaua

SEQ ID NO: 740440 - RNA, 17 nt, Artificial Sequence
  Synthetic
uugcaauagccaagaua

SEQ ID NO: 740441 - RNA, 17 nt, Artificial Sequence
  Synthetic
uuugcaauugcaagaua

SEQ ID NO: 740442 - RNA, 17 nt, Artificial Sequence
  Synthetic
cgucaaagaucaagaua

SEQ ID NO: 740443 - RNA, 17 nt, Artificial Sequence
  Synthetic
uccaucagaucaagaua

SEQ ID NO: 740444 - RNA, 17 nt, Artificial Sequence
  Synthetic
uaguauacuagaagaua

SEQ ID NO: 740445 - RNA, 17 nt, Artificial Sequence
  Synthetic
uauuuucagauaagaua

SEQ ID NO: 740446 - RNA, 17 nt, Artificial Sequence
  Synthetic
uacaaguugauaagaua

SEQ ID NO: 740447 - RNA, 17 nt, Artificial Sequence
  Synthetic
acuauaguguuaagaua

SEQ ID NO: 740448 - RNA, 17 nt, Artificial Sequence
  Synthetic
uugaggaucaacagaua

SEQ ID NO: 740449 - RNA, 17 nt, Artificial Sequence
  Synthetic
cacuuccauaacagaua

SEQ ID NO: 740450 - RNA, 17 nt, Artificial Sequence
  Synthetic
uguugaaugcacagaua

SEQ ID NO: 740451 - RNA, 17 nt, Artificial Sequence
  Synthetic
aucccauaucacagaua

SEQ ID NO: 740452 - RNA, 17 nt, Artificial Sequence
  Synthetic
cugaccugucacagaua

SEQ ID NO: 740453 - RNA, 17 nt, Artificial Sequence
  Synthetic
cuuaaggacuacagaua

SEQ ID NO: 740454 - RNA, 17 nt, Artificial Sequence
  Synthetic
cacacacccuacagaua

SEQ ID NO: 740455 - RNA, 17 nt, Artificial Sequence
  Synthetic
uguauccccuacagaua

SEQ ID NO: 740456 - RNA, 17 nt, Artificial Sequence
  Synthetic
uuaaguuuguacagaua

SEQ ID NO: 740457 - RNA, 17 nt, Artificial Sequence
  Synthetic
acauucaguuacagaua

SEQ ID NO: 740458 - RNA, 17 nt, Artificial Sequence
  Synthetic
uggaaagacaccagaua

SEQ ID NO: 740459 - RNA, 17 nt, Artificial Sequence
  Synthetic
uggguagaggccagaua

SEQ ID NO: 740460 - RNA, 17 nt, Artificial Sequence
  Synthetic
uuuuaaaggagcagaua

SEQ ID NO: 740461 - RNA, 17 nt, Artificial Sequence
  Synthetic
cgcagacaaggcagaua

SEQ ID NO: 740462 - RNA, 17 nt, Artificial Sequence
  Synthetic
uugcuuuuaggcagaua

SEQ ID NO: 740463 - RNA, 17 nt, Artificial Sequence
  Synthetic
agaacccuaugcagaua

SEQ ID NO: 740464 - RNA, 17 nt, Artificial Sequence
  Synthetic
cuggucuuucucagaua

SEQ ID NO: 740465 - RNA, 17 nt, Artificial Sequence
  Synthetic
aucuucccagucagaua

SEQ ID NO: 740466 - RNA, 17 nt, Artificial Sequence
  Synthetic
uauaaauaauucagaua

SEQ ID NO: 740467 - RNA, 17 nt, Artificial Sequence
  Synthetic
uuauaugauuucagaua

SEQ ID NO: 740468 - RNA, 17 nt, Artificial Sequence
  Synthetic
agaacuucaaagagaua

SEQ ID NO: 740469 - RNA, 17 nt, Artificial Sequence
  Synthetic
agguagagaaagagaua

SEQ ID NO: 740470 - RNA, 17 nt, Artificial Sequence
  Synthetic
uaguaggggaagagaua

SEQ ID NO: 740471 - RNA, 17 nt, Artificial Sequence
  Synthetic
uaaauagaccagagaua

SEQ ID NO: 740472 - RNA, 17 nt, Artificial Sequence
  Synthetic
aaaguuuuucagagaua

SEQ ID NO: 740473 - RNA, 17 nt, Artificial Sequence
  Synthetic
agggaggaagagagaua

SEQ ID NO: 740474 - RNA, 17 nt, Artificial Sequence
  Synthetic
cucugaaaugagagaua

SEQ ID NO: 740475 - RNA, 17 nt, Artificial Sequence
  Synthetic
aagaguacugagagaua

SEQ ID NO: 740476 - RNA, 17 nt, Artificial Sequence
  Synthetic
uacauuacugagagaua

SEQ ID NO: 740477 - RNA, 17 nt, Artificial Sequence
  Synthetic
ucuguacaauagagaua

SEQ ID NO: 740478 - RNA, 17 nt, Artificial Sequence
  Synthetic
ugguucagcuagagaua

SEQ ID NO: 740479 - RNA, 17 nt, Artificial Sequence
  Synthetic
agcucaagaaggagaua

SEQ ID NO: 740480 - RNA, 17 nt, Artificial Sequence
  Synthetic
aaaaaucagaggagaua

SEQ ID NO: 740481 - RNA, 17 nt, Artificial Sequence
  Synthetic
aaugaaugagggagaua

SEQ ID NO: 740482 - RNA, 17 nt, Artificial Sequence
  Synthetic
uacaaaauagggagaua

SEQ ID NO: 740483 - RNA, 17 nt, Artificial Sequence
  Synthetic
auaugcucugggagaua

SEQ ID NO: 740484 - RNA, 17 nt, Artificial Sequence
  Synthetic
gugagaaacuggagaua

SEQ ID NO: 740485 - RNA, 17 nt, Artificial Sequence
  Synthetic
auauuauuacugagaua

SEQ ID NO: 740486 - RNA, 17 nt, Artificial Sequence
  Synthetic
ucuuuaucugugagaua

SEQ ID NO: 740487 - RNA, 17 nt, Artificial Sequence
  Synthetic
auguacagugugagaua

SEQ ID NO: 740488 - RNA, 17 nt, Artificial Sequence
  Synthetic
uuaaagcauuugagaua

SEQ ID NO: 740489 - RNA, 17 nt, Artificial Sequence
  Synthetic
uuugcaacuaauagaua

SEQ ID NO: 740490 - RNA, 17 nt, Artificial Sequence
  Synthetic
cuauaaauuaauagaua

SEQ ID NO: 740491 - RNA, 17 nt, Artificial Sequence
  Synthetic
augguauuuaauagaua

SEQ ID NO: 740492 - RNA, 17 nt, Artificial Sequence
  Synthetic
auacuauuacauagaua

SEQ ID NO: 740493 - RNA, 17 nt, Artificial Sequence
  Synthetic
auucuaugucauagaua

SEQ ID NO: 740494 - RNA, 17 nt, Artificial Sequence
  Synthetic
ucaauaguucauagaua

SEQ ID NO: 740495 - RNA, 17 nt, Artificial Sequence
  Synthetic
cuauauauauauagaua

SEQ ID NO: 740496 - RNA, 17 nt, Artificial Sequence
  Synthetic
caugcuuuuuauagaua

SEQ ID NO: 740497 - RNA, 17 nt, Artificial Sequence
  Synthetic
uccuggaaaucuagaua

SEQ ID NO: 740498 - RNA, 17 nt, Artificial Sequence
  Synthetic
uacuugucaaguagaua

SEQ ID NO: 740499 - RNA, 17 nt, Artificial Sequence
  Synthetic
uguauuuuaaguagaua

SEQ ID NO: 740500 - RNA, 17 nt, Artificial Sequence
  Synthetic
aaucuuuugcguagaua

SEQ ID NO: 740501 - RNA, 17 nt, Artificial Sequence
  Synthetic
cuaauauaaauuagaua

SEQ ID NO: 740502 - RNA, 17 nt, Artificial Sequence
  Synthetic
cuuuaaugaauuagaua

SEQ ID NO: 740503 - RNA, 17 nt, Artificial Sequence
  Synthetic
aaaucauacauuagaua

SEQ ID NO: 740504 - RNA, 17 nt, Artificial Sequence
  Synthetic
aaaagaacuauuagaua

SEQ ID NO: 740505 - RNA, 17 nt, Artificial Sequence
  Synthetic
aaacuaacuauuagaua

SEQ ID NO: 740506 - RNA, 17 nt, Artificial Sequence
  Synthetic
auguuagaacuuagaua

SEQ ID NO: 740507 - RNA, 17 nt, Artificial Sequence
  Synthetic
cugguguuucuuagaua

SEQ ID NO: 740508 - RNA, 17 nt, Artificial Sequence
  Synthetic
uugaacuuaguuagaua

SEQ ID NO: 740509 - RNA, 17 nt, Artificial Sequence
  Synthetic
cugcuguguguuagaua

SEQ ID NO: 740510 - RNA, 17 nt, Artificial Sequence
  Synthetic
uagugacauuuuagaua

SEQ ID NO: 740511 - RNA, 17 nt, Artificial Sequence
  Synthetic
aaguaagauuuuagaua

SEQ ID NO: 740512 - RNA, 17 nt, Artificial Sequence
  Synthetic
uuugauuuuuuuagaua

SEQ ID NO: 740513 - RNA, 17 nt, Artificial Sequence
  Synthetic
uaauaauaaaaacgaua

SEQ ID NO: 740514 - RNA, 17 nt, Artificial Sequence
  Synthetic
uuugaggugagacgaua

SEQ ID NO: 740515 - RNA, 17 nt, Artificial Sequence
  Synthetic
uaccaaaaucuacgaua

SEQ ID NO: 740516 - RNA, 17 nt, Artificial Sequence
  Synthetic
uaaaugccaucucgaua

SEQ ID NO: 740517 - RNA, 17 nt, Artificial Sequence
  Synthetic
auuuuaaugucucgaua

SEQ ID NO: 740518 - RNA, 17 nt, Artificial Sequence
  Synthetic
uuuuauaugugucgaua

SEQ ID NO: 740519 - RNA, 17 nt, Artificial Sequence
  Synthetic
aguaguaagaaaggaua

SEQ ID NO: 740520 - RNA, 17 nt, Artificial Sequence
  Synthetic
uagaaagggaaaggaua

SEQ ID NO: 740521 - RNA, 17 nt, Artificial Sequence
  Synthetic
aguguugaucaaggaua

SEQ ID NO: 740522 - RNA, 17 nt, Artificial Sequence
  Synthetic
aacuuccuagaaggaua

SEQ ID NO: 740523 - RNA, 17 nt, Artificial Sequence
  Synthetic
agaaugaaagcaggaua

SEQ ID NO: 740524 - RNA, 17 nt, Artificial Sequence
  Synthetic
agaaaugagucaggaua

SEQ ID NO: 740525 - RNA, 17 nt, Artificial Sequence
  Synthetic
ccuuguacuucaggaua

SEQ ID NO: 740526 - RNA, 17 nt, Artificial Sequence
  Synthetic
uccacaugaagaggaua

SEQ ID NO: 740527 - RNA, 17 nt, Artificial Sequence
  Synthetic
acuggaaaaggaggaua

SEQ ID NO: 740528 - RNA, 17 nt, Artificial Sequence
  Synthetic
aaaacugcaggaggaua

SEQ ID NO: 740529 - RNA, 17 nt, Artificial Sequence
  Synthetic
agaaagagaugaggaua

SEQ ID NO: 740530 - RNA, 17 nt, Artificial Sequence
  Synthetic
augacagggauaggaua

SEQ ID NO: 740531 - RNA, 17 nt, Artificial Sequence
  Synthetic
ugugugacuauaggaua

SEQ ID NO: 740532 - RNA, 17 nt, Artificial Sequence
  Synthetic
ucagugggucuaggaua

SEQ ID NO: 740533 - RNA, 17 nt, Artificial Sequence
  Synthetic
ucccagauucuaggaua

SEQ ID NO: 740534 - RNA, 17 nt, Artificial Sequence
  Synthetic
uuagucacaguaggaua

SEQ ID NO: 740535 - RNA, 17 nt, Artificial Sequence
  Synthetic
uuccugggauuaggaua

SEQ ID NO: 740536 - RNA, 17 nt, Artificial Sequence
  Synthetic
ucuccauucugcggaua

SEQ ID NO: 740537 - RNA, 17 nt, Artificial Sequence
  Synthetic
uucaguaaagagggaua

SEQ ID NO: 740538 - RNA, 17 nt, Artificial Sequence
  Synthetic
auuugcuaagagggaua

SEQ ID NO: 740539 - RNA, 17 nt, Artificial Sequence
  Synthetic
uguccuuuguagggaua

SEQ ID NO: 740540 - RNA, 17 nt, Artificial Sequence
  Synthetic
ucacacauuuagggaua

SEQ ID NO: 740541 - RNA, 17 nt, Artificial Sequence
  Synthetic
uauuaagggaggggaua

SEQ ID NO: 740542 - RNA, 17 nt, Artificial Sequence
  Synthetic
aauggggaaaugggaua

SEQ ID NO: 740543 - RNA, 17 nt, Artificial Sequence
  Synthetic
aauucagauaugggaua

SEQ ID NO: 740544 - RNA, 17 nt, Artificial Sequence
  Synthetic
auaccaucugugggaua

SEQ ID NO: 740545 - RNA, 17 nt, Artificial Sequence
  Synthetic
ugcaguaucuugggaua

SEQ ID NO: 740546 - RNA, 17 nt, Artificial Sequence
  Synthetic
auccuucuguugggaua

SEQ ID NO: 740547 - RNA, 17 nt, Artificial Sequence
  Synthetic
ugugaaagaaauggaua

SEQ ID NO: 740548 - RNA, 17 nt, Artificial Sequence
  Synthetic
ccaucacacaauggaua

SEQ ID NO: 740549 - RNA, 17 nt, Artificial Sequence
  Synthetic
aagagccagaauggaua

SEQ ID NO: 740550 - RNA, 17 nt, Artificial Sequence
  Synthetic
agacuucaacauggaua

SEQ ID NO: 740551 - RNA, 17 nt, Artificial Sequence
  Synthetic
uucugaaaagauggaua

SEQ ID NO: 740552 - RNA, 17 nt, Artificial Sequence
  Synthetic
caauauaguuauggaua

SEQ ID NO: 740553 - RNA, 17 nt, Artificial Sequence
  Synthetic
ccaaauauuuauggaua

SEQ ID NO: 740554 - RNA, 17 nt, Artificial Sequence
  Synthetic
auuucaaccucuggaua

SEQ ID NO: 740555 - RNA, 17 nt, Artificial Sequence
  Synthetic
uuucauuccucuggaua

SEQ ID NO: 740556 - RNA, 17 nt, Artificial Sequence
  Synthetic
acuaccaauaguggaua

SEQ ID NO: 740557 - RNA, 17 nt, Artificial Sequence
  Synthetic
ugaguccaagguggaua

SEQ ID NO: 740558 - RNA, 17 nt, Artificial Sequence
  Synthetic
caugaauaagguggaua

SEQ ID NO: 740559 - RNA, 17 nt, Artificial Sequence
  Synthetic
aucugugaauguggaua

SEQ ID NO: 740560 - RNA, 17 nt, Artificial Sequence
  Synthetic
ccacucugguguggaua

SEQ ID NO: 740561 - RNA, 17 nt, Artificial Sequence
  Synthetic
ugcaaggauuguggaua

SEQ ID NO: 740562 - RNA, 17 nt, Artificial Sequence
  Synthetic
ucuggaugaauuggaua

SEQ ID NO: 740563 - RNA, 17 nt, Artificial Sequence
  Synthetic
aaguuuaauauuggaua

SEQ ID NO: 740564 - RNA, 17 nt, Artificial Sequence
  Synthetic
aauucagguauuggaua

SEQ ID NO: 740565 - RNA, 17 nt, Artificial Sequence
  Synthetic
cuuguauccuuuggaua

SEQ ID NO: 740566 - RNA, 17 nt, Artificial Sequence
  Synthetic
aacuucaauuuuggaua

SEQ ID NO: 740567 - RNA, 17 nt, Artificial Sequence
  Synthetic
cccaagcauuuuggaua

SEQ ID NO: 740568 - RNA, 17 nt, Artificial Sequence
  Synthetic
cgauaagauuuuggaua

SEQ ID NO: 740569 - RNA, 17 nt, Artificial Sequence
  Synthetic
cccaaguguuuuggaua

SEQ ID NO: 740570 - RNA, 17 nt, Artificial Sequence
  Synthetic
cauccaagaaaaugaua

SEQ ID NO: 740571 - RNA, 17 nt, Artificial Sequence
  Synthetic
cuaguuauaaaaugaua

SEQ ID NO: 740572 - RNA, 17 nt, Artificial Sequence
  Synthetic
cauacaaagaaaugaua

SEQ ID NO: 740573 - RNA, 17 nt, Artificial Sequence
  Synthetic
ugagucaggaaaugaua

SEQ ID NO: 740574 - RNA, 17 nt, Artificial Sequence
  Synthetic
ccagggaugaaaugaua

SEQ ID NO: 740575 - RNA, 17 nt, Artificial Sequence
  Synthetic
ugccuucuccaaugaua

SEQ ID NO: 740576 - RNA, 17 nt, Artificial Sequence
  Synthetic
acagaagaauaaugaua

SEQ ID NO: 740577 - RNA, 17 nt, Artificial Sequence
  Synthetic
auacaaucauaaugaua

SEQ ID NO: 740578 - RNA, 17 nt, Artificial Sequence
  Synthetic
ucacaaaagccaugaua

SEQ ID NO: 740579 - RNA, 17 nt, Artificial Sequence
  Synthetic
ucauacuagccaugaua

SEQ ID NO: 740580 - RNA, 17 nt, Artificial Sequence
  Synthetic
aaacaaaaggcaugaua

SEQ ID NO: 740581 - RNA, 17 nt, Artificial Sequence
  Synthetic
uguugacucucaugaua

SEQ ID NO: 740582 - RNA, 17 nt, Artificial Sequence
  Synthetic
ccagguauuucaugaua

SEQ ID NO: 740583 - RNA, 17 nt, Artificial Sequence
  Synthetic
cugagcaagagaugaua

SEQ ID NO: 740584 - RNA, 17 nt, Artificial Sequence
  Synthetic
aguaugggaggaugaua

SEQ ID NO: 740585 - RNA, 17 nt, Artificial Sequence
  Synthetic
auccaaauaggaugaua

SEQ ID NO: 740586 - RNA, 17 nt, Artificial Sequence
  Synthetic
aucuaucauugaugaua

SEQ ID NO: 740587 - RNA, 17 nt, Artificial Sequence
  Synthetic
uuugucuuuauaugaua

SEQ ID NO: 740588 - RNA, 17 nt, Artificial Sequence
  Synthetic
uggaagcugcuaugaua

SEQ ID NO: 740589 - RNA, 17 nt, Artificial Sequence
  Synthetic
aacaauagaaacugaua

SEQ ID NO: 740590 - RNA, 17 nt, Artificial Sequence
  Synthetic
aggaaaaugaacugaua

SEQ ID NO: 740591 - RNA, 17 nt, Artificial Sequence
  Synthetic
uccuucaauaacugaua

SEQ ID NO: 740592 - RNA, 17 nt, Artificial Sequence
  Synthetic
auuuugcaucacugaua

SEQ ID NO: 740593 - RNA, 17 nt, Artificial Sequence
  Synthetic
auagugaaugacugaua

SEQ ID NO: 740594 - RNA, 17 nt, Artificial Sequence
  Synthetic
aagacucaauacugaua

SEQ ID NO: 740595 - RNA, 17 nt, Artificial Sequence
  Synthetic
cacuuuacucccugaua

SEQ ID NO: 740596 - RNA, 17 nt, Artificial Sequence
  Synthetic
agauuagaauccugaua

SEQ ID NO: 740597 - RNA, 17 nt, Artificial Sequence
  Synthetic
uaugaugaauccugaua

SEQ ID NO: 740598 - RNA, 17 nt, Artificial Sequence
  Synthetic
auaguagcauccugaua

SEQ ID NO: 740599 - RNA, 17 nt, Artificial Sequence
  Synthetic
uaacaaaagggcugaua

SEQ ID NO: 740600 - RNA, 17 nt, Artificial Sequence
  Synthetic
aaaccauauaucugaua

SEQ ID NO: 740601 - RNA, 17 nt, Artificial Sequence
  Synthetic
agugagaaagucugaua

SEQ ID NO: 740602 - RNA, 17 nt, Artificial Sequence
  Synthetic
ccagugggauucugaua

SEQ ID NO: 740603 - RNA, 17 nt, Artificial Sequence
  Synthetic
aaugaaccaaagugaua

SEQ ID NO: 740604 - RNA, 17 nt, Artificial Sequence
  Synthetic
uugacuucacagugaua

SEQ ID NO: 740605 - RNA, 17 nt, Artificial Sequence
  Synthetic
ucuuaaaggcagugaua

SEQ ID NO: 740606 - RNA, 17 nt, Artificial Sequence
  Synthetic
accaguguggagugaua

SEQ ID NO: 740607 - RNA, 17 nt, Artificial Sequence
  Synthetic
aaaugcugauagugaua

SEQ ID NO: 740608 - RNA, 17 nt, Artificial Sequence
  Synthetic
ccugucacuuagugaua

SEQ ID NO: 740609 - RNA, 17 nt, Artificial Sequence
  Synthetic
uuaccacuuacgugaua

SEQ ID NO: 740610 - RNA, 17 nt, Artificial Sequence
  Synthetic
ugaauuaaggggugaua

SEQ ID NO: 740611 - RNA, 17 nt, Artificial Sequence
  Synthetic
uguaguaaauggugaua

SEQ ID NO: 740612 - RNA, 17 nt, Artificial Sequence
  Synthetic
auagcucuuuggugaua

SEQ ID NO: 740613 - RNA, 17 nt, Artificial Sequence
  Synthetic
uugccuuaucugugaua

SEQ ID NO: 740614 - RNA, 17 nt, Artificial Sequence
  Synthetic
agcuuuccauugugaua

SEQ ID NO: 740615 - RNA, 17 nt, Artificial Sequence
  Synthetic
ugcuugaguuugugaua

SEQ ID NO: 740616 - RNA, 17 nt, Artificial Sequence
  Synthetic
auacacacacauugaua

SEQ ID NO: 740617 - RNA, 17 nt, Artificial Sequence
  Synthetic
acuaguguccauugaua

SEQ ID NO: 740618 - RNA, 17 nt, Artificial Sequence
  Synthetic
agagcaaaagauugaua

SEQ ID NO: 740619 - RNA, 17 nt, Artificial Sequence
  Synthetic
ccuuuauucuauugaua

SEQ ID NO: 740620 - RNA, 17 nt, Artificial Sequence
  Synthetic
ugggauauuuauugaua

SEQ ID NO: 740621 - RNA, 17 nt, Artificial Sequence
  Synthetic
cauagauuaacuugaua

SEQ ID NO: 740622 - RNA, 17 nt, Artificial Sequence
  Synthetic
uuuaggaaugcuugaua

SEQ ID NO: 740623 - RNA, 17 nt, Artificial Sequence
  Synthetic
uucauggcugcuugaua

SEQ ID NO: 740624 - RNA, 17 nt, Artificial Sequence
  Synthetic
acuuuucaaaguugaua

SEQ ID NO: 740625 - RNA, 17 nt, Artificial Sequence
  Synthetic
uauauaucaaguugaua

SEQ ID NO: 740626 - RNA, 17 nt, Artificial Sequence
  Synthetic
augaguagcgguugaua

SEQ ID NO: 740627 - RNA, 17 nt, Artificial Sequence
  Synthetic
aggaucagauguugaua

SEQ ID NO: 740628 - RNA, 17 nt, Artificial Sequence
  Synthetic
ucuuuaguuuguugaua

SEQ ID NO: 740629 - RNA, 17 nt, Artificial Sequence
  Synthetic
aaugugaauauuugaua

SEQ ID NO: 740630 - RNA, 17 nt, Artificial Sequence
  Synthetic
uuucacucacuuugaua

SEQ ID NO: 740631 - RNA, 17 nt, Artificial Sequence
  Synthetic
uaaacaaggcuuugaua

SEQ ID NO: 740632 - RNA, 17 nt, Artificial Sequence
  Synthetic
caguuauggcuuugaua

SEQ ID NO: 740633 - RNA, 17 nt, Artificial Sequence
  Synthetic
ccuaaucaaguuugaua

SEQ ID NO: 740634 - RNA, 17 nt, Artificial Sequence
  Synthetic
ccuguauuaguuugaua

SEQ ID NO: 740635 - RNA, 17 nt, Artificial Sequence
  Synthetic
uuauguacuguuugaua

SEQ ID NO: 740636 - RNA, 17 nt, Artificial Sequence
  Synthetic
uauuuucauuuuugaua

SEQ ID NO: 740637 - RNA, 17 nt, Artificial Sequence
  Synthetic
cuuauuuuuuuuugaua

SEQ ID NO: 740638 - RNA, 17 nt, Artificial Sequence
  Synthetic
uuuuauucaaaaauaua

SEQ ID NO: 740639 - RNA, 17 nt, Artificial Sequence
  Synthetic
uuuugcagaaaaauaua

SEQ ID NO: 740640 - RNA, 17 nt, Artificial Sequence
  Synthetic
cuguaauuaaaaauaua

SEQ ID NO: 740641 - RNA, 17 nt, Artificial Sequence
  Synthetic
ucuuaguucaaaauaua

SEQ ID NO: 740642 - RNA, 17 nt, Artificial Sequence
  Synthetic
aucaggaagaaaauaua

SEQ ID NO: 740643 - RNA, 17 nt, Artificial Sequence
  Synthetic
uaauggcaacaaauaua

SEQ ID NO: 740644 - RNA, 17 nt, Artificial Sequence
  Synthetic
aggaaacagcaaauaua

SEQ ID NO: 740645 - RNA, 17 nt, Artificial Sequence
  Synthetic
auuuacaugcaaauaua

SEQ ID NO: 740646 - RNA, 17 nt, Artificial Sequence
  Synthetic
auagaauuucaaauaua

SEQ ID NO: 740647 - RNA, 17 nt, Artificial Sequence
  Synthetic
aaaugaaaggaaauaua

SEQ ID NO: 740648 - RNA, 17 nt, Artificial Sequence
  Synthetic
aauaauggugaaauaua

SEQ ID NO: 740649 - RNA, 17 nt, Artificial Sequence
  Synthetic
uucaauaucuaaauaua

SEQ ID NO: 740650 - RNA, 17 nt, Artificial Sequence
  Synthetic
cugaaagccacaauaua

SEQ ID NO: 740651 - RNA, 17 nt, Artificial Sequence
  Synthetic
aauaagcauacaauaua

SEQ ID NO: 740652 - RNA, 17 nt, Artificial Sequence
  Synthetic
ccucuucaaucaauaua

SEQ ID NO: 740653 - RNA, 17 nt, Artificial Sequence
  Synthetic
uggugggcuucaauaua

SEQ ID NO: 740654 - RNA, 17 nt, Artificial Sequence
  Synthetic
agaauucuuucaauaua

SEQ ID NO: 740655 - RNA, 17 nt, Artificial Sequence
  Synthetic
uagagaaggagaauaua

SEQ ID NO: 740656 - RNA, 17 nt, Artificial Sequence
  Synthetic
uuauaagugagaauaua

SEQ ID NO: 740657 - RNA, 17 nt, Artificial Sequence
  Synthetic
uuccaggguagaauaua

SEQ ID NO: 740658 - RNA, 17 nt, Artificial Sequence
  Synthetic
agcauuuuuagaauaua

SEQ ID NO: 740659 - RNA, 17 nt, Artificial Sequence
  Synthetic
augaaggcuugaauaua

SEQ ID NO: 740660 - RNA, 17 nt, Artificial Sequence
  Synthetic
uugugaaacauaauaua

SEQ ID NO: 740661 - RNA, 17 nt, Artificial Sequence
  Synthetic
ugucauaguauaauaua

SEQ ID NO: 740662 - RNA, 17 nt, Artificial Sequence
  Synthetic
cuauagcuuauaauaua

SEQ ID NO: 740663 - RNA, 17 nt, Artificial Sequence
  Synthetic
uccauuagccuaauaua

SEQ ID NO: 740664 - RNA, 17 nt, Artificial Sequence
  Synthetic
auuuuaaaauuaauaua

SEQ ID NO: 740665 - RNA, 17 nt, Artificial Sequence
  Synthetic
auauguuaauuaauaua

SEQ ID NO: 740666 - RNA, 17 nt, Artificial Sequence
  Synthetic
uguguuuguuuaauaua

SEQ ID NO: 740667 - RNA, 17 nt, Artificial Sequence
  Synthetic
uacacgaauaacauaua

SEQ ID NO: 740668 - RNA, 17 nt, Artificial Sequence
  Synthetic
acaaaagauaacauaua

SEQ ID NO: 740669 - RNA, 17 nt, Artificial Sequence
  Synthetic
ugcaaggauaacauaua

SEQ ID NO: 740670 - RNA, 17 nt, Artificial Sequence
  Synthetic
cagaccaaacacauaua

SEQ ID NO: 740671 - RNA, 17 nt, Artificial Sequence
  Synthetic
ucaaauccucacauaua

SEQ ID NO: 740672 - RNA, 17 nt, Artificial Sequence
  Synthetic
caggacauucacauaua

SEQ ID NO: 740673 - RNA, 17 nt, Artificial Sequence
  Synthetic
acauacaaagacauaua

SEQ ID NO: 740674 - RNA, 17 nt, Artificial Sequence
  Synthetic
aauugcuuugacauaua

SEQ ID NO: 740675 - RNA, 17 nt, Artificial Sequence
  Synthetic
auaggaaaaaccauaua

SEQ ID NO: 740676 - RNA, 17 nt, Artificial Sequence
  Synthetic
uguagaaauaccauaua

SEQ ID NO: 740677 - RNA, 17 nt, Artificial Sequence
  Synthetic
cucacauuacccauaua

SEQ ID NO: 740678 - RNA, 17 nt, Artificial Sequence
  Synthetic
ccuaacuugcccauaua

SEQ ID NO: 740679 - RNA, 17 nt, Artificial Sequence
  Synthetic
uucauguuucccauaua

SEQ ID NO: 740680 - RNA, 17 nt, Artificial Sequence
  Synthetic
cagcucauguccauaua

SEQ ID NO: 740681 - RNA, 17 nt, Artificial Sequence
  Synthetic
ugaauagauuccauaua

SEQ ID NO: 740682 - RNA, 17 nt, Artificial Sequence
  Synthetic
auuauuccuuccauaua

SEQ ID NO: 740683 - RNA, 17 nt, Artificial Sequence
  Synthetic
aauuuuauaagcauaua

SEQ ID NO: 740684 - RNA, 17 nt, Artificial Sequence
  Synthetic
uaaacauagagcauaua

SEQ ID NO: 740685 - RNA, 17 nt, Artificial Sequence
  Synthetic
aagaaaaauagcauaua

SEQ ID NO: 740686 - RNA, 17 nt, Artificial Sequence
  Synthetic
auguaucugugcauaua

SEQ ID NO: 740687 - RNA, 17 nt, Artificial Sequence
  Synthetic
caguguauauucauaua

SEQ ID NO: 740688 - RNA, 17 nt, Artificial Sequence
  Synthetic
aucuuauacuucauaua

SEQ ID NO: 740689 - RNA, 17 nt, Artificial Sequence
  Synthetic
ucucauauuuucauaua

SEQ ID NO: 740690 - RNA, 17 nt, Artificial Sequence
  Synthetic
acuaaacuuuucauaua

SEQ ID NO: 740691 - RNA, 17 nt, Artificial Sequence
  Synthetic
uguggguuuuucauaua

SEQ ID NO: 740692 - RNA, 17 nt, Artificial Sequence
  Synthetic
cuuaaauggaagauaua

SEQ ID NO: 740693 - RNA, 17 nt, Artificial Sequence
  Synthetic
aaaauguugaagauaua

SEQ ID NO: 740694 - RNA, 17 nt, Artificial Sequence
  Synthetic
acaccuuaucagauaua

SEQ ID NO: 740695 - RNA, 17 nt, Artificial Sequence
  Synthetic
ugucauggagagauaua

SEQ ID NO: 740696 - RNA, 17 nt, Artificial Sequence
  Synthetic
uucuacuauuagauaua

SEQ ID NO: 740697 - RNA, 17 nt, Artificial Sequence
  Synthetic
agauuucagaggauaua

SEQ ID NO: 740698 - RNA, 17 nt, Artificial Sequence
  Synthetic
uuuguuaccuggauaua

SEQ ID NO: 740699 - RNA, 17 nt, Artificial Sequence
  Synthetic
uguuauuucuggauaua

SEQ ID NO: 740700 - RNA, 17 nt, Artificial Sequence
  Synthetic
aaugagauaaugauaua

SEQ ID NO: 740701 - RNA, 17 nt, Artificial Sequence
  Synthetic
uaguauuuaaugauaua

SEQ ID NO: 740702 - RNA, 17 nt, Artificial Sequence
  Synthetic
agauugagucugauaua

SEQ ID NO: 740703 - RNA, 17 nt, Artificial Sequence
  Synthetic
uauuauuucuugauaua

SEQ ID NO: 740704 - RNA, 17 nt, Artificial Sequence
  Synthetic
uuuuaaauuuugauaua

SEQ ID NO: 740705 - RNA, 17 nt, Artificial Sequence
  Synthetic
aaaagaaaaaauauaua

SEQ ID NO: 740706 - RNA, 17 nt, Artificial Sequence
  Synthetic
cagcacccaaauauaua

SEQ ID NO: 740707 - RNA, 17 nt, Artificial Sequence
  Synthetic
aauaaccagaauauaua

SEQ ID NO: 740708 - RNA, 17 nt, Artificial Sequence
  Synthetic
cuaucuuugaauauaua

SEQ ID NO: 740709 - RNA, 17 nt, Artificial Sequence
  Synthetic
augcaguauaauauaua

SEQ ID NO: 740710 - RNA, 17 nt, Artificial Sequence
  Synthetic
acgcacacacauauaua

SEQ ID NO: 740711 - RNA, 17 nt, Artificial Sequence
  Synthetic
uuaaucgcacauauaua

SEQ ID NO: 740712 - RNA, 17 nt, Artificial Sequence
  Synthetic
agcuuucuccauauaua

SEQ ID NO: 740713 - RNA, 17 nt, Artificial Sequence
  Synthetic
agaauaaagcauauaua

SEQ ID NO: 740714 - RNA, 17 nt, Artificial Sequence
  Synthetic
aagacuaagcauauaua

SEQ ID NO: 740715 - RNA, 17 nt, Artificial Sequence
  Synthetic
uguaucucucauauaua

SEQ ID NO: 740716 - RNA, 17 nt, Artificial Sequence
  Synthetic
auaaguauucauauaua

SEQ ID NO: 740717 - RNA, 17 nt, Artificial Sequence
  Synthetic
uaguaauaagauauaua

SEQ ID NO: 740718 - RNA, 17 nt, Artificial Sequence
  Synthetic
uacuuaacugauauaua

SEQ ID NO: 740719 - RNA, 17 nt, Artificial Sequence
  Synthetic
uaagagaaauauauaua

SEQ ID NO: 740720 - RNA, 17 nt, Artificial Sequence
  Synthetic
ugggguacauauauaua

SEQ ID NO: 740721 - RNA, 17 nt, Artificial Sequence
  Synthetic
cuauaaauauauauaua

SEQ ID NO: 740722 - RNA, 17 nt, Artificial Sequence
  Synthetic
auauauauauauauaua

SEQ ID NO: 740723 - RNA, 17 nt, Artificial Sequence
  Synthetic
uuauauauauauauaua

SEQ ID NO: 740724 - RNA, 17 nt, Artificial Sequence
  Synthetic
augacuuuauauauaua

SEQ ID NO: 740725 - RNA, 17 nt, Artificial Sequence
  Synthetic
aaaagaaccuauauaua

SEQ ID NO: 740726 - RNA, 17 nt, Artificial Sequence
  Synthetic
uccacaauguauauaua

SEQ ID NO: 740727 - RNA, 17 nt, Artificial Sequence
  Synthetic
cuuuuacccacuauaua

SEQ ID NO: 740728 - RNA, 17 nt, Artificial Sequence
  Synthetic
uuacaugucacuauaua

SEQ ID NO: 740729 - RNA, 17 nt, Artificial Sequence
  Synthetic
uuauauuuuacuauaua

SEQ ID NO: 740730 - RNA, 17 nt, Artificial Sequence
  Synthetic
caugucagagcuauaua

SEQ ID NO: 740731 - RNA, 17 nt, Artificial Sequence
  Synthetic
uucuaugagucuauaua

SEQ ID NO: 740732 - RNA, 17 nt, Artificial Sequence
  Synthetic
auccguuuuucuauaua

SEQ ID NO: 740733 - RNA, 17 nt, Artificial Sequence
  Synthetic
aaaaaaguaaguauaua

SEQ ID NO: 740734 - RNA, 17 nt, Artificial Sequence
  Synthetic
ugauaguacaguauaua

SEQ ID NO: 740735 - RNA, 17 nt, Artificial Sequence
  Synthetic
acucacuuuaguauaua

SEQ ID NO: 740736 - RNA, 17 nt, Artificial Sequence
  Synthetic
auucuuugggguauaua

SEQ ID NO: 740737 - RNA, 17 nt, Artificial Sequence
  Synthetic
agccagauggguauaua

SEQ ID NO: 740738 - RNA, 17 nt, Artificial Sequence
  Synthetic
acauuuuuaauuauaua

SEQ ID NO: 740739 - RNA, 17 nt, Artificial Sequence
  Synthetic
augaucucacuuauaua

SEQ ID NO: 740740 - RNA, 17 nt, Artificial Sequence
  Synthetic
aguaucauucuuauaua

SEQ ID NO: 740741 - RNA, 17 nt, Artificial Sequence
  Synthetic
acaggcaugguuauaua

SEQ ID NO: 740742 - RNA, 17 nt, Artificial Sequence
  Synthetic
uauauauauguuauaua

SEQ ID NO: 740743 - RNA, 17 nt, Artificial Sequence
  Synthetic
agaauuagauuuauaua

SEQ ID NO: 740744 - RNA, 17 nt, Artificial Sequence
  Synthetic
uacauauaguuuauaua

SEQ ID NO: 740745 - RNA, 17 nt, Artificial Sequence
  Synthetic
accuuuguguuuauaua

SEQ ID NO: 740746 - RNA, 17 nt, Artificial Sequence
  Synthetic
uuuauggauuuuauaua

SEQ ID NO: 740747 - RNA, 17 nt, Artificial Sequence
  Synthetic
auuauguauuuuauaua

SEQ ID NO: 740748 - RNA, 17 nt, Artificial Sequence
  Synthetic
ugucuguauuuuauaua

SEQ ID NO: 740749 - RNA, 17 nt, Artificial Sequence
  Synthetic
aauugauguuuuauaua

SEQ ID NO: 740750 - RNA, 17 nt, Artificial Sequence
  Synthetic
agcauuccuaaacuaua

SEQ ID NO: 740751 - RNA, 17 nt, Artificial Sequence
  Synthetic
aaauaaccuccacuaua

SEQ ID NO: 740752 - RNA, 17 nt, Artificial Sequence
  Synthetic
aguuaaucugcacuaua

SEQ ID NO: 740753 - RNA, 17 nt, Artificial Sequence
  Synthetic
uuuuuugaaagacuaua

SEQ ID NO: 740754 - RNA, 17 nt, Artificial Sequence
  Synthetic
agcuacucuugacuaua

SEQ ID NO: 740755 - RNA, 17 nt, Artificial Sequence
  Synthetic
uuacuuucuugacuaua

SEQ ID NO: 740756 - RNA, 17 nt, Artificial Sequence
  Synthetic
cuucaaacuauacuaua

SEQ ID NO: 740757 - RNA, 17 nt, Artificial Sequence
  Synthetic
aucuaccugcuacuaua

SEQ ID NO: 740758 - RNA, 17 nt, Artificial Sequence
  Synthetic
cauguccaauuacuaua

SEQ ID NO: 740759 - RNA, 17 nt, Artificial Sequence
  Synthetic
auaauuucauuacuaua

SEQ ID NO: 740760 - RNA, 17 nt, Artificial Sequence
  Synthetic
cuaaaauauuuacuaua

SEQ ID NO: 740761 - RNA, 17 nt, Artificial Sequence
  Synthetic
uaugcuuuucaccuaua

SEQ ID NO: 740762 - RNA, 17 nt, Artificial Sequence
  Synthetic
uauaaugcuuaccuaua

SEQ ID NO: 740763 - RNA, 17 nt, Artificial Sequence
  Synthetic
cugauucuaucccuaua

SEQ ID NO: 740764 - RNA, 17 nt, Artificial Sequence
  Synthetic
acaaccuagucccuaua

SEQ ID NO: 740765 - RNA, 17 nt, Artificial Sequence
  Synthetic
aggagccugucccuaua

SEQ ID NO: 740766 - RNA, 17 nt, Artificial Sequence
  Synthetic
agucaccugugccuaua

SEQ ID NO: 740767 - RNA, 17 nt, Artificial Sequence
  Synthetic
ucuuggcauugccuaua

SEQ ID NO: 740768 - RNA, 17 nt, Artificial Sequence
  Synthetic
caagaauaaauccuaua

SEQ ID NO: 740769 - RNA, 17 nt, Artificial Sequence
  Synthetic
auauuggcaauccuaua

SEQ ID NO: 740770 - RNA, 17 nt, Artificial Sequence
  Synthetic
aaguuugccauccuaua

SEQ ID NO: 740771 - RNA, 17 nt, Artificial Sequence
  Synthetic
aauaugauuauccuaua

SEQ ID NO: 740772 - RNA, 17 nt, Artificial Sequence
  Synthetic
aaaacucaaaagcuaua

SEQ ID NO: 740773 - RNA, 17 nt, Artificial Sequence
  Synthetic
aacacuuaucagcuaua

SEQ ID NO: 740774 - RNA, 17 nt, Artificial Sequence
  Synthetic
uuuuuuuaaaggcuaua

SEQ ID NO: 740775 - RNA, 17 nt, Artificial Sequence
  Synthetic
ugcacauccaggcuaua

SEQ ID NO: 740776 - RNA, 17 nt, Artificial Sequence
  Synthetic
uccaucuuuuggcuaua

SEQ ID NO: 740777 - RNA, 17 nt, Artificial Sequence
  Synthetic
cuuauagccaugcuaua

SEQ ID NO: 740778 - RNA, 17 nt, Artificial Sequence
  Synthetic
aaagaaaaacugcuaua

SEQ ID NO: 740779 - RNA, 17 nt, Artificial Sequence
  Synthetic
uggggauugcugcuaua

SEQ ID NO: 740780 - RNA, 17 nt, Artificial Sequence
  Synthetic
uggaggggcuugcuaua

SEQ ID NO: 740781 - RNA, 17 nt, Artificial Sequence
  Synthetic
ucugagugguugcuaua

SEQ ID NO: 740782 - RNA, 17 nt, Artificial Sequence
  Synthetic
auuauccagaaucuaua

SEQ ID NO: 740783 - RNA, 17 nt, Artificial Sequence
  Synthetic
aauauucagaaucuaua

SEQ ID NO: 740784 - RNA, 17 nt, Artificial Sequence
  Synthetic
aauacccggaaucuaua

SEQ ID NO: 740785 - RNA, 17 nt, Artificial Sequence
  Synthetic
aauauccauaaucuaua

SEQ ID NO: 740786 - RNA, 17 nt, Artificial Sequence
  Synthetic
accaauuccuaucuaua

SEQ ID NO: 740787 - RNA, 17 nt, Artificial Sequence
  Synthetic
cacaacugcccucuaua

SEQ ID NO: 740788 - RNA, 17 nt, Artificial Sequence
  Synthetic
caagcuagaugucuaua

SEQ ID NO: 740789 - RNA, 17 nt, Artificial Sequence
  Synthetic
cuucuucucauucuaua

SEQ ID NO: 740790 - RNA, 17 nt, Artificial Sequence
  Synthetic
acauauauacuucuaua

SEQ ID NO: 740791 - RNA, 17 nt, Artificial Sequence
  Synthetic
aaaccuuauguucuaua

SEQ ID NO: 740792 - RNA, 17 nt, Artificial Sequence
  Synthetic
uuaagaauuguucuaua

SEQ ID NO: 740793 - RNA, 17 nt, Artificial Sequence
  Synthetic
agcugcaaauuucuaua

SEQ ID NO: 740794 - RNA, 17 nt, Artificial Sequence
  Synthetic
cauagcccuuuucuaua

SEQ ID NO: 740795 - RNA, 17 nt, Artificial Sequence
  Synthetic
uagaauguuuuucuaua

SEQ ID NO: 740796 - RNA, 17 nt, Artificial Sequence
  Synthetic
uaugaaugaaaaguaua

SEQ ID NO: 740797 - RNA, 17 nt, Artificial Sequence
  Synthetic
uucuugguuaaaguaua

SEQ ID NO: 740798 - RNA, 17 nt, Artificial Sequence
  Synthetic
cagguuugccaaguaua

SEQ ID NO: 740799 - RNA, 17 nt, Artificial Sequence
  Synthetic
cagguaaagcaaguaua

SEQ ID NO: 740800 - RNA, 17 nt, Artificial Sequence
  Synthetic
uuagagaaagaaguaua

SEQ ID NO: 740801 - RNA, 17 nt, Artificial Sequence
  Synthetic
uugcauacauaaguaua

SEQ ID NO: 740802 - RNA, 17 nt, Artificial Sequence
  Synthetic
uuaugauguuaaguaua

SEQ ID NO: 740803 - RNA, 17 nt, Artificial Sequence
  Synthetic
uaagaaugaacaguaua

SEQ ID NO: 740804 - RNA, 17 nt, Artificial Sequence
  Synthetic
cucuuccuugcaguaua

SEQ ID NO: 740805 - RNA, 17 nt, Artificial Sequence
  Synthetic
acauacugaucaguaua

SEQ ID NO: 740806 - RNA, 17 nt, Artificial Sequence
  Synthetic
uuucuucagugaguaua

SEQ ID NO: 740807 - RNA, 17 nt, Artificial Sequence
  Synthetic
cuauaucaaauaguaua

SEQ ID NO: 740808 - RNA, 17 nt, Artificial Sequence
  Synthetic
cucuaagagauaguaua

SEQ ID NO: 740809 - RNA, 17 nt, Artificial Sequence
  Synthetic
uuuucuaaauuaguaua

SEQ ID NO: 740810 - RNA, 17 nt, Artificial Sequence
  Synthetic
uuucuuuggcacguaua

SEQ ID NO: 740811 - RNA, 17 nt, Artificial Sequence
  Synthetic
aaaggcauaaccguaua

SEQ ID NO: 740812 - RNA, 17 nt, Artificial Sequence
  Synthetic
aucuguggaaagguaua

SEQ ID NO: 740813 - RNA, 17 nt, Artificial Sequence
  Synthetic
auuaugugguagguaua

SEQ ID NO: 740814 - RNA, 17 nt, Artificial Sequence
  Synthetic
uguuaauguuagguaua

SEQ ID NO: 740815 - RNA, 17 nt, Artificial Sequence
  Synthetic
aaugacuuaucgguaua

SEQ ID NO: 740816 - RNA, 17 nt, Artificial Sequence
  Synthetic
ccuuccccaaggguaua

SEQ ID NO: 740817 - RNA, 17 nt, Artificial Sequence
  Synthetic
ucugcaugguggguaua

SEQ ID NO: 740818 - RNA, 17 nt, Artificial Sequence
  Synthetic
ccauguguguggguaua

SEQ ID NO: 740819 - RNA, 17 nt, Artificial Sequence
  Synthetic
uuuuuguauaugguaua

SEQ ID NO: 740820 - RNA, 17 nt, Artificial Sequence
  Synthetic
ucacaguaucugguaua

SEQ ID NO: 740821 - RNA, 17 nt, Artificial Sequence
  Synthetic
ccuuggcaggugguaua

SEQ ID NO: 740822 - RNA, 17 nt, Artificial Sequence
  Synthetic
uucaugguugugguaua

SEQ ID NO: 740823 - RNA, 17 nt, Artificial Sequence
  Synthetic
uugcagugcuugguaua

SEQ ID NO: 740824 - RNA, 17 nt, Artificial Sequence
  Synthetic
uaaauacaacauguaua

SEQ ID NO: 740825 - RNA, 17 nt, Artificial Sequence
  Synthetic
aacaaagaacauguaua

SEQ ID NO: 740826 - RNA, 17 nt, Artificial Sequence
  Synthetic
uuauaguaccauguaua

SEQ ID NO: 740827 - RNA, 17 nt, Artificial Sequence
  Synthetic
uggaaaugucauguaua

SEQ ID NO: 740828 - RNA, 17 nt, Artificial Sequence
  Synthetic
accauugaauauguaua

SEQ ID NO: 740829 - RNA, 17 nt, Artificial Sequence
  Synthetic
acucauauauauguaua

SEQ ID NO: 740830 - RNA, 17 nt, Artificial Sequence
  Synthetic
cuucagauguauguaua

SEQ ID NO: 740831 - RNA, 17 nt, Artificial Sequence
  Synthetic
uaacaguuguauguaua

SEQ ID NO: 740832 - RNA, 17 nt, Artificial Sequence
  Synthetic
auuauccauuauguaua

SEQ ID NO: 740833 - RNA, 17 nt, Artificial Sequence
  Synthetic
ccacacuuuuauguaua

SEQ ID NO: 740834 - RNA, 17 nt, Artificial Sequence
  Synthetic
auugcaucuacuguaua

SEQ ID NO: 740835 - RNA, 17 nt, Artificial Sequence
  Synthetic
aaagauguuacuguaua

SEQ ID NO: 740836 - RNA, 17 nt, Artificial Sequence
  Synthetic
uaaggcaagccuguaua

SEQ ID NO: 740837 - RNA, 17 nt, Artificial Sequence
  Synthetic
agcuguauaucuguaua

SEQ ID NO: 740838 - RNA, 17 nt, Artificial Sequence
  Synthetic
auuugcaugucuguaua

SEQ ID NO: 740839 - RNA, 17 nt, Artificial Sequence
  Synthetic
acauuuuugaguguaua

SEQ ID NO: 740840 - RNA, 17 nt, Artificial Sequence
  Synthetic
cacuuuuacauuguaua

SEQ ID NO: 740841 - RNA, 17 nt, Artificial Sequence
  Synthetic
uuccagauucuuguaua

SEQ ID NO: 740842 - RNA, 17 nt, Artificial Sequence
  Synthetic
aucaacaguguuguaua

SEQ ID NO: 740843 - RNA, 17 nt, Artificial Sequence
  Synthetic
uuauuuucauuuguaua

SEQ ID NO: 740844 - RNA, 17 nt, Artificial Sequence
  Synthetic
uguguuuuauuuguaua

SEQ ID NO: 740845 - RNA, 17 nt, Artificial Sequence
  Synthetic
augugaauguuuguaua

SEQ ID NO: 740846 - RNA, 17 nt, Artificial Sequence
  Synthetic
uaauuaauuuuuguaua

SEQ ID NO: 740847 - RNA, 17 nt, Artificial Sequence
  Synthetic
gaguuaauuuuuguaua

SEQ ID NO: 740848 - RNA, 17 nt, Artificial Sequence
  Synthetic
aaacuaucaaaauuaua

SEQ ID NO: 740849 - RNA, 17 nt, Artificial Sequence
  Synthetic
uacuuaauaaaauuaua

SEQ ID NO: 740850 - RNA, 17 nt, Artificial Sequence
  Synthetic
aacugcauaaaauuaua

SEQ ID NO: 740851 - RNA, 17 nt, Artificial Sequence
  Synthetic
uuuucuuugaaauuaua

SEQ ID NO: 740852 - RNA, 17 nt, Artificial Sequence
  Synthetic
ugagugacagaauuaua

SEQ ID NO: 740853 - RNA, 17 nt, Artificial Sequence
  Synthetic
uucgucuaauaauuaua

SEQ ID NO: 740854 - RNA, 17 nt, Artificial Sequence
  Synthetic
uuuuuggaaacauuaua

SEQ ID NO: 740855 - RNA, 17 nt, Artificial Sequence
  Synthetic
ucucaaagcacauuaua

SEQ ID NO: 740856 - RNA, 17 nt, Artificial Sequence
  Synthetic
aaaauaucaccauuaua

SEQ ID NO: 740857 - RNA, 17 nt, Artificial Sequence
  Synthetic
accucuuucccauuaua

SEQ ID NO: 740858 - RNA, 17 nt, Artificial Sequence
  Synthetic
augagaagagcauuaua

SEQ ID NO: 740859 - RNA, 17 nt, Artificial Sequence
  Synthetic
agcauaagagcauuaua

SEQ ID NO: 740860 - RNA, 17 nt, Artificial Sequence
  Synthetic
cugauuggaucauuaua

SEQ ID NO: 740861 - RNA, 17 nt, Artificial Sequence
  Synthetic
ucaugcaccucauuaua

SEQ ID NO: 740862 - RNA, 17 nt, Artificial Sequence
  Synthetic
uaauaacacagauuaua

SEQ ID NO: 740863 - RNA, 17 nt, Artificial Sequence
  Synthetic
ccacaacuaggauuaua

SEQ ID NO: 740864 - RNA, 17 nt, Artificial Sequence
  Synthetic
uaaauaaguggauuaua

SEQ ID NO: 740865 - RNA, 17 nt, Artificial Sequence
  Synthetic
cacaucauaauauuaua

SEQ ID NO: 740866 - RNA, 17 nt, Artificial Sequence
  Synthetic
uaguguuccauauuaua

SEQ ID NO: 740867 - RNA, 17 nt, Artificial Sequence
  Synthetic
auuacaaagauauuaua

SEQ ID NO: 740868 - RNA, 17 nt, Artificial Sequence
  Synthetic
uuuacuccucuauuaua

SEQ ID NO: 740869 - RNA, 17 nt, Artificial Sequence
  Synthetic
aagccaggauuauuaua

SEQ ID NO: 740870 - RNA, 17 nt, Artificial Sequence
  Synthetic
augaauaaaaacuuaua

SEQ ID NO: 740871 - RNA, 17 nt, Artificial Sequence
  Synthetic
uccuuagcaaacuuaua

SEQ ID NO: 740872 - RNA, 17 nt, Artificial Sequence
  Synthetic
uuuugcagacacuuaua

SEQ ID NO: 740873 - RNA, 17 nt, Artificial Sequence
  Synthetic
uuaaauaaucacuuaua

SEQ ID NO: 740874 - RNA, 17 nt, Artificial Sequence
  Synthetic
uccauagaucacuuaua

SEQ ID NO: 740875 - RNA, 17 nt, Artificial Sequence
  Synthetic
uaacuuacuuacuuaua

SEQ ID NO: 740876 - RNA, 17 nt, Artificial Sequence
  Synthetic
aguauaaaagccuuaua

SEQ ID NO: 740877 - RNA, 17 nt, Artificial Sequence
  Synthetic
uaggcauuugccuuaua

SEQ ID NO: 740878 - RNA, 17 nt, Artificial Sequence
  Synthetic
acuauucuuuccuuaua

SEQ ID NO: 740879 - RNA, 17 nt, Artificial Sequence
  Synthetic
uuauccuuuuccuuaua

SEQ ID NO: 740880 - RNA, 17 nt, Artificial Sequence
  Synthetic
cuucgaaucugcuuaua

SEQ ID NO: 740881 - RNA, 17 nt, Artificial Sequence
  Synthetic
uuugugaggaucuuaua

SEQ ID NO: 740882 - RNA, 17 nt, Artificial Sequence
  Synthetic
aauuaucugaucuuaua

SEQ ID NO: 740883 - RNA, 17 nt, Artificial Sequence
  Synthetic
uucuuacauaucuuaua

SEQ ID NO: 740884 - RNA, 17 nt, Artificial Sequence
  Synthetic
aguuucauuaucuuaua

SEQ ID NO: 740885 - RNA, 17 nt, Artificial Sequence
  Synthetic
cucuucccuuucuuaua

SEQ ID NO: 740886 - RNA, 17 nt, Artificial Sequence
  Synthetic
ucaaaaagacaguuaua

SEQ ID NO: 740887 - RNA, 17 nt, Artificial Sequence
  Synthetic
uaagcaagggaguuaua

SEQ ID NO: 740888 - RNA, 17 nt, Artificial Sequence
  Synthetic
accacaaauggguuaua

SEQ ID NO: 740889 - RNA, 17 nt, Artificial Sequence
  Synthetic
auacucaaaugguuaua

SEQ ID NO: 740890 - RNA, 17 nt, Artificial Sequence
  Synthetic
uucauucaaauguuaua

SEQ ID NO: 740891 - RNA, 17 nt, Artificial Sequence
  Synthetic
ccauaaccuauguuaua

SEQ ID NO: 740892 - RNA, 17 nt, Artificial Sequence
  Synthetic
cacuuccucuuguuaua

SEQ ID NO: 740893 - RNA, 17 nt, Artificial Sequence
  Synthetic
aaagaaggaaauuuaua

SEQ ID NO: 740894 - RNA, 17 nt, Artificial Sequence
  Synthetic
cauauuuaauauuuaua

SEQ ID NO: 740895 - RNA, 17 nt, Artificial Sequence
  Synthetic
cuuuguugauauuuaua

SEQ ID NO: 740896 - RNA, 17 nt, Artificial Sequence
  Synthetic
uuuuccuacuauuuaua

SEQ ID NO: 740897 - RNA, 17 nt, Artificial Sequence
  Synthetic
uauuguugcuauuuaua

SEQ ID NO: 740898 - RNA, 17 nt, Artificial Sequence
  Synthetic
aauuugcauuauuuaua

SEQ ID NO: 740899 - RNA, 17 nt, Artificial Sequence
  Synthetic
acaauucauuauuuaua

SEQ ID NO: 740900 - RNA, 17 nt, Artificial Sequence
  Synthetic
cuuacgauaacuuuaua

SEQ ID NO: 740901 - RNA, 17 nt, Artificial Sequence
  Synthetic
acauuuugagcuuuaua

SEQ ID NO: 740902 - RNA, 17 nt, Artificial Sequence
  Synthetic
ucaagaguugcuuuaua

SEQ ID NO: 740903 - RNA, 17 nt, Artificial Sequence
  Synthetic
accugguuugcuuuaua

SEQ ID NO: 740904 - RNA, 17 nt, Artificial Sequence
  Synthetic
auuuuuacaucuuuaua

SEQ ID NO: 740905 - RNA, 17 nt, Artificial Sequence
  Synthetic
ccuuaaauuucuuuaua

SEQ ID NO: 740906 - RNA, 17 nt, Artificial Sequence
  Synthetic
uuugaaaguaguuuaua

SEQ ID NO: 740907 - RNA, 17 nt, Artificial Sequence
  Synthetic
uuguugcauuguuuaua

SEQ ID NO: 740908 - RNA, 17 nt, Artificial Sequence
  Synthetic
aaggucuguuguuuaua

SEQ ID NO: 740909 - RNA, 17 nt, Artificial Sequence
  Synthetic
acaugcauaauuuuaua

SEQ ID NO: 740910 - RNA, 17 nt, Artificial Sequence
  Synthetic
uaaauuugcauuuuaua

SEQ ID NO: 740911 - RNA, 17 nt, Artificial Sequence
  Synthetic
auuaucuucauuuuaua

SEQ ID NO: 740912 - RNA, 17 nt, Artificial Sequence
  Synthetic
agagaugggauuuuaua

SEQ ID NO: 740913 - RNA, 17 nt, Artificial Sequence
  Synthetic
cuaaaauggauuuuaua

SEQ ID NO: 740914 - RNA, 17 nt, Artificial Sequence
  Synthetic
uuccaugugauuuuaua

SEQ ID NO: 740915 - RNA, 17 nt, Artificial Sequence
  Synthetic
aaacgagauauuuuaua

SEQ ID NO: 740916 - RNA, 17 nt, Artificial Sequence
  Synthetic
ugcuucauuauuuuaua

SEQ ID NO: 740917 - RNA, 17 nt, Artificial Sequence
  Synthetic
ugauugaaccuuuuaua

SEQ ID NO: 740918 - RNA, 17 nt, Artificial Sequence
  Synthetic
acacuuuuccuuuuaua

SEQ ID NO: 740919 - RNA, 17 nt, Artificial Sequence
  Synthetic
aaagagcagcuuuuaua

SEQ ID NO: 740920 - RNA, 17 nt, Artificial Sequence
  Synthetic
cuggagccgcuuuuaua

SEQ ID NO: 740921 - RNA, 17 nt, Artificial Sequence
  Synthetic
cugaggucucuuuuaua

SEQ ID NO: 740922 - RNA, 17 nt, Artificial Sequence
  Synthetic
auucagaaaguuuuaua

SEQ ID NO: 740923 - RNA, 17 nt, Artificial Sequence
  Synthetic
ugaauggaaguuuuaua

SEQ ID NO: 740924 - RNA, 17 nt, Artificial Sequence
  Synthetic
aaucugaugguuuuaua

SEQ ID NO: 740925 - RNA, 17 nt, Artificial Sequence
  Synthetic
caaauaaauguuuuaua

SEQ ID NO: 740926 - RNA, 17 nt, Artificial Sequence
  Synthetic
cacaguugcuuuuuaua

SEQ ID NO: 740927 - RNA, 17 nt, Artificial Sequence
  Synthetic
cugacuagagaaaacua

SEQ ID NO: 740928 - RNA, 17 nt, Artificial Sequence
  Synthetic
uguguacuggaaaacua

SEQ ID NO: 740929 - RNA, 17 nt, Artificial Sequence
  Synthetic
caaaaagaugaaaacua

SEQ ID NO: 740930 - RNA, 17 nt, Artificial Sequence
  Synthetic
ugaagacuugaaaacua

SEQ ID NO: 740931 - RNA, 17 nt, Artificial Sequence
  Synthetic
uggaacuuauaaaacua

SEQ ID NO: 740932 - RNA, 17 nt, Artificial Sequence
  Synthetic
acauuuuauuaaaacua

SEQ ID NO: 740933 - RNA, 17 nt, Artificial Sequence
  Synthetic
cucuuuuaaacaaacua

SEQ ID NO: 740934 - RNA, 17 nt, Artificial Sequence
  Synthetic
caaaaaaucacaaacua

SEQ ID NO: 740935 - RNA, 17 nt, Artificial Sequence
  Synthetic
cucagcaagacaaacua

SEQ ID NO: 740936 - RNA, 17 nt, Artificial Sequence
  Synthetic
aaugguuguacaaacua

SEQ ID NO: 740937 - RNA, 17 nt, Artificial Sequence
  Synthetic
accaccuucccaaacua

SEQ ID NO: 740938 - RNA, 17 nt, Artificial Sequence
  Synthetic
aauccaccuccaaacua

SEQ ID NO: 740939 - RNA, 17 nt, Artificial Sequence
  Synthetic
acuuaacuuccaaacua

SEQ ID NO: 740940 - RNA, 17 nt, Artificial Sequence
  Synthetic
cagagggcagcaaacua

SEQ ID NO: 740941 - RNA, 17 nt, Artificial Sequence
  Synthetic
ucauucucagcaaacua

SEQ ID NO: 740942 - RNA, 17 nt, Artificial Sequence
  Synthetic
caagagucagcaaacua

SEQ ID NO: 740943 - RNA, 17 nt, Artificial Sequence
  Synthetic
uucuugaacagaaacua

SEQ ID NO: 740944 - RNA, 17 nt, Artificial Sequence
  Synthetic
caaaccaucagaaacua

SEQ ID NO: 740945 - RNA, 17 nt, Artificial Sequence
  Synthetic
uugguacagagaaacua

SEQ ID NO: 740946 - RNA, 17 nt, Artificial Sequence
  Synthetic
aaaccugagcgaaacua

SEQ ID NO: 740947 - RNA, 17 nt, Artificial Sequence
  Synthetic
aucuaggcuugaaacua

SEQ ID NO: 740948 - RNA, 17 nt, Artificial Sequence
  Synthetic
uuagguaauauaaacua

SEQ ID NO: 740949 - RNA, 17 nt, Artificial Sequence
  Synthetic
ugagauucuauaaacua

SEQ ID NO: 740950 - RNA, 17 nt, Artificial Sequence
  Synthetic
uagaaauuacuaaacua

SEQ ID NO: 740951 - RNA, 17 nt, Artificial Sequence
  Synthetic
aacucuaauguaaacua

SEQ ID NO: 740952 - RNA, 17 nt, Artificial Sequence
  Synthetic
caaguguuuguaaacua

SEQ ID NO: 740953 - RNA, 17 nt, Artificial Sequence
  Synthetic
ucucugacuuuaaacua

SEQ ID NO: 740954 - RNA, 17 nt, Artificial Sequence
  Synthetic
aaaguacuccacaacua

SEQ ID NO: 740955 - RNA, 17 nt, Artificial Sequence
  Synthetic
cgcucauucuacaacua

SEQ ID NO: 740956 - RNA, 17 nt, Artificial Sequence
  Synthetic
ucaauacccaccaacua

SEQ ID NO: 740957 - RNA, 17 nt, Artificial Sequence
  Synthetic
aacaagcaugccaacua

SEQ ID NO: 740958 - RNA, 17 nt, Artificial Sequence
  Synthetic
aauuauggaggcaacua

SEQ ID NO: 740959 - RNA, 17 nt, Artificial Sequence
  Synthetic
aaugucaugggcaacua

SEQ ID NO: 740960 - RNA, 17 nt, Artificial Sequence
  Synthetic
ugugguaagugcaacua

SEQ ID NO: 740961 - RNA, 17 nt, Artificial Sequence
  Synthetic
aaucucauaaucaacua

SEQ ID NO: 740962 - RNA, 17 nt, Artificial Sequence
  Synthetic
ccagugauuuucaacua

SEQ ID NO: 740963 - RNA, 17 nt, Artificial Sequence
  Synthetic
uuauguuuuaagaacua

SEQ ID NO: 740964 - RNA, 17 nt, Artificial Sequence
  Synthetic
aaagguuuacagaacua

SEQ ID NO: 740965 - RNA, 17 nt, Artificial Sequence
  Synthetic
aaggauaaagagaacua

SEQ ID NO: 740966 - RNA, 17 nt, Artificial Sequence
  Synthetic
uggauucaagagaacua

SEQ ID NO: 740967 - RNA, 17 nt, Artificial Sequence
  Synthetic
caccacugugagaacua

SEQ ID NO: 740968 - RNA, 17 nt, Artificial Sequence
  Synthetic
augcuauccaggaacua

SEQ ID NO: 740969 - RNA, 17 nt, Artificial Sequence
  Synthetic
caggggucagugaacua

SEQ ID NO: 740970 - RNA, 17 nt, Artificial Sequence
  Synthetic
agggggaggaauaacua

SEQ ID NO: 740971 - RNA, 17 nt, Artificial Sequence
  Synthetic
ucucuugguaauaacua

SEQ ID NO: 740972 - RNA, 17 nt, Artificial Sequence
  Synthetic
cauacauauuauaacua

SEQ ID NO: 740973 - RNA, 17 nt, Artificial Sequence
  Synthetic
aaaaacuaaacuaacua

SEQ ID NO: 740974 - RNA, 17 nt, Artificial Sequence
  Synthetic
uauuaagauacuaacua

SEQ ID NO: 740975 - RNA, 17 nt, Artificial Sequence
  Synthetic
ccauaauauccuaacua

SEQ ID NO: 740976 - RNA, 17 nt, Artificial Sequence
  Synthetic
auuguauguaguaacua

SEQ ID NO: 740977 - RNA, 17 nt, Artificial Sequence
  Synthetic
uaucacucugguaacua

SEQ ID NO: 740978 - RNA, 17 nt, Artificial Sequence
  Synthetic
uauaauauuauuaacua

SEQ ID NO: 740979 - RNA, 17 nt, Artificial Sequence
  Synthetic
uucugucugcuuaacua

SEQ ID NO: 740980 - RNA, 17 nt, Artificial Sequence
  Synthetic
cauacaguucuuaacua

SEQ ID NO: 740981 - RNA, 17 nt, Artificial Sequence
  Synthetic
auguagaagguuaacua

SEQ ID NO: 740982 - RNA, 17 nt, Artificial Sequence
  Synthetic
uaaaguagcuuuaacua

SEQ ID NO: 740983 - RNA, 17 nt, Artificial Sequence
  Synthetic
uaauuauauuuuaacua

SEQ ID NO: 740984 - RNA, 17 nt, Artificial Sequence
  Synthetic
cuauaagauaaacacua

SEQ ID NO: 740985 - RNA, 17 nt, Artificial Sequence
  Synthetic
uuucauuacuaacacua

SEQ ID NO: 740986 - RNA, 17 nt, Artificial Sequence
  Synthetic
cagccugcuuaacacua

SEQ ID NO: 740987 - RNA, 17 nt, Artificial Sequence
  Synthetic
aaaaccaccccacacua

SEQ ID NO: 740988 - RNA, 17 nt, Artificial Sequence
  Synthetic
uauggccagggacacua

SEQ ID NO: 740989 - RNA, 17 nt, Artificial Sequence
  Synthetic
cuucuuuuaauacacua

SEQ ID NO: 740990 - RNA, 17 nt, Artificial Sequence
  Synthetic
cauggcuagcuacacua

SEQ ID NO: 740991 - RNA, 17 nt, Artificial Sequence
  Synthetic
uuugguuaaaaccacua

SEQ ID NO: 740992 - RNA, 17 nt, Artificial Sequence
  Synthetic
aauuagcacaaccacua

SEQ ID NO: 740993 - RNA, 17 nt, Artificial Sequence
  Synthetic
aaauggguagcccacua

SEQ ID NO: 740994 - RNA, 17 nt, Artificial Sequence
  Synthetic
ccacauguaagccacua

SEQ ID NO: 740995 - RNA, 17 nt, Artificial Sequence
  Synthetic
aaaagguguagccacua

SEQ ID NO: 740996 - RNA, 17 nt, Artificial Sequence
  Synthetic
aauauaccaugccacua

SEQ ID NO: 740997 - RNA, 17 nt, Artificial Sequence
  Synthetic
accuagucuuuccacua

SEQ ID NO: 740998 - RNA, 17 nt, Artificial Sequence
  Synthetic
aaguacauuuuccacua

SEQ ID NO: 740999 - RNA, 17 nt, Artificial Sequence
  Synthetic
uccaugguaaagcacua

SEQ ID NO: 741000 - RNA, 17 nt, Artificial Sequence
  Synthetic
uaugguuugaagcacua

SEQ ID NO: 741001 - RNA, 17 nt, Artificial Sequence
  Synthetic
cuguaaucccagcacua

SEQ ID NO: 741002 - RNA, 17 nt, Artificial Sequence
  Synthetic
auaguagaugggcacua

SEQ ID NO: 741003 - RNA, 17 nt, Artificial Sequence
  Synthetic
auuguucccaugcacua

SEQ ID NO: 741004 - RNA, 17 nt, Artificial Sequence
  Synthetic
cacuaguuugugcacua

SEQ ID NO: 741005 - RNA, 17 nt, Artificial Sequence
  Synthetic
cuauuuagaaaucacua

SEQ ID NO: 741006 - RNA, 17 nt, Artificial Sequence
  Synthetic
auaauagagaaucacua

SEQ ID NO: 741007 - RNA, 17 nt, Artificial Sequence
  Synthetic
cacacaugagaucacua

SEQ ID NO: 741008 - RNA, 17 nt, Artificial Sequence
  Synthetic
aucagauuguaucacua

SEQ ID NO: 741009 - RNA, 17 nt, Artificial Sequence
  Synthetic
auauaaguuccucacua

SEQ ID NO: 741010 - RNA, 17 nt, Artificial Sequence
  Synthetic
cuguguugaucucacua

SEQ ID NO: 741011 - RNA, 17 nt, Artificial Sequence
  Synthetic
ucugacagaagucacua

SEQ ID NO: 741012 - RNA, 17 nt, Artificial Sequence
  Synthetic
aaauuugagagucacua

SEQ ID NO: 741013 - RNA, 17 nt, Artificial Sequence
  Synthetic
aaaaauaauugucacua

SEQ ID NO: 741014 - RNA, 17 nt, Artificial Sequence
  Synthetic
auucuuucaguucacua

SEQ ID NO: 741015 - RNA, 17 nt, Artificial Sequence
  Synthetic
aaauaacacuuucacua

SEQ ID NO: 741016 - RNA, 17 nt, Artificial Sequence
  Synthetic
acaaugaaguuucacua

SEQ ID NO: 741017 - RNA, 17 nt, Artificial Sequence
  Synthetic
aucacagguuuucacua

SEQ ID NO: 741018 - RNA, 17 nt, Artificial Sequence
  Synthetic
caacuuaaaaaagacua

SEQ ID NO: 741019 - RNA, 17 nt, Artificial Sequence
  Synthetic
augugcuucaaagacua

SEQ ID NO: 741020 - RNA, 17 nt, Artificial Sequence
  Synthetic
uugccucagaaagacua

SEQ ID NO: 741021 - RNA, 17 nt, Artificial Sequence
  Synthetic
aguggagaaacagacua

SEQ ID NO: 741022 - RNA, 17 nt, Artificial Sequence
  Synthetic
agaggugguucagacua

SEQ ID NO: 741023 - RNA, 17 nt, Artificial Sequence
  Synthetic
aaccaccucagagacua

SEQ ID NO: 741024 - RNA, 17 nt, Artificial Sequence
  Synthetic
uaaguucuacgagacua

SEQ ID NO: 741025 - RNA, 17 nt, Artificial Sequence
  Synthetic
uuugaggagugagacua

SEQ ID NO: 741026 - RNA, 17 nt, Artificial Sequence
  Synthetic
auguuuauuuuagacua

SEQ ID NO: 741027 - RNA, 17 nt, Artificial Sequence
  Synthetic
uuuaaauagaaggacua

SEQ ID NO: 741028 - RNA, 17 nt, Artificial Sequence
  Synthetic
cuacauucuaaggacua

SEQ ID NO: 741029 - RNA, 17 nt, Artificial Sequence
  Synthetic
uaagagcuagaggacua

SEQ ID NO: 741030 - RNA, 17 nt, Artificial Sequence
  Synthetic
agcagggugcuggacua

SEQ ID NO: 741031 - RNA, 17 nt, Artificial Sequence
  Synthetic
acuuuaauuuuggacua

SEQ ID NO: 741032 - RNA, 17 nt, Artificial Sequence
  Synthetic
cccagccaaaaugacua

SEQ ID NO: 741033 - RNA, 17 nt, Artificial Sequence
  Synthetic
caccucuaaaaugacua

SEQ ID NO: 741034 - RNA, 17 nt, Artificial Sequence
  Synthetic
cuuccuuucaaugacua

SEQ ID NO: 741035 - RNA, 17 nt, Artificial Sequence
  Synthetic
aagagaucuuaugacua

SEQ ID NO: 741036 - RNA, 17 nt, Artificial Sequence
  Synthetic
aaaugacaacgugacua

SEQ ID NO: 741037 - RNA, 17 nt, Artificial Sequence
  Synthetic
acuucucauugugacua

SEQ ID NO: 741038 - RNA, 17 nt, Artificial Sequence
  Synthetic
uaguucugaguugacua

SEQ ID NO: 741039 - RNA, 17 nt, Artificial Sequence
  Synthetic
agugauagauuugacua

SEQ ID NO: 741040 - RNA, 17 nt, Artificial Sequence
  Synthetic
auucuuuaaaaauacua

SEQ ID NO: 741041 - RNA, 17 nt, Artificial Sequence
  Synthetic
ugaugcucaaaauacua

SEQ ID NO: 741042 - RNA, 17 nt, Artificial Sequence
  Synthetic
uuaacuuagaaauacua

SEQ ID NO: 741043 - RNA, 17 nt, Artificial Sequence
  Synthetic
uaggauguagaauacua

SEQ ID NO: 741044 - RNA, 17 nt, Artificial Sequence
  Synthetic
auuacuauuuaauacua

SEQ ID NO: 741045 - RNA, 17 nt, Artificial Sequence
  Synthetic
uagaaguaggcauacua

SEQ ID NO: 741046 - RNA, 17 nt, Artificial Sequence
  Synthetic
auugaucucucauacua

SEQ ID NO: 741047 - RNA, 17 nt, Artificial Sequence
  Synthetic
auacacuguugauacua

SEQ ID NO: 741048 - RNA, 17 nt, Artificial Sequence
  Synthetic
ucaccaauuugauacua

SEQ ID NO: 741049 - RNA, 17 nt, Artificial Sequence
  Synthetic
agucaguaucacuacua

SEQ ID NO: 741050 - RNA, 17 nt, Artificial Sequence
  Synthetic
aauguaugauacuacua

SEQ ID NO: 741051 - RNA, 17 nt, Artificial Sequence
  Synthetic
agaaauauuuacuacua

SEQ ID NO: 741052 - RNA, 17 nt, Artificial Sequence
  Synthetic
cuuuuaaauaccuacua

SEQ ID NO: 741053 - RNA, 17 nt, Artificial Sequence
  Synthetic
uccugcccacccuacua

SEQ ID NO: 741054 - RNA, 17 nt, Artificial Sequence
  Synthetic
cuaaauaaagccuacua

SEQ ID NO: 741055 - RNA, 17 nt, Artificial Sequence
  Synthetic
cuuuuuucauccuacua

SEQ ID NO: 741056 - RNA, 17 nt, Artificial Sequence
  Synthetic
ugacuucaaagcuacua

SEQ ID NO: 741057 - RNA, 17 nt, Artificial Sequence
  Synthetic
uauaaucccagcuacua

SEQ ID NO: 741058 - RNA, 17 nt, Artificial Sequence
  Synthetic
uguaaucccagcuacua

SEQ ID NO: 741059 - RNA, 17 nt, Artificial Sequence
  Synthetic
aguagucccagcuacua

SEQ ID NO: 741060 - RNA, 17 nt, Artificial Sequence
  Synthetic
auauauauuagcuacua

SEQ ID NO: 741061 - RNA, 17 nt, Artificial Sequence
  Synthetic
uccaucuucugcuacua

SEQ ID NO: 741062 - RNA, 17 nt, Artificial Sequence
  Synthetic
acauccaggugcuacua

SEQ ID NO: 741063 - RNA, 17 nt, Artificial Sequence
  Synthetic
uucuuagacaucuacua

SEQ ID NO: 741064 - RNA, 17 nt, Artificial Sequence
  Synthetic
ucauacuuuaucuacua

SEQ ID NO: 741065 - RNA, 17 nt, Artificial Sequence
  Synthetic
augucagaagucuacua

SEQ ID NO: 741066 - RNA, 17 nt, Artificial Sequence
  Synthetic
cuggguaacuucuacua

SEQ ID NO: 741067 - RNA, 17 nt, Artificial Sequence
  Synthetic
uauuguuuguucuacua

SEQ ID NO: 741068 - RNA, 17 nt, Artificial Sequence
  Synthetic
aguuaauaaccguacua

SEQ ID NO: 741069 - RNA, 17 nt, Artificial Sequence
  Synthetic
ugaaaaauaauguacua

SEQ ID NO: 741070 - RNA, 17 nt, Artificial Sequence
  Synthetic
uugaugauaauguacua

SEQ ID NO: 741071 - RNA, 17 nt, Artificial Sequence
  Synthetic
ugagaaccacuguacua

SEQ ID NO: 741072 - RNA, 17 nt, Artificial Sequence
  Synthetic
augggggcccuguacua

SEQ ID NO: 741073 - RNA, 17 nt, Artificial Sequence
  Synthetic
acacucaggcauuacua

SEQ ID NO: 741074 - RNA, 17 nt, Artificial Sequence
  Synthetic
uuaggaucauauuacua

SEQ ID NO: 741075 - RNA, 17 nt, Artificial Sequence
  Synthetic
uuucuuuguuauuacua

SEQ ID NO: 741076 - RNA, 17 nt, Artificial Sequence
  Synthetic
ugaauaguuuauuacua

SEQ ID NO: 741077 - RNA, 17 nt, Artificial Sequence
  Synthetic
uaguccccaacuuacua

SEQ ID NO: 741078 - RNA, 17 nt, Artificial Sequence
  Synthetic
ccauugagcacuuacua

SEQ ID NO: 741079 - RNA, 17 nt, Artificial Sequence
  Synthetic
uuucagugaccuuacua

SEQ ID NO: 741080 - RNA, 17 nt, Artificial Sequence
  Synthetic
aaauuuauugcuuacua

SEQ ID NO: 741081 - RNA, 17 nt, Artificial Sequence
  Synthetic
uggucucuuucuuacua

SEQ ID NO: 741082 - RNA, 17 nt, Artificial Sequence
  Synthetic
acaaccugugguuacua

SEQ ID NO: 741083 - RNA, 17 nt, Artificial Sequence
  Synthetic
cucauccuaauuuacua

SEQ ID NO: 741084 - RNA, 17 nt, Artificial Sequence
  Synthetic
cuacauaauauuuacua

SEQ ID NO: 741085 - RNA, 17 nt, Artificial Sequence
  Synthetic
aaagggcauauuuacua

SEQ ID NO: 741086 - RNA, 17 nt, Artificial Sequence
  Synthetic
ccuaacuauauuuacua

SEQ ID NO: 741087 - RNA, 17 nt, Artificial Sequence
  Synthetic
acacaguagcuuuacua

SEQ ID NO: 741088 - RNA, 17 nt, Artificial Sequence
  Synthetic
auggugcuucuuuacua

SEQ ID NO: 741089 - RNA, 17 nt, Artificial Sequence
  Synthetic
acugggagaguuuacua

SEQ ID NO: 741090 - RNA, 17 nt, Artificial Sequence
  Synthetic
uuuuuuuccuuuuacua

SEQ ID NO: 741091 - RNA, 17 nt, Artificial Sequence
  Synthetic
ucauucagcuuuuacua

SEQ ID NO: 741092 - RNA, 17 nt, Artificial Sequence
  Synthetic
ccacauaccaaaaccua

SEQ ID NO: 741093 - RNA, 17 nt, Artificial Sequence
  Synthetic
aacaguauagaaaccua

SEQ ID NO: 741094 - RNA, 17 nt, Artificial Sequence
  Synthetic
uaggacaaguaaaccua

SEQ ID NO: 741095 - RNA, 17 nt, Artificial Sequence
  Synthetic
acucugcuuacaaccua

SEQ ID NO: 741096 - RNA, 17 nt, Artificial Sequence
  Synthetic
auuaagaaggcaaccua

SEQ ID NO: 741097 - RNA, 17 nt, Artificial Sequence
  Synthetic
uaagccagaggaaccua

SEQ ID NO: 741098 - RNA, 17 nt, Artificial Sequence
  Synthetic
uaugugagcugaaccua

SEQ ID NO: 741099 - RNA, 17 nt, Artificial Sequence
  Synthetic
ccacuaguuugaaccua

SEQ ID NO: 741100 - RNA, 17 nt, Artificial Sequence
  Synthetic
aauggaaagauaaccua

SEQ ID NO: 741101 - RNA, 17 nt, Artificial Sequence
  Synthetic
acuauuaguauaaccua

SEQ ID NO: 741102 - RNA, 17 nt, Artificial Sequence
  Synthetic
aucucaaacuuaaccua

SEQ ID NO: 741103 - RNA, 17 nt, Artificial Sequence
  Synthetic
cccgugaacuuaaccua

SEQ ID NO: 741104 - RNA, 17 nt, Artificial Sequence
  Synthetic
cgaaaucaaaacaccua

SEQ ID NO: 741105 - RNA, 17 nt, Artificial Sequence
  Synthetic
aaugagggagacaccua

SEQ ID NO: 741106 - RNA, 17 nt, Artificial Sequence
  Synthetic
uuuuccauuaccaccua

SEQ ID NO: 741107 - RNA, 17 nt, Artificial Sequence
  Synthetic
aggacucucaucaccua

SEQ ID NO: 741108 - RNA, 17 nt, Artificial Sequence
  Synthetic
agaggagaagucaccua

SEQ ID NO: 741109 - RNA, 17 nt, Artificial Sequence
  Synthetic
uagaauuuugucaccua

SEQ ID NO: 741110 - RNA, 17 nt, Artificial Sequence
  Synthetic
uucagcacauucaccua

SEQ ID NO: 741111 - RNA, 17 nt, Artificial Sequence
  Synthetic
aaaauaacugagaccua

SEQ ID NO: 741112 - RNA, 17 nt, Artificial Sequence
  Synthetic
auucugauaaugaccua

SEQ ID NO: 741113 - RNA, 17 nt, Artificial Sequence
  Synthetic
aacauuguacauaccua

SEQ ID NO: 741114 - RNA, 17 nt, Artificial Sequence
  Synthetic
aacgucuugcauaccua

SEQ ID NO: 741115 - RNA, 17 nt, Artificial Sequence
  Synthetic
uaggacuguuauaccua

SEQ ID NO: 741116 - RNA, 17 nt, Artificial Sequence
  Synthetic
uuuuaugauccuaccua

SEQ ID NO: 741117 - RNA, 17 nt, Artificial Sequence
  Synthetic
agaggaaucgcuaccua

SEQ ID NO: 741118 - RNA, 17 nt, Artificial Sequence
  Synthetic
aacuucaacucuaccua

SEQ ID NO: 741119 - RNA, 17 nt, Artificial Sequence
  Synthetic
auaaaggacucuaccua

SEQ ID NO: 741120 - RNA, 17 nt, Artificial Sequence
  Synthetic
aggucuuugucuaccua

SEQ ID NO: 741121 - RNA, 17 nt, Artificial Sequence
  Synthetic
ugacuaauuucuaccua

SEQ ID NO: 741122 - RNA, 17 nt, Artificial Sequence
  Synthetic
agaagaguagguaccua

SEQ ID NO: 741123 - RNA, 17 nt, Artificial Sequence
  Synthetic
aaguggauuuguaccua

SEQ ID NO: 741124 - RNA, 17 nt, Artificial Sequence
  Synthetic
cucauuacaauuaccua

SEQ ID NO: 741125 - RNA, 17 nt, Artificial Sequence
  Synthetic
uuggauuucauuaccua

SEQ ID NO: 741126 - RNA, 17 nt, Artificial Sequence
  Synthetic
auagauaagauuaccua

SEQ ID NO: 741127 - RNA, 17 nt, Artificial Sequence
  Synthetic
aguauaugacuuaccua

SEQ ID NO: 741128 - RNA, 17 nt, Artificial Sequence
  Synthetic
aaggauuuauuuaccua

SEQ ID NO: 741129 - RNA, 17 nt, Artificial Sequence
  Synthetic
aaguuaggguuuaccua

SEQ ID NO: 741130 - RNA, 17 nt, Artificial Sequence
  Synthetic
cuuuagaguaaacccua

SEQ ID NO: 741131 - RNA, 17 nt, Artificial Sequence
  Synthetic
ucuuuggcaucacccua

SEQ ID NO: 741132 - RNA, 17 nt, Artificial Sequence
  Synthetic
uuuuuccccucacccua

SEQ ID NO: 741133 - RNA, 17 nt, Artificial Sequence
  Synthetic
uuugaagcuggacccua

SEQ ID NO: 741134 - RNA, 17 nt, Artificial Sequence
  Synthetic
cuugcuaagugacccua

SEQ ID NO: 741135 - RNA, 17 nt, Artificial Sequence
  Synthetic
auauuugcauuacccua

SEQ ID NO: 741136 - RNA, 17 nt, Artificial Sequence
  Synthetic
cuguuauauuuacccua

SEQ ID NO: 741137 - RNA, 17 nt, Artificial Sequence
  Synthetic
ucaaagggagaccccua

SEQ ID NO: 741138 - RNA, 17 nt, Artificial Sequence
  Synthetic
acauucauuucccccua

SEQ ID NO: 741139 - RNA, 17 nt, Artificial Sequence
  Synthetic
augagucucugccccua

SEQ ID NO: 741140 - RNA, 17 nt, Artificial Sequence
  Synthetic
acccacaccauccccua

SEQ ID NO: 741141 - RNA, 17 nt, Artificial Sequence
  Synthetic
ucugguaccaagcccua

SEQ ID NO: 741142 - RNA, 17 nt, Artificial Sequence
  Synthetic
ugucaugagcagcccua

SEQ ID NO: 741143 - RNA, 17 nt, Artificial Sequence
  Synthetic
cauuuggcagagcccua

SEQ ID NO: 741144 - RNA, 17 nt, Artificial Sequence
  Synthetic
caguuaacuuggcccua

SEQ ID NO: 741145 - RNA, 17 nt, Artificial Sequence
  Synthetic
agauuuguaaugcccua

SEQ ID NO: 741146 - RNA, 17 nt, Artificial Sequence
  Synthetic
ugagaacaacugcccua

SEQ ID NO: 741147 - RNA, 17 nt, Artificial Sequence
  Synthetic
uucaucauguugcccua

SEQ ID NO: 741148 - RNA, 17 nt, Artificial Sequence
  Synthetic
uaaacaugucaucccua

SEQ ID NO: 741149 - RNA, 17 nt, Artificial Sequence
  Synthetic
uccuguugucaucccua

SEQ ID NO: 741150 - RNA, 17 nt, Artificial Sequence
  Synthetic
acacuaaaugcucccua

SEQ ID NO: 741151 - RNA, 17 nt, Artificial Sequence
  Synthetic
augccauccucucccua

SEQ ID NO: 741152 - RNA, 17 nt, Artificial Sequence
  Synthetic
uuucacaacagucccua

SEQ ID NO: 741153 - RNA, 17 nt, Artificial Sequence
  Synthetic
aauguugcuauucccua

SEQ ID NO: 741154 - RNA, 17 nt, Artificial Sequence
  Synthetic
auguuaacccuucccua

SEQ ID NO: 741155 - RNA, 17 nt, Artificial Sequence
  Synthetic
uggcuuugauuucccua

SEQ ID NO: 741156 - RNA, 17 nt, Artificial Sequence
  Synthetic
caucuacucuuucccua

SEQ ID NO: 741157 - RNA, 17 nt, Artificial Sequence
  Synthetic
ccaaucuuaaaagccua

SEQ ID NO: 741158 - RNA, 17 nt, Artificial Sequence
  Synthetic
uuaggcuuuaaagccua

SEQ ID NO: 741159 - RNA, 17 nt, Artificial Sequence
  Synthetic
ugccuucaugaagccua

SEQ ID NO: 741160 - RNA, 17 nt, Artificial Sequence
  Synthetic
agagcacauuaagccua

SEQ ID NO: 741161 - RNA, 17 nt, Artificial Sequence
  Synthetic
caaaucuguacagccua

SEQ ID NO: 741162 - RNA, 17 nt, Artificial Sequence
  Synthetic
cucacucagccagccua

SEQ ID NO: 741163 - RNA, 17 nt, Artificial Sequence
  Synthetic
cacuucacuccagccua

SEQ ID NO: 741164 - RNA, 17 nt, Artificial Sequence
  Synthetic
aaaagcagagcagccua

SEQ ID NO: 741165 - RNA, 17 nt, Artificial Sequence
  Synthetic
cugcuaugugcagccua

SEQ ID NO: 741166 - RNA, 17 nt, Artificial Sequence
  Synthetic
uuaagaacaagagccua

SEQ ID NO: 741167 - RNA, 17 nt, Artificial Sequence
  Synthetic
agugcugugggagccua

SEQ ID NO: 741168 - RNA, 17 nt, Artificial Sequence
  Synthetic
auuucauaaauagccua

SEQ ID NO: 741169 - RNA, 17 nt, Artificial Sequence
  Synthetic
uacuuuaauauagccua

SEQ ID NO: 741170 - RNA, 17 nt, Artificial Sequence
  Synthetic
uaauggcacauggccua

SEQ ID NO: 741171 - RNA, 17 nt, Artificial Sequence
  Synthetic
uaaaaaugccuggccua

SEQ ID NO: 741172 - RNA, 17 nt, Artificial Sequence
  Synthetic
uauguaacaaaugccua

SEQ ID NO: 741173 - RNA, 17 nt, Artificial Sequence
  Synthetic
ucagucccaaaugccua

SEQ ID NO: 741174 - RNA, 17 nt, Artificial Sequence
  Synthetic
cugcaaugaaaugccua

SEQ ID NO: 741175 - RNA, 17 nt, Artificial Sequence
  Synthetic
ccaaaagccaaugccua

SEQ ID NO: 741176 - RNA, 17 nt, Artificial Sequence
  Synthetic
agccaaaggaaugccua

SEQ ID NO: 741177 - RNA, 17 nt, Artificial Sequence
  Synthetic
cuuucuagacaugccua

SEQ ID NO: 741178 - RNA, 17 nt, Artificial Sequence
  Synthetic
aaguaauuugaugccua

SEQ ID NO: 741179 - RNA, 17 nt, Artificial Sequence
  Synthetic
uaacccauuuaugccua

SEQ ID NO: 741180 - RNA, 17 nt, Artificial Sequence
  Synthetic
uccuauaaaacugccua

SEQ ID NO: 741181 - RNA, 17 nt, Artificial Sequence
  Synthetic
cauuuacaaacugccua

SEQ ID NO: 741182 - RNA, 17 nt, Artificial Sequence
  Synthetic
ugccacugcacugccua

SEQ ID NO: 741183 - RNA, 17 nt, Artificial Sequence
  Synthetic
aggacuguuacugccua

SEQ ID NO: 741184 - RNA, 17 nt, Artificial Sequence
  Synthetic
uugucuuuuccugccua

SEQ ID NO: 741185 - RNA, 17 nt, Artificial Sequence
  Synthetic
auggaaaaggcugccua

SEQ ID NO: 741186 - RNA, 17 nt, Artificial Sequence
  Synthetic
uuaucaauaauugccua

SEQ ID NO: 741187 - RNA, 17 nt, Artificial Sequence
  Synthetic
auuuuagagguugccua

SEQ ID NO: 741188 - RNA, 17 nt, Artificial Sequence
  Synthetic
aauguucauuuugccua

SEQ ID NO: 741189 - RNA, 17 nt, Artificial Sequence
  Synthetic
ccauuccaaaaauccua

SEQ ID NO: 741190 - RNA, 17 nt, Artificial Sequence
  Synthetic
cuauuccaaaaauccua

SEQ ID NO: 741191 - RNA, 17 nt, Artificial Sequence
  Synthetic
uuggccaccaaauccua

SEQ ID NO: 741192 - RNA, 17 nt, Artificial Sequence
  Synthetic
uuauacagcaaauccua

SEQ ID NO: 741193 - RNA, 17 nt, Artificial Sequence
  Synthetic
cuauaccuucaauccua

SEQ ID NO: 741194 - RNA, 17 nt, Artificial Sequence
  Synthetic
uaacaaugggaauccua

SEQ ID NO: 741195 - RNA, 17 nt, Artificial Sequence
  Synthetic
uuauuugaugaauccua

SEQ ID NO: 741196 - RNA, 17 nt, Artificial Sequence
  Synthetic
uuuaugguguaauccua

SEQ ID NO: 741197 - RNA, 17 nt, Artificial Sequence
  Synthetic
ucuacuacuuaauccua

SEQ ID NO: 741198 - RNA, 17 nt, Artificial Sequence
  Synthetic
aggcuagggucauccua

SEQ ID NO: 741199 - RNA, 17 nt, Artificial Sequence
  Synthetic
acaaaauuaggauccua

SEQ ID NO: 741200 - RNA, 17 nt, Artificial Sequence
  Synthetic
uuucuagaaauauccua

SEQ ID NO: 741201 - RNA, 17 nt, Artificial Sequence
  Synthetic
caaccaagacuauccua

SEQ ID NO: 741202 - RNA, 17 nt, Artificial Sequence
  Synthetic
caagagcaauuauccua

SEQ ID NO: 741203 - RNA, 17 nt, Artificial Sequence
  Synthetic
aaucuaggcuuauccua

SEQ ID NO: 741204 - RNA, 17 nt, Artificial Sequence
  Synthetic
aucacuuucuuauccua

SEQ ID NO: 741205 - RNA, 17 nt, Artificial Sequence
  Synthetic
aaguuauaguuauccua

SEQ ID NO: 741206 - RNA, 17 nt, Artificial Sequence
  Synthetic
cuuguuuuuuuauccua

SEQ ID NO: 741207 - RNA, 17 nt, Artificial Sequence
  Synthetic
uaaucagauaacuccua

SEQ ID NO: 741208 - RNA, 17 nt, Artificial Sequence
  Synthetic
auuuuaacaaccuccua

SEQ ID NO: 741209 - RNA, 17 nt, Artificial Sequence
  Synthetic
uauuggucaaccuccua

SEQ ID NO: 741210 - RNA, 17 nt, Artificial Sequence
  Synthetic
cccacaucuaccuccua

SEQ ID NO: 741211 - RNA, 17 nt, Artificial Sequence
  Synthetic
cuacagguucccuccua

SEQ ID NO: 741212 - RNA, 17 nt, Artificial Sequence
  Synthetic
uuuuccuuggccuccua

SEQ ID NO: 741213 - RNA, 17 nt, Artificial Sequence
  Synthetic
uaaaguaguuccuccua

SEQ ID NO: 741214 - RNA, 17 nt, Artificial Sequence
  Synthetic
uauauaguuuccuccua

SEQ ID NO: 741215 - RNA, 17 nt, Artificial Sequence
  Synthetic
uacucugggagcuccua

SEQ ID NO: 741216 - RNA, 17 nt, Artificial Sequence
  Synthetic
aauuguauaggcuccua

SEQ ID NO: 741217 - RNA, 17 nt, Artificial Sequence
  Synthetic
ugauaagaaugcuccua

SEQ ID NO: 741218 - RNA, 17 nt, Artificial Sequence
  Synthetic
uaggguuugugcuccua

SEQ ID NO: 741219 - RNA, 17 nt, Artificial Sequence
  Synthetic
cuucaagauugcuccua

SEQ ID NO: 741220 - RNA, 17 nt, Artificial Sequence
  Synthetic
uccaucagaaucuccua

SEQ ID NO: 741221 - RNA, 17 nt, Artificial Sequence
  Synthetic
uuauucuacuucuccua

SEQ ID NO: 741222 - RNA, 17 nt, Artificial Sequence
  Synthetic
ucuggggggaaguccua

SEQ ID NO: 741223 - RNA, 17 nt, Artificial Sequence
  Synthetic
aggcaguaacaguccua

SEQ ID NO: 741224 - RNA, 17 nt, Artificial Sequence
  Synthetic
aagacucuuagguccua

SEQ ID NO: 741225 - RNA, 17 nt, Artificial Sequence
  Synthetic
aagccuuucugguccua

SEQ ID NO: 741226 - RNA, 17 nt, Artificial Sequence
  Synthetic
aaaucuagaaauuccua

SEQ ID NO: 741227 - RNA, 17 nt, Artificial Sequence
  Synthetic
ucucaggcccauuccua

SEQ ID NO: 741228 - RNA, 17 nt, Artificial Sequence
  Synthetic
cagcuccuucauuccua

SEQ ID NO: 741229 - RNA, 17 nt, Artificial Sequence
  Synthetic
augugagaagauuccua

SEQ ID NO: 741230 - RNA, 17 nt, Artificial Sequence
  Synthetic
auguguuauuauuccua

SEQ ID NO: 741231 - RNA, 17 nt, Artificial Sequence
  Synthetic
aauuacuuuuauuccua

SEQ ID NO: 741232 - RNA, 17 nt, Artificial Sequence
  Synthetic
ugucguaguacuuccua

SEQ ID NO: 741233 - RNA, 17 nt, Artificial Sequence
  Synthetic
uucauucuugcuuccua

SEQ ID NO: 741234 - RNA, 17 nt, Artificial Sequence
  Synthetic
aauuaauuaucuuccua

SEQ ID NO: 741235 - RNA, 17 nt, Artificial Sequence
  Synthetic
cgaauaaggucuuccua

SEQ ID NO: 741236 - RNA, 17 nt, Artificial Sequence
  Synthetic
aggucccagaguuccua

SEQ ID NO: 741237 - RNA, 17 nt, Artificial Sequence
  Synthetic
aacauaacagguuccua

SEQ ID NO: 741238 - RNA, 17 nt, Artificial Sequence
  Synthetic
ugggaacacauuuccua

SEQ ID NO: 741239 - RNA, 17 nt, Artificial Sequence
  Synthetic
ugcauguggcuuuccua

SEQ ID NO: 741240 - RNA, 17 nt, Artificial Sequence
  Synthetic
uuuaauuaaguuuccua

SEQ ID NO: 741241 - RNA, 17 nt, Artificial Sequence
  Synthetic
uuauauucaguuuccua

SEQ ID NO: 741242 - RNA, 17 nt, Artificial Sequence
  Synthetic
uucuaugaauuuuccua

SEQ ID NO: 741243 - RNA, 17 nt, Artificial Sequence
  Synthetic
cuccuaagguuuuccua

SEQ ID NO: 741244 - RNA, 17 nt, Artificial Sequence
  Synthetic
ucuacuguuuuuuccua

SEQ ID NO: 741245 - RNA, 17 nt, Artificial Sequence
  Synthetic
aaaaccacucaaagcua

SEQ ID NO: 741246 - RNA, 17 nt, Artificial Sequence
  Synthetic
uaaauaauucaaagcua

SEQ ID NO: 741247 - RNA, 17 nt, Artificial Sequence
  Synthetic
ccauuguaaacaagcua

SEQ ID NO: 741248 - RNA, 17 nt, Artificial Sequence
  Synthetic
uacuauaugccaagcua

SEQ ID NO: 741249 - RNA, 17 nt, Artificial Sequence
  Synthetic
uucucagcagcaagcua

SEQ ID NO: 741250 - RNA, 17 nt, Artificial Sequence
  Synthetic
auucacaccucaagcua

SEQ ID NO: 741251 - RNA, 17 nt, Artificial Sequence
  Synthetic
aaaaacugcugaagcua

SEQ ID NO: 741252 - RNA, 17 nt, Artificial Sequence
  Synthetic
aagaaauucugaagcua

SEQ ID NO: 741253 - RNA, 17 nt, Artificial Sequence
  Synthetic
aaaguuacuauaagcua

SEQ ID NO: 741254 - RNA, 17 nt, Artificial Sequence
  Synthetic
cuuuuauuucuaagcua

SEQ ID NO: 741255 - RNA, 17 nt, Artificial Sequence
  Synthetic
cuugggugcaacagcua

SEQ ID NO: 741256 - RNA, 17 nt, Artificial Sequence
  Synthetic
aagaccaguaacagcua

SEQ ID NO: 741257 - RNA, 17 nt, Artificial Sequence
  Synthetic
aaugguucugacagcua

SEQ ID NO: 741258 - RNA, 17 nt, Artificial Sequence
  Synthetic
uaaguuaauuacagcua

SEQ ID NO: 741259 - RNA, 17 nt, Artificial Sequence
  Synthetic
aauauuccaaccagcua

SEQ ID NO: 741260 - RNA, 17 nt, Artificial Sequence
  Synthetic
uucuucucauccagcua

SEQ ID NO: 741261 - RNA, 17 nt, Artificial Sequence
  Synthetic
caaaagauuagcagcua

SEQ ID NO: 741262 - RNA, 17 nt, Artificial Sequence
  Synthetic
uguuuccgaggcagcua

SEQ ID NO: 741263 - RNA, 17 nt, Artificial Sequence
  Synthetic
auuuuacccaucagcua

SEQ ID NO: 741264 - RNA, 17 nt, Artificial Sequence
  Synthetic
caaaaagcuaucagcua

SEQ ID NO: 741265 - RNA, 17 nt, Artificial Sequence
  Synthetic
aaacuguaucucagcua

SEQ ID NO: 741266 - RNA, 17 nt, Artificial Sequence
  Synthetic
aauuaguaguucagcua

SEQ ID NO: 741267 - RNA, 17 nt, Artificial Sequence
  Synthetic
aauuauuuuuucagcua

SEQ ID NO: 741268 - RNA, 17 nt, Artificial Sequence
  Synthetic
ucugucuuacagagcua

SEQ ID NO: 741269 - RNA, 17 nt, Artificial Sequence
  Synthetic
aagggcauauagagcua

SEQ ID NO: 741270 - RNA, 17 nt, Artificial Sequence
  Synthetic
cuggagaauaggagcua

SEQ ID NO: 741271 - RNA, 17 nt, Artificial Sequence
  Synthetic
acauugugauggagcua

SEQ ID NO: 741272 - RNA, 17 nt, Artificial Sequence
  Synthetic
ccaacacccuggagcua

SEQ ID NO: 741273 - RNA, 17 nt, Artificial Sequence
  Synthetic
uuuaggauuuggagcua

SEQ ID NO: 741274 - RNA, 17 nt, Artificial Sequence
  Synthetic
augcaaacaaugagcua

SEQ ID NO: 741275 - RNA, 17 nt, Artificial Sequence
  Synthetic
accuucauaaugagcua

SEQ ID NO: 741276 - RNA, 17 nt, Artificial Sequence
  Synthetic
ugaacaaagcugagcua

SEQ ID NO: 741277 - RNA, 17 nt, Artificial Sequence
  Synthetic
uacaguauucugagcua

SEQ ID NO: 741278 - RNA, 17 nt, Artificial Sequence
  Synthetic
uuuccaucuuugagcua

SEQ ID NO: 741279 - RNA, 17 nt, Artificial Sequence
  Synthetic
agcaaaaacacuagcua

SEQ ID NO: 741280 - RNA, 17 nt, Artificial Sequence
  Synthetic
agagacaaagcuagcua

SEQ ID NO: 741281 - RNA, 17 nt, Artificial Sequence
  Synthetic
cauucuuagucuagcua

SEQ ID NO: 741282 - RNA, 17 nt, Artificial Sequence
  Synthetic
agccuccugaguagcua

SEQ ID NO: 741283 - RNA, 17 nt, Artificial Sequence
  Synthetic
uuaucuuuauguagcua

SEQ ID NO: 741284 - RNA, 17 nt, Artificial Sequence
  Synthetic
aucccagaguguagcua

SEQ ID NO: 741285 - RNA, 17 nt, Artificial Sequence
  Synthetic
aucugggagcuuagcua

SEQ ID NO: 741286 - RNA, 17 nt, Artificial Sequence
  Synthetic
aaguaaacauuuagcua

SEQ ID NO: 741287 - RNA, 17 nt, Artificial Sequence
  Synthetic
cuaauuaucuuuagcua

SEQ ID NO: 741288 - RNA, 17 nt, Artificial Sequence
  Synthetic
aaaaaaugaauacgcua

SEQ ID NO: 741289 - RNA, 17 nt, Artificial Sequence
  Synthetic
uuuggaaaauuacgcua

SEQ ID NO: 741290 - RNA, 17 nt, Artificial Sequence
  Synthetic
agcauuugaaaccgcua

SEQ ID NO: 741291 - RNA, 17 nt, Artificial Sequence
  Synthetic
agcugcucuuuccgcua

SEQ ID NO: 741292 - RNA, 17 nt, Artificial Sequence
  Synthetic
aauuacuuugggcgcua

SEQ ID NO: 741293 - RNA, 17 nt, Artificial Sequence
  Synthetic
caccacaguguucgcua

SEQ ID NO: 741294 - RNA, 17 nt, Artificial Sequence
  Synthetic
acuuaagcaaaaggcua

SEQ ID NO: 741295 - RNA, 17 nt, Artificial Sequence
  Synthetic
caaggccugaaaggcua

SEQ ID NO: 741296 - RNA, 17 nt, Artificial Sequence
  Synthetic
acuauacuacaaggcua

SEQ ID NO: 741297 - RNA, 17 nt, Artificial Sequence
  Synthetic
acuuuuucagaaggcua

SEQ ID NO: 741298 - RNA, 17 nt, Artificial Sequence
  Synthetic
cacuuaagggaaggcua

SEQ ID NO: 741299 - RNA, 17 nt, Artificial Sequence
  Synthetic
agcacuuuggaaggcua

SEQ ID NO: 741300 - RNA, 17 nt, Artificial Sequence
  Synthetic
caguuacauacaggcua

SEQ ID NO: 741301 - RNA, 17 nt, Artificial Sequence
  Synthetic
ugccagugcccaggcua

SEQ ID NO: 741302 - RNA, 17 nt, Artificial Sequence
  Synthetic
agcuacucaggaggcua

SEQ ID NO: 741303 - RNA, 17 nt, Artificial Sequence
  Synthetic
agcuacucgggaggcua

SEQ ID NO: 741304 - RNA, 17 nt, Artificial Sequence
  Synthetic
agcuacuugggaggcua

SEQ ID NO: 741305 - RNA, 17 nt, Artificial Sequence
  Synthetic
agcaauuugggaggcua

SEQ ID NO: 741306 - RNA, 17 nt, Artificial Sequence
  Synthetic
uaauaugcuggaggcua

SEQ ID NO: 741307 - RNA, 17 nt, Artificial Sequence
  Synthetic
auaaauguuugaggcua

SEQ ID NO: 741308 - RNA, 17 nt, Artificial Sequence
  Synthetic
aaaagagaauuaggcua

SEQ ID NO: 741309 - RNA, 17 nt, Artificial Sequence
  Synthetic
aacuguaacaagggcua

SEQ ID NO: 741310 - RNA, 17 nt, Artificial Sequence
  Synthetic
auaugauccuagggcua

SEQ ID NO: 741311 - RNA, 17 nt, Artificial Sequence
  Synthetic
ugagcagcagcgggcua

SEQ ID NO: 741312 - RNA, 17 nt, Artificial Sequence
  Synthetic
ugauuuuuagggggcua

SEQ ID NO: 741313 - RNA, 17 nt, Artificial Sequence
  Synthetic
caggggguggggggcua

SEQ ID NO: 741314 - RNA, 17 nt, Artificial Sequence
  Synthetic
uuggggguggggggcua

SEQ ID NO: 741315 - RNA, 17 nt, Artificial Sequence
  Synthetic
agccucuuggggggcua

SEQ ID NO: 741316 - RNA, 17 nt, Artificial Sequence
  Synthetic
aauacacagcugggcua

SEQ ID NO: 741317 - RNA, 17 nt, Artificial Sequence
  Synthetic
uuaacuuggcugggcua

SEQ ID NO: 741318 - RNA, 17 nt, Artificial Sequence
  Synthetic
caucagaaagugggcua

SEQ ID NO: 741319 - RNA, 17 nt, Artificial Sequence
  Synthetic
agcuaaugggugggcua

SEQ ID NO: 741320 - RNA, 17 nt, Artificial Sequence
  Synthetic
aaguuaccaaauggcua

SEQ ID NO: 741321 - RNA, 17 nt, Artificial Sequence
  Synthetic
uguugauagcauggcua

SEQ ID NO: 741322 - RNA, 17 nt, Artificial Sequence
  Synthetic
accagcuggcauggcua

SEQ ID NO: 741323 - RNA, 17 nt, Artificial Sequence
  Synthetic
uucauggcugauggcua

SEQ ID NO: 741324 - RNA, 17 nt, Artificial Sequence
  Synthetic
cagaagcucuauggcua

SEQ ID NO: 741325 - RNA, 17 nt, Artificial Sequence
  Synthetic
aguaucuuauguggcua

SEQ ID NO: 741326 - RNA, 17 nt, Artificial Sequence
  Synthetic
uuaucauaccuuggcua

SEQ ID NO: 741327 - RNA, 17 nt, Artificial Sequence
  Synthetic
acggcuucuguuggcua

SEQ ID NO: 741328 - RNA, 17 nt, Artificial Sequence
  Synthetic
ugaucucuuguuggcua

SEQ ID NO: 741329 - RNA, 17 nt, Artificial Sequence
  Synthetic
aauugagaauuuggcua

SEQ ID NO: 741330 - RNA, 17 nt, Artificial Sequence
  Synthetic
uauuuaauuuuuggcua

SEQ ID NO: 741331 - RNA, 17 nt, Artificial Sequence
  Synthetic
aaguaggcaaaaugcua

SEQ ID NO: 741332 - RNA, 17 nt, Artificial Sequence
  Synthetic
aagggggcagaaugcua

SEQ ID NO: 741333 - RNA, 17 nt, Artificial Sequence
  Synthetic
acuaaacccugaugcua

SEQ ID NO: 741334 - RNA, 17 nt, Artificial Sequence
  Synthetic
cagccaggcugaugcua

SEQ ID NO: 741335 - RNA, 17 nt, Artificial Sequence
  Synthetic
uauuuugucugaugcua

SEQ ID NO: 741336 - RNA, 17 nt, Artificial Sequence
  Synthetic
uagcucccuugaugcua

SEQ ID NO: 741337 - RNA, 17 nt, Artificial Sequence
  Synthetic
aauaaauuaauaugcua

SEQ ID NO: 741338 - RNA, 17 nt, Artificial Sequence
  Synthetic
ucuuucuuuauaugcua

SEQ ID NO: 741339 - RNA, 17 nt, Artificial Sequence
  Synthetic
auguuugcucuaugcua

SEQ ID NO: 741340 - RNA, 17 nt, Artificial Sequence
  Synthetic
caagcuacgguaugcua

SEQ ID NO: 741341 - RNA, 17 nt, Artificial Sequence
  Synthetic
uuccaauggguaugcua

SEQ ID NO: 741342 - RNA, 17 nt, Artificial Sequence
  Synthetic
caugagguaaacugcua

SEQ ID NO: 741343 - RNA, 17 nt, Artificial Sequence
  Synthetic
uuaagagacuccugcua

SEQ ID NO: 741344 - RNA, 17 nt, Artificial Sequence
  Synthetic
cauuugugcuccugcua

SEQ ID NO: 741345 - RNA, 17 nt, Artificial Sequence
  Synthetic
ugcugcugcugcugcua

SEQ ID NO: 741346 - RNA, 17 nt, Artificial Sequence
  Synthetic
acauucacgaucugcua

SEQ ID NO: 741347 - RNA, 17 nt, Artificial Sequence
  Synthetic
cucuuugcuuucugcua

SEQ ID NO: 741348 - RNA, 17 nt, Artificial Sequence
  Synthetic
caguaugauaagugcua

SEQ ID NO: 741349 - RNA, 17 nt, Artificial Sequence
  Synthetic
aggaaggcugagugcua

SEQ ID NO: 741350 - RNA, 17 nt, Artificial Sequence
  Synthetic
acagccugauagugcua

SEQ ID NO: 741351 - RNA, 17 nt, Artificial Sequence
  Synthetic
cugagauguuagugcua

SEQ ID NO: 741352 - RNA, 17 nt, Artificial Sequence
  Synthetic
uagguauacacgugcua

SEQ ID NO: 741353 - RNA, 17 nt, Artificial Sequence
  Synthetic
auuagagcacggugcua

SEQ ID NO: 741354 - RNA, 17 nt, Artificial Sequence
  Synthetic
aaauucagugugugcua

SEQ ID NO: 741355 - RNA, 17 nt, Artificial Sequence
  Synthetic
uuucagaauuugugcua

SEQ ID NO: 741356 - RNA, 17 nt, Artificial Sequence
  Synthetic
acauuguagaauugcua

SEQ ID NO: 741357 - RNA, 17 nt, Artificial Sequence
  Synthetic
cuuuuguaugauugcua

SEQ ID NO: 741358 - RNA, 17 nt, Artificial Sequence
  Synthetic
aagaggacauauugcua

SEQ ID NO: 741359 - RNA, 17 nt, Artificial Sequence
  Synthetic
cuuaauuauuauugcua

SEQ ID NO: 741360 - RNA, 17 nt, Artificial Sequence
  Synthetic
ugcaguggcccuugcua

SEQ ID NO: 741361 - RNA, 17 nt, Artificial Sequence
  Synthetic
uguuucucagcuugcua

SEQ ID NO: 741362 - RNA, 17 nt, Artificial Sequence
  Synthetic
caugcuuuagguugcua

SEQ ID NO: 741363 - RNA, 17 nt, Artificial Sequence
  Synthetic
uacaauggugguugcua

SEQ ID NO: 741364 - RNA, 17 nt, Artificial Sequence
  Synthetic
agcuacauuuguugcua

SEQ ID NO: 741365 - RNA, 17 nt, Artificial Sequence
  Synthetic
uguguaggaauuugcua

SEQ ID NO: 741366 - RNA, 17 nt, Artificial Sequence
  Synthetic
ucaguuuauauuugcua

SEQ ID NO: 741367 - RNA, 17 nt, Artificial Sequence
  Synthetic
uguuuugcccuuugcua

SEQ ID NO: 741368 - RNA, 17 nt, Artificial Sequence
  Synthetic
uccauauaaguuugcua

SEQ ID NO: 741369 - RNA, 17 nt, Artificial Sequence
  Synthetic
ccugcauuaguuugcua

SEQ ID NO: 741370 - RNA, 17 nt, Artificial Sequence
  Synthetic
uucgguucuguuugcua

SEQ ID NO: 741371 - RNA, 17 nt, Artificial Sequence
  Synthetic
cccuguaucuuuugcua

SEQ ID NO: 741372 - RNA, 17 nt, Artificial Sequence
  Synthetic
caaaggcuaaaaaucua

SEQ ID NO: 741373 - RNA, 17 nt, Artificial Sequence
  Synthetic
agaaagaacaaaaucua

SEQ ID NO: 741374 - RNA, 17 nt, Artificial Sequence
  Synthetic
cuuuuaaauaaaaucua

SEQ ID NO: 741375 - RNA, 17 nt, Artificial Sequence
  Synthetic
aguuccauuaaaaucua

SEQ ID NO: 741376 - RNA, 17 nt, Artificial Sequence
  Synthetic
uuugugaggcaaaucua

SEQ ID NO: 741377 - RNA, 17 nt, Artificial Sequence
  Synthetic
ucucuagggcaaaucua

SEQ ID NO: 741378 - RNA, 17 nt, Artificial Sequence
  Synthetic
uuggcuucagaaaucua

SEQ ID NO: 741379 - RNA, 17 nt, Artificial Sequence
  Synthetic
aucaguaaggaaaucua

SEQ ID NO: 741380 - RNA, 17 nt, Artificial Sequence
  Synthetic
ccagaggacuaaaucua

SEQ ID NO: 741381 - RNA, 17 nt, Artificial Sequence
  Synthetic
uugugaauguaaaucua

SEQ ID NO: 741382 - RNA, 17 nt, Artificial Sequence
  Synthetic
cuuaaauguacaaucua

SEQ ID NO: 741383 - RNA, 17 nt, Artificial Sequence
  Synthetic
cauuaaauuacaaucua

SEQ ID NO: 741384 - RNA, 17 nt, Artificial Sequence
  Synthetic
uuaacuaaagcaaucua

SEQ ID NO: 741385 - RNA, 17 nt, Artificial Sequence
  Synthetic
cagcagucaucaaucua

SEQ ID NO: 741386 - RNA, 17 nt, Artificial Sequence
  Synthetic
acugagcccucaaucua

SEQ ID NO: 741387 - RNA, 17 nt, Artificial Sequence
  Synthetic
aauugaaucagaaucua

SEQ ID NO: 741388 - RNA, 17 nt, Artificial Sequence
  Synthetic
ugaaaugagggaaucua

SEQ ID NO: 741389 - RNA, 17 nt, Artificial Sequence
  Synthetic
auguuccuuugaaucua

SEQ ID NO: 741390 - RNA, 17 nt, Artificial Sequence
  Synthetic
ugccccauaauaaucua

SEQ ID NO: 741391 - RNA, 17 nt, Artificial Sequence
  Synthetic
cgguauauaauaaucua

SEQ ID NO: 741392 - RNA, 17 nt, Artificial Sequence
  Synthetic
uuucgacacauaaucua

SEQ ID NO: 741393 - RNA, 17 nt, Artificial Sequence
  Synthetic
aagaaguugauaaucua

SEQ ID NO: 741394 - RNA, 17 nt, Artificial Sequence
  Synthetic
aagacaaaacuaaucua

SEQ ID NO: 741395 - RNA, 17 nt, Artificial Sequence
  Synthetic
uugaaauuccuaaucua

SEQ ID NO: 741396 - RNA, 17 nt, Artificial Sequence
  Synthetic
acauguaaucuaaucua

SEQ ID NO: 741397 - RNA, 17 nt, Artificial Sequence
  Synthetic
uuucaaagucuaaucua

SEQ ID NO: 741398 - RNA, 17 nt, Artificial Sequence
  Synthetic
aacucauuuguaaucua

SEQ ID NO: 741399 - RNA, 17 nt, Artificial Sequence
  Synthetic
cuggcaaaauuaaucua

SEQ ID NO: 741400 - RNA, 17 nt, Artificial Sequence
  Synthetic
augacuuuugacaucua

SEQ ID NO: 741401 - RNA, 17 nt, Artificial Sequence
  Synthetic
ucuuuaaaaaccaucua

SEQ ID NO: 741402 - RNA, 17 nt, Artificial Sequence
  Synthetic
cucuuguccagcaucua

SEQ ID NO: 741403 - RNA, 17 nt, Artificial Sequence
  Synthetic
accagauguagcaucua

SEQ ID NO: 741404 - RNA, 17 nt, Artificial Sequence
  Synthetic
agaacaagaaucaucua

SEQ ID NO: 741405 - RNA, 17 nt, Artificial Sequence
  Synthetic
uguguaaaccucaucua

SEQ ID NO: 741406 - RNA, 17 nt, Artificial Sequence
  Synthetic
auuugcuuucucaucua

SEQ ID NO: 741407 - RNA, 17 nt, Artificial Sequence
  Synthetic
ugcaaugaugucaucua

SEQ ID NO: 741408 - RNA, 17 nt, Artificial Sequence
  Synthetic
aaagacuauuucaucua

SEQ ID NO: 741409 - RNA, 17 nt, Artificial Sequence
  Synthetic
agguaaugaaagaucua

SEQ ID NO: 741410 - RNA, 17 nt, Artificial Sequence
  Synthetic
aguaaugauuagaucua

SEQ ID NO: 741411 - RNA, 17 nt, Artificial Sequence
  Synthetic
cuucuuauaaugaucua

SEQ ID NO: 741412 - RNA, 17 nt, Artificial Sequence
  Synthetic
uucuaguuaaugaucua

SEQ ID NO: 741413 - RNA, 17 nt, Artificial Sequence
  Synthetic
auauuugcccugaucua

SEQ ID NO: 741414 - RNA, 17 nt, Artificial Sequence
  Synthetic
ucccuauaagugaucua

SEQ ID NO: 741415 - RNA, 17 nt, Artificial Sequence
  Synthetic
agaugacaauugaucua

SEQ ID NO: 741416 - RNA, 17 nt, Artificial Sequence
  Synthetic
cuggggauauugaucua

SEQ ID NO: 741417 - RNA, 17 nt, Artificial Sequence
  Synthetic
auaauaguguugaucua

SEQ ID NO: 741418 - RNA, 17 nt, Artificial Sequence
  Synthetic
auaaaauaaaauaucua

SEQ ID NO: 741419 - RNA, 17 nt, Artificial Sequence
  Synthetic
aauacuuaaaauaucua

SEQ ID NO: 741420 - RNA, 17 nt, Artificial Sequence
  Synthetic
auaaaaucaaauaucua

SEQ ID NO: 741421 - RNA, 17 nt, Artificial Sequence
  Synthetic
uuucaauagaauaucua

SEQ ID NO: 741422 - RNA, 17 nt, Artificial Sequence
  Synthetic
aauuagaauaauaucua

SEQ ID NO: 741423 - RNA, 17 nt, Artificial Sequence
  Synthetic
acuacuaauaauaucua

SEQ ID NO: 741424 - RNA, 17 nt, Artificial Sequence
  Synthetic
acaauuaaucauaucua

SEQ ID NO: 741425 - RNA, 17 nt, Artificial Sequence
  Synthetic
auugcuugcuauaucua

SEQ ID NO: 741426 - RNA, 17 nt, Artificial Sequence
  Synthetic
ucagugauuuauaucua

SEQ ID NO: 741427 - RNA, 17 nt, Artificial Sequence
  Synthetic
cuaccaugaacuaucua

SEQ ID NO: 741428 - RNA, 17 nt, Artificial Sequence
  Synthetic
ugaaauuuaacuaucua

SEQ ID NO: 741429 - RNA, 17 nt, Artificial Sequence
  Synthetic
aggaacuaaucuaucua

SEQ ID NO: 741430 - RNA, 17 nt, Artificial Sequence
  Synthetic
accuacuagucuaucua

SEQ ID NO: 741431 - RNA, 17 nt, Artificial Sequence
  Synthetic
uuucuacuuucuaucua

SEQ ID NO: 741432 - RNA, 17 nt, Artificial Sequence
  Synthetic
uauaaugaaaguaucua

SEQ ID NO: 741433 - RNA, 17 nt, Artificial Sequence
  Synthetic
uauuucacuauuaucua

SEQ ID NO: 741434 - RNA, 17 nt, Artificial Sequence
  Synthetic
uauuguuuuauuaucua

SEQ ID NO: 741435 - RNA, 17 nt, Artificial Sequence
  Synthetic
aacaguuagcuuaucua

SEQ ID NO: 741436 - RNA, 17 nt, Artificial Sequence
  Synthetic
uuuguuuguguuaucua

SEQ ID NO: 741437 - RNA, 17 nt, Artificial Sequence
  Synthetic
ugauugauguuuaucua

SEQ ID NO: 741438 - RNA, 17 nt, Artificial Sequence
  Synthetic
uccaguacaaaacucua

SEQ ID NO: 741439 - RNA, 17 nt, Artificial Sequence
  Synthetic
cucacuugaaaacucua

SEQ ID NO: 741440 - RNA, 17 nt, Artificial Sequence
  Synthetic
acauguuaauaacucua

SEQ ID NO: 741441 - RNA, 17 nt, Artificial Sequence
  Synthetic
cuaguguucuaacucua

SEQ ID NO: 741442 - RNA, 17 nt, Artificial Sequence
  Synthetic
auagaaaagacacucua

SEQ ID NO: 741443 - RNA, 17 nt, Artificial Sequence
  Synthetic
cuuuuuaucccacucua

SEQ ID NO: 741444 - RNA, 17 nt, Artificial Sequence
  Synthetic
uuuuuuuucccacucua

SEQ ID NO: 741445 - RNA, 17 nt, Artificial Sequence
  Synthetic
uuguuuucuucacucua

SEQ ID NO: 741446 - RNA, 17 nt, Artificial Sequence
  Synthetic
uugaucuacagacucua

SEQ ID NO: 741447 - RNA, 17 nt, Artificial Sequence
  Synthetic
aauuguuccagacucua

SEQ ID NO: 741448 - RNA, 17 nt, Artificial Sequence
  Synthetic
cacuuuacuagacucua

SEQ ID NO: 741449 - RNA, 17 nt, Artificial Sequence
  Synthetic
uaucacaaaugacucua

SEQ ID NO: 741450 - RNA, 17 nt, Artificial Sequence
  Synthetic
aaaagccauauacucua

SEQ ID NO: 741451 - RNA, 17 nt, Artificial Sequence
  Synthetic
cagguuuuacuacucua

SEQ ID NO: 741452 - RNA, 17 nt, Artificial Sequence
  Synthetic
aaccaggaucuacucua

SEQ ID NO: 741453 - RNA, 17 nt, Artificial Sequence
  Synthetic
uaguuauaucuacucua

SEQ ID NO: 741454 - RNA, 17 nt, Artificial Sequence
  Synthetic
cugucagaaaaccucua

SEQ ID NO: 741455 - RNA, 17 nt, Artificial Sequence
  Synthetic
uagaugcuucaccucua

SEQ ID NO: 741456 - RNA, 17 nt, Artificial Sequence
  Synthetic
cucucaacaacccucua

SEQ ID NO: 741457 - RNA, 17 nt, Artificial Sequence
  Synthetic
agcuugcauucccucua

SEQ ID NO: 741458 - RNA, 17 nt, Artificial Sequence
  Synthetic
acauccagaagccucua

SEQ ID NO: 741459 - RNA, 17 nt, Artificial Sequence
  Synthetic
auugugagaagccucua

SEQ ID NO: 741460 - RNA, 17 nt, Artificial Sequence
  Synthetic
agucgcuguugccucua

SEQ ID NO: 741461 - RNA, 17 nt, Artificial Sequence
  Synthetic
auguugcuguuccucua

SEQ ID NO: 741462 - RNA, 17 nt, Artificial Sequence
  Synthetic
cugaaucagaagcucua

SEQ ID NO: 741463 - RNA, 17 nt, Artificial Sequence
  Synthetic
uuuuauuuuaagcucua

SEQ ID NO: 741464 - RNA, 17 nt, Artificial Sequence
  Synthetic
auugggaaacagcucua

SEQ ID NO: 741465 - RNA, 17 nt, Artificial Sequence
  Synthetic
cugaauuuccagcucua

SEQ ID NO: 741466 - RNA, 17 nt, Artificial Sequence
  Synthetic
uucucuauggagcucua

SEQ ID NO: 741467 - RNA, 17 nt, Artificial Sequence
  Synthetic
ugacaaggcaggcucua

SEQ ID NO: 741468 - RNA, 17 nt, Artificial Sequence
  Synthetic
aaaaucuucaggcucua

SEQ ID NO: 741469 - RNA, 17 nt, Artificial Sequence
  Synthetic
ucaaauaacuggcucua

SEQ ID NO: 741470 - RNA, 17 nt, Artificial Sequence
  Synthetic
uauuuuugguggcucua

SEQ ID NO: 741471 - RNA, 17 nt, Artificial Sequence
  Synthetic
uagucugcauugcucua

SEQ ID NO: 741472 - RNA, 17 nt, Artificial Sequence
  Synthetic
ugcagaguauugcucua

SEQ ID NO: 741473 - RNA, 17 nt, Artificial Sequence
  Synthetic
ugacacugguugcucua

SEQ ID NO: 741474 - RNA, 17 nt, Artificial Sequence
  Synthetic
ugauuuauuuugcucua

SEQ ID NO: 741475 - RNA, 17 nt, Artificial Sequence
  Synthetic
uugugaucucaucucua

SEQ ID NO: 741476 - RNA, 17 nt, Artificial Sequence
  Synthetic
auccuuaaugaucucua

SEQ ID NO: 741477 - RNA, 17 nt, Artificial Sequence
  Synthetic
agucucucaacucucua

SEQ ID NO: 741478 - RNA, 17 nt, Artificial Sequence
  Synthetic
auagucauugcucucua

SEQ ID NO: 741479 - RNA, 17 nt, Artificial Sequence
  Synthetic
cuccuggagggucucua

SEQ ID NO: 741480 - RNA, 17 nt, Artificial Sequence
  Synthetic
cuuagauucugucucua

SEQ ID NO: 741481 - RNA, 17 nt, Artificial Sequence
  Synthetic
ugcuauuucauucucua

SEQ ID NO: 741482 - RNA, 17 nt, Artificial Sequence
  Synthetic
uucucuaugauucucua

SEQ ID NO: 741483 - RNA, 17 nt, Artificial Sequence
  Synthetic
acacgaaauauucucua

SEQ ID NO: 741484 - RNA, 17 nt, Artificial Sequence
  Synthetic
cuuucguaacuucucua

SEQ ID NO: 741485 - RNA, 17 nt, Artificial Sequence
  Synthetic
uuggcauggcuucucua

SEQ ID NO: 741486 - RNA, 17 nt, Artificial Sequence
  Synthetic
uaauuuuaucuucucua

SEQ ID NO: 741487 - RNA, 17 nt, Artificial Sequence
  Synthetic
uucguguuuguucucua

SEQ ID NO: 741488 - RNA, 17 nt, Artificial Sequence
  Synthetic
uauucuugcuuucucua

SEQ ID NO: 741489 - RNA, 17 nt, Artificial Sequence
  Synthetic
uuccuuuuguuucucua

SEQ ID NO: 741490 - RNA, 17 nt, Artificial Sequence
  Synthetic
agcauaaccaaagucua

SEQ ID NO: 741491 - RNA, 17 nt, Artificial Sequence
  Synthetic
ccaugaggucaagucua

SEQ ID NO: 741492 - RNA, 17 nt, Artificial Sequence
  Synthetic
auuacaagugaagucua

SEQ ID NO: 741493 - RNA, 17 nt, Artificial Sequence
  Synthetic
agaaacacuuaagucua

SEQ ID NO: 741494 - RNA, 17 nt, Artificial Sequence
  Synthetic
cucauguaaacagucua

SEQ ID NO: 741495 - RNA, 17 nt, Artificial Sequence
  Synthetic
uuaagccacccagucua

SEQ ID NO: 741496 - RNA, 17 nt, Artificial Sequence
  Synthetic
auaaauuacccagucua

SEQ ID NO: 741497 - RNA, 17 nt, Artificial Sequence
  Synthetic
auaaggcauccagucua

SEQ ID NO: 741498 - RNA, 17 nt, Artificial Sequence
  Synthetic
cucaaaacaucagucua

SEQ ID NO: 741499 - RNA, 17 nt, Artificial Sequence
  Synthetic
ugaaauuccagagucua

SEQ ID NO: 741500 - RNA, 17 nt, Artificial Sequence
  Synthetic
ugugaaacgagagucua

SEQ ID NO: 741501 - RNA, 17 nt, Artificial Sequence
  Synthetic
ugcuauuaucuagucua

SEQ ID NO: 741502 - RNA, 17 nt, Artificial Sequence
  Synthetic
augcaaugucuagucua

SEQ ID NO: 741503 - RNA, 17 nt, Artificial Sequence
  Synthetic
uuauaucuucuagucua

SEQ ID NO: 741504 - RNA, 17 nt, Artificial Sequence
  Synthetic
auucagaaaugcgucua

SEQ ID NO: 741505 - RNA, 17 nt, Artificial Sequence
  Synthetic
uucagugagauggucua

SEQ ID NO: 741506 - RNA, 17 nt, Artificial Sequence
  Synthetic
ugaaaaucacuggucua

SEQ ID NO: 741507 - RNA, 17 nt, Artificial Sequence
  Synthetic
uuauuuaugaaugucua

SEQ ID NO: 741508 - RNA, 17 nt, Artificial Sequence
  Synthetic
cuugugacucaugucua

SEQ ID NO: 741509 - RNA, 17 nt, Artificial Sequence
  Synthetic
uugggagaaacugucua

SEQ ID NO: 741510 - RNA, 17 nt, Artificial Sequence
  Synthetic
uaauugagagcugucua

SEQ ID NO: 741511 - RNA, 17 nt, Artificial Sequence
  Synthetic
cagccaaagauugucua

SEQ ID NO: 741512 - RNA, 17 nt, Artificial Sequence
  Synthetic
cauuuacauauugucua

SEQ ID NO: 741513 - RNA, 17 nt, Artificial Sequence
  Synthetic
cuaacguaacuugucua

SEQ ID NO: 741514 - RNA, 17 nt, Artificial Sequence
  Synthetic
uacuagaugcuugucua

SEQ ID NO: 741515 - RNA, 17 nt, Artificial Sequence
  Synthetic
aaggaucccuaauucua

SEQ ID NO: 741516 - RNA, 17 nt, Artificial Sequence
  Synthetic
cauuguuucuaauucua

SEQ ID NO: 741517 - RNA, 17 nt, Artificial Sequence
  Synthetic
uuugacucuuaauucua

SEQ ID NO: 741518 - RNA, 17 nt, Artificial Sequence
  Synthetic
ugaguaccuacauucua

SEQ ID NO: 741519 - RNA, 17 nt, Artificial Sequence
  Synthetic
aauggauuuacauucua

SEQ ID NO: 741520 - RNA, 17 nt, Artificial Sequence
  Synthetic
uagaaacaagcauucua

SEQ ID NO: 741521 - RNA, 17 nt, Artificial Sequence
  Synthetic
uucaacugugcauucua

SEQ ID NO: 741522 - RNA, 17 nt, Artificial Sequence
  Synthetic
aaaccauauucauucua

SEQ ID NO: 741523 - RNA, 17 nt, Artificial Sequence
  Synthetic
cuguguguuagauucua

SEQ ID NO: 741524 - RNA, 17 nt, Artificial Sequence
  Synthetic
cuggcugcaugauucua

SEQ ID NO: 741525 - RNA, 17 nt, Artificial Sequence
  Synthetic
auucuauagugauucua

SEQ ID NO: 741526 - RNA, 17 nt, Artificial Sequence
  Synthetic
ucaacucugugauucua

SEQ ID NO: 741527 - RNA, 17 nt, Artificial Sequence
  Synthetic
uuccacaauugauucua

SEQ ID NO: 741528 - RNA, 17 nt, Artificial Sequence
  Synthetic
uuccauguuugauucua

SEQ ID NO: 741529 - RNA, 17 nt, Artificial Sequence
  Synthetic
caaagagggauauucua

SEQ ID NO: 741530 - RNA, 17 nt, Artificial Sequence
  Synthetic
uauaaucauauauucua

SEQ ID NO: 741531 - RNA, 17 nt, Artificial Sequence
  Synthetic
cacuaggcacuauucua

SEQ ID NO: 741532 - RNA, 17 nt, Artificial Sequence
  Synthetic
aaaaagaaaguauucua

SEQ ID NO: 741533 - RNA, 17 nt, Artificial Sequence
  Synthetic
agaguuuuuguauucua

SEQ ID NO: 741534 - RNA, 17 nt, Artificial Sequence
  Synthetic
aucucuuaauuauucua

SEQ ID NO: 741535 - RNA, 17 nt, Artificial Sequence
  Synthetic
uaaaauauauuauucua

SEQ ID NO: 741536 - RNA, 17 nt, Artificial Sequence
  Synthetic
aagaccccaaacuucua

SEQ ID NO: 741537 - RNA, 17 nt, Artificial Sequence
  Synthetic
accauuccuaacuucua

SEQ ID NO: 741538 - RNA, 17 nt, Artificial Sequence
  Synthetic
uuugauccacccuucua

SEQ ID NO: 741539 - RNA, 17 nt, Artificial Sequence
  Synthetic
aacauucuccccuucua

SEQ ID NO: 741540 - RNA, 17 nt, Artificial Sequence
  Synthetic
auauugcccuccuucua

SEQ ID NO: 741541 - RNA, 17 nt, Artificial Sequence
  Synthetic
ucuucaauuuccuucua

SEQ ID NO: 741542 - RNA, 17 nt, Artificial Sequence
  Synthetic
uucuuaaauggcuucua

SEQ ID NO: 741543 - RNA, 17 nt, Artificial Sequence
  Synthetic
ugauguuguaucuucua

SEQ ID NO: 741544 - RNA, 17 nt, Artificial Sequence
  Synthetic
uccuaacaauucuucua

SEQ ID NO: 741545 - RNA, 17 nt, Artificial Sequence
  Synthetic
ucagucagcaaguucua

SEQ ID NO: 741546 - RNA, 17 nt, Artificial Sequence
  Synthetic
auauacuugaaguucua

SEQ ID NO: 741547 - RNA, 17 nt, Artificial Sequence
  Synthetic
uuauacuuuaaguucua

SEQ ID NO: 741548 - RNA, 17 nt, Artificial Sequence
  Synthetic
accuguucacaguucua

SEQ ID NO: 741549 - RNA, 17 nt, Artificial Sequence
  Synthetic
cucaagaaaggguucua

SEQ ID NO: 741550 - RNA, 17 nt, Artificial Sequence
  Synthetic
auucauauuugguucua

SEQ ID NO: 741551 - RNA, 17 nt, Artificial Sequence
  Synthetic
auuuaguuuugguucua

SEQ ID NO: 741552 - RNA, 17 nt, Artificial Sequence
  Synthetic
cauacuauucuguucua

SEQ ID NO: 741553 - RNA, 17 nt, Artificial Sequence
  Synthetic
cugaguucauuguucua

SEQ ID NO: 741554 - RNA, 17 nt, Artificial Sequence
  Synthetic
uaaguccauuuguucua

SEQ ID NO: 741555 - RNA, 17 nt, Artificial Sequence
  Synthetic
cccuuuuaaaauuucua

SEQ ID NO: 741556 - RNA, 17 nt, Artificial Sequence
  Synthetic
ccaauaagcaauuucua

SEQ ID NO: 741557 - RNA, 17 nt, Artificial Sequence
  Synthetic
auaguggggaauuucua

SEQ ID NO: 741558 - RNA, 17 nt, Artificial Sequence
  Synthetic
uaaauuguuaauuucua

SEQ ID NO: 741559 - RNA, 17 nt, Artificial Sequence
  Synthetic
uugaauaaacauuucua

SEQ ID NO: 741560 - RNA, 17 nt, Artificial Sequence
  Synthetic
auaaucaugcauuucua

SEQ ID NO: 741561 - RNA, 17 nt, Artificial Sequence
  Synthetic
ucuacaucagauuucua

SEQ ID NO: 741562 - RNA, 17 nt, Artificial Sequence
  Synthetic
auaugaguagauuucua

SEQ ID NO: 741563 - RNA, 17 nt, Artificial Sequence
  Synthetic
ccaaguuuggauuucua

SEQ ID NO: 741564 - RNA, 17 nt, Artificial Sequence
  Synthetic
uuuuccauauauuucua

SEQ ID NO: 741565 - RNA, 17 nt, Artificial Sequence
  Synthetic
aaucaaugcuauuucua

SEQ ID NO: 741566 - RNA, 17 nt, Artificial Sequence
  Synthetic
aauauaauuuauuucua

SEQ ID NO: 741567 - RNA, 17 nt, Artificial Sequence
  Synthetic
uauugcuauacuuucua

SEQ ID NO: 741568 - RNA, 17 nt, Artificial Sequence
  Synthetic
agugucacuacuuucua

SEQ ID NO: 741569 - RNA, 17 nt, Artificial Sequence
  Synthetic
acucaauguccuuucua

SEQ ID NO: 741570 - RNA, 17 nt, Artificial Sequence
  Synthetic
uugucuucaaguuucua

SEQ ID NO: 741571 - RNA, 17 nt, Artificial Sequence
  Synthetic
acguuucuaaguuucua

SEQ ID NO: 741572 - RNA, 17 nt, Artificial Sequence
  Synthetic
agaaucugggguuucua

SEQ ID NO: 741573 - RNA, 17 nt, Artificial Sequence
  Synthetic
uucauauaugguuucua

SEQ ID NO: 741574 - RNA, 17 nt, Artificial Sequence
  Synthetic
cuguuccuauguuucua

SEQ ID NO: 741575 - RNA, 17 nt, Artificial Sequence
  Synthetic
uuugcaguuuguuucua

SEQ ID NO: 741576 - RNA, 17 nt, Artificial Sequence
  Synthetic
uaacacagcauuuucua

SEQ ID NO: 741577 - RNA, 17 nt, Artificial Sequence
  Synthetic
uauuauuucauuuucua

SEQ ID NO: 741578 - RNA, 17 nt, Artificial Sequence
  Synthetic
ucugauuugauuuucua

SEQ ID NO: 741579 - RNA, 17 nt, Artificial Sequence
  Synthetic
cagcacaguauuuucua

SEQ ID NO: 741580 - RNA, 17 nt, Artificial Sequence
  Synthetic
uauuucauuauuuucua

SEQ ID NO: 741581 - RNA, 17 nt, Artificial Sequence
  Synthetic
uugguaucccuuuucua

SEQ ID NO: 741582 - RNA, 17 nt, Artificial Sequence
  Synthetic
aauuuugaucuuuucua

SEQ ID NO: 741583 - RNA, 17 nt, Artificial Sequence
  Synthetic
acuuuaucaguuuucua

SEQ ID NO: 741584 - RNA, 17 nt, Artificial Sequence
  Synthetic
auuucuuccaaaaagua

SEQ ID NO: 741585 - RNA, 17 nt, Artificial Sequence
  Synthetic
cuauuuaggaaaaagua

SEQ ID NO: 741586 - RNA, 17 nt, Artificial Sequence
  Synthetic
auaccuaugaaaaagua

SEQ ID NO: 741587 - RNA, 17 nt, Artificial Sequence
  Synthetic
acaaaagguaaaaagua

SEQ ID NO: 741588 - RNA, 17 nt, Artificial Sequence
  Synthetic
uuaucuucccaaaagua

SEQ ID NO: 741589 - RNA, 17 nt, Artificial Sequence
  Synthetic
cuccuuaagcaaaagua

SEQ ID NO: 741590 - RNA, 17 nt, Artificial Sequence
  Synthetic
ugcaagagagaaaagua

SEQ ID NO: 741591 - RNA, 17 nt, Artificial Sequence
  Synthetic
ccaaccacuacaaagua

SEQ ID NO: 741592 - RNA, 17 nt, Artificial Sequence
  Synthetic
accaacuaaccaaagua

SEQ ID NO: 741593 - RNA, 17 nt, Artificial Sequence
  Synthetic
cuuugcuacccaaagua

SEQ ID NO: 741594 - RNA, 17 nt, Artificial Sequence
  Synthetic
caguguuacccaaagua

SEQ ID NO: 741595 - RNA, 17 nt, Artificial Sequence
  Synthetic
uuuccaaagagaaagua

SEQ ID NO: 741596 - RNA, 17 nt, Artificial Sequence
  Synthetic
aagaagacaggaaagua

SEQ ID NO: 741597 - RNA, 17 nt, Artificial Sequence
  Synthetic
acagaggcaggaaagua

SEQ ID NO: 741598 - RNA, 17 nt, Artificial Sequence
  Synthetic
ucuaauuggggaaagua

SEQ ID NO: 741599 - RNA, 17 nt, Artificial Sequence
  Synthetic
auaugcccuggaaagua

SEQ ID NO: 741600 - RNA, 17 nt, Artificial Sequence
  Synthetic
cuaauaaaaugaaagua

SEQ ID NO: 741601 - RNA, 17 nt, Artificial Sequence
  Synthetic
auaauuaaaugaaagua

SEQ ID NO: 741602 - RNA, 17 nt, Artificial Sequence
  Synthetic
ucucagcugugaaagua

SEQ ID NO: 741603 - RNA, 17 nt, Artificial Sequence
  Synthetic
uuauguauaauaaagua

SEQ ID NO: 741604 - RNA, 17 nt, Artificial Sequence
  Synthetic
uccagauaccuaaagua

SEQ ID NO: 741605 - RNA, 17 nt, Artificial Sequence
  Synthetic
auuacucugcuaaagua

SEQ ID NO: 741606 - RNA, 17 nt, Artificial Sequence
  Synthetic
uaagagaagguaaagua

SEQ ID NO: 741607 - RNA, 17 nt, Artificial Sequence
  Synthetic
uuuuuagauguaaagua

SEQ ID NO: 741608 - RNA, 17 nt, Artificial Sequence
  Synthetic
aagaugagauuaaagua

SEQ ID NO: 741609 - RNA, 17 nt, Artificial Sequence
  Synthetic
uuucuaauuuuaaagua

SEQ ID NO: 741610 - RNA, 17 nt, Artificial Sequence
  Synthetic
accuaggcaaacaagua

SEQ ID NO: 741611 - RNA, 17 nt, Artificial Sequence
  Synthetic
cagcaaugaaacaagua

SEQ ID NO: 741612 - RNA, 17 nt, Artificial Sequence
  Synthetic
ugaauguugaacaagua

SEQ ID NO: 741613 - RNA, 17 nt, Artificial Sequence
  Synthetic
uuagaccuuaacaagua

SEQ ID NO: 741614 - RNA, 17 nt, Artificial Sequence
  Synthetic
cauucaggacacaagua

SEQ ID NO: 741615 - RNA, 17 nt, Artificial Sequence
  Synthetic
cauuuuucccacaagua

SEQ ID NO: 741616 - RNA, 17 nt, Artificial Sequence
  Synthetic
ucacccccucacaagua

SEQ ID NO: 741617 - RNA, 17 nt, Artificial Sequence
  Synthetic
caccugugugacaagua

SEQ ID NO: 741618 - RNA, 17 nt, Artificial Sequence
  Synthetic
uuacagcaacccaagua

SEQ ID NO: 741619 - RNA, 17 nt, Artificial Sequence
  Synthetic
uacacuaugcccaagua

SEQ ID NO: 741620 - RNA, 17 nt, Artificial Sequence
  Synthetic
uaaauuauagccaagua

SEQ ID NO: 741621 - RNA, 17 nt, Artificial Sequence
  Synthetic
caggugaaauccaagua

SEQ ID NO: 741622 - RNA, 17 nt, Artificial Sequence
  Synthetic
ucuauuuccagcaagua

SEQ ID NO: 741623 - RNA, 17 nt, Artificial Sequence
  Synthetic
auauaagaaaucaagua

SEQ ID NO: 741624 - RNA, 17 nt, Artificial Sequence
  Synthetic
agacuucauaucaagua

SEQ ID NO: 741625 - RNA, 17 nt, Artificial Sequence
  Synthetic
uacuaaauucucaagua

SEQ ID NO: 741626 - RNA, 17 nt, Artificial Sequence
  Synthetic
cauucaaaaaagaagua

SEQ ID NO: 741627 - RNA, 17 nt, Artificial Sequence
  Synthetic
uacacuccaaagaagua

SEQ ID NO: 741628 - RNA, 17 nt, Artificial Sequence
  Synthetic
aacgugagaaagaagua

SEQ ID NO: 741629 - RNA, 17 nt, Artificial Sequence
  Synthetic
auacauaacaagaagua

SEQ ID NO: 741630 - RNA, 17 nt, Artificial Sequence
  Synthetic
aggaagcagaagaagua

SEQ ID NO: 741631 - RNA, 17 nt, Artificial Sequence
  Synthetic
aagaggggacagaagua

SEQ ID NO: 741632 - RNA, 17 nt, Artificial Sequence
  Synthetic
aauauagcugagaagua

SEQ ID NO: 741633 - RNA, 17 nt, Artificial Sequence
  Synthetic
uggugaguugagaagua

SEQ ID NO: 741634 - RNA, 17 nt, Artificial Sequence
  Synthetic
uuugucuaauagaagua

SEQ ID NO: 741635 - RNA, 17 nt, Artificial Sequence
  Synthetic
aaaccuucaccgaagua

SEQ ID NO: 741636 - RNA, 17 nt, Artificial Sequence
  Synthetic
uuggggagaaggaagua

SEQ ID NO: 741637 - RNA, 17 nt, Artificial Sequence
  Synthetic
agugucaggaggaagua

SEQ ID NO: 741638 - RNA, 17 nt, Artificial Sequence
  Synthetic
aaggaagggaggaagua

SEQ ID NO: 741639 - RNA, 17 nt, Artificial Sequence
  Synthetic
uuaugcugagggaagua

SEQ ID NO: 741640 - RNA, 17 nt, Artificial Sequence
  Synthetic
aaagaaugggggaagua

SEQ ID NO: 741641 - RNA, 17 nt, Artificial Sequence
  Synthetic
agacaucacuggaagua

SEQ ID NO: 741642 - RNA, 17 nt, Artificial Sequence
  Synthetic
auaggaaaaaugaagua

SEQ ID NO: 741643 - RNA, 17 nt, Artificial Sequence
  Synthetic
aauacuauacugaagua

SEQ ID NO: 741644 - RNA, 17 nt, Artificial Sequence
  Synthetic
cuucaaauucugaagua

SEQ ID NO: 741645 - RNA, 17 nt, Artificial Sequence
  Synthetic
agucuugccuugaagua

SEQ ID NO: 741646 - RNA, 17 nt, Artificial Sequence
  Synthetic
auucaaaauuugaagua

SEQ ID NO: 741647 - RNA, 17 nt, Artificial Sequence
  Synthetic
agaaaacuuuugaagua

SEQ ID NO: 741648 - RNA, 17 nt, Artificial Sequence
  Synthetic
acaagaaaaaauaagua

SEQ ID NO: 741649 - RNA, 17 nt, Artificial Sequence
  Synthetic
uacugcaaaaauaagua

SEQ ID NO: 741650 - RNA, 17 nt, Artificial Sequence
  Synthetic
agauaaaacaauaagua

SEQ ID NO: 741651 - RNA, 17 nt, Artificial Sequence
  Synthetic
uugauguagaauaagua

SEQ ID NO: 741652 - RNA, 17 nt, Artificial Sequence
  Synthetic
cucuuccauaauaagua

SEQ ID NO: 741653 - RNA, 17 nt, Artificial Sequence
  Synthetic
uuguaugucuauaagua

SEQ ID NO: 741654 - RNA, 17 nt, Artificial Sequence
  Synthetic
uauugccuguauaagua

SEQ ID NO: 741655 - RNA, 17 nt, Artificial Sequence
  Synthetic
uccauacuuuauaagua

SEQ ID NO: 741656 - RNA, 17 nt, Artificial Sequence
  Synthetic
auuuuagucacuaagua

SEQ ID NO: 741657 - RNA, 17 nt, Artificial Sequence
  Synthetic
auaugcuaggcuaagua

SEQ ID NO: 741658 - RNA, 17 nt, Artificial Sequence
  Synthetic
agaaggauaaguaagua

SEQ ID NO: 741659 - RNA, 17 nt, Artificial Sequence
  Synthetic
aagguauuguguaagua

SEQ ID NO: 741660 - RNA, 17 nt, Artificial Sequence
  Synthetic
uauaauuuuauuaagua

SEQ ID NO: 741661 - RNA, 17 nt, Artificial Sequence
  Synthetic
caaauauuacuuaagua

SEQ ID NO: 741662 - RNA, 17 nt, Artificial Sequence
  Synthetic
augaagcauuuuaagua

SEQ ID NO: 741663 - RNA, 17 nt, Artificial Sequence
  Synthetic
caguaaccaaaacagua

SEQ ID NO: 741664 - RNA, 17 nt, Artificial Sequence
  Synthetic
uauuguggaaaacagua

SEQ ID NO: 741665 - RNA, 17 nt, Artificial Sequence
  Synthetic
uuccaaaauaaacagua

SEQ ID NO: 741666 - RNA, 17 nt, Artificial Sequence
  Synthetic
uagagucaacaacagua

SEQ ID NO: 741667 - RNA, 17 nt, Artificial Sequence
  Synthetic
uguugacuacaacagua

SEQ ID NO: 741668 - RNA, 17 nt, Artificial Sequence
  Synthetic
uuaucaggagaacagua

SEQ ID NO: 741669 - RNA, 17 nt, Artificial Sequence
  Synthetic
cauuauggagaacagua

SEQ ID NO: 741670 - RNA, 17 nt, Artificial Sequence
  Synthetic
cauccaggggaacagua

SEQ ID NO: 741671 - RNA, 17 nt, Artificial Sequence
  Synthetic
cauaacacaucacagua

SEQ ID NO: 741672 - RNA, 17 nt, Artificial Sequence
  Synthetic
uauuccagaagacagua

SEQ ID NO: 741673 - RNA, 17 nt, Artificial Sequence
  Synthetic
ucuguauucagacagua

SEQ ID NO: 741674 - RNA, 17 nt, Artificial Sequence
  Synthetic
caugggaggggacagua

SEQ ID NO: 741675 - RNA, 17 nt, Artificial Sequence
  Synthetic
aauuaauuuggacagua

SEQ ID NO: 741676 - RNA, 17 nt, Artificial Sequence
  Synthetic
aauuacuuuggacagua

SEQ ID NO: 741677 - RNA, 17 nt, Artificial Sequence
  Synthetic
cucugcauucuacagua

SEQ ID NO: 741678 - RNA, 17 nt, Artificial Sequence
  Synthetic
ccucugcuauuacagua

SEQ ID NO: 741679 - RNA, 17 nt, Artificial Sequence
  Synthetic
auauagucucaccagua

SEQ ID NO: 741680 - RNA, 17 nt, Artificial Sequence
  Synthetic
cauacucuucaccagua

SEQ ID NO: 741681 - RNA, 17 nt, Artificial Sequence
  Synthetic
uuucucacugcccagua

SEQ ID NO: 741682 - RNA, 17 nt, Artificial Sequence
  Synthetic
ccacauugcugccagua

SEQ ID NO: 741683 - RNA, 17 nt, Artificial Sequence
  Synthetic
uggagaauuauccagua

SEQ ID NO: 741684 - RNA, 17 nt, Artificial Sequence
  Synthetic
cccucaagguuccagua

SEQ ID NO: 741685 - RNA, 17 nt, Artificial Sequence
  Synthetic
aucuguauuuuccagua

SEQ ID NO: 741686 - RNA, 17 nt, Artificial Sequence
  Synthetic
uuuccaugaaggcagua

SEQ ID NO: 741687 - RNA, 17 nt, Artificial Sequence
  Synthetic
caggaagccaggcagua

SEQ ID NO: 741688 - RNA, 17 nt, Artificial Sequence
  Synthetic
agagaauagaggcagua

SEQ ID NO: 741689 - RNA, 17 nt, Artificial Sequence
  Synthetic
aguaaauggaggcagua

SEQ ID NO: 741690 - RNA, 17 nt, Artificial Sequence
  Synthetic
aaucaccuugggcagua

SEQ ID NO: 741691 - RNA, 17 nt, Artificial Sequence
  Synthetic
aauuaccuugggcagua

SEQ ID NO: 741692 - RNA, 17 nt, Artificial Sequence
  Synthetic
aauuuccuugggcagua

SEQ ID NO: 741693 - RNA, 17 nt, Artificial Sequence
  Synthetic
ugugcucccuggcagua

SEQ ID NO: 741694 - RNA, 17 nt, Artificial Sequence
  Synthetic
cuaaguggaaugcagua

SEQ ID NO: 741695 - RNA, 17 nt, Artificial Sequence
  Synthetic
cauuuuuacaugcagua

SEQ ID NO: 741696 - RNA, 17 nt, Artificial Sequence
  Synthetic
caguuaaauaugcagua

SEQ ID NO: 741697 - RNA, 17 nt, Artificial Sequence
  Synthetic
uaggacauagugcagua

SEQ ID NO: 741698 - RNA, 17 nt, Artificial Sequence
  Synthetic
cucucagguuugcagua

SEQ ID NO: 741699 - RNA, 17 nt, Artificial Sequence
  Synthetic
accaacuauaaucagua

SEQ ID NO: 741700 - RNA, 17 nt, Artificial Sequence
  Synthetic
aucuucauugaucagua

SEQ ID NO: 741701 - RNA, 17 nt, Artificial Sequence
  Synthetic
uuuuaaaaauaucagua

SEQ ID NO: 741702 - RNA, 17 nt, Artificial Sequence
  Synthetic
aacacgauguaucagua

SEQ ID NO: 741703 - RNA, 17 nt, Artificial Sequence
  Synthetic
ucuuuauguuaucagua

SEQ ID NO: 741704 - RNA, 17 nt, Artificial Sequence
  Synthetic
aaauaguguuaucagua

SEQ ID NO: 741705 - RNA, 17 nt, Artificial Sequence
  Synthetic
cguaauaggccucagua

SEQ ID NO: 741706 - RNA, 17 nt, Artificial Sequence
  Synthetic
ucuuuaaaaucucagua

SEQ ID NO: 741707 - RNA, 17 nt, Artificial Sequence
  Synthetic
ucucuuucuucucagua

SEQ ID NO: 741708 - RNA, 17 nt, Artificial Sequence
  Synthetic
aagauacaaagucagua

SEQ ID NO: 741709 - RNA, 17 nt, Artificial Sequence
  Synthetic
aagguaguuugucagua

SEQ ID NO: 741710 - RNA, 17 nt, Artificial Sequence
  Synthetic
agacaaauuauucagua

SEQ ID NO: 741711 - RNA, 17 nt, Artificial Sequence
  Synthetic
aguuucauguuucagua

SEQ ID NO: 741712 - RNA, 17 nt, Artificial Sequence
  Synthetic
aaagacuauuuucagua

SEQ ID NO: 741713 - RNA, 17 nt, Artificial Sequence
  Synthetic
auccuguauuuucagua

SEQ ID NO: 741714 - RNA, 17 nt, Artificial Sequence
  Synthetic
cacgagcauaaagagua

SEQ ID NO: 741715 - RNA, 17 nt, Artificial Sequence
  Synthetic
auaaagguacaagagua

SEQ ID NO: 741716 - RNA, 17 nt, Artificial Sequence
  Synthetic
ccacuuaugcaagagua

SEQ ID NO: 741717 - RNA, 17 nt, Artificial Sequence
  Synthetic
uguuugaaagaagagua

SEQ ID NO: 741718 - RNA, 17 nt, Artificial Sequence
  Synthetic
cuuacuggugaagagua

SEQ ID NO: 741719 - RNA, 17 nt, Artificial Sequence
  Synthetic
cugaauuaggcagagua

SEQ ID NO: 741720 - RNA, 17 nt, Artificial Sequence
  Synthetic
uuaccauacagagagua

SEQ ID NO: 741721 - RNA, 17 nt, Artificial Sequence
  Synthetic
uugaaauacugagagua

SEQ ID NO: 741722 - RNA, 17 nt, Artificial Sequence
  Synthetic
uagaggcagugagagua

SEQ ID NO: 741723 - RNA, 17 nt, Artificial Sequence
  Synthetic
uaccaagaaauagagua

SEQ ID NO: 741724 - RNA, 17 nt, Artificial Sequence
  Synthetic
uuauuucacauagagua

SEQ ID NO: 741725 - RNA, 17 nt, Artificial Sequence
  Synthetic
acucugaauauagagua

SEQ ID NO: 741726 - RNA, 17 nt, Artificial Sequence
  Synthetic
uagaaaguuauagagua

SEQ ID NO: 741727 - RNA, 17 nt, Artificial Sequence
  Synthetic
ugaagagaacuagagua

SEQ ID NO: 741728 - RNA, 17 nt, Artificial Sequence
  Synthetic
auguagcagcuagagua

SEQ ID NO: 741729 - RNA, 17 nt, Artificial Sequence
  Synthetic
aaaucugaucuagagua

SEQ ID NO: 741730 - RNA, 17 nt, Artificial Sequence
  Synthetic
agccuuuguuuagagua

SEQ ID NO: 741731 - RNA, 17 nt, Artificial Sequence
  Synthetic
cuuugggaggccgagua

SEQ ID NO: 741732 - RNA, 17 nt, Artificial Sequence
  Synthetic
accaccauacucgagua

SEQ ID NO: 741733 - RNA, 17 nt, Artificial Sequence
  Synthetic
agcugcagccucgagua

SEQ ID NO: 741734 - RNA, 17 nt, Artificial Sequence
  Synthetic
ugacagacgaaggagua

SEQ ID NO: 741735 - RNA, 17 nt, Artificial Sequence
  Synthetic
agguuucagcaggagua

SEQ ID NO: 741736 - RNA, 17 nt, Artificial Sequence
  Synthetic
uagcaguuuuaggagua

SEQ ID NO: 741737 - RNA, 17 nt, Artificial Sequence
  Synthetic
aacaauugcagggagua

SEQ ID NO: 741738 - RNA, 17 nt, Artificial Sequence
  Synthetic
uguguguggcgggagua

SEQ ID NO: 741739 - RNA, 17 nt, Artificial Sequence
  Synthetic
cuucacugcugggagua

SEQ ID NO: 741740 - RNA, 17 nt, Artificial Sequence
  Synthetic
cagaguuuuugggagua

SEQ ID NO: 741741 - RNA, 17 nt, Artificial Sequence
  Synthetic
ugcugagguuuggagua

SEQ ID NO: 741742 - RNA, 17 nt, Artificial Sequence
  Synthetic
cuuuuuuauaaugagua

SEQ ID NO: 741743 - RNA, 17 nt, Artificial Sequence
  Synthetic
aauuucaaacaugagua

SEQ ID NO: 741744 - RNA, 17 nt, Artificial Sequence
  Synthetic
ucagacccugaugagua

SEQ ID NO: 741745 - RNA, 17 nt, Artificial Sequence
  Synthetic
aaucuuacaacugagua

SEQ ID NO: 741746 - RNA, 17 nt, Artificial Sequence
  Synthetic
cauaaugccacugagua

SEQ ID NO: 741747 - RNA, 17 nt, Artificial Sequence
  Synthetic
uuguaagauacugagua

SEQ ID NO: 741748 - RNA, 17 nt, Artificial Sequence
  Synthetic
caugagauuccugagua

SEQ ID NO: 741749 - RNA, 17 nt, Artificial Sequence
  Synthetic
aucuuuaucucugagua

SEQ ID NO: 741750 - RNA, 17 nt, Artificial Sequence
  Synthetic
cucgaaauaugugagua

SEQ ID NO: 741751 - RNA, 17 nt, Artificial Sequence
  Synthetic
aagcucacaauugagua

SEQ ID NO: 741752 - RNA, 17 nt, Artificial Sequence
  Synthetic
aacagggccuuugagua

SEQ ID NO: 741753 - RNA, 17 nt, Artificial Sequence
  Synthetic
uauuccacuuuugagua

SEQ ID NO: 741754 - RNA, 17 nt, Artificial Sequence
  Synthetic
acaacagaaaaauagua

SEQ ID NO: 741755 - RNA, 17 nt, Artificial Sequence
  Synthetic
acuucaucugaauagua

SEQ ID NO: 741756 - RNA, 17 nt, Artificial Sequence
  Synthetic
acaguacaauaauagua

SEQ ID NO: 741757 - RNA, 17 nt, Artificial Sequence
  Synthetic
auuuagaggccauagua

SEQ ID NO: 741758 - RNA, 17 nt, Artificial Sequence
  Synthetic
uguacaucuccauagua

SEQ ID NO: 741759 - RNA, 17 nt, Artificial Sequence
  Synthetic
cacuucugggcauagua

SEQ ID NO: 741760 - RNA, 17 nt, Artificial Sequence
  Synthetic
uguccuguugcauagua

SEQ ID NO: 741761 - RNA, 17 nt, Artificial Sequence
  Synthetic
cccucagaaucauagua

SEQ ID NO: 741762 - RNA, 17 nt, Artificial Sequence
  Synthetic
ucaucacuuucauagua

SEQ ID NO: 741763 - RNA, 17 nt, Artificial Sequence
  Synthetic
cuuuaacguagauagua

SEQ ID NO: 741764 - RNA, 17 nt, Artificial Sequence
  Synthetic
acaaggaagggauagua

SEQ ID NO: 741765 - RNA, 17 nt, Artificial Sequence
  Synthetic
uugguguggggauagua

SEQ ID NO: 741766 - RNA, 17 nt, Artificial Sequence
  Synthetic
ucagcaaaaauauagua

SEQ ID NO: 741767 - RNA, 17 nt, Artificial Sequence
  Synthetic
uggcuaacaauauagua

SEQ ID NO: 741768 - RNA, 17 nt, Artificial Sequence
  Synthetic
ucuucaugaauauagua

SEQ ID NO: 741769 - RNA, 17 nt, Artificial Sequence
  Synthetic
uuccuuccaguauagua

SEQ ID NO: 741770 - RNA, 17 nt, Artificial Sequence
  Synthetic
uauauauauuuauagua

SEQ ID NO: 741771 - RNA, 17 nt, Artificial Sequence
  Synthetic
aacauuguuuuauagua

SEQ ID NO: 741772 - RNA, 17 nt, Artificial Sequence
  Synthetic
cuaacaccaaacuagua

SEQ ID NO: 741773 - RNA, 17 nt, Artificial Sequence
  Synthetic
cauacuggaaacuagua

SEQ ID NO: 741774 - RNA, 17 nt, Artificial Sequence
  Synthetic
aauacuaaaaccuagua

SEQ ID NO: 741775 - RNA, 17 nt, Artificial Sequence
  Synthetic
uuuguaguuuccuagua

SEQ ID NO: 741776 - RNA, 17 nt, Artificial Sequence
  Synthetic
agaugacacagcuagua

SEQ ID NO: 741777 - RNA, 17 nt, Artificial Sequence
  Synthetic
acuuccccaaucuagua

SEQ ID NO: 741778 - RNA, 17 nt, Artificial Sequence
  Synthetic
agcuccuuaaucuagua

SEQ ID NO: 741779 - RNA, 17 nt, Artificial Sequence
  Synthetic
uugacuaaacucuagua

SEQ ID NO: 741780 - RNA, 17 nt, Artificial Sequence
  Synthetic
caauuuagacucuagua

SEQ ID NO: 741781 - RNA, 17 nt, Artificial Sequence
  Synthetic
aaaagcaugaaguagua

SEQ ID NO: 741782 - RNA, 17 nt, Artificial Sequence
  Synthetic
acauguuauaaguagua

SEQ ID NO: 741783 - RNA, 17 nt, Artificial Sequence
  Synthetic
uuaaugcaggaguagua

SEQ ID NO: 741784 - RNA, 17 nt, Artificial Sequence
  Synthetic
cugguagaauaguagua

SEQ ID NO: 741785 - RNA, 17 nt, Artificial Sequence
  Synthetic
ugguaguaguaguagua

SEQ ID NO: 741786 - RNA, 17 nt, Artificial Sequence
  Synthetic
caacuagguagguagua

SEQ ID NO: 741787 - RNA, 17 nt, Artificial Sequence
  Synthetic
aagcaaauaguguagua

SEQ ID NO: 741788 - RNA, 17 nt, Artificial Sequence
  Synthetic
aauauauuauuguagua

SEQ ID NO: 741789 - RNA, 17 nt, Artificial Sequence
  Synthetic
ccaauaaaaaauuagua

SEQ ID NO: 741790 - RNA, 17 nt, Artificial Sequence
  Synthetic
uaugauaagaauuagua

SEQ ID NO: 741791 - RNA, 17 nt, Artificial Sequence
  Synthetic
cugugcucagauuagua

SEQ ID NO: 741792 - RNA, 17 nt, Artificial Sequence
  Synthetic
cagcauuuguauuagua

SEQ ID NO: 741793 - RNA, 17 nt, Artificial Sequence
  Synthetic
auauaaagcacuuagua

SEQ ID NO: 741794 - RNA, 17 nt, Artificial Sequence
  Synthetic
cugacgcagucuuagua

SEQ ID NO: 741795 - RNA, 17 nt, Artificial Sequence
  Synthetic
aagcuagaaaguuagua

SEQ ID NO: 741796 - RNA, 17 nt, Artificial Sequence
  Synthetic
uguuuuguuaguuagua

SEQ ID NO: 741797 - RNA, 17 nt, Artificial Sequence
  Synthetic
augcuguggauuuagua

SEQ ID NO: 741798 - RNA, 17 nt, Artificial Sequence
  Synthetic
ucugcaaauauuuagua

SEQ ID NO: 741799 - RNA, 17 nt, Artificial Sequence
  Synthetic
cuggagacauuuuagua

SEQ ID NO: 741800 - RNA, 17 nt, Artificial Sequence
  Synthetic
aguucuugauuuuagua

SEQ ID NO: 741801 - RNA, 17 nt, Artificial Sequence
  Synthetic
aguauacauuuuuagua

SEQ ID NO: 741802 - RNA, 17 nt, Artificial Sequence
  Synthetic
uuuuuguauuuuuagua

SEQ ID NO: 741803 - RNA, 17 nt, Artificial Sequence
  Synthetic
uuccucaaaggaacgua

SEQ ID NO: 741804 - RNA, 17 nt, Artificial Sequence
  Synthetic
caagcaccaugaacgua

SEQ ID NO: 741805 - RNA, 17 nt, Artificial Sequence
  Synthetic
uguucaugaagcacgua

SEQ ID NO: 741806 - RNA, 17 nt, Artificial Sequence
  Synthetic
aacuaaaauagcacgua

SEQ ID NO: 741807 - RNA, 17 nt, Artificial Sequence
  Synthetic
aaaaauaugaucacgua

SEQ ID NO: 741808 - RNA, 17 nt, Artificial Sequence
  Synthetic
uaccucaaguucacgua

SEQ ID NO: 741809 - RNA, 17 nt, Artificial Sequence
  Synthetic
ugggauuaacauacgua

SEQ ID NO: 741810 - RNA, 17 nt, Artificial Sequence
  Synthetic
aaaguacagcauacgua

SEQ ID NO: 741811 - RNA, 17 nt, Artificial Sequence
  Synthetic
uuucagcuuucuacgua

SEQ ID NO: 741812 - RNA, 17 nt, Artificial Sequence
  Synthetic
ucuuuacaucuuacgua

SEQ ID NO: 741813 - RNA, 17 nt, Artificial Sequence
  Synthetic
ucaacacuuuuuacgua

SEQ ID NO: 741814 - RNA, 17 nt, Artificial Sequence
  Synthetic
aagagaagaaaaccgua

SEQ ID NO: 741815 - RNA, 17 nt, Artificial Sequence
  Synthetic
cacuauggaaaaccgua

SEQ ID NO: 741816 - RNA, 17 nt, Artificial Sequence
  Synthetic
aauuacacuaucccgua

SEQ ID NO: 741817 - RNA, 17 nt, Artificial Sequence
  Synthetic
aggcuuugugggccgua

SEQ ID NO: 741818 - RNA, 17 nt, Artificial Sequence
  Synthetic
agcaaagcuaaagcgua

SEQ ID NO: 741819 - RNA, 17 nt, Artificial Sequence
  Synthetic
uauauuuuacaugcgua

SEQ ID NO: 741820 - RNA, 17 nt, Artificial Sequence
  Synthetic
ugcugccugugugcgua

SEQ ID NO: 741821 - RNA, 17 nt, Artificial Sequence
  Synthetic
aaaggacaaaaaucgua

SEQ ID NO: 741822 - RNA, 17 nt, Artificial Sequence
  Synthetic
cagaagguuacaucgua

SEQ ID NO: 741823 - RNA, 17 nt, Artificial Sequence
  Synthetic
uucaugaaaguuucgua

SEQ ID NO: 741824 - RNA, 17 nt, Artificial Sequence
  Synthetic
aaacauagaaaaaggua

SEQ ID NO: 741825 - RNA, 17 nt, Artificial Sequence
  Synthetic
uucauguacaaaaggua

SEQ ID NO: 741826 - RNA, 17 nt, Artificial Sequence
  Synthetic
ucuggaggcaaaaggua

SEQ ID NO: 741827 - RNA, 17 nt, Artificial Sequence
  Synthetic
ucagcaaauaaaaggua

SEQ ID NO: 741828 - RNA, 17 nt, Artificial Sequence
  Synthetic
aauucuucuaaaaggua

SEQ ID NO: 741829 - RNA, 17 nt, Artificial Sequence
  Synthetic
uguggccaucaaaggua

SEQ ID NO: 741830 - RNA, 17 nt, Artificial Sequence
  Synthetic
aggugaaaagaaaggua

SEQ ID NO: 741831 - RNA, 17 nt, Artificial Sequence
  Synthetic
ugucaaaaauaaaggua

SEQ ID NO: 741832 - RNA, 17 nt, Artificial Sequence
  Synthetic
uauaaaauauaaaggua

SEQ ID NO: 741833 - RNA, 17 nt, Artificial Sequence
  Synthetic
ccaccucccacaaggua

SEQ ID NO: 741834 - RNA, 17 nt, Artificial Sequence
  Synthetic
uauauuaaaccaaggua

SEQ ID NO: 741835 - RNA, 17 nt, Artificial Sequence
  Synthetic
aaaaaggggccaaggua

SEQ ID NO: 741836 - RNA, 17 nt, Artificial Sequence
  Synthetic
ucuuucaugucaaggua

SEQ ID NO: 741837 - RNA, 17 nt, Artificial Sequence
  Synthetic
aagauuggaagaaggua

SEQ ID NO: 741838 - RNA, 17 nt, Artificial Sequence
  Synthetic
cugggagguagaaggua

SEQ ID NO: 741839 - RNA, 17 nt, Artificial Sequence
  Synthetic
uagaaaucacuaaggua

SEQ ID NO: 741840 - RNA, 17 nt, Artificial Sequence
  Synthetic
aacucauucuuaaggua

SEQ ID NO: 741841 - RNA, 17 nt, Artificial Sequence
  Synthetic
uuaucagauaacaggua

SEQ ID NO: 741842 - RNA, 17 nt, Artificial Sequence
  Synthetic
uuacuaugggacaggua

SEQ ID NO: 741843 - RNA, 17 nt, Artificial Sequence
  Synthetic
caagcaccaaccaggua

SEQ ID NO: 741844 - RNA, 17 nt, Artificial Sequence
  Synthetic
ugacauucucccaggua

SEQ ID NO: 741845 - RNA, 17 nt, Artificial Sequence
  Synthetic
aagagauggagcaggua

SEQ ID NO: 741846 - RNA, 17 nt, Artificial Sequence
  Synthetic
agauagauauucaggua

SEQ ID NO: 741847 - RNA, 17 nt, Artificial Sequence
  Synthetic
ucuucugugaagaggua

SEQ ID NO: 741848 - RNA, 17 nt, Artificial Sequence
  Synthetic
ugccaggcuaagaggua

SEQ ID NO: 741849 - RNA, 17 nt, Artificial Sequence
  Synthetic
ugaaagauuaagaggua

SEQ ID NO: 741850 - RNA, 17 nt, Artificial Sequence
  Synthetic
cuuuuauuucagaggua

SEQ ID NO: 741851 - RNA, 17 nt, Artificial Sequence
  Synthetic
cugcuucaagagaggua

SEQ ID NO: 741852 - RNA, 17 nt, Artificial Sequence
  Synthetic
cuauuaucagagaggua

SEQ ID NO: 741853 - RNA, 17 nt, Artificial Sequence
  Synthetic
cacucuacauagaggua

SEQ ID NO: 741854 - RNA, 17 nt, Artificial Sequence
  Synthetic
auggaguaaaggaggua

SEQ ID NO: 741855 - RNA, 17 nt, Artificial Sequence
  Synthetic
cugaagagaaggaggua

SEQ ID NO: 741856 - RNA, 17 nt, Artificial Sequence
  Synthetic
cggggaaagcggaggua

SEQ ID NO: 741857 - RNA, 17 nt, Artificial Sequence
  Synthetic
ugggaguaggggaggua

SEQ ID NO: 741858 - RNA, 17 nt, Artificial Sequence
  Synthetic
cacauguaggggaggua

SEQ ID NO: 741859 - RNA, 17 nt, Artificial Sequence
  Synthetic
accuaguuugggaggua

SEQ ID NO: 741860 - RNA, 17 nt, Artificial Sequence
  Synthetic
cccugcaaguggaggua

SEQ ID NO: 741861 - RNA, 17 nt, Artificial Sequence
  Synthetic
aggguaguguggaggua

SEQ ID NO: 741862 - RNA, 17 nt, Artificial Sequence
  Synthetic
ccucccugacugaggua

SEQ ID NO: 741863 - RNA, 17 nt, Artificial Sequence
  Synthetic
aggucucagcugaggua

SEQ ID NO: 741864 - RNA, 17 nt, Artificial Sequence
  Synthetic
agcuugggagugaggua

SEQ ID NO: 741865 - RNA, 17 nt, Artificial Sequence
  Synthetic
aacauccuagugaggua

SEQ ID NO: 741866 - RNA, 17 nt, Artificial Sequence
  Synthetic
augcauagggugaggua

SEQ ID NO: 741867 - RNA, 17 nt, Artificial Sequence
  Synthetic
agggauugugugaggua

SEQ ID NO: 741868 - RNA, 17 nt, Artificial Sequence
  Synthetic
cuucugugcaauaggua

SEQ ID NO: 741869 - RNA, 17 nt, Artificial Sequence
  Synthetic
aguggaaaugauaggua

SEQ ID NO: 741870 - RNA, 17 nt, Artificial Sequence
  Synthetic
uucaauaaagcuaggua

SEQ ID NO: 741871 - RNA, 17 nt, Artificial Sequence
  Synthetic
agcucuacuucuaggua

SEQ ID NO: 741872 - RNA, 17 nt, Artificial Sequence
  Synthetic
aagugaauauguaggua

SEQ ID NO: 741873 - RNA, 17 nt, Artificial Sequence
  Synthetic
aaucuauuguguaggua

SEQ ID NO: 741874 - RNA, 17 nt, Artificial Sequence
  Synthetic
auguuauaacuuaggua

SEQ ID NO: 741875 - RNA, 17 nt, Artificial Sequence
  Synthetic
aauaagagacuuaggua

SEQ ID NO: 741876 - RNA, 17 nt, Artificial Sequence
  Synthetic
caaaaugaguuuaggua

SEQ ID NO: 741877 - RNA, 17 nt, Artificial Sequence
  Synthetic
cauuauggaggacggua

SEQ ID NO: 741878 - RNA, 17 nt, Artificial Sequence
  Synthetic
uuccauuuugagcggua

SEQ ID NO: 741879 - RNA, 17 nt, Artificial Sequence
  Synthetic
uacuucuuuccucggua

SEQ ID NO: 741880 - RNA, 17 nt, Artificial Sequence
  Synthetic
cuacugaaucaagggua

SEQ ID NO: 741881 - RNA, 17 nt, Artificial Sequence
  Synthetic
acaaauaaagaagggua

SEQ ID NO: 741882 - RNA, 17 nt, Artificial Sequence
  Synthetic
ugaugcugggaagggua

SEQ ID NO: 741883 - RNA, 17 nt, Artificial Sequence
  Synthetic
ccuuuggaugaagggua

SEQ ID NO: 741884 - RNA, 17 nt, Artificial Sequence
  Synthetic
uuuuaccaaucagggua

SEQ ID NO: 741885 - RNA, 17 nt, Artificial Sequence
  Synthetic
uaaaaaugaggagggua

SEQ ID NO: 741886 - RNA, 17 nt, Artificial Sequence
  Synthetic
augaccuacggagggua

SEQ ID NO: 741887 - RNA, 17 nt, Artificial Sequence
  Synthetic
uaagcuuuaugagggua

SEQ ID NO: 741888 - RNA, 17 nt, Artificial Sequence
  Synthetic
accugagagugagggua

SEQ ID NO: 741889 - RNA, 17 nt, Artificial Sequence
  Synthetic
agacuaaaacuagggua

SEQ ID NO: 741890 - RNA, 17 nt, Artificial Sequence
  Synthetic
aacaacccucuagggua

SEQ ID NO: 741891 - RNA, 17 nt, Artificial Sequence
  Synthetic
cugagugggcacgggua

SEQ ID NO: 741892 - RNA, 17 nt, Artificial Sequence
  Synthetic
ugcaggugagacgggua

SEQ ID NO: 741893 - RNA, 17 nt, Artificial Sequence
  Synthetic
uuuuuguauaaggggua

SEQ ID NO: 741894 - RNA, 17 nt, Artificial Sequence
  Synthetic
auaauugccuaggggua

SEQ ID NO: 741895 - RNA, 17 nt, Artificial Sequence
  Synthetic
uagagugucuaggggua

SEQ ID NO: 741896 - RNA, 17 nt, Artificial Sequence
  Synthetic
ugugcagauuaggggua

SEQ ID NO: 741897 - RNA, 17 nt, Artificial Sequence
  Synthetic
ugggaggcuccggggua

SEQ ID NO: 741898 - RNA, 17 nt, Artificial Sequence
  Synthetic
ugcugaugaauggggua

SEQ ID NO: 741899 - RNA, 17 nt, Artificial Sequence
  Synthetic
cccuuguguauggggua

SEQ ID NO: 741900 - RNA, 17 nt, Artificial Sequence
  Synthetic
uaacucuacuuggggua

SEQ ID NO: 741901 - RNA, 17 nt, Artificial Sequence
  Synthetic
auucuucccuuggggua

SEQ ID NO: 741902 - RNA, 17 nt, Artificial Sequence
  Synthetic
auaaugauggaugggua

SEQ ID NO: 741903 - RNA, 17 nt, Artificial Sequence
  Synthetic
agagcagaugaugggua

SEQ ID NO: 741904 - RNA, 17 nt, Artificial Sequence
  Synthetic
aagguaaaguaugggua

SEQ ID NO: 741905 - RNA, 17 nt, Artificial Sequence
  Synthetic
cauuuagugacugggua

SEQ ID NO: 741906 - RNA, 17 nt, Artificial Sequence
  Synthetic
aagucaguuacugggua

SEQ ID NO: 741907 - RNA, 17 nt, Artificial Sequence
  Synthetic
agauugguuacugggua

SEQ ID NO: 741908 - RNA, 17 nt, Artificial Sequence
  Synthetic
cagcagacagcugggua

SEQ ID NO: 741909 - RNA, 17 nt, Artificial Sequence
  Synthetic
caaaaauuagcugggua

SEQ ID NO: 741910 - RNA, 17 nt, Artificial Sequence
  Synthetic
ucucacauaucugggua

SEQ ID NO: 741911 - RNA, 17 nt, Artificial Sequence
  Synthetic
auugauaguagugggua

SEQ ID NO: 741912 - RNA, 17 nt, Artificial Sequence
  Synthetic
uuuuuggggggugggua

SEQ ID NO: 741913 - RNA, 17 nt, Artificial Sequence
  Synthetic
ugagaggugggugggua

SEQ ID NO: 741914 - RNA, 17 nt, Artificial Sequence
  Synthetic
cugauugguggugggua

SEQ ID NO: 741915 - RNA, 17 nt, Artificial Sequence
  Synthetic
acaauuaggauugggua

SEQ ID NO: 741916 - RNA, 17 nt, Artificial Sequence
  Synthetic
ugcacugggauugggua

SEQ ID NO: 741917 - RNA, 17 nt, Artificial Sequence
  Synthetic
ccaugcagucuugggua

SEQ ID NO: 741918 - RNA, 17 nt, Artificial Sequence
  Synthetic
aauuuggcgaaauggua

SEQ ID NO: 741919 - RNA, 17 nt, Artificial Sequence
  Synthetic
uuuugagauaaauggua

SEQ ID NO: 741920 - RNA, 17 nt, Artificial Sequence
  Synthetic
cuacuucuuaaauggua

SEQ ID NO: 741921 - RNA, 17 nt, Artificial Sequence
  Synthetic
acaucaugguaauggua

SEQ ID NO: 741922 - RNA, 17 nt, Artificial Sequence
  Synthetic
auuuaucaaacauggua

SEQ ID NO: 741923 - RNA, 17 nt, Artificial Sequence
  Synthetic
aauccauuaccauggua

SEQ ID NO: 741924 - RNA, 17 nt, Artificial Sequence
  Synthetic
ucucaagagccauggua

SEQ ID NO: 741925 - RNA, 17 nt, Artificial Sequence
  Synthetic
ucaagcuauucauggua

SEQ ID NO: 741926 - RNA, 17 nt, Artificial Sequence
  Synthetic
ucaaccuauagauggua

SEQ ID NO: 741927 - RNA, 17 nt, Artificial Sequence
  Synthetic
aagagcauuauauggua

SEQ ID NO: 741928 - RNA, 17 nt, Artificial Sequence
  Synthetic
ccugagguauuauggua

SEQ ID NO: 741929 - RNA, 17 nt, Artificial Sequence
  Synthetic
uucaagaaacacuggua

SEQ ID NO: 741930 - RNA, 17 nt, Artificial Sequence
  Synthetic
agcuucuucaccuggua

SEQ ID NO: 741931 - RNA, 17 nt, Artificial Sequence
  Synthetic
uaauuuagagccuggua

SEQ ID NO: 741932 - RNA, 17 nt, Artificial Sequence
  Synthetic
aaacugccuuccuggua

SEQ ID NO: 741933 - RNA, 17 nt, Artificial Sequence
  Synthetic
aauuagauucucuggua

SEQ ID NO: 741934 - RNA, 17 nt, Artificial Sequence
  Synthetic
ucugcacuaaaguggua

SEQ ID NO: 741935 - RNA, 17 nt, Artificial Sequence
  Synthetic
ucaguaggacaguggua

SEQ ID NO: 741936 - RNA, 17 nt, Artificial Sequence
  Synthetic
ugaggguuucaguggua

SEQ ID NO: 741937 - RNA, 17 nt, Artificial Sequence
  Synthetic
ugggaaggguaguggua

SEQ ID NO: 741938 - RNA, 17 nt, Artificial Sequence
  Synthetic
uaaguugggauguggua

SEQ ID NO: 741939 - RNA, 17 nt, Artificial Sequence
  Synthetic
uauucacaccuguggua

SEQ ID NO: 741940 - RNA, 17 nt, Artificial Sequence
  Synthetic
aaaucauggcuguggua

SEQ ID NO: 741941 - RNA, 17 nt, Artificial Sequence
  Synthetic
cuuguuaaaguguggua

SEQ ID NO: 741942 - RNA, 17 nt, Artificial Sequence
  Synthetic
aauuagcuuuuguggua

SEQ ID NO: 741943 - RNA, 17 nt, Artificial Sequence
  Synthetic
uaaacugaaaauuggua

SEQ ID NO: 741944 - RNA, 17 nt, Artificial Sequence
  Synthetic
accuuaagucauuggua

SEQ ID NO: 741945 - RNA, 17 nt, Artificial Sequence
  Synthetic
cauuuauuugcuuggua

SEQ ID NO: 741946 - RNA, 17 nt, Artificial Sequence
  Synthetic
caagucauuucuuggua

SEQ ID NO: 741947 - RNA, 17 nt, Artificial Sequence
  Synthetic
aucuaacuauguuggua

SEQ ID NO: 741948 - RNA, 17 nt, Artificial Sequence
  Synthetic
uuauuccauuguuggua

SEQ ID NO: 741949 - RNA, 17 nt, Artificial Sequence
  Synthetic
uauuuuacuuguuggua

SEQ ID NO: 741950 - RNA, 17 nt, Artificial Sequence
  Synthetic
cuuuaggaaauuuggua

SEQ ID NO: 741951 - RNA, 17 nt, Artificial Sequence
  Synthetic
uuacuucucauuuggua

SEQ ID NO: 741952 - RNA, 17 nt, Artificial Sequence
  Synthetic
uggaaauguauuuggua

SEQ ID NO: 741953 - RNA, 17 nt, Artificial Sequence
  Synthetic
augaaggaaguuuggua

SEQ ID NO: 741954 - RNA, 17 nt, Artificial Sequence
  Synthetic
uuuguaugaguuuggua

SEQ ID NO: 741955 - RNA, 17 nt, Artificial Sequence
  Synthetic
aaacagaguuuuuggua

SEQ ID NO: 741956 - RNA, 17 nt, Artificial Sequence
  Synthetic
agauaacuaaaaaugua

SEQ ID NO: 741957 - RNA, 17 nt, Artificial Sequence
  Synthetic
uaguuaaaacaaaugua

SEQ ID NO: 741958 - RNA, 17 nt, Artificial Sequence
  Synthetic
auaugcaaagaaaugua

SEQ ID NO: 741959 - RNA, 17 nt, Artificial Sequence
  Synthetic
uauacaucagaaaugua

SEQ ID NO: 741960 - RNA, 17 nt, Artificial Sequence
  Synthetic
uauagagaggaaaugua

SEQ ID NO: 741961 - RNA, 17 nt, Artificial Sequence
  Synthetic
acgaauucugaaaugua

SEQ ID NO: 741962 - RNA, 17 nt, Artificial Sequence
  Synthetic
cacugcagauaaaugua

SEQ ID NO: 741963 - RNA, 17 nt, Artificial Sequence
  Synthetic
uugaagaucuaaaugua

SEQ ID NO: 741964 - RNA, 17 nt, Artificial Sequence
  Synthetic
uaggagcauuaaaugua

SEQ ID NO: 741965 - RNA, 17 nt, Artificial Sequence
  Synthetic
aaauaucauuaaaugua

SEQ ID NO: 741966 - RNA, 17 nt, Artificial Sequence
  Synthetic
agccauuccacaaugua

SEQ ID NO: 741967 - RNA, 17 nt, Artificial Sequence
  Synthetic
ugcugaaagacaaugua

SEQ ID NO: 741968 - RNA, 17 nt, Artificial Sequence
  Synthetic
cuaauucacccaaugua

SEQ ID NO: 741969 - RNA, 17 nt, Artificial Sequence
  Synthetic
ugucaguaagcaaugua

SEQ ID NO: 741970 - RNA, 17 nt, Artificial Sequence
  Synthetic
uuuaucacaggaaugua

SEQ ID NO: 741971 - RNA, 17 nt, Artificial Sequence
  Synthetic
uuauuuguaugaaugua

SEQ ID NO: 741972 - RNA, 17 nt, Artificial Sequence
  Synthetic
auguauuguugaaugua

SEQ ID NO: 741973 - RNA, 17 nt, Artificial Sequence
  Synthetic
aagagacaaauaaugua

SEQ ID NO: 741974 - RNA, 17 nt, Artificial Sequence
  Synthetic
auguucaagauaaugua

SEQ ID NO: 741975 - RNA, 17 nt, Artificial Sequence
  Synthetic
uuucaaagauuaaugua

SEQ ID NO: 741976 - RNA, 17 nt, Artificial Sequence
  Synthetic
ucucaaacuuuaaugua

SEQ ID NO: 741977 - RNA, 17 nt, Artificial Sequence
  Synthetic
auuuccuuuuuaaugua

SEQ ID NO: 741978 - RNA, 17 nt, Artificial Sequence
  Synthetic
cuuucaucacacaugua

SEQ ID NO: 741979 - RNA, 17 nt, Artificial Sequence
  Synthetic
cuuaaaugguacaugua

SEQ ID NO: 741980 - RNA, 17 nt, Artificial Sequence
  Synthetic
ugcccucccaccaugua

SEQ ID NO: 741981 - RNA, 17 nt, Artificial Sequence
  Synthetic
cucuuuucuaccaugua

SEQ ID NO: 741982 - RNA, 17 nt, Artificial Sequence
  Synthetic
aagccuuuugccaugua

SEQ ID NO: 741983 - RNA, 17 nt, Artificial Sequence
  Synthetic
ccauggcugagcaugua

SEQ ID NO: 741984 - RNA, 17 nt, Artificial Sequence
  Synthetic
agacuaucaggcaugua

SEQ ID NO: 741985 - RNA, 17 nt, Artificial Sequence
  Synthetic
auauuuuggggcaugua

SEQ ID NO: 741986 - RNA, 17 nt, Artificial Sequence
  Synthetic
ucuaaauaaaucaugua

SEQ ID NO: 741987 - RNA, 17 nt, Artificial Sequence
  Synthetic
uuauauuuuaucaugua

SEQ ID NO: 741988 - RNA, 17 nt, Artificial Sequence
  Synthetic
cuuauaugaaagaugua

SEQ ID NO: 741989 - RNA, 17 nt, Artificial Sequence
  Synthetic
accuagaugaagaugua

SEQ ID NO: 741990 - RNA, 17 nt, Artificial Sequence
  Synthetic
cagccagcccagaugua

SEQ ID NO: 741991 - RNA, 17 nt, Artificial Sequence
  Synthetic
uugguuuuaaggaugua

SEQ ID NO: 741992 - RNA, 17 nt, Artificial Sequence
  Synthetic
agaaacaucaggaugua

SEQ ID NO: 741993 - RNA, 17 nt, Artificial Sequence
  Synthetic
agaauucagaggaugua

SEQ ID NO: 741994 - RNA, 17 nt, Artificial Sequence
  Synthetic
agauuucagaggaugua

SEQ ID NO: 741995 - RNA, 17 nt, Artificial Sequence
  Synthetic
ucccucuaagggaugua

SEQ ID NO: 741996 - RNA, 17 nt, Artificial Sequence
  Synthetic
agcagaagauggaugua

SEQ ID NO: 741997 - RNA, 17 nt, Artificial Sequence
  Synthetic
agccauguaaugaugua

SEQ ID NO: 741998 - RNA, 17 nt, Artificial Sequence
  Synthetic
caccauaaaaauaugua

SEQ ID NO: 741999 - RNA, 17 nt, Artificial Sequence
  Synthetic
aaaugugaaaauaugua

SEQ ID NO: 742000 - RNA, 17 nt, Artificial Sequence
  Synthetic
augaaaugauauaugua

SEQ ID NO: 742001 - RNA, 17 nt, Artificial Sequence
  Synthetic
uuuucuauauauaugua

SEQ ID NO: 742002 - RNA, 17 nt, Artificial Sequence
  Synthetic
aucaccuccuauaugua

SEQ ID NO: 742003 - RNA, 17 nt, Artificial Sequence
  Synthetic
uuuaguuuuucuaugua

SEQ ID NO: 742004 - RNA, 17 nt, Artificial Sequence
  Synthetic
aaaauaauaaguaugua

SEQ ID NO: 742005 - RNA, 17 nt, Artificial Sequence
  Synthetic
uuccuugugcguaugua

SEQ ID NO: 742006 - RNA, 17 nt, Artificial Sequence
  Synthetic
cagaagaguuguaugua

SEQ ID NO: 742007 - RNA, 17 nt, Artificial Sequence
  Synthetic
uuuucuuaaauuaugua

SEQ ID NO: 742008 - RNA, 17 nt, Artificial Sequence
  Synthetic
acuucaaugauuaugua

SEQ ID NO: 742009 - RNA, 17 nt, Artificial Sequence
  Synthetic
uuucagaguauuaugua

SEQ ID NO: 742010 - RNA, 17 nt, Artificial Sequence
  Synthetic
uguugauuucuuaugua

SEQ ID NO: 742011 - RNA, 17 nt, Artificial Sequence
  Synthetic
uauauaugaguuaugua

SEQ ID NO: 742012 - RNA, 17 nt, Artificial Sequence
  Synthetic
uuuaucuauguuaugua

SEQ ID NO: 742013 - RNA, 17 nt, Artificial Sequence
  Synthetic
cuuaaaauauuuaugua

SEQ ID NO: 742014 - RNA, 17 nt, Artificial Sequence
  Synthetic
auacagacuuuuaugua

SEQ ID NO: 742015 - RNA, 17 nt, Artificial Sequence
  Synthetic
cuucagacaaaacugua

SEQ ID NO: 742016 - RNA, 17 nt, Artificial Sequence
  Synthetic
acaugguucaaacugua

SEQ ID NO: 742017 - RNA, 17 nt, Artificial Sequence
  Synthetic
augcuaaagaaacugua

SEQ ID NO: 742018 - RNA, 17 nt, Artificial Sequence
  Synthetic
ucuguuaugaaacugua

SEQ ID NO: 742019 - RNA, 17 nt, Artificial Sequence
  Synthetic
aguguuuguaaacugua

SEQ ID NO: 742020 - RNA, 17 nt, Artificial Sequence
  Synthetic
uugagaguagaacugua

SEQ ID NO: 742021 - RNA, 17 nt, Artificial Sequence
  Synthetic
uccuaggaaacacugua

SEQ ID NO: 742022 - RNA, 17 nt, Artificial Sequence
  Synthetic
auagaugcuacacugua

SEQ ID NO: 742023 - RNA, 17 nt, Artificial Sequence
  Synthetic
agaugugugccacugua

SEQ ID NO: 742024 - RNA, 17 nt, Artificial Sequence
  Synthetic
uuggaaagaagacugua

SEQ ID NO: 742025 - RNA, 17 nt, Artificial Sequence
  Synthetic
ccuucaaagagacugua

SEQ ID NO: 742026 - RNA, 17 nt, Artificial Sequence
  Synthetic
uuguaguugugacugua

SEQ ID NO: 742027 - RNA, 17 nt, Artificial Sequence
  Synthetic
auaaugaaacuacugua

SEQ ID NO: 742028 - RNA, 17 nt, Artificial Sequence
  Synthetic
caacaauauuuacugua

SEQ ID NO: 742029 - RNA, 17 nt, Artificial Sequence
  Synthetic
uccugcugaaaccugua

SEQ ID NO: 742030 - RNA, 17 nt, Artificial Sequence
  Synthetic
acaugucuaaaccugua

SEQ ID NO: 742031 - RNA, 17 nt, Artificial Sequence
  Synthetic
ccauuauucacccugua

SEQ ID NO: 742032 - RNA, 17 nt, Artificial Sequence
  Synthetic
cacucuuuuucccugua

SEQ ID NO: 742033 - RNA, 17 nt, Artificial Sequence
  Synthetic
aagcaguuuugccugua

SEQ ID NO: 742034 - RNA, 17 nt, Artificial Sequence
  Synthetic
aucagcaauguccugua

SEQ ID NO: 742035 - RNA, 17 nt, Artificial Sequence
  Synthetic
cuguuuugguuccugua

SEQ ID NO: 742036 - RNA, 17 nt, Artificial Sequence
  Synthetic
ccaaccuaacagcugua

SEQ ID NO: 742037 - RNA, 17 nt, Artificial Sequence
  Synthetic
auugauuuagagcugua

SEQ ID NO: 742038 - RNA, 17 nt, Artificial Sequence
  Synthetic
ccacucuaguagcugua

SEQ ID NO: 742039 - RNA, 17 nt, Artificial Sequence
  Synthetic
caagaaacuuagcugua

SEQ ID NO: 742040 - RNA, 17 nt, Artificial Sequence
  Synthetic
aauaaauaaucgcugua

SEQ ID NO: 742041 - RNA, 17 nt, Artificial Sequence
  Synthetic
uaaccccaaaggcugua

SEQ ID NO: 742042 - RNA, 17 nt, Artificial Sequence
  Synthetic
accuaucaucggcugua

SEQ ID NO: 742043 - RNA, 17 nt, Artificial Sequence
  Synthetic
uuaggaguauggcugua

SEQ ID NO: 742044 - RNA, 17 nt, Artificial Sequence
  Synthetic
agaggauucaugcugua

SEQ ID NO: 742045 - RNA, 17 nt, Artificial Sequence
  Synthetic
caccucagucugcugua

SEQ ID NO: 742046 - RNA, 17 nt, Artificial Sequence
  Synthetic
aauacuguucugcugua

SEQ ID NO: 742047 - RNA, 17 nt, Artificial Sequence
  Synthetic
caacccuguuugcugua

SEQ ID NO: 742048 - RNA, 17 nt, Artificial Sequence
  Synthetic
aguagcccaaaucugua

SEQ ID NO: 742049 - RNA, 17 nt, Artificial Sequence
  Synthetic
caaugcgaauaucugua

SEQ ID NO: 742050 - RNA, 17 nt, Artificial Sequence
  Synthetic
uccuggccauaucugua

SEQ ID NO: 742051 - RNA, 17 nt, Artificial Sequence
  Synthetic
uuuaccccuuaucugua

SEQ ID NO: 742052 - RNA, 17 nt, Artificial Sequence
  Synthetic
uuaucauggacucugua

SEQ ID NO: 742053 - RNA, 17 nt, Artificial Sequence
  Synthetic
cuuuuucagucucugua

SEQ ID NO: 742054 - RNA, 17 nt, Artificial Sequence
  Synthetic
cuuucugauucucugua

SEQ ID NO: 742055 - RNA, 17 nt, Artificial Sequence
  Synthetic
uuuuaucugauucugua

SEQ ID NO: 742056 - RNA, 17 nt, Artificial Sequence
  Synthetic
agcaaacuuauucugua

SEQ ID NO: 742057 - RNA, 17 nt, Artificial Sequence
  Synthetic
ucuuucuaauuucugua

SEQ ID NO: 742058 - RNA, 17 nt, Artificial Sequence
  Synthetic
aaaucaacauuucugua

SEQ ID NO: 742059 - RNA, 17 nt, Artificial Sequence
  Synthetic
agcaaacaguuucugua

SEQ ID NO: 742060 - RNA, 17 nt, Artificial Sequence
  Synthetic
cucugccuuuuucugua

SEQ ID NO: 742061 - RNA, 17 nt, Artificial Sequence
  Synthetic
uuugguagaaaagugua

SEQ ID NO: 742062 - RNA, 17 nt, Artificial Sequence
  Synthetic
acugaauggaaagugua

SEQ ID NO: 742063 - RNA, 17 nt, Artificial Sequence
  Synthetic
uacacaucacaagugua

SEQ ID NO: 742064 - RNA, 17 nt, Artificial Sequence
  Synthetic
ucuacaugagaagugua

SEQ ID NO: 742065 - RNA, 17 nt, Artificial Sequence
  Synthetic
aucaugucuccagugua

SEQ ID NO: 742066 - RNA, 17 nt, Artificial Sequence
  Synthetic
acuuaaaacgcagugua

SEQ ID NO: 742067 - RNA, 17 nt, Artificial Sequence
  Synthetic
acaauuacaucagugua

SEQ ID NO: 742068 - RNA, 17 nt, Artificial Sequence
  Synthetic
acaggcacuucagugua

SEQ ID NO: 742069 - RNA, 17 nt, Artificial Sequence
  Synthetic
auguaauuuucagugua

SEQ ID NO: 742070 - RNA, 17 nt, Artificial Sequence
  Synthetic
acucaguaaagagugua

SEQ ID NO: 742071 - RNA, 17 nt, Artificial Sequence
  Synthetic
agaguguaaagagugua

SEQ ID NO: 742072 - RNA, 17 nt, Artificial Sequence
  Synthetic
aacaaugaaugagugua

SEQ ID NO: 742073 - RNA, 17 nt, Artificial Sequence
  Synthetic
cuugauccaugagugua

SEQ ID NO: 742074 - RNA, 17 nt, Artificial Sequence
  Synthetic
agcugaaagguagugua

SEQ ID NO: 742075 - RNA, 17 nt, Artificial Sequence
  Synthetic
cacguaagcaaggugua

SEQ ID NO: 742076 - RNA, 17 nt, Artificial Sequence
  Synthetic
uuuuuguauaaggugua

SEQ ID NO: 742077 - RNA, 17 nt, Artificial Sequence
  Synthetic
ccauucuaacaggugua

SEQ ID NO: 742078 - RNA, 17 nt, Artificial Sequence
  Synthetic
accccuuaccgggugua

SEQ ID NO: 742079 - RNA, 17 nt, Artificial Sequence
  Synthetic
ucccauuucugggugua

SEQ ID NO: 742080 - RNA, 17 nt, Artificial Sequence
  Synthetic
uugauucagugggugua

SEQ ID NO: 742081 - RNA, 17 nt, Artificial Sequence
  Synthetic
auuucagagugggugua

SEQ ID NO: 742082 - RNA, 17 nt, Artificial Sequence
  Synthetic
uuuuuguauauggugua

SEQ ID NO: 742083 - RNA, 17 nt, Artificial Sequence
  Synthetic
uggggggcuguggugua

SEQ ID NO: 742084 - RNA, 17 nt, Artificial Sequence
  Synthetic
caaagucacaaugugua

SEQ ID NO: 742085 - RNA, 17 nt, Artificial Sequence
  Synthetic
caugagauacaugugua

SEQ ID NO: 742086 - RNA, 17 nt, Artificial Sequence
  Synthetic
aguucuucccaugugua

SEQ ID NO: 742087 - RNA, 17 nt, Artificial Sequence
  Synthetic
uuuuuuuugcaugugua

SEQ ID NO: 742088 - RNA, 17 nt, Artificial Sequence
  Synthetic
ugguuaguuacugugua

SEQ ID NO: 742089 - RNA, 17 nt, Artificial Sequence
  Synthetic
aauaauacagcugugua

SEQ ID NO: 742090 - RNA, 17 nt, Artificial Sequence
  Synthetic
cuaguaaagugugugua

SEQ ID NO: 742091 - RNA, 17 nt, Artificial Sequence
  Synthetic
aacaaagugugugugua

SEQ ID NO: 742092 - RNA, 17 nt, Artificial Sequence
  Synthetic
acauuucucauugugua

SEQ ID NO: 742093 - RNA, 17 nt, Artificial Sequence
  Synthetic
aagaaagcccuugugua

SEQ ID NO: 742094 - RNA, 17 nt, Artificial Sequence
  Synthetic
uaauuucagguugugua

SEQ ID NO: 742095 - RNA, 17 nt, Artificial Sequence
  Synthetic
ccacagugcuuugugua

SEQ ID NO: 742096 - RNA, 17 nt, Artificial Sequence
  Synthetic
ugaaaucauuuugugua

SEQ ID NO: 742097 - RNA, 17 nt, Artificial Sequence
  Synthetic
uccuguuguuuugugua

SEQ ID NO: 742098 - RNA, 17 nt, Artificial Sequence
  Synthetic
aagcuaauuuuugugua

SEQ ID NO: 742099 - RNA, 17 nt, Artificial Sequence
  Synthetic
aguuauagaaaauugua

SEQ ID NO: 742100 - RNA, 17 nt, Artificial Sequence
  Synthetic
cugcuuugcaaauugua

SEQ ID NO: 742101 - RNA, 17 nt, Artificial Sequence
  Synthetic
cuggagaugcaauugua

SEQ ID NO: 742102 - RNA, 17 nt, Artificial Sequence
  Synthetic
cugcuaaaucaauugua

SEQ ID NO: 742103 - RNA, 17 nt, Artificial Sequence
  Synthetic
cauuucagggaauugua

SEQ ID NO: 742104 - RNA, 17 nt, Artificial Sequence
  Synthetic
augaaaauggaauugua

SEQ ID NO: 742105 - RNA, 17 nt, Artificial Sequence
  Synthetic
uaggaguuugaauugua

SEQ ID NO: 742106 - RNA, 17 nt, Artificial Sequence
  Synthetic
acuuagaggacauugua

SEQ ID NO: 742107 - RNA, 17 nt, Artificial Sequence
  Synthetic
ccaugcuggacauugua

SEQ ID NO: 742108 - RNA, 17 nt, Artificial Sequence
  Synthetic
aagaaucuaccauugua

SEQ ID NO: 742109 - RNA, 17 nt, Artificial Sequence
  Synthetic
ccuuugaagccauugua

SEQ ID NO: 742110 - RNA, 17 nt, Artificial Sequence
  Synthetic
ugaaguuggccauugua

SEQ ID NO: 742111 - RNA, 17 nt, Artificial Sequence
  Synthetic
uauuuuauuccauugua

SEQ ID NO: 742112 - RNA, 17 nt, Artificial Sequence
  Synthetic
cuauccucugcauugua

SEQ ID NO: 742113 - RNA, 17 nt, Artificial Sequence
  Synthetic
uuaagacucucauugua

SEQ ID NO: 742114 - RNA, 17 nt, Artificial Sequence
  Synthetic
acuguccccagauugua

SEQ ID NO: 742115 - RNA, 17 nt, Artificial Sequence
  Synthetic
acacaauauggauugua

SEQ ID NO: 742116 - RNA, 17 nt, Artificial Sequence
  Synthetic
ucuaagacauuauugua

SEQ ID NO: 742117 - RNA, 17 nt, Artificial Sequence
  Synthetic
uagaagggauuauugua

SEQ ID NO: 742118 - RNA, 17 nt, Artificial Sequence
  Synthetic
cucccacuauuauugua

SEQ ID NO: 742119 - RNA, 17 nt, Artificial Sequence
  Synthetic
uaaauguguuuauugua

SEQ ID NO: 742120 - RNA, 17 nt, Artificial Sequence
  Synthetic
cagugaaauaacuugua

SEQ ID NO: 742121 - RNA, 17 nt, Artificial Sequence
  Synthetic
acuuagaguaacuugua

SEQ ID NO: 742122 - RNA, 17 nt, Artificial Sequence
  Synthetic
aaguguauguacuugua

SEQ ID NO: 742123 - RNA, 17 nt, Artificial Sequence
  Synthetic
uucacaaaaaccuugua

SEQ ID NO: 742124 - RNA, 17 nt, Artificial Sequence
  Synthetic
auacagccuuccuugua

SEQ ID NO: 742125 - RNA, 17 nt, Artificial Sequence
  Synthetic
cucucuucuagcuugua

SEQ ID NO: 742126 - RNA, 17 nt, Artificial Sequence
  Synthetic
caucucccuggcuugua

SEQ ID NO: 742127 - RNA, 17 nt, Artificial Sequence
  Synthetic
cucucuucuggcuugua

SEQ ID NO: 742128 - RNA, 17 nt, Artificial Sequence
  Synthetic
uuagcaaugaucuugua

SEQ ID NO: 742129 - RNA, 17 nt, Artificial Sequence
  Synthetic
cauuagaagcucuugua

SEQ ID NO: 742130 - RNA, 17 nt, Artificial Sequence
  Synthetic
uuguuaaaugucuugua

SEQ ID NO: 742131 - RNA, 17 nt, Artificial Sequence
  Synthetic
agacaacuauucuugua

SEQ ID NO: 742132 - RNA, 17 nt, Artificial Sequence
  Synthetic
auaauggugaaguugua

SEQ ID NO: 742133 - RNA, 17 nt, Artificial Sequence
  Synthetic
aauauaggugaguugua

SEQ ID NO: 742134 - RNA, 17 nt, Artificial Sequence
  Synthetic
uaccucuuugaguugua

SEQ ID NO: 742135 - RNA, 17 nt, Artificial Sequence
  Synthetic
acuagguuauaguugua

SEQ ID NO: 742136 - RNA, 17 nt, Artificial Sequence
  Synthetic
aguucauguccguugua

SEQ ID NO: 742137 - RNA, 17 nt, Artificial Sequence
  Synthetic
auauaagcaagguugua

SEQ ID NO: 742138 - RNA, 17 nt, Artificial Sequence
  Synthetic
uauacaucuagguugua

SEQ ID NO: 742139 - RNA, 17 nt, Artificial Sequence
  Synthetic
acucauuaucuguugua

SEQ ID NO: 742140 - RNA, 17 nt, Artificial Sequence
  Synthetic
accugguugguguugua

SEQ ID NO: 742141 - RNA, 17 nt, Artificial Sequence
  Synthetic
auaauugguuuguugua

SEQ ID NO: 742142 - RNA, 17 nt, Artificial Sequence
  Synthetic
aauuuccacaauuugua

SEQ ID NO: 742143 - RNA, 17 nt, Artificial Sequence
  Synthetic
auaaucuagaauuugua

SEQ ID NO: 742144 - RNA, 17 nt, Artificial Sequence
  Synthetic
aucuggggacauuugua

SEQ ID NO: 742145 - RNA, 17 nt, Artificial Sequence
  Synthetic
auugauaaauauuugua

SEQ ID NO: 742146 - RNA, 17 nt, Artificial Sequence
  Synthetic
uagaguuaauauuugua

SEQ ID NO: 742147 - RNA, 17 nt, Artificial Sequence
  Synthetic
aggaguauauauuugua

SEQ ID NO: 742148 - RNA, 17 nt, Artificial Sequence
  Synthetic
uuauaagaaacuuugua

SEQ ID NO: 742149 - RNA, 17 nt, Artificial Sequence
  Synthetic
aaggaaaauacuuugua

SEQ ID NO: 742150 - RNA, 17 nt, Artificial Sequence
  Synthetic
aguucacauccuuugua

SEQ ID NO: 742151 - RNA, 17 nt, Artificial Sequence
  Synthetic
aguucaaguccuuugua

SEQ ID NO: 742152 - RNA, 17 nt, Artificial Sequence
  Synthetic
aguucacguccuuugua

SEQ ID NO: 742153 - RNA, 17 nt, Artificial Sequence
  Synthetic
aguucauguccuuugua

SEQ ID NO: 742154 - RNA, 17 nt, Artificial Sequence
  Synthetic
cguucguguccuuugua

SEQ ID NO: 742155 - RNA, 17 nt, Artificial Sequence
  Synthetic
ccccuaaaggcuuugua

SEQ ID NO: 742156 - RNA, 17 nt, Artificial Sequence
  Synthetic
aguauucugucuuugua

SEQ ID NO: 742157 - RNA, 17 nt, Artificial Sequence
  Synthetic
cauaucauuucuuugua

SEQ ID NO: 742158 - RNA, 17 nt, Artificial Sequence
  Synthetic
aaguuuauuucuuugua

SEQ ID NO: 742159 - RNA, 17 nt, Artificial Sequence
  Synthetic
acuuaaaggcguuugua

SEQ ID NO: 742160 - RNA, 17 nt, Artificial Sequence
  Synthetic
aaaaaguacauuuugua

SEQ ID NO: 742161 - RNA, 17 nt, Artificial Sequence
  Synthetic
cuugggccucuuuugua

SEQ ID NO: 742162 - RNA, 17 nt, Artificial Sequence
  Synthetic
uuuugaucucuuuugua

SEQ ID NO: 742163 - RNA, 17 nt, Artificial Sequence
  Synthetic
uuguucuuucuuuugua

SEQ ID NO: 742164 - RNA, 17 nt, Artificial Sequence
  Synthetic
uguuuuuaauuuuugua

SEQ ID NO: 742165 - RNA, 17 nt, Artificial Sequence
  Synthetic
cucaguccauuuuugua

SEQ ID NO: 742166 - RNA, 17 nt, Artificial Sequence
  Synthetic
uauaaaauauuuuugua

SEQ ID NO: 742167 - RNA, 17 nt, Artificial Sequence
  Synthetic
uguuaagaguuuuugua

SEQ ID NO: 742168 - RNA, 17 nt, Artificial Sequence
  Synthetic
aguaaaaaaaaaaauua

SEQ ID NO: 742169 - RNA, 17 nt, Artificial Sequence
  Synthetic
uguuuuagaaaaaauua

SEQ ID NO: 742170 - RNA, 17 nt, Artificial Sequence
  Synthetic
uauacagacaaaaauua

SEQ ID NO: 742171 - RNA, 17 nt, Artificial Sequence
  Synthetic
ccaaagucucaaaauua

SEQ ID NO: 742172 - RNA, 17 nt, Artificial Sequence
  Synthetic
ccuuucuuucaaaauua

SEQ ID NO: 742173 - RNA, 17 nt, Artificial Sequence
  Synthetic
uccagaagagaaaauua

SEQ ID NO: 742174 - RNA, 17 nt, Artificial Sequence
  Synthetic
aagggauaggaaaauua

SEQ ID NO: 742175 - RNA, 17 nt, Artificial Sequence
  Synthetic
auuauuauggaaaauua

SEQ ID NO: 742176 - RNA, 17 nt, Artificial Sequence
  Synthetic
uuuugagaauaaaauua

SEQ ID NO: 742177 - RNA, 17 nt, Artificial Sequence
  Synthetic
aagauccuauaaaauua

SEQ ID NO: 742178 - RNA, 17 nt, Artificial Sequence
  Synthetic
auucgucucuaaaauua

SEQ ID NO: 742179 - RNA, 17 nt, Artificial Sequence
  Synthetic
uaaccacuguaaaauua

SEQ ID NO: 742180 - RNA, 17 nt, Artificial Sequence
  Synthetic
uuuuuaaauuaaaauua

SEQ ID NO: 742181 - RNA, 17 nt, Artificial Sequence
  Synthetic
auugcauguuaaaauua

SEQ ID NO: 742182 - RNA, 17 nt, Artificial Sequence
  Synthetic
auuucccuuuaaaauua

SEQ ID NO: 742183 - RNA, 17 nt, Artificial Sequence
  Synthetic
uuuccauuuuaaaauua

SEQ ID NO: 742184 - RNA, 17 nt, Artificial Sequence
  Synthetic
ucaaaguuuuaaaauua

SEQ ID NO: 742185 - RNA, 17 nt, Artificial Sequence
  Synthetic
aucaggaccucaaauua

SEQ ID NO: 742186 - RNA, 17 nt, Artificial Sequence
  Synthetic
aauguauuuucaaauua

SEQ ID NO: 742187 - RNA, 17 nt, Artificial Sequence
  Synthetic
uaguaaaagagaaauua

SEQ ID NO: 742188 - RNA, 17 nt, Artificial Sequence
  Synthetic
caauuggaaggaaauua

SEQ ID NO: 742189 - RNA, 17 nt, Artificial Sequence
  Synthetic
cacaguugaggaaauua

SEQ ID NO: 742190 - RNA, 17 nt, Artificial Sequence
  Synthetic
augucauaaugaaauua

SEQ ID NO: 742191 - RNA, 17 nt, Artificial Sequence
  Synthetic
uaacuacuaugaaauua

SEQ ID NO: 742192 - RNA, 17 nt, Artificial Sequence
  Synthetic
agcucaugcugaaauua

SEQ ID NO: 742193 - RNA, 17 nt, Artificial Sequence
  Synthetic
acacuugauugaaauua

SEQ ID NO: 742194 - RNA, 17 nt, Artificial Sequence
  Synthetic
ccagcaucuugaaauua

SEQ ID NO: 742195 - RNA, 17 nt, Artificial Sequence
  Synthetic
auauuaaaaauaaauua

SEQ ID NO: 742196 - RNA, 17 nt, Artificial Sequence
  Synthetic
aauugcugaauaaauua

SEQ ID NO: 742197 - RNA, 17 nt, Artificial Sequence
  Synthetic
aguauauugauaaauua

SEQ ID NO: 742198 - RNA, 17 nt, Artificial Sequence
  Synthetic
ugacaauguauaaauua

SEQ ID NO: 742199 - RNA, 17 nt, Artificial Sequence
  Synthetic
ugcacauuuauaaauua

SEQ ID NO: 742200 - RNA, 17 nt, Artificial Sequence
  Synthetic
aauccaaaucuaaauua

SEQ ID NO: 742201 - RNA, 17 nt, Artificial Sequence
  Synthetic
aggugcuuaguaaauua

SEQ ID NO: 742202 - RNA, 17 nt, Artificial Sequence
  Synthetic
uaucaaaaauuaaauua

SEQ ID NO: 742203 - RNA, 17 nt, Artificial Sequence
  Synthetic
ucaauauuauuaaauua

SEQ ID NO: 742204 - RNA, 17 nt, Artificial Sequence
  Synthetic
cuacauacuuuaaauua

SEQ ID NO: 742205 - RNA, 17 nt, Artificial Sequence
  Synthetic
aacauauuuuuaaauua

SEQ ID NO: 742206 - RNA, 17 nt, Artificial Sequence
  Synthetic
auaauuuugcacaauua

SEQ ID NO: 742207 - RNA, 17 nt, Artificial Sequence
  Synthetic
ucucauguggacaauua

SEQ ID NO: 742208 - RNA, 17 nt, Artificial Sequence
  Synthetic
aucagccuucccaauua

SEQ ID NO: 742209 - RNA, 17 nt, Artificial Sequence
  Synthetic
auuggcucaugcaauua

SEQ ID NO: 742210 - RNA, 17 nt, Artificial Sequence
  Synthetic
auaauacauugcaauua

SEQ ID NO: 742211 - RNA, 17 nt, Artificial Sequence
  Synthetic
ccuaccauuaucaauua

SEQ ID NO: 742212 - RNA, 17 nt, Artificial Sequence
  Synthetic
acagcaaaacucaauua

SEQ ID NO: 742213 - RNA, 17 nt, Artificial Sequence
  Synthetic
uauuucuuucucaauua

SEQ ID NO: 742214 - RNA, 17 nt, Artificial Sequence
  Synthetic
uggaggacugucaauua

SEQ ID NO: 742215 - RNA, 17 nt, Artificial Sequence
  Synthetic
acaaauuuauucaauua

SEQ ID NO: 742216 - RNA, 17 nt, Artificial Sequence
  Synthetic
ucuucucucuucaauua

SEQ ID NO: 742217 - RNA, 17 nt, Artificial Sequence
  Synthetic
uagcuaaaaaagaauua

SEQ ID NO: 742218 - RNA, 17 nt, Artificial Sequence
  Synthetic
auggucauaaagaauua

SEQ ID NO: 742219 - RNA, 17 nt, Artificial Sequence
  Synthetic
acaugauucaagaauua

SEQ ID NO: 742220 - RNA, 17 nt, Artificial Sequence
  Synthetic
auggaggcccagaauua

SEQ ID NO: 742221 - RNA, 17 nt, Artificial Sequence
  Synthetic
auaugaaaagagaauua

SEQ ID NO: 742222 - RNA, 17 nt, Artificial Sequence
  Synthetic
cuuuucuuauagaauua

SEQ ID NO: 742223 - RNA, 17 nt, Artificial Sequence
  Synthetic
auuuguuucuagaauua

SEQ ID NO: 742224 - RNA, 17 nt, Artificial Sequence
  Synthetic
aaaaaagaguagaauua

SEQ ID NO: 742225 - RNA, 17 nt, Artificial Sequence
  Synthetic
ucuucuccuuagaauua

SEQ ID NO: 742226 - RNA, 17 nt, Artificial Sequence
  Synthetic
acaacaaguaggaauua

SEQ ID NO: 742227 - RNA, 17 nt, Artificial Sequence
  Synthetic
caaguacuugggaauua

SEQ ID NO: 742228 - RNA, 17 nt, Artificial Sequence
  Synthetic
uggugaguugggaauua

SEQ ID NO: 742229 - RNA, 17 nt, Artificial Sequence
  Synthetic
aaugaaaacaugaauua

SEQ ID NO: 742230 - RNA, 17 nt, Artificial Sequence
  Synthetic
ugaggaggcaugaauua

SEQ ID NO: 742231 - RNA, 17 nt, Artificial Sequence
  Synthetic
ccugggaagaugaauua

SEQ ID NO: 742232 - RNA, 17 nt, Artificial Sequence
  Synthetic
augcaggauaugaauua

SEQ ID NO: 742233 - RNA, 17 nt, Artificial Sequence
  Synthetic
aauggaacuaugaauua

SEQ ID NO: 742234 - RNA, 17 nt, Artificial Sequence
  Synthetic
uguaugacuaugaauua

SEQ ID NO: 742235 - RNA, 17 nt, Artificial Sequence
  Synthetic
aauuacaaacugaauua

SEQ ID NO: 742236 - RNA, 17 nt, Artificial Sequence
  Synthetic
aaucucaccuugaauua

SEQ ID NO: 742237 - RNA, 17 nt, Artificial Sequence
  Synthetic
ucuaauaauuugaauua

SEQ ID NO: 742238 - RNA, 17 nt, Artificial Sequence
  Synthetic
caaucaauuuugaauua

SEQ ID NO: 742239 - RNA, 17 nt, Artificial Sequence
  Synthetic
augaucaaaaauaauua

SEQ ID NO: 742240 - RNA, 17 nt, Artificial Sequence
  Synthetic
ugcuuuugaaauaauua

SEQ ID NO: 742241 - RNA, 17 nt, Artificial Sequence
  Synthetic
ccuaauuuaaauaauua

SEQ ID NO: 742242 - RNA, 17 nt, Artificial Sequence
  Synthetic
aacuaauucaauaauua

SEQ ID NO: 742243 - RNA, 17 nt, Artificial Sequence
  Synthetic
caguacuucaauaauua

SEQ ID NO: 742244 - RNA, 17 nt, Artificial Sequence
  Synthetic
uagauuaaacauaauua

SEQ ID NO: 742245 - RNA, 17 nt, Artificial Sequence
  Synthetic
ucucauauacauaauua

SEQ ID NO: 742246 - RNA, 17 nt, Artificial Sequence
  Synthetic
auuuauguucauaauua

SEQ ID NO: 742247 - RNA, 17 nt, Artificial Sequence
  Synthetic
uuuuuacauuauaauua

SEQ ID NO: 742248 - RNA, 17 nt, Artificial Sequence
  Synthetic
uacuugcuuuauaauua

SEQ ID NO: 742249 - RNA, 17 nt, Artificial Sequence
  Synthetic
uauuaggauacuaauua

SEQ ID NO: 742250 - RNA, 17 nt, Artificial Sequence
  Synthetic
uuaguucugccuaauua

SEQ ID NO: 742251 - RNA, 17 nt, Artificial Sequence
  Synthetic
auuggaauuccuaauua

SEQ ID NO: 742252 - RNA, 17 nt, Artificial Sequence
  Synthetic
ugucaacaaucuaauua

SEQ ID NO: 742253 - RNA, 17 nt, Artificial Sequence
  Synthetic
auauguuuuucuaauua

SEQ ID NO: 742254 - RNA, 17 nt, Artificial Sequence
  Synthetic
aguauaggcaguaauua

SEQ ID NO: 742255 - RNA, 17 nt, Artificial Sequence
  Synthetic
uuugggggacguaauua

SEQ ID NO: 742256 - RNA, 17 nt, Artificial Sequence
  Synthetic
ugcauuuaagguaauua

SEQ ID NO: 742257 - RNA, 17 nt, Artificial Sequence
  Synthetic
cuuuaaagggguaauua

SEQ ID NO: 742258 - RNA, 17 nt, Artificial Sequence
  Synthetic
uuaaucucauguaauua

SEQ ID NO: 742259 - RNA, 17 nt, Artificial Sequence
  Synthetic
agauuuuauuguaauua

SEQ ID NO: 742260 - RNA, 17 nt, Artificial Sequence
  Synthetic
uaguagauuauuaauua

SEQ ID NO: 742261 - RNA, 17 nt, Artificial Sequence
  Synthetic
aggauaguuauuaauua

SEQ ID NO: 742262 - RNA, 17 nt, Artificial Sequence
  Synthetic
aauagagugcuuaauua

SEQ ID NO: 742263 - RNA, 17 nt, Artificial Sequence
  Synthetic
uuaucgagcuuuaauua

SEQ ID NO: 742264 - RNA, 17 nt, Artificial Sequence
  Synthetic
aaucagaucuuuaauua

SEQ ID NO: 742265 - RNA, 17 nt, Artificial Sequence
  Synthetic
auauaaacaaaacauua

SEQ ID NO: 742266 - RNA, 17 nt, Artificial Sequence
  Synthetic
auauaaagcaaacauua

SEQ ID NO: 742267 - RNA, 17 nt, Artificial Sequence
  Synthetic
aacuuccagaaacauua

SEQ ID NO: 742268 - RNA, 17 nt, Artificial Sequence
  Synthetic
uuauauuauaaacauua

SEQ ID NO: 742269 - RNA, 17 nt, Artificial Sequence
  Synthetic
uaagaaagauaacauua

SEQ ID NO: 742270 - RNA, 17 nt, Artificial Sequence
  Synthetic
uaggaagucuaacauua

SEQ ID NO: 742271 - RNA, 17 nt, Artificial Sequence
  Synthetic
auuaaaagguaacauua

SEQ ID NO: 742272 - RNA, 17 nt, Artificial Sequence
  Synthetic
cuggcagaugcacauua

SEQ ID NO: 742273 - RNA, 17 nt, Artificial Sequence
  Synthetic
aaaaaagguucacauua

SEQ ID NO: 742274 - RNA, 17 nt, Artificial Sequence
  Synthetic
cacacuauuucacauua

SEQ ID NO: 742275 - RNA, 17 nt, Artificial Sequence
  Synthetic
caagugcgaggacauua

SEQ ID NO: 742276 - RNA, 17 nt, Artificial Sequence
  Synthetic
ugggaggcaugacauua

SEQ ID NO: 742277 - RNA, 17 nt, Artificial Sequence
  Synthetic
aauaagggaauacauua

SEQ ID NO: 742278 - RNA, 17 nt, Artificial Sequence
  Synthetic
ccacugaaucuacauua

SEQ ID NO: 742279 - RNA, 17 nt, Artificial Sequence
  Synthetic
ucauuuuaguuacauua

SEQ ID NO: 742280 - RNA, 17 nt, Artificial Sequence
  Synthetic
cuauaagaaaaccauua

SEQ ID NO: 742281 - RNA, 17 nt, Artificial Sequence
  Synthetic
aaaugauaaaaccauua

SEQ ID NO: 742282 - RNA, 17 nt, Artificial Sequence
  Synthetic
uauuaguacaaccauua

SEQ ID NO: 742283 - RNA, 17 nt, Artificial Sequence
  Synthetic
cacaaaauuaaccauua

SEQ ID NO: 742284 - RNA, 17 nt, Artificial Sequence
  Synthetic
cucucagaaucccauua

SEQ ID NO: 742285 - RNA, 17 nt, Artificial Sequence
  Synthetic
uaugucuaaagccauua

SEQ ID NO: 742286 - RNA, 17 nt, Artificial Sequence
  Synthetic
aguccuuaaggccauua

SEQ ID NO: 742287 - RNA, 17 nt, Artificial Sequence
  Synthetic
acacuuucgggccauua

SEQ ID NO: 742288 - RNA, 17 nt, Artificial Sequence
  Synthetic
auaucuacuugccauua

SEQ ID NO: 742289 - RNA, 17 nt, Artificial Sequence
  Synthetic
acaugaugaauccauua

SEQ ID NO: 742290 - RNA, 17 nt, Artificial Sequence
  Synthetic
aaugaguacauccauua

SEQ ID NO: 742291 - RNA, 17 nt, Artificial Sequence
  Synthetic
uuaauuguacuccauua

SEQ ID NO: 742292 - RNA, 17 nt, Artificial Sequence
  Synthetic
acagaacauuuccauua

SEQ ID NO: 742293 - RNA, 17 nt, Artificial Sequence
  Synthetic
ugcuacauuuuccauua

SEQ ID NO: 742294 - RNA, 17 nt, Artificial Sequence
  Synthetic
uggagacuuaagcauua

SEQ ID NO: 742295 - RNA, 17 nt, Artificial Sequence
  Synthetic
ucuacuaauaugcauua

SEQ ID NO: 742296 - RNA, 17 nt, Artificial Sequence
  Synthetic
uguaauauugugcauua

SEQ ID NO: 742297 - RNA, 17 nt, Artificial Sequence
  Synthetic
ugcaaaaaaaaucauua

SEQ ID NO: 742298 - RNA, 17 nt, Artificial Sequence
  Synthetic
aaaauaucaaaucauua

SEQ ID NO: 742299 - RNA, 17 nt, Artificial Sequence
  Synthetic
auauuuauaaaucauua

SEQ ID NO: 742300 - RNA, 17 nt, Artificial Sequence
  Synthetic
caguugacuaaucauua

SEQ ID NO: 742301 - RNA, 17 nt, Artificial Sequence
  Synthetic
uuuucuggucaucauua

SEQ ID NO: 742302 - RNA, 17 nt, Artificial Sequence
  Synthetic
uucccuagagaucauua

SEQ ID NO: 742303 - RNA, 17 nt, Artificial Sequence
  Synthetic
uuagacaaauaucauua

SEQ ID NO: 742304 - RNA, 17 nt, Artificial Sequence
  Synthetic
ucaaaaagguaucauua

SEQ ID NO: 742305 - RNA, 17 nt, Artificial Sequence
  Synthetic
cagaagaguuaucauua

SEQ ID NO: 742306 - RNA, 17 nt, Artificial Sequence
  Synthetic
aagagauguuaucauua

SEQ ID NO: 742307 - RNA, 17 nt, Artificial Sequence
  Synthetic
uugcgaauuuaucauua

SEQ ID NO: 742308 - RNA, 17 nt, Artificial Sequence
  Synthetic
auuauaauaacucauua

SEQ ID NO: 742309 - RNA, 17 nt, Artificial Sequence
  Synthetic
aagagggguagucauua

SEQ ID NO: 742310 - RNA, 17 nt, Artificial Sequence
  Synthetic
auacaaauuauucauua

SEQ ID NO: 742311 - RNA, 17 nt, Artificial Sequence
  Synthetic
agagggcuuauucauua

SEQ ID NO: 742312 - RNA, 17 nt, Artificial Sequence
  Synthetic
ucaaucauacuucauua

SEQ ID NO: 742313 - RNA, 17 nt, Artificial Sequence
  Synthetic
uucuauaauguucauua

SEQ ID NO: 742314 - RNA, 17 nt, Artificial Sequence
  Synthetic
uuaugguacuuucauua

SEQ ID NO: 742315 - RNA, 17 nt, Artificial Sequence
  Synthetic
caaaauuauuuucauua

SEQ ID NO: 742316 - RNA, 17 nt, Artificial Sequence
  Synthetic
aacguggaaaaagauua

SEQ ID NO: 742317 - RNA, 17 nt, Artificial Sequence
  Synthetic
uaaaguaacaaagauua

SEQ ID NO: 742318 - RNA, 17 nt, Artificial Sequence
  Synthetic
aaugaagcgaaagauua

SEQ ID NO: 742319 - RNA, 17 nt, Artificial Sequence
  Synthetic
auaauuuuuaaagauua

SEQ ID NO: 742320 - RNA, 17 nt, Artificial Sequence
  Synthetic
uaugacagucaagauua

SEQ ID NO: 742321 - RNA, 17 nt, Artificial Sequence
  Synthetic
aagccuuaagaagauua

SEQ ID NO: 742322 - RNA, 17 nt, Artificial Sequence
  Synthetic
ugaccuccagaagauua

SEQ ID NO: 742323 - RNA, 17 nt, Artificial Sequence
  Synthetic
aaguaagaggaagauua

SEQ ID NO: 742324 - RNA, 17 nt, Artificial Sequence
  Synthetic
uugaacgucuaagauua

SEQ ID NO: 742325 - RNA, 17 nt, Artificial Sequence
  Synthetic
augcuauuguaagauua

SEQ ID NO: 742326 - RNA, 17 nt, Artificial Sequence
  Synthetic
aguaacuaaacagauua

SEQ ID NO: 742327 - RNA, 17 nt, Artificial Sequence
  Synthetic
agauggagaacagauua

SEQ ID NO: 742328 - RNA, 17 nt, Artificial Sequence
  Synthetic
uuagcaucuccagauua

SEQ ID NO: 742329 - RNA, 17 nt, Artificial Sequence
  Synthetic
auggcacauucagauua

SEQ ID NO: 742330 - RNA, 17 nt, Artificial Sequence
  Synthetic
aauagguggagagauua

SEQ ID NO: 742331 - RNA, 17 nt, Artificial Sequence
  Synthetic
aaguucccuauagauua

SEQ ID NO: 742332 - RNA, 17 nt, Artificial Sequence
  Synthetic
aauacaaagguagauua

SEQ ID NO: 742333 - RNA, 17 nt, Artificial Sequence
  Synthetic
auuuuauaguuagauua

SEQ ID NO: 742334 - RNA, 17 nt, Artificial Sequence
  Synthetic
uuuuagaaaaccgauua

SEQ ID NO: 742335 - RNA, 17 nt, Artificial Sequence
  Synthetic
cuccaacagagcgauua

SEQ ID NO: 742336 - RNA, 17 nt, Artificial Sequence
  Synthetic
auagaauggggcgauua

SEQ ID NO: 742337 - RNA, 17 nt, Artificial Sequence
  Synthetic
auaccccaaaaggauua

SEQ ID NO: 742338 - RNA, 17 nt, Artificial Sequence
  Synthetic
caaccuagggaggauua

SEQ ID NO: 742339 - RNA, 17 nt, Artificial Sequence
  Synthetic
auagguuuguaggauua

SEQ ID NO: 742340 - RNA, 17 nt, Artificial Sequence
  Synthetic
uauaugaauuaggauua

SEQ ID NO: 742341 - RNA, 17 nt, Artificial Sequence
  Synthetic
uacuacccuuaggauua

SEQ ID NO: 742342 - RNA, 17 nt, Artificial Sequence
  Synthetic
cccauauucagggauua

SEQ ID NO: 742343 - RNA, 17 nt, Artificial Sequence
  Synthetic
aucaagaauggggauua

SEQ ID NO: 742344 - RNA, 17 nt, Artificial Sequence
  Synthetic
augacacauggggauua

SEQ ID NO: 742345 - RNA, 17 nt, Artificial Sequence
  Synthetic
uugacaccuggggauua

SEQ ID NO: 742346 - RNA, 17 nt, Artificial Sequence
  Synthetic
augacaucuggggauua

SEQ ID NO: 742347 - RNA, 17 nt, Artificial Sequence
  Synthetic
uugacacguggggauua

SEQ ID NO: 742348 - RNA, 17 nt, Artificial Sequence
  Synthetic
aucuguggaugggauua

SEQ ID NO: 742349 - RNA, 17 nt, Artificial Sequence
  Synthetic
cugaguagcugggauua

SEQ ID NO: 742350 - RNA, 17 nt, Artificial Sequence
  Synthetic
ccaaagugcugggauua

SEQ ID NO: 742351 - RNA, 17 nt, Artificial Sequence
  Synthetic
accugcuauugggauua

SEQ ID NO: 742352 - RNA, 17 nt, Artificial Sequence
  Synthetic
uaaugacuaauggauua

SEQ ID NO: 742353 - RNA, 17 nt, Artificial Sequence
  Synthetic
acaaaugggauggauua

SEQ ID NO: 742354 - RNA, 17 nt, Artificial Sequence
  Synthetic
cauuguuggauggauua

SEQ ID NO: 742355 - RNA, 17 nt, Artificial Sequence
  Synthetic
uugaagccaguggauua

SEQ ID NO: 742356 - RNA, 17 nt, Artificial Sequence
  Synthetic
uuacaaaauguggauua

SEQ ID NO: 742357 - RNA, 17 nt, Artificial Sequence
  Synthetic
uuagacuuauuggauua

SEQ ID NO: 742358 - RNA, 17 nt, Artificial Sequence
  Synthetic
ugaugcauguuggauua

SEQ ID NO: 742359 - RNA, 17 nt, Artificial Sequence
  Synthetic
agcaggaauuuggauua

SEQ ID NO: 742360 - RNA, 17 nt, Artificial Sequence
  Synthetic
ucuuaguacaaugauua

SEQ ID NO: 742361 - RNA, 17 nt, Artificial Sequence
  Synthetic
auaagaaaagaugauua

SEQ ID NO: 742362 - RNA, 17 nt, Artificial Sequence
  Synthetic
ccaagauaagaugauua

SEQ ID NO: 742363 - RNA, 17 nt, Artificial Sequence
  Synthetic
aaacaacgggaugauua

SEQ ID NO: 742364 - RNA, 17 nt, Artificial Sequence
  Synthetic
cauauacaauaugauua

SEQ ID NO: 742365 - RNA, 17 nt, Artificial Sequence
  Synthetic
uaauuugcuuaugauua

SEQ ID NO: 742366 - RNA, 17 nt, Artificial Sequence
  Synthetic
uugaaguucucugauua

SEQ ID NO: 742367 - RNA, 17 nt, Artificial Sequence
  Synthetic
cauggaggaagugauua

SEQ ID NO: 742368 - RNA, 17 nt, Artificial Sequence
  Synthetic
auguguaucagugauua

SEQ ID NO: 742369 - RNA, 17 nt, Artificial Sequence
  Synthetic
ccagcagucauugauua

SEQ ID NO: 742370 - RNA, 17 nt, Artificial Sequence
  Synthetic
cuuaucaaacuugauua

SEQ ID NO: 742371 - RNA, 17 nt, Artificial Sequence
  Synthetic
cuugguuaccuugauua

SEQ ID NO: 742372 - RNA, 17 nt, Artificial Sequence
  Synthetic
agaaagaaaaaauauua

SEQ ID NO: 742373 - RNA, 17 nt, Artificial Sequence
  Synthetic
cuguaaacaaaauauua

SEQ ID NO: 742374 - RNA, 17 nt, Artificial Sequence
  Synthetic
ccuauuuuaaaauauua

SEQ ID NO: 742375 - RNA, 17 nt, Artificial Sequence
  Synthetic
auaagaaagaaauauua

SEQ ID NO: 742376 - RNA, 17 nt, Artificial Sequence
  Synthetic
aacagacaccaauauua

SEQ ID NO: 742377 - RNA, 17 nt, Artificial Sequence
  Synthetic
cucucuacccaauauua

SEQ ID NO: 742378 - RNA, 17 nt, Artificial Sequence
  Synthetic
auuggcucccaauauua

SEQ ID NO: 742379 - RNA, 17 nt, Artificial Sequence
  Synthetic
aagaugacggaauauua

SEQ ID NO: 742380 - RNA, 17 nt, Artificial Sequence
  Synthetic
aggaaagguuaauauua

SEQ ID NO: 742381 - RNA, 17 nt, Artificial Sequence
  Synthetic
ccuaaauguuaauauua

SEQ ID NO: 742382 - RNA, 17 nt, Artificial Sequence
  Synthetic
uaugcccuuuaauauua

SEQ ID NO: 742383 - RNA, 17 nt, Artificial Sequence
  Synthetic
agaucaaaaacauauua

SEQ ID NO: 742384 - RNA, 17 nt, Artificial Sequence
  Synthetic
accucacuuccauauua

SEQ ID NO: 742385 - RNA, 17 nt, Artificial Sequence
  Synthetic
uauuaauaagcauauua

SEQ ID NO: 742386 - RNA, 17 nt, Artificial Sequence
  Synthetic
ucuguuuaagcauauua

SEQ ID NO: 742387 - RNA, 17 nt, Artificial Sequence
  Synthetic
uuagacacaagauauua

SEQ ID NO: 742388 - RNA, 17 nt, Artificial Sequence
  Synthetic
auaggaaacagauauua

SEQ ID NO: 742389 - RNA, 17 nt, Artificial Sequence
  Synthetic
uaaauggauagauauua

SEQ ID NO: 742390 - RNA, 17 nt, Artificial Sequence
  Synthetic
uaauaauuucgauauua

SEQ ID NO: 742391 - RNA, 17 nt, Artificial Sequence
  Synthetic
cuuuuuagaggauauua

SEQ ID NO: 742392 - RNA, 17 nt, Artificial Sequence
  Synthetic
aucaagugaggauauua

SEQ ID NO: 742393 - RNA, 17 nt, Artificial Sequence
  Synthetic
ucaaucuaaauauauua

SEQ ID NO: 742394 - RNA, 17 nt, Artificial Sequence
  Synthetic
uaauuauggauauauua

SEQ ID NO: 742395 - RNA, 17 nt, Artificial Sequence
  Synthetic
augguucugauauauua

SEQ ID NO: 742396 - RNA, 17 nt, Artificial Sequence
  Synthetic
aagagaacaguauauua

SEQ ID NO: 742397 - RNA, 17 nt, Artificial Sequence
  Synthetic
uaauaaggaguauauua

SEQ ID NO: 742398 - RNA, 17 nt, Artificial Sequence
  Synthetic
uuagagaaauuauauua

SEQ ID NO: 742399 - RNA, 17 nt, Artificial Sequence
  Synthetic
cuuugcaacuuauauua

SEQ ID NO: 742400 - RNA, 17 nt, Artificial Sequence
  Synthetic
auuugaacuuuauauua

SEQ ID NO: 742401 - RNA, 17 nt, Artificial Sequence
  Synthetic
aaaaaaaaaaacuauua

SEQ ID NO: 742402 - RNA, 17 nt, Artificial Sequence
  Synthetic
auuuuccugaacuauua

SEQ ID NO: 742403 - RNA, 17 nt, Artificial Sequence
  Synthetic
acauuuuugaacuauua

SEQ ID NO: 742404 - RNA, 17 nt, Artificial Sequence
  Synthetic
uuucugccuaacuauua

SEQ ID NO: 742405 - RNA, 17 nt, Artificial Sequence
  Synthetic
aaauaugcacacuauua

SEQ ID NO: 742406 - RNA, 17 nt, Artificial Sequence
  Synthetic
uuuaugccucacuauua

SEQ ID NO: 742407 - RNA, 17 nt, Artificial Sequence
  Synthetic
aaacuaucagacuauua

SEQ ID NO: 742408 - RNA, 17 nt, Artificial Sequence
  Synthetic
aggcucagagacuauua

SEQ ID NO: 742409 - RNA, 17 nt, Artificial Sequence
  Synthetic
uuccuuccaaccuauua

SEQ ID NO: 742410 - RNA, 17 nt, Artificial Sequence
  Synthetic
ccccucuuccccuauua

SEQ ID NO: 742411 - RNA, 17 nt, Artificial Sequence
  Synthetic
cuuacugaggccuauua

SEQ ID NO: 742412 - RNA, 17 nt, Artificial Sequence
  Synthetic
aguuuucacagcuauua

SEQ ID NO: 742413 - RNA, 17 nt, Artificial Sequence
  Synthetic
aauguuuugagcuauua

SEQ ID NO: 742414 - RNA, 17 nt, Artificial Sequence
  Synthetic
agagccugucucuauua

SEQ ID NO: 742415 - RNA, 17 nt, Artificial Sequence
  Synthetic
aaaguaucagucuauua

SEQ ID NO: 742416 - RNA, 17 nt, Artificial Sequence
  Synthetic
uugggcugugucuauua

SEQ ID NO: 742417 - RNA, 17 nt, Artificial Sequence
  Synthetic
cucuuagguuucuauua

SEQ ID NO: 742418 - RNA, 17 nt, Artificial Sequence
  Synthetic
acugaugcaaaguauua

SEQ ID NO: 742419 - RNA, 17 nt, Artificial Sequence
  Synthetic
uaucaccuaaaguauua

SEQ ID NO: 742420 - RNA, 17 nt, Artificial Sequence
  Synthetic
uuuuaauagaaguauua

SEQ ID NO: 742421 - RNA, 17 nt, Artificial Sequence
  Synthetic
aaugauacuaaguauua

SEQ ID NO: 742422 - RNA, 17 nt, Artificial Sequence
  Synthetic
uauugauaacaguauua

SEQ ID NO: 742423 - RNA, 17 nt, Artificial Sequence
  Synthetic
ccauugugacaguauua

SEQ ID NO: 742424 - RNA, 17 nt, Artificial Sequence
  Synthetic
agaaauggagaguauua

SEQ ID NO: 742425 - RNA, 17 nt, Artificial Sequence
  Synthetic
ucacaauaugaguauua

SEQ ID NO: 742426 - RNA, 17 nt, Artificial Sequence
  Synthetic
ugcagcaauacguauua

SEQ ID NO: 742427 - RNA, 17 nt, Artificial Sequence
  Synthetic
ugcuaugcaagguauua

SEQ ID NO: 742428 - RNA, 17 nt, Artificial Sequence
  Synthetic
aacaaccugagguauua

SEQ ID NO: 742429 - RNA, 17 nt, Artificial Sequence
  Synthetic
caguuuucuggguauua

SEQ ID NO: 742430 - RNA, 17 nt, Artificial Sequence
  Synthetic
cauguagaaugguauua

SEQ ID NO: 742431 - RNA, 17 nt, Artificial Sequence
  Synthetic
uucugguuuugguauua

SEQ ID NO: 742432 - RNA, 17 nt, Artificial Sequence
  Synthetic
aaaccaguacuguauua

SEQ ID NO: 742433 - RNA, 17 nt, Artificial Sequence
  Synthetic
uaguuuuaucuguauua

SEQ ID NO: 742434 - RNA, 17 nt, Artificial Sequence
  Synthetic
agaauagaaguguauua

SEQ ID NO: 742435 - RNA, 17 nt, Artificial Sequence
  Synthetic
auggggcuuuuguauua

SEQ ID NO: 742436 - RNA, 17 nt, Artificial Sequence
  Synthetic
uauugaguuuuguauua

SEQ ID NO: 742437 - RNA, 17 nt, Artificial Sequence
  Synthetic
uuuucccuagauuauua

SEQ ID NO: 742438 - RNA, 17 nt, Artificial Sequence
  Synthetic
uucauaauauauuauua

SEQ ID NO: 742439 - RNA, 17 nt, Artificial Sequence
  Synthetic
augaaucuguauuauua

SEQ ID NO: 742440 - RNA, 17 nt, Artificial Sequence
  Synthetic
agcagccauacuuauua

SEQ ID NO: 742441 - RNA, 17 nt, Artificial Sequence
  Synthetic
uuuugcacaccuuauua

SEQ ID NO: 742442 - RNA, 17 nt, Artificial Sequence
  Synthetic
uacaaugcaucuuauua

SEQ ID NO: 742443 - RNA, 17 nt, Artificial Sequence
  Synthetic
auacaagcuucuuauua

SEQ ID NO: 742444 - RNA, 17 nt, Artificial Sequence
  Synthetic
ccaucuaaaaguuauua

SEQ ID NO: 742445 - RNA, 17 nt, Artificial Sequence
  Synthetic
caaauaacaaguuauua

SEQ ID NO: 742446 - RNA, 17 nt, Artificial Sequence
  Synthetic
uuaaaauacaguuauua

SEQ ID NO: 742447 - RNA, 17 nt, Artificial Sequence
  Synthetic
agauaggucaguuauua

SEQ ID NO: 742448 - RNA, 17 nt, Artificial Sequence
  Synthetic
agcaucugaauuuauua

SEQ ID NO: 742449 - RNA, 17 nt, Artificial Sequence
  Synthetic
ugacaaauaauuuauua

SEQ ID NO: 742450 - RNA, 17 nt, Artificial Sequence
  Synthetic
agcauggauauuuauua

SEQ ID NO: 742451 - RNA, 17 nt, Artificial Sequence
  Synthetic
uaacucauuauuuauua

SEQ ID NO: 742452 - RNA, 17 nt, Artificial Sequence
  Synthetic
ugugacucacuuuauua

SEQ ID NO: 742453 - RNA, 17 nt, Artificial Sequence
  Synthetic
cacccaacucuuuauua

SEQ ID NO: 742454 - RNA, 17 nt, Artificial Sequence
  Synthetic
ccucaucuauuuuauua

SEQ ID NO: 742455 - RNA, 17 nt, Artificial Sequence
  Synthetic
agaguaaaguuuuauua

SEQ ID NO: 742456 - RNA, 17 nt, Artificial Sequence
  Synthetic
uggaauuauuuuuauua

SEQ ID NO: 742457 - RNA, 17 nt, Artificial Sequence
  Synthetic
uaacacucuuuuuauua

SEQ ID NO: 742458 - RNA, 17 nt, Artificial Sequence
  Synthetic
ugcccauuuuuuuauua

SEQ ID NO: 742459 - RNA, 17 nt, Artificial Sequence
  Synthetic
ucaaacuuaaaaacuua

SEQ ID NO: 742460 - RNA, 17 nt, Artificial Sequence
  Synthetic
caauauaccaaaacuua

SEQ ID NO: 742461 - RNA, 17 nt, Artificial Sequence
  Synthetic
aguaaaccacaaacuua

SEQ ID NO: 742462 - RNA, 17 nt, Artificial Sequence
  Synthetic
acuccauuacaaacuua

SEQ ID NO: 742463 - RNA, 17 nt, Artificial Sequence
  Synthetic
uucccuucccaaacuua

SEQ ID NO: 742464 - RNA, 17 nt, Artificial Sequence
  Synthetic
aaucgaucucaaacuua

SEQ ID NO: 742465 - RNA, 17 nt, Artificial Sequence
  Synthetic
uuuucacuucaaacuua

SEQ ID NO: 742466 - RNA, 17 nt, Artificial Sequence
  Synthetic
accagacaggaaacuua

SEQ ID NO: 742467 - RNA, 17 nt, Artificial Sequence
  Synthetic
uggcuugccuaaacuua

SEQ ID NO: 742468 - RNA, 17 nt, Artificial Sequence
  Synthetic
uacguugcuuaaacuua

SEQ ID NO: 742469 - RNA, 17 nt, Artificial Sequence
  Synthetic
aaguugugagcaacuua

SEQ ID NO: 742470 - RNA, 17 nt, Artificial Sequence
  Synthetic
ccuaaccucagaacuua

SEQ ID NO: 742471 - RNA, 17 nt, Artificial Sequence
  Synthetic
agguacagaugaacuua

SEQ ID NO: 742472 - RNA, 17 nt, Artificial Sequence
  Synthetic
cucagagaaauaacuua

SEQ ID NO: 742473 - RNA, 17 nt, Artificial Sequence
  Synthetic
auguuuucauuaacuua

SEQ ID NO: 742474 - RNA, 17 nt, Artificial Sequence
  Synthetic
ugauggguucacacuua

SEQ ID NO: 742475 - RNA, 17 nt, Artificial Sequence
  Synthetic
cguucaacucccacuua

SEQ ID NO: 742476 - RNA, 17 nt, Artificial Sequence
  Synthetic
cuugcaucucccacuua

SEQ ID NO: 742477 - RNA, 17 nt, Artificial Sequence
  Synthetic
uccuagucucccacuua

SEQ ID NO: 742478 - RNA, 17 nt, Artificial Sequence
  Synthetic
ucccugaauuccacuua

SEQ ID NO: 742479 - RNA, 17 nt, Artificial Sequence
  Synthetic
auuauuaauuccacuua

SEQ ID NO: 742480 - RNA, 17 nt, Artificial Sequence
  Synthetic
auacugcauuccacuua

SEQ ID NO: 742481 - RNA, 17 nt, Artificial Sequence
  Synthetic
aacagagcuuccacuua

SEQ ID NO: 742482 - RNA, 17 nt, Artificial Sequence
  Synthetic
auuucuggaagcacuua

SEQ ID NO: 742483 - RNA, 17 nt, Artificial Sequence
  Synthetic
uguaaucccagcacuua

SEQ ID NO: 742484 - RNA, 17 nt, Artificial Sequence
  Synthetic
ucucaagcaggcacuua

SEQ ID NO: 742485 - RNA, 17 nt, Artificial Sequence
  Synthetic
uuuuguguaugcacuua

SEQ ID NO: 742486 - RNA, 17 nt, Artificial Sequence
  Synthetic
aguaaaugcaucacuua

SEQ ID NO: 742487 - RNA, 17 nt, Artificial Sequence
  Synthetic
cucaggcagaagacuua

SEQ ID NO: 742488 - RNA, 17 nt, Artificial Sequence
  Synthetic
uguauccuagagacuua

SEQ ID NO: 742489 - RNA, 17 nt, Artificial Sequence
  Synthetic
cuacacaaagggacuua

SEQ ID NO: 742490 - RNA, 17 nt, Artificial Sequence
  Synthetic
auucaaagauggacuua

SEQ ID NO: 742491 - RNA, 17 nt, Artificial Sequence
  Synthetic
accauaccaaugacuua

SEQ ID NO: 742492 - RNA, 17 nt, Artificial Sequence
  Synthetic
uauguuggaaugacuua

SEQ ID NO: 742493 - RNA, 17 nt, Artificial Sequence
  Synthetic
ucauguuauaugacuua

SEQ ID NO: 742494 - RNA, 17 nt, Artificial Sequence
  Synthetic
aauuuggagaauacuua

SEQ ID NO: 742495 - RNA, 17 nt, Artificial Sequence
  Synthetic
auucauuuacauacuua

SEQ ID NO: 742496 - RNA, 17 nt, Artificial Sequence
  Synthetic
uuuguuuaggauacuua

SEQ ID NO: 742497 - RNA, 17 nt, Artificial Sequence
  Synthetic
cuuuaauuuuauacuua

SEQ ID NO: 742498 - RNA, 17 nt, Artificial Sequence
  Synthetic
auuucauuuuauacuua

SEQ ID NO: 742499 - RNA, 17 nt, Artificial Sequence
  Synthetic
uuuucuggaacuacuua

SEQ ID NO: 742500 - RNA, 17 nt, Artificial Sequence
  Synthetic
aaagguacuacuacuua

SEQ ID NO: 742501 - RNA, 17 nt, Artificial Sequence
  Synthetic
caaaaagggaguacuua

SEQ ID NO: 742502 - RNA, 17 nt, Artificial Sequence
  Synthetic
ugcuuuaauuguacuua

SEQ ID NO: 742503 - RNA, 17 nt, Artificial Sequence
  Synthetic
uguauuaaaauuacuua

SEQ ID NO: 742504 - RNA, 17 nt, Artificial Sequence
  Synthetic
uaauaaaacauuacuua

SEQ ID NO: 742505 - RNA, 17 nt, Artificial Sequence
  Synthetic
uucacuauaguuacuua

SEQ ID NO: 742506 - RNA, 17 nt, Artificial Sequence
  Synthetic
aguuugugguuuacuua

SEQ ID NO: 742507 - RNA, 17 nt, Artificial Sequence
  Synthetic
uucuuacaacaaccuua

SEQ ID NO: 742508 - RNA, 17 nt, Artificial Sequence
  Synthetic
ugguauacauaaccuua

SEQ ID NO: 742509 - RNA, 17 nt, Artificial Sequence
  Synthetic
auucuccacuaaccuua

SEQ ID NO: 742510 - RNA, 17 nt, Artificial Sequence
  Synthetic
cccauuugcuaaccuua

SEQ ID NO: 742511 - RNA, 17 nt, Artificial Sequence
  Synthetic
auguaugguuaaccuua

SEQ ID NO: 742512 - RNA, 17 nt, Artificial Sequence
  Synthetic
cucauuuauccaccuua

SEQ ID NO: 742513 - RNA, 17 nt, Artificial Sequence
  Synthetic
aaaauuaggugaccuua

SEQ ID NO: 742514 - RNA, 17 nt, Artificial Sequence
  Synthetic
agcagaaaccuaccuua

SEQ ID NO: 742515 - RNA, 17 nt, Artificial Sequence
  Synthetic
auaugagguuuaccuua

SEQ ID NO: 742516 - RNA, 17 nt, Artificial Sequence
  Synthetic
aaguguaugaacccuua

SEQ ID NO: 742517 - RNA, 17 nt, Artificial Sequence
  Synthetic
ccagguuuucacccuua

SEQ ID NO: 742518 - RNA, 17 nt, Artificial Sequence
  Synthetic
acuaaaucugacccuua

SEQ ID NO: 742519 - RNA, 17 nt, Artificial Sequence
  Synthetic
uauaguuucuacccuua

SEQ ID NO: 742520 - RNA, 17 nt, Artificial Sequence
  Synthetic
ccaguuuucuccccuua

SEQ ID NO: 742521 - RNA, 17 nt, Artificial Sequence
  Synthetic
uguaaauuaggcccuua

SEQ ID NO: 742522 - RNA, 17 nt, Artificial Sequence
  Synthetic
ccugcaaauggcccuua

SEQ ID NO: 742523 - RNA, 17 nt, Artificial Sequence
  Synthetic
agaaugggaaucccuua

SEQ ID NO: 742524 - RNA, 17 nt, Artificial Sequence
  Synthetic
aacuaaacauucccuua

SEQ ID NO: 742525 - RNA, 17 nt, Artificial Sequence
  Synthetic
aagggagagaagccuua

SEQ ID NO: 742526 - RNA, 17 nt, Artificial Sequence
  Synthetic
cauaaugggaagccuua

SEQ ID NO: 742527 - RNA, 17 nt, Artificial Sequence
  Synthetic
uuauucugugagccuua

SEQ ID NO: 742528 - RNA, 17 nt, Artificial Sequence
  Synthetic
cuguaauuuccgccuua

SEQ ID NO: 742529 - RNA, 17 nt, Artificial Sequence
  Synthetic
aaaccauaauggccuua

SEQ ID NO: 742530 - RNA, 17 nt, Artificial Sequence
  Synthetic
auuggguauaugccuua

SEQ ID NO: 742531 - RNA, 17 nt, Artificial Sequence
  Synthetic
aaagacuuuaugccuua

SEQ ID NO: 742532 - RNA, 17 nt, Artificial Sequence
  Synthetic
ccguucccucugccuua

SEQ ID NO: 742533 - RNA, 17 nt, Artificial Sequence
  Synthetic
aauuggcaguugccuua

SEQ ID NO: 742534 - RNA, 17 nt, Artificial Sequence
  Synthetic
ccaccuagguugccuua

SEQ ID NO: 742535 - RNA, 17 nt, Artificial Sequence
  Synthetic
ucugacuguuugccuua

SEQ ID NO: 742536 - RNA, 17 nt, Artificial Sequence
  Synthetic
auuccguaaaauccuua

SEQ ID NO: 742537 - RNA, 17 nt, Artificial Sequence
  Synthetic
cagaauuggcauccuua

SEQ ID NO: 742538 - RNA, 17 nt, Artificial Sequence
  Synthetic
ucuucauguuauccuua

SEQ ID NO: 742539 - RNA, 17 nt, Artificial Sequence
  Synthetic
uacuccuuuuauccuua

SEQ ID NO: 742540 - RNA, 17 nt, Artificial Sequence
  Synthetic
uuuucccaaacuccuua

SEQ ID NO: 742541 - RNA, 17 nt, Artificial Sequence
  Synthetic
auuucccaugcuccuua

SEQ ID NO: 742542 - RNA, 17 nt, Artificial Sequence
  Synthetic
uggagaucaucuccuua

SEQ ID NO: 742543 - RNA, 17 nt, Artificial Sequence
  Synthetic
cuuaucuguaguccuua

SEQ ID NO: 742544 - RNA, 17 nt, Artificial Sequence
  Synthetic
aaccucaacgguccuua

SEQ ID NO: 742545 - RNA, 17 nt, Artificial Sequence
  Synthetic
uuuauuuguauuccuua

SEQ ID NO: 742546 - RNA, 17 nt, Artificial Sequence
  Synthetic
uuuuaaaaacuuccuua

SEQ ID NO: 742547 - RNA, 17 nt, Artificial Sequence
  Synthetic
uagguuucaguuccuua

SEQ ID NO: 742548 - RNA, 17 nt, Artificial Sequence
  Synthetic
aacuagucauuuccuua

SEQ ID NO: 742549 - RNA, 17 nt, Artificial Sequence
  Synthetic
ucuccuuccuuuccuua

SEQ ID NO: 742550 - RNA, 17 nt, Artificial Sequence
  Synthetic
cuggcugaguuuccuua

SEQ ID NO: 742551 - RNA, 17 nt, Artificial Sequence
  Synthetic
uuuuuuucuuuuccuua

SEQ ID NO: 742552 - RNA, 17 nt, Artificial Sequence
  Synthetic
auuuggugaaaagcuua

SEQ ID NO: 742553 - RNA, 17 nt, Artificial Sequence
  Synthetic
ccgggccugaaagcuua

SEQ ID NO: 742554 - RNA, 17 nt, Artificial Sequence
  Synthetic
uuucaccuucaagcuua

SEQ ID NO: 742555 - RNA, 17 nt, Artificial Sequence
  Synthetic
uugucucuucaagcuua

SEQ ID NO: 742556 - RNA, 17 nt, Artificial Sequence
  Synthetic
aguaacauagaagcuua

SEQ ID NO: 742557 - RNA, 17 nt, Artificial Sequence
  Synthetic
ccccaauuagaagcuua

SEQ ID NO: 742558 - RNA, 17 nt, Artificial Sequence
  Synthetic
uuccuaccugaagcuua

SEQ ID NO: 742559 - RNA, 17 nt, Artificial Sequence
  Synthetic
uagcuaagaacagcuua

SEQ ID NO: 742560 - RNA, 17 nt, Artificial Sequence
  Synthetic
uuagaugagccagcuua

SEQ ID NO: 742561 - RNA, 17 nt, Artificial Sequence
  Synthetic
uguaaucaugcagcuua

SEQ ID NO: 742562 - RNA, 17 nt, Artificial Sequence
  Synthetic
aguugcuuaucagcuua

SEQ ID NO: 742563 - RNA, 17 nt, Artificial Sequence
  Synthetic
cugugauagucagcuua

SEQ ID NO: 742564 - RNA, 17 nt, Artificial Sequence
  Synthetic
uuuuagagaagagcuua

SEQ ID NO: 742565 - RNA, 17 nt, Artificial Sequence
  Synthetic
acucgucaucuagcuua

SEQ ID NO: 742566 - RNA, 17 nt, Artificial Sequence
  Synthetic
uuuauuacuguagcuua

SEQ ID NO: 742567 - RNA, 17 nt, Artificial Sequence
  Synthetic
uguaacccuagcgcuua

SEQ ID NO: 742568 - RNA, 17 nt, Artificial Sequence
  Synthetic
ccuaaauaacaggcuua

SEQ ID NO: 742569 - RNA, 17 nt, Artificial Sequence
  Synthetic
uccaacaucauggcuua

SEQ ID NO: 742570 - RNA, 17 nt, Artificial Sequence
  Synthetic
cagcaaacuauggcuua

SEQ ID NO: 742571 - RNA, 17 nt, Artificial Sequence
  Synthetic
aaaagauuuauggcuua

SEQ ID NO: 742572 - RNA, 17 nt, Artificial Sequence
  Synthetic
agguauuuuguggcuua

SEQ ID NO: 742573 - RNA, 17 nt, Artificial Sequence
  Synthetic
cacucuauuuuggcuua

SEQ ID NO: 742574 - RNA, 17 nt, Artificial Sequence
  Synthetic
caucaagguaaugcuua

SEQ ID NO: 742575 - RNA, 17 nt, Artificial Sequence
  Synthetic
uacuugcuuaaugcuua

SEQ ID NO: 742576 - RNA, 17 nt, Artificial Sequence
  Synthetic
caaacuagccaugcuua

SEQ ID NO: 742577 - RNA, 17 nt, Artificial Sequence
  Synthetic
aaaacauuccaugcuua

SEQ ID NO: 742578 - RNA, 17 nt, Artificial Sequence
  Synthetic
aucagguuucaugcuua

SEQ ID NO: 742579 - RNA, 17 nt, Artificial Sequence
  Synthetic
uggaaaccagcugcuua

SEQ ID NO: 742580 - RNA, 17 nt, Artificial Sequence
  Synthetic
uccagaguugcugcuua

SEQ ID NO: 742581 - RNA, 17 nt, Artificial Sequence
  Synthetic
aagcuuacaucugcuua

SEQ ID NO: 742582 - RNA, 17 nt, Artificial Sequence
  Synthetic
caugugaccucugcuua

SEQ ID NO: 742583 - RNA, 17 nt, Artificial Sequence
  Synthetic
cuuguuuucucugcuua

SEQ ID NO: 742584 - RNA, 17 nt, Artificial Sequence
  Synthetic
augguugauucugcuua

SEQ ID NO: 742585 - RNA, 17 nt, Artificial Sequence
  Synthetic
aauuauuuuucugcuua

SEQ ID NO: 742586 - RNA, 17 nt, Artificial Sequence
  Synthetic
ugaauggaaagugcuua

SEQ ID NO: 742587 - RNA, 17 nt, Artificial Sequence
  Synthetic
uggaaggguggugcuua

SEQ ID NO: 742588 - RNA, 17 nt, Artificial Sequence
  Synthetic
agacgaaaaugugcuua

SEQ ID NO: 742589 - RNA, 17 nt, Artificial Sequence
  Synthetic
aucuuuucaugugcuua

SEQ ID NO: 742590 - RNA, 17 nt, Artificial Sequence
  Synthetic
aggcauuucugugcuua

SEQ ID NO: 742591 - RNA, 17 nt, Artificial Sequence
  Synthetic
uauuuugcuauugcuua

SEQ ID NO: 742592 - RNA, 17 nt, Artificial Sequence
  Synthetic
cuuugugcuguugcuua

SEQ ID NO: 742593 - RNA, 17 nt, Artificial Sequence
  Synthetic
cuccuuacuuuugcuua

SEQ ID NO: 742594 - RNA, 17 nt, Artificial Sequence
  Synthetic
accagauguuuugcuua

SEQ ID NO: 742595 - RNA, 17 nt, Artificial Sequence
  Synthetic
aaaggcagcaaaucuua

SEQ ID NO: 742596 - RNA, 17 nt, Artificial Sequence
  Synthetic
uuauuaaagaaaucuua

SEQ ID NO: 742597 - RNA, 17 nt, Artificial Sequence
  Synthetic
ucaacuuggcaaucuua

SEQ ID NO: 742598 - RNA, 17 nt, Artificial Sequence
  Synthetic
cuauuagcauaaucuua

SEQ ID NO: 742599 - RNA, 17 nt, Artificial Sequence
  Synthetic
auucacaaguaaucuua

SEQ ID NO: 742600 - RNA, 17 nt, Artificial Sequence
  Synthetic
agauaaaauuaaucuua

SEQ ID NO: 742601 - RNA, 17 nt, Artificial Sequence
  Synthetic
cccaauaauuaaucuua

SEQ ID NO: 742602 - RNA, 17 nt, Artificial Sequence
  Synthetic
cacuucauuuaaucuua

SEQ ID NO: 742603 - RNA, 17 nt, Artificial Sequence
  Synthetic
aauuugcuuuaaucuua

SEQ ID NO: 742604 - RNA, 17 nt, Artificial Sequence
  Synthetic
acuggcucaacaucuua

SEQ ID NO: 742605 - RNA, 17 nt, Artificial Sequence
  Synthetic
uuuaugaucacaucuua

SEQ ID NO: 742606 - RNA, 17 nt, Artificial Sequence
  Synthetic
uaguccaacccaucuua

SEQ ID NO: 742607 - RNA, 17 nt, Artificial Sequence
  Synthetic
acaauaaugccaucuua

SEQ ID NO: 742608 - RNA, 17 nt, Artificial Sequence
  Synthetic
aauccucuuucaucuua

SEQ ID NO: 742609 - RNA, 17 nt, Artificial Sequence
  Synthetic
aaaaucccaagaucuua

SEQ ID NO: 742610 - RNA, 17 nt, Artificial Sequence
  Synthetic
cauucugcaugaucuua

SEQ ID NO: 742611 - RNA, 17 nt, Artificial Sequence
  Synthetic
acuauuuccugaucuua

SEQ ID NO: 742612 - RNA, 17 nt, Artificial Sequence
  Synthetic
ucuuguuucugaucuua

SEQ ID NO: 742613 - RNA, 17 nt, Artificial Sequence
  Synthetic
ugaaaauggugaucuua

SEQ ID NO: 742614 - RNA, 17 nt, Artificial Sequence
  Synthetic
uauauauugugaucuua

SEQ ID NO: 742615 - RNA, 17 nt, Artificial Sequence
  Synthetic
ucugcaguuugaucuua

SEQ ID NO: 742616 - RNA, 17 nt, Artificial Sequence
  Synthetic
ucgaugaagguaucuua

SEQ ID NO: 742617 - RNA, 17 nt, Artificial Sequence
  Synthetic
auacaaaugguaucuua

SEQ ID NO: 742618 - RNA, 17 nt, Artificial Sequence
  Synthetic
cccacaacuguaucuua

SEQ ID NO: 742619 - RNA, 17 nt, Artificial Sequence
  Synthetic
uauacauuguuaucuua

SEQ ID NO: 742620 - RNA, 17 nt, Artificial Sequence
  Synthetic
accuaauauuuaucuua

SEQ ID NO: 742621 - RNA, 17 nt, Artificial Sequence
  Synthetic
auaaaaucuaccucuua

SEQ ID NO: 742622 - RNA, 17 nt, Artificial Sequence
  Synthetic
uggaauguuaccucuua

SEQ ID NO: 742623 - RNA, 17 nt, Artificial Sequence
  Synthetic
ucugcaucagccucuua

SEQ ID NO: 742624 - RNA, 17 nt, Artificial Sequence
  Synthetic
ucacacauagccucuua

SEQ ID NO: 742625 - RNA, 17 nt, Artificial Sequence
  Synthetic
auauugucuuccucuua

SEQ ID NO: 742626 - RNA, 17 nt, Artificial Sequence
  Synthetic
aacuggauaagcucuua

SEQ ID NO: 742627 - RNA, 17 nt, Artificial Sequence
  Synthetic
ccguaacugagcucuua

SEQ ID NO: 742628 - RNA, 17 nt, Artificial Sequence
  Synthetic
ugcuauuauagcucuua

SEQ ID NO: 742629 - RNA, 17 nt, Artificial Sequence
  Synthetic
ccacuuuguggcucuua

SEQ ID NO: 742630 - RNA, 17 nt, Artificial Sequence
  Synthetic
aguguuaucugcucuua

SEQ ID NO: 742631 - RNA, 17 nt, Artificial Sequence
  Synthetic
uugcauguaaucucuua

SEQ ID NO: 742632 - RNA, 17 nt, Artificial Sequence
  Synthetic
aauguauagaucucuua

SEQ ID NO: 742633 - RNA, 17 nt, Artificial Sequence
  Synthetic
ccacaacaucucucuua

SEQ ID NO: 742634 - RNA, 17 nt, Artificial Sequence
  Synthetic
uauuuugcucucucuua

SEQ ID NO: 742635 - RNA, 17 nt, Artificial Sequence
  Synthetic
augacgugagucucuua

SEQ ID NO: 742636 - RNA, 17 nt, Artificial Sequence
  Synthetic
agcaguuuauucucuua

SEQ ID NO: 742637 - RNA, 17 nt, Artificial Sequence
  Synthetic
cacugcaucuucucuua

SEQ ID NO: 742638 - RNA, 17 nt, Artificial Sequence
  Synthetic
aacaucaguuucucuua

SEQ ID NO: 742639 - RNA, 17 nt, Artificial Sequence
  Synthetic
uucagucuuuucucuua

SEQ ID NO: 742640 - RNA, 17 nt, Artificial Sequence
  Synthetic
uuaaauccuaagucuua

SEQ ID NO: 742641 - RNA, 17 nt, Artificial Sequence
  Synthetic
aguuaagaugagucuua

SEQ ID NO: 742642 - RNA, 17 nt, Artificial Sequence
  Synthetic
cccaaccccuagucuua

SEQ ID NO: 742643 - RNA, 17 nt, Artificial Sequence
  Synthetic
augaguucaacgucuua

SEQ ID NO: 742644 - RNA, 17 nt, Artificial Sequence
  Synthetic
caccaucaguggucuua

SEQ ID NO: 742645 - RNA, 17 nt, Artificial Sequence
  Synthetic
cuacuguuaaugucuua

SEQ ID NO: 742646 - RNA, 17 nt, Artificial Sequence
  Synthetic
uagggaaccaugucuua

SEQ ID NO: 742647 - RNA, 17 nt, Artificial Sequence
  Synthetic
uguauguggaugucuua

SEQ ID NO: 742648 - RNA, 17 nt, Artificial Sequence
  Synthetic
auauuuauggugucuua

SEQ ID NO: 742649 - RNA, 17 nt, Artificial Sequence
  Synthetic
caacaugucuugucuua

SEQ ID NO: 742650 - RNA, 17 nt, Artificial Sequence
  Synthetic
agagcauguuugucuua

SEQ ID NO: 742651 - RNA, 17 nt, Artificial Sequence
  Synthetic
cuauaauaaaauucuua

SEQ ID NO: 742652 - RNA, 17 nt, Artificial Sequence
  Synthetic
aaauauuaaaauucuua

SEQ ID NO: 742653 - RNA, 17 nt, Artificial Sequence
  Synthetic
uacucuacaaauucuua

SEQ ID NO: 742654 - RNA, 17 nt, Artificial Sequence
  Synthetic
uuucucucacauucuua

SEQ ID NO: 742655 - RNA, 17 nt, Artificial Sequence
  Synthetic
uauaaucuucauucuua

SEQ ID NO: 742656 - RNA, 17 nt, Artificial Sequence
  Synthetic
cauaagaaagauucuua

SEQ ID NO: 742657 - RNA, 17 nt, Artificial Sequence
  Synthetic
uuaagaacagauucuua

SEQ ID NO: 742658 - RNA, 17 nt, Artificial Sequence
  Synthetic
ucuuuuucagauucuua

SEQ ID NO: 742659 - RNA, 17 nt, Artificial Sequence
  Synthetic
agguuuggugauucuua

SEQ ID NO: 742660 - RNA, 17 nt, Artificial Sequence
  Synthetic
acucuacucccuucuua

SEQ ID NO: 742661 - RNA, 17 nt, Artificial Sequence
  Synthetic
aaaaacuucccuucuua

SEQ ID NO: 742662 - RNA, 17 nt, Artificial Sequence
  Synthetic
aaaugccuuccuucuua

SEQ ID NO: 742663 - RNA, 17 nt, Artificial Sequence
  Synthetic
uugccagaagcuucuua

SEQ ID NO: 742664 - RNA, 17 nt, Artificial Sequence
  Synthetic
uguccuugagcuucuua

SEQ ID NO: 742665 - RNA, 17 nt, Artificial Sequence
  Synthetic
ugagaaaaaucuucuua

SEQ ID NO: 742666 - RNA, 17 nt, Artificial Sequence
  Synthetic
uuucccuaaucuucuua

SEQ ID NO: 742667 - RNA, 17 nt, Artificial Sequence
  Synthetic
aaccaauuaucuucuua

SEQ ID NO: 742668 - RNA, 17 nt, Artificial Sequence
  Synthetic
uuuuuacacucuucuua

SEQ ID NO: 742669 - RNA, 17 nt, Artificial Sequence
  Synthetic
ucuucuucuucuucuua

SEQ ID NO: 742670 - RNA, 17 nt, Artificial Sequence
  Synthetic
auagguguaaguucuua

SEQ ID NO: 742671 - RNA, 17 nt, Artificial Sequence
  Synthetic
ucauugagccguucuua

SEQ ID NO: 742672 - RNA, 17 nt, Artificial Sequence
  Synthetic
auaucaucaauuucuua

SEQ ID NO: 742673 - RNA, 17 nt, Artificial Sequence
  Synthetic
caauccagaauuucuua

SEQ ID NO: 742674 - RNA, 17 nt, Artificial Sequence
  Synthetic
acaguguuuauuucuua

SEQ ID NO: 742675 - RNA, 17 nt, Artificial Sequence
  Synthetic
aaacuaagacuuucuua

SEQ ID NO: 742676 - RNA, 17 nt, Artificial Sequence
  Synthetic
cuuuuucuaguuucuua

SEQ ID NO: 742677 - RNA, 17 nt, Artificial Sequence
  Synthetic
aaguuuucuguuucuua

SEQ ID NO: 742678 - RNA, 17 nt, Artificial Sequence
  Synthetic
aagaauccauuuucuua

SEQ ID NO: 742679 - RNA, 17 nt, Artificial Sequence
  Synthetic
aaaguagcauuuucuua

SEQ ID NO: 742680 - RNA, 17 nt, Artificial Sequence
  Synthetic
uacaauuucuuuucuua

SEQ ID NO: 742681 - RNA, 17 nt, Artificial Sequence
  Synthetic
uuuaaaaaguuuucuua

SEQ ID NO: 742682 - RNA, 17 nt, Artificial Sequence
  Synthetic
auuauuccuuuuucuua

SEQ ID NO: 742683 - RNA, 17 nt, Artificial Sequence
  Synthetic
cuaaaauuuuuuucuua

SEQ ID NO: 742684 - RNA, 17 nt, Artificial Sequence
  Synthetic
uuaaggaccaaaaguua

SEQ ID NO: 742685 - RNA, 17 nt, Artificial Sequence
  Synthetic
aggcccugcaaaaguua

SEQ ID NO: 742686 - RNA, 17 nt, Artificial Sequence
  Synthetic
aagaauaggaaaaguua

SEQ ID NO: 742687 - RNA, 17 nt, Artificial Sequence
  Synthetic
uuuucaacuaaaaguua

SEQ ID NO: 742688 - RNA, 17 nt, Artificial Sequence
  Synthetic
cuucuugguaaaaguua

SEQ ID NO: 742689 - RNA, 17 nt, Artificial Sequence
  Synthetic
uucauuacacaaaguua

SEQ ID NO: 742690 - RNA, 17 nt, Artificial Sequence
  Synthetic
uuauuuuaagaaaguua

SEQ ID NO: 742691 - RNA, 17 nt, Artificial Sequence
  Synthetic
uguuacuuguaaaguua

SEQ ID NO: 742692 - RNA, 17 nt, Artificial Sequence
  Synthetic
cacuaugaaucaaguua

SEQ ID NO: 742693 - RNA, 17 nt, Artificial Sequence
  Synthetic
agugucccuucaaguua

SEQ ID NO: 742694 - RNA, 17 nt, Artificial Sequence
  Synthetic
uuugaguaaagaaguua

SEQ ID NO: 742695 - RNA, 17 nt, Artificial Sequence
  Synthetic
uuuaagucaagaaguua

SEQ ID NO: 742696 - RNA, 17 nt, Artificial Sequence
  Synthetic
cugcugacaggaaguua

SEQ ID NO: 742697 - RNA, 17 nt, Artificial Sequence
  Synthetic
ccauauggcugaaguua

SEQ ID NO: 742698 - RNA, 17 nt, Artificial Sequence
  Synthetic
uaggauauaauaaguua

SEQ ID NO: 742699 - RNA, 17 nt, Artificial Sequence
  Synthetic
caucaguggauaaguua

SEQ ID NO: 742700 - RNA, 17 nt, Artificial Sequence
  Synthetic
ugacagaagcuaaguua

SEQ ID NO: 742701 - RNA, 17 nt, Artificial Sequence
  Synthetic
aaaaauauaguaaguua

SEQ ID NO: 742702 - RNA, 17 nt, Artificial Sequence
  Synthetic
augacuuggguaaguua

SEQ ID NO: 742703 - RNA, 17 nt, Artificial Sequence
  Synthetic
uacuagaauguaaguua

SEQ ID NO: 742704 - RNA, 17 nt, Artificial Sequence
  Synthetic
cuuauaaaauuaaguua

SEQ ID NO: 742705 - RNA, 17 nt, Artificial Sequence
  Synthetic
auaauuggauuaaguua

SEQ ID NO: 742706 - RNA, 17 nt, Artificial Sequence
  Synthetic
uauauacacuuaaguua

SEQ ID NO: 742707 - RNA, 17 nt, Artificial Sequence
  Synthetic
auaugaaucuuaaguua

SEQ ID NO: 742708 - RNA, 17 nt, Artificial Sequence
  Synthetic
uaaagggaaaacaguua

SEQ ID NO: 742709 - RNA, 17 nt, Artificial Sequence
  Synthetic
uuuacuucuuacaguua

SEQ ID NO: 742710 - RNA, 17 nt, Artificial Sequence
  Synthetic
aauaauuaagccaguua

SEQ ID NO: 742711 - RNA, 17 nt, Artificial Sequence
  Synthetic
uaaaaguuauccaguua

SEQ ID NO: 742712 - RNA, 17 nt, Artificial Sequence
  Synthetic
uuuauccuuugcaguua

SEQ ID NO: 742713 - RNA, 17 nt, Artificial Sequence
  Synthetic
cccuaagagcucaguua

SEQ ID NO: 742714 - RNA, 17 nt, Artificial Sequence
  Synthetic
aaauugaugcucaguua

SEQ ID NO: 742715 - RNA, 17 nt, Artificial Sequence
  Synthetic
cacucauucuucaguua

SEQ ID NO: 742716 - RNA, 17 nt, Artificial Sequence
  Synthetic
cuacaaaguuucaguua

SEQ ID NO: 742717 - RNA, 17 nt, Artificial Sequence
  Synthetic
ccucauaaaaagaguua

SEQ ID NO: 742718 - RNA, 17 nt, Artificial Sequence
  Synthetic
cauuagagaaagaguua

SEQ ID NO: 742719 - RNA, 17 nt, Artificial Sequence
  Synthetic
agcuaaggaaagaguua

SEQ ID NO: 742720 - RNA, 17 nt, Artificial Sequence
  Synthetic
auuaaugucaagaguua

SEQ ID NO: 742721 - RNA, 17 nt, Artificial Sequence
  Synthetic
ucuuuaaaauagaguua

SEQ ID NO: 742722 - RNA, 17 nt, Artificial Sequence
  Synthetic
uguuguaucaggaguua

SEQ ID NO: 742723 - RNA, 17 nt, Artificial Sequence
  Synthetic
ucaaggcauaggaguua

SEQ ID NO: 742724 - RNA, 17 nt, Artificial Sequence
  Synthetic
ugggaaaguaggaguua

SEQ ID NO: 742725 - RNA, 17 nt, Artificial Sequence
  Synthetic
uuggagagcgggaguua

SEQ ID NO: 742726 - RNA, 17 nt, Artificial Sequence
  Synthetic
uaggugggugggaguua

SEQ ID NO: 742727 - RNA, 17 nt, Artificial Sequence
  Synthetic
agccuguauuggaguua

SEQ ID NO: 742728 - RNA, 17 nt, Artificial Sequence
  Synthetic
ccucauaaaaugaguua

SEQ ID NO: 742729 - RNA, 17 nt, Artificial Sequence
  Synthetic
ucuaggaaucugaguua

SEQ ID NO: 742730 - RNA, 17 nt, Artificial Sequence
  Synthetic
aauucccuucugaguua

SEQ ID NO: 742731 - RNA, 17 nt, Artificial Sequence
  Synthetic
acaaaggaauugaguua

SEQ ID NO: 742732 - RNA, 17 nt, Artificial Sequence
  Synthetic
ugacacauaaauaguua

SEQ ID NO: 742733 - RNA, 17 nt, Artificial Sequence
  Synthetic
agaauggagcauaguua

SEQ ID NO: 742734 - RNA, 17 nt, Artificial Sequence
  Synthetic
uuaagucaggauaguua

SEQ ID NO: 742735 - RNA, 17 nt, Artificial Sequence
  Synthetic
cauucacaauauaguua

SEQ ID NO: 742736 - RNA, 17 nt, Artificial Sequence
  Synthetic
caggauuauuauaguua

SEQ ID NO: 742737 - RNA, 17 nt, Artificial Sequence
  Synthetic
uauaacaaaacuaguua

SEQ ID NO: 742738 - RNA, 17 nt, Artificial Sequence
  Synthetic
auuuauuuagcuaguua

SEQ ID NO: 742739 - RNA, 17 nt, Artificial Sequence
  Synthetic
uggcaaugggcuaguua

SEQ ID NO: 742740 - RNA, 17 nt, Artificial Sequence
  Synthetic
aaacauacaucuaguua

SEQ ID NO: 742741 - RNA, 17 nt, Artificial Sequence
  Synthetic
uuucuuggaucuaguua

SEQ ID NO: 742742 - RNA, 17 nt, Artificial Sequence
  Synthetic
auccauauuucuaguua

SEQ ID NO: 742743 - RNA, 17 nt, Artificial Sequence
  Synthetic
agugaacaagguaguua

SEQ ID NO: 742744 - RNA, 17 nt, Artificial Sequence
  Synthetic
uuugcauuugguaguua

SEQ ID NO: 742745 - RNA, 17 nt, Artificial Sequence
  Synthetic
aguuuuguauguaguua

SEQ ID NO: 742746 - RNA, 17 nt, Artificial Sequence
  Synthetic
caccacagguguaguua

SEQ ID NO: 742747 - RNA, 17 nt, Artificial Sequence
  Synthetic
cuugaguuuauuaguua

SEQ ID NO: 742748 - RNA, 17 nt, Artificial Sequence
  Synthetic
uaaaucccaguuaguua

SEQ ID NO: 742749 - RNA, 17 nt, Artificial Sequence
  Synthetic
aauuauucuuaacguua

SEQ ID NO: 742750 - RNA, 17 nt, Artificial Sequence
  Synthetic
aggaccauuugacguua

SEQ ID NO: 742751 - RNA, 17 nt, Artificial Sequence
  Synthetic
uaugagagcaggcguua

SEQ ID NO: 742752 - RNA, 17 nt, Artificial Sequence
  Synthetic
uuuuucuuggaucguua

SEQ ID NO: 742753 - RNA, 17 nt, Artificial Sequence
  Synthetic
cuccuuacuucucguua

SEQ ID NO: 742754 - RNA, 17 nt, Artificial Sequence
  Synthetic
aaacauuuaaaagguua

SEQ ID NO: 742755 - RNA, 17 nt, Artificial Sequence
  Synthetic
aggaauggcaaagguua

SEQ ID NO: 742756 - RNA, 17 nt, Artificial Sequence
  Synthetic
cagaagggagaagguua

SEQ ID NO: 742757 - RNA, 17 nt, Artificial Sequence
  Synthetic
aaaaucugaccagguua

SEQ ID NO: 742758 - RNA, 17 nt, Artificial Sequence
  Synthetic
uauagaaagggagguua

SEQ ID NO: 742759 - RNA, 17 nt, Artificial Sequence
  Synthetic
agcuacucgggagguua

SEQ ID NO: 742760 - RNA, 17 nt, Artificial Sequence
  Synthetic
cgaggggugggagguua

SEQ ID NO: 742761 - RNA, 17 nt, Artificial Sequence
  Synthetic
agauaucaaugagguua

SEQ ID NO: 742762 - RNA, 17 nt, Artificial Sequence
  Synthetic
aguauauauugagguua

SEQ ID NO: 742763 - RNA, 17 nt, Artificial Sequence
  Synthetic
ccauauaacauagguua

SEQ ID NO: 742764 - RNA, 17 nt, Artificial Sequence
  Synthetic
uuuaaaaaauuagguua

SEQ ID NO: 742765 - RNA, 17 nt, Artificial Sequence
  Synthetic
uaugaugaugacgguua

SEQ ID NO: 742766 - RNA, 17 nt, Artificial Sequence
  Synthetic
acagcagaagaggguua

SEQ ID NO: 742767 - RNA, 17 nt, Artificial Sequence
  Synthetic
aaacaaugugaggguua

SEQ ID NO: 742768 - RNA, 17 nt, Artificial Sequence
  Synthetic
acuggauuauaggguua

SEQ ID NO: 742769 - RNA, 17 nt, Artificial Sequence
  Synthetic
aaagcggguagggguua

SEQ ID NO: 742770 - RNA, 17 nt, Artificial Sequence
  Synthetic
caggggaugggggguua

SEQ ID NO: 742771 - RNA, 17 nt, Artificial Sequence
  Synthetic
aggacguguggggguua

SEQ ID NO: 742772 - RNA, 17 nt, Artificial Sequence
  Synthetic
cuguugaaaugggguua

SEQ ID NO: 742773 - RNA, 17 nt, Artificial Sequence
  Synthetic
ugucaauauuuggguua

SEQ ID NO: 742774 - RNA, 17 nt, Artificial Sequence
  Synthetic
cuaugaaauuaugguua

SEQ ID NO: 742775 - RNA, 17 nt, Artificial Sequence
  Synthetic
uuaucaacaacugguua

SEQ ID NO: 742776 - RNA, 17 nt, Artificial Sequence
  Synthetic
uaaaucuuaccugguua

SEQ ID NO: 742777 - RNA, 17 nt, Artificial Sequence
  Synthetic
cacugagcugcugguua

SEQ ID NO: 742778 - RNA, 17 nt, Artificial Sequence
  Synthetic
aucugccuuucugguua

SEQ ID NO: 742779 - RNA, 17 nt, Artificial Sequence
  Synthetic
acuauucccagugguua

SEQ ID NO: 742780 - RNA, 17 nt, Artificial Sequence
  Synthetic
cccagcuguggugguua

SEQ ID NO: 742781 - RNA, 17 nt, Artificial Sequence
  Synthetic
cugcuggccugugguua

SEQ ID NO: 742782 - RNA, 17 nt, Artificial Sequence
  Synthetic
aauacucugauugguua

SEQ ID NO: 742783 - RNA, 17 nt, Artificial Sequence
  Synthetic
ucagagucauuugguua

SEQ ID NO: 742784 - RNA, 17 nt, Artificial Sequence
  Synthetic
ugaaggaaaaaauguua

SEQ ID NO: 742785 - RNA, 17 nt, Artificial Sequence
  Synthetic
acuuaccaaaaauguua

SEQ ID NO: 742786 - RNA, 17 nt, Artificial Sequence
  Synthetic
aguucuugaaaauguua

SEQ ID NO: 742787 - RNA, 17 nt, Artificial Sequence
  Synthetic
aauaugguauaauguua

SEQ ID NO: 742788 - RNA, 17 nt, Artificial Sequence
  Synthetic
aauaagauguaauguua

SEQ ID NO: 742789 - RNA, 17 nt, Artificial Sequence
  Synthetic
uauuaccuuuaauguua

SEQ ID NO: 742790 - RNA, 17 nt, Artificial Sequence
  Synthetic
augucaggaacauguua

SEQ ID NO: 742791 - RNA, 17 nt, Artificial Sequence
  Synthetic
cuaggguuugcauguua

SEQ ID NO: 742792 - RNA, 17 nt, Artificial Sequence
  Synthetic
agaauacugagauguua

SEQ ID NO: 742793 - RNA, 17 nt, Artificial Sequence
  Synthetic
uucauuuuuggauguua

SEQ ID NO: 742794 - RNA, 17 nt, Artificial Sequence
  Synthetic
uauuagagaugauguua

SEQ ID NO: 742795 - RNA, 17 nt, Artificial Sequence
  Synthetic
uuuuaauugugauguua

SEQ ID NO: 742796 - RNA, 17 nt, Artificial Sequence
  Synthetic
caauuaccaauauguua

SEQ ID NO: 742797 - RNA, 17 nt, Artificial Sequence
  Synthetic
aauuauugaauauguua

SEQ ID NO: 742798 - RNA, 17 nt, Artificial Sequence
  Synthetic
auguuaagcauauguua

SEQ ID NO: 742799 - RNA, 17 nt, Artificial Sequence
  Synthetic
uuuuaucaacuauguua

SEQ ID NO: 742800 - RNA, 17 nt, Artificial Sequence
  Synthetic
uuaaucuagguauguua

SEQ ID NO: 742801 - RNA, 17 nt, Artificial Sequence
  Synthetic
aaauguacuguauguua

SEQ ID NO: 742802 - RNA, 17 nt, Artificial Sequence
  Synthetic
uuguaucucuuauguua

SEQ ID NO: 742803 - RNA, 17 nt, Artificial Sequence
  Synthetic
cacauaauuuuauguua

SEQ ID NO: 742804 - RNA, 17 nt, Artificial Sequence
  Synthetic
cuuucacuuuuauguua

SEQ ID NO: 742805 - RNA, 17 nt, Artificial Sequence
  Synthetic
acuaguaggaacuguua

SEQ ID NO: 742806 - RNA, 17 nt, Artificial Sequence
  Synthetic
uauuuuuauaacuguua

SEQ ID NO: 742807 - RNA, 17 nt, Artificial Sequence
  Synthetic
uagucuacacacuguua

SEQ ID NO: 742808 - RNA, 17 nt, Artificial Sequence
  Synthetic
ucuaguuaagacuguua

SEQ ID NO: 742809 - RNA, 17 nt, Artificial Sequence
  Synthetic
uguuugaaggacuguua

SEQ ID NO: 742810 - RNA, 17 nt, Artificial Sequence
  Synthetic
uuauugaaugccuguua

SEQ ID NO: 742811 - RNA, 17 nt, Artificial Sequence
  Synthetic
caauccguugccuguua

SEQ ID NO: 742812 - RNA, 17 nt, Artificial Sequence
  Synthetic
aaaaccagaaucuguua

SEQ ID NO: 742813 - RNA, 17 nt, Artificial Sequence
  Synthetic
ugacuugucaucuguua

SEQ ID NO: 742814 - RNA, 17 nt, Artificial Sequence
  Synthetic
aaugccucugucuguua

SEQ ID NO: 742815 - RNA, 17 nt, Artificial Sequence
  Synthetic
aaaagaaaaaaguguua

SEQ ID NO: 742816 - RNA, 17 nt, Artificial Sequence
  Synthetic
aucuuaacaaaguguua

SEQ ID NO: 742817 - RNA, 17 nt, Artificial Sequence
  Synthetic
ugggaccacaaguguua

SEQ ID NO: 742818 - RNA, 17 nt, Artificial Sequence
  Synthetic
agacuaugcuaguguua

SEQ ID NO: 742819 - RNA, 17 nt, Artificial Sequence
  Synthetic
ugaauucccauguguua

SEQ ID NO: 742820 - RNA, 17 nt, Artificial Sequence
  Synthetic
cuaauggaauuguguua

SEQ ID NO: 742821 - RNA, 17 nt, Artificial Sequence
  Synthetic
aauuauucauuguguua

SEQ ID NO: 742822 - RNA, 17 nt, Artificial Sequence
  Synthetic
auuaagagaaauuguua

SEQ ID NO: 742823 - RNA, 17 nt, Artificial Sequence
  Synthetic
cuccugggaaauuguua

SEQ ID NO: 742824 - RNA, 17 nt, Artificial Sequence
  Synthetic
uauuuuuuaaauuguua

SEQ ID NO: 742825 - RNA, 17 nt, Artificial Sequence
  Synthetic
auaaggaggcauuguua

SEQ ID NO: 742826 - RNA, 17 nt, Artificial Sequence
  Synthetic
aggauaguugauuguua

SEQ ID NO: 742827 - RNA, 17 nt, Artificial Sequence
  Synthetic
aaugguacauauuguua

SEQ ID NO: 742828 - RNA, 17 nt, Artificial Sequence
  Synthetic
uuaccaucauauuguua

SEQ ID NO: 742829 - RNA, 17 nt, Artificial Sequence
  Synthetic
aaagcuucuuauuguua

SEQ ID NO: 742830 - RNA, 17 nt, Artificial Sequence
  Synthetic
uuggcaaacacuuguua

SEQ ID NO: 742831 - RNA, 17 nt, Artificial Sequence
  Synthetic
cccauuaacccuuguua

SEQ ID NO: 742832 - RNA, 17 nt, Artificial Sequence
  Synthetic
aaaauauagucuuguua

SEQ ID NO: 742833 - RNA, 17 nt, Artificial Sequence
  Synthetic
acuaauaaugguuguua

SEQ ID NO: 742834 - RNA, 17 nt, Artificial Sequence
  Synthetic
uuuuguuguuguuguua

SEQ ID NO: 742835 - RNA, 17 nt, Artificial Sequence
  Synthetic
aaagaaaagauuuguua

SEQ ID NO: 742836 - RNA, 17 nt, Artificial Sequence
  Synthetic
uuagggagaguuuguua

SEQ ID NO: 742837 - RNA, 17 nt, Artificial Sequence
  Synthetic
ucugugguauuuuguua

SEQ ID NO: 742838 - RNA, 17 nt, Artificial Sequence
  Synthetic
ucccacugcuuuuguua

SEQ ID NO: 742839 - RNA, 17 nt, Artificial Sequence
  Synthetic
caugggugcuuuuguua

SEQ ID NO: 742840 - RNA, 17 nt, Artificial Sequence
  Synthetic
uggauguguuuuuguua

SEQ ID NO: 742841 - RNA, 17 nt, Artificial Sequence
  Synthetic
agaaaaaaaaaaauuua

SEQ ID NO: 742842 - RNA, 17 nt, Artificial Sequence
  Synthetic
aaacaaacaaaaauuua

SEQ ID NO: 742843 - RNA, 17 nt, Artificial Sequence
  Synthetic
aaaacuaucaaaauuua

SEQ ID NO: 742844 - RNA, 17 nt, Artificial Sequence
  Synthetic
auguggcagaaaauuua

SEQ ID NO: 742845 - RNA, 17 nt, Artificial Sequence
  Synthetic
agccuggagaaaauuua

SEQ ID NO: 742846 - RNA, 17 nt, Artificial Sequence
  Synthetic
uuaagaacuaaaauuua

SEQ ID NO: 742847 - RNA, 17 nt, Artificial Sequence
  Synthetic
uguuaaugacaaauuua

SEQ ID NO: 742848 - RNA, 17 nt, Artificial Sequence
  Synthetic
aucuauaagcaaauuua

SEQ ID NO: 742849 - RNA, 17 nt, Artificial Sequence
  Synthetic
aagucgaaagaaauuua

SEQ ID NO: 742850 - RNA, 17 nt, Artificial Sequence
  Synthetic
ccauauaaagaaauuua

SEQ ID NO: 742851 - RNA, 17 nt, Artificial Sequence
  Synthetic
aggcaugaagaaauuua

SEQ ID NO: 742852 - RNA, 17 nt, Artificial Sequence
  Synthetic
ugaguucgagaaauuua

SEQ ID NO: 742853 - RNA, 17 nt, Artificial Sequence
  Synthetic
uagaccugggaaauuua

SEQ ID NO: 742854 - RNA, 17 nt, Artificial Sequence
  Synthetic
uuuuacuuugaaauuua

SEQ ID NO: 742855 - RNA, 17 nt, Artificial Sequence
  Synthetic
auguaagaauaaauuua

SEQ ID NO: 742856 - RNA, 17 nt, Artificial Sequence
  Synthetic
uuaauuguauaaauuua

SEQ ID NO: 742857 - RNA, 17 nt, Artificial Sequence
  Synthetic
uuguuuguauaaauuua

SEQ ID NO: 742858 - RNA, 17 nt, Artificial Sequence
  Synthetic
ccauuagcguaaauuua

SEQ ID NO: 742859 - RNA, 17 nt, Artificial Sequence
  Synthetic
auuauggauuaaauuua

SEQ ID NO: 742860 - RNA, 17 nt, Artificial Sequence
  Synthetic
aucucugcuuaaauuua

SEQ ID NO: 742861 - RNA, 17 nt, Artificial Sequence
  Synthetic
aacuaaaagacaauuua

SEQ ID NO: 742862 - RNA, 17 nt, Artificial Sequence
  Synthetic
agcaacgauacaauuua

SEQ ID NO: 742863 - RNA, 17 nt, Artificial Sequence
  Synthetic
acaagcuauccaauuua

SEQ ID NO: 742864 - RNA, 17 nt, Artificial Sequence
  Synthetic
aaugcagaggcaauuua

SEQ ID NO: 742865 - RNA, 17 nt, Artificial Sequence
  Synthetic
cagucucuugcaauuua

SEQ ID NO: 742866 - RNA, 17 nt, Artificial Sequence
  Synthetic
uccuccuugucaauuua

SEQ ID NO: 742867 - RNA, 17 nt, Artificial Sequence
  Synthetic
uugacucuaagaauuua

SEQ ID NO: 742868 - RNA, 17 nt, Artificial Sequence
  Synthetic
cacagugacagaauuua

SEQ ID NO: 742869 - RNA, 17 nt, Artificial Sequence
  Synthetic
agaauauuuggaauuua

SEQ ID NO: 742870 - RNA, 17 nt, Artificial Sequence
  Synthetic
acaucaccaugaauuua

SEQ ID NO: 742871 - RNA, 17 nt, Artificial Sequence
  Synthetic
uuacauuucugaauuua

SEQ ID NO: 742872 - RNA, 17 nt, Artificial Sequence
  Synthetic
auaugccugugaauuua

SEQ ID NO: 742873 - RNA, 17 nt, Artificial Sequence
  Synthetic
uuuaugcguugaauuua

SEQ ID NO: 742874 - RNA, 17 nt, Artificial Sequence
  Synthetic
augacuuuaauaauuua

SEQ ID NO: 742875 - RNA, 17 nt, Artificial Sequence
  Synthetic
auuuuguggauaauuua

SEQ ID NO: 742876 - RNA, 17 nt, Artificial Sequence
  Synthetic
agaaagcugauaauuua

SEQ ID NO: 742877 - RNA, 17 nt, Artificial Sequence
  Synthetic
uauuuuuuuauaauuua

SEQ ID NO: 742878 - RNA, 17 nt, Artificial Sequence
  Synthetic
aaggaauuucuaauuua

SEQ ID NO: 742879 - RNA, 17 nt, Artificial Sequence
  Synthetic
uuuggccugguaauuua

SEQ ID NO: 742880 - RNA, 17 nt, Artificial Sequence
  Synthetic
cccugauauguaauuua

SEQ ID NO: 742881 - RNA, 17 nt, Artificial Sequence
  Synthetic
ugugggcuuguaauuua

SEQ ID NO: 742882 - RNA, 17 nt, Artificial Sequence
  Synthetic
uuucauauauuaauuua

SEQ ID NO: 742883 - RNA, 17 nt, Artificial Sequence
  Synthetic
aacaaauauuuaauuua

SEQ ID NO: 742884 - RNA, 17 nt, Artificial Sequence
  Synthetic
ccauaucuuuuaauuua

SEQ ID NO: 742885 - RNA, 17 nt, Artificial Sequence
  Synthetic
caaauagaaaacauuua

SEQ ID NO: 742886 - RNA, 17 nt, Artificial Sequence
  Synthetic
uauuagccuaacauuua

SEQ ID NO: 742887 - RNA, 17 nt, Artificial Sequence
  Synthetic
ccauuguuuaacauuua

SEQ ID NO: 742888 - RNA, 17 nt, Artificial Sequence
  Synthetic
uguggcucacacauuua

SEQ ID NO: 742889 - RNA, 17 nt, Artificial Sequence
  Synthetic
uccccagaccacauuua

SEQ ID NO: 742890 - RNA, 17 nt, Artificial Sequence
  Synthetic
augaggaugcacauuua

SEQ ID NO: 742891 - RNA, 17 nt, Artificial Sequence
  Synthetic
uacuucuuucacauuua

SEQ ID NO: 742892 - RNA, 17 nt, Artificial Sequence
  Synthetic
ucaauucaugacauuua

SEQ ID NO: 742893 - RNA, 17 nt, Artificial Sequence
  Synthetic
auaauuauauacauuua

SEQ ID NO: 742894 - RNA, 17 nt, Artificial Sequence
  Synthetic
cuuauuauauacauuua

SEQ ID NO: 742895 - RNA, 17 nt, Artificial Sequence
  Synthetic
auacauaccuacauuua

SEQ ID NO: 742896 - RNA, 17 nt, Artificial Sequence
  Synthetic
agcauaaauuacauuua

SEQ ID NO: 742897 - RNA, 17 nt, Artificial Sequence
  Synthetic
uucagguauuacauuua

SEQ ID NO: 742898 - RNA, 17 nt, Artificial Sequence
  Synthetic
aaguugguuuacauuua

SEQ ID NO: 742899 - RNA, 17 nt, Artificial Sequence
  Synthetic
uagccuguuuacauuua

SEQ ID NO: 742900 - RNA, 17 nt, Artificial Sequence
  Synthetic
uguauauuuuacauuua

SEQ ID NO: 742901 - RNA, 17 nt, Artificial Sequence
  Synthetic
cucagaaccuccauuua

SEQ ID NO: 742902 - RNA, 17 nt, Artificial Sequence
  Synthetic
ucuuaccauuccauuua

SEQ ID NO: 742903 - RNA, 17 nt, Artificial Sequence
  Synthetic
aauucccauuccauuua

SEQ ID NO: 742904 - RNA, 17 nt, Artificial Sequence
  Synthetic
ugugaguccagcauuua

SEQ ID NO: 742905 - RNA, 17 nt, Artificial Sequence
  Synthetic
uuaaaaacuagcauuua

SEQ ID NO: 742906 - RNA, 17 nt, Artificial Sequence
  Synthetic
uaaaauuaaggcauuua

SEQ ID NO: 742907 - RNA, 17 nt, Artificial Sequence
  Synthetic
uaucgagauggcauuua

SEQ ID NO: 742908 - RNA, 17 nt, Artificial Sequence
  Synthetic
aaugaacauugcauuua

SEQ ID NO: 742909 - RNA, 17 nt, Artificial Sequence
  Synthetic
cccaagcauugcauuua

SEQ ID NO: 742910 - RNA, 17 nt, Artificial Sequence
  Synthetic
uaaaaaucuugcauuua

SEQ ID NO: 742911 - RNA, 17 nt, Artificial Sequence
  Synthetic
uagaccauuugcauuua

SEQ ID NO: 742912 - RNA, 17 nt, Artificial Sequence
  Synthetic
acaugucuuugcauuua

SEQ ID NO: 742913 - RNA, 17 nt, Artificial Sequence
  Synthetic
cauaacaguuucauuua

SEQ ID NO: 742914 - RNA, 17 nt, Artificial Sequence
  Synthetic
uuuuuuaaaaagauuua

SEQ ID NO: 742915 - RNA, 17 nt, Artificial Sequence
  Synthetic
aaaaacuuagagauuua

SEQ ID NO: 742916 - RNA, 17 nt, Artificial Sequence
  Synthetic
uuggagucugagauuua

SEQ ID NO: 742917 - RNA, 17 nt, Artificial Sequence
  Synthetic
uaucauggugagauuua

SEQ ID NO: 742918 - RNA, 17 nt, Artificial Sequence
  Synthetic
acuccccaauagauuua

SEQ ID NO: 742919 - RNA, 17 nt, Artificial Sequence
  Synthetic
acuaauugcuagauuua

SEQ ID NO: 742920 - RNA, 17 nt, Artificial Sequence
  Synthetic
uagucucucuagauuua

SEQ ID NO: 742921 - RNA, 17 nt, Artificial Sequence
  Synthetic
cuguuaguuuagauuua

SEQ ID NO: 742922 - RNA, 17 nt, Artificial Sequence
  Synthetic
cuauuguuuuagauuua

SEQ ID NO: 742923 - RNA, 17 nt, Artificial Sequence
  Synthetic
aaacuaaaaaggauuua

SEQ ID NO: 742924 - RNA, 17 nt, Artificial Sequence
  Synthetic
auaugcugaaggauuua

SEQ ID NO: 742925 - RNA, 17 nt, Artificial Sequence
  Synthetic
cucuguagugggauuua

SEQ ID NO: 742926 - RNA, 17 nt, Artificial Sequence
  Synthetic
cagaggcuguggauuua

SEQ ID NO: 742927 - RNA, 17 nt, Artificial Sequence
  Synthetic
cuucauagaaugauuua

SEQ ID NO: 742928 - RNA, 17 nt, Artificial Sequence
  Synthetic
aaauuccccaugauuua

SEQ ID NO: 742929 - RNA, 17 nt, Artificial Sequence
  Synthetic
augagagagaugauuua

SEQ ID NO: 742930 - RNA, 17 nt, Artificial Sequence
  Synthetic
acuugagagaugauuua

SEQ ID NO: 742931 - RNA, 17 nt, Artificial Sequence
  Synthetic
uugccuuugaugauuua

SEQ ID NO: 742932 - RNA, 17 nt, Artificial Sequence
  Synthetic
ucuucugaauugauuua

SEQ ID NO: 742933 - RNA, 17 nt, Artificial Sequence
  Synthetic
uggagaccauugauuua

SEQ ID NO: 742934 - RNA, 17 nt, Artificial Sequence
  Synthetic
acauagccaaauauuua

SEQ ID NO: 742935 - RNA, 17 nt, Artificial Sequence
  Synthetic
aaauggauaaauauuua

SEQ ID NO: 742936 - RNA, 17 nt, Artificial Sequence
  Synthetic
uaaucugucaauauuua

SEQ ID NO: 742937 - RNA, 17 nt, Artificial Sequence
  Synthetic
ugagauuguaauauuua

SEQ ID NO: 742938 - RNA, 17 nt, Artificial Sequence
  Synthetic
aaguauaaacauauuua

SEQ ID NO: 742939 - RNA, 17 nt, Artificial Sequence
  Synthetic
cuaugcagucauauuua

SEQ ID NO: 742940 - RNA, 17 nt, Artificial Sequence
  Synthetic
aucaugcuucauauuua

SEQ ID NO: 742941 - RNA, 17 nt, Artificial Sequence
  Synthetic
uaucucaaggauauuua

SEQ ID NO: 742942 - RNA, 17 nt, Artificial Sequence
  Synthetic
uugcuuccugauauuua

SEQ ID NO: 742943 - RNA, 17 nt, Artificial Sequence
  Synthetic
aucacuuaauauauuua

SEQ ID NO: 742944 - RNA, 17 nt, Artificial Sequence
  Synthetic
guagguauauauauuua

SEQ ID NO: 742945 - RNA, 17 nt, Artificial Sequence
  Synthetic
uuuauuguauauauuua

SEQ ID NO: 742946 - RNA, 17 nt, Artificial Sequence
  Synthetic
cuacuuagguauauuua

SEQ ID NO: 742947 - RNA, 17 nt, Artificial Sequence
  Synthetic
auaaacucuuauauuua

SEQ ID NO: 742948 - RNA, 17 nt, Artificial Sequence
  Synthetic
cuuucgucuuauauuua

SEQ ID NO: 742949 - RNA, 17 nt, Artificial Sequence
  Synthetic
auuuuuggaacuauuua

SEQ ID NO: 742950 - RNA, 17 nt, Artificial Sequence
  Synthetic
uuuguuuuaacuauuua

SEQ ID NO: 742951 - RNA, 17 nt, Artificial Sequence
  Synthetic
uauucuacagcuauuua

SEQ ID NO: 742952 - RNA, 17 nt, Artificial Sequence
  Synthetic
auguuuugagcuauuua

SEQ ID NO: 742953 - RNA, 17 nt, Artificial Sequence
  Synthetic
ugagcuacuucuauuua

SEQ ID NO: 742954 - RNA, 17 nt, Artificial Sequence
  Synthetic
aaaaccuaaaguauuua

SEQ ID NO: 742955 - RNA, 17 nt, Artificial Sequence
  Synthetic
aaaugcugaaguauuua

SEQ ID NO: 742956 - RNA, 17 nt, Artificial Sequence
  Synthetic
caaucaguaaguauuua

SEQ ID NO: 742957 - RNA, 17 nt, Artificial Sequence
  Synthetic
uauaacugcaguauuua

SEQ ID NO: 742958 - RNA, 17 nt, Artificial Sequence
  Synthetic
uaauuuuuuaguauuua

SEQ ID NO: 742959 - RNA, 17 nt, Artificial Sequence
  Synthetic
ccauauugagguauuua

SEQ ID NO: 742960 - RNA, 17 nt, Artificial Sequence
  Synthetic
agggguuuagguauuua

SEQ ID NO: 742961 - RNA, 17 nt, Artificial Sequence
  Synthetic
auauugacugguauuua

SEQ ID NO: 742962 - RNA, 17 nt, Artificial Sequence
  Synthetic
cugaagaaauguauuua

SEQ ID NO: 742963 - RNA, 17 nt, Artificial Sequence
  Synthetic
auaacuauauguauuua

SEQ ID NO: 742964 - RNA, 17 nt, Artificial Sequence
  Synthetic
auuauccacuguauuua

SEQ ID NO: 742965 - RNA, 17 nt, Artificial Sequence
  Synthetic
aaaagaaaaauuauuua

SEQ ID NO: 742966 - RNA, 17 nt, Artificial Sequence
  Synthetic
aaauguucaauuauuua

SEQ ID NO: 742967 - RNA, 17 nt, Artificial Sequence
  Synthetic
acaugcugaauuauuua

SEQ ID NO: 742968 - RNA, 17 nt, Artificial Sequence
  Synthetic
uguuuaaugauuauuua

SEQ ID NO: 742969 - RNA, 17 nt, Artificial Sequence
  Synthetic
agauaacuuauuauuua

SEQ ID NO: 742970 - RNA, 17 nt, Artificial Sequence
  Synthetic
aaccacuuccuuauuua

SEQ ID NO: 742971 - RNA, 17 nt, Artificial Sequence
  Synthetic
cccaucauuguuauuua

SEQ ID NO: 742972 - RNA, 17 nt, Artificial Sequence
  Synthetic
uaaauuguuguuauuua

SEQ ID NO: 742973 - RNA, 17 nt, Artificial Sequence
  Synthetic
uuuuggaaauuuauuua

SEQ ID NO: 742974 - RNA, 17 nt, Artificial Sequence
  Synthetic
auucuucuauuuauuua

SEQ ID NO: 742975 - RNA, 17 nt, Artificial Sequence
  Synthetic
uguauuguauuuauuua

SEQ ID NO: 742976 - RNA, 17 nt, Artificial Sequence
  Synthetic
aggauauucuuuauuua

SEQ ID NO: 742977 - RNA, 17 nt, Artificial Sequence
  Synthetic
aaaaaaaaguuuauuua

SEQ ID NO: 742978 - RNA, 17 nt, Artificial Sequence
  Synthetic
caaaggaauuuuauuua

SEQ ID NO: 742979 - RNA, 17 nt, Artificial Sequence
  Synthetic
ucuuuaucuuuuauuua

SEQ ID NO: 742980 - RNA, 17 nt, Artificial Sequence
  Synthetic
uuguuuuguuuuauuua

SEQ ID NO: 742981 - RNA, 17 nt, Artificial Sequence
  Synthetic
uaugaccuuuuuauuua

SEQ ID NO: 742982 - RNA, 17 nt, Artificial Sequence
  Synthetic
acaagacacaaacuuua

SEQ ID NO: 742983 - RNA, 17 nt, Artificial Sequence
  Synthetic
cuuccacucaaacuuua

SEQ ID NO: 742984 - RNA, 17 nt, Artificial Sequence
  Synthetic
ccugcuauuaaacuuua

SEQ ID NO: 742985 - RNA, 17 nt, Artificial Sequence
  Synthetic
caaacaauacaacuuua

SEQ ID NO: 742986 - RNA, 17 nt, Artificial Sequence
  Synthetic
ucauuuugccaacuuua

SEQ ID NO: 742987 - RNA, 17 nt, Artificial Sequence
  Synthetic
auacuguagcaacuuua

SEQ ID NO: 742988 - RNA, 17 nt, Artificial Sequence
  Synthetic
uauauuaaucaacuuua

SEQ ID NO: 742989 - RNA, 17 nt, Artificial Sequence
  Synthetic
augcauauggaacuuua

SEQ ID NO: 742990 - RNA, 17 nt, Artificial Sequence
  Synthetic
cuuguuaccuaacuuua

SEQ ID NO: 742991 - RNA, 17 nt, Artificial Sequence
  Synthetic
uuuggaaaaacacuuua

SEQ ID NO: 742992 - RNA, 17 nt, Artificial Sequence
  Synthetic
auaaauccaacacuuua

SEQ ID NO: 742993 - RNA, 17 nt, Artificial Sequence
  Synthetic
uugaaacccccacuuua

SEQ ID NO: 742994 - RNA, 17 nt, Artificial Sequence
  Synthetic
caaagaugaucacuuua

SEQ ID NO: 742995 - RNA, 17 nt, Artificial Sequence
  Synthetic
aagaggagaagacuuua

SEQ ID NO: 742996 - RNA, 17 nt, Artificial Sequence
  Synthetic
uucaauuacagacuuua

SEQ ID NO: 742997 - RNA, 17 nt, Artificial Sequence
  Synthetic
ugaaaauucagacuuua

SEQ ID NO: 742998 - RNA, 17 nt, Artificial Sequence
  Synthetic
aacacaacaggacuuua

SEQ ID NO: 742999 - RNA, 17 nt, Artificial Sequence
  Synthetic
aucaagcugggacuuua

SEQ ID NO: 743000 - RNA, 17 nt, Artificial Sequence
  Synthetic
cagaaccauugacuuua

SEQ ID NO: 743001 - RNA, 17 nt, Artificial Sequence
  Synthetic
ucauaugagauacuuua

SEQ ID NO: 743002 - RNA, 17 nt, Artificial Sequence
  Synthetic
agagaccugauacuuua

SEQ ID NO: 743003 - RNA, 17 nt, Artificial Sequence
  Synthetic
ucugcagcuguacuuua

SEQ ID NO: 743004 - RNA, 17 nt, Artificial Sequence
  Synthetic
uguaagaaauuacuuua

SEQ ID NO: 743005 - RNA, 17 nt, Artificial Sequence
  Synthetic
uguaagucauuacuuua

SEQ ID NO: 743006 - RNA, 17 nt, Artificial Sequence
  Synthetic
ucuagucacuuacuuua

SEQ ID NO: 743007 - RNA, 17 nt, Artificial Sequence
  Synthetic
uuucaaaucuuacuuua

SEQ ID NO: 743008 - RNA, 17 nt, Artificial Sequence
  Synthetic
uuccucaccaaccuuua

SEQ ID NO: 743009 - RNA, 17 nt, Artificial Sequence
  Synthetic
uccuggaguaaccuuua

SEQ ID NO: 743010 - RNA, 17 nt, Artificial Sequence
  Synthetic
ccugaagguaaccuuua

SEQ ID NO: 743011 - RNA, 17 nt, Artificial Sequence
  Synthetic
cuccagccaccccuuua

SEQ ID NO: 743012 - RNA, 17 nt, Artificial Sequence
  Synthetic
agucuucuugcccuuua

SEQ ID NO: 743013 - RNA, 17 nt, Artificial Sequence
  Synthetic
cuuuugguugcccuuua

SEQ ID NO: 743014 - RNA, 17 nt, Artificial Sequence
  Synthetic
aauucucucucccuuua

SEQ ID NO: 743015 - RNA, 17 nt, Artificial Sequence
  Synthetic
cugaguccuucccuuua

SEQ ID NO: 743016 - RNA, 17 nt, Artificial Sequence
  Synthetic
uaucaugcaggccuuua

SEQ ID NO: 743017 - RNA, 17 nt, Artificial Sequence
  Synthetic
aggagauggggccuuua

SEQ ID NO: 743018 - RNA, 17 nt, Artificial Sequence
  Synthetic
uuuuaaauccuccuuua

SEQ ID NO: 743019 - RNA, 17 nt, Artificial Sequence
  Synthetic
ucuaugcauguccuuua

SEQ ID NO: 743020 - RNA, 17 nt, Artificial Sequence
  Synthetic
uugauguguuuccuuua

SEQ ID NO: 743021 - RNA, 17 nt, Artificial Sequence
  Synthetic
cuuuaaauuuuccuuua

SEQ ID NO: 743022 - RNA, 17 nt, Artificial Sequence
  Synthetic
aucagucuuuuccuuua

SEQ ID NO: 743023 - RNA, 17 nt, Artificial Sequence
  Synthetic
ucugugguuuuccuuua

SEQ ID NO: 743024 - RNA, 17 nt, Artificial Sequence
  Synthetic
aucacauagaagcuuua

SEQ ID NO: 743025 - RNA, 17 nt, Artificial Sequence
  Synthetic
acaaugguuaagcuuua

SEQ ID NO: 743026 - RNA, 17 nt, Artificial Sequence
  Synthetic
cagcuauuccagcuuua

SEQ ID NO: 743027 - RNA, 17 nt, Artificial Sequence
  Synthetic
uuaauuaucuagcuuua

SEQ ID NO: 743028 - RNA, 17 nt, Artificial Sequence
  Synthetic
uuugagaauuagcuuua

SEQ ID NO: 743029 - RNA, 17 nt, Artificial Sequence
  Synthetic
aaaaaauaaaggcuuua

SEQ ID NO: 743030 - RNA, 17 nt, Artificial Sequence
  Synthetic
uuccccucugggcuuua

SEQ ID NO: 743031 - RNA, 17 nt, Artificial Sequence
  Synthetic
aaguugcuaaugcuuua

SEQ ID NO: 743032 - RNA, 17 nt, Artificial Sequence
  Synthetic
agauauuuucugcuuua

SEQ ID NO: 743033 - RNA, 17 nt, Artificial Sequence
  Synthetic
cacacacacaaucuuua

SEQ ID NO: 743034 - RNA, 17 nt, Artificial Sequence
  Synthetic
cacuucuuucaucuuua

SEQ ID NO: 743035 - RNA, 17 nt, Artificial Sequence
  Synthetic
ucauuucuggaucuuua

SEQ ID NO: 743036 - RNA, 17 nt, Artificial Sequence
  Synthetic
ccaccucuguaucuuua

SEQ ID NO: 743037 - RNA, 17 nt, Artificial Sequence
  Synthetic
uucucuuguuaucuuua

SEQ ID NO: 743038 - RNA, 17 nt, Artificial Sequence
  Synthetic
uuuauaauuuaucuuua

SEQ ID NO: 743039 - RNA, 17 nt, Artificial Sequence
  Synthetic
ccuauaaaaccucuuua

SEQ ID NO: 743040 - RNA, 17 nt, Artificial Sequence
  Synthetic
uuuuauuaaccucuuua

SEQ ID NO: 743041 - RNA, 17 nt, Artificial Sequence
  Synthetic
ugaacucauccucuuua

SEQ ID NO: 743042 - RNA, 17 nt, Artificial Sequence
  Synthetic
cauuguauugcucuuua

SEQ ID NO: 743043 - RNA, 17 nt, Artificial Sequence
  Synthetic
ugaaaaucaucucuuua

SEQ ID NO: 743044 - RNA, 17 nt, Artificial Sequence
  Synthetic
ugggcuuauucucuuua

SEQ ID NO: 743045 - RNA, 17 nt, Artificial Sequence
  Synthetic
auauugcuuggucuuua

SEQ ID NO: 743046 - RNA, 17 nt, Artificial Sequence
  Synthetic
acgugcauaugucuuua

SEQ ID NO: 743047 - RNA, 17 nt, Artificial Sequence
  Synthetic
cauucauacugucuuua

SEQ ID NO: 743048 - RNA, 17 nt, Artificial Sequence
  Synthetic
agcugcaugugucuuua

SEQ ID NO: 743049 - RNA, 17 nt, Artificial Sequence
  Synthetic
acagacacuugucuuua

SEQ ID NO: 743050 - RNA, 17 nt, Artificial Sequence
  Synthetic
uuugguacuugucuuua

SEQ ID NO: 743051 - RNA, 17 nt, Artificial Sequence
  Synthetic
aaguaaacaauucuuua

SEQ ID NO: 743052 - RNA, 17 nt, Artificial Sequence
  Synthetic
aagauguggauucuuua

SEQ ID NO: 743053 - RNA, 17 nt, Artificial Sequence
  Synthetic
augacuauuauucuuua

SEQ ID NO: 743054 - RNA, 17 nt, Artificial Sequence
  Synthetic
aaauuuucacuucuuua

SEQ ID NO: 743055 - RNA, 17 nt, Artificial Sequence
  Synthetic
ugcuauugacuucuuua

SEQ ID NO: 743056 - RNA, 17 nt, Artificial Sequence
  Synthetic
agcuaugggcuucuuua

SEQ ID NO: 743057 - RNA, 17 nt, Artificial Sequence
  Synthetic
auauagcuauuucuuua

SEQ ID NO: 743058 - RNA, 17 nt, Artificial Sequence
  Synthetic
ugauucuuauuucuuua

SEQ ID NO: 743059 - RNA, 17 nt, Artificial Sequence
  Synthetic
cugacuuucuuucuuua

SEQ ID NO: 743060 - RNA, 17 nt, Artificial Sequence
  Synthetic
agaauuuuguuucuuua

SEQ ID NO: 743061 - RNA, 17 nt, Artificial Sequence
  Synthetic
cagcagaauuuucuuua

SEQ ID NO: 743062 - RNA, 17 nt, Artificial Sequence
  Synthetic
agaguguagaaaguuua

SEQ ID NO: 743063 - RNA, 17 nt, Artificial Sequence
  Synthetic
auucugguagaaguuua

SEQ ID NO: 743064 - RNA, 17 nt, Artificial Sequence
  Synthetic
uccuuuagggaaguuua

SEQ ID NO: 743065 - RNA, 17 nt, Artificial Sequence
  Synthetic
aacaacccugaaguuua

SEQ ID NO: 743066 - RNA, 17 nt, Artificial Sequence
  Synthetic
caaguaaacuaaguuua

SEQ ID NO: 743067 - RNA, 17 nt, Artificial Sequence
  Synthetic
uuuaucaacuaaguuua

SEQ ID NO: 743068 - RNA, 17 nt, Artificial Sequence
  Synthetic
uuaggccaguaaguuua

SEQ ID NO: 743069 - RNA, 17 nt, Artificial Sequence
  Synthetic
cugauucaguaaguuua

SEQ ID NO: 743070 - RNA, 17 nt, Artificial Sequence
  Synthetic
agaacaguguaaguuua

SEQ ID NO: 743071 - RNA, 17 nt, Artificial Sequence
  Synthetic
aaauuuaacacaguuua

SEQ ID NO: 743072 - RNA, 17 nt, Artificial Sequence
  Synthetic
auggguuaagcaguuua

SEQ ID NO: 743073 - RNA, 17 nt, Artificial Sequence
  Synthetic
augugaggggcaguuua

SEQ ID NO: 743074 - RNA, 17 nt, Artificial Sequence
  Synthetic
cuacaacaugcaguuua

SEQ ID NO: 743075 - RNA, 17 nt, Artificial Sequence
  Synthetic
uauuuaaccucaguuua

SEQ ID NO: 743076 - RNA, 17 nt, Artificial Sequence
  Synthetic
uaagaacggucaguuua

SEQ ID NO: 743077 - RNA, 17 nt, Artificial Sequence
  Synthetic
agaaaaugaagaguuua

SEQ ID NO: 743078 - RNA, 17 nt, Artificial Sequence
  Synthetic
uauauguauauaguuua

SEQ ID NO: 743079 - RNA, 17 nt, Artificial Sequence
  Synthetic
aggcuggauguaguuua

SEQ ID NO: 743080 - RNA, 17 nt, Artificial Sequence
  Synthetic
cuuucuucuuuaguuua

SEQ ID NO: 743081 - RNA, 17 nt, Artificial Sequence
  Synthetic
agaagcagacacguuua

SEQ ID NO: 743082 - RNA, 17 nt, Artificial Sequence
  Synthetic
uggggaaaaaagguuua

SEQ ID NO: 743083 - RNA, 17 nt, Artificial Sequence
  Synthetic
ugugaugccaagguuua

SEQ ID NO: 743084 - RNA, 17 nt, Artificial Sequence
  Synthetic
auuuuauccaagguuua

SEQ ID NO: 743085 - RNA, 17 nt, Artificial Sequence
  Synthetic
aaaaccacuaagguuua

SEQ ID NO: 743086 - RNA, 17 nt, Artificial Sequence
  Synthetic
auuugggggcagguuua

SEQ ID NO: 743087 - RNA, 17 nt, Artificial Sequence
  Synthetic
aaauauuggcagguuua

SEQ ID NO: 743088 - RNA, 17 nt, Artificial Sequence
  Synthetic
agcugaugagagguuua

SEQ ID NO: 743089 - RNA, 17 nt, Artificial Sequence
  Synthetic
auacaaagcuagguuua

SEQ ID NO: 743090 - RNA, 17 nt, Artificial Sequence
  Synthetic
agcagaguguagguuua

SEQ ID NO: 743091 - RNA, 17 nt, Artificial Sequence
  Synthetic
aaaugcagaaggguuua

SEQ ID NO: 743092 - RNA, 17 nt, Artificial Sequence
  Synthetic
ucaagaaugaggguuua

SEQ ID NO: 743093 - RNA, 17 nt, Artificial Sequence
  Synthetic
aaaacuuauaggguuua

SEQ ID NO: 743094 - RNA, 17 nt, Artificial Sequence
  Synthetic
ugcaaugcuuggguuua

SEQ ID NO: 743095 - RNA, 17 nt, Artificial Sequence
  Synthetic
uuuaaguaagugguuua

SEQ ID NO: 743096 - RNA, 17 nt, Artificial Sequence
  Synthetic
ucuaaguuggugguuua

SEQ ID NO: 743097 - RNA, 17 nt, Artificial Sequence
  Synthetic
cuuaaaacaaauguuua

SEQ ID NO: 743098 - RNA, 17 nt, Artificial Sequence
  Synthetic
cuuggguggaauguuua

SEQ ID NO: 743099 - RNA, 17 nt, Artificial Sequence
  Synthetic
aauccucuuaauguuua

SEQ ID NO: 743100 - RNA, 17 nt, Artificial Sequence
  Synthetic
ugucuucuacauguuua

SEQ ID NO: 743101 - RNA, 17 nt, Artificial Sequence
  Synthetic
uguucagagcauguuua

SEQ ID NO: 743102 - RNA, 17 nt, Artificial Sequence
  Synthetic
uguauuggugauguuua

SEQ ID NO: 743103 - RNA, 17 nt, Artificial Sequence
  Synthetic
aaagcauuugauguuua

SEQ ID NO: 743104 - RNA, 17 nt, Artificial Sequence
  Synthetic
auaaaacgcuauguuua

SEQ ID NO: 743105 - RNA, 17 nt, Artificial Sequence
  Synthetic
ugcuuauacacuguuua

SEQ ID NO: 743106 - RNA, 17 nt, Artificial Sequence
  Synthetic
uuacauuguacuguuua

SEQ ID NO: 743107 - RNA, 17 nt, Artificial Sequence
  Synthetic
ucucuaccuccuguuua

SEQ ID NO: 743108 - RNA, 17 nt, Artificial Sequence
  Synthetic
cucaggaaagguguuua

SEQ ID NO: 743109 - RNA, 17 nt, Artificial Sequence
  Synthetic
cuucauauauguguuua

SEQ ID NO: 743110 - RNA, 17 nt, Artificial Sequence
  Synthetic
uaauauagcauuguuua

SEQ ID NO: 743111 - RNA, 17 nt, Artificial Sequence
  Synthetic
cuuuaacauauuguuua

SEQ ID NO: 743112 - RNA, 17 nt, Artificial Sequence
  Synthetic
uuaugcaguauuguuua

SEQ ID NO: 743113 - RNA, 17 nt, Artificial Sequence
  Synthetic
ugcuuuuaacuuguuua

SEQ ID NO: 743114 - RNA, 17 nt, Artificial Sequence
  Synthetic
aucuaagcaguuguuua

SEQ ID NO: 743115 - RNA, 17 nt, Artificial Sequence
  Synthetic
ccagacacauuuguuua

SEQ ID NO: 743116 - RNA, 17 nt, Artificial Sequence
  Synthetic
auaaggucaaaauuuua

SEQ ID NO: 743117 - RNA, 17 nt, Artificial Sequence
  Synthetic
aauauuugaaaauuuua

SEQ ID NO: 743118 - RNA, 17 nt, Artificial Sequence
  Synthetic
cuaucauuaaaauuuua

SEQ ID NO: 743119 - RNA, 17 nt, Artificial Sequence
  Synthetic
uuauacuuuaaauuuua

SEQ ID NO: 743120 - RNA, 17 nt, Artificial Sequence
  Synthetic
aaauggccacaauuuua

SEQ ID NO: 743121 - RNA, 17 nt, Artificial Sequence
  Synthetic
aucucacaucaauuuua

SEQ ID NO: 743122 - RNA, 17 nt, Artificial Sequence
  Synthetic
ugaaaauaucaauuuua

SEQ ID NO: 743123 - RNA, 17 nt, Artificial Sequence
  Synthetic
auuuuuucagaauuuua

SEQ ID NO: 743124 - RNA, 17 nt, Artificial Sequence
  Synthetic
uaagugggagaauuuua

SEQ ID NO: 743125 - RNA, 17 nt, Artificial Sequence
  Synthetic
cugcuauuagaauuuua

SEQ ID NO: 743126 - RNA, 17 nt, Artificial Sequence
  Synthetic
agccacauggaauuuua

SEQ ID NO: 743127 - RNA, 17 nt, Artificial Sequence
  Synthetic
uuuugguuggaauuuua

SEQ ID NO: 743128 - RNA, 17 nt, Artificial Sequence
  Synthetic
aagcaucaugaauuuua

SEQ ID NO: 743129 - RNA, 17 nt, Artificial Sequence
  Synthetic
uuaguauuugaauuuua

SEQ ID NO: 743130 - RNA, 17 nt, Artificial Sequence
  Synthetic
uucuuguucuaauuuua

SEQ ID NO: 743131 - RNA, 17 nt, Artificial Sequence
  Synthetic
cauauucaaacauuuua

SEQ ID NO: 743132 - RNA, 17 nt, Artificial Sequence
  Synthetic
agaaaugacacauuuua

SEQ ID NO: 743133 - RNA, 17 nt, Artificial Sequence
  Synthetic
uacuuauugacauuuua

SEQ ID NO: 743134 - RNA, 17 nt, Artificial Sequence
  Synthetic
cuuugcacaccauuuua

SEQ ID NO: 743135 - RNA, 17 nt, Artificial Sequence
  Synthetic
uuuauccugccauuuua

SEQ ID NO: 743136 - RNA, 17 nt, Artificial Sequence
  Synthetic
ccuuguaguccauuuua

SEQ ID NO: 743137 - RNA, 17 nt, Artificial Sequence
  Synthetic
cuaugcugagcauuuua

SEQ ID NO: 743138 - RNA, 17 nt, Artificial Sequence
  Synthetic
aguuaacccgcauuuua

SEQ ID NO: 743139 - RNA, 17 nt, Artificial Sequence
  Synthetic
uaaaaauaggcauuuua

SEQ ID NO: 743140 - RNA, 17 nt, Artificial Sequence
  Synthetic
auuaaacaaucauuuua

SEQ ID NO: 743141 - RNA, 17 nt, Artificial Sequence
  Synthetic
uguuugaauucauuuua

SEQ ID NO: 743142 - RNA, 17 nt, Artificial Sequence
  Synthetic
ucaccgauuucauuuua

SEQ ID NO: 743143 - RNA, 17 nt, Artificial Sequence
  Synthetic
uugcugguuucauuuua

SEQ ID NO: 743144 - RNA, 17 nt, Artificial Sequence
  Synthetic
uuggaggcaagauuuua

SEQ ID NO: 743145 - RNA, 17 nt, Artificial Sequence
  Synthetic
aauaccuuaagauuuua

SEQ ID NO: 743146 - RNA, 17 nt, Artificial Sequence
  Synthetic
aucaggcagagauuuua

SEQ ID NO: 743147 - RNA, 17 nt, Artificial Sequence
  Synthetic
uucauuuggagauuuua

SEQ ID NO: 743148 - RNA, 17 nt, Artificial Sequence
  Synthetic
uucccuuaaggauuuua

SEQ ID NO: 743149 - RNA, 17 nt, Artificial Sequence
  Synthetic
augguacagggauuuua

SEQ ID NO: 743150 - RNA, 17 nt, Artificial Sequence
  Synthetic
uauagugcuggauuuua

SEQ ID NO: 743151 - RNA, 17 nt, Artificial Sequence
  Synthetic
uaucuagcaugauuuua

SEQ ID NO: 743152 - RNA, 17 nt, Artificial Sequence
  Synthetic
ucuugcauaugauuuua

SEQ ID NO: 743153 - RNA, 17 nt, Artificial Sequence
  Synthetic
uaagaaaucugauuuua

SEQ ID NO: 743154 - RNA, 17 nt, Artificial Sequence
  Synthetic
acuugcuuuugauuuua

SEQ ID NO: 743155 - RNA, 17 nt, Artificial Sequence
  Synthetic
cagcuaaaaauauuuua

SEQ ID NO: 743156 - RNA, 17 nt, Artificial Sequence
  Synthetic
cugggacccauauuuua

SEQ ID NO: 743157 - RNA, 17 nt, Artificial Sequence
  Synthetic
aaaauuuccauauuuua

SEQ ID NO: 743158 - RNA, 17 nt, Artificial Sequence
  Synthetic
uauugugugauauuuua

SEQ ID NO: 743159 - RNA, 17 nt, Artificial Sequence
  Synthetic
aggaugcuacuauuuua

SEQ ID NO: 743160 - RNA, 17 nt, Artificial Sequence
  Synthetic
aguugcacaguauuuua

SEQ ID NO: 743161 - RNA, 17 nt, Artificial Sequence
  Synthetic
aacuauggaguauuuua

SEQ ID NO: 743162 - RNA, 17 nt, Artificial Sequence
  Synthetic
aaaaauauaguauuuua

SEQ ID NO: 743163 - RNA, 17 nt, Artificial Sequence
  Synthetic
aucccacugguauuuua

SEQ ID NO: 743164 - RNA, 17 nt, Artificial Sequence
  Synthetic
aaaaguaaauuauuuua

SEQ ID NO: 743165 - RNA, 17 nt, Artificial Sequence
  Synthetic
caaaauguauuauuuua

SEQ ID NO: 743166 - RNA, 17 nt, Artificial Sequence
  Synthetic
uaauaaaaaaacuuuua

SEQ ID NO: 743167 - RNA, 17 nt, Artificial Sequence
  Synthetic
cagguuucuaacuuuua

SEQ ID NO: 743168 - RNA, 17 nt, Artificial Sequence
  Synthetic
uggucaacccacuuuua

SEQ ID NO: 743169 - RNA, 17 nt, Artificial Sequence
  Synthetic
ugugaaacagacuuuua

SEQ ID NO: 743170 - RNA, 17 nt, Artificial Sequence
  Synthetic
aaaaauaaauacuuuua

SEQ ID NO: 743171 - RNA, 17 nt, Artificial Sequence
  Synthetic
uauucagcauacuuuua

SEQ ID NO: 743172 - RNA, 17 nt, Artificial Sequence
  Synthetic
ucugccugguacuuuua

SEQ ID NO: 743173 - RNA, 17 nt, Artificial Sequence
  Synthetic
auuauuacuuacuuuua

SEQ ID NO: 743174 - RNA, 17 nt, Artificial Sequence
  Synthetic
auaauaccuaccuuuua

SEQ ID NO: 743175 - RNA, 17 nt, Artificial Sequence
  Synthetic
uguaauugccccuuuua

SEQ ID NO: 743176 - RNA, 17 nt, Artificial Sequence
  Synthetic
uccaacuuccccuuuua

SEQ ID NO: 743177 - RNA, 17 nt, Artificial Sequence
  Synthetic
aacugaucucccuuuua

SEQ ID NO: 743178 - RNA, 17 nt, Artificial Sequence
  Synthetic
ucacgucaggccuuuua

SEQ ID NO: 743179 - RNA, 17 nt, Artificial Sequence
  Synthetic
ccugcuguggccuuuua

SEQ ID NO: 743180 - RNA, 17 nt, Artificial Sequence
  Synthetic
aggaguugugccuuuua

SEQ ID NO: 743181 - RNA, 17 nt, Artificial Sequence
  Synthetic
uacuuaccuuccuuuua

SEQ ID NO: 743182 - RNA, 17 nt, Artificial Sequence
  Synthetic
cauuugguuuccuuuua

SEQ ID NO: 743183 - RNA, 17 nt, Artificial Sequence
  Synthetic
caaauuauaagcuuuua

SEQ ID NO: 743184 - RNA, 17 nt, Artificial Sequence
  Synthetic
auguaacugugcuuuua

SEQ ID NO: 743185 - RNA, 17 nt, Artificial Sequence
  Synthetic
uuuugcaauugcuuuua

SEQ ID NO: 743186 - RNA, 17 nt, Artificial Sequence
  Synthetic
uguuaagcuugcuuuua

SEQ ID NO: 743187 - RNA, 17 nt, Artificial Sequence
  Synthetic
aaccauucuugcuuuua

SEQ ID NO: 743188 - RNA, 17 nt, Artificial Sequence
  Synthetic
uguuacauuugcuuuua

SEQ ID NO: 743189 - RNA, 17 nt, Artificial Sequence
  Synthetic
uaggauucacucuuuua

SEQ ID NO: 743190 - RNA, 17 nt, Artificial Sequence
  Synthetic
uuauuauuccucuuuua

SEQ ID NO: 743191 - RNA, 17 nt, Artificial Sequence
  Synthetic
cuucaggagcucuuuua

SEQ ID NO: 743192 - RNA, 17 nt, Artificial Sequence
  Synthetic
auaccaauugucuuuua

SEQ ID NO: 743193 - RNA, 17 nt, Artificial Sequence
  Synthetic
uccuacaucuucuuuua

SEQ ID NO: 743194 - RNA, 17 nt, Artificial Sequence
  Synthetic
uuuguugucuucuuuua

SEQ ID NO: 743195 - RNA, 17 nt, Artificial Sequence
  Synthetic
aauuuaacuuucuuuua

SEQ ID NO: 743196 - RNA, 17 nt, Artificial Sequence
  Synthetic
aucaguaguuucuuuua

SEQ ID NO: 743197 - RNA, 17 nt, Artificial Sequence
  Synthetic
auuucuauuuucuuuua

SEQ ID NO: 743198 - RNA, 17 nt, Artificial Sequence
  Synthetic
ucugaaacaaaguuuua

SEQ ID NO: 743199 - RNA, 17 nt, Artificial Sequence
  Synthetic
cugauccugaaguuuua

SEQ ID NO: 743200 - RNA, 17 nt, Artificial Sequence
  Synthetic
uaagucaauaaguuuua

SEQ ID NO: 743201 - RNA, 17 nt, Artificial Sequence
  Synthetic
uuauacucuaaguuuua

SEQ ID NO: 743202 - RNA, 17 nt, Artificial Sequence
  Synthetic
uuauacuuuaaguuuua

SEQ ID NO: 743203 - RNA, 17 nt, Artificial Sequence
  Synthetic
uucuacuuuaaguuuua

SEQ ID NO: 743204 - RNA, 17 nt, Artificial Sequence
  Synthetic
uuguacuuuaaguuuua

SEQ ID NO: 743205 - RNA, 17 nt, Artificial Sequence
  Synthetic
agaugugaccaguuuua

SEQ ID NO: 743206 - RNA, 17 nt, Artificial Sequence
  Synthetic
uucagcucucaguuuua

SEQ ID NO: 743207 - RNA, 17 nt, Artificial Sequence
  Synthetic
agugcuuuucaguuuua

SEQ ID NO: 743208 - RNA, 17 nt, Artificial Sequence
  Synthetic
cgauagccugaguuuua

SEQ ID NO: 743209 - RNA, 17 nt, Artificial Sequence
  Synthetic
accuagaaauaguuuua

SEQ ID NO: 743210 - RNA, 17 nt, Artificial Sequence
  Synthetic
aggcacagauaguuuua

SEQ ID NO: 743211 - RNA, 17 nt, Artificial Sequence
  Synthetic
cuaaacauagcguuuua

SEQ ID NO: 743212 - RNA, 17 nt, Artificial Sequence
  Synthetic
aucuacuacagguuuua

SEQ ID NO: 743213 - RNA, 17 nt, Artificial Sequence
  Synthetic
uuauuaacuagguuuua

SEQ ID NO: 743214 - RNA, 17 nt, Artificial Sequence
  Synthetic
aguuacccaggguuuua

SEQ ID NO: 743215 - RNA, 17 nt, Artificial Sequence
  Synthetic
uuucuucuaggguuuua

SEQ ID NO: 743216 - RNA, 17 nt, Artificial Sequence
  Synthetic
cuuguguggggguuuua

SEQ ID NO: 743217 - RNA, 17 nt, Artificial Sequence
  Synthetic
cuacaaaaaugguuuua

SEQ ID NO: 743218 - RNA, 17 nt, Artificial Sequence
  Synthetic
aaguacuaaugguuuua

SEQ ID NO: 743219 - RNA, 17 nt, Artificial Sequence
  Synthetic
cccuuugcuugguuuua

SEQ ID NO: 743220 - RNA, 17 nt, Artificial Sequence
  Synthetic
uugacucuuauguuuua

SEQ ID NO: 743221 - RNA, 17 nt, Artificial Sequence
  Synthetic
cagggaccacuguuuua

SEQ ID NO: 743222 - RNA, 17 nt, Artificial Sequence
  Synthetic
ucuuauagacuguuuua

SEQ ID NO: 743223 - RNA, 17 nt, Artificial Sequence
  Synthetic
aguagcucgcuguuuua

SEQ ID NO: 743224 - RNA, 17 nt, Artificial Sequence
  Synthetic
ucaacucugcuguuuua

SEQ ID NO: 743225 - RNA, 17 nt, Artificial Sequence
  Synthetic
ugcugaaagguguuuua

SEQ ID NO: 743226 - RNA, 17 nt, Artificial Sequence
  Synthetic
caauccaugguguuuua

SEQ ID NO: 743227 - RNA, 17 nt, Artificial Sequence
  Synthetic
aauucauauuuguuuua

SEQ ID NO: 743228 - RNA, 17 nt, Artificial Sequence
  Synthetic
uauaggauuuuguuuua

SEQ ID NO: 743229 - RNA, 17 nt, Artificial Sequence
  Synthetic
caaaaauaaaauuuuua

SEQ ID NO: 743230 - RNA, 17 nt, Artificial Sequence
  Synthetic
uugcaaaauaauuuuua

SEQ ID NO: 743231 - RNA, 17 nt, Artificial Sequence
  Synthetic
aaguaaauuaauuuuua

SEQ ID NO: 743232 - RNA, 17 nt, Artificial Sequence
  Synthetic
ccaaucauuaauuuuua

SEQ ID NO: 743233 - RNA, 17 nt, Artificial Sequence
  Synthetic
ccuggauggcauuuuua

SEQ ID NO: 743234 - RNA, 17 nt, Artificial Sequence
  Synthetic
aagaaacaucauuuuua

SEQ ID NO: 743235 - RNA, 17 nt, Artificial Sequence
  Synthetic
uacccuccucauuuuua

SEQ ID NO: 743236 - RNA, 17 nt, Artificial Sequence
  Synthetic
uuucaaguucauuuuua

SEQ ID NO: 743237 - RNA, 17 nt, Artificial Sequence
  Synthetic
aagcuaguucauuuuua

SEQ ID NO: 743238 - RNA, 17 nt, Artificial Sequence
  Synthetic
ucaccacaagauuuuua

SEQ ID NO: 743239 - RNA, 17 nt, Artificial Sequence
  Synthetic
ccacaccuagauuuuua

SEQ ID NO: 743240 - RNA, 17 nt, Artificial Sequence
  Synthetic
accuccuuagauuuuua

SEQ ID NO: 743241 - RNA, 17 nt, Artificial Sequence
  Synthetic
uaaggaauugauuuuua

SEQ ID NO: 743242 - RNA, 17 nt, Artificial Sequence
  Synthetic
uucuauuaauauuuuua

SEQ ID NO: 743243 - RNA, 17 nt, Artificial Sequence
  Synthetic
uaccguacauauuuuua

SEQ ID NO: 743244 - RNA, 17 nt, Artificial Sequence
  Synthetic
uucauuuuauauuuuua

SEQ ID NO: 743245 - RNA, 17 nt, Artificial Sequence
  Synthetic
aucagagacuauuuuua

SEQ ID NO: 743246 - RNA, 17 nt, Artificial Sequence
  Synthetic
auuagaugcuauuuuua

SEQ ID NO: 743247 - RNA, 17 nt, Artificial Sequence
  Synthetic
uugucuaucuauuuuua

SEQ ID NO: 743248 - RNA, 17 nt, Artificial Sequence
  Synthetic
cuuuguucguauuuuua

SEQ ID NO: 743249 - RNA, 17 nt, Artificial Sequence
  Synthetic
uguauacuguauuuuua

SEQ ID NO: 743250 - RNA, 17 nt, Artificial Sequence
  Synthetic
aaaaaguuguauuuuua

SEQ ID NO: 743251 - RNA, 17 nt, Artificial Sequence
  Synthetic
uccuaauuaccuuuuua

SEQ ID NO: 743252 - RNA, 17 nt, Artificial Sequence
  Synthetic
aaugacaucccuuuuua

SEQ ID NO: 743253 - RNA, 17 nt, Artificial Sequence
  Synthetic
ccaggaaauccuuuuua

SEQ ID NO: 743254 - RNA, 17 nt, Artificial Sequence
  Synthetic
uaauucauuccuuuuua

SEQ ID NO: 743255 - RNA, 17 nt, Artificial Sequence
  Synthetic
uggcagguggcuuuuua

SEQ ID NO: 743256 - RNA, 17 nt, Artificial Sequence
  Synthetic
uuugcugaugcuuuuua

SEQ ID NO: 743257 - RNA, 17 nt, Artificial Sequence
  Synthetic
ucaccagucucuuuuua

SEQ ID NO: 743258 - RNA, 17 nt, Artificial Sequence
  Synthetic
ccaucuuucucuuuuua

SEQ ID NO: 743259 - RNA, 17 nt, Artificial Sequence
  Synthetic
uuucaagagucuuuuua

SEQ ID NO: 743260 - RNA, 17 nt, Artificial Sequence
  Synthetic
agaucuucuucuuuuua

SEQ ID NO: 743261 - RNA, 17 nt, Artificial Sequence
  Synthetic
agaauacuuucuuuuua

SEQ ID NO: 743262 - RNA, 17 nt, Artificial Sequence
  Synthetic
cauuauguuucuuuuua

SEQ ID NO: 743263 - RNA, 17 nt, Artificial Sequence
  Synthetic
uucuucuagaguuuuua

SEQ ID NO: 743264 - RNA, 17 nt, Artificial Sequence
  Synthetic
uccaaaacagguuuuua

SEQ ID NO: 743265 - RNA, 17 nt, Artificial Sequence
  Synthetic
aucuucuaggguuuuua

SEQ ID NO: 743266 - RNA, 17 nt, Artificial Sequence
  Synthetic
uucuucuaggguuuuua

SEQ ID NO: 743267 - RNA, 17 nt, Artificial Sequence
  Synthetic
auaaacugcuguuuuua

SEQ ID NO: 743268 - RNA, 17 nt, Artificial Sequence
  Synthetic
cuuugugucuguuuuua

SEQ ID NO: 743269 - RNA, 17 nt, Artificial Sequence
  Synthetic
aaccucacaauuuuuua

SEQ ID NO: 743270 - RNA, 17 nt, Artificial Sequence
  Synthetic
ccuugaauaauuuuuua

SEQ ID NO: 743271 - RNA, 17 nt, Artificial Sequence
  Synthetic
ucuaaccuaauuuuuua

SEQ ID NO: 743272 - RNA, 17 nt, Artificial Sequence
  Synthetic
uaaucuuuaauuuuuua

SEQ ID NO: 743273 - RNA, 17 nt, Artificial Sequence
  Synthetic
ccaaaauugauuuuuua

SEQ ID NO: 743274 - RNA, 17 nt, Artificial Sequence
  Synthetic
ucgguguuacuuuuuua

SEQ ID NO: 743275 - RNA, 17 nt, Artificial Sequence
  Synthetic
caacucauccuuuuuua

SEQ ID NO: 743276 - RNA, 17 nt, Artificial Sequence
  Synthetic
aaagagauucuuuuuua

SEQ ID NO: 743277 - RNA, 17 nt, Artificial Sequence
  Synthetic
acugcauuucuuuuuua

SEQ ID NO: 743278 - RNA, 17 nt, Artificial Sequence
  Synthetic
aauucaggaguuuuuua

SEQ ID NO: 743279 - RNA, 17 nt, Artificial Sequence
  Synthetic
aaccucauuguuuuuua

SEQ ID NO: 743280 - RNA, 17 nt, Artificial Sequence
  Synthetic
aacucaucauuuuuuua

SEQ ID NO: 743281 - RNA, 17 nt, Artificial Sequence
  Synthetic
uucuuaucauuuuuuua

SEQ ID NO: 743282 - RNA, 17 nt, Artificial Sequence
  Synthetic
aaaguuauauuuuuuua

SEQ ID NO: 743283 - RNA, 17 nt, Artificial Sequence
  Synthetic
aacucauccuuuuuuua

SEQ ID NO: 743284 - RNA, 17 nt, Artificial Sequence
  Synthetic
aaacucugcuuuuuuua

SEQ ID NO: 743285 - RNA, 17 nt, Artificial Sequence
  Synthetic
aucucauucuuuuuuua

SEQ ID NO: 743286 - RNA, 17 nt, Artificial Sequence
  Synthetic
ccuuuaaauuuuuuuua

SEQ ID NO: 743287 - RNA, 17 nt, Artificial Sequence
  Synthetic
cucuaaccuuuuuuuua

SEQ ID NO: 743288 - RNA, 17 nt, Artificial Sequence
  Synthetic
aaaaaaaaaaaaaaaac

SEQ ID NO: 743289 - RNA, 17 nt, Artificial Sequence
  Synthetic
aaaauaaaaaaaaaaac

SEQ ID NO: 743290 - RNA, 17 nt, Artificial Sequence
  Synthetic
uaaauuaaaaaaaaaac

SEQ ID NO: 743291 - RNA, 17 nt, Artificial Sequence
  Synthetic
aguaaacagaaaaaaac

SEQ ID NO: 743292 - RNA, 17 nt, Artificial Sequence
  Synthetic
acuaaaaauaaaaaaac

SEQ ID NO: 743293 - RNA, 17 nt, Artificial Sequence
  Synthetic
aacaagaaacaaaaaac

SEQ ID NO: 743294 - RNA, 17 nt, Artificial Sequence
  Synthetic
uauuaccaacaaaaaac

SEQ ID NO: 743295 - RNA, 17 nt, Artificial Sequence
  Synthetic
agaggauuacaaaaaac

SEQ ID NO: 743296 - RNA, 17 nt, Artificial Sequence
  Synthetic
cugaaaaagcaaaaaac

SEQ ID NO: 743297 - RNA, 17 nt, Artificial Sequence
  Synthetic
cuuguccuucaaaaaac

SEQ ID NO: 743298 - RNA, 17 nt, Artificial Sequence
  Synthetic
ugaucuuuucaaaaaac

SEQ ID NO: 743299 - RNA, 17 nt, Artificial Sequence
  Synthetic
uuacaaaaguaaaaaac

SEQ ID NO: 743300 - RNA, 17 nt, Artificial Sequence
  Synthetic
cuuucagcuuaaaaaac

SEQ ID NO: 743301 - RNA, 17 nt, Artificial Sequence
  Synthetic
uuucaacguuaaaaaac

SEQ ID NO: 743302 - RNA, 17 nt, Artificial Sequence
  Synthetic
agacuagcaacaaaaac

SEQ ID NO: 743303 - RNA, 17 nt, Artificial Sequence
  Synthetic
cuucuaucaacaaaaac

SEQ ID NO: 743304 - RNA, 17 nt, Artificial Sequence
  Synthetic
auauaauacacaaaaac

SEQ ID NO: 743305 - RNA, 17 nt, Artificial Sequence
  Synthetic
acuuuauuuacaaaaac

SEQ ID NO: 743306 - RNA, 17 nt, Artificial Sequence
  Synthetic
acugauucaccaaaaac

SEQ ID NO: 743307 - RNA, 17 nt, Artificial Sequence
  Synthetic
ucauuauagccaaaaac

SEQ ID NO: 743308 - RNA, 17 nt, Artificial Sequence
  Synthetic
cugaaaauuccaaaaac

SEQ ID NO: 743309 - RNA, 17 nt, Artificial Sequence
  Synthetic
aagcaaaaagcaaaaac

SEQ ID NO: 743310 - RNA, 17 nt, Artificial Sequence
  Synthetic
acugaaugggcaaaaac

SEQ ID NO: 743311 - RNA, 17 nt, Artificial Sequence
  Synthetic
caaccacaugcaaaaac

SEQ ID NO: 743312 - RNA, 17 nt, Artificial Sequence
  Synthetic
auaaagccugcaaaaac

SEQ ID NO: 743313 - RNA, 17 nt, Artificial Sequence
  Synthetic
agagcaugugcaaaaac

SEQ ID NO: 743314 - RNA, 17 nt, Artificial Sequence
  Synthetic
cuggaacuugcaaaaac

SEQ ID NO: 743315 - RNA, 17 nt, Artificial Sequence
  Synthetic
uaucaaaaaagaaaaac

SEQ ID NO: 743316 - RNA, 17 nt, Artificial Sequence
  Synthetic
cuguaguucagaaaaac

SEQ ID NO: 743317 - RNA, 17 nt, Artificial Sequence
  Synthetic
acauggaaaggaaaaac

SEQ ID NO: 743318 - RNA, 17 nt, Artificial Sequence
  Synthetic
auauggaaaggaaaaac

SEQ ID NO: 743319 - RNA, 17 nt, Artificial Sequence
  Synthetic
aaauggugcggaaaaac

SEQ ID NO: 743320 - RNA, 17 nt, Artificial Sequence
  Synthetic
uggaaauuaugaaaaac

SEQ ID NO: 743321 - RNA, 17 nt, Artificial Sequence
  Synthetic
caaaauuauugaaaaac

SEQ ID NO: 743322 - RNA, 17 nt, Artificial Sequence
  Synthetic
cuuacaaaaauaaaaac

SEQ ID NO: 743323 - RNA, 17 nt, Artificial Sequence
  Synthetic
augcacaugauaaaaac

SEQ ID NO: 743324 - RNA, 17 nt, Artificial Sequence
  Synthetic
ccucagaaacuaaaaac

SEQ ID NO: 743325 - RNA, 17 nt, Artificial Sequence
  Synthetic
ucuugccaauuaaaaac

SEQ ID NO: 743326 - RNA, 17 nt, Artificial Sequence
  Synthetic
ccaaaagaauuaaaaac

SEQ ID NO: 743327 - RNA, 17 nt, Artificial Sequence
  Synthetic
aagagaaaguuaaaaac

SEQ ID NO: 743328 - RNA, 17 nt, Artificial Sequence
  Synthetic
aaaaacaaaaacaaaac

SEQ ID NO: 743329 - RNA, 17 nt, Artificial Sequence
  Synthetic
acaaaacaaaacaaaac

SEQ ID NO: 743330 - RNA, 17 nt, Artificial Sequence
  Synthetic
cacacacaaaacaaaac

SEQ ID NO: 743331 - RNA, 17 nt, Artificial Sequence
  Synthetic
aagaaaagaaacaaaac

SEQ ID NO: 743332 - RNA, 17 nt, Artificial Sequence
  Synthetic
cagcaagggaacaaaac

SEQ ID NO: 743333 - RNA, 17 nt, Artificial Sequence
  Synthetic
aggccaacacacaaaac

SEQ ID NO: 743334 - RNA, 17 nt, Artificial Sequence
  Synthetic
ugguaggaagacaaaac

SEQ ID NO: 743335 - RNA, 17 nt, Artificial Sequence
  Synthetic
auccugauggacaaaac

SEQ ID NO: 743336 - RNA, 17 nt, Artificial Sequence
  Synthetic
uuuacagaugacaaaac

SEQ ID NO: 743337 - RNA, 17 nt, Artificial Sequence
  Synthetic
acaacccaguacaaaac

SEQ ID NO: 743338 - RNA, 17 nt, Artificial Sequence
  Synthetic
caggauguuuacaaaac

SEQ ID NO: 743339 - RNA, 17 nt, Artificial Sequence
  Synthetic
uguuuuauuaccaaaac

SEQ ID NO: 743340 - RNA, 17 nt, Artificial Sequence
  Synthetic
acauccuuuagcaaaac

SEQ ID NO: 743341 - RNA, 17 nt, Artificial Sequence
  Synthetic
acacuuguacgcaaaac

SEQ ID NO: 743342 - RNA, 17 nt, Artificial Sequence
  Synthetic
uaaagugaaggcaaaac

SEQ ID NO: 743343 - RNA, 17 nt, Artificial Sequence
  Synthetic
uacugaaugggcaaaac

SEQ ID NO: 743344 - RNA, 17 nt, Artificial Sequence
  Synthetic
ugauuuagaugcaaaac

SEQ ID NO: 743345 - RNA, 17 nt, Artificial Sequence
  Synthetic
cuacuuuagugcaaaac

SEQ ID NO: 743346 - RNA, 17 nt, Artificial Sequence
  Synthetic
uugcuggaagucaaaac

SEQ ID NO: 743347 - RNA, 17 nt, Artificial Sequence
  Synthetic
auauggccauucaaaac

SEQ ID NO: 743348 - RNA, 17 nt, Artificial Sequence
  Synthetic
acugcaccuuucaaaac

SEQ ID NO: 743349 - RNA, 17 nt, Artificial Sequence
  Synthetic
accauuuguuucaaaac

SEQ ID NO: 743350 - RNA, 17 nt, Artificial Sequence
  Synthetic
aguuuuaagaagaaaac

SEQ ID NO: 743351 - RNA, 17 nt, Artificial Sequence
  Synthetic
cuauuauauaagaaaac

SEQ ID NO: 743352 - RNA, 17 nt, Artificial Sequence
  Synthetic
uguaagugacagaaaac

SEQ ID NO: 743353 - RNA, 17 nt, Artificial Sequence
  Synthetic
aaagcccuucagaaaac

SEQ ID NO: 743354 - RNA, 17 nt, Artificial Sequence
  Synthetic
auucccucagagaaaac

SEQ ID NO: 743355 - RNA, 17 nt, Artificial Sequence
  Synthetic
acgaaaggagagaaaac

SEQ ID NO: 743356 - RNA, 17 nt, Artificial Sequence
  Synthetic
cuguaucuagagaaaac

SEQ ID NO: 743357 - RNA, 17 nt, Artificial Sequence
  Synthetic
uuuauagacgagaaaac

SEQ ID NO: 743358 - RNA, 17 nt, Artificial Sequence
  Synthetic
ucaaagacggagaaaac

SEQ ID NO: 743359 - RNA, 17 nt, Artificial Sequence
  Synthetic
aaucaaggggagaaaac

SEQ ID NO: 743360 - RNA, 17 nt, Artificial Sequence
  Synthetic
ccuuaaggggagaaaac

SEQ ID NO: 743361 - RNA, 17 nt, Artificial Sequence
  Synthetic
uuacuaaaugagaaaac

SEQ ID NO: 743362 - RNA, 17 nt, Artificial Sequence
  Synthetic
aaaaacuaugagaaaac

SEQ ID NO: 743363 - RNA, 17 nt, Artificial Sequence
  Synthetic
uuuacuguugagaaaac

SEQ ID NO: 743364 - RNA, 17 nt, Artificial Sequence
  Synthetic
auuuacaccacgaaaac

SEQ ID NO: 743365 - RNA, 17 nt, Artificial Sequence
  Synthetic
cauucgagcaggaaaac

SEQ ID NO: 743366 - RNA, 17 nt, Artificial Sequence
  Synthetic
aaguccaucaggaaaac

SEQ ID NO: 743367 - RNA, 17 nt, Artificial Sequence
  Synthetic
aauggugucgggaaaac

SEQ ID NO: 743368 - RNA, 17 nt, Artificial Sequence
  Synthetic
uuuuucaaugggaaaac

SEQ ID NO: 743369 - RNA, 17 nt, Artificial Sequence
  Synthetic
aauggugcugggaaaac

SEQ ID NO: 743370 - RNA, 17 nt, Artificial Sequence
  Synthetic
aaugguguugggaaaac

SEQ ID NO: 743371 - RNA, 17 nt, Artificial Sequence
  Synthetic
aaaaucuacuggaaaac

SEQ ID NO: 743372 - RNA, 17 nt, Artificial Sequence
  Synthetic
ugaguaauaaugaaaac

SEQ ID NO: 743373 - RNA, 17 nt, Artificial Sequence
  Synthetic
agauacaagaugaaaac

SEQ ID NO: 743374 - RNA, 17 nt, Artificial Sequence
  Synthetic
ucuagcgguaugaaaac

SEQ ID NO: 743375 - RNA, 17 nt, Artificial Sequence
  Synthetic
ucuaaguuuaugaaaac

SEQ ID NO: 743376 - RNA, 17 nt, Artificial Sequence
  Synthetic
agguaguuuaugaaaac

SEQ ID NO: 743377 - RNA, 17 nt, Artificial Sequence
  Synthetic
uuggguccccugaaaac

SEQ ID NO: 743378 - RNA, 17 nt, Artificial Sequence
  Synthetic
ccaaaauaauugaaaac

SEQ ID NO: 743379 - RNA, 17 nt, Artificial Sequence
  Synthetic
cagaacagaaauaaaac

SEQ ID NO: 743380 - RNA, 17 nt, Artificial Sequence
  Synthetic
cacauacagaauaaaac

SEQ ID NO: 743381 - RNA, 17 nt, Artificial Sequence
  Synthetic
aaaguaccucauaaaac

SEQ ID NO: 743382 - RNA, 17 nt, Artificial Sequence
  Synthetic
aguuaugaggauaaaac

SEQ ID NO: 743383 - RNA, 17 nt, Artificial Sequence
  Synthetic
augcacagggauaaaac

SEQ ID NO: 743384 - RNA, 17 nt, Artificial Sequence
  Synthetic
uuaguuauauauaaaac

SEQ ID NO: 743385 - RNA, 17 nt, Artificial Sequence
  Synthetic
cagugcuacuauaaaac

SEQ ID NO: 743386 - RNA, 17 nt, Artificial Sequence
  Synthetic
augaugccaacuaaaac

SEQ ID NO: 743387 - RNA, 17 nt, Artificial Sequence
  Synthetic
cacuucacuccuaaaac

SEQ ID NO: 743388 - RNA, 17 nt, Artificial Sequence
  Synthetic
uaguauuuaucuaaaac

SEQ ID NO: 743389 - RNA, 17 nt, Artificial Sequence
  Synthetic
uuaauugucucuaaaac

SEQ ID NO: 743390 - RNA, 17 nt, Artificial Sequence
  Synthetic
uuuuaucuuucuaaaac

SEQ ID NO: 743391 - RNA, 17 nt, Artificial Sequence
  Synthetic
augggucacaguaaaac

SEQ ID NO: 743392 - RNA, 17 nt, Artificial Sequence
  Synthetic
aucaucuucaguaaaac

SEQ ID NO: 743393 - RNA, 17 nt, Artificial Sequence
  Synthetic
cuaccguucaguaaaac

SEQ ID NO: 743394 - RNA, 17 nt, Artificial Sequence
  Synthetic
uuccagagugguaaaac

SEQ ID NO: 743395 - RNA, 17 nt, Artificial Sequence
  Synthetic
uuucucaucuguaaaac

SEQ ID NO: 743396 - RNA, 17 nt, Artificial Sequence
  Synthetic
ucggaaaauuguaaaac

SEQ ID NO: 743397 - RNA, 17 nt, Artificial Sequence
  Synthetic
uuaagcacaauuaaaac

SEQ ID NO: 743398 - RNA, 17 nt, Artificial Sequence
  Synthetic
uucaguagaauuaaaac

SEQ ID NO: 743399 - RNA, 17 nt, Artificial Sequence
  Synthetic
ugagauuauauuaaaac

SEQ ID NO: 743400 - RNA, 17 nt, Artificial Sequence
  Synthetic
uaucagauacuuaaaac

SEQ ID NO: 743401 - RNA, 17 nt, Artificial Sequence
  Synthetic
aggcuggaucuuaaaac

SEQ ID NO: 743402 - RNA, 17 nt, Artificial Sequence
  Synthetic
auaucaagaguuaaaac

SEQ ID NO: 743403 - RNA, 17 nt, Artificial Sequence
  Synthetic
aauuccauuguuaaaac

SEQ ID NO: 743404 - RNA, 17 nt, Artificial Sequence
  Synthetic
uucagagaaaaacaaac

SEQ ID NO: 743405 - RNA, 17 nt, Artificial Sequence
  Synthetic
caguggcuaaaacaaac

SEQ ID NO: 743406 - RNA, 17 nt, Artificial Sequence
  Synthetic
aaacaaaacaaacaaac

SEQ ID NO: 743407 - RNA, 17 nt, Artificial Sequence
  Synthetic
caauacacacaacaaac

SEQ ID NO: 743408 - RNA, 17 nt, Artificial Sequence
  Synthetic
ucagaauuaacacaaac

SEQ ID NO: 743409 - RNA, 17 nt, Artificial Sequence
  Synthetic
uuacccagaccacaaac

SEQ ID NO: 743410 - RNA, 17 nt, Artificial Sequence
  Synthetic
agugaaauaccacaaac

SEQ ID NO: 743411 - RNA, 17 nt, Artificial Sequence
  Synthetic
agucaguggccacaaac

SEQ ID NO: 743412 - RNA, 17 nt, Artificial Sequence
  Synthetic
auagcagaagcacaaac

SEQ ID NO: 743413 - RNA, 17 nt, Artificial Sequence
  Synthetic
uguaucuaaucacaaac

SEQ ID NO: 743414 - RNA, 17 nt, Artificial Sequence
  Synthetic
cucaaaagaagacaaac

SEQ ID NO: 743415 - RNA, 17 nt, Artificial Sequence
  Synthetic
ugcagcugaagacaaac

SEQ ID NO: 743416 - RNA, 17 nt, Artificial Sequence
  Synthetic
uguuugcaaggacaaac

SEQ ID NO: 743417 - RNA, 17 nt, Artificial Sequence
  Synthetic
caauugaaucuacaaac

SEQ ID NO: 743418 - RNA, 17 nt, Artificial Sequence
  Synthetic
ugguuuuccuuacaaac

SEQ ID NO: 743419 - RNA, 17 nt, Artificial Sequence
  Synthetic
uccuuuaaguaccaaac

SEQ ID NO: 743420 - RNA, 17 nt, Artificial Sequence
  Synthetic
uccugaacaucccaaac

SEQ ID NO: 743421 - RNA, 17 nt, Artificial Sequence
  Synthetic
auuuauuaaggccaaac

SEQ ID NO: 743422 - RNA, 17 nt, Artificial Sequence
  Synthetic
agccaacauauccaaac

SEQ ID NO: 743423 - RNA, 17 nt, Artificial Sequence
  Synthetic
cagaaucauauccaaac

SEQ ID NO: 743424 - RNA, 17 nt, Artificial Sequence
  Synthetic
ugcccuucuuuccaaac

SEQ ID NO: 743425 - RNA, 17 nt, Artificial Sequence
  Synthetic
caaaaggaaaagcaaac

SEQ ID NO: 743426 - RNA, 17 nt, Artificial Sequence
  Synthetic
cacagugagaagcaaac

SEQ ID NO: 743427 - RNA, 17 nt, Artificial Sequence
  Synthetic
uuaaccauacagcaaac

SEQ ID NO: 743428 - RNA, 17 nt, Artificial Sequence
  Synthetic
aaauaccagcagcaaac

SEQ ID NO: 743429 - RNA, 17 nt, Artificial Sequence
  Synthetic
ucuguaaaucagcaaac

SEQ ID NO: 743430 - RNA, 17 nt, Artificial Sequence
  Synthetic
agaaaauccuagcaaac

SEQ ID NO: 743431 - RNA, 17 nt, Artificial Sequence
  Synthetic
ugaaggaaguagcaaac

SEQ ID NO: 743432 - RNA, 17 nt, Artificial Sequence
  Synthetic
aauuuaacuuagcaaac

SEQ ID NO: 743433 - RNA, 17 nt, Artificial Sequence
  Synthetic
agcccaguuuagcaaac

SEQ ID NO: 743434 - RNA, 17 nt, Artificial Sequence
  Synthetic
uuauuacauaggcaaac

SEQ ID NO: 743435 - RNA, 17 nt, Artificial Sequence
  Synthetic
acauacaaauggcaaac

SEQ ID NO: 743436 - RNA, 17 nt, Artificial Sequence
  Synthetic
cugucgguaaugcaaac

SEQ ID NO: 743437 - RNA, 17 nt, Artificial Sequence
  Synthetic
uauuuguuaaugcaaac

SEQ ID NO: 743438 - RNA, 17 nt, Artificial Sequence
  Synthetic
ucaugucgucugcaaac

SEQ ID NO: 743439 - RNA, 17 nt, Artificial Sequence
  Synthetic
uccaggccaucucaaac

SEQ ID NO: 743440 - RNA, 17 nt, Artificial Sequence
  Synthetic
uuauuaaugagucaaac

SEQ ID NO: 743441 - RNA, 17 nt, Artificial Sequence
  Synthetic
aaaacuuugagucaaac

SEQ ID NO: 743442 - RNA, 17 nt, Artificial Sequence
  Synthetic
cuuaaacucugucaaac

SEQ ID NO: 743443 - RNA, 17 nt, Artificial Sequence
  Synthetic
acuaggaaaauucaaac

SEQ ID NO: 743444 - RNA, 17 nt, Artificial Sequence
  Synthetic
auauucagaauucaaac

SEQ ID NO: 743445 - RNA, 17 nt, Artificial Sequence
  Synthetic
uuuugugagauucaaac

SEQ ID NO: 743446 - RNA, 17 nt, Artificial Sequence
  Synthetic
cccgacugccuucaaac

SEQ ID NO: 743447 - RNA, 17 nt, Artificial Sequence
  Synthetic
uaaaucaaaguucaaac

SEQ ID NO: 743448 - RNA, 17 nt, Artificial Sequence
  Synthetic
aaauauuaaguucaaac

SEQ ID NO: 743449 - RNA, 17 nt, Artificial Sequence
  Synthetic
uagcuuugauuucaaac

SEQ ID NO: 743450 - RNA, 17 nt, Artificial Sequence
  Synthetic
ucaaaccucuuucaaac

SEQ ID NO: 743451 - RNA, 17 nt, Artificial Sequence
  Synthetic
aucuagacuuuucaaac

SEQ ID NO: 743452 - RNA, 17 nt, Artificial Sequence
  Synthetic
uaaugaugaaaagaaac

SEQ ID NO: 743453 - RNA, 17 nt, Artificial Sequence
  Synthetic
uaaagcaggaaagaaac

SEQ ID NO: 743454 - RNA, 17 nt, Artificial Sequence
  Synthetic
cagaauuggaaagaaac

SEQ ID NO: 743455 - RNA, 17 nt, Artificial Sequence
  Synthetic
aaauuguuuaaagaaac

SEQ ID NO: 743456 - RNA, 17 nt, Artificial Sequence
  Synthetic
auucucaugcaagaaac

SEQ ID NO: 743457 - RNA, 17 nt, Artificial Sequence
  Synthetic
uccagaggugaagaaac

SEQ ID NO: 743458 - RNA, 17 nt, Artificial Sequence
  Synthetic
cccugaauguaagaaac

SEQ ID NO: 743459 - RNA, 17 nt, Artificial Sequence
  Synthetic
ucaagaaguuaagaaac

SEQ ID NO: 743460 - RNA, 17 nt, Artificial Sequence
  Synthetic
agaaaaaacacagaaac

SEQ ID NO: 743461 - RNA, 17 nt, Artificial Sequence
  Synthetic
uagaggccaccagaaac

SEQ ID NO: 743462 - RNA, 17 nt, Artificial Sequence
  Synthetic
uguaugacaucagaaac

SEQ ID NO: 743463 - RNA, 17 nt, Artificial Sequence
  Synthetic
acuaccuuuucagaaac

SEQ ID NO: 743464 - RNA, 17 nt, Artificial Sequence
  Synthetic
auggcuaaaggagaaac

SEQ ID NO: 743465 - RNA, 17 nt, Artificial Sequence
  Synthetic
ugcaguaaaggagaaac

SEQ ID NO: 743466 - RNA, 17 nt, Artificial Sequence
  Synthetic
agaggauguggagaaac

SEQ ID NO: 743467 - RNA, 17 nt, Artificial Sequence
  Synthetic
ugaggauguggagaaac

SEQ ID NO: 743468 - RNA, 17 nt, Artificial Sequence
  Synthetic
caacuguggugagaaac

SEQ ID NO: 743469 - RNA, 17 nt, Artificial Sequence
  Synthetic
uguugggaaauagaaac

SEQ ID NO: 743470 - RNA, 17 nt, Artificial Sequence
  Synthetic
uucuccugaauagaaac

SEQ ID NO: 743471 - RNA, 17 nt, Artificial Sequence
  Synthetic
acaguauuuauagaaac

SEQ ID NO: 743472 - RNA, 17 nt, Artificial Sequence
  Synthetic
uacugggaucuagaaac

SEQ ID NO: 743473 - RNA, 17 nt, Artificial Sequence
  Synthetic
cugcucuucuuagaaac

SEQ ID NO: 743474 - RNA, 17 nt, Artificial Sequence
  Synthetic
aauucuauuuuagaaac

SEQ ID NO: 743475 - RNA, 17 nt, Artificial Sequence
  Synthetic
uucaaugugggcgaaac

SEQ ID NO: 743476 - RNA, 17 nt, Artificial Sequence
  Synthetic
agauuaaaaugcgaaac

SEQ ID NO: 743477 - RNA, 17 nt, Artificial Sequence
  Synthetic
acauaagagcaggaaac

SEQ ID NO: 743478 - RNA, 17 nt, Artificial Sequence
  Synthetic
aggggagagcaggaaac

SEQ ID NO: 743479 - RNA, 17 nt, Artificial Sequence
  Synthetic
uaacugaaauaggaaac

SEQ ID NO: 743480 - RNA, 17 nt, Artificial Sequence
  Synthetic
augcagaaaacggaaac

SEQ ID NO: 743481 - RNA, 17 nt, Artificial Sequence
  Synthetic
uagaacagaagggaaac

SEQ ID NO: 743482 - RNA, 17 nt, Artificial Sequence
  Synthetic
caaucagagagggaaac

SEQ ID NO: 743483 - RNA, 17 nt, Artificial Sequence
  Synthetic
agagaaaauagggaaac

SEQ ID NO: 743484 - RNA, 17 nt, Artificial Sequence
  Synthetic
aagaaaacaauggaaac

SEQ ID NO: 743485 - RNA, 17 nt, Artificial Sequence
  Synthetic
uuuucucaccuggaaac

SEQ ID NO: 743486 - RNA, 17 nt, Artificial Sequence
  Synthetic
ugaauugagguggaaac

SEQ ID NO: 743487 - RNA, 17 nt, Artificial Sequence
  Synthetic
acuagaacaaaugaaac

SEQ ID NO: 743488 - RNA, 17 nt, Artificial Sequence
  Synthetic
uacaaaucaaaugaaac

SEQ ID NO: 743489 - RNA, 17 nt, Artificial Sequence
  Synthetic
ucaaguagaaaugaaac

SEQ ID NO: 743490 - RNA, 17 nt, Artificial Sequence
  Synthetic
uuaaaaggcaaugaaac

SEQ ID NO: 743491 - RNA, 17 nt, Artificial Sequence
  Synthetic
auccagaggaaugaaac

SEQ ID NO: 743492 - RNA, 17 nt, Artificial Sequence
  Synthetic
aauaggguuaaugaaac

SEQ ID NO: 743493 - RNA, 17 nt, Artificial Sequence
  Synthetic
aaauacaaucaugaaac

SEQ ID NO: 743494 - RNA, 17 nt, Artificial Sequence
  Synthetic
aaaugcuaucaugaaac

SEQ ID NO: 743495 - RNA, 17 nt, Artificial Sequence
  Synthetic
auaguggaagaugaaac

SEQ ID NO: 743496 - RNA, 17 nt, Artificial Sequence
  Synthetic
caugaaagagaugaaac

SEQ ID NO: 743497 - RNA, 17 nt, Artificial Sequence
  Synthetic
agggacauggaugaaac

SEQ ID NO: 743498 - RNA, 17 nt, Artificial Sequence
  Synthetic
accugugucuaugaaac

SEQ ID NO: 743499 - RNA, 17 nt, Artificial Sequence
  Synthetic
cuacagaaaacugaaac

SEQ ID NO: 743500 - RNA, 17 nt, Artificial Sequence
  Synthetic
cugauaucaacugaaac

SEQ ID NO: 743501 - RNA, 17 nt, Artificial Sequence
  Synthetic
ccaugggucacugaaac

SEQ ID NO: 743502 - RNA, 17 nt, Artificial Sequence
  Synthetic
ugaugacuuacugaaac

SEQ ID NO: 743503 - RNA, 17 nt, Artificial Sequence
  Synthetic
aaagaaauaccugaaac

SEQ ID NO: 743504 - RNA, 17 nt, Artificial Sequence
  Synthetic
acguagaaagcugaaac

SEQ ID NO: 743505 - RNA, 17 nt, Artificial Sequence
  Synthetic
auguagaaagcugaaac

SEQ ID NO: 743506 - RNA, 17 nt, Artificial Sequence
  Synthetic
auguagagagcugaaac

SEQ ID NO: 743507 - RNA, 17 nt, Artificial Sequence
  Synthetic
cuuuggguggcugaaac

SEQ ID NO: 743508 - RNA, 17 nt, Artificial Sequence
  Synthetic
uacacaguugcugaaac

SEQ ID NO: 743509 - RNA, 17 nt, Artificial Sequence
  Synthetic
uuauuuuauucugaaac

SEQ ID NO: 743510 - RNA, 17 nt, Artificial Sequence
  Synthetic
ucuuaucagagugaaac

SEQ ID NO: 743511 - RNA, 17 nt, Artificial Sequence
  Synthetic
caggugacuggugaaac

SEQ ID NO: 743512 - RNA, 17 nt, Artificial Sequence
  Synthetic
uaaugggguggugaaac

SEQ ID NO: 743513 - RNA, 17 nt, Artificial Sequence
  Synthetic
agcuuauuuggugaaac

SEQ ID NO: 743514 - RNA, 17 nt, Artificial Sequence
  Synthetic
acaaauaagugugaaac

SEQ ID NO: 743515 - RNA, 17 nt, Artificial Sequence
  Synthetic
uggugauagugugaaac

SEQ ID NO: 743516 - RNA, 17 nt, Artificial Sequence
  Synthetic
aaaacuucuugugaaac

SEQ ID NO: 743517 - RNA, 17 nt, Artificial Sequence
  Synthetic
uacauagcacuugaaac

SEQ ID NO: 743518 - RNA, 17 nt, Artificial Sequence
  Synthetic
uggaaaauccuugaaac

SEQ ID NO: 743519 - RNA, 17 nt, Artificial Sequence
  Synthetic
ugagaauugcuugaaac

SEQ ID NO: 743520 - RNA, 17 nt, Artificial Sequence
  Synthetic
aaacagcucuuugaaac

SEQ ID NO: 743521 - RNA, 17 nt, Artificial Sequence
  Synthetic
uaucugcaaaaauaaac

SEQ ID NO: 743522 - RNA, 17 nt, Artificial Sequence
  Synthetic
aaauaguaaaaauaaac

SEQ ID NO: 743523 - RNA, 17 nt, Artificial Sequence
  Synthetic
caaauauuaaaauaaac

SEQ ID NO: 743524 - RNA, 17 nt, Artificial Sequence
  Synthetic
uuucuuaaagaauaaac

SEQ ID NO: 743525 - RNA, 17 nt, Artificial Sequence
  Synthetic
aaaauaaaauaauaaac

SEQ ID NO: 743526 - RNA, 17 nt, Artificial Sequence
  Synthetic
aggagagcauaauaaac

SEQ ID NO: 743527 - RNA, 17 nt, Artificial Sequence
  Synthetic
uuuaacuguuaauaaac

SEQ ID NO: 743528 - RNA, 17 nt, Artificial Sequence
  Synthetic
uauccuuuaucauaaac

SEQ ID NO: 743529 - RNA, 17 nt, Artificial Sequence
  Synthetic
uuugucaauucauaaac

SEQ ID NO: 743530 - RNA, 17 nt, Artificial Sequence
  Synthetic
agccaaaaaauauaaac

SEQ ID NO: 743531 - RNA, 17 nt, Artificial Sequence
  Synthetic
ugacaagaaauauaaac

SEQ ID NO: 743532 - RNA, 17 nt, Artificial Sequence
  Synthetic
cuaucaagaauauaaac

SEQ ID NO: 743533 - RNA, 17 nt, Artificial Sequence
  Synthetic
agucauugcauauaaac

SEQ ID NO: 743534 - RNA, 17 nt, Artificial Sequence
  Synthetic
cuguaaacucuauaaac

SEQ ID NO: 743535 - RNA, 17 nt, Artificial Sequence
  Synthetic
aagucaaaaguauaaac

SEQ ID NO: 743536 - RNA, 17 nt, Artificial Sequence
  Synthetic
uuuagguguuuauaaac

SEQ ID NO: 743537 - RNA, 17 nt, Artificial Sequence
  Synthetic
aucuuuaaaaacuaaac

SEQ ID NO: 743538 - RNA, 17 nt, Artificial Sequence
  Synthetic
aaagagauguccuaaac

SEQ ID NO: 743539 - RNA, 17 nt, Artificial Sequence
  Synthetic
uuccaauccagcuaaac

SEQ ID NO: 743540 - RNA, 17 nt, Artificial Sequence
  Synthetic
uauccuguuugcuaaac

SEQ ID NO: 743541 - RNA, 17 nt, Artificial Sequence
  Synthetic
uacuguggaaucuaaac

SEQ ID NO: 743542 - RNA, 17 nt, Artificial Sequence
  Synthetic
aagcuuaagaucuaaac

SEQ ID NO: 743543 - RNA, 17 nt, Artificial Sequence
  Synthetic
uauguuccucucuaaac

SEQ ID NO: 743544 - RNA, 17 nt, Artificial Sequence
  Synthetic
agagucaaggucuaaac

SEQ ID NO: 743545 - RNA, 17 nt, Artificial Sequence
  Synthetic
uuauagaaauucuaaac

SEQ ID NO: 743546 - RNA, 17 nt, Artificial Sequence
  Synthetic
uuagcuuuauucuaaac

SEQ ID NO: 743547 - RNA, 17 nt, Artificial Sequence
  Synthetic
caugugcuuuucuaaac

SEQ ID NO: 743548 - RNA, 17 nt, Artificial Sequence
  Synthetic
acaaggaaaaaguaaac

SEQ ID NO: 743549 - RNA, 17 nt, Artificial Sequence
  Synthetic
ucccccucaaaguaaac

SEQ ID NO: 743550 - RNA, 17 nt, Artificial Sequence
  Synthetic
ucuacagaacaguaaac

SEQ ID NO: 743551 - RNA, 17 nt, Artificial Sequence
  Synthetic
acaaucauacaguaaac

SEQ ID NO: 743552 - RNA, 17 nt, Artificial Sequence
  Synthetic
augaugcuacaguaaac

SEQ ID NO: 743553 - RNA, 17 nt, Artificial Sequence
  Synthetic
agaauccaccaguaaac

SEQ ID NO: 743554 - RNA, 17 nt, Artificial Sequence
  Synthetic
caaaaauaucaguaaac

SEQ ID NO: 743555 - RNA, 17 nt, Artificial Sequence
  Synthetic
aucuuaacagaguaaac

SEQ ID NO: 743556 - RNA, 17 nt, Artificial Sequence
  Synthetic
auuuugauugaguaaac

SEQ ID NO: 743557 - RNA, 17 nt, Artificial Sequence
  Synthetic
cugaauuucuaguaaac

SEQ ID NO: 743558 - RNA, 17 nt, Artificial Sequence
  Synthetic
ucagauuguuaguaaac

SEQ ID NO: 743559 - RNA, 17 nt, Artificial Sequence
  Synthetic
aaagguagcagguaaac

SEQ ID NO: 743560 - RNA, 17 nt, Artificial Sequence
  Synthetic
aauggugcuggguaaac

SEQ ID NO: 743561 - RNA, 17 nt, Artificial Sequence
  Synthetic
uaaccuuaaauguaaac

SEQ ID NO: 743562 - RNA, 17 nt, Artificial Sequence
  Synthetic
uuguucuucauguaaac

SEQ ID NO: 743563 - RNA, 17 nt, Artificial Sequence
  Synthetic
aaacauuauauguaaac

SEQ ID NO: 743564 - RNA, 17 nt, Artificial Sequence
  Synthetic
uauagucuccuguaaac

SEQ ID NO: 743565 - RNA, 17 nt, Artificial Sequence
  Synthetic
cugaaaggauuguaaac

SEQ ID NO: 743566 - RNA, 17 nt, Artificial Sequence
  Synthetic
uauguguucaauuaaac

SEQ ID NO: 743567 - RNA, 17 nt, Artificial Sequence
  Synthetic
ugcugagagcauuaaac

SEQ ID NO: 743568 - RNA, 17 nt, Artificial Sequence
  Synthetic
ugacacauguauuaaac

SEQ ID NO: 743569 - RNA, 17 nt, Artificial Sequence
  Synthetic
uuuugcagcacuuaaac

SEQ ID NO: 743570 - RNA, 17 nt, Artificial Sequence
  Synthetic
aguuauuggccuuaaac

SEQ ID NO: 743571 - RNA, 17 nt, Artificial Sequence
  Synthetic
acacugguggcuuaaac

SEQ ID NO: 743572 - RNA, 17 nt, Artificial Sequence
  Synthetic
aggaaagaaucuuaaac

SEQ ID NO: 743573 - RNA, 17 nt, Artificial Sequence
  Synthetic
augugaucauguuaaac

SEQ ID NO: 743574 - RNA, 17 nt, Artificial Sequence
  Synthetic
agagcuagaauuuaaac

SEQ ID NO: 743575 - RNA, 17 nt, Artificial Sequence
  Synthetic
ccacaaggcauuuaaac

SEQ ID NO: 743576 - RNA, 17 nt, Artificial Sequence
  Synthetic
agaacauucauuuaaac

SEQ ID NO: 743577 - RNA, 17 nt, Artificial Sequence
  Synthetic
agcauugauuuuuaaac

SEQ ID NO: 743578 - RNA, 17 nt, Artificial Sequence
  Synthetic
ccaacgaaaaaaacaac

SEQ ID NO: 743579 - RNA, 17 nt, Artificial Sequence
  Synthetic
uccauacacaaaacaac

SEQ ID NO: 743580 - RNA, 17 nt, Artificial Sequence
  Synthetic
ugcugacugaaaacaac

SEQ ID NO: 743581 - RNA, 17 nt, Artificial Sequence
  Synthetic
ugaucugaucaaacaac

SEQ ID NO: 743582 - RNA, 17 nt, Artificial Sequence
  Synthetic
aaaaaucaggaaacaac

SEQ ID NO: 743583 - RNA, 17 nt, Artificial Sequence
  Synthetic
aaaagucaggaaacaac

SEQ ID NO: 743584 - RNA, 17 nt, Artificial Sequence
  Synthetic
uguguuacauaaacaac

SEQ ID NO: 743585 - RNA, 17 nt, Artificial Sequence
  Synthetic
aguucaagcuaaacaac

SEQ ID NO: 743586 - RNA, 17 nt, Artificial Sequence
  Synthetic
uggguggcuuaaacaac

SEQ ID NO: 743587 - RNA, 17 nt, Artificial Sequence
  Synthetic
ugaaacuuaccaacaac

SEQ ID NO: 743588 - RNA, 17 nt, Artificial Sequence
  Synthetic
acauuaacaucaacaac

SEQ ID NO: 743589 - RNA, 17 nt, Artificial Sequence
  Synthetic
cugcauuuaucaacaac

SEQ ID NO: 743590 - RNA, 17 nt, Artificial Sequence
  Synthetic
agcauguccagaacaac

SEQ ID NO: 743591 - RNA, 17 nt, Artificial Sequence
  Synthetic
acauggaaaggaacaac

SEQ ID NO: 743592 - RNA, 17 nt, Artificial Sequence
  Synthetic
cuaggaugaugaacaac

SEQ ID NO: 743593 - RNA, 17 nt, Artificial Sequence
  Synthetic
cauuuuaaaauaacaac

SEQ ID NO: 743594 - RNA, 17 nt, Artificial Sequence
  Synthetic
ugugaagagguaacaac

SEQ ID NO: 743595 - RNA, 17 nt, Artificial Sequence
  Synthetic
ugccaagaauacacaac

SEQ ID NO: 743596 - RNA, 17 nt, Artificial Sequence
  Synthetic
uccccccaccccacaac

SEQ ID NO: 743597 - RNA, 17 nt, Artificial Sequence
  Synthetic
ucccccgaccccacaac

SEQ ID NO: 743598 - RNA, 17 nt, Artificial Sequence
  Synthetic
ucaucauaucccacaac

SEQ ID NO: 743599 - RNA, 17 nt, Artificial Sequence
  Synthetic
uucucaagucccacaac

SEQ ID NO: 743600 - RNA, 17 nt, Artificial Sequence
  Synthetic
cuauuugauagcacaac

SEQ ID NO: 743601 - RNA, 17 nt, Artificial Sequence
  Synthetic
cuauuugcuagcacaac

SEQ ID NO: 743602 - RNA, 17 nt, Artificial Sequence
  Synthetic
auuaucaaaaucacaac

SEQ ID NO: 743603 - RNA, 17 nt, Artificial Sequence
  Synthetic
cuuccuucauagacaac

SEQ ID NO: 743604 - RNA, 17 nt, Artificial Sequence
  Synthetic
uuuaucacaaggacaac

SEQ ID NO: 743605 - RNA, 17 nt, Artificial Sequence
  Synthetic
ucacauuucaggacaac

SEQ ID NO: 743606 - RNA, 17 nt, Artificial Sequence
  Synthetic
cuucuccuagggacaac

SEQ ID NO: 743607 - RNA, 17 nt, Artificial Sequence
  Synthetic
aaauaagacuggacaac

SEQ ID NO: 743608 - RNA, 17 nt, Artificial Sequence
  Synthetic
uuuggcauuuggacaac

SEQ ID NO: 743609 - RNA, 17 nt, Artificial Sequence
  Synthetic
uuaaaacaaaugacaac

SEQ ID NO: 743610 - RNA, 17 nt, Artificial Sequence
  Synthetic
aaguguugcaugacaac

SEQ ID NO: 743611 - RNA, 17 nt, Artificial Sequence
  Synthetic
uccuuagggaugacaac

SEQ ID NO: 743612 - RNA, 17 nt, Artificial Sequence
  Synthetic
cauauugaccugacaac

SEQ ID NO: 743613 - RNA, 17 nt, Artificial Sequence
  Synthetic
auaaguaauaauacaac

SEQ ID NO: 743614 - RNA, 17 nt, Artificial Sequence
  Synthetic
caguaugcuaauacaac

SEQ ID NO: 743615 - RNA, 17 nt, Artificial Sequence
  Synthetic
auuaguuagcauacaac

SEQ ID NO: 743616 - RNA, 17 nt, Artificial Sequence
  Synthetic
aauggguugcauacaac

SEQ ID NO: 743617 - RNA, 17 nt, Artificial Sequence
  Synthetic
aaacauguuaguacaac

SEQ ID NO: 743618 - RNA, 17 nt, Artificial Sequence
  Synthetic
aauggcaaauguacaac

SEQ ID NO: 743619 - RNA, 17 nt, Artificial Sequence
  Synthetic
aacauaaucuguacaac

SEQ ID NO: 743620 - RNA, 17 nt, Artificial Sequence
  Synthetic
agaggagacauuacaac

SEQ ID NO: 743621 - RNA, 17 nt, Artificial Sequence
  Synthetic
acaguaacuuuuacaac

SEQ ID NO: 743622 - RNA, 17 nt, Artificial Sequence
  Synthetic
ucgauuauuuuuacaac

SEQ ID NO: 743623 - RNA, 17 nt, Artificial Sequence
  Synthetic
auuacugauaaaccaac

SEQ ID NO: 743624 - RNA, 17 nt, Artificial Sequence
  Synthetic
ugggugccuaaaccaac

SEQ ID NO: 743625 - RNA, 17 nt, Artificial Sequence
  Synthetic
cuaguuucuaaaccaac

SEQ ID NO: 743626 - RNA, 17 nt, Artificial Sequence
  Synthetic
uuuacauucccaccaac

SEQ ID NO: 743627 - RNA, 17 nt, Artificial Sequence
  Synthetic
aauuggaagugaccaac

SEQ ID NO: 743628 - RNA, 17 nt, Artificial Sequence
  Synthetic
uagcagaguugaccaac

SEQ ID NO: 743629 - RNA, 17 nt, Artificial Sequence
  Synthetic
ugaacauaguacccaac

SEQ ID NO: 743630 - RNA, 17 nt, Artificial Sequence
  Synthetic
uguguugcaaccccaac

SEQ ID NO: 743631 - RNA, 17 nt, Artificial Sequence
  Synthetic
agccccccacccccaac

SEQ ID NO: 743632 - RNA, 17 nt, Artificial Sequence
  Synthetic
ccccccaaucccccaac

SEQ ID NO: 743633 - RNA, 17 nt, Artificial Sequence
  Synthetic
ucucauagucccccaac

SEQ ID NO: 743634 - RNA, 17 nt, Artificial Sequence
  Synthetic
ucaaugcuauccccaac

SEQ ID NO: 743635 - RNA, 17 nt, Artificial Sequence
  Synthetic
ucaaauguuuagccaac

SEQ ID NO: 743636 - RNA, 17 nt, Artificial Sequence
  Synthetic
acauagaaauggccaac

SEQ ID NO: 743637 - RNA, 17 nt, Artificial Sequence
  Synthetic
caccaugccuggccaac

SEQ ID NO: 743638 - RNA, 17 nt, Artificial Sequence
  Synthetic
uucacaacuuggccaac

SEQ ID NO: 743639 - RNA, 17 nt, Artificial Sequence
  Synthetic
aaucauugaaugccaac

SEQ ID NO: 743640 - RNA, 17 nt, Artificial Sequence
  Synthetic
aauuucugaacuccaac

SEQ ID NO: 743641 - RNA, 17 nt, Artificial Sequence
  Synthetic
auucaauuaccuccaac

SEQ ID NO: 743642 - RNA, 17 nt, Artificial Sequence
  Synthetic
cugcucuugucuccaac

SEQ ID NO: 743643 - RNA, 17 nt, Artificial Sequence
  Synthetic
uuuccaaccuguccaac

SEQ ID NO: 743644 - RNA, 17 nt, Artificial Sequence
  Synthetic
cuauagaaucuuccaac

SEQ ID NO: 743645 - RNA, 17 nt, Artificial Sequence
  Synthetic
uaauucugguuuccaac

SEQ ID NO: 743646 - RNA, 17 nt, Artificial Sequence
  Synthetic
auuauuucaaaagcaac

SEQ ID NO: 743647 - RNA, 17 nt, Artificial Sequence
  Synthetic
auucaaacuaaagcaac

SEQ ID NO: 743648 - RNA, 17 nt, Artificial Sequence
  Synthetic
agcugaucuaaagcaac

SEQ ID NO: 743649 - RNA, 17 nt, Artificial Sequence
  Synthetic
ugacaaaaacaagcaac

SEQ ID NO: 743650 - RNA, 17 nt, Artificial Sequence
  Synthetic
uggaaagaaacagcaac

SEQ ID NO: 743651 - RNA, 17 nt, Artificial Sequence
  Synthetic
uggaacaauacagcaac

SEQ ID NO: 743652 - RNA, 17 nt, Artificial Sequence
  Synthetic
auaacaaucccagcaac

SEQ ID NO: 743653 - RNA, 17 nt, Artificial Sequence
  Synthetic
uuuaucagcucagcaac

SEQ ID NO: 743654 - RNA, 17 nt, Artificial Sequence
  Synthetic
agggucaauucagcaac

SEQ ID NO: 743655 - RNA, 17 nt, Artificial Sequence
  Synthetic
cagcaaacaguagcaac

SEQ ID NO: 743656 - RNA, 17 nt, Artificial Sequence
  Synthetic
uuaaauauaaucgcaac

SEQ ID NO: 743657 - RNA, 17 nt, Artificial Sequence
  Synthetic
uuuguggaacucgcaac

SEQ ID NO: 743658 - RNA, 17 nt, Artificial Sequence
  Synthetic
aacuuuguggaggcaac

SEQ ID NO: 743659 - RNA, 17 nt, Artificial Sequence
  Synthetic
agaccagccuaggcaac

SEQ ID NO: 743660 - RNA, 17 nt, Artificial Sequence
  Synthetic
uucagguggugggcaac

SEQ ID NO: 743661 - RNA, 17 nt, Artificial Sequence
  Synthetic
auuuauguaauggcaac

SEQ ID NO: 743662 - RNA, 17 nt, Artificial Sequence
  Synthetic
ugugcucucauggcaac

SEQ ID NO: 743663 - RNA, 17 nt, Artificial Sequence
  Synthetic
auuucuguucuggcaac

SEQ ID NO: 743664 - RNA, 17 nt, Artificial Sequence
  Synthetic
aagagauaaaaugcaac

SEQ ID NO: 743665 - RNA, 17 nt, Artificial Sequence
  Synthetic
ucuucaauaaaugcaac

SEQ ID NO: 743666 - RNA, 17 nt, Artificial Sequence
  Synthetic
augcagaagaaugcaac

SEQ ID NO: 743667 - RNA, 17 nt, Artificial Sequence
  Synthetic
acuauuaugaaugcaac

SEQ ID NO: 743668 - RNA, 17 nt, Artificial Sequence
  Synthetic
ugaggggcuaaugcaac

SEQ ID NO: 743669 - RNA, 17 nt, Artificial Sequence
  Synthetic
agcaacaugcaugcaac

SEQ ID NO: 743670 - RNA, 17 nt, Artificial Sequence
  Synthetic
auuaaucaucaugcaac

SEQ ID NO: 743671 - RNA, 17 nt, Artificial Sequence
  Synthetic
ucuccauacuaugcaac

SEQ ID NO: 743672 - RNA, 17 nt, Artificial Sequence
  Synthetic
caggauugcuaugcaac

SEQ ID NO: 743673 - RNA, 17 nt, Artificial Sequence
  Synthetic
aggagacugacugcaac

SEQ ID NO: 743674 - RNA, 17 nt, Artificial Sequence
  Synthetic
cucauucaccgugcaac

SEQ ID NO: 743675 - RNA, 17 nt, Artificial Sequence
  Synthetic
aaacaagucugugcaac

SEQ ID NO: 743676 - RNA, 17 nt, Artificial Sequence
  Synthetic
ucccuggguauugcaac

SEQ ID NO: 743677 - RNA, 17 nt, Artificial Sequence
  Synthetic
uaauucuaauuugcaac

SEQ ID NO: 743678 - RNA, 17 nt, Artificial Sequence
  Synthetic
uaaaauguuuuugcaac

SEQ ID NO: 743679 - RNA, 17 nt, Artificial Sequence
  Synthetic
augccaucaaaaucaac

SEQ ID NO: 743680 - RNA, 17 nt, Artificial Sequence
  Synthetic
ugaguaaugcaaucaac

SEQ ID NO: 743681 - RNA, 17 nt, Artificial Sequence
  Synthetic
ugcacauaagaaucaac

SEQ ID NO: 743682 - RNA, 17 nt, Artificial Sequence
  Synthetic
uuccaggacacaucaac

SEQ ID NO: 743683 - RNA, 17 nt, Artificial Sequence
  Synthetic
caggugaccucaucaac

SEQ ID NO: 743684 - RNA, 17 nt, Artificial Sequence
  Synthetic
ugugggagaagaucaac

SEQ ID NO: 743685 - RNA, 17 nt, Artificial Sequence
  Synthetic
aaugaaauuagaucaac

SEQ ID NO: 743686 - RNA, 17 nt, Artificial Sequence
  Synthetic
auaguugcuauaucaac

SEQ ID NO: 743687 - RNA, 17 nt, Artificial Sequence
  Synthetic
aacuuugucuuaucaac

SEQ ID NO: 743688 - RNA, 17 nt, Artificial Sequence
  Synthetic
uguuaauacaacucaac

SEQ ID NO: 743689 - RNA, 17 nt, Artificial Sequence
  Synthetic
aucucaauacacucaac

SEQ ID NO: 743690 - RNA, 17 nt, Artificial Sequence
  Synthetic
auauguugguccucaac

SEQ ID NO: 743691 - RNA, 17 nt, Artificial Sequence
  Synthetic
cuuaauuuaugcucaac

SEQ ID NO: 743692 - RNA, 17 nt, Artificial Sequence
  Synthetic
ugauuuagcugcucaac

SEQ ID NO: 743693 - RNA, 17 nt, Artificial Sequence
  Synthetic
cuguguucagagucaac

SEQ ID NO: 743694 - RNA, 17 nt, Artificial Sequence
  Synthetic
cuaucaugagagucaac

SEQ ID NO: 743695 - RNA, 17 nt, Artificial Sequence
  Synthetic
aguuagaccaugucaac

SEQ ID NO: 743696 - RNA, 17 nt, Artificial Sequence
  Synthetic
uaucauuccaugucaac

SEQ ID NO: 743697 - RNA, 17 nt, Artificial Sequence
  Synthetic
uagguguauaugucaac

SEQ ID NO: 743698 - RNA, 17 nt, Artificial Sequence
  Synthetic
aauauguccuugucaac

SEQ ID NO: 743699 - RNA, 17 nt, Artificial Sequence
  Synthetic
ccacuuaauuauucaac

SEQ ID NO: 743700 - RNA, 17 nt, Artificial Sequence
  Synthetic
aaauuaaccacuucaac

SEQ ID NO: 743701 - RNA, 17 nt, Artificial Sequence
  Synthetic
agggauaaaccuucaac

SEQ ID NO: 743702 - RNA, 17 nt, Artificial Sequence
  Synthetic
ugcaggucaccuucaac

SEQ ID NO: 743703 - RNA, 17 nt, Artificial Sequence
  Synthetic
uauccaguguguucaac

SEQ ID NO: 743704 - RNA, 17 nt, Artificial Sequence
  Synthetic
cauaaccccauuucaac

SEQ ID NO: 743705 - RNA, 17 nt, Artificial Sequence
  Synthetic
ucacauuuuauuucaac

SEQ ID NO: 743706 - RNA, 17 nt, Artificial Sequence
  Synthetic
acucgcugucuuucaac

SEQ ID NO: 743707 - RNA, 17 nt, Artificial Sequence
  Synthetic
ccaaguuacuuuucaac

SEQ ID NO: 743708 - RNA, 17 nt, Artificial Sequence
  Synthetic
ugaagugagaaaagaac

SEQ ID NO: 743709 - RNA, 17 nt, Artificial Sequence
  Synthetic
uagcuuuagaaaagaac

SEQ ID NO: 743710 - RNA, 17 nt, Artificial Sequence
  Synthetic
agugcccauaaaagaac

SEQ ID NO: 743711 - RNA, 17 nt, Artificial Sequence
  Synthetic
uuccccagugaaagaac

SEQ ID NO: 743712 - RNA, 17 nt, Artificial Sequence
  Synthetic
aaugacacauaaagaac

SEQ ID NO: 743713 - RNA, 17 nt, Artificial Sequence
  Synthetic
uauauugcauaaagaac

SEQ ID NO: 743714 - RNA, 17 nt, Artificial Sequence
  Synthetic
aguguguuugcaagaac

SEQ ID NO: 743715 - RNA, 17 nt, Artificial Sequence
  Synthetic
aaaauaguaagaagaac

SEQ ID NO: 743716 - RNA, 17 nt, Artificial Sequence
  Synthetic
uuauguaacagaagaac

SEQ ID NO: 743717 - RNA, 17 nt, Artificial Sequence
  Synthetic
uauacuuugcgaagaac

SEQ ID NO: 743718 - RNA, 17 nt, Artificial Sequence
  Synthetic
cacaacuaaggaagaac

SEQ ID NO: 743719 - RNA, 17 nt, Artificial Sequence
  Synthetic
agucauggaugaagaac

SEQ ID NO: 743720 - RNA, 17 nt, Artificial Sequence
  Synthetic
ucugcuuuaugaagaac

SEQ ID NO: 743721 - RNA, 17 nt, Artificial Sequence
  Synthetic
agugagaccugaagaac

SEQ ID NO: 743722 - RNA, 17 nt, Artificial Sequence
  Synthetic
uagaaauucugaagaac

SEQ ID NO: 743723 - RNA, 17 nt, Artificial Sequence
  Synthetic
cuagucuuuugaagaac

SEQ ID NO: 743724 - RNA, 17 nt, Artificial Sequence
  Synthetic
uuuauuauaauaagaac

SEQ ID NO: 743725 - RNA, 17 nt, Artificial Sequence
  Synthetic
caugauuuuauaagaac

SEQ ID NO: 743726 - RNA, 17 nt, Artificial Sequence
  Synthetic
aacaguugccuaagaac

SEQ ID NO: 743727 - RNA, 17 nt, Artificial Sequence
  Synthetic
agcccaaugguaagaac

SEQ ID NO: 743728 - RNA, 17 nt, Artificial Sequence
  Synthetic
aggauguauguaagaac

SEQ ID NO: 743729 - RNA, 17 nt, Artificial Sequence
  Synthetic
agcaaugacuacagaac

SEQ ID NO: 743730 - RNA, 17 nt, Artificial Sequence
  Synthetic
aguuccagccccagaac

SEQ ID NO: 743731 - RNA, 17 nt, Artificial Sequence
  Synthetic
cacuuggagaucagaac

SEQ ID NO: 743732 - RNA, 17 nt, Artificial Sequence
  Synthetic
acuagcacagucagaac

SEQ ID NO: 743733 - RNA, 17 nt, Artificial Sequence
  Synthetic
cuuccacuggucagaac

SEQ ID NO: 743734 - RNA, 17 nt, Artificial Sequence
  Synthetic
uacgauugcaagagaac

SEQ ID NO: 743735 - RNA, 17 nt, Artificial Sequence
  Synthetic
ccaauggguaagagaac

SEQ ID NO: 743736 - RNA, 17 nt, Artificial Sequence
  Synthetic
aucuucccacagagaac

SEQ ID NO: 743737 - RNA, 17 nt, Artificial Sequence
  Synthetic
uuccuagggcagagaac

SEQ ID NO: 743738 - RNA, 17 nt, Artificial Sequence
  Synthetic
uauccaggucagagaac

SEQ ID NO: 743739 - RNA, 17 nt, Artificial Sequence
  Synthetic
uuugguacagagagaac

SEQ ID NO: 743740 - RNA, 17 nt, Artificial Sequence
  Synthetic
ucacccaacuagagaac

SEQ ID NO: 743741 - RNA, 17 nt, Artificial Sequence
  Synthetic
cuuagaugcuagagaac

SEQ ID NO: 743742 - RNA, 17 nt, Artificial Sequence
  Synthetic
aaggagagagggagaac

SEQ ID NO: 743743 - RNA, 17 nt, Artificial Sequence
  Synthetic
aauggugcugggagaac

SEQ ID NO: 743744 - RNA, 17 nt, Artificial Sequence
  Synthetic
aggaaaagugggagaac

SEQ ID NO: 743745 - RNA, 17 nt, Artificial Sequence
  Synthetic
aucacaucauggagaac

SEQ ID NO: 743746 - RNA, 17 nt, Artificial Sequence
  Synthetic
uuacacugcaugagaac

SEQ ID NO: 743747 - RNA, 17 nt, Artificial Sequence
  Synthetic
uuauaguauaugagaac

SEQ ID NO: 743748 - RNA, 17 nt, Artificial Sequence
  Synthetic
acgcagacccugagaac

SEQ ID NO: 743749 - RNA, 17 nt, Artificial Sequence
  Synthetic
agcaacguggauagaac

SEQ ID NO: 743750 - RNA, 17 nt, Artificial Sequence
  Synthetic
uguaaacuguauagaac

SEQ ID NO: 743751 - RNA, 17 nt, Artificial Sequence
  Synthetic
agaauaccaacuagaac

SEQ ID NO: 743752 - RNA, 17 nt, Artificial Sequence
  Synthetic
accauuuaaccuagaac

SEQ ID NO: 743753 - RNA, 17 nt, Artificial Sequence
  Synthetic
acauugauggcuagaac

SEQ ID NO: 743754 - RNA, 17 nt, Artificial Sequence
  Synthetic
auuaucauugcuagaac

SEQ ID NO: 743755 - RNA, 17 nt, Artificial Sequence
  Synthetic
auugcuaggaguagaac

SEQ ID NO: 743756 - RNA, 17 nt, Artificial Sequence
  Synthetic
ucagaaaaacguagaac

SEQ ID NO: 743757 - RNA, 17 nt, Artificial Sequence
  Synthetic
cugauaaguguuagaac

SEQ ID NO: 743758 - RNA, 17 nt, Artificial Sequence
  Synthetic
auuguguccuuuagaac

SEQ ID NO: 743759 - RNA, 17 nt, Artificial Sequence
  Synthetic
agagucagaagacgaac

SEQ ID NO: 743760 - RNA, 17 nt, Artificial Sequence
  Synthetic
cuuggugagaaaggaac

SEQ ID NO: 743761 - RNA, 17 nt, Artificial Sequence
  Synthetic
uuaggggaagaaggaac

SEQ ID NO: 743762 - RNA, 17 nt, Artificial Sequence
  Synthetic
aauagguuggaaggaac

SEQ ID NO: 743763 - RNA, 17 nt, Artificial Sequence
  Synthetic
uccuugaacccaggaac

SEQ ID NO: 743764 - RNA, 17 nt, Artificial Sequence
  Synthetic
cuuucaaaagcaggaac

SEQ ID NO: 743765 - RNA, 17 nt, Artificial Sequence
  Synthetic
caaauuaacgcaggaac

SEQ ID NO: 743766 - RNA, 17 nt, Artificial Sequence
  Synthetic
uagaaguauucaggaac

SEQ ID NO: 743767 - RNA, 17 nt, Artificial Sequence
  Synthetic
ugggcaaacagaggaac

SEQ ID NO: 743768 - RNA, 17 nt, Artificial Sequence
  Synthetic
aagcuagcuggaggaac

SEQ ID NO: 743769 - RNA, 17 nt, Artificial Sequence
  Synthetic
auuuggaaaugaggaac

SEQ ID NO: 743770 - RNA, 17 nt, Artificial Sequence
  Synthetic
aauccuucaugaggaac

SEQ ID NO: 743771 - RNA, 17 nt, Artificial Sequence
  Synthetic
aaaauaugcugaggaac

SEQ ID NO: 743772 - RNA, 17 nt, Artificial Sequence
  Synthetic
agugaccuguuaggaac

SEQ ID NO: 743773 - RNA, 17 nt, Artificial Sequence
  Synthetic
uuucucccauucggaac

SEQ ID NO: 743774 - RNA, 17 nt, Artificial Sequence
  Synthetic
cauaaggcagagggaac

SEQ ID NO: 743775 - RNA, 17 nt, Artificial Sequence
  Synthetic
augaacugagagggaac

SEQ ID NO: 743776 - RNA, 17 nt, Artificial Sequence
  Synthetic
uagcagugagagggaac

SEQ ID NO: 743777 - RNA, 17 nt, Artificial Sequence
  Synthetic
uuaaaagccuagggaac

SEQ ID NO: 743778 - RNA, 17 nt, Artificial Sequence
  Synthetic
aggaagagaaggggaac

SEQ ID NO: 743779 - RNA, 17 nt, Artificial Sequence
  Synthetic
cugggcgaagggggaac

SEQ ID NO: 743780 - RNA, 17 nt, Artificial Sequence
  Synthetic
uuuuugcuugggggaac

SEQ ID NO: 743781 - RNA, 17 nt, Artificial Sequence
  Synthetic
uuacuaaucuggggaac

SEQ ID NO: 743782 - RNA, 17 nt, Artificial Sequence
  Synthetic
uguuuaggaaugggaac

SEQ ID NO: 743783 - RNA, 17 nt, Artificial Sequence
  Synthetic
cuggggcucgugggaac

SEQ ID NO: 743784 - RNA, 17 nt, Artificial Sequence
  Synthetic
caugaacacuugggaac

SEQ ID NO: 743785 - RNA, 17 nt, Artificial Sequence
  Synthetic
aggaacuucuugggaac

SEQ ID NO: 743786 - RNA, 17 nt, Artificial Sequence
  Synthetic
cuguccaaagauggaac

SEQ ID NO: 743787 - RNA, 17 nt, Artificial Sequence
  Synthetic
agcaacauggauggaac

SEQ ID NO: 743788 - RNA, 17 nt, Artificial Sequence
  Synthetic
aacaucauggauggaac

SEQ ID NO: 743789 - RNA, 17 nt, Artificial Sequence
  Synthetic
aacaucuuggauggaac

SEQ ID NO: 743790 - RNA, 17 nt, Artificial Sequence
  Synthetic
caagcaagguguggaac

SEQ ID NO: 743791 - RNA, 17 nt, Artificial Sequence
  Synthetic
aguaauaccauuggaac

SEQ ID NO: 743792 - RNA, 17 nt, Artificial Sequence
  Synthetic
uggaagugacuuggaac

SEQ ID NO: 743793 - RNA, 17 nt, Artificial Sequence
  Synthetic
aguauggcauuuggaac

SEQ ID NO: 743794 - RNA, 17 nt, Artificial Sequence
  Synthetic
agagagugaaaaugaac

SEQ ID NO: 743795 - RNA, 17 nt, Artificial Sequence
  Synthetic
uuugaugggaaaugaac

SEQ ID NO: 743796 - RNA, 17 nt, Artificial Sequence
  Synthetic
aggauauuacaaugaac

SEQ ID NO: 743797 - RNA, 17 nt, Artificial Sequence
  Synthetic
cuacugaaauaaugaac

SEQ ID NO: 743798 - RNA, 17 nt, Artificial Sequence
  Synthetic
cagggaaaaacaugaac

SEQ ID NO: 743799 - RNA, 17 nt, Artificial Sequence
  Synthetic
auagaaccaacaugaac

SEQ ID NO: 743800 - RNA, 17 nt, Artificial Sequence
  Synthetic
uuaaauccaucaugaac

SEQ ID NO: 743801 - RNA, 17 nt, Artificial Sequence
  Synthetic
agaggaagaagaugaac

SEQ ID NO: 743802 - RNA, 17 nt, Artificial Sequence
  Synthetic
aaaugaacuagaugaac

SEQ ID NO: 743803 - RNA, 17 nt, Artificial Sequence
  Synthetic
agagaaugaugaugaac

SEQ ID NO: 743804 - RNA, 17 nt, Artificial Sequence
  Synthetic
ccuuucaguugaugaac

SEQ ID NO: 743805 - RNA, 17 nt, Artificial Sequence
  Synthetic
auguagcuaguaugaac

SEQ ID NO: 743806 - RNA, 17 nt, Artificial Sequence
  Synthetic
caccucacauuaugaac

SEQ ID NO: 743807 - RNA, 17 nt, Artificial Sequence
  Synthetic
caguccagccacugaac

SEQ ID NO: 743808 - RNA, 17 nt, Artificial Sequence
  Synthetic
cucccaagucccugaac

SEQ ID NO: 743809 - RNA, 17 nt, Artificial Sequence
  Synthetic
caaagaggugccugaac

SEQ ID NO: 743810 - RNA, 17 nt, Artificial Sequence
  Synthetic
cucaggaaaagcugaac

SEQ ID NO: 743811 - RNA, 17 nt, Artificial Sequence
  Synthetic
uagggcagcagcugaac

SEQ ID NO: 743812 - RNA, 17 nt, Artificial Sequence
  Synthetic
cuuccggguagcugaac

SEQ ID NO: 743813 - RNA, 17 nt, Artificial Sequence
  Synthetic
auugaugcagagugaac

SEQ ID NO: 743814 - RNA, 17 nt, Artificial Sequence
  Synthetic
cuaccaucagagugaac

SEQ ID NO: 743815 - RNA, 17 nt, Artificial Sequence
  Synthetic
cuaucaugagagugaac

SEQ ID NO: 743816 - RNA, 17 nt, Artificial Sequence
  Synthetic
aguacaguggagugaac

SEQ ID NO: 743817 - RNA, 17 nt, Artificial Sequence
  Synthetic
uuaauaaaugagugaac

SEQ ID NO: 743818 - RNA, 17 nt, Artificial Sequence
  Synthetic
uaaaagaaguagugaac

SEQ ID NO: 743819 - RNA, 17 nt, Artificial Sequence
  Synthetic
acccaaacaaggugaac

SEQ ID NO: 743820 - RNA, 17 nt, Artificial Sequence
  Synthetic
cagucccugaggugaac

SEQ ID NO: 743821 - RNA, 17 nt, Artificial Sequence
  Synthetic
ucaguguuuaggugaac

SEQ ID NO: 743822 - RNA, 17 nt, Artificial Sequence
  Synthetic
caggaaaacaugugaac

SEQ ID NO: 743823 - RNA, 17 nt, Artificial Sequence
  Synthetic
ugguuaauacugugaac

SEQ ID NO: 743824 - RNA, 17 nt, Artificial Sequence
  Synthetic
uauaaguuccauugaac

SEQ ID NO: 743825 - RNA, 17 nt, Artificial Sequence
  Synthetic
uuuuuagggcauugaac

SEQ ID NO: 743826 - RNA, 17 nt, Artificial Sequence
  Synthetic
aacaacacggauugaac

SEQ ID NO: 743827 - RNA, 17 nt, Artificial Sequence
  Synthetic
auuuuggugacuugaac

SEQ ID NO: 743828 - RNA, 17 nt, Artificial Sequence
  Synthetic
acauuuucagcuugaac

SEQ ID NO: 743829 - RNA, 17 nt, Artificial Sequence
  Synthetic
uuauacugggcuugaac

SEQ ID NO: 743830 - RNA, 17 nt, Artificial Sequence
  Synthetic
acaaaaaaccguugaac

SEQ ID NO: 743831 - RNA, 17 nt, Artificial Sequence
  Synthetic
aauugagaggguugaac

SEQ ID NO: 743832 - RNA, 17 nt, Artificial Sequence
  Synthetic
cagaacagacuuugaac

SEQ ID NO: 743833 - RNA, 17 nt, Artificial Sequence
  Synthetic
aggcccugucuuugaac

SEQ ID NO: 743834 - RNA, 17 nt, Artificial Sequence
  Synthetic
aauggcauuguuugaac

SEQ ID NO: 743835 - RNA, 17 nt, Artificial Sequence
  Synthetic
aaauagucaaaaauaac

SEQ ID NO: 743836 - RNA, 17 nt, Artificial Sequence
  Synthetic
acaaauggaaaaauaac

SEQ ID NO: 743837 - RNA, 17 nt, Artificial Sequence
  Synthetic
aaggucugaaaaauaac

SEQ ID NO: 743838 - RNA, 17 nt, Artificial Sequence
  Synthetic
acauuugccaaaauaac

SEQ ID NO: 743839 - RNA, 17 nt, Artificial Sequence
  Synthetic
uuacaaagcaaaauaac

SEQ ID NO: 743840 - RNA, 17 nt, Artificial Sequence
  Synthetic
cucugcugcaaaauaac

SEQ ID NO: 743841 - RNA, 17 nt, Artificial Sequence
  Synthetic
agagcaaggaaaauaac

SEQ ID NO: 743842 - RNA, 17 nt, Artificial Sequence
  Synthetic
cuuguucugaaaauaac

SEQ ID NO: 743843 - RNA, 17 nt, Artificial Sequence
  Synthetic
uacaaaaguaaaauaac

SEQ ID NO: 743844 - RNA, 17 nt, Artificial Sequence
  Synthetic
uccgccucccaaauaac

SEQ ID NO: 743845 - RNA, 17 nt, Artificial Sequence
  Synthetic
ugguuacuccaaauaac

SEQ ID NO: 743846 - RNA, 17 nt, Artificial Sequence
  Synthetic
auaauagggcaaauaac

SEQ ID NO: 743847 - RNA, 17 nt, Artificial Sequence
  Synthetic
aguaaaugucaaauaac

SEQ ID NO: 743848 - RNA, 17 nt, Artificial Sequence
  Synthetic
auaaggaaggaaauaac

SEQ ID NO: 743849 - RNA, 17 nt, Artificial Sequence
  Synthetic
aauguauccuaaauaac

SEQ ID NO: 743850 - RNA, 17 nt, Artificial Sequence
  Synthetic
agacagcguuaaauaac

SEQ ID NO: 743851 - RNA, 17 nt, Artificial Sequence
  Synthetic
uagaaaggaacaauaac

SEQ ID NO: 743852 - RNA, 17 nt, Artificial Sequence
  Synthetic
cugaauagaccaauaac

SEQ ID NO: 743853 - RNA, 17 nt, Artificial Sequence
  Synthetic
aguaacacaagaauaac

SEQ ID NO: 743854 - RNA, 17 nt, Artificial Sequence
  Synthetic
ccuggugcuagaauaac

SEQ ID NO: 743855 - RNA, 17 nt, Artificial Sequence
  Synthetic
agagcccagugaauaac

SEQ ID NO: 743856 - RNA, 17 nt, Artificial Sequence
  Synthetic
aaaagaggaauaauaac

SEQ ID NO: 743857 - RNA, 17 nt, Artificial Sequence
  Synthetic
uaaaucuacauaauaac

SEQ ID NO: 743858 - RNA, 17 nt, Artificial Sequence
  Synthetic
cugacgagacuaauaac

SEQ ID NO: 743859 - RNA, 17 nt, Artificial Sequence
  Synthetic
uaauaccagcuaauaac

SEQ ID NO: 743860 - RNA, 17 nt, Artificial Sequence
  Synthetic
auuuuauuucuaauaac

SEQ ID NO: 743861 - RNA, 17 nt, Artificial Sequence
  Synthetic
uuuagggcauuaauaac

SEQ ID NO: 743862 - RNA, 17 nt, Artificial Sequence
  Synthetic
aucucacuuuuaauaac

SEQ ID NO: 743863 - RNA, 17 nt, Artificial Sequence
  Synthetic
cucuguggaaacauaac

SEQ ID NO: 743864 - RNA, 17 nt, Artificial Sequence
  Synthetic
caauucuuuaacauaac

SEQ ID NO: 743865 - RNA, 17 nt, Artificial Sequence
  Synthetic
aauacuuggcacauaac

SEQ ID NO: 743866 - RNA, 17 nt, Artificial Sequence
  Synthetic
aauucaacucacauaac

SEQ ID NO: 743867 - RNA, 17 nt, Artificial Sequence
  Synthetic
uggauaauggacauaac

SEQ ID NO: 743868 - RNA, 17 nt, Artificial Sequence
  Synthetic
cugugggacuacauaac

SEQ ID NO: 743869 - RNA, 17 nt, Artificial Sequence
  Synthetic
cauaucaaagccauaac

SEQ ID NO: 743870 - RNA, 17 nt, Artificial Sequence
  Synthetic
auaacuaguuccauaac

SEQ ID NO: 743871 - RNA, 17 nt, Artificial Sequence
  Synthetic
auggauaaauucauaac

SEQ ID NO: 743872 - RNA, 17 nt, Artificial Sequence
  Synthetic
aaguguaaauucauaac

SEQ ID NO: 743873 - RNA, 17 nt, Artificial Sequence
  Synthetic
cagagcauuuucauaac

SEQ ID NO: 743874 - RNA, 17 nt, Artificial Sequence
  Synthetic
aaaaaaaaaaagauaac

SEQ ID NO: 743875 - RNA, 17 nt, Artificial Sequence
  Synthetic
agaaauuaacagauaac

SEQ ID NO: 743876 - RNA, 17 nt, Artificial Sequence
  Synthetic
aaaugaaaucagauaac

SEQ ID NO: 743877 - RNA, 17 nt, Artificial Sequence
  Synthetic
cuuauuuaucagauaac

SEQ ID NO: 743878 - RNA, 17 nt, Artificial Sequence
  Synthetic
uauaaaggggagauaac

SEQ ID NO: 743879 - RNA, 17 nt, Artificial Sequence
  Synthetic
aaauggaaauagauaac

SEQ ID NO: 743880 - RNA, 17 nt, Artificial Sequence
  Synthetic
aaucacaucaggauaac

SEQ ID NO: 743881 - RNA, 17 nt, Artificial Sequence
  Synthetic
ugugggcugaggauaac

SEQ ID NO: 743882 - RNA, 17 nt, Artificial Sequence
  Synthetic
aauuaugauaggauaac

SEQ ID NO: 743883 - RNA, 17 nt, Artificial Sequence
  Synthetic
cuucuuuuagggauaac

SEQ ID NO: 743884 - RNA, 17 nt, Artificial Sequence
  Synthetic
uugucaagaaugauaac

SEQ ID NO: 743885 - RNA, 17 nt, Artificial Sequence
  Synthetic
ccagcaagacugauaac

SEQ ID NO: 743886 - RNA, 17 nt, Artificial Sequence
  Synthetic
cguacucagcugauaac

SEQ ID NO: 743887 - RNA, 17 nt, Artificial Sequence
  Synthetic
cguaaagacuugauaac

SEQ ID NO: 743888 - RNA, 17 nt, Artificial Sequence
  Synthetic
ucacggaaaaauauaac

SEQ ID NO: 743889 - RNA, 17 nt, Artificial Sequence
  Synthetic
aagucaaagaauauaac

SEQ ID NO: 743890 - RNA, 17 nt, Artificial Sequence
  Synthetic
auuaaugugaauauaac

SEQ ID NO: 743891 - RNA, 17 nt, Artificial Sequence
  Synthetic
ugaggugugaauauaac

SEQ ID NO: 743892 - RNA, 17 nt, Artificial Sequence
  Synthetic
uuauuuuuacauauaac

SEQ ID NO: 743893 - RNA, 17 nt, Artificial Sequence
  Synthetic
ugcauagcauauauaac

SEQ ID NO: 743894 - RNA, 17 nt, Artificial Sequence
  Synthetic
auucauauuuauauaac

SEQ ID NO: 743895 - RNA, 17 nt, Artificial Sequence
  Synthetic
cuguauuuuuauauaac

SEQ ID NO: 743896 - RNA, 17 nt, Artificial Sequence
  Synthetic
acacuagccacuauaac

SEQ ID NO: 743897 - RNA, 17 nt, Artificial Sequence
  Synthetic
uuuuuaccuccuauaac

SEQ ID NO: 743898 - RNA, 17 nt, Artificial Sequence
  Synthetic
auguauaauauuauaac

SEQ ID NO: 743899 - RNA, 17 nt, Artificial Sequence
  Synthetic
aguuaauaauuuauaac

SEQ ID NO: 743900 - RNA, 17 nt, Artificial Sequence
  Synthetic
uacugcucuuuuauaac

SEQ ID NO: 743901 - RNA, 17 nt, Artificial Sequence
  Synthetic
ccuaaaucuaaacuaac

SEQ ID NO: 743902 - RNA, 17 nt, Artificial Sequence
  Synthetic
aaacugcaucaacuaac

SEQ ID NO: 743903 - RNA, 17 nt, Artificial Sequence
  Synthetic
aaacugccucaacuaac

SEQ ID NO: 743904 - RNA, 17 nt, Artificial Sequence
  Synthetic
caggaaagucaacuaac

SEQ ID NO: 743905 - RNA, 17 nt, Artificial Sequence
  Synthetic
cagugacacagacuaac

SEQ ID NO: 743906 - RNA, 17 nt, Artificial Sequence
  Synthetic
uuguaacucagacuaac

SEQ ID NO: 743907 - RNA, 17 nt, Artificial Sequence
  Synthetic
uauaugcaaugacuaac

SEQ ID NO: 743908 - RNA, 17 nt, Artificial Sequence
  Synthetic
agaaguugcuuacuaac

SEQ ID NO: 743909 - RNA, 17 nt, Artificial Sequence
  Synthetic
aaugaacccaaccuaac

SEQ ID NO: 743910 - RNA, 17 nt, Artificial Sequence
  Synthetic
aauaaaaauaaccuaac

SEQ ID NO: 743911 - RNA, 17 nt, Artificial Sequence
  Synthetic
uuauaagaaauccuaac

SEQ ID NO: 743912 - RNA, 17 nt, Artificial Sequence
  Synthetic
auaguagccauccuaac

SEQ ID NO: 743913 - RNA, 17 nt, Artificial Sequence
  Synthetic
auaauugcccuccuaac

SEQ ID NO: 743914 - RNA, 17 nt, Artificial Sequence
  Synthetic
auguacaaauagcuaac

SEQ ID NO: 743915 - RNA, 17 nt, Artificial Sequence
  Synthetic
uucacaacuuagcuaac

SEQ ID NO: 743916 - RNA, 17 nt, Artificial Sequence
  Synthetic
uccuugauuuagcuaac

SEQ ID NO: 743917 - RNA, 17 nt, Artificial Sequence
  Synthetic
cacugaagagggcuaac

SEQ ID NO: 743918 - RNA, 17 nt, Artificial Sequence
  Synthetic
auuucugauaugcuaac

SEQ ID NO: 743919 - RNA, 17 nt, Artificial Sequence
  Synthetic
uucacuguuaaucuaac

SEQ ID NO: 743920 - RNA, 17 nt, Artificial Sequence
  Synthetic
uagcaccacuaucuaac

SEQ ID NO: 743921 - RNA, 17 nt, Artificial Sequence
  Synthetic
uuccuuuagacucuaac

SEQ ID NO: 743922 - RNA, 17 nt, Artificial Sequence
  Synthetic
uggugggacccucuaac

SEQ ID NO: 743923 - RNA, 17 nt, Artificial Sequence
  Synthetic
uauuccuccugucuaac

SEQ ID NO: 743924 - RNA, 17 nt, Artificial Sequence
  Synthetic
aagcagaaaauucuaac

SEQ ID NO: 743925 - RNA, 17 nt, Artificial Sequence
  Synthetic
augaucaccauucuaac

SEQ ID NO: 743926 - RNA, 17 nt, Artificial Sequence
  Synthetic
auaacagccauucuaac

SEQ ID NO: 743927 - RNA, 17 nt, Artificial Sequence
  Synthetic
auaauagccauucuaac

SEQ ID NO: 743928 - RNA, 17 nt, Artificial Sequence
  Synthetic
augaucgccauucuaac

SEQ ID NO: 743929 - RNA, 17 nt, Artificial Sequence
  Synthetic
auguucgccauucuaac

SEQ ID NO: 743930 - RNA, 17 nt, Artificial Sequence
  Synthetic
augauugccauucuaac

SEQ ID NO: 743931 - RNA, 17 nt, Artificial Sequence
  Synthetic
auaauagucauucuaac

SEQ ID NO: 743932 - RNA, 17 nt, Artificial Sequence
  Synthetic
uaugugaagauucuaac

SEQ ID NO: 743933 - RNA, 17 nt, Artificial Sequence
  Synthetic
cucucuugccuucuaac

SEQ ID NO: 743934 - RNA, 17 nt, Artificial Sequence
  Synthetic
cacucuaguguucuaac

SEQ ID NO: 743935 - RNA, 17 nt, Artificial Sequence
  Synthetic
uuacauauuuuucuaac

SEQ ID NO: 743936 - RNA, 17 nt, Artificial Sequence
  Synthetic
uuccuagaaaaaguaac

SEQ ID NO: 743937 - RNA, 17 nt, Artificial Sequence
  Synthetic
uauucuuaaaaaguaac

SEQ ID NO: 743938 - RNA, 17 nt, Artificial Sequence
  Synthetic
aauaugucaaaaguaac

SEQ ID NO: 743939 - RNA, 17 nt, Artificial Sequence
  Synthetic
uagccagaacaaguaac

SEQ ID NO: 743940 - RNA, 17 nt, Artificial Sequence
  Synthetic
aaaaaagcugaaguaac

SEQ ID NO: 743941 - RNA, 17 nt, Artificial Sequence
  Synthetic
uagaguuuaacaguaac

SEQ ID NO: 743942 - RNA, 17 nt, Artificial Sequence
  Synthetic
auaauuuagacaguaac

SEQ ID NO: 743943 - RNA, 17 nt, Artificial Sequence
  Synthetic
uuucaaaaugcaguaac

SEQ ID NO: 743944 - RNA, 17 nt, Artificial Sequence
  Synthetic
uauguuuuugcaguaac

SEQ ID NO: 743945 - RNA, 17 nt, Artificial Sequence
  Synthetic
caaagauguagaguaac

SEQ ID NO: 743946 - RNA, 17 nt, Artificial Sequence
  Synthetic
ucagccucccgaguaac

SEQ ID NO: 743947 - RNA, 17 nt, Artificial Sequence
  Synthetic
aaauaggauggaguaac

SEQ ID NO: 743948 - RNA, 17 nt, Artificial Sequence
  Synthetic
uuuguaagcuuaguaac

SEQ ID NO: 743949 - RNA, 17 nt, Artificial Sequence
  Synthetic
uuuucucauuuaguaac

SEQ ID NO: 743950 - RNA, 17 nt, Artificial Sequence
  Synthetic
caggggcuccagguaac

SEQ ID NO: 743951 - RNA, 17 nt, Artificial Sequence
  Synthetic
aacaguaaucagguaac

SEQ ID NO: 743952 - RNA, 17 nt, Artificial Sequence
  Synthetic
uuuucaggugagguaac

SEQ ID NO: 743953 - RNA, 17 nt, Artificial Sequence
  Synthetic
uuuaaaaacuagguaac

SEQ ID NO: 743954 - RNA, 17 nt, Artificial Sequence
  Synthetic
aaauuuagagggguaac

SEQ ID NO: 743955 - RNA, 17 nt, Artificial Sequence
  Synthetic
augaaucuggggguaac

SEQ ID NO: 743956 - RNA, 17 nt, Artificial Sequence
  Synthetic
cuuuggaacuggguaac

SEQ ID NO: 743957 - RNA, 17 nt, Artificial Sequence
  Synthetic
uggugucauuggguaac

SEQ ID NO: 743958 - RNA, 17 nt, Artificial Sequence
  Synthetic
aagaacuuauugguaac

SEQ ID NO: 743959 - RNA, 17 nt, Artificial Sequence
  Synthetic
cccucauuuuugguaac

SEQ ID NO: 743960 - RNA, 17 nt, Artificial Sequence
  Synthetic
uuugguuaauauguaac

SEQ ID NO: 743961 - RNA, 17 nt, Artificial Sequence
  Synthetic
aacacuuuauauguaac

SEQ ID NO: 743962 - RNA, 17 nt, Artificial Sequence
  Synthetic
uuuauucaguauguaac

SEQ ID NO: 743963 - RNA, 17 nt, Artificial Sequence
  Synthetic
acuuugucuucuguaac

SEQ ID NO: 743964 - RNA, 17 nt, Artificial Sequence
  Synthetic
aaaugucauaguguaac

SEQ ID NO: 743965 - RNA, 17 nt, Artificial Sequence
  Synthetic
augaucgccauuguaac

SEQ ID NO: 743966 - RNA, 17 nt, Artificial Sequence
  Synthetic
aaauacaaaaaauuaac

SEQ ID NO: 743967 - RNA, 17 nt, Artificial Sequence
  Synthetic
agaauucaaaaauuaac

SEQ ID NO: 743968 - RNA, 17 nt, Artificial Sequence
  Synthetic
uauguagaaaaauuaac

SEQ ID NO: 743969 - RNA, 17 nt, Artificial Sequence
  Synthetic
cgccagaauaaauuaac

SEQ ID NO: 743970 - RNA, 17 nt, Artificial Sequence
  Synthetic
auuuugacagaauuaac

SEQ ID NO: 743971 - RNA, 17 nt, Artificial Sequence
  Synthetic
agaaaaaguuaauuaac

SEQ ID NO: 743972 - RNA, 17 nt, Artificial Sequence
  Synthetic
ccuggccaggcauuaac

SEQ ID NO: 743973 - RNA, 17 nt, Artificial Sequence
  Synthetic
cuucugucugcauuaac

SEQ ID NO: 743974 - RNA, 17 nt, Artificial Sequence
  Synthetic
aaaaugaauagauuaac

SEQ ID NO: 743975 - RNA, 17 nt, Artificial Sequence
  Synthetic
augaaacugggauuaac

SEQ ID NO: 743976 - RNA, 17 nt, Artificial Sequence
  Synthetic
ugaauagaaugauuaac

SEQ ID NO: 743977 - RNA, 17 nt, Artificial Sequence
  Synthetic
uuuuugcucugauuaac

SEQ ID NO: 743978 - RNA, 17 nt, Artificial Sequence
  Synthetic
ucuucaaugugauuaac

SEQ ID NO: 743979 - RNA, 17 nt, Artificial Sequence
  Synthetic
aaacauucaauauuaac

SEQ ID NO: 743980 - RNA, 17 nt, Artificial Sequence
  Synthetic
agugacaggguauuaac

SEQ ID NO: 743981 - RNA, 17 nt, Artificial Sequence
  Synthetic
caaaugagguuauuaac

SEQ ID NO: 743982 - RNA, 17 nt, Artificial Sequence
  Synthetic
auaguacgguuauuaac

SEQ ID NO: 743983 - RNA, 17 nt, Artificial Sequence
  Synthetic
acaaguaucaacuuaac

SEQ ID NO: 743984 - RNA, 17 nt, Artificial Sequence
  Synthetic
aaggaaaagcacuuaac

SEQ ID NO: 743985 - RNA, 17 nt, Artificial Sequence
  Synthetic
uaaaauauugacuuaac

SEQ ID NO: 743986 - RNA, 17 nt, Artificial Sequence
  Synthetic
acacuauuugacuuaac

SEQ ID NO: 743987 - RNA, 17 nt, Artificial Sequence
  Synthetic
auuugcauguacuuaac

SEQ ID NO: 743988 - RNA, 17 nt, Artificial Sequence
  Synthetic
uuagaaccaaccuuaac

SEQ ID NO: 743989 - RNA, 17 nt, Artificial Sequence
  Synthetic
auaucuacacccuuaac

SEQ ID NO: 743990 - RNA, 17 nt, Artificial Sequence
  Synthetic
uggagguggggcuuaac

SEQ ID NO: 743991 - RNA, 17 nt, Artificial Sequence
  Synthetic
aaaccaaaguaguuaac

SEQ ID NO: 743992 - RNA, 17 nt, Artificial Sequence
  Synthetic
auucacgaaagguuaac

SEQ ID NO: 743993 - RNA, 17 nt, Artificial Sequence
  Synthetic
aaugcucacugguuaac

SEQ ID NO: 743994 - RNA, 17 nt, Artificial Sequence
  Synthetic
auaguacagugguuaac

SEQ ID NO: 743995 - RNA, 17 nt, Artificial Sequence
  Synthetic
aggugaaauugguuaac

SEQ ID NO: 743996 - RNA, 17 nt, Artificial Sequence
  Synthetic
ucuggauauauguuaac

SEQ ID NO: 743997 - RNA, 17 nt, Artificial Sequence
  Synthetic
uccaccccacuguuaac

SEQ ID NO: 743998 - RNA, 17 nt, Artificial Sequence
  Synthetic
aagaaaacucuguuaac

SEQ ID NO: 743999 - RNA, 17 nt, Artificial Sequence
  Synthetic
aaaaaaaauguguuaac

SEQ ID NO: 744000 - RNA, 17 nt, Artificial Sequence
  Synthetic
uccuacugauuguuaac

SEQ ID NO: 744001 - RNA, 17 nt, Artificial Sequence
  Synthetic
auagaaaacaauuuaac

SEQ ID NO: 744002 - RNA, 17 nt, Artificial Sequence
  Synthetic
aaguuuuaacauuuaac

SEQ ID NO: 744003 - RNA, 17 nt, Artificial Sequence
  Synthetic
cgaagaugccauuuaac

SEQ ID NO: 744004 - RNA, 17 nt, Artificial Sequence
  Synthetic
uaaggcucugauuuaac

SEQ ID NO: 744005 - RNA, 17 nt, Artificial Sequence
  Synthetic
caaugaauuacuuuaac

SEQ ID NO: 744006 - RNA, 17 nt, Artificial Sequence
  Synthetic
uguugguagccuuuaac

SEQ ID NO: 744007 - RNA, 17 nt, Artificial Sequence
  Synthetic
ugaugaaugccuuuaac

SEQ ID NO: 744008 - RNA, 17 nt, Artificial Sequence
  Synthetic
uucagagccgcuuuaac

SEQ ID NO: 744009 - RNA, 17 nt, Artificial Sequence
  Synthetic
cuacuuccaucuuuaac

SEQ ID NO: 744010 - RNA, 17 nt, Artificial Sequence
  Synthetic
ucugaagaauguuuaac

SEQ ID NO: 744011 - RNA, 17 nt, Artificial Sequence
  Synthetic
uaauuauacauuuuaac

SEQ ID NO: 744012 - RNA, 17 nt, Artificial Sequence
  Synthetic
uauaagcguauuuuaac

SEQ ID NO: 744013 - RNA, 17 nt, Artificial Sequence
  Synthetic
aaaauucuucuuuuaac

SEQ ID NO: 744014 - RNA, 17 nt, Artificial Sequence
  Synthetic
agaauuuagguuuuaac

SEQ ID NO: 744015 - RNA, 17 nt, Artificial Sequence
  Synthetic
agugggauaaaaaacac

SEQ ID NO: 744016 - RNA, 17 nt, Artificial Sequence
  Synthetic
uguguccugaaaaacac

SEQ ID NO: 744017 - RNA, 17 nt, Artificial Sequence
  Synthetic
uagaggaaacaaaacac

SEQ ID NO: 744018 - RNA, 17 nt, Artificial Sequence
  Synthetic
auuaaggcucaaaacac

SEQ ID NO: 744019 - RNA, 17 nt, Artificial Sequence
  Synthetic
uaaaaauaggaaaacac

SEQ ID NO: 744020 - RNA, 17 nt, Artificial Sequence
  Synthetic
uuuaccucugaaaacac

SEQ ID NO: 744021 - RNA, 17 nt, Artificial Sequence
  Synthetic
agggcucauuaaaacac

SEQ ID NO: 744022 - RNA, 17 nt, Artificial Sequence
  Synthetic
cuaucuuauuaaaacac

SEQ ID NO: 744023 - RNA, 17 nt, Artificial Sequence
  Synthetic
auauccaaaacaaacac

SEQ ID NO: 744024 - RNA, 17 nt, Artificial Sequence
  Synthetic
auuauuaagacaaacac

SEQ ID NO: 744025 - RNA, 17 nt, Artificial Sequence
  Synthetic
uaaaauacagcaaacac

SEQ ID NO: 744026 - RNA, 17 nt, Artificial Sequence
  Synthetic
agauauucagcaaacac

SEQ ID NO: 744027 - RNA, 17 nt, Artificial Sequence
  Synthetic
auaacuugggcaaacac

SEQ ID NO: 744028 - RNA, 17 nt, Artificial Sequence
  Synthetic
uaugcugaugcaaacac

SEQ ID NO: 744029 - RNA, 17 nt, Artificial Sequence
  Synthetic
uagaguagaagaaacac

SEQ ID NO: 744030 - RNA, 17 nt, Artificial Sequence
  Synthetic
ugaaaauccagaaacac

SEQ ID NO: 744031 - RNA, 17 nt, Artificial Sequence
  Synthetic
uacucauauagaaacac

SEQ ID NO: 744032 - RNA, 17 nt, Artificial Sequence
  Synthetic
uuuuuuuauagaaacac

SEQ ID NO: 744033 - RNA, 17 nt, Artificial Sequence
  Synthetic
uuaugcucuagaaacac

SEQ ID NO: 744034 - RNA, 17 nt, Artificial Sequence
  Synthetic
aauaacaggggaaacac

SEQ ID NO: 744035 - RNA, 17 nt, Artificial Sequence
  Synthetic
aaugcugcaauaaacac

SEQ ID NO: 744036 - RNA, 17 nt, Artificial Sequence
  Synthetic
auucacagaauaaacac

SEQ ID NO: 744037 - RNA, 17 nt, Artificial Sequence
  Synthetic
ccaaagguaauaaacac

SEQ ID NO: 744038 - RNA, 17 nt, Artificial Sequence
  Synthetic
aaaaaagcaguaaacac

SEQ ID NO: 744039 - RNA, 17 nt, Artificial Sequence
  Synthetic
cuuguaaaauuaaacac

SEQ ID NO: 744040 - RNA, 17 nt, Artificial Sequence
  Synthetic
ucuaguugauuaaacac

SEQ ID NO: 744041 - RNA, 17 nt, Artificial Sequence
  Synthetic
aaauauauauacaacac

SEQ ID NO: 744042 - RNA, 17 nt, Artificial Sequence
  Synthetic
acuaguaaucccaacac

SEQ ID NO: 744043 - RNA, 17 nt, Artificial Sequence
  Synthetic
cagacaggagccaacac

SEQ ID NO: 744044 - RNA, 17 nt, Artificial Sequence
  Synthetic
uuucuaauaagcaacac

SEQ ID NO: 744045 - RNA, 17 nt, Artificial Sequence
  Synthetic
cuccaaaagggcaacac

SEQ ID NO: 744046 - RNA, 17 nt, Artificial Sequence
  Synthetic
acauacaaaaucaacac

SEQ ID NO: 744047 - RNA, 17 nt, Artificial Sequence
  Synthetic
aguuuguggaucaacac

SEQ ID NO: 744048 - RNA, 17 nt, Artificial Sequence
  Synthetic
auauaugcacucaacac

SEQ ID NO: 744049 - RNA, 17 nt, Artificial Sequence
  Synthetic
acaaaaaucgucaacac

SEQ ID NO: 744050 - RNA, 17 nt, Artificial Sequence
  Synthetic
cuuuuucuauucaacac

SEQ ID NO: 744051 - RNA, 17 nt, Artificial Sequence
  Synthetic
aggagaugcuucaacac

SEQ ID NO: 744052 - RNA, 17 nt, Artificial Sequence
  Synthetic
aaucuuuuuuucaacac

SEQ ID NO: 744053 - RNA, 17 nt, Artificial Sequence
  Synthetic
uaagugguaaagaacac

SEQ ID NO: 744054 - RNA, 17 nt, Artificial Sequence
  Synthetic
aaaaagugcaagaacac

SEQ ID NO: 744055 - RNA, 17 nt, Artificial Sequence
  Synthetic
cauugcugauagaacac

SEQ ID NO: 744056 - RNA, 17 nt, Artificial Sequence
  Synthetic
cuucucuuuaugaacac

SEQ ID NO: 744057 - RNA, 17 nt, Artificial Sequence
  Synthetic
cauaucuaagugaacac

SEQ ID NO: 744058 - RNA, 17 nt, Artificial Sequence
  Synthetic
cuguaaagggugaacac

SEQ ID NO: 744059 - RNA, 17 nt, Artificial Sequence
  Synthetic
ucauguuuugugaacac

SEQ ID NO: 744060 - RNA, 17 nt, Artificial Sequence
  Synthetic
uaagguagaaauaacac

SEQ ID NO: 744061 - RNA, 17 nt, Artificial Sequence
  Synthetic
auagaauagaauaacac

SEQ ID NO: 744062 - RNA, 17 nt, Artificial Sequence
  Synthetic
caccagauauauaacac

SEQ ID NO: 744063 - RNA, 17 nt, Artificial Sequence
  Synthetic
uacuugcuauauaacac

SEQ ID NO: 744064 - RNA, 17 nt, Artificial Sequence
  Synthetic
aaaauggcuuauaacac

SEQ ID NO: 744065 - RNA, 17 nt, Artificial Sequence
  Synthetic
ccucagcaaacuaacac

SEQ ID NO: 744066 - RNA, 17 nt, Artificial Sequence
  Synthetic
ucucagcaaacuaacac

SEQ ID NO: 744067 - RNA, 17 nt, Artificial Sequence
  Synthetic
ucuuagcaaacuaacac

SEQ ID NO: 744068 - RNA, 17 nt, Artificial Sequence
  Synthetic
acauuuugcacuaacac

SEQ ID NO: 744069 - RNA, 17 nt, Artificial Sequence
  Synthetic
uuauaugcaccuaacac

SEQ ID NO: 744070 - RNA, 17 nt, Artificial Sequence
  Synthetic
uguuuuauuccuaacac

SEQ ID NO: 744071 - RNA, 17 nt, Artificial Sequence
  Synthetic
uccaauuaaaguaacac

SEQ ID NO: 744072 - RNA, 17 nt, Artificial Sequence
  Synthetic
aacauccugaguaacac

SEQ ID NO: 744073 - RNA, 17 nt, Artificial Sequence
  Synthetic
caugaaaucuguaacac

SEQ ID NO: 744074 - RNA, 17 nt, Artificial Sequence
  Synthetic
cccuucuucauuaacac

SEQ ID NO: 744075 - RNA, 17 nt, Artificial Sequence
  Synthetic
agcccaguugaacacac

SEQ ID NO: 744076 - RNA, 17 nt, Artificial Sequence
  Synthetic
uggccuguugaacacac

SEQ ID NO: 744077 - RNA, 17 nt, Artificial Sequence
  Synthetic
augucagaauaacacac

SEQ ID NO: 744078 - RNA, 17 nt, Artificial Sequence
  Synthetic
ccuagaaucuaacacac

SEQ ID NO: 744079 - RNA, 17 nt, Artificial Sequence
  Synthetic
aggggaacaacacacac

SEQ ID NO: 744080 - RNA, 17 nt, Artificial Sequence
  Synthetic
aggggaauaacacacac

SEQ ID NO: 744081 - RNA, 17 nt, Artificial Sequence
  Synthetic
ccccucaacacacacac

SEQ ID NO: 744082 - RNA, 17 nt, Artificial Sequence
  Synthetic
cacacacacacacacac

SEQ ID NO: 744083 - RNA, 17 nt, Artificial Sequence
  Synthetic
cacagacacacacacac

SEQ ID NO: 744084 - RNA, 17 nt, Artificial Sequence
  Synthetic
ccuccagggacacacac

SEQ ID NO: 744085 - RNA, 17 nt, Artificial Sequence
  Synthetic
augaucccaccacacac

SEQ ID NO: 744086 - RNA, 17 nt, Artificial Sequence
  Synthetic
aagggcuucccacacac

SEQ ID NO: 744087 - RNA, 17 nt, Artificial Sequence
  Synthetic
caggcaacaucacacac

SEQ ID NO: 744088 - RNA, 17 nt, Artificial Sequence
  Synthetic
acgggaacaucacacac

SEQ ID NO: 744089 - RNA, 17 nt, Artificial Sequence
  Synthetic
aggggaacaucacacac

SEQ ID NO: 744090 - RNA, 17 nt, Artificial Sequence
  Synthetic
cggggaacaucacacac

SEQ ID NO: 744091 - RNA, 17 nt, Artificial Sequence
  Synthetic
uguagucccagacacac

SEQ ID NO: 744092 - RNA, 17 nt, Artificial Sequence
  Synthetic
uaaaacaugagacacac

SEQ ID NO: 744093 - RNA, 17 nt, Artificial Sequence
  Synthetic
aguaaaaugggacacac

SEQ ID NO: 744094 - RNA, 17 nt, Artificial Sequence
  Synthetic
ucucaacccugacacac

SEQ ID NO: 744095 - RNA, 17 nt, Artificial Sequence
  Synthetic
uuguuuaugugacacac

SEQ ID NO: 744096 - RNA, 17 nt, Artificial Sequence
  Synthetic
ucucucccuugacacac

SEQ ID NO: 744097 - RNA, 17 nt, Artificial Sequence
  Synthetic
uggcaugaaauacacac

SEQ ID NO: 744098 - RNA, 17 nt, Artificial Sequence
  Synthetic
cuugcgcugcuacacac

SEQ ID NO: 744099 - RNA, 17 nt, Artificial Sequence
  Synthetic
uuaucuuugcuacacac

SEQ ID NO: 744100 - RNA, 17 nt, Artificial Sequence
  Synthetic
ugaacagaguuacacac

SEQ ID NO: 744101 - RNA, 17 nt, Artificial Sequence
  Synthetic
acugacuacuaccacac

SEQ ID NO: 744102 - RNA, 17 nt, Artificial Sequence
  Synthetic
ccaacucucacccacac

SEQ ID NO: 744103 - RNA, 17 nt, Artificial Sequence
  Synthetic
uuuuuucuuucccacac

SEQ ID NO: 744104 - RNA, 17 nt, Artificial Sequence
  Synthetic
cugaagaaucuccacac

SEQ ID NO: 744105 - RNA, 17 nt, Artificial Sequence
  Synthetic
uuuuuuuuuuuccacac

SEQ ID NO: 744106 - RNA, 17 nt, Artificial Sequence
  Synthetic
agcuauauccagcacac

SEQ ID NO: 744107 - RNA, 17 nt, Artificial Sequence
  Synthetic
agaaagaaagagcacac

SEQ ID NO: 744108 - RNA, 17 nt, Artificial Sequence
  Synthetic
caguuucaugagcacac

SEQ ID NO: 744109 - RNA, 17 nt, Artificial Sequence
  Synthetic
cacgcacgcgcgcacac

SEQ ID NO: 744110 - RNA, 17 nt, Artificial Sequence
  Synthetic
cacagggucaggcacac

SEQ ID NO: 744111 - RNA, 17 nt, Artificial Sequence
  Synthetic
caauuucaccugcacac

SEQ ID NO: 744112 - RNA, 17 nt, Artificial Sequence
  Synthetic
uuuugacuauugcacac

SEQ ID NO: 744113 - RNA, 17 nt, Artificial Sequence
  Synthetic
aaucugacacaucacac

SEQ ID NO: 744114 - RNA, 17 nt, Artificial Sequence
  Synthetic
caagggcaagaucacac

SEQ ID NO: 744115 - RNA, 17 nt, Artificial Sequence
  Synthetic
uuuuaaaaggaucacac

SEQ ID NO: 744116 - RNA, 17 nt, Artificial Sequence
  Synthetic
uucaggcaggaucacac

SEQ ID NO: 744117 - RNA, 17 nt, Artificial Sequence
  Synthetic
caagucugaacucacac

SEQ ID NO: 744118 - RNA, 17 nt, Artificial Sequence
  Synthetic
caacaggagacucacac

SEQ ID NO: 744119 - RNA, 17 nt, Artificial Sequence
  Synthetic
ucccuccugccucacac

SEQ ID NO: 744120 - RNA, 17 nt, Artificial Sequence
  Synthetic
aagucuagagcucacac

SEQ ID NO: 744121 - RNA, 17 nt, Artificial Sequence
  Synthetic
cauggccuugcucacac

SEQ ID NO: 744122 - RNA, 17 nt, Artificial Sequence
  Synthetic
uauguucauagucacac

SEQ ID NO: 744123 - RNA, 17 nt, Artificial Sequence
  Synthetic
auucaaugacgucacac

SEQ ID NO: 744124 - RNA, 17 nt, Artificial Sequence
  Synthetic
agaggcaugugucacac

SEQ ID NO: 744125 - RNA, 17 nt, Artificial Sequence
  Synthetic
agccauacuugucacac

SEQ ID NO: 744126 - RNA, 17 nt, Artificial Sequence
  Synthetic
uaaauuauuauucacac

SEQ ID NO: 744127 - RNA, 17 nt, Artificial Sequence
  Synthetic
uuguuaccucuucacac

SEQ ID NO: 744128 - RNA, 17 nt, Artificial Sequence
  Synthetic
ucaguuguucuucacac

SEQ ID NO: 744129 - RNA, 17 nt, Artificial Sequence
  Synthetic
ugaaguuuuaaagacac

SEQ ID NO: 744130 - RNA, 17 nt, Artificial Sequence
  Synthetic
aagcagagagaagacac

SEQ ID NO: 744131 - RNA, 17 nt, Artificial Sequence
  Synthetic
uugaguagagaagacac

SEQ ID NO: 744132 - RNA, 17 nt, Artificial Sequence
  Synthetic
cauaucugagaagacac

SEQ ID NO: 744133 - RNA, 17 nt, Artificial Sequence
  Synthetic
auggauggggaagacac

SEQ ID NO: 744134 - RNA, 17 nt, Artificial Sequence
  Synthetic
ucuaccacugcagacac

SEQ ID NO: 744135 - RNA, 17 nt, Artificial Sequence
  Synthetic
uuugcaucugcagacac

SEQ ID NO: 744136 - RNA, 17 nt, Artificial Sequence
  Synthetic
cagcauauaucagacac

SEQ ID NO: 744137 - RNA, 17 nt, Artificial Sequence
  Synthetic
acaggaacaauagacac

SEQ ID NO: 744138 - RNA, 17 nt, Artificial Sequence
  Synthetic
uguggaauaauagacac

SEQ ID NO: 744139 - RNA, 17 nt, Artificial Sequence
  Synthetic
acugagguaauagacac

SEQ ID NO: 744140 - RNA, 17 nt, Artificial Sequence
  Synthetic
ugagaacacauagacac

SEQ ID NO: 744141 - RNA, 17 nt, Artificial Sequence
  Synthetic
auuaagaagauagacac

SEQ ID NO: 744142 - RNA, 17 nt, Artificial Sequence
  Synthetic
uaguauacaguagacac

SEQ ID NO: 744143 - RNA, 17 nt, Artificial Sequence
  Synthetic
acaaagaggaacgacac

SEQ ID NO: 744144 - RNA, 17 nt, Artificial Sequence
  Synthetic
agcguaugaaaggacac

SEQ ID NO: 744145 - RNA, 17 nt, Artificial Sequence
  Synthetic
uuagcauuagaggacac

SEQ ID NO: 744146 - RNA, 17 nt, Artificial Sequence
  Synthetic
uuacugggauaggacac

SEQ ID NO: 744147 - RNA, 17 nt, Artificial Sequence
  Synthetic
ugaaaacacagggacac

SEQ ID NO: 744148 - RNA, 17 nt, Artificial Sequence
  Synthetic
ccaugugacagggacac

SEQ ID NO: 744149 - RNA, 17 nt, Artificial Sequence
  Synthetic
cauugauaaauggacac

SEQ ID NO: 744150 - RNA, 17 nt, Artificial Sequence
  Synthetic
ugagaacacauggacac

SEQ ID NO: 744151 - RNA, 17 nt, Artificial Sequence
  Synthetic
ugagaucacauggacac

SEQ ID NO: 744152 - RNA, 17 nt, Artificial Sequence
  Synthetic
cgagagcccauggacac

SEQ ID NO: 744153 - RNA, 17 nt, Artificial Sequence
  Synthetic
ugaaaacauauggacac

SEQ ID NO: 744154 - RNA, 17 nt, Artificial Sequence
  Synthetic
ugagaacacuuggacac

SEQ ID NO: 744155 - RNA, 17 nt, Artificial Sequence
  Synthetic
cuauagcugaaugacac

SEQ ID NO: 744156 - RNA, 17 nt, Artificial Sequence
  Synthetic
ugguauuuuaaugacac

SEQ ID NO: 744157 - RNA, 17 nt, Artificial Sequence
  Synthetic
uaaguuucacaugacac

SEQ ID NO: 744158 - RNA, 17 nt, Artificial Sequence
  Synthetic
auuuaacuucaugacac

SEQ ID NO: 744159 - RNA, 17 nt, Artificial Sequence
  Synthetic
ccaucaccaccugacac

SEQ ID NO: 744160 - RNA, 17 nt, Artificial Sequence
  Synthetic
uauaagggcccugacac

SEQ ID NO: 744161 - RNA, 17 nt, Artificial Sequence
  Synthetic
ugugggacaagugacac

SEQ ID NO: 744162 - RNA, 17 nt, Artificial Sequence
  Synthetic
aaaucauucagugacac

SEQ ID NO: 744163 - RNA, 17 nt, Artificial Sequence
  Synthetic
cuccauuggggugacac

SEQ ID NO: 744164 - RNA, 17 nt, Artificial Sequence
  Synthetic
acggaccccugugacac

SEQ ID NO: 744165 - RNA, 17 nt, Artificial Sequence
  Synthetic
uuuccauguauugacac

SEQ ID NO: 744166 - RNA, 17 nt, Artificial Sequence
  Synthetic
cugcaucuuauugacac

SEQ ID NO: 744167 - RNA, 17 nt, Artificial Sequence
  Synthetic
aaaaucucucuugacac

SEQ ID NO: 744168 - RNA, 17 nt, Artificial Sequence
  Synthetic
uuuuuaucaguugacac

SEQ ID NO: 744169 - RNA, 17 nt, Artificial Sequence
  Synthetic
ugggagucaguugacac

SEQ ID NO: 744170 - RNA, 17 nt, Artificial Sequence
  Synthetic
acacugugauuugacac

SEQ ID NO: 744171 - RNA, 17 nt, Artificial Sequence
  Synthetic
augagauguuuugacac

SEQ ID NO: 744172 - RNA, 17 nt, Artificial Sequence
  Synthetic
uccauuucaaaauacac

SEQ ID NO: 744173 - RNA, 17 nt, Artificial Sequence
  Synthetic
cugaacuugaaauacac

SEQ ID NO: 744174 - RNA, 17 nt, Artificial Sequence
  Synthetic
uuggaaaguaaauacac

SEQ ID NO: 744175 - RNA, 17 nt, Artificial Sequence
  Synthetic
aagcaccaucaauacac

SEQ ID NO: 744176 - RNA, 17 nt, Artificial Sequence
  Synthetic
agagauuuuuaauacac

SEQ ID NO: 744177 - RNA, 17 nt, Artificial Sequence
  Synthetic
uacaauuuuagauacac

SEQ ID NO: 744178 - RNA, 17 nt, Artificial Sequence
  Synthetic
cauauaugaauauacac

SEQ ID NO: 744179 - RNA, 17 nt, Artificial Sequence
  Synthetic
auaaacuauauauacac

SEQ ID NO: 744180 - RNA, 17 nt, Artificial Sequence
  Synthetic
uuggguuauguauacac

SEQ ID NO: 744181 - RNA, 17 nt, Artificial Sequence
  Synthetic
ccaagcagaagcuacac

SEQ ID NO: 744182 - RNA, 17 nt, Artificial Sequence
  Synthetic
cagcuuuacagcuacac

SEQ ID NO: 744183 - RNA, 17 nt, Artificial Sequence
  Synthetic
uguagucccagcuacac

SEQ ID NO: 744184 - RNA, 17 nt, Artificial Sequence
  Synthetic
uuuuagaagggcuacac

SEQ ID NO: 744185 - RNA, 17 nt, Artificial Sequence
  Synthetic
aguauagugcucuacac

SEQ ID NO: 744186 - RNA, 17 nt, Artificial Sequence
  Synthetic
uaugcuaacuucuacac

SEQ ID NO: 744187 - RNA, 17 nt, Artificial Sequence
  Synthetic
aacacccugcaguacac

SEQ ID NO: 744188 - RNA, 17 nt, Artificial Sequence
  Synthetic
cccaggcuggaguacac

SEQ ID NO: 744189 - RNA, 17 nt, Artificial Sequence
  Synthetic
aaacauuaugaguacac

SEQ ID NO: 744190 - RNA, 17 nt, Artificial Sequence
  Synthetic
cacccacaauaguacac

SEQ ID NO: 744191 - RNA, 17 nt, Artificial Sequence
  Synthetic
uuuuauugcuaguacac

SEQ ID NO: 744192 - RNA, 17 nt, Artificial Sequence
  Synthetic
aagucacaugcguacac

SEQ ID NO: 744193 - RNA, 17 nt, Artificial Sequence
  Synthetic
agaagaugaggguacac

SEQ ID NO: 744194 - RNA, 17 nt, Artificial Sequence
  Synthetic
aauauacagggguacac

SEQ ID NO: 744195 - RNA, 17 nt, Artificial Sequence
  Synthetic
cuuaaagacuuguacac

SEQ ID NO: 744196 - RNA, 17 nt, Artificial Sequence
  Synthetic
auauaacaaaauuacac

SEQ ID NO: 744197 - RNA, 17 nt, Artificial Sequence
  Synthetic
aacaaguauaauuacac

SEQ ID NO: 744198 - RNA, 17 nt, Artificial Sequence
  Synthetic
cugaauucccauuacac

SEQ ID NO: 744199 - RNA, 17 nt, Artificial Sequence
  Synthetic
cacuagguccauuacac

SEQ ID NO: 744200 - RNA, 17 nt, Artificial Sequence
  Synthetic
aauaaauaauauuacac

SEQ ID NO: 744201 - RNA, 17 nt, Artificial Sequence
  Synthetic
uugcccuuguauuacac

SEQ ID NO: 744202 - RNA, 17 nt, Artificial Sequence
  Synthetic
uaacucaguuauuacac

SEQ ID NO: 744203 - RNA, 17 nt, Artificial Sequence
  Synthetic
cccaccuucucuuacac

SEQ ID NO: 744204 - RNA, 17 nt, Artificial Sequence
  Synthetic
uguuuucauaguuacac

SEQ ID NO: 744205 - RNA, 17 nt, Artificial Sequence
  Synthetic
agcugaaaauguuacac

SEQ ID NO: 744206 - RNA, 17 nt, Artificial Sequence
  Synthetic
aaucaaagaauuuacac

SEQ ID NO: 744207 - RNA, 17 nt, Artificial Sequence
  Synthetic
ugcucauugauuuacac

SEQ ID NO: 744208 - RNA, 17 nt, Artificial Sequence
  Synthetic
agaaucagacuuuacac

SEQ ID NO: 744209 - RNA, 17 nt, Artificial Sequence
  Synthetic
cuaagucugcuuuacac

SEQ ID NO: 744210 - RNA, 17 nt, Artificial Sequence
  Synthetic
uuucucucucuuuacac

SEQ ID NO: 744211 - RNA, 17 nt, Artificial Sequence
  Synthetic
aucauauuguuuuacac

SEQ ID NO: 744212 - RNA, 17 nt, Artificial Sequence
  Synthetic
caaguuauuuuuuacac

SEQ ID NO: 744213 - RNA, 17 nt, Artificial Sequence
  Synthetic
uuaauuugccaaaccac

SEQ ID NO: 744214 - RNA, 17 nt, Artificial Sequence
  Synthetic
ucaaguuaaagaaccac

SEQ ID NO: 744215 - RNA, 17 nt, Artificial Sequence
  Synthetic
uaaaguuugagaaccac

SEQ ID NO: 744216 - RNA, 17 nt, Artificial Sequence
  Synthetic
agagaaaggggaaccac

SEQ ID NO: 744217 - RNA, 17 nt, Artificial Sequence
  Synthetic
ucuaucaccugaaccac

SEQ ID NO: 744218 - RNA, 17 nt, Artificial Sequence
  Synthetic
acaguggugugaaccac

SEQ ID NO: 744219 - RNA, 17 nt, Artificial Sequence
  Synthetic
agauguucccuaaccac

SEQ ID NO: 744220 - RNA, 17 nt, Artificial Sequence
  Synthetic
agacauguuguaaccac

SEQ ID NO: 744221 - RNA, 17 nt, Artificial Sequence
  Synthetic
cuacaagcacacaccac

SEQ ID NO: 744222 - RNA, 17 nt, Artificial Sequence
  Synthetic
aucuaccagcacaccac

SEQ ID NO: 744223 - RNA, 17 nt, Artificial Sequence
  Synthetic
cugcugcagcacaccac

SEQ ID NO: 744224 - RNA, 17 nt, Artificial Sequence
  Synthetic
uggagauugcacaccac

SEQ ID NO: 744225 - RNA, 17 nt, Artificial Sequence
  Synthetic
uaacuuuuugacaccac

SEQ ID NO: 744226 - RNA, 17 nt, Artificial Sequence
  Synthetic
acaaugguguacaccac

SEQ ID NO: 744227 - RNA, 17 nt, Artificial Sequence
  Synthetic
uucauucaauccaccac

SEQ ID NO: 744228 - RNA, 17 nt, Artificial Sequence
  Synthetic
uuuaguauauccaccac

SEQ ID NO: 744229 - RNA, 17 nt, Artificial Sequence
  Synthetic
caagaguucagcaccac

SEQ ID NO: 744230 - RNA, 17 nt, Artificial Sequence
  Synthetic
cugggacagagcaccac

SEQ ID NO: 744231 - RNA, 17 nt, Artificial Sequence
  Synthetic
agcagcuucaucaccac

SEQ ID NO: 744232 - RNA, 17 nt, Artificial Sequence
  Synthetic
agcagucucuucaccac

SEQ ID NO: 744233 - RNA, 17 nt, Artificial Sequence
  Synthetic
uuguuuucuuucaccac

SEQ ID NO: 744234 - RNA, 17 nt, Artificial Sequence
  Synthetic
agaggaaaacagaccac

SEQ ID NO: 744235 - RNA, 17 nt, Artificial Sequence
  Synthetic
ugaguagcugagaccac

SEQ ID NO: 744236 - RNA, 17 nt, Artificial Sequence
  Synthetic
agccauguugagaccac

SEQ ID NO: 744237 - RNA, 17 nt, Artificial Sequence
  Synthetic
uucuauauuuagaccac

SEQ ID NO: 744238 - RNA, 17 nt, Artificial Sequence
  Synthetic
cgaguagcugggaccac

SEQ ID NO: 744239 - RNA, 17 nt, Artificial Sequence
  Synthetic
ugaguagcugggaccac

SEQ ID NO: 744240 - RNA, 17 nt, Artificial Sequence
  Synthetic
ugcuacuaaaugaccac

SEQ ID NO: 744241 - RNA, 17 nt, Artificial Sequence
  Synthetic
aaucacuggaugaccac

SEQ ID NO: 744242 - RNA, 17 nt, Artificial Sequence
  Synthetic
auaaaggcacugaccac

SEQ ID NO: 744243 - RNA, 17 nt, Artificial Sequence
  Synthetic
cugaaaagggugaccac

SEQ ID NO: 744244 - RNA, 17 nt, Artificial Sequence
  Synthetic
ccaaggcgggugaccac

SEQ ID NO: 744245 - RNA, 17 nt, Artificial Sequence
  Synthetic
uauuaaguccauaccac

SEQ ID NO: 744246 - RNA, 17 nt, Artificial Sequence
  Synthetic
augauucugccuaccac

SEQ ID NO: 744247 - RNA, 17 nt, Artificial Sequence
  Synthetic
accaugcuuucuaccac

SEQ ID NO: 744248 - RNA, 17 nt, Artificial Sequence
  Synthetic
cgagcagcugguaccac

SEQ ID NO: 744249 - RNA, 17 nt, Artificial Sequence
  Synthetic
cuacccugcaaacccac

SEQ ID NO: 744250 - RNA, 17 nt, Artificial Sequence
  Synthetic
cgagaccacgaacccac

SEQ ID NO: 744251 - RNA, 17 nt, Artificial Sequence
  Synthetic
cuucuuccugaacccac

SEQ ID NO: 744252 - RNA, 17 nt, Artificial Sequence
  Synthetic
caaagacaaugacccac

SEQ ID NO: 744253 - RNA, 17 nt, Artificial Sequence
  Synthetic
aaaaaaaaaaaccccac

SEQ ID NO: 744254 - RNA, 17 nt, Artificial Sequence
  Synthetic
cacaugcugucccccac

SEQ ID NO: 744255 - RNA, 17 nt, Artificial Sequence
  Synthetic
cagcugagaagccccac

SEQ ID NO: 744256 - RNA, 17 nt, Artificial Sequence
  Synthetic
acauuucccagccccac

SEQ ID NO: 744257 - RNA, 17 nt, Artificial Sequence
  Synthetic
agcauuaaaauccccac

SEQ ID NO: 744258 - RNA, 17 nt, Artificial Sequence
  Synthetic
uuugaaaagcuccccac

SEQ ID NO: 744259 - RNA, 17 nt, Artificial Sequence
  Synthetic
caacacagaguccccac

SEQ ID NO: 744260 - RNA, 17 nt, Artificial Sequence
  Synthetic
ccacacagaguccccac

SEQ ID NO: 744261 - RNA, 17 nt, Artificial Sequence
  Synthetic
ccacauagaguccccac

SEQ ID NO: 744262 - RNA, 17 nt, Artificial Sequence
  Synthetic
cuggaguaaaagcccac

SEQ ID NO: 744263 - RNA, 17 nt, Artificial Sequence
  Synthetic
uaucagggaaugcccac

SEQ ID NO: 744264 - RNA, 17 nt, Artificial Sequence
  Synthetic
uuccuauuuaugcccac

SEQ ID NO: 744265 - RNA, 17 nt, Artificial Sequence
  Synthetic
caucacaacaaucccac

SEQ ID NO: 744266 - RNA, 17 nt, Artificial Sequence
  Synthetic
ccuuaucagaaucccac

SEQ ID NO: 744267 - RNA, 17 nt, Artificial Sequence
  Synthetic
acuuuggaauaucccac

SEQ ID NO: 744268 - RNA, 17 nt, Artificial Sequence
  Synthetic
uucuaguaauaucccac

SEQ ID NO: 744269 - RNA, 17 nt, Artificial Sequence
  Synthetic
aagaaaugauaucccac

SEQ ID NO: 744270 - RNA, 17 nt, Artificial Sequence
  Synthetic
ucucugaccuaucccac

SEQ ID NO: 744271 - RNA, 17 nt, Artificial Sequence
  Synthetic
uguguuuuuuaucccac

SEQ ID NO: 744272 - RNA, 17 nt, Artificial Sequence
  Synthetic
aauaaucaaacucccac

SEQ ID NO: 744273 - RNA, 17 nt, Artificial Sequence
  Synthetic
uuagaaaauacucccac

SEQ ID NO: 744274 - RNA, 17 nt, Artificial Sequence
  Synthetic
uucaaaugaccucccac

SEQ ID NO: 744275 - RNA, 17 nt, Artificial Sequence
  Synthetic
auuaaauuaccucccac

SEQ ID NO: 744276 - RNA, 17 nt, Artificial Sequence
  Synthetic
auucaguuaccucccac

SEQ ID NO: 744277 - RNA, 17 nt, Artificial Sequence
  Synthetic
cugccaacgccucccac

SEQ ID NO: 744278 - RNA, 17 nt, Artificial Sequence
  Synthetic
cugauauuuucucccac

SEQ ID NO: 744279 - RNA, 17 nt, Artificial Sequence
  Synthetic
uauuguuuacuucccac

SEQ ID NO: 744280 - RNA, 17 nt, Artificial Sequence
  Synthetic
uuguucuuuguucccac

SEQ ID NO: 744281 - RNA, 17 nt, Artificial Sequence
  Synthetic
ucaagucaauuucccac

SEQ ID NO: 744282 - RNA, 17 nt, Artificial Sequence
  Synthetic
cauaaaucauuucccac

SEQ ID NO: 744283 - RNA, 17 nt, Artificial Sequence
  Synthetic
uugucuccguuucccac

SEQ ID NO: 744284 - RNA, 17 nt, Artificial Sequence
  Synthetic
uacccaaauuuucccac

SEQ ID NO: 744285 - RNA, 17 nt, Artificial Sequence
  Synthetic
acgguaugaaaagccac

SEQ ID NO: 744286 - RNA, 17 nt, Artificial Sequence
  Synthetic
aaaaaacccaaagccac

SEQ ID NO: 744287 - RNA, 17 nt, Artificial Sequence
  Synthetic
aaugagucccaagccac

SEQ ID NO: 744288 - RNA, 17 nt, Artificial Sequence
  Synthetic
auuguugcugaagccac

SEQ ID NO: 744289 - RNA, 17 nt, Artificial Sequence
  Synthetic
ugguuugguuaagccac

SEQ ID NO: 744290 - RNA, 17 nt, Artificial Sequence
  Synthetic
uuuguuacaacagccac

SEQ ID NO: 744291 - RNA, 17 nt, Artificial Sequence
  Synthetic
caccgauacagagccac

SEQ ID NO: 744292 - RNA, 17 nt, Artificial Sequence
  Synthetic
aaaaauaguagagccac

SEQ ID NO: 744293 - RNA, 17 nt, Artificial Sequence
  Synthetic
ucuaacacaggagccac

SEQ ID NO: 744294 - RNA, 17 nt, Artificial Sequence
  Synthetic
aguuggauuggagccac

SEQ ID NO: 744295 - RNA, 17 nt, Artificial Sequence
  Synthetic
aauuguucaauagccac

SEQ ID NO: 744296 - RNA, 17 nt, Artificial Sequence
  Synthetic
ccuaaaugaauagccac

SEQ ID NO: 744297 - RNA, 17 nt, Artificial Sequence
  Synthetic
uaaaagaauauagccac

SEQ ID NO: 744298 - RNA, 17 nt, Artificial Sequence
  Synthetic
cuaauuuugguagccac

SEQ ID NO: 744299 - RNA, 17 nt, Artificial Sequence
  Synthetic
cagcagaauuuagccac

SEQ ID NO: 744300 - RNA, 17 nt, Artificial Sequence
  Synthetic
ugauucucuuuagccac

SEQ ID NO: 744301 - RNA, 17 nt, Artificial Sequence
  Synthetic
agcuaugauagcgccac

SEQ ID NO: 744302 - RNA, 17 nt, Artificial Sequence
  Synthetic
cagagucuaaaggccac

SEQ ID NO: 744303 - RNA, 17 nt, Artificial Sequence
  Synthetic
aauuuugaucaggccac

SEQ ID NO: 744304 - RNA, 17 nt, Artificial Sequence
  Synthetic
augguggugagggccac

SEQ ID NO: 744305 - RNA, 17 nt, Artificial Sequence
  Synthetic
cuuauuaucugggccac

SEQ ID NO: 744306 - RNA, 17 nt, Artificial Sequence
  Synthetic
uuauugcuuugggccac

SEQ ID NO: 744307 - RNA, 17 nt, Artificial Sequence
  Synthetic
auucccuaaauggccac

SEQ ID NO: 744308 - RNA, 17 nt, Artificial Sequence
  Synthetic
cuaaggauaauggccac

SEQ ID NO: 744309 - RNA, 17 nt, Artificial Sequence
  Synthetic
cuguuacauguggccac

SEQ ID NO: 744310 - RNA, 17 nt, Artificial Sequence
  Synthetic
uugccauuaaaugccac

SEQ ID NO: 744311 - RNA, 17 nt, Artificial Sequence
  Synthetic
cauuccuuccaugccac

SEQ ID NO: 744312 - RNA, 17 nt, Artificial Sequence
  Synthetic
ucucuuuaauaugccac

SEQ ID NO: 744313 - RNA, 17 nt, Artificial Sequence
  Synthetic
uccgagagcuaugccac

SEQ ID NO: 744314 - RNA, 17 nt, Artificial Sequence
  Synthetic
aucaagccaacugccac

SEQ ID NO: 744315 - RNA, 17 nt, Artificial Sequence
  Synthetic
cuacauuugucugccac

SEQ ID NO: 744316 - RNA, 17 nt, Artificial Sequence
  Synthetic
acccaagacugugccac

SEQ ID NO: 744317 - RNA, 17 nt, Artificial Sequence
  Synthetic
cccuuugagguugccac

SEQ ID NO: 744318 - RNA, 17 nt, Artificial Sequence
  Synthetic
aggcuuucuguugccac

SEQ ID NO: 744319 - RNA, 17 nt, Artificial Sequence
  Synthetic
ugaaauacauuugccac

SEQ ID NO: 744320 - RNA, 17 nt, Artificial Sequence
  Synthetic
cccaugacugaauccac

SEQ ID NO: 744321 - RNA, 17 nt, Artificial Sequence
  Synthetic
caguuucagacauccac

SEQ ID NO: 744322 - RNA, 17 nt, Artificial Sequence
  Synthetic
agccagcuaagauccac

SEQ ID NO: 744323 - RNA, 17 nt, Artificial Sequence
  Synthetic
uucugcuuggccuccac

SEQ ID NO: 744324 - RNA, 17 nt, Artificial Sequence
  Synthetic
ucaaacuuuagcuccac

SEQ ID NO: 744325 - RNA, 17 nt, Artificial Sequence
  Synthetic
uacuucuuggucuccac

SEQ ID NO: 744326 - RNA, 17 nt, Artificial Sequence
  Synthetic
caacauuaguucuccac

SEQ ID NO: 744327 - RNA, 17 nt, Artificial Sequence
  Synthetic
uuuuuuuuuuucuccac

SEQ ID NO: 744328 - RNA, 17 nt, Artificial Sequence
  Synthetic
uaaaagcuaaaguccac

SEQ ID NO: 744329 - RNA, 17 nt, Artificial Sequence
  Synthetic
uccugucagcaguccac

SEQ ID NO: 744330 - RNA, 17 nt, Artificial Sequence
  Synthetic
uggauuuaggaguccac

SEQ ID NO: 744331 - RNA, 17 nt, Artificial Sequence
  Synthetic
uguccauuacuguccac

SEQ ID NO: 744332 - RNA, 17 nt, Artificial Sequence
  Synthetic
aaccuucacaauuccac

SEQ ID NO: 744333 - RNA, 17 nt, Artificial Sequence
  Synthetic
ccuaccuacaauuccac

SEQ ID NO: 744334 - RNA, 17 nt, Artificial Sequence
  Synthetic
ugguauuuggauuccac

SEQ ID NO: 744335 - RNA, 17 nt, Artificial Sequence
  Synthetic
auauuguaugauuccac

SEQ ID NO: 744336 - RNA, 17 nt, Artificial Sequence
  Synthetic
auguauucauauuccac

SEQ ID NO: 744337 - RNA, 17 nt, Artificial Sequence
  Synthetic
ucuuucuacccuuccac

SEQ ID NO: 744338 - RNA, 17 nt, Artificial Sequence
  Synthetic
cugcuccguccuuccac

SEQ ID NO: 744339 - RNA, 17 nt, Artificial Sequence
  Synthetic
aaagguuguucuuccac

SEQ ID NO: 744340 - RNA, 17 nt, Artificial Sequence
  Synthetic
uggaaccacaguuccac

SEQ ID NO: 744341 - RNA, 17 nt, Artificial Sequence
  Synthetic
aacuaauuuaguuccac

SEQ ID NO: 744342 - RNA, 17 nt, Artificial Sequence
  Synthetic
ccacguagauguuccac

SEQ ID NO: 744343 - RNA, 17 nt, Artificial Sequence
  Synthetic
acugcagggauuuccac

SEQ ID NO: 744344 - RNA, 17 nt, Artificial Sequence
  Synthetic
agccucuugguuuccac

SEQ ID NO: 744345 - RNA, 17 nt, Artificial Sequence
  Synthetic
aaucgauuauuuuccac

SEQ ID NO: 744346 - RNA, 17 nt, Artificial Sequence
  Synthetic
caguucagcuuuuccac

SEQ ID NO: 744347 - RNA, 17 nt, Artificial Sequence
  Synthetic
uguguuuugaaaagcac

SEQ ID NO: 744348 - RNA, 17 nt, Artificial Sequence
  Synthetic
auuggguuuaaaagcac

SEQ ID NO: 744349 - RNA, 17 nt, Artificial Sequence
  Synthetic
ucagccucccaaagcac

SEQ ID NO: 744350 - RNA, 17 nt, Artificial Sequence
  Synthetic
ucagcuucccaaagcac

SEQ ID NO: 744351 - RNA, 17 nt, Artificial Sequence
  Synthetic
cacaaucuagaaagcac

SEQ ID NO: 744352 - RNA, 17 nt, Artificial Sequence
  Synthetic
aauuuuauugaaagcac

SEQ ID NO: 744353 - RNA, 17 nt, Artificial Sequence
  Synthetic
aacaaaauguaaagcac

SEQ ID NO: 744354 - RNA, 17 nt, Artificial Sequence
  Synthetic
uaucaugugccaagcac

SEQ ID NO: 744355 - RNA, 17 nt, Artificial Sequence
  Synthetic
auuauauuuucaagcac

SEQ ID NO: 744356 - RNA, 17 nt, Artificial Sequence
  Synthetic
uuagacaagggaagcac

SEQ ID NO: 744357 - RNA, 17 nt, Artificial Sequence
  Synthetic
agauaaaauggaagcac

SEQ ID NO: 744358 - RNA, 17 nt, Artificial Sequence
  Synthetic
uaucuuggcugaagcac

SEQ ID NO: 744359 - RNA, 17 nt, Artificial Sequence
  Synthetic
aguuuugagugaagcac

SEQ ID NO: 744360 - RNA, 17 nt, Artificial Sequence
  Synthetic
ucuagucaaauaagcac

SEQ ID NO: 744361 - RNA, 17 nt, Artificial Sequence
  Synthetic
uaccugcugauaagcac

SEQ ID NO: 744362 - RNA, 17 nt, Artificial Sequence
  Synthetic
uaauauccuauaagcac

SEQ ID NO: 744363 - RNA, 17 nt, Artificial Sequence
  Synthetic
uaauugcuuauaagcac

SEQ ID NO: 744364 - RNA, 17 nt, Artificial Sequence
  Synthetic
aaaggagaaaacagcac

SEQ ID NO: 744365 - RNA, 17 nt, Artificial Sequence
  Synthetic
uaucaggagaacagcac

SEQ ID NO: 744366 - RNA, 17 nt, Artificial Sequence
  Synthetic
aaucacuagaacagcac

SEQ ID NO: 744367 - RNA, 17 nt, Artificial Sequence
  Synthetic
uaaaaguugaacagcac

SEQ ID NO: 744368 - RNA, 17 nt, Artificial Sequence
  Synthetic
uuuagcauucacagcac

SEQ ID NO: 744369 - RNA, 17 nt, Artificial Sequence
  Synthetic
accguguuggacagcac

SEQ ID NO: 744370 - RNA, 17 nt, Artificial Sequence
  Synthetic
ucccaaucacccagcac

SEQ ID NO: 744371 - RNA, 17 nt, Artificial Sequence
  Synthetic
ucccuguaccccagcac

SEQ ID NO: 744372 - RNA, 17 nt, Artificial Sequence
  Synthetic
cauaagaacagcagcac

SEQ ID NO: 744373 - RNA, 17 nt, Artificial Sequence
  Synthetic
caaauacacagcagcac

SEQ ID NO: 744374 - RNA, 17 nt, Artificial Sequence
  Synthetic
ugguuuaauagcagcac

SEQ ID NO: 744375 - RNA, 17 nt, Artificial Sequence
  Synthetic
ccucugauuaucagcac

SEQ ID NO: 744376 - RNA, 17 nt, Artificial Sequence
  Synthetic
uacaauuaacucagcac

SEQ ID NO: 744377 - RNA, 17 nt, Artificial Sequence
  Synthetic
ccaguaagugucagcac

SEQ ID NO: 744378 - RNA, 17 nt, Artificial Sequence
  Synthetic
uagacagaagagagcac

SEQ ID NO: 744379 - RNA, 17 nt, Artificial Sequence
  Synthetic
ccuagauaauagagcac

SEQ ID NO: 744380 - RNA, 17 nt, Artificial Sequence
  Synthetic
aaugaauuuuggagcac

SEQ ID NO: 744381 - RNA, 17 nt, Artificial Sequence
  Synthetic
cuggagugcaugagcac

SEQ ID NO: 744382 - RNA, 17 nt, Artificial Sequence
  Synthetic
cauucucucaugagcac

SEQ ID NO: 744383 - RNA, 17 nt, Artificial Sequence
  Synthetic
uaauaguuauugagcac

SEQ ID NO: 744384 - RNA, 17 nt, Artificial Sequence
  Synthetic
ucuuugaaggauagcac

SEQ ID NO: 744385 - RNA, 17 nt, Artificial Sequence
  Synthetic
uccauauguuauagcac

SEQ ID NO: 744386 - RNA, 17 nt, Artificial Sequence
  Synthetic
uaacaaucaucuagcac

SEQ ID NO: 744387 - RNA, 17 nt, Artificial Sequence
  Synthetic
cauccuuuaaguagcac

SEQ ID NO: 744388 - RNA, 17 nt, Artificial Sequence
  Synthetic
cuguccgcagguagcac

SEQ ID NO: 744389 - RNA, 17 nt, Artificial Sequence
  Synthetic
uuucagcugcuuagcac

SEQ ID NO: 744390 - RNA, 17 nt, Artificial Sequence
  Synthetic
uuucagaguguuagcac

SEQ ID NO: 744391 - RNA, 17 nt, Artificial Sequence
  Synthetic
uaaauaauuuuuagcac

SEQ ID NO: 744392 - RNA, 17 nt, Artificial Sequence
  Synthetic
cgcaugccaccacgcac

SEQ ID NO: 744393 - RNA, 17 nt, Artificial Sequence
  Synthetic
cuggcgugaaaaggcac

SEQ ID NO: 744394 - RNA, 17 nt, Artificial Sequence
  Synthetic
caugacuagaaaggcac

SEQ ID NO: 744395 - RNA, 17 nt, Artificial Sequence
  Synthetic
acaaacucacaaggcac

SEQ ID NO: 744396 - RNA, 17 nt, Artificial Sequence
  Synthetic
cacuacucagaaggcac

SEQ ID NO: 744397 - RNA, 17 nt, Artificial Sequence
  Synthetic
cuuauugcggaaggcac

SEQ ID NO: 744398 - RNA, 17 nt, Artificial Sequence
  Synthetic
aauggaagcacaggcac

SEQ ID NO: 744399 - RNA, 17 nt, Artificial Sequence
  Synthetic
uacuaauagccaggcac

SEQ ID NO: 744400 - RNA, 17 nt, Artificial Sequence
  Synthetic
uuucacgggccaggcac

SEQ ID NO: 744401 - RNA, 17 nt, Artificial Sequence
  Synthetic
aacuggguaagaggcac

SEQ ID NO: 744402 - RNA, 17 nt, Artificial Sequence
  Synthetic
ccacuacagagaggcac

SEQ ID NO: 744403 - RNA, 17 nt, Artificial Sequence
  Synthetic
ucccagucaggaggcac

SEQ ID NO: 744404 - RNA, 17 nt, Artificial Sequence
  Synthetic
aaaaucuauggaggcac

SEQ ID NO: 744405 - RNA, 17 nt, Artificial Sequence
  Synthetic
auaaccacaauaggcac

SEQ ID NO: 744406 - RNA, 17 nt, Artificial Sequence
  Synthetic
aagcuccauauaggcac

SEQ ID NO: 744407 - RNA, 17 nt, Artificial Sequence
  Synthetic
uuaucucuuauaggcac

SEQ ID NO: 744408 - RNA, 17 nt, Artificial Sequence
  Synthetic
uuuguucaucuaggcac

SEQ ID NO: 744409 - RNA, 17 nt, Artificial Sequence
  Synthetic
ucugagaucaagggcac

SEQ ID NO: 744410 - RNA, 17 nt, Artificial Sequence
  Synthetic
uucuggcuggagggcac

SEQ ID NO: 744411 - RNA, 17 nt, Artificial Sequence
  Synthetic
acaguaggauagggcac

SEQ ID NO: 744412 - RNA, 17 nt, Artificial Sequence
  Synthetic
caaucagaaaggggcac

SEQ ID NO: 744413 - RNA, 17 nt, Artificial Sequence
  Synthetic
cagugucuguggggcac

SEQ ID NO: 744414 - RNA, 17 nt, Artificial Sequence
  Synthetic
acacacugagugggcac

SEQ ID NO: 744415 - RNA, 17 nt, Artificial Sequence
  Synthetic
uauuauauguugggcac

SEQ ID NO: 744416 - RNA, 17 nt, Artificial Sequence
  Synthetic
caaaauguauauggcac

SEQ ID NO: 744417 - RNA, 17 nt, Artificial Sequence
  Synthetic
uaaacuaacuauggcac

SEQ ID NO: 744418 - RNA, 17 nt, Artificial Sequence
  Synthetic
caaugaaaugcuggcac

SEQ ID NO: 744419 - RNA, 17 nt, Artificial Sequence
  Synthetic
cauuugucgucuggcac

SEQ ID NO: 744420 - RNA, 17 nt, Artificial Sequence
  Synthetic
aaccaagggaguggcac

SEQ ID NO: 744421 - RNA, 17 nt, Artificial Sequence
  Synthetic
cuacaaaaugguggcac

SEQ ID NO: 744422 - RNA, 17 nt, Artificial Sequence
  Synthetic
ccugcaggugguggcac

SEQ ID NO: 744423 - RNA, 17 nt, Artificial Sequence
  Synthetic
agugguaaauguggcac

SEQ ID NO: 744424 - RNA, 17 nt, Artificial Sequence
  Synthetic
uacaggaaguguggcac

SEQ ID NO: 744425 - RNA, 17 nt, Artificial Sequence
  Synthetic
aaugaaauuauuggcac

SEQ ID NO: 744426 - RNA, 17 nt, Artificial Sequence
  Synthetic
cugauccuacaaugcac

SEQ ID NO: 744427 - RNA, 17 nt, Artificial Sequence
  Synthetic
aguaugacugaaugcac

SEQ ID NO: 744428 - RNA, 17 nt, Artificial Sequence
  Synthetic
cauaacauuuaaugcac

SEQ ID NO: 744429 - RNA, 17 nt, Artificial Sequence
  Synthetic
uguccacucacaugcac

SEQ ID NO: 744430 - RNA, 17 nt, Artificial Sequence
  Synthetic
uguaaagauacaugcac

SEQ ID NO: 744431 - RNA, 17 nt, Artificial Sequence
  Synthetic
aagagcucagcaugcac

SEQ ID NO: 744432 - RNA, 17 nt, Artificial Sequence
  Synthetic
cacacacgugcaugcac

SEQ ID NO: 744433 - RNA, 17 nt, Artificial Sequence
  Synthetic
ucagagauuggaugcac

SEQ ID NO: 744434 - RNA, 17 nt, Artificial Sequence
  Synthetic
uacguuugcaccugcac

SEQ ID NO: 744435 - RNA, 17 nt, Artificial Sequence
  Synthetic
uggcaagcaagcugcac

SEQ ID NO: 744436 - RNA, 17 nt, Artificial Sequence
  Synthetic
uauauauauagcugcac

SEQ ID NO: 744437 - RNA, 17 nt, Artificial Sequence
  Synthetic
ucccuugucuucugcac

SEQ ID NO: 744438 - RNA, 17 nt, Artificial Sequence
  Synthetic
aauuauauucagugcac

SEQ ID NO: 744439 - RNA, 17 nt, Artificial Sequence
  Synthetic
cacaggggugagugcac

SEQ ID NO: 744440 - RNA, 17 nt, Artificial Sequence
  Synthetic
auauucccuccgugcac

SEQ ID NO: 744441 - RNA, 17 nt, Artificial Sequence
  Synthetic
ugacaucucaggugcac

SEQ ID NO: 744442 - RNA, 17 nt, Artificial Sequence
  Synthetic
aacacacaguggugcac

SEQ ID NO: 744443 - RNA, 17 nt, Artificial Sequence
  Synthetic
uaaugcuaaaugugcac

SEQ ID NO: 744444 - RNA, 17 nt, Artificial Sequence
  Synthetic
caagagagcaugugcac

SEQ ID NO: 744445 - RNA, 17 nt, Artificial Sequence
  Synthetic
uauguucuuaugugcac

SEQ ID NO: 744446 - RNA, 17 nt, Artificial Sequence
  Synthetic
caaaugucagugugcac

SEQ ID NO: 744447 - RNA, 17 nt, Artificial Sequence
  Synthetic
aggaagcaaaauugcac

SEQ ID NO: 744448 - RNA, 17 nt, Artificial Sequence
  Synthetic
ugguccuaaaauugcac

SEQ ID NO: 744449 - RNA, 17 nt, Artificial Sequence
  Synthetic
aauauuccacauugcac

SEQ ID NO: 744450 - RNA, 17 nt, Artificial Sequence
  Synthetic
caggagcaccauugcac

SEQ ID NO: 744451 - RNA, 17 nt, Artificial Sequence
  Synthetic
uaauuguaucauugcac

SEQ ID NO: 744452 - RNA, 17 nt, Artificial Sequence
  Synthetic
caauuaggagauugcac

SEQ ID NO: 744453 - RNA, 17 nt, Artificial Sequence
  Synthetic
agcuucaucuauugcac

SEQ ID NO: 744454 - RNA, 17 nt, Artificial Sequence
  Synthetic
cuccaaggauguugcac

SEQ ID NO: 744455 - RNA, 17 nt, Artificial Sequence
  Synthetic
cauccauguuguugcac

SEQ ID NO: 744456 - RNA, 17 nt, Artificial Sequence
  Synthetic
cagaucauccuuugcac

SEQ ID NO: 744457 - RNA, 17 nt, Artificial Sequence
  Synthetic
uguuccaaauuuugcac

SEQ ID NO: 744458 - RNA, 17 nt, Artificial Sequence
  Synthetic
uuugauggaaaaaucac

SEQ ID NO: 744459 - RNA, 17 nt, Artificial Sequence
  Synthetic
cagacacugaaaaucac

SEQ ID NO: 744460 - RNA, 17 nt, Artificial Sequence
  Synthetic
cccuaguugaaaaucac

SEQ ID NO: 744461 - RNA, 17 nt, Artificial Sequence
  Synthetic
uuaaaaaauuaaaucac

SEQ ID NO: 744462 - RNA, 17 nt, Artificial Sequence
  Synthetic
uaagaaacuuaaaucac

SEQ ID NO: 744463 - RNA, 17 nt, Artificial Sequence
  Synthetic
aacagaacuuaaaucac

SEQ ID NO: 744464 - RNA, 17 nt, Artificial Sequence
  Synthetic
cugcuuccaacaaucac

SEQ ID NO: 744465 - RNA, 17 nt, Artificial Sequence
  Synthetic
ugaggcaggagaaucac

SEQ ID NO: 744466 - RNA, 17 nt, Artificial Sequence
  Synthetic
agagcugauggaaucac

SEQ ID NO: 744467 - RNA, 17 nt, Artificial Sequence
  Synthetic
caaagaaaaugaaucac

SEQ ID NO: 744468 - RNA, 17 nt, Artificial Sequence
  Synthetic
cuauauucacuaaucac

SEQ ID NO: 744469 - RNA, 17 nt, Artificial Sequence
  Synthetic
aaguuucagcuaaucac

SEQ ID NO: 744470 - RNA, 17 nt, Artificial Sequence
  Synthetic
aguucaaaaguaaucac

SEQ ID NO: 744471 - RNA, 17 nt, Artificial Sequence
  Synthetic
agaagcacaguaaucac

SEQ ID NO: 744472 - RNA, 17 nt, Artificial Sequence
  Synthetic
accaauagaguaaucac

SEQ ID NO: 744473 - RNA, 17 nt, Artificial Sequence
  Synthetic
auaagaaucuuaaucac

SEQ ID NO: 744474 - RNA, 17 nt, Artificial Sequence
  Synthetic
uggcuaaucuuaaucac

SEQ ID NO: 744475 - RNA, 17 nt, Artificial Sequence
  Synthetic
acuuucaucuuaaucac

SEQ ID NO: 744476 - RNA, 17 nt, Artificial Sequence
  Synthetic
aauuucaaaaacaucac

SEQ ID NO: 744477 - RNA, 17 nt, Artificial Sequence
  Synthetic
uguagugcaaacaucac

SEQ ID NO: 744478 - RNA, 17 nt, Artificial Sequence
  Synthetic
aaguaaggaaacaucac

SEQ ID NO: 744479 - RNA, 17 nt, Artificial Sequence
  Synthetic
aggaguaccaacaucac

SEQ ID NO: 744480 - RNA, 17 nt, Artificial Sequence
  Synthetic
cacuaccaagacaucac

SEQ ID NO: 744481 - RNA, 17 nt, Artificial Sequence
  Synthetic
uacaaugaguacaucac

SEQ ID NO: 744482 - RNA, 17 nt, Artificial Sequence
  Synthetic
aaaauccucaccaucac

SEQ ID NO: 744483 - RNA, 17 nt, Artificial Sequence
  Synthetic
aaaaugcucaccaucac

SEQ ID NO: 744484 - RNA, 17 nt, Artificial Sequence
  Synthetic
cauaauguuuccaucac

SEQ ID NO: 744485 - RNA, 17 nt, Artificial Sequence
  Synthetic
aagaaaauaagcaucac

SEQ ID NO: 744486 - RNA, 17 nt, Artificial Sequence
  Synthetic
ucccagaucagcaucac

SEQ ID NO: 744487 - RNA, 17 nt, Artificial Sequence
  Synthetic
acaguggauugcaucac

SEQ ID NO: 744488 - RNA, 17 nt, Artificial Sequence
  Synthetic
acaugcauuugcaucac

SEQ ID NO: 744489 - RNA, 17 nt, Artificial Sequence
  Synthetic
aaaaaccucaucaucac

SEQ ID NO: 744490 - RNA, 17 nt, Artificial Sequence
  Synthetic
aaaaagcucaucaucac

SEQ ID NO: 744491 - RNA, 17 nt, Artificial Sequence
  Synthetic
aaaaugcucaucaucac

SEQ ID NO: 744492 - RNA, 17 nt, Artificial Sequence
  Synthetic
aauauuuucaucaucac

SEQ ID NO: 744493 - RNA, 17 nt, Artificial Sequence
  Synthetic
aacaccuuccucaucac

SEQ ID NO: 744494 - RNA, 17 nt, Artificial Sequence
  Synthetic
ugaccaugagucaucac

SEQ ID NO: 744495 - RNA, 17 nt, Artificial Sequence
  Synthetic
uugacccuugucaucac

SEQ ID NO: 744496 - RNA, 17 nt, Artificial Sequence
  Synthetic
cacuguuaaaagaucac

SEQ ID NO: 744497 - RNA, 17 nt, Artificial Sequence
  Synthetic
ugggaugggcagaucac

SEQ ID NO: 744498 - RNA, 17 nt, Artificial Sequence
  Synthetic
ugaccuugagagaucac

SEQ ID NO: 744499 - RNA, 17 nt, Artificial Sequence
  Synthetic
uuagucauuaugaucac

SEQ ID NO: 744500 - RNA, 17 nt, Artificial Sequence
  Synthetic
aauaaugcaaauaucac

SEQ ID NO: 744501 - RNA, 17 nt, Artificial Sequence
  Synthetic
auuucucuaaauaucac

SEQ ID NO: 744502 - RNA, 17 nt, Artificial Sequence
  Synthetic
cucucuuggcauaucac

SEQ ID NO: 744503 - RNA, 17 nt, Artificial Sequence
  Synthetic
uuuauuaaucauaucac

SEQ ID NO: 744504 - RNA, 17 nt, Artificial Sequence
  Synthetic
ucaugacaucauaucac

SEQ ID NO: 744505 - RNA, 17 nt, Artificial Sequence
  Synthetic
aaauuuauguauaucac

SEQ ID NO: 744506 - RNA, 17 nt, Artificial Sequence
  Synthetic
uuuauccagucuaucac

SEQ ID NO: 744507 - RNA, 17 nt, Artificial Sequence
  Synthetic
cacucuacaaguaucac

SEQ ID NO: 744508 - RNA, 17 nt, Artificial Sequence
  Synthetic
aaaaagcucauuaucac

SEQ ID NO: 744509 - RNA, 17 nt, Artificial Sequence
  Synthetic
auuaaagauauuaucac

SEQ ID NO: 744510 - RNA, 17 nt, Artificial Sequence
  Synthetic
aucaauauuauuaucac

SEQ ID NO: 744511 - RNA, 17 nt, Artificial Sequence
  Synthetic
acauuuucaguuaucac

SEQ ID NO: 744512 - RNA, 17 nt, Artificial Sequence
  Synthetic
cauuuggauguuaucac

SEQ ID NO: 744513 - RNA, 17 nt, Artificial Sequence
  Synthetic
cagguaagauuuaucac

SEQ ID NO: 744514 - RNA, 17 nt, Artificial Sequence
  Synthetic
auuugguuauuuaucac

SEQ ID NO: 744515 - RNA, 17 nt, Artificial Sequence
  Synthetic
aauuuggaacaacucac

SEQ ID NO: 744516 - RNA, 17 nt, Artificial Sequence
  Synthetic
agaaaauaguaacucac

SEQ ID NO: 744517 - RNA, 17 nt, Artificial Sequence
  Synthetic
cacacagcaacacucac

SEQ ID NO: 744518 - RNA, 17 nt, Artificial Sequence
  Synthetic
acugauaauccacucac

SEQ ID NO: 744519 - RNA, 17 nt, Artificial Sequence
  Synthetic
agcauuaaagcacucac

SEQ ID NO: 744520 - RNA, 17 nt, Artificial Sequence
  Synthetic
ugcauacucucacucac

SEQ ID NO: 744521 - RNA, 17 nt, Artificial Sequence
  Synthetic
cgcauauucucacucac

SEQ ID NO: 744522 - RNA, 17 nt, Artificial Sequence
  Synthetic
cacauguucucacucac

SEQ ID NO: 744523 - RNA, 17 nt, Artificial Sequence
  Synthetic
agguuuaauugacucac

SEQ ID NO: 744524 - RNA, 17 nt, Artificial Sequence
  Synthetic
agggcauauauacucac

SEQ ID NO: 744525 - RNA, 17 nt, Artificial Sequence
  Synthetic
cuuuguuuuauacucac

SEQ ID NO: 744526 - RNA, 17 nt, Artificial Sequence
  Synthetic
uucagaacgcuacucac

SEQ ID NO: 744527 - RNA, 17 nt, Artificial Sequence
  Synthetic
ucuaauucucuacucac

SEQ ID NO: 744528 - RNA, 17 nt, Artificial Sequence
  Synthetic
cacauguucuuacucac

SEQ ID NO: 744529 - RNA, 17 nt, Artificial Sequence
  Synthetic
cccuucccccaccucac

SEQ ID NO: 744530 - RNA, 17 nt, Artificial Sequence
  Synthetic
cuuguagaugaccucac

SEQ ID NO: 744531 - RNA, 17 nt, Artificial Sequence
  Synthetic
ccaaacaaaacccucac

SEQ ID NO: 744532 - RNA, 17 nt, Artificial Sequence
  Synthetic
uuuucauccucccucac

SEQ ID NO: 744533 - RNA, 17 nt, Artificial Sequence
  Synthetic
ugcucucaacuccucac

SEQ ID NO: 744534 - RNA, 17 nt, Artificial Sequence
  Synthetic
uucuggauaguccucac

SEQ ID NO: 744535 - RNA, 17 nt, Artificial Sequence
  Synthetic
auaugaagaaagcucac

SEQ ID NO: 744536 - RNA, 17 nt, Artificial Sequence
  Synthetic
cuucuguugaagcucac

SEQ ID NO: 744537 - RNA, 17 nt, Artificial Sequence
  Synthetic
acaacacaacagcucac

SEQ ID NO: 744538 - RNA, 17 nt, Artificial Sequence
  Synthetic
ugacuaucacagcucac

SEQ ID NO: 744539 - RNA, 17 nt, Artificial Sequence
  Synthetic
ugcaaguucacgcucac

SEQ ID NO: 744540 - RNA, 17 nt, Artificial Sequence
  Synthetic
uccuuuccuccgcucac

SEQ ID NO: 744541 - RNA, 17 nt, Artificial Sequence
  Synthetic
ugauuuuacaggcucac

SEQ ID NO: 744542 - RNA, 17 nt, Artificial Sequence
  Synthetic
ugccuugugaggcucac

SEQ ID NO: 744543 - RNA, 17 nt, Artificial Sequence
  Synthetic
caagaggcuaggcucac

SEQ ID NO: 744544 - RNA, 17 nt, Artificial Sequence
  Synthetic
ccuucaacaaugcucac

SEQ ID NO: 744545 - RNA, 17 nt, Artificial Sequence
  Synthetic
uuccuucaaaaucucac

SEQ ID NO: 744546 - RNA, 17 nt, Artificial Sequence
  Synthetic
uacccggcucaucucac

SEQ ID NO: 744547 - RNA, 17 nt, Artificial Sequence
  Synthetic
auucaauuaccucucac

SEQ ID NO: 744548 - RNA, 17 nt, Artificial Sequence
  Synthetic
auauuacauucucucac

SEQ ID NO: 744549 - RNA, 17 nt, Artificial Sequence
  Synthetic
ucuuucucuucucucac

SEQ ID NO: 744550 - RNA, 17 nt, Artificial Sequence
  Synthetic
ucucuauuuucucucac

SEQ ID NO: 744551 - RNA, 17 nt, Artificial Sequence
  Synthetic
agguauucccuucucac

SEQ ID NO: 744552 - RNA, 17 nt, Artificial Sequence
  Synthetic
uaaacagagguucucac

SEQ ID NO: 744553 - RNA, 17 nt, Artificial Sequence
  Synthetic
uaugacuaguuucucac

SEQ ID NO: 744554 - RNA, 17 nt, Artificial Sequence
  Synthetic
ucuauaagaaaagucac

SEQ ID NO: 744555 - RNA, 17 nt, Artificial Sequence
  Synthetic
aaaauacuaaaagucac

SEQ ID NO: 744556 - RNA, 17 nt, Artificial Sequence
  Synthetic
acagcacucaaagucac

SEQ ID NO: 744557 - RNA, 17 nt, Artificial Sequence
  Synthetic
uguuuuagucaagucac

SEQ ID NO: 744558 - RNA, 17 nt, Artificial Sequence
  Synthetic
uuaguaggggaagucac

SEQ ID NO: 744559 - RNA, 17 nt, Artificial Sequence
  Synthetic
caucagucaucagucac

SEQ ID NO: 744560 - RNA, 17 nt, Artificial Sequence
  Synthetic
cagaaaguuggagucac

SEQ ID NO: 744561 - RNA, 17 nt, Artificial Sequence
  Synthetic
aauuuuaaaauagucac

SEQ ID NO: 744562 - RNA, 17 nt, Artificial Sequence
  Synthetic
ugggcauucuuagucac

SEQ ID NO: 744563 - RNA, 17 nt, Artificial Sequence
  Synthetic
aguguaggaaaggucac

SEQ ID NO: 744564 - RNA, 17 nt, Artificial Sequence
  Synthetic
ucacgucaacaggucac

SEQ ID NO: 744565 - RNA, 17 nt, Artificial Sequence
  Synthetic
uucacuuuauaggucac

SEQ ID NO: 744566 - RNA, 17 nt, Artificial Sequence
  Synthetic
uuauuucaaagggucac

SEQ ID NO: 744567 - RNA, 17 nt, Artificial Sequence
  Synthetic
acuaucaccagggucac

SEQ ID NO: 744568 - RNA, 17 nt, Artificial Sequence
  Synthetic
ugaauaaauggggucac

SEQ ID NO: 744569 - RNA, 17 nt, Artificial Sequence
  Synthetic
cugcuguugugggucac

SEQ ID NO: 744570 - RNA, 17 nt, Artificial Sequence
  Synthetic
ugagaacacauggucac

SEQ ID NO: 744571 - RNA, 17 nt, Artificial Sequence
  Synthetic
uguuaguggaaugucac

SEQ ID NO: 744572 - RNA, 17 nt, Artificial Sequence
  Synthetic
caauaaauuaaugucac

SEQ ID NO: 744573 - RNA, 17 nt, Artificial Sequence
  Synthetic
uacaggaagcaugucac

SEQ ID NO: 744574 - RNA, 17 nt, Artificial Sequence
  Synthetic
uuguuguuauaugucac

SEQ ID NO: 744575 - RNA, 17 nt, Artificial Sequence
  Synthetic
aauagugucuaugucac

SEQ ID NO: 744576 - RNA, 17 nt, Artificial Sequence
  Synthetic
uugacuugaucugucac

SEQ ID NO: 744577 - RNA, 17 nt, Artificial Sequence
  Synthetic
uguaaauaaagugucac

SEQ ID NO: 744578 - RNA, 17 nt, Artificial Sequence
  Synthetic
aggcaaaccggugucac

SEQ ID NO: 744579 - RNA, 17 nt, Artificial Sequence
  Synthetic
caguuagucugugucac

SEQ ID NO: 744580 - RNA, 17 nt, Artificial Sequence
  Synthetic
cccaaguaaauugucac

SEQ ID NO: 744581 - RNA, 17 nt, Artificial Sequence
  Synthetic
uucacuugcauugucac

SEQ ID NO: 744582 - RNA, 17 nt, Artificial Sequence
  Synthetic
auguacaggcuugucac

SEQ ID NO: 744583 - RNA, 17 nt, Artificial Sequence
  Synthetic
uuuauauuucuugucac

SEQ ID NO: 744584 - RNA, 17 nt, Artificial Sequence
  Synthetic
acaaauuaauuugucac

SEQ ID NO: 744585 - RNA, 17 nt, Artificial Sequence
  Synthetic
ucaaaaauaaaauucac

SEQ ID NO: 744586 - RNA, 17 nt, Artificial Sequence
  Synthetic
aguaacccuaaauucac

SEQ ID NO: 744587 - RNA, 17 nt, Artificial Sequence
  Synthetic
ucaacugcccaauucac

SEQ ID NO: 744588 - RNA, 17 nt, Artificial Sequence
  Synthetic
auuaaguguuaauucac

SEQ ID NO: 744589 - RNA, 17 nt, Artificial Sequence
  Synthetic
ugucuccuugcauucac

SEQ ID NO: 744590 - RNA, 17 nt, Artificial Sequence
  Synthetic
uuguaaauaucauucac

SEQ ID NO: 744591 - RNA, 17 nt, Artificial Sequence
  Synthetic
aaaauuuuaucauucac

SEQ ID NO: 744592 - RNA, 17 nt, Artificial Sequence
  Synthetic
uggauagugucauucac

SEQ ID NO: 744593 - RNA, 17 nt, Artificial Sequence
  Synthetic
aucaguauuucauucac

SEQ ID NO: 744594 - RNA, 17 nt, Artificial Sequence
  Synthetic
uaagguaacauauucac

SEQ ID NO: 744595 - RNA, 17 nt, Artificial Sequence
  Synthetic
cuuauccucauauucac

SEQ ID NO: 744596 - RNA, 17 nt, Artificial Sequence
  Synthetic
cacuguauuauauucac

SEQ ID NO: 744597 - RNA, 17 nt, Artificial Sequence
  Synthetic
uggaucuuuguauucac

SEQ ID NO: 744598 - RNA, 17 nt, Artificial Sequence
  Synthetic
cagauauuauuauucac

SEQ ID NO: 744599 - RNA, 17 nt, Artificial Sequence
  Synthetic
ucugcccuguuauucac

SEQ ID NO: 744600 - RNA, 17 nt, Artificial Sequence
  Synthetic
aggucacauuuauucac

SEQ ID NO: 744601 - RNA, 17 nt, Artificial Sequence
  Synthetic
cuucuucauuuauucac

SEQ ID NO: 744602 - RNA, 17 nt, Artificial Sequence
  Synthetic
ugggcauagaacuucac

SEQ ID NO: 744603 - RNA, 17 nt, Artificial Sequence
  Synthetic
augucagugaacuucac

SEQ ID NO: 744604 - RNA, 17 nt, Artificial Sequence
  Synthetic
auccuucauaacuucac

SEQ ID NO: 744605 - RNA, 17 nt, Artificial Sequence
  Synthetic
agcugguuccacuucac

SEQ ID NO: 744606 - RNA, 17 nt, Artificial Sequence
  Synthetic
ugcuuuuuucacuucac

SEQ ID NO: 744607 - RNA, 17 nt, Artificial Sequence
  Synthetic
cuggccaaugacuucac

SEQ ID NO: 744608 - RNA, 17 nt, Artificial Sequence
  Synthetic
cauuauauuuacuucac

SEQ ID NO: 744609 - RNA, 17 nt, Artificial Sequence
  Synthetic
auuauaacuaccuucac

SEQ ID NO: 744610 - RNA, 17 nt, Artificial Sequence
  Synthetic
ugcuucauuaccuucac

SEQ ID NO: 744611 - RNA, 17 nt, Artificial Sequence
  Synthetic
caucuguugcccuucac

SEQ ID NO: 744612 - RNA, 17 nt, Artificial Sequence
  Synthetic
cuuaaauucagcuucac

SEQ ID NO: 744613 - RNA, 17 nt, Artificial Sequence
  Synthetic
auucuccagagcuucac

SEQ ID NO: 744614 - RNA, 17 nt, Artificial Sequence
  Synthetic
uggcaagacugcuucac

SEQ ID NO: 744615 - RNA, 17 nt, Artificial Sequence
  Synthetic
aauaauagaaucuucac

SEQ ID NO: 744616 - RNA, 17 nt, Artificial Sequence
  Synthetic
agauuagacaucuucac

SEQ ID NO: 744617 - RNA, 17 nt, Artificial Sequence
  Synthetic
uuaaauaugaucuucac

SEQ ID NO: 744618 - RNA, 17 nt, Artificial Sequence
  Synthetic
agaaggcaccucuucac

SEQ ID NO: 744619 - RNA, 17 nt, Artificial Sequence
  Synthetic
uuguucaaauucuucac

SEQ ID NO: 744620 - RNA, 17 nt, Artificial Sequence
  Synthetic
caagccaccuucuucac

SEQ ID NO: 744621 - RNA, 17 nt, Artificial Sequence
  Synthetic
cauauagauuucuucac

SEQ ID NO: 744622 - RNA, 17 nt, Artificial Sequence
  Synthetic
uuaugcuguuucuucac

SEQ ID NO: 744623 - RNA, 17 nt, Artificial Sequence
  Synthetic
uucucaagaaaguucac

SEQ ID NO: 744624 - RNA, 17 nt, Artificial Sequence
  Synthetic
uaaauauagaaguucac

SEQ ID NO: 744625 - RNA, 17 nt, Artificial Sequence
  Synthetic
ccuuagguuaaguucac

SEQ ID NO: 744626 - RNA, 17 nt, Artificial Sequence
  Synthetic
uucuuagaaucguucac

SEQ ID NO: 744627 - RNA, 17 nt, Artificial Sequence
  Synthetic
aucacuggcagguucac

SEQ ID NO: 744628 - RNA, 17 nt, Artificial Sequence
  Synthetic
uuuucuauuugguucac

SEQ ID NO: 744629 - RNA, 17 nt, Artificial Sequence
  Synthetic
ucauggucacuguucac

SEQ ID NO: 744630 - RNA, 17 nt, Artificial Sequence
  Synthetic
agaucuuuuguguucac

SEQ ID NO: 744631 - RNA, 17 nt, Artificial Sequence
  Synthetic
aauauuaaauuguucac

SEQ ID NO: 744632 - RNA, 17 nt, Artificial Sequence
  Synthetic
uccgguaacuuguucac

SEQ ID NO: 744633 - RNA, 17 nt, Artificial Sequence
  Synthetic
ccuuucgugaauuucac

SEQ ID NO: 744634 - RNA, 17 nt, Artificial Sequence
  Synthetic
acuugaaaacauuucac

SEQ ID NO: 744635 - RNA, 17 nt, Artificial Sequence
  Synthetic
uuuucaucucauuucac

SEQ ID NO: 744636 - RNA, 17 nt, Artificial Sequence
  Synthetic
uaaaguagagauuucac

SEQ ID NO: 744637 - RNA, 17 nt, Artificial Sequence
  Synthetic
ucuggacaugauuucac

SEQ ID NO: 744638 - RNA, 17 nt, Artificial Sequence
  Synthetic
cauaauauauauuucac

SEQ ID NO: 744639 - RNA, 17 nt, Artificial Sequence
  Synthetic
agaucuggcuauuucac

SEQ ID NO: 744640 - RNA, 17 nt, Artificial Sequence
  Synthetic
auuguggauuauuucac

SEQ ID NO: 744641 - RNA, 17 nt, Artificial Sequence
  Synthetic
cacaauuauuauuucac

SEQ ID NO: 744642 - RNA, 17 nt, Artificial Sequence
  Synthetic
auguuagaggcuuucac

SEQ ID NO: 744643 - RNA, 17 nt, Artificial Sequence
  Synthetic
uuccuggcugcuuucac

SEQ ID NO: 744644 - RNA, 17 nt, Artificial Sequence
  Synthetic
uaugcccacucuuucac

SEQ ID NO: 744645 - RNA, 17 nt, Artificial Sequence
  Synthetic
aagcccuguucuuucac

SEQ ID NO: 744646 - RNA, 17 nt, Artificial Sequence
  Synthetic
ugugcuaauaguuucac

SEQ ID NO: 744647 - RNA, 17 nt, Artificial Sequence
  Synthetic
ugcuuacuauguuucac

SEQ ID NO: 744648 - RNA, 17 nt, Artificial Sequence
  Synthetic
auaauccuuuguuucac

SEQ ID NO: 744649 - RNA, 17 nt, Artificial Sequence
  Synthetic
agguacagaauuuucac

SEQ ID NO: 744650 - RNA, 17 nt, Artificial Sequence
  Synthetic
auaaaagacauuuucac

SEQ ID NO: 744651 - RNA, 17 nt, Artificial Sequence
  Synthetic
augauaaaauuuuucac

SEQ ID NO: 744652 - RNA, 17 nt, Artificial Sequence
  Synthetic
ucuuauauauuuuucac

SEQ ID NO: 744653 - RNA, 17 nt, Artificial Sequence
  Synthetic
cuccauggaaaaaagac

SEQ ID NO: 744654 - RNA, 17 nt, Artificial Sequence
  Synthetic
ugauuacacaaaaagac

SEQ ID NO: 744655 - RNA, 17 nt, Artificial Sequence
  Synthetic
uacuuugagaaaaagac

SEQ ID NO: 744656 - RNA, 17 nt, Artificial Sequence
  Synthetic
cgacauauccaaaagac

SEQ ID NO: 744657 - RNA, 17 nt, Artificial Sequence
  Synthetic
cuccagaggcaaaagac

SEQ ID NO: 744658 - RNA, 17 nt, Artificial Sequence
  Synthetic
uaccuaaaagaaaagac

SEQ ID NO: 744659 - RNA, 17 nt, Artificial Sequence
  Synthetic
aaggaaaucuaaaagac

SEQ ID NO: 744660 - RNA, 17 nt, Artificial Sequence
  Synthetic
acauaaagguaaaagac

SEQ ID NO: 744661 - RNA, 17 nt, Artificial Sequence
  Synthetic
acagaauuguaaaagac

SEQ ID NO: 744662 - RNA, 17 nt, Artificial Sequence
  Synthetic
ucauauucaacaaagac

SEQ ID NO: 744663 - RNA, 17 nt, Artificial Sequence
  Synthetic
auggaacaugcaaagac

SEQ ID NO: 744664 - RNA, 17 nt, Artificial Sequence
  Synthetic
cucauaaaaucaaagac

SEQ ID NO: 744665 - RNA, 17 nt, Artificial Sequence
  Synthetic
acagccuguucaaagac

SEQ ID NO: 744666 - RNA, 17 nt, Artificial Sequence
  Synthetic
uuaauugaaagaaagac

SEQ ID NO: 744667 - RNA, 17 nt, Artificial Sequence
  Synthetic
uauguuguuagaaagac

SEQ ID NO: 744668 - RNA, 17 nt, Artificial Sequence
  Synthetic
agaagaaaaggaaagac

SEQ ID NO: 744669 - RNA, 17 nt, Artificial Sequence
  Synthetic
uguaaguggggaaagac

SEQ ID NO: 744670 - RNA, 17 nt, Artificial Sequence
  Synthetic
uguaaaaaaugaaagac

SEQ ID NO: 744671 - RNA, 17 nt, Artificial Sequence
  Synthetic
uacaacagaauaaagac

SEQ ID NO: 744672 - RNA, 17 nt, Artificial Sequence
  Synthetic
cacauggacauaaagac

SEQ ID NO: 744673 - RNA, 17 nt, Artificial Sequence
  Synthetic
cuauuuuuaguaaagac

SEQ ID NO: 744674 - RNA, 17 nt, Artificial Sequence
  Synthetic
cauaaucauuuaaagac

SEQ ID NO: 744675 - RNA, 17 nt, Artificial Sequence
  Synthetic
aggguguauuuaaagac

SEQ ID NO: 744676 - RNA, 17 nt, Artificial Sequence
  Synthetic
auauauauuuuaaagac

SEQ ID NO: 744677 - RNA, 17 nt, Artificial Sequence
  Synthetic
ucucgauuuuuaaagac

SEQ ID NO: 744678 - RNA, 17 nt, Artificial Sequence
  Synthetic
aaaagaaaaaacaagac

SEQ ID NO: 744679 - RNA, 17 nt, Artificial Sequence
  Synthetic
ucaugauaaaacaagac

SEQ ID NO: 744680 - RNA, 17 nt, Artificial Sequence
  Synthetic
uuauuuuacaacaagac

SEQ ID NO: 744681 - RNA, 17 nt, Artificial Sequence
  Synthetic
ugugaauagcacaagac

SEQ ID NO: 744682 - RNA, 17 nt, Artificial Sequence
  Synthetic
aaaaacuggcacaagac

SEQ ID NO: 744683 - RNA, 17 nt, Artificial Sequence
  Synthetic
uauauagggaccaagac

SEQ ID NO: 744684 - RNA, 17 nt, Artificial Sequence
  Synthetic
augucaaaagccaagac

SEQ ID NO: 744685 - RNA, 17 nt, Artificial Sequence
  Synthetic
cuuugggaggccaagac

SEQ ID NO: 744686 - RNA, 17 nt, Artificial Sequence
  Synthetic
aauuuaaaaagcaagac

SEQ ID NO: 744687 - RNA, 17 nt, Artificial Sequence
  Synthetic
aaaagggaaagcaagac

SEQ ID NO: 744688 - RNA, 17 nt, Artificial Sequence
  Synthetic
ccccaaccuagcaagac

SEQ ID NO: 744689 - RNA, 17 nt, Artificial Sequence
  Synthetic
uggacuauuagcaagac

SEQ ID NO: 744690 - RNA, 17 nt, Artificial Sequence
  Synthetic
ugaaguauaggcaagac

SEQ ID NO: 744691 - RNA, 17 nt, Artificial Sequence
  Synthetic
aucacaaggggcaagac

SEQ ID NO: 744692 - RNA, 17 nt, Artificial Sequence
  Synthetic
agauuuuuaugcaagac

SEQ ID NO: 744693 - RNA, 17 nt, Artificial Sequence
  Synthetic
caaaggauaaucaagac

SEQ ID NO: 744694 - RNA, 17 nt, Artificial Sequence
  Synthetic
aggacucagaagaagac

SEQ ID NO: 744695 - RNA, 17 nt, Artificial Sequence
  Synthetic
cugagauagaagaagac

SEQ ID NO: 744696 - RNA, 17 nt, Artificial Sequence
  Synthetic
aacagaacuaagaagac

SEQ ID NO: 744697 - RNA, 17 nt, Artificial Sequence
  Synthetic
agcuuaagccagaagac

SEQ ID NO: 744698 - RNA, 17 nt, Artificial Sequence
  Synthetic
uggaggggucagaagac

SEQ ID NO: 744699 - RNA, 17 nt, Artificial Sequence
  Synthetic
aaagugagagagaagac

SEQ ID NO: 744700 - RNA, 17 nt, Artificial Sequence
  Synthetic
acauacaaugagaagac

SEQ ID NO: 744701 - RNA, 17 nt, Artificial Sequence
  Synthetic
uuauuuaguuagaagac

SEQ ID NO: 744702 - RNA, 17 nt, Artificial Sequence
  Synthetic
aaauuauuuuagaagac

SEQ ID NO: 744703 - RNA, 17 nt, Artificial Sequence
  Synthetic
ugacucauuccgaagac

SEQ ID NO: 744704 - RNA, 17 nt, Artificial Sequence
  Synthetic
aggaaaaggaggaagac

SEQ ID NO: 744705 - RNA, 17 nt, Artificial Sequence
  Synthetic
aauggugcugggaagac

SEQ ID NO: 744706 - RNA, 17 nt, Artificial Sequence
  Synthetic
ugagaggagcugaagac

SEQ ID NO: 744707 - RNA, 17 nt, Artificial Sequence
  Synthetic
agaaggaaauugaagac

SEQ ID NO: 744708 - RNA, 17 nt, Artificial Sequence
  Synthetic
ucauauaacuugaagac

SEQ ID NO: 744709 - RNA, 17 nt, Artificial Sequence
  Synthetic
uuugcuuuuuugaagac

SEQ ID NO: 744710 - RNA, 17 nt, Artificial Sequence
  Synthetic
uguuuauaaaauaagac

SEQ ID NO: 744711 - RNA, 17 nt, Artificial Sequence
  Synthetic
cagaggagaaauaagac

SEQ ID NO: 744712 - RNA, 17 nt, Artificial Sequence
  Synthetic
ccaagaacagauaagac

SEQ ID NO: 744713 - RNA, 17 nt, Artificial Sequence
  Synthetic
uaaccugaauauaagac

SEQ ID NO: 744714 - RNA, 17 nt, Artificial Sequence
  Synthetic
uagaaacauuauaagac

SEQ ID NO: 744715 - RNA, 17 nt, Artificial Sequence
  Synthetic
caauuuauaacuaagac

SEQ ID NO: 744716 - RNA, 17 nt, Artificial Sequence
  Synthetic
uuuaucuggaguaagac

SEQ ID NO: 744717 - RNA, 17 nt, Artificial Sequence
  Synthetic
aauuagacuuguaagac

SEQ ID NO: 744718 - RNA, 17 nt, Artificial Sequence
  Synthetic
caauccucuuguaagac

SEQ ID NO: 744719 - RNA, 17 nt, Artificial Sequence
  Synthetic
caguaagcaaaacagac

SEQ ID NO: 744720 - RNA, 17 nt, Artificial Sequence
  Synthetic
uugacugauaaacagac

SEQ ID NO: 744721 - RNA, 17 nt, Artificial Sequence
  Synthetic
uaaagcuacacacagac

SEQ ID NO: 744722 - RNA, 17 nt, Artificial Sequence
  Synthetic
aauuaaaagacacagac

SEQ ID NO: 744723 - RNA, 17 nt, Artificial Sequence
  Synthetic
aaacaaaggacacagac

SEQ ID NO: 744724 - RNA, 17 nt, Artificial Sequence
  Synthetic
aacaaaauaccacagac

SEQ ID NO: 744725 - RNA, 17 nt, Artificial Sequence
  Synthetic
uuccggggggcacagac

SEQ ID NO: 744726 - RNA, 17 nt, Artificial Sequence
  Synthetic
ucagcggaaagacagac

SEQ ID NO: 744727 - RNA, 17 nt, Artificial Sequence
  Synthetic
cagcaucccugacagac

SEQ ID NO: 744728 - RNA, 17 nt, Artificial Sequence
  Synthetic
uuauuuuuaguacagac

SEQ ID NO: 744729 - RNA, 17 nt, Artificial Sequence
  Synthetic
auuuuuuuaguacagac

SEQ ID NO: 744730 - RNA, 17 nt, Artificial Sequence
  Synthetic
aaaaagcaaaaccagac

SEQ ID NO: 744731 - RNA, 17 nt, Artificial Sequence
  Synthetic
aacucagagcaccagac

SEQ ID NO: 744732 - RNA, 17 nt, Artificial Sequence
  Synthetic
agucuguauacccagac

SEQ ID NO: 744733 - RNA, 17 nt, Artificial Sequence
  Synthetic
auagccuuggcccagac

SEQ ID NO: 744734 - RNA, 17 nt, Artificial Sequence
  Synthetic
ugcuaugguucccagac

SEQ ID NO: 744735 - RNA, 17 nt, Artificial Sequence
  Synthetic
cacuuuguuucccagac

SEQ ID NO: 744736 - RNA, 17 nt, Artificial Sequence
  Synthetic
cgaaggugcagccagac

SEQ ID NO: 744737 - RNA, 17 nt, Artificial Sequence
  Synthetic
caccaucuuggccagac

SEQ ID NO: 744738 - RNA, 17 nt, Artificial Sequence
  Synthetic
agaauaauauuccagac

SEQ ID NO: 744739 - RNA, 17 nt, Artificial Sequence
  Synthetic
aauuucucucagcagac

SEQ ID NO: 744740 - RNA, 17 nt, Artificial Sequence
  Synthetic
caugggaaagagcagac

SEQ ID NO: 744741 - RNA, 17 nt, Artificial Sequence
  Synthetic
auggcuuucgagcagac

SEQ ID NO: 744742 - RNA, 17 nt, Artificial Sequence
  Synthetic
acaugggcugagcagac

SEQ ID NO: 744743 - RNA, 17 nt, Artificial Sequence
  Synthetic
auacgaauuuagcagac

SEQ ID NO: 744744 - RNA, 17 nt, Artificial Sequence
  Synthetic
aaggaaaauucgcagac

SEQ ID NO: 744745 - RNA, 17 nt, Artificial Sequence
  Synthetic
caggcagacaggcagac

SEQ ID NO: 744746 - RNA, 17 nt, Artificial Sequence
  Synthetic
caagcaagcaggcagac

SEQ ID NO: 744747 - RNA, 17 nt, Artificial Sequence
  Synthetic
ucuggaccauggcagac

SEQ ID NO: 744748 - RNA, 17 nt, Artificial Sequence
  Synthetic
accacuuuagugcagac

SEQ ID NO: 744749 - RNA, 17 nt, Artificial Sequence
  Synthetic
caagaaaaguaucagac

SEQ ID NO: 744750 - RNA, 17 nt, Artificial Sequence
  Synthetic
ugccuuuggacucagac

SEQ ID NO: 744751 - RNA, 17 nt, Artificial Sequence
  Synthetic
ucucacacccgucagac

SEQ ID NO: 744752 - RNA, 17 nt, Artificial Sequence
  Synthetic
uuuguucaaggucagac

SEQ ID NO: 744753 - RNA, 17 nt, Artificial Sequence
  Synthetic
acagaaugaugucagac

SEQ ID NO: 744754 - RNA, 17 nt, Artificial Sequence
  Synthetic
aggcagagauuucagac

SEQ ID NO: 744755 - RNA, 17 nt, Artificial Sequence
  Synthetic
uauuuuauuuuucagac

SEQ ID NO: 744756 - RNA, 17 nt, Artificial Sequence
  Synthetic
aacccauaaaaagagac

SEQ ID NO: 744757 - RNA, 17 nt, Artificial Sequence
  Synthetic
ugauauagaaaagagac

SEQ ID NO: 744758 - RNA, 17 nt, Artificial Sequence
  Synthetic
augacuaacaaagagac

SEQ ID NO: 744759 - RNA, 17 nt, Artificial Sequence
  Synthetic
aggaacagcaaagagac

SEQ ID NO: 744760 - RNA, 17 nt, Artificial Sequence
  Synthetic
agcuuuagcaaagagac

SEQ ID NO: 744761 - RNA, 17 nt, Artificial Sequence
  Synthetic
cgcuuuagcaaagagac

SEQ ID NO: 744762 - RNA, 17 nt, Artificial Sequence
  Synthetic
uagaagauggaagagac

SEQ ID NO: 744763 - RNA, 17 nt, Artificial Sequence
  Synthetic
uagcucugugaagagac

SEQ ID NO: 744764 - RNA, 17 nt, Artificial Sequence
  Synthetic
aauuauuuugaagagac

SEQ ID NO: 744765 - RNA, 17 nt, Artificial Sequence
  Synthetic
aaagagauguaagagac

SEQ ID NO: 744766 - RNA, 17 nt, Artificial Sequence
  Synthetic
ugaaugaccacagagac

SEQ ID NO: 744767 - RNA, 17 nt, Artificial Sequence
  Synthetic
aggagagugacagagac

SEQ ID NO: 744768 - RNA, 17 nt, Artificial Sequence
  Synthetic
uuuucggcaccagagac

SEQ ID NO: 744769 - RNA, 17 nt, Artificial Sequence
  Synthetic
aaaggaaugccagagac

SEQ ID NO: 744770 - RNA, 17 nt, Artificial Sequence
  Synthetic
ugaaaccgggcagagac

SEQ ID NO: 744771 - RNA, 17 nt, Artificial Sequence
  Synthetic
aagauauguucagagac

SEQ ID NO: 744772 - RNA, 17 nt, Artificial Sequence
  Synthetic
uaggaaauaagagagac

SEQ ID NO: 744773 - RNA, 17 nt, Artificial Sequence
  Synthetic
agaaagaauggagagac

SEQ ID NO: 744774 - RNA, 17 nt, Artificial Sequence
  Synthetic
accacaaagugagagac

SEQ ID NO: 744775 - RNA, 17 nt, Artificial Sequence
  Synthetic
auagagaguugagagac

SEQ ID NO: 744776 - RNA, 17 nt, Artificial Sequence
  Synthetic
uucccccuaauagagac

SEQ ID NO: 744777 - RNA, 17 nt, Artificial Sequence
  Synthetic
cuauuuuuacuagagac

SEQ ID NO: 744778 - RNA, 17 nt, Artificial Sequence
  Synthetic
auauuuuuaguagagac

SEQ ID NO: 744779 - RNA, 17 nt, Artificial Sequence
  Synthetic
guauuuuuaguagagac

SEQ ID NO: 744780 - RNA, 17 nt, Artificial Sequence
  Synthetic
uuauuuuuaguagagac

SEQ ID NO: 744781 - RNA, 17 nt, Artificial Sequence
  Synthetic
cuguuuuuaguagagac

SEQ ID NO: 744782 - RNA, 17 nt, Artificial Sequence
  Synthetic
uauuuuuuaguagagac

SEQ ID NO: 744783 - RNA, 17 nt, Artificial Sequence
  Synthetic
uguuuuuuaguagagac

SEQ ID NO: 744784 - RNA, 17 nt, Artificial Sequence
  Synthetic
uuacagcagguagagac

SEQ ID NO: 744785 - RNA, 17 nt, Artificial Sequence
  Synthetic
cauuuuuauguagagac

SEQ ID NO: 744786 - RNA, 17 nt, Artificial Sequence
  Synthetic
ugugaaaauuuagagac

SEQ ID NO: 744787 - RNA, 17 nt, Artificial Sequence
  Synthetic
aaagacauacccgagac

SEQ ID NO: 744788 - RNA, 17 nt, Artificial Sequence
  Synthetic
cacuauguccccgagac

SEQ ID NO: 744789 - RNA, 17 nt, Artificial Sequence
  Synthetic
aaagaacugcccgagac

SEQ ID NO: 744790 - RNA, 17 nt, Artificial Sequence
  Synthetic
cuuugggaggccgagac

SEQ ID NO: 744791 - RNA, 17 nt, Artificial Sequence
  Synthetic
cuucacacuuccgagac

SEQ ID NO: 744792 - RNA, 17 nt, Artificial Sequence
  Synthetic
ccuuuuguuuucgagac

SEQ ID NO: 744793 - RNA, 17 nt, Artificial Sequence
  Synthetic
aacccaccccaggagac

SEQ ID NO: 744794 - RNA, 17 nt, Artificial Sequence
  Synthetic
uaauauuuccaggagac

SEQ ID NO: 744795 - RNA, 17 nt, Artificial Sequence
  Synthetic
cuaauggcaagggagac

SEQ ID NO: 744796 - RNA, 17 nt, Artificial Sequence
  Synthetic
uuacuucacagggagac

SEQ ID NO: 744797 - RNA, 17 nt, Artificial Sequence
  Synthetic
uacuggagcagggagac

SEQ ID NO: 744798 - RNA, 17 nt, Artificial Sequence
  Synthetic
uuuaccuucagggagac

SEQ ID NO: 744799 - RNA, 17 nt, Artificial Sequence
  Synthetic
augggucagagggagac

SEQ ID NO: 744800 - RNA, 17 nt, Artificial Sequence
  Synthetic
ugaagagguagggagac

SEQ ID NO: 744801 - RNA, 17 nt, Artificial Sequence
  Synthetic
uaguaaaaaugggagac

SEQ ID NO: 744802 - RNA, 17 nt, Artificial Sequence
  Synthetic
cucuuugacugggagac

SEQ ID NO: 744803 - RNA, 17 nt, Artificial Sequence
  Synthetic
aaauguccuauggagac

SEQ ID NO: 744804 - RNA, 17 nt, Artificial Sequence
  Synthetic
auucuggggcuggagac

SEQ ID NO: 744805 - RNA, 17 nt, Artificial Sequence
  Synthetic
agcuaacugcuggagac

SEQ ID NO: 744806 - RNA, 17 nt, Artificial Sequence
  Synthetic
uuuguuuuucuggagac

SEQ ID NO: 744807 - RNA, 17 nt, Artificial Sequence
  Synthetic
aagcuuucaguggagac

SEQ ID NO: 744808 - RNA, 17 nt, Artificial Sequence
  Synthetic
uguacuuuaguggagac

SEQ ID NO: 744809 - RNA, 17 nt, Artificial Sequence
  Synthetic
aauuuuuuuguggagac

SEQ ID NO: 744810 - RNA, 17 nt, Artificial Sequence
  Synthetic
cccuuuuuuuuggagac

SEQ ID NO: 744811 - RNA, 17 nt, Artificial Sequence
  Synthetic
aaagacauacaugagac

SEQ ID NO: 744812 - RNA, 17 nt, Artificial Sequence
  Synthetic
agaaagaggcaugagac

SEQ ID NO: 744813 - RNA, 17 nt, Artificial Sequence
  Synthetic
uauuuugacuaugagac

SEQ ID NO: 744814 - RNA, 17 nt, Artificial Sequence
  Synthetic
aaagaaauaccugagac

SEQ ID NO: 744815 - RNA, 17 nt, Artificial Sequence
  Synthetic
aaagacauaccugagac

SEQ ID NO: 744816 - RNA, 17 nt, Artificial Sequence
  Synthetic
aaagaacuaccugagac

SEQ ID NO: 744817 - RNA, 17 nt, Artificial Sequence
  Synthetic
aagaacuucccugagac

SEQ ID NO: 744818 - RNA, 17 nt, Artificial Sequence
  Synthetic
aacaaaaugccugagac

SEQ ID NO: 744819 - RNA, 17 nt, Artificial Sequence
  Synthetic
aaagaacugccugagac

SEQ ID NO: 744820 - RNA, 17 nt, Artificial Sequence
  Synthetic
acucgggaggcugagac

SEQ ID NO: 744821 - RNA, 17 nt, Artificial Sequence
  Synthetic
cuuugggaggcugagac

SEQ ID NO: 744822 - RNA, 17 nt, Artificial Sequence
  Synthetic
aaagacauaucugagac

SEQ ID NO: 744823 - RNA, 17 nt, Artificial Sequence
  Synthetic
cggaauguuucugagac

SEQ ID NO: 744824 - RNA, 17 nt, Artificial Sequence
  Synthetic
ugcuggggaagugagac

SEQ ID NO: 744825 - RNA, 17 nt, Artificial Sequence
  Synthetic
caugaugcaggugagac

SEQ ID NO: 744826 - RNA, 17 nt, Artificial Sequence
  Synthetic
aggccuggacuugagac

SEQ ID NO: 744827 - RNA, 17 nt, Artificial Sequence
  Synthetic
aaagacauacuugagac

SEQ ID NO: 744828 - RNA, 17 nt, Artificial Sequence
  Synthetic
uuaaauuuucuugagac

SEQ ID NO: 744829 - RNA, 17 nt, Artificial Sequence
  Synthetic
augaauuauuuugagac

SEQ ID NO: 744830 - RNA, 17 nt, Artificial Sequence
  Synthetic
uuuauuuauuuugagac

SEQ ID NO: 744831 - RNA, 17 nt, Artificial Sequence
  Synthetic
auuuuuucuuuugagac

SEQ ID NO: 744832 - RNA, 17 nt, Artificial Sequence
  Synthetic
uguagaguuuuugagac

SEQ ID NO: 744833 - RNA, 17 nt, Artificial Sequence
  Synthetic
uauauauuuuuugagac

SEQ ID NO: 744834 - RNA, 17 nt, Artificial Sequence
  Synthetic
uuuuuuuuuuuugagac

SEQ ID NO: 744835 - RNA, 17 nt, Artificial Sequence
  Synthetic
aaagugugaaaauagac

SEQ ID NO: 744836 - RNA, 17 nt, Artificial Sequence
  Synthetic
augagaucacaauagac

SEQ ID NO: 744837 - RNA, 17 nt, Artificial Sequence
  Synthetic
acaagguguacauagac

SEQ ID NO: 744838 - RNA, 17 nt, Artificial Sequence
  Synthetic
aacaaaauaccauagac

SEQ ID NO: 744839 - RNA, 17 nt, Artificial Sequence
  Synthetic
aaaauaaugccauagac

SEQ ID NO: 744840 - RNA, 17 nt, Artificial Sequence
  Synthetic
uagguagauagauagac

SEQ ID NO: 744841 - RNA, 17 nt, Artificial Sequence
  Synthetic
uuuaaaugaauauagac

SEQ ID NO: 744842 - RNA, 17 nt, Artificial Sequence
  Synthetic
uauucagauuuauagac

SEQ ID NO: 744843 - RNA, 17 nt, Artificial Sequence
  Synthetic
auggcauguuuauagac

SEQ ID NO: 744844 - RNA, 17 nt, Artificial Sequence
  Synthetic
augagaggacacuagac

SEQ ID NO: 744845 - RNA, 17 nt, Artificial Sequence
  Synthetic
cauuuacagcacuagac

SEQ ID NO: 744846 - RNA, 17 nt, Artificial Sequence
  Synthetic
cucucccugcacuagac

SEQ ID NO: 744847 - RNA, 17 nt, Artificial Sequence
  Synthetic
uugcauguucacuagac

SEQ ID NO: 744848 - RNA, 17 nt, Artificial Sequence
  Synthetic
cauucugucaccuagac

SEQ ID NO: 744849 - RNA, 17 nt, Artificial Sequence
  Synthetic
aggcaggcugccuagac

SEQ ID NO: 744850 - RNA, 17 nt, Artificial Sequence
  Synthetic
cuuuaaaagagcuagac

SEQ ID NO: 744851 - RNA, 17 nt, Artificial Sequence
  Synthetic
auuuuauuuggcuagac

SEQ ID NO: 744852 - RNA, 17 nt, Artificial Sequence
  Synthetic
auuuuuuuuuucuagac

SEQ ID NO: 744853 - RNA, 17 nt, Artificial Sequence
  Synthetic
caaucauuuagguagac

SEQ ID NO: 744854 - RNA, 17 nt, Artificial Sequence
  Synthetic
agacucagcugguagac

SEQ ID NO: 744855 - RNA, 17 nt, Artificial Sequence
  Synthetic
cacaauuucaauuagac

SEQ ID NO: 744856 - RNA, 17 nt, Artificial Sequence
  Synthetic
agcuaaauaccuuagac

SEQ ID NO: 744857 - RNA, 17 nt, Artificial Sequence
  Synthetic
cuagaaauaucuuagac

SEQ ID NO: 744858 - RNA, 17 nt, Artificial Sequence
  Synthetic
caaaguuccaguuagac

SEQ ID NO: 744859 - RNA, 17 nt, Artificial Sequence
  Synthetic
agaagcaggaguuagac

SEQ ID NO: 744860 - RNA, 17 nt, Artificial Sequence
  Synthetic
uuuucaaaagguuagac

SEQ ID NO: 744861 - RNA, 17 nt, Artificial Sequence
  Synthetic
auuagcauuuguuagac

SEQ ID NO: 744862 - RNA, 17 nt, Artificial Sequence
  Synthetic
acaaagguaauuuagac

SEQ ID NO: 744863 - RNA, 17 nt, Artificial Sequence
  Synthetic
ccacucuaucuuuagac

SEQ ID NO: 744864 - RNA, 17 nt, Artificial Sequence
  Synthetic
ccagauuugagaacgac

SEQ ID NO: 744865 - RNA, 17 nt, Artificial Sequence
  Synthetic
aaagaggaagacacgac

SEQ ID NO: 744866 - RNA, 17 nt, Artificial Sequence
  Synthetic
uccccccaccccacgac

SEQ ID NO: 744867 - RNA, 17 nt, Artificial Sequence
  Synthetic
uccccucaccccacgac

SEQ ID NO: 744868 - RNA, 17 nt, Artificial Sequence
  Synthetic
cugccuucugccacgac

SEQ ID NO: 744869 - RNA, 17 nt, Artificial Sequence
  Synthetic
cucuaagagaugacgac

SEQ ID NO: 744870 - RNA, 17 nt, Artificial Sequence
  Synthetic
ucgccccaccccccgac

SEQ ID NO: 744871 - RNA, 17 nt, Artificial Sequence
  Synthetic
auagaggcaacagcgac

SEQ ID NO: 744872 - RNA, 17 nt, Artificial Sequence
  Synthetic
aggacauuugaaucgac

SEQ ID NO: 744873 - RNA, 17 nt, Artificial Sequence
  Synthetic
uaugaggauacaucgac

SEQ ID NO: 744874 - RNA, 17 nt, Artificial Sequence
  Synthetic
ccccagaaccccucgac

SEQ ID NO: 744875 - RNA, 17 nt, Artificial Sequence
  Synthetic
accucccaccccucgac

SEQ ID NO: 744876 - RNA, 17 nt, Artificial Sequence
  Synthetic
aauuuaaggaaaaggac

SEQ ID NO: 744877 - RNA, 17 nt, Artificial Sequence
  Synthetic
uauaugcagcaaaggac

SEQ ID NO: 744878 - RNA, 17 nt, Artificial Sequence
  Synthetic
aaugugucucaaaggac

SEQ ID NO: 744879 - RNA, 17 nt, Artificial Sequence
  Synthetic
ucaaaaguucaaaggac

SEQ ID NO: 744880 - RNA, 17 nt, Artificial Sequence
  Synthetic
ucgaaaguucaaaggac

SEQ ID NO: 744881 - RNA, 17 nt, Artificial Sequence
  Synthetic
augaaaguugaaaggac

SEQ ID NO: 744882 - RNA, 17 nt, Artificial Sequence
  Synthetic
uguuguggauaaaggac

SEQ ID NO: 744883 - RNA, 17 nt, Artificial Sequence
  Synthetic
auuaauauuuaaaggac

SEQ ID NO: 744884 - RNA, 17 nt, Artificial Sequence
  Synthetic
cauugaagaugaaggac

SEQ ID NO: 744885 - RNA, 17 nt, Artificial Sequence
  Synthetic
aaccucuggauaaggac

SEQ ID NO: 744886 - RNA, 17 nt, Artificial Sequence
  Synthetic
aaauuaaaacuaaggac

SEQ ID NO: 744887 - RNA, 17 nt, Artificial Sequence
  Synthetic
uuauagaaacacaggac

SEQ ID NO: 744888 - RNA, 17 nt, Artificial Sequence
  Synthetic
uauuuagaccacaggac

SEQ ID NO: 744889 - RNA, 17 nt, Artificial Sequence
  Synthetic
caacaaucccacaggac

SEQ ID NO: 744890 - RNA, 17 nt, Artificial Sequence
  Synthetic
aaaauuugguucaggac

SEQ ID NO: 744891 - RNA, 17 nt, Artificial Sequence
  Synthetic
aauucaauacagaggac

SEQ ID NO: 744892 - RNA, 17 nt, Artificial Sequence
  Synthetic
uaaaugaaaaugaggac

SEQ ID NO: 744893 - RNA, 17 nt, Artificial Sequence
  Synthetic
uagccccaagugaggac

SEQ ID NO: 744894 - RNA, 17 nt, Artificial Sequence
  Synthetic
uuuuauuuuuugaggac

SEQ ID NO: 744895 - RNA, 17 nt, Artificial Sequence
  Synthetic
ugucuuuuuccuaggac

SEQ ID NO: 744896 - RNA, 17 nt, Artificial Sequence
  Synthetic
uguguguaagguaggac

SEQ ID NO: 744897 - RNA, 17 nt, Artificial Sequence
  Synthetic
ugaaagugacuuaggac

SEQ ID NO: 744898 - RNA, 17 nt, Artificial Sequence
  Synthetic
aaucugucauuuaggac

SEQ ID NO: 744899 - RNA, 17 nt, Artificial Sequence
  Synthetic
aagggcauauuuaggac

SEQ ID NO: 744900 - RNA, 17 nt, Artificial Sequence
  Synthetic
cugagcaaguuuaggac

SEQ ID NO: 744901 - RNA, 17 nt, Artificial Sequence
  Synthetic
uuuauauuguuuaggac

SEQ ID NO: 744902 - RNA, 17 nt, Artificial Sequence
  Synthetic
aacacuaacaaacggac

SEQ ID NO: 744903 - RNA, 17 nt, Artificial Sequence
  Synthetic
caccauguuagccggac

SEQ ID NO: 744904 - RNA, 17 nt, Artificial Sequence
  Synthetic
ccacagaucucucggac

SEQ ID NO: 744905 - RNA, 17 nt, Artificial Sequence
  Synthetic
uuuuugugagaagggac

SEQ ID NO: 744906 - RNA, 17 nt, Artificial Sequence
  Synthetic
cccauggacacagggac

SEQ ID NO: 744907 - RNA, 17 nt, Artificial Sequence
  Synthetic
acacucuuuucagggac

SEQ ID NO: 744908 - RNA, 17 nt, Artificial Sequence
  Synthetic
uaaugauacugagggac

SEQ ID NO: 744909 - RNA, 17 nt, Artificial Sequence
  Synthetic
agcaggcuucuagggac

SEQ ID NO: 744910 - RNA, 17 nt, Artificial Sequence
  Synthetic
augggcaaaaacgggac

SEQ ID NO: 744911 - RNA, 17 nt, Artificial Sequence
  Synthetic
aaacgaagaaaggggac

SEQ ID NO: 744912 - RNA, 17 nt, Artificial Sequence
  Synthetic
ucguggggugaggggac

SEQ ID NO: 744913 - RNA, 17 nt, Artificial Sequence
  Synthetic
cuauaaaauuaggggac

SEQ ID NO: 744914 - RNA, 17 nt, Artificial Sequence
  Synthetic
ugaagggcaagggggac

SEQ ID NO: 744915 - RNA, 17 nt, Artificial Sequence
  Synthetic
caacuuucuggggggac

SEQ ID NO: 744916 - RNA, 17 nt, Artificial Sequence
  Synthetic
aaaaaaaugauggggac

SEQ ID NO: 744917 - RNA, 17 nt, Artificial Sequence
  Synthetic
uuguaaccacuggggac

SEQ ID NO: 744918 - RNA, 17 nt, Artificial Sequence
  Synthetic
aagcugggaguggggac

SEQ ID NO: 744919 - RNA, 17 nt, Artificial Sequence
  Synthetic
uuguuugcaaaugggac

SEQ ID NO: 744920 - RNA, 17 nt, Artificial Sequence
  Synthetic
uuuuaaagacaugggac

SEQ ID NO: 744921 - RNA, 17 nt, Artificial Sequence
  Synthetic
aaugagcaaagugggac

SEQ ID NO: 744922 - RNA, 17 nt, Artificial Sequence
  Synthetic
cuauugccauuugggac

SEQ ID NO: 744923 - RNA, 17 nt, Artificial Sequence
  Synthetic
uuuuuaaaguuugggac

SEQ ID NO: 744924 - RNA, 17 nt, Artificial Sequence
  Synthetic
aguccagagaaauggac

SEQ ID NO: 744925 - RNA, 17 nt, Artificial Sequence
  Synthetic
uuaggaaggaaauggac

SEQ ID NO: 744926 - RNA, 17 nt, Artificial Sequence
  Synthetic
ucuccauuacaauggac

SEQ ID NO: 744927 - RNA, 17 nt, Artificial Sequence
  Synthetic
auuauucugagauggac

SEQ ID NO: 744928 - RNA, 17 nt, Artificial Sequence
  Synthetic
ccaagacuuagauggac

SEQ ID NO: 744929 - RNA, 17 nt, Artificial Sequence
  Synthetic
uagaaacugauauggac

SEQ ID NO: 744930 - RNA, 17 nt, Artificial Sequence
  Synthetic
auacuucauauauggac

SEQ ID NO: 744931 - RNA, 17 nt, Artificial Sequence
  Synthetic
ucccucagucuauggac

SEQ ID NO: 744932 - RNA, 17 nt, Artificial Sequence
  Synthetic
aagcuacguguauggac

SEQ ID NO: 744933 - RNA, 17 nt, Artificial Sequence
  Synthetic
aaaaucaaagacuggac

SEQ ID NO: 744934 - RNA, 17 nt, Artificial Sequence
  Synthetic
acaguagagagcuggac

SEQ ID NO: 744935 - RNA, 17 nt, Artificial Sequence
  Synthetic
uauauaaugugcuggac

SEQ ID NO: 744936 - RNA, 17 nt, Artificial Sequence
  Synthetic
caaaugggugucuggac

SEQ ID NO: 744937 - RNA, 17 nt, Artificial Sequence
  Synthetic
cucuaagaauucuggac

SEQ ID NO: 744938 - RNA, 17 nt, Artificial Sequence
  Synthetic
agaggauggaaguggac

SEQ ID NO: 744939 - RNA, 17 nt, Artificial Sequence
  Synthetic
aacauccuauaguggac

SEQ ID NO: 744940 - RNA, 17 nt, Artificial Sequence
  Synthetic
acaauuuuuccguggac

SEQ ID NO: 744941 - RNA, 17 nt, Artificial Sequence
  Synthetic
uuaagggagugguggac

SEQ ID NO: 744942 - RNA, 17 nt, Artificial Sequence
  Synthetic
uagugcaaaauguggac

SEQ ID NO: 744943 - RNA, 17 nt, Artificial Sequence
  Synthetic
ccuuaugacauguggac

SEQ ID NO: 744944 - RNA, 17 nt, Artificial Sequence
  Synthetic
uaucuuugccauuggac

SEQ ID NO: 744945 - RNA, 17 nt, Artificial Sequence
  Synthetic
uuuucaacaaguuggac

SEQ ID NO: 744946 - RNA, 17 nt, Artificial Sequence
  Synthetic
cuacagcacaguuggac

SEQ ID NO: 744947 - RNA, 17 nt, Artificial Sequence
  Synthetic
cauccuuccaguuggac

SEQ ID NO: 744948 - RNA, 17 nt, Artificial Sequence
  Synthetic
aaggcagugauuuggac

SEQ ID NO: 744949 - RNA, 17 nt, Artificial Sequence
  Synthetic
aaauacgaaguuuggac

SEQ ID NO: 744950 - RNA, 17 nt, Artificial Sequence
  Synthetic
ccugauagauuuuggac

SEQ ID NO: 744951 - RNA, 17 nt, Artificial Sequence
  Synthetic
uuuuuauuguuuuggac

SEQ ID NO: 744952 - RNA, 17 nt, Artificial Sequence
  Synthetic
caaauuugaaaaaugac

SEQ ID NO: 744953 - RNA, 17 nt, Artificial Sequence
  Synthetic
auaauaucuaaaaugac

SEQ ID NO: 744954 - RNA, 17 nt, Artificial Sequence
  Synthetic
acguugcugcaaaugac

SEQ ID NO: 744955 - RNA, 17 nt, Artificial Sequence
  Synthetic
aagauguugcaaaugac

SEQ ID NO: 744956 - RNA, 17 nt, Artificial Sequence
  Synthetic
auguuguugcaaaugac

SEQ ID NO: 744957 - RNA, 17 nt, Artificial Sequence
  Synthetic
auauugucucaaaugac

SEQ ID NO: 744958 - RNA, 17 nt, Artificial Sequence
  Synthetic
auauguagagaaaugac

SEQ ID NO: 744959 - RNA, 17 nt, Artificial Sequence
  Synthetic
caucuuuaugaaaugac

SEQ ID NO: 744960 - RNA, 17 nt, Artificial Sequence
  Synthetic
auguugucauaaaugac

SEQ ID NO: 744961 - RNA, 17 nt, Artificial Sequence
  Synthetic
aguauacacuaaaugac

SEQ ID NO: 744962 - RNA, 17 nt, Artificial Sequence
  Synthetic
cuuaaaaccuaaaugac

SEQ ID NO: 744963 - RNA, 17 nt, Artificial Sequence
  Synthetic
uuuuugacuccaaugac

SEQ ID NO: 744964 - RNA, 17 nt, Artificial Sequence
  Synthetic
aguccacacucaaugac

SEQ ID NO: 744965 - RNA, 17 nt, Artificial Sequence
  Synthetic
cauugaaaaauaaugac

SEQ ID NO: 744966 - RNA, 17 nt, Artificial Sequence
  Synthetic
uuaauagaaauaaugac

SEQ ID NO: 744967 - RNA, 17 nt, Artificial Sequence
  Synthetic
aguaggguucuaaugac

SEQ ID NO: 744968 - RNA, 17 nt, Artificial Sequence
  Synthetic
uucccugcuguaaugac

SEQ ID NO: 744969 - RNA, 17 nt, Artificial Sequence
  Synthetic
acuacucaauuaaugac

SEQ ID NO: 744970 - RNA, 17 nt, Artificial Sequence
  Synthetic
augcaucacuuaaugac

SEQ ID NO: 744971 - RNA, 17 nt, Artificial Sequence
  Synthetic
uacaguaaguuaaugac

SEQ ID NO: 744972 - RNA, 17 nt, Artificial Sequence
  Synthetic
uuauaguuccacaugac

SEQ ID NO: 744973 - RNA, 17 nt, Artificial Sequence
  Synthetic
auagguaaugacaugac

SEQ ID NO: 744974 - RNA, 17 nt, Artificial Sequence
  Synthetic
ccuagcagugccaugac

SEQ ID NO: 744975 - RNA, 17 nt, Artificial Sequence
  Synthetic
uggagauaaagcaugac

SEQ ID NO: 744976 - RNA, 17 nt, Artificial Sequence
  Synthetic
uaauugucaagcaugac

SEQ ID NO: 744977 - RNA, 17 nt, Artificial Sequence
  Synthetic
cuaauaauuagcaugac

SEQ ID NO: 744978 - RNA, 17 nt, Artificial Sequence
  Synthetic
cuguaguauggcaugac

SEQ ID NO: 744979 - RNA, 17 nt, Artificial Sequence
  Synthetic
ugugaaauguucaugac

SEQ ID NO: 744980 - RNA, 17 nt, Artificial Sequence
  Synthetic
ugaaugacuuucaugac

SEQ ID NO: 744981 - RNA, 17 nt, Artificial Sequence
  Synthetic
uuacauguuuucaugac

SEQ ID NO: 744982 - RNA, 17 nt, Artificial Sequence
  Synthetic
acagcuuuccagaugac

SEQ ID NO: 744983 - RNA, 17 nt, Artificial Sequence
  Synthetic
cucauguuggagaugac

SEQ ID NO: 744984 - RNA, 17 nt, Artificial Sequence
  Synthetic
caaagcacugagaugac

SEQ ID NO: 744985 - RNA, 17 nt, Artificial Sequence
  Synthetic
cuuaaaaccuagaugac

SEQ ID NO: 744986 - RNA, 17 nt, Artificial Sequence
  Synthetic
accuaaugcuagaugac

SEQ ID NO: 744987 - RNA, 17 nt, Artificial Sequence
  Synthetic
uaccuaauguagaugac

SEQ ID NO: 744988 - RNA, 17 nt, Artificial Sequence
  Synthetic
cuagggcugucgaugac

SEQ ID NO: 744989 - RNA, 17 nt, Artificial Sequence
  Synthetic
agagguagggggaugac

SEQ ID NO: 744990 - RNA, 17 nt, Artificial Sequence
  Synthetic
cugcuucuuuggaugac

SEQ ID NO: 744991 - RNA, 17 nt, Artificial Sequence
  Synthetic
aacuaugaagugaugac

SEQ ID NO: 744992 - RNA, 17 nt, Artificial Sequence
  Synthetic
aagauuaaggugaugac

SEQ ID NO: 744993 - RNA, 17 nt, Artificial Sequence
  Synthetic
cuguuaucugugaugac

SEQ ID NO: 744994 - RNA, 17 nt, Artificial Sequence
  Synthetic
uuucaggaauugaugac

SEQ ID NO: 744995 - RNA, 17 nt, Artificial Sequence
  Synthetic
cuaccuagaaauaugac

SEQ ID NO: 744996 - RNA, 17 nt, Artificial Sequence
  Synthetic
ucucaacuaaauaugac

SEQ ID NO: 744997 - RNA, 17 nt, Artificial Sequence
  Synthetic
uaaucauaucauaugac

SEQ ID NO: 744998 - RNA, 17 nt, Artificial Sequence
  Synthetic
auaagcaaagauaugac

SEQ ID NO: 744999 - RNA, 17 nt, Artificial Sequence
  Synthetic
uaagggaaggauaugac

SEQ ID NO: 745000 - RNA, 17 nt, Artificial Sequence
  Synthetic
aaaacuacaacuaugac

SEQ ID NO: 745001 - RNA, 17 nt, Artificial Sequence
  Synthetic
auccauucaucuaugac

SEQ ID NO: 745002 - RNA, 17 nt, Artificial Sequence
  Synthetic
caggagccugguaugac

SEQ ID NO: 745003 - RNA, 17 nt, Artificial Sequence
  Synthetic
acauguuucauuaugac

SEQ ID NO: 745004 - RNA, 17 nt, Artificial Sequence
  Synthetic
acacaguuuguuaugac

SEQ ID NO: 745005 - RNA, 17 nt, Artificial Sequence
  Synthetic
auuugucauuuuaugac

SEQ ID NO: 745006 - RNA, 17 nt, Artificial Sequence
  Synthetic
ucagucucuuuuaugac

SEQ ID NO: 745007 - RNA, 17 nt, Artificial Sequence
  Synthetic
cucuuucaaaaacugac

SEQ ID NO: 745008 - RNA, 17 nt, Artificial Sequence
  Synthetic
acugcucugaaacugac

SEQ ID NO: 745009 - RNA, 17 nt, Artificial Sequence
  Synthetic
accaaaguagaacugac

SEQ ID NO: 745010 - RNA, 17 nt, Artificial Sequence
  Synthetic
uggaacaaguaacugac

SEQ ID NO: 745011 - RNA, 17 nt, Artificial Sequence
  Synthetic
auauuugaaacacugac

SEQ ID NO: 745012 - RNA, 17 nt, Artificial Sequence
  Synthetic
uuccaaauuccacugac

SEQ ID NO: 745013 - RNA, 17 nt, Artificial Sequence
  Synthetic
auuguaggguuacugac

SEQ ID NO: 745014 - RNA, 17 nt, Artificial Sequence
  Synthetic
agacacaaacaccugac

SEQ ID NO: 745015 - RNA, 17 nt, Artificial Sequence
  Synthetic
aucuauaagccccugac

SEQ ID NO: 745016 - RNA, 17 nt, Artificial Sequence
  Synthetic
agaaauacuggccugac

SEQ ID NO: 745017 - RNA, 17 nt, Artificial Sequence
  Synthetic
cccccgugccuccugac

SEQ ID NO: 745018 - RNA, 17 nt, Artificial Sequence
  Synthetic
uuaaagacaaagcugac

SEQ ID NO: 745019 - RNA, 17 nt, Artificial Sequence
  Synthetic
aagggagcuaagcugac

SEQ ID NO: 745020 - RNA, 17 nt, Artificial Sequence
  Synthetic
cagaacaccaggcugac

SEQ ID NO: 745021 - RNA, 17 nt, Artificial Sequence
  Synthetic
agucgcuggaggcugac

SEQ ID NO: 745022 - RNA, 17 nt, Artificial Sequence
  Synthetic
ucagaggcugugcugac

SEQ ID NO: 745023 - RNA, 17 nt, Artificial Sequence
  Synthetic
cauaugucaaaucugac

SEQ ID NO: 745024 - RNA, 17 nt, Artificial Sequence
  Synthetic
cagugaacgaaucugac

SEQ ID NO: 745025 - RNA, 17 nt, Artificial Sequence
  Synthetic
aaaaguacuuaucugac

SEQ ID NO: 745026 - RNA, 17 nt, Artificial Sequence
  Synthetic
cuucugccuuaucugac

SEQ ID NO: 745027 - RNA, 17 nt, Artificial Sequence
  Synthetic
ccacauauuuaucugac

SEQ ID NO: 745028 - RNA, 17 nt, Artificial Sequence
  Synthetic
augccuuguacucugac

SEQ ID NO: 745029 - RNA, 17 nt, Artificial Sequence
  Synthetic
aaguaugguccucugac

SEQ ID NO: 745030 - RNA, 17 nt, Artificial Sequence
  Synthetic
aguuuaucugcucugac

SEQ ID NO: 745031 - RNA, 17 nt, Artificial Sequence
  Synthetic
uccaacuuuucucugac

SEQ ID NO: 745032 - RNA, 17 nt, Artificial Sequence
  Synthetic
aacaaagccagucugac

SEQ ID NO: 745033 - RNA, 17 nt, Artificial Sequence
  Synthetic
caaguaaggagucugac

SEQ ID NO: 745034 - RNA, 17 nt, Artificial Sequence
  Synthetic
agggcacauagucugac

SEQ ID NO: 745035 - RNA, 17 nt, Artificial Sequence
  Synthetic
uuaucuaacugucugac

SEQ ID NO: 745036 - RNA, 17 nt, Artificial Sequence
  Synthetic
auaauaggcauucugac

SEQ ID NO: 745037 - RNA, 17 nt, Artificial Sequence
  Synthetic
aagaccuagauucugac

SEQ ID NO: 745038 - RNA, 17 nt, Artificial Sequence
  Synthetic
caugucuacuuucugac

SEQ ID NO: 745039 - RNA, 17 nt, Artificial Sequence
  Synthetic
ucucuaaauuuucugac

SEQ ID NO: 745040 - RNA, 17 nt, Artificial Sequence
  Synthetic
accuacacuuuucugac

SEQ ID NO: 745041 - RNA, 17 nt, Artificial Sequence
  Synthetic
cauagagguuuucugac

SEQ ID NO: 745042 - RNA, 17 nt, Artificial Sequence
  Synthetic
cagagagaaaaagugac

SEQ ID NO: 745043 - RNA, 17 nt, Artificial Sequence
  Synthetic
cagugaguaaaagugac

SEQ ID NO: 745044 - RNA, 17 nt, Artificial Sequence
  Synthetic
accaagcccaaagugac

SEQ ID NO: 745045 - RNA, 17 nt, Artificial Sequence
  Synthetic
agcugggagaaagugac

SEQ ID NO: 745046 - RNA, 17 nt, Artificial Sequence
  Synthetic
auaaauaaagaagugac

SEQ ID NO: 745047 - RNA, 17 nt, Artificial Sequence
  Synthetic
cccuaucacuaagugac

SEQ ID NO: 745048 - RNA, 17 nt, Artificial Sequence
  Synthetic
uagaagggguaagugac

SEQ ID NO: 745049 - RNA, 17 nt, Artificial Sequence
  Synthetic
uacaaaaaaacagugac

SEQ ID NO: 745050 - RNA, 17 nt, Artificial Sequence
  Synthetic
auuuuauucacagugac

SEQ ID NO: 745051 - RNA, 17 nt, Artificial Sequence
  Synthetic
cuaaaaauaagagugac

SEQ ID NO: 745052 - RNA, 17 nt, Artificial Sequence
  Synthetic
ucagcuuuguuagugac

SEQ ID NO: 745053 - RNA, 17 nt, Artificial Sequence
  Synthetic
uuaaugcauuuagugac

SEQ ID NO: 745054 - RNA, 17 nt, Artificial Sequence
  Synthetic
auaguucaaaaggugac

SEQ ID NO: 745055 - RNA, 17 nt, Artificial Sequence
  Synthetic
aaguccuugaaggugac

SEQ ID NO: 745056 - RNA, 17 nt, Artificial Sequence
  Synthetic
ugauuuggucaggugac

SEQ ID NO: 745057 - RNA, 17 nt, Artificial Sequence
  Synthetic
caucugcuuagggugac

SEQ ID NO: 745058 - RNA, 17 nt, Artificial Sequence
  Synthetic
cauuaaauuggggugac

SEQ ID NO: 745059 - RNA, 17 nt, Artificial Sequence
  Synthetic
acuccagccugggugac

SEQ ID NO: 745060 - RNA, 17 nt, Artificial Sequence
  Synthetic
uucucaucucuggugac

SEQ ID NO: 745061 - RNA, 17 nt, Artificial Sequence
  Synthetic
uugcucaagguggugac

SEQ ID NO: 745062 - RNA, 17 nt, Artificial Sequence
  Synthetic
auuugcccuuuggugac

SEQ ID NO: 745063 - RNA, 17 nt, Artificial Sequence
  Synthetic
ugaagaguacaugugac

SEQ ID NO: 745064 - RNA, 17 nt, Artificial Sequence
  Synthetic
aggaauggccaugugac

SEQ ID NO: 745065 - RNA, 17 nt, Artificial Sequence
  Synthetic
uuugccauccaugugac

SEQ ID NO: 745066 - RNA, 17 nt, Artificial Sequence
  Synthetic
uuaggaugaacugugac

SEQ ID NO: 745067 - RNA, 17 nt, Artificial Sequence
  Synthetic
aagacagauacugugac

SEQ ID NO: 745068 - RNA, 17 nt, Artificial Sequence
  Synthetic
aggcacugugcugugac

SEQ ID NO: 745069 - RNA, 17 nt, Artificial Sequence
  Synthetic
ugguccauaucugugac

SEQ ID NO: 745070 - RNA, 17 nt, Artificial Sequence
  Synthetic
uuaugaaaaugugugac

SEQ ID NO: 745071 - RNA, 17 nt, Artificial Sequence
  Synthetic
aauuuuugcauugugac

SEQ ID NO: 745072 - RNA, 17 nt, Artificial Sequence
  Synthetic
aaauuacagauugugac

SEQ ID NO: 745073 - RNA, 17 nt, Artificial Sequence
  Synthetic
aagaccuagauugugac

SEQ ID NO: 745074 - RNA, 17 nt, Artificial Sequence
  Synthetic
ccacacuuccuugugac

SEQ ID NO: 745075 - RNA, 17 nt, Artificial Sequence
  Synthetic
uuggggucuuuugugac

SEQ ID NO: 745076 - RNA, 17 nt, Artificial Sequence
  Synthetic
aacugcugacaauugac

SEQ ID NO: 745077 - RNA, 17 nt, Artificial Sequence
  Synthetic
uggggcugggaauugac

SEQ ID NO: 745078 - RNA, 17 nt, Artificial Sequence
  Synthetic
acucugauauaauugac

SEQ ID NO: 745079 - RNA, 17 nt, Artificial Sequence
  Synthetic
acuuuccauucauugac

SEQ ID NO: 745080 - RNA, 17 nt, Artificial Sequence
  Synthetic
uccagaaacauauugac

SEQ ID NO: 745081 - RNA, 17 nt, Artificial Sequence
  Synthetic
auuguuaccauauugac

SEQ ID NO: 745082 - RNA, 17 nt, Artificial Sequence
  Synthetic
uuagcucauauauugac

SEQ ID NO: 745083 - RNA, 17 nt, Artificial Sequence
  Synthetic
ccaagguauauauugac

SEQ ID NO: 745084 - RNA, 17 nt, Artificial Sequence
  Synthetic
acuaaaugucuauugac

SEQ ID NO: 745085 - RNA, 17 nt, Artificial Sequence
  Synthetic
cguuuauuauuauugac

SEQ ID NO: 745086 - RNA, 17 nt, Artificial Sequence
  Synthetic
uugugcaucaacuugac

SEQ ID NO: 745087 - RNA, 17 nt, Artificial Sequence
  Synthetic
cucuggaaacacuugac

SEQ ID NO: 745088 - RNA, 17 nt, Artificial Sequence
  Synthetic
aaggaagccaccuugac

SEQ ID NO: 745089 - RNA, 17 nt, Artificial Sequence
  Synthetic
uacagaaacagcuugac

SEQ ID NO: 745090 - RNA, 17 nt, Artificial Sequence
  Synthetic
acauuuuuaggcuugac

SEQ ID NO: 745091 - RNA, 17 nt, Artificial Sequence
  Synthetic
ucauaugauggcuugac

SEQ ID NO: 745092 - RNA, 17 nt, Artificial Sequence
  Synthetic
aaggauaaaugcuugac

SEQ ID NO: 745093 - RNA, 17 nt, Artificial Sequence
  Synthetic
agauaacuucucuugac

SEQ ID NO: 745094 - RNA, 17 nt, Artificial Sequence
  Synthetic
aaauaaucaaaguugac

SEQ ID NO: 745095 - RNA, 17 nt, Artificial Sequence
  Synthetic
aagaggcuagaguugac

SEQ ID NO: 745096 - RNA, 17 nt, Artificial Sequence
  Synthetic
augauuauauaguugac

SEQ ID NO: 745097 - RNA, 17 nt, Artificial Sequence
  Synthetic
cacauuuucagguugac

SEQ ID NO: 745098 - RNA, 17 nt, Artificial Sequence
  Synthetic
cuuucagagagguugac

SEQ ID NO: 745099 - RNA, 17 nt, Artificial Sequence
  Synthetic
cuuuaaaaaaauuugac

SEQ ID NO: 745100 - RNA, 17 nt, Artificial Sequence
  Synthetic
aacaaaugaaauuugac

SEQ ID NO: 745101 - RNA, 17 nt, Artificial Sequence
  Synthetic
ucaccuuuucauuugac

SEQ ID NO: 745102 - RNA, 17 nt, Artificial Sequence
  Synthetic
uauuuuuuucauuugac

SEQ ID NO: 745103 - RNA, 17 nt, Artificial Sequence
  Synthetic
caaaaaaaagauuugac

SEQ ID NO: 745104 - RNA, 17 nt, Artificial Sequence
  Synthetic
auuagcuucacuuugac

SEQ ID NO: 745105 - RNA, 17 nt, Artificial Sequence
  Synthetic
uuucaagcuccuuugac

SEQ ID NO: 745106 - RNA, 17 nt, Artificial Sequence
  Synthetic
aagaacuguccuuugac

SEQ ID NO: 745107 - RNA, 17 nt, Artificial Sequence
  Synthetic
acaauggaagcuuugac

SEQ ID NO: 745108 - RNA, 17 nt, Artificial Sequence
  Synthetic
auaaccaaggcuuugac

SEQ ID NO: 745109 - RNA, 17 nt, Artificial Sequence
  Synthetic
cacaauuucaguuugac

SEQ ID NO: 745110 - RNA, 17 nt, Artificial Sequence
  Synthetic
ugguuuauccguuugac

SEQ ID NO: 745111 - RNA, 17 nt, Artificial Sequence
  Synthetic
cuuucuugauguuugac

SEQ ID NO: 745112 - RNA, 17 nt, Artificial Sequence
  Synthetic
ucuuucauaauuuugac

SEQ ID NO: 745113 - RNA, 17 nt, Artificial Sequence
  Synthetic
aauaaaauaaaaaauac

SEQ ID NO: 745114 - RNA, 17 nt, Artificial Sequence
  Synthetic
cugagacacaaaaauac

SEQ ID NO: 745115 - RNA, 17 nt, Artificial Sequence
  Synthetic
aaaccugagaaaaauac

SEQ ID NO: 745116 - RNA, 17 nt, Artificial Sequence
  Synthetic
auuucagggaaaaauac

SEQ ID NO: 745117 - RNA, 17 nt, Artificial Sequence
  Synthetic
agggcugauaaaaauac

SEQ ID NO: 745118 - RNA, 17 nt, Artificial Sequence
  Synthetic
agcuccuuuaaaaauac

SEQ ID NO: 745119 - RNA, 17 nt, Artificial Sequence
  Synthetic
uauuuauaacaaaauac

SEQ ID NO: 745120 - RNA, 17 nt, Artificial Sequence
  Synthetic
cacguaaugcaaaauac

SEQ ID NO: 745121 - RNA, 17 nt, Artificial Sequence
  Synthetic
acagugcuggaaaauac

SEQ ID NO: 745122 - RNA, 17 nt, Artificial Sequence
  Synthetic
caccauacugaaaauac

SEQ ID NO: 745123 - RNA, 17 nt, Artificial Sequence
  Synthetic
uuuuuaaaauaaaauac

SEQ ID NO: 745124 - RNA, 17 nt, Artificial Sequence
  Synthetic
aauccucaauaaaauac

SEQ ID NO: 745125 - RNA, 17 nt, Artificial Sequence
  Synthetic
acuccucaauaaaauac

SEQ ID NO: 745126 - RNA, 17 nt, Artificial Sequence
  Synthetic
uaggacauuuaaaauac

SEQ ID NO: 745127 - RNA, 17 nt, Artificial Sequence
  Synthetic
uuaaacggaacaaauac

SEQ ID NO: 745128 - RNA, 17 nt, Artificial Sequence
  Synthetic
uuuaaagauacaaauac

SEQ ID NO: 745129 - RNA, 17 nt, Artificial Sequence
  Synthetic
auauaucacgcaaauac

SEQ ID NO: 745130 - RNA, 17 nt, Artificial Sequence
  Synthetic
auagacaauucaaauac

SEQ ID NO: 745131 - RNA, 17 nt, Artificial Sequence
  Synthetic
augucacuuucaaauac

SEQ ID NO: 745132 - RNA, 17 nt, Artificial Sequence
  Synthetic
aagguuaaaagaaauac

SEQ ID NO: 745133 - RNA, 17 nt, Artificial Sequence
  Synthetic
uauaauagcagaaauac

SEQ ID NO: 745134 - RNA, 17 nt, Artificial Sequence
  Synthetic
auaaguuggagaaauac

SEQ ID NO: 745135 - RNA, 17 nt, Artificial Sequence
  Synthetic
aguagggcuagaaauac

SEQ ID NO: 745136 - RNA, 17 nt, Artificial Sequence
  Synthetic
aacuuguaaggaaauac

SEQ ID NO: 745137 - RNA, 17 nt, Artificial Sequence
  Synthetic
cguucugcaggaaauac

SEQ ID NO: 745138 - RNA, 17 nt, Artificial Sequence
  Synthetic
agacugaugggaaauac

SEQ ID NO: 745139 - RNA, 17 nt, Artificial Sequence
  Synthetic
ugucgguguggaaauac

SEQ ID NO: 745140 - RNA, 17 nt, Artificial Sequence
  Synthetic
aguuggcuaugaaauac

SEQ ID NO: 745141 - RNA, 17 nt, Artificial Sequence
  Synthetic
uaucagguaugaaauac

SEQ ID NO: 745142 - RNA, 17 nt, Artificial Sequence
  Synthetic
aagcggcucugaaauac

SEQ ID NO: 745143 - RNA, 17 nt, Artificial Sequence
  Synthetic
aauaagaauugaaauac

SEQ ID NO: 745144 - RNA, 17 nt, Artificial Sequence
  Synthetic
cacauggacauaaauac

SEQ ID NO: 745145 - RNA, 17 nt, Artificial Sequence
  Synthetic
ucauguccuauaaauac

SEQ ID NO: 745146 - RNA, 17 nt, Artificial Sequence
  Synthetic
acauaacuacuaaauac

SEQ ID NO: 745147 - RNA, 17 nt, Artificial Sequence
  Synthetic
uucaugaauguaaauac

SEQ ID NO: 745148 - RNA, 17 nt, Artificial Sequence
  Synthetic
aguguaauuuuaaauac

SEQ ID NO: 745149 - RNA, 17 nt, Artificial Sequence
  Synthetic
agacauagaaacaauac

SEQ ID NO: 745150 - RNA, 17 nt, Artificial Sequence
  Synthetic
aguuagggaaacaauac

SEQ ID NO: 745151 - RNA, 17 nt, Artificial Sequence
  Synthetic
ugaguuaggaacaauac

SEQ ID NO: 745152 - RNA, 17 nt, Artificial Sequence
  Synthetic
ugcuucuuccacaauac

SEQ ID NO: 745153 - RNA, 17 nt, Artificial Sequence
  Synthetic
uuagguuuuuacaauac

SEQ ID NO: 745154 - RNA, 17 nt, Artificial Sequence
  Synthetic
uugagcaaaaccaauac

SEQ ID NO: 745155 - RNA, 17 nt, Artificial Sequence
  Synthetic
uuccugaaaaccaauac

SEQ ID NO: 745156 - RNA, 17 nt, Artificial Sequence
  Synthetic
auauaugcacccaauac

SEQ ID NO: 745157 - RNA, 17 nt, Artificial Sequence
  Synthetic
auuuaugcacccaauac

SEQ ID NO: 745158 - RNA, 17 nt, Artificial Sequence
  Synthetic
uucccuaacuccaauac

SEQ ID NO: 745159 - RNA, 17 nt, Artificial Sequence
  Synthetic
aacuacagaagcaauac

SEQ ID NO: 745160 - RNA, 17 nt, Artificial Sequence
  Synthetic
caaugauguuucaauac

SEQ ID NO: 745161 - RNA, 17 nt, Artificial Sequence
  Synthetic
accauuccaaagaauac

SEQ ID NO: 745162 - RNA, 17 nt, Artificial Sequence
  Synthetic
uaauuauucaagaauac

SEQ ID NO: 745163 - RNA, 17 nt, Artificial Sequence
  Synthetic
aagaauuucuagaauac

SEQ ID NO: 745164 - RNA, 17 nt, Artificial Sequence
  Synthetic
aaauuauuuucgaauac

SEQ ID NO: 745165 - RNA, 17 nt, Artificial Sequence
  Synthetic
acauaccacaugaauac

SEQ ID NO: 745166 - RNA, 17 nt, Artificial Sequence
  Synthetic
cauuucaauaugaauac

SEQ ID NO: 745167 - RNA, 17 nt, Artificial Sequence
  Synthetic
cccaauaauuugaauac

SEQ ID NO: 745168 - RNA, 17 nt, Artificial Sequence
  Synthetic
aauauugauaauaauac

SEQ ID NO: 745169 - RNA, 17 nt, Artificial Sequence
  Synthetic
uguguaaggcauaauac

SEQ ID NO: 745170 - RNA, 17 nt, Artificial Sequence
  Synthetic
auuauuuuucauaauac

SEQ ID NO: 745171 - RNA, 17 nt, Artificial Sequence
  Synthetic
agggugggugauaauac

SEQ ID NO: 745172 - RNA, 17 nt, Artificial Sequence
  Synthetic
uggugaauugauaauac

SEQ ID NO: 745173 - RNA, 17 nt, Artificial Sequence
  Synthetic
uaacaacucuauaauac

SEQ ID NO: 745174 - RNA, 17 nt, Artificial Sequence
  Synthetic
uaauccaauuauaauac

SEQ ID NO: 745175 - RNA, 17 nt, Artificial Sequence
  Synthetic
aaagucauuuauaauac

SEQ ID NO: 745176 - RNA, 17 nt, Artificial Sequence
  Synthetic
acaccuuuuuauaauac

SEQ ID NO: 745177 - RNA, 17 nt, Artificial Sequence
  Synthetic
ccuuaucaaacuaauac

SEQ ID NO: 745178 - RNA, 17 nt, Artificial Sequence
  Synthetic
uaugcauauuguaauac

SEQ ID NO: 745179 - RNA, 17 nt, Artificial Sequence
  Synthetic
uaugcguauuguaauac

SEQ ID NO: 745180 - RNA, 17 nt, Artificial Sequence
  Synthetic
acguuaaaaauuaauac

SEQ ID NO: 745181 - RNA, 17 nt, Artificial Sequence
  Synthetic
cuuaaaauuaaacauac

SEQ ID NO: 745182 - RNA, 17 nt, Artificial Sequence
  Synthetic
aaccuaccacaacauac

SEQ ID NO: 745183 - RNA, 17 nt, Artificial Sequence
  Synthetic
aggacaaaucaacauac

SEQ ID NO: 745184 - RNA, 17 nt, Artificial Sequence
  Synthetic
agucacaauuaacauac

SEQ ID NO: 745185 - RNA, 17 nt, Artificial Sequence
  Synthetic
uauaauuuuuaacauac

SEQ ID NO: 745186 - RNA, 17 nt, Artificial Sequence
  Synthetic
aacacauggacacauac

SEQ ID NO: 745187 - RNA, 17 nt, Artificial Sequence
  Synthetic
acaugauaagcacauac

SEQ ID NO: 745188 - RNA, 17 nt, Artificial Sequence
  Synthetic
uacauugauucacauac

SEQ ID NO: 745189 - RNA, 17 nt, Artificial Sequence
  Synthetic
uuuuaggcuucacauac

SEQ ID NO: 745190 - RNA, 17 nt, Artificial Sequence
  Synthetic
auaucucuuugacauac

SEQ ID NO: 745191 - RNA, 17 nt, Artificial Sequence
  Synthetic
cagauuuuucuacauac

SEQ ID NO: 745192 - RNA, 17 nt, Artificial Sequence
  Synthetic
auggcaacaguacauac

SEQ ID NO: 745193 - RNA, 17 nt, Artificial Sequence
  Synthetic
uaucauguaguacauac

SEQ ID NO: 745194 - RNA, 17 nt, Artificial Sequence
  Synthetic
cagacauuuguacauac

SEQ ID NO: 745195 - RNA, 17 nt, Artificial Sequence
  Synthetic
cucccacaguuacauac

SEQ ID NO: 745196 - RNA, 17 nt, Artificial Sequence
  Synthetic
caaaaguguuuacauac

SEQ ID NO: 745197 - RNA, 17 nt, Artificial Sequence
  Synthetic
auaacccuuucccauac

SEQ ID NO: 745198 - RNA, 17 nt, Artificial Sequence
  Synthetic
uggcagugaauccauac

SEQ ID NO: 745199 - RNA, 17 nt, Artificial Sequence
  Synthetic
acugcugguauccauac

SEQ ID NO: 745200 - RNA, 17 nt, Artificial Sequence
  Synthetic
ucccagacucuccauac

SEQ ID NO: 745201 - RNA, 17 nt, Artificial Sequence
  Synthetic
agauuuguagagcauac

SEQ ID NO: 745202 - RNA, 17 nt, Artificial Sequence
  Synthetic
cagauauaccugcauac

SEQ ID NO: 745203 - RNA, 17 nt, Artificial Sequence
  Synthetic
uuucccaauuugcauac

SEQ ID NO: 745204 - RNA, 17 nt, Artificial Sequence
  Synthetic
cuacuuagaaaucauac

SEQ ID NO: 745205 - RNA, 17 nt, Artificial Sequence
  Synthetic
uguguugagcaucauac

SEQ ID NO: 745206 - RNA, 17 nt, Artificial Sequence
  Synthetic
aguuucagugcucauac

SEQ ID NO: 745207 - RNA, 17 nt, Artificial Sequence
  Synthetic
ccuuuguccagucauac

SEQ ID NO: 745208 - RNA, 17 nt, Artificial Sequence
  Synthetic
ugucaaaaaggucauac

SEQ ID NO: 745209 - RNA, 17 nt, Artificial Sequence
  Synthetic
uaucagugaugucauac

SEQ ID NO: 745210 - RNA, 17 nt, Artificial Sequence
  Synthetic
ucucacaccauucauac

SEQ ID NO: 745211 - RNA, 17 nt, Artificial Sequence
  Synthetic
cauuuguauauucauac

SEQ ID NO: 745212 - RNA, 17 nt, Artificial Sequence
  Synthetic
augugguguauucauac

SEQ ID NO: 745213 - RNA, 17 nt, Artificial Sequence
  Synthetic
auuuugaauguucauac

SEQ ID NO: 745214 - RNA, 17 nt, Artificial Sequence
  Synthetic
cauacagccuuucauac

SEQ ID NO: 745215 - RNA, 17 nt, Artificial Sequence
  Synthetic
auuuuucucuuucauac

SEQ ID NO: 745216 - RNA, 17 nt, Artificial Sequence
  Synthetic
accauagcaaaagauac

SEQ ID NO: 745217 - RNA, 17 nt, Artificial Sequence
  Synthetic
aacagggugaaagauac

SEQ ID NO: 745218 - RNA, 17 nt, Artificial Sequence
  Synthetic
ucaauuuugaaagauac

SEQ ID NO: 745219 - RNA, 17 nt, Artificial Sequence
  Synthetic
aggccagaacaagauac

SEQ ID NO: 745220 - RNA, 17 nt, Artificial Sequence
  Synthetic
accugagaggaagauac

SEQ ID NO: 745221 - RNA, 17 nt, Artificial Sequence
  Synthetic
cagacaguugaagauac

SEQ ID NO: 745222 - RNA, 17 nt, Artificial Sequence
  Synthetic
ugaggaucaacagauac

SEQ ID NO: 745223 - RNA, 17 nt, Artificial Sequence
  Synthetic
auuugagaaucagauac

SEQ ID NO: 745224 - RNA, 17 nt, Artificial Sequence
  Synthetic
uuuagagcaagagauac

SEQ ID NO: 745225 - RNA, 17 nt, Artificial Sequence
  Synthetic
uuuucuuuuagagauac

SEQ ID NO: 745226 - RNA, 17 nt, Artificial Sequence
  Synthetic
aguguguucugagauac

SEQ ID NO: 745227 - RNA, 17 nt, Artificial Sequence
  Synthetic
agagaacauugagauac

SEQ ID NO: 745228 - RNA, 17 nt, Artificial Sequence
  Synthetic
aacuuuccuauagauac

SEQ ID NO: 745229 - RNA, 17 nt, Artificial Sequence
  Synthetic
cuggauuuaguagauac

SEQ ID NO: 745230 - RNA, 17 nt, Artificial Sequence
  Synthetic
aauaccauucaggauac

SEQ ID NO: 745231 - RNA, 17 nt, Artificial Sequence
  Synthetic
auauauuuaugggauac

SEQ ID NO: 745232 - RNA, 17 nt, Artificial Sequence
  Synthetic
ccaaguagcugggauac

SEQ ID NO: 745233 - RNA, 17 nt, Artificial Sequence
  Synthetic
ccaaagugcugggauac

SEQ ID NO: 745234 - RNA, 17 nt, Artificial Sequence
  Synthetic
uuuacguucugggauac

SEQ ID NO: 745235 - RNA, 17 nt, Artificial Sequence
  Synthetic
agaagcaacauggauac

SEQ ID NO: 745236 - RNA, 17 nt, Artificial Sequence
  Synthetic
cauaaaaguguggauac

SEQ ID NO: 745237 - RNA, 17 nt, Artificial Sequence
  Synthetic
aauguauuaaaugauac

SEQ ID NO: 745238 - RNA, 17 nt, Artificial Sequence
  Synthetic
acagucaacaaugauac

SEQ ID NO: 745239 - RNA, 17 nt, Artificial Sequence
  Synthetic
aacaucugugaugauac

SEQ ID NO: 745240 - RNA, 17 nt, Artificial Sequence
  Synthetic
cccauucaguaugauac

SEQ ID NO: 745241 - RNA, 17 nt, Artificial Sequence
  Synthetic
ucuuuauguacugauac

SEQ ID NO: 745242 - RNA, 17 nt, Artificial Sequence
  Synthetic
cauauaugcucugauac

SEQ ID NO: 745243 - RNA, 17 nt, Artificial Sequence
  Synthetic
aaugccuauauugauac

SEQ ID NO: 745244 - RNA, 17 nt, Artificial Sequence
  Synthetic
ucuuauguuauugauac

SEQ ID NO: 745245 - RNA, 17 nt, Artificial Sequence
  Synthetic
uugagauguuuugauac

SEQ ID NO: 745246 - RNA, 17 nt, Artificial Sequence
  Synthetic
auuuuucuuuuugauac

SEQ ID NO: 745247 - RNA, 17 nt, Artificial Sequence
  Synthetic
ucaguuacuaaauauac

SEQ ID NO: 745248 - RNA, 17 nt, Artificial Sequence
  Synthetic
ugaaagccacaauauac

SEQ ID NO: 745249 - RNA, 17 nt, Artificial Sequence
  Synthetic
acuuuuuaagaauauac

SEQ ID NO: 745250 - RNA, 17 nt, Artificial Sequence
  Synthetic
uacugcagauaauauac

SEQ ID NO: 745251 - RNA, 17 nt, Artificial Sequence
  Synthetic
uauuucaacuaauauac

SEQ ID NO: 745252 - RNA, 17 nt, Artificial Sequence
  Synthetic
uauguauacacauauac

SEQ ID NO: 745253 - RNA, 17 nt, Artificial Sequence
  Synthetic
caccacuggccauauac

SEQ ID NO: 745254 - RNA, 17 nt, Artificial Sequence
  Synthetic
aauacaagggcauauac

SEQ ID NO: 745255 - RNA, 17 nt, Artificial Sequence
  Synthetic
uaguuucaaugauauac

SEQ ID NO: 745256 - RNA, 17 nt, Artificial Sequence
  Synthetic
uuuuuaaaaauauauac

SEQ ID NO: 745257 - RNA, 17 nt, Artificial Sequence
  Synthetic
uacggcuguauauauac

SEQ ID NO: 745258 - RNA, 17 nt, Artificial Sequence
  Synthetic
aaauuagugguauauac

SEQ ID NO: 745259 - RNA, 17 nt, Artificial Sequence
  Synthetic
aauuagucauuauauac

SEQ ID NO: 745260 - RNA, 17 nt, Artificial Sequence
  Synthetic
uuuaucaucagcuauac

SEQ ID NO: 745261 - RNA, 17 nt, Artificial Sequence
  Synthetic
aagguaacacucuauac

SEQ ID NO: 745262 - RNA, 17 nt, Artificial Sequence
  Synthetic
cccacaaaacaguauac

SEQ ID NO: 745263 - RNA, 17 nt, Artificial Sequence
  Synthetic
uaaaaacaucaguauac

SEQ ID NO: 745264 - RNA, 17 nt, Artificial Sequence
  Synthetic
uuuuguucagaguauac

SEQ ID NO: 745265 - RNA, 17 nt, Artificial Sequence
  Synthetic
caacucccaagguauac

SEQ ID NO: 745266 - RNA, 17 nt, Artificial Sequence
  Synthetic
auaaagaacugguauac

SEQ ID NO: 745267 - RNA, 17 nt, Artificial Sequence
  Synthetic
cagaaaugacauuauac

SEQ ID NO: 745268 - RNA, 17 nt, Artificial Sequence
  Synthetic
cagucauuccauuauac

SEQ ID NO: 745269 - RNA, 17 nt, Artificial Sequence
  Synthetic
cacaacuaggauuauac

SEQ ID NO: 745270 - RNA, 17 nt, Artificial Sequence
  Synthetic
augaaaaaugauuauac

SEQ ID NO: 745271 - RNA, 17 nt, Artificial Sequence
  Synthetic
uuugcagacacuuauac

SEQ ID NO: 745272 - RNA, 17 nt, Artificial Sequence
  Synthetic
cucuugccaaguuauac

SEQ ID NO: 745273 - RNA, 17 nt, Artificial Sequence
  Synthetic
uuuauuccaaguuauac

SEQ ID NO: 745274 - RNA, 17 nt, Artificial Sequence
  Synthetic
acccacagaaguuauac

SEQ ID NO: 745275 - RNA, 17 nt, Artificial Sequence
  Synthetic
auccuauuaaguuauac

SEQ ID NO: 745276 - RNA, 17 nt, Artificial Sequence
  Synthetic
uuuaaagucuguuauac

SEQ ID NO: 745277 - RNA, 17 nt, Artificial Sequence
  Synthetic
cauuuugagcuuuauac

SEQ ID NO: 745278 - RNA, 17 nt, Artificial Sequence
  Synthetic
ucauuuccauuuuauac

SEQ ID NO: 745279 - RNA, 17 nt, Artificial Sequence
  Synthetic
agcucuguauuuuauac

SEQ ID NO: 745280 - RNA, 17 nt, Artificial Sequence
  Synthetic
auauaaggcuuuuauac

SEQ ID NO: 745281 - RNA, 17 nt, Artificial Sequence
  Synthetic
cauuuuuauuuuuauac

SEQ ID NO: 745282 - RNA, 17 nt, Artificial Sequence
  Synthetic
cuuuccuuuuuuuauac

SEQ ID NO: 745283 - RNA, 17 nt, Artificial Sequence
  Synthetic
ccaaguuaucaaacuac

SEQ ID NO: 745284 - RNA, 17 nt, Artificial Sequence
  Synthetic
auguacugggaaacuac

SEQ ID NO: 745285 - RNA, 17 nt, Artificial Sequence
  Synthetic
agaaaaguggaaacuac

SEQ ID NO: 745286 - RNA, 17 nt, Artificial Sequence
  Synthetic
aguauuuaauaaacuac

SEQ ID NO: 745287 - RNA, 17 nt, Artificial Sequence
  Synthetic
uagaauucuccaacuac

SEQ ID NO: 745288 - RNA, 17 nt, Artificial Sequence
  Synthetic
uaaaguuuugcaacuac

SEQ ID NO: 745289 - RNA, 17 nt, Artificial Sequence
  Synthetic
cccacacacucaacuac

SEQ ID NO: 745290 - RNA, 17 nt, Artificial Sequence
  Synthetic
uaccaguagagaacuac

SEQ ID NO: 745291 - RNA, 17 nt, Artificial Sequence
  Synthetic
cgaguagcaggaacuac

SEQ ID NO: 745292 - RNA, 17 nt, Artificial Sequence
  Synthetic
caaguagauggaacuac

SEQ ID NO: 745293 - RNA, 17 nt, Artificial Sequence
  Synthetic
cuguuuuucugaacuac

SEQ ID NO: 745294 - RNA, 17 nt, Artificial Sequence
  Synthetic
uugguuaaucuaacuac

SEQ ID NO: 745295 - RNA, 17 nt, Artificial Sequence
  Synthetic
uguauaguuaacacuac

SEQ ID NO: 745296 - RNA, 17 nt, Artificial Sequence
  Synthetic
acaauucaauacacuac

SEQ ID NO: 745297 - RNA, 17 nt, Artificial Sequence
  Synthetic
uccagcaaucccacuac

SEQ ID NO: 745298 - RNA, 17 nt, Artificial Sequence
  Synthetic
augcucccugccacuac

SEQ ID NO: 745299 - RNA, 17 nt, Artificial Sequence
  Synthetic
uacagcaauuccacuac

SEQ ID NO: 745300 - RNA, 17 nt, Artificial Sequence
  Synthetic
aguacauuuuccacuac

SEQ ID NO: 745301 - RNA, 17 nt, Artificial Sequence
  Synthetic
uggaaguaugucacuac

SEQ ID NO: 745302 - RNA, 17 nt, Artificial Sequence
  Synthetic
ucuuguauccagacuac

SEQ ID NO: 745303 - RNA, 17 nt, Artificial Sequence
  Synthetic
caaguagcagagacuac

SEQ ID NO: 745304 - RNA, 17 nt, Artificial Sequence
  Synthetic
caaguagcugagacuac

SEQ ID NO: 745305 - RNA, 17 nt, Artificial Sequence
  Synthetic
cgagcaucuaggacuac

SEQ ID NO: 745306 - RNA, 17 nt, Artificial Sequence
  Synthetic
ugaguagaugggacuac

SEQ ID NO: 745307 - RNA, 17 nt, Artificial Sequence
  Synthetic
agagcagcugggacuac

SEQ ID NO: 745308 - RNA, 17 nt, Artificial Sequence
  Synthetic
cgagcagcugggacuac

SEQ ID NO: 745309 - RNA, 17 nt, Artificial Sequence
  Synthetic
caaauagcugggacuac

SEQ ID NO: 745310 - RNA, 17 nt, Artificial Sequence
  Synthetic
caaguagcugggacuac

SEQ ID NO: 745311 - RNA, 17 nt, Artificial Sequence
  Synthetic
agaguagcugggacuac

SEQ ID NO: 745312 - RNA, 17 nt, Artificial Sequence
  Synthetic
cgaguagcugggacuac

SEQ ID NO: 745313 - RNA, 17 nt, Artificial Sequence
  Synthetic
ugaguagcugggacuac

SEQ ID NO: 745314 - RNA, 17 nt, Artificial Sequence
  Synthetic
cccguagcugggacuac

SEQ ID NO: 745315 - RNA, 17 nt, Artificial Sequence
  Synthetic
cagguagcugggacuac

SEQ ID NO: 745316 - RNA, 17 nt, Artificial Sequence
  Synthetic
uggguagcugggacuac

SEQ ID NO: 745317 - RNA, 17 nt, Artificial Sequence
  Synthetic
cauguagcugggacuac

SEQ ID NO: 745318 - RNA, 17 nt, Artificial Sequence
  Synthetic
cguguagcugggacuac

SEQ ID NO: 745319 - RNA, 17 nt, Artificial Sequence
  Synthetic
caaguggcugggacuac

SEQ ID NO: 745320 - RNA, 17 nt, Artificial Sequence
  Synthetic
uuaguggcugggacuac

SEQ ID NO: 745321 - RNA, 17 nt, Artificial Sequence
  Synthetic
ugaguaucugggacuac

SEQ ID NO: 745322 - RNA, 17 nt, Artificial Sequence
  Synthetic
cugaguagugggacuac

SEQ ID NO: 745323 - RNA, 17 nt, Artificial Sequence
  Synthetic
ugcuccugaaugacuac

SEQ ID NO: 745324 - RNA, 17 nt, Artificial Sequence
  Synthetic
uugaaaucuaugacuac

SEQ ID NO: 745325 - RNA, 17 nt, Artificial Sequence
  Synthetic
acuguacugaauacuac

SEQ ID NO: 745326 - RNA, 17 nt, Artificial Sequence
  Synthetic
aucuaguaaacuacuac

SEQ ID NO: 745327 - RNA, 17 nt, Artificial Sequence
  Synthetic
aaacaaguaacuacuac

SEQ ID NO: 745328 - RNA, 17 nt, Artificial Sequence
  Synthetic
uccuaauucacuacuac

SEQ ID NO: 745329 - RNA, 17 nt, Artificial Sequence
  Synthetic
uagaggggaucuacuac

SEQ ID NO: 745330 - RNA, 17 nt, Artificial Sequence
  Synthetic
cgaguagcugguacuac

SEQ ID NO: 745331 - RNA, 17 nt, Artificial Sequence
  Synthetic
aggaaaggauguacuac

SEQ ID NO: 745332 - RNA, 17 nt, Artificial Sequence
  Synthetic
uacauaauauuuacuac

SEQ ID NO: 745333 - RNA, 17 nt, Artificial Sequence
  Synthetic
uaggguuaguuuacuac

SEQ ID NO: 745334 - RNA, 17 nt, Artificial Sequence
  Synthetic
uuuuccauuuuuacuac

SEQ ID NO: 745335 - RNA, 17 nt, Artificial Sequence
  Synthetic
uuuaucuuaugaccuac

SEQ ID NO: 745336 - RNA, 17 nt, Artificial Sequence
  Synthetic
aacuauagucacccuac

SEQ ID NO: 745337 - RNA, 17 nt, Artificial Sequence
  Synthetic
cgcucuuuccccccuac

SEQ ID NO: 745338 - RNA, 17 nt, Artificial Sequence
  Synthetic
aagacaugguucccuac

SEQ ID NO: 745339 - RNA, 17 nt, Artificial Sequence
  Synthetic
auaucagguuucccuac

SEQ ID NO: 745340 - RNA, 17 nt, Artificial Sequence
  Synthetic
agccuaaucuagccuac

SEQ ID NO: 745341 - RNA, 17 nt, Artificial Sequence
  Synthetic
cacacacuggggccuac

SEQ ID NO: 745342 - RNA, 17 nt, Artificial Sequence
  Synthetic
uuuugaugauggccuac

SEQ ID NO: 745343 - RNA, 17 nt, Artificial Sequence
  Synthetic
agucuagccuggccuac

SEQ ID NO: 745344 - RNA, 17 nt, Artificial Sequence
  Synthetic
agaggaagccugccuac

SEQ ID NO: 745345 - RNA, 17 nt, Artificial Sequence
  Synthetic
accugcuuagcuccuac

SEQ ID NO: 745346 - RNA, 17 nt, Artificial Sequence
  Synthetic
uugucccacucuccuac

SEQ ID NO: 745347 - RNA, 17 nt, Artificial Sequence
  Synthetic
accauccagacagcuac

SEQ ID NO: 745348 - RNA, 17 nt, Artificial Sequence
  Synthetic
cuuauaaucccagcuac

SEQ ID NO: 745349 - RNA, 17 nt, Artificial Sequence
  Synthetic
ccuguaaucccagcuac

SEQ ID NO: 745350 - RNA, 17 nt, Artificial Sequence
  Synthetic
ccuguagucccagcuac

SEQ ID NO: 745351 - RNA, 17 nt, Artificial Sequence
  Synthetic
agucauaagucagcuac

SEQ ID NO: 745352 - RNA, 17 nt, Artificial Sequence
  Synthetic
augggagccagagcuac

SEQ ID NO: 745353 - RNA, 17 nt, Artificial Sequence
  Synthetic
uguuacauuugagcuac

SEQ ID NO: 745354 - RNA, 17 nt, Artificial Sequence
  Synthetic
cucuuuguuauagcuac

SEQ ID NO: 745355 - RNA, 17 nt, Artificial Sequence
  Synthetic
uaugaggauguagcuac

SEQ ID NO: 745356 - RNA, 17 nt, Artificial Sequence
  Synthetic
cggguagcugaggcuac

SEQ ID NO: 745357 - RNA, 17 nt, Artificial Sequence
  Synthetic
caaaaugaaggggcuac

SEQ ID NO: 745358 - RNA, 17 nt, Artificial Sequence
  Synthetic
ugaguagcuggggcuac

SEQ ID NO: 745359 - RNA, 17 nt, Artificial Sequence
  Synthetic
auuugugugaaugcuac

SEQ ID NO: 745360 - RNA, 17 nt, Artificial Sequence
  Synthetic
ccaccuggauaugcuac

SEQ ID NO: 745361 - RNA, 17 nt, Artificial Sequence
  Synthetic
cauaauuacuaugcuac

SEQ ID NO: 745362 - RNA, 17 nt, Artificial Sequence
  Synthetic
augaauuuuuaugcuac

SEQ ID NO: 745363 - RNA, 17 nt, Artificial Sequence
  Synthetic
cuuauuauaugugcuac

SEQ ID NO: 745364 - RNA, 17 nt, Artificial Sequence
  Synthetic
aagaaugucauugcuac

SEQ ID NO: 745365 - RNA, 17 nt, Artificial Sequence
  Synthetic
cucaaugaaguugcuac

SEQ ID NO: 745366 - RNA, 17 nt, Artificial Sequence
  Synthetic
uuuacuugauuugcuac

SEQ ID NO: 745367 - RNA, 17 nt, Artificial Sequence
  Synthetic
auuucuggguuugcuac

SEQ ID NO: 745368 - RNA, 17 nt, Artificial Sequence
  Synthetic
aaaaaggaaaaaucuac

SEQ ID NO: 745369 - RNA, 17 nt, Artificial Sequence
  Synthetic
ucacuuuaauaaucuac

SEQ ID NO: 745370 - RNA, 17 nt, Artificial Sequence
  Synthetic
aaacacugguaaucuac

SEQ ID NO: 745371 - RNA, 17 nt, Artificial Sequence
  Synthetic
aauuaguauuaaucuac

SEQ ID NO: 745372 - RNA, 17 nt, Artificial Sequence
  Synthetic
ugaaggcagacaucuac

SEQ ID NO: 745373 - RNA, 17 nt, Artificial Sequence
  Synthetic
cuucacuucccaucuac

SEQ ID NO: 745374 - RNA, 17 nt, Artificial Sequence
  Synthetic
uaauuagugccaucuac

SEQ ID NO: 745375 - RNA, 17 nt, Artificial Sequence
  Synthetic
uuuucucugagaucuac

SEQ ID NO: 745376 - RNA, 17 nt, Artificial Sequence
  Synthetic
uuuucagucauaucuac

SEQ ID NO: 745377 - RNA, 17 nt, Artificial Sequence
  Synthetic
auuucacuauuaucuac

SEQ ID NO: 745378 - RNA, 17 nt, Artificial Sequence
  Synthetic
aucaacugcugcucuac

SEQ ID NO: 745379 - RNA, 17 nt, Artificial Sequence
  Synthetic
uaucuuugaaucucuac

SEQ ID NO: 745380 - RNA, 17 nt, Artificial Sequence
  Synthetic
aagugaaagaucucuac

SEQ ID NO: 745381 - RNA, 17 nt, Artificial Sequence
  Synthetic
acccuguaguucucuac

SEQ ID NO: 745382 - RNA, 17 nt, Artificial Sequence
  Synthetic
uuacaucuguucucuac

SEQ ID NO: 745383 - RNA, 17 nt, Artificial Sequence
  Synthetic
uugacucaaaagucuac

SEQ ID NO: 745384 - RNA, 17 nt, Artificial Sequence
  Synthetic
aaaaaauucaagucuac

SEQ ID NO: 745385 - RNA, 17 nt, Artificial Sequence
  Synthetic
uugacaguagagucuac

SEQ ID NO: 745386 - RNA, 17 nt, Artificial Sequence
  Synthetic
caaguagccaggucuac

SEQ ID NO: 745387 - RNA, 17 nt, Artificial Sequence
  Synthetic
aaagucucuuggucuac

SEQ ID NO: 745388 - RNA, 17 nt, Artificial Sequence
  Synthetic
uaguaaauuaugucuac

SEQ ID NO: 745389 - RNA, 17 nt, Artificial Sequence
  Synthetic
ugacugguuuugucuac

SEQ ID NO: 745390 - RNA, 17 nt, Artificial Sequence
  Synthetic
uuuccaaauaauucuac

SEQ ID NO: 745391 - RNA, 17 nt, Artificial Sequence
  Synthetic
aaacaaagggauucuac

SEQ ID NO: 745392 - RNA, 17 nt, Artificial Sequence
  Synthetic
uuuugaacuuauucuac

SEQ ID NO: 745393 - RNA, 17 nt, Artificial Sequence
  Synthetic
uugacucaaccuucuac

SEQ ID NO: 745394 - RNA, 17 nt, Artificial Sequence
  Synthetic
uggccagaggcuucuac

SEQ ID NO: 745395 - RNA, 17 nt, Artificial Sequence
  Synthetic
cuguaucuugcuucuac

SEQ ID NO: 745396 - RNA, 17 nt, Artificial Sequence
  Synthetic
caaguuuacucuucuac

SEQ ID NO: 745397 - RNA, 17 nt, Artificial Sequence
  Synthetic
ucucuauucuguucuac

SEQ ID NO: 745398 - RNA, 17 nt, Artificial Sequence
  Synthetic
ucacauuuuauuucuac

SEQ ID NO: 745399 - RNA, 17 nt, Artificial Sequence
  Synthetic
auuguuauuguuucuac

SEQ ID NO: 745400 - RNA, 17 nt, Artificial Sequence
  Synthetic
aguagggacaaaaguac

SEQ ID NO: 745401 - RNA, 17 nt, Artificial Sequence
  Synthetic
caguucaguaaaaguac

SEQ ID NO: 745402 - RNA, 17 nt, Artificial Sequence
  Synthetic
ucagccucccaaaguac

SEQ ID NO: 745403 - RNA, 17 nt, Artificial Sequence
  Synthetic
aacacuccagaaaguac

SEQ ID NO: 745404 - RNA, 17 nt, Artificial Sequence
  Synthetic
agguaacacacaaguac

SEQ ID NO: 745405 - RNA, 17 nt, Artificial Sequence
  Synthetic
auucaggacacaaguac

SEQ ID NO: 745406 - RNA, 17 nt, Artificial Sequence
  Synthetic
caaagagaugcaaguac

SEQ ID NO: 745407 - RNA, 17 nt, Artificial Sequence
  Synthetic
cuuaaaauaugaaguac

SEQ ID NO: 745408 - RNA, 17 nt, Artificial Sequence
  Synthetic
agagcucuuugaaguac

SEQ ID NO: 745409 - RNA, 17 nt, Artificial Sequence
  Synthetic
aaauugacaauaaguac

SEQ ID NO: 745410 - RNA, 17 nt, Artificial Sequence
  Synthetic
uaauaaaauauaaguac

SEQ ID NO: 745411 - RNA, 17 nt, Artificial Sequence
  Synthetic
auauguacuuuaaguac

SEQ ID NO: 745412 - RNA, 17 nt, Artificial Sequence
  Synthetic
auuuaagugcacaguac

SEQ ID NO: 745413 - RNA, 17 nt, Artificial Sequence
  Synthetic
aauccuuaauacaguac

SEQ ID NO: 745414 - RNA, 17 nt, Artificial Sequence
  Synthetic
uaauuaauauacaguac

SEQ ID NO: 745415 - RNA, 17 nt, Artificial Sequence
  Synthetic
uuuuagauauacaguac

SEQ ID NO: 745416 - RNA, 17 nt, Artificial Sequence
  Synthetic
uguucggcaagcaguac

SEQ ID NO: 745417 - RNA, 17 nt, Artificial Sequence
  Synthetic
aaagucacaugcaguac

SEQ ID NO: 745418 - RNA, 17 nt, Artificial Sequence
  Synthetic
uauauuaucugcaguac

SEQ ID NO: 745419 - RNA, 17 nt, Artificial Sequence
  Synthetic
uucauaauauucaguac

SEQ ID NO: 745420 - RNA, 17 nt, Artificial Sequence
  Synthetic
uacaguuuucagaguac

SEQ ID NO: 745421 - RNA, 17 nt, Artificial Sequence
  Synthetic
ugaaauacugagaguac

SEQ ID NO: 745422 - RNA, 17 nt, Artificial Sequence
  Synthetic
uucuaggaaaggaguac

SEQ ID NO: 745423 - RNA, 17 nt, Artificial Sequence
  Synthetic
ugcagagucaggaguac

SEQ ID NO: 745424 - RNA, 17 nt, Artificial Sequence
  Synthetic
aggcaaggccggaguac

SEQ ID NO: 745425 - RNA, 17 nt, Artificial Sequence
  Synthetic
caaagugcugggaguac

SEQ ID NO: 745426 - RNA, 17 nt, Artificial Sequence
  Synthetic
cuuuuuauauugaguac

SEQ ID NO: 745427 - RNA, 17 nt, Artificial Sequence
  Synthetic
uuuacaacucauaguac

SEQ ID NO: 745428 - RNA, 17 nt, Artificial Sequence
  Synthetic
aacgucuaguauaguac

SEQ ID NO: 745429 - RNA, 17 nt, Artificial Sequence
  Synthetic
ucaacuguuuauaguac

SEQ ID NO: 745430 - RNA, 17 nt, Artificial Sequence
  Synthetic
ccacccuucccuaguac

SEQ ID NO: 745431 - RNA, 17 nt, Artificial Sequence
  Synthetic
acugucuucucuaguac

SEQ ID NO: 745432 - RNA, 17 nt, Artificial Sequence
  Synthetic
uaaauaauaaguaguac

SEQ ID NO: 745433 - RNA, 17 nt, Artificial Sequence
  Synthetic
ugcagggguuguaguac

SEQ ID NO: 745434 - RNA, 17 nt, Artificial Sequence
  Synthetic
cuuguuuaacuuaguac

SEQ ID NO: 745435 - RNA, 17 nt, Artificial Sequence
  Synthetic
aaguguaauauacguac

SEQ ID NO: 745436 - RNA, 17 nt, Artificial Sequence
  Synthetic
ccagguaguauacguac

SEQ ID NO: 745437 - RNA, 17 nt, Artificial Sequence
  Synthetic
uucuguaagccagguac

SEQ ID NO: 745438 - RNA, 17 nt, Artificial Sequence
  Synthetic
agagauggagcagguac

SEQ ID NO: 745439 - RNA, 17 nt, Artificial Sequence
  Synthetic
uaaaacaccauagguac

SEQ ID NO: 745440 - RNA, 17 nt, Artificial Sequence
  Synthetic
auuccucuguuagguac

SEQ ID NO: 745441 - RNA, 17 nt, Artificial Sequence
  Synthetic
auggggggaaaggguac

SEQ ID NO: 745442 - RNA, 17 nt, Artificial Sequence
  Synthetic
caaaguugacaggguac

SEQ ID NO: 745443 - RNA, 17 nt, Artificial Sequence
  Synthetic
ugccagugcugggguac

SEQ ID NO: 745444 - RNA, 17 nt, Artificial Sequence
  Synthetic
aacuguacguuggguac

SEQ ID NO: 745445 - RNA, 17 nt, Artificial Sequence
  Synthetic
cuccuuuaaaaugguac

SEQ ID NO: 745446 - RNA, 17 nt, Artificial Sequence
  Synthetic
ccaaaacaacaugguac

SEQ ID NO: 745447 - RNA, 17 nt, Artificial Sequence
  Synthetic
aaagacaagcaugguac

SEQ ID NO: 745448 - RNA, 17 nt, Artificial Sequence
  Synthetic
ccaaaacagcaugguac

SEQ ID NO: 745449 - RNA, 17 nt, Artificial Sequence
  Synthetic
aaaauuuaauaugguac

SEQ ID NO: 745450 - RNA, 17 nt, Artificial Sequence
  Synthetic
ucccucuuaccugguac

SEQ ID NO: 745451 - RNA, 17 nt, Artificial Sequence
  Synthetic
uuugcagcggcugguac

SEQ ID NO: 745452 - RNA, 17 nt, Artificial Sequence
  Synthetic
cucucaguggcugguac

SEQ ID NO: 745453 - RNA, 17 nt, Artificial Sequence
  Synthetic
aaucuuuuugcugguac

SEQ ID NO: 745454 - RNA, 17 nt, Artificial Sequence
  Synthetic
aggcaacggauugguac

SEQ ID NO: 745455 - RNA, 17 nt, Artificial Sequence
  Synthetic
uagaagauaaaauguac

SEQ ID NO: 745456 - RNA, 17 nt, Artificial Sequence
  Synthetic
augaaauauaaauguac

SEQ ID NO: 745457 - RNA, 17 nt, Artificial Sequence
  Synthetic
acacgugcagaauguac

SEQ ID NO: 745458 - RNA, 17 nt, Artificial Sequence
  Synthetic
acaugugcagaauguac

SEQ ID NO: 745459 - RNA, 17 nt, Artificial Sequence
  Synthetic
ucuuccuaaacauguac

SEQ ID NO: 745460 - RNA, 17 nt, Artificial Sequence
  Synthetic
uguaauuuaacauguac

SEQ ID NO: 745461 - RNA, 17 nt, Artificial Sequence
  Synthetic
aucuaucauacauguac

SEQ ID NO: 745462 - RNA, 17 nt, Artificial Sequence
  Synthetic
acagaggguacauguac

SEQ ID NO: 745463 - RNA, 17 nt, Artificial Sequence
  Synthetic
auuuaggaagcauguac

SEQ ID NO: 745464 - RNA, 17 nt, Artificial Sequence
  Synthetic
aaugacuccucauguac

SEQ ID NO: 745465 - RNA, 17 nt, Artificial Sequence
  Synthetic
cuguuacagugauguac

SEQ ID NO: 745466 - RNA, 17 nt, Artificial Sequence
  Synthetic
cauguauguauauguac

SEQ ID NO: 745467 - RNA, 17 nt, Artificial Sequence
  Synthetic
uuaauuccaguauguac

SEQ ID NO: 745468 - RNA, 17 nt, Artificial Sequence
  Synthetic
acacaaaauuuauguac

SEQ ID NO: 745469 - RNA, 17 nt, Artificial Sequence
  Synthetic
auagaauguuuauguac

SEQ ID NO: 745470 - RNA, 17 nt, Artificial Sequence
  Synthetic
ucugaauuuuuauguac

SEQ ID NO: 745471 - RNA, 17 nt, Artificial Sequence
  Synthetic
auugguagacacuguac

SEQ ID NO: 745472 - RNA, 17 nt, Artificial Sequence
  Synthetic
auugcaagagacuguac

SEQ ID NO: 745473 - RNA, 17 nt, Artificial Sequence
  Synthetic
aggucacugaccuguac

SEQ ID NO: 745474 - RNA, 17 nt, Artificial Sequence
  Synthetic
uuuaucaucagcuguac

SEQ ID NO: 745475 - RNA, 17 nt, Artificial Sequence
  Synthetic
uaucugacaggcuguac

SEQ ID NO: 745476 - RNA, 17 nt, Artificial Sequence
  Synthetic
aguucugcaggcuguac

SEQ ID NO: 745477 - RNA, 17 nt, Artificial Sequence
  Synthetic
acagucacaugcuguac

SEQ ID NO: 745478 - RNA, 17 nt, Artificial Sequence
  Synthetic
uaauucugcugcuguac

SEQ ID NO: 745479 - RNA, 17 nt, Artificial Sequence
  Synthetic
ucuucuccaaucuguac

SEQ ID NO: 745480 - RNA, 17 nt, Artificial Sequence
  Synthetic
acaucucuccucuguac

SEQ ID NO: 745481 - RNA, 17 nt, Artificial Sequence
  Synthetic
aauugcagauucuguac

SEQ ID NO: 745482 - RNA, 17 nt, Artificial Sequence
  Synthetic
uccugccaacaguguac

SEQ ID NO: 745483 - RNA, 17 nt, Artificial Sequence
  Synthetic
uaagucaaauaguguac

SEQ ID NO: 745484 - RNA, 17 nt, Artificial Sequence
  Synthetic
agagguacauaguguac

SEQ ID NO: 745485 - RNA, 17 nt, Artificial Sequence
  Synthetic
aaaucuuugagguguac

SEQ ID NO: 745486 - RNA, 17 nt, Artificial Sequence
  Synthetic
uuauccuacauguguac

SEQ ID NO: 745487 - RNA, 17 nt, Artificial Sequence
  Synthetic
uuaaccuugcuguguac

SEQ ID NO: 745488 - RNA, 17 nt, Artificial Sequence
  Synthetic
caauccacuguguguac

SEQ ID NO: 745489 - RNA, 17 nt, Artificial Sequence
  Synthetic
agccuaagaaauuguac

SEQ ID NO: 745490 - RNA, 17 nt, Artificial Sequence
  Synthetic
augagauguaauuguac

SEQ ID NO: 745491 - RNA, 17 nt, Artificial Sequence
  Synthetic
aagucuuugcauuguac

SEQ ID NO: 745492 - RNA, 17 nt, Artificial Sequence
  Synthetic
agaugaugagauuguac

SEQ ID NO: 745493 - RNA, 17 nt, Artificial Sequence
  Synthetic
ucuuccucauauuguac

SEQ ID NO: 745494 - RNA, 17 nt, Artificial Sequence
  Synthetic
ucuauucaguauuguac

SEQ ID NO: 745495 - RNA, 17 nt, Artificial Sequence
  Synthetic
caacugcaaaguuguac

SEQ ID NO: 745496 - RNA, 17 nt, Artificial Sequence
  Synthetic
cucucaguaaguuguac

SEQ ID NO: 745497 - RNA, 17 nt, Artificial Sequence
  Synthetic
accacaugcaguuguac

SEQ ID NO: 745498 - RNA, 17 nt, Artificial Sequence
  Synthetic
cuuugcagagguuguac

SEQ ID NO: 745499 - RNA, 17 nt, Artificial Sequence
  Synthetic
acaaaccagguuuguac

SEQ ID NO: 745500 - RNA, 17 nt, Artificial Sequence
  Synthetic
uucggccaguuuuguac

SEQ ID NO: 745501 - RNA, 17 nt, Artificial Sequence
  Synthetic
auaaaauauuuuuguac

SEQ ID NO: 745502 - RNA, 17 nt, Artificial Sequence
  Synthetic
uaugaauauuuuuguac

SEQ ID NO: 745503 - RNA, 17 nt, Artificial Sequence
  Synthetic
agcaucuuagaaauuac

SEQ ID NO: 745504 - RNA, 17 nt, Artificial Sequence
  Synthetic
uaccaaguaccaauuac

SEQ ID NO: 745505 - RNA, 17 nt, Artificial Sequence
  Synthetic
caacacaugggaauuac

SEQ ID NO: 745506 - RNA, 17 nt, Artificial Sequence
  Synthetic
caaagcgcuggaauuac

SEQ ID NO: 745507 - RNA, 17 nt, Artificial Sequence
  Synthetic
caaagugcuggaauuac

SEQ ID NO: 745508 - RNA, 17 nt, Artificial Sequence
  Synthetic
uaaggugcuggaauuac

SEQ ID NO: 745509 - RNA, 17 nt, Artificial Sequence
  Synthetic
cagagucccugaauuac

SEQ ID NO: 745510 - RNA, 17 nt, Artificial Sequence
  Synthetic
ucuaggugcugaauuac

SEQ ID NO: 745511 - RNA, 17 nt, Artificial Sequence
  Synthetic
auggcaaauugaauuac

SEQ ID NO: 745512 - RNA, 17 nt, Artificial Sequence
  Synthetic
ccagcuccaauaauuac

SEQ ID NO: 745513 - RNA, 17 nt, Artificial Sequence
  Synthetic
ugcuguuccauaauuac

SEQ ID NO: 745514 - RNA, 17 nt, Artificial Sequence
  Synthetic
accaacaucauaauuac

SEQ ID NO: 745515 - RNA, 17 nt, Artificial Sequence
  Synthetic
uugauauagcuaauuac

SEQ ID NO: 745516 - RNA, 17 nt, Artificial Sequence
  Synthetic
ucuccaaacuuaauuac

SEQ ID NO: 745517 - RNA, 17 nt, Artificial Sequence
  Synthetic
cauagagcaaacauuac

SEQ ID NO: 745518 - RNA, 17 nt, Artificial Sequence
  Synthetic
uggaauuuucacauuac

SEQ ID NO: 745519 - RNA, 17 nt, Artificial Sequence
  Synthetic
uucacaguaaccauuac

SEQ ID NO: 745520 - RNA, 17 nt, Artificial Sequence
  Synthetic
acaaaauuaaccauuac

SEQ ID NO: 745521 - RNA, 17 nt, Artificial Sequence
  Synthetic
cccagcaaucccauuac

SEQ ID NO: 745522 - RNA, 17 nt, Artificial Sequence
  Synthetic
uccagcaaucccauuac

SEQ ID NO: 745523 - RNA, 17 nt, Artificial Sequence
  Synthetic
cccagccaucccauuac

SEQ ID NO: 745524 - RNA, 17 nt, Artificial Sequence
  Synthetic
cucagccaucccauuac

SEQ ID NO: 745525 - RNA, 17 nt, Artificial Sequence
  Synthetic
cccggccaucccauuac

SEQ ID NO: 745526 - RNA, 17 nt, Artificial Sequence
  Synthetic
ccuagugaucccauuac

SEQ ID NO: 745527 - RNA, 17 nt, Artificial Sequence
  Synthetic
cccagcuaucccauuac

SEQ ID NO: 745528 - RNA, 17 nt, Artificial Sequence
  Synthetic
cccagcaaugccauuac

SEQ ID NO: 745529 - RNA, 17 nt, Artificial Sequence
  Synthetic
ucuguucaugccauuac

SEQ ID NO: 745530 - RNA, 17 nt, Artificial Sequence
  Synthetic
ucagaagauuccauuac

SEQ ID NO: 745531 - RNA, 17 nt, Artificial Sequence
  Synthetic
cauugacucagcauuac

SEQ ID NO: 745532 - RNA, 17 nt, Artificial Sequence
  Synthetic
uagaaagaaggcauuac

SEQ ID NO: 745533 - RNA, 17 nt, Artificial Sequence
  Synthetic
uuucaugcaggcauuac

SEQ ID NO: 745534 - RNA, 17 nt, Artificial Sequence
  Synthetic
cgaguagcuggcauuac

SEQ ID NO: 745535 - RNA, 17 nt, Artificial Sequence
  Synthetic
ugacugugacucauuac

SEQ ID NO: 745536 - RNA, 17 nt, Artificial Sequence
  Synthetic
uaaacaguagucauuac

SEQ ID NO: 745537 - RNA, 17 nt, Artificial Sequence
  Synthetic
caaaaugccgagauuac

SEQ ID NO: 745538 - RNA, 17 nt, Artificial Sequence
  Synthetic
caaguagcugagauuac

SEQ ID NO: 745539 - RNA, 17 nt, Artificial Sequence
  Synthetic
agaguagcugagauuac

SEQ ID NO: 745540 - RNA, 17 nt, Artificial Sequence
  Synthetic
cgaguagcugagauuac

SEQ ID NO: 745541 - RNA, 17 nt, Artificial Sequence
  Synthetic
caaaacgcugagauuac

SEQ ID NO: 745542 - RNA, 17 nt, Artificial Sequence
  Synthetic
ugaagcgcugagauuac

SEQ ID NO: 745543 - RNA, 17 nt, Artificial Sequence
  Synthetic
caaagugcugagauuac

SEQ ID NO: 745544 - RNA, 17 nt, Artificial Sequence
  Synthetic
caaaguguugagauuac

SEQ ID NO: 745545 - RNA, 17 nt, Artificial Sequence
  Synthetic
agcugagauuagauuac

SEQ ID NO: 745546 - RNA, 17 nt, Artificial Sequence
  Synthetic
aauuugcuuuagauuac

SEQ ID NO: 745547 - RNA, 17 nt, Artificial Sequence
  Synthetic
ccaagugacacgauuac

SEQ ID NO: 745548 - RNA, 17 nt, Artificial Sequence
  Synthetic
caaagugcugcgauuac

SEQ ID NO: 745549 - RNA, 17 nt, Artificial Sequence
  Synthetic
caaagcacuaggauuac

SEQ ID NO: 745550 - RNA, 17 nt, Artificial Sequence
  Synthetic
caaaguacuaggauuac

SEQ ID NO: 745551 - RNA, 17 nt, Artificial Sequence
  Synthetic
caaguagcuaggauuac

SEQ ID NO: 745552 - RNA, 17 nt, Artificial Sequence
  Synthetic
caaagugcuaggauuac

SEQ ID NO: 745553 - RNA, 17 nt, Artificial Sequence
  Synthetic
caaaguguuaggauuac

SEQ ID NO: 745554 - RNA, 17 nt, Artificial Sequence
  Synthetic
caaagcacagggauuac

SEQ ID NO: 745555 - RNA, 17 nt, Artificial Sequence
  Synthetic
caaagugcggggauuac

SEQ ID NO: 745556 - RNA, 17 nt, Artificial Sequence
  Synthetic
ugacacauggggauuac

SEQ ID NO: 745557 - RNA, 17 nt, Artificial Sequence
  Synthetic
cgaguaacugggauuac

SEQ ID NO: 745558 - RNA, 17 nt, Artificial Sequence
  Synthetic
caaaguacugggauuac

SEQ ID NO: 745559 - RNA, 17 nt, Artificial Sequence
  Synthetic
cagagaccugggauuac

SEQ ID NO: 745560 - RNA, 17 nt, Artificial Sequence
  Synthetic
caaguaccugggauuac

SEQ ID NO: 745561 - RNA, 17 nt, Artificial Sequence
  Synthetic
caaaguccugggauuac

SEQ ID NO: 745562 - RNA, 17 nt, Artificial Sequence
  Synthetic
caaagagcugggauuac

SEQ ID NO: 745563 - RNA, 17 nt, Artificial Sequence
  Synthetic
ugaauagcugggauuac

SEQ ID NO: 745564 - RNA, 17 nt, Artificial Sequence
  Synthetic
caaguagcugggauuac

SEQ ID NO: 745565 - RNA, 17 nt, Artificial Sequence
  Synthetic
uaaguagcugggauuac

SEQ ID NO: 745566 - RNA, 17 nt, Artificial Sequence
  Synthetic
cgaguagcugggauuac

SEQ ID NO: 745567 - RNA, 17 nt, Artificial Sequence
  Synthetic
ugaguagcugggauuac

SEQ ID NO: 745568 - RNA, 17 nt, Artificial Sequence
  Synthetic
cuaguagcugggauuac

SEQ ID NO: 745569 - RNA, 17 nt, Artificial Sequence
  Synthetic
ccgguagcugggauuac

SEQ ID NO: 745570 - RNA, 17 nt, Artificial Sequence
  Synthetic
caaguggcugggauuac

SEQ ID NO: 745571 - RNA, 17 nt, Artificial Sequence
  Synthetic
agaguggcugggauuac

SEQ ID NO: 745572 - RNA, 17 nt, Artificial Sequence
  Synthetic
cgaguggcugggauuac

SEQ ID NO: 745573 - RNA, 17 nt, Artificial Sequence
  Synthetic
aaaaaugcugggauuac

SEQ ID NO: 745574 - RNA, 17 nt, Artificial Sequence
  Synthetic
caaagugcugggauuac

SEQ ID NO: 745575 - RNA, 17 nt, Artificial Sequence
  Synthetic
ccaagugcugggauuac

SEQ ID NO: 745576 - RNA, 17 nt, Artificial Sequence
  Synthetic
cgaagugcugggauuac

SEQ ID NO: 745577 - RNA, 17 nt, Artificial Sequence
  Synthetic
cuaagugcugggauuac

SEQ ID NO: 745578 - RNA, 17 nt, Artificial Sequence
  Synthetic
cacagugcugggauuac

SEQ ID NO: 745579 - RNA, 17 nt, Artificial Sequence
  Synthetic
cagagugcugggauuac

SEQ ID NO: 745580 - RNA, 17 nt, Artificial Sequence
  Synthetic
cauagugcugggauuac

SEQ ID NO: 745581 - RNA, 17 nt, Artificial Sequence
  Synthetic
caaauugcugggauuac

SEQ ID NO: 745582 - RNA, 17 nt, Artificial Sequence
  Synthetic
agaguugcugggauuac

SEQ ID NO: 745583 - RNA, 17 nt, Artificial Sequence
  Synthetic
caaguaucugggauuac

SEQ ID NO: 745584 - RNA, 17 nt, Artificial Sequence
  Synthetic
caaaguggugggauuac

SEQ ID NO: 745585 - RNA, 17 nt, Artificial Sequence
  Synthetic
caaauccuugggauuac

SEQ ID NO: 745586 - RNA, 17 nt, Artificial Sequence
  Synthetic
cgaguaguugggauuac

SEQ ID NO: 745587 - RNA, 17 nt, Artificial Sequence
  Synthetic
caaaguguugggauuac

SEQ ID NO: 745588 - RNA, 17 nt, Artificial Sequence
  Synthetic
caaagcaccuggauuac

SEQ ID NO: 745589 - RNA, 17 nt, Artificial Sequence
  Synthetic
caaagugcuuggauuac

SEQ ID NO: 745590 - RNA, 17 nt, Artificial Sequence
  Synthetic
uaaacagccaugauuac

SEQ ID NO: 745591 - RNA, 17 nt, Artificial Sequence
  Synthetic
agaguacucaugauuac

SEQ ID NO: 745592 - RNA, 17 nt, Artificial Sequence
  Synthetic
agggaugccuugauuac

SEQ ID NO: 745593 - RNA, 17 nt, Artificial Sequence
  Synthetic
ucuuuuuaaaauauuac

SEQ ID NO: 745594 - RNA, 17 nt, Artificial Sequence
  Synthetic
acaacccagaauauuac

SEQ ID NO: 745595 - RNA, 17 nt, Artificial Sequence
  Synthetic
caaauugcugauauuac

SEQ ID NO: 745596 - RNA, 17 nt, Artificial Sequence
  Synthetic
ucaaguagugauauuac

SEQ ID NO: 745597 - RNA, 17 nt, Artificial Sequence
  Synthetic
cuggagaaauauauuac

SEQ ID NO: 745598 - RNA, 17 nt, Artificial Sequence
  Synthetic
auaggccuauauauuac

SEQ ID NO: 745599 - RNA, 17 nt, Artificial Sequence
  Synthetic
ucauaacagacuauuac

SEQ ID NO: 745600 - RNA, 17 nt, Artificial Sequence
  Synthetic
uaucaaacaccuauuac

SEQ ID NO: 745601 - RNA, 17 nt, Artificial Sequence
  Synthetic
ucugaugugaguauuac

SEQ ID NO: 745602 - RNA, 17 nt, Artificial Sequence
  Synthetic
aagauuucuaguauuac

SEQ ID NO: 745603 - RNA, 17 nt, Artificial Sequence
  Synthetic
caaagugcugguauuac

SEQ ID NO: 745604 - RNA, 17 nt, Artificial Sequence
  Synthetic
agggaaagauguauuac

SEQ ID NO: 745605 - RNA, 17 nt, Artificial Sequence
  Synthetic
agauuuauauguauuac

SEQ ID NO: 745606 - RNA, 17 nt, Artificial Sequence
  Synthetic
acaaauuauauuauuac

SEQ ID NO: 745607 - RNA, 17 nt, Artificial Sequence
  Synthetic
uuuuuaauuauuauuac

SEQ ID NO: 745608 - RNA, 17 nt, Artificial Sequence
  Synthetic
aagcucuuacuuauuac

SEQ ID NO: 745609 - RNA, 17 nt, Artificial Sequence
  Synthetic
agugaaaugaaacuuac

SEQ ID NO: 745610 - RNA, 17 nt, Artificial Sequence
  Synthetic
auuuuccauaaacuuac

SEQ ID NO: 745611 - RNA, 17 nt, Artificial Sequence
  Synthetic
uaagaauucuaacuuac

SEQ ID NO: 745612 - RNA, 17 nt, Artificial Sequence
  Synthetic
uuggaauuuuaacuuac

SEQ ID NO: 745613 - RNA, 17 nt, Artificial Sequence
  Synthetic
ccagugcugacacuuac

SEQ ID NO: 745614 - RNA, 17 nt, Artificial Sequence
  Synthetic
aauacauauacacuuac

SEQ ID NO: 745615 - RNA, 17 nt, Artificial Sequence
  Synthetic
ugauaacauauacuuac

SEQ ID NO: 745616 - RNA, 17 nt, Artificial Sequence
  Synthetic
cuuguucugcuacuuac

SEQ ID NO: 745617 - RNA, 17 nt, Artificial Sequence
  Synthetic
auuaagaaaguacuuac

SEQ ID NO: 745618 - RNA, 17 nt, Artificial Sequence
  Synthetic
uuaagucaguuacuuac

SEQ ID NO: 745619 - RNA, 17 nt, Artificial Sequence
  Synthetic
ccacauuauuuacuuac

SEQ ID NO: 745620 - RNA, 17 nt, Artificial Sequence
  Synthetic
ugugaaaauugccuuac

SEQ ID NO: 745621 - RNA, 17 nt, Artificial Sequence
  Synthetic
ccuuccuaaguccuuac

SEQ ID NO: 745622 - RNA, 17 nt, Artificial Sequence
  Synthetic
caugaagccuuccuuac

SEQ ID NO: 745623 - RNA, 17 nt, Artificial Sequence
  Synthetic
caauuguccaagcuuac

SEQ ID NO: 745624 - RNA, 17 nt, Artificial Sequence
  Synthetic
aaggucaaacagcuuac

SEQ ID NO: 745625 - RNA, 17 nt, Artificial Sequence
  Synthetic
acucacuaauggcuuac

SEQ ID NO: 745626 - RNA, 17 nt, Artificial Sequence
  Synthetic
acuaaagcagugcuuac

SEQ ID NO: 745627 - RNA, 17 nt, Artificial Sequence
  Synthetic
aagauuugaaaucuuac

SEQ ID NO: 745628 - RNA, 17 nt, Artificial Sequence
  Synthetic
ccuuuuugguaucuuac

SEQ ID NO: 745629 - RNA, 17 nt, Artificial Sequence
  Synthetic
uuaccuauuuaucuuac

SEQ ID NO: 745630 - RNA, 17 nt, Artificial Sequence
  Synthetic
aucuacuugacucuuac

SEQ ID NO: 745631 - RNA, 17 nt, Artificial Sequence
  Synthetic
cacuuuguggcucuuac

SEQ ID NO: 745632 - RNA, 17 nt, Artificial Sequence
  Synthetic
aaacuuggaagucuuac

SEQ ID NO: 745633 - RNA, 17 nt, Artificial Sequence
  Synthetic
uuuccugcccgucuuac

SEQ ID NO: 745634 - RNA, 17 nt, Artificial Sequence
  Synthetic
aucuggaaaggucuuac

SEQ ID NO: 745635 - RNA, 17 nt, Artificial Sequence
  Synthetic
ugcucugguugucuuac

SEQ ID NO: 745636 - RNA, 17 nt, Artificial Sequence
  Synthetic
uaagcuguaauucuuac

SEQ ID NO: 745637 - RNA, 17 nt, Artificial Sequence
  Synthetic
uaauggccuauucuuac

SEQ ID NO: 745638 - RNA, 17 nt, Artificial Sequence
  Synthetic
aauuuuuguauucuuac

SEQ ID NO: 745639 - RNA, 17 nt, Artificial Sequence
  Synthetic
uucucuaacuuucuuac

SEQ ID NO: 745640 - RNA, 17 nt, Artificial Sequence
  Synthetic
uuuccacgcuuucuuac

SEQ ID NO: 745641 - RNA, 17 nt, Artificial Sequence
  Synthetic
accacucuaaaaguuac

SEQ ID NO: 745642 - RNA, 17 nt, Artificial Sequence
  Synthetic
accugcaccaaaguuac

SEQ ID NO: 745643 - RNA, 17 nt, Artificial Sequence
  Synthetic
accagugaacaaguuac

SEQ ID NO: 745644 - RNA, 17 nt, Artificial Sequence
  Synthetic
uguggcagucaaguuac

SEQ ID NO: 745645 - RNA, 17 nt, Artificial Sequence
  Synthetic
cuauuagaagaaguuac

SEQ ID NO: 745646 - RNA, 17 nt, Artificial Sequence
  Synthetic
agauuucaugaaguuac

SEQ ID NO: 745647 - RNA, 17 nt, Artificial Sequence
  Synthetic
aauauuaaaacaguuac

SEQ ID NO: 745648 - RNA, 17 nt, Artificial Sequence
  Synthetic
auaaucacaacaguuac

SEQ ID NO: 745649 - RNA, 17 nt, Artificial Sequence
  Synthetic
cacuggaugacaguuac

SEQ ID NO: 745650 - RNA, 17 nt, Artificial Sequence
  Synthetic
uugucuguuucaguuac

SEQ ID NO: 745651 - RNA, 17 nt, Artificial Sequence
  Synthetic
ugucacugcugaguuac

SEQ ID NO: 745652 - RNA, 17 nt, Artificial Sequence
  Synthetic
uuaaauuauauaguuac

SEQ ID NO: 745653 - RNA, 17 nt, Artificial Sequence
  Synthetic
augggucuuuuaguuac

SEQ ID NO: 745654 - RNA, 17 nt, Artificial Sequence
  Synthetic
aaugggggaaagguuac

SEQ ID NO: 745655 - RNA, 17 nt, Artificial Sequence
  Synthetic
aaaugcauugagguuac

SEQ ID NO: 745656 - RNA, 17 nt, Artificial Sequence
  Synthetic
cuaagcgcuaggguuac

SEQ ID NO: 745657 - RNA, 17 nt, Artificial Sequence
  Synthetic
caaaauaaagggguuac

SEQ ID NO: 745658 - RNA, 17 nt, Artificial Sequence
  Synthetic
ugaguagcugggguuac

SEQ ID NO: 745659 - RNA, 17 nt, Artificial Sequence
  Synthetic
caaagugcugggguuac

SEQ ID NO: 745660 - RNA, 17 nt, Artificial Sequence
  Synthetic
acuccagccuggguuac

SEQ ID NO: 745661 - RNA, 17 nt, Artificial Sequence
  Synthetic
auugguuaguugguuac

SEQ ID NO: 745662 - RNA, 17 nt, Artificial Sequence
  Synthetic
uuugauaguuugguuac

SEQ ID NO: 745663 - RNA, 17 nt, Artificial Sequence
  Synthetic
aauggucuuuugguuac

SEQ ID NO: 745664 - RNA, 17 nt, Artificial Sequence
  Synthetic
uuaaauccaaauguuac

SEQ ID NO: 745665 - RNA, 17 nt, Artificial Sequence
  Synthetic
uugcacugcaauguuac

SEQ ID NO: 745666 - RNA, 17 nt, Artificial Sequence
  Synthetic
ucugaugcugauguuac

SEQ ID NO: 745667 - RNA, 17 nt, Artificial Sequence
  Synthetic
acuguugcauauguuac

SEQ ID NO: 745668 - RNA, 17 nt, Artificial Sequence
  Synthetic
uauaucacuuauguuac

SEQ ID NO: 745669 - RNA, 17 nt, Artificial Sequence
  Synthetic
cucucuccuccuguuac

SEQ ID NO: 745670 - RNA, 17 nt, Artificial Sequence
  Synthetic
cuuuccuuagcuguuac

SEQ ID NO: 745671 - RNA, 17 nt, Artificial Sequence
  Synthetic
aauugcaggaguguuac

SEQ ID NO: 745672 - RNA, 17 nt, Artificial Sequence
  Synthetic
uacuaaguagguguuac

SEQ ID NO: 745673 - RNA, 17 nt, Artificial Sequence
  Synthetic
uaauuauaauguguuac

SEQ ID NO: 745674 - RNA, 17 nt, Artificial Sequence
  Synthetic
aaaaucugucuuguuac

SEQ ID NO: 745675 - RNA, 17 nt, Artificial Sequence
  Synthetic
aaauugugaguuguuac

SEQ ID NO: 745676 - RNA, 17 nt, Artificial Sequence
  Synthetic
uauacagcuguuguuac

SEQ ID NO: 745677 - RNA, 17 nt, Artificial Sequence
  Synthetic
uuuauuauuguuguuac

SEQ ID NO: 745678 - RNA, 17 nt, Artificial Sequence
  Synthetic
cuaacuaaauuuguuac

SEQ ID NO: 745679 - RNA, 17 nt, Artificial Sequence
  Synthetic
ccccaagauuuuguuac

SEQ ID NO: 745680 - RNA, 17 nt, Artificial Sequence
  Synthetic
aggcacuugaaauuuac

SEQ ID NO: 745681 - RNA, 17 nt, Artificial Sequence
  Synthetic
agcuuaucuaaauuuac

SEQ ID NO: 745682 - RNA, 17 nt, Artificial Sequence
  Synthetic
agucucuugcaauuuac

SEQ ID NO: 745683 - RNA, 17 nt, Artificial Sequence
  Synthetic
ucuuuaaaauaauuuac

SEQ ID NO: 745684 - RNA, 17 nt, Artificial Sequence
  Synthetic
uagaagaggacauuuac

SEQ ID NO: 745685 - RNA, 17 nt, Artificial Sequence
  Synthetic
cuuuaugaaccauuuac

SEQ ID NO: 745686 - RNA, 17 nt, Artificial Sequence
  Synthetic
uucuuuccaccauuuac

SEQ ID NO: 745687 - RNA, 17 nt, Artificial Sequence
  Synthetic
aauauuuugccauuuac

SEQ ID NO: 745688 - RNA, 17 nt, Artificial Sequence
  Synthetic
auucccauuccauuuac

SEQ ID NO: 745689 - RNA, 17 nt, Artificial Sequence
  Synthetic
cacuacagagcauuuac

SEQ ID NO: 745690 - RNA, 17 nt, Artificial Sequence
  Synthetic
aaguaagcaucauuuac

SEQ ID NO: 745691 - RNA, 17 nt, Artificial Sequence
  Synthetic
uuuuagcugagauuuac

SEQ ID NO: 745692 - RNA, 17 nt, Artificial Sequence
  Synthetic
cucagagguagauuuac

SEQ ID NO: 745693 - RNA, 17 nt, Artificial Sequence
  Synthetic
aaagugcugggauuuac

SEQ ID NO: 745694 - RNA, 17 nt, Artificial Sequence
  Synthetic
ugucauuggugauuuac

SEQ ID NO: 745695 - RNA, 17 nt, Artificial Sequence
  Synthetic
auguacaaaauauuuac

SEQ ID NO: 745696 - RNA, 17 nt, Artificial Sequence
  Synthetic
acugccuaaauauuuac

SEQ ID NO: 745697 - RNA, 17 nt, Artificial Sequence
  Synthetic
auggaucuaauauuuac

SEQ ID NO: 745698 - RNA, 17 nt, Artificial Sequence
  Synthetic
ucuccugugauauuuac

SEQ ID NO: 745699 - RNA, 17 nt, Artificial Sequence
  Synthetic
uaggugcauauauuuac

SEQ ID NO: 745700 - RNA, 17 nt, Artificial Sequence
  Synthetic
uagguauauauauuuac

SEQ ID NO: 745701 - RNA, 17 nt, Artificial Sequence
  Synthetic
uucucuuaacuauuuac

SEQ ID NO: 745702 - RNA, 17 nt, Artificial Sequence
  Synthetic
augcacgguguauuuac

SEQ ID NO: 745703 - RNA, 17 nt, Artificial Sequence
  Synthetic
auacucaaauuauuuac

SEQ ID NO: 745704 - RNA, 17 nt, Artificial Sequence
  Synthetic
auucccuucuuauuuac

SEQ ID NO: 745705 - RNA, 17 nt, Artificial Sequence
  Synthetic
uccagccauuuauuuac

SEQ ID NO: 745706 - RNA, 17 nt, Artificial Sequence
  Synthetic
caucaaaguuuauuuac

SEQ ID NO: 745707 - RNA, 17 nt, Artificial Sequence
  Synthetic
auuuaguagaacuuuac

SEQ ID NO: 745708 - RNA, 17 nt, Artificial Sequence
  Synthetic
uuccuagcccacuuuac

SEQ ID NO: 745709 - RNA, 17 nt, Artificial Sequence
  Synthetic
acucuuugugacuuuac

SEQ ID NO: 745710 - RNA, 17 nt, Artificial Sequence
  Synthetic
aguuaauguuacuuuac

SEQ ID NO: 745711 - RNA, 17 nt, Artificial Sequence
  Synthetic
cuguguucacccuuuac

SEQ ID NO: 745712 - RNA, 17 nt, Artificial Sequence
  Synthetic
auuacaccuuccuuuac

SEQ ID NO: 745713 - RNA, 17 nt, Artificial Sequence
  Synthetic
acaguaaagggcuuuac

SEQ ID NO: 745714 - RNA, 17 nt, Artificial Sequence
  Synthetic
aaugcaccacucuuuac

SEQ ID NO: 745715 - RNA, 17 nt, Artificial Sequence
  Synthetic
ccuccuucagucuuuac

SEQ ID NO: 745716 - RNA, 17 nt, Artificial Sequence
  Synthetic
cccaagcuuuucuuuac

SEQ ID NO: 745717 - RNA, 17 nt, Artificial Sequence
  Synthetic
uauucaaaagaguuuac

SEQ ID NO: 745718 - RNA, 17 nt, Artificial Sequence
  Synthetic
acaauauaaacguuuac

SEQ ID NO: 745719 - RNA, 17 nt, Artificial Sequence
  Synthetic
caaagugcuggguuuac

SEQ ID NO: 745720 - RNA, 17 nt, Artificial Sequence
  Synthetic
agcuuccuaauguuuac

SEQ ID NO: 745721 - RNA, 17 nt, Artificial Sequence
  Synthetic
augucuuuccuguuuac

SEQ ID NO: 745722 - RNA, 17 nt, Artificial Sequence
  Synthetic
ccaugagaaaauuuuac

SEQ ID NO: 745723 - RNA, 17 nt, Artificial Sequence
  Synthetic
ugggcauauaauuuuac

SEQ ID NO: 745724 - RNA, 17 nt, Artificial Sequence
  Synthetic
augucaaguaauuuuac

SEQ ID NO: 745725 - RNA, 17 nt, Artificial Sequence
  Synthetic
ucuccuuuuaauuuuac

SEQ ID NO: 745726 - RNA, 17 nt, Artificial Sequence
  Synthetic
cauuucucccauuuuac

SEQ ID NO: 745727 - RNA, 17 nt, Artificial Sequence
  Synthetic
uugaaaugccauuuuac

SEQ ID NO: 745728 - RNA, 17 nt, Artificial Sequence
  Synthetic
uauuuuucucauuuuac

SEQ ID NO: 745729 - RNA, 17 nt, Artificial Sequence
  Synthetic
cugaaccuggauuuuac

SEQ ID NO: 745730 - RNA, 17 nt, Artificial Sequence
  Synthetic
cuugcuuuugauuuuac

SEQ ID NO: 745731 - RNA, 17 nt, Artificial Sequence
  Synthetic
uuuauuuaauauuuuac

SEQ ID NO: 745732 - RNA, 17 nt, Artificial Sequence
  Synthetic
uaaaagacauauuuuac

SEQ ID NO: 745733 - RNA, 17 nt, Artificial Sequence
  Synthetic
aguaguaccuauuuuac

SEQ ID NO: 745734 - RNA, 17 nt, Artificial Sequence
  Synthetic
aaaaugauguauuuuac

SEQ ID NO: 745735 - RNA, 17 nt, Artificial Sequence
  Synthetic
aucccagauuauuuuac

SEQ ID NO: 745736 - RNA, 17 nt, Artificial Sequence
  Synthetic
aucaacccuuauuuuac

SEQ ID NO: 745737 - RNA, 17 nt, Artificial Sequence
  Synthetic
acuagaaagacuuuuac

SEQ ID NO: 745738 - RNA, 17 nt, Artificial Sequence
  Synthetic
uguauuugaccuuuuac

SEQ ID NO: 745739 - RNA, 17 nt, Artificial Sequence
  Synthetic
cgaaugcacccuuuuac

SEQ ID NO: 745740 - RNA, 17 nt, Artificial Sequence
  Synthetic
aacagugguccuuuuac

SEQ ID NO: 745741 - RNA, 17 nt, Artificial Sequence
  Synthetic
uucuaaagagcuuuuac

SEQ ID NO: 745742 - RNA, 17 nt, Artificial Sequence
  Synthetic
cuccuggcugcuuuuac

SEQ ID NO: 745743 - RNA, 17 nt, Artificial Sequence
  Synthetic
uguaaauaaaguuuuac

SEQ ID NO: 745744 - RNA, 17 nt, Artificial Sequence
  Synthetic
aaguuacucaguuuuac

SEQ ID NO: 745745 - RNA, 17 nt, Artificial Sequence
  Synthetic
agcaauuuagguuuuac

SEQ ID NO: 745746 - RNA, 17 nt, Artificial Sequence
  Synthetic
uaccgaaaggguuuuac

SEQ ID NO: 745747 - RNA, 17 nt, Artificial Sequence
  Synthetic
caucuauauauuuuuac

SEQ ID NO: 745748 - RNA, 17 nt, Artificial Sequence
  Synthetic
caguauucuauuuuuac

SEQ ID NO: 745749 - RNA, 17 nt, Artificial Sequence
  Synthetic
acuuuggguauuuuuac

SEQ ID NO: 745750 - RNA, 17 nt, Artificial Sequence
  Synthetic
ucucgacaacuuuuuac

SEQ ID NO: 745751 - RNA, 17 nt, Artificial Sequence
  Synthetic
cccccaagcaaaaaacc

SEQ ID NO: 745752 - RNA, 17 nt, Artificial Sequence
  Synthetic
uuucagcuuaaaaaacc

SEQ ID NO: 745753 - RNA, 17 nt, Artificial Sequence
  Synthetic
caccagaaccaaaaacc

SEQ ID NO: 745754 - RNA, 17 nt, Artificial Sequence
  Synthetic
auggagaugcaaaaacc

SEQ ID NO: 745755 - RNA, 17 nt, Artificial Sequence
  Synthetic
aaagauuaauaaaaacc

SEQ ID NO: 745756 - RNA, 17 nt, Artificial Sequence
  Synthetic
ugcacaauauaaaaacc

SEQ ID NO: 745757 - RNA, 17 nt, Artificial Sequence
  Synthetic
uggguaauauaaaaacc

SEQ ID NO: 745758 - RNA, 17 nt, Artificial Sequence
  Synthetic
uuauuucuauaaaaacc

SEQ ID NO: 745759 - RNA, 17 nt, Artificial Sequence
  Synthetic
cuccaauauuaaaaacc

SEQ ID NO: 745760 - RNA, 17 nt, Artificial Sequence
  Synthetic
uacauccucacaaaacc

SEQ ID NO: 745761 - RNA, 17 nt, Artificial Sequence
  Synthetic
agaacucugacaaaacc

SEQ ID NO: 745762 - RNA, 17 nt, Artificial Sequence
  Synthetic
auccugauaccaaaacc

SEQ ID NO: 745763 - RNA, 17 nt, Artificial Sequence
  Synthetic
aggaaggcuccaaaacc

SEQ ID NO: 745764 - RNA, 17 nt, Artificial Sequence
  Synthetic
aauguaacuucaaaacc

SEQ ID NO: 745765 - RNA, 17 nt, Artificial Sequence
  Synthetic
cuugaagaaagaaaacc

SEQ ID NO: 745766 - RNA, 17 nt, Artificial Sequence
  Synthetic
auucgugaaagaaaacc

SEQ ID NO: 745767 - RNA, 17 nt, Artificial Sequence
  Synthetic
cacaggaacagaaaacc

SEQ ID NO: 745768 - RNA, 17 nt, Artificial Sequence
  Synthetic
uuguccuacagaaaacc

SEQ ID NO: 745769 - RNA, 17 nt, Artificial Sequence
  Synthetic
agaagaaugagaaaacc

SEQ ID NO: 745770 - RNA, 17 nt, Artificial Sequence
  Synthetic
cagugaauuagaaaacc

SEQ ID NO: 745771 - RNA, 17 nt, Artificial Sequence
  Synthetic
cuaccuacaugaaaacc

SEQ ID NO: 745772 - RNA, 17 nt, Artificial Sequence
  Synthetic
aauuaaagaugaaaacc

SEQ ID NO: 745773 - RNA, 17 nt, Artificial Sequence
  Synthetic
caggucaggugaaaacc

SEQ ID NO: 745774 - RNA, 17 nt, Artificial Sequence
  Synthetic
ccuuaagggugaaaacc

SEQ ID NO: 745775 - RNA, 17 nt, Artificial Sequence
  Synthetic
cagucugcuugaaaacc

SEQ ID NO: 745776 - RNA, 17 nt, Artificial Sequence
  Synthetic
aucauugcucuaaaacc

SEQ ID NO: 745777 - RNA, 17 nt, Artificial Sequence
  Synthetic
augaagucaguaaaacc

SEQ ID NO: 745778 - RNA, 17 nt, Artificial Sequence
  Synthetic
auugggggcuuaaaacc

SEQ ID NO: 745779 - RNA, 17 nt, Artificial Sequence
  Synthetic
aagaugaaguuaaaacc

SEQ ID NO: 745780 - RNA, 17 nt, Artificial Sequence
  Synthetic
uccuuccaguacaaacc

SEQ ID NO: 745781 - RNA, 17 nt, Artificial Sequence
  Synthetic
ucugaguaguacaaacc

SEQ ID NO: 745782 - RNA, 17 nt, Artificial Sequence
  Synthetic
ugacgaaaccccaaacc

SEQ ID NO: 745783 - RNA, 17 nt, Artificial Sequence
  Synthetic
cauuuaguauccaaacc

SEQ ID NO: 745784 - RNA, 17 nt, Artificial Sequence
  Synthetic
uccauauaaagcaaacc

SEQ ID NO: 745785 - RNA, 17 nt, Artificial Sequence
  Synthetic
ccauucaucagcaaacc

SEQ ID NO: 745786 - RNA, 17 nt, Artificial Sequence
  Synthetic
ccuauacuuggcaaacc

SEQ ID NO: 745787 - RNA, 17 nt, Artificial Sequence
  Synthetic
caugggaugugcaaacc

SEQ ID NO: 745788 - RNA, 17 nt, Artificial Sequence
  Synthetic
acucuuucuugcaaacc

SEQ ID NO: 745789 - RNA, 17 nt, Artificial Sequence
  Synthetic
uuucccugcaucaaacc

SEQ ID NO: 745790 - RNA, 17 nt, Artificial Sequence
  Synthetic
uaaguucaauucaaacc

SEQ ID NO: 745791 - RNA, 17 nt, Artificial Sequence
  Synthetic
caguguguuuucaaacc

SEQ ID NO: 745792 - RNA, 17 nt, Artificial Sequence
  Synthetic
acaauggagaagaaacc

SEQ ID NO: 745793 - RNA, 17 nt, Artificial Sequence
  Synthetic
agggaacaacagaaacc

SEQ ID NO: 745794 - RNA, 17 nt, Artificial Sequence
  Synthetic
cuagaaguacagaaacc

SEQ ID NO: 745795 - RNA, 17 nt, Artificial Sequence
  Synthetic
uucuaguuacagaaacc

SEQ ID NO: 745796 - RNA, 17 nt, Artificial Sequence
  Synthetic
caucucauugagaaacc

SEQ ID NO: 745797 - RNA, 17 nt, Artificial Sequence
  Synthetic
aucaaagccaggaaacc

SEQ ID NO: 745798 - RNA, 17 nt, Artificial Sequence
  Synthetic
aaucucugagggaaacc

SEQ ID NO: 745799 - RNA, 17 nt, Artificial Sequence
  Synthetic
uagaagcgugggaaacc

SEQ ID NO: 745800 - RNA, 17 nt, Artificial Sequence
  Synthetic
uaaaaggcaaugaaacc

SEQ ID NO: 745801 - RNA, 17 nt, Artificial Sequence
  Synthetic
cuuaucagagugaaacc

SEQ ID NO: 745802 - RNA, 17 nt, Artificial Sequence
  Synthetic
uaaggaaucuugaaacc

SEQ ID NO: 745803 - RNA, 17 nt, Artificial Sequence
  Synthetic
uagugaugcaauaaacc

SEQ ID NO: 745804 - RNA, 17 nt, Artificial Sequence
  Synthetic
uaugucaggaauaaacc

SEQ ID NO: 745805 - RNA, 17 nt, Artificial Sequence
  Synthetic
uugggaauuaauaaacc

SEQ ID NO: 745806 - RNA, 17 nt, Artificial Sequence
  Synthetic
uggccauuacauaaacc

SEQ ID NO: 745807 - RNA, 17 nt, Artificial Sequence
  Synthetic
ccucccaagacuaaacc

SEQ ID NO: 745808 - RNA, 17 nt, Artificial Sequence
  Synthetic
ucucccaagacuaaacc

SEQ ID NO: 745809 - RNA, 17 nt, Artificial Sequence
  Synthetic
cuucccaagacuaaacc

SEQ ID NO: 745810 - RNA, 17 nt, Artificial Sequence
  Synthetic
uuauaaacaccuaaacc

SEQ ID NO: 745811 - RNA, 17 nt, Artificial Sequence
  Synthetic
aaucauaguccuaaacc

SEQ ID NO: 745812 - RNA, 17 nt, Artificial Sequence
  Synthetic
aauggugauucuaaacc

SEQ ID NO: 745813 - RNA, 17 nt, Artificial Sequence
  Synthetic
aaugguguaaguaaacc

SEQ ID NO: 745814 - RNA, 17 nt, Artificial Sequence
  Synthetic
auuauaguuaguaaacc

SEQ ID NO: 745815 - RNA, 17 nt, Artificial Sequence
  Synthetic
uuuaaguaagguaaacc

SEQ ID NO: 745816 - RNA, 17 nt, Artificial Sequence
  Synthetic
ucaugauauuguaaacc

SEQ ID NO: 745817 - RNA, 17 nt, Artificial Sequence
  Synthetic
aagccuugcauuaaacc

SEQ ID NO: 745818 - RNA, 17 nt, Artificial Sequence
  Synthetic
ucugcuucucuuaaacc

SEQ ID NO: 745819 - RNA, 17 nt, Artificial Sequence
  Synthetic
cauuaaguaguuaaacc

SEQ ID NO: 745820 - RNA, 17 nt, Artificial Sequence
  Synthetic
aguaagcccuuuaaacc

SEQ ID NO: 745821 - RNA, 17 nt, Artificial Sequence
  Synthetic
uuaaaauguuuuaaacc

SEQ ID NO: 745822 - RNA, 17 nt, Artificial Sequence
  Synthetic
aaauuuacuaaacaacc

SEQ ID NO: 745823 - RNA, 17 nt, Artificial Sequence
  Synthetic
agauguuuaucacaacc

SEQ ID NO: 745824 - RNA, 17 nt, Artificial Sequence
  Synthetic
uacagucagucacaacc

SEQ ID NO: 745825 - RNA, 17 nt, Artificial Sequence
  Synthetic
aauagucuuucacaacc

SEQ ID NO: 745826 - RNA, 17 nt, Artificial Sequence
  Synthetic
ugaaaagaaagacaacc

SEQ ID NO: 745827 - RNA, 17 nt, Artificial Sequence
  Synthetic
ccuauaugcagacaacc

SEQ ID NO: 745828 - RNA, 17 nt, Artificial Sequence
  Synthetic
auuuuguaaugacaacc

SEQ ID NO: 745829 - RNA, 17 nt, Artificial Sequence
  Synthetic
cugcagaaaaaccaacc

SEQ ID NO: 745830 - RNA, 17 nt, Artificial Sequence
  Synthetic
uccauacaacaccaacc

SEQ ID NO: 745831 - RNA, 17 nt, Artificial Sequence
  Synthetic
caacucaagcaccaacc

SEQ ID NO: 745832 - RNA, 17 nt, Artificial Sequence
  Synthetic
caagaagaggaccaacc

SEQ ID NO: 745833 - RNA, 17 nt, Artificial Sequence
  Synthetic
cccccgccaccccaacc

SEQ ID NO: 745834 - RNA, 17 nt, Artificial Sequence
  Synthetic
agauuguuuccccaacc

SEQ ID NO: 745835 - RNA, 17 nt, Artificial Sequence
  Synthetic
aaaaaggcacuccaacc

SEQ ID NO: 745836 - RNA, 17 nt, Artificial Sequence
  Synthetic
accauuguacuccaacc

SEQ ID NO: 745837 - RNA, 17 nt, Artificial Sequence
  Synthetic
aauuuaaacguccaacc

SEQ ID NO: 745838 - RNA, 17 nt, Artificial Sequence
  Synthetic
uguaaagcaaagcaacc

SEQ ID NO: 745839 - RNA, 17 nt, Artificial Sequence
  Synthetic
aucuaccuagagcaacc

SEQ ID NO: 745840 - RNA, 17 nt, Artificial Sequence
  Synthetic
aaaacauggcugcaacc

SEQ ID NO: 745841 - RNA, 17 nt, Artificial Sequence
  Synthetic
agacaaagaccucaacc

SEQ ID NO: 745842 - RNA, 17 nt, Artificial Sequence
  Synthetic
aaaaaacaaucucaacc

SEQ ID NO: 745843 - RNA, 17 nt, Artificial Sequence
  Synthetic
uuaguugguucucaacc

SEQ ID NO: 745844 - RNA, 17 nt, Artificial Sequence
  Synthetic
ugaaaacuuguucaacc

SEQ ID NO: 745845 - RNA, 17 nt, Artificial Sequence
  Synthetic
aauaaaaagaaagaacc

SEQ ID NO: 745846 - RNA, 17 nt, Artificial Sequence
  Synthetic
ugguaucauuaagaacc

SEQ ID NO: 745847 - RNA, 17 nt, Artificial Sequence
  Synthetic
ugggcugggccagaacc

SEQ ID NO: 745848 - RNA, 17 nt, Artificial Sequence
  Synthetic
uuucaacucucagaacc

SEQ ID NO: 745849 - RNA, 17 nt, Artificial Sequence
  Synthetic
ugggauaggauagaacc

SEQ ID NO: 745850 - RNA, 17 nt, Artificial Sequence
  Synthetic
ugaucuccauuagaacc

SEQ ID NO: 745851 - RNA, 17 nt, Artificial Sequence
  Synthetic
uuccugauguuagaacc

SEQ ID NO: 745852 - RNA, 17 nt, Artificial Sequence
  Synthetic
cauagagugaaggaacc

SEQ ID NO: 745853 - RNA, 17 nt, Artificial Sequence
  Synthetic
acugggauggaggaacc

SEQ ID NO: 745854 - RNA, 17 nt, Artificial Sequence
  Synthetic
aauaggaacuaggaacc

SEQ ID NO: 745855 - RNA, 17 nt, Artificial Sequence
  Synthetic
aggguauuuuaggaacc

SEQ ID NO: 745856 - RNA, 17 nt, Artificial Sequence
  Synthetic
uuugauuaaagggaacc

SEQ ID NO: 745857 - RNA, 17 nt, Artificial Sequence
  Synthetic
ugugcuuagaaugaacc

SEQ ID NO: 745858 - RNA, 17 nt, Artificial Sequence
  Synthetic
ccaaauguccaugaacc

SEQ ID NO: 745859 - RNA, 17 nt, Artificial Sequence
  Synthetic
ugaacaccugaugaacc

SEQ ID NO: 745860 - RNA, 17 nt, Artificial Sequence
  Synthetic
cagaaauaauaugaacc

SEQ ID NO: 745861 - RNA, 17 nt, Artificial Sequence
  Synthetic
aucacacuuuaugaacc

SEQ ID NO: 745862 - RNA, 17 nt, Artificial Sequence
  Synthetic
uuacgugaaacugaacc

SEQ ID NO: 745863 - RNA, 17 nt, Artificial Sequence
  Synthetic
ugagaaucaccugaacc

SEQ ID NO: 745864 - RNA, 17 nt, Artificial Sequence
  Synthetic
uaggggugaagugaacc

SEQ ID NO: 745865 - RNA, 17 nt, Artificial Sequence
  Synthetic
uauuagcugugugaacc

SEQ ID NO: 745866 - RNA, 17 nt, Artificial Sequence
  Synthetic
ugcuuauaaauugaacc

SEQ ID NO: 745867 - RNA, 17 nt, Artificial Sequence
  Synthetic
caagaaucacuugaacc

SEQ ID NO: 745868 - RNA, 17 nt, Artificial Sequence
  Synthetic
ggagaaucacuugaacc

SEQ ID NO: 745869 - RNA, 17 nt, Artificial Sequence
  Synthetic
cauuuucagcuugaacc

SEQ ID NO: 745870 - RNA, 17 nt, Artificial Sequence
  Synthetic
ugagaagcgcuugaacc

SEQ ID NO: 745871 - RNA, 17 nt, Artificial Sequence
  Synthetic
ggagaaucgcuugaacc

SEQ ID NO: 745872 - RNA, 17 nt, Artificial Sequence
  Synthetic
ggagaauugcuugaacc

SEQ ID NO: 745873 - RNA, 17 nt, Artificial Sequence
  Synthetic
uuagugaguguugaacc

SEQ ID NO: 745874 - RNA, 17 nt, Artificial Sequence
  Synthetic
aaaucaaaauuugaacc

SEQ ID NO: 745875 - RNA, 17 nt, Artificial Sequence
  Synthetic
cagcaaguauuugaacc

SEQ ID NO: 745876 - RNA, 17 nt, Artificial Sequence
  Synthetic
auaaaggauuuugaacc

SEQ ID NO: 745877 - RNA, 17 nt, Artificial Sequence
  Synthetic
acauuuuaaaaauaacc

SEQ ID NO: 745878 - RNA, 17 nt, Artificial Sequence
  Synthetic
uuggacauaaaauaacc

SEQ ID NO: 745879 - RNA, 17 nt, Artificial Sequence
  Synthetic
ccccagaccaaauaacc

SEQ ID NO: 745880 - RNA, 17 nt, Artificial Sequence
  Synthetic
caguccaaacaauaacc

SEQ ID NO: 745881 - RNA, 17 nt, Artificial Sequence
  Synthetic
aaguguaaugaauaacc

SEQ ID NO: 745882 - RNA, 17 nt, Artificial Sequence
  Synthetic
aaccaaaacuaauaacc

SEQ ID NO: 745883 - RNA, 17 nt, Artificial Sequence
  Synthetic
aguacaauaucauaacc

SEQ ID NO: 745884 - RNA, 17 nt, Artificial Sequence
  Synthetic
aacucucucucauaacc

SEQ ID NO: 745885 - RNA, 17 nt, Artificial Sequence
  Synthetic
uaaacaaauagauaacc

SEQ ID NO: 745886 - RNA, 17 nt, Artificial Sequence
  Synthetic
accucugagggauaacc

SEQ ID NO: 745887 - RNA, 17 nt, Artificial Sequence
  Synthetic
auuauuagaugauaacc

SEQ ID NO: 745888 - RNA, 17 nt, Artificial Sequence
  Synthetic
aucuuauacauauaacc

SEQ ID NO: 745889 - RNA, 17 nt, Artificial Sequence
  Synthetic
ucacauguucuauaacc

SEQ ID NO: 745890 - RNA, 17 nt, Artificial Sequence
  Synthetic
uuugcaaaguuauaacc

SEQ ID NO: 745891 - RNA, 17 nt, Artificial Sequence
  Synthetic
ccauccaaguacuaacc

SEQ ID NO: 745892 - RNA, 17 nt, Artificial Sequence
  Synthetic
aaaaagcugaaguaacc

SEQ ID NO: 745893 - RNA, 17 nt, Artificial Sequence
  Synthetic
cucacaguggaguaacc

SEQ ID NO: 745894 - RNA, 17 nt, Artificial Sequence
  Synthetic
uguuauuuggaguaacc

SEQ ID NO: 745895 - RNA, 17 nt, Artificial Sequence
  Synthetic
ucuccagguagguaacc

SEQ ID NO: 745896 - RNA, 17 nt, Artificial Sequence
  Synthetic
cagcaucagugguaacc

SEQ ID NO: 745897 - RNA, 17 nt, Artificial Sequence
  Synthetic
caaagugugugguaacc

SEQ ID NO: 745898 - RNA, 17 nt, Artificial Sequence
  Synthetic
aaaccauggauguaacc

SEQ ID NO: 745899 - RNA, 17 nt, Artificial Sequence
  Synthetic
aaauacaaaaauuaacc

SEQ ID NO: 745900 - RNA, 17 nt, Artificial Sequence
  Synthetic
agacagaauaauuaacc

SEQ ID NO: 745901 - RNA, 17 nt, Artificial Sequence
  Synthetic
aaaugaucccauuaacc

SEQ ID NO: 745902 - RNA, 17 nt, Artificial Sequence
  Synthetic
uagucuguucauuaacc

SEQ ID NO: 745903 - RNA, 17 nt, Artificial Sequence
  Synthetic
aauuuuaggacuuaacc

SEQ ID NO: 745904 - RNA, 17 nt, Artificial Sequence
  Synthetic
acuuucagauguuaacc

SEQ ID NO: 745905 - RNA, 17 nt, Artificial Sequence
  Synthetic
ugguuacaaauuuaacc

SEQ ID NO: 745906 - RNA, 17 nt, Artificial Sequence
  Synthetic
accaaugaccuuuaacc

SEQ ID NO: 745907 - RNA, 17 nt, Artificial Sequence
  Synthetic
aagcaucuccuuuaacc

SEQ ID NO: 745908 - RNA, 17 nt, Artificial Sequence
  Synthetic
ugauggggucuuuaacc

SEQ ID NO: 745909 - RNA, 17 nt, Artificial Sequence
  Synthetic
agacugagcccaacacc

SEQ ID NO: 745910 - RNA, 17 nt, Artificial Sequence
  Synthetic
acuaacugcagaacacc

SEQ ID NO: 745911 - RNA, 17 nt, Artificial Sequence
  Synthetic
ugaacaaugagaacacc

SEQ ID NO: 745912 - RNA, 17 nt, Artificial Sequence
  Synthetic
ugaaaucaaggaacacc

SEQ ID NO: 745913 - RNA, 17 nt, Artificial Sequence
  Synthetic
uccauuuauauaacacc

SEQ ID NO: 745914 - RNA, 17 nt, Artificial Sequence
  Synthetic
auaaggaucuuaacacc

SEQ ID NO: 745915 - RNA, 17 nt, Artificial Sequence
  Synthetic
cgggaacaucacacacc

SEQ ID NO: 745916 - RNA, 17 nt, Artificial Sequence
  Synthetic
uuaaagcuagacacacc

SEQ ID NO: 745917 - RNA, 17 nt, Artificial Sequence
  Synthetic
ugguuuugauacacacc

SEQ ID NO: 745918 - RNA, 17 nt, Artificial Sequence
  Synthetic
gcgugagccaccacacc

SEQ ID NO: 745919 - RNA, 17 nt, Artificial Sequence
  Synthetic
augugagccaccacacc

SEQ ID NO: 745920 - RNA, 17 nt, Artificial Sequence
  Synthetic
acacaugccaccacacc

SEQ ID NO: 745921 - RNA, 17 nt, Artificial Sequence
  Synthetic
cccaacagauccacacc

SEQ ID NO: 745922 - RNA, 17 nt, Artificial Sequence
  Synthetic
auugauggcagcacacc

SEQ ID NO: 745923 - RNA, 17 nt, Artificial Sequence
  Synthetic
agaauaucgggcacacc

SEQ ID NO: 745924 - RNA, 17 nt, Artificial Sequence
  Synthetic
acuauucauugcacacc

SEQ ID NO: 745925 - RNA, 17 nt, Artificial Sequence
  Synthetic
caggacagaaucacacc

SEQ ID NO: 745926 - RNA, 17 nt, Artificial Sequence
  Synthetic
agggaugugaucacacc

SEQ ID NO: 745927 - RNA, 17 nt, Artificial Sequence
  Synthetic
aacugaaauaucacacc

SEQ ID NO: 745928 - RNA, 17 nt, Artificial Sequence
  Synthetic
agcuuaauccucacacc

SEQ ID NO: 745929 - RNA, 17 nt, Artificial Sequence
  Synthetic
cucaaacaucucacacc

SEQ ID NO: 745930 - RNA, 17 nt, Artificial Sequence
  Synthetic
aaaaaaaaaaggacacc

SEQ ID NO: 745931 - RNA, 17 nt, Artificial Sequence
  Synthetic
ugugucugccugacacc

SEQ ID NO: 745932 - RNA, 17 nt, Artificial Sequence
  Synthetic
uuucccagaaauacacc

SEQ ID NO: 745933 - RNA, 17 nt, Artificial Sequence
  Synthetic
uucagugcacauacacc

SEQ ID NO: 745934 - RNA, 17 nt, Artificial Sequence
  Synthetic
uuugcaaaccauacacc

SEQ ID NO: 745935 - RNA, 17 nt, Artificial Sequence
  Synthetic
ucuguucagcauacacc

SEQ ID NO: 745936 - RNA, 17 nt, Artificial Sequence
  Synthetic
ugugguacauauacacc

SEQ ID NO: 745937 - RNA, 17 nt, Artificial Sequence
  Synthetic
ucuguuggauauacacc

SEQ ID NO: 745938 - RNA, 17 nt, Artificial Sequence
  Synthetic
cugaaaggcacuacacc

SEQ ID NO: 745939 - RNA, 17 nt, Artificial Sequence
  Synthetic
acaagugaaguuacacc

SEQ ID NO: 745940 - RNA, 17 nt, Artificial Sequence
  Synthetic
auuucuaguuuuacacc

SEQ ID NO: 745941 - RNA, 17 nt, Artificial Sequence
  Synthetic
ucucucuuaaaaccacc

SEQ ID NO: 745942 - RNA, 17 nt, Artificial Sequence
  Synthetic
ucagcaucaacaccacc

SEQ ID NO: 745943 - RNA, 17 nt, Artificial Sequence
  Synthetic
uagaggcaugcaccacc

SEQ ID NO: 745944 - RNA, 17 nt, Artificial Sequence
  Synthetic
uggaugaauggaccacc

SEQ ID NO: 745945 - RNA, 17 nt, Artificial Sequence
  Synthetic
caagggaaacuaccacc

SEQ ID NO: 745946 - RNA, 17 nt, Artificial Sequence
  Synthetic
uaaccuacauuaccacc

SEQ ID NO: 745947 - RNA, 17 nt, Artificial Sequence
  Synthetic
uacaggcgugacccacc

SEQ ID NO: 745948 - RNA, 17 nt, Artificial Sequence
  Synthetic
cauugagacuacccacc

SEQ ID NO: 745949 - RNA, 17 nt, Artificial Sequence
  Synthetic
ucuugagccaccccacc

SEQ ID NO: 745950 - RNA, 17 nt, Artificial Sequence
  Synthetic
augaacuggaccccacc

SEQ ID NO: 745951 - RNA, 17 nt, Artificial Sequence
  Synthetic
uaaccucugcccccacc

SEQ ID NO: 745952 - RNA, 17 nt, Artificial Sequence
  Synthetic
ucacuguguugcccacc

SEQ ID NO: 745953 - RNA, 17 nt, Artificial Sequence
  Synthetic
uccaaucaccucccacc

SEQ ID NO: 745954 - RNA, 17 nt, Artificial Sequence
  Synthetic
uccagucaccucccacc

SEQ ID NO: 745955 - RNA, 17 nt, Artificial Sequence
  Synthetic
uucaauuaccucccacc

SEQ ID NO: 745956 - RNA, 17 nt, Artificial Sequence
  Synthetic
uggggacaugucccacc

SEQ ID NO: 745957 - RNA, 17 nt, Artificial Sequence
  Synthetic
agcuuucccuucccacc

SEQ ID NO: 745958 - RNA, 17 nt, Artificial Sequence
  Synthetic
aacuaaagcaagccacc

SEQ ID NO: 745959 - RNA, 17 nt, Artificial Sequence
  Synthetic
uguaaacagaagccacc

SEQ ID NO: 745960 - RNA, 17 nt, Artificial Sequence
  Synthetic
acauacacacagccacc

SEQ ID NO: 745961 - RNA, 17 nt, Artificial Sequence
  Synthetic
cgggugccuacgccacc

SEQ ID NO: 745962 - RNA, 17 nt, Artificial Sequence
  Synthetic
aggggaaacucgccacc

SEQ ID NO: 745963 - RNA, 17 nt, Artificial Sequence
  Synthetic
aagugaguuuggccacc

SEQ ID NO: 745964 - RNA, 17 nt, Artificial Sequence
  Synthetic
auuccauuaccuccacc

SEQ ID NO: 745965 - RNA, 17 nt, Artificial Sequence
  Synthetic
auucaguuaccuccacc

SEQ ID NO: 745966 - RNA, 17 nt, Artificial Sequence
  Synthetic
auccaauugccuccacc

SEQ ID NO: 745967 - RNA, 17 nt, Artificial Sequence
  Synthetic
aaugggugagcuccacc

SEQ ID NO: 745968 - RNA, 17 nt, Artificial Sequence
  Synthetic
uuugcccuuucuccacc

SEQ ID NO: 745969 - RNA, 17 nt, Artificial Sequence
  Synthetic
aaagagaagauuccacc

SEQ ID NO: 745970 - RNA, 17 nt, Artificial Sequence
  Synthetic
aaugcccuuuuuccacc

SEQ ID NO: 745971 - RNA, 17 nt, Artificial Sequence
  Synthetic
cggccucccaaagcacc

SEQ ID NO: 745972 - RNA, 17 nt, Artificial Sequence
  Synthetic
acauuuggugaagcacc

SEQ ID NO: 745973 - RNA, 17 nt, Artificial Sequence
  Synthetic
augcuaagcacagcacc

SEQ ID NO: 745974 - RNA, 17 nt, Artificial Sequence
  Synthetic
cccaacguggcagcacc

SEQ ID NO: 745975 - RNA, 17 nt, Artificial Sequence
  Synthetic
ccugaaaaugcagcacc

SEQ ID NO: 745976 - RNA, 17 nt, Artificial Sequence
  Synthetic
cccaauauaggagcacc

SEQ ID NO: 745977 - RNA, 17 nt, Artificial Sequence
  Synthetic
ccaguuauucuagcacc

SEQ ID NO: 745978 - RNA, 17 nt, Artificial Sequence
  Synthetic
ucggauaaaguagcacc

SEQ ID NO: 745979 - RNA, 17 nt, Artificial Sequence
  Synthetic
aguauuuucguagcacc

SEQ ID NO: 745980 - RNA, 17 nt, Artificial Sequence
  Synthetic
gcgugagccaccgcacc

SEQ ID NO: 745981 - RNA, 17 nt, Artificial Sequence
  Synthetic
agccaagagcaggcacc

SEQ ID NO: 745982 - RNA, 17 nt, Artificial Sequence
  Synthetic
uugcuuucucaggcacc

SEQ ID NO: 745983 - RNA, 17 nt, Artificial Sequence
  Synthetic
aauauucaugaggcacc

SEQ ID NO: 745984 - RNA, 17 nt, Artificial Sequence
  Synthetic
cacggugagagggcacc

SEQ ID NO: 745985 - RNA, 17 nt, Artificial Sequence
  Synthetic
aaauguggcauggcacc

SEQ ID NO: 745986 - RNA, 17 nt, Artificial Sequence
  Synthetic
cucacaacuauggcacc

SEQ ID NO: 745987 - RNA, 17 nt, Artificial Sequence
  Synthetic
cugacccuuuuggcacc

SEQ ID NO: 745988 - RNA, 17 nt, Artificial Sequence
  Synthetic
cuuguugauaaugcacc

SEQ ID NO: 745989 - RNA, 17 nt, Artificial Sequence
  Synthetic
aggcacaccacugcacc

SEQ ID NO: 745990 - RNA, 17 nt, Artificial Sequence
  Synthetic
auucaauuaucugcacc

SEQ ID NO: 745991 - RNA, 17 nt, Artificial Sequence
  Synthetic
cgugugaugggugcacc

SEQ ID NO: 745992 - RNA, 17 nt, Artificial Sequence
  Synthetic
cuuuauuugugugcacc

SEQ ID NO: 745993 - RNA, 17 nt, Artificial Sequence
  Synthetic
aagggaaauguugcacc

SEQ ID NO: 745994 - RNA, 17 nt, Artificial Sequence
  Synthetic
ucacuuuucuuugcacc

SEQ ID NO: 745995 - RNA, 17 nt, Artificial Sequence
  Synthetic
uguacauugaaaucacc

SEQ ID NO: 745996 - RNA, 17 nt, Artificial Sequence
  Synthetic
uugguaauuaaaucacc

SEQ ID NO: 745997 - RNA, 17 nt, Artificial Sequence
  Synthetic
cauacaucagaaucacc

SEQ ID NO: 745998 - RNA, 17 nt, Artificial Sequence
  Synthetic
ugugcaucagaaucacc

SEQ ID NO: 745999 - RNA, 17 nt, Artificial Sequence
  Synthetic
ugcguaucugaaucacc

SEQ ID NO: 746000 - RNA, 17 nt, Artificial Sequence
  Synthetic
agagcacagacaucacc

SEQ ID NO: 746001 - RNA, 17 nt, Artificial Sequence
  Synthetic
uacuuggcuacaucacc

SEQ ID NO: 746002 - RNA, 17 nt, Artificial Sequence
  Synthetic
acagcagcagcaucacc

SEQ ID NO: 746003 - RNA, 17 nt, Artificial Sequence
  Synthetic
cacuuguggagaucacc

SEQ ID NO: 746004 - RNA, 17 nt, Artificial Sequence
  Synthetic
ucaguguuaauaucacc

SEQ ID NO: 746005 - RNA, 17 nt, Artificial Sequence
  Synthetic
aaagcuuuacuaucacc

SEQ ID NO: 746006 - RNA, 17 nt, Artificial Sequence
  Synthetic
cauuuucaguuaucacc

SEQ ID NO: 746007 - RNA, 17 nt, Artificial Sequence
  Synthetic
uaucaucauuacucacc

SEQ ID NO: 746008 - RNA, 17 nt, Artificial Sequence
  Synthetic
ccccugcccuccucacc

SEQ ID NO: 746009 - RNA, 17 nt, Artificial Sequence
  Synthetic
cucaauuagagcucacc

SEQ ID NO: 746010 - RNA, 17 nt, Artificial Sequence
  Synthetic
ucaaggaucaucucacc

SEQ ID NO: 746011 - RNA, 17 nt, Artificial Sequence
  Synthetic
agaagaagguucucacc

SEQ ID NO: 746012 - RNA, 17 nt, Artificial Sequence
  Synthetic
uauuuuaaugagucacc

SEQ ID NO: 746013 - RNA, 17 nt, Artificial Sequence
  Synthetic
cauaucccagcgucacc

SEQ ID NO: 746014 - RNA, 17 nt, Artificial Sequence
  Synthetic
uauuaacuauggucacc

SEQ ID NO: 746015 - RNA, 17 nt, Artificial Sequence
  Synthetic
cuauuaaauaugucacc

SEQ ID NO: 746016 - RNA, 17 nt, Artificial Sequence
  Synthetic
uuauuaaaucugucacc

SEQ ID NO: 746017 - RNA, 17 nt, Artificial Sequence
  Synthetic
agucucacucugucacc

SEQ ID NO: 746018 - RNA, 17 nt, Artificial Sequence
  Synthetic
agucuagcucugucacc

SEQ ID NO: 746019 - RNA, 17 nt, Artificial Sequence
  Synthetic
agucucgcucugucacc

SEQ ID NO: 746020 - RNA, 17 nt, Artificial Sequence
  Synthetic
aaaguccacaauucacc

SEQ ID NO: 746021 - RNA, 17 nt, Artificial Sequence
  Synthetic
aaauacaaacauucacc

SEQ ID NO: 746022 - RNA, 17 nt, Artificial Sequence
  Synthetic
ugugcacaggauucacc

SEQ ID NO: 746023 - RNA, 17 nt, Artificial Sequence
  Synthetic
ucccagggcacuucacc

SEQ ID NO: 746024 - RNA, 17 nt, Artificial Sequence
  Synthetic
agcucucugccuucacc

SEQ ID NO: 746025 - RNA, 17 nt, Artificial Sequence
  Synthetic
cuacagacuccuucacc

SEQ ID NO: 746026 - RNA, 17 nt, Artificial Sequence
  Synthetic
uuuacagcgucuucacc

SEQ ID NO: 746027 - RNA, 17 nt, Artificial Sequence
  Synthetic
uuaaguaauaguucacc

SEQ ID NO: 746028 - RNA, 17 nt, Artificial Sequence
  Synthetic
acagacaggguuucacc

SEQ ID NO: 746029 - RNA, 17 nt, Artificial Sequence
  Synthetic
ccagagaugaaaagacc

SEQ ID NO: 746030 - RNA, 17 nt, Artificial Sequence
  Synthetic
ucacaauagcaaagacc

SEQ ID NO: 746031 - RNA, 17 nt, Artificial Sequence
  Synthetic
uccagagaagaaagacc

SEQ ID NO: 746032 - RNA, 17 nt, Artificial Sequence
  Synthetic
ugagguucuuaaagacc

SEQ ID NO: 746033 - RNA, 17 nt, Artificial Sequence
  Synthetic
auacaguuuacaagacc

SEQ ID NO: 746034 - RNA, 17 nt, Artificial Sequence
  Synthetic
aagaaauacccaagacc

SEQ ID NO: 746035 - RNA, 17 nt, Artificial Sequence
  Synthetic
ucaaaagccccaagacc

SEQ ID NO: 746036 - RNA, 17 nt, Artificial Sequence
  Synthetic
aggaaggcagcaagacc

SEQ ID NO: 746037 - RNA, 17 nt, Artificial Sequence
  Synthetic
uugggugugucaagacc

SEQ ID NO: 746038 - RNA, 17 nt, Artificial Sequence
  Synthetic
cgagaauugagaagacc

SEQ ID NO: 746039 - RNA, 17 nt, Artificial Sequence
  Synthetic
cuugaugucugaagacc

SEQ ID NO: 746040 - RNA, 17 nt, Artificial Sequence
  Synthetic
uaaaauaaucuaagacc

SEQ ID NO: 746041 - RNA, 17 nt, Artificial Sequence
  Synthetic
ugcagguaucuaagacc

SEQ ID NO: 746042 - RNA, 17 nt, Artificial Sequence
  Synthetic
cucagauuucuaagacc

SEQ ID NO: 746043 - RNA, 17 nt, Artificial Sequence
  Synthetic
cuuccuauuuuaagacc

SEQ ID NO: 746044 - RNA, 17 nt, Artificial Sequence
  Synthetic
ugucccaaaaacagacc

SEQ ID NO: 746045 - RNA, 17 nt, Artificial Sequence
  Synthetic
ugauucauacacagacc

SEQ ID NO: 746046 - RNA, 17 nt, Artificial Sequence
  Synthetic
caaaagcuacacagacc

SEQ ID NO: 746047 - RNA, 17 nt, Artificial Sequence
  Synthetic
acauuauuccacagacc

SEQ ID NO: 746048 - RNA, 17 nt, Artificial Sequence
  Synthetic
aaucuauuugacagacc

SEQ ID NO: 746049 - RNA, 17 nt, Artificial Sequence
  Synthetic
auugagaaauacagacc

SEQ ID NO: 746050 - RNA, 17 nt, Artificial Sequence
  Synthetic
uauuuagaaaccagacc

SEQ ID NO: 746051 - RNA, 17 nt, Artificial Sequence
  Synthetic
ugagucuggaccagacc

SEQ ID NO: 746052 - RNA, 17 nt, Artificial Sequence
  Synthetic
agaaaacaacccagacc

SEQ ID NO: 746053 - RNA, 17 nt, Artificial Sequence
  Synthetic
uucuugaggcccagacc

SEQ ID NO: 746054 - RNA, 17 nt, Artificial Sequence
  Synthetic
uuuuaaauucccagacc

SEQ ID NO: 746055 - RNA, 17 nt, Artificial Sequence
  Synthetic
uccgcaacaugcagacc

SEQ ID NO: 746056 - RNA, 17 nt, Artificial Sequence
  Synthetic
uauuacauagucagacc

SEQ ID NO: 746057 - RNA, 17 nt, Artificial Sequence
  Synthetic
ugcuugaggaagagacc

SEQ ID NO: 746058 - RNA, 17 nt, Artificial Sequence
  Synthetic
uuggccucccagagacc

SEQ ID NO: 746059 - RNA, 17 nt, Artificial Sequence
  Synthetic
cugaggagcaggagacc

SEQ ID NO: 746060 - RNA, 17 nt, Artificial Sequence
  Synthetic
ccaaauagaaugagacc

SEQ ID NO: 746061 - RNA, 17 nt, Artificial Sequence
  Synthetic
uggugcugcaugagacc

SEQ ID NO: 746062 - RNA, 17 nt, Artificial Sequence
  Synthetic
agaccugguaugagacc

SEQ ID NO: 746063 - RNA, 17 nt, Artificial Sequence
  Synthetic
ugaugcugacugagacc

SEQ ID NO: 746064 - RNA, 17 nt, Artificial Sequence
  Synthetic
cauccucaucugagacc

SEQ ID NO: 746065 - RNA, 17 nt, Artificial Sequence
  Synthetic
auuuuaucucugagacc

SEQ ID NO: 746066 - RNA, 17 nt, Artificial Sequence
  Synthetic
auagaaguggugagacc

SEQ ID NO: 746067 - RNA, 17 nt, Artificial Sequence
  Synthetic
cucaggaguuugagacc

SEQ ID NO: 746068 - RNA, 17 nt, Artificial Sequence
  Synthetic
caugugcuaaauagacc

SEQ ID NO: 746069 - RNA, 17 nt, Artificial Sequence
  Synthetic
auguaaaagaauagacc

SEQ ID NO: 746070 - RNA, 17 nt, Artificial Sequence
  Synthetic
aagggaauucauagacc

SEQ ID NO: 746071 - RNA, 17 nt, Artificial Sequence
  Synthetic
aguuauguagauagacc

SEQ ID NO: 746072 - RNA, 17 nt, Artificial Sequence
  Synthetic
cugacaucauauagacc

SEQ ID NO: 746073 - RNA, 17 nt, Artificial Sequence
  Synthetic
aaauacuaaacuagacc

SEQ ID NO: 746074 - RNA, 17 nt, Artificial Sequence
  Synthetic
ucauucuagacuagacc

SEQ ID NO: 746075 - RNA, 17 nt, Artificial Sequence
  Synthetic
ucuucuuagaguagacc

SEQ ID NO: 746076 - RNA, 17 nt, Artificial Sequence
  Synthetic
accacugcacuccgacc

SEQ ID NO: 746077 - RNA, 17 nt, Artificial Sequence
  Synthetic
uauuaagcuaaaggacc

SEQ ID NO: 746078 - RNA, 17 nt, Artificial Sequence
  Synthetic
agcauuguugaaggacc

SEQ ID NO: 746079 - RNA, 17 nt, Artificial Sequence
  Synthetic
aguccuggaccaggacc

SEQ ID NO: 746080 - RNA, 17 nt, Artificial Sequence
  Synthetic
auaaaggucccaggacc

SEQ ID NO: 746081 - RNA, 17 nt, Artificial Sequence
  Synthetic
cagaugcagccaggacc

SEQ ID NO: 746082 - RNA, 17 nt, Artificial Sequence
  Synthetic
ucacgugguucaggacc

SEQ ID NO: 746083 - RNA, 17 nt, Artificial Sequence
  Synthetic
cugacauuuucaggacc

SEQ ID NO: 746084 - RNA, 17 nt, Artificial Sequence
  Synthetic
aacugcccaauaggacc

SEQ ID NO: 746085 - RNA, 17 nt, Artificial Sequence
  Synthetic
aggcuuggcauaggacc

SEQ ID NO: 746086 - RNA, 17 nt, Artificial Sequence
  Synthetic
uuccugguggacggacc

SEQ ID NO: 746087 - RNA, 17 nt, Artificial Sequence
  Synthetic
caugguugccagggacc

SEQ ID NO: 746088 - RNA, 17 nt, Artificial Sequence
  Synthetic
aguagagcaaggggacc

SEQ ID NO: 746089 - RNA, 17 nt, Artificial Sequence
  Synthetic
aaugaaaaauugggacc

SEQ ID NO: 746090 - RNA, 17 nt, Artificial Sequence
  Synthetic
aauugucaagauggacc

SEQ ID NO: 746091 - RNA, 17 nt, Artificial Sequence
  Synthetic
cccaacauggauggacc

SEQ ID NO: 746092 - RNA, 17 nt, Artificial Sequence
  Synthetic
uaucuuucuccuggacc

SEQ ID NO: 746093 - RNA, 17 nt, Artificial Sequence
  Synthetic
ccagacaguccuggacc

SEQ ID NO: 746094 - RNA, 17 nt, Artificial Sequence
  Synthetic
caauuuuuccguggacc

SEQ ID NO: 746095 - RNA, 17 nt, Artificial Sequence
  Synthetic
aaaugguuucguggacc

SEQ ID NO: 746096 - RNA, 17 nt, Artificial Sequence
  Synthetic
cagcauuugcaaugacc

SEQ ID NO: 746097 - RNA, 17 nt, Artificial Sequence
  Synthetic
ucuaacauucaaugacc

SEQ ID NO: 746098 - RNA, 17 nt, Artificial Sequence
  Synthetic
aggucuggagaaugacc

SEQ ID NO: 746099 - RNA, 17 nt, Artificial Sequence
  Synthetic
ucaaaucuuccaugacc

SEQ ID NO: 746100 - RNA, 17 nt, Artificial Sequence
  Synthetic
cuugcaucagcaugacc

SEQ ID NO: 746101 - RNA, 17 nt, Artificial Sequence
  Synthetic
aagucuuauucaugacc

SEQ ID NO: 746102 - RNA, 17 nt, Artificial Sequence
  Synthetic
ugucacauauuaugacc

SEQ ID NO: 746103 - RNA, 17 nt, Artificial Sequence
  Synthetic
uuuuuugaaaacugacc

SEQ ID NO: 746104 - RNA, 17 nt, Artificial Sequence
  Synthetic
uguuaacuugccugacc

SEQ ID NO: 746105 - RNA, 17 nt, Artificial Sequence
  Synthetic
agaccucuuggcugacc

SEQ ID NO: 746106 - RNA, 17 nt, Artificial Sequence
  Synthetic
cugaagaaaaucugacc

SEQ ID NO: 746107 - RNA, 17 nt, Artificial Sequence
  Synthetic
ucaagggauaucugacc

SEQ ID NO: 746108 - RNA, 17 nt, Artificial Sequence
  Synthetic
aaaccaguucucugacc

SEQ ID NO: 746109 - RNA, 17 nt, Artificial Sequence
  Synthetic
cucuaaauuuucugacc

SEQ ID NO: 746110 - RNA, 17 nt, Artificial Sequence
  Synthetic
cuuuagauaaagugacc

SEQ ID NO: 746111 - RNA, 17 nt, Artificial Sequence
  Synthetic
ucuugugcauagugacc

SEQ ID NO: 746112 - RNA, 17 nt, Artificial Sequence
  Synthetic
cuugcaucagcgugacc

SEQ ID NO: 746113 - RNA, 17 nt, Artificial Sequence
  Synthetic
agagggcagaggugacc

SEQ ID NO: 746114 - RNA, 17 nt, Artificial Sequence
  Synthetic
uuguggagggggugacc

SEQ ID NO: 746115 - RNA, 17 nt, Artificial Sequence
  Synthetic
agggcucuugggugacc

SEQ ID NO: 746116 - RNA, 17 nt, Artificial Sequence
  Synthetic
agagauagaaauugacc

SEQ ID NO: 746117 - RNA, 17 nt, Artificial Sequence
  Synthetic
uuauuuaagaauugacc

SEQ ID NO: 746118 - RNA, 17 nt, Artificial Sequence
  Synthetic
uuaugaaccacuugacc

SEQ ID NO: 746119 - RNA, 17 nt, Artificial Sequence
  Synthetic
caaccuccuccuugacc

SEQ ID NO: 746120 - RNA, 17 nt, Artificial Sequence
  Synthetic
uauucuguaucuugacc

SEQ ID NO: 746121 - RNA, 17 nt, Artificial Sequence
  Synthetic
agaaauaccauuugacc

SEQ ID NO: 746122 - RNA, 17 nt, Artificial Sequence
  Synthetic
auauucuacaaaauacc

SEQ ID NO: 746123 - RNA, 17 nt, Artificial Sequence
  Synthetic
acaagggcuaaaauacc

SEQ ID NO: 746124 - RNA, 17 nt, Artificial Sequence
  Synthetic
uagauuuuuaaaauacc

SEQ ID NO: 746125 - RNA, 17 nt, Artificial Sequence
  Synthetic
uuuacaugccaaauacc

SEQ ID NO: 746126 - RNA, 17 nt, Artificial Sequence
  Synthetic
acucauuuagaaauacc

SEQ ID NO: 746127 - RNA, 17 nt, Artificial Sequence
  Synthetic
ccuuaucaugaaauacc

SEQ ID NO: 746128 - RNA, 17 nt, Artificial Sequence
  Synthetic
aagagaugugaaauacc

SEQ ID NO: 746129 - RNA, 17 nt, Artificial Sequence
  Synthetic
uggucacagccaauacc

SEQ ID NO: 746130 - RNA, 17 nt, Artificial Sequence
  Synthetic
agugagaagggaauacc

SEQ ID NO: 746131 - RNA, 17 nt, Artificial Sequence
  Synthetic
ugugccuuuugaauacc

SEQ ID NO: 746132 - RNA, 17 nt, Artificial Sequence
  Synthetic
aaucuuugacuaauacc

SEQ ID NO: 746133 - RNA, 17 nt, Artificial Sequence
  Synthetic
augaaugugguaauacc

SEQ ID NO: 746134 - RNA, 17 nt, Artificial Sequence
  Synthetic
agcaucuaccacauacc

SEQ ID NO: 746135 - RNA, 17 nt, Artificial Sequence
  Synthetic
aaguccauauacauacc

SEQ ID NO: 746136 - RNA, 17 nt, Artificial Sequence
  Synthetic
caaccaggucucauacc

SEQ ID NO: 746137 - RNA, 17 nt, Artificial Sequence
  Synthetic
aaacaaccagucauacc

SEQ ID NO: 746138 - RNA, 17 nt, Artificial Sequence
  Synthetic
uccugcagguucauacc

SEQ ID NO: 746139 - RNA, 17 nt, Artificial Sequence
  Synthetic
aauaggauaaagauacc

SEQ ID NO: 746140 - RNA, 17 nt, Artificial Sequence
  Synthetic
ucacauuugcagauacc

SEQ ID NO: 746141 - RNA, 17 nt, Artificial Sequence
  Synthetic
auaggugcauagauacc

SEQ ID NO: 746142 - RNA, 17 nt, Artificial Sequence
  Synthetic
cuuuauggauggauacc

SEQ ID NO: 746143 - RNA, 17 nt, Artificial Sequence
  Synthetic
agacuuuuaaugauacc

SEQ ID NO: 746144 - RNA, 17 nt, Artificial Sequence
  Synthetic
caagaagaacugauacc

SEQ ID NO: 746145 - RNA, 17 nt, Artificial Sequence
  Synthetic
ucuucaucugugauacc

SEQ ID NO: 746146 - RNA, 17 nt, Artificial Sequence
  Synthetic
ucuuuuggauauauacc

SEQ ID NO: 746147 - RNA, 17 nt, Artificial Sequence
  Synthetic
aauuucuaguauauacc

SEQ ID NO: 746148 - RNA, 17 nt, Artificial Sequence
  Synthetic
aggacacuauuuauacc

SEQ ID NO: 746149 - RNA, 17 nt, Artificial Sequence
  Synthetic
caacaucacuaacuacc

SEQ ID NO: 746150 - RNA, 17 nt, Artificial Sequence
  Synthetic
uggaagguagcacuacc

SEQ ID NO: 746151 - RNA, 17 nt, Artificial Sequence
  Synthetic
cagugucagggacuacc

SEQ ID NO: 746152 - RNA, 17 nt, Artificial Sequence
  Synthetic
uuucuagcccuacuacc

SEQ ID NO: 746153 - RNA, 17 nt, Artificial Sequence
  Synthetic
acagguccuuuacuacc

SEQ ID NO: 746154 - RNA, 17 nt, Artificial Sequence
  Synthetic
ccuccauaaaaccuacc

SEQ ID NO: 746155 - RNA, 17 nt, Artificial Sequence
  Synthetic
auccaaucacaccuacc

SEQ ID NO: 746156 - RNA, 17 nt, Artificial Sequence
  Synthetic
ucagaaccucaccuacc

SEQ ID NO: 746157 - RNA, 17 nt, Artificial Sequence
  Synthetic
accaugauguaccuacc

SEQ ID NO: 746158 - RNA, 17 nt, Artificial Sequence
  Synthetic
uguccugguuaccuacc

SEQ ID NO: 746159 - RNA, 17 nt, Artificial Sequence
  Synthetic
cuguaaucccagcuacc

SEQ ID NO: 746160 - RNA, 17 nt, Artificial Sequence
  Synthetic
cuguagucccagcuacc

SEQ ID NO: 746161 - RNA, 17 nt, Artificial Sequence
  Synthetic
caucccauccagcuacc

SEQ ID NO: 746162 - RNA, 17 nt, Artificial Sequence
  Synthetic
caguagccucagcuacc

SEQ ID NO: 746163 - RNA, 17 nt, Artificial Sequence
  Synthetic
ccaccuguucagcuacc

SEQ ID NO: 746164 - RNA, 17 nt, Artificial Sequence
  Synthetic
agugagugguagcuacc

SEQ ID NO: 746165 - RNA, 17 nt, Artificial Sequence
  Synthetic
uuaccaugcucgcuacc

SEQ ID NO: 746166 - RNA, 17 nt, Artificial Sequence
  Synthetic
ugcauugauuugcuacc

SEQ ID NO: 746167 - RNA, 17 nt, Artificial Sequence
  Synthetic
ugaacauauuugcuacc

SEQ ID NO: 746168 - RNA, 17 nt, Artificial Sequence
  Synthetic
acuagagaaacucuacc

SEQ ID NO: 746169 - RNA, 17 nt, Artificial Sequence
  Synthetic
auuuuguuuccucuacc

SEQ ID NO: 746170 - RNA, 17 nt, Artificial Sequence
  Synthetic
aguuuuuggucucuacc

SEQ ID NO: 746171 - RNA, 17 nt, Artificial Sequence
  Synthetic
ugcauuuuuucucuacc

SEQ ID NO: 746172 - RNA, 17 nt, Artificial Sequence
  Synthetic
cauuugauuggucuacc

SEQ ID NO: 746173 - RNA, 17 nt, Artificial Sequence
  Synthetic
uucucuccuugucuacc

SEQ ID NO: 746174 - RNA, 17 nt, Artificial Sequence
  Synthetic
uuucuguuucuucuacc

SEQ ID NO: 746175 - RNA, 17 nt, Artificial Sequence
  Synthetic
aucacugaguuucuacc

SEQ ID NO: 746176 - RNA, 17 nt, Artificial Sequence
  Synthetic
ccuuggcauuuucuacc

SEQ ID NO: 746177 - RNA, 17 nt, Artificial Sequence
  Synthetic
cauauuuuuuuucuacc

SEQ ID NO: 746178 - RNA, 17 nt, Artificial Sequence
  Synthetic
cauuucccaaaaguacc

SEQ ID NO: 746179 - RNA, 17 nt, Artificial Sequence
  Synthetic
uuccccuuaaaaguacc

SEQ ID NO: 746180 - RNA, 17 nt, Artificial Sequence
  Synthetic
cuuguaucccaaguacc

SEQ ID NO: 746181 - RNA, 17 nt, Artificial Sequence
  Synthetic
ucagccucccaaguacc

SEQ ID NO: 746182 - RNA, 17 nt, Artificial Sequence
  Synthetic
auagcaccucaaguacc

SEQ ID NO: 746183 - RNA, 17 nt, Artificial Sequence
  Synthetic
ucagccuccgaaguacc

SEQ ID NO: 746184 - RNA, 17 nt, Artificial Sequence
  Synthetic
agcugccacuaaguacc

SEQ ID NO: 746185 - RNA, 17 nt, Artificial Sequence
  Synthetic
uuuccaacugcaguacc

SEQ ID NO: 746186 - RNA, 17 nt, Artificial Sequence
  Synthetic
uuacuaugcucaguacc

SEQ ID NO: 746187 - RNA, 17 nt, Artificial Sequence
  Synthetic
auggauggaaagguacc

SEQ ID NO: 746188 - RNA, 17 nt, Artificial Sequence
  Synthetic
cuaguuaauaagguacc

SEQ ID NO: 746189 - RNA, 17 nt, Artificial Sequence
  Synthetic
ucuguaagccagguacc

SEQ ID NO: 746190 - RNA, 17 nt, Artificial Sequence
  Synthetic
ucacauucugagguacc

SEQ ID NO: 746191 - RNA, 17 nt, Artificial Sequence
  Synthetic
cacagagagaggguacc

SEQ ID NO: 746192 - RNA, 17 nt, Artificial Sequence
  Synthetic
agucacauugggguacc

SEQ ID NO: 746193 - RNA, 17 nt, Artificial Sequence
  Synthetic
acacuuaaaaugguacc

SEQ ID NO: 746194 - RNA, 17 nt, Artificial Sequence
  Synthetic
agccucuaaaugguacc

SEQ ID NO: 746195 - RNA, 17 nt, Artificial Sequence
  Synthetic
cucagggcaaugguacc

SEQ ID NO: 746196 - RNA, 17 nt, Artificial Sequence
  Synthetic
acugaaaagaugguacc

SEQ ID NO: 746197 - RNA, 17 nt, Artificial Sequence
  Synthetic
aaaggaaugcugguacc

SEQ ID NO: 746198 - RNA, 17 nt, Artificial Sequence
  Synthetic
uaacucauucugguacc

SEQ ID NO: 746199 - RNA, 17 nt, Artificial Sequence
  Synthetic
acugggagugugguacc

SEQ ID NO: 746200 - RNA, 17 nt, Artificial Sequence
  Synthetic
aacauuuaucauguacc

SEQ ID NO: 746201 - RNA, 17 nt, Artificial Sequence
  Synthetic
ugacuucuauauguacc

SEQ ID NO: 746202 - RNA, 17 nt, Artificial Sequence
  Synthetic
uugugcccuuauguacc

SEQ ID NO: 746203 - RNA, 17 nt, Artificial Sequence
  Synthetic
uggaaaguuuauguacc

SEQ ID NO: 746204 - RNA, 17 nt, Artificial Sequence
  Synthetic
ugaagagccccuguacc

SEQ ID NO: 746205 - RNA, 17 nt, Artificial Sequence
  Synthetic
cauaaauuaucuguacc

SEQ ID NO: 746206 - RNA, 17 nt, Artificial Sequence
  Synthetic
augccuugcucuguacc

SEQ ID NO: 746207 - RNA, 17 nt, Artificial Sequence
  Synthetic
augcaagauuguguacc

SEQ ID NO: 746208 - RNA, 17 nt, Artificial Sequence
  Synthetic
cguaccuauuguguacc

SEQ ID NO: 746209 - RNA, 17 nt, Artificial Sequence
  Synthetic
aacugcugcauuguacc

SEQ ID NO: 746210 - RNA, 17 nt, Artificial Sequence
  Synthetic
cucuuaagaguuguacc

SEQ ID NO: 746211 - RNA, 17 nt, Artificial Sequence
  Synthetic
aacuuuauuguuguacc

SEQ ID NO: 746212 - RNA, 17 nt, Artificial Sequence
  Synthetic
cuugaugaguuuguacc

SEQ ID NO: 746213 - RNA, 17 nt, Artificial Sequence
  Synthetic
aaauacaaaaaauuacc

SEQ ID NO: 746214 - RNA, 17 nt, Artificial Sequence
  Synthetic
aaaauacaaaaauuacc

SEQ ID NO: 746215 - RNA, 17 nt, Artificial Sequence
  Synthetic
ugguguggaaaauuacc

SEQ ID NO: 746216 - RNA, 17 nt, Artificial Sequence
  Synthetic
uuucuuuauaaauuacc

SEQ ID NO: 746217 - RNA, 17 nt, Artificial Sequence
  Synthetic
cuugaauaccaauuacc

SEQ ID NO: 746218 - RNA, 17 nt, Artificial Sequence
  Synthetic
cacagaaugcaauuacc

SEQ ID NO: 746219 - RNA, 17 nt, Artificial Sequence
  Synthetic
cucuagcauuaauuacc

SEQ ID NO: 746220 - RNA, 17 nt, Artificial Sequence
  Synthetic
auugaauccccauuacc

SEQ ID NO: 746221 - RNA, 17 nt, Artificial Sequence
  Synthetic
caacccagaauauuacc

SEQ ID NO: 746222 - RNA, 17 nt, Artificial Sequence
  Synthetic
cuauaaaugcuauuacc

SEQ ID NO: 746223 - RNA, 17 nt, Artificial Sequence
  Synthetic
uuauaguuauuauuacc

SEQ ID NO: 746224 - RNA, 17 nt, Artificial Sequence
  Synthetic
uuaaucugaaccuuacc

SEQ ID NO: 746225 - RNA, 17 nt, Artificial Sequence
  Synthetic
aauacugaccccuuacc

SEQ ID NO: 746226 - RNA, 17 nt, Artificial Sequence
  Synthetic
cugugauaaaucuuacc

SEQ ID NO: 746227 - RNA, 17 nt, Artificial Sequence
  Synthetic
ucaaugucccucuuacc

SEQ ID NO: 746228 - RNA, 17 nt, Artificial Sequence
  Synthetic
cagagcugcuucuuacc

SEQ ID NO: 746229 - RNA, 17 nt, Artificial Sequence
  Synthetic
agaauucaaaaguuacc

SEQ ID NO: 746230 - RNA, 17 nt, Artificial Sequence
  Synthetic
auuuccagcaaguuacc

SEQ ID NO: 746231 - RNA, 17 nt, Artificial Sequence
  Synthetic
auuucuagcaaguuacc

SEQ ID NO: 746232 - RNA, 17 nt, Artificial Sequence
  Synthetic
auguccaaucaguuacc

SEQ ID NO: 746233 - RNA, 17 nt, Artificial Sequence
  Synthetic
auaauauaauaguuacc

SEQ ID NO: 746234 - RNA, 17 nt, Artificial Sequence
  Synthetic
uuucuaucauaguuacc

SEQ ID NO: 746235 - RNA, 17 nt, Artificial Sequence
  Synthetic
uuugaaaauggguuacc

SEQ ID NO: 746236 - RNA, 17 nt, Artificial Sequence
  Synthetic
auuaaacagugguuacc

SEQ ID NO: 746237 - RNA, 17 nt, Artificial Sequence
  Synthetic
aguugaaggauguuacc

SEQ ID NO: 746238 - RNA, 17 nt, Artificial Sequence
  Synthetic
cacauugcacuguuacc

SEQ ID NO: 746239 - RNA, 17 nt, Artificial Sequence
  Synthetic
ucauuaucccuguuacc

SEQ ID NO: 746240 - RNA, 17 nt, Artificial Sequence
  Synthetic
cuugcaucaguguuacc

SEQ ID NO: 746241 - RNA, 17 nt, Artificial Sequence
  Synthetic
uuugugaaguuguuacc

SEQ ID NO: 746242 - RNA, 17 nt, Artificial Sequence
  Synthetic
uguucagguuuguuacc

SEQ ID NO: 746243 - RNA, 17 nt, Artificial Sequence
  Synthetic
cauguugagcauuuacc

SEQ ID NO: 746244 - RNA, 17 nt, Artificial Sequence
  Synthetic
uuguuucugcauuuacc

SEQ ID NO: 746245 - RNA, 17 nt, Artificial Sequence
  Synthetic
uuuuuguucuauuuacc

SEQ ID NO: 746246 - RNA, 17 nt, Artificial Sequence
  Synthetic
cuuuacuuuuauuuacc

SEQ ID NO: 746247 - RNA, 17 nt, Artificial Sequence
  Synthetic
uccaugaaaacuuuacc

SEQ ID NO: 746248 - RNA, 17 nt, Artificial Sequence
  Synthetic
acagucauuucuuuacc

SEQ ID NO: 746249 - RNA, 17 nt, Artificial Sequence
  Synthetic
uguuuuaauaguuuacc

SEQ ID NO: 746250 - RNA, 17 nt, Artificial Sequence
  Synthetic
ugccucucagguuuacc

SEQ ID NO: 746251 - RNA, 17 nt, Artificial Sequence
  Synthetic
aucuuuugucuuuuacc

SEQ ID NO: 746252 - RNA, 17 nt, Artificial Sequence
  Synthetic
uugaaucauguuuuacc

SEQ ID NO: 746253 - RNA, 17 nt, Artificial Sequence
  Synthetic
augcuauucuuuuuacc

SEQ ID NO: 746254 - RNA, 17 nt, Artificial Sequence
  Synthetic
uuccaacaaaaaaaccc

SEQ ID NO: 746255 - RNA, 17 nt, Artificial Sequence
  Synthetic
uuucuccugaaaaaccc

SEQ ID NO: 746256 - RNA, 17 nt, Artificial Sequence
  Synthetic
uuauaauguaaaaaccc

SEQ ID NO: 746257 - RNA, 17 nt, Artificial Sequence
  Synthetic
cucucaaagcaaaaccc

SEQ ID NO: 746258 - RNA, 17 nt, Artificial Sequence
  Synthetic
uuuauaacagaaaaccc

SEQ ID NO: 746259 - RNA, 17 nt, Artificial Sequence
  Synthetic
uaaacuagauaaaaccc

SEQ ID NO: 746260 - RNA, 17 nt, Artificial Sequence
  Synthetic
ucuaaguauucaaaccc

SEQ ID NO: 746261 - RNA, 17 nt, Artificial Sequence
  Synthetic
acagggguuggaaaccc

SEQ ID NO: 746262 - RNA, 17 nt, Artificial Sequence
  Synthetic
uuuugugcuugaaaccc

SEQ ID NO: 746263 - RNA, 17 nt, Artificial Sequence
  Synthetic
augguguaaguaaaccc

SEQ ID NO: 746264 - RNA, 17 nt, Artificial Sequence
  Synthetic
aaagaucaaaacaaccc

SEQ ID NO: 746265 - RNA, 17 nt, Artificial Sequence
  Synthetic
ucuucauuccacaaccc

SEQ ID NO: 746266 - RNA, 17 nt, Artificial Sequence
  Synthetic
ccauuguacuccaaccc

SEQ ID NO: 746267 - RNA, 17 nt, Artificial Sequence
  Synthetic
agaugcugggucaaccc

SEQ ID NO: 746268 - RNA, 17 nt, Artificial Sequence
  Synthetic
aagaauugcucgaaccc

SEQ ID NO: 746269 - RNA, 17 nt, Artificial Sequence
  Synthetic
auccaaaaauggaaccc

SEQ ID NO: 746270 - RNA, 17 nt, Artificial Sequence
  Synthetic
ugguauuuauggaaccc

SEQ ID NO: 746271 - RNA, 17 nt, Artificial Sequence
  Synthetic
agcauuuacuggaaccc

SEQ ID NO: 746272 - RNA, 17 nt, Artificial Sequence
  Synthetic
uuaauaauacugaaccc

SEQ ID NO: 746273 - RNA, 17 nt, Artificial Sequence
  Synthetic
ucgccuuuucugaaccc

SEQ ID NO: 746274 - RNA, 17 nt, Artificial Sequence
  Synthetic
aaggaucacgugaaccc

SEQ ID NO: 746275 - RNA, 17 nt, Artificial Sequence
  Synthetic
gagaauggcgugaaccc

SEQ ID NO: 746276 - RNA, 17 nt, Artificial Sequence
  Synthetic
aagaaucacuugaaccc

SEQ ID NO: 746277 - RNA, 17 nt, Artificial Sequence
  Synthetic
gagaaucacuugaaccc

SEQ ID NO: 746278 - RNA, 17 nt, Artificial Sequence
  Synthetic
gagaaucgcuugaaccc

SEQ ID NO: 746279 - RNA, 17 nt, Artificial Sequence
  Synthetic
gagaauugcuugaaccc

SEQ ID NO: 746280 - RNA, 17 nt, Artificial Sequence
  Synthetic
aagaaucucuugaaccc

SEQ ID NO: 746281 - RNA, 17 nt, Artificial Sequence
  Synthetic
agccaagguuugaaccc

SEQ ID NO: 746282 - RNA, 17 nt, Artificial Sequence
  Synthetic
uuaacauaaccuaaccc

SEQ ID NO: 746283 - RNA, 17 nt, Artificial Sequence
  Synthetic
aucucuaagucuaaccc

SEQ ID NO: 746284 - RNA, 17 nt, Artificial Sequence
  Synthetic
acaauugcaaguaaccc

SEQ ID NO: 746285 - RNA, 17 nt, Artificial Sequence
  Synthetic
agcaaacaagguaaccc

SEQ ID NO: 746286 - RNA, 17 nt, Artificial Sequence
  Synthetic
uuuugcucuuguaaccc

SEQ ID NO: 746287 - RNA, 17 nt, Artificial Sequence
  Synthetic
cauuucuagacacaccc

SEQ ID NO: 746288 - RNA, 17 nt, Artificial Sequence
  Synthetic
cucgcaccaccacaccc

SEQ ID NO: 746289 - RNA, 17 nt, Artificial Sequence
  Synthetic
aggggaacaucacaccc

SEQ ID NO: 746290 - RNA, 17 nt, Artificial Sequence
  Synthetic
aucuguugaugacaccc

SEQ ID NO: 746291 - RNA, 17 nt, Artificial Sequence
  Synthetic
cacaaccucuaccaccc

SEQ ID NO: 746292 - RNA, 17 nt, Artificial Sequence
  Synthetic
aaguucaguugccaccc

SEQ ID NO: 746293 - RNA, 17 nt, Artificial Sequence
  Synthetic
cgaccaaugaagcaccc

SEQ ID NO: 746294 - RNA, 17 nt, Artificial Sequence
  Synthetic
caaucucugaagcaccc

SEQ ID NO: 746295 - RNA, 17 nt, Artificial Sequence
  Synthetic
acaaguucugagcaccc

SEQ ID NO: 746296 - RNA, 17 nt, Artificial Sequence
  Synthetic
ugaggcugcccgcaccc

SEQ ID NO: 746297 - RNA, 17 nt, Artificial Sequence
  Synthetic
agucucacucugcaccc

SEQ ID NO: 746298 - RNA, 17 nt, Artificial Sequence
  Synthetic
ccacuguuugugcaccc

SEQ ID NO: 746299 - RNA, 17 nt, Artificial Sequence
  Synthetic
aacguggcuuugcaccc

SEQ ID NO: 746300 - RNA, 17 nt, Artificial Sequence
  Synthetic
aguauaauauaucaccc

SEQ ID NO: 746301 - RNA, 17 nt, Artificial Sequence
  Synthetic
acuauuucuuaucaccc

SEQ ID NO: 746302 - RNA, 17 nt, Artificial Sequence
  Synthetic
cucuuauuuacucaccc

SEQ ID NO: 746303 - RNA, 17 nt, Artificial Sequence
  Synthetic
auuuaagcuggucaccc

SEQ ID NO: 746304 - RNA, 17 nt, Artificial Sequence
  Synthetic
aaaugauacugucaccc

SEQ ID NO: 746305 - RNA, 17 nt, Artificial Sequence
  Synthetic
uucucacccugucaccc

SEQ ID NO: 746306 - RNA, 17 nt, Artificial Sequence
  Synthetic
uccucacucugucaccc

SEQ ID NO: 746307 - RNA, 17 nt, Artificial Sequence
  Synthetic
aucucacucugucaccc

SEQ ID NO: 746308 - RNA, 17 nt, Artificial Sequence
  Synthetic
uuuugcuuuugucaccc

SEQ ID NO: 746309 - RNA, 17 nt, Artificial Sequence
  Synthetic
aaugcaauuuuucaccc

SEQ ID NO: 746310 - RNA, 17 nt, Artificial Sequence
  Synthetic
cccuaugaaaaagaccc

SEQ ID NO: 746311 - RNA, 17 nt, Artificial Sequence
  Synthetic
agguagaaagaagaccc

SEQ ID NO: 746312 - RNA, 17 nt, Artificial Sequence
  Synthetic
aacaugaaagaagaccc

SEQ ID NO: 746313 - RNA, 17 nt, Artificial Sequence
  Synthetic
aagucucccuaagaccc

SEQ ID NO: 746314 - RNA, 17 nt, Artificial Sequence
  Synthetic
ugcugagggacagaccc

SEQ ID NO: 746315 - RNA, 17 nt, Artificial Sequence
  Synthetic
uaauagucaucagaccc

SEQ ID NO: 746316 - RNA, 17 nt, Artificial Sequence
  Synthetic
auugauagcagagaccc

SEQ ID NO: 746317 - RNA, 17 nt, Artificial Sequence
  Synthetic
acuacagcgagagaccc

SEQ ID NO: 746318 - RNA, 17 nt, Artificial Sequence
  Synthetic
cuauucuuaggagaccc

SEQ ID NO: 746319 - RNA, 17 nt, Artificial Sequence
  Synthetic
cagcaagcuggagaccc

SEQ ID NO: 746320 - RNA, 17 nt, Artificial Sequence
  Synthetic
auccucaucugagaccc

SEQ ID NO: 746321 - RNA, 17 nt, Artificial Sequence
  Synthetic
acgggaacaauagaccc

SEQ ID NO: 746322 - RNA, 17 nt, Artificial Sequence
  Synthetic
uaacucagucuagaccc

SEQ ID NO: 746323 - RNA, 17 nt, Artificial Sequence
  Synthetic
uggagagcugaggaccc

SEQ ID NO: 746324 - RNA, 17 nt, Artificial Sequence
  Synthetic
aauguuucuuaggaccc

SEQ ID NO: 746325 - RNA, 17 nt, Artificial Sequence
  Synthetic
uguugugggagggaccc

SEQ ID NO: 746326 - RNA, 17 nt, Artificial Sequence
  Synthetic
ugggucacgugggaccc

SEQ ID NO: 746327 - RNA, 17 nt, Artificial Sequence
  Synthetic
aauggcugcuuggaccc

SEQ ID NO: 746328 - RNA, 17 nt, Artificial Sequence
  Synthetic
uuauuuuuaaaugaccc

SEQ ID NO: 746329 - RNA, 17 nt, Artificial Sequence
  Synthetic
agccuauggaaugaccc

SEQ ID NO: 746330 - RNA, 17 nt, Artificial Sequence
  Synthetic
aaaacaucuuaugaccc

SEQ ID NO: 746331 - RNA, 17 nt, Artificial Sequence
  Synthetic
aggugcugcacugaccc

SEQ ID NO: 746332 - RNA, 17 nt, Artificial Sequence
  Synthetic
cacaacuacccugaccc

SEQ ID NO: 746333 - RNA, 17 nt, Artificial Sequence
  Synthetic
cauaacaccagugaccc

SEQ ID NO: 746334 - RNA, 17 nt, Artificial Sequence
  Synthetic
uucccauggggugaccc

SEQ ID NO: 746335 - RNA, 17 nt, Artificial Sequence
  Synthetic
cauuugcucugugaccc

SEQ ID NO: 746336 - RNA, 17 nt, Artificial Sequence
  Synthetic
uccacacugugugaccc

SEQ ID NO: 746337 - RNA, 17 nt, Artificial Sequence
  Synthetic
uuagauuuuugugaccc

SEQ ID NO: 746338 - RNA, 17 nt, Artificial Sequence
  Synthetic
aucaagguaauugaccc

SEQ ID NO: 746339 - RNA, 17 nt, Artificial Sequence
  Synthetic
aaccaguugcaauaccc

SEQ ID NO: 746340 - RNA, 17 nt, Artificial Sequence
  Synthetic
uaaugauuauaauaccc

SEQ ID NO: 746341 - RNA, 17 nt, Artificial Sequence
  Synthetic
ugugaaaauagauaccc

SEQ ID NO: 746342 - RNA, 17 nt, Artificial Sequence
  Synthetic
agucaacaaggauaccc

SEQ ID NO: 746343 - RNA, 17 nt, Artificial Sequence
  Synthetic
cuuugggauauauaccc

SEQ ID NO: 746344 - RNA, 17 nt, Artificial Sequence
  Synthetic
accagauguuuauaccc

SEQ ID NO: 746345 - RNA, 17 nt, Artificial Sequence
  Synthetic
uuaugauacaacuaccc

SEQ ID NO: 746346 - RNA, 17 nt, Artificial Sequence
  Synthetic
uuucucugacccuaccc

SEQ ID NO: 746347 - RNA, 17 nt, Artificial Sequence
  Synthetic
uccucccuccccuaccc

SEQ ID NO: 746348 - RNA, 17 nt, Artificial Sequence
  Synthetic
aguagucccagcuaccc

SEQ ID NO: 746349 - RNA, 17 nt, Artificial Sequence
  Synthetic
uguagucccagcuaccc

SEQ ID NO: 746350 - RNA, 17 nt, Artificial Sequence
  Synthetic
aguagccucagcuaccc

SEQ ID NO: 746351 - RNA, 17 nt, Artificial Sequence
  Synthetic
uucuuggaaggcuaccc

SEQ ID NO: 746352 - RNA, 17 nt, Artificial Sequence
  Synthetic
aacaauuaauucuaccc

SEQ ID NO: 746353 - RNA, 17 nt, Artificial Sequence
  Synthetic
auccuuauauucuaccc

SEQ ID NO: 746354 - RNA, 17 nt, Artificial Sequence
  Synthetic
aaguuaagcuucuaccc

SEQ ID NO: 746355 - RNA, 17 nt, Artificial Sequence
  Synthetic
caucaaccagaguaccc

SEQ ID NO: 746356 - RNA, 17 nt, Artificial Sequence
  Synthetic
augaauauuuaguaccc

SEQ ID NO: 746357 - RNA, 17 nt, Artificial Sequence
  Synthetic
uugcuucagugguaccc

SEQ ID NO: 746358 - RNA, 17 nt, Artificial Sequence
  Synthetic
aaauacaaaaauuaccc

SEQ ID NO: 746359 - RNA, 17 nt, Artificial Sequence
  Synthetic
acagaaugcaauuaccc

SEQ ID NO: 746360 - RNA, 17 nt, Artificial Sequence
  Synthetic
uuuucaguuaguuaccc

SEQ ID NO: 746361 - RNA, 17 nt, Artificial Sequence
  Synthetic
cgauuauuuuguuaccc

SEQ ID NO: 746362 - RNA, 17 nt, Artificial Sequence
  Synthetic
caucuuuuccuuuaccc

SEQ ID NO: 746363 - RNA, 17 nt, Artificial Sequence
  Synthetic
agaaguaacaaaacccc

SEQ ID NO: 746364 - RNA, 17 nt, Artificial Sequence
  Synthetic
aaauuuuuacaaacccc

SEQ ID NO: 746365 - RNA, 17 nt, Artificial Sequence
  Synthetic
uucucagauucaacccc

SEQ ID NO: 746366 - RNA, 17 nt, Artificial Sequence
  Synthetic
ucucguaucugaacccc

SEQ ID NO: 746367 - RNA, 17 nt, Artificial Sequence
  Synthetic
augagaaccauaacccc

SEQ ID NO: 746368 - RNA, 17 nt, Artificial Sequence
  Synthetic
ucaugcuaccacacccc

SEQ ID NO: 746369 - RNA, 17 nt, Artificial Sequence
  Synthetic
ccauuugggcacacccc

SEQ ID NO: 746370 - RNA, 17 nt, Artificial Sequence
  Synthetic
cuuugagaggacacccc

SEQ ID NO: 746371 - RNA, 17 nt, Artificial Sequence
  Synthetic
cugguagaacccacccc

SEQ ID NO: 746372 - RNA, 17 nt, Artificial Sequence
  Synthetic
ccacugcacuccacccc

SEQ ID NO: 746373 - RNA, 17 nt, Artificial Sequence
  Synthetic
accuccaccuccacccc

SEQ ID NO: 746374 - RNA, 17 nt, Artificial Sequence
  Synthetic
ugcagcagaaucacccc

SEQ ID NO: 746375 - RNA, 17 nt, Artificial Sequence
  Synthetic
ucucgcucugucacccc

SEQ ID NO: 746376 - RNA, 17 nt, Artificial Sequence
  Synthetic
uguggucuggggacccc

SEQ ID NO: 746377 - RNA, 17 nt, Artificial Sequence
  Synthetic
augauggaaaugacccc

SEQ ID NO: 746378 - RNA, 17 nt, Artificial Sequence
  Synthetic
accaugcccacuacccc

SEQ ID NO: 746379 - RNA, 17 nt, Artificial Sequence
  Synthetic
aaucacccagcuacccc

SEQ ID NO: 746380 - RNA, 17 nt, Artificial Sequence
  Synthetic
aaacaaaacaguacccc

SEQ ID NO: 746381 - RNA, 17 nt, Artificial Sequence
  Synthetic
uuuucccuuuguacccc

SEQ ID NO: 746382 - RNA, 17 nt, Artificial Sequence
  Synthetic
caaagcuugcuuacccc

SEQ ID NO: 746383 - RNA, 17 nt, Artificial Sequence
  Synthetic
cacacacacacaccccc

SEQ ID NO: 746384 - RNA, 17 nt, Artificial Sequence
  Synthetic
caaaucaccccaccccc

SEQ ID NO: 746385 - RNA, 17 nt, Artificial Sequence
  Synthetic
ccuccaccuccaccccc

SEQ ID NO: 746386 - RNA, 17 nt, Artificial Sequence
  Synthetic
uacaucccccucccccc

SEQ ID NO: 746387 - RNA, 17 nt, Artificial Sequence
  Synthetic
aauccaagucagccccc

SEQ ID NO: 746388 - RNA, 17 nt, Artificial Sequence
  Synthetic
cuacauuuuuggccccc

SEQ ID NO: 746389 - RNA, 17 nt, Artificial Sequence
  Synthetic
uucuuuaucaugccccc

SEQ ID NO: 746390 - RNA, 17 nt, Artificial Sequence
  Synthetic
ucacucaaccugccccc

SEQ ID NO: 746391 - RNA, 17 nt, Artificial Sequence
  Synthetic
cucauugcccugccccc

SEQ ID NO: 746392 - RNA, 17 nt, Artificial Sequence
  Synthetic
ucccagucugugccccc

SEQ ID NO: 746393 - RNA, 17 nt, Artificial Sequence
  Synthetic
auucacauuuugccccc

SEQ ID NO: 746394 - RNA, 17 nt, Artificial Sequence
  Synthetic
auuuucucaaauccccc

SEQ ID NO: 746395 - RNA, 17 nt, Artificial Sequence
  Synthetic
uuaguuauuccuccccc

SEQ ID NO: 746396 - RNA, 17 nt, Artificial Sequence
  Synthetic
uuaagaucauguccccc

SEQ ID NO: 746397 - RNA, 17 nt, Artificial Sequence
  Synthetic
ucucgcucuuguccccc

SEQ ID NO: 746398 - RNA, 17 nt, Artificial Sequence
  Synthetic
auucaauuacuuccccc

SEQ ID NO: 746399 - RNA, 17 nt, Artificial Sequence
  Synthetic
uucugugaguuuccccc

SEQ ID NO: 746400 - RNA, 17 nt, Artificial Sequence
  Synthetic
augaacauuuuuccccc

SEQ ID NO: 746401 - RNA, 17 nt, Artificial Sequence
  Synthetic
agcggcagcaaagcccc

SEQ ID NO: 746402 - RNA, 17 nt, Artificial Sequence
  Synthetic
uucaaaaaaccagcccc

SEQ ID NO: 746403 - RNA, 17 nt, Artificial Sequence
  Synthetic
ugccccaccccagcccc

SEQ ID NO: 746404 - RNA, 17 nt, Artificial Sequence
  Synthetic
uuccugcccccagcccc

SEQ ID NO: 746405 - RNA, 17 nt, Artificial Sequence
  Synthetic
ccccuucgcccagcccc

SEQ ID NO: 746406 - RNA, 17 nt, Artificial Sequence
  Synthetic
aggcagcagccagcccc

SEQ ID NO: 746407 - RNA, 17 nt, Artificial Sequence
  Synthetic
agaguccuuagagcccc

SEQ ID NO: 746408 - RNA, 17 nt, Artificial Sequence
  Synthetic
cuguuaccuggagcccc

SEQ ID NO: 746409 - RNA, 17 nt, Artificial Sequence
  Synthetic
cagcuucugguagcccc

SEQ ID NO: 746410 - RNA, 17 nt, Artificial Sequence
  Synthetic
ugaucauauuuagcccc

SEQ ID NO: 746411 - RNA, 17 nt, Artificial Sequence
  Synthetic
auuucucacaucgcccc

SEQ ID NO: 746412 - RNA, 17 nt, Artificial Sequence
  Synthetic
uuccacaggcaggcccc

SEQ ID NO: 746413 - RNA, 17 nt, Artificial Sequence
  Synthetic
uugcuugggcaggcccc

SEQ ID NO: 746414 - RNA, 17 nt, Artificial Sequence
  Synthetic
uggaaaucuuaggcccc

SEQ ID NO: 746415 - RNA, 17 nt, Artificial Sequence
  Synthetic
uccuaauaaggggcccc

SEQ ID NO: 746416 - RNA, 17 nt, Artificial Sequence
  Synthetic
caugguucacuggcccc

SEQ ID NO: 746417 - RNA, 17 nt, Artificial Sequence
  Synthetic
ccacgaaaccuggcccc

SEQ ID NO: 746418 - RNA, 17 nt, Artificial Sequence
  Synthetic
uacuggucuguggcccc

SEQ ID NO: 746419 - RNA, 17 nt, Artificial Sequence
  Synthetic
acauacacuccugcccc

SEQ ID NO: 746420 - RNA, 17 nt, Artificial Sequence
  Synthetic
agaauuccccuugcccc

SEQ ID NO: 746421 - RNA, 17 nt, Artificial Sequence
  Synthetic
augauagagguugcccc

SEQ ID NO: 746422 - RNA, 17 nt, Artificial Sequence
  Synthetic
ugcagagguuuugcccc

SEQ ID NO: 746423 - RNA, 17 nt, Artificial Sequence
  Synthetic
uaaucuccaaaaucccc

SEQ ID NO: 746424 - RNA, 17 nt, Artificial Sequence
  Synthetic
uaauuaagaaaaucccc

SEQ ID NO: 746425 - RNA, 17 nt, Artificial Sequence
  Synthetic
auuuuaauagaaucccc

SEQ ID NO: 746426 - RNA, 17 nt, Artificial Sequence
  Synthetic
uaauccccauaaucccc

SEQ ID NO: 746427 - RNA, 17 nt, Artificial Sequence
  Synthetic
caaucaaagccaucccc

SEQ ID NO: 746428 - RNA, 17 nt, Artificial Sequence
  Synthetic
accacccuuccaucccc

SEQ ID NO: 746429 - RNA, 17 nt, Artificial Sequence
  Synthetic
uuuuucucuugaucccc

SEQ ID NO: 746430 - RNA, 17 nt, Artificial Sequence
  Synthetic
agaaccauucacucccc

SEQ ID NO: 746431 - RNA, 17 nt, Artificial Sequence
  Synthetic
cucccugaggccucccc

SEQ ID NO: 746432 - RNA, 17 nt, Artificial Sequence
  Synthetic
uuuauaacaagcucccc

SEQ ID NO: 746433 - RNA, 17 nt, Artificial Sequence
  Synthetic
ucaacuggucucucccc

SEQ ID NO: 746434 - RNA, 17 nt, Artificial Sequence
  Synthetic
agcucaacugucucccc

SEQ ID NO: 746435 - RNA, 17 nt, Artificial Sequence
  Synthetic
cucucccacuucucccc

SEQ ID NO: 746436 - RNA, 17 nt, Artificial Sequence
  Synthetic
cucuucucuuucucccc

SEQ ID NO: 746437 - RNA, 17 nt, Artificial Sequence
  Synthetic
ucccucuaguagucccc

SEQ ID NO: 746438 - RNA, 17 nt, Artificial Sequence
  Synthetic
cuaaauccacugucccc

SEQ ID NO: 746439 - RNA, 17 nt, Artificial Sequence
  Synthetic
ucuccucuggugucccc

SEQ ID NO: 746440 - RNA, 17 nt, Artificial Sequence
  Synthetic
caauugccaaauucccc

SEQ ID NO: 746441 - RNA, 17 nt, Artificial Sequence
  Synthetic
aagcacaugcauucccc

SEQ ID NO: 746442 - RNA, 17 nt, Artificial Sequence
  Synthetic
auuguaacagauucccc

SEQ ID NO: 746443 - RNA, 17 nt, Artificial Sequence
  Synthetic
aaagaagacacuucccc

SEQ ID NO: 746444 - RNA, 17 nt, Artificial Sequence
  Synthetic
acagcacugacuucccc

SEQ ID NO: 746445 - RNA, 17 nt, Artificial Sequence
  Synthetic
ccuuccuagccuucccc

SEQ ID NO: 746446 - RNA, 17 nt, Artificial Sequence
  Synthetic
uuggaagcugcuucccc

SEQ ID NO: 746447 - RNA, 17 nt, Artificial Sequence
  Synthetic
cuaacacccucuucccc

SEQ ID NO: 746448 - RNA, 17 nt, Artificial Sequence
  Synthetic
cucccaccagguucccc

SEQ ID NO: 746449 - RNA, 17 nt, Artificial Sequence
  Synthetic
cuucugugaguuucccc

SEQ ID NO: 746450 - RNA, 17 nt, Artificial Sequence
  Synthetic
aaugggcuaguuucccc

SEQ ID NO: 746451 - RNA, 17 nt, Artificial Sequence
  Synthetic
ccauuccaauuuucccc

SEQ ID NO: 746452 - RNA, 17 nt, Artificial Sequence
  Synthetic
cuggcagcauuuucccc

SEQ ID NO: 746453 - RNA, 17 nt, Artificial Sequence
  Synthetic
uuuaaaucauuuucccc

SEQ ID NO: 746454 - RNA, 17 nt, Artificial Sequence
  Synthetic
uauggguucuuuucccc

SEQ ID NO: 746455 - RNA, 17 nt, Artificial Sequence
  Synthetic
agaagcacuuuuucccc

SEQ ID NO: 746456 - RNA, 17 nt, Artificial Sequence
  Synthetic
agaaauauuuuuucccc

SEQ ID NO: 746457 - RNA, 17 nt, Artificial Sequence
  Synthetic
agugauuuuuuuucccc

SEQ ID NO: 746458 - RNA, 17 nt, Artificial Sequence
  Synthetic
aaaaaaaaaaaaagccc

SEQ ID NO: 746459 - RNA, 17 nt, Artificial Sequence
  Synthetic
ccaacaaagaaaagccc

SEQ ID NO: 746460 - RNA, 17 nt, Artificial Sequence
  Synthetic
uauuauaagaaaagccc

SEQ ID NO: 746461 - RNA, 17 nt, Artificial Sequence
  Synthetic
auauggcauaaaagccc

SEQ ID NO: 746462 - RNA, 17 nt, Artificial Sequence
  Synthetic
aaauaaguuaaaagccc

SEQ ID NO: 746463 - RNA, 17 nt, Artificial Sequence
  Synthetic
ucuaaaagcuaaagccc

SEQ ID NO: 746464 - RNA, 17 nt, Artificial Sequence
  Synthetic
uauaauguuuaaagccc

SEQ ID NO: 746465 - RNA, 17 nt, Artificial Sequence
  Synthetic
ugaacauacugaagccc

SEQ ID NO: 746466 - RNA, 17 nt, Artificial Sequence
  Synthetic
cuaaagagaauaagccc

SEQ ID NO: 746467 - RNA, 17 nt, Artificial Sequence
  Synthetic
ugcaugagaauaagccc

SEQ ID NO: 746468 - RNA, 17 nt, Artificial Sequence
  Synthetic
uaaaagcaccuaagccc

SEQ ID NO: 746469 - RNA, 17 nt, Artificial Sequence
  Synthetic
cuacauucuuuaagccc

SEQ ID NO: 746470 - RNA, 17 nt, Artificial Sequence
  Synthetic
caaagguccaacagccc

SEQ ID NO: 746471 - RNA, 17 nt, Artificial Sequence
  Synthetic
cugaccugcaacagccc

SEQ ID NO: 746472 - RNA, 17 nt, Artificial Sequence
  Synthetic
agguaaacauacagccc

SEQ ID NO: 746473 - RNA, 17 nt, Artificial Sequence
  Synthetic
agguucuggcccagccc

SEQ ID NO: 746474 - RNA, 17 nt, Artificial Sequence
  Synthetic
uaccuacuucccagccc

SEQ ID NO: 746475 - RNA, 17 nt, Artificial Sequence
  Synthetic
ccacugcacuccagccc

SEQ ID NO: 746476 - RNA, 17 nt, Artificial Sequence
  Synthetic
ucacugcacuccagccc

SEQ ID NO: 746477 - RNA, 17 nt, Artificial Sequence
  Synthetic
cacauucucuccagccc

SEQ ID NO: 746478 - RNA, 17 nt, Artificial Sequence
  Synthetic
agucucgccugcagccc

SEQ ID NO: 746479 - RNA, 17 nt, Artificial Sequence
  Synthetic
ucgaucccucucagccc

SEQ ID NO: 746480 - RNA, 17 nt, Artificial Sequence
  Synthetic
cagcagaguuucagccc

SEQ ID NO: 746481 - RNA, 17 nt, Artificial Sequence
  Synthetic
aagaaagagaagagccc

SEQ ID NO: 746482 - RNA, 17 nt, Artificial Sequence
  Synthetic
accacgaggaagagccc

SEQ ID NO: 746483 - RNA, 17 nt, Artificial Sequence
  Synthetic
auaaccucagagagccc

SEQ ID NO: 746484 - RNA, 17 nt, Artificial Sequence
  Synthetic
cugggcagauagagccc

SEQ ID NO: 746485 - RNA, 17 nt, Artificial Sequence
  Synthetic
auuugguaguagagccc

SEQ ID NO: 746486 - RNA, 17 nt, Artificial Sequence
  Synthetic
auggauuggaggagccc

SEQ ID NO: 746487 - RNA, 17 nt, Artificial Sequence
  Synthetic
agugcaaagaugagccc

SEQ ID NO: 746488 - RNA, 17 nt, Artificial Sequence
  Synthetic
acuaaaagccugagccc

SEQ ID NO: 746489 - RNA, 17 nt, Artificial Sequence
  Synthetic
cuuguguaguauagccc

SEQ ID NO: 746490 - RNA, 17 nt, Artificial Sequence
  Synthetic
aaaugagacccuagccc

SEQ ID NO: 746491 - RNA, 17 nt, Artificial Sequence
  Synthetic
ugggagcccccuagccc

SEQ ID NO: 746492 - RNA, 17 nt, Artificial Sequence
  Synthetic
uaggaauuagcuagccc

SEQ ID NO: 746493 - RNA, 17 nt, Artificial Sequence
  Synthetic
cuuugggcugcuagccc

SEQ ID NO: 746494 - RNA, 17 nt, Artificial Sequence
  Synthetic
cuaguuuauucuagccc

SEQ ID NO: 746495 - RNA, 17 nt, Artificial Sequence
  Synthetic
ucucuaaucaguagccc

SEQ ID NO: 746496 - RNA, 17 nt, Artificial Sequence
  Synthetic
uugcugcaugguagccc

SEQ ID NO: 746497 - RNA, 17 nt, Artificial Sequence
  Synthetic
ucucugucugguagccc

SEQ ID NO: 746498 - RNA, 17 nt, Artificial Sequence
  Synthetic
ccucuagcucuuagccc

SEQ ID NO: 746499 - RNA, 17 nt, Artificial Sequence
  Synthetic
aauuucuccuuuagccc

SEQ ID NO: 746500 - RNA, 17 nt, Artificial Sequence
  Synthetic
aggugaugcgcccgccc

SEQ ID NO: 746501 - RNA, 17 nt, Artificial Sequence
  Synthetic
ugcaaccucugccgccc

SEQ ID NO: 746502 - RNA, 17 nt, Artificial Sequence
  Synthetic
aguagcucauuccgccc

SEQ ID NO: 746503 - RNA, 17 nt, Artificial Sequence
  Synthetic
uuccugccugaucgccc

SEQ ID NO: 746504 - RNA, 17 nt, Artificial Sequence
  Synthetic
uuucgcucgugucgccc

SEQ ID NO: 746505 - RNA, 17 nt, Artificial Sequence
  Synthetic
uuuugcucuugucgccc

SEQ ID NO: 746506 - RNA, 17 nt, Artificial Sequence
  Synthetic
agcaagugcaaaggccc

SEQ ID NO: 746507 - RNA, 17 nt, Artificial Sequence
  Synthetic
cagcucaggcaaggccc

SEQ ID NO: 746508 - RNA, 17 nt, Artificial Sequence
  Synthetic
caccccacaacaggccc

SEQ ID NO: 746509 - RNA, 17 nt, Artificial Sequence
  Synthetic
caccccacgacaggccc

SEQ ID NO: 746510 - RNA, 17 nt, Artificial Sequence
  Synthetic
caccccucgacaggccc

SEQ ID NO: 746511 - RNA, 17 nt, Artificial Sequence
  Synthetic
caccccuugacaggccc

SEQ ID NO: 746512 - RNA, 17 nt, Artificial Sequence
  Synthetic
uaucaaacuacaggccc

SEQ ID NO: 746513 - RNA, 17 nt, Artificial Sequence
  Synthetic
uuuaugcaagcaggccc

SEQ ID NO: 746514 - RNA, 17 nt, Artificial Sequence
  Synthetic
uuuugagucucaggccc

SEQ ID NO: 746515 - RNA, 17 nt, Artificial Sequence
  Synthetic
cuuaagcuuucaggccc

SEQ ID NO: 746516 - RNA, 17 nt, Artificial Sequence
  Synthetic
cauccccugagaggccc

SEQ ID NO: 746517 - RNA, 17 nt, Artificial Sequence
  Synthetic
agcacuuugggaggccc

SEQ ID NO: 746518 - RNA, 17 nt, Artificial Sequence
  Synthetic
aucuuauuuggaggccc

SEQ ID NO: 746519 - RNA, 17 nt, Artificial Sequence
  Synthetic
aaaccaauacagggccc

SEQ ID NO: 746520 - RNA, 17 nt, Artificial Sequence
  Synthetic
cuacgccaccagggccc

SEQ ID NO: 746521 - RNA, 17 nt, Artificial Sequence
  Synthetic
cuugaaacccagggccc

SEQ ID NO: 746522 - RNA, 17 nt, Artificial Sequence
  Synthetic
cuccugauguggggccc

SEQ ID NO: 746523 - RNA, 17 nt, Artificial Sequence
  Synthetic
caugaucucuugggccc

SEQ ID NO: 746524 - RNA, 17 nt, Artificial Sequence
  Synthetic
ucauauguugcuggccc

SEQ ID NO: 746525 - RNA, 17 nt, Artificial Sequence
  Synthetic
agagccagcuguggccc

SEQ ID NO: 746526 - RNA, 17 nt, Artificial Sequence
  Synthetic
uucuuccaguguggccc

SEQ ID NO: 746527 - RNA, 17 nt, Artificial Sequence
  Synthetic
uauuuuauguguggccc

SEQ ID NO: 746528 - RNA, 17 nt, Artificial Sequence
  Synthetic
agauucccuuuuggccc

SEQ ID NO: 746529 - RNA, 17 nt, Artificial Sequence
  Synthetic
uuuuuucuuuuuggccc

SEQ ID NO: 746530 - RNA, 17 nt, Artificial Sequence
  Synthetic
uacuaacuauaaugccc

SEQ ID NO: 746531 - RNA, 17 nt, Artificial Sequence
  Synthetic
agaccucugacaugccc

SEQ ID NO: 746532 - RNA, 17 nt, Artificial Sequence
  Synthetic
cucauagacagaugccc

SEQ ID NO: 746533 - RNA, 17 nt, Artificial Sequence
  Synthetic
accuuuguuagaugccc

SEQ ID NO: 746534 - RNA, 17 nt, Artificial Sequence
  Synthetic
cugaaggauggaugccc

SEQ ID NO: 746535 - RNA, 17 nt, Artificial Sequence
  Synthetic
aaaucauguggaugccc

SEQ ID NO: 746536 - RNA, 17 nt, Artificial Sequence
  Synthetic
ugaaaauucugaugccc

SEQ ID NO: 746537 - RNA, 17 nt, Artificial Sequence
  Synthetic
caucucuggauaugccc

SEQ ID NO: 746538 - RNA, 17 nt, Artificial Sequence
  Synthetic
aauauaagaguaugccc

SEQ ID NO: 746539 - RNA, 17 nt, Artificial Sequence
  Synthetic
ugcaagcuccacugccc

SEQ ID NO: 746540 - RNA, 17 nt, Artificial Sequence
  Synthetic
cucacugaauacugccc

SEQ ID NO: 746541 - RNA, 17 nt, Artificial Sequence
  Synthetic
agccaccgcaccugccc

SEQ ID NO: 746542 - RNA, 17 nt, Artificial Sequence
  Synthetic
aggcuagagggcugccc

SEQ ID NO: 746543 - RNA, 17 nt, Artificial Sequence
  Synthetic
uccaagaaaugcugccc

SEQ ID NO: 746544 - RNA, 17 nt, Artificial Sequence
  Synthetic
uuucacucuugcugccc

SEQ ID NO: 746545 - RNA, 17 nt, Artificial Sequence
  Synthetic
ucuucccuuugcugccc

SEQ ID NO: 746546 - RNA, 17 nt, Artificial Sequence
  Synthetic
aaaugcuagaucugccc

SEQ ID NO: 746547 - RNA, 17 nt, Artificial Sequence
  Synthetic
cuuucuuuacucugccc

SEQ ID NO: 746548 - RNA, 17 nt, Artificial Sequence
  Synthetic
ccucaaguucucugccc

SEQ ID NO: 746549 - RNA, 17 nt, Artificial Sequence
  Synthetic
aauuccuuucucugccc

SEQ ID NO: 746550 - RNA, 17 nt, Artificial Sequence
  Synthetic
auccaggugaagugccc

SEQ ID NO: 746551 - RNA, 17 nt, Artificial Sequence
  Synthetic
cgugagccaccgugccc

SEQ ID NO: 746552 - RNA, 17 nt, Artificial Sequence
  Synthetic
uuaauauaaaugugccc

SEQ ID NO: 746553 - RNA, 17 nt, Artificial Sequence
  Synthetic
ucuggggaagauugccc

SEQ ID NO: 746554 - RNA, 17 nt, Artificial Sequence
  Synthetic
cuccugccugauugccc

SEQ ID NO: 746555 - RNA, 17 nt, Artificial Sequence
  Synthetic
cucuugccugauugccc

SEQ ID NO: 746556 - RNA, 17 nt, Artificial Sequence
  Synthetic
aggucucugacuugccc

SEQ ID NO: 746557 - RNA, 17 nt, Artificial Sequence
  Synthetic
ucagaggaaucuugccc

SEQ ID NO: 746558 - RNA, 17 nt, Artificial Sequence
  Synthetic
uguuuccaauguugccc

SEQ ID NO: 746559 - RNA, 17 nt, Artificial Sequence
  Synthetic
aucucacuauguugccc

SEQ ID NO: 746560 - RNA, 17 nt, Artificial Sequence
  Synthetic
ccauggaacuguugccc

SEQ ID NO: 746561 - RNA, 17 nt, Artificial Sequence
  Synthetic
aucucacucuguugccc

SEQ ID NO: 746562 - RNA, 17 nt, Artificial Sequence
  Synthetic
aucuugcucuguugccc

SEQ ID NO: 746563 - RNA, 17 nt, Artificial Sequence
  Synthetic
cucucacuguguugccc

SEQ ID NO: 746564 - RNA, 17 nt, Artificial Sequence
  Synthetic
uuucacucuuguugccc

SEQ ID NO: 746565 - RNA, 17 nt, Artificial Sequence
  Synthetic
uuucgcucuuguugccc

SEQ ID NO: 746566 - RNA, 17 nt, Artificial Sequence
  Synthetic
uuuugcucuuguugccc

SEQ ID NO: 746567 - RNA, 17 nt, Artificial Sequence
  Synthetic
uuucacuguuguugccc

SEQ ID NO: 746568 - RNA, 17 nt, Artificial Sequence
  Synthetic
cuuugaaacauuugccc

SEQ ID NO: 746569 - RNA, 17 nt, Artificial Sequence
  Synthetic
ucaguuuuucuuugccc

SEQ ID NO: 746570 - RNA, 17 nt, Artificial Sequence
  Synthetic
aaacugucaaaaauccc

SEQ ID NO: 746571 - RNA, 17 nt, Artificial Sequence
  Synthetic
uuuauuuuaaaaauccc

SEQ ID NO: 746572 - RNA, 17 nt, Artificial Sequence
  Synthetic
uacaaaaauaaaauccc

SEQ ID NO: 746573 - RNA, 17 nt, Artificial Sequence
  Synthetic
uggugaagacaaauccc

SEQ ID NO: 746574 - RNA, 17 nt, Artificial Sequence
  Synthetic
aggauccaucaaauccc

SEQ ID NO: 746575 - RNA, 17 nt, Artificial Sequence
  Synthetic
agcuagcaagaaauccc

SEQ ID NO: 746576 - RNA, 17 nt, Artificial Sequence
  Synthetic
aacaauggagaaauccc

SEQ ID NO: 746577 - RNA, 17 nt, Artificial Sequence
  Synthetic
uagaauuuugaaauccc

SEQ ID NO: 746578 - RNA, 17 nt, Artificial Sequence
  Synthetic
uggcauuuugaaauccc

SEQ ID NO: 746579 - RNA, 17 nt, Artificial Sequence
  Synthetic
cugcgacugccaauccc

SEQ ID NO: 746580 - RNA, 17 nt, Artificial Sequence
  Synthetic
cucacgccuguaauccc

SEQ ID NO: 746581 - RNA, 17 nt, Artificial Sequence
  Synthetic
cacaugccuguaauccc

SEQ ID NO: 746582 - RNA, 17 nt, Artificial Sequence
  Synthetic
cucaugccuguaauccc

SEQ ID NO: 746583 - RNA, 17 nt, Artificial Sequence
  Synthetic
aacaaugcacacauccc

SEQ ID NO: 746584 - RNA, 17 nt, Artificial Sequence
  Synthetic
ugauucauucacauccc

SEQ ID NO: 746585 - RNA, 17 nt, Artificial Sequence
  Synthetic
ugcaacuucgacauccc

SEQ ID NO: 746586 - RNA, 17 nt, Artificial Sequence
  Synthetic
auuaaacucuacauccc

SEQ ID NO: 746587 - RNA, 17 nt, Artificial Sequence
  Synthetic
auguugagcagcauccc

SEQ ID NO: 746588 - RNA, 17 nt, Artificial Sequence
  Synthetic
aaccagccuggcauccc

SEQ ID NO: 746589 - RNA, 17 nt, Artificial Sequence
  Synthetic
ugcaagcucugcauccc

SEQ ID NO: 746590 - RNA, 17 nt, Artificial Sequence
  Synthetic
aaccagccuugcauccc

SEQ ID NO: 746591 - RNA, 17 nt, Artificial Sequence
  Synthetic
aaccagcuuugcauccc

SEQ ID NO: 746592 - RNA, 17 nt, Artificial Sequence
  Synthetic
ugagcuuagaucauccc

SEQ ID NO: 746593 - RNA, 17 nt, Artificial Sequence
  Synthetic
aaaugucuucucauccc

SEQ ID NO: 746594 - RNA, 17 nt, Artificial Sequence
  Synthetic
ucagugguucucauccc

SEQ ID NO: 746595 - RNA, 17 nt, Artificial Sequence
  Synthetic
caaguaggcuucauccc

SEQ ID NO: 746596 - RNA, 17 nt, Artificial Sequence
  Synthetic
caagugggcuucauccc

SEQ ID NO: 746597 - RNA, 17 nt, Artificial Sequence
  Synthetic
caaguuggcuucauccc

SEQ ID NO: 746598 - RNA, 17 nt, Artificial Sequence
  Synthetic
ccauaucauuucauccc

SEQ ID NO: 746599 - RNA, 17 nt, Artificial Sequence
  Synthetic
uuuuuugcaaagauccc

SEQ ID NO: 746600 - RNA, 17 nt, Artificial Sequence
  Synthetic
aaaaucaacaagauccc

SEQ ID NO: 746601 - RNA, 17 nt, Artificial Sequence
  Synthetic
uugaaugcuaagauccc

SEQ ID NO: 746602 - RNA, 17 nt, Artificial Sequence
  Synthetic
ugaaacaggcagauccc

SEQ ID NO: 746603 - RNA, 17 nt, Artificial Sequence
  Synthetic
aaugaggacuagauccc

SEQ ID NO: 746604 - RNA, 17 nt, Artificial Sequence
  Synthetic
aaaagcuuugggauccc

SEQ ID NO: 746605 - RNA, 17 nt, Artificial Sequence
  Synthetic
cuaacgcugcugauccc

SEQ ID NO: 746606 - RNA, 17 nt, Artificial Sequence
  Synthetic
caaguuacuuugauccc

SEQ ID NO: 746607 - RNA, 17 nt, Artificial Sequence
  Synthetic
caaacagugcauauccc

SEQ ID NO: 746608 - RNA, 17 nt, Artificial Sequence
  Synthetic
uuuaauuugcauauccc

SEQ ID NO: 746609 - RNA, 17 nt, Artificial Sequence
  Synthetic
uuguucacucauauccc

SEQ ID NO: 746610 - RNA, 17 nt, Artificial Sequence
  Synthetic
ucuaaauuucauauccc

SEQ ID NO: 746611 - RNA, 17 nt, Artificial Sequence
  Synthetic
aaacaaccuucuauccc

SEQ ID NO: 746612 - RNA, 17 nt, Artificial Sequence
  Synthetic
aagaaaaucaguauccc

SEQ ID NO: 746613 - RNA, 17 nt, Artificial Sequence
  Synthetic
cuaagcuugaguauccc

SEQ ID NO: 746614 - RNA, 17 nt, Artificial Sequence
  Synthetic
ugggcaccuauuauccc

SEQ ID NO: 746615 - RNA, 17 nt, Artificial Sequence
  Synthetic
ugagacucacuuauccc

SEQ ID NO: 746616 - RNA, 17 nt, Artificial Sequence
  Synthetic
uucucaagacuuauccc

SEQ ID NO: 746617 - RNA, 17 nt, Artificial Sequence
  Synthetic
caagagggauuuauccc

SEQ ID NO: 746618 - RNA, 17 nt, Artificial Sequence
  Synthetic
ugccacuaguuuauccc

SEQ ID NO: 746619 - RNA, 17 nt, Artificial Sequence
  Synthetic
uuguuuaugaaacuccc

SEQ ID NO: 746620 - RNA, 17 nt, Artificial Sequence
  Synthetic
ccuggcacccaacuccc

SEQ ID NO: 746621 - RNA, 17 nt, Artificial Sequence
  Synthetic
auuucuuagcaacuccc

SEQ ID NO: 746622 - RNA, 17 nt, Artificial Sequence
  Synthetic
agaaucccucaacuccc

SEQ ID NO: 746623 - RNA, 17 nt, Artificial Sequence
  Synthetic
caagauaaagaacuccc

SEQ ID NO: 746624 - RNA, 17 nt, Artificial Sequence
  Synthetic
ucccauguauaacuccc

SEQ ID NO: 746625 - RNA, 17 nt, Artificial Sequence
  Synthetic
uugagauuuuaacuccc

SEQ ID NO: 746626 - RNA, 17 nt, Artificial Sequence
  Synthetic
caguuuugaacacuccc

SEQ ID NO: 746627 - RNA, 17 nt, Artificial Sequence
  Synthetic
acuuaguuuccacuccc

SEQ ID NO: 746628 - RNA, 17 nt, Artificial Sequence
  Synthetic
ucccaugacagacuccc

SEQ ID NO: 746629 - RNA, 17 nt, Artificial Sequence
  Synthetic
ugcaaccuccgacuccc

SEQ ID NO: 746630 - RNA, 17 nt, Artificial Sequence
  Synthetic
ugcaaccucugacuccc

SEQ ID NO: 746631 - RNA, 17 nt, Artificial Sequence
  Synthetic
aguuauauaauacuccc

SEQ ID NO: 746632 - RNA, 17 nt, Artificial Sequence
  Synthetic
ugcaaccuccuacuccc

SEQ ID NO: 746633 - RNA, 17 nt, Artificial Sequence
  Synthetic
aaaaccauucuacuccc

SEQ ID NO: 746634 - RNA, 17 nt, Artificial Sequence
  Synthetic
uuuaaacugguacuccc

SEQ ID NO: 746635 - RNA, 17 nt, Artificial Sequence
  Synthetic
ugccuucauguacuccc

SEQ ID NO: 746636 - RNA, 17 nt, Artificial Sequence
  Synthetic
ucccacaguguacuccc

SEQ ID NO: 746637 - RNA, 17 nt, Artificial Sequence
  Synthetic
cgcaaccuacaccuccc

SEQ ID NO: 746638 - RNA, 17 nt, Artificial Sequence
  Synthetic
ugcaaccuccaccuccc

SEQ ID NO: 746639 - RNA, 17 nt, Artificial Sequence
  Synthetic
cugcaccuccaccuccc

SEQ ID NO: 746640 - RNA, 17 nt, Artificial Sequence
  Synthetic
ugcaagcuccaccuccc

SEQ ID NO: 746641 - RNA, 17 nt, Artificial Sequence
  Synthetic
ugcagccuugaccuccc

SEQ ID NO: 746642 - RNA, 17 nt, Artificial Sequence
  Synthetic
uuuccccuaccccuccc

SEQ ID NO: 746643 - RNA, 17 nt, Artificial Sequence
  Synthetic
uccaccugaucccuccc

SEQ ID NO: 746644 - RNA, 17 nt, Artificial Sequence
  Synthetic
ugccuuuacucccuccc

SEQ ID NO: 746645 - RNA, 17 nt, Artificial Sequence
  Synthetic
acagcugccucccuccc

SEQ ID NO: 746646 - RNA, 17 nt, Artificial Sequence
  Synthetic
ucccaccucagccuccc

SEQ ID NO: 746647 - RNA, 17 nt, Artificial Sequence
  Synthetic
ucaugccucagccuccc

SEQ ID NO: 746648 - RNA, 17 nt, Artificial Sequence
  Synthetic
ugcaaacuccgccuccc

SEQ ID NO: 746649 - RNA, 17 nt, Artificial Sequence
  Synthetic
ugcaaccuccgccuccc

SEQ ID NO: 746650 - RNA, 17 nt, Artificial Sequence
  Synthetic
ugcaagcuccgccuccc

SEQ ID NO: 746651 - RNA, 17 nt, Artificial Sequence
  Synthetic
ugcaacuuccgccuccc

SEQ ID NO: 746652 - RNA, 17 nt, Artificial Sequence
  Synthetic
ugcaaccacugccuccc

SEQ ID NO: 746653 - RNA, 17 nt, Artificial Sequence
  Synthetic
acuucagccugccuccc

SEQ ID NO: 746654 - RNA, 17 nt, Artificial Sequence
  Synthetic
ugcaacaucugccuccc

SEQ ID NO: 746655 - RNA, 17 nt, Artificial Sequence
  Synthetic
ugcaaccucugccuccc

SEQ ID NO: 746656 - RNA, 17 nt, Artificial Sequence
  Synthetic
uacaagcucugccuccc

SEQ ID NO: 746657 - RNA, 17 nt, Artificial Sequence
  Synthetic
ugcaagcucugccuccc

SEQ ID NO: 746658 - RNA, 17 nt, Artificial Sequence
  Synthetic
ucacuauguugccuccc

SEQ ID NO: 746659 - RNA, 17 nt, Artificial Sequence
  Synthetic
auucugcuucuccuccc

SEQ ID NO: 746660 - RNA, 17 nt, Artificial Sequence
  Synthetic
caggcacuuguccuccc

SEQ ID NO: 746661 - RNA, 17 nt, Artificial Sequence
  Synthetic
auugcuaaccagcuccc

SEQ ID NO: 746662 - RNA, 17 nt, Artificial Sequence
  Synthetic
ccuaucuugcagcuccc

SEQ ID NO: 746663 - RNA, 17 nt, Artificial Sequence
  Synthetic
acuuagacugggcuccc

SEQ ID NO: 746664 - RNA, 17 nt, Artificial Sequence
  Synthetic
cgcuggguucugcuccc

SEQ ID NO: 746665 - RNA, 17 nt, Artificial Sequence
  Synthetic
agcacauguuugcuccc

SEQ ID NO: 746666 - RNA, 17 nt, Artificial Sequence
  Synthetic
agauaaugaaaucuccc

SEQ ID NO: 746667 - RNA, 17 nt, Artificial Sequence
  Synthetic
uaaaacucccaucuccc

SEQ ID NO: 746668 - RNA, 17 nt, Artificial Sequence
  Synthetic
aaucgccuccaucuccc

SEQ ID NO: 746669 - RNA, 17 nt, Artificial Sequence
  Synthetic
ugcagccuugaucuccc

SEQ ID NO: 746670 - RNA, 17 nt, Artificial Sequence
  Synthetic
cuguaaauaacucuccc

SEQ ID NO: 746671 - RNA, 17 nt, Artificial Sequence
  Synthetic
uuguaagauucucuccc

SEQ ID NO: 746672 - RNA, 17 nt, Artificial Sequence
  Synthetic
ugcaagcuccgucuccc

SEQ ID NO: 746673 - RNA, 17 nt, Artificial Sequence
  Synthetic
ugcaaccucugucuccc

SEQ ID NO: 746674 - RNA, 17 nt, Artificial Sequence
  Synthetic
ugcacccucugucuccc

SEQ ID NO: 746675 - RNA, 17 nt, Artificial Sequence
  Synthetic
uucuugcuuugucuccc

SEQ ID NO: 746676 - RNA, 17 nt, Artificial Sequence
  Synthetic
uaaucugacauucuccc

SEQ ID NO: 746677 - RNA, 17 nt, Artificial Sequence
  Synthetic
ccuucucuuauucuccc

SEQ ID NO: 746678 - RNA, 17 nt, Artificial Sequence
  Synthetic
acagcugcauuucuccc

SEQ ID NO: 746679 - RNA, 17 nt, Artificial Sequence
  Synthetic
aacaaugacuaaguccc

SEQ ID NO: 746680 - RNA, 17 nt, Artificial Sequence
  Synthetic
uuaucuaacagaguccc

SEQ ID NO: 746681 - RNA, 17 nt, Artificial Sequence
  Synthetic
cuugagucuagaguccc

SEQ ID NO: 746682 - RNA, 17 nt, Artificial Sequence
  Synthetic
uagcagaaacgaguccc

SEQ ID NO: 746683 - RNA, 17 nt, Artificial Sequence
  Synthetic
aagugcucuggaguccc

SEQ ID NO: 746684 - RNA, 17 nt, Artificial Sequence
  Synthetic
ugaaaccuccgcguccc

SEQ ID NO: 746685 - RNA, 17 nt, Artificial Sequence
  Synthetic
ugagccacaugcguccc

SEQ ID NO: 746686 - RNA, 17 nt, Artificial Sequence
  Synthetic
cugcagauaaagguccc

SEQ ID NO: 746687 - RNA, 17 nt, Artificial Sequence
  Synthetic
ucucaaagggagguccc

SEQ ID NO: 746688 - RNA, 17 nt, Artificial Sequence
  Synthetic
cugauucaguagguccc

SEQ ID NO: 746689 - RNA, 17 nt, Artificial Sequence
  Synthetic
uucaccucuuagguccc

SEQ ID NO: 746690 - RNA, 17 nt, Artificial Sequence
  Synthetic
aggcaguaggggguccc

SEQ ID NO: 746691 - RNA, 17 nt, Artificial Sequence
  Synthetic
aauucuaaacugguccc

SEQ ID NO: 746692 - RNA, 17 nt, Artificial Sequence
  Synthetic
uaccccucccugguccc

SEQ ID NO: 746693 - RNA, 17 nt, Artificial Sequence
  Synthetic
agggggucccugguccc

SEQ ID NO: 746694 - RNA, 17 nt, Artificial Sequence
  Synthetic
cucuuugacaauguccc

SEQ ID NO: 746695 - RNA, 17 nt, Artificial Sequence
  Synthetic
ucuuucauugauguccc

SEQ ID NO: 746696 - RNA, 17 nt, Artificial Sequence
  Synthetic
aauccauuguauguccc

SEQ ID NO: 746697 - RNA, 17 nt, Artificial Sequence
  Synthetic
ugacuguccucuguccc

SEQ ID NO: 746698 - RNA, 17 nt, Artificial Sequence
  Synthetic
ccguggugcucuguccc

SEQ ID NO: 746699 - RNA, 17 nt, Artificial Sequence
  Synthetic
ccugcucccaguguccc

SEQ ID NO: 746700 - RNA, 17 nt, Artificial Sequence
  Synthetic
uaguuccuuaguguccc

SEQ ID NO: 746701 - RNA, 17 nt, Artificial Sequence
  Synthetic
ucuguacuccguguccc

SEQ ID NO: 746702 - RNA, 17 nt, Artificial Sequence
  Synthetic
auaccaguguguguccc

SEQ ID NO: 746703 - RNA, 17 nt, Artificial Sequence
  Synthetic
uccugcucaauuguccc

SEQ ID NO: 746704 - RNA, 17 nt, Artificial Sequence
  Synthetic
cuguccuugauuguccc

SEQ ID NO: 746705 - RNA, 17 nt, Artificial Sequence
  Synthetic
aaacccacucuuguccc

SEQ ID NO: 746706 - RNA, 17 nt, Artificial Sequence
  Synthetic
aauauacuucuuguccc

SEQ ID NO: 746707 - RNA, 17 nt, Artificial Sequence
  Synthetic
caucacauuguuguccc

SEQ ID NO: 746708 - RNA, 17 nt, Artificial Sequence
  Synthetic
uucagauacuuuguccc

SEQ ID NO: 746709 - RNA, 17 nt, Artificial Sequence
  Synthetic
cuauuuuguuuuguccc

SEQ ID NO: 746710 - RNA, 17 nt, Artificial Sequence
  Synthetic
uagaaaugcaaauuccc

SEQ ID NO: 746711 - RNA, 17 nt, Artificial Sequence
  Synthetic
auuucuaucaaauuccc

SEQ ID NO: 746712 - RNA, 17 nt, Artificial Sequence
  Synthetic
uuuuaggucaaauuccc

SEQ ID NO: 746713 - RNA, 17 nt, Artificial Sequence
  Synthetic
accugcugccaauuccc

SEQ ID NO: 746714 - RNA, 17 nt, Artificial Sequence
  Synthetic
auuguuugagaauuccc

SEQ ID NO: 746715 - RNA, 17 nt, Artificial Sequence
  Synthetic
uucuugaucacauuccc

SEQ ID NO: 746716 - RNA, 17 nt, Artificial Sequence
  Synthetic
uaagcaucaccauuccc

SEQ ID NO: 746717 - RNA, 17 nt, Artificial Sequence
  Synthetic
acagcuaagccauuccc

SEQ ID NO: 746718 - RNA, 17 nt, Artificial Sequence
  Synthetic
accuggccuccauuccc

SEQ ID NO: 746719 - RNA, 17 nt, Artificial Sequence
  Synthetic
uacugggcugcauuccc

SEQ ID NO: 746720 - RNA, 17 nt, Artificial Sequence
  Synthetic
cuuccucauucauuccc

SEQ ID NO: 746721 - RNA, 17 nt, Artificial Sequence
  Synthetic
ccccucccuugauuccc

SEQ ID NO: 746722 - RNA, 17 nt, Artificial Sequence
  Synthetic
uaaauaauaauauuccc

SEQ ID NO: 746723 - RNA, 17 nt, Artificial Sequence
  Synthetic
agucauacucuauuccc

SEQ ID NO: 746724 - RNA, 17 nt, Artificial Sequence
  Synthetic
uccuuacuucuauuccc

SEQ ID NO: 746725 - RNA, 17 nt, Artificial Sequence
  Synthetic
cuggaaauuuuauuccc

SEQ ID NO: 746726 - RNA, 17 nt, Artificial Sequence
  Synthetic
ucacaacugaacuuccc

SEQ ID NO: 746727 - RNA, 17 nt, Artificial Sequence
  Synthetic
ccaaaaaguaacuuccc

SEQ ID NO: 746728 - RNA, 17 nt, Artificial Sequence
  Synthetic
ugcaaacuacacuuccc

SEQ ID NO: 746729 - RNA, 17 nt, Artificial Sequence
  Synthetic
ugcagccuugacuuccc

SEQ ID NO: 746730 - RNA, 17 nt, Artificial Sequence
  Synthetic
cugcagaccuccuuccc

SEQ ID NO: 746731 - RNA, 17 nt, Artificial Sequence
  Synthetic
aauuucaauuccuuccc

SEQ ID NO: 746732 - RNA, 17 nt, Artificial Sequence
  Synthetic
aauauccauuccuuccc

SEQ ID NO: 746733 - RNA, 17 nt, Artificial Sequence
  Synthetic
caaucuuuuggcuuccc

SEQ ID NO: 746734 - RNA, 17 nt, Artificial Sequence
  Synthetic
aagcuauuaaucuuccc

SEQ ID NO: 746735 - RNA, 17 nt, Artificial Sequence
  Synthetic
ccuuaauucaucuuccc

SEQ ID NO: 746736 - RNA, 17 nt, Artificial Sequence
  Synthetic
agcaaagauaucuuccc

SEQ ID NO: 746737 - RNA, 17 nt, Artificial Sequence
  Synthetic
acaguuucccucuuccc

SEQ ID NO: 746738 - RNA, 17 nt, Artificial Sequence
  Synthetic
cuguauugauucuuccc

SEQ ID NO: 746739 - RNA, 17 nt, Artificial Sequence
  Synthetic
cucuauuauuucuuccc

SEQ ID NO: 746740 - RNA, 17 nt, Artificial Sequence
  Synthetic
uauuugcuuuucuuccc

SEQ ID NO: 746741 - RNA, 17 nt, Artificial Sequence
  Synthetic
cucaaguccaaguuccc

SEQ ID NO: 746742 - RNA, 17 nt, Artificial Sequence
  Synthetic
augguguugaaguuccc

SEQ ID NO: 746743 - RNA, 17 nt, Artificial Sequence
  Synthetic
uuuucuaauaaguuccc

SEQ ID NO: 746744 - RNA, 17 nt, Artificial Sequence
  Synthetic
accccacaacaguuccc

SEQ ID NO: 746745 - RNA, 17 nt, Artificial Sequence
  Synthetic
cauauucuggaguuccc

SEQ ID NO: 746746 - RNA, 17 nt, Artificial Sequence
  Synthetic
ugggaaauguaguuccc

SEQ ID NO: 746747 - RNA, 17 nt, Artificial Sequence
  Synthetic
ucaagaugcugguuccc

SEQ ID NO: 746748 - RNA, 17 nt, Artificial Sequence
  Synthetic
auuagaaacauguuccc

SEQ ID NO: 746749 - RNA, 17 nt, Artificial Sequence
  Synthetic
uagaaaaauauguuccc

SEQ ID NO: 746750 - RNA, 17 nt, Artificial Sequence
  Synthetic
cccaaaaucguguuccc

SEQ ID NO: 746751 - RNA, 17 nt, Artificial Sequence
  Synthetic
agucccaacuuguuccc

SEQ ID NO: 746752 - RNA, 17 nt, Artificial Sequence
  Synthetic
uauagcuaaaauuuccc

SEQ ID NO: 746753 - RNA, 17 nt, Artificial Sequence
  Synthetic
auagccuuaaauuuccc

SEQ ID NO: 746754 - RNA, 17 nt, Artificial Sequence
  Synthetic
aauugagugaauuuccc

SEQ ID NO: 746755 - RNA, 17 nt, Artificial Sequence
  Synthetic
uucuugccuaauuuccc

SEQ ID NO: 746756 - RNA, 17 nt, Artificial Sequence
  Synthetic
ucacuugcccauuuccc

SEQ ID NO: 746757 - RNA, 17 nt, Artificial Sequence
  Synthetic
auucaaaagcauuuccc

SEQ ID NO: 746758 - RNA, 17 nt, Artificial Sequence
  Synthetic
acuugucagcauuuccc

SEQ ID NO: 746759 - RNA, 17 nt, Artificial Sequence
  Synthetic
uuugauuugcauuuccc

SEQ ID NO: 746760 - RNA, 17 nt, Artificial Sequence
  Synthetic
aguaaaauuuauuuccc

SEQ ID NO: 746761 - RNA, 17 nt, Artificial Sequence
  Synthetic
cuaacuccuacuuuccc

SEQ ID NO: 746762 - RNA, 17 nt, Artificial Sequence
  Synthetic
ugcuguauagcuuuccc

SEQ ID NO: 746763 - RNA, 17 nt, Artificial Sequence
  Synthetic
uguaaaucugcuuuccc

SEQ ID NO: 746764 - RNA, 17 nt, Artificial Sequence
  Synthetic
ugaucaugagguuuccc

SEQ ID NO: 746765 - RNA, 17 nt, Artificial Sequence
  Synthetic
agcucucuauguuuccc

SEQ ID NO: 746766 - RNA, 17 nt, Artificial Sequence
  Synthetic
acaacuuuauguuuccc

SEQ ID NO: 746767 - RNA, 17 nt, Artificial Sequence
  Synthetic
aucuugaacuguuuccc

SEQ ID NO: 746768 - RNA, 17 nt, Artificial Sequence
  Synthetic
ugucccuucauuuuccc

SEQ ID NO: 746769 - RNA, 17 nt, Artificial Sequence
  Synthetic
ucaagagagauuuuccc

SEQ ID NO: 746770 - RNA, 17 nt, Artificial Sequence
  Synthetic
aucuuggagauuuuccc

SEQ ID NO: 746771 - RNA, 17 nt, Artificial Sequence
  Synthetic
aguuagcaacuuuuccc

SEQ ID NO: 746772 - RNA, 17 nt, Artificial Sequence
  Synthetic
uuucugccucuuuuccc

SEQ ID NO: 746773 - RNA, 17 nt, Artificial Sequence
  Synthetic
uauguaucaguuuuccc

SEQ ID NO: 746774 - RNA, 17 nt, Artificial Sequence
  Synthetic
cuuuucuauguuuuccc

SEQ ID NO: 746775 - RNA, 17 nt, Artificial Sequence
  Synthetic
uguaaaauccaaaagcc

SEQ ID NO: 746776 - RNA, 17 nt, Artificial Sequence
  Synthetic
acacuuaaucaaaagcc

SEQ ID NO: 746777 - RNA, 17 nt, Artificial Sequence
  Synthetic
uagagagaguaaaagcc

SEQ ID NO: 746778 - RNA, 17 nt, Artificial Sequence
  Synthetic
uuuucauuguaaaagcc

SEQ ID NO: 746779 - RNA, 17 nt, Artificial Sequence
  Synthetic
aagggaacaacaaagcc

SEQ ID NO: 746780 - RNA, 17 nt, Artificial Sequence
  Synthetic
auccugauaccaaagcc

SEQ ID NO: 746781 - RNA, 17 nt, Artificial Sequence
  Synthetic
auucugauaccaaagcc

SEQ ID NO: 746782 - RNA, 17 nt, Artificial Sequence
  Synthetic
acccugaucccaaagcc

SEQ ID NO: 746783 - RNA, 17 nt, Artificial Sequence
  Synthetic
ucccauuggccaaagcc

SEQ ID NO: 746784 - RNA, 17 nt, Artificial Sequence
  Synthetic
ccacaguauccaaagcc

SEQ ID NO: 746785 - RNA, 17 nt, Artificial Sequence
  Synthetic
uauguaauaucaaagcc

SEQ ID NO: 746786 - RNA, 17 nt, Artificial Sequence
  Synthetic
ucaguguucucaaagcc

SEQ ID NO: 746787 - RNA, 17 nt, Artificial Sequence
  Synthetic
acuuuaugaugaaagcc

SEQ ID NO: 746788 - RNA, 17 nt, Artificial Sequence
  Synthetic
ccucauaguugaaagcc

SEQ ID NO: 746789 - RNA, 17 nt, Artificial Sequence
  Synthetic
aauuaaccacuaaagcc

SEQ ID NO: 746790 - RNA, 17 nt, Artificial Sequence
  Synthetic
cuaugaguuguaaagcc

SEQ ID NO: 746791 - RNA, 17 nt, Artificial Sequence
  Synthetic
uuucggaauuuaaagcc

SEQ ID NO: 746792 - RNA, 17 nt, Artificial Sequence
  Synthetic
uguuugacuuuaaagcc

SEQ ID NO: 746793 - RNA, 17 nt, Artificial Sequence
  Synthetic
uagguagagaacaagcc

SEQ ID NO: 746794 - RNA, 17 nt, Artificial Sequence
  Synthetic
cugucaagagacaagcc

SEQ ID NO: 746795 - RNA, 17 nt, Artificial Sequence
  Synthetic
cuuguaacugacaagcc

SEQ ID NO: 746796 - RNA, 17 nt, Artificial Sequence
  Synthetic
aagcuaccauacaagcc

SEQ ID NO: 746797 - RNA, 17 nt, Artificial Sequence
  Synthetic
uuaaugugauacaagcc

SEQ ID NO: 746798 - RNA, 17 nt, Artificial Sequence
  Synthetic
ccagcaaguuacaagcc

SEQ ID NO: 746799 - RNA, 17 nt, Artificial Sequence
  Synthetic
augccugccaccaagcc

SEQ ID NO: 746800 - RNA, 17 nt, Artificial Sequence
  Synthetic
cucuaaucuaccaagcc

SEQ ID NO: 746801 - RNA, 17 nt, Artificial Sequence
  Synthetic
cugcauccugccaagcc

SEQ ID NO: 746802 - RNA, 17 nt, Artificial Sequence
  Synthetic
ucugauggcuccaagcc

SEQ ID NO: 746803 - RNA, 17 nt, Artificial Sequence
  Synthetic
ccucacacgugcaagcc

SEQ ID NO: 746804 - RNA, 17 nt, Artificial Sequence
  Synthetic
uuugccuuuaucaagcc

SEQ ID NO: 746805 - RNA, 17 nt, Artificial Sequence
  Synthetic
accacugcacucaagcc

SEQ ID NO: 746806 - RNA, 17 nt, Artificial Sequence
  Synthetic
aauguguaucucaagcc

SEQ ID NO: 746807 - RNA, 17 nt, Artificial Sequence
  Synthetic
uuucaaacaaagaagcc

SEQ ID NO: 746808 - RNA, 17 nt, Artificial Sequence
  Synthetic
uuugcaggaaagaagcc

SEQ ID NO: 746809 - RNA, 17 nt, Artificial Sequence
  Synthetic
caccuaaaccagaagcc

SEQ ID NO: 746810 - RNA, 17 nt, Artificial Sequence
  Synthetic
ugaauaaagcagaagcc

SEQ ID NO: 746811 - RNA, 17 nt, Artificial Sequence
  Synthetic
uggccagagcagaagcc

SEQ ID NO: 746812 - RNA, 17 nt, Artificial Sequence
  Synthetic
uuaacagaugagaagcc

SEQ ID NO: 746813 - RNA, 17 nt, Artificial Sequence
  Synthetic
uuugaacuuucgaagcc

SEQ ID NO: 746814 - RNA, 17 nt, Artificial Sequence
  Synthetic
uuagaaagcaggaagcc

SEQ ID NO: 746815 - RNA, 17 nt, Artificial Sequence
  Synthetic
aaggaagucaggaagcc

SEQ ID NO: 746816 - RNA, 17 nt, Artificial Sequence
  Synthetic
ugguaagucaggaagcc

SEQ ID NO: 746817 - RNA, 17 nt, Artificial Sequence
  Synthetic
acaaugucugggaagcc

SEQ ID NO: 746818 - RNA, 17 nt, Artificial Sequence
  Synthetic
aaacaacaguggaagcc

SEQ ID NO: 746819 - RNA, 17 nt, Artificial Sequence
  Synthetic
aaaaaaucaaugaagcc

SEQ ID NO: 746820 - RNA, 17 nt, Artificial Sequence
  Synthetic
cucaugaauaugaagcc

SEQ ID NO: 746821 - RNA, 17 nt, Artificial Sequence
  Synthetic
aaagauagugugaagcc

SEQ ID NO: 746822 - RNA, 17 nt, Artificial Sequence
  Synthetic
uuugaacuuuugaagcc

SEQ ID NO: 746823 - RNA, 17 nt, Artificial Sequence
  Synthetic
acuaaaugaaauaagcc

SEQ ID NO: 746824 - RNA, 17 nt, Artificial Sequence
  Synthetic
auauuuaauaauaagcc

SEQ ID NO: 746825 - RNA, 17 nt, Artificial Sequence
  Synthetic
aaaguuaauuauaagcc

SEQ ID NO: 746826 - RNA, 17 nt, Artificial Sequence
  Synthetic
ucagggaaaacuaagcc

SEQ ID NO: 746827 - RNA, 17 nt, Artificial Sequence
  Synthetic
uuugaaaagucuaagcc

SEQ ID NO: 746828 - RNA, 17 nt, Artificial Sequence
  Synthetic
ugggaauucuguaagcc

SEQ ID NO: 746829 - RNA, 17 nt, Artificial Sequence
  Synthetic
aggagcucuuguaagcc

SEQ ID NO: 746830 - RNA, 17 nt, Artificial Sequence
  Synthetic
aaggaaaaacuuaagcc

SEQ ID NO: 746831 - RNA, 17 nt, Artificial Sequence
  Synthetic
aaagugcuauuuaagcc

SEQ ID NO: 746832 - RNA, 17 nt, Artificial Sequence
  Synthetic
caauucccccaacagcc

SEQ ID NO: 746833 - RNA, 17 nt, Artificial Sequence
  Synthetic
aagauauacacacagcc

SEQ ID NO: 746834 - RNA, 17 nt, Artificial Sequence
  Synthetic
uaagaaagaccacagcc

SEQ ID NO: 746835 - RNA, 17 nt, Artificial Sequence
  Synthetic
uuaauauucucacagcc

SEQ ID NO: 746836 - RNA, 17 nt, Artificial Sequence
  Synthetic
aaguauuauggacagcc

SEQ ID NO: 746837 - RNA, 17 nt, Artificial Sequence
  Synthetic
uuaaaugcuauacagcc

SEQ ID NO: 746838 - RNA, 17 nt, Artificial Sequence
  Synthetic
accacugcacuacagcc

SEQ ID NO: 746839 - RNA, 17 nt, Artificial Sequence
  Synthetic
agaccacuuuuacagcc

SEQ ID NO: 746840 - RNA, 17 nt, Artificial Sequence
  Synthetic
agaguucgaaaccagcc

SEQ ID NO: 746841 - RNA, 17 nt, Artificial Sequence
  Synthetic
uguauguugaaccagcc

SEQ ID NO: 746842 - RNA, 17 nt, Artificial Sequence
  Synthetic
cuggggccucaccagcc

SEQ ID NO: 746843 - RNA, 17 nt, Artificial Sequence
  Synthetic
accaauccucaccagcc

SEQ ID NO: 746844 - RNA, 17 nt, Artificial Sequence
  Synthetic
agaguucaagaccagcc

SEQ ID NO: 746845 - RNA, 17 nt, Artificial Sequence
  Synthetic
agaguuugagaccagcc

SEQ ID NO: 746846 - RNA, 17 nt, Artificial Sequence
  Synthetic
ggaguuugagaccagcc

SEQ ID NO: 746847 - RNA, 17 nt, Artificial Sequence
  Synthetic
ccuaguauauaccagcc

SEQ ID NO: 746848 - RNA, 17 nt, Artificial Sequence
  Synthetic
agucaccacacccagcc

SEQ ID NO: 746849 - RNA, 17 nt, Artificial Sequence
  Synthetic
agcuaccacacccagcc

SEQ ID NO: 746850 - RNA, 17 nt, Artificial Sequence
  Synthetic
accauugcaccccagcc

SEQ ID NO: 746851 - RNA, 17 nt, Artificial Sequence
  Synthetic
uguauuucugcccagcc

SEQ ID NO: 746852 - RNA, 17 nt, Artificial Sequence
  Synthetic
aaauugaugggccagcc

SEQ ID NO: 746853 - RNA, 17 nt, Artificial Sequence
  Synthetic
uaagaagugggccagcc

SEQ ID NO: 746854 - RNA, 17 nt, Artificial Sequence
  Synthetic
ccaacugaaauccagcc

SEQ ID NO: 746855 - RNA, 17 nt, Artificial Sequence
  Synthetic
aggauuaacauccagcc

SEQ ID NO: 746856 - RNA, 17 nt, Artificial Sequence
  Synthetic
accucuuacauccagcc

SEQ ID NO: 746857 - RNA, 17 nt, Artificial Sequence
  Synthetic
ccauugcaacuccagcc

SEQ ID NO: 746858 - RNA, 17 nt, Artificial Sequence
  Synthetic
aucaugccacuccagcc

SEQ ID NO: 746859 - RNA, 17 nt, Artificial Sequence
  Synthetic
acaacugcacuccagcc

SEQ ID NO: 746860 - RNA, 17 nt, Artificial Sequence
  Synthetic
accacugcacuccagcc

SEQ ID NO: 746861 - RNA, 17 nt, Artificial Sequence
  Synthetic
gccacugcacuccagcc

SEQ ID NO: 746862 - RNA, 17 nt, Artificial Sequence
  Synthetic
agcacugcacuccagcc

SEQ ID NO: 746863 - RNA, 17 nt, Artificial Sequence
  Synthetic
ugcacugcacuccagcc

SEQ ID NO: 746864 - RNA, 17 nt, Artificial Sequence
  Synthetic
accgcugcacuccagcc

SEQ ID NO: 746865 - RNA, 17 nt, Artificial Sequence
  Synthetic
acugcugcacuccagcc

SEQ ID NO: 746866 - RNA, 17 nt, Artificial Sequence
  Synthetic
aacauugcacuccagcc

SEQ ID NO: 746867 - RNA, 17 nt, Artificial Sequence
  Synthetic
accauugcacuccagcc

SEQ ID NO: 746868 - RNA, 17 nt, Artificial Sequence
  Synthetic
cugcacucacuccagcc

SEQ ID NO: 746869 - RNA, 17 nt, Artificial Sequence
  Synthetic
agauuuucacuccagcc

SEQ ID NO: 746870 - RNA, 17 nt, Artificial Sequence
  Synthetic
accauuguacuccagcc

SEQ ID NO: 746871 - RNA, 17 nt, Artificial Sequence
  Synthetic
uugcuuuuccuccagcc

SEQ ID NO: 746872 - RNA, 17 nt, Artificial Sequence
  Synthetic
accacugcgcuccagcc

SEQ ID NO: 746873 - RNA, 17 nt, Artificial Sequence
  Synthetic
acugcccuucuccagcc

SEQ ID NO: 746874 - RNA, 17 nt, Artificial Sequence
  Synthetic
accacugcauuccagcc

SEQ ID NO: 746875 - RNA, 17 nt, Artificial Sequence
  Synthetic
accacuguauuccagcc

SEQ ID NO: 746876 - RNA, 17 nt, Artificial Sequence
  Synthetic
agccuguaaaagcagcc

SEQ ID NO: 746877 - RNA, 17 nt, Artificial Sequence
  Synthetic
agccugugaaagcagcc

SEQ ID NO: 746878 - RNA, 17 nt, Artificial Sequence
  Synthetic
uauuuaaaauagcagcc

SEQ ID NO: 746879 - RNA, 17 nt, Artificial Sequence
  Synthetic
aagaaacaguagcagcc

SEQ ID NO: 746880 - RNA, 17 nt, Artificial Sequence
  Synthetic
aggaguucaaggcagcc

SEQ ID NO: 746881 - RNA, 17 nt, Artificial Sequence
  Synthetic
auuccaagauggcagcc

SEQ ID NO: 746882 - RNA, 17 nt, Artificial Sequence
  Synthetic
acaagucagaugcagcc

SEQ ID NO: 746883 - RNA, 17 nt, Artificial Sequence
  Synthetic
ucuggaucacugcagcc

SEQ ID NO: 746884 - RNA, 17 nt, Artificial Sequence
  Synthetic
aaauaaacugugcagcc

SEQ ID NO: 746885 - RNA, 17 nt, Artificial Sequence
  Synthetic
aauacaaaaaaucagcc

SEQ ID NO: 746886 - RNA, 17 nt, Artificial Sequence
  Synthetic
aaaauacaaaaucagcc

SEQ ID NO: 746887 - RNA, 17 nt, Artificial Sequence
  Synthetic
auauagccaaaucagcc

SEQ ID NO: 746888 - RNA, 17 nt, Artificial Sequence
  Synthetic
aaaaggaaugaucagcc

SEQ ID NO: 746889 - RNA, 17 nt, Artificial Sequence
  Synthetic
auuuuucuguaucagcc

SEQ ID NO: 746890 - RNA, 17 nt, Artificial Sequence
  Synthetic
cauaaggaaacucagcc

SEQ ID NO: 746891 - RNA, 17 nt, Artificial Sequence
  Synthetic
aacagcuuaacucagcc

SEQ ID NO: 746892 - RNA, 17 nt, Artificial Sequence
  Synthetic
cucagguccacucagcc

SEQ ID NO: 746893 - RNA, 17 nt, Artificial Sequence
  Synthetic
ugcuuugucacucagcc

SEQ ID NO: 746894 - RNA, 17 nt, Artificial Sequence
  Synthetic
cugagaccaccucagcc

SEQ ID NO: 746895 - RNA, 17 nt, Artificial Sequence
  Synthetic
aaaauaaaaucucagcc

SEQ ID NO: 746896 - RNA, 17 nt, Artificial Sequence
  Synthetic
uacagugguucucagcc

SEQ ID NO: 746897 - RNA, 17 nt, Artificial Sequence
  Synthetic
acauuugccagucagcc

SEQ ID NO: 746898 - RNA, 17 nt, Artificial Sequence
  Synthetic
aaagggugcauucagcc

SEQ ID NO: 746899 - RNA, 17 nt, Artificial Sequence
  Synthetic
accacugcacuucagcc

SEQ ID NO: 746900 - RNA, 17 nt, Artificial Sequence
  Synthetic
accuacugccuucagcc

SEQ ID NO: 746901 - RNA, 17 nt, Artificial Sequence
  Synthetic
aaauuaggcuuucagcc

SEQ ID NO: 746902 - RNA, 17 nt, Artificial Sequence
  Synthetic
cuuuugauguuucagcc

SEQ ID NO: 746903 - RNA, 17 nt, Artificial Sequence
  Synthetic
caggaacauuuucagcc

SEQ ID NO: 746904 - RNA, 17 nt, Artificial Sequence
  Synthetic
aauugcagcaaagagcc

SEQ ID NO: 746905 - RNA, 17 nt, Artificial Sequence
  Synthetic
ucuggagucaaagagcc

SEQ ID NO: 746906 - RNA, 17 nt, Artificial Sequence
  Synthetic
cauguaaauaaagagcc

SEQ ID NO: 746907 - RNA, 17 nt, Artificial Sequence
  Synthetic
uaaagcaaaacagagcc

SEQ ID NO: 746908 - RNA, 17 nt, Artificial Sequence
  Synthetic
uauaaaagcacagagcc

SEQ ID NO: 746909 - RNA, 17 nt, Artificial Sequence
  Synthetic
auguacuucacagagcc

SEQ ID NO: 746910 - RNA, 17 nt, Artificial Sequence
  Synthetic
augaaauagacagagcc

SEQ ID NO: 746911 - RNA, 17 nt, Artificial Sequence
  Synthetic
cagugacgcccagagcc

SEQ ID NO: 746912 - RNA, 17 nt, Artificial Sequence
  Synthetic
acugggcagauagagcc

SEQ ID NO: 746913 - RNA, 17 nt, Artificial Sequence
  Synthetic
uuaaauuugauagagcc

SEQ ID NO: 746914 - RNA, 17 nt, Artificial Sequence
  Synthetic
aaaaagaaauuagagcc

SEQ ID NO: 746915 - RNA, 17 nt, Artificial Sequence
  Synthetic
agguuuaauuuagagcc

SEQ ID NO: 746916 - RNA, 17 nt, Artificial Sequence
  Synthetic
ucuuuacaaaaggagcc

SEQ ID NO: 746917 - RNA, 17 nt, Artificial Sequence
  Synthetic
aaaacaaaacaggagcc

SEQ ID NO: 746918 - RNA, 17 nt, Artificial Sequence
  Synthetic
acaaggacacaggagcc

SEQ ID NO: 746919 - RNA, 17 nt, Artificial Sequence
  Synthetic
auggguguggaggagcc

SEQ ID NO: 746920 - RNA, 17 nt, Artificial Sequence
  Synthetic
aauggauuggaggagcc

SEQ ID NO: 746921 - RNA, 17 nt, Artificial Sequence
  Synthetic
auuuuggaauaggagcc

SEQ ID NO: 746922 - RNA, 17 nt, Artificial Sequence
  Synthetic
aaugaaaacucggagcc

SEQ ID NO: 746923 - RNA, 17 nt, Artificial Sequence
  Synthetic
aaauaaaucagggagcc

SEQ ID NO: 746924 - RNA, 17 nt, Artificial Sequence
  Synthetic
agggguucuggggagcc

SEQ ID NO: 746925 - RNA, 17 nt, Artificial Sequence
  Synthetic
uugacaugcauggagcc

SEQ ID NO: 746926 - RNA, 17 nt, Artificial Sequence
  Synthetic
augucaaggguggagcc

SEQ ID NO: 746927 - RNA, 17 nt, Artificial Sequence
  Synthetic
auuuuccauguggagcc

SEQ ID NO: 746928 - RNA, 17 nt, Artificial Sequence
  Synthetic
cuguuuggcuuggagcc

SEQ ID NO: 746929 - RNA, 17 nt, Artificial Sequence
  Synthetic
ucccagugagaugagcc

SEQ ID NO: 746930 - RNA, 17 nt, Artificial Sequence
  Synthetic
aauaauaaggaugagcc

SEQ ID NO: 746931 - RNA, 17 nt, Artificial Sequence
  Synthetic
aggugggguuaugagcc

SEQ ID NO: 746932 - RNA, 17 nt, Artificial Sequence
  Synthetic
uauggguguuaugagcc

SEQ ID NO: 746933 - RNA, 17 nt, Artificial Sequence
  Synthetic
aagugaggaagugagcc

SEQ ID NO: 746934 - RNA, 17 nt, Artificial Sequence
  Synthetic
agagguugcagugagcc

SEQ ID NO: 746935 - RNA, 17 nt, Artificial Sequence
  Synthetic
aaaguccaaggugagcc

SEQ ID NO: 746936 - RNA, 17 nt, Artificial Sequence
  Synthetic
uauguccuucuugagcc

SEQ ID NO: 746937 - RNA, 17 nt, Artificial Sequence
  Synthetic
aaaaaaaacaaauagcc

SEQ ID NO: 746938 - RNA, 17 nt, Artificial Sequence
  Synthetic
ucaaucuacaaauagcc

SEQ ID NO: 746939 - RNA, 17 nt, Artificial Sequence
  Synthetic
aacaguuacuaauagcc

SEQ ID NO: 746940 - RNA, 17 nt, Artificial Sequence
  Synthetic
aagguuaaaucauagcc

SEQ ID NO: 746941 - RNA, 17 nt, Artificial Sequence
  Synthetic
aacuucuagucauagcc

SEQ ID NO: 746942 - RNA, 17 nt, Artificial Sequence
  Synthetic
cugagccucagauagcc

SEQ ID NO: 746943 - RNA, 17 nt, Artificial Sequence
  Synthetic
aauacagauagauagcc

SEQ ID NO: 746944 - RNA, 17 nt, Artificial Sequence
  Synthetic
uagauagauagauagcc

SEQ ID NO: 746945 - RNA, 17 nt, Artificial Sequence
  Synthetic
ugcuguaccauauagcc

SEQ ID NO: 746946 - RNA, 17 nt, Artificial Sequence
  Synthetic
aaauacaaaaacuagcc

SEQ ID NO: 746947 - RNA, 17 nt, Artificial Sequence
  Synthetic
acaacugccaacuagcc

SEQ ID NO: 746948 - RNA, 17 nt, Artificial Sequence
  Synthetic
agcugggacuacuagcc

SEQ ID NO: 746949 - RNA, 17 nt, Artificial Sequence
  Synthetic
uguguuucuuacuagcc

SEQ ID NO: 746950 - RNA, 17 nt, Artificial Sequence
  Synthetic
accacugcacucuagcc

SEQ ID NO: 746951 - RNA, 17 nt, Artificial Sequence
  Synthetic
uugcuccugcucuagcc

SEQ ID NO: 746952 - RNA, 17 nt, Artificial Sequence
  Synthetic
ugaagcuuucucuagcc

SEQ ID NO: 746953 - RNA, 17 nt, Artificial Sequence
  Synthetic
aaacucugcuucuagcc

SEQ ID NO: 746954 - RNA, 17 nt, Artificial Sequence
  Synthetic
cuuuuguucuucuagcc

SEQ ID NO: 746955 - RNA, 17 nt, Artificial Sequence
  Synthetic
accuaaaguuucuagcc

SEQ ID NO: 746956 - RNA, 17 nt, Artificial Sequence
  Synthetic
cagccucccaaguagcc

SEQ ID NO: 746957 - RNA, 17 nt, Artificial Sequence
  Synthetic
aguagguagcaguagcc

SEQ ID NO: 746958 - RNA, 17 nt, Artificial Sequence
  Synthetic
cagccuacugaguagcc

SEQ ID NO: 746959 - RNA, 17 nt, Artificial Sequence
  Synthetic
ugaaaacaauaguagcc

SEQ ID NO: 746960 - RNA, 17 nt, Artificial Sequence
  Synthetic
cucuaggggguguagcc

SEQ ID NO: 746961 - RNA, 17 nt, Artificial Sequence
  Synthetic
acauuaaaguuguagcc

SEQ ID NO: 746962 - RNA, 17 nt, Artificial Sequence
  Synthetic
aaaaaaaaaaauuagcc

SEQ ID NO: 746963 - RNA, 17 nt, Artificial Sequence
  Synthetic
acaaaaaaaaauuagcc

SEQ ID NO: 746964 - RNA, 17 nt, Artificial Sequence
  Synthetic
uacaaaaaaaauuagcc

SEQ ID NO: 746965 - RNA, 17 nt, Artificial Sequence
  Synthetic
aauaaaaaaaauuagcc

SEQ ID NO: 746966 - RNA, 17 nt, Artificial Sequence
  Synthetic
acacaaaaaaauuagcc

SEQ ID NO: 746967 - RNA, 17 nt, Artificial Sequence
  Synthetic
auacaaaaaaauuagcc

SEQ ID NO: 746968 - RNA, 17 nt, Artificial Sequence
  Synthetic
aaauaaaaaaauuagcc

SEQ ID NO: 746969 - RNA, 17 nt, Artificial Sequence
  Synthetic
aacacaaaaaauuagcc

SEQ ID NO: 746970 - RNA, 17 nt, Artificial Sequence
  Synthetic
aauacaaaaaauuagcc

SEQ ID NO: 746971 - RNA, 17 nt, Artificial Sequence
  Synthetic
aaaagaaaaaauuagcc

SEQ ID NO: 746972 - RNA, 17 nt, Artificial Sequence
  Synthetic
aauagaaaaaauuagcc

SEQ ID NO: 746973 - RNA, 17 nt, Artificial Sequence
  Synthetic
aaaauaaaaaauuagcc

SEQ ID NO: 746974 - RNA, 17 nt, Artificial Sequence
  Synthetic
aauauaaaaaauuagcc

SEQ ID NO: 746975 - RNA, 17 nt, Artificial Sequence
  Synthetic
uuuuuaaaaaauuagcc

SEQ ID NO: 746976 - RNA, 17 nt, Artificial Sequence
  Synthetic
aaacacaaaaauuagcc

SEQ ID NO: 746977 - RNA, 17 nt, Artificial Sequence
  Synthetic
aaauacaaaaauuagcc

SEQ ID NO: 746978 - RNA, 17 nt, Artificial Sequence
  Synthetic
agauacaaaaauuagcc

SEQ ID NO: 746979 - RNA, 17 nt, Artificial Sequence
  Synthetic
auauacaaaaauuagcc

SEQ ID NO: 746980 - RNA, 17 nt, Artificial Sequence
  Synthetic
aaacagaaaaauuagcc

SEQ ID NO: 746981 - RNA, 17 nt, Artificial Sequence
  Synthetic
aaauagaaaaauuagcc

SEQ ID NO: 746982 - RNA, 17 nt, Artificial Sequence
  Synthetic
aaauauaaaaauuagcc

SEQ ID NO: 746983 - RNA, 17 nt, Artificial Sequence
  Synthetic
caaaaacaaaauuagcc

SEQ ID NO: 746984 - RNA, 17 nt, Artificial Sequence
  Synthetic
aauacacaaaauuagcc

SEQ ID NO: 746985 - RNA, 17 nt, Artificial Sequence
  Synthetic
aaaauacaaaauuagcc

SEQ ID NO: 746986 - RNA, 17 nt, Artificial Sequence
  Synthetic
aaaguacaaaauuagcc

SEQ ID NO: 746987 - RNA, 17 nt, Artificial Sequence
  Synthetic
aaauaugaaaauuagcc

SEQ ID NO: 746988 - RNA, 17 nt, Artificial Sequence
  Synthetic
uauauauaaaauuagcc

SEQ ID NO: 746989 - RNA, 17 nt, Artificial Sequence
  Synthetic
augaugcugaauuagcc

SEQ ID NO: 746990 - RNA, 17 nt, Artificial Sequence
  Synthetic
aauacaaaacauuagcc

SEQ ID NO: 746991 - RNA, 17 nt, Artificial Sequence
  Synthetic
ugaugauuugauuagcc

SEQ ID NO: 746992 - RNA, 17 nt, Artificial Sequence
  Synthetic
cuccauaccucuuagcc

SEQ ID NO: 746993 - RNA, 17 nt, Artificial Sequence
  Synthetic
auuguuuaaaguuagcc

SEQ ID NO: 746994 - RNA, 17 nt, Artificial Sequence
  Synthetic
agccucccaaguuagcc

SEQ ID NO: 746995 - RNA, 17 nt, Artificial Sequence
  Synthetic
uguuauauauguuagcc

SEQ ID NO: 746996 - RNA, 17 nt, Artificial Sequence
  Synthetic
uuuucaccguguuagcc

SEQ ID NO: 746997 - RNA, 17 nt, Artificial Sequence
  Synthetic
cuguuuuuauaaacgcc

SEQ ID NO: 746998 - RNA, 17 nt, Artificial Sequence
  Synthetic
ucccacauccacacgcc

SEQ ID NO: 746999 - RNA, 17 nt, Artificial Sequence
  Synthetic
ccaugcaccaccacgcc

SEQ ID NO: 747000 - RNA, 17 nt, Artificial Sequence
  Synthetic
augugcaccaccacgcc

SEQ ID NO: 747001 - RNA, 17 nt, Artificial Sequence
  Synthetic
gcgugagccaccacgcc

SEQ ID NO: 747002 - RNA, 17 nt, Artificial Sequence
  Synthetic
gcgcccgccaccacgcc

SEQ ID NO: 747003 - RNA, 17 nt, Artificial Sequence
  Synthetic
acaugugccaccacgcc

SEQ ID NO: 747004 - RNA, 17 nt, Artificial Sequence
  Synthetic
uugucaugagccacgcc

SEQ ID NO: 747005 - RNA, 17 nt, Artificial Sequence
  Synthetic
uaaaaugauugcacgcc

SEQ ID NO: 747006 - RNA, 17 nt, Artificial Sequence
  Synthetic
aaagaagucauuacgcc

SEQ ID NO: 747007 - RNA, 17 nt, Artificial Sequence
  Synthetic
cuugugaucugcccgcc

SEQ ID NO: 747008 - RNA, 17 nt, Artificial Sequence
  Synthetic
cccaaaaaccucccgcc

SEQ ID NO: 747009 - RNA, 17 nt, Artificial Sequence
  Synthetic
cugcaaccucugccgcc

SEQ ID NO: 747010 - RNA, 17 nt, Artificial Sequence
  Synthetic
cuguuuuaaugagcgcc

SEQ ID NO: 747011 - RNA, 17 nt, Artificial Sequence
  Synthetic
ucuguagauguagcgcc

SEQ ID NO: 747012 - RNA, 17 nt, Artificial Sequence
  Synthetic
gcgugagccaccgcgcc

SEQ ID NO: 747013 - RNA, 17 nt, Artificial Sequence
  Synthetic
cguugagccaccgcgcc

SEQ ID NO: 747014 - RNA, 17 nt, Artificial Sequence
  Synthetic
agaguugccccugcgcc

SEQ ID NO: 747015 - RNA, 17 nt, Artificial Sequence
  Synthetic
agaaggcauucaucgcc

SEQ ID NO: 747016 - RNA, 17 nt, Artificial Sequence
  Synthetic
agucucacucugucgcc

SEQ ID NO: 747017 - RNA, 17 nt, Artificial Sequence
  Synthetic
agucucgcucugucgcc

SEQ ID NO: 747018 - RNA, 17 nt, Artificial Sequence
  Synthetic
agucuugcucugucgcc

SEQ ID NO: 747019 - RNA, 17 nt, Artificial Sequence
  Synthetic
auggagucucugucgcc

SEQ ID NO: 747020 - RNA, 17 nt, Artificial Sequence
  Synthetic
ugggaauguaaaaggcc

SEQ ID NO: 747021 - RNA, 17 nt, Artificial Sequence
  Synthetic
ccauuuccauaaaggcc

SEQ ID NO: 747022 - RNA, 17 nt, Artificial Sequence
  Synthetic
uacuaugcauaaaggcc

SEQ ID NO: 747023 - RNA, 17 nt, Artificial Sequence
  Synthetic
aacuaaauuacaaggcc

SEQ ID NO: 747024 - RNA, 17 nt, Artificial Sequence
  Synthetic
uauugaaaagcaaggcc

SEQ ID NO: 747025 - RNA, 17 nt, Artificial Sequence
  Synthetic
cacuuagaggcaaggcc

SEQ ID NO: 747026 - RNA, 17 nt, Artificial Sequence
  Synthetic
ccugcuucuagaaggcc

SEQ ID NO: 747027 - RNA, 17 nt, Artificial Sequence
  Synthetic
ucugcagaaugaaggcc

SEQ ID NO: 747028 - RNA, 17 nt, Artificial Sequence
  Synthetic
uccauugcuugaaggcc

SEQ ID NO: 747029 - RNA, 17 nt, Artificial Sequence
  Synthetic
aaaaugagaaacaggcc

SEQ ID NO: 747030 - RNA, 17 nt, Artificial Sequence
  Synthetic
aguguguucaacaggcc

SEQ ID NO: 747031 - RNA, 17 nt, Artificial Sequence
  Synthetic
auucaagaauacaggcc

SEQ ID NO: 747032 - RNA, 17 nt, Artificial Sequence
  Synthetic
auauaaauguacaggcc

SEQ ID NO: 747033 - RNA, 17 nt, Artificial Sequence
  Synthetic
uuugucaccaccaggcc

SEQ ID NO: 747034 - RNA, 17 nt, Artificial Sequence
  Synthetic
cgccacugcaccaggcc

SEQ ID NO: 747035 - RNA, 17 nt, Artificial Sequence
  Synthetic
aaccauaaccccaggcc

SEQ ID NO: 747036 - RNA, 17 nt, Artificial Sequence
  Synthetic
cucuuguaagccaggcc

SEQ ID NO: 747037 - RNA, 17 nt, Artificial Sequence
  Synthetic
agaauacaggccaggcc

SEQ ID NO: 747038 - RNA, 17 nt, Artificial Sequence
  Synthetic
uguuuuauggccaggcc

SEQ ID NO: 747039 - RNA, 17 nt, Artificial Sequence
  Synthetic
uacauaauuuccaggcc

SEQ ID NO: 747040 - RNA, 17 nt, Artificial Sequence
  Synthetic
uacuuaauuuccaggcc

SEQ ID NO: 747041 - RNA, 17 nt, Artificial Sequence
  Synthetic
cauaaaagaagcaggcc

SEQ ID NO: 747042 - RNA, 17 nt, Artificial Sequence
  Synthetic
cucuuguaaggcaggcc

SEQ ID NO: 747043 - RNA, 17 nt, Artificial Sequence
  Synthetic
cucuuuuagggcaggcc

SEQ ID NO: 747044 - RNA, 17 nt, Artificial Sequence
  Synthetic
agcaguuacgucaggcc

SEQ ID NO: 747045 - RNA, 17 nt, Artificial Sequence
  Synthetic
uacuggaaguucaggcc

SEQ ID NO: 747046 - RNA, 17 nt, Artificial Sequence
  Synthetic
ccuuaagcuuucaggcc

SEQ ID NO: 747047 - RNA, 17 nt, Artificial Sequence
  Synthetic
aaccuuccaaagaggcc

SEQ ID NO: 747048 - RNA, 17 nt, Artificial Sequence
  Synthetic
agaaacucuaagaggcc

SEQ ID NO: 747049 - RNA, 17 nt, Artificial Sequence
  Synthetic
uuugaccaacagaggcc

SEQ ID NO: 747050 - RNA, 17 nt, Artificial Sequence
  Synthetic
cagaaguuccagaggcc

SEQ ID NO: 747051 - RNA, 17 nt, Artificial Sequence
  Synthetic
ucaagugggcagaggcc

SEQ ID NO: 747052 - RNA, 17 nt, Artificial Sequence
  Synthetic
aaguaaaaggagaggcc

SEQ ID NO: 747053 - RNA, 17 nt, Artificial Sequence
  Synthetic
cucaaagagaggaggcc

SEQ ID NO: 747054 - RNA, 17 nt, Artificial Sequence
  Synthetic
cagcacuuugggaggcc

SEQ ID NO: 747055 - RNA, 17 nt, Artificial Sequence
  Synthetic
cagcguuuugggaggcc

SEQ ID NO: 747056 - RNA, 17 nt, Artificial Sequence
  Synthetic
acccgggaauggaggcc

SEQ ID NO: 747057 - RNA, 17 nt, Artificial Sequence
  Synthetic
cccuccaucuggaggcc

SEQ ID NO: 747058 - RNA, 17 nt, Artificial Sequence
  Synthetic
agagcuaggcugaggcc

SEQ ID NO: 747059 - RNA, 17 nt, Artificial Sequence
  Synthetic
aaaagaauggugaggcc

SEQ ID NO: 747060 - RNA, 17 nt, Artificial Sequence
  Synthetic
aagacuugugugaggcc

SEQ ID NO: 747061 - RNA, 17 nt, Artificial Sequence
  Synthetic
uccuaucccuugaggcc

SEQ ID NO: 747062 - RNA, 17 nt, Artificial Sequence
  Synthetic
aauaagauaaauaggcc

SEQ ID NO: 747063 - RNA, 17 nt, Artificial Sequence
  Synthetic
acaaaaaagaauaggcc

SEQ ID NO: 747064 - RNA, 17 nt, Artificial Sequence
  Synthetic
cuugcugaagauaggcc

SEQ ID NO: 747065 - RNA, 17 nt, Artificial Sequence
  Synthetic
agcauagcauauaggcc

SEQ ID NO: 747066 - RNA, 17 nt, Artificial Sequence
  Synthetic
ccacagaucucuaggcc

SEQ ID NO: 747067 - RNA, 17 nt, Artificial Sequence
  Synthetic
cauaaggcuucuaggcc

SEQ ID NO: 747068 - RNA, 17 nt, Artificial Sequence
  Synthetic
auucauuaaaguaggcc

SEQ ID NO: 747069 - RNA, 17 nt, Artificial Sequence
  Synthetic
cucccccaucuuaggcc

SEQ ID NO: 747070 - RNA, 17 nt, Artificial Sequence
  Synthetic
uagaagaaacaccggcc

SEQ ID NO: 747071 - RNA, 17 nt, Artificial Sequence
  Synthetic
agcacugcaguccggcc

SEQ ID NO: 747072 - RNA, 17 nt, Artificial Sequence
  Synthetic
aagauccauuuccggcc

SEQ ID NO: 747073 - RNA, 17 nt, Artificial Sequence
  Synthetic
aacauguguuagcggcc

SEQ ID NO: 747074 - RNA, 17 nt, Artificial Sequence
  Synthetic
aaaagagcauugcggcc

SEQ ID NO: 747075 - RNA, 17 nt, Artificial Sequence
  Synthetic
aacagcauguugcggcc

SEQ ID NO: 747076 - RNA, 17 nt, Artificial Sequence
  Synthetic
ucaggaauacaagggcc

SEQ ID NO: 747077 - RNA, 17 nt, Artificial Sequence
  Synthetic
cacaucuaccaagggcc

SEQ ID NO: 747078 - RNA, 17 nt, Artificial Sequence
  Synthetic
ccccugaaaacagggcc

SEQ ID NO: 747079 - RNA, 17 nt, Artificial Sequence
  Synthetic
caaaacuuagcagggcc

SEQ ID NO: 747080 - RNA, 17 nt, Artificial Sequence
  Synthetic
auguuggaggcagggcc

SEQ ID NO: 747081 - RNA, 17 nt, Artificial Sequence
  Synthetic
aaagagcaaucagggcc

SEQ ID NO: 747082 - RNA, 17 nt, Artificial Sequence
  Synthetic
auuccaagaucagggcc

SEQ ID NO: 747083 - RNA, 17 nt, Artificial Sequence
  Synthetic
aggcaucagucagggcc

SEQ ID NO: 747084 - RNA, 17 nt, Artificial Sequence
  Synthetic
auuuuugauucagggcc

SEQ ID NO: 747085 - RNA, 17 nt, Artificial Sequence
  Synthetic
aacuaauguagagggcc

SEQ ID NO: 747086 - RNA, 17 nt, Artificial Sequence
  Synthetic
cucagcagaggagggcc

SEQ ID NO: 747087 - RNA, 17 nt, Artificial Sequence
  Synthetic
auccaggaacuagggcc

SEQ ID NO: 747088 - RNA, 17 nt, Artificial Sequence
  Synthetic
auauaagaaaacgggcc

SEQ ID NO: 747089 - RNA, 17 nt, Artificial Sequence
  Synthetic
acaugguuucacgggcc

SEQ ID NO: 747090 - RNA, 17 nt, Artificial Sequence
  Synthetic
aauccagaaaaggggcc

SEQ ID NO: 747091 - RNA, 17 nt, Artificial Sequence
  Synthetic
agauagagcccggggcc

SEQ ID NO: 747092 - RNA, 17 nt, Artificial Sequence
  Synthetic
aguucugaaguggggcc

SEQ ID NO: 747093 - RNA, 17 nt, Artificial Sequence
  Synthetic
aguuuugaaguggggcc

SEQ ID NO: 747094 - RNA, 17 nt, Artificial Sequence
  Synthetic
auguuggagguggggcc

SEQ ID NO: 747095 - RNA, 17 nt, Artificial Sequence
  Synthetic
auguuggugguggggcc

SEQ ID NO: 747096 - RNA, 17 nt, Artificial Sequence
  Synthetic
aaaggcgauguggggcc

SEQ ID NO: 747097 - RNA, 17 nt, Artificial Sequence
  Synthetic
auagggcuuuuggggcc

SEQ ID NO: 747098 - RNA, 17 nt, Artificial Sequence
  Synthetic
augaaaauaaaugggcc

SEQ ID NO: 747099 - RNA, 17 nt, Artificial Sequence
  Synthetic
aauucauaucaugggcc

SEQ ID NO: 747100 - RNA, 17 nt, Artificial Sequence
  Synthetic
uaucuucucuaugggcc

SEQ ID NO: 747101 - RNA, 17 nt, Artificial Sequence
  Synthetic
auauuuauguaugggcc

SEQ ID NO: 747102 - RNA, 17 nt, Artificial Sequence
  Synthetic
aagaaaucuuaugggcc

SEQ ID NO: 747103 - RNA, 17 nt, Artificial Sequence
  Synthetic
aaaugguuuccugggcc

SEQ ID NO: 747104 - RNA, 17 nt, Artificial Sequence
  Synthetic
caaaaaucagcugggcc

SEQ ID NO: 747105 - RNA, 17 nt, Artificial Sequence
  Synthetic
uugacaucaucugggcc

SEQ ID NO: 747106 - RNA, 17 nt, Artificial Sequence
  Synthetic
uagaugugaucugggcc

SEQ ID NO: 747107 - RNA, 17 nt, Artificial Sequence
  Synthetic
cuagaaaacucugggcc

SEQ ID NO: 747108 - RNA, 17 nt, Artificial Sequence
  Synthetic
caggggggcucugggcc

SEQ ID NO: 747109 - RNA, 17 nt, Artificial Sequence
  Synthetic
auagagaauucugggcc

SEQ ID NO: 747110 - RNA, 17 nt, Artificial Sequence
  Synthetic
auugcaggcagugggcc

SEQ ID NO: 747111 - RNA, 17 nt, Artificial Sequence
  Synthetic
aaaagaaagagugggcc

SEQ ID NO: 747112 - RNA, 17 nt, Artificial Sequence
  Synthetic
ccucccucuugugggcc

SEQ ID NO: 747113 - RNA, 17 nt, Artificial Sequence
  Synthetic
aagaguaagcuugggcc

SEQ ID NO: 747114 - RNA, 17 nt, Artificial Sequence
  Synthetic
auguccuugcuugggcc

SEQ ID NO: 747115 - RNA, 17 nt, Artificial Sequence
  Synthetic
acccauuaucuugggcc

SEQ ID NO: 747116 - RNA, 17 nt, Artificial Sequence
  Synthetic
augggaaauguugggcc

SEQ ID NO: 747117 - RNA, 17 nt, Artificial Sequence
  Synthetic
acaugugguguugggcc

SEQ ID NO: 747118 - RNA, 17 nt, Artificial Sequence
  Synthetic
ugcagaagaaaauggcc

SEQ ID NO: 747119 - RNA, 17 nt, Artificial Sequence
  Synthetic
uuaaaggcuaaauggcc

SEQ ID NO: 747120 - RNA, 17 nt, Artificial Sequence
  Synthetic
aaccaacuuaaauggcc

SEQ ID NO: 747121 - RNA, 17 nt, Artificial Sequence
  Synthetic
aaaaggaaauaauggcc

SEQ ID NO: 747122 - RNA, 17 nt, Artificial Sequence
  Synthetic
ugauuugggacauggcc

SEQ ID NO: 747123 - RNA, 17 nt, Artificial Sequence
  Synthetic
aagauccacccauggcc

SEQ ID NO: 747124 - RNA, 17 nt, Artificial Sequence
  Synthetic
uuuuaauuugcauggcc

SEQ ID NO: 747125 - RNA, 17 nt, Artificial Sequence
  Synthetic
aaaguagauucauggcc

SEQ ID NO: 747126 - RNA, 17 nt, Artificial Sequence
  Synthetic
aaauacuugagauggcc

SEQ ID NO: 747127 - RNA, 17 nt, Artificial Sequence
  Synthetic
cccuguuugagauggcc

SEQ ID NO: 747128 - RNA, 17 nt, Artificial Sequence
  Synthetic
ccaguaaugggauggcc

SEQ ID NO: 747129 - RNA, 17 nt, Artificial Sequence
  Synthetic
acccuacagauauggcc

SEQ ID NO: 747130 - RNA, 17 nt, Artificial Sequence
  Synthetic
acacuuucacuauggcc

SEQ ID NO: 747131 - RNA, 17 nt, Artificial Sequence
  Synthetic
uucaagagaguauggcc

SEQ ID NO: 747132 - RNA, 17 nt, Artificial Sequence
  Synthetic
caugguguuuuauggcc

SEQ ID NO: 747133 - RNA, 17 nt, Artificial Sequence
  Synthetic
aaauaaaaaaacuggcc

SEQ ID NO: 747134 - RNA, 17 nt, Artificial Sequence
  Synthetic
uuuagugcagacuggcc

SEQ ID NO: 747135 - RNA, 17 nt, Artificial Sequence
  Synthetic
auaaggagaaccuggcc

SEQ ID NO: 747136 - RNA, 17 nt, Artificial Sequence
  Synthetic
agccacugcaccuggcc

SEQ ID NO: 747137 - RNA, 17 nt, Artificial Sequence
  Synthetic
uguugaaggaccuggcc

SEQ ID NO: 747138 - RNA, 17 nt, Artificial Sequence
  Synthetic
uuuacucugcccuggcc

SEQ ID NO: 747139 - RNA, 17 nt, Artificial Sequence
  Synthetic
agccacugcgccuggcc

SEQ ID NO: 747140 - RNA, 17 nt, Artificial Sequence
  Synthetic
uauuggaaguccuggcc

SEQ ID NO: 747141 - RNA, 17 nt, Artificial Sequence
  Synthetic
uucaaaaauuccuggcc

SEQ ID NO: 747142 - RNA, 17 nt, Artificial Sequence
  Synthetic
uuggcaaaaagcuggcc

SEQ ID NO: 747143 - RNA, 17 nt, Artificial Sequence
  Synthetic
augaguagcagcuggcc

SEQ ID NO: 747144 - RNA, 17 nt, Artificial Sequence
  Synthetic
aagauuaagagcuggcc

SEQ ID NO: 747145 - RNA, 17 nt, Artificial Sequence
  Synthetic
aaaacagcaaucuggcc

SEQ ID NO: 747146 - RNA, 17 nt, Artificial Sequence
  Synthetic
agccaccgcaucuggcc

SEQ ID NO: 747147 - RNA, 17 nt, Artificial Sequence
  Synthetic
aaugaaucacucuggcc

SEQ ID NO: 747148 - RNA, 17 nt, Artificial Sequence
  Synthetic
caugacacucucuggcc

SEQ ID NO: 747149 - RNA, 17 nt, Artificial Sequence
  Synthetic
uauuuuagagucuggcc

SEQ ID NO: 747150 - RNA, 17 nt, Artificial Sequence
  Synthetic
uauaccaaguucuggcc

SEQ ID NO: 747151 - RNA, 17 nt, Artificial Sequence
  Synthetic
uguuggaaguucuggcc

SEQ ID NO: 747152 - RNA, 17 nt, Artificial Sequence
  Synthetic
aaaaauaaucaguggcc

SEQ ID NO: 747153 - RNA, 17 nt, Artificial Sequence
  Synthetic
uauuuaauucaguggcc

SEQ ID NO: 747154 - RNA, 17 nt, Artificial Sequence
  Synthetic
auuucccuucaguggcc

SEQ ID NO: 747155 - RNA, 17 nt, Artificial Sequence
  Synthetic
uggucaucauaguggcc

SEQ ID NO: 747156 - RNA, 17 nt, Artificial Sequence
  Synthetic
aaacaagacagguggcc

SEQ ID NO: 747157 - RNA, 17 nt, Artificial Sequence
  Synthetic
agacuauuaggguggcc

SEQ ID NO: 747158 - RNA, 17 nt, Artificial Sequence
  Synthetic
aagauguauuuguggcc

SEQ ID NO: 747159 - RNA, 17 nt, Artificial Sequence
  Synthetic
aaauacaaaaauuggcc

SEQ ID NO: 747160 - RNA, 17 nt, Artificial Sequence
  Synthetic
auaauuacaaauuggcc

SEQ ID NO: 747161 - RNA, 17 nt, Artificial Sequence
  Synthetic
uugaagguaaauuggcc

SEQ ID NO: 747162 - RNA, 17 nt, Artificial Sequence
  Synthetic
aauaauaauaauuggcc

SEQ ID NO: 747163 - RNA, 17 nt, Artificial Sequence
  Synthetic
ccagccagccauuggcc

SEQ ID NO: 747164 - RNA, 17 nt, Artificial Sequence
  Synthetic
uaugauguguauuggcc

SEQ ID NO: 747165 - RNA, 17 nt, Artificial Sequence
  Synthetic
cucagcugggcuuggcc

SEQ ID NO: 747166 - RNA, 17 nt, Artificial Sequence
  Synthetic
aaccaccaugcuuggcc

SEQ ID NO: 747167 - RNA, 17 nt, Artificial Sequence
  Synthetic
aaaaaauuaucuuggcc

SEQ ID NO: 747168 - RNA, 17 nt, Artificial Sequence
  Synthetic
acagauaacucuuggcc

SEQ ID NO: 747169 - RNA, 17 nt, Artificial Sequence
  Synthetic
aaauuauccaguuggcc

SEQ ID NO: 747170 - RNA, 17 nt, Artificial Sequence
  Synthetic
auuucaccauguuggcc

SEQ ID NO: 747171 - RNA, 17 nt, Artificial Sequence
  Synthetic
guuucaccauguuggcc

SEQ ID NO: 747172 - RNA, 17 nt, Artificial Sequence
  Synthetic
uuuucaccauguuggcc

SEQ ID NO: 747173 - RNA, 17 nt, Artificial Sequence
  Synthetic
cacacuagguguuggcc

SEQ ID NO: 747174 - RNA, 17 nt, Artificial Sequence
  Synthetic
uacauguauauuuggcc

SEQ ID NO: 747175 - RNA, 17 nt, Artificial Sequence
  Synthetic
cuccagaguauuuggcc

SEQ ID NO: 747176 - RNA, 17 nt, Artificial Sequence
  Synthetic
uaaaacgcacuuuggcc

SEQ ID NO: 747177 - RNA, 17 nt, Artificial Sequence
  Synthetic
aguuuuccucuuuggcc

SEQ ID NO: 747178 - RNA, 17 nt, Artificial Sequence
  Synthetic
uauuggaaguuuuggcc

SEQ ID NO: 747179 - RNA, 17 nt, Artificial Sequence
  Synthetic
agaacauguuuuuggcc

SEQ ID NO: 747180 - RNA, 17 nt, Artificial Sequence
  Synthetic
uaagaaauuuuuuggcc

SEQ ID NO: 747181 - RNA, 17 nt, Artificial Sequence
  Synthetic
aaaaaaaaaaaaaugcc

SEQ ID NO: 747182 - RNA, 17 nt, Artificial Sequence
  Synthetic
cuuuuaagaaaaaugcc

SEQ ID NO: 747183 - RNA, 17 nt, Artificial Sequence
  Synthetic
uaaucuuuaaaaaugcc

SEQ ID NO: 747184 - RNA, 17 nt, Artificial Sequence
  Synthetic
auacuuggcaaaaugcc

SEQ ID NO: 747185 - RNA, 17 nt, Artificial Sequence
  Synthetic
cucagagauaaaaugcc

SEQ ID NO: 747186 - RNA, 17 nt, Artificial Sequence
  Synthetic
uuaucaagccaaaugcc

SEQ ID NO: 747187 - RNA, 17 nt, Artificial Sequence
  Synthetic
uuguguuugcaaaugcc

SEQ ID NO: 747188 - RNA, 17 nt, Artificial Sequence
  Synthetic
aagugacccacaaugcc

SEQ ID NO: 747189 - RNA, 17 nt, Artificial Sequence
  Synthetic
augcauagcacaaugcc

SEQ ID NO: 747190 - RNA, 17 nt, Artificial Sequence
  Synthetic
uccucuuuuacaaugcc

SEQ ID NO: 747191 - RNA, 17 nt, Artificial Sequence
  Synthetic
agagagaagucaaugcc

SEQ ID NO: 747192 - RNA, 17 nt, Artificial Sequence
  Synthetic
aucaugggaagaaugcc

SEQ ID NO: 747193 - RNA, 17 nt, Artificial Sequence
  Synthetic
aagggaagaguaaugcc

SEQ ID NO: 747194 - RNA, 17 nt, Artificial Sequence
  Synthetic
cauccccuguuaaugcc

SEQ ID NO: 747195 - RNA, 17 nt, Artificial Sequence
  Synthetic
acucauucuuuaaugcc

SEQ ID NO: 747196 - RNA, 17 nt, Artificial Sequence
  Synthetic
uauuacuuuuuaaugcc

SEQ ID NO: 747197 - RNA, 17 nt, Artificial Sequence
  Synthetic
aguauaacacacaugcc

SEQ ID NO: 747198 - RNA, 17 nt, Artificial Sequence
  Synthetic
cacaccaccaccaugcc

SEQ ID NO: 747199 - RNA, 17 nt, Artificial Sequence
  Synthetic
gugcccaccaccaugcc

SEQ ID NO: 747200 - RNA, 17 nt, Artificial Sequence
  Synthetic
acgugagccaccaugcc

SEQ ID NO: 747201 - RNA, 17 nt, Artificial Sequence
  Synthetic
acacgugccaccaugcc

SEQ ID NO: 747202 - RNA, 17 nt, Artificial Sequence
  Synthetic
acgugagcuaccaugcc

SEQ ID NO: 747203 - RNA, 17 nt, Artificial Sequence
  Synthetic
cuaucauucuccaugcc

SEQ ID NO: 747204 - RNA, 17 nt, Artificial Sequence
  Synthetic
uugcucauucucaugcc

SEQ ID NO: 747205 - RNA, 17 nt, Artificial Sequence
  Synthetic
ccaagucuguucaugcc

SEQ ID NO: 747206 - RNA, 17 nt, Artificial Sequence
  Synthetic
uagacaacuuucaugcc

SEQ ID NO: 747207 - RNA, 17 nt, Artificial Sequence
  Synthetic
ucccauccacagaugcc

SEQ ID NO: 747208 - RNA, 17 nt, Artificial Sequence
  Synthetic
cuuuuaaaagagaugcc

SEQ ID NO: 747209 - RNA, 17 nt, Artificial Sequence
  Synthetic
aaauagugaaggaugcc

SEQ ID NO: 747210 - RNA, 17 nt, Artificial Sequence
  Synthetic
ucucagaugaggaugcc

SEQ ID NO: 747211 - RNA, 17 nt, Artificial Sequence
  Synthetic
uucaucccugggaugcc

SEQ ID NO: 747212 - RNA, 17 nt, Artificial Sequence
  Synthetic
uucuuaacauggaugcc

SEQ ID NO: 747213 - RNA, 17 nt, Artificial Sequence
  Synthetic
ucugaggaaaugaugcc

SEQ ID NO: 747214 - RNA, 17 nt, Artificial Sequence
  Synthetic
uuaguuccaaauaugcc

SEQ ID NO: 747215 - RNA, 17 nt, Artificial Sequence
  Synthetic
ucaaacagaaauaugcc

SEQ ID NO: 747216 - RNA, 17 nt, Artificial Sequence
  Synthetic
aaucaauuaaauaugcc

SEQ ID NO: 747217 - RNA, 17 nt, Artificial Sequence
  Synthetic
auuuauuugaauaugcc

SEQ ID NO: 747218 - RNA, 17 nt, Artificial Sequence
  Synthetic
uuucacuauaauaugcc

SEQ ID NO: 747219 - RNA, 17 nt, Artificial Sequence
  Synthetic
aguaucugagauaugcc

SEQ ID NO: 747220 - RNA, 17 nt, Artificial Sequence
  Synthetic
aguacaugauauaugcc

SEQ ID NO: 747221 - RNA, 17 nt, Artificial Sequence
  Synthetic
aaggaacuuuauaugcc

SEQ ID NO: 747222 - RNA, 17 nt, Artificial Sequence
  Synthetic
agggccuuuuauaugcc

SEQ ID NO: 747223 - RNA, 17 nt, Artificial Sequence
  Synthetic
aacauucugaguaugcc

SEQ ID NO: 747224 - RNA, 17 nt, Artificial Sequence
  Synthetic
cauuagaaauguaugcc

SEQ ID NO: 747225 - RNA, 17 nt, Artificial Sequence
  Synthetic
uuaaauaaaauuaugcc

SEQ ID NO: 747226 - RNA, 17 nt, Artificial Sequence
  Synthetic
aguuuagaguaacugcc

SEQ ID NO: 747227 - RNA, 17 nt, Artificial Sequence
  Synthetic
aacauagggccacugcc

SEQ ID NO: 747228 - RNA, 17 nt, Artificial Sequence
  Synthetic
cugcaagcuccacugcc

SEQ ID NO: 747229 - RNA, 17 nt, Artificial Sequence
  Synthetic
auguuuugagcacugcc

SEQ ID NO: 747230 - RNA, 17 nt, Artificial Sequence
  Synthetic
auacuaugcucacugcc

SEQ ID NO: 747231 - RNA, 17 nt, Artificial Sequence
  Synthetic
ucacaacaaagacugcc

SEQ ID NO: 747232 - RNA, 17 nt, Artificial Sequence
  Synthetic
uuaccuagcauacugcc

SEQ ID NO: 747233 - RNA, 17 nt, Artificial Sequence
  Synthetic
auuaauucccuacugcc

SEQ ID NO: 747234 - RNA, 17 nt, Artificial Sequence
  Synthetic
ccugcccacuuacugcc

SEQ ID NO: 747235 - RNA, 17 nt, Artificial Sequence
  Synthetic
uuccuucccuuacugcc

SEQ ID NO: 747236 - RNA, 17 nt, Artificial Sequence
  Synthetic
ucuuuucucucccugcc

SEQ ID NO: 747237 - RNA, 17 nt, Artificial Sequence
  Synthetic
cucucuuuuucccugcc

SEQ ID NO: 747238 - RNA, 17 nt, Artificial Sequence
  Synthetic
uuaacuuggugccugcc

SEQ ID NO: 747239 - RNA, 17 nt, Artificial Sequence
  Synthetic
uacaauacuugccugcc

SEQ ID NO: 747240 - RNA, 17 nt, Artificial Sequence
  Synthetic
uuggucuccauccugcc

SEQ ID NO: 747241 - RNA, 17 nt, Artificial Sequence
  Synthetic
auagugaagaagcugcc

SEQ ID NO: 747242 - RNA, 17 nt, Artificial Sequence
  Synthetic
uagcuuuuucagcugcc

SEQ ID NO: 747243 - RNA, 17 nt, Artificial Sequence
  Synthetic
uuccucagagagcugcc

SEQ ID NO: 747244 - RNA, 17 nt, Artificial Sequence
  Synthetic
auacaauauuagcugcc

SEQ ID NO: 747245 - RNA, 17 nt, Artificial Sequence
  Synthetic
cacagggaaaggcugcc

SEQ ID NO: 747246 - RNA, 17 nt, Artificial Sequence
  Synthetic
ugcuaagcugggcugcc

SEQ ID NO: 747247 - RNA, 17 nt, Artificial Sequence
  Synthetic
aagacuucuuggcugcc

SEQ ID NO: 747248 - RNA, 17 nt, Artificial Sequence
  Synthetic
acguaauaaaugcugcc

SEQ ID NO: 747249 - RNA, 17 nt, Artificial Sequence
  Synthetic
cuugaguuugugcugcc

SEQ ID NO: 747250 - RNA, 17 nt, Artificial Sequence
  Synthetic
cauccauucuugcugcc

SEQ ID NO: 747251 - RNA, 17 nt, Artificial Sequence
  Synthetic
aagugacuuuaucugcc

SEQ ID NO: 747252 - RNA, 17 nt, Artificial Sequence
  Synthetic
cauguuacuacucugcc

SEQ ID NO: 747253 - RNA, 17 nt, Artificial Sequence
  Synthetic
cugagaccaccucugcc

SEQ ID NO: 747254 - RNA, 17 nt, Artificial Sequence
  Synthetic
acaauguucccucugcc

SEQ ID NO: 747255 - RNA, 17 nt, Artificial Sequence
  Synthetic
agucuguucccucugcc

SEQ ID NO: 747256 - RNA, 17 nt, Artificial Sequence
  Synthetic
cccuuguuuccucugcc

SEQ ID NO: 747257 - RNA, 17 nt, Artificial Sequence
  Synthetic
aauaauaaagcucugcc

SEQ ID NO: 747258 - RNA, 17 nt, Artificial Sequence
  Synthetic
ucaguccagucucugcc

SEQ ID NO: 747259 - RNA, 17 nt, Artificial Sequence
  Synthetic
uugguugugucucugcc

SEQ ID NO: 747260 - RNA, 17 nt, Artificial Sequence
  Synthetic
ucuguugugucucugcc

SEQ ID NO: 747261 - RNA, 17 nt, Artificial Sequence
  Synthetic
agcuuuuuuucucugcc

SEQ ID NO: 747262 - RNA, 17 nt, Artificial Sequence
  Synthetic
cuagaaauaugucugcc

SEQ ID NO: 747263 - RNA, 17 nt, Artificial Sequence
  Synthetic
uuuggccucugucugcc

SEQ ID NO: 747264 - RNA, 17 nt, Artificial Sequence
  Synthetic
ccauuucucugucugcc

SEQ ID NO: 747265 - RNA, 17 nt, Artificial Sequence
  Synthetic
auauaaaccauucugcc

SEQ ID NO: 747266 - RNA, 17 nt, Artificial Sequence
  Synthetic
acaugaccuauucugcc

SEQ ID NO: 747267 - RNA, 17 nt, Artificial Sequence
  Synthetic
ugcagcaaacuucugcc

SEQ ID NO: 747268 - RNA, 17 nt, Artificial Sequence
  Synthetic
ugcagcagacuucugcc

SEQ ID NO: 747269 - RNA, 17 nt, Artificial Sequence
  Synthetic
uucuugagccuucugcc

SEQ ID NO: 747270 - RNA, 17 nt, Artificial Sequence
  Synthetic
ugaaaaaccuuucugcc

SEQ ID NO: 747271 - RNA, 17 nt, Artificial Sequence
  Synthetic
ccaaggaguuuucugcc

SEQ ID NO: 747272 - RNA, 17 nt, Artificial Sequence
  Synthetic
ccaaauggcaaagugcc

SEQ ID NO: 747273 - RNA, 17 nt, Artificial Sequence
  Synthetic
ugccuaagcuaagugcc

SEQ ID NO: 747274 - RNA, 17 nt, Artificial Sequence
  Synthetic
auggagagguaagugcc

SEQ ID NO: 747275 - RNA, 17 nt, Artificial Sequence
  Synthetic
aagguuagcacagugcc

SEQ ID NO: 747276 - RNA, 17 nt, Artificial Sequence
  Synthetic
cacuuccuagcagugcc

SEQ ID NO: 747277 - RNA, 17 nt, Artificial Sequence
  Synthetic
cuuguaauaucagugcc

SEQ ID NO: 747278 - RNA, 17 nt, Artificial Sequence
  Synthetic
aguacagacauagugcc

SEQ ID NO: 747279 - RNA, 17 nt, Artificial Sequence
  Synthetic
aaaaauaguauagugcc

SEQ ID NO: 747280 - RNA, 17 nt, Artificial Sequence
  Synthetic
aucagugcuguagugcc

SEQ ID NO: 747281 - RNA, 17 nt, Artificial Sequence
  Synthetic
agcuugcaccacgugcc

SEQ ID NO: 747282 - RNA, 17 nt, Artificial Sequence
  Synthetic
gcgugagccaccgugcc

SEQ ID NO: 747283 - RNA, 17 nt, Artificial Sequence
  Synthetic
acauuuacaaaggugcc

SEQ ID NO: 747284 - RNA, 17 nt, Artificial Sequence
  Synthetic
agagauuuaaaggugcc

SEQ ID NO: 747285 - RNA, 17 nt, Artificial Sequence
  Synthetic
ugagaacaugcggugcc

SEQ ID NO: 747286 - RNA, 17 nt, Artificial Sequence
  Synthetic
ccugggaguugggugcc

SEQ ID NO: 747287 - RNA, 17 nt, Artificial Sequence
  Synthetic
cagauuccccuggugcc

SEQ ID NO: 747288 - RNA, 17 nt, Artificial Sequence
  Synthetic
agacagauaguggugcc

SEQ ID NO: 747289 - RNA, 17 nt, Artificial Sequence
  Synthetic
uaaaauauaaaugugcc

SEQ ID NO: 747290 - RNA, 17 nt, Artificial Sequence
  Synthetic
ugacacuggaaugugcc

SEQ ID NO: 747291 - RNA, 17 nt, Artificial Sequence
  Synthetic
agauggucuaaugugcc

SEQ ID NO: 747292 - RNA, 17 nt, Artificial Sequence
  Synthetic
ugauguuuucaugugcc

SEQ ID NO: 747293 - RNA, 17 nt, Artificial Sequence
  Synthetic
aaggcuuacuaugugcc

SEQ ID NO: 747294 - RNA, 17 nt, Artificial Sequence
  Synthetic
aggcacaccuaugugcc

SEQ ID NO: 747295 - RNA, 17 nt, Artificial Sequence
  Synthetic
caugaacuuuaugugcc

SEQ ID NO: 747296 - RNA, 17 nt, Artificial Sequence
  Synthetic
cagcacggcccugugcc

SEQ ID NO: 747297 - RNA, 17 nt, Artificial Sequence
  Synthetic
caccaucaggcugugcc

SEQ ID NO: 747298 - RNA, 17 nt, Artificial Sequence
  Synthetic
uguaccuucucugugcc

SEQ ID NO: 747299 - RNA, 17 nt, Artificial Sequence
  Synthetic
auuugacuuucugugcc

SEQ ID NO: 747300 - RNA, 17 nt, Artificial Sequence
  Synthetic
auuugucuuucugugcc

SEQ ID NO: 747301 - RNA, 17 nt, Artificial Sequence
  Synthetic
ugguacugaggugugcc

SEQ ID NO: 747302 - RNA, 17 nt, Artificial Sequence
  Synthetic
ucaccccucugugugcc

SEQ ID NO: 747303 - RNA, 17 nt, Artificial Sequence
  Synthetic
uaaauuuuaauugugcc

SEQ ID NO: 747304 - RNA, 17 nt, Artificial Sequence
  Synthetic
aagcugucccuugugcc

SEQ ID NO: 747305 - RNA, 17 nt, Artificial Sequence
  Synthetic
ugaaccuuuguugugcc

SEQ ID NO: 747306 - RNA, 17 nt, Artificial Sequence
  Synthetic
acugcugucuuugugcc

SEQ ID NO: 747307 - RNA, 17 nt, Artificial Sequence
  Synthetic
uaugcauagcaauugcc

SEQ ID NO: 747308 - RNA, 17 nt, Artificial Sequence
  Synthetic
aagcugucaacauugcc

SEQ ID NO: 747309 - RNA, 17 nt, Artificial Sequence
  Synthetic
uugcccaugacauugcc

SEQ ID NO: 747310 - RNA, 17 nt, Artificial Sequence
  Synthetic
aagacaaauccauugcc

SEQ ID NO: 747311 - RNA, 17 nt, Artificial Sequence
  Synthetic
accaagaugauauugcc

SEQ ID NO: 747312 - RNA, 17 nt, Artificial Sequence
  Synthetic
ugcugaauaguauugcc

SEQ ID NO: 747313 - RNA, 17 nt, Artificial Sequence
  Synthetic
aggaguuguuuauugcc

SEQ ID NO: 747314 - RNA, 17 nt, Artificial Sequence
  Synthetic
ucuucaucccacuugcc

SEQ ID NO: 747315 - RNA, 17 nt, Artificial Sequence
  Synthetic
ucaccuuuugacuugcc

SEQ ID NO: 747316 - RNA, 17 nt, Artificial Sequence
  Synthetic
cugaaaacauacuugcc

SEQ ID NO: 747317 - RNA, 17 nt, Artificial Sequence
  Synthetic
ucgugagccaccuugcc

SEQ ID NO: 747318 - RNA, 17 nt, Artificial Sequence
  Synthetic
aguuuucagaccuugcc

SEQ ID NO: 747319 - RNA, 17 nt, Artificial Sequence
  Synthetic
cccagguaacccuugcc

SEQ ID NO: 747320 - RNA, 17 nt, Artificial Sequence
  Synthetic
ccacauucucccuugcc

SEQ ID NO: 747321 - RNA, 17 nt, Artificial Sequence
  Synthetic
cucuaaaaagccuugcc

SEQ ID NO: 747322 - RNA, 17 nt, Artificial Sequence
  Synthetic
acucguuccuccuugcc

SEQ ID NO: 747323 - RNA, 17 nt, Artificial Sequence
  Synthetic
uuuccaaauuccuugcc

SEQ ID NO: 747324 - RNA, 17 nt, Artificial Sequence
  Synthetic
auuuucauaagcuugcc

SEQ ID NO: 747325 - RNA, 17 nt, Artificial Sequence
  Synthetic
aucauguacagcuugcc

SEQ ID NO: 747326 - RNA, 17 nt, Artificial Sequence
  Synthetic
ugaauuccuugcuugcc

SEQ ID NO: 747327 - RNA, 17 nt, Artificial Sequence
  Synthetic
uacuuguuucucuugcc

SEQ ID NO: 747328 - RNA, 17 nt, Artificial Sequence
  Synthetic
uuguuauacuucuugcc

SEQ ID NO: 747329 - RNA, 17 nt, Artificial Sequence
  Synthetic
uuagaaaucuucuugcc

SEQ ID NO: 747330 - RNA, 17 nt, Artificial Sequence
  Synthetic
ugagaaucacaguugcc

SEQ ID NO: 747331 - RNA, 17 nt, Artificial Sequence
  Synthetic
uggugcucugaguugcc

SEQ ID NO: 747332 - RNA, 17 nt, Artificial Sequence
  Synthetic
cccagcauuuaguugcc

SEQ ID NO: 747333 - RNA, 17 nt, Artificial Sequence
  Synthetic
auaguugcaugguugcc

SEQ ID NO: 747334 - RNA, 17 nt, Artificial Sequence
  Synthetic
cuggacuggugguugcc

SEQ ID NO: 747335 - RNA, 17 nt, Artificial Sequence
  Synthetic
agucucgcacuguugcc

SEQ ID NO: 747336 - RNA, 17 nt, Artificial Sequence
  Synthetic
aaggacacucuguugcc

SEQ ID NO: 747337 - RNA, 17 nt, Artificial Sequence
  Synthetic
aguuucgcucuguugcc

SEQ ID NO: 747338 - RNA, 17 nt, Artificial Sequence
  Synthetic
agucuggcucuguugcc

SEQ ID NO: 747339 - RNA, 17 nt, Artificial Sequence
  Synthetic
aguguugcucuguugcc

SEQ ID NO: 747340 - RNA, 17 nt, Artificial Sequence
  Synthetic
agucuuucucuguugcc

SEQ ID NO: 747341 - RNA, 17 nt, Artificial Sequence
  Synthetic
uguaaguuaguguugcc

SEQ ID NO: 747342 - RNA, 17 nt, Artificial Sequence
  Synthetic
uaacauugcguguugcc

SEQ ID NO: 747343 - RNA, 17 nt, Artificial Sequence
  Synthetic
aaauacaaaaauuugcc

SEQ ID NO: 747344 - RNA, 17 nt, Artificial Sequence
  Synthetic
uguuuaaugaauuugcc

SEQ ID NO: 747345 - RNA, 17 nt, Artificial Sequence
  Synthetic
aguuuaaguaauuugcc

SEQ ID NO: 747346 - RNA, 17 nt, Artificial Sequence
  Synthetic
ugugacaagcauuugcc

SEQ ID NO: 747347 - RNA, 17 nt, Artificial Sequence
  Synthetic
agaugguggcauuugcc

SEQ ID NO: 747348 - RNA, 17 nt, Artificial Sequence
  Synthetic
uauuuggcauauuugcc

SEQ ID NO: 747349 - RNA, 17 nt, Artificial Sequence
  Synthetic
cagucaaauuauuugcc

SEQ ID NO: 747350 - RNA, 17 nt, Artificial Sequence
  Synthetic
cuuguagugucuuugcc

SEQ ID NO: 747351 - RNA, 17 nt, Artificial Sequence
  Synthetic
uuuguugugucuuugcc

SEQ ID NO: 747352 - RNA, 17 nt, Artificial Sequence
  Synthetic
caugggacuucuuugcc

SEQ ID NO: 747353 - RNA, 17 nt, Artificial Sequence
  Synthetic
agugagagcaguuugcc

SEQ ID NO: 747354 - RNA, 17 nt, Artificial Sequence
  Synthetic
auuuguaauaguuugcc

SEQ ID NO: 747355 - RNA, 17 nt, Artificial Sequence
  Synthetic
aaauaauauauuuugcc

SEQ ID NO: 747356 - RNA, 17 nt, Artificial Sequence
  Synthetic
aaaaugauacuuuugcc

SEQ ID NO: 747357 - RNA, 17 nt, Artificial Sequence
  Synthetic
aauaaaucaguuuugcc

SEQ ID NO: 747358 - RNA, 17 nt, Artificial Sequence
  Synthetic
acaacacagcaaaaucc

SEQ ID NO: 747359 - RNA, 17 nt, Artificial Sequence
  Synthetic
uucuuuaugcaaaaucc

SEQ ID NO: 747360 - RNA, 17 nt, Artificial Sequence
  Synthetic
cauaguucucaaaaucc

SEQ ID NO: 747361 - RNA, 17 nt, Artificial Sequence
  Synthetic
ugccuuugggaaaaucc

SEQ ID NO: 747362 - RNA, 17 nt, Artificial Sequence
  Synthetic
uuauaaauugaaaaucc

SEQ ID NO: 747363 - RNA, 17 nt, Artificial Sequence
  Synthetic
auuguauaauaaaaucc

SEQ ID NO: 747364 - RNA, 17 nt, Artificial Sequence
  Synthetic
uaauucuaauaaaaucc

SEQ ID NO: 747365 - RNA, 17 nt, Artificial Sequence
  Synthetic
ugugggguauaaaaucc

SEQ ID NO: 747366 - RNA, 17 nt, Artificial Sequence
  Synthetic
acuccccuguaaaaucc

SEQ ID NO: 747367 - RNA, 17 nt, Artificial Sequence
  Synthetic
auugaguuuuaaaaucc

SEQ ID NO: 747368 - RNA, 17 nt, Artificial Sequence
  Synthetic
cucucacuaccaaaucc

SEQ ID NO: 747369 - RNA, 17 nt, Artificial Sequence
  Synthetic
auauaaaguucaaaucc

SEQ ID NO: 747370 - RNA, 17 nt, Artificial Sequence
  Synthetic
uucagaaagagaaaucc

SEQ ID NO: 747371 - RNA, 17 nt, Artificial Sequence
  Synthetic
ucucagauuuuaaaucc

SEQ ID NO: 747372 - RNA, 17 nt, Artificial Sequence
  Synthetic
uaauccuaaaacaaucc

SEQ ID NO: 747373 - RNA, 17 nt, Artificial Sequence
  Synthetic
aagccccuucacaaucc

SEQ ID NO: 747374 - RNA, 17 nt, Artificial Sequence
  Synthetic
uugaagaauuccaaucc

SEQ ID NO: 747375 - RNA, 17 nt, Artificial Sequence
  Synthetic
aaaagggcaagcaaucc

SEQ ID NO: 747376 - RNA, 17 nt, Artificial Sequence
  Synthetic
aacgagaagggcaaucc

SEQ ID NO: 747377 - RNA, 17 nt, Artificial Sequence
  Synthetic
cuuucuaugugcaaucc

SEQ ID NO: 747378 - RNA, 17 nt, Artificial Sequence
  Synthetic
aauuuuacuugcaaucc

SEQ ID NO: 747379 - RNA, 17 nt, Artificial Sequence
  Synthetic
uucuuagccaucaaucc

SEQ ID NO: 747380 - RNA, 17 nt, Artificial Sequence
  Synthetic
agucuuuuauucaaucc

SEQ ID NO: 747381 - RNA, 17 nt, Artificial Sequence
  Synthetic
agacaaauauagaaucc

SEQ ID NO: 747382 - RNA, 17 nt, Artificial Sequence
  Synthetic
aaucucuacaggaaucc

SEQ ID NO: 747383 - RNA, 17 nt, Artificial Sequence
  Synthetic
aaaaaaucaaugaaucc

SEQ ID NO: 747384 - RNA, 17 nt, Artificial Sequence
  Synthetic
ugaggugggaugaaucc

SEQ ID NO: 747385 - RNA, 17 nt, Artificial Sequence
  Synthetic
acuuacuuuaugaaucc

SEQ ID NO: 747386 - RNA, 17 nt, Artificial Sequence
  Synthetic
auuaugucacugaaucc

SEQ ID NO: 747387 - RNA, 17 nt, Artificial Sequence
  Synthetic
acaaaaugucugaaucc

SEQ ID NO: 747388 - RNA, 17 nt, Artificial Sequence
  Synthetic
uaccgcuuucugaaucc

SEQ ID NO: 747389 - RNA, 17 nt, Artificial Sequence
  Synthetic
uaacaaauggugaaucc

SEQ ID NO: 747390 - RNA, 17 nt, Artificial Sequence
  Synthetic
caauugugauugaaucc

SEQ ID NO: 747391 - RNA, 17 nt, Artificial Sequence
  Synthetic
acuguugccuugaaucc

SEQ ID NO: 747392 - RNA, 17 nt, Artificial Sequence
  Synthetic
cugcuggguuugaaucc

SEQ ID NO: 747393 - RNA, 17 nt, Artificial Sequence
  Synthetic
agucaccaaaauaaucc

SEQ ID NO: 747394 - RNA, 17 nt, Artificial Sequence
  Synthetic
aggcaagagaauaaucc

SEQ ID NO: 747395 - RNA, 17 nt, Artificial Sequence
  Synthetic
uuuccuuauaauaaucc

SEQ ID NO: 747396 - RNA, 17 nt, Artificial Sequence
  Synthetic
auaaugaugcauaaucc

SEQ ID NO: 747397 - RNA, 17 nt, Artificial Sequence
  Synthetic
cacauuuaguauaaucc

SEQ ID NO: 747398 - RNA, 17 nt, Artificial Sequence
  Synthetic
caacacugaacuaaucc

SEQ ID NO: 747399 - RNA, 17 nt, Artificial Sequence
  Synthetic
uauuucaucgcuaaucc

SEQ ID NO: 747400 - RNA, 17 nt, Artificial Sequence
  Synthetic
cugucccagucuaaucc

SEQ ID NO: 747401 - RNA, 17 nt, Artificial Sequence
  Synthetic
aucuagaacuguaaucc

SEQ ID NO: 747402 - RNA, 17 nt, Artificial Sequence
  Synthetic
acuagccucuguaaucc

SEQ ID NO: 747403 - RNA, 17 nt, Artificial Sequence
  Synthetic
cuucucaaaauuaaucc

SEQ ID NO: 747404 - RNA, 17 nt, Artificial Sequence
  Synthetic
agagagaugauuaaucc

SEQ ID NO: 747405 - RNA, 17 nt, Artificial Sequence
  Synthetic
caccuagguauuaaucc

SEQ ID NO: 747406 - RNA, 17 nt, Artificial Sequence
  Synthetic
ucaucaacccaacaucc

SEQ ID NO: 747407 - RNA, 17 nt, Artificial Sequence
  Synthetic
cuaauaggaacacaucc

SEQ ID NO: 747408 - RNA, 17 nt, Artificial Sequence
  Synthetic
aaacccgauacacaucc

SEQ ID NO: 747409 - RNA, 17 nt, Artificial Sequence
  Synthetic
uagccuacugcacaucc

SEQ ID NO: 747410 - RNA, 17 nt, Artificial Sequence
  Synthetic
cuacaugucucacaucc

SEQ ID NO: 747411 - RNA, 17 nt, Artificial Sequence
  Synthetic
cucugugucucacaucc

SEQ ID NO: 747412 - RNA, 17 nt, Artificial Sequence
  Synthetic
cuccauuucucacaucc

SEQ ID NO: 747413 - RNA, 17 nt, Artificial Sequence
  Synthetic
acuagccauucacaucc

SEQ ID NO: 747414 - RNA, 17 nt, Artificial Sequence
  Synthetic
cuucugccuggacaucc

SEQ ID NO: 747415 - RNA, 17 nt, Artificial Sequence
  Synthetic
uccagauuuugacaucc

SEQ ID NO: 747416 - RNA, 17 nt, Artificial Sequence
  Synthetic
uacaaacagcuacaucc

SEQ ID NO: 747417 - RNA, 17 nt, Artificial Sequence
  Synthetic
cccugccauguacaucc

SEQ ID NO: 747418 - RNA, 17 nt, Artificial Sequence
  Synthetic
uuuuuucaauuacaucc

SEQ ID NO: 747419 - RNA, 17 nt, Artificial Sequence
  Synthetic
auuuugaucuuacaucc

SEQ ID NO: 747420 - RNA, 17 nt, Artificial Sequence
  Synthetic
cacugccucaaccaucc

SEQ ID NO: 747421 - RNA, 17 nt, Artificial Sequence
  Synthetic
agagaucgacaccaucc

SEQ ID NO: 747422 - RNA, 17 nt, Artificial Sequence
  Synthetic
uagauacaucaccaucc

SEQ ID NO: 747423 - RNA, 17 nt, Artificial Sequence
  Synthetic
agagaucaagaccaucc

SEQ ID NO: 747424 - RNA, 17 nt, Artificial Sequence
  Synthetic
agaaaucgagaccaucc

SEQ ID NO: 747425 - RNA, 17 nt, Artificial Sequence
  Synthetic
agagaucgagaccaucc

SEQ ID NO: 747426 - RNA, 17 nt, Artificial Sequence
  Synthetic
agagauugagaccaucc

SEQ ID NO: 747427 - RNA, 17 nt, Artificial Sequence
  Synthetic
cacuccucauaccaucc

SEQ ID NO: 747428 - RNA, 17 nt, Artificial Sequence
  Synthetic
auuuuauguuaccaucc

SEQ ID NO: 747429 - RNA, 17 nt, Artificial Sequence
  Synthetic
cacauucaaagccaucc

SEQ ID NO: 747430 - RNA, 17 nt, Artificial Sequence
  Synthetic
uguuagcugagccaucc

SEQ ID NO: 747431 - RNA, 17 nt, Artificial Sequence
  Synthetic
cgagaaagaggccaucc

SEQ ID NO: 747432 - RNA, 17 nt, Artificial Sequence
  Synthetic
ccuuaaaaaugccaucc

SEQ ID NO: 747433 - RNA, 17 nt, Artificial Sequence
  Synthetic
acauuuucccuccaucc

SEQ ID NO: 747434 - RNA, 17 nt, Artificial Sequence
  Synthetic
agcguaauccuccaucc

SEQ ID NO: 747435 - RNA, 17 nt, Artificial Sequence
  Synthetic
caagggauccuccaucc

SEQ ID NO: 747436 - RNA, 17 nt, Artificial Sequence
  Synthetic
ucuuucccaaagcaucc

SEQ ID NO: 747437 - RNA, 17 nt, Artificial Sequence
  Synthetic
uauuuuucaaagcaucc

SEQ ID NO: 747438 - RNA, 17 nt, Artificial Sequence
  Synthetic
caauauuccuagcaucc

SEQ ID NO: 747439 - RNA, 17 nt, Artificial Sequence
  Synthetic
agucuccaaucgcaucc

SEQ ID NO: 747440 - RNA, 17 nt, Artificial Sequence
  Synthetic
uguguucacaggcaucc

SEQ ID NO: 747441 - RNA, 17 nt, Artificial Sequence
  Synthetic
uuuagcauugggcaucc

SEQ ID NO: 747442 - RNA, 17 nt, Artificial Sequence
  Synthetic
uuggggaaaaugcaucc

SEQ ID NO: 747443 - RNA, 17 nt, Artificial Sequence
  Synthetic
acuuccuagaaucaucc

SEQ ID NO: 747444 - RNA, 17 nt, Artificial Sequence
  Synthetic
auggagaaccaucaucc

SEQ ID NO: 747445 - RNA, 17 nt, Artificial Sequence
  Synthetic
ccaccuuggacucaucc

SEQ ID NO: 747446 - RNA, 17 nt, Artificial Sequence
  Synthetic
uacccaaguccucaucc

SEQ ID NO: 747447 - RNA, 17 nt, Artificial Sequence
  Synthetic
uaggccucaucucaucc

SEQ ID NO: 747448 - RNA, 17 nt, Artificial Sequence
  Synthetic
ucucagaggucucaucc

SEQ ID NO: 747449 - RNA, 17 nt, Artificial Sequence
  Synthetic
uuuauugggucucaucc

SEQ ID NO: 747450 - RNA, 17 nt, Artificial Sequence
  Synthetic
cuaacauggugucaucc

SEQ ID NO: 747451 - RNA, 17 nt, Artificial Sequence
  Synthetic
ugaucaccgcuucaucc

SEQ ID NO: 747452 - RNA, 17 nt, Artificial Sequence
  Synthetic
uauccugcuguucaucc

SEQ ID NO: 747453 - RNA, 17 nt, Artificial Sequence
  Synthetic
uucugaccauuucaucc

SEQ ID NO: 747454 - RNA, 17 nt, Artificial Sequence
  Synthetic
uaacauaaguuucaucc

SEQ ID NO: 747455 - RNA, 17 nt, Artificial Sequence
  Synthetic
auugaaugcuaagaucc

SEQ ID NO: 747456 - RNA, 17 nt, Artificial Sequence
  Synthetic
cacauugccacagaucc

SEQ ID NO: 747457 - RNA, 17 nt, Artificial Sequence
  Synthetic
ucaucaggcacagaucc

SEQ ID NO: 747458 - RNA, 17 nt, Artificial Sequence
  Synthetic
cacccuagaguagaucc

SEQ ID NO: 747459 - RNA, 17 nt, Artificial Sequence
  Synthetic
uggugguuauuagaucc

SEQ ID NO: 747460 - RNA, 17 nt, Artificial Sequence
  Synthetic
ucagucuggaaggaucc

SEQ ID NO: 747461 - RNA, 17 nt, Artificial Sequence
  Synthetic
uauaaggcaaaugaucc

SEQ ID NO: 747462 - RNA, 17 nt, Artificial Sequence
  Synthetic
uuuuuggcaaaugaucc

SEQ ID NO: 747463 - RNA, 17 nt, Artificial Sequence
  Synthetic
aauuagaauacugaucc

SEQ ID NO: 747464 - RNA, 17 nt, Artificial Sequence
  Synthetic
uucuuauuaagugaucc

SEQ ID NO: 747465 - RNA, 17 nt, Artificial Sequence
  Synthetic
uaaccaaacagugaucc

SEQ ID NO: 747466 - RNA, 17 nt, Artificial Sequence
  Synthetic
uguuuaaagagugaucc

SEQ ID NO: 747467 - RNA, 17 nt, Artificial Sequence
  Synthetic
auacaguggugugaucc

SEQ ID NO: 747468 - RNA, 17 nt, Artificial Sequence
  Synthetic
cccccauuucuugaucc

SEQ ID NO: 747469 - RNA, 17 nt, Artificial Sequence
  Synthetic
acuuuuauuuuugaucc

SEQ ID NO: 747470 - RNA, 17 nt, Artificial Sequence
  Synthetic
aauucauguaaauaucc

SEQ ID NO: 747471 - RNA, 17 nt, Artificial Sequence
  Synthetic
aauuucaaucaauaucc

SEQ ID NO: 747472 - RNA, 17 nt, Artificial Sequence
  Synthetic
ugucaaugucaauaucc

SEQ ID NO: 747473 - RNA, 17 nt, Artificial Sequence
  Synthetic
uaagguggauaauaucc

SEQ ID NO: 747474 - RNA, 17 nt, Artificial Sequence
  Synthetic
uacaacucuacauaucc

SEQ ID NO: 747475 - RNA, 17 nt, Artificial Sequence
  Synthetic
cagccuguagcauaucc

SEQ ID NO: 747476 - RNA, 17 nt, Artificial Sequence
  Synthetic
auuuuugaugcauaucc

SEQ ID NO: 747477 - RNA, 17 nt, Artificial Sequence
  Synthetic
uacccagacagauaucc

SEQ ID NO: 747478 - RNA, 17 nt, Artificial Sequence
  Synthetic
aaauaaauuagauaucc

SEQ ID NO: 747479 - RNA, 17 nt, Artificial Sequence
  Synthetic
ccaaaccucugauaucc

SEQ ID NO: 747480 - RNA, 17 nt, Artificial Sequence
  Synthetic
uagaaaaacauauaucc

SEQ ID NO: 747481 - RNA, 17 nt, Artificial Sequence
  Synthetic
caucacgccauauaucc

SEQ ID NO: 747482 - RNA, 17 nt, Artificial Sequence
  Synthetic
caucaugcacuauaucc

SEQ ID NO: 747483 - RNA, 17 nt, Artificial Sequence
  Synthetic
auuuaucaucuauaucc

SEQ ID NO: 747484 - RNA, 17 nt, Artificial Sequence
  Synthetic
ucagcuucuuuauaucc

SEQ ID NO: 747485 - RNA, 17 nt, Artificial Sequence
  Synthetic
cuuguauacaacuaucc

SEQ ID NO: 747486 - RNA, 17 nt, Artificial Sequence
  Synthetic
uaauuugaacacuaucc

SEQ ID NO: 747487 - RNA, 17 nt, Artificial Sequence
  Synthetic
agguagaaaaccuaucc

SEQ ID NO: 747488 - RNA, 17 nt, Artificial Sequence
  Synthetic
cagugcucagccuaucc

SEQ ID NO: 747489 - RNA, 17 nt, Artificial Sequence
  Synthetic
aaguaauucuccuaucc

SEQ ID NO: 747490 - RNA, 17 nt, Artificial Sequence
  Synthetic
uggucacaaagcuaucc

SEQ ID NO: 747491 - RNA, 17 nt, Artificial Sequence
  Synthetic
uaacauaugaucuaucc

SEQ ID NO: 747492 - RNA, 17 nt, Artificial Sequence
  Synthetic
uuguuauaggucuaucc

SEQ ID NO: 747493 - RNA, 17 nt, Artificial Sequence
  Synthetic
cauacugguuucuaucc

SEQ ID NO: 747494 - RNA, 17 nt, Artificial Sequence
  Synthetic
uacuugucaguguaucc

SEQ ID NO: 747495 - RNA, 17 nt, Artificial Sequence
  Synthetic
uaccccccauuguaucc

SEQ ID NO: 747496 - RNA, 17 nt, Artificial Sequence
  Synthetic
ucuugucagaauuaucc

SEQ ID NO: 747497 - RNA, 17 nt, Artificial Sequence
  Synthetic
uuuugaauacauuaucc

SEQ ID NO: 747498 - RNA, 17 nt, Artificial Sequence
  Synthetic
ccuuuuauggauuaucc

SEQ ID NO: 747499 - RNA, 17 nt, Artificial Sequence
  Synthetic
ucugcaggauauuaucc

SEQ ID NO: 747500 - RNA, 17 nt, Artificial Sequence
  Synthetic
uucaucacuuauuaucc

SEQ ID NO: 747501 - RNA, 17 nt, Artificial Sequence
  Synthetic
ucuucagguuauuaucc

SEQ ID NO: 747502 - RNA, 17 nt, Artificial Sequence
  Synthetic
ugcuacccaaguuaucc

SEQ ID NO: 747503 - RNA, 17 nt, Artificial Sequence
  Synthetic
cugaggacagguuaucc

SEQ ID NO: 747504 - RNA, 17 nt, Artificial Sequence
  Synthetic
aggcacaaauguuaucc

SEQ ID NO: 747505 - RNA, 17 nt, Artificial Sequence
  Synthetic
agguucuaccuuuaucc

SEQ ID NO: 747506 - RNA, 17 nt, Artificial Sequence
  Synthetic
cugcagccucaaacucc

SEQ ID NO: 747507 - RNA, 17 nt, Artificial Sequence
  Synthetic
ugccuaggugaaacucc

SEQ ID NO: 747508 - RNA, 17 nt, Artificial Sequence
  Synthetic
cuguaaccuccaacucc

SEQ ID NO: 747509 - RNA, 17 nt, Artificial Sequence
  Synthetic
cuuaugggugcaacucc

SEQ ID NO: 747510 - RNA, 17 nt, Artificial Sequence
  Synthetic
acuaaauccagaacucc

SEQ ID NO: 747511 - RNA, 17 nt, Artificial Sequence
  Synthetic
cugcagccucgaacucc

SEQ ID NO: 747512 - RNA, 17 nt, Artificial Sequence
  Synthetic
ugagagucaggaacucc

SEQ ID NO: 747513 - RNA, 17 nt, Artificial Sequence
  Synthetic
agcagaaucugaacucc

SEQ ID NO: 747514 - RNA, 17 nt, Artificial Sequence
  Synthetic
agcuggucuugaacucc

SEQ ID NO: 747515 - RNA, 17 nt, Artificial Sequence
  Synthetic
uuuuaccauuuaacucc

SEQ ID NO: 747516 - RNA, 17 nt, Artificial Sequence
  Synthetic
acauuuacaaacacucc

SEQ ID NO: 747517 - RNA, 17 nt, Artificial Sequence
  Synthetic
uugggccuggacacucc

SEQ ID NO: 747518 - RNA, 17 nt, Artificial Sequence
  Synthetic
uggcugugguccacucc

SEQ ID NO: 747519 - RNA, 17 nt, Artificial Sequence
  Synthetic
uaaaauguaggcacucc

SEQ ID NO: 747520 - RNA, 17 nt, Artificial Sequence
  Synthetic
aguuucucaaucacucc

SEQ ID NO: 747521 - RNA, 17 nt, Artificial Sequence
  Synthetic
uccagcaaccucacucc

SEQ ID NO: 747522 - RNA, 17 nt, Artificial Sequence
  Synthetic
ugugguccaaagacucc

SEQ ID NO: 747523 - RNA, 17 nt, Artificial Sequence
  Synthetic
auuccacccaagacucc

SEQ ID NO: 747524 - RNA, 17 nt, Artificial Sequence
  Synthetic
cuuuggacuuggacucc

SEQ ID NO: 747525 - RNA, 17 nt, Artificial Sequence
  Synthetic
aaauggcgugugacucc

SEQ ID NO: 747526 - RNA, 17 nt, Artificial Sequence
  Synthetic
aaucaauauuugacucc

SEQ ID NO: 747527 - RNA, 17 nt, Artificial Sequence
  Synthetic
agcaccuccuauacucc

SEQ ID NO: 747528 - RNA, 17 nt, Artificial Sequence
  Synthetic
uggaugugggcuacucc

SEQ ID NO: 747529 - RNA, 17 nt, Artificial Sequence
  Synthetic
uauagaauugcuacucc

SEQ ID NO: 747530 - RNA, 17 nt, Artificial Sequence
  Synthetic
ucacuccacuguacucc

SEQ ID NO: 747531 - RNA, 17 nt, Artificial Sequence
  Synthetic
ccaaaauauguuacucc

SEQ ID NO: 747532 - RNA, 17 nt, Artificial Sequence
  Synthetic
cugugggcuuuuacucc

SEQ ID NO: 747533 - RNA, 17 nt, Artificial Sequence
  Synthetic
aagaaugcccaaccucc

SEQ ID NO: 747534 - RNA, 17 nt, Artificial Sequence
  Synthetic
ucuagauuucaaccucc

SEQ ID NO: 747535 - RNA, 17 nt, Artificial Sequence
  Synthetic
cggcucgcugaaccucc

SEQ ID NO: 747536 - RNA, 17 nt, Artificial Sequence
  Synthetic
accuugcuaccaccucc

SEQ ID NO: 747537 - RNA, 17 nt, Artificial Sequence
  Synthetic
cagcaaccuccaccucc

SEQ ID NO: 747538 - RNA, 17 nt, Artificial Sequence
  Synthetic
ccgcaaccuccaccucc

SEQ ID NO: 747539 - RNA, 17 nt, Artificial Sequence
  Synthetic
cugcaaccuccaccucc

SEQ ID NO: 747540 - RNA, 17 nt, Artificial Sequence
  Synthetic
acugcaccuccaccucc

SEQ ID NO: 747541 - RNA, 17 nt, Artificial Sequence
  Synthetic
ccgcaagcuccaccucc

SEQ ID NO: 747542 - RNA, 17 nt, Artificial Sequence
  Synthetic
cugcaagcuccaccucc

SEQ ID NO: 747543 - RNA, 17 nt, Artificial Sequence
  Synthetic
uggcgcuagagaccucc

SEQ ID NO: 747544 - RNA, 17 nt, Artificial Sequence
  Synthetic
cugccgccuugaccucc

SEQ ID NO: 747545 - RNA, 17 nt, Artificial Sequence
  Synthetic
cuucuggcgcuaccucc

SEQ ID NO: 747546 - RNA, 17 nt, Artificial Sequence
  Synthetic
cugcaacuucuaccucc

SEQ ID NO: 747547 - RNA, 17 nt, Artificial Sequence
  Synthetic
uuuauaaaauuaccucc

SEQ ID NO: 747548 - RNA, 17 nt, Artificial Sequence
  Synthetic
auauuuagauuaccucc

SEQ ID NO: 747549 - RNA, 17 nt, Artificial Sequence
  Synthetic
uguuuucauuuaccucc

SEQ ID NO: 747550 - RNA, 17 nt, Artificial Sequence
  Synthetic
agcauuugccacccucc

SEQ ID NO: 747551 - RNA, 17 nt, Artificial Sequence
  Synthetic
uaaauccacgacccucc

SEQ ID NO: 747552 - RNA, 17 nt, Artificial Sequence
  Synthetic
aaccucugucccccucc

SEQ ID NO: 747553 - RNA, 17 nt, Artificial Sequence
  Synthetic
cauuagugguccccucc

SEQ ID NO: 747554 - RNA, 17 nt, Artificial Sequence
  Synthetic
cugcaaccucucccucc

SEQ ID NO: 747555 - RNA, 17 nt, Artificial Sequence
  Synthetic
cuaccuuccuucccucc

SEQ ID NO: 747556 - RNA, 17 nt, Artificial Sequence
  Synthetic
auuacaauguucccucc

SEQ ID NO: 747557 - RNA, 17 nt, Artificial Sequence
  Synthetic
agcugacuuuucccucc

SEQ ID NO: 747558 - RNA, 17 nt, Artificial Sequence
  Synthetic
uuuuaacaaaagccucc

SEQ ID NO: 747559 - RNA, 17 nt, Artificial Sequence
  Synthetic
auucagucacagccucc

SEQ ID NO: 747560 - RNA, 17 nt, Artificial Sequence
  Synthetic
cucccaccucagccucc

SEQ ID NO: 747561 - RNA, 17 nt, Artificial Sequence
  Synthetic
cugguaccucagccucc

SEQ ID NO: 747562 - RNA, 17 nt, Artificial Sequence
  Synthetic
cuccugccucagccucc

SEQ ID NO: 747563 - RNA, 17 nt, Artificial Sequence
  Synthetic
cugcaaacuccgccucc

SEQ ID NO: 747564 - RNA, 17 nt, Artificial Sequence
  Synthetic
cagcaaccuccgccucc

SEQ ID NO: 747565 - RNA, 17 nt, Artificial Sequence
  Synthetic
cugcaaccuccgccucc

SEQ ID NO: 747566 - RNA, 17 nt, Artificial Sequence
  Synthetic
cugcagccuccgccucc

SEQ ID NO: 747567 - RNA, 17 nt, Artificial Sequence
  Synthetic
cugcaagcuccgccucc

SEQ ID NO: 747568 - RNA, 17 nt, Artificial Sequence
  Synthetic
cuucuggggaggccucc

SEQ ID NO: 747569 - RNA, 17 nt, Artificial Sequence
  Synthetic
ucacuaugccggccucc

SEQ ID NO: 747570 - RNA, 17 nt, Artificial Sequence
  Synthetic
auuugucuaaugccucc

SEQ ID NO: 747571 - RNA, 17 nt, Artificial Sequence
  Synthetic
ccacaaccuaugccucc

SEQ ID NO: 747572 - RNA, 17 nt, Artificial Sequence
  Synthetic
cugcaaccacugccucc

SEQ ID NO: 747573 - RNA, 17 nt, Artificial Sequence
  Synthetic
cugcaacaucugccucc

SEQ ID NO: 747574 - RNA, 17 nt, Artificial Sequence
  Synthetic
cugcaaacucugccucc

SEQ ID NO: 747575 - RNA, 17 nt, Artificial Sequence
  Synthetic
auggcuacucugccucc

SEQ ID NO: 747576 - RNA, 17 nt, Artificial Sequence
  Synthetic
cagcaaccucugccucc

SEQ ID NO: 747577 - RNA, 17 nt, Artificial Sequence
  Synthetic
cugcaaccucugccucc

SEQ ID NO: 747578 - RNA, 17 nt, Artificial Sequence
  Synthetic
cugcagccucugccucc

SEQ ID NO: 747579 - RNA, 17 nt, Artificial Sequence
  Synthetic
cugcaagcucugccucc

SEQ ID NO: 747580 - RNA, 17 nt, Artificial Sequence
  Synthetic
cugcaaccuuugccucc

SEQ ID NO: 747581 - RNA, 17 nt, Artificial Sequence
  Synthetic
aaauucaggaauccucc

SEQ ID NO: 747582 - RNA, 17 nt, Artificial Sequence
  Synthetic
ugauuauaaacuccucc

SEQ ID NO: 747583 - RNA, 17 nt, Artificial Sequence
  Synthetic
uccuuggccacuccucc

SEQ ID NO: 747584 - RNA, 17 nt, Artificial Sequence
  Synthetic
caaauucagccuccucc

SEQ ID NO: 747585 - RNA, 17 nt, Artificial Sequence
  Synthetic
uuccuacuuaguccucc

SEQ ID NO: 747586 - RNA, 17 nt, Artificial Sequence
  Synthetic
uuaguauaauguccucc

SEQ ID NO: 747587 - RNA, 17 nt, Artificial Sequence
  Synthetic
uuaaccuaauguccucc

SEQ ID NO: 747588 - RNA, 17 nt, Artificial Sequence
  Synthetic
uucuuaaggcuuccucc

SEQ ID NO: 747589 - RNA, 17 nt, Artificial Sequence
  Synthetic
uuaccaucuguuccucc

SEQ ID NO: 747590 - RNA, 17 nt, Artificial Sequence
  Synthetic
cggugccucuuuccucc

SEQ ID NO: 747591 - RNA, 17 nt, Artificial Sequence
  Synthetic
cuaugaguaaaagcucc

SEQ ID NO: 747592 - RNA, 17 nt, Artificial Sequence
  Synthetic
aggaaagcaacagcucc

SEQ ID NO: 747593 - RNA, 17 nt, Artificial Sequence
  Synthetic
uucaaaaaaccagcucc

SEQ ID NO: 747594 - RNA, 17 nt, Artificial Sequence
  Synthetic
augacuccaccagcucc

SEQ ID NO: 747595 - RNA, 17 nt, Artificial Sequence
  Synthetic
uucaaaagaccagcucc

SEQ ID NO: 747596 - RNA, 17 nt, Artificial Sequence
  Synthetic
cuucuuccuccagcucc

SEQ ID NO: 747597 - RNA, 17 nt, Artificial Sequence
  Synthetic
uacaaagcagcagcucc

SEQ ID NO: 747598 - RNA, 17 nt, Artificial Sequence
  Synthetic
uuucuaggcucagcucc

SEQ ID NO: 747599 - RNA, 17 nt, Artificial Sequence
  Synthetic
caugcaagcagagcucc

SEQ ID NO: 747600 - RNA, 17 nt, Artificial Sequence
  Synthetic
aguacuuuuggagcucc

SEQ ID NO: 747601 - RNA, 17 nt, Artificial Sequence
  Synthetic
caaaacuuuauagcucc

SEQ ID NO: 747602 - RNA, 17 nt, Artificial Sequence
  Synthetic
cagccugaccuagcucc

SEQ ID NO: 747603 - RNA, 17 nt, Artificial Sequence
  Synthetic
uucaucuagguagcucc

SEQ ID NO: 747604 - RNA, 17 nt, Artificial Sequence
  Synthetic
cagugcugggaggcucc

SEQ ID NO: 747605 - RNA, 17 nt, Artificial Sequence
  Synthetic
ccaaacaaaggggcucc

SEQ ID NO: 747606 - RNA, 17 nt, Artificial Sequence
  Synthetic
uaagacccaggggcucc

SEQ ID NO: 747607 - RNA, 17 nt, Artificial Sequence
  Synthetic
ugaaaucuuggggcucc

SEQ ID NO: 747608 - RNA, 17 nt, Artificial Sequence
  Synthetic
aauuaccucugggcucc

SEQ ID NO: 747609 - RNA, 17 nt, Artificial Sequence
  Synthetic
caaaaucugugggcucc

SEQ ID NO: 747610 - RNA, 17 nt, Artificial Sequence
  Synthetic
agcccuuuaauggcucc

SEQ ID NO: 747611 - RNA, 17 nt, Artificial Sequence
  Synthetic
uucaaaaaacuggcucc

SEQ ID NO: 747612 - RNA, 17 nt, Artificial Sequence
  Synthetic
ucucaaggcaaugcucc

SEQ ID NO: 747613 - RNA, 17 nt, Artificial Sequence
  Synthetic
auauagccuaaugcucc

SEQ ID NO: 747614 - RNA, 17 nt, Artificial Sequence
  Synthetic
acauaucauucugcucc

SEQ ID NO: 747615 - RNA, 17 nt, Artificial Sequence
  Synthetic
cagugcaauggugcucc

SEQ ID NO: 747616 - RNA, 17 nt, Artificial Sequence
  Synthetic
acacugcuuauugcucc

SEQ ID NO: 747617 - RNA, 17 nt, Artificial Sequence
  Synthetic
acauaucauuuugcucc

SEQ ID NO: 747618 - RNA, 17 nt, Artificial Sequence
  Synthetic
cacugagaaaaaucucc

SEQ ID NO: 747619 - RNA, 17 nt, Artificial Sequence
  Synthetic
aucagauaaaaaucucc

SEQ ID NO: 747620 - RNA, 17 nt, Artificial Sequence
  Synthetic
ucaguuuuaaaaucucc

SEQ ID NO: 747621 - RNA, 17 nt, Artificial Sequence
  Synthetic
ugcgcauacaaaucucc

SEQ ID NO: 747622 - RNA, 17 nt, Artificial Sequence
  Synthetic
acucuucucaaaucucc

SEQ ID NO: 747623 - RNA, 17 nt, Artificial Sequence
  Synthetic
uuaaaggcacaaucucc

SEQ ID NO: 747624 - RNA, 17 nt, Artificial Sequence
  Synthetic
aaggccaaagaaucucc

SEQ ID NO: 747625 - RNA, 17 nt, Artificial Sequence
  Synthetic
cacccgagggaaucucc

SEQ ID NO: 747626 - RNA, 17 nt, Artificial Sequence
  Synthetic
ugugaaacuacaucucc

SEQ ID NO: 747627 - RNA, 17 nt, Artificial Sequence
  Synthetic
aagaaacuaccaucucc

SEQ ID NO: 747628 - RNA, 17 nt, Artificial Sequence
  Synthetic
cugcaacuuccaucucc

SEQ ID NO: 747629 - RNA, 17 nt, Artificial Sequence
  Synthetic
cuuucuuuaucaucucc

SEQ ID NO: 747630 - RNA, 17 nt, Artificial Sequence
  Synthetic
uaaauuuccucaucucc

SEQ ID NO: 747631 - RNA, 17 nt, Artificial Sequence
  Synthetic
ucucucccuucaucucc

SEQ ID NO: 747632 - RNA, 17 nt, Artificial Sequence
  Synthetic
aguuuaguaagaucucc

SEQ ID NO: 747633 - RNA, 17 nt, Artificial Sequence
  Synthetic
augacuuccugaucucc

SEQ ID NO: 747634 - RNA, 17 nt, Artificial Sequence
  Synthetic
cauuggagaaacucucc

SEQ ID NO: 747635 - RNA, 17 nt, Artificial Sequence
  Synthetic
cacacgaccaacucucc

SEQ ID NO: 747636 - RNA, 17 nt, Artificial Sequence
  Synthetic
uucauguuuaacucucc

SEQ ID NO: 747637 - RNA, 17 nt, Artificial Sequence
  Synthetic
acuuauuaggacucucc

SEQ ID NO: 747638 - RNA, 17 nt, Artificial Sequence
  Synthetic
aaccuauugaccucucc

SEQ ID NO: 747639 - RNA, 17 nt, Artificial Sequence
  Synthetic
uauccacuucccucucc

SEQ ID NO: 747640 - RNA, 17 nt, Artificial Sequence
  Synthetic
uaaguaauaagcucucc

SEQ ID NO: 747641 - RNA, 17 nt, Artificial Sequence
  Synthetic
cuauaagcccucucucc

SEQ ID NO: 747642 - RNA, 17 nt, Artificial Sequence
  Synthetic
agguauugucucucucc

SEQ ID NO: 747643 - RNA, 17 nt, Artificial Sequence
  Synthetic
uacccuucccagucucc

SEQ ID NO: 747644 - RNA, 17 nt, Artificial Sequence
  Synthetic
cagaaaggccagucucc

SEQ ID NO: 747645 - RNA, 17 nt, Artificial Sequence
  Synthetic
uugaucugucagucucc

SEQ ID NO: 747646 - RNA, 17 nt, Artificial Sequence
  Synthetic
caauuagcaaggucucc

SEQ ID NO: 747647 - RNA, 17 nt, Artificial Sequence
  Synthetic
uuugagacagggucucc

SEQ ID NO: 747648 - RNA, 17 nt, Artificial Sequence
  Synthetic
auggggaaaaugucucc

SEQ ID NO: 747649 - RNA, 17 nt, Artificial Sequence
  Synthetic
auagugagaaugucucc

SEQ ID NO: 747650 - RNA, 17 nt, Artificial Sequence
  Synthetic
uucccaaacaugucucc

SEQ ID NO: 747651 - RNA, 17 nt, Artificial Sequence
  Synthetic
auggggaagaugucucc

SEQ ID NO: 747652 - RNA, 17 nt, Artificial Sequence
  Synthetic
cugcaaccucugucucc

SEQ ID NO: 747653 - RNA, 17 nt, Artificial Sequence
  Synthetic
augggaaaauugucucc

SEQ ID NO: 747654 - RNA, 17 nt, Artificial Sequence
  Synthetic
cacauguaacauucucc

SEQ ID NO: 747655 - RNA, 17 nt, Artificial Sequence
  Synthetic
cucccuuuucauucucc

SEQ ID NO: 747656 - RNA, 17 nt, Artificial Sequence
  Synthetic
augguagaauauucucc

SEQ ID NO: 747657 - RNA, 17 nt, Artificial Sequence
  Synthetic
accuucucuuauucucc

SEQ ID NO: 747658 - RNA, 17 nt, Artificial Sequence
  Synthetic
uagcuaacagcuucucc

SEQ ID NO: 747659 - RNA, 17 nt, Artificial Sequence
  Synthetic
ugauuacuagcuucucc

SEQ ID NO: 747660 - RNA, 17 nt, Artificial Sequence
  Synthetic
uccaugauuucuucucc

SEQ ID NO: 747661 - RNA, 17 nt, Artificial Sequence
  Synthetic
uaucaguucaguucucc

SEQ ID NO: 747662 - RNA, 17 nt, Artificial Sequence
  Synthetic
cucaugcugauuucucc

SEQ ID NO: 747663 - RNA, 17 nt, Artificial Sequence
  Synthetic
acuguaaauauuucucc

SEQ ID NO: 747664 - RNA, 17 nt, Artificial Sequence
  Synthetic
uuacaccauauuucucc

SEQ ID NO: 747665 - RNA, 17 nt, Artificial Sequence
  Synthetic
uuuuuauuuauuucucc

SEQ ID NO: 747666 - RNA, 17 nt, Artificial Sequence
  Synthetic
cuucccagacuuucucc

SEQ ID NO: 747667 - RNA, 17 nt, Artificial Sequence
  Synthetic
acaaaaacccuuucucc

SEQ ID NO: 747668 - RNA, 17 nt, Artificial Sequence
  Synthetic
cucuccauucuuucucc

SEQ ID NO: 747669 - RNA, 17 nt, Artificial Sequence
  Synthetic
uuuauucuucuuucucc

SEQ ID NO: 747670 - RNA, 17 nt, Artificial Sequence
  Synthetic
aaaagauauguuucucc

SEQ ID NO: 747671 - RNA, 17 nt, Artificial Sequence
  Synthetic
ucagccaaauuuucucc

SEQ ID NO: 747672 - RNA, 17 nt, Artificial Sequence
  Synthetic
agccuuaaauuuucucc

SEQ ID NO: 747673 - RNA, 17 nt, Artificial Sequence
  Synthetic
uuguauuuauuuucucc

SEQ ID NO: 747674 - RNA, 17 nt, Artificial Sequence
  Synthetic
uuucccaucuuuucucc

SEQ ID NO: 747675 - RNA, 17 nt, Artificial Sequence
  Synthetic
ucagcucucuuuucucc

SEQ ID NO: 747676 - RNA, 17 nt, Artificial Sequence
  Synthetic
uugccaaaaaaaagucc

SEQ ID NO: 747677 - RNA, 17 nt, Artificial Sequence
  Synthetic
caaaccaaaaaaagucc

SEQ ID NO: 747678 - RNA, 17 nt, Artificial Sequence
  Synthetic
uguaauaugaaaagucc

SEQ ID NO: 747679 - RNA, 17 nt, Artificial Sequence
  Synthetic
uugguaaauaaaagucc

SEQ ID NO: 747680 - RNA, 17 nt, Artificial Sequence
  Synthetic
uuggacucccaaagucc

SEQ ID NO: 747681 - RNA, 17 nt, Artificial Sequence
  Synthetic
ucggccucccaaagucc

SEQ ID NO: 747682 - RNA, 17 nt, Artificial Sequence
  Synthetic
uuggccucccaaagucc

SEQ ID NO: 747683 - RNA, 17 nt, Artificial Sequence
  Synthetic
acaccagucucaagucc

SEQ ID NO: 747684 - RNA, 17 nt, Artificial Sequence
  Synthetic
cauaguauuggaagucc

SEQ ID NO: 747685 - RNA, 17 nt, Artificial Sequence
  Synthetic
uguggacgaugaagucc

SEQ ID NO: 747686 - RNA, 17 nt, Artificial Sequence
  Synthetic
uacgaacacugaagucc

SEQ ID NO: 747687 - RNA, 17 nt, Artificial Sequence
  Synthetic
auuuugugucacagucc

SEQ ID NO: 747688 - RNA, 17 nt, Artificial Sequence
  Synthetic
auaccuccagacagucc

SEQ ID NO: 747689 - RNA, 17 nt, Artificial Sequence
  Synthetic
aaucuggccuccagucc

SEQ ID NO: 747690 - RNA, 17 nt, Artificial Sequence
  Synthetic
aaccccauccucagucc

SEQ ID NO: 747691 - RNA, 17 nt, Artificial Sequence
  Synthetic
augccucaucucagucc

SEQ ID NO: 747692 - RNA, 17 nt, Artificial Sequence
  Synthetic
ccaaccaaaaagagucc

SEQ ID NO: 747693 - RNA, 17 nt, Artificial Sequence
  Synthetic
agaauaaagaagagucc

SEQ ID NO: 747694 - RNA, 17 nt, Artificial Sequence
  Synthetic
auauguuguaagagucc

SEQ ID NO: 747695 - RNA, 17 nt, Artificial Sequence
  Synthetic
cucuccaaggagagucc

SEQ ID NO: 747696 - RNA, 17 nt, Artificial Sequence
  Synthetic
uuuaauaaugagagucc

SEQ ID NO: 747697 - RNA, 17 nt, Artificial Sequence
  Synthetic
uuuacaagugagagucc

SEQ ID NO: 747698 - RNA, 17 nt, Artificial Sequence
  Synthetic
aaauuuguugagagucc

SEQ ID NO: 747699 - RNA, 17 nt, Artificial Sequence
  Synthetic
ucccugaacuagagucc

SEQ ID NO: 747700 - RNA, 17 nt, Artificial Sequence
  Synthetic
uuaucuggcaggagucc

SEQ ID NO: 747701 - RNA, 17 nt, Artificial Sequence
  Synthetic
uguuagcauaggagucc

SEQ ID NO: 747702 - RNA, 17 nt, Artificial Sequence
  Synthetic
aaaauuggcuggagucc

SEQ ID NO: 747703 - RNA, 17 nt, Artificial Sequence
  Synthetic
uuaugauucaugagucc

SEQ ID NO: 747704 - RNA, 17 nt, Artificial Sequence
  Synthetic
cugggauuucugagucc

SEQ ID NO: 747705 - RNA, 17 nt, Artificial Sequence
  Synthetic
ccuauucaggcuagucc

SEQ ID NO: 747706 - RNA, 17 nt, Artificial Sequence
  Synthetic
ucaaauauggcuagucc

SEQ ID NO: 747707 - RNA, 17 nt, Artificial Sequence
  Synthetic
uuauuaaaauguagucc

SEQ ID NO: 747708 - RNA, 17 nt, Artificial Sequence
  Synthetic
auuguuaaacuuagucc

SEQ ID NO: 747709 - RNA, 17 nt, Artificial Sequence
  Synthetic
uuaacauuuuuuagucc

SEQ ID NO: 747710 - RNA, 17 nt, Artificial Sequence
  Synthetic
aacucuuuacaacgucc

SEQ ID NO: 747711 - RNA, 17 nt, Artificial Sequence
  Synthetic
auaacccccacacgucc

SEQ ID NO: 747712 - RNA, 17 nt, Artificial Sequence
  Synthetic
cggccgccaccacgucc

SEQ ID NO: 747713 - RNA, 17 nt, Artificial Sequence
  Synthetic
ucgaacucuugacgucc

SEQ ID NO: 747714 - RNA, 17 nt, Artificial Sequence
  Synthetic
cagaggaccuuacgucc

SEQ ID NO: 747715 - RNA, 17 nt, Artificial Sequence
  Synthetic
auaaaccagcuccgucc

SEQ ID NO: 747716 - RNA, 17 nt, Artificial Sequence
  Synthetic
uuccccuuccugcgucc

SEQ ID NO: 747717 - RNA, 17 nt, Artificial Sequence
  Synthetic
uucagcaaaaaaggucc

SEQ ID NO: 747718 - RNA, 17 nt, Artificial Sequence
  Synthetic
caaaaaaacccaggucc

SEQ ID NO: 747719 - RNA, 17 nt, Artificial Sequence
  Synthetic
cucacugaagcaggucc

SEQ ID NO: 747720 - RNA, 17 nt, Artificial Sequence
  Synthetic
uucucaaagggaggucc

SEQ ID NO: 747721 - RNA, 17 nt, Artificial Sequence
  Synthetic
ugauuauguaagggucc

SEQ ID NO: 747722 - RNA, 17 nt, Artificial Sequence
  Synthetic
uggucuggggugggucc

SEQ ID NO: 747723 - RNA, 17 nt, Artificial Sequence
  Synthetic
uacucugaaaauggucc

SEQ ID NO: 747724 - RNA, 17 nt, Artificial Sequence
  Synthetic
auuucuuucaauggucc

SEQ ID NO: 747725 - RNA, 17 nt, Artificial Sequence
  Synthetic
agucccauuaauggucc

SEQ ID NO: 747726 - RNA, 17 nt, Artificial Sequence
  Synthetic
uagagaguuaauggucc

SEQ ID NO: 747727 - RNA, 17 nt, Artificial Sequence
  Synthetic
aaauucuaaacuggucc

SEQ ID NO: 747728 - RNA, 17 nt, Artificial Sequence
  Synthetic
uauucuagcccuggucc

SEQ ID NO: 747729 - RNA, 17 nt, Artificial Sequence
  Synthetic
aaucuggggccuggucc

SEQ ID NO: 747730 - RNA, 17 nt, Artificial Sequence
  Synthetic
cuuuucccuccuggucc

SEQ ID NO: 747731 - RNA, 17 nt, Artificial Sequence
  Synthetic
agcccugguccuggucc

SEQ ID NO: 747732 - RNA, 17 nt, Artificial Sequence
  Synthetic
aauggaaccucuggucc

SEQ ID NO: 747733 - RNA, 17 nt, Artificial Sequence
  Synthetic
uugcucacagguggucc

SEQ ID NO: 747734 - RNA, 17 nt, Artificial Sequence
  Synthetic
uucuuaaaauguggucc

SEQ ID NO: 747735 - RNA, 17 nt, Artificial Sequence
  Synthetic
uagaauauaauuggucc

SEQ ID NO: 747736 - RNA, 17 nt, Artificial Sequence
  Synthetic
aaauauuguauuggucc

SEQ ID NO: 747737 - RNA, 17 nt, Artificial Sequence
  Synthetic
ccuauaugugaaugucc

SEQ ID NO: 747738 - RNA, 17 nt, Artificial Sequence
  Synthetic
uaauuaucaucaugucc

SEQ ID NO: 747739 - RNA, 17 nt, Artificial Sequence
  Synthetic
auccacaugucaugucc

SEQ ID NO: 747740 - RNA, 17 nt, Artificial Sequence
  Synthetic
uuggaagcaagaugucc

SEQ ID NO: 747741 - RNA, 17 nt, Artificial Sequence
  Synthetic
uguuggaagggaugucc

SEQ ID NO: 747742 - RNA, 17 nt, Artificial Sequence
  Synthetic
ucugccuacugaugucc

SEQ ID NO: 747743 - RNA, 17 nt, Artificial Sequence
  Synthetic
aagggaaaaauaugucc

SEQ ID NO: 747744 - RNA, 17 nt, Artificial Sequence
  Synthetic
uaauccauuguaugucc

SEQ ID NO: 747745 - RNA, 17 nt, Artificial Sequence
  Synthetic
uuuugggaaaacugucc

SEQ ID NO: 747746 - RNA, 17 nt, Artificial Sequence
  Synthetic
agagaucgagacugucc

SEQ ID NO: 747747 - RNA, 17 nt, Artificial Sequence
  Synthetic
acaacaaaguacugucc

SEQ ID NO: 747748 - RNA, 17 nt, Artificial Sequence
  Synthetic
acuuuuuuaaucugucc

SEQ ID NO: 747749 - RNA, 17 nt, Artificial Sequence
  Synthetic
cagugugaugucugucc

SEQ ID NO: 747750 - RNA, 17 nt, Artificial Sequence
  Synthetic
auguugaacuucugucc

SEQ ID NO: 747751 - RNA, 17 nt, Artificial Sequence
  Synthetic
aggacucauuucugucc

SEQ ID NO: 747752 - RNA, 17 nt, Artificial Sequence
  Synthetic
cacuuuugagagugucc

SEQ ID NO: 747753 - RNA, 17 nt, Artificial Sequence
  Synthetic
aguacccuggagugucc

SEQ ID NO: 747754 - RNA, 17 nt, Artificial Sequence
  Synthetic
agguauagauggugucc

SEQ ID NO: 747755 - RNA, 17 nt, Artificial Sequence
  Synthetic
uccacugagcugugucc

SEQ ID NO: 747756 - RNA, 17 nt, Artificial Sequence
  Synthetic
agaaaugcagugugucc

SEQ ID NO: 747757 - RNA, 17 nt, Artificial Sequence
  Synthetic
uugcuagauuugugucc

SEQ ID NO: 747758 - RNA, 17 nt, Artificial Sequence
  Synthetic
cacuauugaaauugucc

SEQ ID NO: 747759 - RNA, 17 nt, Artificial Sequence
  Synthetic
uguuacaagaauugucc

SEQ ID NO: 747760 - RNA, 17 nt, Artificial Sequence
  Synthetic
uggaagaagaauugucc

SEQ ID NO: 747761 - RNA, 17 nt, Artificial Sequence
  Synthetic
cccuugccugauugucc

SEQ ID NO: 747762 - RNA, 17 nt, Artificial Sequence
  Synthetic
auggacuauacuugucc

SEQ ID NO: 747763 - RNA, 17 nt, Artificial Sequence
  Synthetic
acuuaaguuacuugucc

SEQ ID NO: 747764 - RNA, 17 nt, Artificial Sequence
  Synthetic
ucauagguugcuugucc

SEQ ID NO: 747765 - RNA, 17 nt, Artificial Sequence
  Synthetic
uuauguggaucuugucc

SEQ ID NO: 747766 - RNA, 17 nt, Artificial Sequence
  Synthetic
ucuuuccccuguugucc

SEQ ID NO: 747767 - RNA, 17 nt, Artificial Sequence
  Synthetic
auuggagaguguugucc

SEQ ID NO: 747768 - RNA, 17 nt, Artificial Sequence
  Synthetic
uuaacaguuauuugucc

SEQ ID NO: 747769 - RNA, 17 nt, Artificial Sequence
  Synthetic
cuaccaaagcuuugucc

SEQ ID NO: 747770 - RNA, 17 nt, Artificial Sequence
  Synthetic
ucugauucaaaaauucc

SEQ ID NO: 747771 - RNA, 17 nt, Artificial Sequence
  Synthetic
cuugguaacaaaauucc

SEQ ID NO: 747772 - RNA, 17 nt, Artificial Sequence
  Synthetic
cccaauacgaaaauucc

SEQ ID NO: 747773 - RNA, 17 nt, Artificial Sequence
  Synthetic
auuugcauacaaauucc

SEQ ID NO: 747774 - RNA, 17 nt, Artificial Sequence
  Synthetic
cgcagcauccaaauucc

SEQ ID NO: 747775 - RNA, 17 nt, Artificial Sequence
  Synthetic
aagcacaaucaaauucc

SEQ ID NO: 747776 - RNA, 17 nt, Artificial Sequence
  Synthetic
ucuacaaaauaaauucc

SEQ ID NO: 747777 - RNA, 17 nt, Artificial Sequence
  Synthetic
acagggacauaaauucc

SEQ ID NO: 747778 - RNA, 17 nt, Artificial Sequence
  Synthetic
aaaaauggauaaauucc

SEQ ID NO: 747779 - RNA, 17 nt, Artificial Sequence
  Synthetic
aaggucuguacaauucc

SEQ ID NO: 747780 - RNA, 17 nt, Artificial Sequence
  Synthetic
uaccugcugccaauucc

SEQ ID NO: 747781 - RNA, 17 nt, Artificial Sequence
  Synthetic
ucugguuuuccaauucc

SEQ ID NO: 747782 - RNA, 17 nt, Artificial Sequence
  Synthetic
uauuuguaaagaauucc

SEQ ID NO: 747783 - RNA, 17 nt, Artificial Sequence
  Synthetic
ucuugaaugagaauucc

SEQ ID NO: 747784 - RNA, 17 nt, Artificial Sequence
  Synthetic
cuuuagaacugaauucc

SEQ ID NO: 747785 - RNA, 17 nt, Artificial Sequence
  Synthetic
uggcagccuugaauucc

SEQ ID NO: 747786 - RNA, 17 nt, Artificial Sequence
  Synthetic
augcaccuuugaauucc

SEQ ID NO: 747787 - RNA, 17 nt, Artificial Sequence
  Synthetic
uugggcaaaaacauucc

SEQ ID NO: 747788 - RNA, 17 nt, Artificial Sequence
  Synthetic
ugauaauaaaacauucc

SEQ ID NO: 747789 - RNA, 17 nt, Artificial Sequence
  Synthetic
augccaugaaacauucc

SEQ ID NO: 747790 - RNA, 17 nt, Artificial Sequence
  Synthetic
cugaucuuuaacauucc

SEQ ID NO: 747791 - RNA, 17 nt, Artificial Sequence
  Synthetic
cagcaccagcacauucc

SEQ ID NO: 747792 - RNA, 17 nt, Artificial Sequence
  Synthetic
ugguugccugacauucc

SEQ ID NO: 747793 - RNA, 17 nt, Artificial Sequence
  Synthetic
uauuugaaaaccauucc

SEQ ID NO: 747794 - RNA, 17 nt, Artificial Sequence
  Synthetic
caugaggcccccauucc

SEQ ID NO: 747795 - RNA, 17 nt, Artificial Sequence
  Synthetic
uaggggcaaagcauucc

SEQ ID NO: 747796 - RNA, 17 nt, Artificial Sequence
  Synthetic
uggggaaagagcauucc

SEQ ID NO: 747797 - RNA, 17 nt, Artificial Sequence
  Synthetic
uucagaaagggcauucc

SEQ ID NO: 747798 - RNA, 17 nt, Artificial Sequence
  Synthetic
aauuugucaaucauucc

SEQ ID NO: 747799 - RNA, 17 nt, Artificial Sequence
  Synthetic
auucacguaaucauucc

SEQ ID NO: 747800 - RNA, 17 nt, Artificial Sequence
  Synthetic
agcuauucuaucauucc

SEQ ID NO: 747801 - RNA, 17 nt, Artificial Sequence
  Synthetic
uucuugccucucauucc

SEQ ID NO: 747802 - RNA, 17 nt, Artificial Sequence
  Synthetic
auuucuauucucauucc

SEQ ID NO: 747803 - RNA, 17 nt, Artificial Sequence
  Synthetic
agacauacagucauucc

SEQ ID NO: 747804 - RNA, 17 nt, Artificial Sequence
  Synthetic
cauccacuguucauucc

SEQ ID NO: 747805 - RNA, 17 nt, Artificial Sequence
  Synthetic
agcuggucucagauucc

SEQ ID NO: 747806 - RNA, 17 nt, Artificial Sequence
  Synthetic
uaggugccugagauucc

SEQ ID NO: 747807 - RNA, 17 nt, Artificial Sequence
  Synthetic
aguuccuuauagauucc

SEQ ID NO: 747808 - RNA, 17 nt, Artificial Sequence
  Synthetic
uaucuguuaaggauucc

SEQ ID NO: 747809 - RNA, 17 nt, Artificial Sequence
  Synthetic
aucuuaaaagggauucc

SEQ ID NO: 747810 - RNA, 17 nt, Artificial Sequence
  Synthetic
uccaaugcuuggauucc

SEQ ID NO: 747811 - RNA, 17 nt, Artificial Sequence
  Synthetic
cuaccacagaugauucc

SEQ ID NO: 747812 - RNA, 17 nt, Artificial Sequence
  Synthetic
uuaggaucgcugauucc

SEQ ID NO: 747813 - RNA, 17 nt, Artificial Sequence
  Synthetic
acagguuuggugauucc

SEQ ID NO: 747814 - RNA, 17 nt, Artificial Sequence
  Synthetic
uuuugggaugugauucc

SEQ ID NO: 747815 - RNA, 17 nt, Artificial Sequence
  Synthetic
aggcugaaaaauauucc

SEQ ID NO: 747816 - RNA, 17 nt, Artificial Sequence
  Synthetic
acaaaagaaaauauucc

SEQ ID NO: 747817 - RNA, 17 nt, Artificial Sequence
  Synthetic
ucuugaaaacauauucc

SEQ ID NO: 747818 - RNA, 17 nt, Artificial Sequence
  Synthetic
aaucaaauccauauucc

SEQ ID NO: 747819 - RNA, 17 nt, Artificial Sequence
  Synthetic
ugucaguugcauauucc

SEQ ID NO: 747820 - RNA, 17 nt, Artificial Sequence
  Synthetic
aaaugugcauauauucc

SEQ ID NO: 747821 - RNA, 17 nt, Artificial Sequence
  Synthetic
cucuuagcaacuauucc

SEQ ID NO: 747822 - RNA, 17 nt, Artificial Sequence
  Synthetic
uacugcuucacuauucc

SEQ ID NO: 747823 - RNA, 17 nt, Artificial Sequence
  Synthetic
uuucaggcagcuauucc

SEQ ID NO: 747824 - RNA, 17 nt, Artificial Sequence
  Synthetic
uaaaacucaucuauucc

SEQ ID NO: 747825 - RNA, 17 nt, Artificial Sequence
  Synthetic
cuaaugaucucuauucc

SEQ ID NO: 747826 - RNA, 17 nt, Artificial Sequence
  Synthetic
cuccuuacuucuauucc

SEQ ID NO: 747827 - RNA, 17 nt, Artificial Sequence
  Synthetic
acucaaagagguauucc

SEQ ID NO: 747828 - RNA, 17 nt, Artificial Sequence
  Synthetic
aagacgaaggguauucc

SEQ ID NO: 747829 - RNA, 17 nt, Artificial Sequence
  Synthetic
ucugggaaaauuauucc

SEQ ID NO: 747830 - RNA, 17 nt, Artificial Sequence
  Synthetic
cuaagguagauuauucc

SEQ ID NO: 747831 - RNA, 17 nt, Artificial Sequence
  Synthetic
uguuuaguacuuauucc

SEQ ID NO: 747832 - RNA, 17 nt, Artificial Sequence
  Synthetic
caaucacucuuuauucc

SEQ ID NO: 747833 - RNA, 17 nt, Artificial Sequence
  Synthetic
cuaguuugaaaacuucc

SEQ ID NO: 747834 - RNA, 17 nt, Artificial Sequence
  Synthetic
cuuggcugcaaacuucc

SEQ ID NO: 747835 - RNA, 17 nt, Artificial Sequence
  Synthetic
agaguacaacaacuucc

SEQ ID NO: 747836 - RNA, 17 nt, Artificial Sequence
  Synthetic
caaacauuuuaacuucc

SEQ ID NO: 747837 - RNA, 17 nt, Artificial Sequence
  Synthetic
aaaaaagaaacacuucc

SEQ ID NO: 747838 - RNA, 17 nt, Artificial Sequence
  Synthetic
ccagcaaucccacuucc

SEQ ID NO: 747839 - RNA, 17 nt, Artificial Sequence
  Synthetic
auucccaauccacuucc

SEQ ID NO: 747840 - RNA, 17 nt, Artificial Sequence
  Synthetic
auguguuaggcacuucc

SEQ ID NO: 747841 - RNA, 17 nt, Artificial Sequence
  Synthetic
augacuuucucacuucc

SEQ ID NO: 747842 - RNA, 17 nt, Artificial Sequence
  Synthetic
cugcagccucgacuucc

SEQ ID NO: 747843 - RNA, 17 nt, Artificial Sequence
  Synthetic
uggugacacauacuucc

SEQ ID NO: 747844 - RNA, 17 nt, Artificial Sequence
  Synthetic
cuccuacugguacuucc

SEQ ID NO: 747845 - RNA, 17 nt, Artificial Sequence
  Synthetic
auacaaauuguacuucc

SEQ ID NO: 747846 - RNA, 17 nt, Artificial Sequence
  Synthetic
acaaguuaguuacuucc

SEQ ID NO: 747847 - RNA, 17 nt, Artificial Sequence
  Synthetic
uucuuuuuccaccuucc

SEQ ID NO: 747848 - RNA, 17 nt, Artificial Sequence
  Synthetic
aucucacugcaccuucc

SEQ ID NO: 747849 - RNA, 17 nt, Artificial Sequence
  Synthetic
ccagacaucacccuucc

SEQ ID NO: 747850 - RNA, 17 nt, Artificial Sequence
  Synthetic
uggcuuaaugcccuucc

SEQ ID NO: 747851 - RNA, 17 nt, Artificial Sequence
  Synthetic
uuuacauaaagccuucc

SEQ ID NO: 747852 - RNA, 17 nt, Artificial Sequence
  Synthetic
uuagcauaaugccuucc

SEQ ID NO: 747853 - RNA, 17 nt, Artificial Sequence
  Synthetic
cuuaaaaacugccuucc

SEQ ID NO: 747854 - RNA, 17 nt, Artificial Sequence
  Synthetic
cuaaggaugauccuucc

SEQ ID NO: 747855 - RNA, 17 nt, Artificial Sequence
  Synthetic
aauuggaagcuccuucc

SEQ ID NO: 747856 - RNA, 17 nt, Artificial Sequence
  Synthetic
uaaccacuauuccuucc

SEQ ID NO: 747857 - RNA, 17 nt, Artificial Sequence
  Synthetic
aaucgggaaaagcuucc

SEQ ID NO: 747858 - RNA, 17 nt, Artificial Sequence
  Synthetic
uuucacugaaagcuucc

SEQ ID NO: 747859 - RNA, 17 nt, Artificial Sequence
  Synthetic
cccaacuaccagcuucc

SEQ ID NO: 747860 - RNA, 17 nt, Artificial Sequence
  Synthetic
uucuuucuccagcuucc

SEQ ID NO: 747861 - RNA, 17 nt, Artificial Sequence
  Synthetic
cuccuaccucagcuucc

SEQ ID NO: 747862 - RNA, 17 nt, Artificial Sequence
  Synthetic
cuugaagcagagcuucc

SEQ ID NO: 747863 - RNA, 17 nt, Artificial Sequence
  Synthetic
auauagaaugagcuucc

SEQ ID NO: 747864 - RNA, 17 nt, Artificial Sequence
  Synthetic
cugcaaccuccgcuucc

SEQ ID NO: 747865 - RNA, 17 nt, Artificial Sequence
  Synthetic
cugcaaauuuggcuucc

SEQ ID NO: 747866 - RNA, 17 nt, Artificial Sequence
  Synthetic
auuggcuaaaugcuucc

SEQ ID NO: 747867 - RNA, 17 nt, Artificial Sequence
  Synthetic
cuuaguggaaugcuucc

SEQ ID NO: 747868 - RNA, 17 nt, Artificial Sequence
  Synthetic
acaagacuacugcuucc

SEQ ID NO: 747869 - RNA, 17 nt, Artificial Sequence
  Synthetic
cuuucccuccugcuucc

SEQ ID NO: 747870 - RNA, 17 nt, Artificial Sequence
  Synthetic
uuggguaagcugcuucc

SEQ ID NO: 747871 - RNA, 17 nt, Artificial Sequence
  Synthetic
ugaccccuugugcuucc

SEQ ID NO: 747872 - RNA, 17 nt, Artificial Sequence
  Synthetic
auugaugcaaaucuucc

SEQ ID NO: 747873 - RNA, 17 nt, Artificial Sequence
  Synthetic
cuuuagagaaaucuucc

SEQ ID NO: 747874 - RNA, 17 nt, Artificial Sequence
  Synthetic
ccaccuauaaaucuucc

SEQ ID NO: 747875 - RNA, 17 nt, Artificial Sequence
  Synthetic
ucugccacuccucuucc

SEQ ID NO: 747876 - RNA, 17 nt, Artificial Sequence
  Synthetic
cuagcuaucucucuucc

SEQ ID NO: 747877 - RNA, 17 nt, Artificial Sequence
  Synthetic
ccuucugguucucuucc

SEQ ID NO: 747878 - RNA, 17 nt, Artificial Sequence
  Synthetic
aaagggcuaagucuucc

SEQ ID NO: 747879 - RNA, 17 nt, Artificial Sequence
  Synthetic
uauguuuuaagucuucc

SEQ ID NO: 747880 - RNA, 17 nt, Artificial Sequence
  Synthetic
augaugugcagucuucc

SEQ ID NO: 747881 - RNA, 17 nt, Artificial Sequence
  Synthetic
augccauuccgucuucc

SEQ ID NO: 747882 - RNA, 17 nt, Artificial Sequence
  Synthetic
aucuuugccauucuucc

SEQ ID NO: 747883 - RNA, 17 nt, Artificial Sequence
  Synthetic
aggcaguggcuucuucc

SEQ ID NO: 747884 - RNA, 17 nt, Artificial Sequence
  Synthetic
uucuuauuuguucuucc

SEQ ID NO: 747885 - RNA, 17 nt, Artificial Sequence
  Synthetic
auacuaauuuuucuucc

SEQ ID NO: 747886 - RNA, 17 nt, Artificial Sequence
  Synthetic
uaaaauauuaaaguucc

SEQ ID NO: 747887 - RNA, 17 nt, Artificial Sequence
  Synthetic
aacaguuuggaaguucc

SEQ ID NO: 747888 - RNA, 17 nt, Artificial Sequence
  Synthetic
uucuuuauguaaguucc

SEQ ID NO: 747889 - RNA, 17 nt, Artificial Sequence
  Synthetic
auucacaccacaguucc

SEQ ID NO: 747890 - RNA, 17 nt, Artificial Sequence
  Synthetic
uccacaaaaucaguucc

SEQ ID NO: 747891 - RNA, 17 nt, Artificial Sequence
  Synthetic
uuccaggcccuaguucc

SEQ ID NO: 747892 - RNA, 17 nt, Artificial Sequence
  Synthetic
ugauguaauuuaguucc

SEQ ID NO: 747893 - RNA, 17 nt, Artificial Sequence
  Synthetic
acauauucacagguucc

SEQ ID NO: 747894 - RNA, 17 nt, Artificial Sequence
  Synthetic
uuauauuagcagguucc

SEQ ID NO: 747895 - RNA, 17 nt, Artificial Sequence
  Synthetic
ucgucuuuugagguucc

SEQ ID NO: 747896 - RNA, 17 nt, Artificial Sequence
  Synthetic
cugaugcugcugguucc

SEQ ID NO: 747897 - RNA, 17 nt, Artificial Sequence
  Synthetic
uucucaaaucugguucc

SEQ ID NO: 747898 - RNA, 17 nt, Artificial Sequence
  Synthetic
cugacagaugugguucc

SEQ ID NO: 747899 - RNA, 17 nt, Artificial Sequence
  Synthetic
caugggggauugguucc

SEQ ID NO: 747900 - RNA, 17 nt, Artificial Sequence
  Synthetic
acauuuggauugguucc

SEQ ID NO: 747901 - RNA, 17 nt, Artificial Sequence
  Synthetic
caggcugaaaauguucc

SEQ ID NO: 747902 - RNA, 17 nt, Artificial Sequence
  Synthetic
uucucugucaauguucc

SEQ ID NO: 747903 - RNA, 17 nt, Artificial Sequence
  Synthetic
aacuaaaaacauguucc

SEQ ID NO: 747904 - RNA, 17 nt, Artificial Sequence
  Synthetic
cagcaaaccacuguucc

SEQ ID NO: 747905 - RNA, 17 nt, Artificial Sequence
  Synthetic
uugaguggcacuguucc

SEQ ID NO: 747906 - RNA, 17 nt, Artificial Sequence
  Synthetic
ugugaauaugcuguucc

SEQ ID NO: 747907 - RNA, 17 nt, Artificial Sequence
  Synthetic
agucucuuugcuguucc

SEQ ID NO: 747908 - RNA, 17 nt, Artificial Sequence
  Synthetic
uuugaaugaucuguucc

SEQ ID NO: 747909 - RNA, 17 nt, Artificial Sequence
  Synthetic
acccaaaauucuguucc

SEQ ID NO: 747910 - RNA, 17 nt, Artificial Sequence
  Synthetic
uuccuuauuucuguucc

SEQ ID NO: 747911 - RNA, 17 nt, Artificial Sequence
  Synthetic
uaucucgcugguguucc

SEQ ID NO: 747912 - RNA, 17 nt, Artificial Sequence
  Synthetic
uuucuuaaauguguucc

SEQ ID NO: 747913 - RNA, 17 nt, Artificial Sequence
  Synthetic
ccagaauuauguguucc

SEQ ID NO: 747914 - RNA, 17 nt, Artificial Sequence
  Synthetic
acuuacaccauuguucc

SEQ ID NO: 747915 - RNA, 17 nt, Artificial Sequence
  Synthetic
aaauaaauguuuguucc

SEQ ID NO: 747916 - RNA, 17 nt, Artificial Sequence
  Synthetic
uaauuuccaaaauuucc

SEQ ID NO: 747917 - RNA, 17 nt, Artificial Sequence
  Synthetic
ccugcaucaaaauuucc

SEQ ID NO: 747918 - RNA, 17 nt, Artificial Sequence
  Synthetic
cugggaauaaaauuucc

SEQ ID NO: 747919 - RNA, 17 nt, Artificial Sequence
  Synthetic
agcugaaggcaauuucc

SEQ ID NO: 747920 - RNA, 17 nt, Artificial Sequence
  Synthetic
uaucaacaucaauuucc

SEQ ID NO: 747921 - RNA, 17 nt, Artificial Sequence
  Synthetic
uguuaauaucaauuucc

SEQ ID NO: 747922 - RNA, 17 nt, Artificial Sequence
  Synthetic
aggaggucagaauuucc

SEQ ID NO: 747923 - RNA, 17 nt, Artificial Sequence
  Synthetic
auccuucaugaauuucc

SEQ ID NO: 747924 - RNA, 17 nt, Artificial Sequence
  Synthetic
uaauuugaauaauuucc

SEQ ID NO: 747925 - RNA, 17 nt, Artificial Sequence
  Synthetic
ugauauacauaauuucc

SEQ ID NO: 747926 - RNA, 17 nt, Artificial Sequence
  Synthetic
cauguucaguaauuucc

SEQ ID NO: 747927 - RNA, 17 nt, Artificial Sequence
  Synthetic
aaagauacuuaauuucc

SEQ ID NO: 747928 - RNA, 17 nt, Artificial Sequence
  Synthetic
uaacacacaccauuucc

SEQ ID NO: 747929 - RNA, 17 nt, Artificial Sequence
  Synthetic
acacaguuagcauuucc

SEQ ID NO: 747930 - RNA, 17 nt, Artificial Sequence
  Synthetic
aaacuucuggcauuucc

SEQ ID NO: 747931 - RNA, 17 nt, Artificial Sequence
  Synthetic
aguccacaugcauuucc

SEQ ID NO: 747932 - RNA, 17 nt, Artificial Sequence
  Synthetic
auuaaucuugcauuucc

SEQ ID NO: 747933 - RNA, 17 nt, Artificial Sequence
  Synthetic
uuauuuuauucauuucc

SEQ ID NO: 747934 - RNA, 17 nt, Artificial Sequence
  Synthetic
cccauaucuagauuucc

SEQ ID NO: 747935 - RNA, 17 nt, Artificial Sequence
  Synthetic
cccuaaaaaggauuucc

SEQ ID NO: 747936 - RNA, 17 nt, Artificial Sequence
  Synthetic
uuaccuuuaggauuucc

SEQ ID NO: 747937 - RNA, 17 nt, Artificial Sequence
  Synthetic
ccaaauaauggauuucc

SEQ ID NO: 747938 - RNA, 17 nt, Artificial Sequence
  Synthetic
auuaaaaaaauauuucc

SEQ ID NO: 747939 - RNA, 17 nt, Artificial Sequence
  Synthetic
ucauguuuaauauuucc

SEQ ID NO: 747940 - RNA, 17 nt, Artificial Sequence
  Synthetic
auuuaacguauauuucc

SEQ ID NO: 747941 - RNA, 17 nt, Artificial Sequence
  Synthetic
uuccaugcccuauuucc

SEQ ID NO: 747942 - RNA, 17 nt, Artificial Sequence
  Synthetic
uaucuuagucuauuucc

SEQ ID NO: 747943 - RNA, 17 nt, Artificial Sequence
  Synthetic
cacuaggucguauuucc

SEQ ID NO: 747944 - RNA, 17 nt, Artificial Sequence
  Synthetic
aaaaaggauguauuucc

SEQ ID NO: 747945 - RNA, 17 nt, Artificial Sequence
  Synthetic
caaugacuauuauuucc

SEQ ID NO: 747946 - RNA, 17 nt, Artificial Sequence
  Synthetic
uuuauaauuuuauuucc

SEQ ID NO: 747947 - RNA, 17 nt, Artificial Sequence
  Synthetic
aauauugagaacuuucc

SEQ ID NO: 747948 - RNA, 17 nt, Artificial Sequence
  Synthetic
acacuuucccacuuucc

SEQ ID NO: 747949 - RNA, 17 nt, Artificial Sequence
  Synthetic
aguugcccauacuuucc

SEQ ID NO: 747950 - RNA, 17 nt, Artificial Sequence
  Synthetic
aucugagauuacuuucc

SEQ ID NO: 747951 - RNA, 17 nt, Artificial Sequence
  Synthetic
acuucaguccccuuucc

SEQ ID NO: 747952 - RNA, 17 nt, Artificial Sequence
  Synthetic
aucuccaaagccuuucc

SEQ ID NO: 747953 - RNA, 17 nt, Artificial Sequence
  Synthetic
cauagauacuccuuucc

SEQ ID NO: 747954 - RNA, 17 nt, Artificial Sequence
  Synthetic
auauuuagcuccuuucc

SEQ ID NO: 747955 - RNA, 17 nt, Artificial Sequence
  Synthetic
accucugcuuccuuucc

SEQ ID NO: 747956 - RNA, 17 nt, Artificial Sequence
  Synthetic
uacaucauuggcuuucc

SEQ ID NO: 747957 - RNA, 17 nt, Artificial Sequence
  Synthetic
aggcaauacaucuuucc

SEQ ID NO: 747958 - RNA, 17 nt, Artificial Sequence
  Synthetic
aguuuagugaucuuucc

SEQ ID NO: 747959 - RNA, 17 nt, Artificial Sequence
  Synthetic
ucucaucaucucuuucc

SEQ ID NO: 747960 - RNA, 17 nt, Artificial Sequence
  Synthetic
uucagagcagucuuucc

SEQ ID NO: 747961 - RNA, 17 nt, Artificial Sequence
  Synthetic
uuuuuaguggucuuucc

SEQ ID NO: 747962 - RNA, 17 nt, Artificial Sequence
  Synthetic
cucucuccauucuuucc

SEQ ID NO: 747963 - RNA, 17 nt, Artificial Sequence
  Synthetic
uuaagguauuucuuucc

SEQ ID NO: 747964 - RNA, 17 nt, Artificial Sequence
  Synthetic
acuuuaaaacaguuucc

SEQ ID NO: 747965 - RNA, 17 nt, Artificial Sequence
  Synthetic
cugcuauuucaguuucc

SEQ ID NO: 747966 - RNA, 17 nt, Artificial Sequence
  Synthetic
caagguuuucaguuucc

SEQ ID NO: 747967 - RNA, 17 nt, Artificial Sequence
  Synthetic
uaguguuuguaguuucc

SEQ ID NO: 747968 - RNA, 17 nt, Artificial Sequence
  Synthetic
agcaagacaagguuucc

SEQ ID NO: 747969 - RNA, 17 nt, Artificial Sequence
  Synthetic
aauauaggcagguuucc

SEQ ID NO: 747970 - RNA, 17 nt, Artificial Sequence
  Synthetic
uagauauguggguuucc

SEQ ID NO: 747971 - RNA, 17 nt, Artificial Sequence
  Synthetic
aaggcaaaaugguuucc

SEQ ID NO: 747972 - RNA, 17 nt, Artificial Sequence
  Synthetic
auacucaaaugguuucc

SEQ ID NO: 747973 - RNA, 17 nt, Artificial Sequence
  Synthetic
ucaauuuccugguuucc

SEQ ID NO: 747974 - RNA, 17 nt, Artificial Sequence
  Synthetic
uuuaggcucugguuucc

SEQ ID NO: 747975 - RNA, 17 nt, Artificial Sequence
  Synthetic
accuaucagugguuucc

SEQ ID NO: 747976 - RNA, 17 nt, Artificial Sequence
  Synthetic
auagaauggugguuucc

SEQ ID NO: 747977 - RNA, 17 nt, Artificial Sequence
  Synthetic
aaauacccuugguuucc

SEQ ID NO: 747978 - RNA, 17 nt, Artificial Sequence
  Synthetic
ugaacuuuuugguuucc

SEQ ID NO: 747979 - RNA, 17 nt, Artificial Sequence
  Synthetic
augugaaauauguuucc

SEQ ID NO: 747980 - RNA, 17 nt, Artificial Sequence
  Synthetic
uuuuuguuccuguuucc

SEQ ID NO: 747981 - RNA, 17 nt, Artificial Sequence
  Synthetic
uuuuguucauuguuucc

SEQ ID NO: 747982 - RNA, 17 nt, Artificial Sequence
  Synthetic
cauccaacaaauuuucc

SEQ ID NO: 747983 - RNA, 17 nt, Artificial Sequence
  Synthetic
uauucaugaaauuuucc

SEQ ID NO: 747984 - RNA, 17 nt, Artificial Sequence
  Synthetic
caaacauuaaauuuucc

SEQ ID NO: 747985 - RNA, 17 nt, Artificial Sequence
  Synthetic
aaauuaaacaauuuucc

SEQ ID NO: 747986 - RNA, 17 nt, Artificial Sequence
  Synthetic
auuuuuaacaauuuucc

SEQ ID NO: 747987 - RNA, 17 nt, Artificial Sequence
  Synthetic
caagaguugaauuuucc

SEQ ID NO: 747988 - RNA, 17 nt, Artificial Sequence
  Synthetic
uaaaauucuaauuuucc

SEQ ID NO: 747989 - RNA, 17 nt, Artificial Sequence
  Synthetic
aaaguaaaacauuuucc

SEQ ID NO: 747990 - RNA, 17 nt, Artificial Sequence
  Synthetic
uaucguucccauuuucc

SEQ ID NO: 747991 - RNA, 17 nt, Artificial Sequence
  Synthetic
aaacuuugccauuuucc

SEQ ID NO: 747992 - RNA, 17 nt, Artificial Sequence
  Synthetic
aagccaucagauuuucc

SEQ ID NO: 747993 - RNA, 17 nt, Artificial Sequence
  Synthetic
ucuacuugagauuuucc

SEQ ID NO: 747994 - RNA, 17 nt, Artificial Sequence
  Synthetic
uauaguuaugauuuucc

SEQ ID NO: 747995 - RNA, 17 nt, Artificial Sequence
  Synthetic
uuuacguuguauuuucc

SEQ ID NO: 747996 - RNA, 17 nt, Artificial Sequence
  Synthetic
uaauuuuauuauuuucc

SEQ ID NO: 747997 - RNA, 17 nt, Artificial Sequence
  Synthetic
aauugucuuacuuuucc

SEQ ID NO: 747998 - RNA, 17 nt, Artificial Sequence
  Synthetic
auguaaaugccuuuucc

SEQ ID NO: 747999 - RNA, 17 nt, Artificial Sequence
  Synthetic
agauuuguagcuuuucc

SEQ ID NO: 748000 - RNA, 17 nt, Artificial Sequence
  Synthetic
aaaugauccucuuuucc

SEQ ID NO: 748001 - RNA, 17 nt, Artificial Sequence
  Synthetic
aguugcugcucuuuucc

SEQ ID NO: 748002 - RNA, 17 nt, Artificial Sequence
  Synthetic
acaaucauuucuuuucc

SEQ ID NO: 748003 - RNA, 17 nt, Artificial Sequence
  Synthetic
uaauugcuuucuuuucc

SEQ ID NO: 748004 - RNA, 17 nt, Artificial Sequence
  Synthetic
auauuaacaaguuuucc

SEQ ID NO: 748005 - RNA, 17 nt, Artificial Sequence
  Synthetic
uggcaucuuaguuuucc

SEQ ID NO: 748006 - RNA, 17 nt, Artificial Sequence
  Synthetic
uagaaguuugguuuucc

SEQ ID NO: 748007 - RNA, 17 nt, Artificial Sequence
  Synthetic
auaugcaaauguuuucc

SEQ ID NO: 748008 - RNA, 17 nt, Artificial Sequence
  Synthetic
uuauuuggauguuuucc

SEQ ID NO: 748009 - RNA, 17 nt, Artificial Sequence
  Synthetic
aucucucuauguuuucc

SEQ ID NO: 748010 - RNA, 17 nt, Artificial Sequence
  Synthetic
aucccugucauuuuucc

SEQ ID NO: 748011 - RNA, 17 nt, Artificial Sequence
  Synthetic
aaugccuucauuuuucc

SEQ ID NO: 748012 - RNA, 17 nt, Artificial Sequence
  Synthetic
aaaaguuggauuuuucc

SEQ ID NO: 748013 - RNA, 17 nt, Artificial Sequence
  Synthetic
augacuccccuuuuucc

SEQ ID NO: 748014 - RNA, 17 nt, Artificial Sequence
  Synthetic
aguuuccuucuuuuucc

SEQ ID NO: 748015 - RNA, 17 nt, Artificial Sequence
  Synthetic
cucuuguucguuuuucc

SEQ ID NO: 748016 - RNA, 17 nt, Artificial Sequence
  Synthetic
aauacuauuguuuuucc

SEQ ID NO: 748017 - RNA, 17 nt, Artificial Sequence
  Synthetic
cucaaagaauuuuuucc

SEQ ID NO: 748018 - RNA, 17 nt, Artificial Sequence
  Synthetic
cucucuuacuuuuuucc

SEQ ID NO: 748019 - RNA, 17 nt, Artificial Sequence
  Synthetic
uuaugacauuuuuuucc

SEQ ID NO: 748020 - RNA, 17 nt, Artificial Sequence
  Synthetic
agcccaucuuuuuuucc

SEQ ID NO: 748021 - RNA, 17 nt, Artificial Sequence
  Synthetic
uuuuuucuuuuuuuucc

SEQ ID NO: 748022 - RNA, 17 nt, Artificial Sequence
  Synthetic
acagcauuuuuuuuucc

SEQ ID NO: 748023 - RNA, 17 nt, Artificial Sequence
  Synthetic
auauuuuuuuuuuuucc

SEQ ID NO: 748024 - RNA, 17 nt, Artificial Sequence
  Synthetic
aaacaaaauaaaaaagc

SEQ ID NO: 748025 - RNA, 17 nt, Artificial Sequence
  Synthetic
ucuaacucccaaaaagc

SEQ ID NO: 748026 - RNA, 17 nt, Artificial Sequence
  Synthetic
uuucuuuggcaaaaagc

SEQ ID NO: 748027 - RNA, 17 nt, Artificial Sequence
  Synthetic
uuugggggugaaaaagc

SEQ ID NO: 748028 - RNA, 17 nt, Artificial Sequence
  Synthetic
uaccugcaauaaaaagc

SEQ ID NO: 748029 - RNA, 17 nt, Artificial Sequence
  Synthetic
uaugggugauaaaaagc

SEQ ID NO: 748030 - RNA, 17 nt, Artificial Sequence
  Synthetic
aaccaauggacaaaagc

SEQ ID NO: 748031 - RNA, 17 nt, Artificial Sequence
  Synthetic
acugaaugggcaaaagc

SEQ ID NO: 748032 - RNA, 17 nt, Artificial Sequence
  Synthetic
aggaagacuucaaaagc

SEQ ID NO: 748033 - RNA, 17 nt, Artificial Sequence
  Synthetic
ucagaacuuucaaaagc

SEQ ID NO: 748034 - RNA, 17 nt, Artificial Sequence
  Synthetic
aucgaagggagaaaagc

SEQ ID NO: 748035 - RNA, 17 nt, Artificial Sequence
  Synthetic
uucauccaaggaaaagc

SEQ ID NO: 748036 - RNA, 17 nt, Artificial Sequence
  Synthetic
uuaagucucugaaaagc

SEQ ID NO: 748037 - RNA, 17 nt, Artificial Sequence
  Synthetic
aguaagggaauaaaagc

SEQ ID NO: 748038 - RNA, 17 nt, Artificial Sequence
  Synthetic
ugugugugccuaaaagc

SEQ ID NO: 748039 - RNA, 17 nt, Artificial Sequence
  Synthetic
uaaaggaugcuaaaagc

SEQ ID NO: 748040 - RNA, 17 nt, Artificial Sequence
  Synthetic
aggcaggcucuaaaagc

SEQ ID NO: 748041 - RNA, 17 nt, Artificial Sequence
  Synthetic
uaagugcauguaaaagc

SEQ ID NO: 748042 - RNA, 17 nt, Artificial Sequence
  Synthetic
uuuucauuauuaaaagc

SEQ ID NO: 748043 - RNA, 17 nt, Artificial Sequence
  Synthetic
auguagacaaacaaagc

SEQ ID NO: 748044 - RNA, 17 nt, Artificial Sequence
  Synthetic
agcuuuauaaacaaagc

SEQ ID NO: 748045 - RNA, 17 nt, Artificial Sequence
  Synthetic
auaaauaucaacaaagc

SEQ ID NO: 748046 - RNA, 17 nt, Artificial Sequence
  Synthetic
agcaaaaagaacaaagc

SEQ ID NO: 748047 - RNA, 17 nt, Artificial Sequence
  Synthetic
agccaaaagaacaaagc

SEQ ID NO: 748048 - RNA, 17 nt, Artificial Sequence
  Synthetic
aguaaaaugaacaaagc

SEQ ID NO: 748049 - RNA, 17 nt, Artificial Sequence
  Synthetic
agcaagaauaacaaagc

SEQ ID NO: 748050 - RNA, 17 nt, Artificial Sequence
  Synthetic
aaucaaugccacaaagc

SEQ ID NO: 748051 - RNA, 17 nt, Artificial Sequence
  Synthetic
agaugguuuuacaaagc

SEQ ID NO: 748052 - RNA, 17 nt, Artificial Sequence
  Synthetic
cauucugauaccaaagc

SEQ ID NO: 748053 - RNA, 17 nt, Artificial Sequence
  Synthetic
uaggcauauaccaaagc

SEQ ID NO: 748054 - RNA, 17 nt, Artificial Sequence
  Synthetic
uuaaaaugccccaaagc

SEQ ID NO: 748055 - RNA, 17 nt, Artificial Sequence
  Synthetic
cucugggaggccaaagc

SEQ ID NO: 748056 - RNA, 17 nt, Artificial Sequence
  Synthetic
cuuugggaggccaaagc

SEQ ID NO: 748057 - RNA, 17 nt, Artificial Sequence
  Synthetic
cgucuuuccuccaaagc

SEQ ID NO: 748058 - RNA, 17 nt, Artificial Sequence
  Synthetic
ucagaagacagcaaagc

SEQ ID NO: 748059 - RNA, 17 nt, Artificial Sequence
  Synthetic
acagcaguaggcaaagc

SEQ ID NO: 748060 - RNA, 17 nt, Artificial Sequence
  Synthetic
caccauauuggcaaagc

SEQ ID NO: 748061 - RNA, 17 nt, Artificial Sequence
  Synthetic
ucccugggaugcaaagc

SEQ ID NO: 748062 - RNA, 17 nt, Artificial Sequence
  Synthetic
accaaucagcucaaagc

SEQ ID NO: 748063 - RNA, 17 nt, Artificial Sequence
  Synthetic
cuaauuuggcucaaagc

SEQ ID NO: 748064 - RNA, 17 nt, Artificial Sequence
  Synthetic
acuucuccaaagaaagc

SEQ ID NO: 748065 - RNA, 17 nt, Artificial Sequence
  Synthetic
ugccuacaagagaaagc

SEQ ID NO: 748066 - RNA, 17 nt, Artificial Sequence
  Synthetic
cccaaggaagagaaagc

SEQ ID NO: 748067 - RNA, 17 nt, Artificial Sequence
  Synthetic
uccccacaggagaaagc

SEQ ID NO: 748068 - RNA, 17 nt, Artificial Sequence
  Synthetic
aaaagccaaaggaaagc

SEQ ID NO: 748069 - RNA, 17 nt, Artificial Sequence
  Synthetic
aaucagcaaaggaaagc

SEQ ID NO: 748070 - RNA, 17 nt, Artificial Sequence
  Synthetic
caaauggaaaggaaagc

SEQ ID NO: 748071 - RNA, 17 nt, Artificial Sequence
  Synthetic
aagagaggaaggaaagc

SEQ ID NO: 748072 - RNA, 17 nt, Artificial Sequence
  Synthetic
cggggagagaggaaagc

SEQ ID NO: 748073 - RNA, 17 nt, Artificial Sequence
  Synthetic
aggcaggggaggaaagc

SEQ ID NO: 748074 - RNA, 17 nt, Artificial Sequence
  Synthetic
agaccacaagggaaagc

SEQ ID NO: 748075 - RNA, 17 nt, Artificial Sequence
  Synthetic
caagacacugggaaagc

SEQ ID NO: 748076 - RNA, 17 nt, Artificial Sequence
  Synthetic
uuauuaaaaaugaaagc

SEQ ID NO: 748077 - RNA, 17 nt, Artificial Sequence
  Synthetic
auaaucgaaaugaaagc

SEQ ID NO: 748078 - RNA, 17 nt, Artificial Sequence
  Synthetic
aaaugaagaaugaaagc

SEQ ID NO: 748079 - RNA, 17 nt, Artificial Sequence
  Synthetic
augugaagaaugaaagc

SEQ ID NO: 748080 - RNA, 17 nt, Artificial Sequence
  Synthetic
augggauaagugaaagc

SEQ ID NO: 748081 - RNA, 17 nt, Artificial Sequence
  Synthetic
cccccaaucuugaaagc

SEQ ID NO: 748082 - RNA, 17 nt, Artificial Sequence
  Synthetic
cauauuggaaauaaagc

SEQ ID NO: 748083 - RNA, 17 nt, Artificial Sequence
  Synthetic
uuugugcaccauaaagc

SEQ ID NO: 748084 - RNA, 17 nt, Artificial Sequence
  Synthetic
uuuuaaaaggauaaagc

SEQ ID NO: 748085 - RNA, 17 nt, Artificial Sequence
  Synthetic
agggacauggauaaagc

SEQ ID NO: 748086 - RNA, 17 nt, Artificial Sequence
  Synthetic
aagggcagauauaaagc

SEQ ID NO: 748087 - RNA, 17 nt, Artificial Sequence
  Synthetic
aggagcaaaacuaaagc

SEQ ID NO: 748088 - RNA, 17 nt, Artificial Sequence
  Synthetic
agcuuagaaacuaaagc

SEQ ID NO: 748089 - RNA, 17 nt, Artificial Sequence
  Synthetic
cugugggaggcuaaagc

SEQ ID NO: 748090 - RNA, 17 nt, Artificial Sequence
  Synthetic
cauuugcuuucuaaagc

SEQ ID NO: 748091 - RNA, 17 nt, Artificial Sequence
  Synthetic
cuguguagcuguaaagc

SEQ ID NO: 748092 - RNA, 17 nt, Artificial Sequence
  Synthetic
aguucagagguuaaagc

SEQ ID NO: 748093 - RNA, 17 nt, Artificial Sequence
  Synthetic
aauaaauucuuuaaagc

SEQ ID NO: 748094 - RNA, 17 nt, Artificial Sequence
  Synthetic
acugaaagguuuaaagc

SEQ ID NO: 748095 - RNA, 17 nt, Artificial Sequence
  Synthetic
uauuagaauuuuaaagc

SEQ ID NO: 748096 - RNA, 17 nt, Artificial Sequence
  Synthetic
aguuggcauuuuaaagc

SEQ ID NO: 748097 - RNA, 17 nt, Artificial Sequence
  Synthetic
uaaaauucuaaacaagc

SEQ ID NO: 748098 - RNA, 17 nt, Artificial Sequence
  Synthetic
ugcucaggugaacaagc

SEQ ID NO: 748099 - RNA, 17 nt, Artificial Sequence
  Synthetic
uuauuuagauaacaagc

SEQ ID NO: 748100 - RNA, 17 nt, Artificial Sequence
  Synthetic
ucugaagauuaacaagc

SEQ ID NO: 748101 - RNA, 17 nt, Artificial Sequence
  Synthetic
agguauauuuaacaagc

SEQ ID NO: 748102 - RNA, 17 nt, Artificial Sequence
  Synthetic
aaugcuccaacacaagc

SEQ ID NO: 748103 - RNA, 17 nt, Artificial Sequence
  Synthetic
aaaacccccacacaagc

SEQ ID NO: 748104 - RNA, 17 nt, Artificial Sequence
  Synthetic
uuucuccuuacacaagc

SEQ ID NO: 748105 - RNA, 17 nt, Artificial Sequence
  Synthetic
aacaaauuaccacaagc

SEQ ID NO: 748106 - RNA, 17 nt, Artificial Sequence
  Synthetic
uaaagaccuagacaagc

SEQ ID NO: 748107 - RNA, 17 nt, Artificial Sequence
  Synthetic
uucugagaaauacaagc

SEQ ID NO: 748108 - RNA, 17 nt, Artificial Sequence
  Synthetic
acccaccaaaaccaagc

SEQ ID NO: 748109 - RNA, 17 nt, Artificial Sequence
  Synthetic
aaguaaggagaccaagc

SEQ ID NO: 748110 - RNA, 17 nt, Artificial Sequence
  Synthetic
auuaugcuugaccaagc

SEQ ID NO: 748111 - RNA, 17 nt, Artificial Sequence
  Synthetic
uggaaggggacccaagc

SEQ ID NO: 748112 - RNA, 17 nt, Artificial Sequence
  Synthetic
ucccugagcccccaagc

SEQ ID NO: 748113 - RNA, 17 nt, Artificial Sequence
  Synthetic
cacccugcugcccaagc

SEQ ID NO: 748114 - RNA, 17 nt, Artificial Sequence
  Synthetic
uugcuaugugcccaagc

SEQ ID NO: 748115 - RNA, 17 nt, Artificial Sequence
  Synthetic
cuugcuauugcccaagc

SEQ ID NO: 748116 - RNA, 17 nt, Artificial Sequence
  Synthetic
uugcuuacaugccaagc

SEQ ID NO: 748117 - RNA, 17 nt, Artificial Sequence
  Synthetic
uuucuauccauccaagc

SEQ ID NO: 748118 - RNA, 17 nt, Artificial Sequence
  Synthetic
uggcuguugguccaagc

SEQ ID NO: 748119 - RNA, 17 nt, Artificial Sequence
  Synthetic
agggugaacaagcaagc

SEQ ID NO: 748120 - RNA, 17 nt, Artificial Sequence
  Synthetic
agaaaaaccaagcaagc

SEQ ID NO: 748121 - RNA, 17 nt, Artificial Sequence
  Synthetic
auuuacagucagcaagc

SEQ ID NO: 748122 - RNA, 17 nt, Artificial Sequence
  Synthetic
cacuauguugggcaagc

SEQ ID NO: 748123 - RNA, 17 nt, Artificial Sequence
  Synthetic
caaagcaaaaugcaagc

SEQ ID NO: 748124 - RNA, 17 nt, Artificial Sequence
  Synthetic
uuggaaagaaugcaagc

SEQ ID NO: 748125 - RNA, 17 nt, Artificial Sequence
  Synthetic
uacuucuuuaugcaagc

SEQ ID NO: 748126 - RNA, 17 nt, Artificial Sequence
  Synthetic
aucacagaccugcaagc

SEQ ID NO: 748127 - RNA, 17 nt, Artificial Sequence
  Synthetic
aaugaaaguuugcaagc

SEQ ID NO: 748128 - RNA, 17 nt, Artificial Sequence
  Synthetic
agcauauaaaaucaagc

SEQ ID NO: 748129 - RNA, 17 nt, Artificial Sequence
  Synthetic
uaugccagagaucaagc

SEQ ID NO: 748130 - RNA, 17 nt, Artificial Sequence
  Synthetic
aauguuucugaucaagc

SEQ ID NO: 748131 - RNA, 17 nt, Artificial Sequence
  Synthetic
cauaccagcuaucaagc

SEQ ID NO: 748132 - RNA, 17 nt, Artificial Sequence
  Synthetic
aguucucccccucaagc

SEQ ID NO: 748133 - RNA, 17 nt, Artificial Sequence
  Synthetic
cauucuggggcucaagc

SEQ ID NO: 748134 - RNA, 17 nt, Artificial Sequence
  Synthetic
acugagcuuucucaagc

SEQ ID NO: 748135 - RNA, 17 nt, Artificial Sequence
  Synthetic
cuaaaguuuagucaagc

SEQ ID NO: 748136 - RNA, 17 nt, Artificial Sequence
  Synthetic
uguuaguuaggucaagc

SEQ ID NO: 748137 - RNA, 17 nt, Artificial Sequence
  Synthetic
cuccacguuggucaagc

SEQ ID NO: 748138 - RNA, 17 nt, Artificial Sequence
  Synthetic
aaaagaggcugucaagc

SEQ ID NO: 748139 - RNA, 17 nt, Artificial Sequence
  Synthetic
cacacaaaauuucaagc

SEQ ID NO: 748140 - RNA, 17 nt, Artificial Sequence
  Synthetic
cccacuuaauuucaagc

SEQ ID NO: 748141 - RNA, 17 nt, Artificial Sequence
  Synthetic
auuugcauaaaagaagc

SEQ ID NO: 748142 - RNA, 17 nt, Artificial Sequence
  Synthetic
uuuccaggcaaagaagc

SEQ ID NO: 748143 - RNA, 17 nt, Artificial Sequence
  Synthetic
cuuggguuacaagaagc

SEQ ID NO: 748144 - RNA, 17 nt, Artificial Sequence
  Synthetic
uuauacguucaagaagc

SEQ ID NO: 748145 - RNA, 17 nt, Artificial Sequence
  Synthetic
uuggaauuggaagaagc

SEQ ID NO: 748146 - RNA, 17 nt, Artificial Sequence
  Synthetic
cuacugugugaagaagc

SEQ ID NO: 748147 - RNA, 17 nt, Artificial Sequence
  Synthetic
acuucauuugaagaagc

SEQ ID NO: 748148 - RNA, 17 nt, Artificial Sequence
  Synthetic
auugagcaaacagaagc

SEQ ID NO: 748149 - RNA, 17 nt, Artificial Sequence
  Synthetic
uccuaguaaacagaagc

SEQ ID NO: 748150 - RNA, 17 nt, Artificial Sequence
  Synthetic
aggcaaggcacagaagc

SEQ ID NO: 748151 - RNA, 17 nt, Artificial Sequence
  Synthetic
cuggggcuaccagaagc

SEQ ID NO: 748152 - RNA, 17 nt, Artificial Sequence
  Synthetic
uguuauguggcagaagc

SEQ ID NO: 748153 - RNA, 17 nt, Artificial Sequence
  Synthetic
cugguuucugcagaagc

SEQ ID NO: 748154 - RNA, 17 nt, Artificial Sequence
  Synthetic
aacauauggucagaagc

SEQ ID NO: 748155 - RNA, 17 nt, Artificial Sequence
  Synthetic
aggauuaaaagagaagc

SEQ ID NO: 748156 - RNA, 17 nt, Artificial Sequence
  Synthetic
uaaguaggaagagaagc

SEQ ID NO: 748157 - RNA, 17 nt, Artificial Sequence
  Synthetic
cagaaaggcagagaagc

SEQ ID NO: 748158 - RNA, 17 nt, Artificial Sequence
  Synthetic
aagggagugagagaagc

SEQ ID NO: 748159 - RNA, 17 nt, Artificial Sequence
  Synthetic
ugggcagaaggagaagc

SEQ ID NO: 748160 - RNA, 17 nt, Artificial Sequence
  Synthetic
cuaucauugggagaagc

SEQ ID NO: 748161 - RNA, 17 nt, Artificial Sequence
  Synthetic
aaaagauuccuagaagc

SEQ ID NO: 748162 - RNA, 17 nt, Artificial Sequence
  Synthetic
acagcuggucuagaagc

SEQ ID NO: 748163 - RNA, 17 nt, Artificial Sequence
  Synthetic
ccuggccuucuagaagc

SEQ ID NO: 748164 - RNA, 17 nt, Artificial Sequence
  Synthetic
agagagggcuuagaagc

SEQ ID NO: 748165 - RNA, 17 nt, Artificial Sequence
  Synthetic
cucaaaaucuuagaagc

SEQ ID NO: 748166 - RNA, 17 nt, Artificial Sequence
  Synthetic
uauaauguagccgaagc

SEQ ID NO: 748167 - RNA, 17 nt, Artificial Sequence
  Synthetic
aaaggcaaaaaggaagc

SEQ ID NO: 748168 - RNA, 17 nt, Artificial Sequence
  Synthetic
cagguuguacaggaagc

SEQ ID NO: 748169 - RNA, 17 nt, Artificial Sequence
  Synthetic
uucuccagccaggaagc

SEQ ID NO: 748170 - RNA, 17 nt, Artificial Sequence
  Synthetic
aagggugacccggaagc

SEQ ID NO: 748171 - RNA, 17 nt, Artificial Sequence
  Synthetic
aaguugagaagggaagc

SEQ ID NO: 748172 - RNA, 17 nt, Artificial Sequence
  Synthetic
uuaacuuucagggaagc

SEQ ID NO: 748173 - RNA, 17 nt, Artificial Sequence
  Synthetic
ccagcacuuugggaagc

SEQ ID NO: 748174 - RNA, 17 nt, Artificial Sequence
  Synthetic
uaagugaaaauggaagc

SEQ ID NO: 748175 - RNA, 17 nt, Artificial Sequence
  Synthetic
agacaauguauggaagc

SEQ ID NO: 748176 - RNA, 17 nt, Artificial Sequence
  Synthetic
cagagcaggcuggaagc

SEQ ID NO: 748177 - RNA, 17 nt, Artificial Sequence
  Synthetic
caggugaguuuggaagc

SEQ ID NO: 748178 - RNA, 17 nt, Artificial Sequence
  Synthetic
augacauaaaaugaagc

SEQ ID NO: 748179 - RNA, 17 nt, Artificial Sequence
  Synthetic
uuauaaaauaaugaagc

SEQ ID NO: 748180 - RNA, 17 nt, Artificial Sequence
  Synthetic
aaggacauggaugaagc

SEQ ID NO: 748181 - RNA, 17 nt, Artificial Sequence
  Synthetic
acggacauggaugaagc

SEQ ID NO: 748182 - RNA, 17 nt, Artificial Sequence
  Synthetic
agggacauggaugaagc

SEQ ID NO: 748183 - RNA, 17 nt, Artificial Sequence
  Synthetic
agggacguggaugaagc

SEQ ID NO: 748184 - RNA, 17 nt, Artificial Sequence
  Synthetic
caguaauccuaugaagc

SEQ ID NO: 748185 - RNA, 17 nt, Artificial Sequence
  Synthetic
uuuguaugaacugaagc

SEQ ID NO: 748186 - RNA, 17 nt, Artificial Sequence
  Synthetic
cccuucuccccugaagc

SEQ ID NO: 748187 - RNA, 17 nt, Artificial Sequence
  Synthetic
acucaggaggcugaagc

SEQ ID NO: 748188 - RNA, 17 nt, Artificial Sequence
  Synthetic
acuugggaggcugaagc

SEQ ID NO: 748189 - RNA, 17 nt, Artificial Sequence
  Synthetic
cuuugggaggcugaagc

SEQ ID NO: 748190 - RNA, 17 nt, Artificial Sequence
  Synthetic
uuaacaagggcugaagc

SEQ ID NO: 748191 - RNA, 17 nt, Artificial Sequence
  Synthetic
agugcugaugcugaagc

SEQ ID NO: 748192 - RNA, 17 nt, Artificial Sequence
  Synthetic
caccuucuccgugaagc

SEQ ID NO: 748193 - RNA, 17 nt, Artificial Sequence
  Synthetic
caagcagaaggugaagc

SEQ ID NO: 748194 - RNA, 17 nt, Artificial Sequence
  Synthetic
cuccaaaacauugaagc

SEQ ID NO: 748195 - RNA, 17 nt, Artificial Sequence
  Synthetic
acuugggagguugaagc

SEQ ID NO: 748196 - RNA, 17 nt, Artificial Sequence
  Synthetic
aauggccagaaauaagc

SEQ ID NO: 748197 - RNA, 17 nt, Artificial Sequence
  Synthetic
aagccacuggaauaagc

SEQ ID NO: 748198 - RNA, 17 nt, Artificial Sequence
  Synthetic
agaaugguuucauaagc

SEQ ID NO: 748199 - RNA, 17 nt, Artificial Sequence
  Synthetic
caaaucacaagauaagc

SEQ ID NO: 748200 - RNA, 17 nt, Artificial Sequence
  Synthetic
cucuuugucagauaagc

SEQ ID NO: 748201 - RNA, 17 nt, Artificial Sequence
  Synthetic
cugaaaacuagauaagc

SEQ ID NO: 748202 - RNA, 17 nt, Artificial Sequence
  Synthetic
auuuuuauaauauaagc

SEQ ID NO: 748203 - RNA, 17 nt, Artificial Sequence
  Synthetic
auuuccuaauuauaagc

SEQ ID NO: 748204 - RNA, 17 nt, Artificial Sequence
  Synthetic
caugagagauuauaagc

SEQ ID NO: 748205 - RNA, 17 nt, Artificial Sequence
  Synthetic
uuauuguguuuauaagc

SEQ ID NO: 748206 - RNA, 17 nt, Artificial Sequence
  Synthetic
acagagaacaacuaagc

SEQ ID NO: 748207 - RNA, 17 nt, Artificial Sequence
  Synthetic
uccuacugugacuaagc

SEQ ID NO: 748208 - RNA, 17 nt, Artificial Sequence
  Synthetic
auaagcacucccuaagc

SEQ ID NO: 748209 - RNA, 17 nt, Artificial Sequence
  Synthetic
cgccacauugccuaagc

SEQ ID NO: 748210 - RNA, 17 nt, Artificial Sequence
  Synthetic
cauucuguugccuaagc

SEQ ID NO: 748211 - RNA, 17 nt, Artificial Sequence
  Synthetic
ccucccuuugccuaagc

SEQ ID NO: 748212 - RNA, 17 nt, Artificial Sequence
  Synthetic
auacuuuuuuccuaagc

SEQ ID NO: 748213 - RNA, 17 nt, Artificial Sequence
  Synthetic
uccuguaggagcuaagc

SEQ ID NO: 748214 - RNA, 17 nt, Artificial Sequence
  Synthetic
cauaguagaugcuaagc

SEQ ID NO: 748215 - RNA, 17 nt, Artificial Sequence
  Synthetic
aauuaagguugcuaagc

SEQ ID NO: 748216 - RNA, 17 nt, Artificial Sequence
  Synthetic
uguuuugaaaucuaagc

SEQ ID NO: 748217 - RNA, 17 nt, Artificial Sequence
  Synthetic
augcaacuucucuaagc

SEQ ID NO: 748218 - RNA, 17 nt, Artificial Sequence
  Synthetic
uuauuaagagucuaagc

SEQ ID NO: 748219 - RNA, 17 nt, Artificial Sequence
  Synthetic
aagacuagagucuaagc

SEQ ID NO: 748220 - RNA, 17 nt, Artificial Sequence
  Synthetic
auuaucugaaaguaagc

SEQ ID NO: 748221 - RNA, 17 nt, Artificial Sequence
  Synthetic
aagacacagaaguaagc

SEQ ID NO: 748222 - RNA, 17 nt, Artificial Sequence
  Synthetic
auaugcccucaguaagc

SEQ ID NO: 748223 - RNA, 17 nt, Artificial Sequence
  Synthetic
aaucauuuucaguaagc

SEQ ID NO: 748224 - RNA, 17 nt, Artificial Sequence
  Synthetic
cuguaauuuuaguaagc

SEQ ID NO: 748225 - RNA, 17 nt, Artificial Sequence
  Synthetic
auguaucccacguaagc

SEQ ID NO: 748226 - RNA, 17 nt, Artificial Sequence
  Synthetic
caugauaucagguaagc

SEQ ID NO: 748227 - RNA, 17 nt, Artificial Sequence
  Synthetic
caugccaagugguaagc

SEQ ID NO: 748228 - RNA, 17 nt, Artificial Sequence
  Synthetic
cagaaaagaauguaagc

SEQ ID NO: 748229 - RNA, 17 nt, Artificial Sequence
  Synthetic
uuuuaagugaauuaagc

SEQ ID NO: 748230 - RNA, 17 nt, Artificial Sequence
  Synthetic
ucagggaguucuuaagc

SEQ ID NO: 748231 - RNA, 17 nt, Artificial Sequence
  Synthetic
acauaaaacaguuaagc

SEQ ID NO: 748232 - RNA, 17 nt, Artificial Sequence
  Synthetic
cagccuuaguguuaagc

SEQ ID NO: 748233 - RNA, 17 nt, Artificial Sequence
  Synthetic
ugaagcugaauuuaagc

SEQ ID NO: 748234 - RNA, 17 nt, Artificial Sequence
  Synthetic
aaauaagucauuuaagc

SEQ ID NO: 748235 - RNA, 17 nt, Artificial Sequence
  Synthetic
aaaagugcuauuuaagc

SEQ ID NO: 748236 - RNA, 17 nt, Artificial Sequence
  Synthetic
uuaaagcuacuuuaagc

SEQ ID NO: 748237 - RNA, 17 nt, Artificial Sequence
  Synthetic
uuuaagucuuuuuaagc

SEQ ID NO: 748238 - RNA, 17 nt, Artificial Sequence
  Synthetic
auuaacaacaaaacagc

SEQ ID NO: 748239 - RNA, 17 nt, Artificial Sequence
  Synthetic
ugaagagagaaaacagc

SEQ ID NO: 748240 - RNA, 17 nt, Artificial Sequence
  Synthetic
cccauacaccaaacagc

SEQ ID NO: 748241 - RNA, 17 nt, Artificial Sequence
  Synthetic
uucugccacuaaacagc

SEQ ID NO: 748242 - RNA, 17 nt, Artificial Sequence
  Synthetic
acaaauuguacaacagc

SEQ ID NO: 748243 - RNA, 17 nt, Artificial Sequence
  Synthetic
uggagagugagaacagc

SEQ ID NO: 748244 - RNA, 17 nt, Artificial Sequence
  Synthetic
uaaaagacaugaacagc

SEQ ID NO: 748245 - RNA, 17 nt, Artificial Sequence
  Synthetic
auaaaaauaugaacagc

SEQ ID NO: 748246 - RNA, 17 nt, Artificial Sequence
  Synthetic
cucaauacaauaacagc

SEQ ID NO: 748247 - RNA, 17 nt, Artificial Sequence
  Synthetic
acaucucaucuaacagc

SEQ ID NO: 748248 - RNA, 17 nt, Artificial Sequence
  Synthetic
uauaguauucuaacagc

SEQ ID NO: 748249 - RNA, 17 nt, Artificial Sequence
  Synthetic
ugcuaaauaguaacagc

SEQ ID NO: 748250 - RNA, 17 nt, Artificial Sequence
  Synthetic
auaauaauuguaacagc

SEQ ID NO: 748251 - RNA, 17 nt, Artificial Sequence
  Synthetic
cuuguuagaaacacagc

SEQ ID NO: 748252 - RNA, 17 nt, Artificial Sequence
  Synthetic
ucagagauaaacacagc

SEQ ID NO: 748253 - RNA, 17 nt, Artificial Sequence
  Synthetic
agcagagagaacacagc

SEQ ID NO: 748254 - RNA, 17 nt, Artificial Sequence
  Synthetic
cuuccagcuaacacagc

SEQ ID NO: 748255 - RNA, 17 nt, Artificial Sequence
  Synthetic
aaauaccaacacacagc

SEQ ID NO: 748256 - RNA, 17 nt, Artificial Sequence
  Synthetic
cauaucuaacacacagc

SEQ ID NO: 748257 - RNA, 17 nt, Artificial Sequence
  Synthetic
uuacaguuccacacagc

SEQ ID NO: 748258 - RNA, 17 nt, Artificial Sequence
  Synthetic
acaggagcugacacagc

SEQ ID NO: 748259 - RNA, 17 nt, Artificial Sequence
  Synthetic
aguuuuaaauacacagc

SEQ ID NO: 748260 - RNA, 17 nt, Artificial Sequence
  Synthetic
accauaaccaccacagc

SEQ ID NO: 748261 - RNA, 17 nt, Artificial Sequence
  Synthetic
uccccccaccccacagc

SEQ ID NO: 748262 - RNA, 17 nt, Artificial Sequence
  Synthetic
cuucuuugagccacagc

SEQ ID NO: 748263 - RNA, 17 nt, Artificial Sequence
  Synthetic
ccauaaaaggccacagc

SEQ ID NO: 748264 - RNA, 17 nt, Artificial Sequence
  Synthetic
uugcccugggccacagc

SEQ ID NO: 748265 - RNA, 17 nt, Artificial Sequence
  Synthetic
acuacuuuuagcacagc

SEQ ID NO: 748266 - RNA, 17 nt, Artificial Sequence
  Synthetic
aucuucucaggcacagc

SEQ ID NO: 748267 - RNA, 17 nt, Artificial Sequence
  Synthetic
uguaaggucugcacagc

SEQ ID NO: 748268 - RNA, 17 nt, Artificial Sequence
  Synthetic
acuggaagaaucacagc

SEQ ID NO: 748269 - RNA, 17 nt, Artificial Sequence
  Synthetic
aucugagagaucacagc

SEQ ID NO: 748270 - RNA, 17 nt, Artificial Sequence
  Synthetic
uaccaauuaaagacagc

SEQ ID NO: 748271 - RNA, 17 nt, Artificial Sequence
  Synthetic
agagagaggaagacagc

SEQ ID NO: 748272 - RNA, 17 nt, Artificial Sequence
  Synthetic
acuucggugaagacagc

SEQ ID NO: 748273 - RNA, 17 nt, Artificial Sequence
  Synthetic
aaaauguguaagacagc

SEQ ID NO: 748274 - RNA, 17 nt, Artificial Sequence
  Synthetic
uauuaaauuaagacagc

SEQ ID NO: 748275 - RNA, 17 nt, Artificial Sequence
  Synthetic
uuugagcagcagacagc

SEQ ID NO: 748276 - RNA, 17 nt, Artificial Sequence
  Synthetic
uaacauuagcagacagc

SEQ ID NO: 748277 - RNA, 17 nt, Artificial Sequence
  Synthetic
uccaccaaauagacagc

SEQ ID NO: 748278 - RNA, 17 nt, Artificial Sequence
  Synthetic
acauagugaaggacagc

SEQ ID NO: 748279 - RNA, 17 nt, Artificial Sequence
  Synthetic
agguccuacaggacagc

SEQ ID NO: 748280 - RNA, 17 nt, Artificial Sequence
  Synthetic
cagaguuuuaggacagc

SEQ ID NO: 748281 - RNA, 17 nt, Artificial Sequence
  Synthetic
acuucuuacaugacagc

SEQ ID NO: 748282 - RNA, 17 nt, Artificial Sequence
  Synthetic
auuuauucacugacagc

SEQ ID NO: 748283 - RNA, 17 nt, Artificial Sequence
  Synthetic
cucagauaucugacagc

SEQ ID NO: 748284 - RNA, 17 nt, Artificial Sequence
  Synthetic
acuacuuuugugacagc

SEQ ID NO: 748285 - RNA, 17 nt, Artificial Sequence
  Synthetic
uauaacagguugacagc

SEQ ID NO: 748286 - RNA, 17 nt, Artificial Sequence
  Synthetic
aagcagaggaauacagc

SEQ ID NO: 748287 - RNA, 17 nt, Artificial Sequence
  Synthetic
ccuugugaagauacagc

SEQ ID NO: 748288 - RNA, 17 nt, Artificial Sequence
  Synthetic
cuauuuaaagcuacagc

SEQ ID NO: 748289 - RNA, 17 nt, Artificial Sequence
  Synthetic
caacuaacaucuacagc

SEQ ID NO: 748290 - RNA, 17 nt, Artificial Sequence
  Synthetic
uuggcuugggguacagc

SEQ ID NO: 748291 - RNA, 17 nt, Artificial Sequence
  Synthetic
agggguugaauuacagc

SEQ ID NO: 748292 - RNA, 17 nt, Artificial Sequence
  Synthetic
uuuccugucauuacagc

SEQ ID NO: 748293 - RNA, 17 nt, Artificial Sequence
  Synthetic
ugcauagcucuuacagc

SEQ ID NO: 748294 - RNA, 17 nt, Artificial Sequence
  Synthetic
uagcaaagcaaaccagc

SEQ ID NO: 748295 - RNA, 17 nt, Artificial Sequence
  Synthetic
aaauauggaacaccagc

SEQ ID NO: 748296 - RNA, 17 nt, Artificial Sequence
  Synthetic
ccuagggagacaccagc

SEQ ID NO: 748297 - RNA, 17 nt, Artificial Sequence
  Synthetic
aaacagcaggcaccagc

SEQ ID NO: 748298 - RNA, 17 nt, Artificial Sequence
  Synthetic
auugugauuucaccagc

SEQ ID NO: 748299 - RNA, 17 nt, Artificial Sequence
  Synthetic
ucuuaacauuuaccagc

SEQ ID NO: 748300 - RNA, 17 nt, Artificial Sequence
  Synthetic
caggauucaaacccagc

SEQ ID NO: 748301 - RNA, 17 nt, Artificial Sequence
  Synthetic
augugucucaacccagc

SEQ ID NO: 748302 - RNA, 17 nt, Artificial Sequence
  Synthetic
aaucuccugaacccagc

SEQ ID NO: 748303 - RNA, 17 nt, Artificial Sequence
  Synthetic
aagcuaccacacccagc

SEQ ID NO: 748304 - RNA, 17 nt, Artificial Sequence
  Synthetic
aauuagagacacccagc

SEQ ID NO: 748305 - RNA, 17 nt, Artificial Sequence
  Synthetic
cagagaaggcacccagc

SEQ ID NO: 748306 - RNA, 17 nt, Artificial Sequence
  Synthetic
cuucuaggcugcccagc

SEQ ID NO: 748307 - RNA, 17 nt, Artificial Sequence
  Synthetic
uuguuaugcugcccagc

SEQ ID NO: 748308 - RNA, 17 nt, Artificial Sequence
  Synthetic
acagacauaaucccagc

SEQ ID NO: 748309 - RNA, 17 nt, Artificial Sequence
  Synthetic
aaagaacuugucccagc

SEQ ID NO: 748310 - RNA, 17 nt, Artificial Sequence
  Synthetic
cuaucuucaaagccagc

SEQ ID NO: 748311 - RNA, 17 nt, Artificial Sequence
  Synthetic
aacagaagaaagccagc

SEQ ID NO: 748312 - RNA, 17 nt, Artificial Sequence
  Synthetic
agagagggcaagccagc

SEQ ID NO: 748313 - RNA, 17 nt, Artificial Sequence
  Synthetic
caaacucagcagccagc

SEQ ID NO: 748314 - RNA, 17 nt, Artificial Sequence
  Synthetic
cucucuucagagccagc

SEQ ID NO: 748315 - RNA, 17 nt, Artificial Sequence
  Synthetic
aaaggauuuccgccagc

SEQ ID NO: 748316 - RNA, 17 nt, Artificial Sequence
  Synthetic
cugcugcucaggccagc

SEQ ID NO: 748317 - RNA, 17 nt, Artificial Sequence
  Synthetic
uagugggucaggccagc

SEQ ID NO: 748318 - RNA, 17 nt, Artificial Sequence
  Synthetic
ugagaggugaggccagc

SEQ ID NO: 748319 - RNA, 17 nt, Artificial Sequence
  Synthetic
cuucucuucuggccagc

SEQ ID NO: 748320 - RNA, 17 nt, Artificial Sequence
  Synthetic
cauuuucaaaugccagc

SEQ ID NO: 748321 - RNA, 17 nt, Artificial Sequence
  Synthetic
cccuuagccaugccagc

SEQ ID NO: 748322 - RNA, 17 nt, Artificial Sequence
  Synthetic
uacagaauauugccagc

SEQ ID NO: 748323 - RNA, 17 nt, Artificial Sequence
  Synthetic
uccaauacaacuccagc

SEQ ID NO: 748324 - RNA, 17 nt, Artificial Sequence
  Synthetic
caccacugcacuccagc

SEQ ID NO: 748325 - RNA, 17 nt, Artificial Sequence
  Synthetic
caccauugcacuccagc

SEQ ID NO: 748326 - RNA, 17 nt, Artificial Sequence
  Synthetic
cuuuguaggacuccagc

SEQ ID NO: 748327 - RNA, 17 nt, Artificial Sequence
  Synthetic
auggcuuccccuccagc

SEQ ID NO: 748328 - RNA, 17 nt, Artificial Sequence
  Synthetic
uugaacaucccuccagc

SEQ ID NO: 748329 - RNA, 17 nt, Artificial Sequence
  Synthetic
cccaacaaaucuccagc

SEQ ID NO: 748330 - RNA, 17 nt, Artificial Sequence
  Synthetic
uuccccugaaguccagc

SEQ ID NO: 748331 - RNA, 17 nt, Artificial Sequence
  Synthetic
agugguggauguccagc

SEQ ID NO: 748332 - RNA, 17 nt, Artificial Sequence
  Synthetic
agggaaaaguguccagc

SEQ ID NO: 748333 - RNA, 17 nt, Artificial Sequence
  Synthetic
aaaaucaagauuccagc

SEQ ID NO: 748334 - RNA, 17 nt, Artificial Sequence
  Synthetic
cugagcucccuuccagc

SEQ ID NO: 748335 - RNA, 17 nt, Artificial Sequence
  Synthetic
cuaacuucauuuccagc

SEQ ID NO: 748336 - RNA, 17 nt, Artificial Sequence
  Synthetic
acuuauuccaaagcagc

SEQ ID NO: 748337 - RNA, 17 nt, Artificial Sequence
  Synthetic
uaccuuugcaaagcagc

SEQ ID NO: 748338 - RNA, 17 nt, Artificial Sequence
  Synthetic
caucgaaagaaagcagc

SEQ ID NO: 748339 - RNA, 17 nt, Artificial Sequence
  Synthetic
ucggccucccaagcagc

SEQ ID NO: 748340 - RNA, 17 nt, Artificial Sequence
  Synthetic
uguaucacagaagcagc

SEQ ID NO: 748341 - RNA, 17 nt, Artificial Sequence
  Synthetic
ucaaggcccuaagcagc

SEQ ID NO: 748342 - RNA, 17 nt, Artificial Sequence
  Synthetic
ugacccacaacagcagc

SEQ ID NO: 748343 - RNA, 17 nt, Artificial Sequence
  Synthetic
uguaucuuuacagcagc

SEQ ID NO: 748344 - RNA, 17 nt, Artificial Sequence
  Synthetic
agacaugggccagcagc

SEQ ID NO: 748345 - RNA, 17 nt, Artificial Sequence
  Synthetic
aguaggugagcagcagc

SEQ ID NO: 748346 - RNA, 17 nt, Artificial Sequence
  Synthetic
ucagccuccagagcagc

SEQ ID NO: 748347 - RNA, 17 nt, Artificial Sequence
  Synthetic
ucagccucccgagcagc

SEQ ID NO: 748348 - RNA, 17 nt, Artificial Sequence
  Synthetic
ucauccucccgagcagc

SEQ ID NO: 748349 - RNA, 17 nt, Artificial Sequence
  Synthetic
caaggccuuggagcagc

SEQ ID NO: 748350 - RNA, 17 nt, Artificial Sequence
  Synthetic
ccgcuggccugagcagc

SEQ ID NO: 748351 - RNA, 17 nt, Artificial Sequence
  Synthetic
aguuaauucugagcagc

SEQ ID NO: 748352 - RNA, 17 nt, Artificial Sequence
  Synthetic
uuauuuaaaauagcagc

SEQ ID NO: 748353 - RNA, 17 nt, Artificial Sequence
  Synthetic
cuagccaugauagcagc

SEQ ID NO: 748354 - RNA, 17 nt, Artificial Sequence
  Synthetic
auuucuauuauagcagc

SEQ ID NO: 748355 - RNA, 17 nt, Artificial Sequence
  Synthetic
uguauucaaguagcagc

SEQ ID NO: 748356 - RNA, 17 nt, Artificial Sequence
  Synthetic
uucuuaaauuuagcagc

SEQ ID NO: 748357 - RNA, 17 nt, Artificial Sequence
  Synthetic
agccugcauaacgcagc

SEQ ID NO: 748358 - RNA, 17 nt, Artificial Sequence
  Synthetic
uaaccucacaaggcagc

SEQ ID NO: 748359 - RNA, 17 nt, Artificial Sequence
  Synthetic
caccuucacaaggcagc

SEQ ID NO: 748360 - RNA, 17 nt, Artificial Sequence
  Synthetic
aggcuggagaaggcagc

SEQ ID NO: 748361 - RNA, 17 nt, Artificial Sequence
  Synthetic
agcaguccacaggcagc

SEQ ID NO: 748362 - RNA, 17 nt, Artificial Sequence
  Synthetic
acuccagcuugggcagc

SEQ ID NO: 748363 - RNA, 17 nt, Artificial Sequence
  Synthetic
cucuccaaaauggcagc

SEQ ID NO: 748364 - RNA, 17 nt, Artificial Sequence
  Synthetic
cuucuucacauggcagc

SEQ ID NO: 748365 - RNA, 17 nt, Artificial Sequence
  Synthetic
acauucuacauggcagc

SEQ ID NO: 748366 - RNA, 17 nt, Artificial Sequence
  Synthetic
ugcugauagcuggcagc

SEQ ID NO: 748367 - RNA, 17 nt, Artificial Sequence
  Synthetic
acccgggaauuggcagc

SEQ ID NO: 748368 - RNA, 17 nt, Artificial Sequence
  Synthetic
caauacauauuggcagc

SEQ ID NO: 748369 - RNA, 17 nt, Artificial Sequence
  Synthetic
ucagccucccaugcagc

SEQ ID NO: 748370 - RNA, 17 nt, Artificial Sequence
  Synthetic
acagauacagaugcagc

SEQ ID NO: 748371 - RNA, 17 nt, Artificial Sequence
  Synthetic
agcaacauggaugcagc

SEQ ID NO: 748372 - RNA, 17 nt, Artificial Sequence
  Synthetic
aggaacauggaugcagc

SEQ ID NO: 748373 - RNA, 17 nt, Artificial Sequence
  Synthetic
ugaauagaugaugcagc

SEQ ID NO: 748374 - RNA, 17 nt, Artificial Sequence
  Synthetic
ucauucuuaucugcagc

SEQ ID NO: 748375 - RNA, 17 nt, Artificial Sequence
  Synthetic
uccuuucugggugcagc

SEQ ID NO: 748376 - RNA, 17 nt, Artificial Sequence
  Synthetic
ugauuuugacuugcagc

SEQ ID NO: 748377 - RNA, 17 nt, Artificial Sequence
  Synthetic
aguugcuggcuugcagc

SEQ ID NO: 748378 - RNA, 17 nt, Artificial Sequence
  Synthetic
agauaauccuuugcagc

SEQ ID NO: 748379 - RNA, 17 nt, Artificial Sequence
  Synthetic
aaauacaaaaaaucagc

SEQ ID NO: 748380 - RNA, 17 nt, Artificial Sequence
  Synthetic
aaaauacaaaaaucagc

SEQ ID NO: 748381 - RNA, 17 nt, Artificial Sequence
  Synthetic
aaauuacaaaaaucagc

SEQ ID NO: 748382 - RNA, 17 nt, Artificial Sequence
  Synthetic
cucacaucagaaucagc

SEQ ID NO: 748383 - RNA, 17 nt, Artificial Sequence
  Synthetic
cucacgucagaaucagc

SEQ ID NO: 748384 - RNA, 17 nt, Artificial Sequence
  Synthetic
agcauaagggaaucagc

SEQ ID NO: 748385 - RNA, 17 nt, Artificial Sequence
  Synthetic
caaccucacuaaucagc

SEQ ID NO: 748386 - RNA, 17 nt, Artificial Sequence
  Synthetic
aucacuaaugcaucagc

SEQ ID NO: 748387 - RNA, 17 nt, Artificial Sequence
  Synthetic
auucagauuucaucagc

SEQ ID NO: 748388 - RNA, 17 nt, Artificial Sequence
  Synthetic
acuaugucaauaucagc

SEQ ID NO: 748389 - RNA, 17 nt, Artificial Sequence
  Synthetic
acaguucaaguaucagc

SEQ ID NO: 748390 - RNA, 17 nt, Artificial Sequence
  Synthetic
uaccugugcuuaucagc

SEQ ID NO: 748391 - RNA, 17 nt, Artificial Sequence
  Synthetic
cagaauagcaacucagc

SEQ ID NO: 748392 - RNA, 17 nt, Artificial Sequence
  Synthetic
aagaaaaauaacucagc

SEQ ID NO: 748393 - RNA, 17 nt, Artificial Sequence
  Synthetic
aaaaccccagacucagc

SEQ ID NO: 748394 - RNA, 17 nt, Artificial Sequence
  Synthetic
acagaaacugacucagc

SEQ ID NO: 748395 - RNA, 17 nt, Artificial Sequence
  Synthetic
accuugacugacucagc

SEQ ID NO: 748396 - RNA, 17 nt, Artificial Sequence
  Synthetic
uucuauguauacucagc

SEQ ID NO: 748397 - RNA, 17 nt, Artificial Sequence
  Synthetic
uaucugaacuacucagc

SEQ ID NO: 748398 - RNA, 17 nt, Artificial Sequence
  Synthetic
ccuucuccugccucagc

SEQ ID NO: 748399 - RNA, 17 nt, Artificial Sequence
  Synthetic
cugcucuccagcucagc

SEQ ID NO: 748400 - RNA, 17 nt, Artificial Sequence
  Synthetic
acuggaaggcucucagc

SEQ ID NO: 748401 - RNA, 17 nt, Artificial Sequence
  Synthetic
aaaagaucauucucagc

SEQ ID NO: 748402 - RNA, 17 nt, Artificial Sequence
  Synthetic
uuagcugaguucucagc

SEQ ID NO: 748403 - RNA, 17 nt, Artificial Sequence
  Synthetic
aaauggagaaagucagc

SEQ ID NO: 748404 - RNA, 17 nt, Artificial Sequence
  Synthetic
aaguggcauaagucagc

SEQ ID NO: 748405 - RNA, 17 nt, Artificial Sequence
  Synthetic
cagagguuacagucagc

SEQ ID NO: 748406 - RNA, 17 nt, Artificial Sequence
  Synthetic
agagccacaaggucagc

SEQ ID NO: 748407 - RNA, 17 nt, Artificial Sequence
  Synthetic
agugggaaguggucagc

SEQ ID NO: 748408 - RNA, 17 nt, Artificial Sequence
  Synthetic
uauucaaaaaauucagc

SEQ ID NO: 748409 - RNA, 17 nt, Artificial Sequence
  Synthetic
cagggcuuaaauucagc

SEQ ID NO: 748410 - RNA, 17 nt, Artificial Sequence
  Synthetic
ucagccuuucauucagc

SEQ ID NO: 748411 - RNA, 17 nt, Artificial Sequence
  Synthetic
ucucucauagauucagc

SEQ ID NO: 748412 - RNA, 17 nt, Artificial Sequence
  Synthetic
uuuauuuuagauucagc

SEQ ID NO: 748413 - RNA, 17 nt, Artificial Sequence
  Synthetic
uaauaaaaauauucagc

SEQ ID NO: 748414 - RNA, 17 nt, Artificial Sequence
  Synthetic
uucaaaucauauucagc

SEQ ID NO: 748415 - RNA, 17 nt, Artificial Sequence
  Synthetic
uucuuacagaguucagc

SEQ ID NO: 748416 - RNA, 17 nt, Artificial Sequence
  Synthetic
aucuaguucauuucagc

SEQ ID NO: 748417 - RNA, 17 nt, Artificial Sequence
  Synthetic
uuuucuugucuuucagc

SEQ ID NO: 748418 - RNA, 17 nt, Artificial Sequence
  Synthetic
ccccuacagguuucagc

SEQ ID NO: 748419 - RNA, 17 nt, Artificial Sequence
  Synthetic
uaauuuacuguuucagc

SEQ ID NO: 748420 - RNA, 17 nt, Artificial Sequence
  Synthetic
ucggccucacaaagagc

SEQ ID NO: 748421 - RNA, 17 nt, Artificial Sequence
  Synthetic
uuguucccccaaagagc

SEQ ID NO: 748422 - RNA, 17 nt, Artificial Sequence
  Synthetic
cuaaagcuccaaagagc

SEQ ID NO: 748423 - RNA, 17 nt, Artificial Sequence
  Synthetic
cuauugagaccaagagc

SEQ ID NO: 748424 - RNA, 17 nt, Artificial Sequence
  Synthetic
uugcacuagccaagagc

SEQ ID NO: 748425 - RNA, 17 nt, Artificial Sequence
  Synthetic
ucucuuccaucaagagc

SEQ ID NO: 748426 - RNA, 17 nt, Artificial Sequence
  Synthetic
aacagccacagaagagc

SEQ ID NO: 748427 - RNA, 17 nt, Artificial Sequence
  Synthetic
uuauguuugagaagagc

SEQ ID NO: 748428 - RNA, 17 nt, Artificial Sequence
  Synthetic
aacuauaaaggaagagc

SEQ ID NO: 748429 - RNA, 17 nt, Artificial Sequence
  Synthetic
aaagggcaaggaagagc

SEQ ID NO: 748430 - RNA, 17 nt, Artificial Sequence
  Synthetic
auagaguagggaagagc

SEQ ID NO: 748431 - RNA, 17 nt, Artificial Sequence
  Synthetic
augauggacugaagagc

SEQ ID NO: 748432 - RNA, 17 nt, Artificial Sequence
  Synthetic
aggaugagaauaagagc

SEQ ID NO: 748433 - RNA, 17 nt, Artificial Sequence
  Synthetic
uauauucacauaagagc

SEQ ID NO: 748434 - RNA, 17 nt, Artificial Sequence
  Synthetic
uucuuaagauuaagagc

SEQ ID NO: 748435 - RNA, 17 nt, Artificial Sequence
  Synthetic
acaaguaaguuaagagc

SEQ ID NO: 748436 - RNA, 17 nt, Artificial Sequence
  Synthetic
ucuuaguuguuaagagc

SEQ ID NO: 748437 - RNA, 17 nt, Artificial Sequence
  Synthetic
uuagaguaacacagagc

SEQ ID NO: 748438 - RNA, 17 nt, Artificial Sequence
  Synthetic
ccccuacaucacagagc

SEQ ID NO: 748439 - RNA, 17 nt, Artificial Sequence
  Synthetic
agagucuaucacagagc

SEQ ID NO: 748440 - RNA, 17 nt, Artificial Sequence
  Synthetic
uacauuuaagccagagc

SEQ ID NO: 748441 - RNA, 17 nt, Artificial Sequence
  Synthetic
augguggaaggcagagc

SEQ ID NO: 748442 - RNA, 17 nt, Artificial Sequence
  Synthetic
aaguuaaguggcagagc

SEQ ID NO: 748443 - RNA, 17 nt, Artificial Sequence
  Synthetic
augcaugcaugcagagc

SEQ ID NO: 748444 - RNA, 17 nt, Artificial Sequence
  Synthetic
ucucccacuugcagagc

SEQ ID NO: 748445 - RNA, 17 nt, Artificial Sequence
  Synthetic
agaagcaggaagagagc

SEQ ID NO: 748446 - RNA, 17 nt, Artificial Sequence
  Synthetic
cuaagaaugaagagagc

SEQ ID NO: 748447 - RNA, 17 nt, Artificial Sequence
  Synthetic
uaaccucuguagagagc

SEQ ID NO: 748448 - RNA, 17 nt, Artificial Sequence
  Synthetic
uaaagugaaaggagagc

SEQ ID NO: 748449 - RNA, 17 nt, Artificial Sequence
  Synthetic
aauaaucugaggagagc

SEQ ID NO: 748450 - RNA, 17 nt, Artificial Sequence
  Synthetic
aaggcaaaggggagagc

SEQ ID NO: 748451 - RNA, 17 nt, Artificial Sequence
  Synthetic
acuuuggaggggagagc

SEQ ID NO: 748452 - RNA, 17 nt, Artificial Sequence
  Synthetic
aacuaaagugggagagc

SEQ ID NO: 748453 - RNA, 17 nt, Artificial Sequence
  Synthetic
agaacccccuggagagc

SEQ ID NO: 748454 - RNA, 17 nt, Artificial Sequence
  Synthetic
uacaguaauuggagagc

SEQ ID NO: 748455 - RNA, 17 nt, Artificial Sequence
  Synthetic
aauucacuuuggagagc

SEQ ID NO: 748456 - RNA, 17 nt, Artificial Sequence
  Synthetic
augagauccaugagagc

SEQ ID NO: 748457 - RNA, 17 nt, Artificial Sequence
  Synthetic
uuuggcugcaugagagc

SEQ ID NO: 748458 - RNA, 17 nt, Artificial Sequence
  Synthetic
acugcacauaugagagc

SEQ ID NO: 748459 - RNA, 17 nt, Artificial Sequence
  Synthetic
ugccacuguaugagagc

SEQ ID NO: 748460 - RNA, 17 nt, Artificial Sequence
  Synthetic
uaccuucaucugagagc

SEQ ID NO: 748461 - RNA, 17 nt, Artificial Sequence
  Synthetic
uauuccugucugagagc

SEQ ID NO: 748462 - RNA, 17 nt, Artificial Sequence
  Synthetic
auuacacaaaauagagc

SEQ ID NO: 748463 - RNA, 17 nt, Artificial Sequence
  Synthetic
cuuugaagcacuagagc

SEQ ID NO: 748464 - RNA, 17 nt, Artificial Sequence
  Synthetic
cuucaccuggcuagagc

SEQ ID NO: 748465 - RNA, 17 nt, Artificial Sequence
  Synthetic
caaagaugaucuagagc

SEQ ID NO: 748466 - RNA, 17 nt, Artificial Sequence
  Synthetic
uccuuccagaguagagc

SEQ ID NO: 748467 - RNA, 17 nt, Artificial Sequence
  Synthetic
ucacagaauauuagagc

SEQ ID NO: 748468 - RNA, 17 nt, Artificial Sequence
  Synthetic
agcauugaccuuagagc

SEQ ID NO: 748469 - RNA, 17 nt, Artificial Sequence
  Synthetic
uauacuacauuuagagc

SEQ ID NO: 748470 - RNA, 17 nt, Artificial Sequence
  Synthetic
caguccugauuuagagc

SEQ ID NO: 748471 - RNA, 17 nt, Artificial Sequence
  Synthetic
aagccacaacaccgagc

SEQ ID NO: 748472 - RNA, 17 nt, Artificial Sequence
  Synthetic
acaaauggauaccgagc

SEQ ID NO: 748473 - RNA, 17 nt, Artificial Sequence
  Synthetic
aaaggcaacauucgagc

SEQ ID NO: 748474 - RNA, 17 nt, Artificial Sequence
  Synthetic
acaaaaauuuaaggagc

SEQ ID NO: 748475 - RNA, 17 nt, Artificial Sequence
  Synthetic
caaaacaaaacaggagc

SEQ ID NO: 748476 - RNA, 17 nt, Artificial Sequence
  Synthetic
aggauguuaccaggagc

SEQ ID NO: 748477 - RNA, 17 nt, Artificial Sequence
  Synthetic
ccaaugaauccaggagc

SEQ ID NO: 748478 - RNA, 17 nt, Artificial Sequence
  Synthetic
ucaaugaauccaggagc

SEQ ID NO: 748479 - RNA, 17 nt, Artificial Sequence
  Synthetic
ccaaauguaucaggagc

SEQ ID NO: 748480 - RNA, 17 nt, Artificial Sequence
  Synthetic
agcagucauucaggagc

SEQ ID NO: 748481 - RNA, 17 nt, Artificial Sequence
  Synthetic
aguagucauucaggagc

SEQ ID NO: 748482 - RNA, 17 nt, Artificial Sequence
  Synthetic
ugaggacacagaggagc

SEQ ID NO: 748483 - RNA, 17 nt, Artificial Sequence
  Synthetic
ccauuuuggagaggagc

SEQ ID NO: 748484 - RNA, 17 nt, Artificial Sequence
  Synthetic
uuuauaggaugaggagc

SEQ ID NO: 748485 - RNA, 17 nt, Artificial Sequence
  Synthetic
cuagaucuuugaggagc

SEQ ID NO: 748486 - RNA, 17 nt, Artificial Sequence
  Synthetic
ccaccucaacuaggagc

SEQ ID NO: 748487 - RNA, 17 nt, Artificial Sequence
  Synthetic
uguuagguuuuaggagc

SEQ ID NO: 748488 - RNA, 17 nt, Artificial Sequence
  Synthetic
ugggagaggagcggagc

SEQ ID NO: 748489 - RNA, 17 nt, Artificial Sequence
  Synthetic
aggaaaggaaagggagc

SEQ ID NO: 748490 - RNA, 17 nt, Artificial Sequence
  Synthetic
caaaggggcaagggagc

SEQ ID NO: 748491 - RNA, 17 nt, Artificial Sequence
  Synthetic
cuagauaagcagggagc

SEQ ID NO: 748492 - RNA, 17 nt, Artificial Sequence
  Synthetic
cuuaaaaaaccgggagc

SEQ ID NO: 748493 - RNA, 17 nt, Artificial Sequence
  Synthetic
uuuuugugugggggagc

SEQ ID NO: 748494 - RNA, 17 nt, Artificial Sequence
  Synthetic
ugccagaucaugggagc

SEQ ID NO: 748495 - RNA, 17 nt, Artificial Sequence
  Synthetic
aggcaugauaugggagc

SEQ ID NO: 748496 - RNA, 17 nt, Artificial Sequence
  Synthetic
ccugggacacugggagc

SEQ ID NO: 748497 - RNA, 17 nt, Artificial Sequence
  Synthetic
ugucaucaccugggagc

SEQ ID NO: 748498 - RNA, 17 nt, Artificial Sequence
  Synthetic
auuuguguccugggagc

SEQ ID NO: 748499 - RNA, 17 nt, Artificial Sequence
  Synthetic
aggcugccucugggagc

SEQ ID NO: 748500 - RNA, 17 nt, Artificial Sequence
  Synthetic
uauguaacugugggagc

SEQ ID NO: 748501 - RNA, 17 nt, Artificial Sequence
  Synthetic
agccugggcaauggagc

SEQ ID NO: 748502 - RNA, 17 nt, Artificial Sequence
  Synthetic
agcaacuugaauggagc

SEQ ID NO: 748503 - RNA, 17 nt, Artificial Sequence
  Synthetic
agcaacauggauggagc

SEQ ID NO: 748504 - RNA, 17 nt, Artificial Sequence
  Synthetic
agcaacuuugauggagc

SEQ ID NO: 748505 - RNA, 17 nt, Artificial Sequence
  Synthetic
acugagagauauggagc

SEQ ID NO: 748506 - RNA, 17 nt, Artificial Sequence
  Synthetic
ugguccucaacuggagc

SEQ ID NO: 748507 - RNA, 17 nt, Artificial Sequence
  Synthetic
auguuuuuuacuggagc

SEQ ID NO: 748508 - RNA, 17 nt, Artificial Sequence
  Synthetic
caaaaggacucuggagc

SEQ ID NO: 748509 - RNA, 17 nt, Artificial Sequence
  Synthetic
caaggcuacuguggagc

SEQ ID NO: 748510 - RNA, 17 nt, Artificial Sequence
  Synthetic
ccaguaauuauuggagc

SEQ ID NO: 748511 - RNA, 17 nt, Artificial Sequence
  Synthetic
aagcuuaagcuuggagc

SEQ ID NO: 748512 - RNA, 17 nt, Artificial Sequence
  Synthetic
agaaaacagaaaugagc

SEQ ID NO: 748513 - RNA, 17 nt, Artificial Sequence
  Synthetic
agaagagaagaaugagc

SEQ ID NO: 748514 - RNA, 17 nt, Artificial Sequence
  Synthetic
acuuggagagaaugagc

SEQ ID NO: 748515 - RNA, 17 nt, Artificial Sequence
  Synthetic
aacauauaguaaugagc

SEQ ID NO: 748516 - RNA, 17 nt, Artificial Sequence
  Synthetic
uucccuaggagaugagc

SEQ ID NO: 748517 - RNA, 17 nt, Artificial Sequence
  Synthetic
ugaccaucaugaugagc

SEQ ID NO: 748518 - RNA, 17 nt, Artificial Sequence
  Synthetic
cacauauaaauaugagc

SEQ ID NO: 748519 - RNA, 17 nt, Artificial Sequence
  Synthetic
acauauauauuaugagc

SEQ ID NO: 748520 - RNA, 17 nt, Artificial Sequence
  Synthetic
aauaaaugccacugagc

SEQ ID NO: 748521 - RNA, 17 nt, Artificial Sequence
  Synthetic
acaagaaacuacugagc

SEQ ID NO: 748522 - RNA, 17 nt, Artificial Sequence
  Synthetic
agugaaaucuccugagc

SEQ ID NO: 748523 - RNA, 17 nt, Artificial Sequence
  Synthetic
aucuuagcaagcugagc

SEQ ID NO: 748524 - RNA, 17 nt, Artificial Sequence
  Synthetic
aaaaaggcccgcugagc

SEQ ID NO: 748525 - RNA, 17 nt, Artificial Sequence
  Synthetic
ugugccacuggcugagc

SEQ ID NO: 748526 - RNA, 17 nt, Artificial Sequence
  Synthetic
uccuacuguggcugagc

SEQ ID NO: 748527 - RNA, 17 nt, Artificial Sequence
  Synthetic
ccuuucuguggcugagc

SEQ ID NO: 748528 - RNA, 17 nt, Artificial Sequence
  Synthetic
cuagaugacugcugagc

SEQ ID NO: 748529 - RNA, 17 nt, Artificial Sequence
  Synthetic
aaauguagcaucugagc

SEQ ID NO: 748530 - RNA, 17 nt, Artificial Sequence
  Synthetic
aaauucacccucugagc

SEQ ID NO: 748531 - RNA, 17 nt, Artificial Sequence
  Synthetic
ugugguguuuucugagc

SEQ ID NO: 748532 - RNA, 17 nt, Artificial Sequence
  Synthetic
ugauuggaaaagugagc

SEQ ID NO: 748533 - RNA, 17 nt, Artificial Sequence
  Synthetic
cagagguugcagugagc

SEQ ID NO: 748534 - RNA, 17 nt, Artificial Sequence
  Synthetic
auauugugauggugagc

SEQ ID NO: 748535 - RNA, 17 nt, Artificial Sequence
  Synthetic
aggaaaugaaugugagc

SEQ ID NO: 748536 - RNA, 17 nt, Artificial Sequence
  Synthetic
augucaaaugugugagc

SEQ ID NO: 748537 - RNA, 17 nt, Artificial Sequence
  Synthetic
aaugugaaugugugagc

SEQ ID NO: 748538 - RNA, 17 nt, Artificial Sequence
  Synthetic
auuagauaauauugagc

SEQ ID NO: 748539 - RNA, 17 nt, Artificial Sequence
  Synthetic
ugauuaauauauugagc

SEQ ID NO: 748540 - RNA, 17 nt, Artificial Sequence
  Synthetic
agaaggaacccuugagc

SEQ ID NO: 748541 - RNA, 17 nt, Artificial Sequence
  Synthetic
acaagaaccgcuugagc

SEQ ID NO: 748542 - RNA, 17 nt, Artificial Sequence
  Synthetic
caaaaauaauguugagc

SEQ ID NO: 748543 - RNA, 17 nt, Artificial Sequence
  Synthetic
uucugcccauuuugagc

SEQ ID NO: 748544 - RNA, 17 nt, Artificial Sequence
  Synthetic
uaguugagauuuugagc

SEQ ID NO: 748545 - RNA, 17 nt, Artificial Sequence
  Synthetic
uuuaggguauuuugagc

SEQ ID NO: 748546 - RNA, 17 nt, Artificial Sequence
  Synthetic
acugauacguuuugagc

SEQ ID NO: 748547 - RNA, 17 nt, Artificial Sequence
  Synthetic
aguauaaauuuuugagc

SEQ ID NO: 748548 - RNA, 17 nt, Artificial Sequence
  Synthetic
aaaaaaaaaaaaauagc

SEQ ID NO: 748549 - RNA, 17 nt, Artificial Sequence
  Synthetic
aaauacaaaaaaauagc

SEQ ID NO: 748550 - RNA, 17 nt, Artificial Sequence
  Synthetic
acuuccuugaaaauagc

SEQ ID NO: 748551 - RNA, 17 nt, Artificial Sequence
  Synthetic
ucagccucccaaauagc

SEQ ID NO: 748552 - RNA, 17 nt, Artificial Sequence
  Synthetic
aaaaaaaaagaaauagc

SEQ ID NO: 748553 - RNA, 17 nt, Artificial Sequence
  Synthetic
uuuucauuuuaaauagc

SEQ ID NO: 748554 - RNA, 17 nt, Artificial Sequence
  Synthetic
uccguaaucccaauagc

SEQ ID NO: 748555 - RNA, 17 nt, Artificial Sequence
  Synthetic
caauguguggcaauagc

SEQ ID NO: 748556 - RNA, 17 nt, Artificial Sequence
  Synthetic
acccuacucucaauagc

SEQ ID NO: 748557 - RNA, 17 nt, Artificial Sequence
  Synthetic
cuuguggagggaauagc

SEQ ID NO: 748558 - RNA, 17 nt, Artificial Sequence
  Synthetic
acugauuuuggaauagc

SEQ ID NO: 748559 - RNA, 17 nt, Artificial Sequence
  Synthetic
ucagccuccugaauagc

SEQ ID NO: 748560 - RNA, 17 nt, Artificial Sequence
  Synthetic
uaauucacaauaauagc

SEQ ID NO: 748561 - RNA, 17 nt, Artificial Sequence
  Synthetic
uauaacauaauaauagc

SEQ ID NO: 748562 - RNA, 17 nt, Artificial Sequence
  Synthetic
ugaugcuauuuaauagc

SEQ ID NO: 748563 - RNA, 17 nt, Artificial Sequence
  Synthetic
aacaaguugaacauagc

SEQ ID NO: 748564 - RNA, 17 nt, Artificial Sequence
  Synthetic
ccuaggcugcacauagc

SEQ ID NO: 748565 - RNA, 17 nt, Artificial Sequence
  Synthetic
ccuuaugcucacauagc

SEQ ID NO: 748566 - RNA, 17 nt, Artificial Sequence
  Synthetic
cuuauaggggacauagc

SEQ ID NO: 748567 - RNA, 17 nt, Artificial Sequence
  Synthetic
auuuguuaguacauagc

SEQ ID NO: 748568 - RNA, 17 nt, Artificial Sequence
  Synthetic
ugaggcagcaccauagc

SEQ ID NO: 748569 - RNA, 17 nt, Artificial Sequence
  Synthetic
uuuguguucagcauagc

SEQ ID NO: 748570 - RNA, 17 nt, Artificial Sequence
  Synthetic
uuucaacuuaucauagc

SEQ ID NO: 748571 - RNA, 17 nt, Artificial Sequence
  Synthetic
ugaaaacaucagauagc

SEQ ID NO: 748572 - RNA, 17 nt, Artificial Sequence
  Synthetic
uaagucagggagauagc

SEQ ID NO: 748573 - RNA, 17 nt, Artificial Sequence
  Synthetic
auagauagauagauagc

SEQ ID NO: 748574 - RNA, 17 nt, Artificial Sequence
  Synthetic
uguguggaguagauagc

SEQ ID NO: 748575 - RNA, 17 nt, Artificial Sequence
  Synthetic
cccaguaaugggauagc

SEQ ID NO: 748576 - RNA, 17 nt, Artificial Sequence
  Synthetic
aacggugcugggauagc

SEQ ID NO: 748577 - RNA, 17 nt, Artificial Sequence
  Synthetic
uagaaggagaugauagc

SEQ ID NO: 748578 - RNA, 17 nt, Artificial Sequence
  Synthetic
auagcucugcugauagc

SEQ ID NO: 748579 - RNA, 17 nt, Artificial Sequence
  Synthetic
agcuguuuggugauagc

SEQ ID NO: 748580 - RNA, 17 nt, Artificial Sequence
  Synthetic
acuuccagcuugauagc

SEQ ID NO: 748581 - RNA, 17 nt, Artificial Sequence
  Synthetic
ugugggauguugauagc

SEQ ID NO: 748582 - RNA, 17 nt, Artificial Sequence
  Synthetic
uuuuaggcaaauauagc

SEQ ID NO: 748583 - RNA, 17 nt, Artificial Sequence
  Synthetic
uuuuucauuucuauagc

SEQ ID NO: 748584 - RNA, 17 nt, Artificial Sequence
  Synthetic
uagcaacacaguauagc

SEQ ID NO: 748585 - RNA, 17 nt, Artificial Sequence
  Synthetic
uaaauuaauaguauagc

SEQ ID NO: 748586 - RNA, 17 nt, Artificial Sequence
  Synthetic
uauuguuuucuuauagc

SEQ ID NO: 748587 - RNA, 17 nt, Artificial Sequence
  Synthetic
uucuaccaaaaacuagc

SEQ ID NO: 748588 - RNA, 17 nt, Artificial Sequence
  Synthetic
augcuuccacaacuagc

SEQ ID NO: 748589 - RNA, 17 nt, Artificial Sequence
  Synthetic
cuggacccuccacuagc

SEQ ID NO: 748590 - RNA, 17 nt, Artificial Sequence
  Synthetic
uagugaaacagacuagc

SEQ ID NO: 748591 - RNA, 17 nt, Artificial Sequence
  Synthetic
auaaaauagagacuagc

SEQ ID NO: 748592 - RNA, 17 nt, Artificial Sequence
  Synthetic
cuaaaccaaugacuagc

SEQ ID NO: 748593 - RNA, 17 nt, Artificial Sequence
  Synthetic
cuaugaucuguacuagc

SEQ ID NO: 748594 - RNA, 17 nt, Artificial Sequence
  Synthetic
aggaacugaaaccuagc

SEQ ID NO: 748595 - RNA, 17 nt, Artificial Sequence
  Synthetic
caacaacucuaccuagc

SEQ ID NO: 748596 - RNA, 17 nt, Artificial Sequence
  Synthetic
uuuugugaguaccuagc

SEQ ID NO: 748597 - RNA, 17 nt, Artificial Sequence
  Synthetic
uccacuuuaugccuagc

SEQ ID NO: 748598 - RNA, 17 nt, Artificial Sequence
  Synthetic
ugcaagcuucagcuagc

SEQ ID NO: 748599 - RNA, 17 nt, Artificial Sequence
  Synthetic
uuucauucagagcuagc

SEQ ID NO: 748600 - RNA, 17 nt, Artificial Sequence
  Synthetic
uuacucuuauagcuagc

SEQ ID NO: 748601 - RNA, 17 nt, Artificial Sequence
  Synthetic
uucuguagauggcuagc

SEQ ID NO: 748602 - RNA, 17 nt, Artificial Sequence
  Synthetic
uaugauagaaugcuagc

SEQ ID NO: 748603 - RNA, 17 nt, Artificial Sequence
  Synthetic
auaucuucucugcuagc

SEQ ID NO: 748604 - RNA, 17 nt, Artificial Sequence
  Synthetic
ugggauuucuugcuagc

SEQ ID NO: 748605 - RNA, 17 nt, Artificial Sequence
  Synthetic
uauauauccccucuagc

SEQ ID NO: 748606 - RNA, 17 nt, Artificial Sequence
  Synthetic
uuugugugggcucuagc

SEQ ID NO: 748607 - RNA, 17 nt, Artificial Sequence
  Synthetic
acacaauguucucuagc

SEQ ID NO: 748608 - RNA, 17 nt, Artificial Sequence
  Synthetic
acuaaccaaguucuagc

SEQ ID NO: 748609 - RNA, 17 nt, Artificial Sequence
  Synthetic
cuucacauguuucuagc

SEQ ID NO: 748610 - RNA, 17 nt, Artificial Sequence
  Synthetic
aaaauacaaaaaguagc

SEQ ID NO: 748611 - RNA, 17 nt, Artificial Sequence
  Synthetic
ucaaccucccaaguagc

SEQ ID NO: 748612 - RNA, 17 nt, Artificial Sequence
  Synthetic
acagccucccaaguagc

SEQ ID NO: 748613 - RNA, 17 nt, Artificial Sequence
  Synthetic
ucagccucccaaguagc

SEQ ID NO: 748614 - RNA, 17 nt, Artificial Sequence
  Synthetic
ucagcuucccaaguagc

SEQ ID NO: 748615 - RNA, 17 nt, Artificial Sequence
  Synthetic
ucagccuuccaaguagc

SEQ ID NO: 748616 - RNA, 17 nt, Artificial Sequence
  Synthetic
aauauauaucaaguagc

SEQ ID NO: 748617 - RNA, 17 nt, Artificial Sequence
  Synthetic
aauucaauagaaguagc

SEQ ID NO: 748618 - RNA, 17 nt, Artificial Sequence
  Synthetic
ucagccuccuaaguagc

SEQ ID NO: 748619 - RNA, 17 nt, Artificial Sequence
  Synthetic
ucagccugcuaaguagc

SEQ ID NO: 748620 - RNA, 17 nt, Artificial Sequence
  Synthetic
cagauaauuuaaguagc

SEQ ID NO: 748621 - RNA, 17 nt, Artificial Sequence
  Synthetic
aguccuaagacaguagc

SEQ ID NO: 748622 - RNA, 17 nt, Artificial Sequence
  Synthetic
cucugucuuccaguagc

SEQ ID NO: 748623 - RNA, 17 nt, Artificial Sequence
  Synthetic
cugccuucugcaguagc

SEQ ID NO: 748624 - RNA, 17 nt, Artificial Sequence
  Synthetic
ucagccuccagaguagc

SEQ ID NO: 748625 - RNA, 17 nt, Artificial Sequence
  Synthetic
ucagccuaccgaguagc

SEQ ID NO: 748626 - RNA, 17 nt, Artificial Sequence
  Synthetic
uuaaccucccgaguagc

SEQ ID NO: 748627 - RNA, 17 nt, Artificial Sequence
  Synthetic
ucagccucccgaguagc

SEQ ID NO: 748628 - RNA, 17 nt, Artificial Sequence
  Synthetic
uuagccucccgaguagc

SEQ ID NO: 748629 - RNA, 17 nt, Artificial Sequence
  Synthetic
ucaggcucccgaguagc

SEQ ID NO: 748630 - RNA, 17 nt, Artificial Sequence
  Synthetic
ucagcuucccgaguagc

SEQ ID NO: 748631 - RNA, 17 nt, Artificial Sequence
  Synthetic
cucagccuccgaguagc

SEQ ID NO: 748632 - RNA, 17 nt, Artificial Sequence
  Synthetic
ucagccucucgaguagc

SEQ ID NO: 748633 - RNA, 17 nt, Artificial Sequence
  Synthetic
ucagccucaggaguagc

SEQ ID NO: 748634 - RNA, 17 nt, Artificial Sequence
  Synthetic
uuugccaaaugaguagc

SEQ ID NO: 748635 - RNA, 17 nt, Artificial Sequence
  Synthetic
ucagcccccugaguagc

SEQ ID NO: 748636 - RNA, 17 nt, Artificial Sequence
  Synthetic
ucagccuccugaguagc

SEQ ID NO: 748637 - RNA, 17 nt, Artificial Sequence
  Synthetic
uuagccuccugaguagc

SEQ ID NO: 748638 - RNA, 17 nt, Artificial Sequence
  Synthetic
ucaggcuccugaguagc

SEQ ID NO: 748639 - RNA, 17 nt, Artificial Sequence
  Synthetic
ucagcguccugaguagc

SEQ ID NO: 748640 - RNA, 17 nt, Artificial Sequence
  Synthetic
ucagccaucugaguagc

SEQ ID NO: 748641 - RNA, 17 nt, Artificial Sequence
  Synthetic
ucagccucuugaguagc

SEQ ID NO: 748642 - RNA, 17 nt, Artificial Sequence
  Synthetic
uaaauucuuugaguagc

SEQ ID NO: 748643 - RNA, 17 nt, Artificial Sequence
  Synthetic
aggaaccauauaguagc

SEQ ID NO: 748644 - RNA, 17 nt, Artificial Sequence
  Synthetic
ucagccucccuaguagc

SEQ ID NO: 748645 - RNA, 17 nt, Artificial Sequence
  Synthetic
ccuuuuuaaaacguagc

SEQ ID NO: 748646 - RNA, 17 nt, Artificial Sequence
  Synthetic
ucagccucccccguagc

SEQ ID NO: 748647 - RNA, 17 nt, Artificial Sequence
  Synthetic
auacauagaaagguagc

SEQ ID NO: 748648 - RNA, 17 nt, Artificial Sequence
  Synthetic
agggucauaaagguagc

SEQ ID NO: 748649 - RNA, 17 nt, Artificial Sequence
  Synthetic
ucagccucccagguagc

SEQ ID NO: 748650 - RNA, 17 nt, Artificial Sequence
  Synthetic
acggguagagagguagc

SEQ ID NO: 748651 - RNA, 17 nt, Artificial Sequence
  Synthetic
cucagccucccgguagc

SEQ ID NO: 748652 - RNA, 17 nt, Artificial Sequence
  Synthetic
ccagccuuucggguagc

SEQ ID NO: 748653 - RNA, 17 nt, Artificial Sequence
  Synthetic
cagaugccugggguagc

SEQ ID NO: 748654 - RNA, 17 nt, Artificial Sequence
  Synthetic
ucagccuccuggguagc

SEQ ID NO: 748655 - RNA, 17 nt, Artificial Sequence
  Synthetic
ucagcuuccuggguagc

SEQ ID NO: 748656 - RNA, 17 nt, Artificial Sequence
  Synthetic
uagccgggcaugguagc

SEQ ID NO: 748657 - RNA, 17 nt, Artificial Sequence
  Synthetic
auguagugccugguagc

SEQ ID NO: 748658 - RNA, 17 nt, Artificial Sequence
  Synthetic
ucucagacugugguagc

SEQ ID NO: 748659 - RNA, 17 nt, Artificial Sequence
  Synthetic
uucaggguaaauguagc

SEQ ID NO: 748660 - RNA, 17 nt, Artificial Sequence
  Synthetic
ucagacucccauguagc

SEQ ID NO: 748661 - RNA, 17 nt, Artificial Sequence
  Synthetic
uauuauucccauguagc

SEQ ID NO: 748662 - RNA, 17 nt, Artificial Sequence
  Synthetic
aggauuuuguauguagc

SEQ ID NO: 748663 - RNA, 17 nt, Artificial Sequence
  Synthetic
auaaacugaaguguagc

SEQ ID NO: 748664 - RNA, 17 nt, Artificial Sequence
  Synthetic
ucagccucccguguagc

SEQ ID NO: 748665 - RNA, 17 nt, Artificial Sequence
  Synthetic
aagauguucauuguagc

SEQ ID NO: 748666 - RNA, 17 nt, Artificial Sequence
  Synthetic
ugagaaaauguuguagc

SEQ ID NO: 748667 - RNA, 17 nt, Artificial Sequence
  Synthetic
caaagaauuuuuguagc

SEQ ID NO: 748668 - RNA, 17 nt, Artificial Sequence
  Synthetic
aaaaaaaaaaaauuagc

SEQ ID NO: 748669 - RNA, 17 nt, Artificial Sequence
  Synthetic
uacaaaaaaaaauuagc

SEQ ID NO: 748670 - RNA, 17 nt, Artificial Sequence
  Synthetic
auacaaaaaaaauuagc

SEQ ID NO: 748671 - RNA, 17 nt, Artificial Sequence
  Synthetic
aaauaaaaaaaauuagc

SEQ ID NO: 748672 - RNA, 17 nt, Artificial Sequence
  Synthetic
aacacaaaaaaauuagc

SEQ ID NO: 748673 - RNA, 17 nt, Artificial Sequence
  Synthetic
aauacaaaaaaauuagc

SEQ ID NO: 748674 - RNA, 17 nt, Artificial Sequence
  Synthetic
aaaauaaaaaaauuagc

SEQ ID NO: 748675 - RNA, 17 nt, Artificial Sequence
  Synthetic
aaacacaaaaaauuagc

SEQ ID NO: 748676 - RNA, 17 nt, Artificial Sequence
  Synthetic
aaauacaaaaaauuagc

SEQ ID NO: 748677 - RNA, 17 nt, Artificial Sequence
  Synthetic
aaaaagaaaaaauuagc

SEQ ID NO: 748678 - RNA, 17 nt, Artificial Sequence
  Synthetic
aaauauaaaaaauuagc

SEQ ID NO: 748679 - RNA, 17 nt, Artificial Sequence
  Synthetic
aaaauacaaaaauuagc

SEQ ID NO: 748680 - RNA, 17 nt, Artificial Sequence
  Synthetic
aauauacaaaaauuagc

SEQ ID NO: 748681 - RNA, 17 nt, Artificial Sequence
  Synthetic
aaacuacaaaaauuagc

SEQ ID NO: 748682 - RNA, 17 nt, Artificial Sequence
  Synthetic
aaauaccaaaaauuagc

SEQ ID NO: 748683 - RNA, 17 nt, Artificial Sequence
  Synthetic
aaaacagaaaaauuagc

SEQ ID NO: 748684 - RNA, 17 nt, Artificial Sequence
  Synthetic
aaaauauaaaaauuagc

SEQ ID NO: 748685 - RNA, 17 nt, Artificial Sequence
  Synthetic
acaaaaacaaaauuagc

SEQ ID NO: 748686 - RNA, 17 nt, Artificial Sequence
  Synthetic
aaauacacaaaauuagc

SEQ ID NO: 748687 - RNA, 17 nt, Artificial Sequence
  Synthetic
aaaaauacaaaauuagc

SEQ ID NO: 748688 - RNA, 17 nt, Artificial Sequence
  Synthetic
aaaauaguaaaauuagc

SEQ ID NO: 748689 - RNA, 17 nt, Artificial Sequence
  Synthetic
acaaguugagaauuagc

SEQ ID NO: 748690 - RNA, 17 nt, Artificial Sequence
  Synthetic
aucaacaauuaauuagc

SEQ ID NO: 748691 - RNA, 17 nt, Artificial Sequence
  Synthetic
aauuauaaugcauuagc

SEQ ID NO: 748692 - RNA, 17 nt, Artificial Sequence
  Synthetic
auuuaacuuucauuagc

SEQ ID NO: 748693 - RNA, 17 nt, Artificial Sequence
  Synthetic
aacaucugaagauuagc

SEQ ID NO: 748694 - RNA, 17 nt, Artificial Sequence
  Synthetic
uuugcucugugauuagc

SEQ ID NO: 748695 - RNA, 17 nt, Artificial Sequence
  Synthetic
uuuuaagugugauuagc

SEQ ID NO: 748696 - RNA, 17 nt, Artificial Sequence
  Synthetic
auauauuaaauauuagc

SEQ ID NO: 748697 - RNA, 17 nt, Artificial Sequence
  Synthetic
uacuaagugauauuagc

SEQ ID NO: 748698 - RNA, 17 nt, Artificial Sequence
  Synthetic
uguccgauuauauuagc

SEQ ID NO: 748699 - RNA, 17 nt, Artificial Sequence
  Synthetic
cuggcucugguauuagc

SEQ ID NO: 748700 - RNA, 17 nt, Artificial Sequence
  Synthetic
uuuucaaaguuauuagc

SEQ ID NO: 748701 - RNA, 17 nt, Artificial Sequence
  Synthetic
cuuauccaguuauuagc

SEQ ID NO: 748702 - RNA, 17 nt, Artificial Sequence
  Synthetic
aaaauaaaaaacuuagc

SEQ ID NO: 748703 - RNA, 17 nt, Artificial Sequence
  Synthetic
aaauacaaaaacuuagc

SEQ ID NO: 748704 - RNA, 17 nt, Artificial Sequence
  Synthetic
aaaaugcaaaacuuagc

SEQ ID NO: 748705 - RNA, 17 nt, Artificial Sequence
  Synthetic
caauauagaaacuuagc

SEQ ID NO: 748706 - RNA, 17 nt, Artificial Sequence
  Synthetic
aguauagaagccuuagc

SEQ ID NO: 748707 - RNA, 17 nt, Artificial Sequence
  Synthetic
uaggaauauagcuuagc

SEQ ID NO: 748708 - RNA, 17 nt, Artificial Sequence
  Synthetic
ucugagaguggcuuagc

SEQ ID NO: 748709 - RNA, 17 nt, Artificial Sequence
  Synthetic
agccaguggaucuuagc

SEQ ID NO: 748710 - RNA, 17 nt, Artificial Sequence
  Synthetic
uucuggaauaucuuagc

SEQ ID NO: 748711 - RNA, 17 nt, Artificial Sequence
  Synthetic
uagcuggaagucuuagc

SEQ ID NO: 748712 - RNA, 17 nt, Artificial Sequence
  Synthetic
aaaaaaaaaaaguuagc

SEQ ID NO: 748713 - RNA, 17 nt, Artificial Sequence
  Synthetic
ugaaauaaaaaguuagc

SEQ ID NO: 748714 - RNA, 17 nt, Artificial Sequence
  Synthetic
uauucauauaaguuagc

SEQ ID NO: 748715 - RNA, 17 nt, Artificial Sequence
  Synthetic
uagagauauaaguuagc

SEQ ID NO: 748716 - RNA, 17 nt, Artificial Sequence
  Synthetic
agacaguggcuguuagc

SEQ ID NO: 748717 - RNA, 17 nt, Artificial Sequence
  Synthetic
aaagaaaacguguuagc

SEQ ID NO: 748718 - RNA, 17 nt, Artificial Sequence
  Synthetic
aggccagcuguguuagc

SEQ ID NO: 748719 - RNA, 17 nt, Artificial Sequence
  Synthetic
auggauguuguguuagc

SEQ ID NO: 748720 - RNA, 17 nt, Artificial Sequence
  Synthetic
uuaagaaacaauuuagc

SEQ ID NO: 748721 - RNA, 17 nt, Artificial Sequence
  Synthetic
ccaaguuuagauuuagc

SEQ ID NO: 748722 - RNA, 17 nt, Artificial Sequence
  Synthetic
caaaugucugauuuagc

SEQ ID NO: 748723 - RNA, 17 nt, Artificial Sequence
  Synthetic
agagauucugauuuagc

SEQ ID NO: 748724 - RNA, 17 nt, Artificial Sequence
  Synthetic
acaguugcauauuuagc

SEQ ID NO: 748725 - RNA, 17 nt, Artificial Sequence
  Synthetic
ugcuccuccccuuuagc

SEQ ID NO: 748726 - RNA, 17 nt, Artificial Sequence
  Synthetic
cagaaaugcucuuuagc

SEQ ID NO: 748727 - RNA, 17 nt, Artificial Sequence
  Synthetic
uauuugccuaguuuagc

SEQ ID NO: 748728 - RNA, 17 nt, Artificial Sequence
  Synthetic
aacauacaaauuuuagc

SEQ ID NO: 748729 - RNA, 17 nt, Artificial Sequence
  Synthetic
uucaauuuaaaaaacgc

SEQ ID NO: 748730 - RNA, 17 nt, Artificial Sequence
  Synthetic
aguagaugagcaaacgc

SEQ ID NO: 748731 - RNA, 17 nt, Artificial Sequence
  Synthetic
auacacagaguaaacgc

SEQ ID NO: 748732 - RNA, 17 nt, Artificial Sequence
  Synthetic
uuguuuuaucauaacgc

SEQ ID NO: 748733 - RNA, 17 nt, Artificial Sequence
  Synthetic
accaaagaauauaacgc

SEQ ID NO: 748734 - RNA, 17 nt, Artificial Sequence
  Synthetic
cauaagcaaauuaacgc

SEQ ID NO: 748735 - RNA, 17 nt, Artificial Sequence
  Synthetic
ccuaagcacguuaacgc

SEQ ID NO: 748736 - RNA, 17 nt, Artificial Sequence
  Synthetic
aaaggcaacaaacacgc

SEQ ID NO: 748737 - RNA, 17 nt, Artificial Sequence
  Synthetic
ccucuuagugcgcacgc

SEQ ID NO: 748738 - RNA, 17 nt, Artificial Sequence
  Synthetic
agauuauuuucucacgc

SEQ ID NO: 748739 - RNA, 17 nt, Artificial Sequence
  Synthetic
uaccuaagaauucacgc

SEQ ID NO: 748740 - RNA, 17 nt, Artificial Sequence
  Synthetic
aguuccucacuagacgc

SEQ ID NO: 748741 - RNA, 17 nt, Artificial Sequence
  Synthetic
ugagacugggaggacgc

SEQ ID NO: 748742 - RNA, 17 nt, Artificial Sequence
  Synthetic
ucaacuauugaggacgc

SEQ ID NO: 748743 - RNA, 17 nt, Artificial Sequence
  Synthetic
uuuccaucaggggacgc

SEQ ID NO: 748744 - RNA, 17 nt, Artificial Sequence
  Synthetic
ugagaacaccuggacgc

SEQ ID NO: 748745 - RNA, 17 nt, Artificial Sequence
  Synthetic
uaguuccuuugugacgc

SEQ ID NO: 748746 - RNA, 17 nt, Artificial Sequence
  Synthetic
acuaggaaaacauacgc

SEQ ID NO: 748747 - RNA, 17 nt, Artificial Sequence
  Synthetic
cucucaggcaccaccgc

SEQ ID NO: 748748 - RNA, 17 nt, Artificial Sequence
  Synthetic
aaaaauaacuauaccgc

SEQ ID NO: 748749 - RNA, 17 nt, Artificial Sequence
  Synthetic
uucaaaauguguaccgc

SEQ ID NO: 748750 - RNA, 17 nt, Artificial Sequence
  Synthetic
acacccaacccucccgc

SEQ ID NO: 748751 - RNA, 17 nt, Artificial Sequence
  Synthetic
ccagaguugguucccgc

SEQ ID NO: 748752 - RNA, 17 nt, Artificial Sequence
  Synthetic
cuucuucacaaggccgc

SEQ ID NO: 748753 - RNA, 17 nt, Artificial Sequence
  Synthetic
caacuuggcugggccgc

SEQ ID NO: 748754 - RNA, 17 nt, Artificial Sequence
  Synthetic
ugaaaacauauggccgc

SEQ ID NO: 748755 - RNA, 17 nt, Artificial Sequence
  Synthetic
caugauuuugaugccgc

SEQ ID NO: 748756 - RNA, 17 nt, Artificial Sequence
  Synthetic
uuucuagcucuguccgc

SEQ ID NO: 748757 - RNA, 17 nt, Artificial Sequence
  Synthetic
ccagccucccaaagcgc

SEQ ID NO: 748758 - RNA, 17 nt, Artificial Sequence
  Synthetic
ucagccucccaaagcgc

SEQ ID NO: 748759 - RNA, 17 nt, Artificial Sequence
  Synthetic
acacuuggacacagcgc

SEQ ID NO: 748760 - RNA, 17 nt, Artificial Sequence
  Synthetic
agccaaaucuccagcgc

SEQ ID NO: 748761 - RNA, 17 nt, Artificial Sequence
  Synthetic
cugcccaugacuggcgc

SEQ ID NO: 748762 - RNA, 17 nt, Artificial Sequence
  Synthetic
ugagaauucccuggcgc

SEQ ID NO: 748763 - RNA, 17 nt, Artificial Sequence
  Synthetic
cacaugccaccaugcgc

SEQ ID NO: 748764 - RNA, 17 nt, Artificial Sequence
  Synthetic
uuuaaugccaggugcgc

SEQ ID NO: 748765 - RNA, 17 nt, Artificial Sequence
  Synthetic
uagcaaugcagaaucgc

SEQ ID NO: 748766 - RNA, 17 nt, Artificial Sequence
  Synthetic
agcccugccugcaucgc

SEQ ID NO: 748767 - RNA, 17 nt, Artificial Sequence
  Synthetic
cuucccgauaagaucgc

SEQ ID NO: 748768 - RNA, 17 nt, Artificial Sequence
  Synthetic
aaauggauaaaacucgc

SEQ ID NO: 748769 - RNA, 17 nt, Artificial Sequence
  Synthetic
ugcaaucucugccucgc

SEQ ID NO: 748770 - RNA, 17 nt, Artificial Sequence
  Synthetic
agaugagaaguugucgc

SEQ ID NO: 748771 - RNA, 17 nt, Artificial Sequence
  Synthetic
augugcaucagauucgc

SEQ ID NO: 748772 - RNA, 17 nt, Artificial Sequence
  Synthetic
ugcuucugcuauuucgc

SEQ ID NO: 748773 - RNA, 17 nt, Artificial Sequence
  Synthetic
cuaaaucacucuuucgc

SEQ ID NO: 748774 - RNA, 17 nt, Artificial Sequence
  Synthetic
aaauguagugguuucgc

SEQ ID NO: 748775 - RNA, 17 nt, Artificial Sequence
  Synthetic
aauaaaccauguuucgc

SEQ ID NO: 748776 - RNA, 17 nt, Artificial Sequence
  Synthetic
aucuauaugaaaaaggc

SEQ ID NO: 748777 - RNA, 17 nt, Artificial Sequence
  Synthetic
uuaugaaauaaaaaggc

SEQ ID NO: 748778 - RNA, 17 nt, Artificial Sequence
  Synthetic
ccaagcucccaaaaggc

SEQ ID NO: 748779 - RNA, 17 nt, Artificial Sequence
  Synthetic
acaugccaucaaaaggc

SEQ ID NO: 748780 - RNA, 17 nt, Artificial Sequence
  Synthetic
uaacaaauucaaaaggc

SEQ ID NO: 748781 - RNA, 17 nt, Artificial Sequence
  Synthetic
aguauggaagaaaaggc

SEQ ID NO: 748782 - RNA, 17 nt, Artificial Sequence
  Synthetic
accuuuacagaaaaggc

SEQ ID NO: 748783 - RNA, 17 nt, Artificial Sequence
  Synthetic
caucaaauggaaaaggc

SEQ ID NO: 748784 - RNA, 17 nt, Artificial Sequence
  Synthetic
cuaaugcuggaaaaggc

SEQ ID NO: 748785 - RNA, 17 nt, Artificial Sequence
  Synthetic
ugucaggaugaaaaggc

SEQ ID NO: 748786 - RNA, 17 nt, Artificial Sequence
  Synthetic
cugcugaaauaaaaggc

SEQ ID NO: 748787 - RNA, 17 nt, Artificial Sequence
  Synthetic
uggaaagccuaaaaggc

SEQ ID NO: 748788 - RNA, 17 nt, Artificial Sequence
  Synthetic
ugcuggugaccaaaggc

SEQ ID NO: 748789 - RNA, 17 nt, Artificial Sequence
  Synthetic
cacuaaaaaucaaaggc

SEQ ID NO: 748790 - RNA, 17 nt, Artificial Sequence
  Synthetic
aauucaagcucaaaggc

SEQ ID NO: 748791 - RNA, 17 nt, Artificial Sequence
  Synthetic
uuuuuugcgucaaaggc

SEQ ID NO: 748792 - RNA, 17 nt, Artificial Sequence
  Synthetic
ucagaaguuucaaaggc

SEQ ID NO: 748793 - RNA, 17 nt, Artificial Sequence
  Synthetic
cagccagagagaaaggc

SEQ ID NO: 748794 - RNA, 17 nt, Artificial Sequence
  Synthetic
ccagcuacccgaaaggc

SEQ ID NO: 748795 - RNA, 17 nt, Artificial Sequence
  Synthetic
ucgaggaaaggaaaggc

SEQ ID NO: 748796 - RNA, 17 nt, Artificial Sequence
  Synthetic
aggcauugaggaaaggc

SEQ ID NO: 748797 - RNA, 17 nt, Artificial Sequence
  Synthetic
aguaaacuuggaaaggc

SEQ ID NO: 748798 - RNA, 17 nt, Artificial Sequence
  Synthetic
uucccucacauaaaggc

SEQ ID NO: 748799 - RNA, 17 nt, Artificial Sequence
  Synthetic
auuuuuuagauaaaggc

SEQ ID NO: 748800 - RNA, 17 nt, Artificial Sequence
  Synthetic
auuuagaugguaaaggc

SEQ ID NO: 748801 - RNA, 17 nt, Artificial Sequence
  Synthetic
ucagacaaaaacaaggc

SEQ ID NO: 748802 - RNA, 17 nt, Artificial Sequence
  Synthetic
agaaauggcaacaaggc

SEQ ID NO: 748803 - RNA, 17 nt, Artificial Sequence
  Synthetic
agagacaugaacaaggc

SEQ ID NO: 748804 - RNA, 17 nt, Artificial Sequence
  Synthetic
uggcaagauaacaaggc

SEQ ID NO: 748805 - RNA, 17 nt, Artificial Sequence
  Synthetic
aaagcaaaucacaaggc

SEQ ID NO: 748806 - RNA, 17 nt, Artificial Sequence
  Synthetic
uuuggagaugacaaggc

SEQ ID NO: 748807 - RNA, 17 nt, Artificial Sequence
  Synthetic
ccccucuggcccaaggc

SEQ ID NO: 748808 - RNA, 17 nt, Artificial Sequence
  Synthetic
cuuagggaggccaaggc

SEQ ID NO: 748809 - RNA, 17 nt, Artificial Sequence
  Synthetic
cugugggaggccaaggc

SEQ ID NO: 748810 - RNA, 17 nt, Artificial Sequence
  Synthetic
cuuugggaggccaaggc

SEQ ID NO: 748811 - RNA, 17 nt, Artificial Sequence
  Synthetic
cuuugggaguccaaggc

SEQ ID NO: 748812 - RNA, 17 nt, Artificial Sequence
  Synthetic
uagaacacuagcaaggc

SEQ ID NO: 748813 - RNA, 17 nt, Artificial Sequence
  Synthetic
ugugcccuucgcaaggc

SEQ ID NO: 748814 - RNA, 17 nt, Artificial Sequence
  Synthetic
cucuacauaggcaaggc

SEQ ID NO: 748815 - RNA, 17 nt, Artificial Sequence
  Synthetic
ucccugggaugcaaggc

SEQ ID NO: 748816 - RNA, 17 nt, Artificial Sequence
  Synthetic
uccuugggaugcaaggc

SEQ ID NO: 748817 - RNA, 17 nt, Artificial Sequence
  Synthetic
augaaaagcaucaaggc

SEQ ID NO: 748818 - RNA, 17 nt, Artificial Sequence
  Synthetic
ugaaaaucugucaaggc

SEQ ID NO: 748819 - RNA, 17 nt, Artificial Sequence
  Synthetic
aacagaagaaagaaggc

SEQ ID NO: 748820 - RNA, 17 nt, Artificial Sequence
  Synthetic
ucacauguggagaaggc

SEQ ID NO: 748821 - RNA, 17 nt, Artificial Sequence
  Synthetic
agacaaggcaggaaggc

SEQ ID NO: 748822 - RNA, 17 nt, Artificial Sequence
  Synthetic
aguggaaggcugaaggc

SEQ ID NO: 748823 - RNA, 17 nt, Artificial Sequence
  Synthetic
agggucagagugaaggc

SEQ ID NO: 748824 - RNA, 17 nt, Artificial Sequence
  Synthetic
acagucucuuugaaggc

SEQ ID NO: 748825 - RNA, 17 nt, Artificial Sequence
  Synthetic
uaaaagccuaauaaggc

SEQ ID NO: 748826 - RNA, 17 nt, Artificial Sequence
  Synthetic
acucgggaggcuaaggc

SEQ ID NO: 748827 - RNA, 17 nt, Artificial Sequence
  Synthetic
auuugggaggcuaaggc

SEQ ID NO: 748828 - RNA, 17 nt, Artificial Sequence
  Synthetic
acucuuaauucuaaggc

SEQ ID NO: 748829 - RNA, 17 nt, Artificial Sequence
  Synthetic
ccccaaucuaguaaggc

SEQ ID NO: 748830 - RNA, 17 nt, Artificial Sequence
  Synthetic
agaagcucuuguaaggc

SEQ ID NO: 748831 - RNA, 17 nt, Artificial Sequence
  Synthetic
acucgggagguuaaggc

SEQ ID NO: 748832 - RNA, 17 nt, Artificial Sequence
  Synthetic
augagauacuuuaaggc

SEQ ID NO: 748833 - RNA, 17 nt, Artificial Sequence
  Synthetic
aaaaaugagaaacaggc

SEQ ID NO: 748834 - RNA, 17 nt, Artificial Sequence
  Synthetic
ugaccucaucaacaggc

SEQ ID NO: 748835 - RNA, 17 nt, Artificial Sequence
  Synthetic
uuugggcuucaacaggc

SEQ ID NO: 748836 - RNA, 17 nt, Artificial Sequence
  Synthetic
agaccugaagaacaggc

SEQ ID NO: 748837 - RNA, 17 nt, Artificial Sequence
  Synthetic
uaugcugaggaacaggc

SEQ ID NO: 748838 - RNA, 17 nt, Artificial Sequence
  Synthetic
uccguccuuccacaggc

SEQ ID NO: 748839 - RNA, 17 nt, Artificial Sequence
  Synthetic
uguucuuacucacaggc

SEQ ID NO: 748840 - RNA, 17 nt, Artificial Sequence
  Synthetic
aaaauucgcagacaggc

SEQ ID NO: 748841 - RNA, 17 nt, Artificial Sequence
  Synthetic
cagacaggcagacaggc

SEQ ID NO: 748842 - RNA, 17 nt, Artificial Sequence
  Synthetic
uugacugggagacaggc

SEQ ID NO: 748843 - RNA, 17 nt, Artificial Sequence
  Synthetic
agaauugaaauacaggc

SEQ ID NO: 748844 - RNA, 17 nt, Artificial Sequence
  Synthetic
ccacagggaguacaggc

SEQ ID NO: 748845 - RNA, 17 nt, Artificial Sequence
  Synthetic
aauauaaauguacaggc

SEQ ID NO: 748846 - RNA, 17 nt, Artificial Sequence
  Synthetic
uggcugcuuuuacaggc

SEQ ID NO: 748847 - RNA, 17 nt, Artificial Sequence
  Synthetic
uggagaagaaaccaggc

SEQ ID NO: 748848 - RNA, 17 nt, Artificial Sequence
  Synthetic
cgcucugucaaccaggc

SEQ ID NO: 748849 - RNA, 17 nt, Artificial Sequence
  Synthetic
ucacucugucaccaggc

SEQ ID NO: 748850 - RNA, 17 nt, Artificial Sequence
  Synthetic
uagcucugucaccaggc

SEQ ID NO: 748851 - RNA, 17 nt, Artificial Sequence
  Synthetic
ucgcucugucaccaggc

SEQ ID NO: 748852 - RNA, 17 nt, Artificial Sequence
  Synthetic
uugcucugucaccaggc

SEQ ID NO: 748853 - RNA, 17 nt, Artificial Sequence
  Synthetic
cugcucuuucaccaggc

SEQ ID NO: 748854 - RNA, 17 nt, Artificial Sequence
  Synthetic
uucuaaguggaccaggc

SEQ ID NO: 748855 - RNA, 17 nt, Artificial Sequence
  Synthetic
caucaaguugaccaggc

SEQ ID NO: 748856 - RNA, 17 nt, Artificial Sequence
  Synthetic
caccauguugaccaggc

SEQ ID NO: 748857 - RNA, 17 nt, Artificial Sequence
  Synthetic
cacccuguaacccaggc

SEQ ID NO: 748858 - RNA, 17 nt, Artificial Sequence
  Synthetic
ugcuccaucacccaggc

SEQ ID NO: 748859 - RNA, 17 nt, Artificial Sequence
  Synthetic
ugaucuaucacccaggc

SEQ ID NO: 748860 - RNA, 17 nt, Artificial Sequence
  Synthetic
cacuacgucacccaggc

SEQ ID NO: 748861 - RNA, 17 nt, Artificial Sequence
  Synthetic
ugcugggucacccaggc

SEQ ID NO: 748862 - RNA, 17 nt, Artificial Sequence
  Synthetic
cacccugucacccaggc

SEQ ID NO: 748863 - RNA, 17 nt, Artificial Sequence
  Synthetic
uacccugucacccaggc

SEQ ID NO: 748864 - RNA, 17 nt, Artificial Sequence
  Synthetic
cacucugucacccaggc

SEQ ID NO: 748865 - RNA, 17 nt, Artificial Sequence
  Synthetic
agcucugucacccaggc

SEQ ID NO: 748866 - RNA, 17 nt, Artificial Sequence
  Synthetic
cgcucugucacccaggc

SEQ ID NO: 748867 - RNA, 17 nt, Artificial Sequence
  Synthetic
ugcucugucacccaggc

SEQ ID NO: 748868 - RNA, 17 nt, Artificial Sequence
  Synthetic
cguucugucacccaggc

SEQ ID NO: 748869 - RNA, 17 nt, Artificial Sequence
  Synthetic
cacugugucacccaggc

SEQ ID NO: 748870 - RNA, 17 nt, Artificial Sequence
  Synthetic
cacuuugucacccaggc

SEQ ID NO: 748871 - RNA, 17 nt, Artificial Sequence
  Synthetic
cgcuguguuacccaggc

SEQ ID NO: 748872 - RNA, 17 nt, Artificial Sequence
  Synthetic
ccugcaacagcccaggc

SEQ ID NO: 748873 - RNA, 17 nt, Artificial Sequence
  Synthetic
ucgccugcagcccaggc

SEQ ID NO: 748874 - RNA, 17 nt, Artificial Sequence
  Synthetic
ugcucagucgcccaggc

SEQ ID NO: 748875 - RNA, 17 nt, Artificial Sequence
  Synthetic
cacucugucgcccaggc

SEQ ID NO: 748876 - RNA, 17 nt, Artificial Sequence
  Synthetic
cccucugucgcccaggc

SEQ ID NO: 748877 - RNA, 17 nt, Artificial Sequence
  Synthetic
cgcucugucgcccaggc

SEQ ID NO: 748878 - RNA, 17 nt, Artificial Sequence
  Synthetic
ugcucugucgcccaggc

SEQ ID NO: 748879 - RNA, 17 nt, Artificial Sequence
  Synthetic
cuuucugucgcccaggc

SEQ ID NO: 748880 - RNA, 17 nt, Artificial Sequence
  Synthetic
cgcucuuucgcccaggc

SEQ ID NO: 748881 - RNA, 17 nt, Artificial Sequence
  Synthetic
cuuugggaggcccaggc

SEQ ID NO: 748882 - RNA, 17 nt, Artificial Sequence
  Synthetic
acucuugcugcccaggc

SEQ ID NO: 748883 - RNA, 17 nt, Artificial Sequence
  Synthetic
ugcuccauugcccaggc

SEQ ID NO: 748884 - RNA, 17 nt, Artificial Sequence
  Synthetic
cacucgguugcccaggc

SEQ ID NO: 748885 - RNA, 17 nt, Artificial Sequence
  Synthetic
caccauguugcccaggc

SEQ ID NO: 748886 - RNA, 17 nt, Artificial Sequence
  Synthetic
ugccauguugcccaggc

SEQ ID NO: 748887 - RNA, 17 nt, Artificial Sequence
  Synthetic
cacuauguugcccaggc

SEQ ID NO: 748888 - RNA, 17 nt, Artificial Sequence
  Synthetic
cauuauguugcccaggc

SEQ ID NO: 748889 - RNA, 17 nt, Artificial Sequence
  Synthetic
cuugcuguugcccaggc

SEQ ID NO: 748890 - RNA, 17 nt, Artificial Sequence
  Synthetic
cacucuguugcccaggc

SEQ ID NO: 748891 - RNA, 17 nt, Artificial Sequence
  Synthetic
cgcucuguugcccaggc

SEQ ID NO: 748892 - RNA, 17 nt, Artificial Sequence
  Synthetic
ugcucuguugcccaggc

SEQ ID NO: 748893 - RNA, 17 nt, Artificial Sequence
  Synthetic
cacuguguugcccaggc

SEQ ID NO: 748894 - RNA, 17 nt, Artificial Sequence
  Synthetic
acucuuguugcccaggc

SEQ ID NO: 748895 - RNA, 17 nt, Artificial Sequence
  Synthetic
uauguugccucccaggc

SEQ ID NO: 748896 - RNA, 17 nt, Artificial Sequence
  Synthetic
cacuuguccucccaggc

SEQ ID NO: 748897 - RNA, 17 nt, Artificial Sequence
  Synthetic
ugcuuugucucccaggc

SEQ ID NO: 748898 - RNA, 17 nt, Artificial Sequence
  Synthetic
cagauagauagccaggc

SEQ ID NO: 748899 - RNA, 17 nt, Artificial Sequence
  Synthetic
caccauguuagccaggc

SEQ ID NO: 748900 - RNA, 17 nt, Artificial Sequence
  Synthetic
ucacucugucgccaggc

SEQ ID NO: 748901 - RNA, 17 nt, Artificial Sequence
  Synthetic
ucgcucugucgccaggc

SEQ ID NO: 748902 - RNA, 17 nt, Artificial Sequence
  Synthetic
uugcucugucgccaggc

SEQ ID NO: 748903 - RNA, 17 nt, Artificial Sequence
  Synthetic
agucucugucgccaggc

SEQ ID NO: 748904 - RNA, 17 nt, Artificial Sequence
  Synthetic
aauguaaaaggccaggc

SEQ ID NO: 748905 - RNA, 17 nt, Artificial Sequence
  Synthetic
cgccaugucggccaggc

SEQ ID NO: 748906 - RNA, 17 nt, Artificial Sequence
  Synthetic
cgccaugcuggccaggc

SEQ ID NO: 748907 - RNA, 17 nt, Artificial Sequence
  Synthetic
cacuaugguggccaggc

SEQ ID NO: 748908 - RNA, 17 nt, Artificial Sequence
  Synthetic
caccaucuuggccaggc

SEQ ID NO: 748909 - RNA, 17 nt, Artificial Sequence
  Synthetic
caccacguuggccaggc

SEQ ID NO: 748910 - RNA, 17 nt, Artificial Sequence
  Synthetic
uaccacguuggccaggc

SEQ ID NO: 748911 - RNA, 17 nt, Artificial Sequence
  Synthetic
cauuacguuggccaggc

SEQ ID NO: 748912 - RNA, 17 nt, Artificial Sequence
  Synthetic
caccagguuggccaggc

SEQ ID NO: 748913 - RNA, 17 nt, Artificial Sequence
  Synthetic
caccauguuggccaggc

SEQ ID NO: 748914 - RNA, 17 nt, Artificial Sequence
  Synthetic
uaccauguuggccaggc

SEQ ID NO: 748915 - RNA, 17 nt, Artificial Sequence
  Synthetic
cgccauguuggccaggc

SEQ ID NO: 748916 - RNA, 17 nt, Artificial Sequence
  Synthetic
ugccauguuggccaggc

SEQ ID NO: 748917 - RNA, 17 nt, Artificial Sequence
  Synthetic
cgucauguuggccaggc

SEQ ID NO: 748918 - RNA, 17 nt, Artificial Sequence
  Synthetic
caugauguuggccaggc

SEQ ID NO: 748919 - RNA, 17 nt, Artificial Sequence
  Synthetic
cacuauguuggccaggc

SEQ ID NO: 748920 - RNA, 17 nt, Artificial Sequence
  Synthetic
cacuguguuggccaggc

SEQ ID NO: 748921 - RNA, 17 nt, Artificial Sequence
  Synthetic
caccuuguuggccaggc

SEQ ID NO: 748922 - RNA, 17 nt, Artificial Sequence
  Synthetic
ucaccauuuggccaggc

SEQ ID NO: 748923 - RNA, 17 nt, Artificial Sequence
  Synthetic
ucccugggaugccaggc

SEQ ID NO: 748924 - RNA, 17 nt, Artificial Sequence
  Synthetic
uugcucuguugccaggc

SEQ ID NO: 748925 - RNA, 17 nt, Artificial Sequence
  Synthetic
caccauauuugccaggc

SEQ ID NO: 748926 - RNA, 17 nt, Artificial Sequence
  Synthetic
cuauucugcauccaggc

SEQ ID NO: 748927 - RNA, 17 nt, Artificial Sequence
  Synthetic
cacucugucauccaggc

SEQ ID NO: 748928 - RNA, 17 nt, Artificial Sequence
  Synthetic
uauagaguacuccaggc

SEQ ID NO: 748929 - RNA, 17 nt, Artificial Sequence
  Synthetic
cacuauguuguccaggc

SEQ ID NO: 748930 - RNA, 17 nt, Artificial Sequence
  Synthetic
ugcuauguuguccaggc

SEQ ID NO: 748931 - RNA, 17 nt, Artificial Sequence
  Synthetic
cucuauguuuuccaggc

SEQ ID NO: 748932 - RNA, 17 nt, Artificial Sequence
  Synthetic
aagacagcaaagcaggc

SEQ ID NO: 748933 - RNA, 17 nt, Artificial Sequence
  Synthetic
cagaccugcaagcaggc

SEQ ID NO: 748934 - RNA, 17 nt, Artificial Sequence
  Synthetic
aaggcagagaagcaggc

SEQ ID NO: 748935 - RNA, 17 nt, Artificial Sequence
  Synthetic
cuucagagccagcaggc

SEQ ID NO: 748936 - RNA, 17 nt, Artificial Sequence
  Synthetic
ccacuugcagagcaggc

SEQ ID NO: 748937 - RNA, 17 nt, Artificial Sequence
  Synthetic
caaggcagauggcaggc

SEQ ID NO: 748938 - RNA, 17 nt, Artificial Sequence
  Synthetic
ccuuugggauggcaggc

SEQ ID NO: 748939 - RNA, 17 nt, Artificial Sequence
  Synthetic
agccaagaaaugcaggc

SEQ ID NO: 748940 - RNA, 17 nt, Artificial Sequence
  Synthetic
aggaaaugccugcaggc

SEQ ID NO: 748941 - RNA, 17 nt, Artificial Sequence
  Synthetic
uuuuacagggaucaggc

SEQ ID NO: 748942 - RNA, 17 nt, Artificial Sequence
  Synthetic
caccauaaugaucaggc

SEQ ID NO: 748943 - RNA, 17 nt, Artificial Sequence
  Synthetic
caccaaguugaucaggc

SEQ ID NO: 748944 - RNA, 17 nt, Artificial Sequence
  Synthetic
caccacguugaucaggc

SEQ ID NO: 748945 - RNA, 17 nt, Artificial Sequence
  Synthetic
cuccauguugaucaggc

SEQ ID NO: 748946 - RNA, 17 nt, Artificial Sequence
  Synthetic
cgcucugucacucaggc

SEQ ID NO: 748947 - RNA, 17 nt, Artificial Sequence
  Synthetic
cgcugugucgcucaggc

SEQ ID NO: 748948 - RNA, 17 nt, Artificial Sequence
  Synthetic
auaugacugucucaggc

SEQ ID NO: 748949 - RNA, 17 nt, Artificial Sequence
  Synthetic
caccauguuagucaggc

SEQ ID NO: 748950 - RNA, 17 nt, Artificial Sequence
  Synthetic
cagcaugucggucaggc

SEQ ID NO: 748951 - RNA, 17 nt, Artificial Sequence
  Synthetic
aguucuaagggucaggc

SEQ ID NO: 748952 - RNA, 17 nt, Artificial Sequence
  Synthetic
caccauguuggucaggc

SEQ ID NO: 748953 - RNA, 17 nt, Artificial Sequence
  Synthetic
cgccauguuggucaggc

SEQ ID NO: 748954 - RNA, 17 nt, Artificial Sequence
  Synthetic
caucauguuggucaggc

SEQ ID NO: 748955 - RNA, 17 nt, Artificial Sequence
  Synthetic
ugaauggcuauucaggc

SEQ ID NO: 748956 - RNA, 17 nt, Artificial Sequence
  Synthetic
uaugcaguuauucaggc

SEQ ID NO: 748957 - RNA, 17 nt, Artificial Sequence
  Synthetic
ucuaauuuacuucaggc

SEQ ID NO: 748958 - RNA, 17 nt, Artificial Sequence
  Synthetic
ugcuacauauuucaggc

SEQ ID NO: 748959 - RNA, 17 nt, Artificial Sequence
  Synthetic
uuucagguguuucaggc

SEQ ID NO: 748960 - RNA, 17 nt, Artificial Sequence
  Synthetic
aggauuaucaaagaggc

SEQ ID NO: 748961 - RNA, 17 nt, Artificial Sequence
  Synthetic
auauaagaggaagaggc

SEQ ID NO: 748962 - RNA, 17 nt, Artificial Sequence
  Synthetic
uacauagaggaagaggc

SEQ ID NO: 748963 - RNA, 17 nt, Artificial Sequence
  Synthetic
aacuaagcugaagaggc

SEQ ID NO: 748964 - RNA, 17 nt, Artificial Sequence
  Synthetic
accagagucacagaggc

SEQ ID NO: 748965 - RNA, 17 nt, Artificial Sequence
  Synthetic
uacuggaagacagaggc

SEQ ID NO: 748966 - RNA, 17 nt, Artificial Sequence
  Synthetic
uauucaaaaccagaggc

SEQ ID NO: 748967 - RNA, 17 nt, Artificial Sequence
  Synthetic
uuauagauaccagaggc

SEQ ID NO: 748968 - RNA, 17 nt, Artificial Sequence
  Synthetic
agguaguugccagaggc

SEQ ID NO: 748969 - RNA, 17 nt, Artificial Sequence
  Synthetic
acucgggaggcagaggc

SEQ ID NO: 748970 - RNA, 17 nt, Artificial Sequence
  Synthetic
cuuugggaggcagaggc

SEQ ID NO: 748971 - RNA, 17 nt, Artificial Sequence
  Synthetic
agaaguagaucagaggc

SEQ ID NO: 748972 - RNA, 17 nt, Artificial Sequence
  Synthetic
cgaaagccaagagaggc

SEQ ID NO: 748973 - RNA, 17 nt, Artificial Sequence
  Synthetic
uugcauuagagagaggc

SEQ ID NO: 748974 - RNA, 17 nt, Artificial Sequence
  Synthetic
ccauuuucuggagaggc

SEQ ID NO: 748975 - RNA, 17 nt, Artificial Sequence
  Synthetic
aggaaaaacugagaggc

SEQ ID NO: 748976 - RNA, 17 nt, Artificial Sequence
  Synthetic
uuccagaaucuagaggc

SEQ ID NO: 748977 - RNA, 17 nt, Artificial Sequence
  Synthetic
auauauauucuagaggc

SEQ ID NO: 748978 - RNA, 17 nt, Artificial Sequence
  Synthetic
uuuuuuuugguagaggc

SEQ ID NO: 748979 - RNA, 17 nt, Artificial Sequence
  Synthetic
cuccaacucuuagaggc

SEQ ID NO: 748980 - RNA, 17 nt, Artificial Sequence
  Synthetic
auuuacagaaacgaggc

SEQ ID NO: 748981 - RNA, 17 nt, Artificial Sequence
  Synthetic
cuuuggaaggccgaggc

SEQ ID NO: 748982 - RNA, 17 nt, Artificial Sequence
  Synthetic
cuuugcgaggccgaggc

SEQ ID NO: 748983 - RNA, 17 nt, Artificial Sequence
  Synthetic
cuucaggaggccgaggc

SEQ ID NO: 748984 - RNA, 17 nt, Artificial Sequence
  Synthetic
cuuggggaggccgaggc

SEQ ID NO: 748985 - RNA, 17 nt, Artificial Sequence
  Synthetic
uuuggggaggccgaggc

SEQ ID NO: 748986 - RNA, 17 nt, Artificial Sequence
  Synthetic
cucugggaggccgaggc

SEQ ID NO: 748987 - RNA, 17 nt, Artificial Sequence
  Synthetic
cuuugggaggccgaggc

SEQ ID NO: 748988 - RNA, 17 nt, Artificial Sequence
  Synthetic
aaaaaggaaaaggaggc

SEQ ID NO: 748989 - RNA, 17 nt, Artificial Sequence
  Synthetic
auggagagacaggaggc

SEQ ID NO: 748990 - RNA, 17 nt, Artificial Sequence
  Synthetic
caacuggagcaggaggc

SEQ ID NO: 748991 - RNA, 17 nt, Artificial Sequence
  Synthetic
uuggucggggaggaggc

SEQ ID NO: 748992 - RNA, 17 nt, Artificial Sequence
  Synthetic
auaaauuauuaggaggc

SEQ ID NO: 748993 - RNA, 17 nt, Artificial Sequence
  Synthetic
ccaaaaauuagggaggc

SEQ ID NO: 748994 - RNA, 17 nt, Artificial Sequence
  Synthetic
aauugcacuggggaggc

SEQ ID NO: 748995 - RNA, 17 nt, Artificial Sequence
  Synthetic
ccagcgcuuugggaggc

SEQ ID NO: 748996 - RNA, 17 nt, Artificial Sequence
  Synthetic
ucagcguuuugggaggc

SEQ ID NO: 748997 - RNA, 17 nt, Artificial Sequence
  Synthetic
ugaaaugccauggaggc

SEQ ID NO: 748998 - RNA, 17 nt, Artificial Sequence
  Synthetic
ucagaaucuauggaggc

SEQ ID NO: 748999 - RNA, 17 nt, Artificial Sequence
  Synthetic
agacagagccuggaggc

SEQ ID NO: 749000 - RNA, 17 nt, Artificial Sequence
  Synthetic
cucacaguucuggaggc

SEQ ID NO: 749001 - RNA, 17 nt, Artificial Sequence
  Synthetic
cuuauaguucuggaggc

SEQ ID NO: 749002 - RNA, 17 nt, Artificial Sequence
  Synthetic
cucaccguucuggaggc

SEQ ID NO: 749003 - RNA, 17 nt, Artificial Sequence
  Synthetic
uggaucagaguggaggc

SEQ ID NO: 749004 - RNA, 17 nt, Artificial Sequence
  Synthetic
cacaagugaguggaggc

SEQ ID NO: 749005 - RNA, 17 nt, Artificial Sequence
  Synthetic
uuuccaauguuggaggc

SEQ ID NO: 749006 - RNA, 17 nt, Artificial Sequence
  Synthetic
uaaaaaauuuuggaggc

SEQ ID NO: 749007 - RNA, 17 nt, Artificial Sequence
  Synthetic
agauuguuuuuggaggc

SEQ ID NO: 749008 - RNA, 17 nt, Artificial Sequence
  Synthetic
cuuaaccagaaugaggc

SEQ ID NO: 749009 - RNA, 17 nt, Artificial Sequence
  Synthetic
cagaauccacaugaggc

SEQ ID NO: 749010 - RNA, 17 nt, Artificial Sequence
  Synthetic
uguaagguccaugaggc

SEQ ID NO: 749011 - RNA, 17 nt, Artificial Sequence
  Synthetic
cuuacaaaucaugaggc

SEQ ID NO: 749012 - RNA, 17 nt, Artificial Sequence
  Synthetic
agaaacuaagaugaggc

SEQ ID NO: 749013 - RNA, 17 nt, Artificial Sequence
  Synthetic
uuuuaagaggaugaggc

SEQ ID NO: 749014 - RNA, 17 nt, Artificial Sequence
  Synthetic
cuuugggaggaugaggc

SEQ ID NO: 749015 - RNA, 17 nt, Artificial Sequence
  Synthetic
aauguauccuaugaggc

SEQ ID NO: 749016 - RNA, 17 nt, Artificial Sequence
  Synthetic
cuuugggagccugaggc

SEQ ID NO: 749017 - RNA, 17 nt, Artificial Sequence
  Synthetic
acucgggaagcugaggc

SEQ ID NO: 749018 - RNA, 17 nt, Artificial Sequence
  Synthetic
auuugggaagcugaggc

SEQ ID NO: 749019 - RNA, 17 nt, Artificial Sequence
  Synthetic
cuuugggaagcugaggc

SEQ ID NO: 749020 - RNA, 17 nt, Artificial Sequence
  Synthetic
acucaggacgcugaggc

SEQ ID NO: 749021 - RNA, 17 nt, Artificial Sequence
  Synthetic
acuuggaaggcugaggc

SEQ ID NO: 749022 - RNA, 17 nt, Artificial Sequence
  Synthetic
acuuagcaggcugaggc

SEQ ID NO: 749023 - RNA, 17 nt, Artificial Sequence
  Synthetic
acucaagaggcugaggc

SEQ ID NO: 749024 - RNA, 17 nt, Artificial Sequence
  Synthetic
cuuugagaggcugaggc

SEQ ID NO: 749025 - RNA, 17 nt, Artificial Sequence
  Synthetic
acucaggaggcugaggc

SEQ ID NO: 749026 - RNA, 17 nt, Artificial Sequence
  Synthetic
auucaggaggcugaggc

SEQ ID NO: 749027 - RNA, 17 nt, Artificial Sequence
  Synthetic
uacucggaggcugaggc

SEQ ID NO: 749028 - RNA, 17 nt, Artificial Sequence
  Synthetic
acuucggaggcugaggc

SEQ ID NO: 749029 - RNA, 17 nt, Artificial Sequence
  Synthetic
acuagggaggcugaggc

SEQ ID NO: 749030 - RNA, 17 nt, Artificial Sequence
  Synthetic
acacgggaggcugaggc

SEQ ID NO: 749031 - RNA, 17 nt, Artificial Sequence
  Synthetic
uaccgggaggcugaggc

SEQ ID NO: 749032 - RNA, 17 nt, Artificial Sequence
  Synthetic
acucgggaggcugaggc

SEQ ID NO: 749033 - RNA, 17 nt, Artificial Sequence
  Synthetic
acgggggaggcugaggc

SEQ ID NO: 749034 - RNA, 17 nt, Artificial Sequence
  Synthetic
cuaugggaggcugaggc

SEQ ID NO: 749035 - RNA, 17 nt, Artificial Sequence
  Synthetic
acuugggaggcugaggc

SEQ ID NO: 749036 - RNA, 17 nt, Artificial Sequence
  Synthetic
auuugggaggcugaggc

SEQ ID NO: 749037 - RNA, 17 nt, Artificial Sequence
  Synthetic
cuuugggaggcugaggc

SEQ ID NO: 749038 - RNA, 17 nt, Artificial Sequence
  Synthetic
uuuugggaggcugaggc

SEQ ID NO: 749039 - RNA, 17 nt, Artificial Sequence
  Synthetic
acacuggaggcugaggc

SEQ ID NO: 749040 - RNA, 17 nt, Artificial Sequence
  Synthetic
acucuggaggcugaggc

SEQ ID NO: 749041 - RNA, 17 nt, Artificial Sequence
  Synthetic
acuccugaggcugaggc

SEQ ID NO: 749042 - RNA, 17 nt, Artificial Sequence
  Synthetic
acucgguaggcugaggc

SEQ ID NO: 749043 - RNA, 17 nt, Artificial Sequence
  Synthetic
acucagauggcugaggc

SEQ ID NO: 749044 - RNA, 17 nt, Artificial Sequence
  Synthetic
cuuugggaugcugaggc

SEQ ID NO: 749045 - RNA, 17 nt, Artificial Sequence
  Synthetic
cacuuuuuugcugaggc

SEQ ID NO: 749046 - RNA, 17 nt, Artificial Sequence
  Synthetic
acuuggcagucugaggc

SEQ ID NO: 749047 - RNA, 17 nt, Artificial Sequence
  Synthetic
aaaaagaauggugaggc

SEQ ID NO: 749048 - RNA, 17 nt, Artificial Sequence
  Synthetic
acugaccugugugaggc

SEQ ID NO: 749049 - RNA, 17 nt, Artificial Sequence
  Synthetic
aaagacuugugugaggc

SEQ ID NO: 749050 - RNA, 17 nt, Artificial Sequence
  Synthetic
uacaaaggccuugaggc

SEQ ID NO: 749051 - RNA, 17 nt, Artificial Sequence
  Synthetic
cuuuuuuuucuugaggc

SEQ ID NO: 749052 - RNA, 17 nt, Artificial Sequence
  Synthetic
acucuggagguugaggc

SEQ ID NO: 749053 - RNA, 17 nt, Artificial Sequence
  Synthetic
aagaaagauguugaggc

SEQ ID NO: 749054 - RNA, 17 nt, Artificial Sequence
  Synthetic
aaauaagauaaauaggc

SEQ ID NO: 749055 - RNA, 17 nt, Artificial Sequence
  Synthetic
agaacuggguaauaggc

SEQ ID NO: 749056 - RNA, 17 nt, Artificial Sequence
  Synthetic
uuauggucaagauaggc

SEQ ID NO: 749057 - RNA, 17 nt, Artificial Sequence
  Synthetic
uuguaggagggauaggc

SEQ ID NO: 749058 - RNA, 17 nt, Artificial Sequence
  Synthetic
acuggcaaaauauaggc

SEQ ID NO: 749059 - RNA, 17 nt, Artificial Sequence
  Synthetic
auaacaaugauauaggc

SEQ ID NO: 749060 - RNA, 17 nt, Artificial Sequence
  Synthetic
caguaaggacccuaggc

SEQ ID NO: 749061 - RNA, 17 nt, Artificial Sequence
  Synthetic
cacucuguccccuaggc

SEQ ID NO: 749062 - RNA, 17 nt, Artificial Sequence
  Synthetic
ucaccaguugccuaggc

SEQ ID NO: 749063 - RNA, 17 nt, Artificial Sequence
  Synthetic
cacuauguugccuaggc

SEQ ID NO: 749064 - RNA, 17 nt, Artificial Sequence
  Synthetic
cacucuguugccuaggc

SEQ ID NO: 749065 - RNA, 17 nt, Artificial Sequence
  Synthetic
ugagaauucuccuaggc

SEQ ID NO: 749066 - RNA, 17 nt, Artificial Sequence
  Synthetic
caccaaguuggcuaggc

SEQ ID NO: 749067 - RNA, 17 nt, Artificial Sequence
  Synthetic
caccuaaacaucuaggc

SEQ ID NO: 749068 - RNA, 17 nt, Artificial Sequence
  Synthetic
ucugggcucagguaggc

SEQ ID NO: 749069 - RNA, 17 nt, Artificial Sequence
  Synthetic
acuuuccaaauguaggc

SEQ ID NO: 749070 - RNA, 17 nt, Artificial Sequence
  Synthetic
cuaagugcccuguaggc

SEQ ID NO: 749071 - RNA, 17 nt, Artificial Sequence
  Synthetic
uucagugaaguguaggc

SEQ ID NO: 749072 - RNA, 17 nt, Artificial Sequence
  Synthetic
agaagugcaaauuaggc

SEQ ID NO: 749073 - RNA, 17 nt, Artificial Sequence
  Synthetic
agccagagcaauuaggc

SEQ ID NO: 749074 - RNA, 17 nt, Artificial Sequence
  Synthetic
uuucuguuuuauuaggc

SEQ ID NO: 749075 - RNA, 17 nt, Artificial Sequence
  Synthetic
aauaaugaaauuuaggc

SEQ ID NO: 749076 - RNA, 17 nt, Artificial Sequence
  Synthetic
aagugguaaauuuaggc

SEQ ID NO: 749077 - RNA, 17 nt, Artificial Sequence
  Synthetic
acaugaauaauuuaggc

SEQ ID NO: 749078 - RNA, 17 nt, Artificial Sequence
  Synthetic
aaauucauuauuuaggc

SEQ ID NO: 749079 - RNA, 17 nt, Artificial Sequence
  Synthetic
acugcccucuauacggc

SEQ ID NO: 749080 - RNA, 17 nt, Artificial Sequence
  Synthetic
aaacuuuaauguacggc

SEQ ID NO: 749081 - RNA, 17 nt, Artificial Sequence
  Synthetic
accacgaacccaccggc

SEQ ID NO: 749082 - RNA, 17 nt, Artificial Sequence
  Synthetic
ucacucugucgcccggc

SEQ ID NO: 749083 - RNA, 17 nt, Artificial Sequence
  Synthetic
agaacugaauucccggc

SEQ ID NO: 749084 - RNA, 17 nt, Artificial Sequence
  Synthetic
uuagagaagaauccggc

SEQ ID NO: 749085 - RNA, 17 nt, Artificial Sequence
  Synthetic
uaagauccauuuccggc

SEQ ID NO: 749086 - RNA, 17 nt, Artificial Sequence
  Synthetic
ugaggaggagaagcggc

SEQ ID NO: 749087 - RNA, 17 nt, Artificial Sequence
  Synthetic
caugauuuugcagcggc

SEQ ID NO: 749088 - RNA, 17 nt, Artificial Sequence
  Synthetic
aaacagcauguugcggc

SEQ ID NO: 749089 - RNA, 17 nt, Artificial Sequence
  Synthetic
aagagaguaaaaucggc

SEQ ID NO: 749090 - RNA, 17 nt, Artificial Sequence
  Synthetic
aagaacaguuacucggc

SEQ ID NO: 749091 - RNA, 17 nt, Artificial Sequence
  Synthetic
uaaaauguucucucggc

SEQ ID NO: 749092 - RNA, 17 nt, Artificial Sequence
  Synthetic
uccacucauuggucggc

SEQ ID NO: 749093 - RNA, 17 nt, Artificial Sequence
  Synthetic
aaaacaucaauuucggc

SEQ ID NO: 749094 - RNA, 17 nt, Artificial Sequence
  Synthetic
uucuucugcaaaagggc

SEQ ID NO: 749095 - RNA, 17 nt, Artificial Sequence
  Synthetic
aaaaaaguacaaagggc

SEQ ID NO: 749096 - RNA, 17 nt, Artificial Sequence
  Synthetic
ucagcaaaagaaagggc

SEQ ID NO: 749097 - RNA, 17 nt, Artificial Sequence
  Synthetic
ugaacugacucaagggc

SEQ ID NO: 749098 - RNA, 17 nt, Artificial Sequence
  Synthetic
auuaccaccucaagggc

SEQ ID NO: 749099 - RNA, 17 nt, Artificial Sequence
  Synthetic
aguugugauucaagggc

SEQ ID NO: 749100 - RNA, 17 nt, Artificial Sequence
  Synthetic
ccagcagguggaagggc

SEQ ID NO: 749101 - RNA, 17 nt, Artificial Sequence
  Synthetic
acucaucagugaagggc

SEQ ID NO: 749102 - RNA, 17 nt, Artificial Sequence
  Synthetic
aggauauagugaagggc

SEQ ID NO: 749103 - RNA, 17 nt, Artificial Sequence
  Synthetic
ugggagcuccuaagggc

SEQ ID NO: 749104 - RNA, 17 nt, Artificial Sequence
  Synthetic
uggugguugcuaagggc

SEQ ID NO: 749105 - RNA, 17 nt, Artificial Sequence
  Synthetic
aacaucacguuaagggc

SEQ ID NO: 749106 - RNA, 17 nt, Artificial Sequence
  Synthetic
acacauagacacagggc

SEQ ID NO: 749107 - RNA, 17 nt, Artificial Sequence
  Synthetic
cuuuaaauacacagggc

SEQ ID NO: 749108 - RNA, 17 nt, Artificial Sequence
  Synthetic
acugcaccuuccagggc

SEQ ID NO: 749109 - RNA, 17 nt, Artificial Sequence
  Synthetic
aauuuuuaaagcagggc

SEQ ID NO: 749110 - RNA, 17 nt, Artificial Sequence
  Synthetic
caaaaaccuaucagggc

SEQ ID NO: 749111 - RNA, 17 nt, Artificial Sequence
  Synthetic
cugugaaaagucagggc

SEQ ID NO: 749112 - RNA, 17 nt, Artificial Sequence
  Synthetic
aaugagaguuucagggc

SEQ ID NO: 749113 - RNA, 17 nt, Artificial Sequence
  Synthetic
auaauuaugcagagggc

SEQ ID NO: 749114 - RNA, 17 nt, Artificial Sequence
  Synthetic
ucccuggugaggagggc

SEQ ID NO: 749115 - RNA, 17 nt, Artificial Sequence
  Synthetic
uaaaaagcagggagggc

SEQ ID NO: 749116 - RNA, 17 nt, Artificial Sequence
  Synthetic
uuaacugcucugagggc

SEQ ID NO: 749117 - RNA, 17 nt, Artificial Sequence
  Synthetic
cucuaaguagguagggc

SEQ ID NO: 749118 - RNA, 17 nt, Artificial Sequence
  Synthetic
uggaugaaggguagggc

SEQ ID NO: 749119 - RNA, 17 nt, Artificial Sequence
  Synthetic
agagaagagcuuagggc

SEQ ID NO: 749120 - RNA, 17 nt, Artificial Sequence
  Synthetic
ugguuucauuuuagggc

SEQ ID NO: 749121 - RNA, 17 nt, Artificial Sequence
  Synthetic
auucuugcuuuuagggc

SEQ ID NO: 749122 - RNA, 17 nt, Artificial Sequence
  Synthetic
aggagcucuuuuagggc

SEQ ID NO: 749123 - RNA, 17 nt, Artificial Sequence
  Synthetic
uauauaagaaaacgggc

SEQ ID NO: 749124 - RNA, 17 nt, Artificial Sequence
  Synthetic
acacgugcagaacgggc

SEQ ID NO: 749125 - RNA, 17 nt, Artificial Sequence
  Synthetic
aaauaaaauucacgggc

SEQ ID NO: 749126 - RNA, 17 nt, Artificial Sequence
  Synthetic
ugagcccaacaccgggc

SEQ ID NO: 749127 - RNA, 17 nt, Artificial Sequence
  Synthetic
cgcacuguugcccgggc

SEQ ID NO: 749128 - RNA, 17 nt, Artificial Sequence
  Synthetic
aaucuuaugggccgggc

SEQ ID NO: 749129 - RNA, 17 nt, Artificial Sequence
  Synthetic
caccauguuggccgggc

SEQ ID NO: 749130 - RNA, 17 nt, Artificial Sequence
  Synthetic
aaaggacuugcucgggc

SEQ ID NO: 749131 - RNA, 17 nt, Artificial Sequence
  Synthetic
cagaagacacaaggggc

SEQ ID NO: 749132 - RNA, 17 nt, Artificial Sequence
  Synthetic
uuuuaaggauaaggggc

SEQ ID NO: 749133 - RNA, 17 nt, Artificial Sequence
  Synthetic
aucaggauguaaggggc

SEQ ID NO: 749134 - RNA, 17 nt, Artificial Sequence
  Synthetic
ugauaguaaccaggggc

SEQ ID NO: 749135 - RNA, 17 nt, Artificial Sequence
  Synthetic
ucaaugaagccaggggc

SEQ ID NO: 749136 - RNA, 17 nt, Artificial Sequence
  Synthetic
agccauuggccaggggc

SEQ ID NO: 749137 - RNA, 17 nt, Artificial Sequence
  Synthetic
uggugguugccaggggc

SEQ ID NO: 749138 - RNA, 17 nt, Artificial Sequence
  Synthetic
cagugguuuccaggggc

SEQ ID NO: 749139 - RNA, 17 nt, Artificial Sequence
  Synthetic
uggugguuuccaggggc

SEQ ID NO: 749140 - RNA, 17 nt, Artificial Sequence
  Synthetic
aaguuugcugcaggggc

SEQ ID NO: 749141 - RNA, 17 nt, Artificial Sequence
  Synthetic
uuaaauagugcaggggc

SEQ ID NO: 749142 - RNA, 17 nt, Artificial Sequence
  Synthetic
uuccauggaucaggggc

SEQ ID NO: 749143 - RNA, 17 nt, Artificial Sequence
  Synthetic
cguugggucucaggggc

SEQ ID NO: 749144 - RNA, 17 nt, Artificial Sequence
  Synthetic
auuuuaaaaagaggggc

SEQ ID NO: 749145 - RNA, 17 nt, Artificial Sequence
  Synthetic
uguaacagcagaggggc

SEQ ID NO: 749146 - RNA, 17 nt, Artificial Sequence
  Synthetic
auauucccgagaggggc

SEQ ID NO: 749147 - RNA, 17 nt, Artificial Sequence
  Synthetic
auuauguugggaggggc

SEQ ID NO: 749148 - RNA, 17 nt, Artificial Sequence
  Synthetic
ccaucuugaauaggggc

SEQ ID NO: 749149 - RNA, 17 nt, Artificial Sequence
  Synthetic
augggugggcuaggggc

SEQ ID NO: 749150 - RNA, 17 nt, Artificial Sequence
  Synthetic
aagauggauguaggggc

SEQ ID NO: 749151 - RNA, 17 nt, Artificial Sequence
  Synthetic
acggucaguuuaggggc

SEQ ID NO: 749152 - RNA, 17 nt, Artificial Sequence
  Synthetic
uuuugggaggccggggc

SEQ ID NO: 749153 - RNA, 17 nt, Artificial Sequence
  Synthetic
uucucaaaauggggggc

SEQ ID NO: 749154 - RNA, 17 nt, Artificial Sequence
  Synthetic
aauugaaucaugggggc

SEQ ID NO: 749155 - RNA, 17 nt, Artificial Sequence
  Synthetic
aauuuaaucaugggggc

SEQ ID NO: 749156 - RNA, 17 nt, Artificial Sequence
  Synthetic
augcccuuccugggggc

SEQ ID NO: 749157 - RNA, 17 nt, Artificial Sequence
  Synthetic
uuccaggggcugggggc

SEQ ID NO: 749158 - RNA, 17 nt, Artificial Sequence
  Synthetic
ccccgaggauugggggc

SEQ ID NO: 749159 - RNA, 17 nt, Artificial Sequence
  Synthetic
cugauacauuugggggc

SEQ ID NO: 749160 - RNA, 17 nt, Artificial Sequence
  Synthetic
uccugaaaaaauggggc

SEQ ID NO: 749161 - RNA, 17 nt, Artificial Sequence
  Synthetic
ccaaugugaaauggggc

SEQ ID NO: 749162 - RNA, 17 nt, Artificial Sequence
  Synthetic
aaagcaaaaacuggggc

SEQ ID NO: 749163 - RNA, 17 nt, Artificial Sequence
  Synthetic
ugcaaaggcccuggggc

SEQ ID NO: 749164 - RNA, 17 nt, Artificial Sequence
  Synthetic
acccgaaaggcuggggc

SEQ ID NO: 749165 - RNA, 17 nt, Artificial Sequence
  Synthetic
uaagcugcaaguggggc

SEQ ID NO: 749166 - RNA, 17 nt, Artificial Sequence
  Synthetic
cuagaugccaguggggc

SEQ ID NO: 749167 - RNA, 17 nt, Artificial Sequence
  Synthetic
aggggcugggguggggc

SEQ ID NO: 749168 - RNA, 17 nt, Artificial Sequence
  Synthetic
uaggugccuauuggggc

SEQ ID NO: 749169 - RNA, 17 nt, Artificial Sequence
  Synthetic
uaucugcuguuuggggc

SEQ ID NO: 749170 - RNA, 17 nt, Artificial Sequence
  Synthetic
uggaccagcaaaugggc

SEQ ID NO: 749171 - RNA, 17 nt, Artificial Sequence
  Synthetic
uaaagccucaaaugggc

SEQ ID NO: 749172 - RNA, 17 nt, Artificial Sequence
  Synthetic
caucuggagaaaugggc

SEQ ID NO: 749173 - RNA, 17 nt, Artificial Sequence
  Synthetic
cagaguaaucaaugggc

SEQ ID NO: 749174 - RNA, 17 nt, Artificial Sequence
  Synthetic
uuuaaagaguaaugggc

SEQ ID NO: 749175 - RNA, 17 nt, Artificial Sequence
  Synthetic
ucgcaaagcccaugggc

SEQ ID NO: 749176 - RNA, 17 nt, Artificial Sequence
  Synthetic
ucaugccucccaugggc

SEQ ID NO: 749177 - RNA, 17 nt, Artificial Sequence
  Synthetic
augaacucagcaugggc

SEQ ID NO: 749178 - RNA, 17 nt, Artificial Sequence
  Synthetic
ugcgagcaugcaugggc

SEQ ID NO: 749179 - RNA, 17 nt, Artificial Sequence
  Synthetic
uagaaaugaauaugggc

SEQ ID NO: 749180 - RNA, 17 nt, Artificial Sequence
  Synthetic
ugggaugugguaugggc

SEQ ID NO: 749181 - RNA, 17 nt, Artificial Sequence
  Synthetic
aauauuuauguaugggc

SEQ ID NO: 749182 - RNA, 17 nt, Artificial Sequence
  Synthetic
aaagaaaucuuaugggc

SEQ ID NO: 749183 - RNA, 17 nt, Artificial Sequence
  Synthetic
ucaucuaggcacugggc

SEQ ID NO: 749184 - RNA, 17 nt, Artificial Sequence
  Synthetic
cugggaaacuacugggc

SEQ ID NO: 749185 - RNA, 17 nt, Artificial Sequence
  Synthetic
ugucuuugugccugggc

SEQ ID NO: 749186 - RNA, 17 nt, Artificial Sequence
  Synthetic
aaaaugguuuccugggc

SEQ ID NO: 749187 - RNA, 17 nt, Artificial Sequence
  Synthetic
agaagaaugagcugggc

SEQ ID NO: 749188 - RNA, 17 nt, Artificial Sequence
  Synthetic
caccauguuggcugggc

SEQ ID NO: 749189 - RNA, 17 nt, Artificial Sequence
  Synthetic
ugaaaaucaugcugggc

SEQ ID NO: 749190 - RNA, 17 nt, Artificial Sequence
  Synthetic
auugacaucaucugggc

SEQ ID NO: 749191 - RNA, 17 nt, Artificial Sequence
  Synthetic
acuugcuugaucugggc

SEQ ID NO: 749192 - RNA, 17 nt, Artificial Sequence
  Synthetic
acuagaaaacucugggc

SEQ ID NO: 749193 - RNA, 17 nt, Artificial Sequence
  Synthetic
auuccuucucucugggc

SEQ ID NO: 749194 - RNA, 17 nt, Artificial Sequence
  Synthetic
aagcauagugucugggc

SEQ ID NO: 749195 - RNA, 17 nt, Artificial Sequence
  Synthetic
aauagagaauucugggc

SEQ ID NO: 749196 - RNA, 17 nt, Artificial Sequence
  Synthetic
auaggcauauucugggc

SEQ ID NO: 749197 - RNA, 17 nt, Artificial Sequence
  Synthetic
ucaaugauguucugggc

SEQ ID NO: 749198 - RNA, 17 nt, Artificial Sequence
  Synthetic
ccuggcaguaagugggc

SEQ ID NO: 749199 - RNA, 17 nt, Artificial Sequence
  Synthetic
aaaauaaagcagugggc

SEQ ID NO: 749200 - RNA, 17 nt, Artificial Sequence
  Synthetic
uaaaacccaaggugggc

SEQ ID NO: 749201 - RNA, 17 nt, Artificial Sequence
  Synthetic
cacccagcaaggugggc

SEQ ID NO: 749202 - RNA, 17 nt, Artificial Sequence
  Synthetic
ucacagauggggugggc

SEQ ID NO: 749203 - RNA, 17 nt, Artificial Sequence
  Synthetic
uggagccacuggugggc

SEQ ID NO: 749204 - RNA, 17 nt, Artificial Sequence
  Synthetic
cacucugucaugugggc

SEQ ID NO: 749205 - RNA, 17 nt, Artificial Sequence
  Synthetic
ccaacaugauauugggc

SEQ ID NO: 749206 - RNA, 17 nt, Artificial Sequence
  Synthetic
agaguucuuuauugggc

SEQ ID NO: 749207 - RNA, 17 nt, Artificial Sequence
  Synthetic
auuaaagauccuugggc

SEQ ID NO: 749208 - RNA, 17 nt, Artificial Sequence
  Synthetic
ugugaaauuuguugggc

SEQ ID NO: 749209 - RNA, 17 nt, Artificial Sequence
  Synthetic
caagaugagauuugggc

SEQ ID NO: 749210 - RNA, 17 nt, Artificial Sequence
  Synthetic
agaaaaaugauuugggc

SEQ ID NO: 749211 - RNA, 17 nt, Artificial Sequence
  Synthetic
uuucuuacuauuugggc

SEQ ID NO: 749212 - RNA, 17 nt, Artificial Sequence
  Synthetic
cucauuccccuuugggc

SEQ ID NO: 749213 - RNA, 17 nt, Artificial Sequence
  Synthetic
auaauccuuaaaauggc

SEQ ID NO: 749214 - RNA, 17 nt, Artificial Sequence
  Synthetic
aaucuacagcaaauggc

SEQ ID NO: 749215 - RNA, 17 nt, Artificial Sequence
  Synthetic
uagugugaugaaauggc

SEQ ID NO: 749216 - RNA, 17 nt, Artificial Sequence
  Synthetic
uccuguaaauaaauggc

SEQ ID NO: 749217 - RNA, 17 nt, Artificial Sequence
  Synthetic
ucaaaucacacaauggc

SEQ ID NO: 749218 - RNA, 17 nt, Artificial Sequence
  Synthetic
agccccuggccaauggc

SEQ ID NO: 749219 - RNA, 17 nt, Artificial Sequence
  Synthetic
uguagaaguggaauggc

SEQ ID NO: 749220 - RNA, 17 nt, Artificial Sequence
  Synthetic
uuguuucaaugaauggc

SEQ ID NO: 749221 - RNA, 17 nt, Artificial Sequence
  Synthetic
cuucccaagugaauggc

SEQ ID NO: 749222 - RNA, 17 nt, Artificial Sequence
  Synthetic
caagcuucaguaauggc

SEQ ID NO: 749223 - RNA, 17 nt, Artificial Sequence
  Synthetic
auuaauagaaacauggc

SEQ ID NO: 749224 - RNA, 17 nt, Artificial Sequence
  Synthetic
acaccacgacacauggc

SEQ ID NO: 749225 - RNA, 17 nt, Artificial Sequence
  Synthetic
uugaauggccacauggc

SEQ ID NO: 749226 - RNA, 17 nt, Artificial Sequence
  Synthetic
ucacaguuccacauggc

SEQ ID NO: 749227 - RNA, 17 nt, Artificial Sequence
  Synthetic
caguucuaauacauggc

SEQ ID NO: 749228 - RNA, 17 nt, Artificial Sequence
  Synthetic
ucaccauucuacauggc

SEQ ID NO: 749229 - RNA, 17 nt, Artificial Sequence
  Synthetic
aucaucugguacauggc

SEQ ID NO: 749230 - RNA, 17 nt, Artificial Sequence
  Synthetic
uauguuuuuaccauggc

SEQ ID NO: 749231 - RNA, 17 nt, Artificial Sequence
  Synthetic
aaagauccacccauggc

SEQ ID NO: 749232 - RNA, 17 nt, Artificial Sequence
  Synthetic
aggggaagacccauggc

SEQ ID NO: 749233 - RNA, 17 nt, Artificial Sequence
  Synthetic
cuccuuuuagccauggc

SEQ ID NO: 749234 - RNA, 17 nt, Artificial Sequence
  Synthetic
cuaugugaggccauggc

SEQ ID NO: 749235 - RNA, 17 nt, Artificial Sequence
  Synthetic
ccccuuuuauccauggc

SEQ ID NO: 749236 - RNA, 17 nt, Artificial Sequence
  Synthetic
acacaguucagcauggc

SEQ ID NO: 749237 - RNA, 17 nt, Artificial Sequence
  Synthetic
ucacaguucagcauggc

SEQ ID NO: 749238 - RNA, 17 nt, Artificial Sequence
  Synthetic
ucauaguucagcauggc

SEQ ID NO: 749239 - RNA, 17 nt, Artificial Sequence
  Synthetic
ucaccauucugcauggc

SEQ ID NO: 749240 - RNA, 17 nt, Artificial Sequence
  Synthetic
ucacugguuugcauggc

SEQ ID NO: 749241 - RNA, 17 nt, Artificial Sequence
  Synthetic
aaauauuuagucauggc

SEQ ID NO: 749242 - RNA, 17 nt, Artificial Sequence
  Synthetic
agggggcucuucauggc

SEQ ID NO: 749243 - RNA, 17 nt, Artificial Sequence
  Synthetic
aagcaaaaaaagauggc

SEQ ID NO: 749244 - RNA, 17 nt, Artificial Sequence
  Synthetic
aagaggaguaagauggc

SEQ ID NO: 749245 - RNA, 17 nt, Artificial Sequence
  Synthetic
uuaccaaggcagauggc

SEQ ID NO: 749246 - RNA, 17 nt, Artificial Sequence
  Synthetic
cccaguaaugggauggc

SEQ ID NO: 749247 - RNA, 17 nt, Artificial Sequence
  Synthetic
caugaugcugggauggc

SEQ ID NO: 749248 - RNA, 17 nt, Artificial Sequence
  Synthetic
uguuccuuugggauggc

SEQ ID NO: 749249 - RNA, 17 nt, Artificial Sequence
  Synthetic
auauugucaaauauggc

SEQ ID NO: 749250 - RNA, 17 nt, Artificial Sequence
  Synthetic
acgaagaucaauauggc

SEQ ID NO: 749251 - RNA, 17 nt, Artificial Sequence
  Synthetic
ucacaguucaauauggc

SEQ ID NO: 749252 - RNA, 17 nt, Artificial Sequence
  Synthetic
aagcaaauggauauggc

SEQ ID NO: 749253 - RNA, 17 nt, Artificial Sequence
  Synthetic
agagagaaaaguauggc

SEQ ID NO: 749254 - RNA, 17 nt, Artificial Sequence
  Synthetic
aauggaggcaguauggc

SEQ ID NO: 749255 - RNA, 17 nt, Artificial Sequence
  Synthetic
uuugguuccuguauggc

SEQ ID NO: 749256 - RNA, 17 nt, Artificial Sequence
  Synthetic
cuguucucacuuauggc

SEQ ID NO: 749257 - RNA, 17 nt, Artificial Sequence
  Synthetic
acuuccuuauuuauggc

SEQ ID NO: 749258 - RNA, 17 nt, Artificial Sequence
  Synthetic
auauaguauuuuauggc

SEQ ID NO: 749259 - RNA, 17 nt, Artificial Sequence
  Synthetic
aaaauaaaaaaacuggc

SEQ ID NO: 749260 - RNA, 17 nt, Artificial Sequence
  Synthetic
uaaugcaaucaacuggc

SEQ ID NO: 749261 - RNA, 17 nt, Artificial Sequence
  Synthetic
uccugauccuaacuggc

SEQ ID NO: 749262 - RNA, 17 nt, Artificial Sequence
  Synthetic
caggagccaacacuggc

SEQ ID NO: 749263 - RNA, 17 nt, Artificial Sequence
  Synthetic
aagaucaaggcacuggc

SEQ ID NO: 749264 - RNA, 17 nt, Artificial Sequence
  Synthetic
agucagagaucacuggc

SEQ ID NO: 749265 - RNA, 17 nt, Artificial Sequence
  Synthetic
uuuacaacaagacuggc

SEQ ID NO: 749266 - RNA, 17 nt, Artificial Sequence
  Synthetic
aaccaugaaggacuggc

SEQ ID NO: 749267 - RNA, 17 nt, Artificial Sequence
  Synthetic
uucgaaacaggacuggc

SEQ ID NO: 749268 - RNA, 17 nt, Artificial Sequence
  Synthetic
uauaacaaaauacuggc

SEQ ID NO: 749269 - RNA, 17 nt, Artificial Sequence
  Synthetic
acccuuauuuuacuggc

SEQ ID NO: 749270 - RNA, 17 nt, Artificial Sequence
  Synthetic
uccuaaggaaaccuggc

SEQ ID NO: 749271 - RNA, 17 nt, Artificial Sequence
  Synthetic
ucacucugcacccuggc

SEQ ID NO: 749272 - RNA, 17 nt, Artificial Sequence
  Synthetic
caacagaaagcccuggc

SEQ ID NO: 749273 - RNA, 17 nt, Artificial Sequence
  Synthetic
acuguuguugcccuggc

SEQ ID NO: 749274 - RNA, 17 nt, Artificial Sequence
  Synthetic
aaauccaaaagccuggc

SEQ ID NO: 749275 - RNA, 17 nt, Artificial Sequence
  Synthetic
uauucucacagccuggc

SEQ ID NO: 749276 - RNA, 17 nt, Artificial Sequence
  Synthetic
uggugguggggccuggc

SEQ ID NO: 749277 - RNA, 17 nt, Artificial Sequence
  Synthetic
cugcugaauugccuggc

SEQ ID NO: 749278 - RNA, 17 nt, Artificial Sequence
  Synthetic
uucuccagcuuccuggc

SEQ ID NO: 749279 - RNA, 17 nt, Artificial Sequence
  Synthetic
ccucccaugcagcuggc

SEQ ID NO: 749280 - RNA, 17 nt, Artificial Sequence
  Synthetic
uaagauuaagagcuggc

SEQ ID NO: 749281 - RNA, 17 nt, Artificial Sequence
  Synthetic
uucaucugagagcuggc

SEQ ID NO: 749282 - RNA, 17 nt, Artificial Sequence
  Synthetic
uacucucaauagcuggc

SEQ ID NO: 749283 - RNA, 17 nt, Artificial Sequence
  Synthetic
uuuaaaacguagcuggc

SEQ ID NO: 749284 - RNA, 17 nt, Artificial Sequence
  Synthetic
aguggaucuuagcuggc

SEQ ID NO: 749285 - RNA, 17 nt, Artificial Sequence
  Synthetic
ccuggccaauggcuggc

SEQ ID NO: 749286 - RNA, 17 nt, Artificial Sequence
  Synthetic
uagcugggcaugcuggc

SEQ ID NO: 749287 - RNA, 17 nt, Artificial Sequence
  Synthetic
uagccgggcgugcuggc

SEQ ID NO: 749288 - RNA, 17 nt, Artificial Sequence
  Synthetic
aaaaacagcaaucuggc

SEQ ID NO: 749289 - RNA, 17 nt, Artificial Sequence
  Synthetic
aaaagaucacaucuggc

SEQ ID NO: 749290 - RNA, 17 nt, Artificial Sequence
  Synthetic
ucuggcuggcaucuggc

SEQ ID NO: 749291 - RNA, 17 nt, Artificial Sequence
  Synthetic
uacacagguuaucuggc

SEQ ID NO: 749292 - RNA, 17 nt, Artificial Sequence
  Synthetic
uacaggagagcucuggc

SEQ ID NO: 749293 - RNA, 17 nt, Artificial Sequence
  Synthetic
aacauuuugucucuggc

SEQ ID NO: 749294 - RNA, 17 nt, Artificial Sequence
  Synthetic
uuauuuuagagucuggc

SEQ ID NO: 749295 - RNA, 17 nt, Artificial Sequence
  Synthetic
uuuucuuaaugucuggc

SEQ ID NO: 749296 - RNA, 17 nt, Artificial Sequence
  Synthetic
aaauugagaauucuggc

SEQ ID NO: 749297 - RNA, 17 nt, Artificial Sequence
  Synthetic
ugcucugucauucuggc

SEQ ID NO: 749298 - RNA, 17 nt, Artificial Sequence
  Synthetic
uuauaccaaguucuggc

SEQ ID NO: 749299 - RNA, 17 nt, Artificial Sequence
  Synthetic
aagugucugaaaguggc

SEQ ID NO: 749300 - RNA, 17 nt, Artificial Sequence
  Synthetic
aagugugguaaaguggc

SEQ ID NO: 749301 - RNA, 17 nt, Artificial Sequence
  Synthetic
ucagccucccaaguggc

SEQ ID NO: 749302 - RNA, 17 nt, Artificial Sequence
  Synthetic
cugaccaaagaaguggc

SEQ ID NO: 749303 - RNA, 17 nt, Artificial Sequence
  Synthetic
cagcagcaagaaguggc

SEQ ID NO: 749304 - RNA, 17 nt, Artificial Sequence
  Synthetic
cccuauggggaaguggc

SEQ ID NO: 749305 - RNA, 17 nt, Artificial Sequence
  Synthetic
uagccaggcgcaguggc

SEQ ID NO: 749306 - RNA, 17 nt, Artificial Sequence
  Synthetic
auguuucucucaguggc

SEQ ID NO: 749307 - RNA, 17 nt, Artificial Sequence
  Synthetic
augcccaguucaguggc

SEQ ID NO: 749308 - RNA, 17 nt, Artificial Sequence
  Synthetic
ucagccuccagaguggc

SEQ ID NO: 749309 - RNA, 17 nt, Artificial Sequence
  Synthetic
ucagccucccgaguggc

SEQ ID NO: 749310 - RNA, 17 nt, Artificial Sequence
  Synthetic
auauagacaggaguggc

SEQ ID NO: 749311 - RNA, 17 nt, Artificial Sequence
  Synthetic
uccauggcuggaguggc

SEQ ID NO: 749312 - RNA, 17 nt, Artificial Sequence
  Synthetic
uucacuggcugaguggc

SEQ ID NO: 749313 - RNA, 17 nt, Artificial Sequence
  Synthetic
uuuccuacuugaguggc

SEQ ID NO: 749314 - RNA, 17 nt, Artificial Sequence
  Synthetic
agagugaaacuaguggc

SEQ ID NO: 749315 - RNA, 17 nt, Artificial Sequence
  Synthetic
augaggggcguaguggc

SEQ ID NO: 749316 - RNA, 17 nt, Artificial Sequence
  Synthetic
ucagccucuuuaguggc

SEQ ID NO: 749317 - RNA, 17 nt, Artificial Sequence
  Synthetic
agacucuucuacguggc

SEQ ID NO: 749318 - RNA, 17 nt, Artificial Sequence
  Synthetic
cuucuucacaagguggc

SEQ ID NO: 749319 - RNA, 17 nt, Artificial Sequence
  Synthetic
ccuucuucacagguggc

SEQ ID NO: 749320 - RNA, 17 nt, Artificial Sequence
  Synthetic
uagcugggcacgguggc

SEQ ID NO: 749321 - RNA, 17 nt, Artificial Sequence
  Synthetic
ccuccacagacgguggc

SEQ ID NO: 749322 - RNA, 17 nt, Artificial Sequence
  Synthetic
ccucuucacaggguggc

SEQ ID NO: 749323 - RNA, 17 nt, Artificial Sequence
  Synthetic
uuccugguugggguggc

SEQ ID NO: 749324 - RNA, 17 nt, Artificial Sequence
  Synthetic
uagccagacaugguggc

SEQ ID NO: 749325 - RNA, 17 nt, Artificial Sequence
  Synthetic
auggcuuacaugguggc

SEQ ID NO: 749326 - RNA, 17 nt, Artificial Sequence
  Synthetic
uagccaggcaugguggc

SEQ ID NO: 749327 - RNA, 17 nt, Artificial Sequence
  Synthetic
uagccgggcaugguggc

SEQ ID NO: 749328 - RNA, 17 nt, Artificial Sequence
  Synthetic
uggccgggcaugguggc

SEQ ID NO: 749329 - RNA, 17 nt, Artificial Sequence
  Synthetic
uagcugggcaugguggc

SEQ ID NO: 749330 - RNA, 17 nt, Artificial Sequence
  Synthetic
caaacaggagugguggc

SEQ ID NO: 749331 - RNA, 17 nt, Artificial Sequence
  Synthetic
uagccaggcgugguggc

SEQ ID NO: 749332 - RNA, 17 nt, Artificial Sequence
  Synthetic
uagccgggcgugguggc

SEQ ID NO: 749333 - RNA, 17 nt, Artificial Sequence
  Synthetic
uagcugggcgugguggc

SEQ ID NO: 749334 - RNA, 17 nt, Artificial Sequence
  Synthetic
uagccaugcgugguggc

SEQ ID NO: 749335 - RNA, 17 nt, Artificial Sequence
  Synthetic
ugggagagggugguggc

SEQ ID NO: 749336 - RNA, 17 nt, Artificial Sequence
  Synthetic
ucuuaugaugugguggc

SEQ ID NO: 749337 - RNA, 17 nt, Artificial Sequence
  Synthetic
uagccgggcuugguggc

SEQ ID NO: 749338 - RNA, 17 nt, Artificial Sequence
  Synthetic
aauaagcuguugguggc

SEQ ID NO: 749339 - RNA, 17 nt, Artificial Sequence
  Synthetic
uugccagguuugguggc

SEQ ID NO: 749340 - RNA, 17 nt, Artificial Sequence
  Synthetic
uuucagcagcauguggc

SEQ ID NO: 749341 - RNA, 17 nt, Artificial Sequence
  Synthetic
ugacauucugauguggc

SEQ ID NO: 749342 - RNA, 17 nt, Artificial Sequence
  Synthetic
aaggauucuuauguggc

SEQ ID NO: 749343 - RNA, 17 nt, Artificial Sequence
  Synthetic
ucuucagcaacuguggc

SEQ ID NO: 749344 - RNA, 17 nt, Artificial Sequence
  Synthetic
caagagaugacuguggc

SEQ ID NO: 749345 - RNA, 17 nt, Artificial Sequence
  Synthetic
aaaauaugagguguggc

SEQ ID NO: 749346 - RNA, 17 nt, Artificial Sequence
  Synthetic
cugcauuccuguguggc

SEQ ID NO: 749347 - RNA, 17 nt, Artificial Sequence
  Synthetic
ucacaguucuguguggc

SEQ ID NO: 749348 - RNA, 17 nt, Artificial Sequence
  Synthetic
ugguguguguguguggc

SEQ ID NO: 749349 - RNA, 17 nt, Artificial Sequence
  Synthetic
cauuacaugcuuguggc

SEQ ID NO: 749350 - RNA, 17 nt, Artificial Sequence
  Synthetic
aaagauguauuuguggc

SEQ ID NO: 749351 - RNA, 17 nt, Artificial Sequence
  Synthetic
ucucauuuauuuguggc

SEQ ID NO: 749352 - RNA, 17 nt, Artificial Sequence
  Synthetic
augcugucaaaauuggc

SEQ ID NO: 749353 - RNA, 17 nt, Artificial Sequence
  Synthetic
agugguguucaauuggc

SEQ ID NO: 749354 - RNA, 17 nt, Artificial Sequence
  Synthetic
aagaaagaugaauuggc

SEQ ID NO: 749355 - RNA, 17 nt, Artificial Sequence
  Synthetic
aaauaauaauaauuggc

SEQ ID NO: 749356 - RNA, 17 nt, Artificial Sequence
  Synthetic
cagcauaaaacauuggc

SEQ ID NO: 749357 - RNA, 17 nt, Artificial Sequence
  Synthetic
aacuuauacccauuggc

SEQ ID NO: 749358 - RNA, 17 nt, Artificial Sequence
  Synthetic
ccuuuccccccauuggc

SEQ ID NO: 749359 - RNA, 17 nt, Artificial Sequence
  Synthetic
uauguuguugcauuggc

SEQ ID NO: 749360 - RNA, 17 nt, Artificial Sequence
  Synthetic
uccuucaguucauuggc

SEQ ID NO: 749361 - RNA, 17 nt, Artificial Sequence
  Synthetic
ucucccaagagauuggc

SEQ ID NO: 749362 - RNA, 17 nt, Artificial Sequence
  Synthetic
auggaaaaaauauuggc

SEQ ID NO: 749363 - RNA, 17 nt, Artificial Sequence
  Synthetic
agugacuaaauauuggc

SEQ ID NO: 749364 - RNA, 17 nt, Artificial Sequence
  Synthetic
auaauuaggguauuggc

SEQ ID NO: 749365 - RNA, 17 nt, Artificial Sequence
  Synthetic
ugugaaagaaacuuggc

SEQ ID NO: 749366 - RNA, 17 nt, Artificial Sequence
  Synthetic
ucaugugucaacuuggc

SEQ ID NO: 749367 - RNA, 17 nt, Artificial Sequence
  Synthetic
aucugaaggaacuuggc

SEQ ID NO: 749368 - RNA, 17 nt, Artificial Sequence
  Synthetic
ucaaauguuaacuuggc

SEQ ID NO: 749369 - RNA, 17 nt, Artificial Sequence
  Synthetic
uuauguguuaacuuggc

SEQ ID NO: 749370 - RNA, 17 nt, Artificial Sequence
  Synthetic
uuacgguuccacuuggc

SEQ ID NO: 749371 - RNA, 17 nt, Artificial Sequence
  Synthetic
aucuaugaagacuuggc

SEQ ID NO: 749372 - RNA, 17 nt, Artificial Sequence
  Synthetic
aauaaauacuacuuggc

SEQ ID NO: 749373 - RNA, 17 nt, Artificial Sequence
  Synthetic
ucuuuucuuaccuuggc

SEQ ID NO: 749374 - RNA, 17 nt, Artificial Sequence
  Synthetic
cuguuauaagccuuggc

SEQ ID NO: 749375 - RNA, 17 nt, Artificial Sequence
  Synthetic
aucuuucccuccuuggc

SEQ ID NO: 749376 - RNA, 17 nt, Artificial Sequence
  Synthetic
uuaaaauaguccuuggc

SEQ ID NO: 749377 - RNA, 17 nt, Artificial Sequence
  Synthetic
acucagcugggcuuggc

SEQ ID NO: 749378 - RNA, 17 nt, Artificial Sequence
  Synthetic
auugacccuggcuuggc

SEQ ID NO: 749379 - RNA, 17 nt, Artificial Sequence
  Synthetic
aguauuaacugcuuggc

SEQ ID NO: 749380 - RNA, 17 nt, Artificial Sequence
  Synthetic
cacaccaagugcuuggc

SEQ ID NO: 749381 - RNA, 17 nt, Artificial Sequence
  Synthetic
aacaagaggcucuuggc

SEQ ID NO: 749382 - RNA, 17 nt, Artificial Sequence
  Synthetic
uaugguuuucucuuggc

SEQ ID NO: 749383 - RNA, 17 nt, Artificial Sequence
  Synthetic
caacauaucaaguuggc

SEQ ID NO: 749384 - RNA, 17 nt, Artificial Sequence
  Synthetic
auugugaguaaguuggc

SEQ ID NO: 749385 - RNA, 17 nt, Artificial Sequence
  Synthetic
cuauauuguaaguuggc

SEQ ID NO: 749386 - RNA, 17 nt, Artificial Sequence
  Synthetic
uaucauaaucaguuggc

SEQ ID NO: 749387 - RNA, 17 nt, Artificial Sequence
  Synthetic
aucuggauauaguuggc

SEQ ID NO: 749388 - RNA, 17 nt, Artificial Sequence
  Synthetic
cagugggaggcguuggc

SEQ ID NO: 749389 - RNA, 17 nt, Artificial Sequence
  Synthetic
aaauaauagggguuggc

SEQ ID NO: 749390 - RNA, 17 nt, Artificial Sequence
  Synthetic
gguuucaccauguuggc

SEQ ID NO: 749391 - RNA, 17 nt, Artificial Sequence
  Synthetic
aguuuugccauguuggc

SEQ ID NO: 749392 - RNA, 17 nt, Artificial Sequence
  Synthetic
uccuguacacuguuggc

SEQ ID NO: 749393 - RNA, 17 nt, Artificial Sequence
  Synthetic
cgcaggggccuguuggc

SEQ ID NO: 749394 - RNA, 17 nt, Artificial Sequence
  Synthetic
aaaaugaaaguguuggc

SEQ ID NO: 749395 - RNA, 17 nt, Artificial Sequence
  Synthetic
caauuaagaaauuuggc

SEQ ID NO: 749396 - RNA, 17 nt, Artificial Sequence
  Synthetic
uucaaaagccauuuggc

SEQ ID NO: 749397 - RNA, 17 nt, Artificial Sequence
  Synthetic
cccacgugaccuuuggc

SEQ ID NO: 749398 - RNA, 17 nt, Artificial Sequence
  Synthetic
acccugaacgcuuuggc

SEQ ID NO: 749399 - RNA, 17 nt, Artificial Sequence
  Synthetic
auauggacaucuuuggc

SEQ ID NO: 749400 - RNA, 17 nt, Artificial Sequence
  Synthetic
augaaacuuaguuuggc

SEQ ID NO: 749401 - RNA, 17 nt, Artificial Sequence
  Synthetic
augaagcuuaguuuggc

SEQ ID NO: 749402 - RNA, 17 nt, Artificial Sequence
  Synthetic
auuugagaugguuuggc

SEQ ID NO: 749403 - RNA, 17 nt, Artificial Sequence
  Synthetic
auagguaacauuuuggc

SEQ ID NO: 749404 - RNA, 17 nt, Artificial Sequence
  Synthetic
cccuuagucauuuuggc

SEQ ID NO: 749405 - RNA, 17 nt, Artificial Sequence
  Synthetic
ucuaaaaguguuuuggc

SEQ ID NO: 749406 - RNA, 17 nt, Artificial Sequence
  Synthetic
cuccuuuuuguuuuggc

SEQ ID NO: 749407 - RNA, 17 nt, Artificial Sequence
  Synthetic
uuuugugcauuuuuggc

SEQ ID NO: 749408 - RNA, 17 nt, Artificial Sequence
  Synthetic
uuguguuuauuuuuggc

SEQ ID NO: 749409 - RNA, 17 nt, Artificial Sequence
  Synthetic
aagaacauguuuuuggc

SEQ ID NO: 749410 - RNA, 17 nt, Artificial Sequence
  Synthetic
auaagaaauuuuuuggc

SEQ ID NO: 749411 - RNA, 17 nt, Artificial Sequence
  Synthetic
auaugaaaaaaaaaugc

SEQ ID NO: 749412 - RNA, 17 nt, Artificial Sequence
  Synthetic
uuggccuccaaaaaugc

SEQ ID NO: 749413 - RNA, 17 nt, Artificial Sequence
  Synthetic
uauuagaagaaaaaugc

SEQ ID NO: 749414 - RNA, 17 nt, Artificial Sequence
  Synthetic
aaaaaacagaaaaaugc

SEQ ID NO: 749415 - RNA, 17 nt, Artificial Sequence
  Synthetic
agucaucauaaaaaugc

SEQ ID NO: 749416 - RNA, 17 nt, Artificial Sequence
  Synthetic
uagauauuucaaaaugc

SEQ ID NO: 749417 - RNA, 17 nt, Artificial Sequence
  Synthetic
uuugaccaagaaaaugc

SEQ ID NO: 749418 - RNA, 17 nt, Artificial Sequence
  Synthetic
agucacagugaaaaugc

SEQ ID NO: 749419 - RNA, 17 nt, Artificial Sequence
  Synthetic
auuuuagacuaaaaugc

SEQ ID NO: 749420 - RNA, 17 nt, Artificial Sequence
  Synthetic
acuuguccuuaaaaugc

SEQ ID NO: 749421 - RNA, 17 nt, Artificial Sequence
  Synthetic
agaacugcuuaaaaugc

SEQ ID NO: 749422 - RNA, 17 nt, Artificial Sequence
  Synthetic
uauuucuguuaaaaugc

SEQ ID NO: 749423 - RNA, 17 nt, Artificial Sequence
  Synthetic
caggcaauuacaaaugc

SEQ ID NO: 749424 - RNA, 17 nt, Artificial Sequence
  Synthetic
aaagggauaccaaaugc

SEQ ID NO: 749425 - RNA, 17 nt, Artificial Sequence
  Synthetic
uaaugaaauccaaaugc

SEQ ID NO: 749426 - RNA, 17 nt, Artificial Sequence
  Synthetic
uaaauaauagcaaaugc

SEQ ID NO: 749427 - RNA, 17 nt, Artificial Sequence
  Synthetic
cuaaacucugcaaaugc

SEQ ID NO: 749428 - RNA, 17 nt, Artificial Sequence
  Synthetic
uaaaguaaaucaaaugc

SEQ ID NO: 749429 - RNA, 17 nt, Artificial Sequence
  Synthetic
aauauccugucaaaugc

SEQ ID NO: 749430 - RNA, 17 nt, Artificial Sequence
  Synthetic
aaaaauaguucaaaugc

SEQ ID NO: 749431 - RNA, 17 nt, Artificial Sequence
  Synthetic
caagagccaagaaaugc

SEQ ID NO: 749432 - RNA, 17 nt, Artificial Sequence
  Synthetic
ugcauuuagagaaaugc

SEQ ID NO: 749433 - RNA, 17 nt, Artificial Sequence
  Synthetic
uaucugcugagaaaugc

SEQ ID NO: 749434 - RNA, 17 nt, Artificial Sequence
  Synthetic
cauugugugagaaaugc

SEQ ID NO: 749435 - RNA, 17 nt, Artificial Sequence
  Synthetic
uauccaaguggaaaugc

SEQ ID NO: 749436 - RNA, 17 nt, Artificial Sequence
  Synthetic
uucaggcaaugaaaugc

SEQ ID NO: 749437 - RNA, 17 nt, Artificial Sequence
  Synthetic
uuccagaauauaaaugc

SEQ ID NO: 749438 - RNA, 17 nt, Artificial Sequence
  Synthetic
accuggcaacuaaaugc

SEQ ID NO: 749439 - RNA, 17 nt, Artificial Sequence
  Synthetic
auggcuucccuaaaugc

SEQ ID NO: 749440 - RNA, 17 nt, Artificial Sequence
  Synthetic
auuagaaauuuaaaugc

SEQ ID NO: 749441 - RNA, 17 nt, Artificial Sequence
  Synthetic
ucaaggccuuuaaaugc

SEQ ID NO: 749442 - RNA, 17 nt, Artificial Sequence
  Synthetic
auuuuaaucaacaaugc

SEQ ID NO: 749443 - RNA, 17 nt, Artificial Sequence
  Synthetic
aaucgaagacacaaugc

SEQ ID NO: 749444 - RNA, 17 nt, Artificial Sequence
  Synthetic
caaaagacacccaaugc

SEQ ID NO: 749445 - RNA, 17 nt, Artificial Sequence
  Synthetic
auguuaauagccaaugc

SEQ ID NO: 749446 - RNA, 17 nt, Artificial Sequence
  Synthetic
aucaaguuaagcaaugc

SEQ ID NO: 749447 - RNA, 17 nt, Artificial Sequence
  Synthetic
cagucugauggcaaugc

SEQ ID NO: 749448 - RNA, 17 nt, Artificial Sequence
  Synthetic
ccugaaaaacucaaugc

SEQ ID NO: 749449 - RNA, 17 nt, Artificial Sequence
  Synthetic
ucaggguaaaagaaugc

SEQ ID NO: 749450 - RNA, 17 nt, Artificial Sequence
  Synthetic
cucagcaugaagaaugc

SEQ ID NO: 749451 - RNA, 17 nt, Artificial Sequence
  Synthetic
uuuaaaagugagaaugc

SEQ ID NO: 749452 - RNA, 17 nt, Artificial Sequence
  Synthetic
aaagaagaauagaaugc

SEQ ID NO: 749453 - RNA, 17 nt, Artificial Sequence
  Synthetic
uaggcagaaaggaaugc

SEQ ID NO: 749454 - RNA, 17 nt, Artificial Sequence
  Synthetic
aggauccagaggaaugc

SEQ ID NO: 749455 - RNA, 17 nt, Artificial Sequence
  Synthetic
cuuaucuggaggaaugc

SEQ ID NO: 749456 - RNA, 17 nt, Artificial Sequence
  Synthetic
ucauagauugggaaugc

SEQ ID NO: 749457 - RNA, 17 nt, Artificial Sequence
  Synthetic
uuuaauuucuggaaugc

SEQ ID NO: 749458 - RNA, 17 nt, Artificial Sequence
  Synthetic
aguuuaaaaaugaaugc

SEQ ID NO: 749459 - RNA, 17 nt, Artificial Sequence
  Synthetic
uguuauggacugaaugc

SEQ ID NO: 749460 - RNA, 17 nt, Artificial Sequence
  Synthetic
cauuucugugugaaugc

SEQ ID NO: 749461 - RNA, 17 nt, Artificial Sequence
  Synthetic
uauaguguaaauaaugc

SEQ ID NO: 749462 - RNA, 17 nt, Artificial Sequence
  Synthetic
ccuuagcaaacuaaugc

SEQ ID NO: 749463 - RNA, 17 nt, Artificial Sequence
  Synthetic
aacagcagaacuaaugc

SEQ ID NO: 749464 - RNA, 17 nt, Artificial Sequence
  Synthetic
cugcugucuccuaaugc

SEQ ID NO: 749465 - RNA, 17 nt, Artificial Sequence
  Synthetic
augucagcaucuaaugc

SEQ ID NO: 749466 - RNA, 17 nt, Artificial Sequence
  Synthetic
uugguagcaucuaaugc

SEQ ID NO: 749467 - RNA, 17 nt, Artificial Sequence
  Synthetic
augaauaauucuaaugc

SEQ ID NO: 749468 - RNA, 17 nt, Artificial Sequence
  Synthetic
accuuuuguucuaaugc

SEQ ID NO: 749469 - RNA, 17 nt, Artificial Sequence
  Synthetic
aagaagcuggguaaugc

SEQ ID NO: 749470 - RNA, 17 nt, Artificial Sequence
  Synthetic
agcucaagugguaaugc

SEQ ID NO: 749471 - RNA, 17 nt, Artificial Sequence
  Synthetic
aaguugagcuguaaugc

SEQ ID NO: 749472 - RNA, 17 nt, Artificial Sequence
  Synthetic
ccuaagugaauuaaugc

SEQ ID NO: 749473 - RNA, 17 nt, Artificial Sequence
  Synthetic
acacaaaagauuaaugc

SEQ ID NO: 749474 - RNA, 17 nt, Artificial Sequence
  Synthetic
caaugacugauuaaugc

SEQ ID NO: 749475 - RNA, 17 nt, Artificial Sequence
  Synthetic
caauaaauuauuaaugc

SEQ ID NO: 749476 - RNA, 17 nt, Artificial Sequence
  Synthetic
cagaggacaguuaaugc

SEQ ID NO: 749477 - RNA, 17 nt, Artificial Sequence
  Synthetic
acaugugcacaacaugc

SEQ ID NO: 749478 - RNA, 17 nt, Artificial Sequence
  Synthetic
ucaugugcacaacaugc

SEQ ID NO: 749479 - RNA, 17 nt, Artificial Sequence
  Synthetic
agccccucauaacaugc

SEQ ID NO: 749480 - RNA, 17 nt, Artificial Sequence
  Synthetic
uugauuauguaacaugc

SEQ ID NO: 749481 - RNA, 17 nt, Artificial Sequence
  Synthetic
uaaaucaggacacaugc

SEQ ID NO: 749482 - RNA, 17 nt, Artificial Sequence
  Synthetic
aguugcugaagacaugc

SEQ ID NO: 749483 - RNA, 17 nt, Artificial Sequence
  Synthetic
agauaugagacccaugc

SEQ ID NO: 749484 - RNA, 17 nt, Artificial Sequence
  Synthetic
agguuuuggccccaugc

SEQ ID NO: 749485 - RNA, 17 nt, Artificial Sequence
  Synthetic
ugcucuauuccccaugc

SEQ ID NO: 749486 - RNA, 17 nt, Artificial Sequence
  Synthetic
uggaauggggcccaugc

SEQ ID NO: 749487 - RNA, 17 nt, Artificial Sequence
  Synthetic
agagaaaaaagccaugc

SEQ ID NO: 749488 - RNA, 17 nt, Artificial Sequence
  Synthetic
augggguuucgccaugc

SEQ ID NO: 749489 - RNA, 17 nt, Artificial Sequence
  Synthetic
ucuuaaacaugccaugc

SEQ ID NO: 749490 - RNA, 17 nt, Artificial Sequence
  Synthetic
acugcaaucauccaugc

SEQ ID NO: 749491 - RNA, 17 nt, Artificial Sequence
  Synthetic
uuucaaaaucuccaugc

SEQ ID NO: 749492 - RNA, 17 nt, Artificial Sequence
  Synthetic
aaauuguaccagcaugc

SEQ ID NO: 749493 - RNA, 17 nt, Artificial Sequence
  Synthetic
uuuccuucccagcaugc

SEQ ID NO: 749494 - RNA, 17 nt, Artificial Sequence
  Synthetic
aaauuagcugggcaugc

SEQ ID NO: 749495 - RNA, 17 nt, Artificial Sequence
  Synthetic
aacuuagcugggcaugc

SEQ ID NO: 749496 - RNA, 17 nt, Artificial Sequence
  Synthetic
uuaaauauguggcaugc

SEQ ID NO: 749497 - RNA, 17 nt, Artificial Sequence
  Synthetic
aaauaccuaaugcaugc

SEQ ID NO: 749498 - RNA, 17 nt, Artificial Sequence
  Synthetic
aaauagcuaaugcaugc

SEQ ID NO: 749499 - RNA, 17 nt, Artificial Sequence
  Synthetic
aagcaguucaugcaugc

SEQ ID NO: 749500 - RNA, 17 nt, Artificial Sequence
  Synthetic
cuucagguggugcaugc

SEQ ID NO: 749501 - RNA, 17 nt, Artificial Sequence
  Synthetic
uugugugcauugcaugc

SEQ ID NO: 749502 - RNA, 17 nt, Artificial Sequence
  Synthetic
ccagaauuuuugcaugc

SEQ ID NO: 749503 - RNA, 17 nt, Artificial Sequence
  Synthetic
uugauugaaaaucaugc

SEQ ID NO: 749504 - RNA, 17 nt, Artificial Sequence
  Synthetic
agccaacuugaucaugc

SEQ ID NO: 749505 - RNA, 17 nt, Artificial Sequence
  Synthetic
cccuauggauaucaugc

SEQ ID NO: 749506 - RNA, 17 nt, Artificial Sequence
  Synthetic
uaagagauggcucaugc

SEQ ID NO: 749507 - RNA, 17 nt, Artificial Sequence
  Synthetic
ugaaagaugucucaugc

SEQ ID NO: 749508 - RNA, 17 nt, Artificial Sequence
  Synthetic
uugccacaaauucaugc

SEQ ID NO: 749509 - RNA, 17 nt, Artificial Sequence
  Synthetic
aaauacaguuuucaugc

SEQ ID NO: 749510 - RNA, 17 nt, Artificial Sequence
  Synthetic
aucuaaguaaaagaugc

SEQ ID NO: 749511 - RNA, 17 nt, Artificial Sequence
  Synthetic
ccaaucagccaagaugc

SEQ ID NO: 749512 - RNA, 17 nt, Artificial Sequence
  Synthetic
cccuaauuucaagaugc

SEQ ID NO: 749513 - RNA, 17 nt, Artificial Sequence
  Synthetic
agaaagacugaagaugc

SEQ ID NO: 749514 - RNA, 17 nt, Artificial Sequence
  Synthetic
aagccagaguaagaugc

SEQ ID NO: 749515 - RNA, 17 nt, Artificial Sequence
  Synthetic
caggaaacaacagaugc

SEQ ID NO: 749516 - RNA, 17 nt, Artificial Sequence
  Synthetic
caggcaacaacagaugc

SEQ ID NO: 749517 - RNA, 17 nt, Artificial Sequence
  Synthetic
caaaaaauaccagaugc

SEQ ID NO: 749518 - RNA, 17 nt, Artificial Sequence
  Synthetic
aguugaaaaagagaugc

SEQ ID NO: 749519 - RNA, 17 nt, Artificial Sequence
  Synthetic
ucuuuuaaaagagaugc

SEQ ID NO: 749520 - RNA, 17 nt, Artificial Sequence
  Synthetic
ugaggaugcugagaugc

SEQ ID NO: 749521 - RNA, 17 nt, Artificial Sequence
  Synthetic
auugggauuauagaugc

SEQ ID NO: 749522 - RNA, 17 nt, Artificial Sequence
  Synthetic
ucauuuucccuagaugc

SEQ ID NO: 749523 - RNA, 17 nt, Artificial Sequence
  Synthetic
agaagcugaguagaugc

SEQ ID NO: 749524 - RNA, 17 nt, Artificial Sequence
  Synthetic
uggaguggcugggaugc

SEQ ID NO: 749525 - RNA, 17 nt, Artificial Sequence
  Synthetic
uuaucaugaauggaugc

SEQ ID NO: 749526 - RNA, 17 nt, Artificial Sequence
  Synthetic
auucuuaacauggaugc

SEQ ID NO: 749527 - RNA, 17 nt, Artificial Sequence
  Synthetic
ugguaucagaaugaugc

SEQ ID NO: 749528 - RNA, 17 nt, Artificial Sequence
  Synthetic
uauuuaagacaugaugc

SEQ ID NO: 749529 - RNA, 17 nt, Artificial Sequence
  Synthetic
agauaugcagaugaugc

SEQ ID NO: 749530 - RNA, 17 nt, Artificial Sequence
  Synthetic
ugguaucaggaugaugc

SEQ ID NO: 749531 - RNA, 17 nt, Artificial Sequence
  Synthetic
aguaacaaauaugaugc

SEQ ID NO: 749532 - RNA, 17 nt, Artificial Sequence
  Synthetic
caggaaacaacugaugc

SEQ ID NO: 749533 - RNA, 17 nt, Artificial Sequence
  Synthetic
uggugguuaccugaugc

SEQ ID NO: 749534 - RNA, 17 nt, Artificial Sequence
  Synthetic
uauaacauagcugaugc

SEQ ID NO: 749535 - RNA, 17 nt, Artificial Sequence
  Synthetic
acuugggaggcugaugc

SEQ ID NO: 749536 - RNA, 17 nt, Artificial Sequence
  Synthetic
cuagguuaugcugaugc

SEQ ID NO: 749537 - RNA, 17 nt, Artificial Sequence
  Synthetic
caggaacugucugaugc

SEQ ID NO: 749538 - RNA, 17 nt, Artificial Sequence
  Synthetic
cauauagaaggugaugc

SEQ ID NO: 749539 - RNA, 17 nt, Artificial Sequence
  Synthetic
cacguuuguggugaugc

SEQ ID NO: 749540 - RNA, 17 nt, Artificial Sequence
  Synthetic
uggggccagauugaugc

SEQ ID NO: 749541 - RNA, 17 nt, Artificial Sequence
  Synthetic
auagacuugcuugaugc

SEQ ID NO: 749542 - RNA, 17 nt, Artificial Sequence
  Synthetic
aaacuacaucuugaugc

SEQ ID NO: 749543 - RNA, 17 nt, Artificial Sequence
  Synthetic
ccuggaaauuuugaugc

SEQ ID NO: 749544 - RNA, 17 nt, Artificial Sequence
  Synthetic
aagccuucacaauaugc

SEQ ID NO: 749545 - RNA, 17 nt, Artificial Sequence
  Synthetic
ccaccaugagaauaugc

SEQ ID NO: 749546 - RNA, 17 nt, Artificial Sequence
  Synthetic
uauucaaaauaauaugc

SEQ ID NO: 749547 - RNA, 17 nt, Artificial Sequence
  Synthetic
uagcauauguaauaugc

SEQ ID NO: 749548 - RNA, 17 nt, Artificial Sequence
  Synthetic
cuguuauugccauaugc

SEQ ID NO: 749549 - RNA, 17 nt, Artificial Sequence
  Synthetic
ucauuuugcagauaugc

SEQ ID NO: 749550 - RNA, 17 nt, Artificial Sequence
  Synthetic
accccugagagauaugc

SEQ ID NO: 749551 - RNA, 17 nt, Artificial Sequence
  Synthetic
caugucugaauauaugc

SEQ ID NO: 749552 - RNA, 17 nt, Artificial Sequence
  Synthetic
uagcaguuucuauaugc

SEQ ID NO: 749553 - RNA, 17 nt, Artificial Sequence
  Synthetic
auccuuuuauuauaugc

SEQ ID NO: 749554 - RNA, 17 nt, Artificial Sequence
  Synthetic
uggcucuguuuauaugc

SEQ ID NO: 749555 - RNA, 17 nt, Artificial Sequence
  Synthetic
ugguucuguuuauaugc

SEQ ID NO: 749556 - RNA, 17 nt, Artificial Sequence
  Synthetic
cacuuguaacacuaugc

SEQ ID NO: 749557 - RNA, 17 nt, Artificial Sequence
  Synthetic
auuucacaucacuaugc

SEQ ID NO: 749558 - RNA, 17 nt, Artificial Sequence
  Synthetic
uuuaaaaaauacuaugc

SEQ ID NO: 749559 - RNA, 17 nt, Artificial Sequence
  Synthetic
agaagaaguaccuaugc

SEQ ID NO: 749560 - RNA, 17 nt, Artificial Sequence
  Synthetic
cuugaaauuggcuaugc

SEQ ID NO: 749561 - RNA, 17 nt, Artificial Sequence
  Synthetic
uuaagacagugcuaugc

SEQ ID NO: 749562 - RNA, 17 nt, Artificial Sequence
  Synthetic
uaguauauaaucuaugc

SEQ ID NO: 749563 - RNA, 17 nt, Artificial Sequence
  Synthetic
accugagaucucuaugc

SEQ ID NO: 749564 - RNA, 17 nt, Artificial Sequence
  Synthetic
agccacagcugguaugc

SEQ ID NO: 749565 - RNA, 17 nt, Artificial Sequence
  Synthetic
auaguaauuauguaugc

SEQ ID NO: 749566 - RNA, 17 nt, Artificial Sequence
  Synthetic
uuccucaagcuguaugc

SEQ ID NO: 749567 - RNA, 17 nt, Artificial Sequence
  Synthetic
caauauuuucuguaugc

SEQ ID NO: 749568 - RNA, 17 nt, Artificial Sequence
  Synthetic
aauaauaguacuuaugc

SEQ ID NO: 749569 - RNA, 17 nt, Artificial Sequence
  Synthetic
auagaaaggaguuaugc

SEQ ID NO: 749570 - RNA, 17 nt, Artificial Sequence
  Synthetic
aaaaauauacguuaugc

SEQ ID NO: 749571 - RNA, 17 nt, Artificial Sequence
  Synthetic
caccugcugcguuaugc

SEQ ID NO: 749572 - RNA, 17 nt, Artificial Sequence
  Synthetic
ugcuucacaauuuaugc

SEQ ID NO: 749573 - RNA, 17 nt, Artificial Sequence
  Synthetic
uccagauuuauuuaugc

SEQ ID NO: 749574 - RNA, 17 nt, Artificial Sequence
  Synthetic
ccucucaaaguuuaugc

SEQ ID NO: 749575 - RNA, 17 nt, Artificial Sequence
  Synthetic
uaauacauuguuuaugc

SEQ ID NO: 749576 - RNA, 17 nt, Artificial Sequence
  Synthetic
auaguguagaaaacugc

SEQ ID NO: 749577 - RNA, 17 nt, Artificial Sequence
  Synthetic
cuuucacuucaaacugc

SEQ ID NO: 749578 - RNA, 17 nt, Artificial Sequence
  Synthetic
accaacucugaaacugc

SEQ ID NO: 749579 - RNA, 17 nt, Artificial Sequence
  Synthetic
uauuuaagaucaacugc

SEQ ID NO: 749580 - RNA, 17 nt, Artificial Sequence
  Synthetic
ucaguuuccucaacugc

SEQ ID NO: 749581 - RNA, 17 nt, Artificial Sequence
  Synthetic
cacugguucagaacugc

SEQ ID NO: 749582 - RNA, 17 nt, Artificial Sequence
  Synthetic
uucugcuucugaacugc

SEQ ID NO: 749583 - RNA, 17 nt, Artificial Sequence
  Synthetic
auuagccauugaacugc

SEQ ID NO: 749584 - RNA, 17 nt, Artificial Sequence
  Synthetic
aaacaaaguugaacugc

SEQ ID NO: 749585 - RNA, 17 nt, Artificial Sequence
  Synthetic
cuguagcagcuaacugc

SEQ ID NO: 749586 - RNA, 17 nt, Artificial Sequence
  Synthetic
caugcugguguaacugc

SEQ ID NO: 749587 - RNA, 17 nt, Artificial Sequence
  Synthetic
uaaauuauauuaacugc

SEQ ID NO: 749588 - RNA, 17 nt, Artificial Sequence
  Synthetic
aacacuuaacacacugc

SEQ ID NO: 749589 - RNA, 17 nt, Artificial Sequence
  Synthetic
uuguacuaggacacugc

SEQ ID NO: 749590 - RNA, 17 nt, Artificial Sequence
  Synthetic
aucuaucuguacacugc

SEQ ID NO: 749591 - RNA, 17 nt, Artificial Sequence
  Synthetic
uuucuguugaccacugc

SEQ ID NO: 749592 - RNA, 17 nt, Artificial Sequence
  Synthetic
uccagcaaucccacugc

SEQ ID NO: 749593 - RNA, 17 nt, Artificial Sequence
  Synthetic
acacuagucuccacugc

SEQ ID NO: 749594 - RNA, 17 nt, Artificial Sequence
  Synthetic
cuaagagggggcacugc

SEQ ID NO: 749595 - RNA, 17 nt, Artificial Sequence
  Synthetic
uaacuauuugucacugc

SEQ ID NO: 749596 - RNA, 17 nt, Artificial Sequence
  Synthetic
ugguuuuucuucacugc

SEQ ID NO: 749597 - RNA, 17 nt, Artificial Sequence
  Synthetic
ccccugaaguucacugc

SEQ ID NO: 749598 - RNA, 17 nt, Artificial Sequence
  Synthetic
cauuuaacuaagacugc

SEQ ID NO: 749599 - RNA, 17 nt, Artificial Sequence
  Synthetic
cuccggaggcagacugc

SEQ ID NO: 749600 - RNA, 17 nt, Artificial Sequence
  Synthetic
aagaaacaguagacugc

SEQ ID NO: 749601 - RNA, 17 nt, Artificial Sequence
  Synthetic
auccaaaauaggacugc

SEQ ID NO: 749602 - RNA, 17 nt, Artificial Sequence
  Synthetic
aggugaagagggacugc

SEQ ID NO: 749603 - RNA, 17 nt, Artificial Sequence
  Synthetic
ccuuaaucaaugacugc

SEQ ID NO: 749604 - RNA, 17 nt, Artificial Sequence
  Synthetic
ugcuccugaaugacugc

SEQ ID NO: 749605 - RNA, 17 nt, Artificial Sequence
  Synthetic
acuugaguucugacugc

SEQ ID NO: 749606 - RNA, 17 nt, Artificial Sequence
  Synthetic
agcugaaacuugacugc

SEQ ID NO: 749607 - RNA, 17 nt, Artificial Sequence
  Synthetic
auugauuuaaauacugc

SEQ ID NO: 749608 - RNA, 17 nt, Artificial Sequence
  Synthetic
aaaaaugccaauacugc

SEQ ID NO: 749609 - RNA, 17 nt, Artificial Sequence
  Synthetic
uuagauuggaauacugc

SEQ ID NO: 749610 - RNA, 17 nt, Artificial Sequence
  Synthetic
auucugcuagauacugc

SEQ ID NO: 749611 - RNA, 17 nt, Artificial Sequence
  Synthetic
agaaaaaauuauacugc

SEQ ID NO: 749612 - RNA, 17 nt, Artificial Sequence
  Synthetic
cuuuuuuuuucuacugc

SEQ ID NO: 749613 - RNA, 17 nt, Artificial Sequence
  Synthetic
ugaaauuuuauuacugc

SEQ ID NO: 749614 - RNA, 17 nt, Artificial Sequence
  Synthetic
uaguuuacacuuacugc

SEQ ID NO: 749615 - RNA, 17 nt, Artificial Sequence
  Synthetic
aggagguaauuuacugc

SEQ ID NO: 749616 - RNA, 17 nt, Artificial Sequence
  Synthetic
ccagugccaccaccugc

SEQ ID NO: 749617 - RNA, 17 nt, Artificial Sequence
  Synthetic
cugaugucuccaccugc

SEQ ID NO: 749618 - RNA, 17 nt, Artificial Sequence
  Synthetic
ccagcccuuccaccugc

SEQ ID NO: 749619 - RNA, 17 nt, Artificial Sequence
  Synthetic
uauuucccuucaccugc

SEQ ID NO: 749620 - RNA, 17 nt, Artificial Sequence
  Synthetic
cauaugcuuuuaccugc

SEQ ID NO: 749621 - RNA, 17 nt, Artificial Sequence
  Synthetic
aagacaacaaacccugc

SEQ ID NO: 749622 - RNA, 17 nt, Artificial Sequence
  Synthetic
ugucugucaaccccugc

SEQ ID NO: 749623 - RNA, 17 nt, Artificial Sequence
  Synthetic
ucccaccucaccccugc

SEQ ID NO: 749624 - RNA, 17 nt, Artificial Sequence
  Synthetic
augaagauagccccugc

SEQ ID NO: 749625 - RNA, 17 nt, Artificial Sequence
  Synthetic
ucuggcguuuccccugc

SEQ ID NO: 749626 - RNA, 17 nt, Artificial Sequence
  Synthetic
aagucugacaucccugc

SEQ ID NO: 749627 - RNA, 17 nt, Artificial Sequence
  Synthetic
agauuaugacucccugc

SEQ ID NO: 749628 - RNA, 17 nt, Artificial Sequence
  Synthetic
acugucugacucccugc

SEQ ID NO: 749629 - RNA, 17 nt, Artificial Sequence
  Synthetic
agugaggcuuucccugc

SEQ ID NO: 749630 - RNA, 17 nt, Artificial Sequence
  Synthetic
caauacaaugagccugc

SEQ ID NO: 749631 - RNA, 17 nt, Artificial Sequence
  Synthetic
caaucaucugagccugc

SEQ ID NO: 749632 - RNA, 17 nt, Artificial Sequence
  Synthetic
cugcaaccuccgccugc

SEQ ID NO: 749633 - RNA, 17 nt, Artificial Sequence
  Synthetic
caccgugccgggccugc

SEQ ID NO: 749634 - RNA, 17 nt, Artificial Sequence
  Synthetic
caggaguaugggccugc

SEQ ID NO: 749635 - RNA, 17 nt, Artificial Sequence
  Synthetic
aagggcuuguggccugc

SEQ ID NO: 749636 - RNA, 17 nt, Artificial Sequence
  Synthetic
accagaucccugccugc

SEQ ID NO: 749637 - RNA, 17 nt, Artificial Sequence
  Synthetic
uaaacguuccugccugc

SEQ ID NO: 749638 - RNA, 17 nt, Artificial Sequence
  Synthetic
caaaccuggcugccugc

SEQ ID NO: 749639 - RNA, 17 nt, Artificial Sequence
  Synthetic
ugaaagaugcugccugc

SEQ ID NO: 749640 - RNA, 17 nt, Artificial Sequence
  Synthetic
ucagguaggaauccugc

SEQ ID NO: 749641 - RNA, 17 nt, Artificial Sequence
  Synthetic
uaacucccuccuccugc

SEQ ID NO: 749642 - RNA, 17 nt, Artificial Sequence
  Synthetic
cuuaagaagucuccugc

SEQ ID NO: 749643 - RNA, 17 nt, Artificial Sequence
  Synthetic
ucagucuuucuuccugc

SEQ ID NO: 749644 - RNA, 17 nt, Artificial Sequence
  Synthetic
cucuucagaaaagcugc

SEQ ID NO: 749645 - RNA, 17 nt, Artificial Sequence
  Synthetic
ucuuauccacaagcugc

SEQ ID NO: 749646 - RNA, 17 nt, Artificial Sequence
  Synthetic
acuucuauucaagcugc

SEQ ID NO: 749647 - RNA, 17 nt, Artificial Sequence
  Synthetic
auaaauuguacagcugc

SEQ ID NO: 749648 - RNA, 17 nt, Artificial Sequence
  Synthetic
agcagcccaccagcugc

SEQ ID NO: 749649 - RNA, 17 nt, Artificial Sequence
  Synthetic
cuucugaccccagcugc

SEQ ID NO: 749650 - RNA, 17 nt, Artificial Sequence
  Synthetic
cuggguugcccagcugc

SEQ ID NO: 749651 - RNA, 17 nt, Artificial Sequence
  Synthetic
aauuguucugcagcugc

SEQ ID NO: 749652 - RNA, 17 nt, Artificial Sequence
  Synthetic
ugaagagaaagagcugc

SEQ ID NO: 749653 - RNA, 17 nt, Artificial Sequence
  Synthetic
auuccucagagagcugc

SEQ ID NO: 749654 - RNA, 17 nt, Artificial Sequence
  Synthetic
caugguugaggagcugc

SEQ ID NO: 749655 - RNA, 17 nt, Artificial Sequence
  Synthetic
aucauggauggagcugc

SEQ ID NO: 749656 - RNA, 17 nt, Artificial Sequence
  Synthetic
uagaaucacugagcugc

SEQ ID NO: 749657 - RNA, 17 nt, Artificial Sequence
  Synthetic
aucaggaggugagcugc

SEQ ID NO: 749658 - RNA, 17 nt, Artificial Sequence
  Synthetic
aggagaaacauagcugc

SEQ ID NO: 749659 - RNA, 17 nt, Artificial Sequence
  Synthetic
ugggaccaucuagcugc

SEQ ID NO: 749660 - RNA, 17 nt, Artificial Sequence
  Synthetic
aauuccuuuguagcugc

SEQ ID NO: 749661 - RNA, 17 nt, Artificial Sequence
  Synthetic
uauagcauucccgcugc

SEQ ID NO: 749662 - RNA, 17 nt, Artificial Sequence
  Synthetic
aagcagguugccgcugc

SEQ ID NO: 749663 - RNA, 17 nt, Artificial Sequence
  Synthetic
caaggcugcaaggcugc

SEQ ID NO: 749664 - RNA, 17 nt, Artificial Sequence
  Synthetic
uggggagugaaggcugc

SEQ ID NO: 749665 - RNA, 17 nt, Artificial Sequence
  Synthetic
auuaaaacacaggcugc

SEQ ID NO: 749666 - RNA, 17 nt, Artificial Sequence
  Synthetic
auauguggugaggcugc

SEQ ID NO: 749667 - RNA, 17 nt, Artificial Sequence
  Synthetic
acguccaucuaggcugc

SEQ ID NO: 749668 - RNA, 17 nt, Artificial Sequence
  Synthetic
acuccagccugggcugc

SEQ ID NO: 749669 - RNA, 17 nt, Artificial Sequence
  Synthetic
ugaccacugcuggcugc

SEQ ID NO: 749670 - RNA, 17 nt, Artificial Sequence
  Synthetic
aucugagaaguggcugc

SEQ ID NO: 749671 - RNA, 17 nt, Artificial Sequence
  Synthetic
auuuuuuacuuggcugc

SEQ ID NO: 749672 - RNA, 17 nt, Artificial Sequence
  Synthetic
uaagacuucuuggcugc

SEQ ID NO: 749673 - RNA, 17 nt, Artificial Sequence
  Synthetic
aauuggcaaaaugcugc

SEQ ID NO: 749674 - RNA, 17 nt, Artificial Sequence
  Synthetic
aguagucguaaugcugc

SEQ ID NO: 749675 - RNA, 17 nt, Artificial Sequence
  Synthetic
uguagaacagaugcugc

SEQ ID NO: 749676 - RNA, 17 nt, Artificial Sequence
  Synthetic
ugguaucaggaugcugc

SEQ ID NO: 749677 - RNA, 17 nt, Artificial Sequence
  Synthetic
aggaauuuggaugcugc

SEQ ID NO: 749678 - RNA, 17 nt, Artificial Sequence
  Synthetic
agugaugcugaugcugc

SEQ ID NO: 749679 - RNA, 17 nt, Artificial Sequence
  Synthetic
cuuguuauguaugcugc

SEQ ID NO: 749680 - RNA, 17 nt, Artificial Sequence
  Synthetic
aauaauuguuaugcugc

SEQ ID NO: 749681 - RNA, 17 nt, Artificial Sequence
  Synthetic
cauagauucacugcugc

SEQ ID NO: 749682 - RNA, 17 nt, Artificial Sequence
  Synthetic
caggaacccucugcugc

SEQ ID NO: 749683 - RNA, 17 nt, Artificial Sequence
  Synthetic
aggcagaagucugcugc

SEQ ID NO: 749684 - RNA, 17 nt, Artificial Sequence
  Synthetic
uaugaaaacagugcugc

SEQ ID NO: 749685 - RNA, 17 nt, Artificial Sequence
  Synthetic
uaguugagcagugcugc

SEQ ID NO: 749686 - RNA, 17 nt, Artificial Sequence
  Synthetic
ucaugaaaaugugcugc

SEQ ID NO: 749687 - RNA, 17 nt, Artificial Sequence
  Synthetic
agacauagccuugcugc

SEQ ID NO: 749688 - RNA, 17 nt, Artificial Sequence
  Synthetic
cugccacuucuugcugc

SEQ ID NO: 749689 - RNA, 17 nt, Artificial Sequence
  Synthetic
aguugcuagguugcugc

SEQ ID NO: 749690 - RNA, 17 nt, Artificial Sequence
  Synthetic
aggcagaaguuugcugc

SEQ ID NO: 749691 - RNA, 17 nt, Artificial Sequence
  Synthetic
aagugccuguuugcugc

SEQ ID NO: 749692 - RNA, 17 nt, Artificial Sequence
  Synthetic
ccagacaccaaaucugc

SEQ ID NO: 749693 - RNA, 17 nt, Artificial Sequence
  Synthetic
cauaguauuccaucugc

SEQ ID NO: 749694 - RNA, 17 nt, Artificial Sequence
  Synthetic
aucuggauuucaucugc

SEQ ID NO: 749695 - RNA, 17 nt, Artificial Sequence
  Synthetic
agauuccacagaucugc

SEQ ID NO: 749696 - RNA, 17 nt, Artificial Sequence
  Synthetic
cuugaucacagaucugc

SEQ ID NO: 749697 - RNA, 17 nt, Artificial Sequence
  Synthetic
uugaaucauguaucugc

SEQ ID NO: 749698 - RNA, 17 nt, Artificial Sequence
  Synthetic
cugggaccuuuaucugc

SEQ ID NO: 749699 - RNA, 17 nt, Artificial Sequence
  Synthetic
cugggcugaaacucugc

SEQ ID NO: 749700 - RNA, 17 nt, Artificial Sequence
  Synthetic
caugaacaaaccucugc

SEQ ID NO: 749701 - RNA, 17 nt, Artificial Sequence
  Synthetic
ugucaaacguccucugc

SEQ ID NO: 749702 - RNA, 17 nt, Artificial Sequence
  Synthetic
acacugaacagcucugc

SEQ ID NO: 749703 - RNA, 17 nt, Artificial Sequence
  Synthetic
uuuuaucccagcucugc

SEQ ID NO: 749704 - RNA, 17 nt, Artificial Sequence
  Synthetic
acauuaugaggcucugc

SEQ ID NO: 749705 - RNA, 17 nt, Artificial Sequence
  Synthetic
augacauguggcucugc

SEQ ID NO: 749706 - RNA, 17 nt, Artificial Sequence
  Synthetic
ucaaugguuggcucugc

SEQ ID NO: 749707 - RNA, 17 nt, Artificial Sequence
  Synthetic
aaugacaacaucucugc

SEQ ID NO: 749708 - RNA, 17 nt, Artificial Sequence
  Synthetic
auggaaaaccucucugc

SEQ ID NO: 749709 - RNA, 17 nt, Artificial Sequence
  Synthetic
acuucuugccucucugc

SEQ ID NO: 749710 - RNA, 17 nt, Artificial Sequence
  Synthetic
agcuguguucucucugc

SEQ ID NO: 749711 - RNA, 17 nt, Artificial Sequence
  Synthetic
cuuucaagugucucugc

SEQ ID NO: 749712 - RNA, 17 nt, Artificial Sequence
  Synthetic
uagucaucauucucugc

SEQ ID NO: 749713 - RNA, 17 nt, Artificial Sequence
  Synthetic
agaaaguuauucucugc

SEQ ID NO: 749714 - RNA, 17 nt, Artificial Sequence
  Synthetic
caaaaauucaagucugc

SEQ ID NO: 749715 - RNA, 17 nt, Artificial Sequence
  Synthetic
cuuuuucuguagucugc

SEQ ID NO: 749716 - RNA, 17 nt, Artificial Sequence
  Synthetic
cacucacucacgucugc

SEQ ID NO: 749717 - RNA, 17 nt, Artificial Sequence
  Synthetic
cucugcugcaggucugc

SEQ ID NO: 749718 - RNA, 17 nt, Artificial Sequence
  Synthetic
cccaaaguauggucugc

SEQ ID NO: 749719 - RNA, 17 nt, Artificial Sequence
  Synthetic
cauugucaguugucugc

SEQ ID NO: 749720 - RNA, 17 nt, Artificial Sequence
  Synthetic
uucugcucacauucugc

SEQ ID NO: 749721 - RNA, 17 nt, Artificial Sequence
  Synthetic
ugaugguuacauucugc

SEQ ID NO: 749722 - RNA, 17 nt, Artificial Sequence
  Synthetic
aggaguucagauucugc

SEQ ID NO: 749723 - RNA, 17 nt, Artificial Sequence
  Synthetic
uuggcugacgauucugc

SEQ ID NO: 749724 - RNA, 17 nt, Artificial Sequence
  Synthetic
ucgauucaugauucugc

SEQ ID NO: 749725 - RNA, 17 nt, Artificial Sequence
  Synthetic
uaucugguaacuucugc

SEQ ID NO: 749726 - RNA, 17 nt, Artificial Sequence
  Synthetic
auucaugaaccuucugc

SEQ ID NO: 749727 - RNA, 17 nt, Artificial Sequence
  Synthetic
uguucugcagcuucugc

SEQ ID NO: 749728 - RNA, 17 nt, Artificial Sequence
  Synthetic
aagucuaguucuucugc

SEQ ID NO: 749729 - RNA, 17 nt, Artificial Sequence
  Synthetic
uauuucuuuucuucugc

SEQ ID NO: 749730 - RNA, 17 nt, Artificial Sequence
  Synthetic
aaccucagaaguucugc

SEQ ID NO: 749731 - RNA, 17 nt, Artificial Sequence
  Synthetic
uuggcucacaguucugc

SEQ ID NO: 749732 - RNA, 17 nt, Artificial Sequence
  Synthetic
uugacuuacgguucugc

SEQ ID NO: 749733 - RNA, 17 nt, Artificial Sequence
  Synthetic
uuggcucaugguucugc

SEQ ID NO: 749734 - RNA, 17 nt, Artificial Sequence
  Synthetic
uuggcugaugguucugc

SEQ ID NO: 749735 - RNA, 17 nt, Artificial Sequence
  Synthetic
aaaugguuauguucugc

SEQ ID NO: 749736 - RNA, 17 nt, Artificial Sequence
  Synthetic
auugccucaauuucugc

SEQ ID NO: 749737 - RNA, 17 nt, Artificial Sequence
  Synthetic
caaaucagaauuucugc

SEQ ID NO: 749738 - RNA, 17 nt, Artificial Sequence
  Synthetic
cuuggagacauuucugc

SEQ ID NO: 749739 - RNA, 17 nt, Artificial Sequence
  Synthetic
uuuauaaauauuucugc

SEQ ID NO: 749740 - RNA, 17 nt, Artificial Sequence
  Synthetic
uuuguauauauuucugc

SEQ ID NO: 749741 - RNA, 17 nt, Artificial Sequence
  Synthetic
uaauagccacuuucugc

SEQ ID NO: 749742 - RNA, 17 nt, Artificial Sequence
  Synthetic
uacugcagccuuucugc

SEQ ID NO: 749743 - RNA, 17 nt, Artificial Sequence
  Synthetic
ugcauagcuguuucugc

SEQ ID NO: 749744 - RNA, 17 nt, Artificial Sequence
  Synthetic
ucagccacccaaagugc

SEQ ID NO: 749745 - RNA, 17 nt, Artificial Sequence
  Synthetic
cggccuccccaaagugc

SEQ ID NO: 749746 - RNA, 17 nt, Artificial Sequence
  Synthetic
ucagacucccaaagugc

SEQ ID NO: 749747 - RNA, 17 nt, Artificial Sequence
  Synthetic
uuggacucccaaagugc

SEQ ID NO: 749748 - RNA, 17 nt, Artificial Sequence
  Synthetic
ucagccucccaaagugc

SEQ ID NO: 749749 - RNA, 17 nt, Artificial Sequence
  Synthetic
uaggccucccaaagugc

SEQ ID NO: 749750 - RNA, 17 nt, Artificial Sequence
  Synthetic
acggccucccaaagugc

SEQ ID NO: 749751 - RNA, 17 nt, Artificial Sequence
  Synthetic
ucggccucccaaagugc

SEQ ID NO: 749752 - RNA, 17 nt, Artificial Sequence
  Synthetic
ugggccucccaaagugc

SEQ ID NO: 749753 - RNA, 17 nt, Artificial Sequence
  Synthetic
cuggccucccaaagugc

SEQ ID NO: 749754 - RNA, 17 nt, Artificial Sequence
  Synthetic
uuggccucccaaagugc

SEQ ID NO: 749755 - RNA, 17 nt, Artificial Sequence
  Synthetic
ucugccucccaaagugc

SEQ ID NO: 749756 - RNA, 17 nt, Artificial Sequence
  Synthetic
ucauccucccaaagugc

SEQ ID NO: 749757 - RNA, 17 nt, Artificial Sequence
  Synthetic
ucaggcucccaaagugc

SEQ ID NO: 749758 - RNA, 17 nt, Artificial Sequence
  Synthetic
ccagcuucccaaagugc

SEQ ID NO: 749759 - RNA, 17 nt, Artificial Sequence
  Synthetic
ucagcuucccaaagugc

SEQ ID NO: 749760 - RNA, 17 nt, Artificial Sequence
  Synthetic
ucggccuuccaaagugc

SEQ ID NO: 749761 - RNA, 17 nt, Artificial Sequence
  Synthetic
ucggccucgcaaagugc

SEQ ID NO: 749762 - RNA, 17 nt, Artificial Sequence
  Synthetic
ucagccucucaaagugc

SEQ ID NO: 749763 - RNA, 17 nt, Artificial Sequence
  Synthetic
ucggccucucaaagugc

SEQ ID NO: 749764 - RNA, 17 nt, Artificial Sequence
  Synthetic
uuggucucucaaagugc

SEQ ID NO: 749765 - RNA, 17 nt, Artificial Sequence
  Synthetic
acaugugcagaaagugc

SEQ ID NO: 749766 - RNA, 17 nt, Artificial Sequence
  Synthetic
ucagcauccgaaagugc

SEQ ID NO: 749767 - RNA, 17 nt, Artificial Sequence
  Synthetic
ucagccuccgaaagugc

SEQ ID NO: 749768 - RNA, 17 nt, Artificial Sequence
  Synthetic
ucagccuccuaaagugc

SEQ ID NO: 749769 - RNA, 17 nt, Artificial Sequence
  Synthetic
uuggaucaguaaagugc

SEQ ID NO: 749770 - RNA, 17 nt, Artificial Sequence
  Synthetic
auauucaauuaaagugc

SEQ ID NO: 749771 - RNA, 17 nt, Artificial Sequence
  Synthetic
ucggccuccccaagugc

SEQ ID NO: 749772 - RNA, 17 nt, Artificial Sequence
  Synthetic
augagugugagaagugc

SEQ ID NO: 749773 - RNA, 17 nt, Artificial Sequence
  Synthetic
uuggccucccgaagugc

SEQ ID NO: 749774 - RNA, 17 nt, Artificial Sequence
  Synthetic
cugugucacugaagugc

SEQ ID NO: 749775 - RNA, 17 nt, Artificial Sequence
  Synthetic
aaauaaccuauaagugc

SEQ ID NO: 749776 - RNA, 17 nt, Artificial Sequence
  Synthetic
uuggccucccuaagugc

SEQ ID NO: 749777 - RNA, 17 nt, Artificial Sequence
  Synthetic
aagacagcaguaagugc

SEQ ID NO: 749778 - RNA, 17 nt, Artificial Sequence
  Synthetic
acuguugauuuaagugc

SEQ ID NO: 749779 - RNA, 17 nt, Artificial Sequence
  Synthetic
uuagccucccacagugc

SEQ ID NO: 749780 - RNA, 17 nt, Artificial Sequence
  Synthetic
uuggccucccacagugc

SEQ ID NO: 749781 - RNA, 17 nt, Artificial Sequence
  Synthetic
agaguuccucacagugc

SEQ ID NO: 749782 - RNA, 17 nt, Artificial Sequence
  Synthetic
ucuccauuucacagugc

SEQ ID NO: 749783 - RNA, 17 nt, Artificial Sequence
  Synthetic
cacugcacguccagugc

SEQ ID NO: 749784 - RNA, 17 nt, Artificial Sequence
  Synthetic
cacagcaaaagcagugc

SEQ ID NO: 749785 - RNA, 17 nt, Artificial Sequence
  Synthetic
uuuuucagaagcagugc

SEQ ID NO: 749786 - RNA, 17 nt, Artificial Sequence
  Synthetic
cuuaaacacagcagugc

SEQ ID NO: 749787 - RNA, 17 nt, Artificial Sequence
  Synthetic
agcugcaacugcagugc

SEQ ID NO: 749788 - RNA, 17 nt, Artificial Sequence
  Synthetic
cauucuguuaucagugc

SEQ ID NO: 749789 - RNA, 17 nt, Artificial Sequence
  Synthetic
acugaaagucucagugc

SEQ ID NO: 749790 - RNA, 17 nt, Artificial Sequence
  Synthetic
ucggccucccagagugc

SEQ ID NO: 749791 - RNA, 17 nt, Artificial Sequence
  Synthetic
cuuuuauuagggagugc

SEQ ID NO: 749792 - RNA, 17 nt, Artificial Sequence
  Synthetic
caaagcgcugggagugc

SEQ ID NO: 749793 - RNA, 17 nt, Artificial Sequence
  Synthetic
uguuuaucugugagugc

SEQ ID NO: 749794 - RNA, 17 nt, Artificial Sequence
  Synthetic
cuggcuuucuugagugc

SEQ ID NO: 749795 - RNA, 17 nt, Artificial Sequence
  Synthetic
ucuauuuuaaauagugc

SEQ ID NO: 749796 - RNA, 17 nt, Artificial Sequence
  Synthetic
cuuugaaugaauagugc

SEQ ID NO: 749797 - RNA, 17 nt, Artificial Sequence
  Synthetic
ucagccucccauagugc

SEQ ID NO: 749798 - RNA, 17 nt, Artificial Sequence
  Synthetic
ugauauggauauagugc

SEQ ID NO: 749799 - RNA, 17 nt, Artificial Sequence
  Synthetic
ugauguauauauagugc

SEQ ID NO: 749800 - RNA, 17 nt, Artificial Sequence
  Synthetic
agaauccuuuguagugc

SEQ ID NO: 749801 - RNA, 17 nt, Artificial Sequence
  Synthetic
acaugugcacaacgugc

SEQ ID NO: 749802 - RNA, 17 nt, Artificial Sequence
  Synthetic
uuggccugacaacgugc

SEQ ID NO: 749803 - RNA, 17 nt, Artificial Sequence
  Synthetic
acauguacagaacgugc

SEQ ID NO: 749804 - RNA, 17 nt, Artificial Sequence
  Synthetic
acaggugcagaacgugc

SEQ ID NO: 749805 - RNA, 17 nt, Artificial Sequence
  Synthetic
acaugugcagaacgugc

SEQ ID NO: 749806 - RNA, 17 nt, Artificial Sequence
  Synthetic
uucagggguacacgugc

SEQ ID NO: 749807 - RNA, 17 nt, Artificial Sequence
  Synthetic
aaauuagccgggcgugc

SEQ ID NO: 749808 - RNA, 17 nt, Artificial Sequence
  Synthetic
ucuuuguugaaaggugc

SEQ ID NO: 749809 - RNA, 17 nt, Artificial Sequence
  Synthetic
uaucuuagacaaggugc

SEQ ID NO: 749810 - RNA, 17 nt, Artificial Sequence
  Synthetic
augcagguagaaggugc

SEQ ID NO: 749811 - RNA, 17 nt, Artificial Sequence
  Synthetic
uacacuuuggaaggugc

SEQ ID NO: 749812 - RNA, 17 nt, Artificial Sequence
  Synthetic
uagcacauugaaggugc

SEQ ID NO: 749813 - RNA, 17 nt, Artificial Sequence
  Synthetic
ucuaccuccuaaggugc

SEQ ID NO: 749814 - RNA, 17 nt, Artificial Sequence
  Synthetic
caggaaacaacaggugc

SEQ ID NO: 749815 - RNA, 17 nt, Artificial Sequence
  Synthetic
caggaaacaucaggugc

SEQ ID NO: 749816 - RNA, 17 nt, Artificial Sequence
  Synthetic
uggcaaaguauaggugc

SEQ ID NO: 749817 - RNA, 17 nt, Artificial Sequence
  Synthetic
cucauugagcuaggugc

SEQ ID NO: 749818 - RNA, 17 nt, Artificial Sequence
  Synthetic
uacucaauaaacggugc

SEQ ID NO: 749819 - RNA, 17 nt, Artificial Sequence
  Synthetic
uauuuaauaaacggugc

SEQ ID NO: 749820 - RNA, 17 nt, Artificial Sequence
  Synthetic
ucauuuuacaagggugc

SEQ ID NO: 749821 - RNA, 17 nt, Artificial Sequence
  Synthetic
uuaaaucacaggggugc

SEQ ID NO: 749822 - RNA, 17 nt, Artificial Sequence
  Synthetic
aaugagcgccugggugc

SEQ ID NO: 749823 - RNA, 17 nt, Artificial Sequence
  Synthetic
agaugguuucugggugc

SEQ ID NO: 749824 - RNA, 17 nt, Artificial Sequence
  Synthetic
uauuuaauaaauggugc

SEQ ID NO: 749825 - RNA, 17 nt, Artificial Sequence
  Synthetic
uauucaguaaauggugc

SEQ ID NO: 749826 - RNA, 17 nt, Artificial Sequence
  Synthetic
ucuucaaccaauggugc

SEQ ID NO: 749827 - RNA, 17 nt, Artificial Sequence
  Synthetic
uucagaagagauggugc

SEQ ID NO: 749828 - RNA, 17 nt, Artificial Sequence
  Synthetic
acuuggagugauggugc

SEQ ID NO: 749829 - RNA, 17 nt, Artificial Sequence
  Synthetic
cugacauuagguggugc

SEQ ID NO: 749830 - RNA, 17 nt, Artificial Sequence
  Synthetic
ucauaaagugguggugc

SEQ ID NO: 749831 - RNA, 17 nt, Artificial Sequence
  Synthetic
cacucaugauguggugc

SEQ ID NO: 749832 - RNA, 17 nt, Artificial Sequence
  Synthetic
uccaguaacuuuggugc

SEQ ID NO: 749833 - RNA, 17 nt, Artificial Sequence
  Synthetic
uaauaaaacaaaugugc

SEQ ID NO: 749834 - RNA, 17 nt, Artificial Sequence
  Synthetic
acaugugcacaaugugc

SEQ ID NO: 749835 - RNA, 17 nt, Artificial Sequence
  Synthetic
uuggccucccaaugugc

SEQ ID NO: 749836 - RNA, 17 nt, Artificial Sequence
  Synthetic
uacaacauagaaugugc

SEQ ID NO: 749837 - RNA, 17 nt, Artificial Sequence
  Synthetic
cugugccuuuaaugugc

SEQ ID NO: 749838 - RNA, 17 nt, Artificial Sequence
  Synthetic
cagaaaauaacaugugc

SEQ ID NO: 749839 - RNA, 17 nt, Artificial Sequence
  Synthetic
ucuaggggcacaugugc

SEQ ID NO: 749840 - RNA, 17 nt, Artificial Sequence
  Synthetic
aaaaauggcacaugugc

SEQ ID NO: 749841 - RNA, 17 nt, Artificial Sequence
  Synthetic
uucaggaauacaugugc

SEQ ID NO: 749842 - RNA, 17 nt, Artificial Sequence
  Synthetic
uuaagggguacaugugc

SEQ ID NO: 749843 - RNA, 17 nt, Artificial Sequence
  Synthetic
uucagggguacaugugc

SEQ ID NO: 749844 - RNA, 17 nt, Artificial Sequence
  Synthetic
uuccgugguacaugugc

SEQ ID NO: 749845 - RNA, 17 nt, Artificial Sequence
  Synthetic
agcaccuacucaugugc

SEQ ID NO: 749846 - RNA, 17 nt, Artificial Sequence
  Synthetic
uggccucugagaugugc

SEQ ID NO: 749847 - RNA, 17 nt, Artificial Sequence
  Synthetic
agagccuuuagaugugc

SEQ ID NO: 749848 - RNA, 17 nt, Artificial Sequence
  Synthetic
aacuugagucgaugugc

SEQ ID NO: 749849 - RNA, 17 nt, Artificial Sequence
  Synthetic
acaugugcaggaugugc

SEQ ID NO: 749850 - RNA, 17 nt, Artificial Sequence
  Synthetic
cuuauauucugaugugc

SEQ ID NO: 749851 - RNA, 17 nt, Artificial Sequence
  Synthetic
uacggcaggugaugugc

SEQ ID NO: 749852 - RNA, 17 nt, Artificial Sequence
  Synthetic
aggacacgaauaugugc

SEQ ID NO: 749853 - RNA, 17 nt, Artificial Sequence
  Synthetic
cucagauuauuaugugc

SEQ ID NO: 749854 - RNA, 17 nt, Artificial Sequence
  Synthetic
uauuauauuuuaugugc

SEQ ID NO: 749855 - RNA, 17 nt, Artificial Sequence
  Synthetic
augagggugaacugugc

SEQ ID NO: 749856 - RNA, 17 nt, Artificial Sequence
  Synthetic
uaugcaaggcacugugc

SEQ ID NO: 749857 - RNA, 17 nt, Artificial Sequence
  Synthetic
aggagcaggcacugugc

SEQ ID NO: 749858 - RNA, 17 nt, Artificial Sequence
  Synthetic
aaaugauguaccugugc

SEQ ID NO: 749859 - RNA, 17 nt, Artificial Sequence
  Synthetic
acugaagguuccugugc

SEQ ID NO: 749860 - RNA, 17 nt, Artificial Sequence
  Synthetic
caagagaacagcugugc

SEQ ID NO: 749861 - RNA, 17 nt, Artificial Sequence
  Synthetic
acuucagacugcugugc

SEQ ID NO: 749862 - RNA, 17 nt, Artificial Sequence
  Synthetic
uagcucauuugcugugc

SEQ ID NO: 749863 - RNA, 17 nt, Artificial Sequence
  Synthetic
uguaaagugcucugugc

SEQ ID NO: 749864 - RNA, 17 nt, Artificial Sequence
  Synthetic
agaggcaagaagugugc

SEQ ID NO: 749865 - RNA, 17 nt, Artificial Sequence
  Synthetic
uuuguuaaacagugugc

SEQ ID NO: 749866 - RNA, 17 nt, Artificial Sequence
  Synthetic
ucaaaaccacagugugc

SEQ ID NO: 749867 - RNA, 17 nt, Artificial Sequence
  Synthetic
cuucacggacagugugc

SEQ ID NO: 749868 - RNA, 17 nt, Artificial Sequence
  Synthetic
auacgagcccagugugc

SEQ ID NO: 749869 - RNA, 17 nt, Artificial Sequence
  Synthetic
uucaggagcacgugugc

SEQ ID NO: 749870 - RNA, 17 nt, Artificial Sequence
  Synthetic
aauaaacauacgugugc

SEQ ID NO: 749871 - RNA, 17 nt, Artificial Sequence
  Synthetic
caggcaagagcgugugc

SEQ ID NO: 749872 - RNA, 17 nt, Artificial Sequence
  Synthetic
aaauuagccgggugugc

SEQ ID NO: 749873 - RNA, 17 nt, Artificial Sequence
  Synthetic
uauggccaguggugugc

SEQ ID NO: 749874 - RNA, 17 nt, Artificial Sequence
  Synthetic
acaugugcacauugugc

SEQ ID NO: 749875 - RNA, 17 nt, Artificial Sequence
  Synthetic
uguucuggacauugugc

SEQ ID NO: 749876 - RNA, 17 nt, Artificial Sequence
  Synthetic
uuuauuacguguugugc

SEQ ID NO: 749877 - RNA, 17 nt, Artificial Sequence
  Synthetic
cugcuuagaauuugugc

SEQ ID NO: 749878 - RNA, 17 nt, Artificial Sequence
  Synthetic
uuucaggcuuuuugugc

SEQ ID NO: 749879 - RNA, 17 nt, Artificial Sequence
  Synthetic
auggaaaaaaaaauugc

SEQ ID NO: 749880 - RNA, 17 nt, Artificial Sequence
  Synthetic
aggagaauaaaaauugc

SEQ ID NO: 749881 - RNA, 17 nt, Artificial Sequence
  Synthetic
uuagccucccaaauugc

SEQ ID NO: 749882 - RNA, 17 nt, Artificial Sequence
  Synthetic
ucggccucucaaauugc

SEQ ID NO: 749883 - RNA, 17 nt, Artificial Sequence
  Synthetic
uaugcuaacuaaauugc

SEQ ID NO: 749884 - RNA, 17 nt, Artificial Sequence
  Synthetic
ugaaaggcuuaaauugc

SEQ ID NO: 749885 - RNA, 17 nt, Artificial Sequence
  Synthetic
uguuaggaaacaauugc

SEQ ID NO: 749886 - RNA, 17 nt, Artificial Sequence
  Synthetic
uugguugugacaauugc

SEQ ID NO: 749887 - RNA, 17 nt, Artificial Sequence
  Synthetic
uaugugguuacaauugc

SEQ ID NO: 749888 - RNA, 17 nt, Artificial Sequence
  Synthetic
uccaagagugcaauugc

SEQ ID NO: 749889 - RNA, 17 nt, Artificial Sequence
  Synthetic
uuuggucacagaauugc

SEQ ID NO: 749890 - RNA, 17 nt, Artificial Sequence
  Synthetic
auaugaccaugaauugc

SEQ ID NO: 749891 - RNA, 17 nt, Artificial Sequence
  Synthetic
aacauguuaugaauugc

SEQ ID NO: 749892 - RNA, 17 nt, Artificial Sequence
  Synthetic
cuugaguuuauaauugc

SEQ ID NO: 749893 - RNA, 17 nt, Artificial Sequence
  Synthetic
agguauuaauuaauugc

SEQ ID NO: 749894 - RNA, 17 nt, Artificial Sequence
  Synthetic
cuauaaaauuuaauugc

SEQ ID NO: 749895 - RNA, 17 nt, Artificial Sequence
  Synthetic
aguauguuuaacauugc

SEQ ID NO: 749896 - RNA, 17 nt, Artificial Sequence
  Synthetic
cccaguaauggcauugc

SEQ ID NO: 749897 - RNA, 17 nt, Artificial Sequence
  Synthetic
uuacuguuguucauugc

SEQ ID NO: 749898 - RNA, 17 nt, Artificial Sequence
  Synthetic
cuuaggcauuucauugc

SEQ ID NO: 749899 - RNA, 17 nt, Artificial Sequence
  Synthetic
cauacuuguuucauugc

SEQ ID NO: 749900 - RNA, 17 nt, Artificial Sequence
  Synthetic
ccaaguaaugagauugc

SEQ ID NO: 749901 - RNA, 17 nt, Artificial Sequence
  Synthetic
uggcuggucucgauugc

SEQ ID NO: 749902 - RNA, 17 nt, Artificial Sequence
  Synthetic
cccagaaaugggauugc

SEQ ID NO: 749903 - RNA, 17 nt, Artificial Sequence
  Synthetic
accaauaaugggauugc

SEQ ID NO: 749904 - RNA, 17 nt, Artificial Sequence
  Synthetic
cccaauaaugggauugc

SEQ ID NO: 749905 - RNA, 17 nt, Artificial Sequence
  Synthetic
accaguaaugggauugc

SEQ ID NO: 749906 - RNA, 17 nt, Artificial Sequence
  Synthetic
uccaguaaugggauugc

SEQ ID NO: 749907 - RNA, 17 nt, Artificial Sequence
  Synthetic
ugcaguaaugggauugc

SEQ ID NO: 749908 - RNA, 17 nt, Artificial Sequence
  Synthetic
cucaguaaugggauugc

SEQ ID NO: 749909 - RNA, 17 nt, Artificial Sequence
  Synthetic
caaugugcugggauugc

SEQ ID NO: 749910 - RNA, 17 nt, Artificial Sequence
  Synthetic
cccggaagugggauugc

SEQ ID NO: 749911 - RNA, 17 nt, Artificial Sequence
  Synthetic
cccagcagugggauugc

SEQ ID NO: 749912 - RNA, 17 nt, Artificial Sequence
  Synthetic
cccaguagugggauugc

SEQ ID NO: 749913 - RNA, 17 nt, Artificial Sequence
  Synthetic
aacaaacacuggauugc

SEQ ID NO: 749914 - RNA, 17 nt, Artificial Sequence
  Synthetic
ucuagccucuugauugc

SEQ ID NO: 749915 - RNA, 17 nt, Artificial Sequence
  Synthetic
cauggcuauacuauugc

SEQ ID NO: 749916 - RNA, 17 nt, Artificial Sequence
  Synthetic
cuuuuagcugcuauugc

SEQ ID NO: 749917 - RNA, 17 nt, Artificial Sequence
  Synthetic
uuuuuccuuucuauugc

SEQ ID NO: 749918 - RNA, 17 nt, Artificial Sequence
  Synthetic
aauaguuuucguauugc

SEQ ID NO: 749919 - RNA, 17 nt, Artificial Sequence
  Synthetic
ugggaucaggguauugc

SEQ ID NO: 749920 - RNA, 17 nt, Artificial Sequence
  Synthetic
uuucugccuuguauugc

SEQ ID NO: 749921 - RNA, 17 nt, Artificial Sequence
  Synthetic
auauaagaguuuauugc

SEQ ID NO: 749922 - RNA, 17 nt, Artificial Sequence
  Synthetic
ugccugcuuuuuauugc

SEQ ID NO: 749923 - RNA, 17 nt, Artificial Sequence
  Synthetic
aaauuauacaaacuugc

SEQ ID NO: 749924 - RNA, 17 nt, Artificial Sequence
  Synthetic
caaagcagcaaacuugc

SEQ ID NO: 749925 - RNA, 17 nt, Artificial Sequence
  Synthetic
acaugugcacaacuugc

SEQ ID NO: 749926 - RNA, 17 nt, Artificial Sequence
  Synthetic
aagagggcugaacuugc

SEQ ID NO: 749927 - RNA, 17 nt, Artificial Sequence
  Synthetic
aucaccugguaacuugc

SEQ ID NO: 749928 - RNA, 17 nt, Artificial Sequence
  Synthetic
auuuauugaacacuugc

SEQ ID NO: 749929 - RNA, 17 nt, Artificial Sequence
  Synthetic
aaaauguagccacuugc

SEQ ID NO: 749930 - RNA, 17 nt, Artificial Sequence
  Synthetic
ccauauuuuucacuugc

SEQ ID NO: 749931 - RNA, 17 nt, Artificial Sequence
  Synthetic
ccgacuuccugacuugc

SEQ ID NO: 749932 - RNA, 17 nt, Artificial Sequence
  Synthetic
cugguucaaauacuugc

SEQ ID NO: 749933 - RNA, 17 nt, Artificial Sequence
  Synthetic
ugaaauggcauacuugc

SEQ ID NO: 749934 - RNA, 17 nt, Artificial Sequence
  Synthetic
cugccugcccaccuugc

SEQ ID NO: 749935 - RNA, 17 nt, Artificial Sequence
  Synthetic
uuccuugcccaccuugc

SEQ ID NO: 749936 - RNA, 17 nt, Artificial Sequence
  Synthetic
agauggaagacccuugc

SEQ ID NO: 749937 - RNA, 17 nt, Artificial Sequence
  Synthetic
ugaguauguacccuugc

SEQ ID NO: 749938 - RNA, 17 nt, Artificial Sequence
  Synthetic
cccaaagaggcccuugc

SEQ ID NO: 749939 - RNA, 17 nt, Artificial Sequence
  Synthetic
aggcccuuugcccuugc

SEQ ID NO: 749940 - RNA, 17 nt, Artificial Sequence
  Synthetic
ucuagcccuucccuugc

SEQ ID NO: 749941 - RNA, 17 nt, Artificial Sequence
  Synthetic
caguuuuguucccuugc

SEQ ID NO: 749942 - RNA, 17 nt, Artificial Sequence
  Synthetic
ucuggcauuucccuugc

SEQ ID NO: 749943 - RNA, 17 nt, Artificial Sequence
  Synthetic
uugagauaaagccuugc

SEQ ID NO: 749944 - RNA, 17 nt, Artificial Sequence
  Synthetic
caauccaaacuccuugc

SEQ ID NO: 749945 - RNA, 17 nt, Artificial Sequence
  Synthetic
caucuuuauguccuugc

SEQ ID NO: 749946 - RNA, 17 nt, Artificial Sequence
  Synthetic
cuuuuaauguuccuugc

SEQ ID NO: 749947 - RNA, 17 nt, Artificial Sequence
  Synthetic
ucuggauauuuccuugc

SEQ ID NO: 749948 - RNA, 17 nt, Artificial Sequence
  Synthetic
uauaucaaagagcuugc

SEQ ID NO: 749949 - RNA, 17 nt, Artificial Sequence
  Synthetic
agcuuaggggagcuugc

SEQ ID NO: 749950 - RNA, 17 nt, Artificial Sequence
  Synthetic
ccaugaauggagcuugc

SEQ ID NO: 749951 - RNA, 17 nt, Artificial Sequence
  Synthetic
augcaaaacaggcuugc

SEQ ID NO: 749952 - RNA, 17 nt, Artificial Sequence
  Synthetic
ugcagacacaggcuugc

SEQ ID NO: 749953 - RNA, 17 nt, Artificial Sequence
  Synthetic
aaauuagccaggcuugc

SEQ ID NO: 749954 - RNA, 17 nt, Artificial Sequence
  Synthetic
uaguccagccugcuugc

SEQ ID NO: 749955 - RNA, 17 nt, Artificial Sequence
  Synthetic
auccagcuucugcuugc

SEQ ID NO: 749956 - RNA, 17 nt, Artificial Sequence
  Synthetic
aucacacgggaucuugc

SEQ ID NO: 749957 - RNA, 17 nt, Artificial Sequence
  Synthetic
uuuucuaccuaucuugc

SEQ ID NO: 749958 - RNA, 17 nt, Artificial Sequence
  Synthetic
auacuuuucucucuugc

SEQ ID NO: 749959 - RNA, 17 nt, Artificial Sequence
  Synthetic
aggaaaaaaagucuugc

SEQ ID NO: 749960 - RNA, 17 nt, Artificial Sequence
  Synthetic
ccaguuaucagucuugc

SEQ ID NO: 749961 - RNA, 17 nt, Artificial Sequence
  Synthetic
cauuugcucagucuugc

SEQ ID NO: 749962 - RNA, 17 nt, Artificial Sequence
  Synthetic
uggagacagagucuugc

SEQ ID NO: 749963 - RNA, 17 nt, Artificial Sequence
  Synthetic
auaaugaauggucuugc

SEQ ID NO: 749964 - RNA, 17 nt, Artificial Sequence
  Synthetic
uuaggacuuugucuugc

SEQ ID NO: 749965 - RNA, 17 nt, Artificial Sequence
  Synthetic
accaugugucuucuugc

SEQ ID NO: 749966 - RNA, 17 nt, Artificial Sequence
  Synthetic
cucugacauguucuugc

SEQ ID NO: 749967 - RNA, 17 nt, Artificial Sequence
  Synthetic
aaaagcuaauuucuugc

SEQ ID NO: 749968 - RNA, 17 nt, Artificial Sequence
  Synthetic
acagcuaaguuucuugc

SEQ ID NO: 749969 - RNA, 17 nt, Artificial Sequence
  Synthetic
aaauucagcaaaguugc

SEQ ID NO: 749970 - RNA, 17 nt, Artificial Sequence
  Synthetic
cuagccuucaaaguugc

SEQ ID NO: 749971 - RNA, 17 nt, Artificial Sequence
  Synthetic
aaguuuaguaaaguugc

SEQ ID NO: 749972 - RNA, 17 nt, Artificial Sequence
  Synthetic
uucauucucccaguugc

SEQ ID NO: 749973 - RNA, 17 nt, Artificial Sequence
  Synthetic
aguuugcaugcaguugc

SEQ ID NO: 749974 - RNA, 17 nt, Artificial Sequence
  Synthetic
uuuccuauugcaguugc

SEQ ID NO: 749975 - RNA, 17 nt, Artificial Sequence
  Synthetic
ucaaccuccagaguugc

SEQ ID NO: 749976 - RNA, 17 nt, Artificial Sequence
  Synthetic
uuagccuucagaguugc

SEQ ID NO: 749977 - RNA, 17 nt, Artificial Sequence
  Synthetic
acucuuuacugaguugc

SEQ ID NO: 749978 - RNA, 17 nt, Artificial Sequence
  Synthetic
cugggaaauguaguugc

SEQ ID NO: 749979 - RNA, 17 nt, Artificial Sequence
  Synthetic
aacuucucagacguugc

SEQ ID NO: 749980 - RNA, 17 nt, Artificial Sequence
  Synthetic
cacuccuuuggcguugc

SEQ ID NO: 749981 - RNA, 17 nt, Artificial Sequence
  Synthetic
cccaggagugagguugc

SEQ ID NO: 749982 - RNA, 17 nt, Artificial Sequence
  Synthetic
uucccuugcuggguugc

SEQ ID NO: 749983 - RNA, 17 nt, Artificial Sequence
  Synthetic
aauucauuuuggguugc

SEQ ID NO: 749984 - RNA, 17 nt, Artificial Sequence
  Synthetic
ccuccuccugugguugc

SEQ ID NO: 749985 - RNA, 17 nt, Artificial Sequence
  Synthetic
uggucaaggaauguugc

SEQ ID NO: 749986 - RNA, 17 nt, Artificial Sequence
  Synthetic
uucucaguuaauguugc

SEQ ID NO: 749987 - RNA, 17 nt, Artificial Sequence
  Synthetic
uucucaggggauguugc

SEQ ID NO: 749988 - RNA, 17 nt, Artificial Sequence
  Synthetic
auacaguaugauguugc

SEQ ID NO: 749989 - RNA, 17 nt, Artificial Sequence
  Synthetic
ugaauuauauauguugc

SEQ ID NO: 749990 - RNA, 17 nt, Artificial Sequence
  Synthetic
ugauguggguauguugc

SEQ ID NO: 749991 - RNA, 17 nt, Artificial Sequence
  Synthetic
agugggaguuauguugc

SEQ ID NO: 749992 - RNA, 17 nt, Artificial Sequence
  Synthetic
acaauaaaaacuguugc

SEQ ID NO: 749993 - RNA, 17 nt, Artificial Sequence
  Synthetic
cucugauacacuguugc

SEQ ID NO: 749994 - RNA, 17 nt, Artificial Sequence
  Synthetic
uuuuuuuauacuguugc

SEQ ID NO: 749995 - RNA, 17 nt, Artificial Sequence
  Synthetic
ccagccugggcuguugc

SEQ ID NO: 749996 - RNA, 17 nt, Artificial Sequence
  Synthetic
acuuuuuauucuguugc

SEQ ID NO: 749997 - RNA, 17 nt, Artificial Sequence
  Synthetic
ugugucaguucuguugc

SEQ ID NO: 749998 - RNA, 17 nt, Artificial Sequence
  Synthetic
uugcagugaaguguugc

SEQ ID NO: 749999 - RNA, 17 nt, Artificial Sequence
  Synthetic
uugagugagaguguugc

SEQ ID NO: 750000 - RNA, 17 nt, Artificial Sequence
  Synthetic
acucuuggcuguguugc

SEQ ID NO: 750001 - RNA, 17 nt, Artificial Sequence
  Synthetic
uguuacccauuuguugc

SEQ ID NO: 750002 - RNA, 17 nt, Artificial Sequence
  Synthetic
uuuuaaugcaaauuugc

SEQ ID NO: 750003 - RNA, 17 nt, Artificial Sequence
  Synthetic
cacuguuagaaauuugc

SEQ ID NO: 750004 - RNA, 17 nt, Artificial Sequence
  Synthetic
ucacaucugaaauuugc

SEQ ID NO: 750005 - RNA, 17 nt, Artificial Sequence
  Synthetic
cacagcugggaauuugc

SEQ ID NO: 750006 - RNA, 17 nt, Artificial Sequence
  Synthetic
uacucacuugcauuugc

SEQ ID NO: 750007 - RNA, 17 nt, Artificial Sequence
  Synthetic
uuuacaaccagauuugc

SEQ ID NO: 750008 - RNA, 17 nt, Artificial Sequence
  Synthetic
aaaguacuuagauuugc

SEQ ID NO: 750009 - RNA, 17 nt, Artificial Sequence
  Synthetic
auauuuggcauauuugc

SEQ ID NO: 750010 - RNA, 17 nt, Artificial Sequence
  Synthetic
ugaauauugcuauuugc

SEQ ID NO: 750011 - RNA, 17 nt, Artificial Sequence
  Synthetic
ucacuacauuuauuugc

SEQ ID NO: 750012 - RNA, 17 nt, Artificial Sequence
  Synthetic
uguuguuuaaacuuugc

SEQ ID NO: 750013 - RNA, 17 nt, Artificial Sequence
  Synthetic
auugugcugaacuuugc

SEQ ID NO: 750014 - RNA, 17 nt, Artificial Sequence
  Synthetic
agacuaagauccuuugc

SEQ ID NO: 750015 - RNA, 17 nt, Artificial Sequence
  Synthetic
uuuugcuccuccuuugc

SEQ ID NO: 750016 - RNA, 17 nt, Artificial Sequence
  Synthetic
aacauuugguccuuugc

SEQ ID NO: 750017 - RNA, 17 nt, Artificial Sequence
  Synthetic
cuucugcuuuccuuugc

SEQ ID NO: 750018 - RNA, 17 nt, Artificial Sequence
  Synthetic
aauggacaaagcuuugc

SEQ ID NO: 750019 - RNA, 17 nt, Artificial Sequence
  Synthetic
aauauuauaggcuuugc

SEQ ID NO: 750020 - RNA, 17 nt, Artificial Sequence
  Synthetic
cggauccuaggcuuugc

SEQ ID NO: 750021 - RNA, 17 nt, Artificial Sequence
  Synthetic
aauguuuuaggcuuugc

SEQ ID NO: 750022 - RNA, 17 nt, Artificial Sequence
  Synthetic
ugcccuuguggcuuugc

SEQ ID NO: 750023 - RNA, 17 nt, Artificial Sequence
  Synthetic
uggcauauuggcuuugc

SEQ ID NO: 750024 - RNA, 17 nt, Artificial Sequence
  Synthetic
uucuuguggcucuuugc

SEQ ID NO: 750025 - RNA, 17 nt, Artificial Sequence
  Synthetic
auuucuaaguucuuugc

SEQ ID NO: 750026 - RNA, 17 nt, Artificial Sequence
  Synthetic
uauugguugagguuugc

SEQ ID NO: 750027 - RNA, 17 nt, Artificial Sequence
  Synthetic
caccccuguggguuugc

SEQ ID NO: 750028 - RNA, 17 nt, Artificial Sequence
  Synthetic
uguuaaaagugguuugc

SEQ ID NO: 750029 - RNA, 17 nt, Artificial Sequence
  Synthetic
cuggaacagugguuugc

SEQ ID NO: 750030 - RNA, 17 nt, Artificial Sequence
  Synthetic
uuuuuugauauguuugc

SEQ ID NO: 750031 - RNA, 17 nt, Artificial Sequence
  Synthetic
aguaagcauguguuugc

SEQ ID NO: 750032 - RNA, 17 nt, Artificial Sequence
  Synthetic
uuaaucacuguguuugc

SEQ ID NO: 750033 - RNA, 17 nt, Artificial Sequence
  Synthetic
aauaaaaaaaauuuugc

SEQ ID NO: 750034 - RNA, 17 nt, Artificial Sequence
  Synthetic
accuugacaaauuuugc

SEQ ID NO: 750035 - RNA, 17 nt, Artificial Sequence
  Synthetic
aguuuuaaucauuuugc

SEQ ID NO: 750036 - RNA, 17 nt, Artificial Sequence
  Synthetic
ugucuuuuauauuuugc

SEQ ID NO: 750037 - RNA, 17 nt, Artificial Sequence
  Synthetic
aacuuugauuauuuugc

SEQ ID NO: 750038 - RNA, 17 nt, Artificial Sequence
  Synthetic
ugccccauaacuuuugc

SEQ ID NO: 750039 - RNA, 17 nt, Artificial Sequence
  Synthetic
acaguacaggcuuuugc

SEQ ID NO: 750040 - RNA, 17 nt, Artificial Sequence
  Synthetic
agucucugugcuuuugc

SEQ ID NO: 750041 - RNA, 17 nt, Artificial Sequence
  Synthetic
ucaaauuuaucuuuugc

SEQ ID NO: 750042 - RNA, 17 nt, Artificial Sequence
  Synthetic
ucuuuaggagguuuugc

SEQ ID NO: 750043 - RNA, 17 nt, Artificial Sequence
  Synthetic
uuuagcuguuguuuugc

SEQ ID NO: 750044 - RNA, 17 nt, Artificial Sequence
  Synthetic
ucaauauuaauuuuugc

SEQ ID NO: 750045 - RNA, 17 nt, Artificial Sequence
  Synthetic
cacuauacuauuuuugc

SEQ ID NO: 750046 - RNA, 17 nt, Artificial Sequence
  Synthetic
ugaugaucuauuuuugc

SEQ ID NO: 750047 - RNA, 17 nt, Artificial Sequence
  Synthetic
aaguacucccuuuuugc

SEQ ID NO: 750048 - RNA, 17 nt, Artificial Sequence
  Synthetic
agucauaaucuuuuugc

SEQ ID NO: 750049 - RNA, 17 nt, Artificial Sequence
  Synthetic
acaaagagaaaaaaauc

SEQ ID NO: 750050 - RNA, 17 nt, Artificial Sequence
  Synthetic
acgcagagaaaaaaauc

SEQ ID NO: 750051 - RNA, 17 nt, Artificial Sequence
  Synthetic
auauuuagaaaaaaauc

SEQ ID NO: 750052 - RNA, 17 nt, Artificial Sequence
  Synthetic
aaaagagacaaaaaauc

SEQ ID NO: 750053 - RNA, 17 nt, Artificial Sequence
  Synthetic
uauaaauagaaaaaauc

SEQ ID NO: 750054 - RNA, 17 nt, Artificial Sequence
  Synthetic
cagcacacacaaaaauc

SEQ ID NO: 750055 - RNA, 17 nt, Artificial Sequence
  Synthetic
uucucagaauaaaaauc

SEQ ID NO: 750056 - RNA, 17 nt, Artificial Sequence
  Synthetic
agucuugaauaaaaauc

SEQ ID NO: 750057 - RNA, 17 nt, Artificial Sequence
  Synthetic
ccaucuaacuaaaaauc

SEQ ID NO: 750058 - RNA, 17 nt, Artificial Sequence
  Synthetic
uggccauguuaaaaauc

SEQ ID NO: 750059 - RNA, 17 nt, Artificial Sequence
  Synthetic
acacacacaccaaaauc

SEQ ID NO: 750060 - RNA, 17 nt, Artificial Sequence
  Synthetic
aaaggaaugucaaaauc

SEQ ID NO: 750061 - RNA, 17 nt, Artificial Sequence
  Synthetic
accaggaugucaaaauc

SEQ ID NO: 750062 - RNA, 17 nt, Artificial Sequence
  Synthetic
aaacuacuuucaaaauc

SEQ ID NO: 750063 - RNA, 17 nt, Artificial Sequence
  Synthetic
uuggaaaaaagaaaauc

SEQ ID NO: 750064 - RNA, 17 nt, Artificial Sequence
  Synthetic
auauggggaagaaaauc

SEQ ID NO: 750065 - RNA, 17 nt, Artificial Sequence
  Synthetic
ugaauuaucagaaaauc

SEQ ID NO: 750066 - RNA, 17 nt, Artificial Sequence
  Synthetic
uccaauucaugaaaauc

SEQ ID NO: 750067 - RNA, 17 nt, Artificial Sequence
  Synthetic
acauauccaauaaaauc

SEQ ID NO: 750068 - RNA, 17 nt, Artificial Sequence
  Synthetic
aauccuagaauaaaauc

SEQ ID NO: 750069 - RNA, 17 nt, Artificial Sequence
  Synthetic
aacuguauaauaaaauc

SEQ ID NO: 750070 - RNA, 17 nt, Artificial Sequence
  Synthetic
ucuucgucuauaaaauc

SEQ ID NO: 750071 - RNA, 17 nt, Artificial Sequence
  Synthetic
ucaucuggaguaaaauc

SEQ ID NO: 750072 - RNA, 17 nt, Artificial Sequence
  Synthetic
acucuguggguaaaauc

SEQ ID NO: 750073 - RNA, 17 nt, Artificial Sequence
  Synthetic
agacucagauuaaaauc

SEQ ID NO: 750074 - RNA, 17 nt, Artificial Sequence
  Synthetic
uuauaaaacuuaaaauc

SEQ ID NO: 750075 - RNA, 17 nt, Artificial Sequence
  Synthetic
uugcccauuuuaaaauc

SEQ ID NO: 750076 - RNA, 17 nt, Artificial Sequence
  Synthetic
uuauucucucacaaauc

SEQ ID NO: 750077 - RNA, 17 nt, Artificial Sequence
  Synthetic
uggaaaagcuacaaauc

SEQ ID NO: 750078 - RNA, 17 nt, Artificial Sequence
  Synthetic
ugugaagacuccaaauc

SEQ ID NO: 750079 - RNA, 17 nt, Artificial Sequence
  Synthetic
agcaauuaaagcaaauc

SEQ ID NO: 750080 - RNA, 17 nt, Artificial Sequence
  Synthetic
caaagagccagcaaauc

SEQ ID NO: 750081 - RNA, 17 nt, Artificial Sequence
  Synthetic
aacaacaguggcaaauc

SEQ ID NO: 750082 - RNA, 17 nt, Artificial Sequence
  Synthetic
uguggaauaaucaaauc

SEQ ID NO: 750083 - RNA, 17 nt, Artificial Sequence
  Synthetic
ugcucaaugaucaaauc

SEQ ID NO: 750084 - RNA, 17 nt, Artificial Sequence
  Synthetic
uguguaaugaucaaauc

SEQ ID NO: 750085 - RNA, 17 nt, Artificial Sequence
  Synthetic
ccagucguucucaaauc

SEQ ID NO: 750086 - RNA, 17 nt, Artificial Sequence
  Synthetic
cuuaaaagagucaaauc

SEQ ID NO: 750087 - RNA, 17 nt, Artificial Sequence
  Synthetic
ugacugauuuucaaauc

SEQ ID NO: 750088 - RNA, 17 nt, Artificial Sequence
  Synthetic
uaaaagaaaaagaaauc

SEQ ID NO: 750089 - RNA, 17 nt, Artificial Sequence
  Synthetic
ugggagagacagaaauc

SEQ ID NO: 750090 - RNA, 17 nt, Artificial Sequence
  Synthetic
auauaaauacagaaauc

SEQ ID NO: 750091 - RNA, 17 nt, Artificial Sequence
  Synthetic
cuaaauuuccagaaauc

SEQ ID NO: 750092 - RNA, 17 nt, Artificial Sequence
  Synthetic
ucuggacugcagaaauc

SEQ ID NO: 750093 - RNA, 17 nt, Artificial Sequence
  Synthetic
auagauagauagaaauc

SEQ ID NO: 750094 - RNA, 17 nt, Artificial Sequence
  Synthetic
aaaguauaguagaaauc

SEQ ID NO: 750095 - RNA, 17 nt, Artificial Sequence
  Synthetic
agagaagagaggaaauc

SEQ ID NO: 750096 - RNA, 17 nt, Artificial Sequence
  Synthetic
accagguuagggaaauc

SEQ ID NO: 750097 - RNA, 17 nt, Artificial Sequence
  Synthetic
uccauggcaaugaaauc

SEQ ID NO: 750098 - RNA, 17 nt, Artificial Sequence
  Synthetic
agauuacuacugaaauc

SEQ ID NO: 750099 - RNA, 17 nt, Artificial Sequence
  Synthetic
augagaacucugaaauc

SEQ ID NO: 750100 - RNA, 17 nt, Artificial Sequence
  Synthetic
caaguacuugugaaauc

SEQ ID NO: 750101 - RNA, 17 nt, Artificial Sequence
  Synthetic
accgagcaauugaaauc

SEQ ID NO: 750102 - RNA, 17 nt, Artificial Sequence
  Synthetic
caucaagauuugaaauc

SEQ ID NO: 750103 - RNA, 17 nt, Artificial Sequence
  Synthetic
uagaggacuuugaaauc

SEQ ID NO: 750104 - RNA, 17 nt, Artificial Sequence
  Synthetic
ucuaagucuuugaaauc

SEQ ID NO: 750105 - RNA, 17 nt, Artificial Sequence
  Synthetic
accagcauaaauaaauc

SEQ ID NO: 750106 - RNA, 17 nt, Artificial Sequence
  Synthetic
uaugaggucaauaaauc

SEQ ID NO: 750107 - RNA, 17 nt, Artificial Sequence
  Synthetic
uuaauccuucauaaauc

SEQ ID NO: 750108 - RNA, 17 nt, Artificial Sequence
  Synthetic
aauauuggggauaaauc

SEQ ID NO: 750109 - RNA, 17 nt, Artificial Sequence
  Synthetic
aaagucugauauaaauc

SEQ ID NO: 750110 - RNA, 17 nt, Artificial Sequence
  Synthetic
uucauuuucuauaaauc

SEQ ID NO: 750111 - RNA, 17 nt, Artificial Sequence
  Synthetic
uacaguuuuacuaaauc

SEQ ID NO: 750112 - RNA, 17 nt, Artificial Sequence
  Synthetic
uguuauuuaccuaaauc

SEQ ID NO: 750113 - RNA, 17 nt, Artificial Sequence
  Synthetic
uucaaaaaugcuaaauc

SEQ ID NO: 750114 - RNA, 17 nt, Artificial Sequence
  Synthetic
uuuuuauuugcuaaauc

SEQ ID NO: 750115 - RNA, 17 nt, Artificial Sequence
  Synthetic
acauccugcucuaaauc

SEQ ID NO: 750116 - RNA, 17 nt, Artificial Sequence
  Synthetic
auggguaauucuaaauc

SEQ ID NO: 750117 - RNA, 17 nt, Artificial Sequence
  Synthetic
agguucuuggguaaauc

SEQ ID NO: 750118 - RNA, 17 nt, Artificial Sequence
  Synthetic
uaagucugauguaaauc

SEQ ID NO: 750119 - RNA, 17 nt, Artificial Sequence
  Synthetic
cauucucugauuaaauc

SEQ ID NO: 750120 - RNA, 17 nt, Artificial Sequence
  Synthetic
uucacaguaguuaaauc

SEQ ID NO: 750121 - RNA, 17 nt, Artificial Sequence
  Synthetic
auuaguuagguuaaauc

SEQ ID NO: 750122 - RNA, 17 nt, Artificial Sequence
  Synthetic
caaguaguaaaacaauc

SEQ ID NO: 750123 - RNA, 17 nt, Artificial Sequence
  Synthetic
uuuguuuuaaaacaauc

SEQ ID NO: 750124 - RNA, 17 nt, Artificial Sequence
  Synthetic
auucaaauacaacaauc

SEQ ID NO: 750125 - RNA, 17 nt, Artificial Sequence
  Synthetic
uacaacuaucaacaauc

SEQ ID NO: 750126 - RNA, 17 nt, Artificial Sequence
  Synthetic
ugcuauggauaacaauc

SEQ ID NO: 750127 - RNA, 17 nt, Artificial Sequence
  Synthetic
ucacagacuccacaauc

SEQ ID NO: 750128 - RNA, 17 nt, Artificial Sequence
  Synthetic
aaaggcccuccacaauc

SEQ ID NO: 750129 - RNA, 17 nt, Artificial Sequence
  Synthetic
uuuaugauuccacaauc

SEQ ID NO: 750130 - RNA, 17 nt, Artificial Sequence
  Synthetic
aucaaaaaggcacaauc

SEQ ID NO: 750131 - RNA, 17 nt, Artificial Sequence
  Synthetic
uuguauguuucacaauc

SEQ ID NO: 750132 - RNA, 17 nt, Artificial Sequence
  Synthetic
uuuuggccaggacaauc

SEQ ID NO: 750133 - RNA, 17 nt, Artificial Sequence
  Synthetic
aaagaagcccuacaauc

SEQ ID NO: 750134 - RNA, 17 nt, Artificial Sequence
  Synthetic
auuucuggguuacaauc

SEQ ID NO: 750135 - RNA, 17 nt, Artificial Sequence
  Synthetic
uuauuuccuuuacaauc

SEQ ID NO: 750136 - RNA, 17 nt, Artificial Sequence
  Synthetic
ucucauguuuuacaauc

SEQ ID NO: 750137 - RNA, 17 nt, Artificial Sequence
  Synthetic
uguaaaacgcaccaauc

SEQ ID NO: 750138 - RNA, 17 nt, Artificial Sequence
  Synthetic
ugagaguuuuaccaauc

SEQ ID NO: 750139 - RNA, 17 nt, Artificial Sequence
  Synthetic
acuaaaaaaccccaauc

SEQ ID NO: 750140 - RNA, 17 nt, Artificial Sequence
  Synthetic
ucaguggguagccaauc

SEQ ID NO: 750141 - RNA, 17 nt, Artificial Sequence
  Synthetic
agacaaauuggccaauc

SEQ ID NO: 750142 - RNA, 17 nt, Artificial Sequence
  Synthetic
cauuguccauuccaauc

SEQ ID NO: 750143 - RNA, 17 nt, Artificial Sequence
  Synthetic
auuaaaaaacagcaauc

SEQ ID NO: 750144 - RNA, 17 nt, Artificial Sequence
  Synthetic
aagugaaaagagcaauc

SEQ ID NO: 750145 - RNA, 17 nt, Artificial Sequence
  Synthetic
uagaauagaaggcaauc

SEQ ID NO: 750146 - RNA, 17 nt, Artificial Sequence
  Synthetic
aaucuagagaggcaauc

SEQ ID NO: 750147 - RNA, 17 nt, Artificial Sequence
  Synthetic
uccuggccagggcaauc

SEQ ID NO: 750148 - RNA, 17 nt, Artificial Sequence
  Synthetic
uucuggccagggcaauc

SEQ ID NO: 750149 - RNA, 17 nt, Artificial Sequence
  Synthetic
aguggcgcagugcaauc

SEQ ID NO: 750150 - RNA, 17 nt, Artificial Sequence
  Synthetic
auagaugaauugcaauc

SEQ ID NO: 750151 - RNA, 17 nt, Artificial Sequence
  Synthetic
aaaaugcagaaucaauc

SEQ ID NO: 750152 - RNA, 17 nt, Artificial Sequence
  Synthetic
uuauaacaacaucaauc

SEQ ID NO: 750153 - RNA, 17 nt, Artificial Sequence
  Synthetic
cuaauaaugccucaauc

SEQ ID NO: 750154 - RNA, 17 nt, Artificial Sequence
  Synthetic
uucuccuuuggucaauc

SEQ ID NO: 750155 - RNA, 17 nt, Artificial Sequence
  Synthetic
uuuuuuuuuugucaauc

SEQ ID NO: 750156 - RNA, 17 nt, Artificial Sequence
  Synthetic
agagaagaauuucaauc

SEQ ID NO: 750157 - RNA, 17 nt, Artificial Sequence
  Synthetic
caaaagacauuucaauc

SEQ ID NO: 750158 - RNA, 17 nt, Artificial Sequence
  Synthetic
uaaugugaguuucaauc

SEQ ID NO: 750159 - RNA, 17 nt, Artificial Sequence
  Synthetic
aaaugacccaaagaauc

SEQ ID NO: 750160 - RNA, 17 nt, Artificial Sequence
  Synthetic
ucugagaucaaagaauc

SEQ ID NO: 750161 - RNA, 17 nt, Artificial Sequence
  Synthetic
uuccuuauacaagaauc

SEQ ID NO: 750162 - RNA, 17 nt, Artificial Sequence
  Synthetic
aacuuuagagaagaauc

SEQ ID NO: 750163 - RNA, 17 nt, Artificial Sequence
  Synthetic
aauacuagggaagaauc

SEQ ID NO: 750164 - RNA, 17 nt, Artificial Sequence
  Synthetic
cuaauaaaugaagaauc

SEQ ID NO: 750165 - RNA, 17 nt, Artificial Sequence
  Synthetic
agcaaauaaacagaauc

SEQ ID NO: 750166 - RNA, 17 nt, Artificial Sequence
  Synthetic
uguuuaguggcagaauc

SEQ ID NO: 750167 - RNA, 17 nt, Artificial Sequence
  Synthetic
cccauuuuggcagaauc

SEQ ID NO: 750168 - RNA, 17 nt, Artificial Sequence
  Synthetic
uucuguaaaucagaauc

SEQ ID NO: 750169 - RNA, 17 nt, Artificial Sequence
  Synthetic
auaaaugauucagaauc

SEQ ID NO: 750170 - RNA, 17 nt, Artificial Sequence
  Synthetic
aauacuuucagagaauc

SEQ ID NO: 750171 - RNA, 17 nt, Artificial Sequence
  Synthetic
ugaauaagaggagaauc

SEQ ID NO: 750172 - RNA, 17 nt, Artificial Sequence
  Synthetic
cucuuaaugggagaauc

SEQ ID NO: 750173 - RNA, 17 nt, Artificial Sequence
  Synthetic
aauauuacgugagaauc

SEQ ID NO: 750174 - RNA, 17 nt, Artificial Sequence
  Synthetic
cauauagggauagaauc

SEQ ID NO: 750175 - RNA, 17 nt, Artificial Sequence
  Synthetic
aaaccugugauagaauc

SEQ ID NO: 750176 - RNA, 17 nt, Artificial Sequence
  Synthetic
ucccuuauccuagaauc

SEQ ID NO: 750177 - RNA, 17 nt, Artificial Sequence
  Synthetic
cguauauauuuagaauc

SEQ ID NO: 750178 - RNA, 17 nt, Artificial Sequence
  Synthetic
uuggcucauuacgaauc

SEQ ID NO: 750179 - RNA, 17 nt, Artificial Sequence
  Synthetic
aacuugcuuuacgaauc

SEQ ID NO: 750180 - RNA, 17 nt, Artificial Sequence
  Synthetic
cuacugcuuugcgaauc

SEQ ID NO: 750181 - RNA, 17 nt, Artificial Sequence
  Synthetic
uugggagccuaggaauc

SEQ ID NO: 750182 - RNA, 17 nt, Artificial Sequence
  Synthetic
uucuuggcaauggaauc

SEQ ID NO: 750183 - RNA, 17 nt, Artificial Sequence
  Synthetic
ugaauauaacuggaauc

SEQ ID NO: 750184 - RNA, 17 nt, Artificial Sequence
  Synthetic
aucaaggggcuggaauc

SEQ ID NO: 750185 - RNA, 17 nt, Artificial Sequence
  Synthetic
aacuaaagguuggaauc

SEQ ID NO: 750186 - RNA, 17 nt, Artificial Sequence
  Synthetic
cacaaguugaaugaauc

SEQ ID NO: 750187 - RNA, 17 nt, Artificial Sequence
  Synthetic
aguaacccagaugaauc

SEQ ID NO: 750188 - RNA, 17 nt, Artificial Sequence
  Synthetic
agggacauggaugaauc

SEQ ID NO: 750189 - RNA, 17 nt, Artificial Sequence
  Synthetic
aacuuacuuuaugaauc

SEQ ID NO: 750190 - RNA, 17 nt, Artificial Sequence
  Synthetic
agcugauaaacugaauc

SEQ ID NO: 750191 - RNA, 17 nt, Artificial Sequence
  Synthetic
ccacaugccacugaauc

SEQ ID NO: 750192 - RNA, 17 nt, Artificial Sequence
  Synthetic
cuuguuguuccugaauc

SEQ ID NO: 750193 - RNA, 17 nt, Artificial Sequence
  Synthetic
acuucacaugcugaauc

SEQ ID NO: 750194 - RNA, 17 nt, Artificial Sequence
  Synthetic
agaugcagcucugaauc

SEQ ID NO: 750195 - RNA, 17 nt, Artificial Sequence
  Synthetic
uuaacaaauggugaauc

SEQ ID NO: 750196 - RNA, 17 nt, Artificial Sequence
  Synthetic
aaagcugauggugaauc

SEQ ID NO: 750197 - RNA, 17 nt, Artificial Sequence
  Synthetic
uugaaauuuugugaauc

SEQ ID NO: 750198 - RNA, 17 nt, Artificial Sequence
  Synthetic
aucauaacgauugaauc

SEQ ID NO: 750199 - RNA, 17 nt, Artificial Sequence
  Synthetic
agagaauagcuugaauc

SEQ ID NO: 750200 - RNA, 17 nt, Artificial Sequence
  Synthetic
uccucaucucuugaauc

SEQ ID NO: 750201 - RNA, 17 nt, Artificial Sequence
  Synthetic
cccagacauuuugaauc

SEQ ID NO: 750202 - RNA, 17 nt, Artificial Sequence
  Synthetic
aguucaguuuuugaauc

SEQ ID NO: 750203 - RNA, 17 nt, Artificial Sequence
  Synthetic
auuccuguaaaauaauc

SEQ ID NO: 750204 - RNA, 17 nt, Artificial Sequence
  Synthetic
acuuuauacaaauaauc

SEQ ID NO: 750205 - RNA, 17 nt, Artificial Sequence
  Synthetic
uaaauugaugaauaauc

SEQ ID NO: 750206 - RNA, 17 nt, Artificial Sequence
  Synthetic
uuuuguucgacauaauc

SEQ ID NO: 750207 - RNA, 17 nt, Artificial Sequence
  Synthetic
auucacagugcauaauc

SEQ ID NO: 750208 - RNA, 17 nt, Artificial Sequence
  Synthetic
auaauuacuagauaauc

SEQ ID NO: 750209 - RNA, 17 nt, Artificial Sequence
  Synthetic
uuucuucauugauaauc

SEQ ID NO: 750210 - RNA, 17 nt, Artificial Sequence
  Synthetic
aacuuugauguauaauc

SEQ ID NO: 750211 - RNA, 17 nt, Artificial Sequence
  Synthetic
ucaaagcauuuauaauc

SEQ ID NO: 750212 - RNA, 17 nt, Artificial Sequence
  Synthetic
cauaaaauaaacuaauc

SEQ ID NO: 750213 - RNA, 17 nt, Artificial Sequence
  Synthetic
aguucagaagacuaauc

SEQ ID NO: 750214 - RNA, 17 nt, Artificial Sequence
  Synthetic
ugguaccugaccuaauc

SEQ ID NO: 750215 - RNA, 17 nt, Artificial Sequence
  Synthetic
uaguugaaaugcuaauc

SEQ ID NO: 750216 - RNA, 17 nt, Artificial Sequence
  Synthetic
augugggaccucuaauc

SEQ ID NO: 750217 - RNA, 17 nt, Artificial Sequence
  Synthetic
acugucccagucuaauc

SEQ ID NO: 750218 - RNA, 17 nt, Artificial Sequence
  Synthetic
uaugguaauuucuaauc

SEQ ID NO: 750219 - RNA, 17 nt, Artificial Sequence
  Synthetic
cuuauuccuuucuaauc

SEQ ID NO: 750220 - RNA, 17 nt, Artificial Sequence
  Synthetic
cuuguauguuucuaauc

SEQ ID NO: 750221 - RNA, 17 nt, Artificial Sequence
  Synthetic
agaauacagaaguaauc

SEQ ID NO: 750222 - RNA, 17 nt, Artificial Sequence
  Synthetic
uugaaugaacaguaauc

SEQ ID NO: 750223 - RNA, 17 nt, Artificial Sequence
  Synthetic
aauuuuguuuaguaauc

SEQ ID NO: 750224 - RNA, 17 nt, Artificial Sequence
  Synthetic
uugccuugaagguaauc

SEQ ID NO: 750225 - RNA, 17 nt, Artificial Sequence
  Synthetic
cuuuuaaggagguaauc

SEQ ID NO: 750226 - RNA, 17 nt, Artificial Sequence
  Synthetic
aaacauacaugguaauc

SEQ ID NO: 750227 - RNA, 17 nt, Artificial Sequence
  Synthetic
auaauaguuugguaauc

SEQ ID NO: 750228 - RNA, 17 nt, Artificial Sequence
  Synthetic
caucuagaacuguaauc

SEQ ID NO: 750229 - RNA, 17 nt, Artificial Sequence
  Synthetic
agucuuuuuguguaauc

SEQ ID NO: 750230 - RNA, 17 nt, Artificial Sequence
  Synthetic
ucuugcugucauuaauc

SEQ ID NO: 750231 - RNA, 17 nt, Artificial Sequence
  Synthetic
caucuggaggauuaauc

SEQ ID NO: 750232 - RNA, 17 nt, Artificial Sequence
  Synthetic
uacaauaccacuuaauc

SEQ ID NO: 750233 - RNA, 17 nt, Artificial Sequence
  Synthetic
uuuccucuuccuuaauc

SEQ ID NO: 750234 - RNA, 17 nt, Artificial Sequence
  Synthetic
aaauauuuauuuuaauc

SEQ ID NO: 750235 - RNA, 17 nt, Artificial Sequence
  Synthetic
aggaguuccuuuuaauc

SEQ ID NO: 750236 - RNA, 17 nt, Artificial Sequence
  Synthetic
aaguuuuuaaaaacauc

SEQ ID NO: 750237 - RNA, 17 nt, Artificial Sequence
  Synthetic
ucauguuguaaaacauc

SEQ ID NO: 750238 - RNA, 17 nt, Artificial Sequence
  Synthetic
uuaugagaacaaacauc

SEQ ID NO: 750239 - RNA, 17 nt, Artificial Sequence
  Synthetic
uguccuagagaaacauc

SEQ ID NO: 750240 - RNA, 17 nt, Artificial Sequence
  Synthetic
aaaagucaggaaacauc

SEQ ID NO: 750241 - RNA, 17 nt, Artificial Sequence
  Synthetic
uauuaagaggaaacauc

SEQ ID NO: 750242 - RNA, 17 nt, Artificial Sequence
  Synthetic
cccaggguauaaacauc

SEQ ID NO: 750243 - RNA, 17 nt, Artificial Sequence
  Synthetic
ugaaucacuuaaacauc

SEQ ID NO: 750244 - RNA, 17 nt, Artificial Sequence
  Synthetic
cugauccuuuaaacauc

SEQ ID NO: 750245 - RNA, 17 nt, Artificial Sequence
  Synthetic
aacccucccccaacauc

SEQ ID NO: 750246 - RNA, 17 nt, Artificial Sequence
  Synthetic
uagcuacuggcaacauc

SEQ ID NO: 750247 - RNA, 17 nt, Artificial Sequence
  Synthetic
cuagaaauaagaacauc

SEQ ID NO: 750248 - RNA, 17 nt, Artificial Sequence
  Synthetic
caacuccucugaacauc

SEQ ID NO: 750249 - RNA, 17 nt, Artificial Sequence
  Synthetic
ucaauaugaauaacauc

SEQ ID NO: 750250 - RNA, 17 nt, Artificial Sequence
  Synthetic
ugcaauuuaauaacauc

SEQ ID NO: 750251 - RNA, 17 nt, Artificial Sequence
  Synthetic
uaccagguucuaacauc

SEQ ID NO: 750252 - RNA, 17 nt, Artificial Sequence
  Synthetic
uuugggagaguaacauc

SEQ ID NO: 750253 - RNA, 17 nt, Artificial Sequence
  Synthetic
aaaggaaaaaacacauc

SEQ ID NO: 750254 - RNA, 17 nt, Artificial Sequence
  Synthetic
acaacucugaacacauc

SEQ ID NO: 750255 - RNA, 17 nt, Artificial Sequence
  Synthetic
cuaauuaaagacacauc

SEQ ID NO: 750256 - RNA, 17 nt, Artificial Sequence
  Synthetic
acauugagaaccacauc

SEQ ID NO: 750257 - RNA, 17 nt, Artificial Sequence
  Synthetic
augcuuaacaccacauc

SEQ ID NO: 750258 - RNA, 17 nt, Artificial Sequence
  Synthetic
aaccggggccccacauc

SEQ ID NO: 750259 - RNA, 17 nt, Artificial Sequence
  Synthetic
auuuuuauggccacauc

SEQ ID NO: 750260 - RNA, 17 nt, Artificial Sequence
  Synthetic
ugaaauacugccacauc

SEQ ID NO: 750261 - RNA, 17 nt, Artificial Sequence
  Synthetic
agaauauuugccacauc

SEQ ID NO: 750262 - RNA, 17 nt, Artificial Sequence
  Synthetic
aaaaucucuuccacauc

SEQ ID NO: 750263 - RNA, 17 nt, Artificial Sequence
  Synthetic
uuuaucuucagcacauc

SEQ ID NO: 750264 - RNA, 17 nt, Artificial Sequence
  Synthetic
uuauuuacaaucacauc

SEQ ID NO: 750265 - RNA, 17 nt, Artificial Sequence
  Synthetic
uguguaauaaucacauc

SEQ ID NO: 750266 - RNA, 17 nt, Artificial Sequence
  Synthetic
uuuuaaaagaucacauc

SEQ ID NO: 750267 - RNA, 17 nt, Artificial Sequence
  Synthetic
cuguguuuuaucacauc

SEQ ID NO: 750268 - RNA, 17 nt, Artificial Sequence
  Synthetic
uuguauuacgucacauc

SEQ ID NO: 750269 - RNA, 17 nt, Artificial Sequence
  Synthetic
ucaaaaagagagacauc

SEQ ID NO: 750270 - RNA, 17 nt, Artificial Sequence
  Synthetic
ugcauuucauagacauc

SEQ ID NO: 750271 - RNA, 17 nt, Artificial Sequence
  Synthetic
auccuauucuagacauc

SEQ ID NO: 750272 - RNA, 17 nt, Artificial Sequence
  Synthetic
aagaaucauaggacauc

SEQ ID NO: 750273 - RNA, 17 nt, Artificial Sequence
  Synthetic
caggugcccuggacauc

SEQ ID NO: 750274 - RNA, 17 nt, Artificial Sequence
  Synthetic
aucccucccaugacauc

SEQ ID NO: 750275 - RNA, 17 nt, Artificial Sequence
  Synthetic
aaauaccgaaauacauc

SEQ ID NO: 750276 - RNA, 17 nt, Artificial Sequence
  Synthetic
uggagcuucaauacauc

SEQ ID NO: 750277 - RNA, 17 nt, Artificial Sequence
  Synthetic
ucuccuccugauacauc

SEQ ID NO: 750278 - RNA, 17 nt, Artificial Sequence
  Synthetic
ucuugguuuacuacauc

SEQ ID NO: 750279 - RNA, 17 nt, Artificial Sequence
  Synthetic
uauauuugaccuacauc

SEQ ID NO: 750280 - RNA, 17 nt, Artificial Sequence
  Synthetic
aggaaauaaaguacauc

SEQ ID NO: 750281 - RNA, 17 nt, Artificial Sequence
  Synthetic
uaaggcuauaaaccauc

SEQ ID NO: 750282 - RNA, 17 nt, Artificial Sequence
  Synthetic
cagaaaccagaaccauc

SEQ ID NO: 750283 - RNA, 17 nt, Artificial Sequence
  Synthetic
agacuucgugaaccauc

SEQ ID NO: 750284 - RNA, 17 nt, Artificial Sequence
  Synthetic
ucuuccucauaaccauc

SEQ ID NO: 750285 - RNA, 17 nt, Artificial Sequence
  Synthetic
aucuaccacccaccauc

SEQ ID NO: 750286 - RNA, 17 nt, Artificial Sequence
  Synthetic
caggagaugucaccauc

SEQ ID NO: 750287 - RNA, 17 nt, Artificial Sequence
  Synthetic
aaguugauuucaccauc

SEQ ID NO: 750288 - RNA, 17 nt, Artificial Sequence
  Synthetic
ccuugaagaagaccauc

SEQ ID NO: 750289 - RNA, 17 nt, Artificial Sequence
  Synthetic
aagagaucgagaccauc

SEQ ID NO: 750290 - RNA, 17 nt, Artificial Sequence
  Synthetic
aucuauuaaauaccauc

SEQ ID NO: 750291 - RNA, 17 nt, Artificial Sequence
  Synthetic
cuaaaacauuuaccauc

SEQ ID NO: 750292 - RNA, 17 nt, Artificial Sequence
  Synthetic
aguuggaaagacccauc

SEQ ID NO: 750293 - RNA, 17 nt, Artificial Sequence
  Synthetic
aguuaaaucaucccauc

SEQ ID NO: 750294 - RNA, 17 nt, Artificial Sequence
  Synthetic
agcuagauggucccauc

SEQ ID NO: 750295 - RNA, 17 nt, Artificial Sequence
  Synthetic
ucucccaugaagccauc

SEQ ID NO: 750296 - RNA, 17 nt, Artificial Sequence
  Synthetic
ucagcagugcagccauc

SEQ ID NO: 750297 - RNA, 17 nt, Artificial Sequence
  Synthetic
ucgagaaagaggccauc

SEQ ID NO: 750298 - RNA, 17 nt, Artificial Sequence
  Synthetic
aaaugcaugaugccauc

SEQ ID NO: 750299 - RNA, 17 nt, Artificial Sequence
  Synthetic
uuucaaggacugccauc

SEQ ID NO: 750300 - RNA, 17 nt, Artificial Sequence
  Synthetic
uacauuuuauugccauc

SEQ ID NO: 750301 - RNA, 17 nt, Artificial Sequence
  Synthetic
ucagcugugaauccauc

SEQ ID NO: 750302 - RNA, 17 nt, Artificial Sequence
  Synthetic
ucggcugugaauccauc

SEQ ID NO: 750303 - RNA, 17 nt, Artificial Sequence
  Synthetic
uagcugggccauccauc

SEQ ID NO: 750304 - RNA, 17 nt, Artificial Sequence
  Synthetic
uucuucuauacuccauc

SEQ ID NO: 750305 - RNA, 17 nt, Artificial Sequence
  Synthetic
ugcuaucacccuccauc

SEQ ID NO: 750306 - RNA, 17 nt, Artificial Sequence
  Synthetic
cagaaauaaucuccauc

SEQ ID NO: 750307 - RNA, 17 nt, Artificial Sequence
  Synthetic
aaccaaauuucuccauc

SEQ ID NO: 750308 - RNA, 17 nt, Artificial Sequence
  Synthetic
augcuguuuucuccauc

SEQ ID NO: 750309 - RNA, 17 nt, Artificial Sequence
  Synthetic
ugaaacaaaaguccauc

SEQ ID NO: 750310 - RNA, 17 nt, Artificial Sequence
  Synthetic
aaggacuuaaguccauc

SEQ ID NO: 750311 - RNA, 17 nt, Artificial Sequence
  Synthetic
agcucuuaggguccauc

SEQ ID NO: 750312 - RNA, 17 nt, Artificial Sequence
  Synthetic
ucccaguuuuguccauc

SEQ ID NO: 750313 - RNA, 17 nt, Artificial Sequence
  Synthetic
cauugaguucuuccauc

SEQ ID NO: 750314 - RNA, 17 nt, Artificial Sequence
  Synthetic
auggugugaguuccauc

SEQ ID NO: 750315 - RNA, 17 nt, Artificial Sequence
  Synthetic
cuuguuuuuuuuccauc

SEQ ID NO: 750316 - RNA, 17 nt, Artificial Sequence
  Synthetic
acgggcauugaagcauc

SEQ ID NO: 750317 - RNA, 17 nt, Artificial Sequence
  Synthetic
uuuuguaaauaagcauc

SEQ ID NO: 750318 - RNA, 17 nt, Artificial Sequence
  Synthetic
augguuuuauaagcauc

SEQ ID NO: 750319 - RNA, 17 nt, Artificial Sequence
  Synthetic
uuucuuaaaacagcauc

SEQ ID NO: 750320 - RNA, 17 nt, Artificial Sequence
  Synthetic
acaaccucaccagcauc

SEQ ID NO: 750321 - RNA, 17 nt, Artificial Sequence
  Synthetic
cuacccuucccagcauc

SEQ ID NO: 750322 - RNA, 17 nt, Artificial Sequence
  Synthetic
uaaaaugccagagcauc

SEQ ID NO: 750323 - RNA, 17 nt, Artificial Sequence
  Synthetic
auugugaaaauagcauc

SEQ ID NO: 750324 - RNA, 17 nt, Artificial Sequence
  Synthetic
acauccuugcuagcauc

SEQ ID NO: 750325 - RNA, 17 nt, Artificial Sequence
  Synthetic
aucuuuuaaguagcauc

SEQ ID NO: 750326 - RNA, 17 nt, Artificial Sequence
  Synthetic
agcaggaagguagcauc

SEQ ID NO: 750327 - RNA, 17 nt, Artificial Sequence
  Synthetic
ucuagcaaucccgcauc

SEQ ID NO: 750328 - RNA, 17 nt, Artificial Sequence
  Synthetic
ccacugugugcggcauc

SEQ ID NO: 750329 - RNA, 17 nt, Artificial Sequence
  Synthetic
agaugauuuagggcauc

SEQ ID NO: 750330 - RNA, 17 nt, Artificial Sequence
  Synthetic
uuuuccauaugggcauc

SEQ ID NO: 750331 - RNA, 17 nt, Artificial Sequence
  Synthetic
auuuucuuaauggcauc

SEQ ID NO: 750332 - RNA, 17 nt, Artificial Sequence
  Synthetic
auuuucuucauggcauc

SEQ ID NO: 750333 - RNA, 17 nt, Artificial Sequence
  Synthetic
ugaugcucuguggcauc

SEQ ID NO: 750334 - RNA, 17 nt, Artificial Sequence
  Synthetic
cuuggggaaaaugcauc

SEQ ID NO: 750335 - RNA, 17 nt, Artificial Sequence
  Synthetic
cagaagaacuaugcauc

SEQ ID NO: 750336 - RNA, 17 nt, Artificial Sequence
  Synthetic
uggaaaguuucugcauc

SEQ ID NO: 750337 - RNA, 17 nt, Artificial Sequence
  Synthetic
cgaugaaaaaaaucauc

SEQ ID NO: 750338 - RNA, 17 nt, Artificial Sequence
  Synthetic
cacugugcaaaaucauc

SEQ ID NO: 750339 - RNA, 17 nt, Artificial Sequence
  Synthetic
uauuccaugaaaucauc

SEQ ID NO: 750340 - RNA, 17 nt, Artificial Sequence
  Synthetic
caacaucgucaaucauc

SEQ ID NO: 750341 - RNA, 17 nt, Artificial Sequence
  Synthetic
caccuuacagaaucauc

SEQ ID NO: 750342 - RNA, 17 nt, Artificial Sequence
  Synthetic
auauaugcauaaucauc

SEQ ID NO: 750343 - RNA, 17 nt, Artificial Sequence
  Synthetic
aauguugccacaucauc

SEQ ID NO: 750344 - RNA, 17 nt, Artificial Sequence
  Synthetic
ucaaaauugacaucauc

SEQ ID NO: 750345 - RNA, 17 nt, Artificial Sequence
  Synthetic
uuucugucaccaucauc

SEQ ID NO: 750346 - RNA, 17 nt, Artificial Sequence
  Synthetic
uguauucuuccaucauc

SEQ ID NO: 750347 - RNA, 17 nt, Artificial Sequence
  Synthetic
caccuuucagcaucauc

SEQ ID NO: 750348 - RNA, 17 nt, Artificial Sequence
  Synthetic
uuacucugaagaucauc

SEQ ID NO: 750349 - RNA, 17 nt, Artificial Sequence
  Synthetic
uugaaaaacuacucauc

SEQ ID NO: 750350 - RNA, 17 nt, Artificial Sequence
  Synthetic
uuucuuggaagcucauc

SEQ ID NO: 750351 - RNA, 17 nt, Artificial Sequence
  Synthetic
ugguagauuagcucauc

SEQ ID NO: 750352 - RNA, 17 nt, Artificial Sequence
  Synthetic
uauuauugucucucauc

SEQ ID NO: 750353 - RNA, 17 nt, Artificial Sequence
  Synthetic
cuagaaguagucucauc

SEQ ID NO: 750354 - RNA, 17 nt, Artificial Sequence
  Synthetic
uucaaaaaguucucauc

SEQ ID NO: 750355 - RNA, 17 nt, Artificial Sequence
  Synthetic
aauuuauuuuucucauc

SEQ ID NO: 750356 - RNA, 17 nt, Artificial Sequence
  Synthetic
cagcaucacuagucauc

SEQ ID NO: 750357 - RNA, 17 nt, Artificial Sequence
  Synthetic
uuacauggcuagucauc

SEQ ID NO: 750358 - RNA, 17 nt, Artificial Sequence
  Synthetic
cuucagagcccgucauc

SEQ ID NO: 750359 - RNA, 17 nt, Artificial Sequence
  Synthetic
ucuuagauguggucauc

SEQ ID NO: 750360 - RNA, 17 nt, Artificial Sequence
  Synthetic
agaggaguuuggucauc

SEQ ID NO: 750361 - RNA, 17 nt, Artificial Sequence
  Synthetic
uuguguugcaugucauc

SEQ ID NO: 750362 - RNA, 17 nt, Artificial Sequence
  Synthetic
aaacuuccucugucauc

SEQ ID NO: 750363 - RNA, 17 nt, Artificial Sequence
  Synthetic
agccuuuaggugucauc

SEQ ID NO: 750364 - RNA, 17 nt, Artificial Sequence
  Synthetic
ccuugcaguuugucauc

SEQ ID NO: 750365 - RNA, 17 nt, Artificial Sequence
  Synthetic
caauuuggaaauucauc

SEQ ID NO: 750366 - RNA, 17 nt, Artificial Sequence
  Synthetic
aucaacuguaauucauc

SEQ ID NO: 750367 - RNA, 17 nt, Artificial Sequence
  Synthetic
ucugcuuguacuucauc

SEQ ID NO: 750368 - RNA, 17 nt, Artificial Sequence
  Synthetic
cccagagcuccuucauc

SEQ ID NO: 750369 - RNA, 17 nt, Artificial Sequence
  Synthetic
uaagucauuaguucauc

SEQ ID NO: 750370 - RNA, 17 nt, Artificial Sequence
  Synthetic
agaaaaccagguucauc

SEQ ID NO: 750371 - RNA, 17 nt, Artificial Sequence
  Synthetic
uugcaucgauguucauc

SEQ ID NO: 750372 - RNA, 17 nt, Artificial Sequence
  Synthetic
ucgcauugauguucauc

SEQ ID NO: 750373 - RNA, 17 nt, Artificial Sequence
  Synthetic
ucuauuugcauuucauc

SEQ ID NO: 750374 - RNA, 17 nt, Artificial Sequence
  Synthetic
uuuauuaugguuucauc

SEQ ID NO: 750375 - RNA, 17 nt, Artificial Sequence
  Synthetic
aacuuauuuguuucauc

SEQ ID NO: 750376 - RNA, 17 nt, Artificial Sequence
  Synthetic
cauguauuuuuuucauc

SEQ ID NO: 750377 - RNA, 17 nt, Artificial Sequence
  Synthetic
uguuuuuuuuuuucauc

SEQ ID NO: 750378 - RNA, 17 nt, Artificial Sequence
  Synthetic
auaaugaaaaaaagauc

SEQ ID NO: 750379 - RNA, 17 nt, Artificial Sequence
  Synthetic
agguuuggaaaaagauc

SEQ ID NO: 750380 - RNA, 17 nt, Artificial Sequence
  Synthetic
uggaaaauaaaaagauc

SEQ ID NO: 750381 - RNA, 17 nt, Artificial Sequence
  Synthetic
cuauugcagaaaagauc

SEQ ID NO: 750382 - RNA, 17 nt, Artificial Sequence
  Synthetic
auuacuaauaaaagauc

SEQ ID NO: 750383 - RNA, 17 nt, Artificial Sequence
  Synthetic
uggcauauccaaagauc

SEQ ID NO: 750384 - RNA, 17 nt, Artificial Sequence
  Synthetic
uaacucauucaaagauc

SEQ ID NO: 750385 - RNA, 17 nt, Artificial Sequence
  Synthetic
uuuuaaggggaaagauc

SEQ ID NO: 750386 - RNA, 17 nt, Artificial Sequence
  Synthetic
uuaacuucuuaaagauc

SEQ ID NO: 750387 - RNA, 17 nt, Artificial Sequence
  Synthetic
cuggaauguuaaagauc

SEQ ID NO: 750388 - RNA, 17 nt, Artificial Sequence
  Synthetic
uauauuugcacaagauc

SEQ ID NO: 750389 - RNA, 17 nt, Artificial Sequence
  Synthetic
ccucuauuuacaagauc

SEQ ID NO: 750390 - RNA, 17 nt, Artificial Sequence
  Synthetic
ugcagugagccaagauc

SEQ ID NO: 750391 - RNA, 17 nt, Artificial Sequence
  Synthetic
aguggagggagaagauc

SEQ ID NO: 750392 - RNA, 17 nt, Artificial Sequence
  Synthetic
uuuucuuagggaagauc

SEQ ID NO: 750393 - RNA, 17 nt, Artificial Sequence
  Synthetic
augaguaugugaagauc

SEQ ID NO: 750394 - RNA, 17 nt, Artificial Sequence
  Synthetic
ugcuuuccccuaagauc

SEQ ID NO: 750395 - RNA, 17 nt, Artificial Sequence
  Synthetic
acucuaauauuaagauc

SEQ ID NO: 750396 - RNA, 17 nt, Artificial Sequence
  Synthetic
cugaaagccuccagauc

SEQ ID NO: 750397 - RNA, 17 nt, Artificial Sequence
  Synthetic
uuugaagaaagcagauc

SEQ ID NO: 750398 - RNA, 17 nt, Artificial Sequence
  Synthetic
accuuucuaugcagauc

SEQ ID NO: 750399 - RNA, 17 nt, Artificial Sequence
  Synthetic
uguauagugaucagauc

SEQ ID NO: 750400 - RNA, 17 nt, Artificial Sequence
  Synthetic
aaguacacagucagauc

SEQ ID NO: 750401 - RNA, 17 nt, Artificial Sequence
  Synthetic
uaaucuauguucagauc

SEQ ID NO: 750402 - RNA, 17 nt, Artificial Sequence
  Synthetic
uaauaaaucaagagauc

SEQ ID NO: 750403 - RNA, 17 nt, Artificial Sequence
  Synthetic
uuaaauuugaagagauc

SEQ ID NO: 750404 - RNA, 17 nt, Artificial Sequence
  Synthetic
ucuuauugccagagauc

SEQ ID NO: 750405 - RNA, 17 nt, Artificial Sequence
  Synthetic
agaugaagggagagauc

SEQ ID NO: 750406 - RNA, 17 nt, Artificial Sequence
  Synthetic
uauacuugugagagauc

SEQ ID NO: 750407 - RNA, 17 nt, Artificial Sequence
  Synthetic
uauuuuuaguagagauc

SEQ ID NO: 750408 - RNA, 17 nt, Artificial Sequence
  Synthetic
aggcagaucacgagauc

SEQ ID NO: 750409 - RNA, 17 nt, Artificial Sequence
  Synthetic
uaaaauaccaggagauc

SEQ ID NO: 750410 - RNA, 17 nt, Artificial Sequence
  Synthetic
aaucuaagcaggagauc

SEQ ID NO: 750411 - RNA, 17 nt, Artificial Sequence
  Synthetic
ugaaggugcaggagauc

SEQ ID NO: 750412 - RNA, 17 nt, Artificial Sequence
  Synthetic
cacaaggucaggagauc

SEQ ID NO: 750413 - RNA, 17 nt, Artificial Sequence
  Synthetic
cuuagcugagggagauc

SEQ ID NO: 750414 - RNA, 17 nt, Artificial Sequence
  Synthetic
ugaguuuucaugagauc

SEQ ID NO: 750415 - RNA, 17 nt, Artificial Sequence
  Synthetic
aguuuucaagugagauc

SEQ ID NO: 750416 - RNA, 17 nt, Artificial Sequence
  Synthetic
auaauauuaaauagauc

SEQ ID NO: 750417 - RNA, 17 nt, Artificial Sequence
  Synthetic
acugaugucuauagauc

SEQ ID NO: 750418 - RNA, 17 nt, Artificial Sequence
  Synthetic
aaauuaagcccuagauc

SEQ ID NO: 750419 - RNA, 17 nt, Artificial Sequence
  Synthetic
auuacaaaaaguagauc

SEQ ID NO: 750420 - RNA, 17 nt, Artificial Sequence
  Synthetic
uucugauucaguagauc

SEQ ID NO: 750421 - RNA, 17 nt, Artificial Sequence
  Synthetic
auaagcagagguagauc

SEQ ID NO: 750422 - RNA, 17 nt, Artificial Sequence
  Synthetic
uaucuggaacuuagauc

SEQ ID NO: 750423 - RNA, 17 nt, Artificial Sequence
  Synthetic
uguagagcccuuagauc

SEQ ID NO: 750424 - RNA, 17 nt, Artificial Sequence
  Synthetic
uuuugaaaauuuagauc

SEQ ID NO: 750425 - RNA, 17 nt, Artificial Sequence
  Synthetic
uucuggccagggcgauc

SEQ ID NO: 750426 - RNA, 17 nt, Artificial Sequence
  Synthetic
agugcaauggugcgauc

SEQ ID NO: 750427 - RNA, 17 nt, Artificial Sequence
  Synthetic
uuuauuagucaaggauc

SEQ ID NO: 750428 - RNA, 17 nt, Artificial Sequence
  Synthetic
uauuaaugagaaggauc

SEQ ID NO: 750429 - RNA, 17 nt, Artificial Sequence
  Synthetic
cucagucuggaaggauc

SEQ ID NO: 750430 - RNA, 17 nt, Artificial Sequence
  Synthetic
ucucugagaccaggauc

SEQ ID NO: 750431 - RNA, 17 nt, Artificial Sequence
  Synthetic
uacuaugagucaggauc

SEQ ID NO: 750432 - RNA, 17 nt, Artificial Sequence
  Synthetic
uagcugcugggaggauc

SEQ ID NO: 750433 - RNA, 17 nt, Artificial Sequence
  Synthetic
cugcaaagccuaggauc

SEQ ID NO: 750434 - RNA, 17 nt, Artificial Sequence
  Synthetic
uggaggcagcuaggauc

SEQ ID NO: 750435 - RNA, 17 nt, Artificial Sequence
  Synthetic
aauugaagcaagggauc

SEQ ID NO: 750436 - RNA, 17 nt, Artificial Sequence
  Synthetic
ugaauuuuacagggauc

SEQ ID NO: 750437 - RNA, 17 nt, Artificial Sequence
  Synthetic
acguccugggagggauc

SEQ ID NO: 750438 - RNA, 17 nt, Artificial Sequence
  Synthetic
ugccuggcuuugggauc

SEQ ID NO: 750439 - RNA, 17 nt, Artificial Sequence
  Synthetic
agaagggaaaauggauc

SEQ ID NO: 750440 - RNA, 17 nt, Artificial Sequence
  Synthetic
caauuuuuccauggauc

SEQ ID NO: 750441 - RNA, 17 nt, Artificial Sequence
  Synthetic
agggacauagauggauc

SEQ ID NO: 750442 - RNA, 17 nt, Artificial Sequence
  Synthetic
ccagaaaguacuggauc

SEQ ID NO: 750443 - RNA, 17 nt, Artificial Sequence
  Synthetic
caauggcuggcuggauc

SEQ ID NO: 750444 - RNA, 17 nt, Artificial Sequence
  Synthetic
ccuccaaaugguggauc

SEQ ID NO: 750445 - RNA, 17 nt, Artificial Sequence
  Synthetic
ucagagacacuuggauc

SEQ ID NO: 750446 - RNA, 17 nt, Artificial Sequence
  Synthetic
acacucagcuuuggauc

SEQ ID NO: 750447 - RNA, 17 nt, Artificial Sequence
  Synthetic
uuuaaacauuuuggauc

SEQ ID NO: 750448 - RNA, 17 nt, Artificial Sequence
  Synthetic
uuucagguuuuuggauc

SEQ ID NO: 750449 - RNA, 17 nt, Artificial Sequence
  Synthetic
ugggcuucacaaugauc

SEQ ID NO: 750450 - RNA, 17 nt, Artificial Sequence
  Synthetic
uaguauauacaaugauc

SEQ ID NO: 750451 - RNA, 17 nt, Artificial Sequence
  Synthetic
aaaauaggaacaugauc

SEQ ID NO: 750452 - RNA, 17 nt, Artificial Sequence
  Synthetic
uuuaccuagagaugauc

SEQ ID NO: 750453 - RNA, 17 nt, Artificial Sequence
  Synthetic
aagcuauaacuaugauc

SEQ ID NO: 750454 - RNA, 17 nt, Artificial Sequence
  Synthetic
uuaucuugccuaugauc

SEQ ID NO: 750455 - RNA, 17 nt, Artificial Sequence
  Synthetic
uugagugcuguaugauc

SEQ ID NO: 750456 - RNA, 17 nt, Artificial Sequence
  Synthetic
aaguggugagacugauc

SEQ ID NO: 750457 - RNA, 17 nt, Artificial Sequence
  Synthetic
ucuuaaagauacugauc

SEQ ID NO: 750458 - RNA, 17 nt, Artificial Sequence
  Synthetic
aaaacauucaccugauc

SEQ ID NO: 750459 - RNA, 17 nt, Artificial Sequence
  Synthetic
ccucacuaucccugauc

SEQ ID NO: 750460 - RNA, 17 nt, Artificial Sequence
  Synthetic
uguuagccaggcugauc

SEQ ID NO: 750461 - RNA, 17 nt, Artificial Sequence
  Synthetic
aacugcauuuucugauc

SEQ ID NO: 750462 - RNA, 17 nt, Artificial Sequence
  Synthetic
aaauauggaaagugauc

SEQ ID NO: 750463 - RNA, 17 nt, Artificial Sequence
  Synthetic
aggaauuaauagugauc

SEQ ID NO: 750464 - RNA, 17 nt, Artificial Sequence
  Synthetic
cccgaccucaggugauc

SEQ ID NO: 750465 - RNA, 17 nt, Artificial Sequence
  Synthetic
aaguauaucuggugauc

SEQ ID NO: 750466 - RNA, 17 nt, Artificial Sequence
  Synthetic
auaauuuuuuggugauc

SEQ ID NO: 750467 - RNA, 17 nt, Artificial Sequence
  Synthetic
uuggucuagaugugauc

SEQ ID NO: 750468 - RNA, 17 nt, Artificial Sequence
  Synthetic
uuccuggggcugugauc

SEQ ID NO: 750469 - RNA, 17 nt, Artificial Sequence
  Synthetic
uaccuucaucugugauc

SEQ ID NO: 750470 - RNA, 17 nt, Artificial Sequence
  Synthetic
agugccagagugugauc

SEQ ID NO: 750471 - RNA, 17 nt, Artificial Sequence
  Synthetic
aaaaauauugugugauc

SEQ ID NO: 750472 - RNA, 17 nt, Artificial Sequence
  Synthetic
acuugcaaauugugauc

SEQ ID NO: 750473 - RNA, 17 nt, Artificial Sequence
  Synthetic
uuguacaauuugugauc

SEQ ID NO: 750474 - RNA, 17 nt, Artificial Sequence
  Synthetic
aaaagcccuuugugauc

SEQ ID NO: 750475 - RNA, 17 nt, Artificial Sequence
  Synthetic
ucaauaggaaauugauc

SEQ ID NO: 750476 - RNA, 17 nt, Artificial Sequence
  Synthetic
cuaccuguaaauugauc

SEQ ID NO: 750477 - RNA, 17 nt, Artificial Sequence
  Synthetic
aauucacaucauugauc

SEQ ID NO: 750478 - RNA, 17 nt, Artificial Sequence
  Synthetic
auggcugcugauugauc

SEQ ID NO: 750479 - RNA, 17 nt, Artificial Sequence
  Synthetic
uuuugacuugcuugauc

SEQ ID NO: 750480 - RNA, 17 nt, Artificial Sequence
  Synthetic
agaucuaacauuugauc

SEQ ID NO: 750481 - RNA, 17 nt, Artificial Sequence
  Synthetic
agugaugauauuugauc

SEQ ID NO: 750482 - RNA, 17 nt, Artificial Sequence
  Synthetic
auuagauucuuuugauc

SEQ ID NO: 750483 - RNA, 17 nt, Artificial Sequence
  Synthetic
aggaaagaaaaaauauc

SEQ ID NO: 750484 - RNA, 17 nt, Artificial Sequence
  Synthetic
ucccaaagaaaaauauc

SEQ ID NO: 750485 - RNA, 17 nt, Artificial Sequence
  Synthetic
aaucauuucaaaauauc

SEQ ID NO: 750486 - RNA, 17 nt, Artificial Sequence
  Synthetic
agguugaguaaaauauc

SEQ ID NO: 750487 - RNA, 17 nt, Artificial Sequence
  Synthetic
uauaguuuuaaaauauc

SEQ ID NO: 750488 - RNA, 17 nt, Artificial Sequence
  Synthetic
uuugugucacaaauauc

SEQ ID NO: 750489 - RNA, 17 nt, Artificial Sequence
  Synthetic
auguuugaccaaauauc

SEQ ID NO: 750490 - RNA, 17 nt, Artificial Sequence
  Synthetic
agacauguucaaauauc

SEQ ID NO: 750491 - RNA, 17 nt, Artificial Sequence
  Synthetic
uuuaacacugaaauauc

SEQ ID NO: 750492 - RNA, 17 nt, Artificial Sequence
  Synthetic
auuucaagugaaauauc

SEQ ID NO: 750493 - RNA, 17 nt, Artificial Sequence
  Synthetic
uuuucaccuuaaauauc

SEQ ID NO: 750494 - RNA, 17 nt, Artificial Sequence
  Synthetic
aaagguuauccaauauc

SEQ ID NO: 750495 - RNA, 17 nt, Artificial Sequence
  Synthetic
aaaauuucaugaauauc

SEQ ID NO: 750496 - RNA, 17 nt, Artificial Sequence
  Synthetic
aacaggcauugaauauc

SEQ ID NO: 750497 - RNA, 17 nt, Artificial Sequence
  Synthetic
cucucauuuugaauauc

SEQ ID NO: 750498 - RNA, 17 nt, Artificial Sequence
  Synthetic
cagauuugacuaauauc

SEQ ID NO: 750499 - RNA, 17 nt, Artificial Sequence
  Synthetic
uuacaguuucuaauauc

SEQ ID NO: 750500 - RNA, 17 nt, Artificial Sequence
  Synthetic
uagacaauaguaauauc

SEQ ID NO: 750501 - RNA, 17 nt, Artificial Sequence
  Synthetic
uagagccagguaauauc

SEQ ID NO: 750502 - RNA, 17 nt, Artificial Sequence
  Synthetic
aaaagcucucacauauc

SEQ ID NO: 750503 - RNA, 17 nt, Artificial Sequence
  Synthetic
uccauaaauuacauauc

SEQ ID NO: 750504 - RNA, 17 nt, Artificial Sequence
  Synthetic
aaucuguauuacauauc

SEQ ID NO: 750505 - RNA, 17 nt, Artificial Sequence
  Synthetic
auauuuuauaccauauc

SEQ ID NO: 750506 - RNA, 17 nt, Artificial Sequence
  Synthetic
agcacuauauccauauc

SEQ ID NO: 750507 - RNA, 17 nt, Artificial Sequence
  Synthetic
aaaaucuucuccauauc

SEQ ID NO: 750508 - RNA, 17 nt, Artificial Sequence
  Synthetic
auaaagggauucauauc

SEQ ID NO: 750509 - RNA, 17 nt, Artificial Sequence
  Synthetic
agaaaguacuagauauc

SEQ ID NO: 750510 - RNA, 17 nt, Artificial Sequence
  Synthetic
aauggcaaguagauauc

SEQ ID NO: 750511 - RNA, 17 nt, Artificial Sequence
  Synthetic
uuaaaaacaaugauauc

SEQ ID NO: 750512 - RNA, 17 nt, Artificial Sequence
  Synthetic
uauaaaagaaugauauc

SEQ ID NO: 750513 - RNA, 17 nt, Artificial Sequence
  Synthetic
uagucaaggaugauauc

SEQ ID NO: 750514 - RNA, 17 nt, Artificial Sequence
  Synthetic
ugauaaauggugauauc

SEQ ID NO: 750515 - RNA, 17 nt, Artificial Sequence
  Synthetic
aaugcucaauugauauc

SEQ ID NO: 750516 - RNA, 17 nt, Artificial Sequence
  Synthetic
cuguaacaguugauauc

SEQ ID NO: 750517 - RNA, 17 nt, Artificial Sequence
  Synthetic
uuauugacuuugauauc

SEQ ID NO: 750518 - RNA, 17 nt, Artificial Sequence
  Synthetic
aaauuguaaaauauauc

SEQ ID NO: 750519 - RNA, 17 nt, Artificial Sequence
  Synthetic
aguuuuuaaaauauauc

SEQ ID NO: 750520 - RNA, 17 nt, Artificial Sequence
  Synthetic
uuccugagaaauauauc

SEQ ID NO: 750521 - RNA, 17 nt, Artificial Sequence
  Synthetic
ugccuauucaauauauc

SEQ ID NO: 750522 - RNA, 17 nt, Artificial Sequence
  Synthetic
uaauuuaugcauauauc

SEQ ID NO: 750523 - RNA, 17 nt, Artificial Sequence
  Synthetic
aauauguuggauauauc

SEQ ID NO: 750524 - RNA, 17 nt, Artificial Sequence
  Synthetic
auauauauauauauauc

SEQ ID NO: 750525 - RNA, 17 nt, Artificial Sequence
  Synthetic
aagucacuuuauauauc

SEQ ID NO: 750526 - RNA, 17 nt, Artificial Sequence
  Synthetic
aauauccaaacuauauc

SEQ ID NO: 750527 - RNA, 17 nt, Artificial Sequence
  Synthetic
aauguauuaucuauauc

SEQ ID NO: 750528 - RNA, 17 nt, Artificial Sequence
  Synthetic
aaacucauaaguauauc

SEQ ID NO: 750529 - RNA, 17 nt, Artificial Sequence
  Synthetic
cauuuccuaaguauauc

SEQ ID NO: 750530 - RNA, 17 nt, Artificial Sequence
  Synthetic
uguuacuuuuguauauc

SEQ ID NO: 750531 - RNA, 17 nt, Artificial Sequence
  Synthetic
uucaggaaaauuauauc

SEQ ID NO: 750532 - RNA, 17 nt, Artificial Sequence
  Synthetic
auuauaauaauuauauc

SEQ ID NO: 750533 - RNA, 17 nt, Artificial Sequence
  Synthetic
auuuuaucuauuauauc

SEQ ID NO: 750534 - RNA, 17 nt, Artificial Sequence
  Synthetic
aguuucaggcuuauauc

SEQ ID NO: 750535 - RNA, 17 nt, Artificial Sequence
  Synthetic
uacucuguauuuauauc

SEQ ID NO: 750536 - RNA, 17 nt, Artificial Sequence
  Synthetic
aaaauuuuuuuuauauc

SEQ ID NO: 750537 - RNA, 17 nt, Artificial Sequence
  Synthetic
aggccauuaaaacuauc

SEQ ID NO: 750538 - RNA, 17 nt, Artificial Sequence
  Synthetic
uuuuaggagaaacuauc

SEQ ID NO: 750539 - RNA, 17 nt, Artificial Sequence
  Synthetic
aaucugaaauaacuauc

SEQ ID NO: 750540 - RNA, 17 nt, Artificial Sequence
  Synthetic
ucuuaaauuuaacuauc

SEQ ID NO: 750541 - RNA, 17 nt, Artificial Sequence
  Synthetic
aaguccuuagcacuauc

SEQ ID NO: 750542 - RNA, 17 nt, Artificial Sequence
  Synthetic
uguucaacaucacuauc

SEQ ID NO: 750543 - RNA, 17 nt, Artificial Sequence
  Synthetic
agaacucacucacuauc

SEQ ID NO: 750544 - RNA, 17 nt, Artificial Sequence
  Synthetic
ucucaugauucacuauc

SEQ ID NO: 750545 - RNA, 17 nt, Artificial Sequence
  Synthetic
uuaguuaauagacuauc

SEQ ID NO: 750546 - RNA, 17 nt, Artificial Sequence
  Synthetic
aauggguauagacuauc

SEQ ID NO: 750547 - RNA, 17 nt, Artificial Sequence
  Synthetic
uacaacaaaauacuauc

SEQ ID NO: 750548 - RNA, 17 nt, Artificial Sequence
  Synthetic
ccaaaauauuuacuauc

SEQ ID NO: 750549 - RNA, 17 nt, Artificial Sequence
  Synthetic
cauuucaaaaaccuauc

SEQ ID NO: 750550 - RNA, 17 nt, Artificial Sequence
  Synthetic
uugaaaaacuaccuauc

SEQ ID NO: 750551 - RNA, 17 nt, Artificial Sequence
  Synthetic
cugagaaacuaccuauc

SEQ ID NO: 750552 - RNA, 17 nt, Artificial Sequence
  Synthetic
ccccucauuuaccuauc

SEQ ID NO: 750553 - RNA, 17 nt, Artificial Sequence
  Synthetic
acaggugugugccuauc

SEQ ID NO: 750554 - RNA, 17 nt, Artificial Sequence
  Synthetic
aaggacucaguccuauc

SEQ ID NO: 750555 - RNA, 17 nt, Artificial Sequence
  Synthetic
cucacauaacagcuauc

SEQ ID NO: 750556 - RNA, 17 nt, Artificial Sequence
  Synthetic
uuauuuuuccagcuauc

SEQ ID NO: 750557 - RNA, 17 nt, Artificial Sequence
  Synthetic
uuccagcuuuagcuauc

SEQ ID NO: 750558 - RNA, 17 nt, Artificial Sequence
  Synthetic
aagacacuauugcuauc

SEQ ID NO: 750559 - RNA, 17 nt, Artificial Sequence
  Synthetic
ccaguccaaaaucuauc

SEQ ID NO: 750560 - RNA, 17 nt, Artificial Sequence
  Synthetic
uuuacauaagaucuauc

SEQ ID NO: 750561 - RNA, 17 nt, Artificial Sequence
  Synthetic
uuuugcccuccucuauc

SEQ ID NO: 750562 - RNA, 17 nt, Artificial Sequence
  Synthetic
agguagaacucucuauc

SEQ ID NO: 750563 - RNA, 17 nt, Artificial Sequence
  Synthetic
aaucuagaaugucuauc

SEQ ID NO: 750564 - RNA, 17 nt, Artificial Sequence
  Synthetic
uauucagagauucuauc

SEQ ID NO: 750565 - RNA, 17 nt, Artificial Sequence
  Synthetic
cugaugaaaaaaguauc

SEQ ID NO: 750566 - RNA, 17 nt, Artificial Sequence
  Synthetic
uaggaaauaaaaguauc

SEQ ID NO: 750567 - RNA, 17 nt, Artificial Sequence
  Synthetic
aucuuccuuaaaguauc

SEQ ID NO: 750568 - RNA, 17 nt, Artificial Sequence
  Synthetic
cauauuguuaaaguauc

SEQ ID NO: 750569 - RNA, 17 nt, Artificial Sequence
  Synthetic
ucaaacucccaaguauc

SEQ ID NO: 750570 - RNA, 17 nt, Artificial Sequence
  Synthetic
auguguaacacaguauc

SEQ ID NO: 750571 - RNA, 17 nt, Artificial Sequence
  Synthetic
aaguaguucacaguauc

SEQ ID NO: 750572 - RNA, 17 nt, Artificial Sequence
  Synthetic
uacaacacuacaguauc

SEQ ID NO: 750573 - RNA, 17 nt, Artificial Sequence
  Synthetic
auaucuauugcaguauc

SEQ ID NO: 750574 - RNA, 17 nt, Artificial Sequence
  Synthetic
uagcagacaagaguauc

SEQ ID NO: 750575 - RNA, 17 nt, Artificial Sequence
  Synthetic
cuuggacacagaguauc

SEQ ID NO: 750576 - RNA, 17 nt, Artificial Sequence
  Synthetic
uguaucuuuagaguauc

SEQ ID NO: 750577 - RNA, 17 nt, Artificial Sequence
  Synthetic
ucagccuccugaguauc

SEQ ID NO: 750578 - RNA, 17 nt, Artificial Sequence
  Synthetic
ucggccuccugaguauc

SEQ ID NO: 750579 - RNA, 17 nt, Artificial Sequence
  Synthetic
aaauuugaauuaguauc

SEQ ID NO: 750580 - RNA, 17 nt, Artificial Sequence
  Synthetic
aaauaucccuuaguauc

SEQ ID NO: 750581 - RNA, 17 nt, Artificial Sequence
  Synthetic
caaaggcauuuaguauc

SEQ ID NO: 750582 - RNA, 17 nt, Artificial Sequence
  Synthetic
agggauuuuuuaguauc

SEQ ID NO: 750583 - RNA, 17 nt, Artificial Sequence
  Synthetic
agaaaauugaagguauc

SEQ ID NO: 750584 - RNA, 17 nt, Artificial Sequence
  Synthetic
aaugagucuuagguauc

SEQ ID NO: 750585 - RNA, 17 nt, Artificial Sequence
  Synthetic
uccuuacuuuagguauc

SEQ ID NO: 750586 - RNA, 17 nt, Artificial Sequence
  Synthetic
cacuauagcacgguauc

SEQ ID NO: 750587 - RNA, 17 nt, Artificial Sequence
  Synthetic
uuaugaacauggguauc

SEQ ID NO: 750588 - RNA, 17 nt, Artificial Sequence
  Synthetic
cuguacuagcugguauc

SEQ ID NO: 750589 - RNA, 17 nt, Artificial Sequence
  Synthetic
ugccaggcuuugguauc

SEQ ID NO: 750590 - RNA, 17 nt, Artificial Sequence
  Synthetic
ugccagguuuugguauc

SEQ ID NO: 750591 - RNA, 17 nt, Artificial Sequence
  Synthetic
cugcccccaaauguauc

SEQ ID NO: 750592 - RNA, 17 nt, Artificial Sequence
  Synthetic
ccuucaugaaauguauc

SEQ ID NO: 750593 - RNA, 17 nt, Artificial Sequence
  Synthetic
ugccuuuacaauguauc

SEQ ID NO: 750594 - RNA, 17 nt, Artificial Sequence
  Synthetic
agagcaccugauguauc

SEQ ID NO: 750595 - RNA, 17 nt, Artificial Sequence
  Synthetic
agauagaaauauguauc

SEQ ID NO: 750596 - RNA, 17 nt, Artificial Sequence
  Synthetic
agaagaauauauguauc

SEQ ID NO: 750597 - RNA, 17 nt, Artificial Sequence
  Synthetic
auaaguuucuauguauc

SEQ ID NO: 750598 - RNA, 17 nt, Artificial Sequence
  Synthetic
acugaaauugcuguauc

SEQ ID NO: 750599 - RNA, 17 nt, Artificial Sequence
  Synthetic
ccaucuuuaucuguauc

SEQ ID NO: 750600 - RNA, 17 nt, Artificial Sequence
  Synthetic
aauuguaauucuguauc

SEQ ID NO: 750601 - RNA, 17 nt, Artificial Sequence
  Synthetic
cucuagccucuuguauc

SEQ ID NO: 750602 - RNA, 17 nt, Artificial Sequence
  Synthetic
accuuucuuguuguauc

SEQ ID NO: 750603 - RNA, 17 nt, Artificial Sequence
  Synthetic
cacgacaaaaaauuauc

SEQ ID NO: 750604 - RNA, 17 nt, Artificial Sequence
  Synthetic
aaauuuuaaaaauuauc

SEQ ID NO: 750605 - RNA, 17 nt, Artificial Sequence
  Synthetic
aauugugcaaaauuauc

SEQ ID NO: 750606 - RNA, 17 nt, Artificial Sequence
  Synthetic
cagucuguaaaauuauc

SEQ ID NO: 750607 - RNA, 17 nt, Artificial Sequence
  Synthetic
uagaaaugcaaauuauc

SEQ ID NO: 750608 - RNA, 17 nt, Artificial Sequence
  Synthetic
caagugaaggaauuauc

SEQ ID NO: 750609 - RNA, 17 nt, Artificial Sequence
  Synthetic
augaagguugaauuauc

SEQ ID NO: 750610 - RNA, 17 nt, Artificial Sequence
  Synthetic
uuaaguguguaauuauc

SEQ ID NO: 750611 - RNA, 17 nt, Artificial Sequence
  Synthetic
aaauuguuuuaauuauc

SEQ ID NO: 750612 - RNA, 17 nt, Artificial Sequence
  Synthetic
aaaauaucaacauuauc

SEQ ID NO: 750613 - RNA, 17 nt, Artificial Sequence
  Synthetic
uuauagcaaccauuauc

SEQ ID NO: 750614 - RNA, 17 nt, Artificial Sequence
  Synthetic
cuaaacuuuccauuauc

SEQ ID NO: 750615 - RNA, 17 nt, Artificial Sequence
  Synthetic
caagaccauucauuauc

SEQ ID NO: 750616 - RNA, 17 nt, Artificial Sequence
  Synthetic
ucucccaaucuauuauc

SEQ ID NO: 750617 - RNA, 17 nt, Artificial Sequence
  Synthetic
uuccauauucuauuauc

SEQ ID NO: 750618 - RNA, 17 nt, Artificial Sequence
  Synthetic
cagaugguaguauuauc

SEQ ID NO: 750619 - RNA, 17 nt, Artificial Sequence
  Synthetic
uucaaguccuuauuauc

SEQ ID NO: 750620 - RNA, 17 nt, Artificial Sequence
  Synthetic
uaugcagaauacuuauc

SEQ ID NO: 750621 - RNA, 17 nt, Artificial Sequence
  Synthetic
cugagaauuuacuuauc

SEQ ID NO: 750622 - RNA, 17 nt, Artificial Sequence
  Synthetic
uuguaauuuuacuuauc

SEQ ID NO: 750623 - RNA, 17 nt, Artificial Sequence
  Synthetic
acagucuuggccuuauc

SEQ ID NO: 750624 - RNA, 17 nt, Artificial Sequence
  Synthetic
uccacaagaugcuuauc

SEQ ID NO: 750625 - RNA, 17 nt, Artificial Sequence
  Synthetic
cagguacuaugcuuauc

SEQ ID NO: 750626 - RNA, 17 nt, Artificial Sequence
  Synthetic
aaauggaagaucuuauc

SEQ ID NO: 750627 - RNA, 17 nt, Artificial Sequence
  Synthetic
acuccugcgaucuuauc

SEQ ID NO: 750628 - RNA, 17 nt, Artificial Sequence
  Synthetic
aacugcacagucuuauc

SEQ ID NO: 750629 - RNA, 17 nt, Artificial Sequence
  Synthetic
acauguuuugucuuauc

SEQ ID NO: 750630 - RNA, 17 nt, Artificial Sequence
  Synthetic
auuuuccuaaaguuauc

SEQ ID NO: 750631 - RNA, 17 nt, Artificial Sequence
  Synthetic
auuucuaacaaguuauc

SEQ ID NO: 750632 - RNA, 17 nt, Artificial Sequence
  Synthetic
uggacacacaaguuauc

SEQ ID NO: 750633 - RNA, 17 nt, Artificial Sequence
  Synthetic
auggacauggaguuauc

SEQ ID NO: 750634 - RNA, 17 nt, Artificial Sequence
  Synthetic
auuucacaugaguuauc

SEQ ID NO: 750635 - RNA, 17 nt, Artificial Sequence
  Synthetic
uucuggaacuaguuauc

SEQ ID NO: 750636 - RNA, 17 nt, Artificial Sequence
  Synthetic
ccauuacacagguuauc

SEQ ID NO: 750637 - RNA, 17 nt, Artificial Sequence
  Synthetic
caaauaaaaugguuauc

SEQ ID NO: 750638 - RNA, 17 nt, Artificial Sequence
  Synthetic
uucuguaagguguuauc

SEQ ID NO: 750639 - RNA, 17 nt, Artificial Sequence
  Synthetic
caaagguuuuuguuauc

SEQ ID NO: 750640 - RNA, 17 nt, Artificial Sequence
  Synthetic
cuuauaaaaaauuuauc

SEQ ID NO: 750641 - RNA, 17 nt, Artificial Sequence
  Synthetic
ucaaucuuaaauuuauc

SEQ ID NO: 750642 - RNA, 17 nt, Artificial Sequence
  Synthetic
aucaaacuccauuuauc

SEQ ID NO: 750643 - RNA, 17 nt, Artificial Sequence
  Synthetic
uuuucaguccauuuauc

SEQ ID NO: 750644 - RNA, 17 nt, Artificial Sequence
  Synthetic
ugcagcagagauuuauc

SEQ ID NO: 750645 - RNA, 17 nt, Artificial Sequence
  Synthetic
uugggaagggauuuauc

SEQ ID NO: 750646 - RNA, 17 nt, Artificial Sequence
  Synthetic
cucuuacuauauuuauc

SEQ ID NO: 750647 - RNA, 17 nt, Artificial Sequence
  Synthetic
aaagcauucucuuuauc

SEQ ID NO: 750648 - RNA, 17 nt, Artificial Sequence
  Synthetic
aaaauuuuuucuuuauc

SEQ ID NO: 750649 - RNA, 17 nt, Artificial Sequence
  Synthetic
acaauuuauaguuuauc

SEQ ID NO: 750650 - RNA, 17 nt, Artificial Sequence
  Synthetic
cuuacaauggguuuauc

SEQ ID NO: 750651 - RNA, 17 nt, Artificial Sequence
  Synthetic
cguaugauggguuuauc

SEQ ID NO: 750652 - RNA, 17 nt, Artificial Sequence
  Synthetic
uuuaugauggguuuauc

SEQ ID NO: 750653 - RNA, 17 nt, Artificial Sequence
  Synthetic
ugcuuuugguguuuauc

SEQ ID NO: 750654 - RNA, 17 nt, Artificial Sequence
  Synthetic
cuuuugaagauuuuauc

SEQ ID NO: 750655 - RNA, 17 nt, Artificial Sequence
  Synthetic
caucacaggauuuuauc

SEQ ID NO: 750656 - RNA, 17 nt, Artificial Sequence
  Synthetic
uguagcugccuuuuauc

SEQ ID NO: 750657 - RNA, 17 nt, Artificial Sequence
  Synthetic
ucuaugggaguuuuauc

SEQ ID NO: 750658 - RNA, 17 nt, Artificial Sequence
  Synthetic
auaucugcauuuuuauc

SEQ ID NO: 750659 - RNA, 17 nt, Artificial Sequence
  Synthetic
caagaugccuuuuuauc

SEQ ID NO: 750660 - RNA, 17 nt, Artificial Sequence
  Synthetic
auauagaauuuuuuauc

SEQ ID NO: 750661 - RNA, 17 nt, Artificial Sequence
  Synthetic
acuacuguuuuuuuauc

SEQ ID NO: 750662 - RNA, 17 nt, Artificial Sequence
  Synthetic
uaaagcuuuuuuuuauc

SEQ ID NO: 750663 - RNA, 17 nt, Artificial Sequence
  Synthetic
cauguuucagaaaacuc

SEQ ID NO: 750664 - RNA, 17 nt, Artificial Sequence
  Synthetic
aaucaacuagaaaacuc

SEQ ID NO: 750665 - RNA, 17 nt, Artificial Sequence
  Synthetic
cguauccuagaaaacuc

SEQ ID NO: 750666 - RNA, 17 nt, Artificial Sequence
  Synthetic
ugagcuccauaaaacuc

SEQ ID NO: 750667 - RNA, 17 nt, Artificial Sequence
  Synthetic
uaaccagagacaaacuc

SEQ ID NO: 750668 - RNA, 17 nt, Artificial Sequence
  Synthetic
acucaguuuccaaacuc

SEQ ID NO: 750669 - RNA, 17 nt, Artificial Sequence
  Synthetic
uuuuauuuaucaaacuc

SEQ ID NO: 750670 - RNA, 17 nt, Artificial Sequence
  Synthetic
caaauguagucaaacuc

SEQ ID NO: 750671 - RNA, 17 nt, Artificial Sequence
  Synthetic
agccacgauucaaacuc

SEQ ID NO: 750672 - RNA, 17 nt, Artificial Sequence
  Synthetic
aacugacacagaaacuc

SEQ ID NO: 750673 - RNA, 17 nt, Artificial Sequence
  Synthetic
cuuaagagcagaaacuc

SEQ ID NO: 750674 - RNA, 17 nt, Artificial Sequence
  Synthetic
uaguaaaucagaaacuc

SEQ ID NO: 750675 - RNA, 17 nt, Artificial Sequence
  Synthetic
ugacauaguagaaacuc

SEQ ID NO: 750676 - RNA, 17 nt, Artificial Sequence
  Synthetic
auauaagguagaaacuc

SEQ ID NO: 750677 - RNA, 17 nt, Artificial Sequence
  Synthetic
agggcuuguagaaacuc

SEQ ID NO: 750678 - RNA, 17 nt, Artificial Sequence
  Synthetic
uaucccuugggaaacuc

SEQ ID NO: 750679 - RNA, 17 nt, Artificial Sequence
  Synthetic
aucccaaacugaaacuc

SEQ ID NO: 750680 - RNA, 17 nt, Artificial Sequence
  Synthetic
agaggcaaccuaaacuc

SEQ ID NO: 750681 - RNA, 17 nt, Artificial Sequence
  Synthetic
cugaaguugcuaaacuc

SEQ ID NO: 750682 - RNA, 17 nt, Artificial Sequence
  Synthetic
aaucacgauuuaaacuc

SEQ ID NO: 750683 - RNA, 17 nt, Artificial Sequence
  Synthetic
ccuuguucuuuaaacuc

SEQ ID NO: 750684 - RNA, 17 nt, Artificial Sequence
  Synthetic
ugauauuuuuacaacuc

SEQ ID NO: 750685 - RNA, 17 nt, Artificial Sequence
  Synthetic
ccggcgggaaccaacuc

SEQ ID NO: 750686 - RNA, 17 nt, Artificial Sequence
  Synthetic
uguaaucccagcaacuc

SEQ ID NO: 750687 - RNA, 17 nt, Artificial Sequence
  Synthetic
uccauaagcagcaacuc

SEQ ID NO: 750688 - RNA, 17 nt, Artificial Sequence
  Synthetic
accacuucacucaacuc

SEQ ID NO: 750689 - RNA, 17 nt, Artificial Sequence
  Synthetic
cuugucuuacucaacuc

SEQ ID NO: 750690 - RNA, 17 nt, Artificial Sequence
  Synthetic
cugacagugcucaacuc

SEQ ID NO: 750691 - RNA, 17 nt, Artificial Sequence
  Synthetic
agcccaauaaagaacuc

SEQ ID NO: 750692 - RNA, 17 nt, Artificial Sequence
  Synthetic
agcuggggcaagaacuc

SEQ ID NO: 750693 - RNA, 17 nt, Artificial Sequence
  Synthetic
auucguuuuaagaacuc

SEQ ID NO: 750694 - RNA, 17 nt, Artificial Sequence
  Synthetic
agcagcucacagaacuc

SEQ ID NO: 750695 - RNA, 17 nt, Artificial Sequence
  Synthetic
uacuaaauccagaacuc

SEQ ID NO: 750696 - RNA, 17 nt, Artificial Sequence
  Synthetic
auuuauuuagagaacuc

SEQ ID NO: 750697 - RNA, 17 nt, Artificial Sequence
  Synthetic
caaucaaacuagaacuc

SEQ ID NO: 750698 - RNA, 17 nt, Artificial Sequence
  Synthetic
caaucaaauuagaacuc

SEQ ID NO: 750699 - RNA, 17 nt, Artificial Sequence
  Synthetic
uaagcaaucccgaacuc

SEQ ID NO: 750700 - RNA, 17 nt, Artificial Sequence
  Synthetic
uuuuuuucaaggaacuc

SEQ ID NO: 750701 - RNA, 17 nt, Artificial Sequence
  Synthetic
uuuugaaucaggaacuc

SEQ ID NO: 750702 - RNA, 17 nt, Artificial Sequence
  Synthetic
aacugaaauaggaacuc

SEQ ID NO: 750703 - RNA, 17 nt, Artificial Sequence
  Synthetic
cucugcccuaggaacuc

SEQ ID NO: 750704 - RNA, 17 nt, Artificial Sequence
  Synthetic
uuuucuaccuggaacuc

SEQ ID NO: 750705 - RNA, 17 nt, Artificial Sequence
  Synthetic
acagcgccccugaacuc

SEQ ID NO: 750706 - RNA, 17 nt, Artificial Sequence
  Synthetic
ugaugagaugugaacuc

SEQ ID NO: 750707 - RNA, 17 nt, Artificial Sequence
  Synthetic
cacugagccuugaacuc

SEQ ID NO: 750708 - RNA, 17 nt, Artificial Sequence
  Synthetic
aggcuggccuugaacuc

SEQ ID NO: 750709 - RNA, 17 nt, Artificial Sequence
  Synthetic
aggcuguucuugaacuc

SEQ ID NO: 750710 - RNA, 17 nt, Artificial Sequence
  Synthetic
aaccuguauuugaacuc

SEQ ID NO: 750711 - RNA, 17 nt, Artificial Sequence
  Synthetic
aaauaagcacauaacuc

SEQ ID NO: 750712 - RNA, 17 nt, Artificial Sequence
  Synthetic
augucagaagauaacuc

SEQ ID NO: 750713 - RNA, 17 nt, Artificial Sequence
  Synthetic
acagguauuucuaacuc

SEQ ID NO: 750714 - RNA, 17 nt, Artificial Sequence
  Synthetic
uccaaguaaaguaacuc

SEQ ID NO: 750715 - RNA, 17 nt, Artificial Sequence
  Synthetic
uguaagugaaguaacuc

SEQ ID NO: 750716 - RNA, 17 nt, Artificial Sequence
  Synthetic
ucagagcuaaguaacuc

SEQ ID NO: 750717 - RNA, 17 nt, Artificial Sequence
  Synthetic
auaacgcugguuaacuc

SEQ ID NO: 750718 - RNA, 17 nt, Artificial Sequence
  Synthetic
uguagcacuuuuaacuc

SEQ ID NO: 750719 - RNA, 17 nt, Artificial Sequence
  Synthetic
aaacagccaaaacacuc

SEQ ID NO: 750720 - RNA, 17 nt, Artificial Sequence
  Synthetic
ucacuuugcuaacacuc

SEQ ID NO: 750721 - RNA, 17 nt, Artificial Sequence
  Synthetic
uuuaaaaauuaacacuc

SEQ ID NO: 750722 - RNA, 17 nt, Artificial Sequence
  Synthetic
aggggaacaucacacuc

SEQ ID NO: 750723 - RNA, 17 nt, Artificial Sequence
  Synthetic
augggaacaucacacuc

SEQ ID NO: 750724 - RNA, 17 nt, Artificial Sequence
  Synthetic
auagccagaucacacuc

SEQ ID NO: 750725 - RNA, 17 nt, Artificial Sequence
  Synthetic
aggggaauaucacacuc

SEQ ID NO: 750726 - RNA, 17 nt, Artificial Sequence
  Synthetic
uuugacaacagacacuc

SEQ ID NO: 750727 - RNA, 17 nt, Artificial Sequence
  Synthetic
uuuuauguaugacacuc

SEQ ID NO: 750728 - RNA, 17 nt, Artificial Sequence
  Synthetic
aaguuuuugugacacuc

SEQ ID NO: 750729 - RNA, 17 nt, Artificial Sequence
  Synthetic
ccuaggaaacaccacuc

SEQ ID NO: 750730 - RNA, 17 nt, Artificial Sequence
  Synthetic
uccucaucauaccacuc

SEQ ID NO: 750731 - RNA, 17 nt, Artificial Sequence
  Synthetic
uaacaaauguaccacuc

SEQ ID NO: 750732 - RNA, 17 nt, Artificial Sequence
  Synthetic
auccaguuuuaccacuc

SEQ ID NO: 750733 - RNA, 17 nt, Artificial Sequence
  Synthetic
uguaaucccagccacuc

SEQ ID NO: 750734 - RNA, 17 nt, Artificial Sequence
  Synthetic
acaugggccugccacuc

SEQ ID NO: 750735 - RNA, 17 nt, Artificial Sequence
  Synthetic
aacauuacacagcacuc

SEQ ID NO: 750736 - RNA, 17 nt, Artificial Sequence
  Synthetic
cuguaaucccagcacuc

SEQ ID NO: 750737 - RNA, 17 nt, Artificial Sequence
  Synthetic
uucucucaucagcacuc

SEQ ID NO: 750738 - RNA, 17 nt, Artificial Sequence
  Synthetic
ugauuguaagagcacuc

SEQ ID NO: 750739 - RNA, 17 nt, Artificial Sequence
  Synthetic
aucugcccuuagcacuc

SEQ ID NO: 750740 - RNA, 17 nt, Artificial Sequence
  Synthetic
aucacaccacugcacuc

SEQ ID NO: 750741 - RNA, 17 nt, Artificial Sequence
  Synthetic
uagaggguggugcacuc

SEQ ID NO: 750742 - RNA, 17 nt, Artificial Sequence
  Synthetic
ucuuaaacauugcacuc

SEQ ID NO: 750743 - RNA, 17 nt, Artificial Sequence
  Synthetic
cccccuaaaaaucacuc

SEQ ID NO: 750744 - RNA, 17 nt, Artificial Sequence
  Synthetic
uguacguaaaaucacuc

SEQ ID NO: 750745 - RNA, 17 nt, Artificial Sequence
  Synthetic
accaacaaggaucacuc

SEQ ID NO: 750746 - RNA, 17 nt, Artificial Sequence
  Synthetic
ucagcagaagcucacuc

SEQ ID NO: 750747 - RNA, 17 nt, Artificial Sequence
  Synthetic
uuuugaucugcucacuc

SEQ ID NO: 750748 - RNA, 17 nt, Artificial Sequence
  Synthetic
acuuagcuuagucacuc

SEQ ID NO: 750749 - RNA, 17 nt, Artificial Sequence
  Synthetic
cucuuuguaggucacuc

SEQ ID NO: 750750 - RNA, 17 nt, Artificial Sequence
  Synthetic
uucuggcucugucacuc

SEQ ID NO: 750751 - RNA, 17 nt, Artificial Sequence
  Synthetic
ugagaaagacuucacuc

SEQ ID NO: 750752 - RNA, 17 nt, Artificial Sequence
  Synthetic
augccucuucuucacuc

SEQ ID NO: 750753 - RNA, 17 nt, Artificial Sequence
  Synthetic
auuauuaaaguucacuc

SEQ ID NO: 750754 - RNA, 17 nt, Artificial Sequence
  Synthetic
aagagccauuuucacuc

SEQ ID NO: 750755 - RNA, 17 nt, Artificial Sequence
  Synthetic
acuggucauuuucacuc

SEQ ID NO: 750756 - RNA, 17 nt, Artificial Sequence
  Synthetic
ccccaguguuuucacuc

SEQ ID NO: 750757 - RNA, 17 nt, Artificial Sequence
  Synthetic
caagauuaaaaagacuc

SEQ ID NO: 750758 - RNA, 17 nt, Artificial Sequence
  Synthetic
aauacauacaaagacuc

SEQ ID NO: 750759 - RNA, 17 nt, Artificial Sequence
  Synthetic
aaccaaugcuaagacuc

SEQ ID NO: 750760 - RNA, 17 nt, Artificial Sequence
  Synthetic
agagauuaguaagacuc

SEQ ID NO: 750761 - RNA, 17 nt, Artificial Sequence
  Synthetic
aggacaaccacagacuc

SEQ ID NO: 750762 - RNA, 17 nt, Artificial Sequence
  Synthetic
ugcaaaguaucagacuc

SEQ ID NO: 750763 - RNA, 17 nt, Artificial Sequence
  Synthetic
accuauuuuucagacuc

SEQ ID NO: 750764 - RNA, 17 nt, Artificial Sequence
  Synthetic
acagagaggggagacuc

SEQ ID NO: 750765 - RNA, 17 nt, Artificial Sequence
  Synthetic
aucucuugccuagacuc

SEQ ID NO: 750766 - RNA, 17 nt, Artificial Sequence
  Synthetic
auuuuuaauguagacuc

SEQ ID NO: 750767 - RNA, 17 nt, Artificial Sequence
  Synthetic
caguggccuuuagacuc

SEQ ID NO: 750768 - RNA, 17 nt, Artificial Sequence
  Synthetic
aaguuaugcaacgacuc

SEQ ID NO: 750769 - RNA, 17 nt, Artificial Sequence
  Synthetic
ugccugcugaccgacuc

SEQ ID NO: 750770 - RNA, 17 nt, Artificial Sequence
  Synthetic
aaacuccaaaaggacuc

SEQ ID NO: 750771 - RNA, 17 nt, Artificial Sequence
  Synthetic
aggcagagaaaggacuc

SEQ ID NO: 750772 - RNA, 17 nt, Artificial Sequence
  Synthetic
cuagggcaagaggacuc

SEQ ID NO: 750773 - RNA, 17 nt, Artificial Sequence
  Synthetic
uuuaagggagaggacuc

SEQ ID NO: 750774 - RNA, 17 nt, Artificial Sequence
  Synthetic
uuuaggauugaggacuc

SEQ ID NO: 750775 - RNA, 17 nt, Artificial Sequence
  Synthetic
agcuggaauuaggacuc

SEQ ID NO: 750776 - RNA, 17 nt, Artificial Sequence
  Synthetic
agagucauauuggacuc

SEQ ID NO: 750777 - RNA, 17 nt, Artificial Sequence
  Synthetic
ccuauuuccaaugacuc

SEQ ID NO: 750778 - RNA, 17 nt, Artificial Sequence
  Synthetic
ccuuugcuuuaugacuc

SEQ ID NO: 750779 - RNA, 17 nt, Artificial Sequence
  Synthetic
aaguuccuuccugacuc

SEQ ID NO: 750780 - RNA, 17 nt, Artificial Sequence
  Synthetic
acccacacuucugacuc

SEQ ID NO: 750781 - RNA, 17 nt, Artificial Sequence
  Synthetic
uuccuucacagugacuc

SEQ ID NO: 750782 - RNA, 17 nt, Artificial Sequence
  Synthetic
uccugccucugugacuc

SEQ ID NO: 750783 - RNA, 17 nt, Artificial Sequence
  Synthetic
caugggcugcuugacuc

SEQ ID NO: 750784 - RNA, 17 nt, Artificial Sequence
  Synthetic
uuaugaggauuugacuc

SEQ ID NO: 750785 - RNA, 17 nt, Artificial Sequence
  Synthetic
caaccuauauuugacuc

SEQ ID NO: 750786 - RNA, 17 nt, Artificial Sequence
  Synthetic
aaccaggccaaauacuc

SEQ ID NO: 750787 - RNA, 17 nt, Artificial Sequence
  Synthetic
uguguaaugaaauacuc

SEQ ID NO: 750788 - RNA, 17 nt, Artificial Sequence
  Synthetic
aaaaaauacuaauacuc

SEQ ID NO: 750789 - RNA, 17 nt, Artificial Sequence
  Synthetic
aaaugcagcuaauacuc

SEQ ID NO: 750790 - RNA, 17 nt, Artificial Sequence
  Synthetic
caucacacaacauacuc

SEQ ID NO: 750791 - RNA, 17 nt, Artificial Sequence
  Synthetic
uggcuuuagacauacuc

SEQ ID NO: 750792 - RNA, 17 nt, Artificial Sequence
  Synthetic
uguagucccagauacuc

SEQ ID NO: 750793 - RNA, 17 nt, Artificial Sequence
  Synthetic
ucaucaugcagauacuc

SEQ ID NO: 750794 - RNA, 17 nt, Artificial Sequence
  Synthetic
uucugcuggugauacuc

SEQ ID NO: 750795 - RNA, 17 nt, Artificial Sequence
  Synthetic
uauaaucccaacuacuc

SEQ ID NO: 750796 - RNA, 17 nt, Artificial Sequence
  Synthetic
uguaaucccaacuacuc

SEQ ID NO: 750797 - RNA, 17 nt, Artificial Sequence
  Synthetic
cuguagucccacuacuc

SEQ ID NO: 750798 - RNA, 17 nt, Artificial Sequence
  Synthetic
uguaguaccagcuacuc

SEQ ID NO: 750799 - RNA, 17 nt, Artificial Sequence
  Synthetic
uguaaccccagcuacuc

SEQ ID NO: 750800 - RNA, 17 nt, Artificial Sequence
  Synthetic
uguagccccagcuacuc

SEQ ID NO: 750801 - RNA, 17 nt, Artificial Sequence
  Synthetic
ucuaaucccagcuacuc

SEQ ID NO: 750802 - RNA, 17 nt, Artificial Sequence
  Synthetic
cguaaucccagcuacuc

SEQ ID NO: 750803 - RNA, 17 nt, Artificial Sequence
  Synthetic
uguaaucccagcuacuc

SEQ ID NO: 750804 - RNA, 17 nt, Artificial Sequence
  Synthetic
uauagucccagcuacuc

SEQ ID NO: 750805 - RNA, 17 nt, Artificial Sequence
  Synthetic
uguagucccagcuacuc

SEQ ID NO: 750806 - RNA, 17 nt, Artificial Sequence
  Synthetic
uguggucccagcuacuc

SEQ ID NO: 750807 - RNA, 17 nt, Artificial Sequence
  Synthetic
uguaaucucagcuacuc

SEQ ID NO: 750808 - RNA, 17 nt, Artificial Sequence
  Synthetic
uguagucucagcuacuc

SEQ ID NO: 750809 - RNA, 17 nt, Artificial Sequence
  Synthetic
uauaauccuagcuacuc

SEQ ID NO: 750810 - RNA, 17 nt, Artificial Sequence
  Synthetic
uguagccuuagcuacuc

SEQ ID NO: 750811 - RNA, 17 nt, Artificial Sequence
  Synthetic
uuuuggcugggcuacuc

SEQ ID NO: 750812 - RNA, 17 nt, Artificial Sequence
  Synthetic
uguaguuccugcuacuc

SEQ ID NO: 750813 - RNA, 17 nt, Artificial Sequence
  Synthetic
uguucuuauugcuacuc

SEQ ID NO: 750814 - RNA, 17 nt, Artificial Sequence
  Synthetic
uguagucccaucuacuc

SEQ ID NO: 750815 - RNA, 17 nt, Artificial Sequence
  Synthetic
cuuuaccagcucuacuc

SEQ ID NO: 750816 - RNA, 17 nt, Artificial Sequence
  Synthetic
augaucauaaaguacuc

SEQ ID NO: 750817 - RNA, 17 nt, Artificial Sequence
  Synthetic
cuugaguuccaguacuc

SEQ ID NO: 750818 - RNA, 17 nt, Artificial Sequence
  Synthetic
aguuggcuucaguacuc

SEQ ID NO: 750819 - RNA, 17 nt, Artificial Sequence
  Synthetic
uacaguauauaguacuc

SEQ ID NO: 750820 - RNA, 17 nt, Artificial Sequence
  Synthetic
aguaauccgagguacuc

SEQ ID NO: 750821 - RNA, 17 nt, Artificial Sequence
  Synthetic
auauauguaauguacuc

SEQ ID NO: 750822 - RNA, 17 nt, Artificial Sequence
  Synthetic
augguuaauguguacuc

SEQ ID NO: 750823 - RNA, 17 nt, Artificial Sequence
  Synthetic
acaaguuggaauuacuc

SEQ ID NO: 750824 - RNA, 17 nt, Artificial Sequence
  Synthetic
uuuuagagggauuacuc

SEQ ID NO: 750825 - RNA, 17 nt, Artificial Sequence
  Synthetic
uuucucauuucuuacuc

SEQ ID NO: 750826 - RNA, 17 nt, Artificial Sequence
  Synthetic
uguaaucccaguuacuc

SEQ ID NO: 750827 - RNA, 17 nt, Artificial Sequence
  Synthetic
uacucagacuguuacuc

SEQ ID NO: 750828 - RNA, 17 nt, Artificial Sequence
  Synthetic
acacauccucuuuacuc

SEQ ID NO: 750829 - RNA, 17 nt, Artificial Sequence
  Synthetic
ugaggccuauuuuacuc

SEQ ID NO: 750830 - RNA, 17 nt, Artificial Sequence
  Synthetic
auauuaaccuuuuacuc

SEQ ID NO: 750831 - RNA, 17 nt, Artificial Sequence
  Synthetic
aaucuauucaaaaccuc

SEQ ID NO: 750832 - RNA, 17 nt, Artificial Sequence
  Synthetic
ucuccccucuaaaccuc

SEQ ID NO: 750833 - RNA, 17 nt, Artificial Sequence
  Synthetic
cucgagcucccaaccuc

SEQ ID NO: 750834 - RNA, 17 nt, Artificial Sequence
  Synthetic
aguacaauuucaaccuc

SEQ ID NO: 750835 - RNA, 17 nt, Artificial Sequence
  Synthetic
uuagcuuuuucaaccuc

SEQ ID NO: 750836 - RNA, 17 nt, Artificial Sequence
  Synthetic
cagcucaauggaaccuc

SEQ ID NO: 750837 - RNA, 17 nt, Artificial Sequence
  Synthetic
uggguacauauaaccuc

SEQ ID NO: 750838 - RNA, 17 nt, Artificial Sequence
  Synthetic
auauuaggacuaaccuc

SEQ ID NO: 750839 - RNA, 17 nt, Artificial Sequence
  Synthetic
cuucaggaauuaaccuc

SEQ ID NO: 750840 - RNA, 17 nt, Artificial Sequence
  Synthetic
uuucaacaagacaccuc

SEQ ID NO: 750841 - RNA, 17 nt, Artificial Sequence
  Synthetic
auuuuaacagacaccuc

SEQ ID NO: 750842 - RNA, 17 nt, Artificial Sequence
  Synthetic
cugaugucauacaccuc

SEQ ID NO: 750843 - RNA, 17 nt, Artificial Sequence
  Synthetic
uauaguaagggcaccuc

SEQ ID NO: 750844 - RNA, 17 nt, Artificial Sequence
  Synthetic
cuuuauucccucaccuc

SEQ ID NO: 750845 - RNA, 17 nt, Artificial Sequence
  Synthetic
auguaugucuucaccuc

SEQ ID NO: 750846 - RNA, 17 nt, Artificial Sequence
  Synthetic
aaaucccaguucaccuc

SEQ ID NO: 750847 - RNA, 17 nt, Artificial Sequence
  Synthetic
ucuguagucaagaccuc

SEQ ID NO: 750848 - RNA, 17 nt, Artificial Sequence
  Synthetic
auggcuggggagaccuc

SEQ ID NO: 750849 - RNA, 17 nt, Artificial Sequence
  Synthetic
acuucagacuagaccuc

SEQ ID NO: 750850 - RNA, 17 nt, Artificial Sequence
  Synthetic
uuugccuccuagaccuc

SEQ ID NO: 750851 - RNA, 17 nt, Artificial Sequence
  Synthetic
uauaugaaguagaccuc

SEQ ID NO: 750852 - RNA, 17 nt, Artificial Sequence
  Synthetic
cucaaacacccgaccuc

SEQ ID NO: 750853 - RNA, 17 nt, Artificial Sequence
  Synthetic
cucaaacucccgaccuc

SEQ ID NO: 750854 - RNA, 17 nt, Artificial Sequence
  Synthetic
cuuaaacucccgaccuc

SEQ ID NO: 750855 - RNA, 17 nt, Artificial Sequence
  Synthetic
cucgaacucccgaccuc

SEQ ID NO: 750856 - RNA, 17 nt, Artificial Sequence
  Synthetic
ucuagaucuccgaccuc

SEQ ID NO: 750857 - RNA, 17 nt, Artificial Sequence
  Synthetic
cuugaacuccggaccuc

SEQ ID NO: 750858 - RNA, 17 nt, Artificial Sequence
  Synthetic
cauccucauaugaccuc

SEQ ID NO: 750859 - RNA, 17 nt, Artificial Sequence
  Synthetic
cucgaaauccugaccuc

SEQ ID NO: 750860 - RNA, 17 nt, Artificial Sequence
  Synthetic
cgcaaacuccugaccuc

SEQ ID NO: 750861 - RNA, 17 nt, Artificial Sequence
  Synthetic
cucaaacuccugaccuc

SEQ ID NO: 750862 - RNA, 17 nt, Artificial Sequence
  Synthetic
cucgaacuccugaccuc

SEQ ID NO: 750863 - RNA, 17 nt, Artificial Sequence
  Synthetic
uucgaacuccugaccuc

SEQ ID NO: 750864 - RNA, 17 nt, Artificial Sequence
  Synthetic
cuugaacuccugaccuc

SEQ ID NO: 750865 - RNA, 17 nt, Artificial Sequence
  Synthetic
cuguaacuccugaccuc

SEQ ID NO: 750866 - RNA, 17 nt, Artificial Sequence
  Synthetic
cucgagcuccugaccuc

SEQ ID NO: 750867 - RNA, 17 nt, Artificial Sequence
  Synthetic
cucgaacuucugaccuc

SEQ ID NO: 750868 - RNA, 17 nt, Artificial Sequence
  Synthetic
uaucaccaugugaccuc

SEQ ID NO: 750869 - RNA, 17 nt, Artificial Sequence
  Synthetic
cuugaacucuugaccuc

SEQ ID NO: 750870 - RNA, 17 nt, Artificial Sequence
  Synthetic
ugucauuucaauaccuc

SEQ ID NO: 750871 - RNA, 17 nt, Artificial Sequence
  Synthetic
cccuaccauaauaccuc

SEQ ID NO: 750872 - RNA, 17 nt, Artificial Sequence
  Synthetic
aauaaagcauauaccuc

SEQ ID NO: 750873 - RNA, 17 nt, Artificial Sequence
  Synthetic
accuaacauuauaccuc

SEQ ID NO: 750874 - RNA, 17 nt, Artificial Sequence
  Synthetic
ugccacuuuuauaccuc

SEQ ID NO: 750875 - RNA, 17 nt, Artificial Sequence
  Synthetic
cgugauccuucuaccuc

SEQ ID NO: 750876 - RNA, 17 nt, Artificial Sequence
  Synthetic
aagaugucuucuaccuc

SEQ ID NO: 750877 - RNA, 17 nt, Artificial Sequence
  Synthetic
cucucuuuuucuaccuc

SEQ ID NO: 750878 - RNA, 17 nt, Artificial Sequence
  Synthetic
uaacuaucaaguaccuc

SEQ ID NO: 750879 - RNA, 17 nt, Artificial Sequence
  Synthetic
ucuagauuuuguaccuc

SEQ ID NO: 750880 - RNA, 17 nt, Artificial Sequence
  Synthetic
ccacauucaauuaccuc

SEQ ID NO: 750881 - RNA, 17 nt, Artificial Sequence
  Synthetic
aauuagaacauuaccuc

SEQ ID NO: 750882 - RNA, 17 nt, Artificial Sequence
  Synthetic
aucuucuacauuaccuc

SEQ ID NO: 750883 - RNA, 17 nt, Artificial Sequence
  Synthetic
aagaaagugguuaccuc

SEQ ID NO: 750884 - RNA, 17 nt, Artificial Sequence
  Synthetic
cuaccacugaaacccuc

SEQ ID NO: 750885 - RNA, 17 nt, Artificial Sequence
  Synthetic
cacucuuauuaacccuc

SEQ ID NO: 750886 - RNA, 17 nt, Artificial Sequence
  Synthetic
cacuguaacacacccuc

SEQ ID NO: 750887 - RNA, 17 nt, Artificial Sequence
  Synthetic
cauugccucccacccuc

SEQ ID NO: 750888 - RNA, 17 nt, Artificial Sequence
  Synthetic
acaguggucccacccuc

SEQ ID NO: 750889 - RNA, 17 nt, Artificial Sequence
  Synthetic
augcaaauagcacccuc

SEQ ID NO: 750890 - RNA, 17 nt, Artificial Sequence
  Synthetic
uacuuaggaggacccuc

SEQ ID NO: 750891 - RNA, 17 nt, Artificial Sequence
  Synthetic
ccugaacauguacccuc

SEQ ID NO: 750892 - RNA, 17 nt, Artificial Sequence
  Synthetic
uuuauuuuuucccccuc

SEQ ID NO: 750893 - RNA, 17 nt, Artificial Sequence
  Synthetic
augacugugggccccuc

SEQ ID NO: 750894 - RNA, 17 nt, Artificial Sequence
  Synthetic
ucuggcaggugccccuc

SEQ ID NO: 750895 - RNA, 17 nt, Artificial Sequence
  Synthetic
uaaucugccuuccccuc

SEQ ID NO: 750896 - RNA, 17 nt, Artificial Sequence
  Synthetic
ucaauuuuuuuccccuc

SEQ ID NO: 750897 - RNA, 17 nt, Artificial Sequence
  Synthetic
auacucugaaagcccuc

SEQ ID NO: 750898 - RNA, 17 nt, Artificial Sequence
  Synthetic
uguuuuaaugagcccuc

SEQ ID NO: 750899 - RNA, 17 nt, Artificial Sequence
  Synthetic
aaauuuauuuagcccuc

SEQ ID NO: 750900 - RNA, 17 nt, Artificial Sequence
  Synthetic
aaaagauguaugcccuc

SEQ ID NO: 750901 - RNA, 17 nt, Artificial Sequence
  Synthetic
uuugacuugcugcccuc

SEQ ID NO: 750902 - RNA, 17 nt, Artificial Sequence
  Synthetic
auuagaauguugcccuc

SEQ ID NO: 750903 - RNA, 17 nt, Artificial Sequence
  Synthetic
agauugcuuaaucccuc

SEQ ID NO: 750904 - RNA, 17 nt, Artificial Sequence
  Synthetic
ccauuuuuauaucccuc

SEQ ID NO: 750905 - RNA, 17 nt, Artificial Sequence
  Synthetic
uagcauauuugucccuc

SEQ ID NO: 750906 - RNA, 17 nt, Artificial Sequence
  Synthetic
auguagguaauucccuc

SEQ ID NO: 750907 - RNA, 17 nt, Artificial Sequence
  Synthetic
acccucuaacuucccuc

SEQ ID NO: 750908 - RNA, 17 nt, Artificial Sequence
  Synthetic
ucuuccccucuucccuc

SEQ ID NO: 750909 - RNA, 17 nt, Artificial Sequence
  Synthetic
caacuucugguucccuc

SEQ ID NO: 750910 - RNA, 17 nt, Artificial Sequence
  Synthetic
uuuauuuucuuucccuc

SEQ ID NO: 750911 - RNA, 17 nt, Artificial Sequence
  Synthetic
uguuuugguuuucccuc

SEQ ID NO: 750912 - RNA, 17 nt, Artificial Sequence
  Synthetic
aagaaugcagaagccuc

SEQ ID NO: 750913 - RNA, 17 nt, Artificial Sequence
  Synthetic
aagccaguagaagccuc

SEQ ID NO: 750914 - RNA, 17 nt, Artificial Sequence
  Synthetic
ccuaaauccacagccuc

SEQ ID NO: 750915 - RNA, 17 nt, Artificial Sequence
  Synthetic
cuacccuucacagccuc

SEQ ID NO: 750916 - RNA, 17 nt, Artificial Sequence
  Synthetic
aguaagauuacagccuc

SEQ ID NO: 750917 - RNA, 17 nt, Artificial Sequence
  Synthetic
caccacagcccagccuc

SEQ ID NO: 750918 - RNA, 17 nt, Artificial Sequence
  Synthetic
cuauccuucccagccuc

SEQ ID NO: 750919 - RNA, 17 nt, Artificial Sequence
  Synthetic
acacucuucccagccuc

SEQ ID NO: 750920 - RNA, 17 nt, Artificial Sequence
  Synthetic
ugggugcgggcagccuc

SEQ ID NO: 750921 - RNA, 17 nt, Artificial Sequence
  Synthetic
ucuccugccucagccuc

SEQ ID NO: 750922 - RNA, 17 nt, Artificial Sequence
  Synthetic
auuaaggugucagccuc

SEQ ID NO: 750923 - RNA, 17 nt, Artificial Sequence
  Synthetic
cuucuggugagagccuc

SEQ ID NO: 750924 - RNA, 17 nt, Artificial Sequence
  Synthetic
agaucuugaauagccuc

SEQ ID NO: 750925 - RNA, 17 nt, Artificial Sequence
  Synthetic
aacacacugcuagccuc

SEQ ID NO: 750926 - RNA, 17 nt, Artificial Sequence
  Synthetic
ugaacagcuguagccuc

SEQ ID NO: 750927 - RNA, 17 nt, Artificial Sequence
  Synthetic
cuacccuuuguagccuc

SEQ ID NO: 750928 - RNA, 17 nt, Artificial Sequence
  Synthetic
uucuggauguuagccuc

SEQ ID NO: 750929 - RNA, 17 nt, Artificial Sequence
  Synthetic
ugugauccgcccgccuc

SEQ ID NO: 750930 - RNA, 17 nt, Artificial Sequence
  Synthetic
ucucaaguccaggccuc

SEQ ID NO: 750931 - RNA, 17 nt, Artificial Sequence
  Synthetic
auggcuucagaggccuc

SEQ ID NO: 750932 - RNA, 17 nt, Artificial Sequence
  Synthetic
auggcuggggaggccuc

SEQ ID NO: 750933 - RNA, 17 nt, Artificial Sequence
  Synthetic
uugccuuccuaggccuc

SEQ ID NO: 750934 - RNA, 17 nt, Artificial Sequence
  Synthetic
ccugagcucuaggccuc

SEQ ID NO: 750935 - RNA, 17 nt, Artificial Sequence
  Synthetic
auggcuggguaggccuc

SEQ ID NO: 750936 - RNA, 17 nt, Artificial Sequence
  Synthetic
uuuuccuuuuaggccuc

SEQ ID NO: 750937 - RNA, 17 nt, Artificial Sequence
  Synthetic
ucaggucacacggccuc

SEQ ID NO: 750938 - RNA, 17 nt, Artificial Sequence
  Synthetic
cuucucaugagggccuc

SEQ ID NO: 750939 - RNA, 17 nt, Artificial Sequence
  Synthetic
cucgaacuccuggccuc

SEQ ID NO: 750940 - RNA, 17 nt, Artificial Sequence
  Synthetic
uacaaggcauuggccuc

SEQ ID NO: 750941 - RNA, 17 nt, Artificial Sequence
  Synthetic
ugcauuguuuuggccuc

SEQ ID NO: 750942 - RNA, 17 nt, Artificial Sequence
  Synthetic
agaaacagaaaugccuc

SEQ ID NO: 750943 - RNA, 17 nt, Artificial Sequence
  Synthetic
aaagaaaggaaugccuc

SEQ ID NO: 750944 - RNA, 17 nt, Artificial Sequence
  Synthetic
ugcucugaccaugccuc

SEQ ID NO: 750945 - RNA, 17 nt, Artificial Sequence
  Synthetic
cugauuucaacugccuc

SEQ ID NO: 750946 - RNA, 17 nt, Artificial Sequence
  Synthetic
auguccugcacugccuc

SEQ ID NO: 750947 - RNA, 17 nt, Artificial Sequence
  Synthetic
uugagugucacugccuc

SEQ ID NO: 750948 - RNA, 17 nt, Artificial Sequence
  Synthetic
uauauacaggcugccuc

SEQ ID NO: 750949 - RNA, 17 nt, Artificial Sequence
  Synthetic
ucucagcucagugccuc

SEQ ID NO: 750950 - RNA, 17 nt, Artificial Sequence
  Synthetic
agugauucucgugccuc

SEQ ID NO: 750951 - RNA, 17 nt, Artificial Sequence
  Synthetic
ugucuugauggugccuc

SEQ ID NO: 750952 - RNA, 17 nt, Artificial Sequence
  Synthetic
uccauuugaugugccuc

SEQ ID NO: 750953 - RNA, 17 nt, Artificial Sequence
  Synthetic
uucauuuacauugccuc

SEQ ID NO: 750954 - RNA, 17 nt, Artificial Sequence
  Synthetic
cuaaaaagacuugccuc

SEQ ID NO: 750955 - RNA, 17 nt, Artificial Sequence
  Synthetic
ugaguuuagguugccuc

SEQ ID NO: 750956 - RNA, 17 nt, Artificial Sequence
  Synthetic
cacccgucuuuugccuc

SEQ ID NO: 750957 - RNA, 17 nt, Artificial Sequence
  Synthetic
cccagcccccaauccuc

SEQ ID NO: 750958 - RNA, 17 nt, Artificial Sequence
  Synthetic
acagcuucugaauccuc

SEQ ID NO: 750959 - RNA, 17 nt, Artificial Sequence
  Synthetic
cugagguuauaauccuc

SEQ ID NO: 750960 - RNA, 17 nt, Artificial Sequence
  Synthetic
uaagcuauaacauccuc

SEQ ID NO: 750961 - RNA, 17 nt, Artificial Sequence
  Synthetic
auauggcccacauccuc

SEQ ID NO: 750962 - RNA, 17 nt, Artificial Sequence
  Synthetic
cgacccuucccauccuc

SEQ ID NO: 750963 - RNA, 17 nt, Artificial Sequence
  Synthetic
uaaauauuuucauccuc

SEQ ID NO: 750964 - RNA, 17 nt, Artificial Sequence
  Synthetic
uagaaauauagauccuc

SEQ ID NO: 750965 - RNA, 17 nt, Artificial Sequence
  Synthetic
aggaauacacuauccuc

SEQ ID NO: 750966 - RNA, 17 nt, Artificial Sequence
  Synthetic
uuguucugacuauccuc

SEQ ID NO: 750967 - RNA, 17 nt, Artificial Sequence
  Synthetic
cuuaaguuucuauccuc

SEQ ID NO: 750968 - RNA, 17 nt, Artificial Sequence
  Synthetic
cuuaacauaguauccuc

SEQ ID NO: 750969 - RNA, 17 nt, Artificial Sequence
  Synthetic
cuggucuugaacuccuc

SEQ ID NO: 750970 - RNA, 17 nt, Artificial Sequence
  Synthetic
uacucagccuacuccuc

SEQ ID NO: 750971 - RNA, 17 nt, Artificial Sequence
  Synthetic
ucacauucaagcuccuc

SEQ ID NO: 750972 - RNA, 17 nt, Artificial Sequence
  Synthetic
aauuuguuuggcuccuc

SEQ ID NO: 750973 - RNA, 17 nt, Artificial Sequence
  Synthetic
cacagugccugcuccuc

SEQ ID NO: 750974 - RNA, 17 nt, Artificial Sequence
  Synthetic
uagcuuaucaucuccuc

SEQ ID NO: 750975 - RNA, 17 nt, Artificial Sequence
  Synthetic
ugguaagaacucuccuc

SEQ ID NO: 750976 - RNA, 17 nt, Artificial Sequence
  Synthetic
uucugggcucucuccuc

SEQ ID NO: 750977 - RNA, 17 nt, Artificial Sequence
  Synthetic
ucuuguucucucuccuc

SEQ ID NO: 750978 - RNA, 17 nt, Artificial Sequence
  Synthetic
ucucuguaguucuccuc

SEQ ID NO: 750979 - RNA, 17 nt, Artificial Sequence
  Synthetic
uuaagaucuuucuccuc

SEQ ID NO: 750980 - RNA, 17 nt, Artificial Sequence
  Synthetic
cccuagauuuaguccuc

SEQ ID NO: 750981 - RNA, 17 nt, Artificial Sequence
  Synthetic
aaaaguuugagguccuc

SEQ ID NO: 750982 - RNA, 17 nt, Artificial Sequence
  Synthetic
ugcaaauugugguccuc

SEQ ID NO: 750983 - RNA, 17 nt, Artificial Sequence
  Synthetic
uuguaucacauguccuc

SEQ ID NO: 750984 - RNA, 17 nt, Artificial Sequence
  Synthetic
uuuuaaagacuguccuc

SEQ ID NO: 750985 - RNA, 17 nt, Artificial Sequence
  Synthetic
ucugggguucuguccuc

SEQ ID NO: 750986 - RNA, 17 nt, Artificial Sequence
  Synthetic
uaaauuuuauuguccuc

SEQ ID NO: 750987 - RNA, 17 nt, Artificial Sequence
  Synthetic
uuucuucuaaauuccuc

SEQ ID NO: 750988 - RNA, 17 nt, Artificial Sequence
  Synthetic
aauuuaccuaauuccuc

SEQ ID NO: 750989 - RNA, 17 nt, Artificial Sequence
  Synthetic
ugacuccugcauuccuc

SEQ ID NO: 750990 - RNA, 17 nt, Artificial Sequence
  Synthetic
caguguggcgauuccuc

SEQ ID NO: 750991 - RNA, 17 nt, Artificial Sequence
  Synthetic
cgguguggcgauuccuc

SEQ ID NO: 750992 - RNA, 17 nt, Artificial Sequence
  Synthetic
cuuuggacauauuccuc

SEQ ID NO: 750993 - RNA, 17 nt, Artificial Sequence
  Synthetic
aaugauuucuauuccuc

SEQ ID NO: 750994 - RNA, 17 nt, Artificial Sequence
  Synthetic
cacucaccuuauuccuc

SEQ ID NO: 750995 - RNA, 17 nt, Artificial Sequence
  Synthetic
uuguggcauacuuccuc

SEQ ID NO: 750996 - RNA, 17 nt, Artificial Sequence
  Synthetic
cugucuguuccuuccuc

SEQ ID NO: 750997 - RNA, 17 nt, Artificial Sequence
  Synthetic
uuuucaaaaucuuccuc

SEQ ID NO: 750998 - RNA, 17 nt, Artificial Sequence
  Synthetic
uuauccuuagguuccuc

SEQ ID NO: 750999 - RNA, 17 nt, Artificial Sequence
  Synthetic
aacacugugauuuccuc

SEQ ID NO: 751000 - RNA, 17 nt, Artificial Sequence
  Synthetic
ucuguauucguuuccuc

SEQ ID NO: 751001 - RNA, 17 nt, Artificial Sequence
  Synthetic
ucucaaaauguuuccuc

SEQ ID NO: 751002 - RNA, 17 nt, Artificial Sequence
  Synthetic
cauugcuuguuuuccuc

SEQ ID NO: 751003 - RNA, 17 nt, Artificial Sequence
  Synthetic
cauauauguaaaagcuc

SEQ ID NO: 751004 - RNA, 17 nt, Artificial Sequence
  Synthetic
acuaagggccaaagcuc

SEQ ID NO: 751005 - RNA, 17 nt, Artificial Sequence
  Synthetic
uauucaaccuaaagcuc

SEQ ID NO: 751006 - RNA, 17 nt, Artificial Sequence
  Synthetic
uuucucagguaaagcuc

SEQ ID NO: 751007 - RNA, 17 nt, Artificial Sequence
  Synthetic
uugaaaauaccaagcuc

SEQ ID NO: 751008 - RNA, 17 nt, Artificial Sequence
  Synthetic
cucaaacucccaagcuc

SEQ ID NO: 751009 - RNA, 17 nt, Artificial Sequence
  Synthetic
uucuuaaugccaagcuc

SEQ ID NO: 751010 - RNA, 17 nt, Artificial Sequence
  Synthetic
aauauagccagaagcuc

SEQ ID NO: 751011 - RNA, 17 nt, Artificial Sequence
  Synthetic
uuucaaggcagaagcuc

SEQ ID NO: 751012 - RNA, 17 nt, Artificial Sequence
  Synthetic
cuccuugaccgaagcuc

SEQ ID NO: 751013 - RNA, 17 nt, Artificial Sequence
  Synthetic
aaugugcagcgaagcuc

SEQ ID NO: 751014 - RNA, 17 nt, Artificial Sequence
  Synthetic
aauugagcaggaagcuc

SEQ ID NO: 751015 - RNA, 17 nt, Artificial Sequence
  Synthetic
aacuuccagugaagcuc

SEQ ID NO: 751016 - RNA, 17 nt, Artificial Sequence
  Synthetic
auuaauagcauaagcuc

SEQ ID NO: 751017 - RNA, 17 nt, Artificial Sequence
  Synthetic
aaugucuuaguaagcuc

SEQ ID NO: 751018 - RNA, 17 nt, Artificial Sequence
  Synthetic
cugaauaggaacagcuc

SEQ ID NO: 751019 - RNA, 17 nt, Artificial Sequence
  Synthetic
uuugguugucacagcuc

SEQ ID NO: 751020 - RNA, 17 nt, Artificial Sequence
  Synthetic
ucucaaacugacagcuc

SEQ ID NO: 751021 - RNA, 17 nt, Artificial Sequence
  Synthetic
aacaauuuauacagcuc

SEQ ID NO: 751022 - RNA, 17 nt, Artificial Sequence
  Synthetic
agggagcgcuacagcuc

SEQ ID NO: 751023 - RNA, 17 nt, Artificial Sequence
  Synthetic
aagccaaaguacagcuc

SEQ ID NO: 751024 - RNA, 17 nt, Artificial Sequence
  Synthetic
ugaaguggaaccagcuc

SEQ ID NO: 751025 - RNA, 17 nt, Artificial Sequence
  Synthetic
uuucauguccccagcuc

SEQ ID NO: 751026 - RNA, 17 nt, Artificial Sequence
  Synthetic
aauaaauaagccagcuc

SEQ ID NO: 751027 - RNA, 17 nt, Artificial Sequence
  Synthetic
cugguaagaagcagcuc

SEQ ID NO: 751028 - RNA, 17 nt, Artificial Sequence
  Synthetic
uguccucauagcagcuc

SEQ ID NO: 751029 - RNA, 17 nt, Artificial Sequence
  Synthetic
aauaaucacaucagcuc

SEQ ID NO: 751030 - RNA, 17 nt, Artificial Sequence
  Synthetic
cucgaguuccucagcuc

SEQ ID NO: 751031 - RNA, 17 nt, Artificial Sequence
  Synthetic
cguucuagcuucagcuc

SEQ ID NO: 751032 - RNA, 17 nt, Artificial Sequence
  Synthetic
augcuggacaagagcuc

SEQ ID NO: 751033 - RNA, 17 nt, Artificial Sequence
  Synthetic
cucauacaggagagcuc

SEQ ID NO: 751034 - RNA, 17 nt, Artificial Sequence
  Synthetic
uuuuuaaaauagagcuc

SEQ ID NO: 751035 - RNA, 17 nt, Artificial Sequence
  Synthetic
ccagaggccuagagcuc

SEQ ID NO: 751036 - RNA, 17 nt, Artificial Sequence
  Synthetic
aaauauuauucgagcuc

SEQ ID NO: 751037 - RNA, 17 nt, Artificial Sequence
  Synthetic
uccugaagaaggagcuc

SEQ ID NO: 751038 - RNA, 17 nt, Artificial Sequence
  Synthetic
uccugaugaaggagcuc

SEQ ID NO: 751039 - RNA, 17 nt, Artificial Sequence
  Synthetic
cagcggaaggggagcuc

SEQ ID NO: 751040 - RNA, 17 nt, Artificial Sequence
  Synthetic
caagagaucuggagcuc

SEQ ID NO: 751041 - RNA, 17 nt, Artificial Sequence
  Synthetic
cuccaaccccugagcuc

SEQ ID NO: 751042 - RNA, 17 nt, Artificial Sequence
  Synthetic
uaccaugugcugagcuc

SEQ ID NO: 751043 - RNA, 17 nt, Artificial Sequence
  Synthetic
uagccacgugugagcuc

SEQ ID NO: 751044 - RNA, 17 nt, Artificial Sequence
  Synthetic
ccaaaacuuuauagcuc

SEQ ID NO: 751045 - RNA, 17 nt, Artificial Sequence
  Synthetic
aggcaucugacuagcuc

SEQ ID NO: 751046 - RNA, 17 nt, Artificial Sequence
  Synthetic
uucugauuuacuagcuc

SEQ ID NO: 751047 - RNA, 17 nt, Artificial Sequence
  Synthetic
aauaacuucuuuagcuc

SEQ ID NO: 751048 - RNA, 17 nt, Artificial Sequence
  Synthetic
ucucuugauggacgcuc

SEQ ID NO: 751049 - RNA, 17 nt, Artificial Sequence
  Synthetic
cuuuuaaagggccgcuc

SEQ ID NO: 751050 - RNA, 17 nt, Artificial Sequence
  Synthetic
cucccaaugaaaggcuc

SEQ ID NO: 751051 - RNA, 17 nt, Artificial Sequence
  Synthetic
ugagggaauaaaggcuc

SEQ ID NO: 751052 - RNA, 17 nt, Artificial Sequence
  Synthetic
cugccagcugaaggcuc

SEQ ID NO: 751053 - RNA, 17 nt, Artificial Sequence
  Synthetic
uaucccucugaaggcuc

SEQ ID NO: 751054 - RNA, 17 nt, Artificial Sequence
  Synthetic
aaagcacucacaggcuc

SEQ ID NO: 751055 - RNA, 17 nt, Artificial Sequence
  Synthetic
caaaauaauccaggcuc

SEQ ID NO: 751056 - RNA, 17 nt, Artificial Sequence
  Synthetic
cucaaccauccaggcuc

SEQ ID NO: 751057 - RNA, 17 nt, Artificial Sequence
  Synthetic
uagagaugaucaggcuc

SEQ ID NO: 751058 - RNA, 17 nt, Artificial Sequence
  Synthetic
acagaccaaauaggcuc

SEQ ID NO: 751059 - RNA, 17 nt, Artificial Sequence
  Synthetic
uauuuggucauaggcuc

SEQ ID NO: 751060 - RNA, 17 nt, Artificial Sequence
  Synthetic
caccaacuccuaggcuc

SEQ ID NO: 751061 - RNA, 17 nt, Artificial Sequence
  Synthetic
uuuucuugcaggggcuc

SEQ ID NO: 751062 - RNA, 17 nt, Artificial Sequence
  Synthetic
ugacauugagggggcuc

SEQ ID NO: 751063 - RNA, 17 nt, Artificial Sequence
  Synthetic
acauagcaggggggcuc

SEQ ID NO: 751064 - RNA, 17 nt, Artificial Sequence
  Synthetic
uuccagcuugggggcuc

SEQ ID NO: 751065 - RNA, 17 nt, Artificial Sequence
  Synthetic
ugcagauaccugggcuc

SEQ ID NO: 751066 - RNA, 17 nt, Artificial Sequence
  Synthetic
ucgacaucccugggcuc

SEQ ID NO: 751067 - RNA, 17 nt, Artificial Sequence
  Synthetic
cuccaccuccugggcuc

SEQ ID NO: 751068 - RNA, 17 nt, Artificial Sequence
  Synthetic
cuuucaucucugggcuc

SEQ ID NO: 751069 - RNA, 17 nt, Artificial Sequence
  Synthetic
aaggggacagugggcuc

SEQ ID NO: 751070 - RNA, 17 nt, Artificial Sequence
  Synthetic
uagauaaacuugggcuc

SEQ ID NO: 751071 - RNA, 17 nt, Artificial Sequence
  Synthetic
agcaaagagccuggcuc

SEQ ID NO: 751072 - RNA, 17 nt, Artificial Sequence
  Synthetic
uuacaagaagcuggcuc

SEQ ID NO: 751073 - RNA, 17 nt, Artificial Sequence
  Synthetic
auuagucuaaguggcuc

SEQ ID NO: 751074 - RNA, 17 nt, Artificial Sequence
  Synthetic
aaaagacuucuuggcuc

SEQ ID NO: 751075 - RNA, 17 nt, Artificial Sequence
  Synthetic
auaagacuucuuggcuc

SEQ ID NO: 751076 - RNA, 17 nt, Artificial Sequence
  Synthetic
uggggacgaguuggcuc

SEQ ID NO: 751077 - RNA, 17 nt, Artificial Sequence
  Synthetic
ucauuauauuuuggcuc

SEQ ID NO: 751078 - RNA, 17 nt, Artificial Sequence
  Synthetic
augguuacuuuuggcuc

SEQ ID NO: 751079 - RNA, 17 nt, Artificial Sequence
  Synthetic
cuuuguucuuuuggcuc

SEQ ID NO: 751080 - RNA, 17 nt, Artificial Sequence
  Synthetic
caaucauaaaaaugcuc

SEQ ID NO: 751081 - RNA, 17 nt, Artificial Sequence
  Synthetic
uuucacuguaaaugcuc

SEQ ID NO: 751082 - RNA, 17 nt, Artificial Sequence
  Synthetic
uuuagaaaccaaugcuc

SEQ ID NO: 751083 - RNA, 17 nt, Artificial Sequence
  Synthetic
cucugacuauaaugcuc

SEQ ID NO: 751084 - RNA, 17 nt, Artificial Sequence
  Synthetic
uuacaacauuaaugcuc

SEQ ID NO: 751085 - RNA, 17 nt, Artificial Sequence
  Synthetic
caaaauaguuaaugcuc

SEQ ID NO: 751086 - RNA, 17 nt, Artificial Sequence
  Synthetic
uuaagacaaacaugcuc

SEQ ID NO: 751087 - RNA, 17 nt, Artificial Sequence
  Synthetic
aacaauuccagaugcuc

SEQ ID NO: 751088 - RNA, 17 nt, Artificial Sequence
  Synthetic
uguaguccuagaugcuc

SEQ ID NO: 751089 - RNA, 17 nt, Artificial Sequence
  Synthetic
uauuaucuaauaugcuc

SEQ ID NO: 751090 - RNA, 17 nt, Artificial Sequence
  Synthetic
aauugugucauaugcuc

SEQ ID NO: 751091 - RNA, 17 nt, Artificial Sequence
  Synthetic
aggaagcagauaugcuc

SEQ ID NO: 751092 - RNA, 17 nt, Artificial Sequence
  Synthetic
aaaggcuagauaugcuc

SEQ ID NO: 751093 - RNA, 17 nt, Artificial Sequence
  Synthetic
auuuguguuauaugcuc

SEQ ID NO: 751094 - RNA, 17 nt, Artificial Sequence
  Synthetic
cagagaggauuaugcuc

SEQ ID NO: 751095 - RNA, 17 nt, Artificial Sequence
  Synthetic
caguuuauguuaugcuc

SEQ ID NO: 751096 - RNA, 17 nt, Artificial Sequence
  Synthetic
aaaaggucaaacugcuc

SEQ ID NO: 751097 - RNA, 17 nt, Artificial Sequence
  Synthetic
aagucacuuaacugcuc

SEQ ID NO: 751098 - RNA, 17 nt, Artificial Sequence
  Synthetic
ucagccuuugacugcuc

SEQ ID NO: 751099 - RNA, 17 nt, Artificial Sequence
  Synthetic
ugugguaccagcugcuc

SEQ ID NO: 751100 - RNA, 17 nt, Artificial Sequence
  Synthetic
uguagucccagcugcuc

SEQ ID NO: 751101 - RNA, 17 nt, Artificial Sequence
  Synthetic
accagcaccugcugcuc

SEQ ID NO: 751102 - RNA, 17 nt, Artificial Sequence
  Synthetic
cuaaugcccugcugcuc

SEQ ID NO: 751103 - RNA, 17 nt, Artificial Sequence
  Synthetic
ucuccuucucucugcuc

SEQ ID NO: 751104 - RNA, 17 nt, Artificial Sequence
  Synthetic
augaaugccuucugcuc

SEQ ID NO: 751105 - RNA, 17 nt, Artificial Sequence
  Synthetic
cccccuggcuucugcuc

SEQ ID NO: 751106 - RNA, 17 nt, Artificial Sequence
  Synthetic
ugugggccaaagugcuc

SEQ ID NO: 751107 - RNA, 17 nt, Artificial Sequence
  Synthetic
auuucuagcaagugcuc

SEQ ID NO: 751108 - RNA, 17 nt, Artificial Sequence
  Synthetic
ugggauuacaggugcuc

SEQ ID NO: 751109 - RNA, 17 nt, Artificial Sequence
  Synthetic
cucuaugcuaggugcuc

SEQ ID NO: 751110 - RNA, 17 nt, Artificial Sequence
  Synthetic
aggugaugucugugcuc

SEQ ID NO: 751111 - RNA, 17 nt, Artificial Sequence
  Synthetic
agauuuggugugugcuc

SEQ ID NO: 751112 - RNA, 17 nt, Artificial Sequence
  Synthetic
augacaauguugugcuc

SEQ ID NO: 751113 - RNA, 17 nt, Artificial Sequence
  Synthetic
cuccugccuaauugcuc

SEQ ID NO: 751114 - RNA, 17 nt, Artificial Sequence
  Synthetic
aguuuagugcauugcuc

SEQ ID NO: 751115 - RNA, 17 nt, Artificial Sequence
  Synthetic
acaaaaaggacuugcuc

SEQ ID NO: 751116 - RNA, 17 nt, Artificial Sequence
  Synthetic
aguuaagugacuugcuc

SEQ ID NO: 751117 - RNA, 17 nt, Artificial Sequence
  Synthetic
agaauugggccuugcuc

SEQ ID NO: 751118 - RNA, 17 nt, Artificial Sequence
  Synthetic
agacuuucuccuugcuc

SEQ ID NO: 751119 - RNA, 17 nt, Artificial Sequence
  Synthetic
ccuaucaucucuugcuc

SEQ ID NO: 751120 - RNA, 17 nt, Artificial Sequence
  Synthetic
aggacucaaaguugcuc

SEQ ID NO: 751121 - RNA, 17 nt, Artificial Sequence
  Synthetic
ccaucuuuccguugcuc

SEQ ID NO: 751122 - RNA, 17 nt, Artificial Sequence
  Synthetic
ugcucagcugguugcuc

SEQ ID NO: 751123 - RNA, 17 nt, Artificial Sequence
  Synthetic
agacagagacuuugcuc

SEQ ID NO: 751124 - RNA, 17 nt, Artificial Sequence
  Synthetic
uauauaugucuuugcuc

SEQ ID NO: 751125 - RNA, 17 nt, Artificial Sequence
  Synthetic
aaugggaacguuugcuc

SEQ ID NO: 751126 - RNA, 17 nt, Artificial Sequence
  Synthetic
auuuugagcuuuugcuc

SEQ ID NO: 751127 - RNA, 17 nt, Artificial Sequence
  Synthetic
aagaagacuuuuugcuc

SEQ ID NO: 751128 - RNA, 17 nt, Artificial Sequence
  Synthetic
cuuaaccagaaaaucuc

SEQ ID NO: 751129 - RNA, 17 nt, Artificial Sequence
  Synthetic
aaaugagcuaaaaucuc

SEQ ID NO: 751130 - RNA, 17 nt, Artificial Sequence
  Synthetic
uuuaaaaguaaaaucuc

SEQ ID NO: 751131 - RNA, 17 nt, Artificial Sequence
  Synthetic
cugagaguugaaaucuc

SEQ ID NO: 751132 - RNA, 17 nt, Artificial Sequence
  Synthetic
ucugguauauaaaucuc

SEQ ID NO: 751133 - RNA, 17 nt, Artificial Sequence
  Synthetic
auaaauuacccaaucuc

SEQ ID NO: 751134 - RNA, 17 nt, Artificial Sequence
  Synthetic
agccuucagccaaucuc

SEQ ID NO: 751135 - RNA, 17 nt, Artificial Sequence
  Synthetic
uugaccuuuccaaucuc

SEQ ID NO: 751136 - RNA, 17 nt, Artificial Sequence
  Synthetic
augcucaccucaaucuc

SEQ ID NO: 751137 - RNA, 17 nt, Artificial Sequence
  Synthetic
caacggaccagaaucuc

SEQ ID NO: 751138 - RNA, 17 nt, Artificial Sequence
  Synthetic
ccacauaccagaaucuc

SEQ ID NO: 751139 - RNA, 17 nt, Artificial Sequence
  Synthetic
uagaaaugcagaaucuc

SEQ ID NO: 751140 - RNA, 17 nt, Artificial Sequence
  Synthetic
aacuaaaucagaaucuc

SEQ ID NO: 751141 - RNA, 17 nt, Artificial Sequence
  Synthetic
agagcuaaaggaaucuc

SEQ ID NO: 751142 - RNA, 17 nt, Artificial Sequence
  Synthetic
ucaucuccaggaaucuc

SEQ ID NO: 751143 - RNA, 17 nt, Artificial Sequence
  Synthetic
acagcuugaggaaucuc

SEQ ID NO: 751144 - RNA, 17 nt, Artificial Sequence
  Synthetic
acuuucuaaaacaucuc

SEQ ID NO: 751145 - RNA, 17 nt, Artificial Sequence
  Synthetic
ucugguugucacaucuc

SEQ ID NO: 751146 - RNA, 17 nt, Artificial Sequence
  Synthetic
cagcauauucacaucuc

SEQ ID NO: 751147 - RNA, 17 nt, Artificial Sequence
  Synthetic
uuuccacaugacaucuc

SEQ ID NO: 751148 - RNA, 17 nt, Artificial Sequence
  Synthetic
cucucucaugacaucuc

SEQ ID NO: 751149 - RNA, 17 nt, Artificial Sequence
  Synthetic
uaagaaacuaccaucuc

SEQ ID NO: 751150 - RNA, 17 nt, Artificial Sequence
  Synthetic
uguggucaagccaucuc

SEQ ID NO: 751151 - RNA, 17 nt, Artificial Sequence
  Synthetic
uuacucaaaagcaucuc

SEQ ID NO: 751152 - RNA, 17 nt, Artificial Sequence
  Synthetic
cccucagacagcaucuc

SEQ ID NO: 751153 - RNA, 17 nt, Artificial Sequence
  Synthetic
uacugaaucagcaucuc

SEQ ID NO: 751154 - RNA, 17 nt, Artificial Sequence
  Synthetic
acuagccuacucaucuc

SEQ ID NO: 751155 - RNA, 17 nt, Artificial Sequence
  Synthetic
cgacaacuucucaucuc

SEQ ID NO: 751156 - RNA, 17 nt, Artificial Sequence
  Synthetic
uauuuuccuuucaucuc

SEQ ID NO: 751157 - RNA, 17 nt, Artificial Sequence
  Synthetic
ccuggucuuuucaucuc

SEQ ID NO: 751158 - RNA, 17 nt, Artificial Sequence
  Synthetic
aggcuauucaagaucuc

SEQ ID NO: 751159 - RNA, 17 nt, Artificial Sequence
  Synthetic
uggugauggaagaucuc

SEQ ID NO: 751160 - RNA, 17 nt, Artificial Sequence
  Synthetic
aggaaacauaagaucuc

SEQ ID NO: 751161 - RNA, 17 nt, Artificial Sequence
  Synthetic
agagcuucacagaucuc

SEQ ID NO: 751162 - RNA, 17 nt, Artificial Sequence
  Synthetic
cauugaaggcagaucuc

SEQ ID NO: 751163 - RNA, 17 nt, Artificial Sequence
  Synthetic
caguugaaucagaucuc

SEQ ID NO: 751164 - RNA, 17 nt, Artificial Sequence
  Synthetic
accugcauagagaucuc

SEQ ID NO: 751165 - RNA, 17 nt, Artificial Sequence
  Synthetic
cuuucuuccucgaucuc

SEQ ID NO: 751166 - RNA, 17 nt, Artificial Sequence
  Synthetic
aaauagaaaaggaucuc

SEQ ID NO: 751167 - RNA, 17 nt, Artificial Sequence
  Synthetic
uauauaacuaggaucuc

SEQ ID NO: 751168 - RNA, 17 nt, Artificial Sequence
  Synthetic
cagcaugggaugaucuc

SEQ ID NO: 751169 - RNA, 17 nt, Artificial Sequence
  Synthetic
uuauuuucccugaucuc

SEQ ID NO: 751170 - RNA, 17 nt, Artificial Sequence
  Synthetic
acuggaucucugaucuc

SEQ ID NO: 751171 - RNA, 17 nt, Artificial Sequence
  Synthetic
cuccuauuucugaucuc

SEQ ID NO: 751172 - RNA, 17 nt, Artificial Sequence
  Synthetic
uuagggaacgugaucuc

SEQ ID NO: 751173 - RNA, 17 nt, Artificial Sequence
  Synthetic
cccaccugcuugaucuc

SEQ ID NO: 751174 - RNA, 17 nt, Artificial Sequence
  Synthetic
aggauggucuugaucuc

SEQ ID NO: 751175 - RNA, 17 nt, Artificial Sequence
  Synthetic
cauacaauuuugaucuc

SEQ ID NO: 751176 - RNA, 17 nt, Artificial Sequence
  Synthetic
auaaaaugaaauaucuc

SEQ ID NO: 751177 - RNA, 17 nt, Artificial Sequence
  Synthetic
uacacagacaauaucuc

SEQ ID NO: 751178 - RNA, 17 nt, Artificial Sequence
  Synthetic
uuauacaaggauaucuc

SEQ ID NO: 751179 - RNA, 17 nt, Artificial Sequence
  Synthetic
cuuuuauccacuaucuc

SEQ ID NO: 751180 - RNA, 17 nt, Artificial Sequence
  Synthetic
uucuuuuccacuaucuc

SEQ ID NO: 751181 - RNA, 17 nt, Artificial Sequence
  Synthetic
ccccuccauccuaucuc

SEQ ID NO: 751182 - RNA, 17 nt, Artificial Sequence
  Synthetic
cucaaauguccuaucuc

SEQ ID NO: 751183 - RNA, 17 nt, Artificial Sequence
  Synthetic
auucaaguagcuaucuc

SEQ ID NO: 751184 - RNA, 17 nt, Artificial Sequence
  Synthetic
uugcuugucaguaucuc

SEQ ID NO: 751185 - RNA, 17 nt, Artificial Sequence
  Synthetic
auuuaaauagguaucuc

SEQ ID NO: 751186 - RNA, 17 nt, Artificial Sequence
  Synthetic
uugcauccuuguaucuc

SEQ ID NO: 751187 - RNA, 17 nt, Artificial Sequence
  Synthetic
augaugauaauuaucuc

SEQ ID NO: 751188 - RNA, 17 nt, Artificial Sequence
  Synthetic
uuuagcaaucuuaucuc

SEQ ID NO: 751189 - RNA, 17 nt, Artificial Sequence
  Synthetic
aauaaaauaaaacucuc

SEQ ID NO: 751190 - RNA, 17 nt, Artificial Sequence
  Synthetic
uauuugagacaacucuc

SEQ ID NO: 751191 - RNA, 17 nt, Artificial Sequence
  Synthetic
uagacauaagaacucuc

SEQ ID NO: 751192 - RNA, 17 nt, Artificial Sequence
  Synthetic
aaaguuacuuaacucuc

SEQ ID NO: 751193 - RNA, 17 nt, Artificial Sequence
  Synthetic
uggaucaugacacucuc

SEQ ID NO: 751194 - RNA, 17 nt, Artificial Sequence
  Synthetic
uuaucucugacacucuc

SEQ ID NO: 751195 - RNA, 17 nt, Artificial Sequence
  Synthetic
uccuggucuacacucuc

SEQ ID NO: 751196 - RNA, 17 nt, Artificial Sequence
  Synthetic
cccauacccucacucuc

SEQ ID NO: 751197 - RNA, 17 nt, Artificial Sequence
  Synthetic
cucucucucucacucuc

SEQ ID NO: 751198 - RNA, 17 nt, Artificial Sequence
  Synthetic
aguucauuuucacucuc

SEQ ID NO: 751199 - RNA, 17 nt, Artificial Sequence
  Synthetic
uggaaauggagacucuc

SEQ ID NO: 751200 - RNA, 17 nt, Artificial Sequence
  Synthetic
ugcuggcuuugacucuc

SEQ ID NO: 751201 - RNA, 17 nt, Artificial Sequence
  Synthetic
cauacauauauacucuc

SEQ ID NO: 751202 - RNA, 17 nt, Artificial Sequence
  Synthetic
acuaucauucuacucuc

SEQ ID NO: 751203 - RNA, 17 nt, Artificial Sequence
  Synthetic
cuaaaauauuuacucuc

SEQ ID NO: 751204 - RNA, 17 nt, Artificial Sequence
  Synthetic
uguauauaucaccucuc

SEQ ID NO: 751205 - RNA, 17 nt, Artificial Sequence
  Synthetic
aauucuauugaccucuc

SEQ ID NO: 751206 - RNA, 17 nt, Artificial Sequence
  Synthetic
uauuuccagccccucuc

SEQ ID NO: 751207 - RNA, 17 nt, Artificial Sequence
  Synthetic
auaagucucucccucuc

SEQ ID NO: 751208 - RNA, 17 nt, Artificial Sequence
  Synthetic
ugcgaccuccgccucuc

SEQ ID NO: 751209 - RNA, 17 nt, Artificial Sequence
  Synthetic
acacaccggggccucuc

SEQ ID NO: 751210 - RNA, 17 nt, Artificial Sequence
  Synthetic
ccaauagucugccucuc

SEQ ID NO: 751211 - RNA, 17 nt, Artificial Sequence
  Synthetic
ugcaacuucugccucuc

SEQ ID NO: 751212 - RNA, 17 nt, Artificial Sequence
  Synthetic
auauguuucugccucuc

SEQ ID NO: 751213 - RNA, 17 nt, Artificial Sequence
  Synthetic
cacacaugcauccucuc

SEQ ID NO: 751214 - RNA, 17 nt, Artificial Sequence
  Synthetic
cuccgucaucuccucuc

SEQ ID NO: 751215 - RNA, 17 nt, Artificial Sequence
  Synthetic
aauauguccuuccucuc

SEQ ID NO: 751216 - RNA, 17 nt, Artificial Sequence
  Synthetic
uugugucagaagcucuc

SEQ ID NO: 751217 - RNA, 17 nt, Artificial Sequence
  Synthetic
agaggucauaagcucuc

SEQ ID NO: 751218 - RNA, 17 nt, Artificial Sequence
  Synthetic
uacuucaaagagcucuc

SEQ ID NO: 751219 - RNA, 17 nt, Artificial Sequence
  Synthetic
uaucaauuagagcucuc

SEQ ID NO: 751220 - RNA, 17 nt, Artificial Sequence
  Synthetic
agggcacuuucgcucuc

SEQ ID NO: 751221 - RNA, 17 nt, Artificial Sequence
  Synthetic
auugcagguaggcucuc

SEQ ID NO: 751222 - RNA, 17 nt, Artificial Sequence
  Synthetic
aaucaggagcugcucuc

SEQ ID NO: 751223 - RNA, 17 nt, Artificial Sequence
  Synthetic
ucugacccucugcucuc

SEQ ID NO: 751224 - RNA, 17 nt, Artificial Sequence
  Synthetic
auagagggucugcucuc

SEQ ID NO: 751225 - RNA, 17 nt, Artificial Sequence
  Synthetic
uauuggagagugcucuc

SEQ ID NO: 751226 - RNA, 17 nt, Artificial Sequence
  Synthetic
acauuaucuuugcucuc

SEQ ID NO: 751227 - RNA, 17 nt, Artificial Sequence
  Synthetic
uugaacuauaaucucuc

SEQ ID NO: 751228 - RNA, 17 nt, Artificial Sequence
  Synthetic
cuaucuuaacaucucuc

SEQ ID NO: 751229 - RNA, 17 nt, Artificial Sequence
  Synthetic
aauuaguugcaucucuc

SEQ ID NO: 751230 - RNA, 17 nt, Artificial Sequence
  Synthetic
agaaauugagaucucuc

SEQ ID NO: 751231 - RNA, 17 nt, Artificial Sequence
  Synthetic
uauuacaaugaucucuc

SEQ ID NO: 751232 - RNA, 17 nt, Artificial Sequence
  Synthetic
cuuccugcauaucucuc

SEQ ID NO: 751233 - RNA, 17 nt, Artificial Sequence
  Synthetic
cuaaaaagguaucucuc

SEQ ID NO: 751234 - RNA, 17 nt, Artificial Sequence
  Synthetic
aggacauguuaucucuc

SEQ ID NO: 751235 - RNA, 17 nt, Artificial Sequence
  Synthetic
acacuaucagcucucuc

SEQ ID NO: 751236 - RNA, 17 nt, Artificial Sequence
  Synthetic
auuuaaaaaucucucuc

SEQ ID NO: 751237 - RNA, 17 nt, Artificial Sequence
  Synthetic
agggcuugcucucucuc

SEQ ID NO: 751238 - RNA, 17 nt, Artificial Sequence
  Synthetic
augugugggagucucuc

SEQ ID NO: 751239 - RNA, 17 nt, Artificial Sequence
  Synthetic
cuuaucuugggucucuc

SEQ ID NO: 751240 - RNA, 17 nt, Artificial Sequence
  Synthetic
uuugcagagugucucuc

SEQ ID NO: 751241 - RNA, 17 nt, Artificial Sequence
  Synthetic
ccaugcuagugucucuc

SEQ ID NO: 751242 - RNA, 17 nt, Artificial Sequence
  Synthetic
uaugaaacuugucucuc

SEQ ID NO: 751243 - RNA, 17 nt, Artificial Sequence
  Synthetic
uaauuuuccauucucuc

SEQ ID NO: 751244 - RNA, 17 nt, Artificial Sequence
  Synthetic
acuuuacauauucucuc

SEQ ID NO: 751245 - RNA, 17 nt, Artificial Sequence
  Synthetic
uaacauuaacuucucuc

SEQ ID NO: 751246 - RNA, 17 nt, Artificial Sequence
  Synthetic
ucuagauuccuucucuc

SEQ ID NO: 751247 - RNA, 17 nt, Artificial Sequence
  Synthetic
ugaguuuuuguucucuc

SEQ ID NO: 751248 - RNA, 17 nt, Artificial Sequence
  Synthetic
aacucgaccuuucucuc

SEQ ID NO: 751249 - RNA, 17 nt, Artificial Sequence
  Synthetic
agccugaccuuucucuc

SEQ ID NO: 751250 - RNA, 17 nt, Artificial Sequence
  Synthetic
aacccagccuuucucuc

SEQ ID NO: 751251 - RNA, 17 nt, Artificial Sequence
  Synthetic
cugucacuuuuucucuc

SEQ ID NO: 751252 - RNA, 17 nt, Artificial Sequence
  Synthetic
aacuucagcaaagucuc

SEQ ID NO: 751253 - RNA, 17 nt, Artificial Sequence
  Synthetic
aucaugcaucaagucuc

SEQ ID NO: 751254 - RNA, 17 nt, Artificial Sequence
  Synthetic
uccuugugggaagucuc

SEQ ID NO: 751255 - RNA, 17 nt, Artificial Sequence
  Synthetic
ucaucuaaaacagucuc

SEQ ID NO: 751256 - RNA, 17 nt, Artificial Sequence
  Synthetic
uccucuaaaccagucuc

SEQ ID NO: 751257 - RNA, 17 nt, Artificial Sequence
  Synthetic
uauaaacacccagucuc

SEQ ID NO: 751258 - RNA, 17 nt, Artificial Sequence
  Synthetic
agaaauuacccagucuc

SEQ ID NO: 751259 - RNA, 17 nt, Artificial Sequence
  Synthetic
auaaauuacccagucuc

SEQ ID NO: 751260 - RNA, 17 nt, Artificial Sequence
  Synthetic
auccauuacccagucuc

SEQ ID NO: 751261 - RNA, 17 nt, Artificial Sequence
  Synthetic
uaaauuaccccagucuc

SEQ ID NO: 751262 - RNA, 17 nt, Artificial Sequence
  Synthetic
auaaauugcccagucuc

SEQ ID NO: 751263 - RNA, 17 nt, Artificial Sequence
  Synthetic
auaaauuauccagucuc

SEQ ID NO: 751264 - RNA, 17 nt, Artificial Sequence
  Synthetic
cugcugcugucagucuc

SEQ ID NO: 751265 - RNA, 17 nt, Artificial Sequence
  Synthetic
uauuccucaagagucuc

SEQ ID NO: 751266 - RNA, 17 nt, Artificial Sequence
  Synthetic
cugcuuuguggagucuc

SEQ ID NO: 751267 - RNA, 17 nt, Artificial Sequence
  Synthetic
auuuuaaucugagucuc

SEQ ID NO: 751268 - RNA, 17 nt, Artificial Sequence
  Synthetic
cucucuuuuugagucuc

SEQ ID NO: 751269 - RNA, 17 nt, Artificial Sequence
  Synthetic
aaacucccucuagucuc

SEQ ID NO: 751270 - RNA, 17 nt, Artificial Sequence
  Synthetic
uguuuuaucaaggucuc

SEQ ID NO: 751271 - RNA, 17 nt, Artificial Sequence
  Synthetic
cuguaaucccaggucuc

SEQ ID NO: 751272 - RNA, 17 nt, Artificial Sequence
  Synthetic
auucagaaucaggucuc

SEQ ID NO: 751273 - RNA, 17 nt, Artificial Sequence
  Synthetic
uuaaaguaucaggucuc

SEQ ID NO: 751274 - RNA, 17 nt, Artificial Sequence
  Synthetic
ugaacaaaauaggucuc

SEQ ID NO: 751275 - RNA, 17 nt, Artificial Sequence
  Synthetic
cuaugcuacagggucuc

SEQ ID NO: 751276 - RNA, 17 nt, Artificial Sequence
  Synthetic
uucagugguagggucuc

SEQ ID NO: 751277 - RNA, 17 nt, Artificial Sequence
  Synthetic
uaagauuuuagggucuc

SEQ ID NO: 751278 - RNA, 17 nt, Artificial Sequence
  Synthetic
ucuuaaaauggggucuc

SEQ ID NO: 751279 - RNA, 17 nt, Artificial Sequence
  Synthetic
accacugcaugggucuc

SEQ ID NO: 751280 - RNA, 17 nt, Artificial Sequence
  Synthetic
ugguugcguugggucuc

SEQ ID NO: 751281 - RNA, 17 nt, Artificial Sequence
  Synthetic
ugugauucuauggucuc

SEQ ID NO: 751282 - RNA, 17 nt, Artificial Sequence
  Synthetic
ucuaggcugcuggucuc

SEQ ID NO: 751283 - RNA, 17 nt, Artificial Sequence
  Synthetic
acucaaaguguggucuc

SEQ ID NO: 751284 - RNA, 17 nt, Artificial Sequence
  Synthetic
ugaauuuauaaugucuc

SEQ ID NO: 751285 - RNA, 17 nt, Artificial Sequence
  Synthetic
acaaauguacaugucuc

SEQ ID NO: 751286 - RNA, 17 nt, Artificial Sequence
  Synthetic
uggguuuuucaugucuc

SEQ ID NO: 751287 - RNA, 17 nt, Artificial Sequence
  Synthetic
ucaaaaaacacugucuc

SEQ ID NO: 751288 - RNA, 17 nt, Artificial Sequence
  Synthetic
uaauauaugacugucuc

SEQ ID NO: 751289 - RNA, 17 nt, Artificial Sequence
  Synthetic
uguuuucuggcugucuc

SEQ ID NO: 751290 - RNA, 17 nt, Artificial Sequence
  Synthetic
cuccaaaauucugucuc

SEQ ID NO: 751291 - RNA, 17 nt, Artificial Sequence
  Synthetic
aaacaucugagugucuc

SEQ ID NO: 751292 - RNA, 17 nt, Artificial Sequence
  Synthetic
caauauuguugugucuc

SEQ ID NO: 751293 - RNA, 17 nt, Artificial Sequence
  Synthetic
ugcaugaagauugucuc

SEQ ID NO: 751294 - RNA, 17 nt, Artificial Sequence
  Synthetic
uagucuuaccuugucuc

SEQ ID NO: 751295 - RNA, 17 nt, Artificial Sequence
  Synthetic
auuuaaauccuugucuc

SEQ ID NO: 751296 - RNA, 17 nt, Artificial Sequence
  Synthetic
acucacauccuugucuc

SEQ ID NO: 751297 - RNA, 17 nt, Artificial Sequence
  Synthetic
ucaugugcaguugucuc

SEQ ID NO: 751298 - RNA, 17 nt, Artificial Sequence
  Synthetic
cuauccuaauuugucuc

SEQ ID NO: 751299 - RNA, 17 nt, Artificial Sequence
  Synthetic
uggggaucauuugucuc

SEQ ID NO: 751300 - RNA, 17 nt, Artificial Sequence
  Synthetic
cuagcuagcuuugucuc

SEQ ID NO: 751301 - RNA, 17 nt, Artificial Sequence
  Synthetic
uauccugaguuugucuc

SEQ ID NO: 751302 - RNA, 17 nt, Artificial Sequence
  Synthetic
cacaaacauuuugucuc

SEQ ID NO: 751303 - RNA, 17 nt, Artificial Sequence
  Synthetic
agaaaugccaaauucuc

SEQ ID NO: 751304 - RNA, 17 nt, Artificial Sequence
  Synthetic
uagagaugcaaauucuc

SEQ ID NO: 751305 - RNA, 17 nt, Artificial Sequence
  Synthetic
uagaaaaguaaauucuc

SEQ ID NO: 751306 - RNA, 17 nt, Artificial Sequence
  Synthetic
aggugcagucaauucuc

SEQ ID NO: 751307 - RNA, 17 nt, Artificial Sequence
  Synthetic
uaucuggaagaauucuc

SEQ ID NO: 751308 - RNA, 17 nt, Artificial Sequence
  Synthetic
acuuaaauguaauucuc

SEQ ID NO: 751309 - RNA, 17 nt, Artificial Sequence
  Synthetic
cuagccauguaauucuc

SEQ ID NO: 751310 - RNA, 17 nt, Artificial Sequence
  Synthetic
caguaaauuuaauucuc

SEQ ID NO: 751311 - RNA, 17 nt, Artificial Sequence
  Synthetic
uuuaagacaacauucuc

SEQ ID NO: 751312 - RNA, 17 nt, Artificial Sequence
  Synthetic
ugagauugcacauucuc

SEQ ID NO: 751313 - RNA, 17 nt, Artificial Sequence
  Synthetic
augaaaaauacauucuc

SEQ ID NO: 751314 - RNA, 17 nt, Artificial Sequence
  Synthetic
uucauuuuuacauucuc

SEQ ID NO: 751315 - RNA, 17 nt, Artificial Sequence
  Synthetic
auuugaaacgcauucuc

SEQ ID NO: 751316 - RNA, 17 nt, Artificial Sequence
  Synthetic
uguuuuaauucauucuc

SEQ ID NO: 751317 - RNA, 17 nt, Artificial Sequence
  Synthetic
uauggaauuagauucuc

SEQ ID NO: 751318 - RNA, 17 nt, Artificial Sequence
  Synthetic
uguccaucaggauucuc

SEQ ID NO: 751319 - RNA, 17 nt, Artificial Sequence
  Synthetic
aauuggaucugauucuc

SEQ ID NO: 751320 - RNA, 17 nt, Artificial Sequence
  Synthetic
aauucucugugauucuc

SEQ ID NO: 751321 - RNA, 17 nt, Artificial Sequence
  Synthetic
aaaggggaaauauucuc

SEQ ID NO: 751322 - RNA, 17 nt, Artificial Sequence
  Synthetic
uugcaagugauauucuc

SEQ ID NO: 751323 - RNA, 17 nt, Artificial Sequence
  Synthetic
uuugcugguauauucuc

SEQ ID NO: 751324 - RNA, 17 nt, Artificial Sequence
  Synthetic
acuuauuuuauauucuc

SEQ ID NO: 751325 - RNA, 17 nt, Artificial Sequence
  Synthetic
acauguuuuauauucuc

SEQ ID NO: 751326 - RNA, 17 nt, Artificial Sequence
  Synthetic
aaaaaauuccuauucuc

SEQ ID NO: 751327 - RNA, 17 nt, Artificial Sequence
  Synthetic
cauuacaugguauucuc

SEQ ID NO: 751328 - RNA, 17 nt, Artificial Sequence
  Synthetic
aaauuuucuguauucuc

SEQ ID NO: 751329 - RNA, 17 nt, Artificial Sequence
  Synthetic
ugugagagaaacuucuc

SEQ ID NO: 751330 - RNA, 17 nt, Artificial Sequence
  Synthetic
acugugccacacuucuc

SEQ ID NO: 751331 - RNA, 17 nt, Artificial Sequence
  Synthetic
uuugcuuuucacuucuc

SEQ ID NO: 751332 - RNA, 17 nt, Artificial Sequence
  Synthetic
ucuucagaagacuucuc

SEQ ID NO: 751333 - RNA, 17 nt, Artificial Sequence
  Synthetic
augagaucagacuucuc

SEQ ID NO: 751334 - RNA, 17 nt, Artificial Sequence
  Synthetic
augccaauggacuucuc

SEQ ID NO: 751335 - RNA, 17 nt, Artificial Sequence
  Synthetic
aggggaaaugacuucuc

SEQ ID NO: 751336 - RNA, 17 nt, Artificial Sequence
  Synthetic
aaaggaacugacuucuc

SEQ ID NO: 751337 - RNA, 17 nt, Artificial Sequence
  Synthetic
auacucauuuacuucuc

SEQ ID NO: 751338 - RNA, 17 nt, Artificial Sequence
  Synthetic
aauacacgcaccuucuc

SEQ ID NO: 751339 - RNA, 17 nt, Artificial Sequence
  Synthetic
uuaaaaaaauccuucuc

SEQ ID NO: 751340 - RNA, 17 nt, Artificial Sequence
  Synthetic
aaacaaaaguccuucuc

SEQ ID NO: 751341 - RNA, 17 nt, Artificial Sequence
  Synthetic
uauucuauuuccuucuc

SEQ ID NO: 751342 - RNA, 17 nt, Artificial Sequence
  Synthetic
ugucucucaagcuucuc

SEQ ID NO: 751343 - RNA, 17 nt, Artificial Sequence
  Synthetic
aaggagcucagcuucuc

SEQ ID NO: 751344 - RNA, 17 nt, Artificial Sequence
  Synthetic
uucucguuuggcuucuc

SEQ ID NO: 751345 - RNA, 17 nt, Artificial Sequence
  Synthetic
ucauuaauaaucuucuc

SEQ ID NO: 751346 - RNA, 17 nt, Artificial Sequence
  Synthetic
augccacacaucuucuc

SEQ ID NO: 751347 - RNA, 17 nt, Artificial Sequence
  Synthetic
cagaucauuaucuucuc

SEQ ID NO: 751348 - RNA, 17 nt, Artificial Sequence
  Synthetic
agguuauugcucuucuc

SEQ ID NO: 751349 - RNA, 17 nt, Artificial Sequence
  Synthetic
uuuucuuuugucuucuc

SEQ ID NO: 751350 - RNA, 17 nt, Artificial Sequence
  Synthetic
uuuuuccuauucuucuc

SEQ ID NO: 751351 - RNA, 17 nt, Artificial Sequence
  Synthetic
acaauaucuuucuucuc

SEQ ID NO: 751352 - RNA, 17 nt, Artificial Sequence
  Synthetic
uccaggucuuucuucuc

SEQ ID NO: 751353 - RNA, 17 nt, Artificial Sequence
  Synthetic
aucucuaacaaguucuc

SEQ ID NO: 751354 - RNA, 17 nt, Artificial Sequence
  Synthetic
uucucucuguaguucuc

SEQ ID NO: 751355 - RNA, 17 nt, Artificial Sequence
  Synthetic
auuguucauagguucuc

SEQ ID NO: 751356 - RNA, 17 nt, Artificial Sequence
  Synthetic
uuacagguuggguucuc

SEQ ID NO: 751357 - RNA, 17 nt, Artificial Sequence
  Synthetic
uacugucaaauguucuc

SEQ ID NO: 751358 - RNA, 17 nt, Artificial Sequence
  Synthetic
ccuagauaaauguucuc

SEQ ID NO: 751359 - RNA, 17 nt, Artificial Sequence
  Synthetic
agaacauuaauguucuc

SEQ ID NO: 751360 - RNA, 17 nt, Artificial Sequence
  Synthetic
ccuucuuugauguucuc

SEQ ID NO: 751361 - RNA, 17 nt, Artificial Sequence
  Synthetic
uaaggcucacuguucuc

SEQ ID NO: 751362 - RNA, 17 nt, Artificial Sequence
  Synthetic
ccuagaccccuguucuc

SEQ ID NO: 751363 - RNA, 17 nt, Artificial Sequence
  Synthetic
auauggggaguguucuc

SEQ ID NO: 751364 - RNA, 17 nt, Artificial Sequence
  Synthetic
cuaaacaaauuguucuc

SEQ ID NO: 751365 - RNA, 17 nt, Artificial Sequence
  Synthetic
auagcaugauuguucuc

SEQ ID NO: 751366 - RNA, 17 nt, Artificial Sequence
  Synthetic
uugugagccuuguucuc

SEQ ID NO: 751367 - RNA, 17 nt, Artificial Sequence
  Synthetic
uuucucaacaauuucuc

SEQ ID NO: 751368 - RNA, 17 nt, Artificial Sequence
  Synthetic
uuuuuuucacauuucuc

SEQ ID NO: 751369 - RNA, 17 nt, Artificial Sequence
  Synthetic
ugggagucccauuucuc

SEQ ID NO: 751370 - RNA, 17 nt, Artificial Sequence
  Synthetic
uuaccuguccauuucuc

SEQ ID NO: 751371 - RNA, 17 nt, Artificial Sequence
  Synthetic
uuugauuuucauuucuc

SEQ ID NO: 751372 - RNA, 17 nt, Artificial Sequence
  Synthetic
uguuucaccgauuucuc

SEQ ID NO: 751373 - RNA, 17 nt, Artificial Sequence
  Synthetic
uaggggugugauuucuc

SEQ ID NO: 751374 - RNA, 17 nt, Artificial Sequence
  Synthetic
aaaauacuugauuucuc

SEQ ID NO: 751375 - RNA, 17 nt, Artificial Sequence
  Synthetic
aguaguaaauauuucuc

SEQ ID NO: 751376 - RNA, 17 nt, Artificial Sequence
  Synthetic
aaauuuccauauuucuc

SEQ ID NO: 751377 - RNA, 17 nt, Artificial Sequence
  Synthetic
auucucugauauuucuc

SEQ ID NO: 751378 - RNA, 17 nt, Artificial Sequence
  Synthetic
uagcagauauauuucuc

SEQ ID NO: 751379 - RNA, 17 nt, Artificial Sequence
  Synthetic
aaccugauauauuucuc

SEQ ID NO: 751380 - RNA, 17 nt, Artificial Sequence
  Synthetic
auucuuaucuauuucuc

SEQ ID NO: 751381 - RNA, 17 nt, Artificial Sequence
  Synthetic
aauccauucuauuucuc

SEQ ID NO: 751382 - RNA, 17 nt, Artificial Sequence
  Synthetic
auauuucuuuauuucuc

SEQ ID NO: 751383 - RNA, 17 nt, Artificial Sequence
  Synthetic
agcaacuucacuuucuc

SEQ ID NO: 751384 - RNA, 17 nt, Artificial Sequence
  Synthetic
uuacuaguuacuuucuc

SEQ ID NO: 751385 - RNA, 17 nt, Artificial Sequence
  Synthetic
uuaauauugccuuucuc

SEQ ID NO: 751386 - RNA, 17 nt, Artificial Sequence
  Synthetic
uauuuccuugcuuucuc

SEQ ID NO: 751387 - RNA, 17 nt, Artificial Sequence
  Synthetic
aaacauuuuucuuucuc

SEQ ID NO: 751388 - RNA, 17 nt, Artificial Sequence
  Synthetic
ucuauaaugaguuucuc

SEQ ID NO: 751389 - RNA, 17 nt, Artificial Sequence
  Synthetic
auuucuccuuguuucuc

SEQ ID NO: 751390 - RNA, 17 nt, Artificial Sequence
  Synthetic
agugcaaccauuuucuc

SEQ ID NO: 751391 - RNA, 17 nt, Artificial Sequence
  Synthetic
aagauccuucuuuucuc

SEQ ID NO: 751392 - RNA, 17 nt, Artificial Sequence
  Synthetic
uugccaugaguuuucuc

SEQ ID NO: 751393 - RNA, 17 nt, Artificial Sequence
  Synthetic
uaccaaaagguuuucuc

SEQ ID NO: 751394 - RNA, 17 nt, Artificial Sequence
  Synthetic
aguuucuggguuuucuc

SEQ ID NO: 751395 - RNA, 17 nt, Artificial Sequence
  Synthetic
auggacugauuuuucuc

SEQ ID NO: 751396 - RNA, 17 nt, Artificial Sequence
  Synthetic
ugaucaauauuuuucuc

SEQ ID NO: 751397 - RNA, 17 nt, Artificial Sequence
  Synthetic
ucuccuguauuuuucuc

SEQ ID NO: 751398 - RNA, 17 nt, Artificial Sequence
  Synthetic
ucuacccacuuuuucuc

SEQ ID NO: 751399 - RNA, 17 nt, Artificial Sequence
  Synthetic
aaucuagucuuuuucuc

SEQ ID NO: 751400 - RNA, 17 nt, Artificial Sequence
  Synthetic
cauugcuuguuuuucuc

SEQ ID NO: 751401 - RNA, 17 nt, Artificial Sequence
  Synthetic
auaucaucacaaaaguc

SEQ ID NO: 751402 - RNA, 17 nt, Artificial Sequence
  Synthetic
uaagcaagccaaaaguc

SEQ ID NO: 751403 - RNA, 17 nt, Artificial Sequence
  Synthetic
aaaucagggcaaaaguc

SEQ ID NO: 751404 - RNA, 17 nt, Artificial Sequence
  Synthetic
acaaaauuggaaaaguc

SEQ ID NO: 751405 - RNA, 17 nt, Artificial Sequence
  Synthetic
ucuuacugugaaaaguc

SEQ ID NO: 751406 - RNA, 17 nt, Artificial Sequence
  Synthetic
uuugaaaaaacaaaguc

SEQ ID NO: 751407 - RNA, 17 nt, Artificial Sequence
  Synthetic
uaccauuggacaaaguc

SEQ ID NO: 751408 - RNA, 17 nt, Artificial Sequence
  Synthetic
aacagggauacaaaguc

SEQ ID NO: 751409 - RNA, 17 nt, Artificial Sequence
  Synthetic
cucugauucccaaaguc

SEQ ID NO: 751410 - RNA, 17 nt, Artificial Sequence
  Synthetic
cuacccauugcaaaguc

SEQ ID NO: 751411 - RNA, 17 nt, Artificial Sequence
  Synthetic
agcucaguuucaaaguc

SEQ ID NO: 751412 - RNA, 17 nt, Artificial Sequence
  Synthetic
aaggaaagaagaaaguc

SEQ ID NO: 751413 - RNA, 17 nt, Artificial Sequence
  Synthetic
auucccuggagaaaguc

SEQ ID NO: 751414 - RNA, 17 nt, Artificial Sequence
  Synthetic
uagaauuauagaaaguc

SEQ ID NO: 751415 - RNA, 17 nt, Artificial Sequence
  Synthetic
uauauagcuagaaaguc

SEQ ID NO: 751416 - RNA, 17 nt, Artificial Sequence
  Synthetic
agggcagccugaaaguc

SEQ ID NO: 751417 - RNA, 17 nt, Artificial Sequence
  Synthetic
aaugaguaucuaaaguc

SEQ ID NO: 751418 - RNA, 17 nt, Artificial Sequence
  Synthetic
aggauauguuuaaaguc

SEQ ID NO: 751419 - RNA, 17 nt, Artificial Sequence
  Synthetic
aguugcauauacaaguc

SEQ ID NO: 751420 - RNA, 17 nt, Artificial Sequence
  Synthetic
cucagugucaccaaguc

SEQ ID NO: 751421 - RNA, 17 nt, Artificial Sequence
  Synthetic
uugcuaaggagcaaguc

SEQ ID NO: 751422 - RNA, 17 nt, Artificial Sequence
  Synthetic
ccuuuccuuggcaaguc

SEQ ID NO: 751423 - RNA, 17 nt, Artificial Sequence
  Synthetic
uuaacuuccugcaaguc

SEQ ID NO: 751424 - RNA, 17 nt, Artificial Sequence
  Synthetic
ucuaaguccuucaaguc

SEQ ID NO: 751425 - RNA, 17 nt, Artificial Sequence
  Synthetic
aaauaagcauagaaguc

SEQ ID NO: 751426 - RNA, 17 nt, Artificial Sequence
  Synthetic
ugguacauauagaaguc

SEQ ID NO: 751427 - RNA, 17 nt, Artificial Sequence
  Synthetic
auauaaaacuagaaguc

SEQ ID NO: 751428 - RNA, 17 nt, Artificial Sequence
  Synthetic
aggugguauuagaaguc

SEQ ID NO: 751429 - RNA, 17 nt, Artificial Sequence
  Synthetic
ugcagaguggcgaaguc

SEQ ID NO: 751430 - RNA, 17 nt, Artificial Sequence
  Synthetic
caggaaggaaggaaguc

SEQ ID NO: 751431 - RNA, 17 nt, Artificial Sequence
  Synthetic
cugcaagucaggaaguc

SEQ ID NO: 751432 - RNA, 17 nt, Artificial Sequence
  Synthetic
ucaccaagagggaaguc

SEQ ID NO: 751433 - RNA, 17 nt, Artificial Sequence
  Synthetic
cuagcugcauggaaguc

SEQ ID NO: 751434 - RNA, 17 nt, Artificial Sequence
  Synthetic
acagagguuuggaaguc

SEQ ID NO: 751435 - RNA, 17 nt, Artificial Sequence
  Synthetic
caugcaugcaugaaguc

SEQ ID NO: 751436 - RNA, 17 nt, Artificial Sequence
  Synthetic
aauuuucaugugaaguc

SEQ ID NO: 751437 - RNA, 17 nt, Artificial Sequence
  Synthetic
uaguauaguuugaaguc

SEQ ID NO: 751438 - RNA, 17 nt, Artificial Sequence
  Synthetic
caaaaagaaaauaaguc

SEQ ID NO: 751439 - RNA, 17 nt, Artificial Sequence
  Synthetic
uuaaguuuaccuaaguc

SEQ ID NO: 751440 - RNA, 17 nt, Artificial Sequence
  Synthetic
aaaguuaucucuaaguc

SEQ ID NO: 751441 - RNA, 17 nt, Artificial Sequence
  Synthetic
ccaaauuauucuaaguc

SEQ ID NO: 751442 - RNA, 17 nt, Artificial Sequence
  Synthetic
acaauggcaaguaaguc

SEQ ID NO: 751443 - RNA, 17 nt, Artificial Sequence
  Synthetic
auggucagaaguaaguc

SEQ ID NO: 751444 - RNA, 17 nt, Artificial Sequence
  Synthetic
auggagagagguaaguc

SEQ ID NO: 751445 - RNA, 17 nt, Artificial Sequence
  Synthetic
cagauuuuugguaaguc

SEQ ID NO: 751446 - RNA, 17 nt, Artificial Sequence
  Synthetic
aaacaggguuguaaguc

SEQ ID NO: 751447 - RNA, 17 nt, Artificial Sequence
  Synthetic
uguauaaugauuaaguc

SEQ ID NO: 751448 - RNA, 17 nt, Artificial Sequence
  Synthetic
aaauggcauuuuaaguc

SEQ ID NO: 751449 - RNA, 17 nt, Artificial Sequence
  Synthetic
uaguguccaaaacaguc

SEQ ID NO: 751450 - RNA, 17 nt, Artificial Sequence
  Synthetic
ucaucuggaaaacaguc

SEQ ID NO: 751451 - RNA, 17 nt, Artificial Sequence
  Synthetic
cuguaggcagaacaguc

SEQ ID NO: 751452 - RNA, 17 nt, Artificial Sequence
  Synthetic
ugugcucugccacaguc

SEQ ID NO: 751453 - RNA, 17 nt, Artificial Sequence
  Synthetic
agaaaggcuucacaguc

SEQ ID NO: 751454 - RNA, 17 nt, Artificial Sequence
  Synthetic
aaucaccucacccaguc

SEQ ID NO: 751455 - RNA, 17 nt, Artificial Sequence
  Synthetic
cgcucugucacccaguc

SEQ ID NO: 751456 - RNA, 17 nt, Artificial Sequence
  Synthetic
aggcagcagccccaguc

SEQ ID NO: 751457 - RNA, 17 nt, Artificial Sequence
  Synthetic
cacaauaacucccaguc

SEQ ID NO: 751458 - RNA, 17 nt, Artificial Sequence
  Synthetic
caccauguuggccaguc

SEQ ID NO: 751459 - RNA, 17 nt, Artificial Sequence
  Synthetic
cagagucaucuccaguc

SEQ ID NO: 751460 - RNA, 17 nt, Artificial Sequence
  Synthetic
ucauccuagaagcaguc

SEQ ID NO: 751461 - RNA, 17 nt, Artificial Sequence
  Synthetic
acuuuauugcagcaguc

SEQ ID NO: 751462 - RNA, 17 nt, Artificial Sequence
  Synthetic
ugggcaucagagcaguc

SEQ ID NO: 751463 - RNA, 17 nt, Artificial Sequence
  Synthetic
uguugaugcuagcaguc

SEQ ID NO: 751464 - RNA, 17 nt, Artificial Sequence
  Synthetic
ccaguuugaaggcaguc

SEQ ID NO: 751465 - RNA, 17 nt, Artificial Sequence
  Synthetic
uuuaaacucaggcaguc

SEQ ID NO: 751466 - RNA, 17 nt, Artificial Sequence
  Synthetic
aaaccugagaggcaguc

SEQ ID NO: 751467 - RNA, 17 nt, Artificial Sequence
  Synthetic
uuuuauauauggcaguc

SEQ ID NO: 751468 - RNA, 17 nt, Artificial Sequence
  Synthetic
acagcagcacugcaguc

SEQ ID NO: 751469 - RNA, 17 nt, Artificial Sequence
  Synthetic
aaggacauuuugcaguc

SEQ ID NO: 751470 - RNA, 17 nt, Artificial Sequence
  Synthetic
uucccaauuaaucaguc

SEQ ID NO: 751471 - RNA, 17 nt, Artificial Sequence
  Synthetic
ucuauucaccaucaguc

SEQ ID NO: 751472 - RNA, 17 nt, Artificial Sequence
  Synthetic
aaugucaggcaucaguc

SEQ ID NO: 751473 - RNA, 17 nt, Artificial Sequence
  Synthetic
aagaacaaagaucaguc

SEQ ID NO: 751474 - RNA, 17 nt, Artificial Sequence
  Synthetic
cugagaccaccucaguc

SEQ ID NO: 751475 - RNA, 17 nt, Artificial Sequence
  Synthetic
aagagaugaccucaguc

SEQ ID NO: 751476 - RNA, 17 nt, Artificial Sequence
  Synthetic
uuuuccucuccucaguc

SEQ ID NO: 751477 - RNA, 17 nt, Artificial Sequence
  Synthetic
aucaaaauuccucaguc

SEQ ID NO: 751478 - RNA, 17 nt, Artificial Sequence
  Synthetic
cuccauguugcucaguc

SEQ ID NO: 751479 - RNA, 17 nt, Artificial Sequence
  Synthetic
ucaagugauggucaguc

SEQ ID NO: 751480 - RNA, 17 nt, Artificial Sequence
  Synthetic
uuugcuuuucuucaguc

SEQ ID NO: 751481 - RNA, 17 nt, Artificial Sequence
  Synthetic
aaauuggauaaagaguc

SEQ ID NO: 751482 - RNA, 17 nt, Artificial Sequence
  Synthetic
caacacagccaagaguc

SEQ ID NO: 751483 - RNA, 17 nt, Artificial Sequence
  Synthetic
uuuuuugaggcagaguc

SEQ ID NO: 751484 - RNA, 17 nt, Artificial Sequence
  Synthetic
aucuaccuugcagaguc

SEQ ID NO: 751485 - RNA, 17 nt, Artificial Sequence
  Synthetic
ugccaguauggagaguc

SEQ ID NO: 751486 - RNA, 17 nt, Artificial Sequence
  Synthetic
ucaggacagugagaguc

SEQ ID NO: 751487 - RNA, 17 nt, Artificial Sequence
  Synthetic
aauauauuuauagaguc

SEQ ID NO: 751488 - RNA, 17 nt, Artificial Sequence
  Synthetic
uuacaggaacuagaguc

SEQ ID NO: 751489 - RNA, 17 nt, Artificial Sequence
  Synthetic
caaagcacucuagaguc

SEQ ID NO: 751490 - RNA, 17 nt, Artificial Sequence
  Synthetic
auaauacccuuagaguc

SEQ ID NO: 751491 - RNA, 17 nt, Artificial Sequence
  Synthetic
ccaaauuucuuagaguc

SEQ ID NO: 751492 - RNA, 17 nt, Artificial Sequence
  Synthetic
aacuuuauuuuagaguc

SEQ ID NO: 751493 - RNA, 17 nt, Artificial Sequence
  Synthetic
ugcuaaaaugccgaguc

SEQ ID NO: 751494 - RNA, 17 nt, Artificial Sequence
  Synthetic
ugcuauuuugccgaguc

SEQ ID NO: 751495 - RNA, 17 nt, Artificial Sequence
  Synthetic
aggauaguggaggaguc

SEQ ID NO: 751496 - RNA, 17 nt, Artificial Sequence
  Synthetic
caugugcacuaggaguc

SEQ ID NO: 751497 - RNA, 17 nt, Artificial Sequence
  Synthetic
uacaaagucauggaguc

SEQ ID NO: 751498 - RNA, 17 nt, Artificial Sequence
  Synthetic
uuuuuugagauggaguc

SEQ ID NO: 751499 - RNA, 17 nt, Artificial Sequence
  Synthetic
aucuaaagaaaugaguc

SEQ ID NO: 751500 - RNA, 17 nt, Artificial Sequence
  Synthetic
aacugagcauaugaguc

SEQ ID NO: 751501 - RNA, 17 nt, Artificial Sequence
  Synthetic
aaugaauacuaugaguc

SEQ ID NO: 751502 - RNA, 17 nt, Artificial Sequence
  Synthetic
caaggagaagcugaguc

SEQ ID NO: 751503 - RNA, 17 nt, Artificial Sequence
  Synthetic
ugucuaccagcugaguc

SEQ ID NO: 751504 - RNA, 17 nt, Artificial Sequence
  Synthetic
cuuugggaggcugaguc

SEQ ID NO: 751505 - RNA, 17 nt, Artificial Sequence
  Synthetic
acaaggcaugcugaguc

SEQ ID NO: 751506 - RNA, 17 nt, Artificial Sequence
  Synthetic
ugaagccaaucugaguc

SEQ ID NO: 751507 - RNA, 17 nt, Artificial Sequence
  Synthetic
aaagcaaugcgugaguc

SEQ ID NO: 751508 - RNA, 17 nt, Artificial Sequence
  Synthetic
ccuuugcguugugaguc

SEQ ID NO: 751509 - RNA, 17 nt, Artificial Sequence
  Synthetic
agugagagacuugaguc

SEQ ID NO: 751510 - RNA, 17 nt, Artificial Sequence
  Synthetic
aaucaaauauaauaguc

SEQ ID NO: 751511 - RNA, 17 nt, Artificial Sequence
  Synthetic
cugauaaacuaauaguc

SEQ ID NO: 751512 - RNA, 17 nt, Artificial Sequence
  Synthetic
auccagaauucauaguc

SEQ ID NO: 751513 - RNA, 17 nt, Artificial Sequence
  Synthetic
uaccacuuacuauaguc

SEQ ID NO: 751514 - RNA, 17 nt, Artificial Sequence
  Synthetic
cucagguaauuauaguc

SEQ ID NO: 751515 - RNA, 17 nt, Artificial Sequence
  Synthetic
aacuaugguuuauaguc

SEQ ID NO: 751516 - RNA, 17 nt, Artificial Sequence
  Synthetic
uuugaauaggacuaguc

SEQ ID NO: 751517 - RNA, 17 nt, Artificial Sequence
  Synthetic
uuuauauuuaucuaguc

SEQ ID NO: 751518 - RNA, 17 nt, Artificial Sequence
  Synthetic
aggauagaagucuaguc

SEQ ID NO: 751519 - RNA, 17 nt, Artificial Sequence
  Synthetic
auuauuucauaguaguc

SEQ ID NO: 751520 - RNA, 17 nt, Artificial Sequence
  Synthetic
cuuuuaaaccuguaguc

SEQ ID NO: 751521 - RNA, 17 nt, Artificial Sequence
  Synthetic
ccauuuccaaauuaguc

SEQ ID NO: 751522 - RNA, 17 nt, Artificial Sequence
  Synthetic
uuuuuucuucauuaguc

SEQ ID NO: 751523 - RNA, 17 nt, Artificial Sequence
  Synthetic
aaugccucugauuaguc

SEQ ID NO: 751524 - RNA, 17 nt, Artificial Sequence
  Synthetic
aagugaguguauuaguc

SEQ ID NO: 751525 - RNA, 17 nt, Artificial Sequence
  Synthetic
uuucuucuuuauuaguc

SEQ ID NO: 751526 - RNA, 17 nt, Artificial Sequence
  Synthetic
ccuguacucucuuaguc

SEQ ID NO: 751527 - RNA, 17 nt, Artificial Sequence
  Synthetic
cagcccuugucuuaguc

SEQ ID NO: 751528 - RNA, 17 nt, Artificial Sequence
  Synthetic
agaauaauuucuuaguc

SEQ ID NO: 751529 - RNA, 17 nt, Artificial Sequence
  Synthetic
auggaaggcuguuaguc

SEQ ID NO: 751530 - RNA, 17 nt, Artificial Sequence
  Synthetic
ugcaagaaacuuuaguc

SEQ ID NO: 751531 - RNA, 17 nt, Artificial Sequence
  Synthetic
uugacuaaacuuuaguc

SEQ ID NO: 751532 - RNA, 17 nt, Artificial Sequence
  Synthetic
auuucauuaguuuaguc

SEQ ID NO: 751533 - RNA, 17 nt, Artificial Sequence
  Synthetic
aacagcuggguuuaguc

SEQ ID NO: 751534 - RNA, 17 nt, Artificial Sequence
  Synthetic
aaacuaacauuuuaguc

SEQ ID NO: 751535 - RNA, 17 nt, Artificial Sequence
  Synthetic
uugcucauuuuuuaguc

SEQ ID NO: 751536 - RNA, 17 nt, Artificial Sequence
  Synthetic
uguguaauggucacguc

SEQ ID NO: 751537 - RNA, 17 nt, Artificial Sequence
  Synthetic
ucggcugugaauccguc

SEQ ID NO: 751538 - RNA, 17 nt, Artificial Sequence
  Synthetic
cauugagcaaguccguc

SEQ ID NO: 751539 - RNA, 17 nt, Artificial Sequence
  Synthetic
aaauuccuagaaucguc

SEQ ID NO: 751540 - RNA, 17 nt, Artificial Sequence
  Synthetic
aauucccauuugucguc

SEQ ID NO: 751541 - RNA, 17 nt, Artificial Sequence
  Synthetic
uaaaaugggaaaagguc

SEQ ID NO: 751542 - RNA, 17 nt, Artificial Sequence
  Synthetic
caagaauugaaaagguc

SEQ ID NO: 751543 - RNA, 17 nt, Artificial Sequence
  Synthetic
agccagagagaaagguc

SEQ ID NO: 751544 - RNA, 17 nt, Artificial Sequence
  Synthetic
uucgucugggaaagguc

SEQ ID NO: 751545 - RNA, 17 nt, Artificial Sequence
  Synthetic
ugauagacaagaagguc

SEQ ID NO: 751546 - RNA, 17 nt, Artificial Sequence
  Synthetic
uagugaagaagaagguc

SEQ ID NO: 751547 - RNA, 17 nt, Artificial Sequence
  Synthetic
uaagaacuuagaagguc

SEQ ID NO: 751548 - RNA, 17 nt, Artificial Sequence
  Synthetic
cuaagaaaaggaagguc

SEQ ID NO: 751549 - RNA, 17 nt, Artificial Sequence
  Synthetic
ugaauaaaaauaagguc

SEQ ID NO: 751550 - RNA, 17 nt, Artificial Sequence
  Synthetic
uugauauuuauaagguc

SEQ ID NO: 751551 - RNA, 17 nt, Artificial Sequence
  Synthetic
augaaaugccuaagguc

SEQ ID NO: 751552 - RNA, 17 nt, Artificial Sequence
  Synthetic
uccuauggagacagguc

SEQ ID NO: 751553 - RNA, 17 nt, Artificial Sequence
  Synthetic
uacuuaucugacagguc

SEQ ID NO: 751554 - RNA, 17 nt, Artificial Sequence
  Synthetic
aucaggcugcccagguc

SEQ ID NO: 751555 - RNA, 17 nt, Artificial Sequence
  Synthetic
cucaaucacuccagguc

SEQ ID NO: 751556 - RNA, 17 nt, Artificial Sequence
  Synthetic
aaacaaaugugcagguc

SEQ ID NO: 751557 - RNA, 17 nt, Artificial Sequence
  Synthetic
uuggaagaaaagagguc

SEQ ID NO: 751558 - RNA, 17 nt, Artificial Sequence
  Synthetic
aacuggcacaagagguc

SEQ ID NO: 751559 - RNA, 17 nt, Artificial Sequence
  Synthetic
ucuauucccaagagguc

SEQ ID NO: 751560 - RNA, 17 nt, Artificial Sequence
  Synthetic
ugcagugagcagagguc

SEQ ID NO: 751561 - RNA, 17 nt, Artificial Sequence
  Synthetic
caguugguugagagguc

SEQ ID NO: 751562 - RNA, 17 nt, Artificial Sequence
  Synthetic
aggcagaucacgagguc

SEQ ID NO: 751563 - RNA, 17 nt, Artificial Sequence
  Synthetic
agaaggaucacgagguc

SEQ ID NO: 751564 - RNA, 17 nt, Artificial Sequence
  Synthetic
aggcggaucacgagguc

SEQ ID NO: 751565 - RNA, 17 nt, Artificial Sequence
  Synthetic
agguggaucacgagguc

SEQ ID NO: 751566 - RNA, 17 nt, Artificial Sequence
  Synthetic
aguuggaucacgagguc

SEQ ID NO: 751567 - RNA, 17 nt, Artificial Sequence
  Synthetic
auguguuaaccgagguc

SEQ ID NO: 751568 - RNA, 17 nt, Artificial Sequence
  Synthetic
uucuaauuggggagguc

SEQ ID NO: 751569 - RNA, 17 nt, Artificial Sequence
  Synthetic
aggcagaucaugagguc

SEQ ID NO: 751570 - RNA, 17 nt, Artificial Sequence
  Synthetic
aggcggaucaugagguc

SEQ ID NO: 751571 - RNA, 17 nt, Artificial Sequence
  Synthetic
agguggaucaugagguc

SEQ ID NO: 751572 - RNA, 17 nt, Artificial Sequence
  Synthetic
gcagaucaccugagguc

SEQ ID NO: 751573 - RNA, 17 nt, Artificial Sequence
  Synthetic
acggaucaccugagguc

SEQ ID NO: 751574 - RNA, 17 nt, Artificial Sequence
  Synthetic
gcggaucaccugagguc

SEQ ID NO: 751575 - RNA, 17 nt, Artificial Sequence
  Synthetic
auggaucaccugagguc

SEQ ID NO: 751576 - RNA, 17 nt, Artificial Sequence
  Synthetic
guggaucaccugagguc

SEQ ID NO: 751577 - RNA, 17 nt, Artificial Sequence
  Synthetic
ccugaucaccugagguc

SEQ ID NO: 751578 - RNA, 17 nt, Artificial Sequence
  Synthetic
cuuggaaugcugagguc

SEQ ID NO: 751579 - RNA, 17 nt, Artificial Sequence
  Synthetic
auggaucaucugagguc

SEQ ID NO: 751580 - RNA, 17 nt, Artificial Sequence
  Synthetic
acacuccuucugagguc

SEQ ID NO: 751581 - RNA, 17 nt, Artificial Sequence
  Synthetic
acggaucacuugagguc

SEQ ID NO: 751582 - RNA, 17 nt, Artificial Sequence
  Synthetic
cccucucucuugagguc

SEQ ID NO: 751583 - RNA, 17 nt, Artificial Sequence
  Synthetic
ugagauaaacauagguc

SEQ ID NO: 751584 - RNA, 17 nt, Artificial Sequence
  Synthetic
ucagugacauauagguc

SEQ ID NO: 751585 - RNA, 17 nt, Artificial Sequence
  Synthetic
agguggaucacuagguc

SEQ ID NO: 751586 - RNA, 17 nt, Artificial Sequence
  Synthetic
aguccaggagcuagguc

SEQ ID NO: 751587 - RNA, 17 nt, Artificial Sequence
  Synthetic
ccacagaucucuagguc

SEQ ID NO: 751588 - RNA, 17 nt, Artificial Sequence
  Synthetic
ugcugauucaguagguc

SEQ ID NO: 751589 - RNA, 17 nt, Artificial Sequence
  Synthetic
cauagguucuguagguc

SEQ ID NO: 751590 - RNA, 17 nt, Artificial Sequence
  Synthetic
agccaaagcaaacgguc

SEQ ID NO: 751591 - RNA, 17 nt, Artificial Sequence
  Synthetic
uugugcgacgugcgguc

SEQ ID NO: 751592 - RNA, 17 nt, Artificial Sequence
  Synthetic
cuggugccaaaaggguc

SEQ ID NO: 751593 - RNA, 17 nt, Artificial Sequence
  Synthetic
auuaaaugagaaggguc

SEQ ID NO: 751594 - RNA, 17 nt, Artificial Sequence
  Synthetic
ucacaguucuaaggguc

SEQ ID NO: 751595 - RNA, 17 nt, Artificial Sequence
  Synthetic
cucaggcaaacaggguc

SEQ ID NO: 751596 - RNA, 17 nt, Artificial Sequence
  Synthetic
aguucuaacacaggguc

SEQ ID NO: 751597 - RNA, 17 nt, Artificial Sequence
  Synthetic
aauaaucacacaggguc

SEQ ID NO: 751598 - RNA, 17 nt, Artificial Sequence
  Synthetic
cgggugaccacaggguc

SEQ ID NO: 751599 - RNA, 17 nt, Artificial Sequence
  Synthetic
cagugguuaccaggguc

SEQ ID NO: 751600 - RNA, 17 nt, Artificial Sequence
  Synthetic
uucuugcugccaggguc

SEQ ID NO: 751601 - RNA, 17 nt, Artificial Sequence
  Synthetic
ugugaagaagcaggguc

SEQ ID NO: 751602 - RNA, 17 nt, Artificial Sequence
  Synthetic
uugcucaaaggaggguc

SEQ ID NO: 751603 - RNA, 17 nt, Artificial Sequence
  Synthetic
aacauggaugccggguc

SEQ ID NO: 751604 - RNA, 17 nt, Artificial Sequence
  Synthetic
aguccugaaaagggguc

SEQ ID NO: 751605 - RNA, 17 nt, Artificial Sequence
  Synthetic
aguuccacaaagggguc

SEQ ID NO: 751606 - RNA, 17 nt, Artificial Sequence
  Synthetic
cggaagcacaagggguc

SEQ ID NO: 751607 - RNA, 17 nt, Artificial Sequence
  Synthetic
agacaguagcagggguc

SEQ ID NO: 751608 - RNA, 17 nt, Artificial Sequence
  Synthetic
uuuagguaagagggguc

SEQ ID NO: 751609 - RNA, 17 nt, Artificial Sequence
  Synthetic
agagcugucuagggguc

SEQ ID NO: 751610 - RNA, 17 nt, Artificial Sequence
  Synthetic
cugggauuaacgggguc

SEQ ID NO: 751611 - RNA, 17 nt, Artificial Sequence
  Synthetic
uucagggagacgggguc

SEQ ID NO: 751612 - RNA, 17 nt, Artificial Sequence
  Synthetic
caggaggcacggggguc

SEQ ID NO: 751613 - RNA, 17 nt, Artificial Sequence
  Synthetic
caagaggucuggggguc

SEQ ID NO: 751614 - RNA, 17 nt, Artificial Sequence
  Synthetic
ugaguuuccaugggguc

SEQ ID NO: 751615 - RNA, 17 nt, Artificial Sequence
  Synthetic
ucuaccauugugggguc

SEQ ID NO: 751616 - RNA, 17 nt, Artificial Sequence
  Synthetic
cuaggccuacauggguc

SEQ ID NO: 751617 - RNA, 17 nt, Artificial Sequence
  Synthetic
ugcaaaagggcuggguc

SEQ ID NO: 751618 - RNA, 17 nt, Artificial Sequence
  Synthetic
uuuucuuuaucuggguc

SEQ ID NO: 751619 - RNA, 17 nt, Artificial Sequence
  Synthetic
uauuaaagcauuggguc

SEQ ID NO: 751620 - RNA, 17 nt, Artificial Sequence
  Synthetic
uuuuggacccuuggguc

SEQ ID NO: 751621 - RNA, 17 nt, Artificial Sequence
  Synthetic
uuuaguuauguuggguc

SEQ ID NO: 751622 - RNA, 17 nt, Artificial Sequence
  Synthetic
aaacagagauuuggguc

SEQ ID NO: 751623 - RNA, 17 nt, Artificial Sequence
  Synthetic
uaaguggagaaaugguc

SEQ ID NO: 751624 - RNA, 17 nt, Artificial Sequence
  Synthetic
uccuucaaagaaugguc

SEQ ID NO: 751625 - RNA, 17 nt, Artificial Sequence
  Synthetic
uucccacaaguaugguc

SEQ ID NO: 751626 - RNA, 17 nt, Artificial Sequence
  Synthetic
ucauggugcuuaugguc

SEQ ID NO: 751627 - RNA, 17 nt, Artificial Sequence
  Synthetic
uguaauugccacugguc

SEQ ID NO: 751628 - RNA, 17 nt, Artificial Sequence
  Synthetic
aguugaagauacugguc

SEQ ID NO: 751629 - RNA, 17 nt, Artificial Sequence
  Synthetic
agccaccccaccugguc

SEQ ID NO: 751630 - RNA, 17 nt, Artificial Sequence
  Synthetic
cucauaccauccugguc

SEQ ID NO: 751631 - RNA, 17 nt, Artificial Sequence
  Synthetic
auuuuuauuuccugguc

SEQ ID NO: 751632 - RNA, 17 nt, Artificial Sequence
  Synthetic
ccuuggccaggcugguc

SEQ ID NO: 751633 - RNA, 17 nt, Artificial Sequence
  Synthetic
caaaucauucucugguc

SEQ ID NO: 751634 - RNA, 17 nt, Artificial Sequence
  Synthetic
ccauuauaauucugguc

SEQ ID NO: 751635 - RNA, 17 nt, Artificial Sequence
  Synthetic
agaaugucuuagugguc

SEQ ID NO: 751636 - RNA, 17 nt, Artificial Sequence
  Synthetic
acuuuauuauggugguc

SEQ ID NO: 751637 - RNA, 17 nt, Artificial Sequence
  Synthetic
uuuccuuaaaugugguc

SEQ ID NO: 751638 - RNA, 17 nt, Artificial Sequence
  Synthetic
uugucuauagugugguc

SEQ ID NO: 751639 - RNA, 17 nt, Artificial Sequence
  Synthetic
agcuguucauugugguc

SEQ ID NO: 751640 - RNA, 17 nt, Artificial Sequence
  Synthetic
auaaccuguuugugguc

SEQ ID NO: 751641 - RNA, 17 nt, Artificial Sequence
  Synthetic
aaacagaaaaauugguc

SEQ ID NO: 751642 - RNA, 17 nt, Artificial Sequence
  Synthetic
uucuuuugaaauugguc

SEQ ID NO: 751643 - RNA, 17 nt, Artificial Sequence
  Synthetic
uucuauaggaauugguc

SEQ ID NO: 751644 - RNA, 17 nt, Artificial Sequence
  Synthetic
uuaagaaauaauugguc

SEQ ID NO: 751645 - RNA, 17 nt, Artificial Sequence
  Synthetic
ugggugcuucauugguc

SEQ ID NO: 751646 - RNA, 17 nt, Artificial Sequence
  Synthetic
aguuuuauuucuugguc

SEQ ID NO: 751647 - RNA, 17 nt, Artificial Sequence
  Synthetic
auuuuucuuucuugguc

SEQ ID NO: 751648 - RNA, 17 nt, Artificial Sequence
  Synthetic
uugaaaagaaguugguc

SEQ ID NO: 751649 - RNA, 17 nt, Artificial Sequence
  Synthetic
uacugauuaaguugguc

SEQ ID NO: 751650 - RNA, 17 nt, Artificial Sequence
  Synthetic
uucugugucaguugguc

SEQ ID NO: 751651 - RNA, 17 nt, Artificial Sequence
  Synthetic
uaagagauggguugguc

SEQ ID NO: 751652 - RNA, 17 nt, Artificial Sequence
  Synthetic
auuucaccauguugguc

SEQ ID NO: 751653 - RNA, 17 nt, Artificial Sequence
  Synthetic
cagccacuucuuugguc

SEQ ID NO: 751654 - RNA, 17 nt, Artificial Sequence
  Synthetic
auggauggauuuugguc

SEQ ID NO: 751655 - RNA, 17 nt, Artificial Sequence
  Synthetic
ccuuuuuuuuuuugguc

SEQ ID NO: 751656 - RNA, 17 nt, Artificial Sequence
  Synthetic
uccugauucaaaauguc

SEQ ID NO: 751657 - RNA, 17 nt, Artificial Sequence
  Synthetic
acuagaauuaaaauguc

SEQ ID NO: 751658 - RNA, 17 nt, Artificial Sequence
  Synthetic
cuagaucuccaaauguc

SEQ ID NO: 751659 - RNA, 17 nt, Artificial Sequence
  Synthetic
agauaaggaacaauguc

SEQ ID NO: 751660 - RNA, 17 nt, Artificial Sequence
  Synthetic
uuaaaauucacaauguc

SEQ ID NO: 751661 - RNA, 17 nt, Artificial Sequence
  Synthetic
uaguucacuacaauguc

SEQ ID NO: 751662 - RNA, 17 nt, Artificial Sequence
  Synthetic
uugugaagaccaauguc

SEQ ID NO: 751663 - RNA, 17 nt, Artificial Sequence
  Synthetic
aucaauuaaucaauguc

SEQ ID NO: 751664 - RNA, 17 nt, Artificial Sequence
  Synthetic
caaaaagaaagaauguc

SEQ ID NO: 751665 - RNA, 17 nt, Artificial Sequence
  Synthetic
uaaaaacuacgaauguc

SEQ ID NO: 751666 - RNA, 17 nt, Artificial Sequence
  Synthetic
uucugccaaggaauguc

SEQ ID NO: 751667 - RNA, 17 nt, Artificial Sequence
  Synthetic
ccccaaccaggaauguc

SEQ ID NO: 751668 - RNA, 17 nt, Artificial Sequence
  Synthetic
uuauucugaggaauguc

SEQ ID NO: 751669 - RNA, 17 nt, Artificial Sequence
  Synthetic
auucuucuuugaauguc

SEQ ID NO: 751670 - RNA, 17 nt, Artificial Sequence
  Synthetic
uccuaaaauauaauguc

SEQ ID NO: 751671 - RNA, 17 nt, Artificial Sequence
  Synthetic
cagcaccaccuaauguc

SEQ ID NO: 751672 - RNA, 17 nt, Artificial Sequence
  Synthetic
uucucauagcuaauguc

SEQ ID NO: 751673 - RNA, 17 nt, Artificial Sequence
  Synthetic
agacauuugguaauguc

SEQ ID NO: 751674 - RNA, 17 nt, Artificial Sequence
  Synthetic
auuuuuuucuuaauguc

SEQ ID NO: 751675 - RNA, 17 nt, Artificial Sequence
  Synthetic
ucuucauuguuaauguc

SEQ ID NO: 751676 - RNA, 17 nt, Artificial Sequence
  Synthetic
auaugcucuuuaauguc

SEQ ID NO: 751677 - RNA, 17 nt, Artificial Sequence
  Synthetic
acacaggcacacauguc

SEQ ID NO: 751678 - RNA, 17 nt, Artificial Sequence
  Synthetic
ugcacaugacacauguc

SEQ ID NO: 751679 - RNA, 17 nt, Artificial Sequence
  Synthetic
uuuuuuggauacauguc

SEQ ID NO: 751680 - RNA, 17 nt, Artificial Sequence
  Synthetic
agagaaaaaugcauguc

SEQ ID NO: 751681 - RNA, 17 nt, Artificial Sequence
  Synthetic
uuuuuauucaucauguc

SEQ ID NO: 751682 - RNA, 17 nt, Artificial Sequence
  Synthetic
acacaauguaucauguc

SEQ ID NO: 751683 - RNA, 17 nt, Artificial Sequence
  Synthetic
uaauaaauauucauguc

SEQ ID NO: 751684 - RNA, 17 nt, Artificial Sequence
  Synthetic
agauagauauucauguc

SEQ ID NO: 751685 - RNA, 17 nt, Artificial Sequence
  Synthetic
cagcagcaaaagauguc

SEQ ID NO: 751686 - RNA, 17 nt, Artificial Sequence
  Synthetic
uucaguuauaagauguc

SEQ ID NO: 751687 - RNA, 17 nt, Artificial Sequence
  Synthetic
uggaagcgggagauguc

SEQ ID NO: 751688 - RNA, 17 nt, Artificial Sequence
  Synthetic
ccuaaaacauagauguc

SEQ ID NO: 751689 - RNA, 17 nt, Artificial Sequence
  Synthetic
aaaugaauguggauguc

SEQ ID NO: 751690 - RNA, 17 nt, Artificial Sequence
  Synthetic
acauucucaaugauguc

SEQ ID NO: 751691 - RNA, 17 nt, Artificial Sequence
  Synthetic
uuuaaaauacugauguc

SEQ ID NO: 751692 - RNA, 17 nt, Artificial Sequence
  Synthetic
ccaggaagggugauguc

SEQ ID NO: 751693 - RNA, 17 nt, Artificial Sequence
  Synthetic
auaacuugauugauguc

SEQ ID NO: 751694 - RNA, 17 nt, Artificial Sequence
  Synthetic
uugguauucaauauguc

SEQ ID NO: 751695 - RNA, 17 nt, Artificial Sequence
  Synthetic
uguggcauucauauguc

SEQ ID NO: 751696 - RNA, 17 nt, Artificial Sequence
  Synthetic
uucuucucagauauguc

SEQ ID NO: 751697 - RNA, 17 nt, Artificial Sequence
  Synthetic
uagaaaacaacuauguc

SEQ ID NO: 751698 - RNA, 17 nt, Artificial Sequence
  Synthetic
aguagcacagcuauguc

SEQ ID NO: 751699 - RNA, 17 nt, Artificial Sequence
  Synthetic
uuuaggaacucuauguc

SEQ ID NO: 751700 - RNA, 17 nt, Artificial Sequence
  Synthetic
ucaugauucuguauguc

SEQ ID NO: 751701 - RNA, 17 nt, Artificial Sequence
  Synthetic
cuuaaauuuuguauguc

SEQ ID NO: 751702 - RNA, 17 nt, Artificial Sequence
  Synthetic
ucugcucuaauuauguc

SEQ ID NO: 751703 - RNA, 17 nt, Artificial Sequence
  Synthetic
auaacuuguguuauguc

SEQ ID NO: 751704 - RNA, 17 nt, Artificial Sequence
  Synthetic
aaaaauuauuuuauguc

SEQ ID NO: 751705 - RNA, 17 nt, Artificial Sequence
  Synthetic
agagaagcaacacuguc

SEQ ID NO: 751706 - RNA, 17 nt, Artificial Sequence
  Synthetic
cugaguugagcacuguc

SEQ ID NO: 751707 - RNA, 17 nt, Artificial Sequence
  Synthetic
aaugguuacagacuguc

SEQ ID NO: 751708 - RNA, 17 nt, Artificial Sequence
  Synthetic
ccugguccaggacuguc

SEQ ID NO: 751709 - RNA, 17 nt, Artificial Sequence
  Synthetic
caccauuuuauacuguc

SEQ ID NO: 751710 - RNA, 17 nt, Artificial Sequence
  Synthetic
ucuauacaccuacuguc

SEQ ID NO: 751711 - RNA, 17 nt, Artificial Sequence
  Synthetic
uuuuuguuucuacuguc

SEQ ID NO: 751712 - RNA, 17 nt, Artificial Sequence
  Synthetic
aacaacaaaguacuguc

SEQ ID NO: 751713 - RNA, 17 nt, Artificial Sequence
  Synthetic
uuccuaaccuaccuguc

SEQ ID NO: 751714 - RNA, 17 nt, Artificial Sequence
  Synthetic
uacuugcuuuaccuguc

SEQ ID NO: 751715 - RNA, 17 nt, Artificial Sequence
  Synthetic
acacacugaggccuguc

SEQ ID NO: 751716 - RNA, 17 nt, Artificial Sequence
  Synthetic
acacacuggggccuguc

SEQ ID NO: 751717 - RNA, 17 nt, Artificial Sequence
  Synthetic
ucccauuuuauccuguc

SEQ ID NO: 751718 - RNA, 17 nt, Artificial Sequence
  Synthetic
aaauguucccuccuguc

SEQ ID NO: 751719 - RNA, 17 nt, Artificial Sequence
  Synthetic
caguguuggcuccuguc

SEQ ID NO: 751720 - RNA, 17 nt, Artificial Sequence
  Synthetic
uccuuaaguuuccuguc

SEQ ID NO: 751721 - RNA, 17 nt, Artificial Sequence
  Synthetic
uauuuccuguagcuguc

SEQ ID NO: 751722 - RNA, 17 nt, Artificial Sequence
  Synthetic
uuugaaguauggcuguc

SEQ ID NO: 751723 - RNA, 17 nt, Artificial Sequence
  Synthetic
cuuuuuauuuggcuguc

SEQ ID NO: 751724 - RNA, 17 nt, Artificial Sequence
  Synthetic
cuguagaagaugcuguc

SEQ ID NO: 751725 - RNA, 17 nt, Artificial Sequence
  Synthetic
uauuucuugaaucuguc

SEQ ID NO: 751726 - RNA, 17 nt, Artificial Sequence
  Synthetic
aauuaacuucaucuguc

SEQ ID NO: 751727 - RNA, 17 nt, Artificial Sequence
  Synthetic
auucaugcauaucuguc

SEQ ID NO: 751728 - RNA, 17 nt, Artificial Sequence
  Synthetic
ucuccaggauaucuguc

SEQ ID NO: 751729 - RNA, 17 nt, Artificial Sequence
  Synthetic
augcuguucucucuguc

SEQ ID NO: 751730 - RNA, 17 nt, Artificial Sequence
  Synthetic
ucucuggcuucucuguc

SEQ ID NO: 751731 - RNA, 17 nt, Artificial Sequence
  Synthetic
ucagugucaagucuguc

SEQ ID NO: 751732 - RNA, 17 nt, Artificial Sequence
  Synthetic
aucuuacauugucuguc

SEQ ID NO: 751733 - RNA, 17 nt, Artificial Sequence
  Synthetic
uugguugagcuucuguc

SEQ ID NO: 751734 - RNA, 17 nt, Artificial Sequence
  Synthetic
uuacacuguuuucuguc

SEQ ID NO: 751735 - RNA, 17 nt, Artificial Sequence
  Synthetic
cugucugugaaaguguc

SEQ ID NO: 751736 - RNA, 17 nt, Artificial Sequence
  Synthetic
acagaguuccaaguguc

SEQ ID NO: 751737 - RNA, 17 nt, Artificial Sequence
  Synthetic
aauuucaaucaaguguc

SEQ ID NO: 751738 - RNA, 17 nt, Artificial Sequence
  Synthetic
aaagacagugaaguguc

SEQ ID NO: 751739 - RNA, 17 nt, Artificial Sequence
  Synthetic
ugguagacauaaguguc

SEQ ID NO: 751740 - RNA, 17 nt, Artificial Sequence
  Synthetic
augguuuuauaaguguc

SEQ ID NO: 751741 - RNA, 17 nt, Artificial Sequence
  Synthetic
cuucagggaacaguguc

SEQ ID NO: 751742 - RNA, 17 nt, Artificial Sequence
  Synthetic
auuaauagaccaguguc

SEQ ID NO: 751743 - RNA, 17 nt, Artificial Sequence
  Synthetic
aggcacauuccaguguc

SEQ ID NO: 751744 - RNA, 17 nt, Artificial Sequence
  Synthetic
aaguggcuggcaguguc

SEQ ID NO: 751745 - RNA, 17 nt, Artificial Sequence
  Synthetic
aggaacuccucaguguc

SEQ ID NO: 751746 - RNA, 17 nt, Artificial Sequence
  Synthetic
cugugauuuucaguguc

SEQ ID NO: 751747 - RNA, 17 nt, Artificial Sequence
  Synthetic
caaagcucaugaguguc

SEQ ID NO: 751748 - RNA, 17 nt, Artificial Sequence
  Synthetic
ucuggguggauaguguc

SEQ ID NO: 751749 - RNA, 17 nt, Artificial Sequence
  Synthetic
ucaccuacuauaguguc

SEQ ID NO: 751750 - RNA, 17 nt, Artificial Sequence
  Synthetic
ugcuuuauuguaguguc

SEQ ID NO: 751751 - RNA, 17 nt, Artificial Sequence
  Synthetic
aaacucagauuaguguc

SEQ ID NO: 751752 - RNA, 17 nt, Artificial Sequence
  Synthetic
uggcuaaacuuaguguc

SEQ ID NO: 751753 - RNA, 17 nt, Artificial Sequence
  Synthetic
ucugagaucaagguguc

SEQ ID NO: 751754 - RNA, 17 nt, Artificial Sequence
  Synthetic
acaggcauccagguguc

SEQ ID NO: 751755 - RNA, 17 nt, Artificial Sequence
  Synthetic
aaaggaguucagguguc

SEQ ID NO: 751756 - RNA, 17 nt, Artificial Sequence
  Synthetic
auuuaauaaaugguguc

SEQ ID NO: 751757 - RNA, 17 nt, Artificial Sequence
  Synthetic
agucauccugugguguc

SEQ ID NO: 751758 - RNA, 17 nt, Artificial Sequence
  Synthetic
cucuggcauuugguguc

SEQ ID NO: 751759 - RNA, 17 nt, Artificial Sequence
  Synthetic
ccagcagauuugguguc

SEQ ID NO: 751760 - RNA, 17 nt, Artificial Sequence
  Synthetic
cuggcagguuugguguc

SEQ ID NO: 751761 - RNA, 17 nt, Artificial Sequence
  Synthetic
auggccauuuugguguc

SEQ ID NO: 751762 - RNA, 17 nt, Artificial Sequence
  Synthetic
ccuuaaacaaauguguc

SEQ ID NO: 751763 - RNA, 17 nt, Artificial Sequence
  Synthetic
uggguguucaauguguc

SEQ ID NO: 751764 - RNA, 17 nt, Artificial Sequence
  Synthetic
auccucuaccauguguc

SEQ ID NO: 751765 - RNA, 17 nt, Artificial Sequence
  Synthetic
ucuaccucagauguguc

SEQ ID NO: 751766 - RNA, 17 nt, Artificial Sequence
  Synthetic
caaugaaaugauguguc

SEQ ID NO: 751767 - RNA, 17 nt, Artificial Sequence
  Synthetic
agcucuuaguauguguc

SEQ ID NO: 751768 - RNA, 17 nt, Artificial Sequence
  Synthetic
uuauacucaacuguguc

SEQ ID NO: 751769 - RNA, 17 nt, Artificial Sequence
  Synthetic
cugcucagaacuguguc

SEQ ID NO: 751770 - RNA, 17 nt, Artificial Sequence
  Synthetic
uggagcugcucuguguc

SEQ ID NO: 751771 - RNA, 17 nt, Artificial Sequence
  Synthetic
aaaacauccaguguguc

SEQ ID NO: 751772 - RNA, 17 nt, Artificial Sequence
  Synthetic
ucagccuccaguguguc

SEQ ID NO: 751773 - RNA, 17 nt, Artificial Sequence
  Synthetic
aggggaagcuguguguc

SEQ ID NO: 751774 - RNA, 17 nt, Artificial Sequence
  Synthetic
acauuuugaauuguguc

SEQ ID NO: 751775 - RNA, 17 nt, Artificial Sequence
  Synthetic
auuuuucauuuuguguc

SEQ ID NO: 751776 - RNA, 17 nt, Artificial Sequence
  Synthetic
uauggacuuuuuguguc

SEQ ID NO: 751777 - RNA, 17 nt, Artificial Sequence
  Synthetic
ugauauuagaaauuguc

SEQ ID NO: 751778 - RNA, 17 nt, Artificial Sequence
  Synthetic
caagauauagaauuguc

SEQ ID NO: 751779 - RNA, 17 nt, Artificial Sequence
  Synthetic
uuugaaguuacauuguc

SEQ ID NO: 751780 - RNA, 17 nt, Artificial Sequence
  Synthetic
ucaauuauuccauuguc

SEQ ID NO: 751781 - RNA, 17 nt, Artificial Sequence
  Synthetic
uuuucuacugcauuguc

SEQ ID NO: 751782 - RNA, 17 nt, Artificial Sequence
  Synthetic
ucagcagauucauuguc

SEQ ID NO: 751783 - RNA, 17 nt, Artificial Sequence
  Synthetic
aacaugcacagauuguc

SEQ ID NO: 751784 - RNA, 17 nt, Artificial Sequence
  Synthetic
uugugauuuuuauuguc

SEQ ID NO: 751785 - RNA, 17 nt, Artificial Sequence
  Synthetic
agagaaaacuacuuguc

SEQ ID NO: 751786 - RNA, 17 nt, Artificial Sequence
  Synthetic
ucaucagguuacuuguc

SEQ ID NO: 751787 - RNA, 17 nt, Artificial Sequence
  Synthetic
aagaaacuugccuuguc

SEQ ID NO: 751788 - RNA, 17 nt, Artificial Sequence
  Synthetic
aaccacagcagcuuguc

SEQ ID NO: 751789 - RNA, 17 nt, Artificial Sequence
  Synthetic
cacauaaugagcuuguc

SEQ ID NO: 751790 - RNA, 17 nt, Artificial Sequence
  Synthetic
uuuucucagcaguuguc

SEQ ID NO: 751791 - RNA, 17 nt, Artificial Sequence
  Synthetic
augaaaaugcaguuguc

SEQ ID NO: 751792 - RNA, 17 nt, Artificial Sequence
  Synthetic
acaacaauguaguuguc

SEQ ID NO: 751793 - RNA, 17 nt, Artificial Sequence
  Synthetic
aauuccagcacguuguc

SEQ ID NO: 751794 - RNA, 17 nt, Artificial Sequence
  Synthetic
aguggucucugguuguc

SEQ ID NO: 751795 - RNA, 17 nt, Artificial Sequence
  Synthetic
uuugucacgugguuguc

SEQ ID NO: 751796 - RNA, 17 nt, Artificial Sequence
  Synthetic
acuucagccauguuguc

SEQ ID NO: 751797 - RNA, 17 nt, Artificial Sequence
  Synthetic
uggcuuucuauguuguc

SEQ ID NO: 751798 - RNA, 17 nt, Artificial Sequence
  Synthetic
agucucgcucuguuguc

SEQ ID NO: 751799 - RNA, 17 nt, Artificial Sequence
  Synthetic
uuucaguucguguuguc

SEQ ID NO: 751800 - RNA, 17 nt, Artificial Sequence
  Synthetic
uguccauuuguguuguc

SEQ ID NO: 751801 - RNA, 17 nt, Artificial Sequence
  Synthetic
uuacguuuuguguuguc

SEQ ID NO: 751802 - RNA, 17 nt, Artificial Sequence
  Synthetic
acaacuacauuguuguc

SEQ ID NO: 751803 - RNA, 17 nt, Artificial Sequence
  Synthetic
agcuaacaguuguuguc

SEQ ID NO: 751804 - RNA, 17 nt, Artificial Sequence
  Synthetic
acuaaaaaacauuuguc

SEQ ID NO: 751805 - RNA, 17 nt, Artificial Sequence
  Synthetic
uuacuuguucauuuguc

SEQ ID NO: 751806 - RNA, 17 nt, Artificial Sequence
  Synthetic
acaaaucaguauuuguc

SEQ ID NO: 751807 - RNA, 17 nt, Artificial Sequence
  Synthetic
uuuaaagaguauuuguc

SEQ ID NO: 751808 - RNA, 17 nt, Artificial Sequence
  Synthetic
ugguguugaccuuuguc

SEQ ID NO: 751809 - RNA, 17 nt, Artificial Sequence
  Synthetic
uuuuuguuuccuuuguc

SEQ ID NO: 751810 - RNA, 17 nt, Artificial Sequence
  Synthetic
cagccccaugcuuuguc

SEQ ID NO: 751811 - RNA, 17 nt, Artificial Sequence
  Synthetic
cuugugauaucuuuguc

SEQ ID NO: 751812 - RNA, 17 nt, Artificial Sequence
  Synthetic
agugaaucuucuuuguc

SEQ ID NO: 751813 - RNA, 17 nt, Artificial Sequence
  Synthetic
aauauucuuauuuuguc

SEQ ID NO: 751814 - RNA, 17 nt, Artificial Sequence
  Synthetic
cuuguucuacuuuuguc

SEQ ID NO: 751815 - RNA, 17 nt, Artificial Sequence
  Synthetic
cagaaaauccuuuuguc

SEQ ID NO: 751816 - RNA, 17 nt, Artificial Sequence
  Synthetic
aaaaugagauuuuuguc

SEQ ID NO: 751817 - RNA, 17 nt, Artificial Sequence
  Synthetic
cauugcuuguuuuuguc

SEQ ID NO: 751818 - RNA, 17 nt, Artificial Sequence
  Synthetic
cguugcuuguuuuuguc

SEQ ID NO: 751819 - RNA, 17 nt, Artificial Sequence
  Synthetic
cauuucuuguuuuuguc

SEQ ID NO: 751820 - RNA, 17 nt, Artificial Sequence
  Synthetic
auuucuuguuuuuuguc

SEQ ID NO: 751821 - RNA, 17 nt, Artificial Sequence
  Synthetic
uuaauuguaaaaaauuc

SEQ ID NO: 751822 - RNA, 17 nt, Artificial Sequence
  Synthetic
uuaaauuuaaaaaauuc

SEQ ID NO: 751823 - RNA, 17 nt, Artificial Sequence
  Synthetic
ccagcaugcaaaaauuc

SEQ ID NO: 751824 - RNA, 17 nt, Artificial Sequence
  Synthetic
ugucagaggaaaaauuc

SEQ ID NO: 751825 - RNA, 17 nt, Artificial Sequence
  Synthetic
auauacaagcaaaauuc

SEQ ID NO: 751826 - RNA, 17 nt, Artificial Sequence
  Synthetic
uacucuaagcaaaauuc

SEQ ID NO: 751827 - RNA, 17 nt, Artificial Sequence
  Synthetic
aaacuaccucaaaauuc

SEQ ID NO: 751828 - RNA, 17 nt, Artificial Sequence
  Synthetic
uugauugcucaaaauuc

SEQ ID NO: 751829 - RNA, 17 nt, Artificial Sequence
  Synthetic
aucccccuugaaaauuc

SEQ ID NO: 751830 - RNA, 17 nt, Artificial Sequence
  Synthetic
caagauuuugaaaauuc

SEQ ID NO: 751831 - RNA, 17 nt, Artificial Sequence
  Synthetic
uauggaagauaaaauuc

SEQ ID NO: 751832 - RNA, 17 nt, Artificial Sequence
  Synthetic
uguaucugauaaaauuc

SEQ ID NO: 751833 - RNA, 17 nt, Artificial Sequence
  Synthetic
auguaugacuaaaauuc

SEQ ID NO: 751834 - RNA, 17 nt, Artificial Sequence
  Synthetic
aaauuguaguaaaauuc

SEQ ID NO: 751835 - RNA, 17 nt, Artificial Sequence
  Synthetic
cauaucuauuaaaauuc

SEQ ID NO: 751836 - RNA, 17 nt, Artificial Sequence
  Synthetic
aaacaauuuccaaauuc

SEQ ID NO: 751837 - RNA, 17 nt, Artificial Sequence
  Synthetic
ugucucuuuccaaauuc

SEQ ID NO: 751838 - RNA, 17 nt, Artificial Sequence
  Synthetic
cuuccccuaagaaauuc

SEQ ID NO: 751839 - RNA, 17 nt, Artificial Sequence
  Synthetic
cauaagaauagaaauuc

SEQ ID NO: 751840 - RNA, 17 nt, Artificial Sequence
  Synthetic
ccaaauuucugaaauuc

SEQ ID NO: 751841 - RNA, 17 nt, Artificial Sequence
  Synthetic
uaguuuaugugaaauuc

SEQ ID NO: 751842 - RNA, 17 nt, Artificial Sequence
  Synthetic
auucuagauugaaauuc

SEQ ID NO: 751843 - RNA, 17 nt, Artificial Sequence
  Synthetic
acauacuguguaaauuc

SEQ ID NO: 751844 - RNA, 17 nt, Artificial Sequence
  Synthetic
uuaggaacaaacaauuc

SEQ ID NO: 751845 - RNA, 17 nt, Artificial Sequence
  Synthetic
uccaagauccacaauuc

SEQ ID NO: 751846 - RNA, 17 nt, Artificial Sequence
  Synthetic
caauuauaauacaauuc

SEQ ID NO: 751847 - RNA, 17 nt, Artificial Sequence
  Synthetic
cucuuuuacuacaauuc

SEQ ID NO: 751848 - RNA, 17 nt, Artificial Sequence
  Synthetic
aauacaauguacaauuc

SEQ ID NO: 751849 - RNA, 17 nt, Artificial Sequence
  Synthetic
acguggaaaaccaauuc

SEQ ID NO: 751850 - RNA, 17 nt, Artificial Sequence
  Synthetic
cuuaaggaugccaauuc

SEQ ID NO: 751851 - RNA, 17 nt, Artificial Sequence
  Synthetic
cccacugccugcaauuc

SEQ ID NO: 751852 - RNA, 17 nt, Artificial Sequence
  Synthetic
auguauaauugcaauuc

SEQ ID NO: 751853 - RNA, 17 nt, Artificial Sequence
  Synthetic
cauuuuuaaaucaauuc

SEQ ID NO: 751854 - RNA, 17 nt, Artificial Sequence
  Synthetic
acagcacaucucaauuc

SEQ ID NO: 751855 - RNA, 17 nt, Artificial Sequence
  Synthetic
uucuggacucucaauuc

SEQ ID NO: 751856 - RNA, 17 nt, Artificial Sequence
  Synthetic
aucccauuugucaauuc

SEQ ID NO: 751857 - RNA, 17 nt, Artificial Sequence
  Synthetic
acuuugacuuucaauuc

SEQ ID NO: 751858 - RNA, 17 nt, Artificial Sequence
  Synthetic
aaaaaggaaaagaauuc

SEQ ID NO: 751859 - RNA, 17 nt, Artificial Sequence
  Synthetic
aauuucucuaagaauuc

SEQ ID NO: 751860 - RNA, 17 nt, Artificial Sequence
  Synthetic
aaaguggaagagaauuc

SEQ ID NO: 751861 - RNA, 17 nt, Artificial Sequence
  Synthetic
aggaaaauugagaauuc

SEQ ID NO: 751862 - RNA, 17 nt, Artificial Sequence
  Synthetic
ucucauggcuagaauuc

SEQ ID NO: 751863 - RNA, 17 nt, Artificial Sequence
  Synthetic
uuuggaagguagaauuc

SEQ ID NO: 751864 - RNA, 17 nt, Artificial Sequence
  Synthetic
aguuaugcuuagaauuc

SEQ ID NO: 751865 - RNA, 17 nt, Artificial Sequence
  Synthetic
aauaaugacaggaauuc

SEQ ID NO: 751866 - RNA, 17 nt, Artificial Sequence
  Synthetic
uugggauuacggaauuc

SEQ ID NO: 751867 - RNA, 17 nt, Artificial Sequence
  Synthetic
ccuacugucuggaauuc

SEQ ID NO: 751868 - RNA, 17 nt, Artificial Sequence
  Synthetic
aacccuaaguggaauuc

SEQ ID NO: 751869 - RNA, 17 nt, Artificial Sequence
  Synthetic
cuaaguacuuggaauuc

SEQ ID NO: 751870 - RNA, 17 nt, Artificial Sequence
  Synthetic
aacccguuuuggaauuc

SEQ ID NO: 751871 - RNA, 17 nt, Artificial Sequence
  Synthetic
aaaagaucaaugaauuc

SEQ ID NO: 751872 - RNA, 17 nt, Artificial Sequence
  Synthetic
ugccagacuaugaauuc

SEQ ID NO: 751873 - RNA, 17 nt, Artificial Sequence
  Synthetic
caaauggcacugaauuc

SEQ ID NO: 751874 - RNA, 17 nt, Artificial Sequence
  Synthetic
cacauucuugugaauuc

SEQ ID NO: 751875 - RNA, 17 nt, Artificial Sequence
  Synthetic
uauauuauauugaauuc

SEQ ID NO: 751876 - RNA, 17 nt, Artificial Sequence
  Synthetic
acagaucacuugaauuc

SEQ ID NO: 751877 - RNA, 17 nt, Artificial Sequence
  Synthetic
cugaauucaaauaauuc

SEQ ID NO: 751878 - RNA, 17 nt, Artificial Sequence
  Synthetic
ccuggaacacauaauuc

SEQ ID NO: 751879 - RNA, 17 nt, Artificial Sequence
  Synthetic
uuauccauugauaauuc

SEQ ID NO: 751880 - RNA, 17 nt, Artificial Sequence
  Synthetic
caucagagauauaauuc

SEQ ID NO: 751881 - RNA, 17 nt, Artificial Sequence
  Synthetic
agcaugugaccuaauuc

SEQ ID NO: 751882 - RNA, 17 nt, Artificial Sequence
  Synthetic
ugaauuuucccuaauuc

SEQ ID NO: 751883 - RNA, 17 nt, Artificial Sequence
  Synthetic
uggaaugcugcuaauuc

SEQ ID NO: 751884 - RNA, 17 nt, Artificial Sequence
  Synthetic
ucuaagugaaguaauuc

SEQ ID NO: 751885 - RNA, 17 nt, Artificial Sequence
  Synthetic
ucucuacccaguaauuc

SEQ ID NO: 751886 - RNA, 17 nt, Artificial Sequence
  Synthetic
caccauuucuguaauuc

SEQ ID NO: 751887 - RNA, 17 nt, Artificial Sequence
  Synthetic
auucuugaaauuaauuc

SEQ ID NO: 751888 - RNA, 17 nt, Artificial Sequence
  Synthetic
uuucucuacauuaauuc

SEQ ID NO: 751889 - RNA, 17 nt, Artificial Sequence
  Synthetic
uuagcaacuauuaauuc

SEQ ID NO: 751890 - RNA, 17 nt, Artificial Sequence
  Synthetic
ucacaaggucuuaauuc

SEQ ID NO: 751891 - RNA, 17 nt, Artificial Sequence
  Synthetic
caccaaaauguuaauuc

SEQ ID NO: 751892 - RNA, 17 nt, Artificial Sequence
  Synthetic
aaagagaaauuuaauuc

SEQ ID NO: 751893 - RNA, 17 nt, Artificial Sequence
  Synthetic
aauaaauuauuuaauuc

SEQ ID NO: 751894 - RNA, 17 nt, Artificial Sequence
  Synthetic
cuggcuguuuuuaauuc

SEQ ID NO: 751895 - RNA, 17 nt, Artificial Sequence
  Synthetic
aauuuagaacaacauuc

SEQ ID NO: 751896 - RNA, 17 nt, Artificial Sequence
  Synthetic
ugguaaagacaacauuc

SEQ ID NO: 751897 - RNA, 17 nt, Artificial Sequence
  Synthetic
aagucaguauaacauuc

SEQ ID NO: 751898 - RNA, 17 nt, Artificial Sequence
  Synthetic
uucccccacuaacauuc

SEQ ID NO: 751899 - RNA, 17 nt, Artificial Sequence
  Synthetic
ucuugucucuaacauuc

SEQ ID NO: 751900 - RNA, 17 nt, Artificial Sequence
  Synthetic
uugacaguuacacauuc

SEQ ID NO: 751901 - RNA, 17 nt, Artificial Sequence
  Synthetic
cucuuuucuccacauuc

SEQ ID NO: 751902 - RNA, 17 nt, Artificial Sequence
  Synthetic
ucugagcccucacauuc

SEQ ID NO: 751903 - RNA, 17 nt, Artificial Sequence
  Synthetic
ucuuaaaagucacauuc

SEQ ID NO: 751904 - RNA, 17 nt, Artificial Sequence
  Synthetic
ugacaacuuucacauuc

SEQ ID NO: 751905 - RNA, 17 nt, Artificial Sequence
  Synthetic
auugaaauaagacauuc

SEQ ID NO: 751906 - RNA, 17 nt, Artificial Sequence
  Synthetic
cucaaauggagacauuc

SEQ ID NO: 751907 - RNA, 17 nt, Artificial Sequence
  Synthetic
ugcuccucuagacauuc

SEQ ID NO: 751908 - RNA, 17 nt, Artificial Sequence
  Synthetic
uauauaucaggacauuc

SEQ ID NO: 751909 - RNA, 17 nt, Artificial Sequence
  Synthetic
ccuuuugauggacauuc

SEQ ID NO: 751910 - RNA, 17 nt, Artificial Sequence
  Synthetic
uucauacauugacauuc

SEQ ID NO: 751911 - RNA, 17 nt, Artificial Sequence
  Synthetic
ugcuaaaaacuacauuc

SEQ ID NO: 751912 - RNA, 17 nt, Artificial Sequence
  Synthetic
cugugugucuuacauuc

SEQ ID NO: 751913 - RNA, 17 nt, Artificial Sequence
  Synthetic
accuguuucuuacauuc

SEQ ID NO: 751914 - RNA, 17 nt, Artificial Sequence
  Synthetic
uauuauacuuuacauuc

SEQ ID NO: 751915 - RNA, 17 nt, Artificial Sequence
  Synthetic
uuauuugaaaaccauuc

SEQ ID NO: 751916 - RNA, 17 nt, Artificial Sequence
  Synthetic
caugaagucaaccauuc

SEQ ID NO: 751917 - RNA, 17 nt, Artificial Sequence
  Synthetic
auuuaucaccaccauuc

SEQ ID NO: 751918 - RNA, 17 nt, Artificial Sequence
  Synthetic
ucugggaaauaccauuc

SEQ ID NO: 751919 - RNA, 17 nt, Artificial Sequence
  Synthetic
ccuaggcaauaccauuc

SEQ ID NO: 751920 - RNA, 17 nt, Artificial Sequence
  Synthetic
uauucaugcuaccauuc

SEQ ID NO: 751921 - RNA, 17 nt, Artificial Sequence
  Synthetic
uugaggcauuaccauuc

SEQ ID NO: 751922 - RNA, 17 nt, Artificial Sequence
  Synthetic
ccuaggcauuaccauuc

SEQ ID NO: 751923 - RNA, 17 nt, Artificial Sequence
  Synthetic
agggagagggcccauuc

SEQ ID NO: 751924 - RNA, 17 nt, Artificial Sequence
  Synthetic
cugaggccuugccauuc

SEQ ID NO: 751925 - RNA, 17 nt, Artificial Sequence
  Synthetic
caagcauucauccauuc

SEQ ID NO: 751926 - RNA, 17 nt, Artificial Sequence
  Synthetic
uauaucccuauccauuc

SEQ ID NO: 751927 - RNA, 17 nt, Artificial Sequence
  Synthetic
caugaaaaucuccauuc

SEQ ID NO: 751928 - RNA, 17 nt, Artificial Sequence
  Synthetic
uacuuaauuuuccauuc

SEQ ID NO: 751929 - RNA, 17 nt, Artificial Sequence
  Synthetic
agcaugauuuuccauuc

SEQ ID NO: 751930 - RNA, 17 nt, Artificial Sequence
  Synthetic
agauggggggagcauuc

SEQ ID NO: 751931 - RNA, 17 nt, Artificial Sequence
  Synthetic
caucaaaaauagcauuc

SEQ ID NO: 751932 - RNA, 17 nt, Artificial Sequence
  Synthetic
aaauacugcaugcauuc

SEQ ID NO: 751933 - RNA, 17 nt, Artificial Sequence
  Synthetic
auuuacaucaugcauuc

SEQ ID NO: 751934 - RNA, 17 nt, Artificial Sequence
  Synthetic
aguaaaagggugcauuc

SEQ ID NO: 751935 - RNA, 17 nt, Artificial Sequence
  Synthetic
aagcugaccaaucauuc

SEQ ID NO: 751936 - RNA, 17 nt, Artificial Sequence
  Synthetic
uauguacagaaucauuc

SEQ ID NO: 751937 - RNA, 17 nt, Artificial Sequence
  Synthetic
uuuuuaaaagaucauuc

SEQ ID NO: 751938 - RNA, 17 nt, Artificial Sequence
  Synthetic
uuuuaaacagaucauuc

SEQ ID NO: 751939 - RNA, 17 nt, Artificial Sequence
  Synthetic
cagcuauucuaucauuc

SEQ ID NO: 751940 - RNA, 17 nt, Artificial Sequence
  Synthetic
uuauugauaacucauuc

SEQ ID NO: 751941 - RNA, 17 nt, Artificial Sequence
  Synthetic
agugaccuuacucauuc

SEQ ID NO: 751942 - RNA, 17 nt, Artificial Sequence
  Synthetic
cugcugcucccucauuc

SEQ ID NO: 751943 - RNA, 17 nt, Artificial Sequence
  Synthetic
auccuccagccucauuc

SEQ ID NO: 751944 - RNA, 17 nt, Artificial Sequence
  Synthetic
caaaaccaugcucauuc

SEQ ID NO: 751945 - RNA, 17 nt, Artificial Sequence
  Synthetic
accccucaugcucauuc

SEQ ID NO: 751946 - RNA, 17 nt, Artificial Sequence
  Synthetic
aucuaugugucucauuc

SEQ ID NO: 751947 - RNA, 17 nt, Artificial Sequence
  Synthetic
ugauugcuuucucauuc

SEQ ID NO: 751948 - RNA, 17 nt, Artificial Sequence
  Synthetic
cuucuuuuuucucauuc

SEQ ID NO: 751949 - RNA, 17 nt, Artificial Sequence
  Synthetic
acuaaauaaagucauuc

SEQ ID NO: 751950 - RNA, 17 nt, Artificial Sequence
  Synthetic
ccucuaugaagucauuc

SEQ ID NO: 751951 - RNA, 17 nt, Artificial Sequence
  Synthetic
aagacauacagucauuc

SEQ ID NO: 751952 - RNA, 17 nt, Artificial Sequence
  Synthetic
uuauccagcagucauuc

SEQ ID NO: 751953 - RNA, 17 nt, Artificial Sequence
  Synthetic
uaaauaauaauucauuc

SEQ ID NO: 751954 - RNA, 17 nt, Artificial Sequence
  Synthetic
cuucaaagcauucauuc

SEQ ID NO: 751955 - RNA, 17 nt, Artificial Sequence
  Synthetic
acggauuaacuucauuc

SEQ ID NO: 751956 - RNA, 17 nt, Artificial Sequence
  Synthetic
aacuuguuucuucauuc

SEQ ID NO: 751957 - RNA, 17 nt, Artificial Sequence
  Synthetic
cuuuuaucaguucauuc

SEQ ID NO: 751958 - RNA, 17 nt, Artificial Sequence
  Synthetic
cucuuaaaauuucauuc

SEQ ID NO: 751959 - RNA, 17 nt, Artificial Sequence
  Synthetic
uuuggguaguuucauuc

SEQ ID NO: 751960 - RNA, 17 nt, Artificial Sequence
  Synthetic
uuuuugacuuuucauuc

SEQ ID NO: 751961 - RNA, 17 nt, Artificial Sequence
  Synthetic
ccuauggaaaaagauuc

SEQ ID NO: 751962 - RNA, 17 nt, Artificial Sequence
  Synthetic
uaaacaaacuaagauuc

SEQ ID NO: 751963 - RNA, 17 nt, Artificial Sequence
  Synthetic
ugugaagaaacagauuc

SEQ ID NO: 751964 - RNA, 17 nt, Artificial Sequence
  Synthetic
caauacauuccagauuc

SEQ ID NO: 751965 - RNA, 17 nt, Artificial Sequence
  Synthetic
ucagggcauucagauuc

SEQ ID NO: 751966 - RNA, 17 nt, Artificial Sequence
  Synthetic
augcgucccagagauuc

SEQ ID NO: 751967 - RNA, 17 nt, Artificial Sequence
  Synthetic
cugugucccagagauuc

SEQ ID NO: 751968 - RNA, 17 nt, Artificial Sequence
  Synthetic
auucaacaaggagauuc

SEQ ID NO: 751969 - RNA, 17 nt, Artificial Sequence
  Synthetic
aaugcaguaggagauuc

SEQ ID NO: 751970 - RNA, 17 nt, Artificial Sequence
  Synthetic
aaauuaggaugagauuc

SEQ ID NO: 751971 - RNA, 17 nt, Artificial Sequence
  Synthetic
auaucuuuuugagauuc

SEQ ID NO: 751972 - RNA, 17 nt, Artificial Sequence
  Synthetic
agguuccucauagauuc

SEQ ID NO: 751973 - RNA, 17 nt, Artificial Sequence
  Synthetic
auguuguugauagauuc

SEQ ID NO: 751974 - RNA, 17 nt, Artificial Sequence
  Synthetic
aaguuccuuauagauuc

SEQ ID NO: 751975 - RNA, 17 nt, Artificial Sequence
  Synthetic
auccugccucuagauuc

SEQ ID NO: 751976 - RNA, 17 nt, Artificial Sequence
  Synthetic
aaagucagucuagauuc

SEQ ID NO: 751977 - RNA, 17 nt, Artificial Sequence
  Synthetic
aaguuccuuguagauuc

SEQ ID NO: 751978 - RNA, 17 nt, Artificial Sequence
  Synthetic
acuuugauuuuagauuc

SEQ ID NO: 751979 - RNA, 17 nt, Artificial Sequence
  Synthetic
aaguguauuuuagauuc

SEQ ID NO: 751980 - RNA, 17 nt, Artificial Sequence
  Synthetic
uuuuauugaaacgauuc

SEQ ID NO: 751981 - RNA, 17 nt, Artificial Sequence
  Synthetic
uguaaagaugacgauuc

SEQ ID NO: 751982 - RNA, 17 nt, Artificial Sequence
  Synthetic
ccaaguucaagcgauuc

SEQ ID NO: 751983 - RNA, 17 nt, Artificial Sequence
  Synthetic
uucuauuuuagcgauuc

SEQ ID NO: 751984 - RNA, 17 nt, Artificial Sequence
  Synthetic
aaauuugguuaggauuc

SEQ ID NO: 751985 - RNA, 17 nt, Artificial Sequence
  Synthetic
aucuguucaagggauuc

SEQ ID NO: 751986 - RNA, 17 nt, Artificial Sequence
  Synthetic
augaaaguaugggauuc

SEQ ID NO: 751987 - RNA, 17 nt, Artificial Sequence
  Synthetic
agggguaagugggauuc

SEQ ID NO: 751988 - RNA, 17 nt, Artificial Sequence
  Synthetic
cuugaugucauggauuc

SEQ ID NO: 751989 - RNA, 17 nt, Artificial Sequence
  Synthetic
uucuagauuauggauuc

SEQ ID NO: 751990 - RNA, 17 nt, Artificial Sequence
  Synthetic
uccuuuaucaaugauuc

SEQ ID NO: 751991 - RNA, 17 nt, Artificial Sequence
  Synthetic
auaaauuucaaugauuc

SEQ ID NO: 751992 - RNA, 17 nt, Artificial Sequence
  Synthetic
uauauaugucaugauuc

SEQ ID NO: 751993 - RNA, 17 nt, Artificial Sequence
  Synthetic
agcauuuuugaugauuc

SEQ ID NO: 751994 - RNA, 17 nt, Artificial Sequence
  Synthetic
cuagaaacuucugauuc

SEQ ID NO: 751995 - RNA, 17 nt, Artificial Sequence
  Synthetic
aguuuaaaucgugauuc

SEQ ID NO: 751996 - RNA, 17 nt, Artificial Sequence
  Synthetic
ugcuuaaggauugauuc

SEQ ID NO: 751997 - RNA, 17 nt, Artificial Sequence
  Synthetic
uuauuaugauuugauuc

SEQ ID NO: 751998 - RNA, 17 nt, Artificial Sequence
  Synthetic
caaaagauuuuugauuc

SEQ ID NO: 751999 - RNA, 17 nt, Artificial Sequence
  Synthetic
augauggaaaaauauuc

SEQ ID NO: 752000 - RNA, 17 nt, Artificial Sequence
  Synthetic
cagcuucaaacauauuc

SEQ ID NO: 752001 - RNA, 17 nt, Artificial Sequence
  Synthetic
uauguguacacauauuc

SEQ ID NO: 752002 - RNA, 17 nt, Artificial Sequence
  Synthetic
aaggcaggcccauauuc

SEQ ID NO: 752003 - RNA, 17 nt, Artificial Sequence
  Synthetic
ugauauaagccauauuc

SEQ ID NO: 752004 - RNA, 17 nt, Artificial Sequence
  Synthetic
acuaggguuccauauuc

SEQ ID NO: 752005 - RNA, 17 nt, Artificial Sequence
  Synthetic
uccaaauaggcauauuc

SEQ ID NO: 752006 - RNA, 17 nt, Artificial Sequence
  Synthetic
auucuuaccucauauuc

SEQ ID NO: 752007 - RNA, 17 nt, Artificial Sequence
  Synthetic
agcuacaagucauauuc

SEQ ID NO: 752008 - RNA, 17 nt, Artificial Sequence
  Synthetic
uaguggacuucauauuc

SEQ ID NO: 752009 - RNA, 17 nt, Artificial Sequence
  Synthetic
uucugacuuucauauuc

SEQ ID NO: 752010 - RNA, 17 nt, Artificial Sequence
  Synthetic
ugaaauguuucauauuc

SEQ ID NO: 752011 - RNA, 17 nt, Artificial Sequence
  Synthetic
augugccucagauauuc

SEQ ID NO: 752012 - RNA, 17 nt, Artificial Sequence
  Synthetic
ucaaaggggagauauuc

SEQ ID NO: 752013 - RNA, 17 nt, Artificial Sequence
  Synthetic
auuguagauagauauuc

SEQ ID NO: 752014 - RNA, 17 nt, Artificial Sequence
  Synthetic
aauuaacaaggauauuc

SEQ ID NO: 752015 - RNA, 17 nt, Artificial Sequence
  Synthetic
auuuuugcuggauauuc

SEQ ID NO: 752016 - RNA, 17 nt, Artificial Sequence
  Synthetic
aaagaaggcugauauuc

SEQ ID NO: 752017 - RNA, 17 nt, Artificial Sequence
  Synthetic
acagauacuugauauuc

SEQ ID NO: 752018 - RNA, 17 nt, Artificial Sequence
  Synthetic
ugauaguagauauauuc

SEQ ID NO: 752019 - RNA, 17 nt, Artificial Sequence
  Synthetic
uaacuccuuauauauuc

SEQ ID NO: 752020 - RNA, 17 nt, Artificial Sequence
  Synthetic
auaaaaaaacuauauuc

SEQ ID NO: 752021 - RNA, 17 nt, Artificial Sequence
  Synthetic
acaacucaccuauauuc

SEQ ID NO: 752022 - RNA, 17 nt, Artificial Sequence
  Synthetic
aguucagaauuauauuc

SEQ ID NO: 752023 - RNA, 17 nt, Artificial Sequence
  Synthetic
acccugcauuuauauuc

SEQ ID NO: 752024 - RNA, 17 nt, Artificial Sequence
  Synthetic
uucucucauuuauauuc

SEQ ID NO: 752025 - RNA, 17 nt, Artificial Sequence
  Synthetic
uuuuccugaaacuauuc

SEQ ID NO: 752026 - RNA, 17 nt, Artificial Sequence
  Synthetic
aagauaaggaacuauuc

SEQ ID NO: 752027 - RNA, 17 nt, Artificial Sequence
  Synthetic
ugccucugucacuauuc

SEQ ID NO: 752028 - RNA, 17 nt, Artificial Sequence
  Synthetic
agcauuucugacuauuc

SEQ ID NO: 752029 - RNA, 17 nt, Artificial Sequence
  Synthetic
ccuaggaaauacuauuc

SEQ ID NO: 752030 - RNA, 17 nt, Artificial Sequence
  Synthetic
acuagagaauacuauuc

SEQ ID NO: 752031 - RNA, 17 nt, Artificial Sequence
  Synthetic
ccgaaauauuccuauuc

SEQ ID NO: 752032 - RNA, 17 nt, Artificial Sequence
  Synthetic
uguuuguaaagcuauuc

SEQ ID NO: 752033 - RNA, 17 nt, Artificial Sequence
  Synthetic
uguaaucccagcuauuc

SEQ ID NO: 752034 - RNA, 17 nt, Artificial Sequence
  Synthetic
agacaguugagcuauuc

SEQ ID NO: 752035 - RNA, 17 nt, Artificial Sequence
  Synthetic
ugggcacccaucuauuc

SEQ ID NO: 752036 - RNA, 17 nt, Artificial Sequence
  Synthetic
aucaccuugcucuauuc

SEQ ID NO: 752037 - RNA, 17 nt, Artificial Sequence
  Synthetic
accuaguuucucuauuc

SEQ ID NO: 752038 - RNA, 17 nt, Artificial Sequence
  Synthetic
ucguuauuggucuauuc

SEQ ID NO: 752039 - RNA, 17 nt, Artificial Sequence
  Synthetic
cuguuauuggucuauuc

SEQ ID NO: 752040 - RNA, 17 nt, Artificial Sequence
  Synthetic
uuguuauuggucuauuc

SEQ ID NO: 752041 - RNA, 17 nt, Artificial Sequence
  Synthetic
uggagaaaugucuauuc

SEQ ID NO: 752042 - RNA, 17 nt, Artificial Sequence
  Synthetic
aucaucugugucuauuc

SEQ ID NO: 752043 - RNA, 17 nt, Artificial Sequence
  Synthetic
agauuuauuuucuauuc

SEQ ID NO: 752044 - RNA, 17 nt, Artificial Sequence
  Synthetic
ugacugcuuuucuauuc

SEQ ID NO: 752045 - RNA, 17 nt, Artificial Sequence
  Synthetic
uuuuuaaaaaaguauuc

SEQ ID NO: 752046 - RNA, 17 nt, Artificial Sequence
  Synthetic
aaguuguagaaguauuc

SEQ ID NO: 752047 - RNA, 17 nt, Artificial Sequence
  Synthetic
uuacugaugaaguauuc

SEQ ID NO: 752048 - RNA, 17 nt, Artificial Sequence
  Synthetic
cacuuuucacaguauuc

SEQ ID NO: 752049 - RNA, 17 nt, Artificial Sequence
  Synthetic
ugaaugaaagaguauuc

SEQ ID NO: 752050 - RNA, 17 nt, Artificial Sequence
  Synthetic
auauuucuaauguauuc

SEQ ID NO: 752051 - RNA, 17 nt, Artificial Sequence
  Synthetic
ugguucuuaauguauuc

SEQ ID NO: 752052 - RNA, 17 nt, Artificial Sequence
  Synthetic
aucagugugcuguauuc

SEQ ID NO: 752053 - RNA, 17 nt, Artificial Sequence
  Synthetic
uuguaccaucuguauuc

SEQ ID NO: 752054 - RNA, 17 nt, Artificial Sequence
  Synthetic
aucagugugguguauuc

SEQ ID NO: 752055 - RNA, 17 nt, Artificial Sequence
  Synthetic
ugaacauuuguguauuc

SEQ ID NO: 752056 - RNA, 17 nt, Artificial Sequence
  Synthetic
uagggucucuuguauuc

SEQ ID NO: 752057 - RNA, 17 nt, Artificial Sequence
  Synthetic
ugguaucuguuguauuc

SEQ ID NO: 752058 - RNA, 17 nt, Artificial Sequence
  Synthetic
caguuuaguuuguauuc

SEQ ID NO: 752059 - RNA, 17 nt, Artificial Sequence
  Synthetic
agauacaaaaauuauuc

SEQ ID NO: 752060 - RNA, 17 nt, Artificial Sequence
  Synthetic
agcucacucaauuauuc

SEQ ID NO: 752061 - RNA, 17 nt, Artificial Sequence
  Synthetic
auaucacagaauuauuc

SEQ ID NO: 752062 - RNA, 17 nt, Artificial Sequence
  Synthetic
cugaguuuuaauuauuc

SEQ ID NO: 752063 - RNA, 17 nt, Artificial Sequence
  Synthetic
uuggucaaacauuauuc

SEQ ID NO: 752064 - RNA, 17 nt, Artificial Sequence
  Synthetic
aaggguuuauauuauuc

SEQ ID NO: 752065 - RNA, 17 nt, Artificial Sequence
  Synthetic
augaaucauuauuauuc

SEQ ID NO: 752066 - RNA, 17 nt, Artificial Sequence
  Synthetic
uguagauauuauuauuc

SEQ ID NO: 752067 - RNA, 17 nt, Artificial Sequence
  Synthetic
aaaaaaaaaacuuauuc

SEQ ID NO: 752068 - RNA, 17 nt, Artificial Sequence
  Synthetic
ccucucccaacuuauuc

SEQ ID NO: 752069 - RNA, 17 nt, Artificial Sequence
  Synthetic
ucuaugaacacuuauuc

SEQ ID NO: 752070 - RNA, 17 nt, Artificial Sequence
  Synthetic
cuaguuguuacuuauuc

SEQ ID NO: 752071 - RNA, 17 nt, Artificial Sequence
  Synthetic
uuacacacuucuuauuc

SEQ ID NO: 752072 - RNA, 17 nt, Artificial Sequence
  Synthetic
ccuauugacauuuauuc

SEQ ID NO: 752073 - RNA, 17 nt, Artificial Sequence
  Synthetic
uacacagcuauuuauuc

SEQ ID NO: 752074 - RNA, 17 nt, Artificial Sequence
  Synthetic
uaaggaagacuuuauuc

SEQ ID NO: 752075 - RNA, 17 nt, Artificial Sequence
  Synthetic
aaccaauuacuuuauuc

SEQ ID NO: 752076 - RNA, 17 nt, Artificial Sequence
  Synthetic
ucccuugcucuuuauuc

SEQ ID NO: 752077 - RNA, 17 nt, Artificial Sequence
  Synthetic
uuuacucuuguuuauuc

SEQ ID NO: 752078 - RNA, 17 nt, Artificial Sequence
  Synthetic
auaguuuguuuuuauuc

SEQ ID NO: 752079 - RNA, 17 nt, Artificial Sequence
  Synthetic
aaaaagauuuuuuauuc

SEQ ID NO: 752080 - RNA, 17 nt, Artificial Sequence
  Synthetic
caacauagaaaaacuuc

SEQ ID NO: 752081 - RNA, 17 nt, Artificial Sequence
  Synthetic
auaugccuuaaaacuuc

SEQ ID NO: 752082 - RNA, 17 nt, Artificial Sequence
  Synthetic
uaccccuucuaaacuuc

SEQ ID NO: 752083 - RNA, 17 nt, Artificial Sequence
  Synthetic
uugauaccuuaaacuuc

SEQ ID NO: 752084 - RNA, 17 nt, Artificial Sequence
  Synthetic
cagaguuuagcaacuuc

SEQ ID NO: 752085 - RNA, 17 nt, Artificial Sequence
  Synthetic
auaaauacugcaacuuc

SEQ ID NO: 752086 - RNA, 17 nt, Artificial Sequence
  Synthetic
uaugucuuuucaacuuc

SEQ ID NO: 752087 - RNA, 17 nt, Artificial Sequence
  Synthetic
aaaaggaaaagaacuuc

SEQ ID NO: 752088 - RNA, 17 nt, Artificial Sequence
  Synthetic
agaggcaggagaacuuc

SEQ ID NO: 752089 - RNA, 17 nt, Artificial Sequence
  Synthetic
ucauucaugagaacuuc

SEQ ID NO: 752090 - RNA, 17 nt, Artificial Sequence
  Synthetic
acucucuggggaacuuc

SEQ ID NO: 752091 - RNA, 17 nt, Artificial Sequence
  Synthetic
uagugaacaugaacuuc

SEQ ID NO: 752092 - RNA, 17 nt, Artificial Sequence
  Synthetic
uuuguauccauaacuuc

SEQ ID NO: 752093 - RNA, 17 nt, Artificial Sequence
  Synthetic
uuaucuuguguaacuuc

SEQ ID NO: 752094 - RNA, 17 nt, Artificial Sequence
  Synthetic
uauuuuucauuaacuuc

SEQ ID NO: 752095 - RNA, 17 nt, Artificial Sequence
  Synthetic
uuccaauuugacacuuc

SEQ ID NO: 752096 - RNA, 17 nt, Artificial Sequence
  Synthetic
cuugauuuugacacuuc

SEQ ID NO: 752097 - RNA, 17 nt, Artificial Sequence
  Synthetic
uccagaaaucccacuuc

SEQ ID NO: 752098 - RNA, 17 nt, Artificial Sequence
  Synthetic
uccagcaaucccacuuc

SEQ ID NO: 752099 - RNA, 17 nt, Artificial Sequence
  Synthetic
uacaccuuucccacuuc

SEQ ID NO: 752100 - RNA, 17 nt, Artificial Sequence
  Synthetic
uaggaaagauccacuuc

SEQ ID NO: 752101 - RNA, 17 nt, Artificial Sequence
  Synthetic
accauugccuccacuuc

SEQ ID NO: 752102 - RNA, 17 nt, Artificial Sequence
  Synthetic
uccaauaauuccacuuc

SEQ ID NO: 752103 - RNA, 17 nt, Artificial Sequence
  Synthetic
uguaaucccagcacuuc

SEQ ID NO: 752104 - RNA, 17 nt, Artificial Sequence
  Synthetic
aaacuuuccagcacuuc

SEQ ID NO: 752105 - RNA, 17 nt, Artificial Sequence
  Synthetic
augucaaauaucacuuc

SEQ ID NO: 752106 - RNA, 17 nt, Artificial Sequence
  Synthetic
aauaaauguaucacuuc

SEQ ID NO: 752107 - RNA, 17 nt, Artificial Sequence
  Synthetic
uaccaaaugcucacuuc

SEQ ID NO: 752108 - RNA, 17 nt, Artificial Sequence
  Synthetic
uugugauauuucacuuc

SEQ ID NO: 752109 - RNA, 17 nt, Artificial Sequence
  Synthetic
caucgggggaagacuuc

SEQ ID NO: 752110 - RNA, 17 nt, Artificial Sequence
  Synthetic
ucauugucucagacuuc

SEQ ID NO: 752111 - RNA, 17 nt, Artificial Sequence
  Synthetic
cucgucagucagacuuc

SEQ ID NO: 752112 - RNA, 17 nt, Artificial Sequence
  Synthetic
ugagcggaggagacuuc

SEQ ID NO: 752113 - RNA, 17 nt, Artificial Sequence
  Synthetic
cagaguacuuggacuuc

SEQ ID NO: 752114 - RNA, 17 nt, Artificial Sequence
  Synthetic
ucuggguacaugacuuc

SEQ ID NO: 752115 - RNA, 17 nt, Artificial Sequence
  Synthetic
cucgaacuccugacuuc

SEQ ID NO: 752116 - RNA, 17 nt, Artificial Sequence
  Synthetic
auagaacaugugacuuc

SEQ ID NO: 752117 - RNA, 17 nt, Artificial Sequence
  Synthetic
ccucuuucugugacuuc

SEQ ID NO: 752118 - RNA, 17 nt, Artificial Sequence
  Synthetic
cuacuggaauugacuuc

SEQ ID NO: 752119 - RNA, 17 nt, Artificial Sequence
  Synthetic
cucaaacucuugacuuc

SEQ ID NO: 752120 - RNA, 17 nt, Artificial Sequence
  Synthetic
acuguacugaauacuuc

SEQ ID NO: 752121 - RNA, 17 nt, Artificial Sequence
  Synthetic
uguuuccaagauacuuc

SEQ ID NO: 752122 - RNA, 17 nt, Artificial Sequence
  Synthetic
caucuuggauauacuuc

SEQ ID NO: 752123 - RNA, 17 nt, Artificial Sequence
  Synthetic
agcuaacucuauacuuc

SEQ ID NO: 752124 - RNA, 17 nt, Artificial Sequence
  Synthetic
ccuuuaaaaccuacuuc

SEQ ID NO: 752125 - RNA, 17 nt, Artificial Sequence
  Synthetic
cuuucaauuccuacuuc

SEQ ID NO: 752126 - RNA, 17 nt, Artificial Sequence
  Synthetic
ucacuggcaucuacuuc

SEQ ID NO: 752127 - RNA, 17 nt, Artificial Sequence
  Synthetic
auaaucauuucuacuuc

SEQ ID NO: 752128 - RNA, 17 nt, Artificial Sequence
  Synthetic
auuuaucuaaguacuuc

SEQ ID NO: 752129 - RNA, 17 nt, Artificial Sequence
  Synthetic
uacacagccauuacuuc

SEQ ID NO: 752130 - RNA, 17 nt, Artificial Sequence
  Synthetic
uaauuuuauguuacuuc

SEQ ID NO: 752131 - RNA, 17 nt, Artificial Sequence
  Synthetic
aagcucuaauuuacuuc

SEQ ID NO: 752132 - RNA, 17 nt, Artificial Sequence
  Synthetic
uauagguauuuuacuuc

SEQ ID NO: 752133 - RNA, 17 nt, Artificial Sequence
  Synthetic
cauucaguuacaccuuc

SEQ ID NO: 752134 - RNA, 17 nt, Artificial Sequence
  Synthetic
ucucuccuuccaccuuc

SEQ ID NO: 752135 - RNA, 17 nt, Artificial Sequence
  Synthetic
uguucuaugucaccuuc

SEQ ID NO: 752136 - RNA, 17 nt, Artificial Sequence
  Synthetic
uuggggaggugaccuuc

SEQ ID NO: 752137 - RNA, 17 nt, Artificial Sequence
  Synthetic
ccuuaaagguuaccuuc

SEQ ID NO: 752138 - RNA, 17 nt, Artificial Sequence
  Synthetic
ugcaagguuuuaccuuc

SEQ ID NO: 752139 - RNA, 17 nt, Artificial Sequence
  Synthetic
auuuugauguacccuuc

SEQ ID NO: 752140 - RNA, 17 nt, Artificial Sequence
  Synthetic
ucagacaaggccccuuc

SEQ ID NO: 752141 - RNA, 17 nt, Artificial Sequence
  Synthetic
acgugacaaagcccuuc

SEQ ID NO: 752142 - RNA, 17 nt, Artificial Sequence
  Synthetic
aucagcuugagcccuuc

SEQ ID NO: 752143 - RNA, 17 nt, Artificial Sequence
  Synthetic
aaauccuagggcccuuc

SEQ ID NO: 752144 - RNA, 17 nt, Artificial Sequence
  Synthetic
uuuuccccacucccuuc

SEQ ID NO: 752145 - RNA, 17 nt, Artificial Sequence
  Synthetic
auuaauugccucccuuc

SEQ ID NO: 752146 - RNA, 17 nt, Artificial Sequence
  Synthetic
caacugucagucccuuc

SEQ ID NO: 752147 - RNA, 17 nt, Artificial Sequence
  Synthetic
cuagggacauggccuuc

SEQ ID NO: 752148 - RNA, 17 nt, Artificial Sequence
  Synthetic
aagcacguauggccuuc

SEQ ID NO: 752149 - RNA, 17 nt, Artificial Sequence
  Synthetic
ccuuucuucaugccuuc

SEQ ID NO: 752150 - RNA, 17 nt, Artificial Sequence
  Synthetic
uauuuccuucugccuuc

SEQ ID NO: 752151 - RNA, 17 nt, Artificial Sequence
  Synthetic
uuuagacaugugccuuc

SEQ ID NO: 752152 - RNA, 17 nt, Artificial Sequence
  Synthetic
auuauucucuugccuuc

SEQ ID NO: 752153 - RNA, 17 nt, Artificial Sequence
  Synthetic
cauaauauuuugccuuc

SEQ ID NO: 752154 - RNA, 17 nt, Artificial Sequence
  Synthetic
acaaaaaaaaauccuuc

SEQ ID NO: 752155 - RNA, 17 nt, Artificial Sequence
  Synthetic
ucaggaagcaauccuuc

SEQ ID NO: 752156 - RNA, 17 nt, Artificial Sequence
  Synthetic
uauuuauuuaauccuuc

SEQ ID NO: 752157 - RNA, 17 nt, Artificial Sequence
  Synthetic
ucuuaucaucauccuuc

SEQ ID NO: 752158 - RNA, 17 nt, Artificial Sequence
  Synthetic
cuguuuguauauccuuc

SEQ ID NO: 752159 - RNA, 17 nt, Artificial Sequence
  Synthetic
aaaggcacaacuccuuc

SEQ ID NO: 752160 - RNA, 17 nt, Artificial Sequence
  Synthetic
aacucccucccuccuuc

SEQ ID NO: 752161 - RNA, 17 nt, Artificial Sequence
  Synthetic
uguuucucagcuccuuc

SEQ ID NO: 752162 - RNA, 17 nt, Artificial Sequence
  Synthetic
cauucaucuucuccuuc

SEQ ID NO: 752163 - RNA, 17 nt, Artificial Sequence
  Synthetic
uccaccuucaguccuuc

SEQ ID NO: 752164 - RNA, 17 nt, Artificial Sequence
  Synthetic
aaccuggaggguccuuc

SEQ ID NO: 752165 - RNA, 17 nt, Artificial Sequence
  Synthetic
caacccuuuuguccuuc

SEQ ID NO: 752166 - RNA, 17 nt, Artificial Sequence
  Synthetic
uguccauucauuccuuc

SEQ ID NO: 752167 - RNA, 17 nt, Artificial Sequence
  Synthetic
uguuuagugauuccuuc

SEQ ID NO: 752168 - RNA, 17 nt, Artificial Sequence
  Synthetic
uuaaccacuauuccuuc

SEQ ID NO: 752169 - RNA, 17 nt, Artificial Sequence
  Synthetic
uguuuagcgcuuccuuc

SEQ ID NO: 752170 - RNA, 17 nt, Artificial Sequence
  Synthetic
ugcccauaagaagcuuc

SEQ ID NO: 752171 - RNA, 17 nt, Artificial Sequence
  Synthetic
auucucccuuaagcuuc

SEQ ID NO: 752172 - RNA, 17 nt, Artificial Sequence
  Synthetic
aggaaagacacagcuuc

SEQ ID NO: 752173 - RNA, 17 nt, Artificial Sequence
  Synthetic
ucccaacuaccagcuuc

SEQ ID NO: 752174 - RNA, 17 nt, Artificial Sequence
  Synthetic
uugccucuuccagcuuc

SEQ ID NO: 752175 - RNA, 17 nt, Artificial Sequence
  Synthetic
agcaucuacucagcuuc

SEQ ID NO: 752176 - RNA, 17 nt, Artificial Sequence
  Synthetic
agaguccagugagcuuc

SEQ ID NO: 752177 - RNA, 17 nt, Artificial Sequence
  Synthetic
ccuuuuccucuagcuuc

SEQ ID NO: 752178 - RNA, 17 nt, Artificial Sequence
  Synthetic
aguauagaguuagcuuc

SEQ ID NO: 752179 - RNA, 17 nt, Artificial Sequence
  Synthetic
uguaaucucagcgcuuc

SEQ ID NO: 752180 - RNA, 17 nt, Artificial Sequence
  Synthetic
uugcugaaacaggcuuc

SEQ ID NO: 752181 - RNA, 17 nt, Artificial Sequence
  Synthetic
agaagcaggcaggcuuc

SEQ ID NO: 752182 - RNA, 17 nt, Artificial Sequence
  Synthetic
ccuucuguggaggcuuc

SEQ ID NO: 752183 - RNA, 17 nt, Artificial Sequence
  Synthetic
acacccucuggggcuuc

SEQ ID NO: 752184 - RNA, 17 nt, Artificial Sequence
  Synthetic
uccaaaauaauggcuuc

SEQ ID NO: 752185 - RNA, 17 nt, Artificial Sequence
  Synthetic
aggaucacacuggcuuc

SEQ ID NO: 752186 - RNA, 17 nt, Artificial Sequence
  Synthetic
acagauuaccuggcuuc

SEQ ID NO: 752187 - RNA, 17 nt, Artificial Sequence
  Synthetic
auuauauccaaugcuuc

SEQ ID NO: 752188 - RNA, 17 nt, Artificial Sequence
  Synthetic
aaauguaaauaugcuuc

SEQ ID NO: 752189 - RNA, 17 nt, Artificial Sequence
  Synthetic
uuaaaaauauaugcuuc

SEQ ID NO: 752190 - RNA, 17 nt, Artificial Sequence
  Synthetic
agaugcugcuaugcuuc

SEQ ID NO: 752191 - RNA, 17 nt, Artificial Sequence
  Synthetic
aguaucacuuaugcuuc

SEQ ID NO: 752192 - RNA, 17 nt, Artificial Sequence
  Synthetic
ccuuucccuccugcuuc

SEQ ID NO: 752193 - RNA, 17 nt, Artificial Sequence
  Synthetic
auguaugaaucugcuuc

SEQ ID NO: 752194 - RNA, 17 nt, Artificial Sequence
  Synthetic
acaaucugaucugcuuc

SEQ ID NO: 752195 - RNA, 17 nt, Artificial Sequence
  Synthetic
acuguugauucugcuuc

SEQ ID NO: 752196 - RNA, 17 nt, Artificial Sequence
  Synthetic
cugaccccuugugcuuc

SEQ ID NO: 752197 - RNA, 17 nt, Artificial Sequence
  Synthetic
agaaugcuuugugcuuc

SEQ ID NO: 752198 - RNA, 17 nt, Artificial Sequence
  Synthetic
aaacaaaacauugcuuc

SEQ ID NO: 752199 - RNA, 17 nt, Artificial Sequence
  Synthetic
cuagaagucauugcuuc

SEQ ID NO: 752200 - RNA, 17 nt, Artificial Sequence
  Synthetic
ucuuuguuucuugcuuc

SEQ ID NO: 752201 - RNA, 17 nt, Artificial Sequence
  Synthetic
ccucaggugguugcuuc

SEQ ID NO: 752202 - RNA, 17 nt, Artificial Sequence
  Synthetic
aauauuuaguuugcuuc

SEQ ID NO: 752203 - RNA, 17 nt, Artificial Sequence
  Synthetic
cucugcucaaaaucuuc

SEQ ID NO: 752204 - RNA, 17 nt, Artificial Sequence
  Synthetic
aaaaugagaaaaucuuc

SEQ ID NO: 752205 - RNA, 17 nt, Artificial Sequence
  Synthetic
uuuuaaacuaaaucuuc

SEQ ID NO: 752206 - RNA, 17 nt, Artificial Sequence
  Synthetic
uuuugccaccaaucuuc

SEQ ID NO: 752207 - RNA, 17 nt, Artificial Sequence
  Synthetic
aacagcccuuaaucuuc

SEQ ID NO: 752208 - RNA, 17 nt, Artificial Sequence
  Synthetic
uucuuggaaacaucuuc

SEQ ID NO: 752209 - RNA, 17 nt, Artificial Sequence
  Synthetic
uuuaccaaaccaucuuc

SEQ ID NO: 752210 - RNA, 17 nt, Artificial Sequence
  Synthetic
uauaccuguccaucuuc

SEQ ID NO: 752211 - RNA, 17 nt, Artificial Sequence
  Synthetic
uuuucuauugcaucuuc

SEQ ID NO: 752212 - RNA, 17 nt, Artificial Sequence
  Synthetic
cuucaacaaagaucuuc

SEQ ID NO: 752213 - RNA, 17 nt, Artificial Sequence
  Synthetic
aacuugugaagaucuuc

SEQ ID NO: 752214 - RNA, 17 nt, Artificial Sequence
  Synthetic
uugcaccucagaucuuc

SEQ ID NO: 752215 - RNA, 17 nt, Artificial Sequence
  Synthetic
auauuagcuugaucuuc

SEQ ID NO: 752216 - RNA, 17 nt, Artificial Sequence
  Synthetic
uaauauauuugaucuuc

SEQ ID NO: 752217 - RNA, 17 nt, Artificial Sequence
  Synthetic
auguuaguuugaucuuc

SEQ ID NO: 752218 - RNA, 17 nt, Artificial Sequence
  Synthetic
ugcugugggauaucuuc

SEQ ID NO: 752219 - RNA, 17 nt, Artificial Sequence
  Synthetic
caugaauaucuaucuuc

SEQ ID NO: 752220 - RNA, 17 nt, Artificial Sequence
  Synthetic
uuaucuuaucuaucuuc

SEQ ID NO: 752221 - RNA, 17 nt, Artificial Sequence
  Synthetic
aauauuagcuuaucuuc

SEQ ID NO: 752222 - RNA, 17 nt, Artificial Sequence
  Synthetic
agcaaagcuuuaucuuc

SEQ ID NO: 752223 - RNA, 17 nt, Artificial Sequence
  Synthetic
uuagagcugaacucuuc

SEQ ID NO: 752224 - RNA, 17 nt, Artificial Sequence
  Synthetic
uguacuaggcacucuuc

SEQ ID NO: 752225 - RNA, 17 nt, Artificial Sequence
  Synthetic
aaggggaaagacucuuc

SEQ ID NO: 752226 - RNA, 17 nt, Artificial Sequence
  Synthetic
aacuugaacuacucuuc

SEQ ID NO: 752227 - RNA, 17 nt, Artificial Sequence
  Synthetic
uuguacagcuacucuuc

SEQ ID NO: 752228 - RNA, 17 nt, Artificial Sequence
  Synthetic
augacagcuaccucuuc

SEQ ID NO: 752229 - RNA, 17 nt, Artificial Sequence
  Synthetic
ugagaucaucccucuuc

SEQ ID NO: 752230 - RNA, 17 nt, Artificial Sequence
  Synthetic
cauacuugucccucuuc

SEQ ID NO: 752231 - RNA, 17 nt, Artificial Sequence
  Synthetic
ucaucaagauccucuuc

SEQ ID NO: 752232 - RNA, 17 nt, Artificial Sequence
  Synthetic
aucuggauauccucuuc

SEQ ID NO: 752233 - RNA, 17 nt, Artificial Sequence
  Synthetic
aauaaugcaagcucuuc

SEQ ID NO: 752234 - RNA, 17 nt, Artificial Sequence
  Synthetic
ugaauaaacagcucuuc

SEQ ID NO: 752235 - RNA, 17 nt, Artificial Sequence
  Synthetic
uggcccccacucucuuc

SEQ ID NO: 752236 - RNA, 17 nt, Artificial Sequence
  Synthetic
agacugcuccucucuuc

SEQ ID NO: 752237 - RNA, 17 nt, Artificial Sequence
  Synthetic
uaaaaaucucucucuuc

SEQ ID NO: 752238 - RNA, 17 nt, Artificial Sequence
  Synthetic
augaaaucauucucuuc

SEQ ID NO: 752239 - RNA, 17 nt, Artificial Sequence
  Synthetic
aacuccugcuucucuuc

SEQ ID NO: 752240 - RNA, 17 nt, Artificial Sequence
  Synthetic
uuugcucucuucucuuc

SEQ ID NO: 752241 - RNA, 17 nt, Artificial Sequence
  Synthetic
uaucaggucuucucuuc

SEQ ID NO: 752242 - RNA, 17 nt, Artificial Sequence
  Synthetic
cuacucuaguucucuuc

SEQ ID NO: 752243 - RNA, 17 nt, Artificial Sequence
  Synthetic
uacacaauuuucucuuc

SEQ ID NO: 752244 - RNA, 17 nt, Artificial Sequence
  Synthetic
accuuaauuuucucuuc

SEQ ID NO: 752245 - RNA, 17 nt, Artificial Sequence
  Synthetic
uugggaaauaagucuuc

SEQ ID NO: 752246 - RNA, 17 nt, Artificial Sequence
  Synthetic
uggggaucagagucuuc

SEQ ID NO: 752247 - RNA, 17 nt, Artificial Sequence
  Synthetic
auuauucuaccgucuuc

SEQ ID NO: 752248 - RNA, 17 nt, Artificial Sequence
  Synthetic
aucuucaauaggucuuc

SEQ ID NO: 752249 - RNA, 17 nt, Artificial Sequence
  Synthetic
uuuuguguauggucuuc

SEQ ID NO: 752250 - RNA, 17 nt, Artificial Sequence
  Synthetic
ucuaucauuuggucuuc

SEQ ID NO: 752251 - RNA, 17 nt, Artificial Sequence
  Synthetic
acacaaaauaugucuuc

SEQ ID NO: 752252 - RNA, 17 nt, Artificial Sequence
  Synthetic
cagagguacuugucuuc

SEQ ID NO: 752253 - RNA, 17 nt, Artificial Sequence
  Synthetic
uauauguuuuugucuuc

SEQ ID NO: 752254 - RNA, 17 nt, Artificial Sequence
  Synthetic
acaagaaacaauucuuc

SEQ ID NO: 752255 - RNA, 17 nt, Artificial Sequence
  Synthetic
cuuugacugaauucuuc

SEQ ID NO: 752256 - RNA, 17 nt, Artificial Sequence
  Synthetic
aaauuuguuaauucuuc

SEQ ID NO: 752257 - RNA, 17 nt, Artificial Sequence
  Synthetic
aauuuagcacauucuuc

SEQ ID NO: 752258 - RNA, 17 nt, Artificial Sequence
  Synthetic
ucuuagugucauucuuc

SEQ ID NO: 752259 - RNA, 17 nt, Artificial Sequence
  Synthetic
acuacaaaggauucuuc

SEQ ID NO: 752260 - RNA, 17 nt, Artificial Sequence
  Synthetic
ucuucuguaacuucuuc

SEQ ID NO: 752261 - RNA, 17 nt, Artificial Sequence
  Synthetic
uacugacauacuucuuc

SEQ ID NO: 752262 - RNA, 17 nt, Artificial Sequence
  Synthetic
uugugauauacuucuuc

SEQ ID NO: 752263 - RNA, 17 nt, Artificial Sequence
  Synthetic
cccuuugacccuucuuc

SEQ ID NO: 752264 - RNA, 17 nt, Artificial Sequence
  Synthetic
uccagagcuccuucuuc

SEQ ID NO: 752265 - RNA, 17 nt, Artificial Sequence
  Synthetic
uaaguuuuuccuucuuc

SEQ ID NO: 752266 - RNA, 17 nt, Artificial Sequence
  Synthetic
cacugagcaucuucuuc

SEQ ID NO: 752267 - RNA, 17 nt, Artificial Sequence
  Synthetic
cagaugcauaguucuuc

SEQ ID NO: 752268 - RNA, 17 nt, Artificial Sequence
  Synthetic
auggugacugguucuuc

SEQ ID NO: 752269 - RNA, 17 nt, Artificial Sequence
  Synthetic
ucuuguucauguucuuc

SEQ ID NO: 752270 - RNA, 17 nt, Artificial Sequence
  Synthetic
acagauagauguucuuc

SEQ ID NO: 752271 - RNA, 17 nt, Artificial Sequence
  Synthetic
ugaccugccuguucuuc

SEQ ID NO: 752272 - RNA, 17 nt, Artificial Sequence
  Synthetic
caagauuuuuguucuuc

SEQ ID NO: 752273 - RNA, 17 nt, Artificial Sequence
  Synthetic
uuaugcaucauuucuuc

SEQ ID NO: 752274 - RNA, 17 nt, Artificial Sequence
  Synthetic
aaaggcuagauuucuuc

SEQ ID NO: 752275 - RNA, 17 nt, Artificial Sequence
  Synthetic
aaagagcugauuucuuc

SEQ ID NO: 752276 - RNA, 17 nt, Artificial Sequence
  Synthetic
cuguuggggcuuucuuc

SEQ ID NO: 752277 - RNA, 17 nt, Artificial Sequence
  Synthetic
uaauauacucuuucuuc

SEQ ID NO: 752278 - RNA, 17 nt, Artificial Sequence
  Synthetic
uuaauagcaguuucuuc

SEQ ID NO: 752279 - RNA, 17 nt, Artificial Sequence
  Synthetic
uugcuuuggguuucuuc

SEQ ID NO: 752280 - RNA, 17 nt, Artificial Sequence
  Synthetic
uuaucucuauuuucuuc

SEQ ID NO: 752281 - RNA, 17 nt, Artificial Sequence
  Synthetic
auacacuccuuuucuuc

SEQ ID NO: 752282 - RNA, 17 nt, Artificial Sequence
  Synthetic
cgucuuuccuuuucuuc

SEQ ID NO: 752283 - RNA, 17 nt, Artificial Sequence
  Synthetic
uguuauuucuuuucuuc

SEQ ID NO: 752284 - RNA, 17 nt, Artificial Sequence
  Synthetic
aauuucagguuuucuuc

SEQ ID NO: 752285 - RNA, 17 nt, Artificial Sequence
  Synthetic
aguacaucaaaaaguuc

SEQ ID NO: 752286 - RNA, 17 nt, Artificial Sequence
  Synthetic
agaagaaaugaaaguuc

SEQ ID NO: 752287 - RNA, 17 nt, Artificial Sequence
  Synthetic
ugggcaguugaaaguuc

SEQ ID NO: 752288 - RNA, 17 nt, Artificial Sequence
  Synthetic
ugcuugagaccaaguuc

SEQ ID NO: 752289 - RNA, 17 nt, Artificial Sequence
  Synthetic
agaauuauaccaaguuc

SEQ ID NO: 752290 - RNA, 17 nt, Artificial Sequence
  Synthetic
uaaucccaaagaaguuc

SEQ ID NO: 752291 - RNA, 17 nt, Artificial Sequence
  Synthetic
ugggauuuaagaaguuc

SEQ ID NO: 752292 - RNA, 17 nt, Artificial Sequence
  Synthetic
cauugugagagaaguuc

SEQ ID NO: 752293 - RNA, 17 nt, Artificial Sequence
  Synthetic
uaguucucaggaaguuc

SEQ ID NO: 752294 - RNA, 17 nt, Artificial Sequence
  Synthetic
aggaagggaggaaguuc

SEQ ID NO: 752295 - RNA, 17 nt, Artificial Sequence
  Synthetic
uauuguacuggaaguuc

SEQ ID NO: 752296 - RNA, 17 nt, Artificial Sequence
  Synthetic
cauaguguuggaaguuc

SEQ ID NO: 752297 - RNA, 17 nt, Artificial Sequence
  Synthetic
acaggaggaauaaguuc

SEQ ID NO: 752298 - RNA, 17 nt, Artificial Sequence
  Synthetic
uaauuauacuuaaguuc

SEQ ID NO: 752299 - RNA, 17 nt, Artificial Sequence
  Synthetic
acaacuuucuuaaguuc

SEQ ID NO: 752300 - RNA, 17 nt, Artificial Sequence
  Synthetic
aauuauacuuuaaguuc

SEQ ID NO: 752301 - RNA, 17 nt, Artificial Sequence
  Synthetic
uauuauacuuuaaguuc

SEQ ID NO: 752302 - RNA, 17 nt, Artificial Sequence
  Synthetic
aauuuuacuuuaaguuc

SEQ ID NO: 752303 - RNA, 17 nt, Artificial Sequence
  Synthetic
uuuuaaauuuuaaguuc

SEQ ID NO: 752304 - RNA, 17 nt, Artificial Sequence
  Synthetic
acuuuuauuuuaaguuc

SEQ ID NO: 752305 - RNA, 17 nt, Artificial Sequence
  Synthetic
uuuucacuuuuaaguuc

SEQ ID NO: 752306 - RNA, 17 nt, Artificial Sequence
  Synthetic
cugcuugaaaacaguuc

SEQ ID NO: 752307 - RNA, 17 nt, Artificial Sequence
  Synthetic
uuagccucccacaguuc

SEQ ID NO: 752308 - RNA, 17 nt, Artificial Sequence
  Synthetic
aucauuucucacaguuc

SEQ ID NO: 752309 - RNA, 17 nt, Artificial Sequence
  Synthetic
cuuauuucucacaguuc

SEQ ID NO: 752310 - RNA, 17 nt, Artificial Sequence
  Synthetic
cuguugucuuacaguuc

SEQ ID NO: 752311 - RNA, 17 nt, Artificial Sequence
  Synthetic
uaggguucacccaguuc

SEQ ID NO: 752312 - RNA, 17 nt, Artificial Sequence
  Synthetic
uugguucagcccaguuc

SEQ ID NO: 752313 - RNA, 17 nt, Artificial Sequence
  Synthetic
ucuuaagccuccaguuc

SEQ ID NO: 752314 - RNA, 17 nt, Artificial Sequence
  Synthetic
uguauuucuugcaguuc

SEQ ID NO: 752315 - RNA, 17 nt, Artificial Sequence
  Synthetic
aagagaaguugcaguuc

SEQ ID NO: 752316 - RNA, 17 nt, Artificial Sequence
  Synthetic
uuugaagaaaucaguuc

SEQ ID NO: 752317 - RNA, 17 nt, Artificial Sequence
  Synthetic
uuuagcaaucucaguuc

SEQ ID NO: 752318 - RNA, 17 nt, Artificial Sequence
  Synthetic
uuaauuucuuucaguuc

SEQ ID NO: 752319 - RNA, 17 nt, Artificial Sequence
  Synthetic
caagaugagaagaguuc

SEQ ID NO: 752320 - RNA, 17 nt, Artificial Sequence
  Synthetic
acguauuaccagaguuc

SEQ ID NO: 752321 - RNA, 17 nt, Artificial Sequence
  Synthetic
caaaccccucagaguuc

SEQ ID NO: 752322 - RNA, 17 nt, Artificial Sequence
  Synthetic
agauucuaguagaguuc

SEQ ID NO: 752323 - RNA, 17 nt, Artificial Sequence
  Synthetic
cuguggaaaaggaguuc

SEQ ID NO: 752324 - RNA, 17 nt, Artificial Sequence
  Synthetic
cuugaauucaggaguuc

SEQ ID NO: 752325 - RNA, 17 nt, Artificial Sequence
  Synthetic
ugguagccccggaguuc

SEQ ID NO: 752326 - RNA, 17 nt, Artificial Sequence
  Synthetic
uuuuucuaacugaguuc

SEQ ID NO: 752327 - RNA, 17 nt, Artificial Sequence
  Synthetic
caaguccucuugaguuc

SEQ ID NO: 752328 - RNA, 17 nt, Artificial Sequence
  Synthetic
auaugccuaaauaguuc

SEQ ID NO: 752329 - RNA, 17 nt, Artificial Sequence
  Synthetic
aaacuccauaauaguuc

SEQ ID NO: 752330 - RNA, 17 nt, Artificial Sequence
  Synthetic
cuuuuuuaacauaguuc

SEQ ID NO: 752331 - RNA, 17 nt, Artificial Sequence
  Synthetic
uuguuggcucauaguuc

SEQ ID NO: 752332 - RNA, 17 nt, Artificial Sequence
  Synthetic
uuuauugcuuauaguuc

SEQ ID NO: 752333 - RNA, 17 nt, Artificial Sequence
  Synthetic
uuccaggacucuaguuc

SEQ ID NO: 752334 - RNA, 17 nt, Artificial Sequence
  Synthetic
augauuaucucuaguuc

SEQ ID NO: 752335 - RNA, 17 nt, Artificial Sequence
  Synthetic
ucuuaagacuguaguuc

SEQ ID NO: 752336 - RNA, 17 nt, Artificial Sequence
  Synthetic
aaaggaagaauuaguuc

SEQ ID NO: 752337 - RNA, 17 nt, Artificial Sequence
  Synthetic
ugcuugaacauuaguuc

SEQ ID NO: 752338 - RNA, 17 nt, Artificial Sequence
  Synthetic
uacauauucauuaguuc

SEQ ID NO: 752339 - RNA, 17 nt, Artificial Sequence
  Synthetic
cuugaguuuuaacguuc

SEQ ID NO: 752340 - RNA, 17 nt, Artificial Sequence
  Synthetic
aagauugcaguacguuc

SEQ ID NO: 752341 - RNA, 17 nt, Artificial Sequence
  Synthetic
uauuauacuuuacguuc

SEQ ID NO: 752342 - RNA, 17 nt, Artificial Sequence
  Synthetic
auuuucuuuuuacguuc

SEQ ID NO: 752343 - RNA, 17 nt, Artificial Sequence
  Synthetic
uuuauuucucaccguuc

SEQ ID NO: 752344 - RNA, 17 nt, Artificial Sequence
  Synthetic
ucguuacugguccguuc

SEQ ID NO: 752345 - RNA, 17 nt, Artificial Sequence
  Synthetic
aaguaguaucuucguuc

SEQ ID NO: 752346 - RNA, 17 nt, Artificial Sequence
  Synthetic
aaauaugaucaagguuc

SEQ ID NO: 752347 - RNA, 17 nt, Artificial Sequence
  Synthetic
ucaaaaauaacagguuc

SEQ ID NO: 752348 - RNA, 17 nt, Artificial Sequence
  Synthetic
agcauauucacagguuc

SEQ ID NO: 752349 - RNA, 17 nt, Artificial Sequence
  Synthetic
uauaugggaccagguuc

SEQ ID NO: 752350 - RNA, 17 nt, Artificial Sequence
  Synthetic
cuccgcgucccagguuc

SEQ ID NO: 752351 - RNA, 17 nt, Artificial Sequence
  Synthetic
ucacugcagccagguuc

SEQ ID NO: 752352 - RNA, 17 nt, Artificial Sequence
  Synthetic
aacacugaucuagguuc

SEQ ID NO: 752353 - RNA, 17 nt, Artificial Sequence
  Synthetic
uuccuuuugguagguuc

SEQ ID NO: 752354 - RNA, 17 nt, Artificial Sequence
  Synthetic
acuuuuaaauuagguuc

SEQ ID NO: 752355 - RNA, 17 nt, Artificial Sequence
  Synthetic
agggacagauuagguuc

SEQ ID NO: 752356 - RNA, 17 nt, Artificial Sequence
  Synthetic
aaacagugugaggguuc

SEQ ID NO: 752357 - RNA, 17 nt, Artificial Sequence
  Synthetic
acaaaacuguaggguuc

SEQ ID NO: 752358 - RNA, 17 nt, Artificial Sequence
  Synthetic
aagguaguguaggguuc

SEQ ID NO: 752359 - RNA, 17 nt, Artificial Sequence
  Synthetic
uuuuugagaugggguuc

SEQ ID NO: 752360 - RNA, 17 nt, Artificial Sequence
  Synthetic
auuugaguuugggguuc

SEQ ID NO: 752361 - RNA, 17 nt, Artificial Sequence
  Synthetic
cuccgccugcuggguuc

SEQ ID NO: 752362 - RNA, 17 nt, Artificial Sequence
  Synthetic
auuuacccaguggguuc

SEQ ID NO: 752363 - RNA, 17 nt, Artificial Sequence
  Synthetic
uuaucaaagaaugguuc

SEQ ID NO: 752364 - RNA, 17 nt, Artificial Sequence
  Synthetic
aauaaguguaaugguuc

SEQ ID NO: 752365 - RNA, 17 nt, Artificial Sequence
  Synthetic
uuaaacccauaugguuc

SEQ ID NO: 752366 - RNA, 17 nt, Artificial Sequence
  Synthetic
uauccaccuuaugguuc

SEQ ID NO: 752367 - RNA, 17 nt, Artificial Sequence
  Synthetic
uguaauacaucugguuc

SEQ ID NO: 752368 - RNA, 17 nt, Artificial Sequence
  Synthetic
cgguugaagugugguuc

SEQ ID NO: 752369 - RNA, 17 nt, Artificial Sequence
  Synthetic
ucucauccucuugguuc

SEQ ID NO: 752370 - RNA, 17 nt, Artificial Sequence
  Synthetic
acaucuagucuugguuc

SEQ ID NO: 752371 - RNA, 17 nt, Artificial Sequence
  Synthetic
uuaagaaaauuugguuc

SEQ ID NO: 752372 - RNA, 17 nt, Artificial Sequence
  Synthetic
ucauggacauuugguuc

SEQ ID NO: 752373 - RNA, 17 nt, Artificial Sequence
  Synthetic
uaaauacaguuugguuc

SEQ ID NO: 752374 - RNA, 17 nt, Artificial Sequence
  Synthetic
uaccugguuuuugguuc

SEQ ID NO: 752375 - RNA, 17 nt, Artificial Sequence
  Synthetic
cuuaaccuaaaauguuc

SEQ ID NO: 752376 - RNA, 17 nt, Artificial Sequence
  Synthetic
aauggggacaaauguuc

SEQ ID NO: 752377 - RNA, 17 nt, Artificial Sequence
  Synthetic
ccaaaauguaaauguuc

SEQ ID NO: 752378 - RNA, 17 nt, Artificial Sequence
  Synthetic
ugggucagagaauguuc

SEQ ID NO: 752379 - RNA, 17 nt, Artificial Sequence
  Synthetic
ccagaggguacauguuc

SEQ ID NO: 752380 - RNA, 17 nt, Artificial Sequence
  Synthetic
cuaaauuauucauguuc

SEQ ID NO: 752381 - RNA, 17 nt, Artificial Sequence
  Synthetic
aaguacacaagauguuc

SEQ ID NO: 752382 - RNA, 17 nt, Artificial Sequence
  Synthetic
auauacuuuagauguuc

SEQ ID NO: 752383 - RNA, 17 nt, Artificial Sequence
  Synthetic
uccgguuugggauguuc

SEQ ID NO: 752384 - RNA, 17 nt, Artificial Sequence
  Synthetic
uguucaagaugauguuc

SEQ ID NO: 752385 - RNA, 17 nt, Artificial Sequence
  Synthetic
ugcucuaagguauguuc

SEQ ID NO: 752386 - RNA, 17 nt, Artificial Sequence
  Synthetic
aaauauuagguauguuc

SEQ ID NO: 752387 - RNA, 17 nt, Artificial Sequence
  Synthetic
ucguuacugguauguuc

SEQ ID NO: 752388 - RNA, 17 nt, Artificial Sequence
  Synthetic
uugguuucauuauguuc

SEQ ID NO: 752389 - RNA, 17 nt, Artificial Sequence
  Synthetic
augggacaacacuguuc

SEQ ID NO: 752390 - RNA, 17 nt, Artificial Sequence
  Synthetic
cuuauuucucacuguuc

SEQ ID NO: 752391 - RNA, 17 nt, Artificial Sequence
  Synthetic
uuucaagcagacuguuc

SEQ ID NO: 752392 - RNA, 17 nt, Artificial Sequence
  Synthetic
auuugcucugacuguuc

SEQ ID NO: 752393 - RNA, 17 nt, Artificial Sequence
  Synthetic
cuguucaaagucuguuc

SEQ ID NO: 752394 - RNA, 17 nt, Artificial Sequence
  Synthetic
uggcagaauuucuguuc

SEQ ID NO: 752395 - RNA, 17 nt, Artificial Sequence
  Synthetic
cuuuuuauuuucuguuc

SEQ ID NO: 752396 - RNA, 17 nt, Artificial Sequence
  Synthetic
cacucucaaaaguguuc

SEQ ID NO: 752397 - RNA, 17 nt, Artificial Sequence
  Synthetic
uucugagaacaguguuc

SEQ ID NO: 752398 - RNA, 17 nt, Artificial Sequence
  Synthetic
cguuuggccagguguuc

SEQ ID NO: 752399 - RNA, 17 nt, Artificial Sequence
  Synthetic
uugggaggaugguguuc

SEQ ID NO: 752400 - RNA, 17 nt, Artificial Sequence
  Synthetic
cuucuucuaugguguuc

SEQ ID NO: 752401 - RNA, 17 nt, Artificial Sequence
  Synthetic
uuuuaaaagugguguuc

SEQ ID NO: 752402 - RNA, 17 nt, Artificial Sequence
  Synthetic
auaaugguaauguguuc

SEQ ID NO: 752403 - RNA, 17 nt, Artificial Sequence
  Synthetic
cuugaggcucuguguuc

SEQ ID NO: 752404 - RNA, 17 nt, Artificial Sequence
  Synthetic
uugauuacuguguguuc

SEQ ID NO: 752405 - RNA, 17 nt, Artificial Sequence
  Synthetic
caauguuuuguguguuc

SEQ ID NO: 752406 - RNA, 17 nt, Artificial Sequence
  Synthetic
aagaacaaaaauuguuc

SEQ ID NO: 752407 - RNA, 17 nt, Artificial Sequence
  Synthetic
auuuaagucaauuguuc

SEQ ID NO: 752408 - RNA, 17 nt, Artificial Sequence
  Synthetic
cagaaaaauaauuguuc

SEQ ID NO: 752409 - RNA, 17 nt, Artificial Sequence
  Synthetic
uucuuaucuaauuguuc

SEQ ID NO: 752410 - RNA, 17 nt, Artificial Sequence
  Synthetic
uucauggaccauuguuc

SEQ ID NO: 752411 - RNA, 17 nt, Artificial Sequence
  Synthetic
uuuagaaaagauuguuc

SEQ ID NO: 752412 - RNA, 17 nt, Artificial Sequence
  Synthetic
ucaagauaauauuguuc

SEQ ID NO: 752413 - RNA, 17 nt, Artificial Sequence
  Synthetic
aguccaguuacuuguuc

SEQ ID NO: 752414 - RNA, 17 nt, Artificial Sequence
  Synthetic
ugacccguaucuuguuc

SEQ ID NO: 752415 - RNA, 17 nt, Artificial Sequence
  Synthetic
uacuuuauuucuuguuc

SEQ ID NO: 752416 - RNA, 17 nt, Artificial Sequence
  Synthetic
uuuuuaaccaguuguuc

SEQ ID NO: 752417 - RNA, 17 nt, Artificial Sequence
  Synthetic
ucugcugucaguuguuc

SEQ ID NO: 752418 - RNA, 17 nt, Artificial Sequence
  Synthetic
aauuuagucauuuguuc

SEQ ID NO: 752419 - RNA, 17 nt, Artificial Sequence
  Synthetic
uuucuguugauuuguuc

SEQ ID NO: 752420 - RNA, 17 nt, Artificial Sequence
  Synthetic
cucaugccccuuuguuc

SEQ ID NO: 752421 - RNA, 17 nt, Artificial Sequence
  Synthetic
uguucuguaguuuguuc

SEQ ID NO: 752422 - RNA, 17 nt, Artificial Sequence
  Synthetic
aaaauaaauguuuguuc

SEQ ID NO: 752423 - RNA, 17 nt, Artificial Sequence
  Synthetic
uguugucuauuuuguuc

SEQ ID NO: 752424 - RNA, 17 nt, Artificial Sequence
  Synthetic
auucuuaguuuuuguuc

SEQ ID NO: 752425 - RNA, 17 nt, Artificial Sequence
  Synthetic
aaaaaaaaaaaaauuuc

SEQ ID NO: 752426 - RNA, 17 nt, Artificial Sequence
  Synthetic
cagacaaagaaaauuuc

SEQ ID NO: 752427 - RNA, 17 nt, Artificial Sequence
  Synthetic
auaucuucuaaaauuuc

SEQ ID NO: 752428 - RNA, 17 nt, Artificial Sequence
  Synthetic
ugugcuauucaaauuuc

SEQ ID NO: 752429 - RNA, 17 nt, Artificial Sequence
  Synthetic
aaaguauuucaaauuuc

SEQ ID NO: 752430 - RNA, 17 nt, Artificial Sequence
  Synthetic
aaugcguuucaaauuuc

SEQ ID NO: 752431 - RNA, 17 nt, Artificial Sequence
  Synthetic
uguuuaauagaaauuuc

SEQ ID NO: 752432 - RNA, 17 nt, Artificial Sequence
  Synthetic
aguuucuuugaaauuuc

SEQ ID NO: 752433 - RNA, 17 nt, Artificial Sequence
  Synthetic
aauuuaaaguaaauuuc

SEQ ID NO: 752434 - RNA, 17 nt, Artificial Sequence
  Synthetic
ugguuaaauuaaauuuc

SEQ ID NO: 752435 - RNA, 17 nt, Artificial Sequence
  Synthetic
ugcugaucaccaauuuc

SEQ ID NO: 752436 - RNA, 17 nt, Artificial Sequence
  Synthetic
uugaguggggcaauuuc

SEQ ID NO: 752437 - RNA, 17 nt, Artificial Sequence
  Synthetic
uuuaugaucucaauuuc

SEQ ID NO: 752438 - RNA, 17 nt, Artificial Sequence
  Synthetic
ucuuuugauucaauuuc

SEQ ID NO: 752439 - RNA, 17 nt, Artificial Sequence
  Synthetic
uacugaaucagaauuuc

SEQ ID NO: 752440 - RNA, 17 nt, Artificial Sequence
  Synthetic
augggagaaggaauuuc

SEQ ID NO: 752441 - RNA, 17 nt, Artificial Sequence
  Synthetic
uaacacaaaauaauuuc

SEQ ID NO: 752442 - RNA, 17 nt, Artificial Sequence
  Synthetic
aaaaaaaacauaauuuc

SEQ ID NO: 752443 - RNA, 17 nt, Artificial Sequence
  Synthetic
caauaaagcauaauuuc

SEQ ID NO: 752444 - RNA, 17 nt, Artificial Sequence
  Synthetic
acuuccucuauaauuuc

SEQ ID NO: 752445 - RNA, 17 nt, Artificial Sequence
  Synthetic
uaaaauugacuaauuuc

SEQ ID NO: 752446 - RNA, 17 nt, Artificial Sequence
  Synthetic
auuaucucauuaauuuc

SEQ ID NO: 752447 - RNA, 17 nt, Artificial Sequence
  Synthetic
agaaauugauuaauuuc

SEQ ID NO: 752448 - RNA, 17 nt, Artificial Sequence
  Synthetic
uuucuuuucuuaauuuc

SEQ ID NO: 752449 - RNA, 17 nt, Artificial Sequence
  Synthetic
uuaacuuaguuaauuuc

SEQ ID NO: 752450 - RNA, 17 nt, Artificial Sequence
  Synthetic
cccaugugguuaauuuc

SEQ ID NO: 752451 - RNA, 17 nt, Artificial Sequence
  Synthetic
uuaccuucuuuaauuuc

SEQ ID NO: 752452 - RNA, 17 nt, Artificial Sequence
  Synthetic
aaaauauguuuaauuuc

SEQ ID NO: 752453 - RNA, 17 nt, Artificial Sequence
  Synthetic
acaaugaugaacauuuc

SEQ ID NO: 752454 - RNA, 17 nt, Artificial Sequence
  Synthetic
acauuucuucacauuuc

SEQ ID NO: 752455 - RNA, 17 nt, Artificial Sequence
  Synthetic
uuauucuucuacauuuc

SEQ ID NO: 752456 - RNA, 17 nt, Artificial Sequence
  Synthetic
aaaaaaauguacauuuc

SEQ ID NO: 752457 - RNA, 17 nt, Artificial Sequence
  Synthetic
cuuauuauuuacauuuc

SEQ ID NO: 752458 - RNA, 17 nt, Artificial Sequence
  Synthetic
ugaguauugaccauuuc

SEQ ID NO: 752459 - RNA, 17 nt, Artificial Sequence
  Synthetic
cccaccacuaccauuuc

SEQ ID NO: 752460 - RNA, 17 nt, Artificial Sequence
  Synthetic
uccagcaaucccauuuc

SEQ ID NO: 752461 - RNA, 17 nt, Artificial Sequence
  Synthetic
ucuacauaucccauuuc

SEQ ID NO: 752462 - RNA, 17 nt, Artificial Sequence
  Synthetic
agccucacucccauuuc

SEQ ID NO: 752463 - RNA, 17 nt, Artificial Sequence
  Synthetic
aaaguagaagccauuuc

SEQ ID NO: 752464 - RNA, 17 nt, Artificial Sequence
  Synthetic
agcaaguaugccauuuc

SEQ ID NO: 752465 - RNA, 17 nt, Artificial Sequence
  Synthetic
ccuuuaagauccauuuc

SEQ ID NO: 752466 - RNA, 17 nt, Artificial Sequence
  Synthetic
aaauaaggauccauuuc

SEQ ID NO: 752467 - RNA, 17 nt, Artificial Sequence
  Synthetic
aacaaauucuccauuuc

SEQ ID NO: 752468 - RNA, 17 nt, Artificial Sequence
  Synthetic
cuuccuuuaagcauuuc

SEQ ID NO: 752469 - RNA, 17 nt, Artificial Sequence
  Synthetic
uauuuuccuagcauuuc

SEQ ID NO: 752470 - RNA, 17 nt, Artificial Sequence
  Synthetic
cuaccacguagcauuuc

SEQ ID NO: 752471 - RNA, 17 nt, Artificial Sequence
  Synthetic
aaaacaacaggcauuuc

SEQ ID NO: 752472 - RNA, 17 nt, Artificial Sequence
  Synthetic
augauauaaaucauuuc

SEQ ID NO: 752473 - RNA, 17 nt, Artificial Sequence
  Synthetic
uauguuuuacucauuuc

SEQ ID NO: 752474 - RNA, 17 nt, Artificial Sequence
  Synthetic
aauuaaagagucauuuc

SEQ ID NO: 752475 - RNA, 17 nt, Artificial Sequence
  Synthetic
auguacuuauucauuuc

SEQ ID NO: 752476 - RNA, 17 nt, Artificial Sequence
  Synthetic
ugcccauucuucauuuc

SEQ ID NO: 752477 - RNA, 17 nt, Artificial Sequence
  Synthetic
auagacuuguucauuuc

SEQ ID NO: 752478 - RNA, 17 nt, Artificial Sequence
  Synthetic
ucuauucauuucauuuc

SEQ ID NO: 752479 - RNA, 17 nt, Artificial Sequence
  Synthetic
cuagaaguaaagauuuc

SEQ ID NO: 752480 - RNA, 17 nt, Artificial Sequence
  Synthetic
aaaaugaaccagauuuc

SEQ ID NO: 752481 - RNA, 17 nt, Artificial Sequence
  Synthetic
augaagagggagauuuc

SEQ ID NO: 752482 - RNA, 17 nt, Artificial Sequence
  Synthetic
uuuugaaaauagauuuc

SEQ ID NO: 752483 - RNA, 17 nt, Artificial Sequence
  Synthetic
acuuacugcuagauuuc

SEQ ID NO: 752484 - RNA, 17 nt, Artificial Sequence
  Synthetic
cauccuuuguagauuuc

SEQ ID NO: 752485 - RNA, 17 nt, Artificial Sequence
  Synthetic
ugaggaauaucgauuuc

SEQ ID NO: 752486 - RNA, 17 nt, Artificial Sequence
  Synthetic
cccagaagugggauuuc

SEQ ID NO: 752487 - RNA, 17 nt, Artificial Sequence
  Synthetic
uucagaauauggauuuc

SEQ ID NO: 752488 - RNA, 17 nt, Artificial Sequence
  Synthetic
cuuucugcuuggauuuc

SEQ ID NO: 752489 - RNA, 17 nt, Artificial Sequence
  Synthetic
uggaacauuuggauuuc

SEQ ID NO: 752490 - RNA, 17 nt, Artificial Sequence
  Synthetic
aucuacaacaugauuuc

SEQ ID NO: 752491 - RNA, 17 nt, Artificial Sequence
  Synthetic
uugugagccaugauuuc

SEQ ID NO: 752492 - RNA, 17 nt, Artificial Sequence
  Synthetic
aaacaauaugugauuuc

SEQ ID NO: 752493 - RNA, 17 nt, Artificial Sequence
  Synthetic
auaggcauugugauuuc

SEQ ID NO: 752494 - RNA, 17 nt, Artificial Sequence
  Synthetic
auaaccauauugauuuc

SEQ ID NO: 752495 - RNA, 17 nt, Artificial Sequence
  Synthetic
uccccauucuugauuuc

SEQ ID NO: 752496 - RNA, 17 nt, Artificial Sequence
  Synthetic
uaggccacuuugauuuc

SEQ ID NO: 752497 - RNA, 17 nt, Artificial Sequence
  Synthetic
cacugaccuuugauuuc

SEQ ID NO: 752498 - RNA, 17 nt, Artificial Sequence
  Synthetic
uugagaacaaauauuuc

SEQ ID NO: 752499 - RNA, 17 nt, Artificial Sequence
  Synthetic
cugaauaggaauauuuc

SEQ ID NO: 752500 - RNA, 17 nt, Artificial Sequence
  Synthetic
acaauucuuaauauuuc

SEQ ID NO: 752501 - RNA, 17 nt, Artificial Sequence
  Synthetic
ucguuuuuuaauauuuc

SEQ ID NO: 752502 - RNA, 17 nt, Artificial Sequence
  Synthetic
auuuugcuacauauuuc

SEQ ID NO: 752503 - RNA, 17 nt, Artificial Sequence
  Synthetic
caucagauucauauuuc

SEQ ID NO: 752504 - RNA, 17 nt, Artificial Sequence
  Synthetic
aagcuucucuauauuuc

SEQ ID NO: 752505 - RNA, 17 nt, Artificial Sequence
  Synthetic
caaagaugguauauuuc

SEQ ID NO: 752506 - RNA, 17 nt, Artificial Sequence
  Synthetic
aaacaaauuuauauuuc

SEQ ID NO: 752507 - RNA, 17 nt, Artificial Sequence
  Synthetic
auacugaagacuauuuc

SEQ ID NO: 752508 - RNA, 17 nt, Artificial Sequence
  Synthetic
cuacaaaaagcuauuuc

SEQ ID NO: 752509 - RNA, 17 nt, Artificial Sequence
  Synthetic
auuuugagaucuauuuc

SEQ ID NO: 752510 - RNA, 17 nt, Artificial Sequence
  Synthetic
acuugggccucuauuuc

SEQ ID NO: 752511 - RNA, 17 nt, Artificial Sequence
  Synthetic
cgucaggccaguauuuc

SEQ ID NO: 752512 - RNA, 17 nt, Artificial Sequence
  Synthetic
aacuuaaucaguauuuc

SEQ ID NO: 752513 - RNA, 17 nt, Artificial Sequence
  Synthetic
agagggaaggguauuuc

SEQ ID NO: 752514 - RNA, 17 nt, Artificial Sequence
  Synthetic
uauuuuugauguauuuc

SEQ ID NO: 752515 - RNA, 17 nt, Artificial Sequence
  Synthetic
ugagccugguguauuuc

SEQ ID NO: 752516 - RNA, 17 nt, Artificial Sequence
  Synthetic
uuuaaaacuuguauuuc

SEQ ID NO: 752517 - RNA, 17 nt, Artificial Sequence
  Synthetic
auaaccauuuguauuuc

SEQ ID NO: 752518 - RNA, 17 nt, Artificial Sequence
  Synthetic
uguaagagaauuauuuc

SEQ ID NO: 752519 - RNA, 17 nt, Artificial Sequence
  Synthetic
auuauuaacauuauuuc

SEQ ID NO: 752520 - RNA, 17 nt, Artificial Sequence
  Synthetic
accugaaccauuauuuc

SEQ ID NO: 752521 - RNA, 17 nt, Artificial Sequence
  Synthetic
uauucagucauuauuuc

SEQ ID NO: 752522 - RNA, 17 nt, Artificial Sequence
  Synthetic
cugauggagauuauuuc

SEQ ID NO: 752523 - RNA, 17 nt, Artificial Sequence
  Synthetic
aguauguaccuuauuuc

SEQ ID NO: 752524 - RNA, 17 nt, Artificial Sequence
  Synthetic
ucugucagccuuauuuc

SEQ ID NO: 752525 - RNA, 17 nt, Artificial Sequence
  Synthetic
ugccaccagcuuauuuc

SEQ ID NO: 752526 - RNA, 17 nt, Artificial Sequence
  Synthetic
aucaacaggcuuauuuc

SEQ ID NO: 752527 - RNA, 17 nt, Artificial Sequence
  Synthetic
cgaaaagcucuuauuuc

SEQ ID NO: 752528 - RNA, 17 nt, Artificial Sequence
  Synthetic
cuucuaucucuuauuuc

SEQ ID NO: 752529 - RNA, 17 nt, Artificial Sequence
  Synthetic
ucucuugagguuauuuc

SEQ ID NO: 752530 - RNA, 17 nt, Artificial Sequence
  Synthetic
ugugaaacuguuauuuc

SEQ ID NO: 752531 - RNA, 17 nt, Artificial Sequence
  Synthetic
ugacucaguguuauuuc

SEQ ID NO: 752532 - RNA, 17 nt, Artificial Sequence
  Synthetic
uguguauaauuuauuuc

SEQ ID NO: 752533 - RNA, 17 nt, Artificial Sequence
  Synthetic
ugcacaccauuuauuuc

SEQ ID NO: 752534 - RNA, 17 nt, Artificial Sequence
  Synthetic
ugaauggucuuuauuuc

SEQ ID NO: 752535 - RNA, 17 nt, Artificial Sequence
  Synthetic
augauugucuuuauuuc

SEQ ID NO: 752536 - RNA, 17 nt, Artificial Sequence
  Synthetic
auuuguuucuuuauuuc

SEQ ID NO: 752537 - RNA, 17 nt, Artificial Sequence
  Synthetic
uuaugaugguuuauuuc

SEQ ID NO: 752538 - RNA, 17 nt, Artificial Sequence
  Synthetic
aagucauuuaaacuuuc

SEQ ID NO: 752539 - RNA, 17 nt, Artificial Sequence
  Synthetic
cugugacuccaacuuuc

SEQ ID NO: 752540 - RNA, 17 nt, Artificial Sequence
  Synthetic
ucagacugugaacuuuc

SEQ ID NO: 752541 - RNA, 17 nt, Artificial Sequence
  Synthetic
uuauucaaauaacuuuc

SEQ ID NO: 752542 - RNA, 17 nt, Artificial Sequence
  Synthetic
uuugguguguaacuuuc

SEQ ID NO: 752543 - RNA, 17 nt, Artificial Sequence
  Synthetic
ugaggaacuuaacuuuc

SEQ ID NO: 752544 - RNA, 17 nt, Artificial Sequence
  Synthetic
acuacacaaacacuuuc

SEQ ID NO: 752545 - RNA, 17 nt, Artificial Sequence
  Synthetic
cauacuuuaacacuuuc

SEQ ID NO: 752546 - RNA, 17 nt, Artificial Sequence
  Synthetic
augcuuuuaacacuuuc

SEQ ID NO: 752547 - RNA, 17 nt, Artificial Sequence
  Synthetic
uucuccacaucacuuuc

SEQ ID NO: 752548 - RNA, 17 nt, Artificial Sequence
  Synthetic
uucuccccaucacuuuc

SEQ ID NO: 752549 - RNA, 17 nt, Artificial Sequence
  Synthetic
uuuuagugaucacuuuc

SEQ ID NO: 752550 - RNA, 17 nt, Artificial Sequence
  Synthetic
cacaucacccgacuuuc

SEQ ID NO: 752551 - RNA, 17 nt, Artificial Sequence
  Synthetic
agcuguauaggacuuuc

SEQ ID NO: 752552 - RNA, 17 nt, Artificial Sequence
  Synthetic
aggccagcuggacuuuc

SEQ ID NO: 752553 - RNA, 17 nt, Artificial Sequence
  Synthetic
ccagauccaguacuuuc

SEQ ID NO: 752554 - RNA, 17 nt, Artificial Sequence
  Synthetic
ucuucucuauuacuuuc

SEQ ID NO: 752555 - RNA, 17 nt, Artificial Sequence
  Synthetic
uuccccucuuuacuuuc

SEQ ID NO: 752556 - RNA, 17 nt, Artificial Sequence
  Synthetic
aagguaacccaccuuuc

SEQ ID NO: 752557 - RNA, 17 nt, Artificial Sequence
  Synthetic
auaauaauauaccuuuc

SEQ ID NO: 752558 - RNA, 17 nt, Artificial Sequence
  Synthetic
auuguauuaacccuuuc

SEQ ID NO: 752559 - RNA, 17 nt, Artificial Sequence
  Synthetic
uuuuacuucucccuuuc

SEQ ID NO: 752560 - RNA, 17 nt, Artificial Sequence
  Synthetic
ucuuucucaagccuuuc

SEQ ID NO: 752561 - RNA, 17 nt, Artificial Sequence
  Synthetic
uccugccccagccuuuc

SEQ ID NO: 752562 - RNA, 17 nt, Artificial Sequence
  Synthetic
ccuccccuuagccuuuc

SEQ ID NO: 752563 - RNA, 17 nt, Artificial Sequence
  Synthetic
aucugagcaugccuuuc

SEQ ID NO: 752564 - RNA, 17 nt, Artificial Sequence
  Synthetic
uuucucaucugccuuuc

SEQ ID NO: 752565 - RNA, 17 nt, Artificial Sequence
  Synthetic
uacaaccucugccuuuc

SEQ ID NO: 752566 - RNA, 17 nt, Artificial Sequence
  Synthetic
cuuucguauauccuuuc

SEQ ID NO: 752567 - RNA, 17 nt, Artificial Sequence
  Synthetic
uguucaaguauccuuuc

SEQ ID NO: 752568 - RNA, 17 nt, Artificial Sequence
  Synthetic
uuuucucaauuccuuuc

SEQ ID NO: 752569 - RNA, 17 nt, Artificial Sequence
  Synthetic
uguaagccguuccuuuc

SEQ ID NO: 752570 - RNA, 17 nt, Artificial Sequence
  Synthetic
aaauguauuuuccuuuc

SEQ ID NO: 752571 - RNA, 17 nt, Artificial Sequence
  Synthetic
aguucuaacaagcuuuc

SEQ ID NO: 752572 - RNA, 17 nt, Artificial Sequence
  Synthetic
acuuuuaacaagcuuuc

SEQ ID NO: 752573 - RNA, 17 nt, Artificial Sequence
  Synthetic
agggcaaggaagcuuuc

SEQ ID NO: 752574 - RNA, 17 nt, Artificial Sequence
  Synthetic
caucuccuuaagcuuuc

SEQ ID NO: 752575 - RNA, 17 nt, Artificial Sequence
  Synthetic
auugauguugagcuuuc

SEQ ID NO: 752576 - RNA, 17 nt, Artificial Sequence
  Synthetic
caauauaucaggcuuuc

SEQ ID NO: 752577 - RNA, 17 nt, Artificial Sequence
  Synthetic
cgcaaaucagggcuuuc

SEQ ID NO: 752578 - RNA, 17 nt, Artificial Sequence
  Synthetic
ugaaaagaauggcuuuc

SEQ ID NO: 752579 - RNA, 17 nt, Artificial Sequence
  Synthetic
cuucuaccauggcuuuc

SEQ ID NO: 752580 - RNA, 17 nt, Artificial Sequence
  Synthetic
caccccacacugcuuuc

SEQ ID NO: 752581 - RNA, 17 nt, Artificial Sequence
  Synthetic
ugaaauuugcugcuuuc

SEQ ID NO: 752582 - RNA, 17 nt, Artificial Sequence
  Synthetic
ucucagaaucugcuuuc

SEQ ID NO: 752583 - RNA, 17 nt, Artificial Sequence
  Synthetic
aagucagcucugcuuuc

SEQ ID NO: 752584 - RNA, 17 nt, Artificial Sequence
  Synthetic
aaggguuauuugcuuuc

SEQ ID NO: 752585 - RNA, 17 nt, Artificial Sequence
  Synthetic
accaagccaaaucuuuc

SEQ ID NO: 752586 - RNA, 17 nt, Artificial Sequence
  Synthetic
cuccuccaccaucuuuc

SEQ ID NO: 752587 - RNA, 17 nt, Artificial Sequence
  Synthetic
aaaaugucucaucuuuc

SEQ ID NO: 752588 - RNA, 17 nt, Artificial Sequence
  Synthetic
ucagucugucaucuuuc

SEQ ID NO: 752589 - RNA, 17 nt, Artificial Sequence
  Synthetic
ucuaggcaauaucuuuc

SEQ ID NO: 752590 - RNA, 17 nt, Artificial Sequence
  Synthetic
aauuuuuucuaucuuuc

SEQ ID NO: 752591 - RNA, 17 nt, Artificial Sequence
  Synthetic
caaaauugaacucuuuc

SEQ ID NO: 752592 - RNA, 17 nt, Artificial Sequence
  Synthetic
agaacaguaacucuuuc

SEQ ID NO: 752593 - RNA, 17 nt, Artificial Sequence
  Synthetic
uguagaguaucucuuuc

SEQ ID NO: 752594 - RNA, 17 nt, Artificial Sequence
  Synthetic
uuucuagucagucuuuc

SEQ ID NO: 752595 - RNA, 17 nt, Artificial Sequence
  Synthetic
aguggcaucugucuuuc

SEQ ID NO: 752596 - RNA, 17 nt, Artificial Sequence
  Synthetic
agacaacuaauucuuuc

SEQ ID NO: 752597 - RNA, 17 nt, Artificial Sequence
  Synthetic
aucaucaccauucuuuc

SEQ ID NO: 752598 - RNA, 17 nt, Artificial Sequence
  Synthetic
cugaucuagauucuuuc

SEQ ID NO: 752599 - RNA, 17 nt, Artificial Sequence
  Synthetic
uucacuuauguucuuuc

SEQ ID NO: 752600 - RNA, 17 nt, Artificial Sequence
  Synthetic
auagauuuuguucuuuc

SEQ ID NO: 752601 - RNA, 17 nt, Artificial Sequence
  Synthetic
auuucaaaauuucuuuc

SEQ ID NO: 752602 - RNA, 17 nt, Artificial Sequence
  Synthetic
ucaagacauuuucuuuc

SEQ ID NO: 752603 - RNA, 17 nt, Artificial Sequence
  Synthetic
aaacucaggaaaguuuc

SEQ ID NO: 752604 - RNA, 17 nt, Artificial Sequence
  Synthetic
uuaggggugaaaguuuc

SEQ ID NO: 752605 - RNA, 17 nt, Artificial Sequence
  Synthetic
cuuuucuuuaaaguuuc

SEQ ID NO: 752606 - RNA, 17 nt, Artificial Sequence
  Synthetic
uaacugcucuaaguuuc

SEQ ID NO: 752607 - RNA, 17 nt, Artificial Sequence
  Synthetic
agacaaaaguaaguuuc

SEQ ID NO: 752608 - RNA, 17 nt, Artificial Sequence
  Synthetic
ccaugauuguaaguuuc

SEQ ID NO: 752609 - RNA, 17 nt, Artificial Sequence
  Synthetic
uaguuuucuuaaguuuc

SEQ ID NO: 752610 - RNA, 17 nt, Artificial Sequence
  Synthetic
aauaguucaccaguuuc

SEQ ID NO: 752611 - RNA, 17 nt, Artificial Sequence
  Synthetic
uuaaagcacccaguuuc

SEQ ID NO: 752612 - RNA, 17 nt, Artificial Sequence
  Synthetic
uuuguauuuccaguuuc

SEQ ID NO: 752613 - RNA, 17 nt, Artificial Sequence
  Synthetic
cuaagacaugcaguuuc

SEQ ID NO: 752614 - RNA, 17 nt, Artificial Sequence
  Synthetic
acaucgaauucaguuuc

SEQ ID NO: 752615 - RNA, 17 nt, Artificial Sequence
  Synthetic
cuaaaacauucaguuuc

SEQ ID NO: 752616 - RNA, 17 nt, Artificial Sequence
  Synthetic
agggcucuuucaguuuc

SEQ ID NO: 752617 - RNA, 17 nt, Artificial Sequence
  Synthetic
uggcauguuucaguuuc

SEQ ID NO: 752618 - RNA, 17 nt, Artificial Sequence
  Synthetic
aaaauaaagagaguuuc

SEQ ID NO: 752619 - RNA, 17 nt, Artificial Sequence
  Synthetic
auucaaaugagaguuuc

SEQ ID NO: 752620 - RNA, 17 nt, Artificial Sequence
  Synthetic
aaaaccagaauaguuuc

SEQ ID NO: 752621 - RNA, 17 nt, Artificial Sequence
  Synthetic
acuauuuuaauaguuuc

SEQ ID NO: 752622 - RNA, 17 nt, Artificial Sequence
  Synthetic
aaaggggacauaguuuc

SEQ ID NO: 752623 - RNA, 17 nt, Artificial Sequence
  Synthetic
uaugcucucauaguuuc

SEQ ID NO: 752624 - RNA, 17 nt, Artificial Sequence
  Synthetic
aaaggggguauaguuuc

SEQ ID NO: 752625 - RNA, 17 nt, Artificial Sequence
  Synthetic
aaaaauaaccuaguuuc

SEQ ID NO: 752626 - RNA, 17 nt, Artificial Sequence
  Synthetic
aaagaguuuguaguuuc

SEQ ID NO: 752627 - RNA, 17 nt, Artificial Sequence
  Synthetic
uuguaguuuuuaguuuc

SEQ ID NO: 752628 - RNA, 17 nt, Artificial Sequence
  Synthetic
agagaauuuggcguuuc

SEQ ID NO: 752629 - RNA, 17 nt, Artificial Sequence
  Synthetic
ccuacugcaaagguuuc

SEQ ID NO: 752630 - RNA, 17 nt, Artificial Sequence
  Synthetic
aaagacuuaaagguuuc

SEQ ID NO: 752631 - RNA, 17 nt, Artificial Sequence
  Synthetic
cuaaacaagcagguuuc

SEQ ID NO: 752632 - RNA, 17 nt, Artificial Sequence
  Synthetic
auaaaaaugcagguuuc

SEQ ID NO: 752633 - RNA, 17 nt, Artificial Sequence
  Synthetic
auuuggaaggagguuuc

SEQ ID NO: 752634 - RNA, 17 nt, Artificial Sequence
  Synthetic
acuucaucugagguuuc

SEQ ID NO: 752635 - RNA, 17 nt, Artificial Sequence
  Synthetic
aaggccucugagguuuc

SEQ ID NO: 752636 - RNA, 17 nt, Artificial Sequence
  Synthetic
cuuugagcugcgguuuc

SEQ ID NO: 752637 - RNA, 17 nt, Artificial Sequence
  Synthetic
uucaauccuaggguuuc

SEQ ID NO: 752638 - RNA, 17 nt, Artificial Sequence
  Synthetic
ucaagauaauggguuuc

SEQ ID NO: 752639 - RNA, 17 nt, Artificial Sequence
  Synthetic
uuugcaugcuggguuuc

SEQ ID NO: 752640 - RNA, 17 nt, Artificial Sequence
  Synthetic
uuugagguuuggguuuc

SEQ ID NO: 752641 - RNA, 17 nt, Artificial Sequence
  Synthetic
ugguaucagaugguuuc

SEQ ID NO: 752642 - RNA, 17 nt, Artificial Sequence
  Synthetic
ugauucucuaugguuuc

SEQ ID NO: 752643 - RNA, 17 nt, Artificial Sequence
  Synthetic
agaguuuuuaugguuuc

SEQ ID NO: 752644 - RNA, 17 nt, Artificial Sequence
  Synthetic
ccgaugguucugguuuc

SEQ ID NO: 752645 - RNA, 17 nt, Artificial Sequence
  Synthetic
aaaauuuaauugguuuc

SEQ ID NO: 752646 - RNA, 17 nt, Artificial Sequence
  Synthetic
augacaggguugguuuc

SEQ ID NO: 752647 - RNA, 17 nt, Artificial Sequence
  Synthetic
uugaugacuuugguuuc

SEQ ID NO: 752648 - RNA, 17 nt, Artificial Sequence
  Synthetic
ucauuuucuuugguuuc

SEQ ID NO: 752649 - RNA, 17 nt, Artificial Sequence
  Synthetic
uuuaccccuaauguuuc

SEQ ID NO: 752650 - RNA, 17 nt, Artificial Sequence
  Synthetic
uuugacuacgauguuuc

SEQ ID NO: 752651 - RNA, 17 nt, Artificial Sequence
  Synthetic
cccagucaauauguuuc

SEQ ID NO: 752652 - RNA, 17 nt, Artificial Sequence
  Synthetic
uaaggaaauacuguuuc

SEQ ID NO: 752653 - RNA, 17 nt, Artificial Sequence
  Synthetic
auagcaacaucuguuuc

SEQ ID NO: 752654 - RNA, 17 nt, Artificial Sequence
  Synthetic
uaugggaauucuguuuc

SEQ ID NO: 752655 - RNA, 17 nt, Artificial Sequence
  Synthetic
ugucauuuuucuguuuc

SEQ ID NO: 752656 - RNA, 17 nt, Artificial Sequence
  Synthetic
uuuuuuuuaaguguuuc

SEQ ID NO: 752657 - RNA, 17 nt, Artificial Sequence
  Synthetic
aguguuucagguguuuc

SEQ ID NO: 752658 - RNA, 17 nt, Artificial Sequence
  Synthetic
uugaaaaaauguguuuc

SEQ ID NO: 752659 - RNA, 17 nt, Artificial Sequence
  Synthetic
uuaccaaacuguguuuc

SEQ ID NO: 752660 - RNA, 17 nt, Artificial Sequence
  Synthetic
ccaaaacccuguguuuc

SEQ ID NO: 752661 - RNA, 17 nt, Artificial Sequence
  Synthetic
uccucuggcauuguuuc

SEQ ID NO: 752662 - RNA, 17 nt, Artificial Sequence
  Synthetic
uacuauuuucuuguuuc

SEQ ID NO: 752663 - RNA, 17 nt, Artificial Sequence
  Synthetic
uaugaaauuguuguuuc

SEQ ID NO: 752664 - RNA, 17 nt, Artificial Sequence
  Synthetic
uuaauggcauuuguuuc

SEQ ID NO: 752665 - RNA, 17 nt, Artificial Sequence
  Synthetic
ugcagacguuuuguuuc

SEQ ID NO: 752666 - RNA, 17 nt, Artificial Sequence
  Synthetic
acuuuacaaaaauuuuc

SEQ ID NO: 752667 - RNA, 17 nt, Artificial Sequence
  Synthetic
cuuagcaguaaauuuuc

SEQ ID NO: 752668 - RNA, 17 nt, Artificial Sequence
  Synthetic
aaaacuuguaaauuuuc

SEQ ID NO: 752669 - RNA, 17 nt, Artificial Sequence
  Synthetic
uauaguuuuaaauuuuc

SEQ ID NO: 752670 - RNA, 17 nt, Artificial Sequence
  Synthetic
aaaaaaauccaauuuuc

SEQ ID NO: 752671 - RNA, 17 nt, Artificial Sequence
  Synthetic
ugauaccuucaauuuuc

SEQ ID NO: 752672 - RNA, 17 nt, Artificial Sequence
  Synthetic
cgguuuuuggaauuuuc

SEQ ID NO: 752673 - RNA, 17 nt, Artificial Sequence
  Synthetic
uaaagugcauaauuuuc

SEQ ID NO: 752674 - RNA, 17 nt, Artificial Sequence
  Synthetic
aacucuuucuaauuuuc

SEQ ID NO: 752675 - RNA, 17 nt, Artificial Sequence
  Synthetic
aacuuuucuuaauuuuc

SEQ ID NO: 752676 - RNA, 17 nt, Artificial Sequence
  Synthetic
uacaaagaaacauuuuc

SEQ ID NO: 752677 - RNA, 17 nt, Artificial Sequence
  Synthetic
uugauguucacauuuuc

SEQ ID NO: 752678 - RNA, 17 nt, Artificial Sequence
  Synthetic
cacagucugacauuuuc

SEQ ID NO: 752679 - RNA, 17 nt, Artificial Sequence
  Synthetic
aagaaaaacccauuuuc

SEQ ID NO: 752680 - RNA, 17 nt, Artificial Sequence
  Synthetic
uuuuugagcccauuuuc

SEQ ID NO: 752681 - RNA, 17 nt, Artificial Sequence
  Synthetic
ccgggugcugcauuuuc

SEQ ID NO: 752682 - RNA, 17 nt, Artificial Sequence
  Synthetic
caaauuaaaucauuuuc

SEQ ID NO: 752683 - RNA, 17 nt, Artificial Sequence
  Synthetic
ugcuuucuaucauuuuc

SEQ ID NO: 752684 - RNA, 17 nt, Artificial Sequence
  Synthetic
aaauggcccucauuuuc

SEQ ID NO: 752685 - RNA, 17 nt, Artificial Sequence
  Synthetic
auacugaagucauuuuc

SEQ ID NO: 752686 - RNA, 17 nt, Artificial Sequence
  Synthetic
uguauagaaagauuuuc

SEQ ID NO: 752687 - RNA, 17 nt, Artificial Sequence
  Synthetic
agcuucccgagauuuuc

SEQ ID NO: 752688 - RNA, 17 nt, Artificial Sequence
  Synthetic
acuuguuuuggauuuuc

SEQ ID NO: 752689 - RNA, 17 nt, Artificial Sequence
  Synthetic
aguuuucauugauuuuc

SEQ ID NO: 752690 - RNA, 17 nt, Artificial Sequence
  Synthetic
ugaaucuaaauauuuuc

SEQ ID NO: 752691 - RNA, 17 nt, Artificial Sequence
  Synthetic
aaauaagaacuauuuuc

SEQ ID NO: 752692 - RNA, 17 nt, Artificial Sequence
  Synthetic
auguuauuacuauuuuc

SEQ ID NO: 752693 - RNA, 17 nt, Artificial Sequence
  Synthetic
cuuuugaggcuauuuuc

SEQ ID NO: 752694 - RNA, 17 nt, Artificial Sequence
  Synthetic
caugccaaaguauuuuc

SEQ ID NO: 752695 - RNA, 17 nt, Artificial Sequence
  Synthetic
ucuuaaucaguauuuuc

SEQ ID NO: 752696 - RNA, 17 nt, Artificial Sequence
  Synthetic
uauuacucaguauuuuc

SEQ ID NO: 752697 - RNA, 17 nt, Artificial Sequence
  Synthetic
uuugcagaauuauuuuc

SEQ ID NO: 752698 - RNA, 17 nt, Artificial Sequence
  Synthetic
uuuagauuguuauuuuc

SEQ ID NO: 752699 - RNA, 17 nt, Artificial Sequence
  Synthetic
ugaaauuggaacuuuuc

SEQ ID NO: 752700 - RNA, 17 nt, Artificial Sequence
  Synthetic
auaccuacucacuuuuc

SEQ ID NO: 752701 - RNA, 17 nt, Artificial Sequence
  Synthetic
aacucugaggacuuuuc

SEQ ID NO: 752702 - RNA, 17 nt, Artificial Sequence
  Synthetic
acacuguuggacuuuuc

SEQ ID NO: 752703 - RNA, 17 nt, Artificial Sequence
  Synthetic
aacacaggugacuuuuc

SEQ ID NO: 752704 - RNA, 17 nt, Artificial Sequence
  Synthetic
cuuaucguugacuuuuc

SEQ ID NO: 752705 - RNA, 17 nt, Artificial Sequence
  Synthetic
caacacucauacuuuuc

SEQ ID NO: 752706 - RNA, 17 nt, Artificial Sequence
  Synthetic
uuauaauauuacuuuuc

SEQ ID NO: 752707 - RNA, 17 nt, Artificial Sequence
  Synthetic
auaaauguuuacuuuuc

SEQ ID NO: 752708 - RNA, 17 nt, Artificial Sequence
  Synthetic
ugguacaguaccuuuuc

SEQ ID NO: 752709 - RNA, 17 nt, Artificial Sequence
  Synthetic
aauccaggccccuuuuc

SEQ ID NO: 752710 - RNA, 17 nt, Artificial Sequence
  Synthetic
uuuuugugcuccuuuuc

SEQ ID NO: 752711 - RNA, 17 nt, Artificial Sequence
  Synthetic
agaauuccuuccuuuuc

SEQ ID NO: 752712 - RNA, 17 nt, Artificial Sequence
  Synthetic
uuuuagaguuccuuuuc

SEQ ID NO: 752713 - RNA, 17 nt, Artificial Sequence
  Synthetic
uuuguuauuuccuuuuc

SEQ ID NO: 752714 - RNA, 17 nt, Artificial Sequence
  Synthetic
uacuuaauaagcuuuuc

SEQ ID NO: 752715 - RNA, 17 nt, Artificial Sequence
  Synthetic
aucuuucuaagcuuuuc

SEQ ID NO: 752716 - RNA, 17 nt, Artificial Sequence
  Synthetic
uuccaaacgugcuuuuc

SEQ ID NO: 752717 - RNA, 17 nt, Artificial Sequence
  Synthetic
aaguugcauugcuuuuc

SEQ ID NO: 752718 - RNA, 17 nt, Artificial Sequence
  Synthetic
uccucuuuuugcuuuuc

SEQ ID NO: 752719 - RNA, 17 nt, Artificial Sequence
  Synthetic
uaccuacucaucuuuuc

SEQ ID NO: 752720 - RNA, 17 nt, Artificial Sequence
  Synthetic
acucccacacucuuuuc

SEQ ID NO: 752721 - RNA, 17 nt, Artificial Sequence
  Synthetic
cuaaugcaggucuuuuc

SEQ ID NO: 752722 - RNA, 17 nt, Artificial Sequence
  Synthetic
aaguuucaugucuuuuc

SEQ ID NO: 752723 - RNA, 17 nt, Artificial Sequence
  Synthetic
cuaucuucuuucuuuuc

SEQ ID NO: 752724 - RNA, 17 nt, Artificial Sequence
  Synthetic
acaaaucuuuucuuuuc

SEQ ID NO: 752725 - RNA, 17 nt, Artificial Sequence
  Synthetic
acagcaaagaaguuuuc

SEQ ID NO: 752726 - RNA, 17 nt, Artificial Sequence
  Synthetic
agggcuucuaaguuuuc

SEQ ID NO: 752727 - RNA, 17 nt, Artificial Sequence
  Synthetic
cucauucagcaguuuuc

SEQ ID NO: 752728 - RNA, 17 nt, Artificial Sequence
  Synthetic
uugguaaaucaguuuuc

SEQ ID NO: 752729 - RNA, 17 nt, Artificial Sequence
  Synthetic
caggcaauucaguuuuc

SEQ ID NO: 752730 - RNA, 17 nt, Artificial Sequence
  Synthetic
ccuuccguucaguuuuc

SEQ ID NO: 752731 - RNA, 17 nt, Artificial Sequence
  Synthetic
auuauucaugaguuuuc

SEQ ID NO: 752732 - RNA, 17 nt, Artificial Sequence
  Synthetic
auauugacauaguuuuc

SEQ ID NO: 752733 - RNA, 17 nt, Artificial Sequence
  Synthetic
cugcuuaucuaguuuuc

SEQ ID NO: 752734 - RNA, 17 nt, Artificial Sequence
  Synthetic
agcugaugcugguuuuc

SEQ ID NO: 752735 - RNA, 17 nt, Artificial Sequence
  Synthetic
uaagcuaauugguuuuc

SEQ ID NO: 752736 - RNA, 17 nt, Artificial Sequence
  Synthetic
aaccuguauugguuuuc

SEQ ID NO: 752737 - RNA, 17 nt, Artificial Sequence
  Synthetic
uuagaaguuugguuuuc

SEQ ID NO: 752738 - RNA, 17 nt, Artificial Sequence
  Synthetic
uuaguuuugauguuuuc

SEQ ID NO: 752739 - RNA, 17 nt, Artificial Sequence
  Synthetic
auaaggaguauguuuuc

SEQ ID NO: 752740 - RNA, 17 nt, Artificial Sequence
  Synthetic
auccaggcccuguuuuc

SEQ ID NO: 752741 - RNA, 17 nt, Artificial Sequence
  Synthetic
uuggguucucuguuuuc

SEQ ID NO: 752742 - RNA, 17 nt, Artificial Sequence
  Synthetic
uauuggugucuguuuuc

SEQ ID NO: 752743 - RNA, 17 nt, Artificial Sequence
  Synthetic
aaaugugauguguuuuc

SEQ ID NO: 752744 - RNA, 17 nt, Artificial Sequence
  Synthetic
cuaaaauauguguuuuc

SEQ ID NO: 752745 - RNA, 17 nt, Artificial Sequence
  Synthetic
agaaaugauuuguuuuc

SEQ ID NO: 752746 - RNA, 17 nt, Artificial Sequence
  Synthetic
cacuguauuuuguuuuc

SEQ ID NO: 752747 - RNA, 17 nt, Artificial Sequence
  Synthetic
uaaauugccaauuuuuc

SEQ ID NO: 752748 - RNA, 17 nt, Artificial Sequence
  Synthetic
aauuaauagaauuuuuc

SEQ ID NO: 752749 - RNA, 17 nt, Artificial Sequence
  Synthetic
uuaaaauaagauuuuuc

SEQ ID NO: 752750 - RNA, 17 nt, Artificial Sequence
  Synthetic
cauguuugugauuuuuc

SEQ ID NO: 752751 - RNA, 17 nt, Artificial Sequence
  Synthetic
uucugauuugauuuuuc

SEQ ID NO: 752752 - RNA, 17 nt, Artificial Sequence
  Synthetic
cugaacaauuauuuuuc

SEQ ID NO: 752753 - RNA, 17 nt, Artificial Sequence
  Synthetic
aucacccaaacuuuuuc

SEQ ID NO: 752754 - RNA, 17 nt, Artificial Sequence
  Synthetic
auuuuuuaaacuuuuuc

SEQ ID NO: 752755 - RNA, 17 nt, Artificial Sequence
  Synthetic
caagacauuacuuuuuc

SEQ ID NO: 752756 - RNA, 17 nt, Artificial Sequence
  Synthetic
ccucauucagcuuuuuc

SEQ ID NO: 752757 - RNA, 17 nt, Artificial Sequence
  Synthetic
cacuaaggcucuuuuuc

SEQ ID NO: 752758 - RNA, 17 nt, Artificial Sequence
  Synthetic
cgcugcuguucuuuuuc

SEQ ID NO: 752759 - RNA, 17 nt, Artificial Sequence
  Synthetic
caauccacaaguuuuuc

SEQ ID NO: 752760 - RNA, 17 nt, Artificial Sequence
  Synthetic
aaaucaggaaguuuuuc

SEQ ID NO: 752761 - RNA, 17 nt, Artificial Sequence
  Synthetic
ccagcauugaguuuuuc

SEQ ID NO: 752762 - RNA, 17 nt, Artificial Sequence
  Synthetic
uuggucacacguuuuuc

SEQ ID NO: 752763 - RNA, 17 nt, Artificial Sequence
  Synthetic
aacuuccaggguuuuuc

SEQ ID NO: 752764 - RNA, 17 nt, Artificial Sequence
  Synthetic
agggcacuugguuuuuc

SEQ ID NO: 752765 - RNA, 17 nt, Artificial Sequence
  Synthetic
auuguuaacuguuuuuc

SEQ ID NO: 752766 - RNA, 17 nt, Artificial Sequence
  Synthetic
uuuuuggaguguuuuuc

SEQ ID NO: 752767 - RNA, 17 nt, Artificial Sequence
  Synthetic
ugaaaaauguguuuuuc

SEQ ID NO: 752768 - RNA, 17 nt, Artificial Sequence
  Synthetic
ucaaauucuuguuuuuc

SEQ ID NO: 752769 - RNA, 17 nt, Artificial Sequence
  Synthetic
aagccaauuuguuuuuc

SEQ ID NO: 752770 - RNA, 17 nt, Artificial Sequence
  Synthetic
aggccacuuuguuuuuc

SEQ ID NO: 752771 - RNA, 17 nt, Artificial Sequence
  Synthetic
auuauucuaauuuuuuc

SEQ ID NO: 752772 - RNA, 17 nt, Artificial Sequence
  Synthetic
acagaugacauuuuuuc

SEQ ID NO: 752773 - RNA, 17 nt, Artificial Sequence
  Synthetic
uccagccccauuuuuuc

SEQ ID NO: 752774 - RNA, 17 nt, Artificial Sequence
  Synthetic
aucaauaagauuuuuuc

SEQ ID NO: 752775 - RNA, 17 nt, Artificial Sequence
  Synthetic
aguaauaugauuuuuuc

SEQ ID NO: 752776 - RNA, 17 nt, Artificial Sequence
  Synthetic
uauauauauauuuuuuc

SEQ ID NO: 752777 - RNA, 17 nt, Artificial Sequence
  Synthetic
ccauuaguuauuuuuuc

SEQ ID NO: 752778 - RNA, 17 nt, Artificial Sequence
  Synthetic
aaucucauucuuuuuuc

SEQ ID NO: 752779 - RNA, 17 nt, Artificial Sequence
  Synthetic
uaaaaauuucuuuuuuc

SEQ ID NO: 752780 - RNA, 17 nt, Artificial Sequence
  Synthetic
aaaaauuaauuuuuuuc

SEQ ID NO: 752781 - RNA, 17 nt, Artificial Sequence
  Synthetic
uuucuucgauuuuuuuc

SEQ ID NO: 752782 - RNA, 17 nt, Artificial Sequence
  Synthetic
augugaauauuuuuuuc

SEQ ID NO: 752783 - RNA, 17 nt, Artificial Sequence
  Synthetic
aacaagguauuuuuuuc

SEQ ID NO: 752784 - RNA, 17 nt, Artificial Sequence
  Synthetic
aacauucucuuuuuuuc

SEQ ID NO: 752785 - RNA, 17 nt, Artificial Sequence
  Synthetic
uuuuuuuucuuuuuuuc

SEQ ID NO: 752786 - RNA, 17 nt, Artificial Sequence
  Synthetic
uacagcauuuuuuuuuc

SEQ ID NO: 752787 - RNA, 17 nt, Artificial Sequence
  Synthetic
auccauuuuuuuuuuuc

SEQ ID NO: 752788 - RNA, 17 nt, Artificial Sequence
  Synthetic
uuuuuuuuuuuuuuuuc

SEQ ID NO: 752789 - RNA, 17 nt, Artificial Sequence
  Synthetic
aaaaaaaaaaaaaaaag

SEQ ID NO: 752790 - RNA, 17 nt, Artificial Sequence
  Synthetic
uuaaaaaaaaaaaaaag

SEQ ID NO: 752791 - RNA, 17 nt, Artificial Sequence
  Synthetic
uaaaaagaaaaaaaaag

SEQ ID NO: 752792 - RNA, 17 nt, Artificial Sequence
  Synthetic
cagaccacaaaaaaaag

SEQ ID NO: 752793 - RNA, 17 nt, Artificial Sequence
  Synthetic
cugucuccaaaaaaaag

SEQ ID NO: 752794 - RNA, 17 nt, Artificial Sequence
  Synthetic
auugaaaacaaaaaaag

SEQ ID NO: 752795 - RNA, 17 nt, Artificial Sequence
  Synthetic
cugucacacaaaaaaag

SEQ ID NO: 752796 - RNA, 17 nt, Artificial Sequence
  Synthetic
uugugaugcaaaaaaag

SEQ ID NO: 752797 - RNA, 17 nt, Artificial Sequence
  Synthetic
cuugaugggaaaaaaag

SEQ ID NO: 752798 - RNA, 17 nt, Artificial Sequence
  Synthetic
acugaguaacaaaaaag

SEQ ID NO: 752799 - RNA, 17 nt, Artificial Sequence
  Synthetic
caaaacaaagaaaaaag

SEQ ID NO: 752800 - RNA, 17 nt, Artificial Sequence
  Synthetic
aauuucaaagaaaaaag

SEQ ID NO: 752801 - RNA, 17 nt, Artificial Sequence
  Synthetic
ugucagacagaaaaaag

SEQ ID NO: 752802 - RNA, 17 nt, Artificial Sequence
  Synthetic
cucacaagagaaaaaag

SEQ ID NO: 752803 - RNA, 17 nt, Artificial Sequence
  Synthetic
caucagugagaaaaaag

SEQ ID NO: 752804 - RNA, 17 nt, Artificial Sequence
  Synthetic
cuucauauugaaaaaag

SEQ ID NO: 752805 - RNA, 17 nt, Artificial Sequence
  Synthetic
uacacauuuuaaaaaag

SEQ ID NO: 752806 - RNA, 17 nt, Artificial Sequence
  Synthetic
augacuuuuuaaaaaag

SEQ ID NO: 752807 - RNA, 17 nt, Artificial Sequence
  Synthetic
uaacgugcaacaaaaag

SEQ ID NO: 752808 - RNA, 17 nt, Artificial Sequence
  Synthetic
acaaagccgacaaaaag

SEQ ID NO: 752809 - RNA, 17 nt, Artificial Sequence
  Synthetic
ugucauuaaccaaaaag

SEQ ID NO: 752810 - RNA, 17 nt, Artificial Sequence
  Synthetic
uccagaaaagcaaaaag

SEQ ID NO: 752811 - RNA, 17 nt, Artificial Sequence
  Synthetic
aaaagaagggcaaaaag

SEQ ID NO: 752812 - RNA, 17 nt, Artificial Sequence
  Synthetic
acaaccccaucaaaaag

SEQ ID NO: 752813 - RNA, 17 nt, Artificial Sequence
  Synthetic
acauugccuucaaaaag

SEQ ID NO: 752814 - RNA, 17 nt, Artificial Sequence
  Synthetic
uuuauuuaaagaaaaag

SEQ ID NO: 752815 - RNA, 17 nt, Artificial Sequence
  Synthetic
ccgagaggcagaaaaag

SEQ ID NO: 752816 - RNA, 17 nt, Artificial Sequence
  Synthetic
uaauauuagagaaaaag

SEQ ID NO: 752817 - RNA, 17 nt, Artificial Sequence
  Synthetic
aaguaagggagaaaaag

SEQ ID NO: 752818 - RNA, 17 nt, Artificial Sequence
  Synthetic
aauuuccugagaaaaag

SEQ ID NO: 752819 - RNA, 17 nt, Artificial Sequence
  Synthetic
ccaaucaauagaaaaag

SEQ ID NO: 752820 - RNA, 17 nt, Artificial Sequence
  Synthetic
uuaaauuuuagaaaaag

SEQ ID NO: 752821 - RNA, 17 nt, Artificial Sequence
  Synthetic
ugcagcaaaggaaaaag

SEQ ID NO: 752822 - RNA, 17 nt, Artificial Sequence
  Synthetic
aaucauaaaggaaaaag

SEQ ID NO: 752823 - RNA, 17 nt, Artificial Sequence
  Synthetic
aggaaagcaggaaaaag

SEQ ID NO: 752824 - RNA, 17 nt, Artificial Sequence
  Synthetic
agaaaugcaggaaaaag

SEQ ID NO: 752825 - RNA, 17 nt, Artificial Sequence
  Synthetic
cuugucccuggaaaaag

SEQ ID NO: 752826 - RNA, 17 nt, Artificial Sequence
  Synthetic
ucauacaaaauaaaaag

SEQ ID NO: 752827 - RNA, 17 nt, Artificial Sequence
  Synthetic
auuuagaauauaaaaag

SEQ ID NO: 752828 - RNA, 17 nt, Artificial Sequence
  Synthetic
augaguguuauaaaaag

SEQ ID NO: 752829 - RNA, 17 nt, Artificial Sequence
  Synthetic
aauuuauaaguaaaaag

SEQ ID NO: 752830 - RNA, 17 nt, Artificial Sequence
  Synthetic
uaaccccauguaaaaag

SEQ ID NO: 752831 - RNA, 17 nt, Artificial Sequence
  Synthetic
aaaaaaaauuuaaaaag

SEQ ID NO: 752832 - RNA, 17 nt, Artificial Sequence
  Synthetic
uuuuauauuuuaaaaag

SEQ ID NO: 752833 - RNA, 17 nt, Artificial Sequence
  Synthetic
cuuaaaguuuuaaaaag

SEQ ID NO: 752834 - RNA, 17 nt, Artificial Sequence
  Synthetic
aaguuagucaacaaaag

SEQ ID NO: 752835 - RNA, 17 nt, Artificial Sequence
  Synthetic
ccuugaaaggacaaaag

SEQ ID NO: 752836 - RNA, 17 nt, Artificial Sequence
  Synthetic
auuaaagaggacaaaag

SEQ ID NO: 752837 - RNA, 17 nt, Artificial Sequence
  Synthetic
auguugagggacaaaag

SEQ ID NO: 752838 - RNA, 17 nt, Artificial Sequence
  Synthetic
aucugaauggacaaaag

SEQ ID NO: 752839 - RNA, 17 nt, Artificial Sequence
  Synthetic
aaacgagaauacaaaag

SEQ ID NO: 752840 - RNA, 17 nt, Artificial Sequence
  Synthetic
ugcucaacauacaaaag

SEQ ID NO: 752841 - RNA, 17 nt, Artificial Sequence
  Synthetic
uaguacccuuacaaaag

SEQ ID NO: 752842 - RNA, 17 nt, Artificial Sequence
  Synthetic
aaaaugcuuuacaaaag

SEQ ID NO: 752843 - RNA, 17 nt, Artificial Sequence
  Synthetic
cuggcacucaccaaaag

SEQ ID NO: 752844 - RNA, 17 nt, Artificial Sequence
  Synthetic
uuucucuguaccaaaag

SEQ ID NO: 752845 - RNA, 17 nt, Artificial Sequence
  Synthetic
uggaacuaccccaaaag

SEQ ID NO: 752846 - RNA, 17 nt, Artificial Sequence
  Synthetic
acagaaauagccaaaag

SEQ ID NO: 752847 - RNA, 17 nt, Artificial Sequence
  Synthetic
agguuagaggccaaaag

SEQ ID NO: 752848 - RNA, 17 nt, Artificial Sequence
  Synthetic
acaaccccauccaaaag

SEQ ID NO: 752849 - RNA, 17 nt, Artificial Sequence
  Synthetic
caaaggaggagcaaaag

SEQ ID NO: 752850 - RNA, 17 nt, Artificial Sequence
  Synthetic
aggagaaugagcaaaag

SEQ ID NO: 752851 - RNA, 17 nt, Artificial Sequence
  Synthetic
auauaaaauagcaaaag

SEQ ID NO: 752852 - RNA, 17 nt, Artificial Sequence
  Synthetic
acucuuuccaucaaaag

SEQ ID NO: 752853 - RNA, 17 nt, Artificial Sequence
  Synthetic
ucuaauccucucaaaag

SEQ ID NO: 752854 - RNA, 17 nt, Artificial Sequence
  Synthetic
aacagcagcuucaaaag

SEQ ID NO: 752855 - RNA, 17 nt, Artificial Sequence
  Synthetic
uuggaguucuucaaaag

SEQ ID NO: 752856 - RNA, 17 nt, Artificial Sequence
  Synthetic
uuucaaaguuucaaaag

SEQ ID NO: 752857 - RNA, 17 nt, Artificial Sequence
  Synthetic
uauuuaaaaaagaaaag

SEQ ID NO: 752858 - RNA, 17 nt, Artificial Sequence
  Synthetic
ugcuuuaaaaagaaaag

SEQ ID NO: 752859 - RNA, 17 nt, Artificial Sequence
  Synthetic
aagauagaaaagaaaag

SEQ ID NO: 752860 - RNA, 17 nt, Artificial Sequence
  Synthetic
uaauuuauaaagaaaag

SEQ ID NO: 752861 - RNA, 17 nt, Artificial Sequence
  Synthetic
acuuguggcaagaaaag

SEQ ID NO: 752862 - RNA, 17 nt, Artificial Sequence
  Synthetic
uggguuuggaagaaaag

SEQ ID NO: 752863 - RNA, 17 nt, Artificial Sequence
  Synthetic
cuaaaaauccagaaaag

SEQ ID NO: 752864 - RNA, 17 nt, Artificial Sequence
  Synthetic
ucaauucagcagaaaag

SEQ ID NO: 752865 - RNA, 17 nt, Artificial Sequence
  Synthetic
ugugauugcuagaaaag

SEQ ID NO: 752866 - RNA, 17 nt, Artificial Sequence
  Synthetic
acaugaaucuagaaaag

SEQ ID NO: 752867 - RNA, 17 nt, Artificial Sequence
  Synthetic
ccuagaagguagaaaag

SEQ ID NO: 752868 - RNA, 17 nt, Artificial Sequence
  Synthetic
cuugggggguagaaaag

SEQ ID NO: 752869 - RNA, 17 nt, Artificial Sequence
  Synthetic
uuucugagaaggaaaag

SEQ ID NO: 752870 - RNA, 17 nt, Artificial Sequence
  Synthetic
uauaagaagaggaaaag

SEQ ID NO: 752871 - RNA, 17 nt, Artificial Sequence
  Synthetic
ucaaguaagaggaaaag

SEQ ID NO: 752872 - RNA, 17 nt, Artificial Sequence
  Synthetic
cuaaacaauaggaaaag

SEQ ID NO: 752873 - RNA, 17 nt, Artificial Sequence
  Synthetic
cauucgaguaggaaaag

SEQ ID NO: 752874 - RNA, 17 nt, Artificial Sequence
  Synthetic
uauucaauuaggaaaag

SEQ ID NO: 752875 - RNA, 17 nt, Artificial Sequence
  Synthetic
uauucaguuaggaaaag

SEQ ID NO: 752876 - RNA, 17 nt, Artificial Sequence
  Synthetic
augaggggagggaaaag

SEQ ID NO: 752877 - RNA, 17 nt, Artificial Sequence
  Synthetic
ucuuugcuggggaaaag

SEQ ID NO: 752878 - RNA, 17 nt, Artificial Sequence
  Synthetic
agaauuuuggggaaaag

SEQ ID NO: 752879 - RNA, 17 nt, Artificial Sequence
  Synthetic
cuauuaccugggaaaag

SEQ ID NO: 752880 - RNA, 17 nt, Artificial Sequence
  Synthetic
caggaauccuggaaaag

SEQ ID NO: 752881 - RNA, 17 nt, Artificial Sequence
  Synthetic
aaaagaaaaaugaaaag

SEQ ID NO: 752882 - RNA, 17 nt, Artificial Sequence
  Synthetic
agaacugaaaugaaaag

SEQ ID NO: 752883 - RNA, 17 nt, Artificial Sequence
  Synthetic
ucaaaaucaaugaaaag

SEQ ID NO: 752884 - RNA, 17 nt, Artificial Sequence
  Synthetic
ccuuucuacaugaaaag

SEQ ID NO: 752885 - RNA, 17 nt, Artificial Sequence
  Synthetic
ucuuaguggaugaaaag

SEQ ID NO: 752886 - RNA, 17 nt, Artificial Sequence
  Synthetic
agauuagugaugaaaag

SEQ ID NO: 752887 - RNA, 17 nt, Artificial Sequence
  Synthetic
ugguuucauaugaaaag

SEQ ID NO: 752888 - RNA, 17 nt, Artificial Sequence
  Synthetic
acggagagacugaaaag

SEQ ID NO: 752889 - RNA, 17 nt, Artificial Sequence
  Synthetic
auuucaguccugaaaag

SEQ ID NO: 752890 - RNA, 17 nt, Artificial Sequence
  Synthetic
cgcuaaaugcugaaaag

SEQ ID NO: 752891 - RNA, 17 nt, Artificial Sequence
  Synthetic
ugcgaggaucugaaaag

SEQ ID NO: 752892 - RNA, 17 nt, Artificial Sequence
  Synthetic
ccuuugagagugaaaag

SEQ ID NO: 752893 - RNA, 17 nt, Artificial Sequence
  Synthetic
uaaaaaauuuugaaaag

SEQ ID NO: 752894 - RNA, 17 nt, Artificial Sequence
  Synthetic
cugaugguuuugaaaag

SEQ ID NO: 752895 - RNA, 17 nt, Artificial Sequence
  Synthetic
ucaacggaaaauaaaag

SEQ ID NO: 752896 - RNA, 17 nt, Artificial Sequence
  Synthetic
uaaaggugaaauaaaag

SEQ ID NO: 752897 - RNA, 17 nt, Artificial Sequence
  Synthetic
caaaagguaaauaaaag

SEQ ID NO: 752898 - RNA, 17 nt, Artificial Sequence
  Synthetic
aagcaaggcaauaaaag

SEQ ID NO: 752899 - RNA, 17 nt, Artificial Sequence
  Synthetic
auuacaaggaauaaaag

SEQ ID NO: 752900 - RNA, 17 nt, Artificial Sequence
  Synthetic
aaaugacauaauaaaag

SEQ ID NO: 752901 - RNA, 17 nt, Artificial Sequence
  Synthetic
ccagccauggauaaaag

SEQ ID NO: 752902 - RNA, 17 nt, Artificial Sequence
  Synthetic
uaauauucauauaaaag

SEQ ID NO: 752903 - RNA, 17 nt, Artificial Sequence
  Synthetic
uuccugagguauaaaag

SEQ ID NO: 752904 - RNA, 17 nt, Artificial Sequence
  Synthetic
cagugcccuuauaaaag

SEQ ID NO: 752905 - RNA, 17 nt, Artificial Sequence
  Synthetic
ugguucccuuauaaaag

SEQ ID NO: 752906 - RNA, 17 nt, Artificial Sequence
  Synthetic
agcuguuauccuaaaag

SEQ ID NO: 752907 - RNA, 17 nt, Artificial Sequence
  Synthetic
cuucaucuugcuaaaag

SEQ ID NO: 752908 - RNA, 17 nt, Artificial Sequence
  Synthetic
uauagaaaaucuaaaag

SEQ ID NO: 752909 - RNA, 17 nt, Artificial Sequence
  Synthetic
aagucauuuucuaaaag

SEQ ID NO: 752910 - RNA, 17 nt, Artificial Sequence
  Synthetic
auaaaaagaaguaaaag

SEQ ID NO: 752911 - RNA, 17 nt, Artificial Sequence
  Synthetic
aguaguagcaguaaaag

SEQ ID NO: 752912 - RNA, 17 nt, Artificial Sequence
  Synthetic
ucaaucugacguaaaag

SEQ ID NO: 752913 - RNA, 17 nt, Artificial Sequence
  Synthetic
cguuaccuugguaaaag

SEQ ID NO: 752914 - RNA, 17 nt, Artificial Sequence
  Synthetic
uuuccuggcuguaaaag

SEQ ID NO: 752915 - RNA, 17 nt, Artificial Sequence
  Synthetic
accaggcauuguaaaag

SEQ ID NO: 752916 - RNA, 17 nt, Artificial Sequence
  Synthetic
auguucucacuuaaaag

SEQ ID NO: 752917 - RNA, 17 nt, Artificial Sequence
  Synthetic
aauccccaccuuaaaag

SEQ ID NO: 752918 - RNA, 17 nt, Artificial Sequence
  Synthetic
uguauuuaccuuaaaag

SEQ ID NO: 752919 - RNA, 17 nt, Artificial Sequence
  Synthetic
uuugaaucccuuaaaag

SEQ ID NO: 752920 - RNA, 17 nt, Artificial Sequence
  Synthetic
cagcaacagcuuaaaag

SEQ ID NO: 752921 - RNA, 17 nt, Artificial Sequence
  Synthetic
auguucucgcuuaaaag

SEQ ID NO: 752922 - RNA, 17 nt, Artificial Sequence
  Synthetic
aggacauugguuaaaag

SEQ ID NO: 752923 - RNA, 17 nt, Artificial Sequence
  Synthetic
uaucaaaauguuaaaag

SEQ ID NO: 752924 - RNA, 17 nt, Artificial Sequence
  Synthetic
ucugaagcauuuaaaag

SEQ ID NO: 752925 - RNA, 17 nt, Artificial Sequence
  Synthetic
auacaaaaguuuaaaag

SEQ ID NO: 752926 - RNA, 17 nt, Artificial Sequence
  Synthetic
cauagaaauuuuaaaag

SEQ ID NO: 752927 - RNA, 17 nt, Artificial Sequence
  Synthetic
cugauauauuuuaaaag

SEQ ID NO: 752928 - RNA, 17 nt, Artificial Sequence
  Synthetic
aaaaaauuuuuuaaaag

SEQ ID NO: 752929 - RNA, 17 nt, Artificial Sequence
  Synthetic
uuccauaaaaaacaaag

SEQ ID NO: 752930 - RNA, 17 nt, Artificial Sequence
  Synthetic
aaccccgaaaaacaaag

SEQ ID NO: 752931 - RNA, 17 nt, Artificial Sequence
  Synthetic
ucauccagaaaacaaag

SEQ ID NO: 752932 - RNA, 17 nt, Artificial Sequence
  Synthetic
aauuggcccaaacaaag

SEQ ID NO: 752933 - RNA, 17 nt, Artificial Sequence
  Synthetic
auucuuuuuaaacaaag

SEQ ID NO: 752934 - RNA, 17 nt, Artificial Sequence
  Synthetic
aguguggaagaacaaag

SEQ ID NO: 752935 - RNA, 17 nt, Artificial Sequence
  Synthetic
uauaagugagaacaaag

SEQ ID NO: 752936 - RNA, 17 nt, Artificial Sequence
  Synthetic
auaacgaaugaacaaag

SEQ ID NO: 752937 - RNA, 17 nt, Artificial Sequence
  Synthetic
agcacaccugaacaaag

SEQ ID NO: 752938 - RNA, 17 nt, Artificial Sequence
  Synthetic
aucuugaaauaacaaag

SEQ ID NO: 752939 - RNA, 17 nt, Artificial Sequence
  Synthetic
uuaucucuguaacaaag

SEQ ID NO: 752940 - RNA, 17 nt, Artificial Sequence
  Synthetic
cugaaccccacacaaag

SEQ ID NO: 752941 - RNA, 17 nt, Artificial Sequence
  Synthetic
aacauauggacacaaag

SEQ ID NO: 752942 - RNA, 17 nt, Artificial Sequence
  Synthetic
auagacuuuacacaaag

SEQ ID NO: 752943 - RNA, 17 nt, Artificial Sequence
  Synthetic
aacucaaacccacaaag

SEQ ID NO: 752944 - RNA, 17 nt, Artificial Sequence
  Synthetic
uugcgaguuccacaaag

SEQ ID NO: 752945 - RNA, 17 nt, Artificial Sequence
  Synthetic
uagugcugagcacaaag

SEQ ID NO: 752946 - RNA, 17 nt, Artificial Sequence
  Synthetic
aauggaauaagacaaag

SEQ ID NO: 752947 - RNA, 17 nt, Artificial Sequence
  Synthetic
aggaaacugagacaaag

SEQ ID NO: 752948 - RNA, 17 nt, Artificial Sequence
  Synthetic
auggaagcuagacaaag

SEQ ID NO: 752949 - RNA, 17 nt, Artificial Sequence
  Synthetic
agggagaggggacaaag

SEQ ID NO: 752950 - RNA, 17 nt, Artificial Sequence
  Synthetic
aguaugacuggacaaag

SEQ ID NO: 752951 - RNA, 17 nt, Artificial Sequence
  Synthetic
acauaagagauacaaag

SEQ ID NO: 752952 - RNA, 17 nt, Artificial Sequence
  Synthetic
cuaccagagauacaaag

SEQ ID NO: 752953 - RNA, 17 nt, Artificial Sequence
  Synthetic
aucagagggcuacaaag

SEQ ID NO: 752954 - RNA, 17 nt, Artificial Sequence
  Synthetic
agcuaugugcuacaaag

SEQ ID NO: 752955 - RNA, 17 nt, Artificial Sequence
  Synthetic
uagugcggaguacaaag

SEQ ID NO: 752956 - RNA, 17 nt, Artificial Sequence
  Synthetic
cuaccagagguacaaag

SEQ ID NO: 752957 - RNA, 17 nt, Artificial Sequence
  Synthetic
uuggaguucuuacaaag

SEQ ID NO: 752958 - RNA, 17 nt, Artificial Sequence
  Synthetic
aacuacaagaaccaaag

SEQ ID NO: 752959 - RNA, 17 nt, Artificial Sequence
  Synthetic
aacaaggaguaccaaag

SEQ ID NO: 752960 - RNA, 17 nt, Artificial Sequence
  Synthetic
ccuaauagaccccaaag

SEQ ID NO: 752961 - RNA, 17 nt, Artificial Sequence
  Synthetic
auucagccagcccaaag

SEQ ID NO: 752962 - RNA, 17 nt, Artificial Sequence
  Synthetic
ucaguuucagcccaaag

SEQ ID NO: 752963 - RNA, 17 nt, Artificial Sequence
  Synthetic
uucuucuuugcccaaag

SEQ ID NO: 752964 - RNA, 17 nt, Artificial Sequence
  Synthetic
accuuggccucccaaag

SEQ ID NO: 752965 - RNA, 17 nt, Artificial Sequence
  Synthetic
caacaagaaggccaaag

SEQ ID NO: 752966 - RNA, 17 nt, Artificial Sequence
  Synthetic
aaugugccaggccaaag

SEQ ID NO: 752967 - RNA, 17 nt, Artificial Sequence
  Synthetic
ucucugggaggccaaag

SEQ ID NO: 752968 - RNA, 17 nt, Artificial Sequence
  Synthetic
aaaacuacaaagcaaag

SEQ ID NO: 752969 - RNA, 17 nt, Artificial Sequence
  Synthetic
caugguggaaagcaaag

SEQ ID NO: 752970 - RNA, 17 nt, Artificial Sequence
  Synthetic
acaacuaauaagcaaag

SEQ ID NO: 752971 - RNA, 17 nt, Artificial Sequence
  Synthetic
ugaaagcagcagcaaag

SEQ ID NO: 752972 - RNA, 17 nt, Artificial Sequence
  Synthetic
uggggaaaagagcaaag

SEQ ID NO: 752973 - RNA, 17 nt, Artificial Sequence
  Synthetic
aauauaaaugagcaaag

SEQ ID NO: 752974 - RNA, 17 nt, Artificial Sequence
  Synthetic
agaagugcugagcaaag

SEQ ID NO: 752975 - RNA, 17 nt, Artificial Sequence
  Synthetic
caguaagcaaggcaaag

SEQ ID NO: 752976 - RNA, 17 nt, Artificial Sequence
  Synthetic
caugguggaaggcaaag

SEQ ID NO: 752977 - RNA, 17 nt, Artificial Sequence
  Synthetic
aggggacagaggcaaag

SEQ ID NO: 752978 - RNA, 17 nt, Artificial Sequence
  Synthetic
aaaguucugcggcaaag

SEQ ID NO: 752979 - RNA, 17 nt, Artificial Sequence
  Synthetic
cauggugaagggcaaag

SEQ ID NO: 752980 - RNA, 17 nt, Artificial Sequence
  Synthetic
ugaggcauagggcaaag

SEQ ID NO: 752981 - RNA, 17 nt, Artificial Sequence
  Synthetic
ucacaugcauggcaaag

SEQ ID NO: 752982 - RNA, 17 nt, Artificial Sequence
  Synthetic
auccuucucuggcaaag

SEQ ID NO: 752983 - RNA, 17 nt, Artificial Sequence
  Synthetic
uccuuggcuuggcaaag

SEQ ID NO: 752984 - RNA, 17 nt, Artificial Sequence
  Synthetic
caagugcugcugcaaag

SEQ ID NO: 752985 - RNA, 17 nt, Artificial Sequence
  Synthetic
cuaccagaggugcaaag

SEQ ID NO: 752986 - RNA, 17 nt, Artificial Sequence
  Synthetic
uuguauauauugcaaag

SEQ ID NO: 752987 - RNA, 17 nt, Artificial Sequence
  Synthetic
uuuugugaaaaucaaag

SEQ ID NO: 752988 - RNA, 17 nt, Artificial Sequence
  Synthetic
uaacccugaaaucaaag

SEQ ID NO: 752989 - RNA, 17 nt, Artificial Sequence
  Synthetic
auauaccuaaaucaaag

SEQ ID NO: 752990 - RNA, 17 nt, Artificial Sequence
  Synthetic
agagaaaagaaucaaag

SEQ ID NO: 752991 - RNA, 17 nt, Artificial Sequence
  Synthetic
acaugaaggaaucaaag

SEQ ID NO: 752992 - RNA, 17 nt, Artificial Sequence
  Synthetic
aggacauuuaaucaaag

SEQ ID NO: 752993 - RNA, 17 nt, Artificial Sequence
  Synthetic
uuuuuuuuuaaucaaag

SEQ ID NO: 752994 - RNA, 17 nt, Artificial Sequence
  Synthetic
caaauaucacaucaaag

SEQ ID NO: 752995 - RNA, 17 nt, Artificial Sequence
  Synthetic
aaggaaauacaucaaag

SEQ ID NO: 752996 - RNA, 17 nt, Artificial Sequence
  Synthetic
agaauugaugaucaaag

SEQ ID NO: 752997 - RNA, 17 nt, Artificial Sequence
  Synthetic
uacagugcugaucaaag

SEQ ID NO: 752998 - RNA, 17 nt, Artificial Sequence
  Synthetic
cacaucgcauaucaaag

SEQ ID NO: 752999 - RNA, 17 nt, Artificial Sequence
  Synthetic
cuuaaggauuaucaaag

SEQ ID NO: 753000 - RNA, 17 nt, Artificial Sequence
  Synthetic
uaccuuacaacucaaag

SEQ ID NO: 753001 - RNA, 17 nt, Artificial Sequence
  Synthetic
ugaugaguaacucaaag

SEQ ID NO: 753002 - RNA, 17 nt, Artificial Sequence
  Synthetic
uauuacaaagcucaaag

SEQ ID NO: 753003 - RNA, 17 nt, Artificial Sequence
  Synthetic
cuuuccuucucucaaag

SEQ ID NO: 753004 - RNA, 17 nt, Artificial Sequence
  Synthetic
uucuacuauucucaaag

SEQ ID NO: 753005 - RNA, 17 nt, Artificial Sequence
  Synthetic
uaacuuguuucucaaag

SEQ ID NO: 753006 - RNA, 17 nt, Artificial Sequence
  Synthetic
aaggauuagagucaaag

SEQ ID NO: 753007 - RNA, 17 nt, Artificial Sequence
  Synthetic
aacugaagaauucaaag

SEQ ID NO: 753008 - RNA, 17 nt, Artificial Sequence
  Synthetic
aaugaguuaauucaaag

SEQ ID NO: 753009 - RNA, 17 nt, Artificial Sequence
  Synthetic
uauauucacauucaaag

SEQ ID NO: 753010 - RNA, 17 nt, Artificial Sequence
  Synthetic
aaauaguucauucaaag

SEQ ID NO: 753011 - RNA, 17 nt, Artificial Sequence
  Synthetic
uaauuuuagauucaaag

SEQ ID NO: 753012 - RNA, 17 nt, Artificial Sequence
  Synthetic
aaagaggugguucaaag

SEQ ID NO: 753013 - RNA, 17 nt, Artificial Sequence
  Synthetic
agaaugcacuuucaaag

SEQ ID NO: 753014 - RNA, 17 nt, Artificial Sequence
  Synthetic
uaguuauucuuucaaag

SEQ ID NO: 753015 - RNA, 17 nt, Artificial Sequence
  Synthetic
aagagaagguuucaaag

SEQ ID NO: 753016 - RNA, 17 nt, Artificial Sequence
  Synthetic
aaagaaaaaaaagaaag

SEQ ID NO: 753017 - RNA, 17 nt, Artificial Sequence
  Synthetic
uacacuaaaaaagaaag

SEQ ID NO: 753018 - RNA, 17 nt, Artificial Sequence
  Synthetic
caauuuacaaaagaaag

SEQ ID NO: 753019 - RNA, 17 nt, Artificial Sequence
  Synthetic
aaauuaagaaaagaaag

SEQ ID NO: 753020 - RNA, 17 nt, Artificial Sequence
  Synthetic
caaaacggaaaagaaag

SEQ ID NO: 753021 - RNA, 17 nt, Artificial Sequence
  Synthetic
uaauuuauaaaagaaag

SEQ ID NO: 753022 - RNA, 17 nt, Artificial Sequence
  Synthetic
ucccuuguaaaagaaag

SEQ ID NO: 753023 - RNA, 17 nt, Artificial Sequence
  Synthetic
aaaaaauacaaagaaag

SEQ ID NO: 753024 - RNA, 17 nt, Artificial Sequence
  Synthetic
acgauugucaaagaaag

SEQ ID NO: 753025 - RNA, 17 nt, Artificial Sequence
  Synthetic
aaaaagaagaaagaaag

SEQ ID NO: 753026 - RNA, 17 nt, Artificial Sequence
  Synthetic
cugucgaggaaagaaag

SEQ ID NO: 753027 - RNA, 17 nt, Artificial Sequence
  Synthetic
ugaaggaaagaagaaag

SEQ ID NO: 753028 - RNA, 17 nt, Artificial Sequence
  Synthetic
auugcagaagaagaaag

SEQ ID NO: 753029 - RNA, 17 nt, Artificial Sequence
  Synthetic
cuaggaaacgaagaaag

SEQ ID NO: 753030 - RNA, 17 nt, Artificial Sequence
  Synthetic
ugagguugugaagaaag

SEQ ID NO: 753031 - RNA, 17 nt, Artificial Sequence
  Synthetic
aaaaaauuugaagaaag

SEQ ID NO: 753032 - RNA, 17 nt, Artificial Sequence
  Synthetic
acacaggaauaagaaag

SEQ ID NO: 753033 - RNA, 17 nt, Artificial Sequence
  Synthetic
acuauaucauaagaaag

SEQ ID NO: 753034 - RNA, 17 nt, Artificial Sequence
  Synthetic
cuaauuuuauaagaaag

SEQ ID NO: 753035 - RNA, 17 nt, Artificial Sequence
  Synthetic
uauaagguguaagaaag

SEQ ID NO: 753036 - RNA, 17 nt, Artificial Sequence
  Synthetic
uaauagaauuaagaaag

SEQ ID NO: 753037 - RNA, 17 nt, Artificial Sequence
  Synthetic
uucuauacuuaagaaag

SEQ ID NO: 753038 - RNA, 17 nt, Artificial Sequence
  Synthetic
cagauggacacagaaag

SEQ ID NO: 753039 - RNA, 17 nt, Artificial Sequence
  Synthetic
auauauugcacagaaag

SEQ ID NO: 753040 - RNA, 17 nt, Artificial Sequence
  Synthetic
aaauugaucacagaaag

SEQ ID NO: 753041 - RNA, 17 nt, Artificial Sequence
  Synthetic
ccugaagucacagaaag

SEQ ID NO: 753042 - RNA, 17 nt, Artificial Sequence
  Synthetic
acuagcaagacagaaag

SEQ ID NO: 753043 - RNA, 17 nt, Artificial Sequence
  Synthetic
augagagauacagaaag

SEQ ID NO: 753044 - RNA, 17 nt, Artificial Sequence
  Synthetic
ugaacagaagcagaaag

SEQ ID NO: 753045 - RNA, 17 nt, Artificial Sequence
  Synthetic
acaaacccagcagaaag

SEQ ID NO: 753046 - RNA, 17 nt, Artificial Sequence
  Synthetic
uacuuacaaucagaaag

SEQ ID NO: 753047 - RNA, 17 nt, Artificial Sequence
  Synthetic
aaaaacccaucagaaag

SEQ ID NO: 753048 - RNA, 17 nt, Artificial Sequence
  Synthetic
aagaccccaucagaaag

SEQ ID NO: 753049 - RNA, 17 nt, Artificial Sequence
  Synthetic
cgccgggauucagaaag

SEQ ID NO: 753050 - RNA, 17 nt, Artificial Sequence
  Synthetic
ucauuauaaagagaaag

SEQ ID NO: 753051 - RNA, 17 nt, Artificial Sequence
  Synthetic
accaaagagagagaaag

SEQ ID NO: 753052 - RNA, 17 nt, Artificial Sequence
  Synthetic
ugggaagagagagaaag

SEQ ID NO: 753053 - RNA, 17 nt, Artificial Sequence
  Synthetic
uuugaagauagagaaag

SEQ ID NO: 753054 - RNA, 17 nt, Artificial Sequence
  Synthetic
ucugaagaucgagaaag

SEQ ID NO: 753055 - RNA, 17 nt, Artificial Sequence
  Synthetic
cauuuuggaggagaaag

SEQ ID NO: 753056 - RNA, 17 nt, Artificial Sequence
  Synthetic
uaaauacuaugagaaag

SEQ ID NO: 753057 - RNA, 17 nt, Artificial Sequence
  Synthetic
auugagaauugagaaag

SEQ ID NO: 753058 - RNA, 17 nt, Artificial Sequence
  Synthetic
agaaaggcuugagaaag

SEQ ID NO: 753059 - RNA, 17 nt, Artificial Sequence
  Synthetic
agaaauugaauagaaag

SEQ ID NO: 753060 - RNA, 17 nt, Artificial Sequence
  Synthetic
uugugauucauagaaag

SEQ ID NO: 753061 - RNA, 17 nt, Artificial Sequence
  Synthetic
acugcacagauagaaag

SEQ ID NO: 753062 - RNA, 17 nt, Artificial Sequence
  Synthetic
uauacuucuauagaaag

SEQ ID NO: 753063 - RNA, 17 nt, Artificial Sequence
  Synthetic
aaaaguccucuagaaag

SEQ ID NO: 753064 - RNA, 17 nt, Artificial Sequence
  Synthetic
ugauagguucuagaaag

SEQ ID NO: 753065 - RNA, 17 nt, Artificial Sequence
  Synthetic
ugucuucaaguagaaag

SEQ ID NO: 753066 - RNA, 17 nt, Artificial Sequence
  Synthetic
ugucacacuguagaaag

SEQ ID NO: 753067 - RNA, 17 nt, Artificial Sequence
  Synthetic
auucgaauauuagaaag

SEQ ID NO: 753068 - RNA, 17 nt, Artificial Sequence
  Synthetic
aauagaaguuuagaaag

SEQ ID NO: 753069 - RNA, 17 nt, Artificial Sequence
  Synthetic
uccguggggaccgaaag

SEQ ID NO: 753070 - RNA, 17 nt, Artificial Sequence
  Synthetic
uaaaagccaaaggaaag

SEQ ID NO: 753071 - RNA, 17 nt, Artificial Sequence
  Synthetic
aaaucagcaaaggaaag

SEQ ID NO: 753072 - RNA, 17 nt, Artificial Sequence
  Synthetic
agaaggggaaaggaaag

SEQ ID NO: 753073 - RNA, 17 nt, Artificial Sequence
  Synthetic
uaauuuauaaaggaaag

SEQ ID NO: 753074 - RNA, 17 nt, Artificial Sequence
  Synthetic
ugauuuauaaaggaaag

SEQ ID NO: 753075 - RNA, 17 nt, Artificial Sequence
  Synthetic
uaauuucuaaaggaaag

SEQ ID NO: 753076 - RNA, 17 nt, Artificial Sequence
  Synthetic
aauugggggaaggaaag

SEQ ID NO: 753077 - RNA, 17 nt, Artificial Sequence
  Synthetic
uuaaugaaacaggaaag

SEQ ID NO: 753078 - RNA, 17 nt, Artificial Sequence
  Synthetic
aacuuuagucaggaaag

SEQ ID NO: 753079 - RNA, 17 nt, Artificial Sequence
  Synthetic
ugucuccuggaggaaag

SEQ ID NO: 753080 - RNA, 17 nt, Artificial Sequence
  Synthetic
augaagaaugaggaaag

SEQ ID NO: 753081 - RNA, 17 nt, Artificial Sequence
  Synthetic
agaaguacugaggaaag

SEQ ID NO: 753082 - RNA, 17 nt, Artificial Sequence
  Synthetic
aagagcaucuaggaaag

SEQ ID NO: 753083 - RNA, 17 nt, Artificial Sequence
  Synthetic
aaagaauuaagggaaag

SEQ ID NO: 753084 - RNA, 17 nt, Artificial Sequence
  Synthetic
ugaauaaagagggaaag

SEQ ID NO: 753085 - RNA, 17 nt, Artificial Sequence
  Synthetic
ugacucucaggggaaag

SEQ ID NO: 753086 - RNA, 17 nt, Artificial Sequence
  Synthetic
uugcaccucggggaaag

SEQ ID NO: 753087 - RNA, 17 nt, Artificial Sequence
  Synthetic
uagugguagggggaaag

SEQ ID NO: 753088 - RNA, 17 nt, Artificial Sequence
  Synthetic
ccccuauaaugggaaag

SEQ ID NO: 753089 - RNA, 17 nt, Artificial Sequence
  Synthetic
uaggggaggugggaaag

SEQ ID NO: 753090 - RNA, 17 nt, Artificial Sequence
  Synthetic
aauugggguugggaaag

SEQ ID NO: 753091 - RNA, 17 nt, Artificial Sequence
  Synthetic
aguaacugaauggaaag

SEQ ID NO: 753092 - RNA, 17 nt, Artificial Sequence
  Synthetic
uucacuccccuggaaag

SEQ ID NO: 753093 - RNA, 17 nt, Artificial Sequence
  Synthetic
acugagaagcuggaaag

SEQ ID NO: 753094 - RNA, 17 nt, Artificial Sequence
  Synthetic
uaccaucaauuggaaag

SEQ ID NO: 753095 - RNA, 17 nt, Artificial Sequence
  Synthetic
uuuucuucauuggaaag

SEQ ID NO: 753096 - RNA, 17 nt, Artificial Sequence
  Synthetic
uuuccuuauuuggaaag

SEQ ID NO: 753097 - RNA, 17 nt, Artificial Sequence
  Synthetic
aaaaucagaaaugaaag

SEQ ID NO: 753098 - RNA, 17 nt, Artificial Sequence
  Synthetic
ucagcaugaaaugaaag

SEQ ID NO: 753099 - RNA, 17 nt, Artificial Sequence
  Synthetic
acuuaugacaaugaaag

SEQ ID NO: 753100 - RNA, 17 nt, Artificial Sequence
  Synthetic
ucaaaggagaaugaaag

SEQ ID NO: 753101 - RNA, 17 nt, Artificial Sequence
  Synthetic
cugguugcuaaugaaag

SEQ ID NO: 753102 - RNA, 17 nt, Artificial Sequence
  Synthetic
aaacacuguaaugaaag

SEQ ID NO: 753103 - RNA, 17 nt, Artificial Sequence
  Synthetic
uuucuuuagcaugaaag

SEQ ID NO: 753104 - RNA, 17 nt, Artificial Sequence
  Synthetic
ucuccauaagaugaaag

SEQ ID NO: 753105 - RNA, 17 nt, Artificial Sequence
  Synthetic
agaugaagagaugaaag

SEQ ID NO: 753106 - RNA, 17 nt, Artificial Sequence
  Synthetic
uguacugccgaugaaag

SEQ ID NO: 753107 - RNA, 17 nt, Artificial Sequence
  Synthetic
acucuauacuaugaaag

SEQ ID NO: 753108 - RNA, 17 nt, Artificial Sequence
  Synthetic
aaaaauggaacugaaag

SEQ ID NO: 753109 - RNA, 17 nt, Artificial Sequence
  Synthetic
uuuuaaaagacugaaag

SEQ ID NO: 753110 - RNA, 17 nt, Artificial Sequence
  Synthetic
ugaagaggugcugaaag

SEQ ID NO: 753111 - RNA, 17 nt, Artificial Sequence
  Synthetic
caagcagaaggugaaag

SEQ ID NO: 753112 - RNA, 17 nt, Artificial Sequence
  Synthetic
aauguagggggugaaag

SEQ ID NO: 753113 - RNA, 17 nt, Artificial Sequence
  Synthetic
augauuaauggugaaag

SEQ ID NO: 753114 - RNA, 17 nt, Artificial Sequence
  Synthetic
uaauuaaaaugugaaag

SEQ ID NO: 753115 - RNA, 17 nt, Artificial Sequence
  Synthetic
ugagauuacugugaaag

SEQ ID NO: 753116 - RNA, 17 nt, Artificial Sequence
  Synthetic
aaaaauaugugugaaag

SEQ ID NO: 753117 - RNA, 17 nt, Artificial Sequence
  Synthetic
uuucagagaauugaaag

SEQ ID NO: 753118 - RNA, 17 nt, Artificial Sequence
  Synthetic
aaaaggagaauugaaag

SEQ ID NO: 753119 - RNA, 17 nt, Artificial Sequence
  Synthetic
uuuuuaaucguugaaag

SEQ ID NO: 753120 - RNA, 17 nt, Artificial Sequence
  Synthetic
cugcccaauguugaaag

SEQ ID NO: 753121 - RNA, 17 nt, Artificial Sequence
  Synthetic
uuugacagauuugaaag

SEQ ID NO: 753122 - RNA, 17 nt, Artificial Sequence
  Synthetic
aaaggccuguuugaaag

SEQ ID NO: 753123 - RNA, 17 nt, Artificial Sequence
  Synthetic
ugugaguguuuugaaag

SEQ ID NO: 753124 - RNA, 17 nt, Artificial Sequence
  Synthetic
aauuggccaaaauaaag

SEQ ID NO: 753125 - RNA, 17 nt, Artificial Sequence
  Synthetic
aucacauuaaaauaaag

SEQ ID NO: 753126 - RNA, 17 nt, Artificial Sequence
  Synthetic
acacaggggaaauaaag

SEQ ID NO: 753127 - RNA, 17 nt, Artificial Sequence
  Synthetic
aggggcuggaaauaaag

SEQ ID NO: 753128 - RNA, 17 nt, Artificial Sequence
  Synthetic
uaaaaagguaaauaaag

SEQ ID NO: 753129 - RNA, 17 nt, Artificial Sequence
  Synthetic
auuaauuggcaauaaag

SEQ ID NO: 753130 - RNA, 17 nt, Artificial Sequence
  Synthetic
uuaagaaaucaauaaag

SEQ ID NO: 753131 - RNA, 17 nt, Artificial Sequence
  Synthetic
uuuuuaugucaauaaag

SEQ ID NO: 753132 - RNA, 17 nt, Artificial Sequence
  Synthetic
agagaacuagaauaaag

SEQ ID NO: 753133 - RNA, 17 nt, Artificial Sequence
  Synthetic
uaacaacaauaauaaag

SEQ ID NO: 753134 - RNA, 17 nt, Artificial Sequence
  Synthetic
aaacuauuauaauaaag

SEQ ID NO: 753135 - RNA, 17 nt, Artificial Sequence
  Synthetic
acuaugcagccauaaag

SEQ ID NO: 753136 - RNA, 17 nt, Artificial Sequence
  Synthetic
auuauaaauccauaaag

SEQ ID NO: 753137 - RNA, 17 nt, Artificial Sequence
  Synthetic
aggaaaugggcauaaag

SEQ ID NO: 753138 - RNA, 17 nt, Artificial Sequence
  Synthetic
caugaucccucauaaag

SEQ ID NO: 753139 - RNA, 17 nt, Artificial Sequence
  Synthetic
uccuuguuuucauaaag

SEQ ID NO: 753140 - RNA, 17 nt, Artificial Sequence
  Synthetic
uauuucaaaagauaaag

SEQ ID NO: 753141 - RNA, 17 nt, Artificial Sequence
  Synthetic
aacucuauaagauaaag

SEQ ID NO: 753142 - RNA, 17 nt, Artificial Sequence
  Synthetic
cuagaaauacgauaaag

SEQ ID NO: 753143 - RNA, 17 nt, Artificial Sequence
  Synthetic
agaaaugaaggauaaag

SEQ ID NO: 753144 - RNA, 17 nt, Artificial Sequence
  Synthetic
aagaaaaaaugauaaag

SEQ ID NO: 753145 - RNA, 17 nt, Artificial Sequence
  Synthetic
aauaaaaaaugauaaag

SEQ ID NO: 753146 - RNA, 17 nt, Artificial Sequence
  Synthetic
acaugaaacugauaaag

SEQ ID NO: 753147 - RNA, 17 nt, Artificial Sequence
  Synthetic
agaaacagaauauaaag

SEQ ID NO: 753148 - RNA, 17 nt, Artificial Sequence
  Synthetic
agaaaaagcauauaaag

SEQ ID NO: 753149 - RNA, 17 nt, Artificial Sequence
  Synthetic
uugcaaaugauauaaag

SEQ ID NO: 753150 - RNA, 17 nt, Artificial Sequence
  Synthetic
accuugcuuauauaaag

SEQ ID NO: 753151 - RNA, 17 nt, Artificial Sequence
  Synthetic
uuuauucagcuauaaag

SEQ ID NO: 753152 - RNA, 17 nt, Artificial Sequence
  Synthetic
agcuuuuuucuauaaag

SEQ ID NO: 753153 - RNA, 17 nt, Artificial Sequence
  Synthetic
cugaugguuuuauaaag

SEQ ID NO: 753154 - RNA, 17 nt, Artificial Sequence
  Synthetic
cuuuuggaaaacuaaag

SEQ ID NO: 753155 - RNA, 17 nt, Artificial Sequence
  Synthetic
aguuagaauaacuaaag

SEQ ID NO: 753156 - RNA, 17 nt, Artificial Sequence
  Synthetic
ucagcuacuaacuaaag

SEQ ID NO: 753157 - RNA, 17 nt, Artificial Sequence
  Synthetic
agucccagccacuaaag

SEQ ID NO: 753158 - RNA, 17 nt, Artificial Sequence
  Synthetic
agcaauacauacuaaag

SEQ ID NO: 753159 - RNA, 17 nt, Artificial Sequence
  Synthetic
ucuuaggggaccuaaag

SEQ ID NO: 753160 - RNA, 17 nt, Artificial Sequence
  Synthetic
cuggaauuacccuaaag

SEQ ID NO: 753161 - RNA, 17 nt, Artificial Sequence
  Synthetic
ugguucucuuccuaaag

SEQ ID NO: 753162 - RNA, 17 nt, Artificial Sequence
  Synthetic
caaauaaaaagcuaaag

SEQ ID NO: 753163 - RNA, 17 nt, Artificial Sequence
  Synthetic
aagagaccaagcuaaag

SEQ ID NO: 753164 - RNA, 17 nt, Artificial Sequence
  Synthetic
uuaaagcgaagcuaaag

SEQ ID NO: 753165 - RNA, 17 nt, Artificial Sequence
  Synthetic
uauauggugagcuaaag

SEQ ID NO: 753166 - RNA, 17 nt, Artificial Sequence
  Synthetic
ucaccgcauagcuaaag

SEQ ID NO: 753167 - RNA, 17 nt, Artificial Sequence
  Synthetic
auguuggccugcuaaag

SEQ ID NO: 753168 - RNA, 17 nt, Artificial Sequence
  Synthetic
ccacaagagugcuaaag

SEQ ID NO: 753169 - RNA, 17 nt, Artificial Sequence
  Synthetic
aaagggccauucuaaag

SEQ ID NO: 753170 - RNA, 17 nt, Artificial Sequence
  Synthetic
uauuuuaucuucuaaag

SEQ ID NO: 753171 - RNA, 17 nt, Artificial Sequence
  Synthetic
uauuaaucuuucuaaag

SEQ ID NO: 753172 - RNA, 17 nt, Artificial Sequence
  Synthetic
uaaacaguuuucuaaag

SEQ ID NO: 753173 - RNA, 17 nt, Artificial Sequence
  Synthetic
uagacagaaaaguaaag

SEQ ID NO: 753174 - RNA, 17 nt, Artificial Sequence
  Synthetic
acuuucuguaaguaaag

SEQ ID NO: 753175 - RNA, 17 nt, Artificial Sequence
  Synthetic
uauucauaucaguaaag

SEQ ID NO: 753176 - RNA, 17 nt, Artificial Sequence
  Synthetic
uguagaguucaguaaag

SEQ ID NO: 753177 - RNA, 17 nt, Artificial Sequence
  Synthetic
uaauuaaacgaguaaag

SEQ ID NO: 753178 - RNA, 17 nt, Artificial Sequence
  Synthetic
auuacucaugaguaaag

SEQ ID NO: 753179 - RNA, 17 nt, Artificial Sequence
  Synthetic
auaagcccugaguaaag

SEQ ID NO: 753180 - RNA, 17 nt, Artificial Sequence
  Synthetic
uuggccauaagguaaag

SEQ ID NO: 753181 - RNA, 17 nt, Artificial Sequence
  Synthetic
aaagguaagagguaaag

SEQ ID NO: 753182 - RNA, 17 nt, Artificial Sequence
  Synthetic
aguauuuaaggguaaag

SEQ ID NO: 753183 - RNA, 17 nt, Artificial Sequence
  Synthetic
acaauguguggguaaag

SEQ ID NO: 753184 - RNA, 17 nt, Artificial Sequence
  Synthetic
uucccucagcuguaaag

SEQ ID NO: 753185 - RNA, 17 nt, Artificial Sequence
  Synthetic
uuuucuuaucuguaaag

SEQ ID NO: 753186 - RNA, 17 nt, Artificial Sequence
  Synthetic
uuuacuccucuguaaag

SEQ ID NO: 753187 - RNA, 17 nt, Artificial Sequence
  Synthetic
uauuuuuuucuguaaag

SEQ ID NO: 753188 - RNA, 17 nt, Artificial Sequence
  Synthetic
aagugacuaaauuaaag

SEQ ID NO: 753189 - RNA, 17 nt, Artificial Sequence
  Synthetic
auuuggaagaauuaaag

SEQ ID NO: 753190 - RNA, 17 nt, Artificial Sequence
  Synthetic
aaaauucuacauuaaag

SEQ ID NO: 753191 - RNA, 17 nt, Artificial Sequence
  Synthetic
uaaaaacaccauuaaag

SEQ ID NO: 753192 - RNA, 17 nt, Artificial Sequence
  Synthetic
uucagauuagauuaaag

SEQ ID NO: 753193 - RNA, 17 nt, Artificial Sequence
  Synthetic
uuuugcuuugauuaaag

SEQ ID NO: 753194 - RNA, 17 nt, Artificial Sequence
  Synthetic
agaaaggaauauuaaag

SEQ ID NO: 753195 - RNA, 17 nt, Artificial Sequence
  Synthetic
acagcuggauauuaaag

SEQ ID NO: 753196 - RNA, 17 nt, Artificial Sequence
  Synthetic
aaagaguguuauuaaag

SEQ ID NO: 753197 - RNA, 17 nt, Artificial Sequence
  Synthetic
cagggcaaaacuuaaag

SEQ ID NO: 753198 - RNA, 17 nt, Artificial Sequence
  Synthetic
aacuuuaaaccuuaaag

SEQ ID NO: 753199 - RNA, 17 nt, Artificial Sequence
  Synthetic
agcucuccaccuuaaag

SEQ ID NO: 753200 - RNA, 17 nt, Artificial Sequence
  Synthetic
aagaaaugggcuuaaag

SEQ ID NO: 753201 - RNA, 17 nt, Artificial Sequence
  Synthetic
cugucuauugcuuaaag

SEQ ID NO: 753202 - RNA, 17 nt, Artificial Sequence
  Synthetic
aaacaaaaaucuuaaag

SEQ ID NO: 753203 - RNA, 17 nt, Artificial Sequence
  Synthetic
ucuuucucacguuaaag

SEQ ID NO: 753204 - RNA, 17 nt, Artificial Sequence
  Synthetic
augcuuuucuguuaaag

SEQ ID NO: 753205 - RNA, 17 nt, Artificial Sequence
  Synthetic
agagaauguuguuaaag

SEQ ID NO: 753206 - RNA, 17 nt, Artificial Sequence
  Synthetic
ugauaaaagauuuaaag

SEQ ID NO: 753207 - RNA, 17 nt, Artificial Sequence
  Synthetic
uugaagcugauuuaaag

SEQ ID NO: 753208 - RNA, 17 nt, Artificial Sequence
  Synthetic
agguuuaguauuuaaag

SEQ ID NO: 753209 - RNA, 17 nt, Artificial Sequence
  Synthetic
agguagggccuuuaaag

SEQ ID NO: 753210 - RNA, 17 nt, Artificial Sequence
  Synthetic
acagggaguguuuaaag

SEQ ID NO: 753211 - RNA, 17 nt, Artificial Sequence
  Synthetic
aauuuuaucuuuuaaag

SEQ ID NO: 753212 - RNA, 17 nt, Artificial Sequence
  Synthetic
uacuuuacaaaaacaag

SEQ ID NO: 753213 - RNA, 17 nt, Artificial Sequence
  Synthetic
acaaagaggaaaacaag

SEQ ID NO: 753214 - RNA, 17 nt, Artificial Sequence
  Synthetic
auacauacagaaacaag

SEQ ID NO: 753215 - RNA, 17 nt, Artificial Sequence
  Synthetic
uauuucugugaaacaag

SEQ ID NO: 753216 - RNA, 17 nt, Artificial Sequence
  Synthetic
uuggaguuugaaacaag

SEQ ID NO: 753217 - RNA, 17 nt, Artificial Sequence
  Synthetic
auuauaugcuaaacaag

SEQ ID NO: 753218 - RNA, 17 nt, Artificial Sequence
  Synthetic
uuaaucaauccaacaag

SEQ ID NO: 753219 - RNA, 17 nt, Artificial Sequence
  Synthetic
uggaagauaagaacaag

SEQ ID NO: 753220 - RNA, 17 nt, Artificial Sequence
  Synthetic
uacaagaacagaacaag

SEQ ID NO: 753221 - RNA, 17 nt, Artificial Sequence
  Synthetic
uucaugagaggaacaag

SEQ ID NO: 753222 - RNA, 17 nt, Artificial Sequence
  Synthetic
aaauagaaaauaacaag

SEQ ID NO: 753223 - RNA, 17 nt, Artificial Sequence
  Synthetic
aguucccuuauaacaag

SEQ ID NO: 753224 - RNA, 17 nt, Artificial Sequence
  Synthetic
uggagaguuauaacaag

SEQ ID NO: 753225 - RNA, 17 nt, Artificial Sequence
  Synthetic
augaaaauucuaacaag

SEQ ID NO: 753226 - RNA, 17 nt, Artificial Sequence
  Synthetic
aaugacaauguaacaag

SEQ ID NO: 753227 - RNA, 17 nt, Artificial Sequence
  Synthetic
aaccaaaaauuaacaag

SEQ ID NO: 753228 - RNA, 17 nt, Artificial Sequence
  Synthetic
aaagacagauuaacaag

SEQ ID NO: 753229 - RNA, 17 nt, Artificial Sequence
  Synthetic
uuuucagaagacacaag

SEQ ID NO: 753230 - RNA, 17 nt, Artificial Sequence
  Synthetic
aggcugacagacacaag

SEQ ID NO: 753231 - RNA, 17 nt, Artificial Sequence
  Synthetic
ucccuuuucuacacaag

SEQ ID NO: 753232 - RNA, 17 nt, Artificial Sequence
  Synthetic
aaguugucaaccacaag

SEQ ID NO: 753233 - RNA, 17 nt, Artificial Sequence
  Synthetic
ugauauaauaccacaag

SEQ ID NO: 753234 - RNA, 17 nt, Artificial Sequence
  Synthetic
uguuccaggcccacaag

SEQ ID NO: 753235 - RNA, 17 nt, Artificial Sequence
  Synthetic
aaacugccuuccacaag

SEQ ID NO: 753236 - RNA, 17 nt, Artificial Sequence
  Synthetic
caccccggaagcacaag

SEQ ID NO: 753237 - RNA, 17 nt, Artificial Sequence
  Synthetic
uagcuaacgggcacaag

SEQ ID NO: 753238 - RNA, 17 nt, Artificial Sequence
  Synthetic
uggccaacuggcacaag

SEQ ID NO: 753239 - RNA, 17 nt, Artificial Sequence
  Synthetic
ucauacaugaucacaag

SEQ ID NO: 753240 - RNA, 17 nt, Artificial Sequence
  Synthetic
uuuagaacuuucacaag

SEQ ID NO: 753241 - RNA, 17 nt, Artificial Sequence
  Synthetic
accaucauuaagacaag

SEQ ID NO: 753242 - RNA, 17 nt, Artificial Sequence
  Synthetic
auuuuggcacagacaag

SEQ ID NO: 753243 - RNA, 17 nt, Artificial Sequence
  Synthetic
cuuaucaggcagacaag

SEQ ID NO: 753244 - RNA, 17 nt, Artificial Sequence
  Synthetic
aaggccgcagagacaag

SEQ ID NO: 753245 - RNA, 17 nt, Artificial Sequence
  Synthetic
aagucuauauagacaag

SEQ ID NO: 753246 - RNA, 17 nt, Artificial Sequence
  Synthetic
caaugaaaaucgacaag

SEQ ID NO: 753247 - RNA, 17 nt, Artificial Sequence
  Synthetic
auacaacugaggacaag

SEQ ID NO: 753248 - RNA, 17 nt, Artificial Sequence
  Synthetic
auaauaaaggggacaag

SEQ ID NO: 753249 - RNA, 17 nt, Artificial Sequence
  Synthetic
cugaucucauggacaag

SEQ ID NO: 753250 - RNA, 17 nt, Artificial Sequence
  Synthetic
uaaacaaaugugacaag

SEQ ID NO: 753251 - RNA, 17 nt, Artificial Sequence
  Synthetic
aaccaaaaauugacaag

SEQ ID NO: 753252 - RNA, 17 nt, Artificial Sequence
  Synthetic
uuucagaaauugacaag

SEQ ID NO: 753253 - RNA, 17 nt, Artificial Sequence
  Synthetic
aaaagaagacauacaag

SEQ ID NO: 753254 - RNA, 17 nt, Artificial Sequence
  Synthetic
caaagaggagauacaag

SEQ ID NO: 753255 - RNA, 17 nt, Artificial Sequence
  Synthetic
uucuuagaauauacaag

SEQ ID NO: 753256 - RNA, 17 nt, Artificial Sequence
  Synthetic
caucugacuuauacaag

SEQ ID NO: 753257 - RNA, 17 nt, Artificial Sequence
  Synthetic
uaugugcugccuacaag

SEQ ID NO: 753258 - RNA, 17 nt, Artificial Sequence
  Synthetic
caagcucauucuacaag

SEQ ID NO: 753259 - RNA, 17 nt, Artificial Sequence
  Synthetic
agaucgauuucuacaag

SEQ ID NO: 753260 - RNA, 17 nt, Artificial Sequence
  Synthetic
cuaggaacauguacaag

SEQ ID NO: 753261 - RNA, 17 nt, Artificial Sequence
  Synthetic
ucaaaagcaauuacaag

SEQ ID NO: 753262 - RNA, 17 nt, Artificial Sequence
  Synthetic
ugguuuauaauuacaag

SEQ ID NO: 753263 - RNA, 17 nt, Artificial Sequence
  Synthetic
auguucucacuuacaag

SEQ ID NO: 753264 - RNA, 17 nt, Artificial Sequence
  Synthetic
ccuucccgucuuacaag

SEQ ID NO: 753265 - RNA, 17 nt, Artificial Sequence
  Synthetic
cuuuucugucuuacaag

SEQ ID NO: 753266 - RNA, 17 nt, Artificial Sequence
  Synthetic
aaaugcaccaaaccaag

SEQ ID NO: 753267 - RNA, 17 nt, Artificial Sequence
  Synthetic
aaauuauagaaaccaag

SEQ ID NO: 753268 - RNA, 17 nt, Artificial Sequence
  Synthetic
aagugcauggaaccaag

SEQ ID NO: 753269 - RNA, 17 nt, Artificial Sequence
  Synthetic
uuucuuccugaaccaag

SEQ ID NO: 753270 - RNA, 17 nt, Artificial Sequence
  Synthetic
caagcacacuaaccaag

SEQ ID NO: 753271 - RNA, 17 nt, Artificial Sequence
  Synthetic
uacuuuggguaaccaag

SEQ ID NO: 753272 - RNA, 17 nt, Artificial Sequence
  Synthetic
uuuuuaccuccaccaag

SEQ ID NO: 753273 - RNA, 17 nt, Artificial Sequence
  Synthetic
augaggauggcaccaag

SEQ ID NO: 753274 - RNA, 17 nt, Artificial Sequence
  Synthetic
ccauuuuugucaccaag

SEQ ID NO: 753275 - RNA, 17 nt, Artificial Sequence
  Synthetic
cucagcucuggaccaag

SEQ ID NO: 753276 - RNA, 17 nt, Artificial Sequence
  Synthetic
uauucaccaugaccaag

SEQ ID NO: 753277 - RNA, 17 nt, Artificial Sequence
  Synthetic
augaggacaguaccaag

SEQ ID NO: 753278 - RNA, 17 nt, Artificial Sequence
  Synthetic
aauagcuugaacccaag

SEQ ID NO: 753279 - RNA, 17 nt, Artificial Sequence
  Synthetic
aucagugaccacccaag

SEQ ID NO: 753280 - RNA, 17 nt, Artificial Sequence
  Synthetic
agaucauaagacccaag

SEQ ID NO: 753281 - RNA, 17 nt, Artificial Sequence
  Synthetic
ugcuccucauacccaag

SEQ ID NO: 753282 - RNA, 17 nt, Artificial Sequence
  Synthetic
augcuaugauacccaag

SEQ ID NO: 753283 - RNA, 17 nt, Artificial Sequence
  Synthetic
aaaacucuaaccccaag

SEQ ID NO: 753284 - RNA, 17 nt, Artificial Sequence
  Synthetic
ugccuuagccccccaag

SEQ ID NO: 753285 - RNA, 17 nt, Artificial Sequence
  Synthetic
uagauaaaauccccaag

SEQ ID NO: 753286 - RNA, 17 nt, Artificial Sequence
  Synthetic
uuuggucgaggcccaag

SEQ ID NO: 753287 - RNA, 17 nt, Artificial Sequence
  Synthetic
ugcaucagccucccaag

SEQ ID NO: 753288 - RNA, 17 nt, Artificial Sequence
  Synthetic
uccaauaagcucccaag

SEQ ID NO: 753289 - RNA, 17 nt, Artificial Sequence
  Synthetic
cauuaucuauucccaag

SEQ ID NO: 753290 - RNA, 17 nt, Artificial Sequence
  Synthetic
ugcuuagcaaagccaag

SEQ ID NO: 753291 - RNA, 17 nt, Artificial Sequence
  Synthetic
aggucuccccagccaag

SEQ ID NO: 753292 - RNA, 17 nt, Artificial Sequence
  Synthetic
cagguaguugagccaag

SEQ ID NO: 753293 - RNA, 17 nt, Artificial Sequence
  Synthetic
uuuuuacaguagccaag

SEQ ID NO: 753294 - RNA, 17 nt, Artificial Sequence
  Synthetic
ucuggaagggggccaag

SEQ ID NO: 753295 - RNA, 17 nt, Artificial Sequence
  Synthetic
aauguagaauggccaag

SEQ ID NO: 753296 - RNA, 17 nt, Artificial Sequence
  Synthetic
aucacauguuggccaag

SEQ ID NO: 753297 - RNA, 17 nt, Artificial Sequence
  Synthetic
cagucaaucaugccaag

SEQ ID NO: 753298 - RNA, 17 nt, Artificial Sequence
  Synthetic
uaagcaguggugccaag

SEQ ID NO: 753299 - RNA, 17 nt, Artificial Sequence
  Synthetic
cagaauugaaauccaag

SEQ ID NO: 753300 - RNA, 17 nt, Artificial Sequence
  Synthetic
aaaggcaugaauccaag

SEQ ID NO: 753301 - RNA, 17 nt, Artificial Sequence
  Synthetic
cauuucucugauccaag

SEQ ID NO: 753302 - RNA, 17 nt, Artificial Sequence
  Synthetic
cucauuagauauccaag

SEQ ID NO: 753303 - RNA, 17 nt, Artificial Sequence
  Synthetic
uuuguaagaacuccaag

SEQ ID NO: 753304 - RNA, 17 nt, Artificial Sequence
  Synthetic
aagaacagggcuccaag

SEQ ID NO: 753305 - RNA, 17 nt, Artificial Sequence
  Synthetic
caguucugaucuccaag

SEQ ID NO: 753306 - RNA, 17 nt, Artificial Sequence
  Synthetic
ucugcaggcucuccaag

SEQ ID NO: 753307 - RNA, 17 nt, Artificial Sequence
  Synthetic
augaaugcuucuccaag

SEQ ID NO: 753308 - RNA, 17 nt, Artificial Sequence
  Synthetic
agaguauguucuccaag

SEQ ID NO: 753309 - RNA, 17 nt, Artificial Sequence
  Synthetic
aucauuggaaguccaag

SEQ ID NO: 753310 - RNA, 17 nt, Artificial Sequence
  Synthetic
ugcugaauaauuccaag

SEQ ID NO: 753311 - RNA, 17 nt, Artificial Sequence
  Synthetic
cagagaaggauuccaag

SEQ ID NO: 753312 - RNA, 17 nt, Artificial Sequence
  Synthetic
caaaaugcuauuccaag

SEQ ID NO: 753313 - RNA, 17 nt, Artificial Sequence
  Synthetic
agagaauguauuccaag

SEQ ID NO: 753314 - RNA, 17 nt, Artificial Sequence
  Synthetic
aauuuagauguuccaag

SEQ ID NO: 753315 - RNA, 17 nt, Artificial Sequence
  Synthetic
caugauuuauuuccaag

SEQ ID NO: 753316 - RNA, 17 nt, Artificial Sequence
  Synthetic
cagaauaccuuuccaag

SEQ ID NO: 753317 - RNA, 17 nt, Artificial Sequence
  Synthetic
caacugaagaaagcaag

SEQ ID NO: 753318 - RNA, 17 nt, Artificial Sequence
  Synthetic
auuuuauauaaagcaag

SEQ ID NO: 753319 - RNA, 17 nt, Artificial Sequence
  Synthetic
aaacauaaagaagcaag

SEQ ID NO: 753320 - RNA, 17 nt, Artificial Sequence
  Synthetic
uauaagcaggaagcaag

SEQ ID NO: 753321 - RNA, 17 nt, Artificial Sequence
  Synthetic
cucaggaauuaagcaag

SEQ ID NO: 753322 - RNA, 17 nt, Artificial Sequence
  Synthetic
agaucucuuuaagcaag

SEQ ID NO: 753323 - RNA, 17 nt, Artificial Sequence
  Synthetic
agagugcagccagcaag

SEQ ID NO: 753324 - RNA, 17 nt, Artificial Sequence
  Synthetic
uuugaguacagagcaag

SEQ ID NO: 753325 - RNA, 17 nt, Artificial Sequence
  Synthetic
uuaagaaguagagcaag

SEQ ID NO: 753326 - RNA, 17 nt, Artificial Sequence
  Synthetic
aagaugucaggagcaag

SEQ ID NO: 753327 - RNA, 17 nt, Artificial Sequence
  Synthetic
agaacuuacggagcaag

SEQ ID NO: 753328 - RNA, 17 nt, Artificial Sequence
  Synthetic
aggcaguauugagcaag

SEQ ID NO: 753329 - RNA, 17 nt, Artificial Sequence
  Synthetic
aauuagauaauagcaag

SEQ ID NO: 753330 - RNA, 17 nt, Artificial Sequence
  Synthetic
acauagcugguagcaag

SEQ ID NO: 753331 - RNA, 17 nt, Artificial Sequence
  Synthetic
agacaggcauuagcaag

SEQ ID NO: 753332 - RNA, 17 nt, Artificial Sequence
  Synthetic
uagggucacuuagcaag

SEQ ID NO: 753333 - RNA, 17 nt, Artificial Sequence
  Synthetic
cggaggaauuuagcaag

SEQ ID NO: 753334 - RNA, 17 nt, Artificial Sequence
  Synthetic
ugguuagaaaaggcaag

SEQ ID NO: 753335 - RNA, 17 nt, Artificial Sequence
  Synthetic
ugaaauggaaaggcaag

SEQ ID NO: 753336 - RNA, 17 nt, Artificial Sequence
  Synthetic
ugggaggccaaggcaag

SEQ ID NO: 753337 - RNA, 17 nt, Artificial Sequence
  Synthetic
agagaaaaccaggcaag

SEQ ID NO: 753338 - RNA, 17 nt, Artificial Sequence
  Synthetic
ugggaagcugaggcaag

SEQ ID NO: 753339 - RNA, 17 nt, Artificial Sequence
  Synthetic
uacugaaaaagggcaag

SEQ ID NO: 753340 - RNA, 17 nt, Artificial Sequence
  Synthetic
uagaucugaagggcaag

SEQ ID NO: 753341 - RNA, 17 nt, Artificial Sequence
  Synthetic
aaggggugaggggcaag

SEQ ID NO: 753342 - RNA, 17 nt, Artificial Sequence
  Synthetic
caaaaucagugggcaag

SEQ ID NO: 753343 - RNA, 17 nt, Artificial Sequence
  Synthetic
uuuaaaccuugggcaag

SEQ ID NO: 753344 - RNA, 17 nt, Artificial Sequence
  Synthetic
acgugcaaaauggcaag

SEQ ID NO: 753345 - RNA, 17 nt, Artificial Sequence
  Synthetic
ucauugaaaauggcaag

SEQ ID NO: 753346 - RNA, 17 nt, Artificial Sequence
  Synthetic
ugaccuaaucuggcaag

SEQ ID NO: 753347 - RNA, 17 nt, Artificial Sequence
  Synthetic
ccaaugcuucuggcaag

SEQ ID NO: 753348 - RNA, 17 nt, Artificial Sequence
  Synthetic
uuguuaaaauuggcaag

SEQ ID NO: 753349 - RNA, 17 nt, Artificial Sequence
  Synthetic
cuguauaacuuggcaag

SEQ ID NO: 753350 - RNA, 17 nt, Artificial Sequence
  Synthetic
uguguuuucuuggcaag

SEQ ID NO: 753351 - RNA, 17 nt, Artificial Sequence
  Synthetic
ucuuuaacuuuggcaag

SEQ ID NO: 753352 - RNA, 17 nt, Artificial Sequence
  Synthetic
aaaaguguagaugcaag

SEQ ID NO: 753353 - RNA, 17 nt, Artificial Sequence
  Synthetic
aaggccauggaugcaag

SEQ ID NO: 753354 - RNA, 17 nt, Artificial Sequence
  Synthetic
ugauuguuguaugcaag

SEQ ID NO: 753355 - RNA, 17 nt, Artificial Sequence
  Synthetic
uuuagauucccugcaag

SEQ ID NO: 753356 - RNA, 17 nt, Artificial Sequence
  Synthetic
cacaucuaagcugcaag

SEQ ID NO: 753357 - RNA, 17 nt, Artificial Sequence
  Synthetic
ccagccugcucugcaag

SEQ ID NO: 753358 - RNA, 17 nt, Artificial Sequence
  Synthetic
uuagaggauggugcaag

SEQ ID NO: 753359 - RNA, 17 nt, Artificial Sequence
  Synthetic
cuccacacuggugcaag

SEQ ID NO: 753360 - RNA, 17 nt, Artificial Sequence
  Synthetic
ucaugaccuugugcaag

SEQ ID NO: 753361 - RNA, 17 nt, Artificial Sequence
  Synthetic
ugggaaccaauugcaag

SEQ ID NO: 753362 - RNA, 17 nt, Artificial Sequence
  Synthetic
aagauacuacuugcaag

SEQ ID NO: 753363 - RNA, 17 nt, Artificial Sequence
  Synthetic
uuggaaguaguugcaag

SEQ ID NO: 753364 - RNA, 17 nt, Artificial Sequence
  Synthetic
uccccaaaauuugcaag

SEQ ID NO: 753365 - RNA, 17 nt, Artificial Sequence
  Synthetic
cccauucauuuugcaag

SEQ ID NO: 753366 - RNA, 17 nt, Artificial Sequence
  Synthetic
cacagaaaaaaaucaag

SEQ ID NO: 753367 - RNA, 17 nt, Artificial Sequence
  Synthetic
aagagaucaaaaucaag

SEQ ID NO: 753368 - RNA, 17 nt, Artificial Sequence
  Synthetic
caagaccagcaaucaag

SEQ ID NO: 753369 - RNA, 17 nt, Artificial Sequence
  Synthetic
ugcaauagucaaucaag

SEQ ID NO: 753370 - RNA, 17 nt, Artificial Sequence
  Synthetic
ugauauggagaaucaag

SEQ ID NO: 753371 - RNA, 17 nt, Artificial Sequence
  Synthetic
ugugcauuugaaucaag

SEQ ID NO: 753372 - RNA, 17 nt, Artificial Sequence
  Synthetic
aagaagauaacaucaag

SEQ ID NO: 753373 - RNA, 17 nt, Artificial Sequence
  Synthetic
aaacuucccacaucaag

SEQ ID NO: 753374 - RNA, 17 nt, Artificial Sequence
  Synthetic
augugaaaaucaucaag

SEQ ID NO: 753375 - RNA, 17 nt, Artificial Sequence
  Synthetic
auacugcugucaucaag

SEQ ID NO: 753376 - RNA, 17 nt, Artificial Sequence
  Synthetic
aagguuauuucaucaag

SEQ ID NO: 753377 - RNA, 17 nt, Artificial Sequence
  Synthetic
cgaaguccaagaucaag

SEQ ID NO: 753378 - RNA, 17 nt, Artificial Sequence
  Synthetic
uauccaccaugaucaag

SEQ ID NO: 753379 - RNA, 17 nt, Artificial Sequence
  Synthetic
uugugggugugaucaag

SEQ ID NO: 753380 - RNA, 17 nt, Artificial Sequence
  Synthetic
caaauuuuucuaucaag

SEQ ID NO: 753381 - RNA, 17 nt, Artificial Sequence
  Synthetic
uauuuuauuguaucaag

SEQ ID NO: 753382 - RNA, 17 nt, Artificial Sequence
  Synthetic
aucuaaacauuaucaag

SEQ ID NO: 753383 - RNA, 17 nt, Artificial Sequence
  Synthetic
acuaauuccuuaucaag

SEQ ID NO: 753384 - RNA, 17 nt, Artificial Sequence
  Synthetic
aaaaaccugaacucaag

SEQ ID NO: 753385 - RNA, 17 nt, Artificial Sequence
  Synthetic
agucccagcuacucaag

SEQ ID NO: 753386 - RNA, 17 nt, Artificial Sequence
  Synthetic
ugauugcauuacucaag

SEQ ID NO: 753387 - RNA, 17 nt, Artificial Sequence
  Synthetic
ugaacucugaccucaag

SEQ ID NO: 753388 - RNA, 17 nt, Artificial Sequence
  Synthetic
ugaaccucauccucaag

SEQ ID NO: 753389 - RNA, 17 nt, Artificial Sequence
  Synthetic
accuaauguuccucaag

SEQ ID NO: 753390 - RNA, 17 nt, Artificial Sequence
  Synthetic
ugccuccccagcucaag

SEQ ID NO: 753391 - RNA, 17 nt, Artificial Sequence
  Synthetic
aacaugcucagcucaag

SEQ ID NO: 753392 - RNA, 17 nt, Artificial Sequence
  Synthetic
agaagguggagcucaag

SEQ ID NO: 753393 - RNA, 17 nt, Artificial Sequence
  Synthetic
cgacucccuggcucaag

SEQ ID NO: 753394 - RNA, 17 nt, Artificial Sequence
  Synthetic
ucuugaccacucucaag

SEQ ID NO: 753395 - RNA, 17 nt, Artificial Sequence
  Synthetic
uguuuaauauucucaag

SEQ ID NO: 753396 - RNA, 17 nt, Artificial Sequence
  Synthetic
cagacugccuucucaag

SEQ ID NO: 753397 - RNA, 17 nt, Artificial Sequence
  Synthetic
aagagagauuucucaag

SEQ ID NO: 753398 - RNA, 17 nt, Artificial Sequence
  Synthetic
ccaagcccaaagucaag

SEQ ID NO: 753399 - RNA, 17 nt, Artificial Sequence
  Synthetic
uguaaaggaaagucaag

SEQ ID NO: 753400 - RNA, 17 nt, Artificial Sequence
  Synthetic
uauaacuaacagucaag

SEQ ID NO: 753401 - RNA, 17 nt, Artificial Sequence
  Synthetic
cuugagggucagucaag

SEQ ID NO: 753402 - RNA, 17 nt, Artificial Sequence
  Synthetic
caacacguauagucaag

SEQ ID NO: 753403 - RNA, 17 nt, Artificial Sequence
  Synthetic
aaugacaaguagucaag

SEQ ID NO: 753404 - RNA, 17 nt, Artificial Sequence
  Synthetic
caaacgugaaggucaag

SEQ ID NO: 753405 - RNA, 17 nt, Artificial Sequence
  Synthetic
uugccuuagaggucaag

SEQ ID NO: 753406 - RNA, 17 nt, Artificial Sequence
  Synthetic
aagaaugccuggucaag

SEQ ID NO: 753407 - RNA, 17 nt, Artificial Sequence
  Synthetic
caccggggccugucaag

SEQ ID NO: 753408 - RNA, 17 nt, Artificial Sequence
  Synthetic
ccccagcuccugucaag

SEQ ID NO: 753409 - RNA, 17 nt, Artificial Sequence
  Synthetic
aaaagaagaaauucaag

SEQ ID NO: 753410 - RNA, 17 nt, Artificial Sequence
  Synthetic
agaucaugccauucaag

SEQ ID NO: 753411 - RNA, 17 nt, Artificial Sequence
  Synthetic
uuaauagaucauucaag

SEQ ID NO: 753412 - RNA, 17 nt, Artificial Sequence
  Synthetic
acuccccuucauucaag

SEQ ID NO: 753413 - RNA, 17 nt, Artificial Sequence
  Synthetic
cagagcucugauucaag

SEQ ID NO: 753414 - RNA, 17 nt, Artificial Sequence
  Synthetic
uugagacaauauucaag

SEQ ID NO: 753415 - RNA, 17 nt, Artificial Sequence
  Synthetic
agaauuguauauucaag

SEQ ID NO: 753416 - RNA, 17 nt, Artificial Sequence
  Synthetic
agaugaaaguauucaag

SEQ ID NO: 753417 - RNA, 17 nt, Artificial Sequence
  Synthetic
cuggaguuguauucaag

SEQ ID NO: 753418 - RNA, 17 nt, Artificial Sequence
  Synthetic
cuuaccuauuauucaag

SEQ ID NO: 753419 - RNA, 17 nt, Artificial Sequence
  Synthetic
uuucacaggccuucaag

SEQ ID NO: 753420 - RNA, 17 nt, Artificial Sequence
  Synthetic
uguggcaggucuucaag

SEQ ID NO: 753421 - RNA, 17 nt, Artificial Sequence
  Synthetic
auguauuugaguucaag

SEQ ID NO: 753422 - RNA, 17 nt, Artificial Sequence
  Synthetic
cgccucccagguucaag

SEQ ID NO: 753423 - RNA, 17 nt, Artificial Sequence
  Synthetic
aacuugaauauuucaag

SEQ ID NO: 753424 - RNA, 17 nt, Artificial Sequence
  Synthetic
uuaacauguguuucaag

SEQ ID NO: 753425 - RNA, 17 nt, Artificial Sequence
  Synthetic
cucaugauuguuucaag

SEQ ID NO: 753426 - RNA, 17 nt, Artificial Sequence
  Synthetic
uuuccagaauuuucaag

SEQ ID NO: 753427 - RNA, 17 nt, Artificial Sequence
  Synthetic
ccuagagaauuuucaag

SEQ ID NO: 753428 - RNA, 17 nt, Artificial Sequence
  Synthetic
acacugauauuuucaag

SEQ ID NO: 753429 - RNA, 17 nt, Artificial Sequence
  Synthetic
aacuuaaauuuuucaag

SEQ ID NO: 753430 - RNA, 17 nt, Artificial Sequence
  Synthetic
cuggaaaaaaaaagaag

SEQ ID NO: 753431 - RNA, 17 nt, Artificial Sequence
  Synthetic
aauguacacaaaagaag

SEQ ID NO: 753432 - RNA, 17 nt, Artificial Sequence
  Synthetic
acgauuuugaaaagaag

SEQ ID NO: 753433 - RNA, 17 nt, Artificial Sequence
  Synthetic
cucccuaauaaaagaag

SEQ ID NO: 753434 - RNA, 17 nt, Artificial Sequence
  Synthetic
cuuaucuuuaaaagaag

SEQ ID NO: 753435 - RNA, 17 nt, Artificial Sequence
  Synthetic
aaagacacacaaagaag

SEQ ID NO: 753436 - RNA, 17 nt, Artificial Sequence
  Synthetic
aauccugaccaaagaag

SEQ ID NO: 753437 - RNA, 17 nt, Artificial Sequence
  Synthetic
acuuuaaaagaaagaag

SEQ ID NO: 753438 - RNA, 17 nt, Artificial Sequence
  Synthetic
auaacaggagaaagaag

SEQ ID NO: 753439 - RNA, 17 nt, Artificial Sequence
  Synthetic
uguaagcuauaaagaag

SEQ ID NO: 753440 - RNA, 17 nt, Artificial Sequence
  Synthetic
uggcaaguuuaaagaag

SEQ ID NO: 753441 - RNA, 17 nt, Artificial Sequence
  Synthetic
cuucacaucacaagaag

SEQ ID NO: 753442 - RNA, 17 nt, Artificial Sequence
  Synthetic
aucugaaugacaagaag

SEQ ID NO: 753443 - RNA, 17 nt, Artificial Sequence
  Synthetic
uaacuuuuaccaagaag

SEQ ID NO: 753444 - RNA, 17 nt, Artificial Sequence
  Synthetic
ccaccagcagcaagaag

SEQ ID NO: 753445 - RNA, 17 nt, Artificial Sequence
  Synthetic
augucaucagcaagaag

SEQ ID NO: 753446 - RNA, 17 nt, Artificial Sequence
  Synthetic
uggagacuuucaagaag

SEQ ID NO: 753447 - RNA, 17 nt, Artificial Sequence
  Synthetic
aguggaagaagaagaag

SEQ ID NO: 753448 - RNA, 17 nt, Artificial Sequence
  Synthetic
acauagaguagaagaag

SEQ ID NO: 753449 - RNA, 17 nt, Artificial Sequence
  Synthetic
uguguugggugaagaag

SEQ ID NO: 753450 - RNA, 17 nt, Artificial Sequence
  Synthetic
cgagaugcuugaagaag

SEQ ID NO: 753451 - RNA, 17 nt, Artificial Sequence
  Synthetic
agaauuuagauaagaag

SEQ ID NO: 753452 - RNA, 17 nt, Artificial Sequence
  Synthetic
uggucuacucuaagaag

SEQ ID NO: 753453 - RNA, 17 nt, Artificial Sequence
  Synthetic
auuuuuaaaguaagaag

SEQ ID NO: 753454 - RNA, 17 nt, Artificial Sequence
  Synthetic
caguggauauuaagaag

SEQ ID NO: 753455 - RNA, 17 nt, Artificial Sequence
  Synthetic
cuguuugacuuaagaag

SEQ ID NO: 753456 - RNA, 17 nt, Artificial Sequence
  Synthetic
aggccugaguuaagaag

SEQ ID NO: 753457 - RNA, 17 nt, Artificial Sequence
  Synthetic
cuuuucucaaacagaag

SEQ ID NO: 753458 - RNA, 17 nt, Artificial Sequence
  Synthetic
cuggauagaaacagaag

SEQ ID NO: 753459 - RNA, 17 nt, Artificial Sequence
  Synthetic
uagaaguggaacagaag

SEQ ID NO: 753460 - RNA, 17 nt, Artificial Sequence
  Synthetic
aaaugaguuaacagaag

SEQ ID NO: 753461 - RNA, 17 nt, Artificial Sequence
  Synthetic
aaaauaauacacagaag

SEQ ID NO: 753462 - RNA, 17 nt, Artificial Sequence
  Synthetic
ugcucuguacacagaag

SEQ ID NO: 753463 - RNA, 17 nt, Artificial Sequence
  Synthetic
aauauuugccacagaag

SEQ ID NO: 753464 - RNA, 17 nt, Artificial Sequence
  Synthetic
caggcaaggcacagaag

SEQ ID NO: 753465 - RNA, 17 nt, Artificial Sequence
  Synthetic
agacuaggcuacagaag

SEQ ID NO: 753466 - RNA, 17 nt, Artificial Sequence
  Synthetic
agaaagagacccagaag

SEQ ID NO: 753467 - RNA, 17 nt, Artificial Sequence
  Synthetic
uaugcaauucccagaag

SEQ ID NO: 753468 - RNA, 17 nt, Artificial Sequence
  Synthetic
aaaugguaggccagaag

SEQ ID NO: 753469 - RNA, 17 nt, Artificial Sequence
  Synthetic
uacaaccaugccagaag

SEQ ID NO: 753470 - RNA, 17 nt, Artificial Sequence
  Synthetic
ugcaucgacuccagaag

SEQ ID NO: 753471 - RNA, 17 nt, Artificial Sequence
  Synthetic
uagauuguaagcagaag

SEQ ID NO: 753472 - RNA, 17 nt, Artificial Sequence
  Synthetic
ugugaagacagcagaag

SEQ ID NO: 753473 - RNA, 17 nt, Artificial Sequence
  Synthetic
accuuuaaacgcagaag

SEQ ID NO: 753474 - RNA, 17 nt, Artificial Sequence
  Synthetic
acuuugggaggcagaag

SEQ ID NO: 753475 - RNA, 17 nt, Artificial Sequence
  Synthetic
cugaaaaggggcagaag

SEQ ID NO: 753476 - RNA, 17 nt, Artificial Sequence
  Synthetic
auugaaaacugcagaag

SEQ ID NO: 753477 - RNA, 17 nt, Artificial Sequence
  Synthetic
aggccaagcugcagaag

SEQ ID NO: 753478 - RNA, 17 nt, Artificial Sequence
  Synthetic
aguuuggccaucagaag

SEQ ID NO: 753479 - RNA, 17 nt, Artificial Sequence
  Synthetic
cuuugaagacucagaag

SEQ ID NO: 753480 - RNA, 17 nt, Artificial Sequence
  Synthetic
ucacaugaggucagaag

SEQ ID NO: 753481 - RNA, 17 nt, Artificial Sequence
  Synthetic
auguguauggucagaag

SEQ ID NO: 753482 - RNA, 17 nt, Artificial Sequence
  Synthetic
ugcuuugcauucagaag

SEQ ID NO: 753483 - RNA, 17 nt, Artificial Sequence
  Synthetic
ucacuuuuauucagaag

SEQ ID NO: 753484 - RNA, 17 nt, Artificial Sequence
  Synthetic
aaacagaucuucagaag

SEQ ID NO: 753485 - RNA, 17 nt, Artificial Sequence
  Synthetic
uaggaaguuuucagaag

SEQ ID NO: 753486 - RNA, 17 nt, Artificial Sequence
  Synthetic
uagucauccaagagaag

SEQ ID NO: 753487 - RNA, 17 nt, Artificial Sequence
  Synthetic
uguaggugcaagagaag

SEQ ID NO: 753488 - RNA, 17 nt, Artificial Sequence
  Synthetic
uuauccauuaagagaag

SEQ ID NO: 753489 - RNA, 17 nt, Artificial Sequence
  Synthetic
aauagacaagagagaag

SEQ ID NO: 753490 - RNA, 17 nt, Artificial Sequence
  Synthetic
caagacagagagagaag

SEQ ID NO: 753491 - RNA, 17 nt, Artificial Sequence
  Synthetic
agagagagagagagaag

SEQ ID NO: 753492 - RNA, 17 nt, Artificial Sequence
  Synthetic
aggaggauggagagaag

SEQ ID NO: 753493 - RNA, 17 nt, Artificial Sequence
  Synthetic
uggcaacucuagagaag

SEQ ID NO: 753494 - RNA, 17 nt, Artificial Sequence
  Synthetic
aaaaaaauguagagaag

SEQ ID NO: 753495 - RNA, 17 nt, Artificial Sequence
  Synthetic
cugacgcuguagagaag

SEQ ID NO: 753496 - RNA, 17 nt, Artificial Sequence
  Synthetic
uuggagagcaggagaag

SEQ ID NO: 753497 - RNA, 17 nt, Artificial Sequence
  Synthetic
aaagugaggaggagaag

SEQ ID NO: 753498 - RNA, 17 nt, Artificial Sequence
  Synthetic
agaauuuggaggagaag

SEQ ID NO: 753499 - RNA, 17 nt, Artificial Sequence
  Synthetic
aucauuuggaggagaag

SEQ ID NO: 753500 - RNA, 17 nt, Artificial Sequence
  Synthetic
uauucaauuaggagaag

SEQ ID NO: 753501 - RNA, 17 nt, Artificial Sequence
  Synthetic
caagauuaagggagaag

SEQ ID NO: 753502 - RNA, 17 nt, Artificial Sequence
  Synthetic
cugcuucaggggagaag

SEQ ID NO: 753503 - RNA, 17 nt, Artificial Sequence
  Synthetic
aaggcaguggggagaag

SEQ ID NO: 753504 - RNA, 17 nt, Artificial Sequence
  Synthetic
ucuuaaauugggagaag

SEQ ID NO: 753505 - RNA, 17 nt, Artificial Sequence
  Synthetic
uacccacaauggagaag

SEQ ID NO: 753506 - RNA, 17 nt, Artificial Sequence
  Synthetic
auauuauucuggagaag

SEQ ID NO: 753507 - RNA, 17 nt, Artificial Sequence
  Synthetic
agaaccagaaugagaag

SEQ ID NO: 753508 - RNA, 17 nt, Artificial Sequence
  Synthetic
aguucguagaugagaag

SEQ ID NO: 753509 - RNA, 17 nt, Artificial Sequence
  Synthetic
uggaauuagaugagaag

SEQ ID NO: 753510 - RNA, 17 nt, Artificial Sequence
  Synthetic
ucuuaaaggaugagaag

SEQ ID NO: 753511 - RNA, 17 nt, Artificial Sequence
  Synthetic
agcggagcuaugagaag

SEQ ID NO: 753512 - RNA, 17 nt, Artificial Sequence
  Synthetic
uaguagaaucugagaag

SEQ ID NO: 753513 - RNA, 17 nt, Artificial Sequence
  Synthetic
aguagagcugugagaag

SEQ ID NO: 753514 - RNA, 17 nt, Artificial Sequence
  Synthetic
aguggagcugugagaag

SEQ ID NO: 753515 - RNA, 17 nt, Artificial Sequence
  Synthetic
cacauuccauugagaag

SEQ ID NO: 753516 - RNA, 17 nt, Artificial Sequence
  Synthetic
auuaauaacuugagaag

SEQ ID NO: 753517 - RNA, 17 nt, Artificial Sequence
  Synthetic
auugaggccuugagaag

SEQ ID NO: 753518 - RNA, 17 nt, Artificial Sequence
  Synthetic
uuaaggaauuugagaag

SEQ ID NO: 753519 - RNA, 17 nt, Artificial Sequence
  Synthetic
aaucagauuuugagaag

SEQ ID NO: 753520 - RNA, 17 nt, Artificial Sequence
  Synthetic
auugugacaaauagaag

SEQ ID NO: 753521 - RNA, 17 nt, Artificial Sequence
  Synthetic
acaauacugaauagaag

SEQ ID NO: 753522 - RNA, 17 nt, Artificial Sequence
  Synthetic
cuagggacuaauagaag

SEQ ID NO: 753523 - RNA, 17 nt, Artificial Sequence
  Synthetic
uuaccucuuaauagaag

SEQ ID NO: 753524 - RNA, 17 nt, Artificial Sequence
  Synthetic
aagcuggcacauagaag

SEQ ID NO: 753525 - RNA, 17 nt, Artificial Sequence
  Synthetic
auacagggccauagaag

SEQ ID NO: 753526 - RNA, 17 nt, Artificial Sequence
  Synthetic
acuacuuuucauagaag

SEQ ID NO: 753527 - RNA, 17 nt, Artificial Sequence
  Synthetic
aaaaauaucuauagaag

SEQ ID NO: 753528 - RNA, 17 nt, Artificial Sequence
  Synthetic
auguuaggcacuagaag

SEQ ID NO: 753529 - RNA, 17 nt, Artificial Sequence
  Synthetic
agaguuuggacuagaag

SEQ ID NO: 753530 - RNA, 17 nt, Artificial Sequence
  Synthetic
uuggggacuacuagaag

SEQ ID NO: 753531 - RNA, 17 nt, Artificial Sequence
  Synthetic
augagaacaccuagaag

SEQ ID NO: 753532 - RNA, 17 nt, Artificial Sequence
  Synthetic
cagaagucugcuagaag

SEQ ID NO: 753533 - RNA, 17 nt, Artificial Sequence
  Synthetic
uaucugaguaguagaag

SEQ ID NO: 753534 - RNA, 17 nt, Artificial Sequence
  Synthetic
ugcuaugaggguagaag

SEQ ID NO: 753535 - RNA, 17 nt, Artificial Sequence
  Synthetic
agugacaaaauuagaag

SEQ ID NO: 753536 - RNA, 17 nt, Artificial Sequence
  Synthetic
ucuuccucaauuagaag

SEQ ID NO: 753537 - RNA, 17 nt, Artificial Sequence
  Synthetic
uuguauaguauuagaag

SEQ ID NO: 753538 - RNA, 17 nt, Artificial Sequence
  Synthetic
aacaggacaguuagaag

SEQ ID NO: 753539 - RNA, 17 nt, Artificial Sequence
  Synthetic
uuccugaaguuuagaag

SEQ ID NO: 753540 - RNA, 17 nt, Artificial Sequence
  Synthetic
acucagauguuuagaag

SEQ ID NO: 753541 - RNA, 17 nt, Artificial Sequence
  Synthetic
auaaauaucuuacgaag

SEQ ID NO: 753542 - RNA, 17 nt, Artificial Sequence
  Synthetic
acaacaacaaaccgaag

SEQ ID NO: 753543 - RNA, 17 nt, Artificial Sequence
  Synthetic
aaaaaaaaaacccgaag

SEQ ID NO: 753544 - RNA, 17 nt, Artificial Sequence
  Synthetic
acuuugggaggccgaag

SEQ ID NO: 753545 - RNA, 17 nt, Artificial Sequence
  Synthetic
ucagccauucuccgaag

SEQ ID NO: 753546 - RNA, 17 nt, Artificial Sequence
  Synthetic
ccaggggcugggcgaag

SEQ ID NO: 753547 - RNA, 17 nt, Artificial Sequence
  Synthetic
aaaaaaaaaaaaggaag

SEQ ID NO: 753548 - RNA, 17 nt, Artificial Sequence
  Synthetic
auuaaaaaaaaaggaag

SEQ ID NO: 753549 - RNA, 17 nt, Artificial Sequence
  Synthetic
acauggagaaaaggaag

SEQ ID NO: 753550 - RNA, 17 nt, Artificial Sequence
  Synthetic
aauucaaccaaaggaag

SEQ ID NO: 753551 - RNA, 17 nt, Artificial Sequence
  Synthetic
ucucaaagacaaggaag

SEQ ID NO: 753552 - RNA, 17 nt, Artificial Sequence
  Synthetic
caugaaagccaaggaag

SEQ ID NO: 753553 - RNA, 17 nt, Artificial Sequence
  Synthetic
uugccaagccaaggaag

SEQ ID NO: 753554 - RNA, 17 nt, Artificial Sequence
  Synthetic
cauuagaagcaaggaag

SEQ ID NO: 753555 - RNA, 17 nt, Artificial Sequence
  Synthetic
cagaaaucucaaggaag

SEQ ID NO: 753556 - RNA, 17 nt, Artificial Sequence
  Synthetic
agccauaaauaaggaag

SEQ ID NO: 753557 - RNA, 17 nt, Artificial Sequence
  Synthetic
uauaagggguaaggaag

SEQ ID NO: 753558 - RNA, 17 nt, Artificial Sequence
  Synthetic
aacgcaguguaaggaag

SEQ ID NO: 753559 - RNA, 17 nt, Artificial Sequence
  Synthetic
uauaagguguaaggaag

SEQ ID NO: 753560 - RNA, 17 nt, Artificial Sequence
  Synthetic
ucuccagauuaaggaag

SEQ ID NO: 753561 - RNA, 17 nt, Artificial Sequence
  Synthetic
ucauauuguuaaggaag

SEQ ID NO: 753562 - RNA, 17 nt, Artificial Sequence
  Synthetic
cacauggacacaggaag

SEQ ID NO: 753563 - RNA, 17 nt, Artificial Sequence
  Synthetic
uagaaaggcacaggaag

SEQ ID NO: 753564 - RNA, 17 nt, Artificial Sequence
  Synthetic
cacauggucacaggaag

SEQ ID NO: 753565 - RNA, 17 nt, Artificial Sequence
  Synthetic
uuuuuaaagacaggaag

SEQ ID NO: 753566 - RNA, 17 nt, Artificial Sequence
  Synthetic
cacaugaauacaggaag

SEQ ID NO: 753567 - RNA, 17 nt, Artificial Sequence
  Synthetic
aucugcaaaccaggaag

SEQ ID NO: 753568 - RNA, 17 nt, Artificial Sequence
  Synthetic
uggagaucaccaggaag

SEQ ID NO: 753569 - RNA, 17 nt, Artificial Sequence
  Synthetic
cacuugaccccaggaag

SEQ ID NO: 753570 - RNA, 17 nt, Artificial Sequence
  Synthetic
ugaaagcagccaggaag

SEQ ID NO: 753571 - RNA, 17 nt, Artificial Sequence
  Synthetic
caccuggacgcaggaag

SEQ ID NO: 753572 - RNA, 17 nt, Artificial Sequence
  Synthetic
ugcuaacacucaggaag

SEQ ID NO: 753573 - RNA, 17 nt, Artificial Sequence
  Synthetic
uuuaauauaagaggaag

SEQ ID NO: 753574 - RNA, 17 nt, Artificial Sequence
  Synthetic
ucuagucucagaggaag

SEQ ID NO: 753575 - RNA, 17 nt, Artificial Sequence
  Synthetic
aucaaguggagaggaag

SEQ ID NO: 753576 - RNA, 17 nt, Artificial Sequence
  Synthetic
agaauuuugagaggaag

SEQ ID NO: 753577 - RNA, 17 nt, Artificial Sequence
  Synthetic
agucuacauagaggaag

SEQ ID NO: 753578 - RNA, 17 nt, Artificial Sequence
  Synthetic
auccgauugggaggaag

SEQ ID NO: 753579 - RNA, 17 nt, Artificial Sequence
  Synthetic
cugugaaaaugaggaag

SEQ ID NO: 753580 - RNA, 17 nt, Artificial Sequence
  Synthetic
uguguguaaugaggaag

SEQ ID NO: 753581 - RNA, 17 nt, Artificial Sequence
  Synthetic
agguacaacugaggaag

SEQ ID NO: 753582 - RNA, 17 nt, Artificial Sequence
  Synthetic
acagaagugauaggaag

SEQ ID NO: 753583 - RNA, 17 nt, Artificial Sequence
  Synthetic
cuguugagccuaggaag

SEQ ID NO: 753584 - RNA, 17 nt, Artificial Sequence
  Synthetic
cugccuauaguaggaag

SEQ ID NO: 753585 - RNA, 17 nt, Artificial Sequence
  Synthetic
aagacucagguaggaag

SEQ ID NO: 753586 - RNA, 17 nt, Artificial Sequence
  Synthetic
cugcaagguguaggaag

SEQ ID NO: 753587 - RNA, 17 nt, Artificial Sequence
  Synthetic
auaagguaauuaggaag

SEQ ID NO: 753588 - RNA, 17 nt, Artificial Sequence
  Synthetic
ccucagaguuacggaag

SEQ ID NO: 753589 - RNA, 17 nt, Artificial Sequence
  Synthetic
ccaaaggccuccggaag

SEQ ID NO: 753590 - RNA, 17 nt, Artificial Sequence
  Synthetic
cauggaaacagcggaag

SEQ ID NO: 753591 - RNA, 17 nt, Artificial Sequence
  Synthetic
aggggagggaagggaag

SEQ ID NO: 753592 - RNA, 17 nt, Artificial Sequence
  Synthetic
aucuaugggaagggaag

SEQ ID NO: 753593 - RNA, 17 nt, Artificial Sequence
  Synthetic
ucuaugaauaagggaag

SEQ ID NO: 753594 - RNA, 17 nt, Artificial Sequence
  Synthetic
aacuaggguaagggaag

SEQ ID NO: 753595 - RNA, 17 nt, Artificial Sequence
  Synthetic
uuuuuccuacagggaag

SEQ ID NO: 753596 - RNA, 17 nt, Artificial Sequence
  Synthetic
auuagcugccagggaag

SEQ ID NO: 753597 - RNA, 17 nt, Artificial Sequence
  Synthetic
augagugaggagggaag

SEQ ID NO: 753598 - RNA, 17 nt, Artificial Sequence
  Synthetic
auguuuugggagggaag

SEQ ID NO: 753599 - RNA, 17 nt, Artificial Sequence
  Synthetic
ucaacagauacgggaag

SEQ ID NO: 753600 - RNA, 17 nt, Artificial Sequence
  Synthetic
cugaaguaaccgggaag

SEQ ID NO: 753601 - RNA, 17 nt, Artificial Sequence
  Synthetic
uggagaggaaggggaag

SEQ ID NO: 753602 - RNA, 17 nt, Artificial Sequence
  Synthetic
uuccuuaauaggggaag

SEQ ID NO: 753603 - RNA, 17 nt, Artificial Sequence
  Synthetic
agagcaccacggggaag

SEQ ID NO: 753604 - RNA, 17 nt, Artificial Sequence
  Synthetic
aggggagaagggggaag

SEQ ID NO: 753605 - RNA, 17 nt, Artificial Sequence
  Synthetic
ugugggguggggggaag

SEQ ID NO: 753606 - RNA, 17 nt, Artificial Sequence
  Synthetic
cugugaggugggggaag

SEQ ID NO: 753607 - RNA, 17 nt, Artificial Sequence
  Synthetic
uuguggggugggggaag

SEQ ID NO: 753608 - RNA, 17 nt, Artificial Sequence
  Synthetic
uaaacccuauggggaag

SEQ ID NO: 753609 - RNA, 17 nt, Artificial Sequence
  Synthetic
agaaagguauggggaag

SEQ ID NO: 753610 - RNA, 17 nt, Artificial Sequence
  Synthetic
aagcagugcuggggaag

SEQ ID NO: 753611 - RNA, 17 nt, Artificial Sequence
  Synthetic
caggaacucuggggaag

SEQ ID NO: 753612 - RNA, 17 nt, Artificial Sequence
  Synthetic
ugcaaauuuuggggaag

SEQ ID NO: 753613 - RNA, 17 nt, Artificial Sequence
  Synthetic
aagggagagaugggaag

SEQ ID NO: 753614 - RNA, 17 nt, Artificial Sequence
  Synthetic
agcaaggcagugggaag

SEQ ID NO: 753615 - RNA, 17 nt, Artificial Sequence
  Synthetic
uggcucucagugggaag

SEQ ID NO: 753616 - RNA, 17 nt, Artificial Sequence
  Synthetic
auuuaaucaaauggaag

SEQ ID NO: 753617 - RNA, 17 nt, Artificial Sequence
  Synthetic
aaaggaggaaauggaag

SEQ ID NO: 753618 - RNA, 17 nt, Artificial Sequence
  Synthetic
ugagauggcaauggaag

SEQ ID NO: 753619 - RNA, 17 nt, Artificial Sequence
  Synthetic
caaacagauaauggaag

SEQ ID NO: 753620 - RNA, 17 nt, Artificial Sequence
  Synthetic
agccaaacacauggaag

SEQ ID NO: 753621 - RNA, 17 nt, Artificial Sequence
  Synthetic
cagggacagcauggaag

SEQ ID NO: 753622 - RNA, 17 nt, Artificial Sequence
  Synthetic
uaauugaaucauggaag

SEQ ID NO: 753623 - RNA, 17 nt, Artificial Sequence
  Synthetic
uuagaagaggauggaag

SEQ ID NO: 753624 - RNA, 17 nt, Artificial Sequence
  Synthetic
cauacuuauuauggaag

SEQ ID NO: 753625 - RNA, 17 nt, Artificial Sequence
  Synthetic
agagaagacacuggaag

SEQ ID NO: 753626 - RNA, 17 nt, Artificial Sequence
  Synthetic
agcuaucaagcuggaag

SEQ ID NO: 753627 - RNA, 17 nt, Artificial Sequence
  Synthetic
cuaccagaagcuggaag

SEQ ID NO: 753628 - RNA, 17 nt, Artificial Sequence
  Synthetic
caugcugaaucuggaag

SEQ ID NO: 753629 - RNA, 17 nt, Artificial Sequence
  Synthetic
uaaaguacaucuggaag

SEQ ID NO: 753630 - RNA, 17 nt, Artificial Sequence
  Synthetic
aguuacggaaguggaag

SEQ ID NO: 753631 - RNA, 17 nt, Artificial Sequence
  Synthetic
agauagguaaguggaag

SEQ ID NO: 753632 - RNA, 17 nt, Artificial Sequence
  Synthetic
uauuaauuaaguggaag

SEQ ID NO: 753633 - RNA, 17 nt, Artificial Sequence
  Synthetic
ucuuccuacaguggaag

SEQ ID NO: 753634 - RNA, 17 nt, Artificial Sequence
  Synthetic
cuuccacaacguggaag

SEQ ID NO: 753635 - RNA, 17 nt, Artificial Sequence
  Synthetic
uuccaacgagguggaag

SEQ ID NO: 753636 - RNA, 17 nt, Artificial Sequence
  Synthetic
agagagggagguggaag

SEQ ID NO: 753637 - RNA, 17 nt, Artificial Sequence
  Synthetic
ugcaauucugguggaag

SEQ ID NO: 753638 - RNA, 17 nt, Artificial Sequence
  Synthetic
cauauacauuguggaag

SEQ ID NO: 753639 - RNA, 17 nt, Artificial Sequence
  Synthetic
ugaaaacucauuggaag

SEQ ID NO: 753640 - RNA, 17 nt, Artificial Sequence
  Synthetic
uggaguuguauuggaag

SEQ ID NO: 753641 - RNA, 17 nt, Artificial Sequence
  Synthetic
uucaaagagguuggaag

SEQ ID NO: 753642 - RNA, 17 nt, Artificial Sequence
  Synthetic
caacagcauguuggaag

SEQ ID NO: 753643 - RNA, 17 nt, Artificial Sequence
  Synthetic
cugaacguguuuggaag

SEQ ID NO: 753644 - RNA, 17 nt, Artificial Sequence
  Synthetic
agaaagaaaaaaugaag

SEQ ID NO: 753645 - RNA, 17 nt, Artificial Sequence
  Synthetic
aauuagccaaaaugaag

SEQ ID NO: 753646 - RNA, 17 nt, Artificial Sequence
  Synthetic
cauggcagaaaaugaag

SEQ ID NO: 753647 - RNA, 17 nt, Artificial Sequence
  Synthetic
ugcaguaugaaaugaag

SEQ ID NO: 753648 - RNA, 17 nt, Artificial Sequence
  Synthetic
aaaaaccuugaaugaag

SEQ ID NO: 753649 - RNA, 17 nt, Artificial Sequence
  Synthetic
uaaauagaauaaugaag

SEQ ID NO: 753650 - RNA, 17 nt, Artificial Sequence
  Synthetic
cugacaacauaaugaag

SEQ ID NO: 753651 - RNA, 17 nt, Artificial Sequence
  Synthetic
caugugugguaaugaag

SEQ ID NO: 753652 - RNA, 17 nt, Artificial Sequence
  Synthetic
ucaacaaguuaaugaag

SEQ ID NO: 753653 - RNA, 17 nt, Artificial Sequence
  Synthetic
auauaguccacaugaag

SEQ ID NO: 753654 - RNA, 17 nt, Artificial Sequence
  Synthetic
cuggagaagacaugaag

SEQ ID NO: 753655 - RNA, 17 nt, Artificial Sequence
  Synthetic
uaccucaauccaugaag

SEQ ID NO: 753656 - RNA, 17 nt, Artificial Sequence
  Synthetic
ugcguaaaaucaugaag

SEQ ID NO: 753657 - RNA, 17 nt, Artificial Sequence
  Synthetic
acacuuguaagaugaag

SEQ ID NO: 753658 - RNA, 17 nt, Artificial Sequence
  Synthetic
auuucagacagaugaag

SEQ ID NO: 753659 - RNA, 17 nt, Artificial Sequence
  Synthetic
aucuacaaaggaugaag

SEQ ID NO: 753660 - RNA, 17 nt, Artificial Sequence
  Synthetic
uauaauagaggaugaag

SEQ ID NO: 753661 - RNA, 17 nt, Artificial Sequence
  Synthetic
uguuuuggaggaugaag

SEQ ID NO: 753662 - RNA, 17 nt, Artificial Sequence
  Synthetic
aaugauccuggaugaag

SEQ ID NO: 753663 - RNA, 17 nt, Artificial Sequence
  Synthetic
uacaaagaaauaugaag

SEQ ID NO: 753664 - RNA, 17 nt, Artificial Sequence
  Synthetic
aaaagaugaauaugaag

SEQ ID NO: 753665 - RNA, 17 nt, Artificial Sequence
  Synthetic
agauuugacauaugaag

SEQ ID NO: 753666 - RNA, 17 nt, Artificial Sequence
  Synthetic
uaugacuuucuaugaag

SEQ ID NO: 753667 - RNA, 17 nt, Artificial Sequence
  Synthetic
cuauacaaguuaugaag

SEQ ID NO: 753668 - RNA, 17 nt, Artificial Sequence
  Synthetic
ucuaucaacaacugaag

SEQ ID NO: 753669 - RNA, 17 nt, Artificial Sequence
  Synthetic
cugaguaagaacugaag

SEQ ID NO: 753670 - RNA, 17 nt, Artificial Sequence
  Synthetic
ugauauuaacacugaag

SEQ ID NO: 753671 - RNA, 17 nt, Artificial Sequence
  Synthetic
cuuuuucuucacugaag

SEQ ID NO: 753672 - RNA, 17 nt, Artificial Sequence
  Synthetic
uuguagagugacugaag

SEQ ID NO: 753673 - RNA, 17 nt, Artificial Sequence
  Synthetic
auaugagaauacugaag

SEQ ID NO: 753674 - RNA, 17 nt, Artificial Sequence
  Synthetic
uacaugugcuacugaag

SEQ ID NO: 753675 - RNA, 17 nt, Artificial Sequence
  Synthetic
cucacaacaaccugaag

SEQ ID NO: 753676 - RNA, 17 nt, Artificial Sequence
  Synthetic
caagaacuaagcugaag

SEQ ID NO: 753677 - RNA, 17 nt, Artificial Sequence
  Synthetic
ucacauuugagcugaag

SEQ ID NO: 753678 - RNA, 17 nt, Artificial Sequence
  Synthetic
aagagucuuagcugaag

SEQ ID NO: 753679 - RNA, 17 nt, Artificial Sequence
  Synthetic
ugggaggcaggcugaag

SEQ ID NO: 753680 - RNA, 17 nt, Artificial Sequence
  Synthetic
uuaaguagaggcugaag

SEQ ID NO: 753681 - RNA, 17 nt, Artificial Sequence
  Synthetic
acuuugggaggcugaag

SEQ ID NO: 753682 - RNA, 17 nt, Artificial Sequence
  Synthetic
agcacagcagucugaag

SEQ ID NO: 753683 - RNA, 17 nt, Artificial Sequence
  Synthetic
uugggaauggucugaag

SEQ ID NO: 753684 - RNA, 17 nt, Artificial Sequence
  Synthetic
auucaacaguucugaag

SEQ ID NO: 753685 - RNA, 17 nt, Artificial Sequence
  Synthetic
uagccaugaaagugaag

SEQ ID NO: 753686 - RNA, 17 nt, Artificial Sequence
  Synthetic
ugcuuagcuaagugaag

SEQ ID NO: 753687 - RNA, 17 nt, Artificial Sequence
  Synthetic
uagaaauuacagugaag

SEQ ID NO: 753688 - RNA, 17 nt, Artificial Sequence
  Synthetic
cuagcugcccagugaag

SEQ ID NO: 753689 - RNA, 17 nt, Artificial Sequence
  Synthetic
cuugcauagcagugaag

SEQ ID NO: 753690 - RNA, 17 nt, Artificial Sequence
  Synthetic
caguuuuaggagugaag

SEQ ID NO: 753691 - RNA, 17 nt, Artificial Sequence
  Synthetic
ccuaggcuggagugaag

SEQ ID NO: 753692 - RNA, 17 nt, Artificial Sequence
  Synthetic
cccagaguugagugaag

SEQ ID NO: 753693 - RNA, 17 nt, Artificial Sequence
  Synthetic
cagaaaaacuagugaag

SEQ ID NO: 753694 - RNA, 17 nt, Artificial Sequence
  Synthetic
agaauauucuagugaag

SEQ ID NO: 753695 - RNA, 17 nt, Artificial Sequence
  Synthetic
aaauucuguuagugaag

SEQ ID NO: 753696 - RNA, 17 nt, Artificial Sequence
  Synthetic
cauggcagaaggugaag

SEQ ID NO: 753697 - RNA, 17 nt, Artificial Sequence
  Synthetic
caugguggaaggugaag

SEQ ID NO: 753698 - RNA, 17 nt, Artificial Sequence
  Synthetic
aaauucagaaugugaag

SEQ ID NO: 753699 - RNA, 17 nt, Artificial Sequence
  Synthetic
auuuaacuacugugaag

SEQ ID NO: 753700 - RNA, 17 nt, Artificial Sequence
  Synthetic
aaaguacaccugugaag

SEQ ID NO: 753701 - RNA, 17 nt, Artificial Sequence
  Synthetic
ccugccacccugugaag

SEQ ID NO: 753702 - RNA, 17 nt, Artificial Sequence
  Synthetic
uuugucccagugugaag

SEQ ID NO: 753703 - RNA, 17 nt, Artificial Sequence
  Synthetic
uguuaacuuuugugaag

SEQ ID NO: 753704 - RNA, 17 nt, Artificial Sequence
  Synthetic
uaaauuuggcauugaag

SEQ ID NO: 753705 - RNA, 17 nt, Artificial Sequence
  Synthetic
uuuauuuuuuauugaag

SEQ ID NO: 753706 - RNA, 17 nt, Artificial Sequence
  Synthetic
uaaaugugaccuugaag

SEQ ID NO: 753707 - RNA, 17 nt, Artificial Sequence
  Synthetic
uguaguucuccuugaag

SEQ ID NO: 753708 - RNA, 17 nt, Artificial Sequence
  Synthetic
ugaauacauucuugaag

SEQ ID NO: 753709 - RNA, 17 nt, Artificial Sequence
  Synthetic
uguuuucuuucuugaag

SEQ ID NO: 753710 - RNA, 17 nt, Artificial Sequence
  Synthetic
ucaaguaaaaguugaag

SEQ ID NO: 753711 - RNA, 17 nt, Artificial Sequence
  Synthetic
uugagacccaguugaag

SEQ ID NO: 753712 - RNA, 17 nt, Artificial Sequence
  Synthetic
augauagucaguugaag

SEQ ID NO: 753713 - RNA, 17 nt, Artificial Sequence
  Synthetic
uuuguaugggguugaag

SEQ ID NO: 753714 - RNA, 17 nt, Artificial Sequence
  Synthetic
ugccuccuggguugaag

SEQ ID NO: 753715 - RNA, 17 nt, Artificial Sequence
  Synthetic
cguggcagugguugaag

SEQ ID NO: 753716 - RNA, 17 nt, Artificial Sequence
  Synthetic
agcaccauugguugaag

SEQ ID NO: 753717 - RNA, 17 nt, Artificial Sequence
  Synthetic
uauuuaucaauuugaag

SEQ ID NO: 753718 - RNA, 17 nt, Artificial Sequence
  Synthetic
agagucuuucuuugaag

SEQ ID NO: 753719 - RNA, 17 nt, Artificial Sequence
  Synthetic
cagguacggguuugaag

SEQ ID NO: 753720 - RNA, 17 nt, Artificial Sequence
  Synthetic
aaaaaagguguuugaag

SEQ ID NO: 753721 - RNA, 17 nt, Artificial Sequence
  Synthetic
auucaacaguuuugaag

SEQ ID NO: 753722 - RNA, 17 nt, Artificial Sequence
  Synthetic
cauugacuuuuuugaag

SEQ ID NO: 753723 - RNA, 17 nt, Artificial Sequence
  Synthetic
uugggaaaaaaaauaag

SEQ ID NO: 753724 - RNA, 17 nt, Artificial Sequence
  Synthetic
uaguuaauaaaaauaag

SEQ ID NO: 753725 - RNA, 17 nt, Artificial Sequence
  Synthetic
agauaaacagaaauaag

SEQ ID NO: 753726 - RNA, 17 nt, Artificial Sequence
  Synthetic
cuuaagagggaaauaag

SEQ ID NO: 753727 - RNA, 17 nt, Artificial Sequence
  Synthetic
uucuaaguggaaauaag

SEQ ID NO: 753728 - RNA, 17 nt, Artificial Sequence
  Synthetic
aacuuuugugaaauaag

SEQ ID NO: 753729 - RNA, 17 nt, Artificial Sequence
  Synthetic
aaugucaacuaaauaag

SEQ ID NO: 753730 - RNA, 17 nt, Artificial Sequence
  Synthetic
aaaacaaccuaaauaag

SEQ ID NO: 753731 - RNA, 17 nt, Artificial Sequence
  Synthetic
aucauaagcuaaauaag

SEQ ID NO: 753732 - RNA, 17 nt, Artificial Sequence
  Synthetic
aguaagugcuaaauaag

SEQ ID NO: 753733 - RNA, 17 nt, Artificial Sequence
  Synthetic
cugggugaguaaauaag

SEQ ID NO: 753734 - RNA, 17 nt, Artificial Sequence
  Synthetic
aaaaagaauuaaauaag

SEQ ID NO: 753735 - RNA, 17 nt, Artificial Sequence
  Synthetic
uaagagauuuaaauaag

SEQ ID NO: 753736 - RNA, 17 nt, Artificial Sequence
  Synthetic
uuagcuaggacaauaag

SEQ ID NO: 753737 - RNA, 17 nt, Artificial Sequence
  Synthetic
aaaauuuggagaauaag

SEQ ID NO: 753738 - RNA, 17 nt, Artificial Sequence
  Synthetic
aauaauauuggaauaag

SEQ ID NO: 753739 - RNA, 17 nt, Artificial Sequence
  Synthetic
auggguagaugaauaag

SEQ ID NO: 753740 - RNA, 17 nt, Artificial Sequence
  Synthetic
ugaggaaacugaauaag

SEQ ID NO: 753741 - RNA, 17 nt, Artificial Sequence
  Synthetic
uggcuguggugaauaag

SEQ ID NO: 753742 - RNA, 17 nt, Artificial Sequence
  Synthetic
ugaaguagaauaauaag

SEQ ID NO: 753743 - RNA, 17 nt, Artificial Sequence
  Synthetic
ugagagcauauaauaag

SEQ ID NO: 753744 - RNA, 17 nt, Artificial Sequence
  Synthetic
uagugcuuccuaauaag

SEQ ID NO: 753745 - RNA, 17 nt, Artificial Sequence
  Synthetic
uuaaagccccacauaag

SEQ ID NO: 753746 - RNA, 17 nt, Artificial Sequence
  Synthetic
uuuggaagccacauaag

SEQ ID NO: 753747 - RNA, 17 nt, Artificial Sequence
  Synthetic
uaaugacuucacauaag

SEQ ID NO: 753748 - RNA, 17 nt, Artificial Sequence
  Synthetic
uuuuccuuagacauaag

SEQ ID NO: 753749 - RNA, 17 nt, Artificial Sequence
  Synthetic
aaaaaaugcuacauaag

SEQ ID NO: 753750 - RNA, 17 nt, Artificial Sequence
  Synthetic
auaugauauaccauaag

SEQ ID NO: 753751 - RNA, 17 nt, Artificial Sequence
  Synthetic
auauucucacccauaag

SEQ ID NO: 753752 - RNA, 17 nt, Artificial Sequence
  Synthetic
acuuccacauccauaag

SEQ ID NO: 753753 - RNA, 17 nt, Artificial Sequence
  Synthetic
acugaccaaagcauaag

SEQ ID NO: 753754 - RNA, 17 nt, Artificial Sequence
  Synthetic
auuagcauaagcauaag

SEQ ID NO: 753755 - RNA, 17 nt, Artificial Sequence
  Synthetic
agcuaugugagcauaag

SEQ ID NO: 753756 - RNA, 17 nt, Artificial Sequence
  Synthetic
augguuaaaugcauaag

SEQ ID NO: 753757 - RNA, 17 nt, Artificial Sequence
  Synthetic
cccuacucuugcauaag

SEQ ID NO: 753758 - RNA, 17 nt, Artificial Sequence
  Synthetic
uuaaauucuugcauaag

SEQ ID NO: 753759 - RNA, 17 nt, Artificial Sequence
  Synthetic
auaaauaaacucauaag

SEQ ID NO: 753760 - RNA, 17 nt, Artificial Sequence
  Synthetic
auggucucacucauaag

SEQ ID NO: 753761 - RNA, 17 nt, Artificial Sequence
  Synthetic
auguucucacucauaag

SEQ ID NO: 753762 - RNA, 17 nt, Artificial Sequence
  Synthetic
uauccccuacagauaag

SEQ ID NO: 753763 - RNA, 17 nt, Artificial Sequence
  Synthetic
aaaaaaggucagauaag

SEQ ID NO: 753764 - RNA, 17 nt, Artificial Sequence
  Synthetic
aauagauaagagauaag

SEQ ID NO: 753765 - RNA, 17 nt, Artificial Sequence
  Synthetic
aagaaaauagagauaag

SEQ ID NO: 753766 - RNA, 17 nt, Artificial Sequence
  Synthetic
ucacaggaugagauaag

SEQ ID NO: 753767 - RNA, 17 nt, Artificial Sequence
  Synthetic
cgaaaaaacucgauaag

SEQ ID NO: 753768 - RNA, 17 nt, Artificial Sequence
  Synthetic
aagauuuuaaggauaag

SEQ ID NO: 753769 - RNA, 17 nt, Artificial Sequence
  Synthetic
uuguacuucaggauaag

SEQ ID NO: 753770 - RNA, 17 nt, Artificial Sequence
  Synthetic
uacacaggauggauaag

SEQ ID NO: 753771 - RNA, 17 nt, Artificial Sequence
  Synthetic
uggaugaauuggauaag

SEQ ID NO: 753772 - RNA, 17 nt, Artificial Sequence
  Synthetic
auauccauuaugauaag

SEQ ID NO: 753773 - RNA, 17 nt, Artificial Sequence
  Synthetic
uuuucucaucugauaag

SEQ ID NO: 753774 - RNA, 17 nt, Artificial Sequence
  Synthetic
uaaucaaguuugauaag

SEQ ID NO: 753775 - RNA, 17 nt, Artificial Sequence
  Synthetic
uuuucauuuuugauaag

SEQ ID NO: 753776 - RNA, 17 nt, Artificial Sequence
  Synthetic
auaaaauagaauauaag

SEQ ID NO: 753777 - RNA, 17 nt, Artificial Sequence
  Synthetic
aaaucucauaauauaag

SEQ ID NO: 753778 - RNA, 17 nt, Artificial Sequence
  Synthetic
uuauuuuuuaauauaag

SEQ ID NO: 753779 - RNA, 17 nt, Artificial Sequence
  Synthetic
uuggacguacauauaag

SEQ ID NO: 753780 - RNA, 17 nt, Artificial Sequence
  Synthetic
uaaauggaagauauaag

SEQ ID NO: 753781 - RNA, 17 nt, Artificial Sequence
  Synthetic
aaaagucuagauauaag

SEQ ID NO: 753782 - RNA, 17 nt, Artificial Sequence
  Synthetic
aaugcacaauauauaag

SEQ ID NO: 753783 - RNA, 17 nt, Artificial Sequence
  Synthetic
ucuuauacauauauaag

SEQ ID NO: 753784 - RNA, 17 nt, Artificial Sequence
  Synthetic
auuuuuaauuauauaag

SEQ ID NO: 753785 - RNA, 17 nt, Artificial Sequence
  Synthetic
aacuucuaggcuauaag

SEQ ID NO: 753786 - RNA, 17 nt, Artificial Sequence
  Synthetic
agauugucaaguauaag

SEQ ID NO: 753787 - RNA, 17 nt, Artificial Sequence
  Synthetic
ccauuugagaguauaag

SEQ ID NO: 753788 - RNA, 17 nt, Artificial Sequence
  Synthetic
aagucuuggaguauaag

SEQ ID NO: 753789 - RNA, 17 nt, Artificial Sequence
  Synthetic
uccuaaguagguauaag

SEQ ID NO: 753790 - RNA, 17 nt, Artificial Sequence
  Synthetic
uggaguauugguauaag

SEQ ID NO: 753791 - RNA, 17 nt, Artificial Sequence
  Synthetic
auuuuugaguguauaag

SEQ ID NO: 753792 - RNA, 17 nt, Artificial Sequence
  Synthetic
caacaguguuguauaag

SEQ ID NO: 753793 - RNA, 17 nt, Artificial Sequence
  Synthetic
aauaugcacauuauaag

SEQ ID NO: 753794 - RNA, 17 nt, Artificial Sequence
  Synthetic
auauucucacuuauaag

SEQ ID NO: 753795 - RNA, 17 nt, Artificial Sequence
  Synthetic
auguucucacuuauaag

SEQ ID NO: 753796 - RNA, 17 nt, Artificial Sequence
  Synthetic
uuguucucacuuauaag

SEQ ID NO: 753797 - RNA, 17 nt, Artificial Sequence
  Synthetic
ucucacuuacuuauaag

SEQ ID NO: 753798 - RNA, 17 nt, Artificial Sequence
  Synthetic
auguucucauuuauaag

SEQ ID NO: 753799 - RNA, 17 nt, Artificial Sequence
  Synthetic
auucuaauguuuauaag

SEQ ID NO: 753800 - RNA, 17 nt, Artificial Sequence
  Synthetic
uugaaggguuuuauaag

SEQ ID NO: 753801 - RNA, 17 nt, Artificial Sequence
  Synthetic
uccaaugguuuuauaag

SEQ ID NO: 753802 - RNA, 17 nt, Artificial Sequence
  Synthetic
ucugaugguuuuauaag

SEQ ID NO: 753803 - RNA, 17 nt, Artificial Sequence
  Synthetic
uuugaugguuuuauaag

SEQ ID NO: 753804 - RNA, 17 nt, Artificial Sequence
  Synthetic
ucugauuguuuuauaag

SEQ ID NO: 753805 - RNA, 17 nt, Artificial Sequence
  Synthetic
aaucacuugaaacuaag

SEQ ID NO: 753806 - RNA, 17 nt, Artificial Sequence
  Synthetic
agguaauauaaacuaag

SEQ ID NO: 753807 - RNA, 17 nt, Artificial Sequence
  Synthetic
ugcuuuauucaacuaag

SEQ ID NO: 753808 - RNA, 17 nt, Artificial Sequence
  Synthetic
agauaacagacacuaag

SEQ ID NO: 753809 - RNA, 17 nt, Artificial Sequence
  Synthetic
acauaugguccacuaag

SEQ ID NO: 753810 - RNA, 17 nt, Artificial Sequence
  Synthetic
acuucccaaagacuaag

SEQ ID NO: 753811 - RNA, 17 nt, Artificial Sequence
  Synthetic
uccuuucaaugacuaag

SEQ ID NO: 753812 - RNA, 17 nt, Artificial Sequence
  Synthetic
aaauauuuacuacuaag

SEQ ID NO: 753813 - RNA, 17 nt, Artificial Sequence
  Synthetic
aacacccagcuacuaag

SEQ ID NO: 753814 - RNA, 17 nt, Artificial Sequence
  Synthetic
agcuccaaaguacuaag

SEQ ID NO: 753815 - RNA, 17 nt, Artificial Sequence
  Synthetic
aaugugcuaguacuaag

SEQ ID NO: 753816 - RNA, 17 nt, Artificial Sequence
  Synthetic
caaguaaugaaccuaag

SEQ ID NO: 753817 - RNA, 17 nt, Artificial Sequence
  Synthetic
ccaaccagggaccuaag

SEQ ID NO: 753818 - RNA, 17 nt, Artificial Sequence
  Synthetic
aagaagacauaccuaag

SEQ ID NO: 753819 - RNA, 17 nt, Artificial Sequence
  Synthetic
cugagcugguaccuaag

SEQ ID NO: 753820 - RNA, 17 nt, Artificial Sequence
  Synthetic
cucucagcaacccuaag

SEQ ID NO: 753821 - RNA, 17 nt, Artificial Sequence
  Synthetic
ucgaaaagaacccuaag

SEQ ID NO: 753822 - RNA, 17 nt, Artificial Sequence
  Synthetic
cuuuugucaccccuaag

SEQ ID NO: 753823 - RNA, 17 nt, Artificial Sequence
  Synthetic
uuuuaagucucccuaag

SEQ ID NO: 753824 - RNA, 17 nt, Artificial Sequence
  Synthetic
ucaauuuuuucccuaag

SEQ ID NO: 753825 - RNA, 17 nt, Artificial Sequence
  Synthetic
aaagaaauuauccuaag

SEQ ID NO: 753826 - RNA, 17 nt, Artificial Sequence
  Synthetic
accaccccaaagcuaag

SEQ ID NO: 753827 - RNA, 17 nt, Artificial Sequence
  Synthetic
uacaggcaggagcuaag

SEQ ID NO: 753828 - RNA, 17 nt, Artificial Sequence
  Synthetic
aacaaagcugagcuaag

SEQ ID NO: 753829 - RNA, 17 nt, Artificial Sequence
  Synthetic
uuacugaguuagcuaag

SEQ ID NO: 753830 - RNA, 17 nt, Artificial Sequence
  Synthetic
aggccugaaaggcuaag

SEQ ID NO: 753831 - RNA, 17 nt, Artificial Sequence
  Synthetic
auuuuuagggggcuaag

SEQ ID NO: 753832 - RNA, 17 nt, Artificial Sequence
  Synthetic
uacuggguauggcuaag

SEQ ID NO: 753833 - RNA, 17 nt, Artificial Sequence
  Synthetic
uuuuugagacaucuaag

SEQ ID NO: 753834 - RNA, 17 nt, Artificial Sequence
  Synthetic
acuuuggggacucuaag

SEQ ID NO: 753835 - RNA, 17 nt, Artificial Sequence
  Synthetic
ucaaauuggccucuaag

SEQ ID NO: 753836 - RNA, 17 nt, Artificial Sequence
  Synthetic
aacauacuggcucuaag

SEQ ID NO: 753837 - RNA, 17 nt, Artificial Sequence
  Synthetic
uucugaauuagucuaag

SEQ ID NO: 753838 - RNA, 17 nt, Artificial Sequence
  Synthetic
ugcuuugguauucuaag

SEQ ID NO: 753839 - RNA, 17 nt, Artificial Sequence
  Synthetic
aucuuccuuauucuaag

SEQ ID NO: 753840 - RNA, 17 nt, Artificial Sequence
  Synthetic
aggcuuguccuucuaag

SEQ ID NO: 753841 - RNA, 17 nt, Artificial Sequence
  Synthetic
uuuaauaugcuucuaag

SEQ ID NO: 753842 - RNA, 17 nt, Artificial Sequence
  Synthetic
ugagagacaguucuaag

SEQ ID NO: 753843 - RNA, 17 nt, Artificial Sequence
  Synthetic
aagguagacuuucuaag

SEQ ID NO: 753844 - RNA, 17 nt, Artificial Sequence
  Synthetic
caauauuauuuucuaag

SEQ ID NO: 753845 - RNA, 17 nt, Artificial Sequence
  Synthetic
aaucuguguuuucuaag

SEQ ID NO: 753846 - RNA, 17 nt, Artificial Sequence
  Synthetic
aaaaaacaaaaaguaag

SEQ ID NO: 753847 - RNA, 17 nt, Artificial Sequence
  Synthetic
auuacuuuaaaaguaag

SEQ ID NO: 753848 - RNA, 17 nt, Artificial Sequence
  Synthetic
auaacuuugaaaguaag

SEQ ID NO: 753849 - RNA, 17 nt, Artificial Sequence
  Synthetic
aguuuucagcaaguaag

SEQ ID NO: 753850 - RNA, 17 nt, Artificial Sequence
  Synthetic
aaagugaggcaaguaag

SEQ ID NO: 753851 - RNA, 17 nt, Artificial Sequence
  Synthetic
cccuaaccucaaguaag

SEQ ID NO: 753852 - RNA, 17 nt, Artificial Sequence
  Synthetic
acauaaugucaaguaag

SEQ ID NO: 753853 - RNA, 17 nt, Artificial Sequence
  Synthetic
accuuauuucaaguaag

SEQ ID NO: 753854 - RNA, 17 nt, Artificial Sequence
  Synthetic
agaagugaggaaguaag

SEQ ID NO: 753855 - RNA, 17 nt, Artificial Sequence
  Synthetic
uagaauuaggaaguaag

SEQ ID NO: 753856 - RNA, 17 nt, Artificial Sequence
  Synthetic
acagcuauugaaguaag

SEQ ID NO: 753857 - RNA, 17 nt, Artificial Sequence
  Synthetic
auucuaugcuaaguaag

SEQ ID NO: 753858 - RNA, 17 nt, Artificial Sequence
  Synthetic
auggcauuuuaaguaag

SEQ ID NO: 753859 - RNA, 17 nt, Artificial Sequence
  Synthetic
caccaccuggcaguaag

SEQ ID NO: 753860 - RNA, 17 nt, Artificial Sequence
  Synthetic
aauuaaaacucaguaag

SEQ ID NO: 753861 - RNA, 17 nt, Artificial Sequence
  Synthetic
aaagguacaagaguaag

SEQ ID NO: 753862 - RNA, 17 nt, Artificial Sequence
  Synthetic
agcugauacagaguaag

SEQ ID NO: 753863 - RNA, 17 nt, Artificial Sequence
  Synthetic
agaugccagggaguaag

SEQ ID NO: 753864 - RNA, 17 nt, Artificial Sequence
  Synthetic
cauguugaaauaguaag

SEQ ID NO: 753865 - RNA, 17 nt, Artificial Sequence
  Synthetic
aucucacagauaguaag

SEQ ID NO: 753866 - RNA, 17 nt, Artificial Sequence
  Synthetic
cagauaaauauaguaag

SEQ ID NO: 753867 - RNA, 17 nt, Artificial Sequence
  Synthetic
auagggaauauaguaag

SEQ ID NO: 753868 - RNA, 17 nt, Artificial Sequence
  Synthetic
auccagacuauaguaag

SEQ ID NO: 753869 - RNA, 17 nt, Artificial Sequence
  Synthetic
ugucuucauaacguaag

SEQ ID NO: 753870 - RNA, 17 nt, Artificial Sequence
  Synthetic
cuguauguauacguaag

SEQ ID NO: 753871 - RNA, 17 nt, Artificial Sequence
  Synthetic
auggacucacucguaag

SEQ ID NO: 753872 - RNA, 17 nt, Artificial Sequence
  Synthetic
auguucucacucguaag

SEQ ID NO: 753873 - RNA, 17 nt, Artificial Sequence
  Synthetic
uuuuaauaaaagguaag

SEQ ID NO: 753874 - RNA, 17 nt, Artificial Sequence
  Synthetic
acauucucccagguaag

SEQ ID NO: 753875 - RNA, 17 nt, Artificial Sequence
  Synthetic
augagaguggagguaag

SEQ ID NO: 753876 - RNA, 17 nt, Artificial Sequence
  Synthetic
aaaaggagauagguaag

SEQ ID NO: 753877 - RNA, 17 nt, Artificial Sequence
  Synthetic
ucagaauuuuagguaag

SEQ ID NO: 753878 - RNA, 17 nt, Artificial Sequence
  Synthetic
accauacacccgguaag

SEQ ID NO: 753879 - RNA, 17 nt, Artificial Sequence
  Synthetic
cuugaacaaaggguaag

SEQ ID NO: 753880 - RNA, 17 nt, Artificial Sequence
  Synthetic
caugaauuaaggguaag

SEQ ID NO: 753881 - RNA, 17 nt, Artificial Sequence
  Synthetic
uggaagcagaggguaag

SEQ ID NO: 753882 - RNA, 17 nt, Artificial Sequence
  Synthetic
aacuugauuaggguaag

SEQ ID NO: 753883 - RNA, 17 nt, Artificial Sequence
  Synthetic
acuuggaacuggguaag

SEQ ID NO: 753884 - RNA, 17 nt, Artificial Sequence
  Synthetic
ucacauaucuggguaag

SEQ ID NO: 753885 - RNA, 17 nt, Artificial Sequence
  Synthetic
ucaggaguuaugguaag

SEQ ID NO: 753886 - RNA, 17 nt, Artificial Sequence
  Synthetic
cuaauagcagugguaag

SEQ ID NO: 753887 - RNA, 17 nt, Artificial Sequence
  Synthetic
auuccauuguugguaag

SEQ ID NO: 753888 - RNA, 17 nt, Artificial Sequence
  Synthetic
acuuugggaaauguaag

SEQ ID NO: 753889 - RNA, 17 nt, Artificial Sequence
  Synthetic
auuuguaugaauguaag

SEQ ID NO: 753890 - RNA, 17 nt, Artificial Sequence
  Synthetic
uagauaccucauguaag

SEQ ID NO: 753891 - RNA, 17 nt, Artificial Sequence
  Synthetic
aaacaucaggauguaag

SEQ ID NO: 753892 - RNA, 17 nt, Artificial Sequence
  Synthetic
cuaucaucggcuguaag

SEQ ID NO: 753893 - RNA, 17 nt, Artificial Sequence
  Synthetic
ccacauagaucuguaag

SEQ ID NO: 753894 - RNA, 17 nt, Artificial Sequence
  Synthetic
uggaacaaugguguaag

SEQ ID NO: 753895 - RNA, 17 nt, Artificial Sequence
  Synthetic
uacaagaccuguguaag

SEQ ID NO: 753896 - RNA, 17 nt, Artificial Sequence
  Synthetic
ucucguguaguuguaag

SEQ ID NO: 753897 - RNA, 17 nt, Artificial Sequence
  Synthetic
auuagaauguuuguaag

SEQ ID NO: 753898 - RNA, 17 nt, Artificial Sequence
  Synthetic
accugcuugaaauuaag

SEQ ID NO: 753899 - RNA, 17 nt, Artificial Sequence
  Synthetic
uucauuuuuaaauuaag

SEQ ID NO: 753900 - RNA, 17 nt, Artificial Sequence
  Synthetic
aucuuagaacaauuaag

SEQ ID NO: 753901 - RNA, 17 nt, Artificial Sequence
  Synthetic
auauugcgacaauuaag

SEQ ID NO: 753902 - RNA, 17 nt, Artificial Sequence
  Synthetic
uagaaaaugcaauuaag

SEQ ID NO: 753903 - RNA, 17 nt, Artificial Sequence
  Synthetic
aucaauuuugaauuaag

SEQ ID NO: 753904 - RNA, 17 nt, Artificial Sequence
  Synthetic
ccuguugaauaauuaag

SEQ ID NO: 753905 - RNA, 17 nt, Artificial Sequence
  Synthetic
auuuacuauuaauuaag

SEQ ID NO: 753906 - RNA, 17 nt, Artificial Sequence
  Synthetic
uuugucuuuuaauuaag

SEQ ID NO: 753907 - RNA, 17 nt, Artificial Sequence
  Synthetic
acaccauaaacauuaag

SEQ ID NO: 753908 - RNA, 17 nt, Artificial Sequence
  Synthetic
caauugugaacauuaag

SEQ ID NO: 753909 - RNA, 17 nt, Artificial Sequence
  Synthetic
aggacucuaacauuaag

SEQ ID NO: 753910 - RNA, 17 nt, Artificial Sequence
  Synthetic
uuuucuaugacauuaag

SEQ ID NO: 753911 - RNA, 17 nt, Artificial Sequence
  Synthetic
uggguauuuccauuaag

SEQ ID NO: 753912 - RNA, 17 nt, Artificial Sequence
  Synthetic
aaaaguaacucauuaag

SEQ ID NO: 753913 - RNA, 17 nt, Artificial Sequence
  Synthetic
aaaacugaaagauuaag

SEQ ID NO: 753914 - RNA, 17 nt, Artificial Sequence
  Synthetic
uuagaaaaccgauuaag

SEQ ID NO: 753915 - RNA, 17 nt, Artificial Sequence
  Synthetic
uaaaagacucgauuaag

SEQ ID NO: 753916 - RNA, 17 nt, Artificial Sequence
  Synthetic
cugagguccggauuaag

SEQ ID NO: 753917 - RNA, 17 nt, Artificial Sequence
  Synthetic
uggcaaccaauauuaag

SEQ ID NO: 753918 - RNA, 17 nt, Artificial Sequence
  Synthetic
ccacauaccauauuaag

SEQ ID NO: 753919 - RNA, 17 nt, Artificial Sequence
  Synthetic
uguuuacaucuauuaag

SEQ ID NO: 753920 - RNA, 17 nt, Artificial Sequence
  Synthetic
uuuccucuucuauuaag

SEQ ID NO: 753921 - RNA, 17 nt, Artificial Sequence
  Synthetic
auugugacaguauuaag

SEQ ID NO: 753922 - RNA, 17 nt, Artificial Sequence
  Synthetic
auuuuucaauuauuaag

SEQ ID NO: 753923 - RNA, 17 nt, Artificial Sequence
  Synthetic
cuuaaauuauuauuaag

SEQ ID NO: 753924 - RNA, 17 nt, Artificial Sequence
  Synthetic
acuuaaaauuuauuaag

SEQ ID NO: 753925 - RNA, 17 nt, Artificial Sequence
  Synthetic
acaauuaguuuauuaag

SEQ ID NO: 753926 - RNA, 17 nt, Artificial Sequence
  Synthetic
uauuuuauagccuuaag

SEQ ID NO: 753927 - RNA, 17 nt, Artificial Sequence
  Synthetic
cuuugauaauccuuaag

SEQ ID NO: 753928 - RNA, 17 nt, Artificial Sequence
  Synthetic
aauuugguaggcuuaag

SEQ ID NO: 753929 - RNA, 17 nt, Artificial Sequence
  Synthetic
caagaagcaugcuuaag

SEQ ID NO: 753930 - RNA, 17 nt, Artificial Sequence
  Synthetic
aacaauuucugcuuaag

SEQ ID NO: 753931 - RNA, 17 nt, Artificial Sequence
  Synthetic
agugaacauugcuuaag

SEQ ID NO: 753932 - RNA, 17 nt, Artificial Sequence
  Synthetic
uuuuucaguugcuuaag

SEQ ID NO: 753933 - RNA, 17 nt, Artificial Sequence
  Synthetic
uugaauugcaucuuaag

SEQ ID NO: 753934 - RNA, 17 nt, Artificial Sequence
  Synthetic
ugcauuaucaucuuaag

SEQ ID NO: 753935 - RNA, 17 nt, Artificial Sequence
  Synthetic
cugguggucaucuuaag

SEQ ID NO: 753936 - RNA, 17 nt, Artificial Sequence
  Synthetic
uguaccuaacucuuaag

SEQ ID NO: 753937 - RNA, 17 nt, Artificial Sequence
  Synthetic
auuuggugagucuuaag

SEQ ID NO: 753938 - RNA, 17 nt, Artificial Sequence
  Synthetic
auuuauggugucuuaag

SEQ ID NO: 753939 - RNA, 17 nt, Artificial Sequence
  Synthetic
uacaaucaauucuuaag

SEQ ID NO: 753940 - RNA, 17 nt, Artificial Sequence
  Synthetic
aagaacagauucuuaag

SEQ ID NO: 753941 - RNA, 17 nt, Artificial Sequence
  Synthetic
uuccauuuguucuuaag

SEQ ID NO: 753942 - RNA, 17 nt, Artificial Sequence
  Synthetic
uuuuaugucaaguuaag

SEQ ID NO: 753943 - RNA, 17 nt, Artificial Sequence
  Synthetic
uuauagguauaguuaag

SEQ ID NO: 753944 - RNA, 17 nt, Artificial Sequence
  Synthetic
acauacaucuaguuaag

SEQ ID NO: 753945 - RNA, 17 nt, Artificial Sequence
  Synthetic
aguuugguaagguuaag

SEQ ID NO: 753946 - RNA, 17 nt, Artificial Sequence
  Synthetic
uuagaaaggggguuaag

SEQ ID NO: 753947 - RNA, 17 nt, Artificial Sequence
  Synthetic
aaccagaaucuguuaag

SEQ ID NO: 753948 - RNA, 17 nt, Artificial Sequence
  Synthetic
aagacgaggguguuaag

SEQ ID NO: 753949 - RNA, 17 nt, Artificial Sequence
  Synthetic
acccuagaaaauuuaag

SEQ ID NO: 753950 - RNA, 17 nt, Artificial Sequence
  Synthetic
ugguucucaaauuuaag

SEQ ID NO: 753951 - RNA, 17 nt, Artificial Sequence
  Synthetic
uuauauugcaauuuaag

SEQ ID NO: 753952 - RNA, 17 nt, Artificial Sequence
  Synthetic
caauugaaacauuuaag

SEQ ID NO: 753953 - RNA, 17 nt, Artificial Sequence
  Synthetic
ccucugauacauuuaag

SEQ ID NO: 753954 - RNA, 17 nt, Artificial Sequence
  Synthetic
auuguuuuagauuuaag

SEQ ID NO: 753955 - RNA, 17 nt, Artificial Sequence
  Synthetic
ccucuauuggauuuaag

SEQ ID NO: 753956 - RNA, 17 nt, Artificial Sequence
  Synthetic
ugaccuuuuuauuuaag

SEQ ID NO: 753957 - RNA, 17 nt, Artificial Sequence
  Synthetic
aaauuaugcacuuuaag

SEQ ID NO: 753958 - RNA, 17 nt, Artificial Sequence
  Synthetic
ugcagcuguacuuuaag

SEQ ID NO: 753959 - RNA, 17 nt, Artificial Sequence
  Synthetic
uuuagaguuacuuuaag

SEQ ID NO: 753960 - RNA, 17 nt, Artificial Sequence
  Synthetic
acauuaacugcuuuaag

SEQ ID NO: 753961 - RNA, 17 nt, Artificial Sequence
  Synthetic
aaccauauggguuuaag

SEQ ID NO: 753962 - RNA, 17 nt, Artificial Sequence
  Synthetic
uuuuuguaaauuuuaag

SEQ ID NO: 753963 - RNA, 17 nt, Artificial Sequence
  Synthetic
accuuaugaauuuuaag

SEQ ID NO: 753964 - RNA, 17 nt, Artificial Sequence
  Synthetic
aaucccaccauuuuaag

SEQ ID NO: 753965 - RNA, 17 nt, Artificial Sequence
  Synthetic
ucuagaggacuuuuaag

SEQ ID NO: 753966 - RNA, 17 nt, Artificial Sequence
  Synthetic
ugccugguacuuuuaag

SEQ ID NO: 753967 - RNA, 17 nt, Artificial Sequence
  Synthetic
caguuaagucuuuuaag

SEQ ID NO: 753968 - RNA, 17 nt, Artificial Sequence
  Synthetic
cuagugauuguuuuaag

SEQ ID NO: 753969 - RNA, 17 nt, Artificial Sequence
  Synthetic
uuauguuucuuuuuaag

SEQ ID NO: 753970 - RNA, 17 nt, Artificial Sequence
  Synthetic
ccucacaauuuuuuaag

SEQ ID NO: 753971 - RNA, 17 nt, Artificial Sequence
  Synthetic
aauaaaaaaaaaaacag

SEQ ID NO: 753972 - RNA, 17 nt, Artificial Sequence
  Synthetic
uuggcaaauaaaaacag

SEQ ID NO: 753973 - RNA, 17 nt, Artificial Sequence
  Synthetic
agauauuauaaaaacag

SEQ ID NO: 753974 - RNA, 17 nt, Artificial Sequence
  Synthetic
caaaaagcuaaaaacag

SEQ ID NO: 753975 - RNA, 17 nt, Artificial Sequence
  Synthetic
caauuauuuaaaaacag

SEQ ID NO: 753976 - RNA, 17 nt, Artificial Sequence
  Synthetic
caugugcaacaaaacag

SEQ ID NO: 753977 - RNA, 17 nt, Artificial Sequence
  Synthetic
ugagagccacaaaacag

SEQ ID NO: 753978 - RNA, 17 nt, Artificial Sequence
  Synthetic
uuguaucuucaaaacag

SEQ ID NO: 753979 - RNA, 17 nt, Artificial Sequence
  Synthetic
uccauuggagaaaacag

SEQ ID NO: 753980 - RNA, 17 nt, Artificial Sequence
  Synthetic
ugagagaaggaaaacag

SEQ ID NO: 753981 - RNA, 17 nt, Artificial Sequence
  Synthetic
cuuaucccauaaaacag

SEQ ID NO: 753982 - RNA, 17 nt, Artificial Sequence
  Synthetic
ucauggagcuaaaacag

SEQ ID NO: 753983 - RNA, 17 nt, Artificial Sequence
  Synthetic
auaugaaucuaaaacag

SEQ ID NO: 753984 - RNA, 17 nt, Artificial Sequence
  Synthetic
uaacgcauguaaaacag

SEQ ID NO: 753985 - RNA, 17 nt, Artificial Sequence
  Synthetic
caaacgauuuaaaacag

SEQ ID NO: 753986 - RNA, 17 nt, Artificial Sequence
  Synthetic
uuucuacuuuaaaacag

SEQ ID NO: 753987 - RNA, 17 nt, Artificial Sequence
  Synthetic
ccugggugcacaaacag

SEQ ID NO: 753988 - RNA, 17 nt, Artificial Sequence
  Synthetic
caugggcugacaaacag

SEQ ID NO: 753989 - RNA, 17 nt, Artificial Sequence
  Synthetic
uaaauggaagcaaacag

SEQ ID NO: 753990 - RNA, 17 nt, Artificial Sequence
  Synthetic
caagauaggucaaacag

SEQ ID NO: 753991 - RNA, 17 nt, Artificial Sequence
  Synthetic
uucgauauuucaaacag

SEQ ID NO: 753992 - RNA, 17 nt, Artificial Sequence
  Synthetic
aaguuccucagaaacag

SEQ ID NO: 753993 - RNA, 17 nt, Artificial Sequence
  Synthetic
ugcuuuucaggaaacag

SEQ ID NO: 753994 - RNA, 17 nt, Artificial Sequence
  Synthetic
acaaugaagggaaacag

SEQ ID NO: 753995 - RNA, 17 nt, Artificial Sequence
  Synthetic
caucuacauggaaacag

SEQ ID NO: 753996 - RNA, 17 nt, Artificial Sequence
  Synthetic
ugacuuucucuaaacag

SEQ ID NO: 753997 - RNA, 17 nt, Artificial Sequence
  Synthetic
uaauaaggaaacaacag

SEQ ID NO: 753998 - RNA, 17 nt, Artificial Sequence
  Synthetic
auuugauagcacaacag

SEQ ID NO: 753999 - RNA, 17 nt, Artificial Sequence
  Synthetic
cagagcacagacaacag

SEQ ID NO: 754000 - RNA, 17 nt, Artificial Sequence
  Synthetic
uggcaaauguacaacag

SEQ ID NO: 754001 - RNA, 17 nt, Artificial Sequence
  Synthetic
acaguuuugaccaacag

SEQ ID NO: 754002 - RNA, 17 nt, Artificial Sequence
  Synthetic
aaucguugccccaacag

SEQ ID NO: 754003 - RNA, 17 nt, Artificial Sequence
  Synthetic
uguggaacucgcaacag

SEQ ID NO: 754004 - RNA, 17 nt, Artificial Sequence
  Synthetic
uucaauaaaugcaacag

SEQ ID NO: 754005 - RNA, 17 nt, Artificial Sequence
  Synthetic
agacaacaaugcaacag

SEQ ID NO: 754006 - RNA, 17 nt, Artificial Sequence
  Synthetic
auuugauagugcaacag

SEQ ID NO: 754007 - RNA, 17 nt, Artificial Sequence
  Synthetic
ugaagcagaaucaacag

SEQ ID NO: 754008 - RNA, 17 nt, Artificial Sequence
  Synthetic
uaacgauuaaagaacag

SEQ ID NO: 754009 - RNA, 17 nt, Artificial Sequence
  Synthetic
ccaacggaacagaacag

SEQ ID NO: 754010 - RNA, 17 nt, Artificial Sequence
  Synthetic
ccaauggaacagaacag

SEQ ID NO: 754011 - RNA, 17 nt, Artificial Sequence
  Synthetic
cauugaggagagaacag

SEQ ID NO: 754012 - RNA, 17 nt, Artificial Sequence
  Synthetic
acaaugugauagaacag

SEQ ID NO: 754013 - RNA, 17 nt, Artificial Sequence
  Synthetic
aauaucaaguagaacag

SEQ ID NO: 754014 - RNA, 17 nt, Artificial Sequence
  Synthetic
cagcagcaguagaacag

SEQ ID NO: 754015 - RNA, 17 nt, Artificial Sequence
  Synthetic
aacaaagcaucgaacag

SEQ ID NO: 754016 - RNA, 17 nt, Artificial Sequence
  Synthetic
auagaccaauggaacag

SEQ ID NO: 754017 - RNA, 17 nt, Artificial Sequence
  Synthetic
augaggaccuggaacag

SEQ ID NO: 754018 - RNA, 17 nt, Artificial Sequence
  Synthetic
ugcaggauuuggaacag

SEQ ID NO: 754019 - RNA, 17 nt, Artificial Sequence
  Synthetic
uacaagaacgugaacag

SEQ ID NO: 754020 - RNA, 17 nt, Artificial Sequence
  Synthetic
cguauuuucuugaacag

SEQ ID NO: 754021 - RNA, 17 nt, Artificial Sequence
  Synthetic
cauuagcuguugaacag

SEQ ID NO: 754022 - RNA, 17 nt, Artificial Sequence
  Synthetic
aaauggaaaaauaacag

SEQ ID NO: 754023 - RNA, 17 nt, Artificial Sequence
  Synthetic
agaauagcgaauaacag

SEQ ID NO: 754024 - RNA, 17 nt, Artificial Sequence
  Synthetic
uuacaguuucauaacag

SEQ ID NO: 754025 - RNA, 17 nt, Artificial Sequence
  Synthetic
ucucagcaaacuaacag

SEQ ID NO: 754026 - RNA, 17 nt, Artificial Sequence
  Synthetic
gcccaucagacuaacag

SEQ ID NO: 754027 - RNA, 17 nt, Artificial Sequence
  Synthetic
aaaccuguaccuaacag

SEQ ID NO: 754028 - RNA, 17 nt, Artificial Sequence
  Synthetic
aguagccauccuaacag

SEQ ID NO: 754029 - RNA, 17 nt, Artificial Sequence
  Synthetic
ucccucgcagcuaacag

SEQ ID NO: 754030 - RNA, 17 nt, Artificial Sequence
  Synthetic
cugagugcaucuaacag

SEQ ID NO: 754031 - RNA, 17 nt, Artificial Sequence
  Synthetic
caauaugaugguaacag

SEQ ID NO: 754032 - RNA, 17 nt, Artificial Sequence
  Synthetic
uuagucuauuguaacag

SEQ ID NO: 754033 - RNA, 17 nt, Artificial Sequence
  Synthetic
uggccaggcauuaacag

SEQ ID NO: 754034 - RNA, 17 nt, Artificial Sequence
  Synthetic
uacuacucuauuaacag

SEQ ID NO: 754035 - RNA, 17 nt, Artificial Sequence
  Synthetic
aaaaagggaguuaacag

SEQ ID NO: 754036 - RNA, 17 nt, Artificial Sequence
  Synthetic
agaaucaugguuaacag

SEQ ID NO: 754037 - RNA, 17 nt, Artificial Sequence
  Synthetic
uguaacuugguuaacag

SEQ ID NO: 754038 - RNA, 17 nt, Artificial Sequence
  Synthetic
auuagaccuguuaacag

SEQ ID NO: 754039 - RNA, 17 nt, Artificial Sequence
  Synthetic
aggcaauccuuuaacag

SEQ ID NO: 754040 - RNA, 17 nt, Artificial Sequence
  Synthetic
auauucaaguuuaacag

SEQ ID NO: 754041 - RNA, 17 nt, Artificial Sequence
  Synthetic
auauucagcaaacacag

SEQ ID NO: 754042 - RNA, 17 nt, Artificial Sequence
  Synthetic
aaaagugagaaacacag

SEQ ID NO: 754043 - RNA, 17 nt, Artificial Sequence
  Synthetic
aaagugcaagaacacag

SEQ ID NO: 754044 - RNA, 17 nt, Artificial Sequence
  Synthetic
cagagagaggaacacag

SEQ ID NO: 754045 - RNA, 17 nt, Artificial Sequence
  Synthetic
acaacaggaacacacag

SEQ ID NO: 754046 - RNA, 17 nt, Artificial Sequence
  Synthetic
uucaaaaauacacacag

SEQ ID NO: 754047 - RNA, 17 nt, Artificial Sequence
  Synthetic
cauuucuauacacacag

SEQ ID NO: 754048 - RNA, 17 nt, Artificial Sequence
  Synthetic
auauuugcuacacacag

SEQ ID NO: 754049 - RNA, 17 nt, Artificial Sequence
  Synthetic
uguauaucuccacacag

SEQ ID NO: 754050 - RNA, 17 nt, Artificial Sequence
  Synthetic
ccugaugccgcacacag

SEQ ID NO: 754051 - RNA, 17 nt, Artificial Sequence
  Synthetic
auaugccaggcacacag

SEQ ID NO: 754052 - RNA, 17 nt, Artificial Sequence
  Synthetic
ucauucauggcacacag

SEQ ID NO: 754053 - RNA, 17 nt, Artificial Sequence
  Synthetic
uuguugaaaagacacag

SEQ ID NO: 754054 - RNA, 17 nt, Artificial Sequence
  Synthetic
uacaaaugaggacacag

SEQ ID NO: 754055 - RNA, 17 nt, Artificial Sequence
  Synthetic
auagcugaaugacacag

SEQ ID NO: 754056 - RNA, 17 nt, Artificial Sequence
  Synthetic
acugugauuugacacag

SEQ ID NO: 754057 - RNA, 17 nt, Artificial Sequence
  Synthetic
aggugauauauacacag

SEQ ID NO: 754058 - RNA, 17 nt, Artificial Sequence
  Synthetic
aggauaugucuacacag

SEQ ID NO: 754059 - RNA, 17 nt, Artificial Sequence
  Synthetic
ugaaagguuuuacacag

SEQ ID NO: 754060 - RNA, 17 nt, Artificial Sequence
  Synthetic
cauauuguuuuacacag

SEQ ID NO: 754061 - RNA, 17 nt, Artificial Sequence
  Synthetic
aucuucucagaccacag

SEQ ID NO: 754062 - RNA, 17 nt, Artificial Sequence
  Synthetic
acccugcaaacccacag

SEQ ID NO: 754063 - RNA, 17 nt, Artificial Sequence
  Synthetic
acuccuuguccccacag

SEQ ID NO: 754064 - RNA, 17 nt, Artificial Sequence
  Synthetic
ucuacuuaaucccacag

SEQ ID NO: 754065 - RNA, 17 nt, Artificial Sequence
  Synthetic
aauguacaucuccacag

SEQ ID NO: 754066 - RNA, 17 nt, Artificial Sequence
  Synthetic
uaaaccccucuccacag

SEQ ID NO: 754067 - RNA, 17 nt, Artificial Sequence
  Synthetic
uaccuacaauuccacag

SEQ ID NO: 754068 - RNA, 17 nt, Artificial Sequence
  Synthetic
cacacagucuuccacag

SEQ ID NO: 754069 - RNA, 17 nt, Artificial Sequence
  Synthetic
caaacugcuuuccacag

SEQ ID NO: 754070 - RNA, 17 nt, Artificial Sequence
  Synthetic
augggugguuuccacag

SEQ ID NO: 754071 - RNA, 17 nt, Artificial Sequence
  Synthetic
cucuaaauacagcacag

SEQ ID NO: 754072 - RNA, 17 nt, Artificial Sequence
  Synthetic
aaaggauuagagcacag

SEQ ID NO: 754073 - RNA, 17 nt, Artificial Sequence
  Synthetic
ucccuauaggagcacag

SEQ ID NO: 754074 - RNA, 17 nt, Artificial Sequence
  Synthetic
cccaggcuggagcacag

SEQ ID NO: 754075 - RNA, 17 nt, Artificial Sequence
  Synthetic
ucucguggaaggcacag

SEQ ID NO: 754076 - RNA, 17 nt, Artificial Sequence
  Synthetic
caucuucucaggcacag

SEQ ID NO: 754077 - RNA, 17 nt, Artificial Sequence
  Synthetic
uuugcagccgggcacag

SEQ ID NO: 754078 - RNA, 17 nt, Artificial Sequence
  Synthetic
aagacagcugggcacag

SEQ ID NO: 754079 - RNA, 17 nt, Artificial Sequence
  Synthetic
auacaggcugggcacag

SEQ ID NO: 754080 - RNA, 17 nt, Artificial Sequence
  Synthetic
uguguggggaugcacag

SEQ ID NO: 754081 - RNA, 17 nt, Artificial Sequence
  Synthetic
auuuuacuucugcacag

SEQ ID NO: 754082 - RNA, 17 nt, Artificial Sequence
  Synthetic
cagaacuuaaaucacag

SEQ ID NO: 754083 - RNA, 17 nt, Artificial Sequence
  Synthetic
aaagggccacaucacag

SEQ ID NO: 754084 - RNA, 17 nt, Artificial Sequence
  Synthetic
auuuuuggugaucacag

SEQ ID NO: 754085 - RNA, 17 nt, Artificial Sequence
  Synthetic
ugauaauccacucacag

SEQ ID NO: 754086 - RNA, 17 nt, Artificial Sequence
  Synthetic
aacagcuguccucacag

SEQ ID NO: 754087 - RNA, 17 nt, Artificial Sequence
  Synthetic
uaguguucaucucacag

SEQ ID NO: 754088 - RNA, 17 nt, Artificial Sequence
  Synthetic
agcccuaguucucacag

SEQ ID NO: 754089 - RNA, 17 nt, Artificial Sequence
  Synthetic
acugaaaucauucacag

SEQ ID NO: 754090 - RNA, 17 nt, Artificial Sequence
  Synthetic
aauuuuucacuucacag

SEQ ID NO: 754091 - RNA, 17 nt, Artificial Sequence
  Synthetic
ugauuccuacuucacag

SEQ ID NO: 754092 - RNA, 17 nt, Artificial Sequence
  Synthetic
uuaauggugguucacag

SEQ ID NO: 754093 - RNA, 17 nt, Artificial Sequence
  Synthetic
cauuuaacuguucacag

SEQ ID NO: 754094 - RNA, 17 nt, Artificial Sequence
  Synthetic
uacauuccauuucacag

SEQ ID NO: 754095 - RNA, 17 nt, Artificial Sequence
  Synthetic
uggacaugauuucacag

SEQ ID NO: 754096 - RNA, 17 nt, Artificial Sequence
  Synthetic
ucaugaguguuucacag

SEQ ID NO: 754097 - RNA, 17 nt, Artificial Sequence
  Synthetic
ucauacugccaagacag

SEQ ID NO: 754098 - RNA, 17 nt, Artificial Sequence
  Synthetic
uauaaaaggcaagacag

SEQ ID NO: 754099 - RNA, 17 nt, Artificial Sequence
  Synthetic
uguacuagagaagacag

SEQ ID NO: 754100 - RNA, 17 nt, Artificial Sequence
  Synthetic
cagcuacuggaagacag

SEQ ID NO: 754101 - RNA, 17 nt, Artificial Sequence
  Synthetic
agaagaauugaagacag

SEQ ID NO: 754102 - RNA, 17 nt, Artificial Sequence
  Synthetic
ugaggauauacagacag

SEQ ID NO: 754103 - RNA, 17 nt, Artificial Sequence
  Synthetic
cucuaccaggcagacag

SEQ ID NO: 754104 - RNA, 17 nt, Artificial Sequence
  Synthetic
aagucagaaucagacag

SEQ ID NO: 754105 - RNA, 17 nt, Artificial Sequence
  Synthetic
ucaaggcauucagacag

SEQ ID NO: 754106 - RNA, 17 nt, Artificial Sequence
  Synthetic
auuuuuaguagagacag

SEQ ID NO: 754107 - RNA, 17 nt, Artificial Sequence
  Synthetic
cagagaacaggagacag

SEQ ID NO: 754108 - RNA, 17 nt, Artificial Sequence
  Synthetic
uugaacccaggagacag

SEQ ID NO: 754109 - RNA, 17 nt, Artificial Sequence
  Synthetic
cuuucuccaggagacag

SEQ ID NO: 754110 - RNA, 17 nt, Artificial Sequence
  Synthetic
uuguaccuaggagacag

SEQ ID NO: 754111 - RNA, 17 nt, Artificial Sequence
  Synthetic
uugaaacugggagacag

SEQ ID NO: 754112 - RNA, 17 nt, Artificial Sequence
  Synthetic
uugaaccugggagacag

SEQ ID NO: 754113 - RNA, 17 nt, Artificial Sequence
  Synthetic
ccaaaagagugagacag

SEQ ID NO: 754114 - RNA, 17 nt, Artificial Sequence
  Synthetic
aaaaggguuugagacag

SEQ ID NO: 754115 - RNA, 17 nt, Artificial Sequence
  Synthetic
uaaaagagaauagacag

SEQ ID NO: 754116 - RNA, 17 nt, Artificial Sequence
  Synthetic
uuuggucuuauagacag

SEQ ID NO: 754117 - RNA, 17 nt, Artificial Sequence
  Synthetic
aaguuucaacuagacag

SEQ ID NO: 754118 - RNA, 17 nt, Artificial Sequence
  Synthetic
uuaaaagagcuagacag

SEQ ID NO: 754119 - RNA, 17 nt, Artificial Sequence
  Synthetic
aauaggaaaguagacag

SEQ ID NO: 754120 - RNA, 17 nt, Artificial Sequence
  Synthetic
agacaggauguagacag

SEQ ID NO: 754121 - RNA, 17 nt, Artificial Sequence
  Synthetic
ugggacugguuagacag

SEQ ID NO: 754122 - RNA, 17 nt, Artificial Sequence
  Synthetic
aagaaaggccacgacag

SEQ ID NO: 754123 - RNA, 17 nt, Artificial Sequence
  Synthetic
uccagccugggcgacag

SEQ ID NO: 754124 - RNA, 17 nt, Artificial Sequence
  Synthetic
uaauuuauaaaggacag

SEQ ID NO: 754125 - RNA, 17 nt, Artificial Sequence
  Synthetic
aacauagugaaggacag

SEQ ID NO: 754126 - RNA, 17 nt, Artificial Sequence
  Synthetic
acaagcacauaggacag

SEQ ID NO: 754127 - RNA, 17 nt, Artificial Sequence
  Synthetic
acagaucucucggacag

SEQ ID NO: 754128 - RNA, 17 nt, Artificial Sequence
  Synthetic
uuagaagccagggacag

SEQ ID NO: 754129 - RNA, 17 nt, Artificial Sequence
  Synthetic
ccacagagacgggacag

SEQ ID NO: 754130 - RNA, 17 nt, Artificial Sequence
  Synthetic
agaguauaaggggacag

SEQ ID NO: 754131 - RNA, 17 nt, Artificial Sequence
  Synthetic
uaacucugaggggacag

SEQ ID NO: 754132 - RNA, 17 nt, Artificial Sequence
  Synthetic
acccaggagggggacag

SEQ ID NO: 754133 - RNA, 17 nt, Artificial Sequence
  Synthetic
ucuguauugggggacag

SEQ ID NO: 754134 - RNA, 17 nt, Artificial Sequence
  Synthetic
cuuucuccuggggacag

SEQ ID NO: 754135 - RNA, 17 nt, Artificial Sequence
  Synthetic
uuuaaaguuugggacag

SEQ ID NO: 754136 - RNA, 17 nt, Artificial Sequence
  Synthetic
aaaaaauuuugggacag

SEQ ID NO: 754137 - RNA, 17 nt, Artificial Sequence
  Synthetic
uggaauugaguggacag

SEQ ID NO: 754138 - RNA, 17 nt, Artificial Sequence
  Synthetic
uggggucugguggacag

SEQ ID NO: 754139 - RNA, 17 nt, Artificial Sequence
  Synthetic
ccaaacuguguggacag

SEQ ID NO: 754140 - RNA, 17 nt, Artificial Sequence
  Synthetic
cuuauugguuuggacag

SEQ ID NO: 754141 - RNA, 17 nt, Artificial Sequence
  Synthetic
aauuccccagaugacag

SEQ ID NO: 754142 - RNA, 17 nt, Artificial Sequence
  Synthetic
uucagccuggaugacag

SEQ ID NO: 754143 - RNA, 17 nt, Artificial Sequence
  Synthetic
cuuucaaaaacugacag

SEQ ID NO: 754144 - RNA, 17 nt, Artificial Sequence
  Synthetic
ucaaagaccacugacag

SEQ ID NO: 754145 - RNA, 17 nt, Artificial Sequence
  Synthetic
uggaagaucucugacag

SEQ ID NO: 754146 - RNA, 17 nt, Artificial Sequence
  Synthetic
uuucagcucucugacag

SEQ ID NO: 754147 - RNA, 17 nt, Artificial Sequence
  Synthetic
ugucuacuuucugacag

SEQ ID NO: 754148 - RNA, 17 nt, Artificial Sequence
  Synthetic
uaaguagagagugacag

SEQ ID NO: 754149 - RNA, 17 nt, Artificial Sequence
  Synthetic
aaccugaauagugacag

SEQ ID NO: 754150 - RNA, 17 nt, Artificial Sequence
  Synthetic
ugcccccuuagugacag

SEQ ID NO: 754151 - RNA, 17 nt, Artificial Sequence
  Synthetic
uguggugguggugacag

SEQ ID NO: 754152 - RNA, 17 nt, Artificial Sequence
  Synthetic
aauugaaucugugacag

SEQ ID NO: 754153 - RNA, 17 nt, Artificial Sequence
  Synthetic
aguaacuguugugacag

SEQ ID NO: 754154 - RNA, 17 nt, Artificial Sequence
  Synthetic
cacuacuuuugugacag

SEQ ID NO: 754155 - RNA, 17 nt, Artificial Sequence
  Synthetic
uaaucuaauauugacag

SEQ ID NO: 754156 - RNA, 17 nt, Artificial Sequence
  Synthetic
ccgucuaauauugacag

SEQ ID NO: 754157 - RNA, 17 nt, Artificial Sequence
  Synthetic
uaaaugucuauugacag

SEQ ID NO: 754158 - RNA, 17 nt, Artificial Sequence
  Synthetic
uccauugaacuugacag

SEQ ID NO: 754159 - RNA, 17 nt, Artificial Sequence
  Synthetic
acagauuaacuugacag

SEQ ID NO: 754160 - RNA, 17 nt, Artificial Sequence
  Synthetic
cagaacagaguugacag

SEQ ID NO: 754161 - RNA, 17 nt, Artificial Sequence
  Synthetic
cugucuaauguugacag

SEQ ID NO: 754162 - RNA, 17 nt, Artificial Sequence
  Synthetic
uaaaauaaaaaauacag

SEQ ID NO: 754163 - RNA, 17 nt, Artificial Sequence
  Synthetic
augccaugaaaauacag

SEQ ID NO: 754164 - RNA, 17 nt, Artificial Sequence
  Synthetic
auaauguuaaaauacag

SEQ ID NO: 754165 - RNA, 17 nt, Artificial Sequence
  Synthetic
ucagguaugaaauacag

SEQ ID NO: 754166 - RNA, 17 nt, Artificial Sequence
  Synthetic
cuaaaccuuaaauacag

SEQ ID NO: 754167 - RNA, 17 nt, Artificial Sequence
  Synthetic
acacucagagaauacag

SEQ ID NO: 754168 - RNA, 17 nt, Artificial Sequence
  Synthetic
ugcaguauggaauacag

SEQ ID NO: 754169 - RNA, 17 nt, Artificial Sequence
  Synthetic
accaggcuggaauacag

SEQ ID NO: 754170 - RNA, 17 nt, Artificial Sequence
  Synthetic
agucauuuauaauacag

SEQ ID NO: 754171 - RNA, 17 nt, Artificial Sequence
  Synthetic
cuucuagucuaauacag

SEQ ID NO: 754172 - RNA, 17 nt, Artificial Sequence
  Synthetic
ugcauauuguaauacag

SEQ ID NO: 754173 - RNA, 17 nt, Artificial Sequence
  Synthetic
ugcguauuguaauacag

SEQ ID NO: 754174 - RNA, 17 nt, Artificial Sequence
  Synthetic
cacauggacacauacag

SEQ ID NO: 754175 - RNA, 17 nt, Artificial Sequence
  Synthetic
uuuuguuacccauacag

SEQ ID NO: 754176 - RNA, 17 nt, Artificial Sequence
  Synthetic
ugagguuguccauacag

SEQ ID NO: 754177 - RNA, 17 nt, Artificial Sequence
  Synthetic
cgccugcucucauacag

SEQ ID NO: 754178 - RNA, 17 nt, Artificial Sequence
  Synthetic
cuucccuaaagauacag

SEQ ID NO: 754179 - RNA, 17 nt, Artificial Sequence
  Synthetic
uacuuauuaagauacag

SEQ ID NO: 754180 - RNA, 17 nt, Artificial Sequence
  Synthetic
aggaguucuagauacag

SEQ ID NO: 754181 - RNA, 17 nt, Artificial Sequence
  Synthetic
acacaaauaggauacag

SEQ ID NO: 754182 - RNA, 17 nt, Artificial Sequence
  Synthetic
aacuaacagggauacag

SEQ ID NO: 754183 - RNA, 17 nt, Artificial Sequence
  Synthetic
aauaaagaaauauacag

SEQ ID NO: 754184 - RNA, 17 nt, Artificial Sequence
  Synthetic
cugcagauaauauacag

SEQ ID NO: 754185 - RNA, 17 nt, Artificial Sequence
  Synthetic
uuuuauuuuauauacag

SEQ ID NO: 754186 - RNA, 17 nt, Artificial Sequence
  Synthetic
uaggauuuauuauacag

SEQ ID NO: 754187 - RNA, 17 nt, Artificial Sequence
  Synthetic
caggaaaggcacuacag

SEQ ID NO: 754188 - RNA, 17 nt, Artificial Sequence
  Synthetic
cagcauucucacuacag

SEQ ID NO: 754189 - RNA, 17 nt, Artificial Sequence
  Synthetic
uacacaagaagcuacag

SEQ ID NO: 754190 - RNA, 17 nt, Artificial Sequence
  Synthetic
aguagcuggggcuacag

SEQ ID NO: 754191 - RNA, 17 nt, Artificial Sequence
  Synthetic
ucagcccauggcuacag

SEQ ID NO: 754192 - RNA, 17 nt, Artificial Sequence
  Synthetic
aggcaaucuggcuacag

SEQ ID NO: 754193 - RNA, 17 nt, Artificial Sequence
  Synthetic
uaaacaguuugcuacag

SEQ ID NO: 754194 - RNA, 17 nt, Artificial Sequence
  Synthetic
uuguccccaaucuacag

SEQ ID NO: 754195 - RNA, 17 nt, Artificial Sequence
  Synthetic
cggaggcagaucuacag

SEQ ID NO: 754196 - RNA, 17 nt, Artificial Sequence
  Synthetic
caacugcugcucuacag

SEQ ID NO: 754197 - RNA, 17 nt, Artificial Sequence
  Synthetic
cgcccugcucucuacag

SEQ ID NO: 754198 - RNA, 17 nt, Artificial Sequence
  Synthetic
caaacugcuuucuacag

SEQ ID NO: 754199 - RNA, 17 nt, Artificial Sequence
  Synthetic
aacucugacaaguacag

SEQ ID NO: 754200 - RNA, 17 nt, Artificial Sequence
  Synthetic
auggacuuuaaguacag

SEQ ID NO: 754201 - RNA, 17 nt, Artificial Sequence
  Synthetic
aagaauauccaguacag

SEQ ID NO: 754202 - RNA, 17 nt, Artificial Sequence
  Synthetic
auaaaucaucaguacag

SEQ ID NO: 754203 - RNA, 17 nt, Artificial Sequence
  Synthetic
ugggacacggaguacag

SEQ ID NO: 754204 - RNA, 17 nt, Artificial Sequence
  Synthetic
aggcacugggaguacag

SEQ ID NO: 754205 - RNA, 17 nt, Artificial Sequence
  Synthetic
cucagccuggaguacag

SEQ ID NO: 754206 - RNA, 17 nt, Artificial Sequence
  Synthetic
cccaggcuggaguacag

SEQ ID NO: 754207 - RNA, 17 nt, Artificial Sequence
  Synthetic
aaugucuuauaguacag

SEQ ID NO: 754208 - RNA, 17 nt, Artificial Sequence
  Synthetic
cucaggcuguaguacag

SEQ ID NO: 754209 - RNA, 17 nt, Artificial Sequence
  Synthetic
ucguauauuuaguacag

SEQ ID NO: 754210 - RNA, 17 nt, Artificial Sequence
  Synthetic
uaucuaaucagguacag

SEQ ID NO: 754211 - RNA, 17 nt, Artificial Sequence
  Synthetic
ccucuuaccugguacag

SEQ ID NO: 754212 - RNA, 17 nt, Artificial Sequence
  Synthetic
augaugagauuguacag

SEQ ID NO: 754213 - RNA, 17 nt, Artificial Sequence
  Synthetic
agguaauggaauuacag

SEQ ID NO: 754214 - RNA, 17 nt, Artificial Sequence
  Synthetic
agguaauugaauuacag

SEQ ID NO: 754215 - RNA, 17 nt, Artificial Sequence
  Synthetic
cuuccccaggauuacag

SEQ ID NO: 754216 - RNA, 17 nt, Artificial Sequence
  Synthetic
agaagaugggauuacag

SEQ ID NO: 754217 - RNA, 17 nt, Artificial Sequence
  Synthetic
aguagcugggauuacag

SEQ ID NO: 754218 - RNA, 17 nt, Artificial Sequence
  Synthetic
cuccuagaauauuacag

SEQ ID NO: 754219 - RNA, 17 nt, Artificial Sequence
  Synthetic
agccaaauauauuacag

SEQ ID NO: 754220 - RNA, 17 nt, Artificial Sequence
  Synthetic
cuacuuuccuauuacag

SEQ ID NO: 754221 - RNA, 17 nt, Artificial Sequence
  Synthetic
aauauuuuguauuacag

SEQ ID NO: 754222 - RNA, 17 nt, Artificial Sequence
  Synthetic
ucagggaugacuuacag

SEQ ID NO: 754223 - RNA, 17 nt, Artificial Sequence
  Synthetic
cuacuugacucuuacag

SEQ ID NO: 754224 - RNA, 17 nt, Artificial Sequence
  Synthetic
uacaguaaguguuacag

SEQ ID NO: 754225 - RNA, 17 nt, Artificial Sequence
  Synthetic
uuaauacaaauuuacag

SEQ ID NO: 754226 - RNA, 17 nt, Artificial Sequence
  Synthetic
ccucaaagaauuuacag

SEQ ID NO: 754227 - RNA, 17 nt, Artificial Sequence
  Synthetic
uaaucgccacuuuacag

SEQ ID NO: 754228 - RNA, 17 nt, Artificial Sequence
  Synthetic
uuugugauaguuuacag

SEQ ID NO: 754229 - RNA, 17 nt, Artificial Sequence
  Synthetic
aaaagcuuaguuuacag

SEQ ID NO: 754230 - RNA, 17 nt, Artificial Sequence
  Synthetic
augccuuaauuuuacag

SEQ ID NO: 754231 - RNA, 17 nt, Artificial Sequence
  Synthetic
ucaguauucaaaaccag

SEQ ID NO: 754232 - RNA, 17 nt, Artificial Sequence
  Synthetic
auaagaagacaaaccag

SEQ ID NO: 754233 - RNA, 17 nt, Artificial Sequence
  Synthetic
acuccuuggcaaaccag

SEQ ID NO: 754234 - RNA, 17 nt, Artificial Sequence
  Synthetic
aagguggaauaaaccag

SEQ ID NO: 754235 - RNA, 17 nt, Artificial Sequence
  Synthetic
uaaucucuauaaaccag

SEQ ID NO: 754236 - RNA, 17 nt, Artificial Sequence
  Synthetic
uauuauccuccaaccag

SEQ ID NO: 754237 - RNA, 17 nt, Artificial Sequence
  Synthetic
uugcaaagaggaaccag

SEQ ID NO: 754238 - RNA, 17 nt, Artificial Sequence
  Synthetic
agaaugauaguaaccag

SEQ ID NO: 754239 - RNA, 17 nt, Artificial Sequence
  Synthetic
uguauagauuuaaccag

SEQ ID NO: 754240 - RNA, 17 nt, Artificial Sequence
  Synthetic
uugggguuuuuaaccag

SEQ ID NO: 754241 - RNA, 17 nt, Artificial Sequence
  Synthetic
cuuuaagugaacaccag

SEQ ID NO: 754242 - RNA, 17 nt, Artificial Sequence
  Synthetic
aaaucccaagacaccag

SEQ ID NO: 754243 - RNA, 17 nt, Artificial Sequence
  Synthetic
cugccuggggacaccag

SEQ ID NO: 754244 - RNA, 17 nt, Artificial Sequence
  Synthetic
ucucuuaaaaccaccag

SEQ ID NO: 754245 - RNA, 17 nt, Artificial Sequence
  Synthetic
agguaugccaccaccag

SEQ ID NO: 754246 - RNA, 17 nt, Artificial Sequence
  Synthetic
ucauuccugcccaccag

SEQ ID NO: 754247 - RNA, 17 nt, Artificial Sequence
  Synthetic
accuaggugcccaccag

SEQ ID NO: 754248 - RNA, 17 nt, Artificial Sequence
  Synthetic
caagccucauccaccag

SEQ ID NO: 754249 - RNA, 17 nt, Artificial Sequence
  Synthetic
ugacuacaaugcaccag

SEQ ID NO: 754250 - RNA, 17 nt, Artificial Sequence
  Synthetic
aaaguuucuugcaccag

SEQ ID NO: 754251 - RNA, 17 nt, Artificial Sequence
  Synthetic
caauguucauucaccag

SEQ ID NO: 754252 - RNA, 17 nt, Artificial Sequence
  Synthetic
cagaaagaccagaccag

SEQ ID NO: 754253 - RNA, 17 nt, Artificial Sequence
  Synthetic
aaacuccacuagaccag

SEQ ID NO: 754254 - RNA, 17 nt, Artificial Sequence
  Synthetic
agaaugcucuagaccag

SEQ ID NO: 754255 - RNA, 17 nt, Artificial Sequence
  Synthetic
aaacagaaaaggaccag

SEQ ID NO: 754256 - RNA, 17 nt, Artificial Sequence
  Synthetic
ucccaucauaggaccag

SEQ ID NO: 754257 - RNA, 17 nt, Artificial Sequence
  Synthetic
ucucauuuggggaccag

SEQ ID NO: 754258 - RNA, 17 nt, Artificial Sequence
  Synthetic
cuugaauccuggaccag

SEQ ID NO: 754259 - RNA, 17 nt, Artificial Sequence
  Synthetic
ugagugaaaaugaccag

SEQ ID NO: 754260 - RNA, 17 nt, Artificial Sequence
  Synthetic
uccagaugacugaccag

SEQ ID NO: 754261 - RNA, 17 nt, Artificial Sequence
  Synthetic
aagccaguucugaccag

SEQ ID NO: 754262 - RNA, 17 nt, Artificial Sequence
  Synthetic
uuuccauaaaauaccag

SEQ ID NO: 754263 - RNA, 17 nt, Artificial Sequence
  Synthetic
ugagacuaucauaccag

SEQ ID NO: 754264 - RNA, 17 nt, Artificial Sequence
  Synthetic
uagguagcucauaccag

SEQ ID NO: 754265 - RNA, 17 nt, Artificial Sequence
  Synthetic
uuuuuuauagauaccag

SEQ ID NO: 754266 - RNA, 17 nt, Artificial Sequence
  Synthetic
cagccgaauucuaccag

SEQ ID NO: 754267 - RNA, 17 nt, Artificial Sequence
  Synthetic
cagcugaauucuaccag

SEQ ID NO: 754268 - RNA, 17 nt, Artificial Sequence
  Synthetic
acauucugagguaccag

SEQ ID NO: 754269 - RNA, 17 nt, Artificial Sequence
  Synthetic
acagaagcugguaccag

SEQ ID NO: 754270 - RNA, 17 nt, Artificial Sequence
  Synthetic
aaaaggaugguuaccag

SEQ ID NO: 754271 - RNA, 17 nt, Artificial Sequence
  Synthetic
agaauggugguuaccag

SEQ ID NO: 754272 - RNA, 17 nt, Artificial Sequence
  Synthetic
aaauugggcuaacccag

SEQ ID NO: 754273 - RNA, 17 nt, Artificial Sequence
  Synthetic
uugcuuaagccacccag

SEQ ID NO: 754274 - RNA, 17 nt, Artificial Sequence
  Synthetic
uuccaacccucacccag

SEQ ID NO: 754275 - RNA, 17 nt, Artificial Sequence
  Synthetic
ucccaucacagacccag

SEQ ID NO: 754276 - RNA, 17 nt, Artificial Sequence
  Synthetic
uuucuucauagacccag

SEQ ID NO: 754277 - RNA, 17 nt, Artificial Sequence
  Synthetic
uuaugggagggacccag

SEQ ID NO: 754278 - RNA, 17 nt, Artificial Sequence
  Synthetic
uugugggagggacccag

SEQ ID NO: 754279 - RNA, 17 nt, Artificial Sequence
  Synthetic
agaagccguggacccag

SEQ ID NO: 754280 - RNA, 17 nt, Artificial Sequence
  Synthetic
auugggcauauacccag

SEQ ID NO: 754281 - RNA, 17 nt, Artificial Sequence
  Synthetic
agcauaaauuuacccag

SEQ ID NO: 754282 - RNA, 17 nt, Artificial Sequence
  Synthetic
ucaggaucaaaccccag

SEQ ID NO: 754283 - RNA, 17 nt, Artificial Sequence
  Synthetic
accuuuuuuccccccag

SEQ ID NO: 754284 - RNA, 17 nt, Artificial Sequence
  Synthetic
ugacauucagcccccag

SEQ ID NO: 754285 - RNA, 17 nt, Artificial Sequence
  Synthetic
cucagaugagcccccag

SEQ ID NO: 754286 - RNA, 17 nt, Artificial Sequence
  Synthetic
uucucacaucgccccag

SEQ ID NO: 754287 - RNA, 17 nt, Artificial Sequence
  Synthetic
aucuguuuuggccccag

SEQ ID NO: 754288 - RNA, 17 nt, Artificial Sequence
  Synthetic
acuaggcagugccccag

SEQ ID NO: 754289 - RNA, 17 nt, Artificial Sequence
  Synthetic
uguuuuccuguccccag

SEQ ID NO: 754290 - RNA, 17 nt, Artificial Sequence
  Synthetic
cucuugagauuccccag

SEQ ID NO: 754291 - RNA, 17 nt, Artificial Sequence
  Synthetic
auuuagaauuuccccag

SEQ ID NO: 754292 - RNA, 17 nt, Artificial Sequence
  Synthetic
aucaccauaaagcccag

SEQ ID NO: 754293 - RNA, 17 nt, Artificial Sequence
  Synthetic
ucccaucacaagcccag

SEQ ID NO: 754294 - RNA, 17 nt, Artificial Sequence
  Synthetic
cauggaaccaagcccag

SEQ ID NO: 754295 - RNA, 17 nt, Artificial Sequence
  Synthetic
uggaaggagcagcccag

SEQ ID NO: 754296 - RNA, 17 nt, Artificial Sequence
  Synthetic
cucuaccaggagcccag

SEQ ID NO: 754297 - RNA, 17 nt, Artificial Sequence
  Synthetic
ugcuuuccauagcccag

SEQ ID NO: 754298 - RNA, 17 nt, Artificial Sequence
  Synthetic
cacuccucguagcccag

SEQ ID NO: 754299 - RNA, 17 nt, Artificial Sequence
  Synthetic
uuacuuuugucgcccag

SEQ ID NO: 754300 - RNA, 17 nt, Artificial Sequence
  Synthetic
cuugaccgagggcccag

SEQ ID NO: 754301 - RNA, 17 nt, Artificial Sequence
  Synthetic
caaauuuuaaugcccag

SEQ ID NO: 754302 - RNA, 17 nt, Artificial Sequence
  Synthetic
uauaaucuacugcccag

SEQ ID NO: 754303 - RNA, 17 nt, Artificial Sequence
  Synthetic
auuauacucuugcccag

SEQ ID NO: 754304 - RNA, 17 nt, Artificial Sequence
  Synthetic
aguuuuucuuugcccag

SEQ ID NO: 754305 - RNA, 17 nt, Artificial Sequence
  Synthetic
aaauauacuaaucccag

SEQ ID NO: 754306 - RNA, 17 nt, Artificial Sequence
  Synthetic
cugccgaguaaucccag

SEQ ID NO: 754307 - RNA, 17 nt, Artificial Sequence
  Synthetic
agccuuaugcaucccag

SEQ ID NO: 754308 - RNA, 17 nt, Artificial Sequence
  Synthetic
uggaagcuucaucccag

SEQ ID NO: 754309 - RNA, 17 nt, Artificial Sequence
  Synthetic
agaugcuuagaucccag

SEQ ID NO: 754310 - RNA, 17 nt, Artificial Sequence
  Synthetic
uuacgacgugaucccag

SEQ ID NO: 754311 - RNA, 17 nt, Artificial Sequence
  Synthetic
cagacuagguaucccag

SEQ ID NO: 754312 - RNA, 17 nt, Artificial Sequence
  Synthetic
cuuuugcuguaucccag

SEQ ID NO: 754313 - RNA, 17 nt, Artificial Sequence
  Synthetic
cauuccaagacucccag

SEQ ID NO: 754314 - RNA, 17 nt, Artificial Sequence
  Synthetic
uccccuccagcucccag

SEQ ID NO: 754315 - RNA, 17 nt, Artificial Sequence
  Synthetic
ugauggucagcucccag

SEQ ID NO: 754316 - RNA, 17 nt, Artificial Sequence
  Synthetic
auuuucauagcucccag

SEQ ID NO: 754317 - RNA, 17 nt, Artificial Sequence
  Synthetic
uuaggaaaaugucccag

SEQ ID NO: 754318 - RNA, 17 nt, Artificial Sequence
  Synthetic
uucuaucaaauucccag

SEQ ID NO: 754319 - RNA, 17 nt, Artificial Sequence
  Synthetic
aguucacaguuucccag

SEQ ID NO: 754320 - RNA, 17 nt, Artificial Sequence
  Synthetic
uaauuaaaacaagccag

SEQ ID NO: 754321 - RNA, 17 nt, Artificial Sequence
  Synthetic
cgagaauuucaagccag

SEQ ID NO: 754322 - RNA, 17 nt, Artificial Sequence
  Synthetic
aaaaucaaugaagccag

SEQ ID NO: 754323 - RNA, 17 nt, Artificial Sequence
  Synthetic
cuauauauugaagccag

SEQ ID NO: 754324 - RNA, 17 nt, Artificial Sequence
  Synthetic
uucuauguugaagccag

SEQ ID NO: 754325 - RNA, 17 nt, Artificial Sequence
  Synthetic
aacaauauauaagccag

SEQ ID NO: 754326 - RNA, 17 nt, Artificial Sequence
  Synthetic
uagcuaccuacagccag

SEQ ID NO: 754327 - RNA, 17 nt, Artificial Sequence
  Synthetic
uuucacaaagcagccag

SEQ ID NO: 754328 - RNA, 17 nt, Artificial Sequence
  Synthetic
ucagccugcucagccag

SEQ ID NO: 754329 - RNA, 17 nt, Artificial Sequence
  Synthetic
cagugguucucagccag

SEQ ID NO: 754330 - RNA, 17 nt, Artificial Sequence
  Synthetic
agggugcauucagccag

SEQ ID NO: 754331 - RNA, 17 nt, Artificial Sequence
  Synthetic
aaguaggcccucgccag

SEQ ID NO: 754332 - RNA, 17 nt, Artificial Sequence
  Synthetic
uacagggaaaaggccag

SEQ ID NO: 754333 - RNA, 17 nt, Artificial Sequence
  Synthetic
aagcagagaaaggccag

SEQ ID NO: 754334 - RNA, 17 nt, Artificial Sequence
  Synthetic
ccugcugcucaggccag

SEQ ID NO: 754335 - RNA, 17 nt, Artificial Sequence
  Synthetic
uaaacaauagaggccag

SEQ ID NO: 754336 - RNA, 17 nt, Artificial Sequence
  Synthetic
cuaaccuccuaggccag

SEQ ID NO: 754337 - RNA, 17 nt, Artificial Sequence
  Synthetic
acagaucucuaggccag

SEQ ID NO: 754338 - RNA, 17 nt, Artificial Sequence
  Synthetic
agccuguauauggccag

SEQ ID NO: 754339 - RNA, 17 nt, Artificial Sequence
  Synthetic
acuauuaggguggccag

SEQ ID NO: 754340 - RNA, 17 nt, Artificial Sequence
  Synthetic
agccagccauuggccag

SEQ ID NO: 754341 - RNA, 17 nt, Artificial Sequence
  Synthetic
cuuguaaucuuggccag

SEQ ID NO: 754342 - RNA, 17 nt, Artificial Sequence
  Synthetic
cacauuuuaaaugccag

SEQ ID NO: 754343 - RNA, 17 nt, Artificial Sequence
  Synthetic
uccagaaacaaugccag

SEQ ID NO: 754344 - RNA, 17 nt, Artificial Sequence
  Synthetic
auauauaucaaugccag

SEQ ID NO: 754345 - RNA, 17 nt, Artificial Sequence
  Synthetic
cucuaacuagaugccag

SEQ ID NO: 754346 - RNA, 17 nt, Artificial Sequence
  Synthetic
ucaauuaaauaugccag

SEQ ID NO: 754347 - RNA, 17 nt, Artificial Sequence
  Synthetic
ugggaguugggugccag

SEQ ID NO: 754348 - RNA, 17 nt, Artificial Sequence
  Synthetic
acagauaguggugccag

SEQ ID NO: 754349 - RNA, 17 nt, Artificial Sequence
  Synthetic
agaaagguaguugccag

SEQ ID NO: 754350 - RNA, 17 nt, Artificial Sequence
  Synthetic
aacucuuugguugccag

SEQ ID NO: 754351 - RNA, 17 nt, Artificial Sequence
  Synthetic
uguccauuauuugccag

SEQ ID NO: 754352 - RNA, 17 nt, Artificial Sequence
  Synthetic
aacagauucaaauccag

SEQ ID NO: 754353 - RNA, 17 nt, Artificial Sequence
  Synthetic
ucuuugccagaauccag

SEQ ID NO: 754354 - RNA, 17 nt, Artificial Sequence
  Synthetic
cccagguuggaauccag

SEQ ID NO: 754355 - RNA, 17 nt, Artificial Sequence
  Synthetic
uacaugccugaauccag

SEQ ID NO: 754356 - RNA, 17 nt, Artificial Sequence
  Synthetic
accaaagguccauccag

SEQ ID NO: 754357 - RNA, 17 nt, Artificial Sequence
  Synthetic
caacuuuuaagauccag

SEQ ID NO: 754358 - RNA, 17 nt, Artificial Sequence
  Synthetic
ucaugggagggauccag

SEQ ID NO: 754359 - RNA, 17 nt, Artificial Sequence
  Synthetic
uugugggagggauccag

SEQ ID NO: 754360 - RNA, 17 nt, Artificial Sequence
  Synthetic
cuucuguuucuauccag

SEQ ID NO: 754361 - RNA, 17 nt, Artificial Sequence
  Synthetic
uggcccuuaguauccag

SEQ ID NO: 754362 - RNA, 17 nt, Artificial Sequence
  Synthetic
uggcuaaccguauccag

SEQ ID NO: 754363 - RNA, 17 nt, Artificial Sequence
  Synthetic
acccuguccuuauccag

SEQ ID NO: 754364 - RNA, 17 nt, Artificial Sequence
  Synthetic
aaucuuccuuuauccag

SEQ ID NO: 754365 - RNA, 17 nt, Artificial Sequence
  Synthetic
aaacauauaaacuccag

SEQ ID NO: 754366 - RNA, 17 nt, Artificial Sequence
  Synthetic
acauugcagaacuccag

SEQ ID NO: 754367 - RNA, 17 nt, Artificial Sequence
  Synthetic
aguggagaggacuccag

SEQ ID NO: 754368 - RNA, 17 nt, Artificial Sequence
  Synthetic
aagucaugacccuccag

SEQ ID NO: 754369 - RNA, 17 nt, Artificial Sequence
  Synthetic
ugaauugcccccuccag

SEQ ID NO: 754370 - RNA, 17 nt, Artificial Sequence
  Synthetic
auaccuuuugccuccag

SEQ ID NO: 754371 - RNA, 17 nt, Artificial Sequence
  Synthetic
ccuacuuaguccuccag

SEQ ID NO: 754372 - RNA, 17 nt, Artificial Sequence
  Synthetic
cuuaaggcuuccuccag

SEQ ID NO: 754373 - RNA, 17 nt, Artificial Sequence
  Synthetic
uugcugaacagcuccag

SEQ ID NO: 754374 - RNA, 17 nt, Artificial Sequence
  Synthetic
agcagacaaaucuccag

SEQ ID NO: 754375 - RNA, 17 nt, Artificial Sequence
  Synthetic
acuaauaugaucuccag

SEQ ID NO: 754376 - RNA, 17 nt, Artificial Sequence
  Synthetic
ugugaccagcucuccag

SEQ ID NO: 754377 - RNA, 17 nt, Artificial Sequence
  Synthetic
uucaaguucuucuccag

SEQ ID NO: 754378 - RNA, 17 nt, Artificial Sequence
  Synthetic
ucaguuuuugaguccag

SEQ ID NO: 754379 - RNA, 17 nt, Artificial Sequence
  Synthetic
cuucugaaauaguccag

SEQ ID NO: 754380 - RNA, 17 nt, Artificial Sequence
  Synthetic
aacagaaaguaguccag

SEQ ID NO: 754381 - RNA, 17 nt, Artificial Sequence
  Synthetic
agggagcagccguccag

SEQ ID NO: 754382 - RNA, 17 nt, Artificial Sequence
  Synthetic
aaaaaaguuccguccag

SEQ ID NO: 754383 - RNA, 17 nt, Artificial Sequence
  Synthetic
aauauguauugguccag

SEQ ID NO: 754384 - RNA, 17 nt, Artificial Sequence
  Synthetic
cauacaugcauguccag

SEQ ID NO: 754385 - RNA, 17 nt, Artificial Sequence
  Synthetic
acuaauaauguguccag

SEQ ID NO: 754386 - RNA, 17 nt, Artificial Sequence
  Synthetic
cacugagcuguguccag

SEQ ID NO: 754387 - RNA, 17 nt, Artificial Sequence
  Synthetic
uauucguuuuuguccag

SEQ ID NO: 754388 - RNA, 17 nt, Artificial Sequence
  Synthetic
uacuuacugaauuccag

SEQ ID NO: 754389 - RNA, 17 nt, Artificial Sequence
  Synthetic
agagguucacauuccag

SEQ ID NO: 754390 - RNA, 17 nt, Artificial Sequence
  Synthetic
cucacaagacauuccag

SEQ ID NO: 754391 - RNA, 17 nt, Artificial Sequence
  Synthetic
ugugaaacagauuccag

SEQ ID NO: 754392 - RNA, 17 nt, Artificial Sequence
  Synthetic
uuuccaggagauuccag

SEQ ID NO: 754393 - RNA, 17 nt, Artificial Sequence
  Synthetic
accacagaugauuccag

SEQ ID NO: 754394 - RNA, 17 nt, Artificial Sequence
  Synthetic
uuuggaggcuauuccag

SEQ ID NO: 754395 - RNA, 17 nt, Artificial Sequence
  Synthetic
cauccagcuuauuccag

SEQ ID NO: 754396 - RNA, 17 nt, Artificial Sequence
  Synthetic
caagaauguuauuccag

SEQ ID NO: 754397 - RNA, 17 nt, Artificial Sequence
  Synthetic
cauguauguuauuccag

SEQ ID NO: 754398 - RNA, 17 nt, Artificial Sequence
  Synthetic
cuuuuuccaccuuccag

SEQ ID NO: 754399 - RNA, 17 nt, Artificial Sequence
  Synthetic
ccaugaagaccuuccag

SEQ ID NO: 754400 - RNA, 17 nt, Artificial Sequence
  Synthetic
auuauuccuccuuccag

SEQ ID NO: 754401 - RNA, 17 nt, Artificial Sequence
  Synthetic
ucauuauuuccuuccag

SEQ ID NO: 754402 - RNA, 17 nt, Artificial Sequence
  Synthetic
ugggaugaagcuuccag

SEQ ID NO: 754403 - RNA, 17 nt, Artificial Sequence
  Synthetic
uuguaaauugcuuccag

SEQ ID NO: 754404 - RNA, 17 nt, Artificial Sequence
  Synthetic
ugaaagucaucuuccag

SEQ ID NO: 754405 - RNA, 17 nt, Artificial Sequence
  Synthetic
cauuuucauucuuccag

SEQ ID NO: 754406 - RNA, 17 nt, Artificial Sequence
  Synthetic
aacuguagauguuccag

SEQ ID NO: 754407 - RNA, 17 nt, Artificial Sequence
  Synthetic
uuuuauuaaauuuccag

SEQ ID NO: 754408 - RNA, 17 nt, Artificial Sequence
  Synthetic
cuggguucaauuuccag

SEQ ID NO: 754409 - RNA, 17 nt, Artificial Sequence
  Synthetic
uucaguccccuuuccag

SEQ ID NO: 754410 - RNA, 17 nt, Artificial Sequence
  Synthetic
cuaucagugguuuccag

SEQ ID NO: 754411 - RNA, 17 nt, Artificial Sequence
  Synthetic
agaauggugguuuccag

SEQ ID NO: 754412 - RNA, 17 nt, Artificial Sequence
  Synthetic
acuauguauguuuccag

SEQ ID NO: 754413 - RNA, 17 nt, Artificial Sequence
  Synthetic
cagucaaguguuuccag

SEQ ID NO: 754414 - RNA, 17 nt, Artificial Sequence
  Synthetic
uucaugaaauuuuccag

SEQ ID NO: 754415 - RNA, 17 nt, Artificial Sequence
  Synthetic
cuaacucaguuuuccag

SEQ ID NO: 754416 - RNA, 17 nt, Artificial Sequence
  Synthetic
uaucuugcuuuuuccag

SEQ ID NO: 754417 - RNA, 17 nt, Artificial Sequence
  Synthetic
aaagaaaaaaaaagcag

SEQ ID NO: 754418 - RNA, 17 nt, Artificial Sequence
  Synthetic
acuuugcugaaaagcag

SEQ ID NO: 754419 - RNA, 17 nt, Artificial Sequence
  Synthetic
cauuuacuucaaagcag

SEQ ID NO: 754420 - RNA, 17 nt, Artificial Sequence
  Synthetic
uuuugcuaugaaagcag

SEQ ID NO: 754421 - RNA, 17 nt, Artificial Sequence
  Synthetic
uagccuagcuaaagcag

SEQ ID NO: 754422 - RNA, 17 nt, Artificial Sequence
  Synthetic
uagcguagcuaaagcag

SEQ ID NO: 754423 - RNA, 17 nt, Artificial Sequence
  Synthetic
agaaguaacacaagcag

SEQ ID NO: 754424 - RNA, 17 nt, Artificial Sequence
  Synthetic
uauaaaacuccaagcag

SEQ ID NO: 754425 - RNA, 17 nt, Artificial Sequence
  Synthetic
uugucugcuccaagcag

SEQ ID NO: 754426 - RNA, 17 nt, Artificial Sequence
  Synthetic
acaaacucaucaagcag

SEQ ID NO: 754427 - RNA, 17 nt, Artificial Sequence
  Synthetic
uaaugagagucaagcag

SEQ ID NO: 754428 - RNA, 17 nt, Artificial Sequence
  Synthetic
uuaauauggagaagcag

SEQ ID NO: 754429 - RNA, 17 nt, Artificial Sequence
  Synthetic
cccuggaaaggaagcag

SEQ ID NO: 754430 - RNA, 17 nt, Artificial Sequence
  Synthetic
aggcuuaauggaagcag

SEQ ID NO: 754431 - RNA, 17 nt, Artificial Sequence
  Synthetic
acuuucucuggaagcag

SEQ ID NO: 754432 - RNA, 17 nt, Artificial Sequence
  Synthetic
ugaauuuguggaagcag

SEQ ID NO: 754433 - RNA, 17 nt, Artificial Sequence
  Synthetic
aguaccuauugaagcag

SEQ ID NO: 754434 - RNA, 17 nt, Artificial Sequence
  Synthetic
agugaaauuugaagcag

SEQ ID NO: 754435 - RNA, 17 nt, Artificial Sequence
  Synthetic
aaacaugacauaagcag

SEQ ID NO: 754436 - RNA, 17 nt, Artificial Sequence
  Synthetic
agacauggcauaagcag

SEQ ID NO: 754437 - RNA, 17 nt, Artificial Sequence
  Synthetic
uacaaggagauaagcag

SEQ ID NO: 754438 - RNA, 17 nt, Artificial Sequence
  Synthetic
caacaaaguauaagcag

SEQ ID NO: 754439 - RNA, 17 nt, Artificial Sequence
  Synthetic
uccaagguuauaagcag

SEQ ID NO: 754440 - RNA, 17 nt, Artificial Sequence
  Synthetic
acuuuugggguaagcag

SEQ ID NO: 754441 - RNA, 17 nt, Artificial Sequence
  Synthetic
uuaauuccuuuaagcag

SEQ ID NO: 754442 - RNA, 17 nt, Artificial Sequence
  Synthetic
caguuccguuuaagcag

SEQ ID NO: 754443 - RNA, 17 nt, Artificial Sequence
  Synthetic
aggaaccaaaacagcag

SEQ ID NO: 754444 - RNA, 17 nt, Artificial Sequence
  Synthetic
uguugaggacacagcag

SEQ ID NO: 754445 - RNA, 17 nt, Artificial Sequence
  Synthetic
agagagguucccagcag

SEQ ID NO: 754446 - RNA, 17 nt, Artificial Sequence
  Synthetic
aaguuggaagccagcag

SEQ ID NO: 754447 - RNA, 17 nt, Artificial Sequence
  Synthetic
augccugcagccagcag

SEQ ID NO: 754448 - RNA, 17 nt, Artificial Sequence
  Synthetic
agaaugagugccagcag

SEQ ID NO: 754449 - RNA, 17 nt, Artificial Sequence
  Synthetic
ugguggauguccagcag

SEQ ID NO: 754450 - RNA, 17 nt, Artificial Sequence
  Synthetic
caguaggugagcagcag

SEQ ID NO: 754451 - RNA, 17 nt, Artificial Sequence
  Synthetic
uagagugcaugcagcag

SEQ ID NO: 754452 - RNA, 17 nt, Artificial Sequence
  Synthetic
cagcagaccugcagcag

SEQ ID NO: 754453 - RNA, 17 nt, Artificial Sequence
  Synthetic
ugauuugucugcagcag

SEQ ID NO: 754454 - RNA, 17 nt, Artificial Sequence
  Synthetic
uucuaucagcucagcag

SEQ ID NO: 754455 - RNA, 17 nt, Artificial Sequence
  Synthetic
aggagaguuuucagcag

SEQ ID NO: 754456 - RNA, 17 nt, Artificial Sequence
  Synthetic
aggcgaaggaagagcag

SEQ ID NO: 754457 - RNA, 17 nt, Artificial Sequence
  Synthetic
cguuuggcacagagcag

SEQ ID NO: 754458 - RNA, 17 nt, Artificial Sequence
  Synthetic
uggcaucugcagagcag

SEQ ID NO: 754459 - RNA, 17 nt, Artificial Sequence
  Synthetic
uugaugagucagagcag

SEQ ID NO: 754460 - RNA, 17 nt, Artificial Sequence
  Synthetic
cccuuucuucagagcag

SEQ ID NO: 754461 - RNA, 17 nt, Artificial Sequence
  Synthetic
acuguuccagagagcag

SEQ ID NO: 754462 - RNA, 17 nt, Artificial Sequence
  Synthetic
cccaggcgggagagcag

SEQ ID NO: 754463 - RNA, 17 nt, Artificial Sequence
  Synthetic
ugcacauaugagagcag

SEQ ID NO: 754464 - RNA, 17 nt, Artificial Sequence
  Synthetic
ugaggaguugagagcag

SEQ ID NO: 754465 - RNA, 17 nt, Artificial Sequence
  Synthetic
uugaacaccuagagcag

SEQ ID NO: 754466 - RNA, 17 nt, Artificial Sequence
  Synthetic
auacuuuuguagagcag

SEQ ID NO: 754467 - RNA, 17 nt, Artificial Sequence
  Synthetic
auuauacuuuagagcag

SEQ ID NO: 754468 - RNA, 17 nt, Artificial Sequence
  Synthetic
ugccuugggaggagcag

SEQ ID NO: 754469 - RNA, 17 nt, Artificial Sequence
  Synthetic
uuggguaugaggagcag

SEQ ID NO: 754470 - RNA, 17 nt, Artificial Sequence
  Synthetic
cucucuuuuaggagcag

SEQ ID NO: 754471 - RNA, 17 nt, Artificial Sequence
  Synthetic
caacauagguggagcag

SEQ ID NO: 754472 - RNA, 17 nt, Artificial Sequence
  Synthetic
uaaugguuucugagcag

SEQ ID NO: 754473 - RNA, 17 nt, Artificial Sequence
  Synthetic
caggagcgugugagcag

SEQ ID NO: 754474 - RNA, 17 nt, Artificial Sequence
  Synthetic
uuuugcccauugagcag

SEQ ID NO: 754475 - RNA, 17 nt, Artificial Sequence
  Synthetic
cucauuuccuugagcag

SEQ ID NO: 754476 - RNA, 17 nt, Artificial Sequence
  Synthetic
cuuauuuccuugagcag

SEQ ID NO: 754477 - RNA, 17 nt, Artificial Sequence
  Synthetic
uuuauuuccuugagcag

SEQ ID NO: 754478 - RNA, 17 nt, Artificial Sequence
  Synthetic
cagaagauuuugagcag

SEQ ID NO: 754479 - RNA, 17 nt, Artificial Sequence
  Synthetic
uugugaaucaauagcag

SEQ ID NO: 754480 - RNA, 17 nt, Artificial Sequence
  Synthetic
uaaaauucuaauagcag

SEQ ID NO: 754481 - RNA, 17 nt, Artificial Sequence
  Synthetic
ccauacuguaauagcag

SEQ ID NO: 754482 - RNA, 17 nt, Artificial Sequence
  Synthetic
uaggcugcacauagcag

SEQ ID NO: 754483 - RNA, 17 nt, Artificial Sequence
  Synthetic
cuguauucaaguagcag

SEQ ID NO: 754484 - RNA, 17 nt, Artificial Sequence
  Synthetic
cacacuugacguagcag

SEQ ID NO: 754485 - RNA, 17 nt, Artificial Sequence
  Synthetic
uugucuagauguagcag

SEQ ID NO: 754486 - RNA, 17 nt, Artificial Sequence
  Synthetic
aaacagauuuguagcag

SEQ ID NO: 754487 - RNA, 17 nt, Artificial Sequence
  Synthetic
cucacaaucauuagcag

SEQ ID NO: 754488 - RNA, 17 nt, Artificial Sequence
  Synthetic
aagcccaaaguuagcag

SEQ ID NO: 754489 - RNA, 17 nt, Artificial Sequence
  Synthetic
aauuuacauuuuagcag

SEQ ID NO: 754490 - RNA, 17 nt, Artificial Sequence
  Synthetic
uguaacagucaccgcag

SEQ ID NO: 754491 - RNA, 17 nt, Artificial Sequence
  Synthetic
aaaacauauggccgcag

SEQ ID NO: 754492 - RNA, 17 nt, Artificial Sequence
  Synthetic
cccaggcuggagcgcag

SEQ ID NO: 754493 - RNA, 17 nt, Artificial Sequence
  Synthetic
cccagguuggagcgcag

SEQ ID NO: 754494 - RNA, 17 nt, Artificial Sequence
  Synthetic
aaauuagccaggcgcag

SEQ ID NO: 754495 - RNA, 17 nt, Artificial Sequence
  Synthetic
uuccuggccaggcgcag

SEQ ID NO: 754496 - RNA, 17 nt, Artificial Sequence
  Synthetic
uaaaacuucaggcgcag

SEQ ID NO: 754497 - RNA, 17 nt, Artificial Sequence
  Synthetic
cccauggccgggcgcag

SEQ ID NO: 754498 - RNA, 17 nt, Artificial Sequence
  Synthetic
uaauuggccgggcgcag

SEQ ID NO: 754499 - RNA, 17 nt, Artificial Sequence
  Synthetic
uuauagucugggcgcag

SEQ ID NO: 754500 - RNA, 17 nt, Artificial Sequence
  Synthetic
agaauucccuggcgcag

SEQ ID NO: 754501 - RNA, 17 nt, Artificial Sequence
  Synthetic
auuggacugucucgcag

SEQ ID NO: 754502 - RNA, 17 nt, Artificial Sequence
  Synthetic
cugcccucuauucgcag

SEQ ID NO: 754503 - RNA, 17 nt, Artificial Sequence
  Synthetic
aaaacaaaaaaaggcag

SEQ ID NO: 754504 - RNA, 17 nt, Artificial Sequence
  Synthetic
cauacagaaaaaggcag

SEQ ID NO: 754505 - RNA, 17 nt, Artificial Sequence
  Synthetic
uugaaccugaaaggcag

SEQ ID NO: 754506 - RNA, 17 nt, Artificial Sequence
  Synthetic
agugauacuaaaggcag

SEQ ID NO: 754507 - RNA, 17 nt, Artificial Sequence
  Synthetic
caaaggauacaaggcag

SEQ ID NO: 754508 - RNA, 17 nt, Artificial Sequence
  Synthetic
agacggaagcaaggcag

SEQ ID NO: 754509 - RNA, 17 nt, Artificial Sequence
  Synthetic
cggagccgagaaggcag

SEQ ID NO: 754510 - RNA, 17 nt, Artificial Sequence
  Synthetic
uauccaugagaaggcag

SEQ ID NO: 754511 - RNA, 17 nt, Artificial Sequence
  Synthetic
uugaacguggaaggcag

SEQ ID NO: 754512 - RNA, 17 nt, Artificial Sequence
  Synthetic
uugcacccauaaggcag

SEQ ID NO: 754513 - RNA, 17 nt, Artificial Sequence
  Synthetic
ccacccuucuaaggcag

SEQ ID NO: 754514 - RNA, 17 nt, Artificial Sequence
  Synthetic
uuugaauuguaaggcag

SEQ ID NO: 754515 - RNA, 17 nt, Artificial Sequence
  Synthetic
aacuggguaacaggcag

SEQ ID NO: 754516 - RNA, 17 nt, Artificial Sequence
  Synthetic
caucaauacacaggcag

SEQ ID NO: 754517 - RNA, 17 nt, Artificial Sequence
  Synthetic
ugauggccuacaggcag

SEQ ID NO: 754518 - RNA, 17 nt, Artificial Sequence
  Synthetic
acagggaguacaggcag

SEQ ID NO: 754519 - RNA, 17 nt, Artificial Sequence
  Synthetic
aaggacaucccaggcag

SEQ ID NO: 754520 - RNA, 17 nt, Artificial Sequence
  Synthetic
agaagcaggccaggcag

SEQ ID NO: 754521 - RNA, 17 nt, Artificial Sequence
  Synthetic
aagggcaauccaggcag

SEQ ID NO: 754522 - RNA, 17 nt, Artificial Sequence
  Synthetic
cacugaaguccaggcag

SEQ ID NO: 754523 - RNA, 17 nt, Artificial Sequence
  Synthetic
aaaaacauuccaggcag

SEQ ID NO: 754524 - RNA, 17 nt, Artificial Sequence
  Synthetic
uugguccaagcaggcag

SEQ ID NO: 754525 - RNA, 17 nt, Artificial Sequence
  Synthetic
aagggaauggcaggcag

SEQ ID NO: 754526 - RNA, 17 nt, Artificial Sequence
  Synthetic
uccugaauugcaggcag

SEQ ID NO: 754527 - RNA, 17 nt, Artificial Sequence
  Synthetic
aagacuauuucaggcag

SEQ ID NO: 754528 - RNA, 17 nt, Artificial Sequence
  Synthetic
uugaacccaagaggcag

SEQ ID NO: 754529 - RNA, 17 nt, Artificial Sequence
  Synthetic
aaggaggagagaggcag

SEQ ID NO: 754530 - RNA, 17 nt, Artificial Sequence
  Synthetic
uucaacccaggaggcag

SEQ ID NO: 754531 - RNA, 17 nt, Artificial Sequence
  Synthetic
uugaacccaggaggcag

SEQ ID NO: 754532 - RNA, 17 nt, Artificial Sequence
  Synthetic
uugaacguaggaggcag

SEQ ID NO: 754533 - RNA, 17 nt, Artificial Sequence
  Synthetic
ucgaacccgggaggcag

SEQ ID NO: 754534 - RNA, 17 nt, Artificial Sequence
  Synthetic
uugaacccgggaggcag

SEQ ID NO: 754535 - RNA, 17 nt, Artificial Sequence
  Synthetic
uugaacucgggaggcag

SEQ ID NO: 754536 - RNA, 17 nt, Artificial Sequence
  Synthetic
aacuacucgggaggcag

SEQ ID NO: 754537 - RNA, 17 nt, Artificial Sequence
  Synthetic
uugagcuggggaggcag

SEQ ID NO: 754538 - RNA, 17 nt, Artificial Sequence
  Synthetic
uugaacaugggaggcag

SEQ ID NO: 754539 - RNA, 17 nt, Artificial Sequence
  Synthetic
uugaaucugggaggcag

SEQ ID NO: 754540 - RNA, 17 nt, Artificial Sequence
  Synthetic
agcacuuugggaggcag

SEQ ID NO: 754541 - RNA, 17 nt, Artificial Sequence
  Synthetic
uugaagccuggaggcag

SEQ ID NO: 754542 - RNA, 17 nt, Artificial Sequence
  Synthetic
caauuaccaugaggcag

SEQ ID NO: 754543 - RNA, 17 nt, Artificial Sequence
  Synthetic
ucaggaggcugaggcag

SEQ ID NO: 754544 - RNA, 17 nt, Artificial Sequence
  Synthetic
uucggaggcugaggcag

SEQ ID NO: 754545 - RNA, 17 nt, Artificial Sequence
  Synthetic
uugggaggcugaggcag

SEQ ID NO: 754546 - RNA, 17 nt, Artificial Sequence
  Synthetic
caagaaaagugaggcag

SEQ ID NO: 754547 - RNA, 17 nt, Artificial Sequence
  Synthetic
aaauaccauugaggcag

SEQ ID NO: 754548 - RNA, 17 nt, Artificial Sequence
  Synthetic
aacuggguaauaggcag

SEQ ID NO: 754549 - RNA, 17 nt, Artificial Sequence
  Synthetic
augggagagauaggcag

SEQ ID NO: 754550 - RNA, 17 nt, Artificial Sequence
  Synthetic
cucugaaaucuaggcag

SEQ ID NO: 754551 - RNA, 17 nt, Artificial Sequence
  Synthetic
cucugaauucuaggcag

SEQ ID NO: 754552 - RNA, 17 nt, Artificial Sequence
  Synthetic
ugaugcauucuaggcag

SEQ ID NO: 754553 - RNA, 17 nt, Artificial Sequence
  Synthetic
uacaguugaguaggcag

SEQ ID NO: 754554 - RNA, 17 nt, Artificial Sequence
  Synthetic
uugguugguguaggcag

SEQ ID NO: 754555 - RNA, 17 nt, Artificial Sequence
  Synthetic
agaugucaauuaggcag

SEQ ID NO: 754556 - RNA, 17 nt, Artificial Sequence
  Synthetic
aggauuauuuuaggcag

SEQ ID NO: 754557 - RNA, 17 nt, Artificial Sequence
  Synthetic
uugaacccgggcggcag

SEQ ID NO: 754558 - RNA, 17 nt, Artificial Sequence
  Synthetic
cuuuguaaaaagggcag

SEQ ID NO: 754559 - RNA, 17 nt, Artificial Sequence
  Synthetic
uaaauauggaagggcag

SEQ ID NO: 754560 - RNA, 17 nt, Artificial Sequence
  Synthetic
aucuggcaagagggcag

SEQ ID NO: 754561 - RNA, 17 nt, Artificial Sequence
  Synthetic
ccuggugaggagggcag

SEQ ID NO: 754562 - RNA, 17 nt, Artificial Sequence
  Synthetic
cccaggcuggagggcag

SEQ ID NO: 754563 - RNA, 17 nt, Artificial Sequence
  Synthetic
aagcuucaugagggcag

SEQ ID NO: 754564 - RNA, 17 nt, Artificial Sequence
  Synthetic
agaaaacaauagggcag

SEQ ID NO: 754565 - RNA, 17 nt, Artificial Sequence
  Synthetic
aguuuagguaggggcag

SEQ ID NO: 754566 - RNA, 17 nt, Artificial Sequence
  Synthetic
agucggggagggggcag

SEQ ID NO: 754567 - RNA, 17 nt, Artificial Sequence
  Synthetic
ugcauaccauggggcag

SEQ ID NO: 754568 - RNA, 17 nt, Artificial Sequence
  Synthetic
agcaaaaacuggggcag

SEQ ID NO: 754569 - RNA, 17 nt, Artificial Sequence
  Synthetic
uggcaucuaaugggcag

SEQ ID NO: 754570 - RNA, 17 nt, Artificial Sequence
  Synthetic
ugucaucaagugggcag

SEQ ID NO: 754571 - RNA, 17 nt, Artificial Sequence
  Synthetic
acagauggggugggcag

SEQ ID NO: 754572 - RNA, 17 nt, Artificial Sequence
  Synthetic
aggauggcauugggcag

SEQ ID NO: 754573 - RNA, 17 nt, Artificial Sequence
  Synthetic
acaggagacuugggcag

SEQ ID NO: 754574 - RNA, 17 nt, Artificial Sequence
  Synthetic
uaauagaaacauggcag

SEQ ID NO: 754575 - RNA, 17 nt, Artificial Sequence
  Synthetic
uucaagaucucuggcag

SEQ ID NO: 754576 - RNA, 17 nt, Artificial Sequence
  Synthetic
uauuuucuaaguggcag

SEQ ID NO: 754577 - RNA, 17 nt, Artificial Sequence
  Synthetic
aaguuagcugguggcag

SEQ ID NO: 754578 - RNA, 17 nt, Artificial Sequence
  Synthetic
agacuguagguuggcag

SEQ ID NO: 754579 - RNA, 17 nt, Artificial Sequence
  Synthetic
augaaaaaaaaaugcag

SEQ ID NO: 754580 - RNA, 17 nt, Artificial Sequence
  Synthetic
aaguuaggaaaaugcag

SEQ ID NO: 754581 - RNA, 17 nt, Artificial Sequence
  Synthetic
uuuccccucaaaugcag

SEQ ID NO: 754582 - RNA, 17 nt, Artificial Sequence
  Synthetic
aauacccuacaaugcag

SEQ ID NO: 754583 - RNA, 17 nt, Artificial Sequence
  Synthetic
caaguuaagcaaugcag

SEQ ID NO: 754584 - RNA, 17 nt, Artificial Sequence
  Synthetic
acuaucugagaaugcag

SEQ ID NO: 754585 - RNA, 17 nt, Artificial Sequence
  Synthetic
cccaggcuggaaugcag

SEQ ID NO: 754586 - RNA, 17 nt, Artificial Sequence
  Synthetic
cucaggcuggaaugcag

SEQ ID NO: 754587 - RNA, 17 nt, Artificial Sequence
  Synthetic
cccuggcuggaaugcag

SEQ ID NO: 754588 - RNA, 17 nt, Artificial Sequence
  Synthetic
aaacaaauaacaugcag

SEQ ID NO: 754589 - RNA, 17 nt, Artificial Sequence
  Synthetic
auuauucagacaugcag

SEQ ID NO: 754590 - RNA, 17 nt, Artificial Sequence
  Synthetic
cccugagacccaugcag

SEQ ID NO: 754591 - RNA, 17 nt, Artificial Sequence
  Synthetic
acuagugcugcaugcag

SEQ ID NO: 754592 - RNA, 17 nt, Artificial Sequence
  Synthetic
agaugggggagaugcag

SEQ ID NO: 754593 - RNA, 17 nt, Artificial Sequence
  Synthetic
ucuaggagaauaugcag

SEQ ID NO: 754594 - RNA, 17 nt, Artificial Sequence
  Synthetic
uuugcuaaccuaugcag

SEQ ID NO: 754595 - RNA, 17 nt, Artificial Sequence
  Synthetic
cagaaacagcuaugcag

SEQ ID NO: 754596 - RNA, 17 nt, Artificial Sequence
  Synthetic
ugacaaaaaguaugcag

SEQ ID NO: 754597 - RNA, 17 nt, Artificial Sequence
  Synthetic
acaaaauaauuaugcag

SEQ ID NO: 754598 - RNA, 17 nt, Artificial Sequence
  Synthetic
ucugcuagauacugcag

SEQ ID NO: 754599 - RNA, 17 nt, Artificial Sequence
  Synthetic
agcuaucuuuacugcag

SEQ ID NO: 754600 - RNA, 17 nt, Artificial Sequence
  Synthetic
cuggaauuauccugcag

SEQ ID NO: 754601 - RNA, 17 nt, Artificial Sequence
  Synthetic
ugcaguugcagcugcag

SEQ ID NO: 754602 - RNA, 17 nt, Artificial Sequence
  Synthetic
aaagggaggggcugcag

SEQ ID NO: 754603 - RNA, 17 nt, Artificial Sequence
  Synthetic
cucucccuucucugcag

SEQ ID NO: 754604 - RNA, 17 nt, Artificial Sequence
  Synthetic
ucagauggcuucugcag

SEQ ID NO: 754605 - RNA, 17 nt, Artificial Sequence
  Synthetic
ugccucaauuucugcag

SEQ ID NO: 754606 - RNA, 17 nt, Artificial Sequence
  Synthetic
uucccucauuucugcag

SEQ ID NO: 754607 - RNA, 17 nt, Artificial Sequence
  Synthetic
cccaggcuaaagugcag

SEQ ID NO: 754608 - RNA, 17 nt, Artificial Sequence
  Synthetic
auucaauacaagugcag

SEQ ID NO: 754609 - RNA, 17 nt, Artificial Sequence
  Synthetic
uggauagggaagugcag

SEQ ID NO: 754610 - RNA, 17 nt, Artificial Sequence
  Synthetic
cccaggcugaagugcag

SEQ ID NO: 754611 - RNA, 17 nt, Artificial Sequence
  Synthetic
uccaggcugaagugcag

SEQ ID NO: 754612 - RNA, 17 nt, Artificial Sequence
  Synthetic
acaaacgcacagugcag

SEQ ID NO: 754613 - RNA, 17 nt, Artificial Sequence
  Synthetic
cuccguaggcagugcag

SEQ ID NO: 754614 - RNA, 17 nt, Artificial Sequence
  Synthetic
cccaagcugcagugcag

SEQ ID NO: 754615 - RNA, 17 nt, Artificial Sequence
  Synthetic
uccaggcugcagugcag

SEQ ID NO: 754616 - RNA, 17 nt, Artificial Sequence
  Synthetic
aaaugauuucagugcag

SEQ ID NO: 754617 - RNA, 17 nt, Artificial Sequence
  Synthetic
cccaggcuagagugcag

SEQ ID NO: 754618 - RNA, 17 nt, Artificial Sequence
  Synthetic
cccaggcaggagugcag

SEQ ID NO: 754619 - RNA, 17 nt, Artificial Sequence
  Synthetic
cccaugccggagugcag

SEQ ID NO: 754620 - RNA, 17 nt, Artificial Sequence
  Synthetic
cccaggucggagugcag

SEQ ID NO: 754621 - RNA, 17 nt, Artificial Sequence
  Synthetic
cccaagcuggagugcag

SEQ ID NO: 754622 - RNA, 17 nt, Artificial Sequence
  Synthetic
accaggcuggagugcag

SEQ ID NO: 754623 - RNA, 17 nt, Artificial Sequence
  Synthetic
cccaggcuggagugcag

SEQ ID NO: 754624 - RNA, 17 nt, Artificial Sequence
  Synthetic
cucaggcuggagugcag

SEQ ID NO: 754625 - RNA, 17 nt, Artificial Sequence
  Synthetic
ccuaggcuggagugcag

SEQ ID NO: 754626 - RNA, 17 nt, Artificial Sequence
  Synthetic
cccgggcuggagugcag

SEQ ID NO: 754627 - RNA, 17 nt, Artificial Sequence
  Synthetic
ugugggcuggagugcag

SEQ ID NO: 754628 - RNA, 17 nt, Artificial Sequence
  Synthetic
cccuggcuggagugcag

SEQ ID NO: 754629 - RNA, 17 nt, Artificial Sequence
  Synthetic
cccagucuggagugcag

SEQ ID NO: 754630 - RNA, 17 nt, Artificial Sequence
  Synthetic
cccgggguggagugcag

SEQ ID NO: 754631 - RNA, 17 nt, Artificial Sequence
  Synthetic
cccagguuggagugcag

SEQ ID NO: 754632 - RNA, 17 nt, Artificial Sequence
  Synthetic
uuuaucugugagugcag

SEQ ID NO: 754633 - RNA, 17 nt, Artificial Sequence
  Synthetic
cccaggcuugagugcag

SEQ ID NO: 754634 - RNA, 17 nt, Artificial Sequence
  Synthetic
cuguucuuugagugcag

SEQ ID NO: 754635 - RNA, 17 nt, Artificial Sequence
  Synthetic
ugcaaguuugagugcag

SEQ ID NO: 754636 - RNA, 17 nt, Artificial Sequence
  Synthetic
uauuuuaaauagugcag

SEQ ID NO: 754637 - RNA, 17 nt, Artificial Sequence
  Synthetic
cccaggcuguagugcag

SEQ ID NO: 754638 - RNA, 17 nt, Artificial Sequence
  Synthetic
aaauuggccaggugcag

SEQ ID NO: 754639 - RNA, 17 nt, Artificial Sequence
  Synthetic
auguaguccaggugcag

SEQ ID NO: 754640 - RNA, 17 nt, Artificial Sequence
  Synthetic
aauaaggucaggugcag

SEQ ID NO: 754641 - RNA, 17 nt, Artificial Sequence
  Synthetic
cauugagcuaggugcag

SEQ ID NO: 754642 - RNA, 17 nt, Artificial Sequence
  Synthetic
acaggagccgggugcag

SEQ ID NO: 754643 - RNA, 17 nt, Artificial Sequence
  Synthetic
ugugaggccgggugcag

SEQ ID NO: 754644 - RNA, 17 nt, Artificial Sequence
  Synthetic
cccaggcuggggugcag

SEQ ID NO: 754645 - RNA, 17 nt, Artificial Sequence
  Synthetic
aacuuuguggggugcag

SEQ ID NO: 754646 - RNA, 17 nt, Artificial Sequence
  Synthetic
caucuggcugggugcag

SEQ ID NO: 754647 - RNA, 17 nt, Artificial Sequence
  Synthetic
uuccaggccuggugcag

SEQ ID NO: 754648 - RNA, 17 nt, Artificial Sequence
  Synthetic
uaaaggagguggugcag

SEQ ID NO: 754649 - RNA, 17 nt, Artificial Sequence
  Synthetic
ucuauuugaaugugcag

SEQ ID NO: 754650 - RNA, 17 nt, Artificial Sequence
  Synthetic
cuuagaaauaugugcag

SEQ ID NO: 754651 - RNA, 17 nt, Artificial Sequence
  Synthetic
auguuccuugugugcag

SEQ ID NO: 754652 - RNA, 17 nt, Artificial Sequence
  Synthetic
cauucuaauuugugcag

SEQ ID NO: 754653 - RNA, 17 nt, Artificial Sequence
  Synthetic
agaagacacgauugcag

SEQ ID NO: 754654 - RNA, 17 nt, Artificial Sequence
  Synthetic
augaggggauauugcag

SEQ ID NO: 754655 - RNA, 17 nt, Artificial Sequence
  Synthetic
agaaaacaaacuugcag

SEQ ID NO: 754656 - RNA, 17 nt, Artificial Sequence
  Synthetic
aagaaaugaacuugcag

SEQ ID NO: 754657 - RNA, 17 nt, Artificial Sequence
  Synthetic
ccuaccuccacuugcag

SEQ ID NO: 754658 - RNA, 17 nt, Artificial Sequence
  Synthetic
uuacuuauuaguugcag

SEQ ID NO: 754659 - RNA, 17 nt, Artificial Sequence
  Synthetic
aaucuuucugguugcag

SEQ ID NO: 754660 - RNA, 17 nt, Artificial Sequence
  Synthetic
uucuuggcauguugcag

SEQ ID NO: 754661 - RNA, 17 nt, Artificial Sequence
  Synthetic
agagagcuguguugcag

SEQ ID NO: 754662 - RNA, 17 nt, Artificial Sequence
  Synthetic
ucguggaguuguugcag

SEQ ID NO: 754663 - RNA, 17 nt, Artificial Sequence
  Synthetic
aaaauugacauuugcag

SEQ ID NO: 754664 - RNA, 17 nt, Artificial Sequence
  Synthetic
uuuuuuuugauuugcag

SEQ ID NO: 754665 - RNA, 17 nt, Artificial Sequence
  Synthetic
uaagauuaccuuugcag

SEQ ID NO: 754666 - RNA, 17 nt, Artificial Sequence
  Synthetic
caaaauuagcuuugcag

SEQ ID NO: 754667 - RNA, 17 nt, Artificial Sequence
  Synthetic
agugacaguguuugcag

SEQ ID NO: 754668 - RNA, 17 nt, Artificial Sequence
  Synthetic
cuucuuuaauuuugcag

SEQ ID NO: 754669 - RNA, 17 nt, Artificial Sequence
  Synthetic
uuggcaugauuuugcag

SEQ ID NO: 754670 - RNA, 17 nt, Artificial Sequence
  Synthetic
ucuuuuauauuuugcag

SEQ ID NO: 754671 - RNA, 17 nt, Artificial Sequence
  Synthetic
acuggaacaaaaaucag

SEQ ID NO: 754672 - RNA, 17 nt, Artificial Sequence
  Synthetic
aaaaggagaaaaaucag

SEQ ID NO: 754673 - RNA, 17 nt, Artificial Sequence
  Synthetic
uguaagugaaaaaucag

SEQ ID NO: 754674 - RNA, 17 nt, Artificial Sequence
  Synthetic
uuuguuuacaaaaucag

SEQ ID NO: 754675 - RNA, 17 nt, Artificial Sequence
  Synthetic
agcuauuccaaaaucag

SEQ ID NO: 754676 - RNA, 17 nt, Artificial Sequence
  Synthetic
uuccaaauuaaaaucag

SEQ ID NO: 754677 - RNA, 17 nt, Artificial Sequence
  Synthetic
aacaugagacaaaucag

SEQ ID NO: 754678 - RNA, 17 nt, Artificial Sequence
  Synthetic
uuugcuguuacaaucag

SEQ ID NO: 754679 - RNA, 17 nt, Artificial Sequence
  Synthetic
uuacguuaagcaaucag

SEQ ID NO: 754680 - RNA, 17 nt, Artificial Sequence
  Synthetic
aagugaaguucaaucag

SEQ ID NO: 754681 - RNA, 17 nt, Artificial Sequence
  Synthetic
ugguuaggaagaaucag

SEQ ID NO: 754682 - RNA, 17 nt, Artificial Sequence
  Synthetic
aaagaauucagaaucag

SEQ ID NO: 754683 - RNA, 17 nt, Artificial Sequence
  Synthetic
agugauuagagaaucag

SEQ ID NO: 754684 - RNA, 17 nt, Artificial Sequence
  Synthetic
ccuauuuuuagaaucag

SEQ ID NO: 754685 - RNA, 17 nt, Artificial Sequence
  Synthetic
accaggcagggaaucag

SEQ ID NO: 754686 - RNA, 17 nt, Artificial Sequence
  Synthetic
cugacuuugggaaucag

SEQ ID NO: 754687 - RNA, 17 nt, Artificial Sequence
  Synthetic
uugaguaaaugaaucag

SEQ ID NO: 754688 - RNA, 17 nt, Artificial Sequence
  Synthetic
cagaaaaaaauaaucag

SEQ ID NO: 754689 - RNA, 17 nt, Artificial Sequence
  Synthetic
uaaggaaggauaaucag

SEQ ID NO: 754690 - RNA, 17 nt, Artificial Sequence
  Synthetic
uuuuccugacuaaucag

SEQ ID NO: 754691 - RNA, 17 nt, Artificial Sequence
  Synthetic
aagauaacucuaaucag

SEQ ID NO: 754692 - RNA, 17 nt, Artificial Sequence
  Synthetic
auagugcuaguaaucag

SEQ ID NO: 754693 - RNA, 17 nt, Artificial Sequence
  Synthetic
uuaagaggaaacaucag

SEQ ID NO: 754694 - RNA, 17 nt, Artificial Sequence
  Synthetic
uucuauuacaacaucag

SEQ ID NO: 754695 - RNA, 17 nt, Artificial Sequence
  Synthetic
uuacuaguccacaucag

SEQ ID NO: 754696 - RNA, 17 nt, Artificial Sequence
  Synthetic
ugaaauaacaccaucag

SEQ ID NO: 754697 - RNA, 17 nt, Artificial Sequence
  Synthetic
uuaaaucaucccaucag

SEQ ID NO: 754698 - RNA, 17 nt, Artificial Sequence
  Synthetic
uuacccagauccaucag

SEQ ID NO: 754699 - RNA, 17 nt, Artificial Sequence
  Synthetic
uuauccagauccaucag

SEQ ID NO: 754700 - RNA, 17 nt, Artificial Sequence
  Synthetic
accuaaacguccaucag

SEQ ID NO: 754701 - RNA, 17 nt, Artificial Sequence
  Synthetic
accuaaguuuccaucag

SEQ ID NO: 754702 - RNA, 17 nt, Artificial Sequence
  Synthetic
cauaggguuuccaucag

SEQ ID NO: 754703 - RNA, 17 nt, Artificial Sequence
  Synthetic
augccagucagcaucag

SEQ ID NO: 754704 - RNA, 17 nt, Artificial Sequence
  Synthetic
ccaugggaaaucaucag

SEQ ID NO: 754705 - RNA, 17 nt, Artificial Sequence
  Synthetic
auuucauaacucaucag

SEQ ID NO: 754706 - RNA, 17 nt, Artificial Sequence
  Synthetic
uguuaaaaagucaucag

SEQ ID NO: 754707 - RNA, 17 nt, Artificial Sequence
  Synthetic
accaugcaguucaucag

SEQ ID NO: 754708 - RNA, 17 nt, Artificial Sequence
  Synthetic
uucaauauuuucaucag

SEQ ID NO: 754709 - RNA, 17 nt, Artificial Sequence
  Synthetic
cgguagcuggagaucag

SEQ ID NO: 754710 - RNA, 17 nt, Artificial Sequence
  Synthetic
acagagauauagaucag

SEQ ID NO: 754711 - RNA, 17 nt, Artificial Sequence
  Synthetic
ugaaauagcuagaucag

SEQ ID NO: 754712 - RNA, 17 nt, Artificial Sequence
  Synthetic
uagaagaaguagaucag

SEQ ID NO: 754713 - RNA, 17 nt, Artificial Sequence
  Synthetic
uucagaauuuagaucag

SEQ ID NO: 754714 - RNA, 17 nt, Artificial Sequence
  Synthetic
auugauagaaggaucag

SEQ ID NO: 754715 - RNA, 17 nt, Artificial Sequence
  Synthetic
uuuuuccagaggaucag

SEQ ID NO: 754716 - RNA, 17 nt, Artificial Sequence
  Synthetic
auuuuuccauggaucag

SEQ ID NO: 754717 - RNA, 17 nt, Artificial Sequence
  Synthetic
uccaaaugguggaucag

SEQ ID NO: 754718 - RNA, 17 nt, Artificial Sequence
  Synthetic
agggaauggcugaucag

SEQ ID NO: 754719 - RNA, 17 nt, Artificial Sequence
  Synthetic
ugcaauaaugugaucag

SEQ ID NO: 754720 - RNA, 17 nt, Artificial Sequence
  Synthetic
uguguagcaaauaucag

SEQ ID NO: 754721 - RNA, 17 nt, Artificial Sequence
  Synthetic
uaaauucacaauaucag

SEQ ID NO: 754722 - RNA, 17 nt, Artificial Sequence
  Synthetic
aaugaaaguaauaucag

SEQ ID NO: 754723 - RNA, 17 nt, Artificial Sequence
  Synthetic
ucugaccuggauaucag

SEQ ID NO: 754724 - RNA, 17 nt, Artificial Sequence
  Synthetic
agaaaggaauauaucag

SEQ ID NO: 754725 - RNA, 17 nt, Artificial Sequence
  Synthetic
aaaacagaguauaucag

SEQ ID NO: 754726 - RNA, 17 nt, Artificial Sequence
  Synthetic
acaauggggccuaucag

SEQ ID NO: 754727 - RNA, 17 nt, Artificial Sequence
  Synthetic
acccacauuucuaucag

SEQ ID NO: 754728 - RNA, 17 nt, Artificial Sequence
  Synthetic
agcucaaaacguaucag

SEQ ID NO: 754729 - RNA, 17 nt, Artificial Sequence
  Synthetic
ccacuuaaauguaucag

SEQ ID NO: 754730 - RNA, 17 nt, Artificial Sequence
  Synthetic
auugauuaacuuaucag

SEQ ID NO: 754731 - RNA, 17 nt, Artificial Sequence
  Synthetic
ugaauuagaguuaucag

SEQ ID NO: 754732 - RNA, 17 nt, Artificial Sequence
  Synthetic
cacagcuggguuaucag

SEQ ID NO: 754733 - RNA, 17 nt, Artificial Sequence
  Synthetic
cuaaguauuguuaucag

SEQ ID NO: 754734 - RNA, 17 nt, Artificial Sequence
  Synthetic
ccaggaaacuuuaucag

SEQ ID NO: 754735 - RNA, 17 nt, Artificial Sequence
  Synthetic
aggugucacuuuaucag

SEQ ID NO: 754736 - RNA, 17 nt, Artificial Sequence
  Synthetic
ucuguugguuuuaucag

SEQ ID NO: 754737 - RNA, 17 nt, Artificial Sequence
  Synthetic
uugaaugaagaacucag

SEQ ID NO: 754738 - RNA, 17 nt, Artificial Sequence
  Synthetic
uguaaauaagaacucag

SEQ ID NO: 754739 - RNA, 17 nt, Artificial Sequence
  Synthetic
ugucucuuagaacucag

SEQ ID NO: 754740 - RNA, 17 nt, Artificial Sequence
  Synthetic
acuggucuggaacucag

SEQ ID NO: 754741 - RNA, 17 nt, Artificial Sequence
  Synthetic
cuuucucuugaacucag

SEQ ID NO: 754742 - RNA, 17 nt, Artificial Sequence
  Synthetic
uuacacaguuaacucag

SEQ ID NO: 754743 - RNA, 17 nt, Artificial Sequence
  Synthetic
uuggaaacgagacucag

SEQ ID NO: 754744 - RNA, 17 nt, Artificial Sequence
  Synthetic
agauaacugagacucag

SEQ ID NO: 754745 - RNA, 17 nt, Artificial Sequence
  Synthetic
uuuuaauguagacucag

SEQ ID NO: 754746 - RNA, 17 nt, Artificial Sequence
  Synthetic
aaucuucauugacucag

SEQ ID NO: 754747 - RNA, 17 nt, Artificial Sequence
  Synthetic
uuauuaaacauacucag

SEQ ID NO: 754748 - RNA, 17 nt, Artificial Sequence
  Synthetic
cccaauuccauacucag

SEQ ID NO: 754749 - RNA, 17 nt, Artificial Sequence
  Synthetic
uaguaccagcuacucag

SEQ ID NO: 754750 - RNA, 17 nt, Artificial Sequence
  Synthetic
caauguuacuuacucag

SEQ ID NO: 754751 - RNA, 17 nt, Artificial Sequence
  Synthetic
aaaagcccacaccucag

SEQ ID NO: 754752 - RNA, 17 nt, Artificial Sequence
  Synthetic
augcucaguuaccucag

SEQ ID NO: 754753 - RNA, 17 nt, Artificial Sequence
  Synthetic
aaaaagcauacccucag

SEQ ID NO: 754754 - RNA, 17 nt, Artificial Sequence
  Synthetic
uaguuuuggggccucag

SEQ ID NO: 754755 - RNA, 17 nt, Artificial Sequence
  Synthetic
ucugcaaggugccucag

SEQ ID NO: 754756 - RNA, 17 nt, Artificial Sequence
  Synthetic
aggcguuaacagcucag

SEQ ID NO: 754757 - RNA, 17 nt, Artificial Sequence
  Synthetic
cccuggacacagcucag

SEQ ID NO: 754758 - RNA, 17 nt, Artificial Sequence
  Synthetic
ugguugucacagcucag

SEQ ID NO: 754759 - RNA, 17 nt, Artificial Sequence
  Synthetic
ucugcucuccagcucag

SEQ ID NO: 754760 - RNA, 17 nt, Artificial Sequence
  Synthetic
ucguguguccagcucag

SEQ ID NO: 754761 - RNA, 17 nt, Artificial Sequence
  Synthetic
caaguggucuagcucag

SEQ ID NO: 754762 - RNA, 17 nt, Artificial Sequence
  Synthetic
cuuaaaaaccugcucag

SEQ ID NO: 754763 - RNA, 17 nt, Artificial Sequence
  Synthetic
acucggaaugugcucag

SEQ ID NO: 754764 - RNA, 17 nt, Artificial Sequence
  Synthetic
caauaaauuuugcucag

SEQ ID NO: 754765 - RNA, 17 nt, Artificial Sequence
  Synthetic
caggugagaaaucucag

SEQ ID NO: 754766 - RNA, 17 nt, Artificial Sequence
  Synthetic
aaggaccacaaucucag

SEQ ID NO: 754767 - RNA, 17 nt, Artificial Sequence
  Synthetic
aagccagcacaucucag

SEQ ID NO: 754768 - RNA, 17 nt, Artificial Sequence
  Synthetic
uauugcauauaucucag

SEQ ID NO: 754769 - RNA, 17 nt, Artificial Sequence
  Synthetic
uuuuugcuguaucucag

SEQ ID NO: 754770 - RNA, 17 nt, Artificial Sequence
  Synthetic
cuggcuuugacucucag

SEQ ID NO: 754771 - RNA, 17 nt, Artificial Sequence
  Synthetic
acaccggggccucucag

SEQ ID NO: 754772 - RNA, 17 nt, Artificial Sequence
  Synthetic
uauguccuuccucucag

SEQ ID NO: 754773 - RNA, 17 nt, Artificial Sequence
  Synthetic
cuucaaagagcucucag

SEQ ID NO: 754774 - RNA, 17 nt, Artificial Sequence
  Synthetic
augaaaguggcucucag

SEQ ID NO: 754775 - RNA, 17 nt, Artificial Sequence
  Synthetic
uuacaaugaucucucag

SEQ ID NO: 754776 - RNA, 17 nt, Artificial Sequence
  Synthetic
uccugcauaucucucag

SEQ ID NO: 754777 - RNA, 17 nt, Artificial Sequence
  Synthetic
cacaaucacucucucag

SEQ ID NO: 754778 - RNA, 17 nt, Artificial Sequence
  Synthetic
ugguauguuucucucag

SEQ ID NO: 754779 - RNA, 17 nt, Artificial Sequence
  Synthetic
cuucucucuagucucag

SEQ ID NO: 754780 - RNA, 17 nt, Artificial Sequence
  Synthetic
cacaaaaguggucucag

SEQ ID NO: 754781 - RNA, 17 nt, Artificial Sequence
  Synthetic
aaccuucagugucucag

SEQ ID NO: 754782 - RNA, 17 nt, Artificial Sequence
  Synthetic
uaagacaacauucucag

SEQ ID NO: 754783 - RNA, 17 nt, Artificial Sequence
  Synthetic
uucuuaauuauucucag

SEQ ID NO: 754784 - RNA, 17 nt, Artificial Sequence
  Synthetic
uaauccaagcuucucag

SEQ ID NO: 754785 - RNA, 17 nt, Artificial Sequence
  Synthetic
auggcuuuucuucucag

SEQ ID NO: 754786 - RNA, 17 nt, Artificial Sequence
  Synthetic
cucuaacaaguucucag

SEQ ID NO: 754787 - RNA, 17 nt, Artificial Sequence
  Synthetic
ucaaguggaguucucag

SEQ ID NO: 754788 - RNA, 17 nt, Artificial Sequence
  Synthetic
uauguagaauuucucag

SEQ ID NO: 754789 - RNA, 17 nt, Artificial Sequence
  Synthetic
agcaaaaauuuucucag

SEQ ID NO: 754790 - RNA, 17 nt, Artificial Sequence
  Synthetic
accucucuuuuucucag

SEQ ID NO: 754791 - RNA, 17 nt, Artificial Sequence
  Synthetic
ucuguaaagaaagucag

SEQ ID NO: 754792 - RNA, 17 nt, Artificial Sequence
  Synthetic
uaaaaguagcaagucag

SEQ ID NO: 754793 - RNA, 17 nt, Artificial Sequence
  Synthetic
agaaauacucaagucag

SEQ ID NO: 754794 - RNA, 17 nt, Artificial Sequence
  Synthetic
uauaagaaggaagucag

SEQ ID NO: 754795 - RNA, 17 nt, Artificial Sequence
  Synthetic
ccaaugcugccagucag

SEQ ID NO: 754796 - RNA, 17 nt, Artificial Sequence
  Synthetic
uauucaccaucagucag

SEQ ID NO: 754797 - RNA, 17 nt, Artificial Sequence
  Synthetic
uugaaccagggagucag

SEQ ID NO: 754798 - RNA, 17 nt, Artificial Sequence
  Synthetic
cuuaagaauggagucag

SEQ ID NO: 754799 - RNA, 17 nt, Artificial Sequence
  Synthetic
ugagcguuuggagucag

SEQ ID NO: 754800 - RNA, 17 nt, Artificial Sequence
  Synthetic
aagcaucugauagucag

SEQ ID NO: 754801 - RNA, 17 nt, Artificial Sequence
  Synthetic
cugagcauuauagucag

SEQ ID NO: 754802 - RNA, 17 nt, Artificial Sequence
  Synthetic
ccuuguccuguagucag

SEQ ID NO: 754803 - RNA, 17 nt, Artificial Sequence
  Synthetic
auaaauuacaaggucag

SEQ ID NO: 754804 - RNA, 17 nt, Artificial Sequence
  Synthetic
aaaacagccaaggucag

SEQ ID NO: 754805 - RNA, 17 nt, Artificial Sequence
  Synthetic
augucagucaaggucag

SEQ ID NO: 754806 - RNA, 17 nt, Artificial Sequence
  Synthetic
aagaacaggcaggucag

SEQ ID NO: 754807 - RNA, 17 nt, Artificial Sequence
  Synthetic
augcauauucaggucag

SEQ ID NO: 754808 - RNA, 17 nt, Artificial Sequence
  Synthetic
ugguucaaggaggucag

SEQ ID NO: 754809 - RNA, 17 nt, Artificial Sequence
  Synthetic
uuauuucaggaggucag

SEQ ID NO: 754810 - RNA, 17 nt, Artificial Sequence
  Synthetic
agagagcagagggucag

SEQ ID NO: 754811 - RNA, 17 nt, Artificial Sequence
  Synthetic
cagggagacggggucag

SEQ ID NO: 754812 - RNA, 17 nt, Artificial Sequence
  Synthetic
caaaagggcugggucag

SEQ ID NO: 754813 - RNA, 17 nt, Artificial Sequence
  Synthetic
cuagaggagugggucag

SEQ ID NO: 754814 - RNA, 17 nt, Artificial Sequence
  Synthetic
agggcuguguuggucag

SEQ ID NO: 754815 - RNA, 17 nt, Artificial Sequence
  Synthetic
agaguacacaaugucag

SEQ ID NO: 754816 - RNA, 17 nt, Artificial Sequence
  Synthetic
uccaaucugaaugucag

SEQ ID NO: 754817 - RNA, 17 nt, Artificial Sequence
  Synthetic
uuguuugguaaugucag

SEQ ID NO: 754818 - RNA, 17 nt, Artificial Sequence
  Synthetic
ccgcaagaacaugucag

SEQ ID NO: 754819 - RNA, 17 nt, Artificial Sequence
  Synthetic
caggucagccaugucag

SEQ ID NO: 754820 - RNA, 17 nt, Artificial Sequence
  Synthetic
ucuccagggcaugucag

SEQ ID NO: 754821 - RNA, 17 nt, Artificial Sequence
  Synthetic
auagauauucaugucag

SEQ ID NO: 754822 - RNA, 17 nt, Artificial Sequence
  Synthetic
uggugcuuucaugucag

SEQ ID NO: 754823 - RNA, 17 nt, Artificial Sequence
  Synthetic
cuguauuuuuaugucag

SEQ ID NO: 754824 - RNA, 17 nt, Artificial Sequence
  Synthetic
uccuaccccacugucag

SEQ ID NO: 754825 - RNA, 17 nt, Artificial Sequence
  Synthetic
acacuggggccugucag

SEQ ID NO: 754826 - RNA, 17 nt, Artificial Sequence
  Synthetic
uaguagaguccugucag

SEQ ID NO: 754827 - RNA, 17 nt, Artificial Sequence
  Synthetic
auguauggcagugucag

SEQ ID NO: 754828 - RNA, 17 nt, Artificial Sequence
  Synthetic
uugagcaauagugucag

SEQ ID NO: 754829 - RNA, 17 nt, Artificial Sequence
  Synthetic
aaaauguuuugugucag

SEQ ID NO: 754830 - RNA, 17 nt, Artificial Sequence
  Synthetic
aucaaauuacuugucag

SEQ ID NO: 754831 - RNA, 17 nt, Artificial Sequence
  Synthetic
auuaugcuucuugucag

SEQ ID NO: 754832 - RNA, 17 nt, Artificial Sequence
  Synthetic
agcuauugaaaauucag

SEQ ID NO: 754833 - RNA, 17 nt, Artificial Sequence
  Synthetic
aaacaaaggaaauucag

SEQ ID NO: 754834 - RNA, 17 nt, Artificial Sequence
  Synthetic
caaaguguacaauucag

SEQ ID NO: 754835 - RNA, 17 nt, Artificial Sequence
  Synthetic
ucuaaaauagaauucag

SEQ ID NO: 754836 - RNA, 17 nt, Artificial Sequence
  Synthetic
cucugccuagaauucag

SEQ ID NO: 754837 - RNA, 17 nt, Artificial Sequence
  Synthetic
agggugguagaauucag

SEQ ID NO: 754838 - RNA, 17 nt, Artificial Sequence
  Synthetic
ugguucuaugaauucag

SEQ ID NO: 754839 - RNA, 17 nt, Artificial Sequence
  Synthetic
aaaaaaauuuaauucag

SEQ ID NO: 754840 - RNA, 17 nt, Artificial Sequence
  Synthetic
cgaaguauuuaauucag

SEQ ID NO: 754841 - RNA, 17 nt, Artificial Sequence
  Synthetic
aacauguuaccauucag

SEQ ID NO: 754842 - RNA, 17 nt, Artificial Sequence
  Synthetic
ccauaauguagauucag

SEQ ID NO: 754843 - RNA, 17 nt, Artificial Sequence
  Synthetic
uuuuauuuuagauucag

SEQ ID NO: 754844 - RNA, 17 nt, Artificial Sequence
  Synthetic
uaaggauuaugauucag

SEQ ID NO: 754845 - RNA, 17 nt, Artificial Sequence
  Synthetic
ugcagauugugauucag

SEQ ID NO: 754846 - RNA, 17 nt, Artificial Sequence
  Synthetic
uagugcuuuugauucag

SEQ ID NO: 754847 - RNA, 17 nt, Artificial Sequence
  Synthetic
aacauaaaaauauucag

SEQ ID NO: 754848 - RNA, 17 nt, Artificial Sequence
  Synthetic
aacauuuuaauauucag

SEQ ID NO: 754849 - RNA, 17 nt, Artificial Sequence
  Synthetic
agcugaagcauauucag

SEQ ID NO: 754850 - RNA, 17 nt, Artificial Sequence
  Synthetic
aacucaccuauauucag

SEQ ID NO: 754851 - RNA, 17 nt, Artificial Sequence
  Synthetic
cucuugucccuauucag

SEQ ID NO: 754852 - RNA, 17 nt, Artificial Sequence
  Synthetic
ucacauuaucuauucag

SEQ ID NO: 754853 - RNA, 17 nt, Artificial Sequence
  Synthetic
agguauuacguauucag

SEQ ID NO: 754854 - RNA, 17 nt, Artificial Sequence
  Synthetic
aaacacugauuauucag

SEQ ID NO: 754855 - RNA, 17 nt, Artificial Sequence
  Synthetic
ccaauuacuuuauucag

SEQ ID NO: 754856 - RNA, 17 nt, Artificial Sequence
  Synthetic
ucaagguaaaacuucag

SEQ ID NO: 754857 - RNA, 17 nt, Artificial Sequence
  Synthetic
caacauugaaacuucag

SEQ ID NO: 754858 - RNA, 17 nt, Artificial Sequence
  Synthetic
ccagcagugaacuucag

SEQ ID NO: 754859 - RNA, 17 nt, Artificial Sequence
  Synthetic
aaaauuauucacuucag

SEQ ID NO: 754860 - RNA, 17 nt, Artificial Sequence
  Synthetic
acucugacagacuucag

SEQ ID NO: 754861 - RNA, 17 nt, Artificial Sequence
  Synthetic
auccggcuggacuucag

SEQ ID NO: 754862 - RNA, 17 nt, Artificial Sequence
  Synthetic
uuccaaaaugacuucag

SEQ ID NO: 754863 - RNA, 17 nt, Artificial Sequence
  Synthetic
aagcagcuugacuucag

SEQ ID NO: 754864 - RNA, 17 nt, Artificial Sequence
  Synthetic
ucccacauguacuucag

SEQ ID NO: 754865 - RNA, 17 nt, Artificial Sequence
  Synthetic
aaacuauauuacuucag

SEQ ID NO: 754866 - RNA, 17 nt, Artificial Sequence
  Synthetic
agaugauuucccuucag

SEQ ID NO: 754867 - RNA, 17 nt, Artificial Sequence
  Synthetic
uuccccagagccuucag

SEQ ID NO: 754868 - RNA, 17 nt, Artificial Sequence
  Synthetic
aaaucaaaugccuucag

SEQ ID NO: 754869 - RNA, 17 nt, Artificial Sequence
  Synthetic
acugaggauuccuucag

SEQ ID NO: 754870 - RNA, 17 nt, Artificial Sequence
  Synthetic
acccucuggggcuucag

SEQ ID NO: 754871 - RNA, 17 nt, Artificial Sequence
  Synthetic
ucucuacaaugcuucag

SEQ ID NO: 754872 - RNA, 17 nt, Artificial Sequence
  Synthetic
cucaugaccugcuucag

SEQ ID NO: 754873 - RNA, 17 nt, Artificial Sequence
  Synthetic
ucggaccauugcuucag

SEQ ID NO: 754874 - RNA, 17 nt, Artificial Sequence
  Synthetic
ugaaaucauugcuucag

SEQ ID NO: 754875 - RNA, 17 nt, Artificial Sequence
  Synthetic
ucaggcuguugcuucag

SEQ ID NO: 754876 - RNA, 17 nt, Artificial Sequence
  Synthetic
ucuuucucgaucuucag

SEQ ID NO: 754877 - RNA, 17 nt, Artificial Sequence
  Synthetic
caaugggagcucuucag

SEQ ID NO: 754878 - RNA, 17 nt, Artificial Sequence
  Synthetic
ucagcaguagucuucag

SEQ ID NO: 754879 - RNA, 17 nt, Artificial Sequence
  Synthetic
auucuaacuuucuucag

SEQ ID NO: 754880 - RNA, 17 nt, Artificial Sequence
  Synthetic
auauaucucaaguucag

SEQ ID NO: 754881 - RNA, 17 nt, Artificial Sequence
  Synthetic
cauaacuggaaguucag

SEQ ID NO: 754882 - RNA, 17 nt, Artificial Sequence
  Synthetic
uucacuuuuaaguucag

SEQ ID NO: 754883 - RNA, 17 nt, Artificial Sequence
  Synthetic
uuaaguauacaguucag

SEQ ID NO: 754884 - RNA, 17 nt, Artificial Sequence
  Synthetic
aaguguauacaguucag

SEQ ID NO: 754885 - RNA, 17 nt, Artificial Sequence
  Synthetic
uucuugacugaguucag

SEQ ID NO: 754886 - RNA, 17 nt, Artificial Sequence
  Synthetic
auuuugccugaguucag

SEQ ID NO: 754887 - RNA, 17 nt, Artificial Sequence
  Synthetic
uggucucucuaguucag

SEQ ID NO: 754888 - RNA, 17 nt, Artificial Sequence
  Synthetic
uuuuaaauuagguucag

SEQ ID NO: 754889 - RNA, 17 nt, Artificial Sequence
  Synthetic
aguauuuuaggguucag

SEQ ID NO: 754890 - RNA, 17 nt, Artificial Sequence
  Synthetic
aauuauaaaauguucag

SEQ ID NO: 754891 - RNA, 17 nt, Artificial Sequence
  Synthetic
auguuccagauguucag

SEQ ID NO: 754892 - RNA, 17 nt, Artificial Sequence
  Synthetic
agaagaacaguguucag

SEQ ID NO: 754893 - RNA, 17 nt, Artificial Sequence
  Synthetic
acauuuaauguguucag

SEQ ID NO: 754894 - RNA, 17 nt, Artificial Sequence
  Synthetic
ugaggcucuguguucag

SEQ ID NO: 754895 - RNA, 17 nt, Artificial Sequence
  Synthetic
augaccaaauuguucag

SEQ ID NO: 754896 - RNA, 17 nt, Artificial Sequence
  Synthetic
uccuuccaaaauuucag

SEQ ID NO: 754897 - RNA, 17 nt, Artificial Sequence
  Synthetic
auuugaggaaauuucag

SEQ ID NO: 754898 - RNA, 17 nt, Artificial Sequence
  Synthetic
aucuuacagaauuucag

SEQ ID NO: 754899 - RNA, 17 nt, Artificial Sequence
  Synthetic
uaauuggauaauuucag

SEQ ID NO: 754900 - RNA, 17 nt, Artificial Sequence
  Synthetic
uacaaaaguaauuucag

SEQ ID NO: 754901 - RNA, 17 nt, Artificial Sequence
  Synthetic
uauucagaacauuucag

SEQ ID NO: 754902 - RNA, 17 nt, Artificial Sequence
  Synthetic
cuuacagcacauuucag

SEQ ID NO: 754903 - RNA, 17 nt, Artificial Sequence
  Synthetic
ccgagaccccauuucag

SEQ ID NO: 754904 - RNA, 17 nt, Artificial Sequence
  Synthetic
cuuaucucucauuucag

SEQ ID NO: 754905 - RNA, 17 nt, Artificial Sequence
  Synthetic
agacuuguucauuucag

SEQ ID NO: 754906 - RNA, 17 nt, Artificial Sequence
  Synthetic
uucuaccuagauuucag

SEQ ID NO: 754907 - RNA, 17 nt, Artificial Sequence
  Synthetic
cucugccuagauuucag

SEQ ID NO: 754908 - RNA, 17 nt, Artificial Sequence
  Synthetic
cagaauauggauuucag

SEQ ID NO: 754909 - RNA, 17 nt, Artificial Sequence
  Synthetic
uuugagaaauauuucag

SEQ ID NO: 754910 - RNA, 17 nt, Artificial Sequence
  Synthetic
ugaacuaaauauuucag

SEQ ID NO: 754911 - RNA, 17 nt, Artificial Sequence
  Synthetic
uguugcuaauauuucag

SEQ ID NO: 754912 - RNA, 17 nt, Artificial Sequence
  Synthetic
auguauacauauuucag

SEQ ID NO: 754913 - RNA, 17 nt, Artificial Sequence
  Synthetic
ugauuccucuauuucag

SEQ ID NO: 754914 - RNA, 17 nt, Artificial Sequence
  Synthetic
aauugcuuuuauuucag

SEQ ID NO: 754915 - RNA, 17 nt, Artificial Sequence
  Synthetic
ugcuuuaaaccuuucag

SEQ ID NO: 754916 - RNA, 17 nt, Artificial Sequence
  Synthetic
uauauuguggcuuucag

SEQ ID NO: 754917 - RNA, 17 nt, Artificial Sequence
  Synthetic
ucucaacgaucuuucag

SEQ ID NO: 754918 - RNA, 17 nt, Artificial Sequence
  Synthetic
cucacguucucuuucag

SEQ ID NO: 754919 - RNA, 17 nt, Artificial Sequence
  Synthetic
cuagccaugucuuucag

SEQ ID NO: 754920 - RNA, 17 nt, Artificial Sequence
  Synthetic
aaauggcaaaguuucag

SEQ ID NO: 754921 - RNA, 17 nt, Artificial Sequence
  Synthetic
ucaccugaggguuucag

SEQ ID NO: 754922 - RNA, 17 nt, Artificial Sequence
  Synthetic
auaaaacaugguuucag

SEQ ID NO: 754923 - RNA, 17 nt, Artificial Sequence
  Synthetic
aauuuaauugguuucag

SEQ ID NO: 754924 - RNA, 17 nt, Artificial Sequence
  Synthetic
auaauuuacuguuucag

SEQ ID NO: 754925 - RNA, 17 nt, Artificial Sequence
  Synthetic
uuucuggaguguuucag

SEQ ID NO: 754926 - RNA, 17 nt, Artificial Sequence
  Synthetic
cacauauauuguuucag

SEQ ID NO: 754927 - RNA, 17 nt, Artificial Sequence
  Synthetic
augucaagaauuuucag

SEQ ID NO: 754928 - RNA, 17 nt, Artificial Sequence
  Synthetic
cuuuucuuaauuuucag

SEQ ID NO: 754929 - RNA, 17 nt, Artificial Sequence
  Synthetic
acugaagucauuuucag

SEQ ID NO: 754930 - RNA, 17 nt, Artificial Sequence
  Synthetic
ccucaucagauuuucag

SEQ ID NO: 754931 - RNA, 17 nt, Artificial Sequence
  Synthetic
uucaugaauauuuucag

SEQ ID NO: 754932 - RNA, 17 nt, Artificial Sequence
  Synthetic
auucuaacaguuuucag

SEQ ID NO: 754933 - RNA, 17 nt, Artificial Sequence
  Synthetic
aauguugagguuuucag

SEQ ID NO: 754934 - RNA, 17 nt, Artificial Sequence
  Synthetic
ccaggcccuguuuucag

SEQ ID NO: 754935 - RNA, 17 nt, Artificial Sequence
  Synthetic
ugucccuguguuuucag

SEQ ID NO: 754936 - RNA, 17 nt, Artificial Sequence
  Synthetic
uaaaaucacuuuuucag

SEQ ID NO: 754937 - RNA, 17 nt, Artificial Sequence
  Synthetic
uauuaugaguuuuucag

SEQ ID NO: 754938 - RNA, 17 nt, Artificial Sequence
  Synthetic
uuuugguuguuuuucag

SEQ ID NO: 754939 - RNA, 17 nt, Artificial Sequence
  Synthetic
auagaaaaaaaaaagag

SEQ ID NO: 754940 - RNA, 17 nt, Artificial Sequence
  Synthetic
auuaaaauaaaaaagag

SEQ ID NO: 754941 - RNA, 17 nt, Artificial Sequence
  Synthetic
cuggggcagaaaaagag

SEQ ID NO: 754942 - RNA, 17 nt, Artificial Sequence
  Synthetic
uccucugagaaaaagag

SEQ ID NO: 754943 - RNA, 17 nt, Artificial Sequence
  Synthetic
aaaacauuuaaaaagag

SEQ ID NO: 754944 - RNA, 17 nt, Artificial Sequence
  Synthetic
uuauauuuuaaaaagag

SEQ ID NO: 754945 - RNA, 17 nt, Artificial Sequence
  Synthetic
agaggcgaccaaaagag

SEQ ID NO: 754946 - RNA, 17 nt, Artificial Sequence
  Synthetic
agcaaacagcaaaagag

SEQ ID NO: 754947 - RNA, 17 nt, Artificial Sequence
  Synthetic
uuuaaaaaagaaaagag

SEQ ID NO: 754948 - RNA, 17 nt, Artificial Sequence
  Synthetic
aauaauaaagaaaagag

SEQ ID NO: 754949 - RNA, 17 nt, Artificial Sequence
  Synthetic
ucaaaaauagaaaagag

SEQ ID NO: 754950 - RNA, 17 nt, Artificial Sequence
  Synthetic
uacaugguagaaaagag

SEQ ID NO: 754951 - RNA, 17 nt, Artificial Sequence
  Synthetic
aggaaaucauaaaagag

SEQ ID NO: 754952 - RNA, 17 nt, Artificial Sequence
  Synthetic
auacauuauuaaaagag

SEQ ID NO: 754953 - RNA, 17 nt, Artificial Sequence
  Synthetic
cauauggacacaaagag

SEQ ID NO: 754954 - RNA, 17 nt, Artificial Sequence
  Synthetic
uaccauucaccaaagag

SEQ ID NO: 754955 - RNA, 17 nt, Artificial Sequence
  Synthetic
uaguugaacccaaagag

SEQ ID NO: 754956 - RNA, 17 nt, Artificial Sequence
  Synthetic
aauuaaaaaagaaagag

SEQ ID NO: 754957 - RNA, 17 nt, Artificial Sequence
  Synthetic
ccuuguaaaagaaagag

SEQ ID NO: 754958 - RNA, 17 nt, Artificial Sequence
  Synthetic
uccuuuugcagaaagag

SEQ ID NO: 754959 - RNA, 17 nt, Artificial Sequence
  Synthetic
ucaaacaagagaaagag

SEQ ID NO: 754960 - RNA, 17 nt, Artificial Sequence
  Synthetic
caguaggggggaaagag

SEQ ID NO: 754961 - RNA, 17 nt, Artificial Sequence
  Synthetic
cagagauuaugaaagag

SEQ ID NO: 754962 - RNA, 17 nt, Artificial Sequence
  Synthetic
caaggccagugaaagag

SEQ ID NO: 754963 - RNA, 17 nt, Artificial Sequence
  Synthetic
aaggagccuugaaagag

SEQ ID NO: 754964 - RNA, 17 nt, Artificial Sequence
  Synthetic
uuucuagaaauaaagag

SEQ ID NO: 754965 - RNA, 17 nt, Artificial Sequence
  Synthetic
acaauagggauaaagag

SEQ ID NO: 754966 - RNA, 17 nt, Artificial Sequence
  Synthetic
uggacucagcuaaagag

SEQ ID NO: 754967 - RNA, 17 nt, Artificial Sequence
  Synthetic
aggcagccaguaaagag

SEQ ID NO: 754968 - RNA, 17 nt, Artificial Sequence
  Synthetic
agaggaggaguaaagag

SEQ ID NO: 754969 - RNA, 17 nt, Artificial Sequence
  Synthetic
uucugaaguguaaagag

SEQ ID NO: 754970 - RNA, 17 nt, Artificial Sequence
  Synthetic
agaguguuauuaaagag

SEQ ID NO: 754971 - RNA, 17 nt, Artificial Sequence
  Synthetic
uuauuucccaacaagag

SEQ ID NO: 754972 - RNA, 17 nt, Artificial Sequence
  Synthetic
ugcccagucaacaagag

SEQ ID NO: 754973 - RNA, 17 nt, Artificial Sequence
  Synthetic
aaguuggaacacaagag

SEQ ID NO: 754974 - RNA, 17 nt, Artificial Sequence
  Synthetic
cuuuaaucacacaagag

SEQ ID NO: 754975 - RNA, 17 nt, Artificial Sequence
  Synthetic
uaugaaaggcacaagag

SEQ ID NO: 754976 - RNA, 17 nt, Artificial Sequence
  Synthetic
auaggagaagacaagag

SEQ ID NO: 754977 - RNA, 17 nt, Artificial Sequence
  Synthetic
auuaugagagacaagag

SEQ ID NO: 754978 - RNA, 17 nt, Artificial Sequence
  Synthetic
augaaaaucgacaagag

SEQ ID NO: 754979 - RNA, 17 nt, Artificial Sequence
  Synthetic
uuuuccagggacaagag

SEQ ID NO: 754980 - RNA, 17 nt, Artificial Sequence
  Synthetic
uugaugggguacaagag

SEQ ID NO: 754981 - RNA, 17 nt, Artificial Sequence
  Synthetic
aaacagcaaaccaagag

SEQ ID NO: 754982 - RNA, 17 nt, Artificial Sequence
  Synthetic
augucgaaagccaagag

SEQ ID NO: 754983 - RNA, 17 nt, Artificial Sequence
  Synthetic
uguagaauggccaagag

SEQ ID NO: 754984 - RNA, 17 nt, Artificial Sequence
  Synthetic
caguauuuuagcaagag

SEQ ID NO: 754985 - RNA, 17 nt, Artificial Sequence
  Synthetic
auuguuguaugcaagag

SEQ ID NO: 754986 - RNA, 17 nt, Artificial Sequence
  Synthetic
aacagaaaucucaagag

SEQ ID NO: 754987 - RNA, 17 nt, Artificial Sequence
  Synthetic
caauacauauucaagag

SEQ ID NO: 754988 - RNA, 17 nt, Artificial Sequence
  Synthetic
cacaacugcuucaagag

SEQ ID NO: 754989 - RNA, 17 nt, Artificial Sequence
  Synthetic
ugaaggagcaagaagag

SEQ ID NO: 754990 - RNA, 17 nt, Artificial Sequence
  Synthetic
aaaauaaaacagaagag

SEQ ID NO: 754991 - RNA, 17 nt, Artificial Sequence
  Synthetic
uuuggcuugcagaagag

SEQ ID NO: 754992 - RNA, 17 nt, Artificial Sequence
  Synthetic
auccgaauggagaagag

SEQ ID NO: 754993 - RNA, 17 nt, Artificial Sequence
  Synthetic
uauacacuggagaagag

SEQ ID NO: 754994 - RNA, 17 nt, Artificial Sequence
  Synthetic
cauggagcugagaagag

SEQ ID NO: 754995 - RNA, 17 nt, Artificial Sequence
  Synthetic
uaaaauucauagaagag

SEQ ID NO: 754996 - RNA, 17 nt, Artificial Sequence
  Synthetic
caaaauaccuagaagag

SEQ ID NO: 754997 - RNA, 17 nt, Artificial Sequence
  Synthetic
caaaacggcuagaagag

SEQ ID NO: 754998 - RNA, 17 nt, Artificial Sequence
  Synthetic
auuaaucaguagaagag

SEQ ID NO: 754999 - RNA, 17 nt, Artificial Sequence
  Synthetic
agaguguaguagaagag

SEQ ID NO: 755000 - RNA, 17 nt, Artificial Sequence
  Synthetic
cgucuaaauuagaagag

SEQ ID NO: 755001 - RNA, 17 nt, Artificial Sequence
  Synthetic
cagacaacuuagaagag

SEQ ID NO: 755002 - RNA, 17 nt, Artificial Sequence
  Synthetic
auuucaacagcgaagag

SEQ ID NO: 755003 - RNA, 17 nt, Artificial Sequence
  Synthetic
aaaaaaagaaggaagag

SEQ ID NO: 755004 - RNA, 17 nt, Artificial Sequence
  Synthetic
cugcaaaccaggaagag

SEQ ID NO: 755005 - RNA, 17 nt, Artificial Sequence
  Synthetic
cccaaggagaggaagag

SEQ ID NO: 755006 - RNA, 17 nt, Artificial Sequence
  Synthetic
agcggagggaggaagag

SEQ ID NO: 755007 - RNA, 17 nt, Artificial Sequence
  Synthetic
uauucaaauaggaagag

SEQ ID NO: 755008 - RNA, 17 nt, Artificial Sequence
  Synthetic
agaauccaagggaagag

SEQ ID NO: 755009 - RNA, 17 nt, Artificial Sequence
  Synthetic
aacuccggagggaagag

SEQ ID NO: 755010 - RNA, 17 nt, Artificial Sequence
  Synthetic
ccuuaauaggggaagag

SEQ ID NO: 755011 - RNA, 17 nt, Artificial Sequence
  Synthetic
uggaaaaaugggaagag

SEQ ID NO: 755012 - RNA, 17 nt, Artificial Sequence
  Synthetic
agcaugagaaugaagag

SEQ ID NO: 755013 - RNA, 17 nt, Artificial Sequence
  Synthetic
uuccauuuccugaagag

SEQ ID NO: 755014 - RNA, 17 nt, Artificial Sequence
  Synthetic
aaggcugaggugaagag

SEQ ID NO: 755015 - RNA, 17 nt, Artificial Sequence
  Synthetic
auaauuucauugaagag

SEQ ID NO: 755016 - RNA, 17 nt, Artificial Sequence
  Synthetic
auagauuauuugaagag

SEQ ID NO: 755017 - RNA, 17 nt, Artificial Sequence
  Synthetic
aaaagguguuugaagag

SEQ ID NO: 755018 - RNA, 17 nt, Artificial Sequence
  Synthetic
cuaucuggaaauaagag

SEQ ID NO: 755019 - RNA, 17 nt, Artificial Sequence
  Synthetic
aaacaaucagauaagag

SEQ ID NO: 755020 - RNA, 17 nt, Artificial Sequence
  Synthetic
ccaagaucagauaagag

SEQ ID NO: 755021 - RNA, 17 nt, Artificial Sequence
  Synthetic
aaaaggucagauaagag

SEQ ID NO: 755022 - RNA, 17 nt, Artificial Sequence
  Synthetic
aguaaugaaccuaagag

SEQ ID NO: 755023 - RNA, 17 nt, Artificial Sequence
  Synthetic
acaauggucucuaagag

SEQ ID NO: 755024 - RNA, 17 nt, Artificial Sequence
  Synthetic
agaauuuuagguaagag

SEQ ID NO: 755025 - RNA, 17 nt, Artificial Sequence
  Synthetic
uuuuuguaucuuaagag

SEQ ID NO: 755026 - RNA, 17 nt, Artificial Sequence
  Synthetic
uaccaaaagguuaagag

SEQ ID NO: 755027 - RNA, 17 nt, Artificial Sequence
  Synthetic
ugguugcuuguuaagag

SEQ ID NO: 755028 - RNA, 17 nt, Artificial Sequence
  Synthetic
acuaauauuuuuaagag

SEQ ID NO: 755029 - RNA, 17 nt, Artificial Sequence
  Synthetic
aaaagcuaaaaacagag

SEQ ID NO: 755030 - RNA, 17 nt, Artificial Sequence
  Synthetic
aauauucagaaacagag

SEQ ID NO: 755031 - RNA, 17 nt, Artificial Sequence
  Synthetic
agggacaaggaacagag

SEQ ID NO: 755032 - RNA, 17 nt, Artificial Sequence
  Synthetic
aguaacaaauaacagag

SEQ ID NO: 755033 - RNA, 17 nt, Artificial Sequence
  Synthetic
augccaggcacacagag

SEQ ID NO: 755034 - RNA, 17 nt, Artificial Sequence
  Synthetic
aacacauggacacagag

SEQ ID NO: 755035 - RNA, 17 nt, Artificial Sequence
  Synthetic
cuuugucuuacacagag

SEQ ID NO: 755036 - RNA, 17 nt, Artificial Sequence
  Synthetic
aacgccauuccacagag

SEQ ID NO: 755037 - RNA, 17 nt, Artificial Sequence
  Synthetic
uuccuucuuccacagag

SEQ ID NO: 755038 - RNA, 17 nt, Artificial Sequence
  Synthetic
uuuacuucugcacagag

SEQ ID NO: 755039 - RNA, 17 nt, Artificial Sequence
  Synthetic
ugaaaucauucacagag

SEQ ID NO: 755040 - RNA, 17 nt, Artificial Sequence
  Synthetic
cacaaaggcagacagag

SEQ ID NO: 755041 - RNA, 17 nt, Artificial Sequence
  Synthetic
ucuugaaagagacagag

SEQ ID NO: 755042 - RNA, 17 nt, Artificial Sequence
  Synthetic
cgggaagagagacagag

SEQ ID NO: 755043 - RNA, 17 nt, Artificial Sequence
  Synthetic
aaaagagugagacagag

SEQ ID NO: 755044 - RNA, 17 nt, Artificial Sequence
  Synthetic
aaagagaauagacagag

SEQ ID NO: 755045 - RNA, 17 nt, Artificial Sequence
  Synthetic
acaaacaagcgacagag

SEQ ID NO: 755046 - RNA, 17 nt, Artificial Sequence
  Synthetic
acgacaggaggacagag

SEQ ID NO: 755047 - RNA, 17 nt, Artificial Sequence
  Synthetic
aauuuuucaauacagag

SEQ ID NO: 755048 - RNA, 17 nt, Artificial Sequence
  Synthetic
aagaugugcauacagag

SEQ ID NO: 755049 - RNA, 17 nt, Artificial Sequence
  Synthetic
agaugcaguauacagag

SEQ ID NO: 755050 - RNA, 17 nt, Artificial Sequence
  Synthetic
ugaguagaacuacagag

SEQ ID NO: 755051 - RNA, 17 nt, Artificial Sequence
  Synthetic
caguauccacuacagag

SEQ ID NO: 755052 - RNA, 17 nt, Artificial Sequence
  Synthetic
aagaagacaaaccagag

SEQ ID NO: 755053 - RNA, 17 nt, Artificial Sequence
  Synthetic
cucucucgaaaccagag

SEQ ID NO: 755054 - RNA, 17 nt, Artificial Sequence
  Synthetic
agaugugacaaccagag

SEQ ID NO: 755055 - RNA, 17 nt, Artificial Sequence
  Synthetic
aacaucccacaccagag

SEQ ID NO: 755056 - RNA, 17 nt, Artificial Sequence
  Synthetic
cccuauccacaccagag

SEQ ID NO: 755057 - RNA, 17 nt, Artificial Sequence
  Synthetic
ccaaggagugaccagag

SEQ ID NO: 755058 - RNA, 17 nt, Artificial Sequence
  Synthetic
agggcaaaauaccagag

SEQ ID NO: 755059 - RNA, 17 nt, Artificial Sequence
  Synthetic
uaaaaugcauaccagag

SEQ ID NO: 755060 - RNA, 17 nt, Artificial Sequence
  Synthetic
aaugaaggguaccagag

SEQ ID NO: 755061 - RNA, 17 nt, Artificial Sequence
  Synthetic
caccauaaagcccagag

SEQ ID NO: 755062 - RNA, 17 nt, Artificial Sequence
  Synthetic
aaaacuguggcccagag

SEQ ID NO: 755063 - RNA, 17 nt, Artificial Sequence
  Synthetic
cagggaaaaggccagag

SEQ ID NO: 755064 - RNA, 17 nt, Artificial Sequence
  Synthetic
ccugccuugggccagag

SEQ ID NO: 755065 - RNA, 17 nt, Artificial Sequence
  Synthetic
agcuugaacauccagag

SEQ ID NO: 755066 - RNA, 17 nt, Artificial Sequence
  Synthetic
ugccucagccuccagag

SEQ ID NO: 755067 - RNA, 17 nt, Artificial Sequence
  Synthetic
aagucugauguccagag

SEQ ID NO: 755068 - RNA, 17 nt, Artificial Sequence
  Synthetic
uaccuauguuuccagag

SEQ ID NO: 755069 - RNA, 17 nt, Artificial Sequence
  Synthetic
uuaaguaagaagcagag

SEQ ID NO: 755070 - RNA, 17 nt, Artificial Sequence
  Synthetic
cacauguaacagcagag

SEQ ID NO: 755071 - RNA, 17 nt, Artificial Sequence
  Synthetic
aagugcugacagcagag

SEQ ID NO: 755072 - RNA, 17 nt, Artificial Sequence
  Synthetic
agcuuacugcagcagag

SEQ ID NO: 755073 - RNA, 17 nt, Artificial Sequence
  Synthetic
uauaauuuguagcagag

SEQ ID NO: 755074 - RNA, 17 nt, Artificial Sequence
  Synthetic
agaagguccccgcagag

SEQ ID NO: 755075 - RNA, 17 nt, Artificial Sequence
  Synthetic
uacagaaaaaggcagag

SEQ ID NO: 755076 - RNA, 17 nt, Artificial Sequence
  Synthetic
cuucugaaaaggcagag

SEQ ID NO: 755077 - RNA, 17 nt, Artificial Sequence
  Synthetic
uugguguugaggcagag

SEQ ID NO: 755078 - RNA, 17 nt, Artificial Sequence
  Synthetic
acucagaaggggcagag

SEQ ID NO: 755079 - RNA, 17 nt, Artificial Sequence
  Synthetic
acauagauauggcagag

SEQ ID NO: 755080 - RNA, 17 nt, Artificial Sequence
  Synthetic
auauccuuguggcagag

SEQ ID NO: 755081 - RNA, 17 nt, Artificial Sequence
  Synthetic
caugcaugcaugcagag

SEQ ID NO: 755082 - RNA, 17 nt, Artificial Sequence
  Synthetic
caggaaccucugcagag

SEQ ID NO: 755083 - RNA, 17 nt, Artificial Sequence
  Synthetic
uuucugcaagugcagag

SEQ ID NO: 755084 - RNA, 17 nt, Artificial Sequence
  Synthetic
agagagguggugcagag

SEQ ID NO: 755085 - RNA, 17 nt, Artificial Sequence
  Synthetic
auggauauauugcagag

SEQ ID NO: 755086 - RNA, 17 nt, Artificial Sequence
  Synthetic
acucucccaaaucagag

SEQ ID NO: 755087 - RNA, 17 nt, Artificial Sequence
  Synthetic
aaacuucacaaucagag

SEQ ID NO: 755088 - RNA, 17 nt, Artificial Sequence
  Synthetic
auucaucaagaucagag

SEQ ID NO: 755089 - RNA, 17 nt, Artificial Sequence
  Synthetic
caaugaauauaucagag

SEQ ID NO: 755090 - RNA, 17 nt, Artificial Sequence
  Synthetic
auucucuauuaucagag

SEQ ID NO: 755091 - RNA, 17 nt, Artificial Sequence
  Synthetic
aagggagaaacucagag

SEQ ID NO: 755092 - RNA, 17 nt, Artificial Sequence
  Synthetic
aaagagaagccucagag

SEQ ID NO: 755093 - RNA, 17 nt, Artificial Sequence
  Synthetic
aucaugaucucucagag

SEQ ID NO: 755094 - RNA, 17 nt, Artificial Sequence
  Synthetic
agaaagcagucucagag

SEQ ID NO: 755095 - RNA, 17 nt, Artificial Sequence
  Synthetic
uguagaauuucucagag

SEQ ID NO: 755096 - RNA, 17 nt, Artificial Sequence
  Synthetic
uaagaaggaagucagag

SEQ ID NO: 755097 - RNA, 17 nt, Artificial Sequence
  Synthetic
agugggauaggucagag

SEQ ID NO: 755098 - RNA, 17 nt, Artificial Sequence
  Synthetic
ugaaagcguggucagag

SEQ ID NO: 755099 - RNA, 17 nt, Artificial Sequence
  Synthetic
agauaaaaaugucagag

SEQ ID NO: 755100 - RNA, 17 nt, Artificial Sequence
  Synthetic
uaaauggagauucagag

SEQ ID NO: 755101 - RNA, 17 nt, Artificial Sequence
  Synthetic
aauuauucacuucagag

SEQ ID NO: 755102 - RNA, 17 nt, Artificial Sequence
  Synthetic
aaagcagaauuucagag

SEQ ID NO: 755103 - RNA, 17 nt, Artificial Sequence
  Synthetic
aaaaaugaaaaagagag

SEQ ID NO: 755104 - RNA, 17 nt, Artificial Sequence
  Synthetic
uuguaauccaaagagag

SEQ ID NO: 755105 - RNA, 17 nt, Artificial Sequence
  Synthetic
accagaccucaagagag

SEQ ID NO: 755106 - RNA, 17 nt, Artificial Sequence
  Synthetic
uugauuuuucaagagag

SEQ ID NO: 755107 - RNA, 17 nt, Artificial Sequence
  Synthetic
uacaagccagaagagag

SEQ ID NO: 755108 - RNA, 17 nt, Artificial Sequence
  Synthetic
acaccaugagaagagag

SEQ ID NO: 755109 - RNA, 17 nt, Artificial Sequence
  Synthetic
uacaagcuagaagagag

SEQ ID NO: 755110 - RNA, 17 nt, Artificial Sequence
  Synthetic
uucaacagcgaagagag

SEQ ID NO: 755111 - RNA, 17 nt, Artificial Sequence
  Synthetic
cucugcaaggaagagag

SEQ ID NO: 755112 - RNA, 17 nt, Artificial Sequence
  Synthetic
caugagaaugaagagag

SEQ ID NO: 755113 - RNA, 17 nt, Artificial Sequence
  Synthetic
cuagugaaugaagagag

SEQ ID NO: 755114 - RNA, 17 nt, Artificial Sequence
  Synthetic
cuaucaacugaagagag

SEQ ID NO: 755115 - RNA, 17 nt, Artificial Sequence
  Synthetic
caaagcauugaagagag

SEQ ID NO: 755116 - RNA, 17 nt, Artificial Sequence
  Synthetic
auugguaccacagagag

SEQ ID NO: 755117 - RNA, 17 nt, Artificial Sequence
  Synthetic
ugagcuugcacagagag

SEQ ID NO: 755118 - RNA, 17 nt, Artificial Sequence
  Synthetic
cugaggcucacagagag

SEQ ID NO: 755119 - RNA, 17 nt, Artificial Sequence
  Synthetic
uuuagagagacagagag

SEQ ID NO: 755120 - RNA, 17 nt, Artificial Sequence
  Synthetic
uagcuagagacagagag

SEQ ID NO: 755121 - RNA, 17 nt, Artificial Sequence
  Synthetic
aaacaagcgacagagag

SEQ ID NO: 755122 - RNA, 17 nt, Artificial Sequence
  Synthetic
uucuagcuuacagagag

SEQ ID NO: 755123 - RNA, 17 nt, Artificial Sequence
  Synthetic
uucccauuuacagagag

SEQ ID NO: 755124 - RNA, 17 nt, Artificial Sequence
  Synthetic
auugguacugcagagag

SEQ ID NO: 755125 - RNA, 17 nt, Artificial Sequence
  Synthetic
augagaugaucagagag

SEQ ID NO: 755126 - RNA, 17 nt, Artificial Sequence
  Synthetic
aaauagaucucagagag

SEQ ID NO: 755127 - RNA, 17 nt, Artificial Sequence
  Synthetic
aacagagaaagagagag

SEQ ID NO: 755128 - RNA, 17 nt, Artificial Sequence
  Synthetic
cagaccucaagagagag

SEQ ID NO: 755129 - RNA, 17 nt, Artificial Sequence
  Synthetic
auaaacaagagagagag

SEQ ID NO: 755130 - RNA, 17 nt, Artificial Sequence
  Synthetic
cagagcaagagagagag

SEQ ID NO: 755131 - RNA, 17 nt, Artificial Sequence
  Synthetic
cagagagagagagagag

SEQ ID NO: 755132 - RNA, 17 nt, Artificial Sequence
  Synthetic
uggagagagagagagag

SEQ ID NO: 755133 - RNA, 17 nt, Artificial Sequence
  Synthetic
aacaaguggagagagag

SEQ ID NO: 755134 - RNA, 17 nt, Artificial Sequence
  Synthetic
uuuuaauugagagagag

SEQ ID NO: 755135 - RNA, 17 nt, Artificial Sequence
  Synthetic
augccgggaggagagag

SEQ ID NO: 755136 - RNA, 17 nt, Artificial Sequence
  Synthetic
caggauugaggagagag

SEQ ID NO: 755137 - RNA, 17 nt, Artificial Sequence
  Synthetic
uuaaaaaacugagagag

SEQ ID NO: 755138 - RNA, 17 nt, Artificial Sequence
  Synthetic
accucauccugagagag

SEQ ID NO: 755139 - RNA, 17 nt, Artificial Sequence
  Synthetic
ucuaaugugugagagag

SEQ ID NO: 755140 - RNA, 17 nt, Artificial Sequence
  Synthetic
uucagcuuaauagagag

SEQ ID NO: 755141 - RNA, 17 nt, Artificial Sequence
  Synthetic
accaaaucuauagagag

SEQ ID NO: 755142 - RNA, 17 nt, Artificial Sequence
  Synthetic
caacaaaaucuagagag

SEQ ID NO: 755143 - RNA, 17 nt, Artificial Sequence
  Synthetic
uauuaaauaguagagag

SEQ ID NO: 755144 - RNA, 17 nt, Artificial Sequence
  Synthetic
ucugugaaugccgagag

SEQ ID NO: 755145 - RNA, 17 nt, Artificial Sequence
  Synthetic
aagggaggaaaggagag

SEQ ID NO: 755146 - RNA, 17 nt, Artificial Sequence
  Synthetic
auaucacucaaggagag

SEQ ID NO: 755147 - RNA, 17 nt, Artificial Sequence
  Synthetic
agggggaggaaggagag

SEQ ID NO: 755148 - RNA, 17 nt, Artificial Sequence
  Synthetic
agggaagggaaggagag

SEQ ID NO: 755149 - RNA, 17 nt, Artificial Sequence
  Synthetic
agaagugugaaggagag

SEQ ID NO: 755150 - RNA, 17 nt, Artificial Sequence
  Synthetic
aaaaggaauaaggagag

SEQ ID NO: 755151 - RNA, 17 nt, Artificial Sequence
  Synthetic
acaauuucccaggagag

SEQ ID NO: 755152 - RNA, 17 nt, Artificial Sequence
  Synthetic
aaaagcagccaggagag

SEQ ID NO: 755153 - RNA, 17 nt, Artificial Sequence
  Synthetic
aaauggaagcaggagag

SEQ ID NO: 755154 - RNA, 17 nt, Artificial Sequence
  Synthetic
uuggacaaggaggagag

SEQ ID NO: 755155 - RNA, 17 nt, Artificial Sequence
  Synthetic
aaguaccaguaggagag

SEQ ID NO: 755156 - RNA, 17 nt, Artificial Sequence
  Synthetic
cugggagggagggagag

SEQ ID NO: 755157 - RNA, 17 nt, Artificial Sequence
  Synthetic
cauuaugggagggagag

SEQ ID NO: 755158 - RNA, 17 nt, Artificial Sequence
  Synthetic
aauaggaguagggagag

SEQ ID NO: 755159 - RNA, 17 nt, Artificial Sequence
  Synthetic
uuggggaguagggagag

SEQ ID NO: 755160 - RNA, 17 nt, Artificial Sequence
  Synthetic
cuggagcucggggagag

SEQ ID NO: 755161 - RNA, 17 nt, Artificial Sequence
  Synthetic
aacaaggguggggagag

SEQ ID NO: 755162 - RNA, 17 nt, Artificial Sequence
  Synthetic
ucguauguuggggagag

SEQ ID NO: 755163 - RNA, 17 nt, Artificial Sequence
  Synthetic
uaacuaaagugggagag

SEQ ID NO: 755164 - RNA, 17 nt, Artificial Sequence
  Synthetic
ccuccuuugugggagag

SEQ ID NO: 755165 - RNA, 17 nt, Artificial Sequence
  Synthetic
cuggaaagaauggagag

SEQ ID NO: 755166 - RNA, 17 nt, Artificial Sequence
  Synthetic
uauuuaggacuggagag

SEQ ID NO: 755167 - RNA, 17 nt, Artificial Sequence
  Synthetic
caggcauuacuggagag

SEQ ID NO: 755168 - RNA, 17 nt, Artificial Sequence
  Synthetic
uaaauugagcuggagag

SEQ ID NO: 755169 - RNA, 17 nt, Artificial Sequence
  Synthetic
cuauuuauucuggagag

SEQ ID NO: 755170 - RNA, 17 nt, Artificial Sequence
  Synthetic
accuccucuguggagag

SEQ ID NO: 755171 - RNA, 17 nt, Artificial Sequence
  Synthetic
uuucaugaauuggagag

SEQ ID NO: 755172 - RNA, 17 nt, Artificial Sequence
  Synthetic
ucagaaacauuggagag

SEQ ID NO: 755173 - RNA, 17 nt, Artificial Sequence
  Synthetic
ucaaaaaacuuggagag

SEQ ID NO: 755174 - RNA, 17 nt, Artificial Sequence
  Synthetic
cagaaauucuuggagag

SEQ ID NO: 755175 - RNA, 17 nt, Artificial Sequence
  Synthetic
ucauaauagaaugagag

SEQ ID NO: 755176 - RNA, 17 nt, Artificial Sequence
  Synthetic
cagaauuggaaugagag

SEQ ID NO: 755177 - RNA, 17 nt, Artificial Sequence
  Synthetic
aagagugugaaugagag

SEQ ID NO: 755178 - RNA, 17 nt, Artificial Sequence
  Synthetic
ucauuuaguuaugagag

SEQ ID NO: 755179 - RNA, 17 nt, Artificial Sequence
  Synthetic
uggcugcugccugagag

SEQ ID NO: 755180 - RNA, 17 nt, Artificial Sequence
  Synthetic
uguaugaaugcugagag

SEQ ID NO: 755181 - RNA, 17 nt, Artificial Sequence
  Synthetic
auggcagaaagugagag

SEQ ID NO: 755182 - RNA, 17 nt, Artificial Sequence
  Synthetic
agugaaguaagugagag

SEQ ID NO: 755183 - RNA, 17 nt, Artificial Sequence
  Synthetic
aauaggagcggugagag

SEQ ID NO: 755184 - RNA, 17 nt, Artificial Sequence
  Synthetic
agaauucagggugagag

SEQ ID NO: 755185 - RNA, 17 nt, Artificial Sequence
  Synthetic
augggguauggugagag

SEQ ID NO: 755186 - RNA, 17 nt, Artificial Sequence
  Synthetic
aauaggaguggugagag

SEQ ID NO: 755187 - RNA, 17 nt, Artificial Sequence
  Synthetic
ucucuaaugugugagag

SEQ ID NO: 755188 - RNA, 17 nt, Artificial Sequence
  Synthetic
acaaaugugugugagag

SEQ ID NO: 755189 - RNA, 17 nt, Artificial Sequence
  Synthetic
uuuccuccccuugagag

SEQ ID NO: 755190 - RNA, 17 nt, Artificial Sequence
  Synthetic
uauguguggcuugagag

SEQ ID NO: 755191 - RNA, 17 nt, Artificial Sequence
  Synthetic
aauuuagaaaaauagag

SEQ ID NO: 755192 - RNA, 17 nt, Artificial Sequence
  Synthetic
ugccucuccaaauagag

SEQ ID NO: 755193 - RNA, 17 nt, Artificial Sequence
  Synthetic
agaucuuguaaauagag

SEQ ID NO: 755194 - RNA, 17 nt, Artificial Sequence
  Synthetic
cugcaaacagaauagag

SEQ ID NO: 755195 - RNA, 17 nt, Artificial Sequence
  Synthetic
accaaagccacauagag

SEQ ID NO: 755196 - RNA, 17 nt, Artificial Sequence
  Synthetic
ucaaaaauuacauagag

SEQ ID NO: 755197 - RNA, 17 nt, Artificial Sequence
  Synthetic
uaaggaauuacauagag

SEQ ID NO: 755198 - RNA, 17 nt, Artificial Sequence
  Synthetic
aaucaaaaggcauagag

SEQ ID NO: 755199 - RNA, 17 nt, Artificial Sequence
  Synthetic
cauaugugaucauagag

SEQ ID NO: 755200 - RNA, 17 nt, Artificial Sequence
  Synthetic
ccagucuaaagauagag

SEQ ID NO: 755201 - RNA, 17 nt, Artificial Sequence
  Synthetic
cugugagguagauagag

SEQ ID NO: 755202 - RNA, 17 nt, Artificial Sequence
  Synthetic
aaagaauuaugauagag

SEQ ID NO: 755203 - RNA, 17 nt, Artificial Sequence
  Synthetic
agauaaaauauauagag

SEQ ID NO: 755204 - RNA, 17 nt, Artificial Sequence
  Synthetic
uuggcauuuguauagag

SEQ ID NO: 755205 - RNA, 17 nt, Artificial Sequence
  Synthetic
acuuuuauguuauagag

SEQ ID NO: 755206 - RNA, 17 nt, Artificial Sequence
  Synthetic
aaaaguaaaaacuagag

SEQ ID NO: 755207 - RNA, 17 nt, Artificial Sequence
  Synthetic
acggaggacuacuagag

SEQ ID NO: 755208 - RNA, 17 nt, Artificial Sequence
  Synthetic
ccuuacagcuacuagag

SEQ ID NO: 755209 - RNA, 17 nt, Artificial Sequence
  Synthetic
ccuugccuaaccuagag

SEQ ID NO: 755210 - RNA, 17 nt, Artificial Sequence
  Synthetic
auuggacaucccuagag

SEQ ID NO: 755211 - RNA, 17 nt, Artificial Sequence
  Synthetic
ucauuuguuggcuagag

SEQ ID NO: 755212 - RNA, 17 nt, Artificial Sequence
  Synthetic
agagaaggaaucuagag

SEQ ID NO: 755213 - RNA, 17 nt, Artificial Sequence
  Synthetic
auucauuagcucuagag

SEQ ID NO: 755214 - RNA, 17 nt, Artificial Sequence
  Synthetic
agagacagaaaguagag

SEQ ID NO: 755215 - RNA, 17 nt, Artificial Sequence
  Synthetic
auggagagaaaguagag

SEQ ID NO: 755216 - RNA, 17 nt, Artificial Sequence
  Synthetic
aauaaguccaaguagag

SEQ ID NO: 755217 - RNA, 17 nt, Artificial Sequence
  Synthetic
agaauucagaaguagag

SEQ ID NO: 755218 - RNA, 17 nt, Artificial Sequence
  Synthetic
uuguauuuuaaguagag

SEQ ID NO: 755219 - RNA, 17 nt, Artificial Sequence
  Synthetic
auuugguaccaguagag

SEQ ID NO: 755220 - RNA, 17 nt, Artificial Sequence
  Synthetic
cacauggacacguagag

SEQ ID NO: 755221 - RNA, 17 nt, Artificial Sequence
  Synthetic
uuguauucaggguagag

SEQ ID NO: 755222 - RNA, 17 nt, Artificial Sequence
  Synthetic
cauaauauuggguagag

SEQ ID NO: 755223 - RNA, 17 nt, Artificial Sequence
  Synthetic
agaagaagaugguagag

SEQ ID NO: 755224 - RNA, 17 nt, Artificial Sequence
  Synthetic
uaucagagaugguagag

SEQ ID NO: 755225 - RNA, 17 nt, Artificial Sequence
  Synthetic
caaguuagaugguagag

SEQ ID NO: 755226 - RNA, 17 nt, Artificial Sequence
  Synthetic
ugucugcagugguagag

SEQ ID NO: 755227 - RNA, 17 nt, Artificial Sequence
  Synthetic
aagugucugguguagag

SEQ ID NO: 755228 - RNA, 17 nt, Artificial Sequence
  Synthetic
aauaaagucaauuagag

SEQ ID NO: 755229 - RNA, 17 nt, Artificial Sequence
  Synthetic
uauuuuguucauuagag

SEQ ID NO: 755230 - RNA, 17 nt, Artificial Sequence
  Synthetic
agaacugaaacuuagag

SEQ ID NO: 755231 - RNA, 17 nt, Artificial Sequence
  Synthetic
ucauccaaagguuagag

SEQ ID NO: 755232 - RNA, 17 nt, Artificial Sequence
  Synthetic
cucugaggugguuagag

SEQ ID NO: 755233 - RNA, 17 nt, Artificial Sequence
  Synthetic
ugacaauaaauuuagag

SEQ ID NO: 755234 - RNA, 17 nt, Artificial Sequence
  Synthetic
uucagaaacauuuagag

SEQ ID NO: 755235 - RNA, 17 nt, Artificial Sequence
  Synthetic
augggauauuuuuagag

SEQ ID NO: 755236 - RNA, 17 nt, Artificial Sequence
  Synthetic
auggauuguugaacgag

SEQ ID NO: 755237 - RNA, 17 nt, Artificial Sequence
  Synthetic
auuauguugaauacgag

SEQ ID NO: 755238 - RNA, 17 nt, Artificial Sequence
  Synthetic
aacagaacuuauacgag

SEQ ID NO: 755239 - RNA, 17 nt, Artificial Sequence
  Synthetic
aaucacuugaacccgag

SEQ ID NO: 755240 - RNA, 17 nt, Artificial Sequence
  Synthetic
uaucgcuugaacccgag

SEQ ID NO: 755241 - RNA, 17 nt, Artificial Sequence
  Synthetic
ugucucagccucccgag

SEQ ID NO: 755242 - RNA, 17 nt, Artificial Sequence
  Synthetic
uuuuuaagaucuccgag

SEQ ID NO: 755243 - RNA, 17 nt, Artificial Sequence
  Synthetic
agggugggaggagcgag

SEQ ID NO: 755244 - RNA, 17 nt, Artificial Sequence
  Synthetic
cagggugagugagcgag

SEQ ID NO: 755245 - RNA, 17 nt, Artificial Sequence
  Synthetic
agacucagaagggcgag

SEQ ID NO: 755246 - RNA, 17 nt, Artificial Sequence
  Synthetic
ucgggggguggggcgag

SEQ ID NO: 755247 - RNA, 17 nt, Artificial Sequence
  Synthetic
uuuauagcaaaaucgag

SEQ ID NO: 755248 - RNA, 17 nt, Artificial Sequence
  Synthetic
caauuuugggaaucgag

SEQ ID NO: 755249 - RNA, 17 nt, Artificial Sequence
  Synthetic
uuuccccuaccaucgag

SEQ ID NO: 755250 - RNA, 17 nt, Artificial Sequence
  Synthetic
agucccagcuacucgag

SEQ ID NO: 755251 - RNA, 17 nt, Artificial Sequence
  Synthetic
caccggggccugucgag

SEQ ID NO: 755252 - RNA, 17 nt, Artificial Sequence
  Synthetic
cuucuguugaguucgag

SEQ ID NO: 755253 - RNA, 17 nt, Artificial Sequence
  Synthetic
cuuuacuucaaaaggag

SEQ ID NO: 755254 - RNA, 17 nt, Artificial Sequence
  Synthetic
auaccuauacaaaggag

SEQ ID NO: 755255 - RNA, 17 nt, Artificial Sequence
  Synthetic
cugcaacgccaaaggag

SEQ ID NO: 755256 - RNA, 17 nt, Artificial Sequence
  Synthetic
cuugguugccaaaggag

SEQ ID NO: 755257 - RNA, 17 nt, Artificial Sequence
  Synthetic
cccaggugucaaaggag

SEQ ID NO: 755258 - RNA, 17 nt, Artificial Sequence
  Synthetic
accaacaaauaaaggag

SEQ ID NO: 755259 - RNA, 17 nt, Artificial Sequence
  Synthetic
aggguuaaguaaaggag

SEQ ID NO: 755260 - RNA, 17 nt, Artificial Sequence
  Synthetic
acugaaguuuaaaggag

SEQ ID NO: 755261 - RNA, 17 nt, Artificial Sequence
  Synthetic
cugcaaacaacaaggag

SEQ ID NO: 755262 - RNA, 17 nt, Artificial Sequence
  Synthetic
acuguggggacaaggag

SEQ ID NO: 755263 - RNA, 17 nt, Artificial Sequence
  Synthetic
uggguuugaccaaggag

SEQ ID NO: 755264 - RNA, 17 nt, Artificial Sequence
  Synthetic
uagggaggcccaaggag

SEQ ID NO: 755265 - RNA, 17 nt, Artificial Sequence
  Synthetic
uuaacucucccaaggag

SEQ ID NO: 755266 - RNA, 17 nt, Artificial Sequence
  Synthetic
cugugugcagcaaggag

SEQ ID NO: 755267 - RNA, 17 nt, Artificial Sequence
  Synthetic
augcgaaggucaaggag

SEQ ID NO: 755268 - RNA, 17 nt, Artificial Sequence
  Synthetic
aauccauauucaaggag

SEQ ID NO: 755269 - RNA, 17 nt, Artificial Sequence
  Synthetic
ccuaaaaacagaaggag

SEQ ID NO: 755270 - RNA, 17 nt, Artificial Sequence
  Synthetic
uucuucaucugaaggag

SEQ ID NO: 755271 - RNA, 17 nt, Artificial Sequence
  Synthetic
ugcaacaggugaaggag

SEQ ID NO: 755272 - RNA, 17 nt, Artificial Sequence
  Synthetic
uauuuugauauaaggag

SEQ ID NO: 755273 - RNA, 17 nt, Artificial Sequence
  Synthetic
uacuuuugcuuaaggag

SEQ ID NO: 755274 - RNA, 17 nt, Artificial Sequence
  Synthetic
auucagacuuuaaggag

SEQ ID NO: 755275 - RNA, 17 nt, Artificial Sequence
  Synthetic
aaacaaacaaacaggag

SEQ ID NO: 755276 - RNA, 17 nt, Artificial Sequence
  Synthetic
augccauuuaacaggag

SEQ ID NO: 755277 - RNA, 17 nt, Artificial Sequence
  Synthetic
augaauauagacaggag

SEQ ID NO: 755278 - RNA, 17 nt, Artificial Sequence
  Synthetic
ucgcuugaacccaggag

SEQ ID NO: 755279 - RNA, 17 nt, Artificial Sequence
  Synthetic
cuagaucugcccaggag

SEQ ID NO: 755280 - RNA, 17 nt, Artificial Sequence
  Synthetic
aacccauaucccaggag

SEQ ID NO: 755281 - RNA, 17 nt, Artificial Sequence
  Synthetic
aagaaaugcuccaggag

SEQ ID NO: 755282 - RNA, 17 nt, Artificial Sequence
  Synthetic
aagaagagaggcaggag

SEQ ID NO: 755283 - RNA, 17 nt, Artificial Sequence
  Synthetic
agaguaaugggcaggag

SEQ ID NO: 755284 - RNA, 17 nt, Artificial Sequence
  Synthetic
augucaugauucaggag

SEQ ID NO: 755285 - RNA, 17 nt, Artificial Sequence
  Synthetic
agacauagcuucaggag

SEQ ID NO: 755286 - RNA, 17 nt, Artificial Sequence
  Synthetic
ucucuauauuucaggag

SEQ ID NO: 755287 - RNA, 17 nt, Artificial Sequence
  Synthetic
acagcaaaagagaggag

SEQ ID NO: 755288 - RNA, 17 nt, Artificial Sequence
  Synthetic
auuaugaaagagaggag

SEQ ID NO: 755289 - RNA, 17 nt, Artificial Sequence
  Synthetic
agguggagggagaggag

SEQ ID NO: 755290 - RNA, 17 nt, Artificial Sequence
  Synthetic
aaagguugggagaggag

SEQ ID NO: 755291 - RNA, 17 nt, Artificial Sequence
  Synthetic
cagugagacuagaggag

SEQ ID NO: 755292 - RNA, 17 nt, Artificial Sequence
  Synthetic
cacugggcuacgaggag

SEQ ID NO: 755293 - RNA, 17 nt, Artificial Sequence
  Synthetic
cacuccgaaaggaggag

SEQ ID NO: 755294 - RNA, 17 nt, Artificial Sequence
  Synthetic
aggaggagcaggaggag

SEQ ID NO: 755295 - RNA, 17 nt, Artificial Sequence
  Synthetic
uguggguggaggaggag

SEQ ID NO: 755296 - RNA, 17 nt, Artificial Sequence
  Synthetic
caaaaagaagggaggag

SEQ ID NO: 755297 - RNA, 17 nt, Artificial Sequence
  Synthetic
cuuuggcgggggaggag

SEQ ID NO: 755298 - RNA, 17 nt, Artificial Sequence
  Synthetic
ugagacuuugggaggag

SEQ ID NO: 755299 - RNA, 17 nt, Artificial Sequence
  Synthetic
aguuccagacugaggag

SEQ ID NO: 755300 - RNA, 17 nt, Artificial Sequence
  Synthetic
ccuaagagagugaggag

SEQ ID NO: 755301 - RNA, 17 nt, Artificial Sequence
  Synthetic
caagauauauugaggag

SEQ ID NO: 755302 - RNA, 17 nt, Artificial Sequence
  Synthetic
acuauguugaauaggag

SEQ ID NO: 755303 - RNA, 17 nt, Artificial Sequence
  Synthetic
uagguuuuugauaggag

SEQ ID NO: 755304 - RNA, 17 nt, Artificial Sequence
  Synthetic
caaaaaauagcuaggag

SEQ ID NO: 755305 - RNA, 17 nt, Artificial Sequence
  Synthetic
uagggaguggguaggag

SEQ ID NO: 755306 - RNA, 17 nt, Artificial Sequence
  Synthetic
accuuugaauguaggag

SEQ ID NO: 755307 - RNA, 17 nt, Artificial Sequence
  Synthetic
agaaaaaaaauuaggag

SEQ ID NO: 755308 - RNA, 17 nt, Artificial Sequence
  Synthetic
auaccaagaauuaggag

SEQ ID NO: 755309 - RNA, 17 nt, Artificial Sequence
  Synthetic
uagaaguccauuaggag

SEQ ID NO: 755310 - RNA, 17 nt, Artificial Sequence
  Synthetic
aguugggugauuaggag

SEQ ID NO: 755311 - RNA, 17 nt, Artificial Sequence
  Synthetic
auaaaugaaguuaggag

SEQ ID NO: 755312 - RNA, 17 nt, Artificial Sequence
  Synthetic
cucuugagcuuuaggag

SEQ ID NO: 755313 - RNA, 17 nt, Artificial Sequence
  Synthetic
uuguucuagccacggag

SEQ ID NO: 755314 - RNA, 17 nt, Artificial Sequence
  Synthetic
aaaaaagugagacggag

SEQ ID NO: 755315 - RNA, 17 nt, Artificial Sequence
  Synthetic
cugcacugccuacggag

SEQ ID NO: 755316 - RNA, 17 nt, Artificial Sequence
  Synthetic
acuuuuauguuacggag

SEQ ID NO: 755317 - RNA, 17 nt, Artificial Sequence
  Synthetic
agucauuagaaagggag

SEQ ID NO: 755318 - RNA, 17 nt, Artificial Sequence
  Synthetic
acugcugggaaagggag

SEQ ID NO: 755319 - RNA, 17 nt, Artificial Sequence
  Synthetic
ccugggaaucaagggag

SEQ ID NO: 755320 - RNA, 17 nt, Artificial Sequence
  Synthetic
auaauaaaagaagggag

SEQ ID NO: 755321 - RNA, 17 nt, Artificial Sequence
  Synthetic
aguaacccagaagggag

SEQ ID NO: 755322 - RNA, 17 nt, Artificial Sequence
  Synthetic
cuguugagagaagggag

SEQ ID NO: 755323 - RNA, 17 nt, Artificial Sequence
  Synthetic
uggugaugggaagggag

SEQ ID NO: 755324 - RNA, 17 nt, Artificial Sequence
  Synthetic
ugugugugggaagggag

SEQ ID NO: 755325 - RNA, 17 nt, Artificial Sequence
  Synthetic
caucaauaauaagggag

SEQ ID NO: 755326 - RNA, 17 nt, Artificial Sequence
  Synthetic
uggcauggcuaagggag

SEQ ID NO: 755327 - RNA, 17 nt, Artificial Sequence
  Synthetic
uguuaauauuaagggag

SEQ ID NO: 755328 - RNA, 17 nt, Artificial Sequence
  Synthetic
cuauuucuuuaagggag

SEQ ID NO: 755329 - RNA, 17 nt, Artificial Sequence
  Synthetic
uaugagguuuaagggag

SEQ ID NO: 755330 - RNA, 17 nt, Artificial Sequence
  Synthetic
cuggaggacacagggag

SEQ ID NO: 755331 - RNA, 17 nt, Artificial Sequence
  Synthetic
cacauggacacagggag

SEQ ID NO: 755332 - RNA, 17 nt, Artificial Sequence
  Synthetic
cauauggacacagggag

SEQ ID NO: 755333 - RNA, 17 nt, Artificial Sequence
  Synthetic
auuggaugcacagggag

SEQ ID NO: 755334 - RNA, 17 nt, Artificial Sequence
  Synthetic
aucuuaaucacagggag

SEQ ID NO: 755335 - RNA, 17 nt, Artificial Sequence
  Synthetic
ugccagggaccagggag

SEQ ID NO: 755336 - RNA, 17 nt, Artificial Sequence
  Synthetic
ugagcuggagcagggag

SEQ ID NO: 755337 - RNA, 17 nt, Artificial Sequence
  Synthetic
agguggugcagagggag

SEQ ID NO: 755338 - RNA, 17 nt, Artificial Sequence
  Synthetic
agaugguagagagggag

SEQ ID NO: 755339 - RNA, 17 nt, Artificial Sequence
  Synthetic
agaaaagcuagagggag

SEQ ID NO: 755340 - RNA, 17 nt, Artificial Sequence
  Synthetic
uugaacccaggagggag

SEQ ID NO: 755341 - RNA, 17 nt, Artificial Sequence
  Synthetic
cuagagggaggagggag

SEQ ID NO: 755342 - RNA, 17 nt, Artificial Sequence
  Synthetic
agggugggaggagggag

SEQ ID NO: 755343 - RNA, 17 nt, Artificial Sequence
  Synthetic
agaacgauaggagggag

SEQ ID NO: 755344 - RNA, 17 nt, Artificial Sequence
  Synthetic
aagaaagagggagggag

SEQ ID NO: 755345 - RNA, 17 nt, Artificial Sequence
  Synthetic
agggaggagggagggag

SEQ ID NO: 755346 - RNA, 17 nt, Artificial Sequence
  Synthetic
aggaggaggggagggag

SEQ ID NO: 755347 - RNA, 17 nt, Artificial Sequence
  Synthetic
cuauuuaggggagggag

SEQ ID NO: 755348 - RNA, 17 nt, Artificial Sequence
  Synthetic
ugaggagguggagggag

SEQ ID NO: 755349 - RNA, 17 nt, Artificial Sequence
  Synthetic
ccuuucuuaugagggag

SEQ ID NO: 755350 - RNA, 17 nt, Artificial Sequence
  Synthetic
uuuacagaacuagggag

SEQ ID NO: 755351 - RNA, 17 nt, Artificial Sequence
  Synthetic
cuugcggcccuagggag

SEQ ID NO: 755352 - RNA, 17 nt, Artificial Sequence
  Synthetic
acauacaggcuagggag

SEQ ID NO: 755353 - RNA, 17 nt, Artificial Sequence
  Synthetic
cacauggacaccgggag

SEQ ID NO: 755354 - RNA, 17 nt, Artificial Sequence
  Synthetic
agcaaucuggccgggag

SEQ ID NO: 755355 - RNA, 17 nt, Artificial Sequence
  Synthetic
agggaagggaaggggag

SEQ ID NO: 755356 - RNA, 17 nt, Artificial Sequence
  Synthetic
uaaaugcauaaggggag

SEQ ID NO: 755357 - RNA, 17 nt, Artificial Sequence
  Synthetic
agggaaggggaggggag

SEQ ID NO: 755358 - RNA, 17 nt, Artificial Sequence
  Synthetic
aggggaggggaggggag

SEQ ID NO: 755359 - RNA, 17 nt, Artificial Sequence
  Synthetic
uaaaucacugaggggag

SEQ ID NO: 755360 - RNA, 17 nt, Artificial Sequence
  Synthetic
aucagugauuaggggag

SEQ ID NO: 755361 - RNA, 17 nt, Artificial Sequence
  Synthetic
uuuuggggaagggggag

SEQ ID NO: 755362 - RNA, 17 nt, Artificial Sequence
  Synthetic
ugguggggucgggggag

SEQ ID NO: 755363 - RNA, 17 nt, Artificial Sequence
  Synthetic
uuguggggucgggggag

SEQ ID NO: 755364 - RNA, 17 nt, Artificial Sequence
  Synthetic
cacagaccuggggggag

SEQ ID NO: 755365 - RNA, 17 nt, Artificial Sequence
  Synthetic
ucgugggguggggggag

SEQ ID NO: 755366 - RNA, 17 nt, Artificial Sequence
  Synthetic
uggugggguggggggag

SEQ ID NO: 755367 - RNA, 17 nt, Artificial Sequence
  Synthetic
cugugggguggggggag

SEQ ID NO: 755368 - RNA, 17 nt, Artificial Sequence
  Synthetic
uugugggguggggggag

SEQ ID NO: 755369 - RNA, 17 nt, Artificial Sequence
  Synthetic
acauggagaugggggag

SEQ ID NO: 755370 - RNA, 17 nt, Artificial Sequence
  Synthetic
aacuugauaugggggag

SEQ ID NO: 755371 - RNA, 17 nt, Artificial Sequence
  Synthetic
aaagcgagaauggggag

SEQ ID NO: 755372 - RNA, 17 nt, Artificial Sequence
  Synthetic
aagcuuaguguggggag

SEQ ID NO: 755373 - RNA, 17 nt, Artificial Sequence
  Synthetic
ugggaucagaaugggag

SEQ ID NO: 755374 - RNA, 17 nt, Artificial Sequence
  Synthetic
acaaggguuaaugggag

SEQ ID NO: 755375 - RNA, 17 nt, Artificial Sequence
  Synthetic
uucauaaaccaugggag

SEQ ID NO: 755376 - RNA, 17 nt, Artificial Sequence
  Synthetic
augccagaucaugggag

SEQ ID NO: 755377 - RNA, 17 nt, Artificial Sequence
  Synthetic
uaacuuuuagaugggag

SEQ ID NO: 755378 - RNA, 17 nt, Artificial Sequence
  Synthetic
ugguccuaugaugggag

SEQ ID NO: 755379 - RNA, 17 nt, Artificial Sequence
  Synthetic
ugggcuugugaugggag

SEQ ID NO: 755380 - RNA, 17 nt, Artificial Sequence
  Synthetic
aaaaaauuaacugggag

SEQ ID NO: 755381 - RNA, 17 nt, Artificial Sequence
  Synthetic
uuagcuagcccugggag

SEQ ID NO: 755382 - RNA, 17 nt, Artificial Sequence
  Synthetic
uuucauaucccugggag

SEQ ID NO: 755383 - RNA, 17 nt, Artificial Sequence
  Synthetic
cuugaccaagcugggag

SEQ ID NO: 755384 - RNA, 17 nt, Artificial Sequence
  Synthetic
augauagcagcugggag

SEQ ID NO: 755385 - RNA, 17 nt, Artificial Sequence
  Synthetic
auccuagaaucugggag

SEQ ID NO: 755386 - RNA, 17 nt, Artificial Sequence
  Synthetic
ugaaauaucucugggag

SEQ ID NO: 755387 - RNA, 17 nt, Artificial Sequence
  Synthetic
agacuugagucugggag

SEQ ID NO: 755388 - RNA, 17 nt, Artificial Sequence
  Synthetic
ucacucguaagugggag

SEQ ID NO: 755389 - RNA, 17 nt, Artificial Sequence
  Synthetic
cuucuuaggggugggag

SEQ ID NO: 755390 - RNA, 17 nt, Artificial Sequence
  Synthetic
cuuucagcuggugggag

SEQ ID NO: 755391 - RNA, 17 nt, Artificial Sequence
  Synthetic
aauacgaguggugggag

SEQ ID NO: 755392 - RNA, 17 nt, Artificial Sequence
  Synthetic
cugcugacacuugggag

SEQ ID NO: 755393 - RNA, 17 nt, Artificial Sequence
  Synthetic
aguucagggcuugggag

SEQ ID NO: 755394 - RNA, 17 nt, Artificial Sequence
  Synthetic
ccagaauaaguugggag

SEQ ID NO: 755395 - RNA, 17 nt, Artificial Sequence
  Synthetic
agaaaaaagguugggag

SEQ ID NO: 755396 - RNA, 17 nt, Artificial Sequence
  Synthetic
uuagauuauguugggag

SEQ ID NO: 755397 - RNA, 17 nt, Artificial Sequence
  Synthetic
acagacuuauuugggag

SEQ ID NO: 755398 - RNA, 17 nt, Artificial Sequence
  Synthetic
ugugguugguuugggag

SEQ ID NO: 755399 - RNA, 17 nt, Artificial Sequence
  Synthetic
acaguagauuuugggag

SEQ ID NO: 755400 - RNA, 17 nt, Artificial Sequence
  Synthetic
aguaugucuuuugggag

SEQ ID NO: 755401 - RNA, 17 nt, Artificial Sequence
  Synthetic
aagaagauuuuugggag

SEQ ID NO: 755402 - RNA, 17 nt, Artificial Sequence
  Synthetic
uuuaaaguuaaauggag

SEQ ID NO: 755403 - RNA, 17 nt, Artificial Sequence
  Synthetic
auaagaucagaauggag

SEQ ID NO: 755404 - RNA, 17 nt, Artificial Sequence
  Synthetic
auaugaguggaauggag

SEQ ID NO: 755405 - RNA, 17 nt, Artificial Sequence
  Synthetic
cguauagucacauggag

SEQ ID NO: 755406 - RNA, 17 nt, Artificial Sequence
  Synthetic
cuauuguuaccauggag

SEQ ID NO: 755407 - RNA, 17 nt, Artificial Sequence
  Synthetic
caaacugcuccauggag

SEQ ID NO: 755408 - RNA, 17 nt, Artificial Sequence
  Synthetic
cacauggacucauggag

SEQ ID NO: 755409 - RNA, 17 nt, Artificial Sequence
  Synthetic
cuucccuauucauggag

SEQ ID NO: 755410 - RNA, 17 nt, Artificial Sequence
  Synthetic
uuaccaaguucauggag

SEQ ID NO: 755411 - RNA, 17 nt, Artificial Sequence
  Synthetic
cuuucaggaagauggag

SEQ ID NO: 755412 - RNA, 17 nt, Artificial Sequence
  Synthetic
ccagagauaggauggag

SEQ ID NO: 755413 - RNA, 17 nt, Artificial Sequence
  Synthetic
uucagaggaugauggag

SEQ ID NO: 755414 - RNA, 17 nt, Artificial Sequence
  Synthetic
uuugaacuaugauggag

SEQ ID NO: 755415 - RNA, 17 nt, Artificial Sequence
  Synthetic
aggagauucugauggag

SEQ ID NO: 755416 - RNA, 17 nt, Artificial Sequence
  Synthetic
aaggagcagauauggag

SEQ ID NO: 755417 - RNA, 17 nt, Artificial Sequence
  Synthetic
ucacaauguguauggag

SEQ ID NO: 755418 - RNA, 17 nt, Artificial Sequence
  Synthetic
uaacaugguaacuggag

SEQ ID NO: 755419 - RNA, 17 nt, Artificial Sequence
  Synthetic
uguuagaaagacuggag

SEQ ID NO: 755420 - RNA, 17 nt, Artificial Sequence
  Synthetic
auuugaaucgacuggag

SEQ ID NO: 755421 - RNA, 17 nt, Artificial Sequence
  Synthetic
ugauucacauacuggag

SEQ ID NO: 755422 - RNA, 17 nt, Artificial Sequence
  Synthetic
cuuaacucagccuggag

SEQ ID NO: 755423 - RNA, 17 nt, Artificial Sequence
  Synthetic
caaggagaguccuggag

SEQ ID NO: 755424 - RNA, 17 nt, Artificial Sequence
  Synthetic
auuuccgccagcuggag

SEQ ID NO: 755425 - RNA, 17 nt, Artificial Sequence
  Synthetic
ugucacccaggcuggag

SEQ ID NO: 755426 - RNA, 17 nt, Artificial Sequence
  Synthetic
ugucgcccaggcuggag

SEQ ID NO: 755427 - RNA, 17 nt, Artificial Sequence
  Synthetic
uuuagccauggcuggag

SEQ ID NO: 755428 - RNA, 17 nt, Artificial Sequence
  Synthetic
uuuauccauggcuggag

SEQ ID NO: 755429 - RNA, 17 nt, Artificial Sequence
  Synthetic
aacaacagaugcuggag

SEQ ID NO: 755430 - RNA, 17 nt, Artificial Sequence
  Synthetic
aacaacaggugcuggag

SEQ ID NO: 755431 - RNA, 17 nt, Artificial Sequence
  Synthetic
uuguucccuugcuggag

SEQ ID NO: 755432 - RNA, 17 nt, Artificial Sequence
  Synthetic
cuagaagcagucuggag

SEQ ID NO: 755433 - RNA, 17 nt, Artificial Sequence
  Synthetic
uacuguguguucuggag

SEQ ID NO: 755434 - RNA, 17 nt, Artificial Sequence
  Synthetic
aaacccauuuucuggag

SEQ ID NO: 755435 - RNA, 17 nt, Artificial Sequence
  Synthetic
uacuuaagaaaguggag

SEQ ID NO: 755436 - RNA, 17 nt, Artificial Sequence
  Synthetic
cguaaaaucaaguggag

SEQ ID NO: 755437 - RNA, 17 nt, Artificial Sequence
  Synthetic
uagagaagacaguggag

SEQ ID NO: 755438 - RNA, 17 nt, Artificial Sequence
  Synthetic
agagggagagaguggag

SEQ ID NO: 755439 - RNA, 17 nt, Artificial Sequence
  Synthetic
cccaggcuggaguggag

SEQ ID NO: 755440 - RNA, 17 nt, Artificial Sequence
  Synthetic
uugcuacaaagguggag

SEQ ID NO: 755441 - RNA, 17 nt, Artificial Sequence
  Synthetic
acuagguacagguggag

SEQ ID NO: 755442 - RNA, 17 nt, Artificial Sequence
  Synthetic
uucagacuaggguggag

SEQ ID NO: 755443 - RNA, 17 nt, Artificial Sequence
  Synthetic
aaaccuccucuguggag

SEQ ID NO: 755444 - RNA, 17 nt, Artificial Sequence
  Synthetic
aauagcauucuguggag

SEQ ID NO: 755445 - RNA, 17 nt, Artificial Sequence
  Synthetic
uaugaguggguguggag

SEQ ID NO: 755446 - RNA, 17 nt, Artificial Sequence
  Synthetic
aacgugaguguguggag

SEQ ID NO: 755447 - RNA, 17 nt, Artificial Sequence
  Synthetic
uaauucaauuuguggag

SEQ ID NO: 755448 - RNA, 17 nt, Artificial Sequence
  Synthetic
auggugcguuuguggag

SEQ ID NO: 755449 - RNA, 17 nt, Artificial Sequence
  Synthetic
uuccuagagaauuggag

SEQ ID NO: 755450 - RNA, 17 nt, Artificial Sequence
  Synthetic
cuagaacauaauuggag

SEQ ID NO: 755451 - RNA, 17 nt, Artificial Sequence
  Synthetic
acaaucuugcauuggag

SEQ ID NO: 755452 - RNA, 17 nt, Artificial Sequence
  Synthetic
uauccuguucauuggag

SEQ ID NO: 755453 - RNA, 17 nt, Artificial Sequence
  Synthetic
aacuuggaagauuggag

SEQ ID NO: 755454 - RNA, 17 nt, Artificial Sequence
  Synthetic
ugggggugagauuggag

SEQ ID NO: 755455 - RNA, 17 nt, Artificial Sequence
  Synthetic
uggagaguagauuggag

SEQ ID NO: 755456 - RNA, 17 nt, Artificial Sequence
  Synthetic
cugguaaagacuuggag

SEQ ID NO: 755457 - RNA, 17 nt, Artificial Sequence
  Synthetic
caggacucuccuuggag

SEQ ID NO: 755458 - RNA, 17 nt, Artificial Sequence
  Synthetic
aaaaaaacuucuuggag

SEQ ID NO: 755459 - RNA, 17 nt, Artificial Sequence
  Synthetic
agaaggugagguuggag

SEQ ID NO: 755460 - RNA, 17 nt, Artificial Sequence
  Synthetic
uauuaaggaauuuggag

SEQ ID NO: 755461 - RNA, 17 nt, Artificial Sequence
  Synthetic
caacaugagauuuggag

SEQ ID NO: 755462 - RNA, 17 nt, Artificial Sequence
  Synthetic
aaagguacuauuuggag

SEQ ID NO: 755463 - RNA, 17 nt, Artificial Sequence
  Synthetic
uggggaugacuuuggag

SEQ ID NO: 755464 - RNA, 17 nt, Artificial Sequence
  Synthetic
aguucaugccuuuggag

SEQ ID NO: 755465 - RNA, 17 nt, Artificial Sequence
  Synthetic
caucaauagguuuggag

SEQ ID NO: 755466 - RNA, 17 nt, Artificial Sequence
  Synthetic
cagcugccauuuuggag

SEQ ID NO: 755467 - RNA, 17 nt, Artificial Sequence
  Synthetic
agugccauauuuuggag

SEQ ID NO: 755468 - RNA, 17 nt, Artificial Sequence
  Synthetic
cuguguagcuuuuggag

SEQ ID NO: 755469 - RNA, 17 nt, Artificial Sequence
  Synthetic
uugauucucuuuuggag

SEQ ID NO: 755470 - RNA, 17 nt, Artificial Sequence
  Synthetic
uuucuagauuuuuggag

SEQ ID NO: 755471 - RNA, 17 nt, Artificial Sequence
  Synthetic
uacuuauggaaaaugag

SEQ ID NO: 755472 - RNA, 17 nt, Artificial Sequence
  Synthetic
uuuaaauauaaaaugag

SEQ ID NO: 755473 - RNA, 17 nt, Artificial Sequence
  Synthetic
uagaaaacagaaaugag

SEQ ID NO: 755474 - RNA, 17 nt, Artificial Sequence
  Synthetic
uaagguggauaaaugag

SEQ ID NO: 755475 - RNA, 17 nt, Artificial Sequence
  Synthetic
ccagauagguaaaugag

SEQ ID NO: 755476 - RNA, 17 nt, Artificial Sequence
  Synthetic
ucagugaaaacaaugag

SEQ ID NO: 755477 - RNA, 17 nt, Artificial Sequence
  Synthetic
acucuuaucucaaugag

SEQ ID NO: 755478 - RNA, 17 nt, Artificial Sequence
  Synthetic
cacagaauaagaaugag

SEQ ID NO: 755479 - RNA, 17 nt, Artificial Sequence
  Synthetic
uacuuggagagaaugag

SEQ ID NO: 755480 - RNA, 17 nt, Artificial Sequence
  Synthetic
aggcugccaggaaugag

SEQ ID NO: 755481 - RNA, 17 nt, Artificial Sequence
  Synthetic
uggugggcaggaaugag

SEQ ID NO: 755482 - RNA, 17 nt, Artificial Sequence
  Synthetic
uagcuaaagggaaugag

SEQ ID NO: 755483 - RNA, 17 nt, Artificial Sequence
  Synthetic
aaagcaucuugaaugag

SEQ ID NO: 755484 - RNA, 17 nt, Artificial Sequence
  Synthetic
acaaagacaaacaugag

SEQ ID NO: 755485 - RNA, 17 nt, Artificial Sequence
  Synthetic
cagucacccaacaugag

SEQ ID NO: 755486 - RNA, 17 nt, Artificial Sequence
  Synthetic
cugggagggaacaugag

SEQ ID NO: 755487 - RNA, 17 nt, Artificial Sequence
  Synthetic
ugauuuugacacaugag

SEQ ID NO: 755488 - RNA, 17 nt, Artificial Sequence
  Synthetic
cagaaaaaugacaugag

SEQ ID NO: 755489 - RNA, 17 nt, Artificial Sequence
  Synthetic
uuauuuuucaccaugag

SEQ ID NO: 755490 - RNA, 17 nt, Artificial Sequence
  Synthetic
uuuauucuuuccaugag

SEQ ID NO: 755491 - RNA, 17 nt, Artificial Sequence
  Synthetic
uccugaaugagcaugag

SEQ ID NO: 755492 - RNA, 17 nt, Artificial Sequence
  Synthetic
cauuauagaggcaugag

SEQ ID NO: 755493 - RNA, 17 nt, Artificial Sequence
  Synthetic
uugauuugcuucaugag

SEQ ID NO: 755494 - RNA, 17 nt, Artificial Sequence
  Synthetic
agagucuugaagaugag

SEQ ID NO: 755495 - RNA, 17 nt, Artificial Sequence
  Synthetic
ugggaggcuaagaugag

SEQ ID NO: 755496 - RNA, 17 nt, Artificial Sequence
  Synthetic
acaaagcaggagaugag

SEQ ID NO: 755497 - RNA, 17 nt, Artificial Sequence
  Synthetic
auuagguaggagaugag

SEQ ID NO: 755498 - RNA, 17 nt, Artificial Sequence
  Synthetic
ucagugaaaaggaugag

SEQ ID NO: 755499 - RNA, 17 nt, Artificial Sequence
  Synthetic
aacaaaaugaggaugag

SEQ ID NO: 755500 - RNA, 17 nt, Artificial Sequence
  Synthetic
acugcuucuaggaugag

SEQ ID NO: 755501 - RNA, 17 nt, Artificial Sequence
  Synthetic
uaggcccaagggaugag

SEQ ID NO: 755502 - RNA, 17 nt, Artificial Sequence
  Synthetic
ugcagagccaugaugag

SEQ ID NO: 755503 - RNA, 17 nt, Artificial Sequence
  Synthetic
acugaagagcugaugag

SEQ ID NO: 755504 - RNA, 17 nt, Artificial Sequence
  Synthetic
caacucucaaauaugag

SEQ ID NO: 755505 - RNA, 17 nt, Artificial Sequence
  Synthetic
augugaaaggauaugag

SEQ ID NO: 755506 - RNA, 17 nt, Artificial Sequence
  Synthetic
aguguguaugauaugag

SEQ ID NO: 755507 - RNA, 17 nt, Artificial Sequence
  Synthetic
aucaguaauuguaugag

SEQ ID NO: 755508 - RNA, 17 nt, Artificial Sequence
  Synthetic
aaccaggauauuaugag

SEQ ID NO: 755509 - RNA, 17 nt, Artificial Sequence
  Synthetic
caaugccuccuuaugag

SEQ ID NO: 755510 - RNA, 17 nt, Artificial Sequence
  Synthetic
aucaaacugcuuaugag

SEQ ID NO: 755511 - RNA, 17 nt, Artificial Sequence
  Synthetic
aguaaguaaguuaugag

SEQ ID NO: 755512 - RNA, 17 nt, Artificial Sequence
  Synthetic
aaucauuuaguuaugag

SEQ ID NO: 755513 - RNA, 17 nt, Artificial Sequence
  Synthetic
aaccagcauguuaugag

SEQ ID NO: 755514 - RNA, 17 nt, Artificial Sequence
  Synthetic
acagaggaaaaacugag

SEQ ID NO: 755515 - RNA, 17 nt, Artificial Sequence
  Synthetic
agauacauugaacugag

SEQ ID NO: 755516 - RNA, 17 nt, Artificial Sequence
  Synthetic
agagagaaguaacugag

SEQ ID NO: 755517 - RNA, 17 nt, Artificial Sequence
  Synthetic
uguuuuaaaucacugag

SEQ ID NO: 755518 - RNA, 17 nt, Artificial Sequence
  Synthetic
ccauuuuaaggacugag

SEQ ID NO: 755519 - RNA, 17 nt, Artificial Sequence
  Synthetic
aaaaagacuggacugag

SEQ ID NO: 755520 - RNA, 17 nt, Artificial Sequence
  Synthetic
uacaucucaauacugag

SEQ ID NO: 755521 - RNA, 17 nt, Artificial Sequence
  Synthetic
ucccagguaaaccugag

SEQ ID NO: 755522 - RNA, 17 nt, Artificial Sequence
  Synthetic
aauagacaauaccugag

SEQ ID NO: 755523 - RNA, 17 nt, Artificial Sequence
  Synthetic
uacccugacacccugag

SEQ ID NO: 755524 - RNA, 17 nt, Artificial Sequence
  Synthetic
accccccauccccugag

SEQ ID NO: 755525 - RNA, 17 nt, Artificial Sequence
  Synthetic
caaucagauccccugag

SEQ ID NO: 755526 - RNA, 17 nt, Artificial Sequence
  Synthetic
agguaugcuccccugag

SEQ ID NO: 755527 - RNA, 17 nt, Artificial Sequence
  Synthetic
cauuuuaaggcccugag

SEQ ID NO: 755528 - RNA, 17 nt, Artificial Sequence
  Synthetic
uuugcucuaagccugag

SEQ ID NO: 755529 - RNA, 17 nt, Artificial Sequence
  Synthetic
ugggguuucugccugag

SEQ ID NO: 755530 - RNA, 17 nt, Artificial Sequence
  Synthetic
aaugaagugcuccugag

SEQ ID NO: 755531 - RNA, 17 nt, Artificial Sequence
  Synthetic
aggaaaagagagcugag

SEQ ID NO: 755532 - RNA, 17 nt, Artificial Sequence
  Synthetic
agaggcacugagcugag

SEQ ID NO: 755533 - RNA, 17 nt, Artificial Sequence
  Synthetic
uacaaaauugagcugag

SEQ ID NO: 755534 - RNA, 17 nt, Artificial Sequence
  Synthetic
aaagagauuuagcugag

SEQ ID NO: 755535 - RNA, 17 nt, Artificial Sequence
  Synthetic
uguggagccaggcugag

SEQ ID NO: 755536 - RNA, 17 nt, Artificial Sequence
  Synthetic
accaucccagggcugag

SEQ ID NO: 755537 - RNA, 17 nt, Artificial Sequence
  Synthetic
agcuaacgggggcugag

SEQ ID NO: 755538 - RNA, 17 nt, Artificial Sequence
  Synthetic
uaccuucacuggcugag

SEQ ID NO: 755539 - RNA, 17 nt, Artificial Sequence
  Synthetic
uuaagcuaguugcugag

SEQ ID NO: 755540 - RNA, 17 nt, Artificial Sequence
  Synthetic
uuuuaacaaaaucugag

SEQ ID NO: 755541 - RNA, 17 nt, Artificial Sequence
  Synthetic
ccaaaggcaaaucugag

SEQ ID NO: 755542 - RNA, 17 nt, Artificial Sequence
  Synthetic
uaaggucagaaucugag

SEQ ID NO: 755543 - RNA, 17 nt, Artificial Sequence
  Synthetic
cucauaaugaaucugag

SEQ ID NO: 755544 - RNA, 17 nt, Artificial Sequence
  Synthetic
ugccuagauaaucugag

SEQ ID NO: 755545 - RNA, 17 nt, Artificial Sequence
  Synthetic
acacauuauuaucugag

SEQ ID NO: 755546 - RNA, 17 nt, Artificial Sequence
  Synthetic
aagcccugaacucugag

SEQ ID NO: 755547 - RNA, 17 nt, Artificial Sequence
  Synthetic
ucaugccuaacucugag

SEQ ID NO: 755548 - RNA, 17 nt, Artificial Sequence
  Synthetic
aagaucugagcucugag

SEQ ID NO: 755549 - RNA, 17 nt, Artificial Sequence
  Synthetic
aguguagucagucugag

SEQ ID NO: 755550 - RNA, 17 nt, Artificial Sequence
  Synthetic
uuaacuucuggucugag

SEQ ID NO: 755551 - RNA, 17 nt, Artificial Sequence
  Synthetic
augaggugcugucugag

SEQ ID NO: 755552 - RNA, 17 nt, Artificial Sequence
  Synthetic
uauaauuugugucugag

SEQ ID NO: 755553 - RNA, 17 nt, Artificial Sequence
  Synthetic
uguacaaaaauucugag

SEQ ID NO: 755554 - RNA, 17 nt, Artificial Sequence
  Synthetic
uuuauccucauucugag

SEQ ID NO: 755555 - RNA, 17 nt, Artificial Sequence
  Synthetic
aagagcacuguucugag

SEQ ID NO: 755556 - RNA, 17 nt, Artificial Sequence
  Synthetic
uuagauauauuucugag

SEQ ID NO: 755557 - RNA, 17 nt, Artificial Sequence
  Synthetic
ucuccuauauuucugag

SEQ ID NO: 755558 - RNA, 17 nt, Artificial Sequence
  Synthetic
auaauauucuuucugag

SEQ ID NO: 755559 - RNA, 17 nt, Artificial Sequence
  Synthetic
uguccacauuuucugag

SEQ ID NO: 755560 - RNA, 17 nt, Artificial Sequence
  Synthetic
ucauggcagaaagugag

SEQ ID NO: 755561 - RNA, 17 nt, Artificial Sequence
  Synthetic
uacauucugaaagugag

SEQ ID NO: 755562 - RNA, 17 nt, Artificial Sequence
  Synthetic
aggcugucacaagugag

SEQ ID NO: 755563 - RNA, 17 nt, Artificial Sequence
  Synthetic
ugaaaaauccaagugag

SEQ ID NO: 755564 - RNA, 17 nt, Artificial Sequence
  Synthetic
acauucauugaagugag

SEQ ID NO: 755565 - RNA, 17 nt, Artificial Sequence
  Synthetic
cacgcauuugaagugag

SEQ ID NO: 755566 - RNA, 17 nt, Artificial Sequence
  Synthetic
uucaucuacacagugag

SEQ ID NO: 755567 - RNA, 17 nt, Artificial Sequence
  Synthetic
cacagacauacagugag

SEQ ID NO: 755568 - RNA, 17 nt, Artificial Sequence
  Synthetic
cuacacacagcagugag

SEQ ID NO: 755569 - RNA, 17 nt, Artificial Sequence
  Synthetic
aaacaaauagcagugag

SEQ ID NO: 755570 - RNA, 17 nt, Artificial Sequence
  Synthetic
auuggguaugcagugag

SEQ ID NO: 755571 - RNA, 17 nt, Artificial Sequence
  Synthetic
acagagguugcagugag

SEQ ID NO: 755572 - RNA, 17 nt, Artificial Sequence
  Synthetic
agacaaaagucagugag

SEQ ID NO: 755573 - RNA, 17 nt, Artificial Sequence
  Synthetic
aaagaaucuucagugag

SEQ ID NO: 755574 - RNA, 17 nt, Artificial Sequence
  Synthetic
ugaauaugaagagugag

SEQ ID NO: 755575 - RNA, 17 nt, Artificial Sequence
  Synthetic
aaaaguaagagagugag

SEQ ID NO: 755576 - RNA, 17 nt, Artificial Sequence
  Synthetic
aaaugagcaggagugag

SEQ ID NO: 755577 - RNA, 17 nt, Artificial Sequence
  Synthetic
cauagcugaggagugag

SEQ ID NO: 755578 - RNA, 17 nt, Artificial Sequence
  Synthetic
aauaaaaauggagugag

SEQ ID NO: 755579 - RNA, 17 nt, Artificial Sequence
  Synthetic
cagcagacgugagugag

SEQ ID NO: 755580 - RNA, 17 nt, Artificial Sequence
  Synthetic
ccaaauuuacuagugag

SEQ ID NO: 755581 - RNA, 17 nt, Artificial Sequence
  Synthetic
aaguagauuguagugag

SEQ ID NO: 755582 - RNA, 17 nt, Artificial Sequence
  Synthetic
uaacucucauuagugag

SEQ ID NO: 755583 - RNA, 17 nt, Artificial Sequence
  Synthetic
uaauuuuuugucgugag

SEQ ID NO: 755584 - RNA, 17 nt, Artificial Sequence
  Synthetic
cugaggaauaaggugag

SEQ ID NO: 755585 - RNA, 17 nt, Artificial Sequence
  Synthetic
cugagauuuaaggugag

SEQ ID NO: 755586 - RNA, 17 nt, Artificial Sequence
  Synthetic
cuaguugaagaggugag

SEQ ID NO: 755587 - RNA, 17 nt, Artificial Sequence
  Synthetic
ucuuugcaugaggugag

SEQ ID NO: 755588 - RNA, 17 nt, Artificial Sequence
  Synthetic
uagaugaaauaggugag

SEQ ID NO: 755589 - RNA, 17 nt, Artificial Sequence
  Synthetic
auuucuugguaggugag

SEQ ID NO: 755590 - RNA, 17 nt, Artificial Sequence
  Synthetic
aaggacaccagggugag

SEQ ID NO: 755591 - RNA, 17 nt, Artificial Sequence
  Synthetic
aaagaauucagggugag

SEQ ID NO: 755592 - RNA, 17 nt, Artificial Sequence
  Synthetic
uugugguauagggugag

SEQ ID NO: 755593 - RNA, 17 nt, Artificial Sequence
  Synthetic
ccaagcccuagggugag

SEQ ID NO: 755594 - RNA, 17 nt, Artificial Sequence
  Synthetic
caagaaaugggggugag

SEQ ID NO: 755595 - RNA, 17 nt, Artificial Sequence
  Synthetic
augauguuuggggugag

SEQ ID NO: 755596 - RNA, 17 nt, Artificial Sequence
  Synthetic
aagaugagcugggugag

SEQ ID NO: 755597 - RNA, 17 nt, Artificial Sequence
  Synthetic
auaugggauugggugag

SEQ ID NO: 755598 - RNA, 17 nt, Artificial Sequence
  Synthetic
uugaaguuaauggugag

SEQ ID NO: 755599 - RNA, 17 nt, Artificial Sequence
  Synthetic
agguacaucauggugag

SEQ ID NO: 755600 - RNA, 17 nt, Artificial Sequence
  Synthetic
agguggggccuggugag

SEQ ID NO: 755601 - RNA, 17 nt, Artificial Sequence
  Synthetic
cagaggugaguggugag

SEQ ID NO: 755602 - RNA, 17 nt, Artificial Sequence
  Synthetic
auuuucacaaaugugag

SEQ ID NO: 755603 - RNA, 17 nt, Artificial Sequence
  Synthetic
aauguuagaaaugugag

SEQ ID NO: 755604 - RNA, 17 nt, Artificial Sequence
  Synthetic
auuuuuauaaaugugag

SEQ ID NO: 755605 - RNA, 17 nt, Artificial Sequence
  Synthetic
aauggcucuaaugugag

SEQ ID NO: 755606 - RNA, 17 nt, Artificial Sequence
  Synthetic
cauggauuuaaugugag

SEQ ID NO: 755607 - RNA, 17 nt, Artificial Sequence
  Synthetic
aauaaauaucaugugag

SEQ ID NO: 755608 - RNA, 17 nt, Artificial Sequence
  Synthetic
ugcuacaaugaugugag

SEQ ID NO: 755609 - RNA, 17 nt, Artificial Sequence
  Synthetic
ugauauagcuaugugag

SEQ ID NO: 755610 - RNA, 17 nt, Artificial Sequence
  Synthetic
auuuaaaguuaugugag

SEQ ID NO: 755611 - RNA, 17 nt, Artificial Sequence
  Synthetic
uuuguuuacacugugag

SEQ ID NO: 755612 - RNA, 17 nt, Artificial Sequence
  Synthetic
agucccuccccugugag

SEQ ID NO: 755613 - RNA, 17 nt, Artificial Sequence
  Synthetic
auccuucaagcugugag

SEQ ID NO: 755614 - RNA, 17 nt, Artificial Sequence
  Synthetic
uuuauugaggcugugag

SEQ ID NO: 755615 - RNA, 17 nt, Artificial Sequence
  Synthetic
aagacgaucucugugag

SEQ ID NO: 755616 - RNA, 17 nt, Artificial Sequence
  Synthetic
uugaggaaaagugugag

SEQ ID NO: 755617 - RNA, 17 nt, Artificial Sequence
  Synthetic
auacacauaugugugag

SEQ ID NO: 755618 - RNA, 17 nt, Artificial Sequence
  Synthetic
aaacaaaugugugugag

SEQ ID NO: 755619 - RNA, 17 nt, Artificial Sequence
  Synthetic
uauauuguacuugugag

SEQ ID NO: 755620 - RNA, 17 nt, Artificial Sequence
  Synthetic
aauaccuuacuugugag

SEQ ID NO: 755621 - RNA, 17 nt, Artificial Sequence
  Synthetic
ccuuccuaaguugugag

SEQ ID NO: 755622 - RNA, 17 nt, Artificial Sequence
  Synthetic
aauauuuaaguugugag

SEQ ID NO: 755623 - RNA, 17 nt, Artificial Sequence
  Synthetic
uaauguagaaaauugag

SEQ ID NO: 755624 - RNA, 17 nt, Artificial Sequence
  Synthetic
aauguugggaaauugag

SEQ ID NO: 755625 - RNA, 17 nt, Artificial Sequence
  Synthetic
ucaaaguguaaauugag

SEQ ID NO: 755626 - RNA, 17 nt, Artificial Sequence
  Synthetic
aaaaguauccaauugag

SEQ ID NO: 755627 - RNA, 17 nt, Artificial Sequence
  Synthetic
ugaggguuggaauugag

SEQ ID NO: 755628 - RNA, 17 nt, Artificial Sequence
  Synthetic
ccuugacugacauugag

SEQ ID NO: 755629 - RNA, 17 nt, Artificial Sequence
  Synthetic
aguacagaaccauugag

SEQ ID NO: 755630 - RNA, 17 nt, Artificial Sequence
  Synthetic
accuaugaaccauugag

SEQ ID NO: 755631 - RNA, 17 nt, Artificial Sequence
  Synthetic
agccauguuucauugag

SEQ ID NO: 755632 - RNA, 17 nt, Artificial Sequence
  Synthetic
ucuguuuuaggauugag

SEQ ID NO: 755633 - RNA, 17 nt, Artificial Sequence
  Synthetic
auaauggggggauugag

SEQ ID NO: 755634 - RNA, 17 nt, Artificial Sequence
  Synthetic
aggacucaaauauugag

SEQ ID NO: 755635 - RNA, 17 nt, Artificial Sequence
  Synthetic
uucuuaaugcuauugag

SEQ ID NO: 755636 - RNA, 17 nt, Artificial Sequence
  Synthetic
ugguucucaaacuugag

SEQ ID NO: 755637 - RNA, 17 nt, Artificial Sequence
  Synthetic
aaagaaaacaacuugag

SEQ ID NO: 755638 - RNA, 17 nt, Artificial Sequence
  Synthetic
agaaaaugauacuugag

SEQ ID NO: 755639 - RNA, 17 nt, Artificial Sequence
  Synthetic
acauuuuccuacuugag

SEQ ID NO: 755640 - RNA, 17 nt, Artificial Sequence
  Synthetic
aaguuaugcaccuugag

SEQ ID NO: 755641 - RNA, 17 nt, Artificial Sequence
  Synthetic
ccauuccaugccuugag

SEQ ID NO: 755642 - RNA, 17 nt, Artificial Sequence
  Synthetic
cugugguuguccuugag

SEQ ID NO: 755643 - RNA, 17 nt, Artificial Sequence
  Synthetic
aaaugagaaagcuugag

SEQ ID NO: 755644 - RNA, 17 nt, Artificial Sequence
  Synthetic
aaggagcccagcuugag

SEQ ID NO: 755645 - RNA, 17 nt, Artificial Sequence
  Synthetic
aagaauaaaugcuugag

SEQ ID NO: 755646 - RNA, 17 nt, Artificial Sequence
  Synthetic
aagaauaauugcuugag

SEQ ID NO: 755647 - RNA, 17 nt, Artificial Sequence
  Synthetic
agauaggcagucuugag

SEQ ID NO: 755648 - RNA, 17 nt, Artificial Sequence
  Synthetic
uucauauacuucuugag

SEQ ID NO: 755649 - RNA, 17 nt, Artificial Sequence
  Synthetic
auguguaagaaguugag

SEQ ID NO: 755650 - RNA, 17 nt, Artificial Sequence
  Synthetic
caaguaaaucaguugag

SEQ ID NO: 755651 - RNA, 17 nt, Artificial Sequence
  Synthetic
uuuuauuuuccguugag

SEQ ID NO: 755652 - RNA, 17 nt, Artificial Sequence
  Synthetic
agaaguccaagguugag

SEQ ID NO: 755653 - RNA, 17 nt, Artificial Sequence
  Synthetic
ugcauugcuugguugag

SEQ ID NO: 755654 - RNA, 17 nt, Artificial Sequence
  Synthetic
acaauggcaauguugag

SEQ ID NO: 755655 - RNA, 17 nt, Artificial Sequence
  Synthetic
ccuguguguguguugag

SEQ ID NO: 755656 - RNA, 17 nt, Artificial Sequence
  Synthetic
ccuagaggguuguugag

SEQ ID NO: 755657 - RNA, 17 nt, Artificial Sequence
  Synthetic
aagcuuucaaauuugag

SEQ ID NO: 755658 - RNA, 17 nt, Artificial Sequence
  Synthetic
uaauaaaccaauuugag

SEQ ID NO: 755659 - RNA, 17 nt, Artificial Sequence
  Synthetic
aaucccagcaauuugag

SEQ ID NO: 755660 - RNA, 17 nt, Artificial Sequence
  Synthetic
caacauaggaauuugag

SEQ ID NO: 755661 - RNA, 17 nt, Artificial Sequence
  Synthetic
ugaugaugacauuugag

SEQ ID NO: 755662 - RNA, 17 nt, Artificial Sequence
  Synthetic
cuuccacugcauuugag

SEQ ID NO: 755663 - RNA, 17 nt, Artificial Sequence
  Synthetic
uaaaaggugcauuugag

SEQ ID NO: 755664 - RNA, 17 nt, Artificial Sequence
  Synthetic
ucaaaaugagauuugag

SEQ ID NO: 755665 - RNA, 17 nt, Artificial Sequence
  Synthetic
uccacuugagauuugag

SEQ ID NO: 755666 - RNA, 17 nt, Artificial Sequence
  Synthetic
uguacacuugauuugag

SEQ ID NO: 755667 - RNA, 17 nt, Artificial Sequence
  Synthetic
auucagguugauuugag

SEQ ID NO: 755668 - RNA, 17 nt, Artificial Sequence
  Synthetic
cuaagcagcuauuugag

SEQ ID NO: 755669 - RNA, 17 nt, Artificial Sequence
  Synthetic
ccugcauaaacuuugag

SEQ ID NO: 755670 - RNA, 17 nt, Artificial Sequence
  Synthetic
aucuauccaacuuugag

SEQ ID NO: 755671 - RNA, 17 nt, Artificial Sequence
  Synthetic
aaucccagcacuuugag

SEQ ID NO: 755672 - RNA, 17 nt, Artificial Sequence
  Synthetic
ucccuguuuacuuugag

SEQ ID NO: 755673 - RNA, 17 nt, Artificial Sequence
  Synthetic
uuauuucugccuuugag

SEQ ID NO: 755674 - RNA, 17 nt, Artificial Sequence
  Synthetic
uuuugugugccuuugag

SEQ ID NO: 755675 - RNA, 17 nt, Artificial Sequence
  Synthetic
acuagaauuccuuugag

SEQ ID NO: 755676 - RNA, 17 nt, Artificial Sequence
  Synthetic
cuuuccuuagcuuugag

SEQ ID NO: 755677 - RNA, 17 nt, Artificial Sequence
  Synthetic
acagaaauggcuuugag

SEQ ID NO: 755678 - RNA, 17 nt, Artificial Sequence
  Synthetic
uuccucagcaguuugag

SEQ ID NO: 755679 - RNA, 17 nt, Artificial Sequence
  Synthetic
agaauguggaguuugag

SEQ ID NO: 755680 - RNA, 17 nt, Artificial Sequence
  Synthetic
ccaugugcuaguuugag

SEQ ID NO: 755681 - RNA, 17 nt, Artificial Sequence
  Synthetic
agagugagaauuuugag

SEQ ID NO: 755682 - RNA, 17 nt, Artificial Sequence
  Synthetic
aagccuuccauuuugag

SEQ ID NO: 755683 - RNA, 17 nt, Artificial Sequence
  Synthetic
uucagcacuauuuugag

SEQ ID NO: 755684 - RNA, 17 nt, Artificial Sequence
  Synthetic
cuuguaccacuuuugag

SEQ ID NO: 755685 - RNA, 17 nt, Artificial Sequence
  Synthetic
uugcgaauauuuuugag

SEQ ID NO: 755686 - RNA, 17 nt, Artificial Sequence
  Synthetic
ccaugauguuuuuugag

SEQ ID NO: 755687 - RNA, 17 nt, Artificial Sequence
  Synthetic
uuuuuuuuuuuuuugag

SEQ ID NO: 755688 - RNA, 17 nt, Artificial Sequence
  Synthetic
accauguaucaaaauag

SEQ ID NO: 755689 - RNA, 17 nt, Artificial Sequence
  Synthetic
aagauuaaauaaaauag

SEQ ID NO: 755690 - RNA, 17 nt, Artificial Sequence
  Synthetic
uuaaggcuauaaaauag

SEQ ID NO: 755691 - RNA, 17 nt, Artificial Sequence
  Synthetic
cuuuuacaguaaaauag

SEQ ID NO: 755692 - RNA, 17 nt, Artificial Sequence
  Synthetic
cuuuacuaguaaaauag

SEQ ID NO: 755693 - RNA, 17 nt, Artificial Sequence
  Synthetic
augcaacaaacaaauag

SEQ ID NO: 755694 - RNA, 17 nt, Artificial Sequence
  Synthetic
aaaauguaaacaaauag

SEQ ID NO: 755695 - RNA, 17 nt, Artificial Sequence
  Synthetic
aaguguuucacaaauag

SEQ ID NO: 755696 - RNA, 17 nt, Artificial Sequence
  Synthetic
aaacauaccccaaauag

SEQ ID NO: 755697 - RNA, 17 nt, Artificial Sequence
  Synthetic
ccugcacauucaaauag

SEQ ID NO: 755698 - RNA, 17 nt, Artificial Sequence
  Synthetic
uaaauacagggaaauag

SEQ ID NO: 755699 - RNA, 17 nt, Artificial Sequence
  Synthetic
uguggauguggaaauag

SEQ ID NO: 755700 - RNA, 17 nt, Artificial Sequence
  Synthetic
cacacuaacugaaauag

SEQ ID NO: 755701 - RNA, 17 nt, Artificial Sequence
  Synthetic
ucaucccacugaaauag

SEQ ID NO: 755702 - RNA, 17 nt, Artificial Sequence
  Synthetic
augguagccugaaauag

SEQ ID NO: 755703 - RNA, 17 nt, Artificial Sequence
  Synthetic
uaauuuaaaauaaauag

SEQ ID NO: 755704 - RNA, 17 nt, Artificial Sequence
  Synthetic
aggcacucaauaaauag

SEQ ID NO: 755705 - RNA, 17 nt, Artificial Sequence
  Synthetic
uuuuuauuuauaaauag

SEQ ID NO: 755706 - RNA, 17 nt, Artificial Sequence
  Synthetic
uagugauuucuaaauag

SEQ ID NO: 755707 - RNA, 17 nt, Artificial Sequence
  Synthetic
ccagaucuuguaaauag

SEQ ID NO: 755708 - RNA, 17 nt, Artificial Sequence
  Synthetic
uuugauuuuuuaaauag

SEQ ID NO: 755709 - RNA, 17 nt, Artificial Sequence
  Synthetic
cucaucauaaacaauag

SEQ ID NO: 755710 - RNA, 17 nt, Artificial Sequence
  Synthetic
auggcaaucaacaauag

SEQ ID NO: 755711 - RNA, 17 nt, Artificial Sequence
  Synthetic
aguuuacauaacaauag

SEQ ID NO: 755712 - RNA, 17 nt, Artificial Sequence
  Synthetic
auuaauacuaacaauag

SEQ ID NO: 755713 - RNA, 17 nt, Artificial Sequence
  Synthetic
cuuuugauccacaauag

SEQ ID NO: 755714 - RNA, 17 nt, Artificial Sequence
  Synthetic
cacaauacuaccaauag

SEQ ID NO: 755715 - RNA, 17 nt, Artificial Sequence
  Synthetic
aggcauauacccaauag

SEQ ID NO: 755716 - RNA, 17 nt, Artificial Sequence
  Synthetic
cuuacaggcuccaauag

SEQ ID NO: 755717 - RNA, 17 nt, Artificial Sequence
  Synthetic
aaggaagacagcaauag

SEQ ID NO: 755718 - RNA, 17 nt, Artificial Sequence
  Synthetic
caaaacuuuugcaauag

SEQ ID NO: 755719 - RNA, 17 nt, Artificial Sequence
  Synthetic
auuauaaugcucaauag

SEQ ID NO: 755720 - RNA, 17 nt, Artificial Sequence
  Synthetic
cccuuccuauucaauag

SEQ ID NO: 755721 - RNA, 17 nt, Artificial Sequence
  Synthetic
agcaucaccuucaauag

SEQ ID NO: 755722 - RNA, 17 nt, Artificial Sequence
  Synthetic
acaugguaguucaauag

SEQ ID NO: 755723 - RNA, 17 nt, Artificial Sequence
  Synthetic
aggaaacauuucaauag

SEQ ID NO: 755724 - RNA, 17 nt, Artificial Sequence
  Synthetic
aacuagugaaagaauag

SEQ ID NO: 755725 - RNA, 17 nt, Artificial Sequence
  Synthetic
auaaaaaacaagaauag

SEQ ID NO: 755726 - RNA, 17 nt, Artificial Sequence
  Synthetic
agggucaggaagaauag

SEQ ID NO: 755727 - RNA, 17 nt, Artificial Sequence
  Synthetic
uucaaaacucagaauag

SEQ ID NO: 755728 - RNA, 17 nt, Artificial Sequence
  Synthetic
ucugaaauagagaauag

SEQ ID NO: 755729 - RNA, 17 nt, Artificial Sequence
  Synthetic
aaauaagaggagaauag

SEQ ID NO: 755730 - RNA, 17 nt, Artificial Sequence
  Synthetic
cacuaaaaugagaauag

SEQ ID NO: 755731 - RNA, 17 nt, Artificial Sequence
  Synthetic
uaugcauuaaggaauag

SEQ ID NO: 755732 - RNA, 17 nt, Artificial Sequence
  Synthetic
uacuuuacuuggaauag

SEQ ID NO: 755733 - RNA, 17 nt, Artificial Sequence
  Synthetic
agacacaugcugaauag

SEQ ID NO: 755734 - RNA, 17 nt, Artificial Sequence
  Synthetic
ucuugcuugcugaauag

SEQ ID NO: 755735 - RNA, 17 nt, Artificial Sequence
  Synthetic
uacucggcagugaauag

SEQ ID NO: 755736 - RNA, 17 nt, Artificial Sequence
  Synthetic
auaaacauugugaauag

SEQ ID NO: 755737 - RNA, 17 nt, Artificial Sequence
  Synthetic
aacuccaucuugaauag

SEQ ID NO: 755738 - RNA, 17 nt, Artificial Sequence
  Synthetic
aaaaguucaaauaauag

SEQ ID NO: 755739 - RNA, 17 nt, Artificial Sequence
  Synthetic
ugcccauacaauaauag

SEQ ID NO: 755740 - RNA, 17 nt, Artificial Sequence
  Synthetic
cagcaaugcaauaauag

SEQ ID NO: 755741 - RNA, 17 nt, Artificial Sequence
  Synthetic
uucguugaagauaauag

SEQ ID NO: 755742 - RNA, 17 nt, Artificial Sequence
  Synthetic
uauuaguaauauaauag

SEQ ID NO: 755743 - RNA, 17 nt, Artificial Sequence
  Synthetic
uuauccccauauaauag

SEQ ID NO: 755744 - RNA, 17 nt, Artificial Sequence
  Synthetic
ucuaauagauauaauag

SEQ ID NO: 755745 - RNA, 17 nt, Artificial Sequence
  Synthetic
ccuccaaaaccuaauag

SEQ ID NO: 755746 - RNA, 17 nt, Artificial Sequence
  Synthetic
ucccuuccuuguaauag

SEQ ID NO: 755747 - RNA, 17 nt, Artificial Sequence
  Synthetic
aaaagaggaauuaauag

SEQ ID NO: 755748 - RNA, 17 nt, Artificial Sequence
  Synthetic
ugaauaaugauuaauag

SEQ ID NO: 755749 - RNA, 17 nt, Artificial Sequence
  Synthetic
cucuucuuccuuaauag

SEQ ID NO: 755750 - RNA, 17 nt, Artificial Sequence
  Synthetic
aaguaguauguuaauag

SEQ ID NO: 755751 - RNA, 17 nt, Artificial Sequence
  Synthetic
uugaugcuauuuaauag

SEQ ID NO: 755752 - RNA, 17 nt, Artificial Sequence
  Synthetic
ugcucugcuuuuaauag

SEQ ID NO: 755753 - RNA, 17 nt, Artificial Sequence
  Synthetic
uaaaagcuuuuuaauag

SEQ ID NO: 755754 - RNA, 17 nt, Artificial Sequence
  Synthetic
caaauucugaaacauag

SEQ ID NO: 755755 - RNA, 17 nt, Artificial Sequence
  Synthetic
uucauuuuuaaacauag

SEQ ID NO: 755756 - RNA, 17 nt, Artificial Sequence
  Synthetic
cucuucugcuaacauag

SEQ ID NO: 755757 - RNA, 17 nt, Artificial Sequence
  Synthetic
aggaaauucuaacauag

SEQ ID NO: 755758 - RNA, 17 nt, Artificial Sequence
  Synthetic
uaaccaaagccacauag

SEQ ID NO: 755759 - RNA, 17 nt, Artificial Sequence
  Synthetic
uguuaccuaucacauag

SEQ ID NO: 755760 - RNA, 17 nt, Artificial Sequence
  Synthetic
cuuagaaugggacauag

SEQ ID NO: 755761 - RNA, 17 nt, Artificial Sequence
  Synthetic
auaucacuccuacauag

SEQ ID NO: 755762 - RNA, 17 nt, Artificial Sequence
  Synthetic
uuugacacucuacauag

SEQ ID NO: 755763 - RNA, 17 nt, Artificial Sequence
  Synthetic
auguggagucuacauag

SEQ ID NO: 755764 - RNA, 17 nt, Artificial Sequence
  Synthetic
auuaaaagacaccauag

SEQ ID NO: 755765 - RNA, 17 nt, Artificial Sequence
  Synthetic
ucagauguauaccauag

SEQ ID NO: 755766 - RNA, 17 nt, Artificial Sequence
  Synthetic
auuuacuuuacccauag

SEQ ID NO: 755767 - RNA, 17 nt, Artificial Sequence
  Synthetic
cagggaaggugccauag

SEQ ID NO: 755768 - RNA, 17 nt, Artificial Sequence
  Synthetic
ccuaguuugugccauag

SEQ ID NO: 755769 - RNA, 17 nt, Artificial Sequence
  Synthetic
aaucuaaacauccauag

SEQ ID NO: 755770 - RNA, 17 nt, Artificial Sequence
  Synthetic
acugcucuacuccauag

SEQ ID NO: 755771 - RNA, 17 nt, Artificial Sequence
  Synthetic
agagagguucuccauag

SEQ ID NO: 755772 - RNA, 17 nt, Artificial Sequence
  Synthetic
caaacgguucuccauag

SEQ ID NO: 755773 - RNA, 17 nt, Artificial Sequence
  Synthetic
cauacgguuuuccauag

SEQ ID NO: 755774 - RNA, 17 nt, Artificial Sequence
  Synthetic
uuaacugaugagcauag

SEQ ID NO: 755775 - RNA, 17 nt, Artificial Sequence
  Synthetic
cccuuuucuuagcauag

SEQ ID NO: 755776 - RNA, 17 nt, Artificial Sequence
  Synthetic
aaguuagccaggcauag

SEQ ID NO: 755777 - RNA, 17 nt, Artificial Sequence
  Synthetic
aaauuaggugggcauag

SEQ ID NO: 755778 - RNA, 17 nt, Artificial Sequence
  Synthetic
uaauuaacuuggcauag

SEQ ID NO: 755779 - RNA, 17 nt, Artificial Sequence
  Synthetic
cuaguuuauuugcauag

SEQ ID NO: 755780 - RNA, 17 nt, Artificial Sequence
  Synthetic
uuacugaaaaaucauag

SEQ ID NO: 755781 - RNA, 17 nt, Artificial Sequence
  Synthetic
aaaggagcaaaucauag

SEQ ID NO: 755782 - RNA, 17 nt, Artificial Sequence
  Synthetic
caacuuggucaucauag

SEQ ID NO: 755783 - RNA, 17 nt, Artificial Sequence
  Synthetic
caaaucaaagaucauag

SEQ ID NO: 755784 - RNA, 17 nt, Artificial Sequence
  Synthetic
uucuuucaugaucauag

SEQ ID NO: 755785 - RNA, 17 nt, Artificial Sequence
  Synthetic
auuguugaugaucauag

SEQ ID NO: 755786 - RNA, 17 nt, Artificial Sequence
  Synthetic
caaaugucaccucauag

SEQ ID NO: 755787 - RNA, 17 nt, Artificial Sequence
  Synthetic
cauguacagagucauag

SEQ ID NO: 755788 - RNA, 17 nt, Artificial Sequence
  Synthetic
aaaauaaaaauucauag

SEQ ID NO: 755789 - RNA, 17 nt, Artificial Sequence
  Synthetic
cuaaagcaaauucauag

SEQ ID NO: 755790 - RNA, 17 nt, Artificial Sequence
  Synthetic
aaguggucaauucauag

SEQ ID NO: 755791 - RNA, 17 nt, Artificial Sequence
  Synthetic
ccugaaugacuucauag

SEQ ID NO: 755792 - RNA, 17 nt, Artificial Sequence
  Synthetic
aucuaaaagguucauag

SEQ ID NO: 755793 - RNA, 17 nt, Artificial Sequence
  Synthetic
auauuuuauuuucauag

SEQ ID NO: 755794 - RNA, 17 nt, Artificial Sequence
  Synthetic
aauuacuacaaagauag

SEQ ID NO: 755795 - RNA, 17 nt, Artificial Sequence
  Synthetic
augggauggaaagauag

SEQ ID NO: 755796 - RNA, 17 nt, Artificial Sequence
  Synthetic
aauguucuauaagauag

SEQ ID NO: 755797 - RNA, 17 nt, Artificial Sequence
  Synthetic
uaagaucacacagauag

SEQ ID NO: 755798 - RNA, 17 nt, Artificial Sequence
  Synthetic
ugcuuuuaggcagauag

SEQ ID NO: 755799 - RNA, 17 nt, Artificial Sequence
  Synthetic
ugaaaaaaaucagauag

SEQ ID NO: 755800 - RNA, 17 nt, Artificial Sequence
  Synthetic
ugucaaagaucagauag

SEQ ID NO: 755801 - RNA, 17 nt, Artificial Sequence
  Synthetic
uuguccuccagagauag

SEQ ID NO: 755802 - RNA, 17 nt, Artificial Sequence
  Synthetic
auuauuagcagagauag

SEQ ID NO: 755803 - RNA, 17 nt, Artificial Sequence
  Synthetic
acauuacugagagauag

SEQ ID NO: 755804 - RNA, 17 nt, Artificial Sequence
  Synthetic
uauauggugagagauag

SEQ ID NO: 755805 - RNA, 17 nt, Artificial Sequence
  Synthetic
cuagaagaaggagauag

SEQ ID NO: 755806 - RNA, 17 nt, Artificial Sequence
  Synthetic
aggguuuaaggagauag

SEQ ID NO: 755807 - RNA, 17 nt, Artificial Sequence
  Synthetic
ugaacacuuggagauag

SEQ ID NO: 755808 - RNA, 17 nt, Artificial Sequence
  Synthetic
agccuuuccugagauag

SEQ ID NO: 755809 - RNA, 17 nt, Artificial Sequence
  Synthetic
uucuaugucauagauag

SEQ ID NO: 755810 - RNA, 17 nt, Artificial Sequence
  Synthetic
ucaaucucuauagauag

SEQ ID NO: 755811 - RNA, 17 nt, Artificial Sequence
  Synthetic
uuucaguauguagauag

SEQ ID NO: 755812 - RNA, 17 nt, Artificial Sequence
  Synthetic
uauacucaguuagauag

SEQ ID NO: 755813 - RNA, 17 nt, Artificial Sequence
  Synthetic
aggugccuguuagauag

SEQ ID NO: 755814 - RNA, 17 nt, Artificial Sequence
  Synthetic
uucuaguuuaaggauag

SEQ ID NO: 755815 - RNA, 17 nt, Artificial Sequence
  Synthetic
cagugggucuaggauag

SEQ ID NO: 755816 - RNA, 17 nt, Artificial Sequence
  Synthetic
uaacgugcuuaggauag

SEQ ID NO: 755817 - RNA, 17 nt, Artificial Sequence
  Synthetic
ucugaaaagauggauag

SEQ ID NO: 755818 - RNA, 17 nt, Artificial Sequence
  Synthetic
auucuagagauggauag

SEQ ID NO: 755819 - RNA, 17 nt, Artificial Sequence
  Synthetic
cuuaguggucuggauag

SEQ ID NO: 755820 - RNA, 17 nt, Artificial Sequence
  Synthetic
agggcaaaaaaugauag

SEQ ID NO: 755821 - RNA, 17 nt, Artificial Sequence
  Synthetic
auuuuuucaaaugauag

SEQ ID NO: 755822 - RNA, 17 nt, Artificial Sequence
  Synthetic
aucauaggaaaugauag

SEQ ID NO: 755823 - RNA, 17 nt, Artificial Sequence
  Synthetic
cuuucaagcaaugauag

SEQ ID NO: 755824 - RNA, 17 nt, Artificial Sequence
  Synthetic
auaaggcuacaugauag

SEQ ID NO: 755825 - RNA, 17 nt, Artificial Sequence
  Synthetic
ugcuauucucaugauag

SEQ ID NO: 755826 - RNA, 17 nt, Artificial Sequence
  Synthetic
ugcuguucucaugauag

SEQ ID NO: 755827 - RNA, 17 nt, Artificial Sequence
  Synthetic
cgugugagagaugauag

SEQ ID NO: 755828 - RNA, 17 nt, Artificial Sequence
  Synthetic
ugccuaguagaugauag

SEQ ID NO: 755829 - RNA, 17 nt, Artificial Sequence
  Synthetic
uauugcccauaugauag

SEQ ID NO: 755830 - RNA, 17 nt, Artificial Sequence
  Synthetic
uagguuguuuaugauag

SEQ ID NO: 755831 - RNA, 17 nt, Artificial Sequence
  Synthetic
aacucucguacugauag

SEQ ID NO: 755832 - RNA, 17 nt, Artificial Sequence
  Synthetic
agaaguaaaccugauag

SEQ ID NO: 755833 - RNA, 17 nt, Artificial Sequence
  Synthetic
aagagcauucgugauag

SEQ ID NO: 755834 - RNA, 17 nt, Artificial Sequence
  Synthetic
cuaaacaaaggugauag

SEQ ID NO: 755835 - RNA, 17 nt, Artificial Sequence
  Synthetic
ucacccaugugugauag

SEQ ID NO: 755836 - RNA, 17 nt, Artificial Sequence
  Synthetic
aucuauuugauugauag

SEQ ID NO: 755837 - RNA, 17 nt, Artificial Sequence
  Synthetic
cuucuuuaucuugauag

SEQ ID NO: 755838 - RNA, 17 nt, Artificial Sequence
  Synthetic
auauaucaaguugauag

SEQ ID NO: 755839 - RNA, 17 nt, Artificial Sequence
  Synthetic
aaaacugaauuugauag

SEQ ID NO: 755840 - RNA, 17 nt, Artificial Sequence
  Synthetic
uuuguugaauuugauag

SEQ ID NO: 755841 - RNA, 17 nt, Artificial Sequence
  Synthetic
uuuugacauaaauauag

SEQ ID NO: 755842 - RNA, 17 nt, Artificial Sequence
  Synthetic
agagaaggagaauauag

SEQ ID NO: 755843 - RNA, 17 nt, Artificial Sequence
  Synthetic
uauuacuuggaauauag

SEQ ID NO: 755844 - RNA, 17 nt, Artificial Sequence
  Synthetic
aacaacacauaauauag

SEQ ID NO: 755845 - RNA, 17 nt, Artificial Sequence
  Synthetic
uacugugcaacauauag

SEQ ID NO: 755846 - RNA, 17 nt, Artificial Sequence
  Synthetic
uguaucugugcauauag

SEQ ID NO: 755847 - RNA, 17 nt, Artificial Sequence
  Synthetic
auagcagagagauauag

SEQ ID NO: 755848 - RNA, 17 nt, Artificial Sequence
  Synthetic
agagaugaaugauauag

SEQ ID NO: 755849 - RNA, 17 nt, Artificial Sequence
  Synthetic
agcacccaaauauauag

SEQ ID NO: 755850 - RNA, 17 nt, Artificial Sequence
  Synthetic
cuggcuucaauauauag

SEQ ID NO: 755851 - RNA, 17 nt, Artificial Sequence
  Synthetic
aguaauaagauauauag

SEQ ID NO: 755852 - RNA, 17 nt, Artificial Sequence
  Synthetic
acuuaacugauauauag

SEQ ID NO: 755853 - RNA, 17 nt, Artificial Sequence
  Synthetic
uauauuuuacuauauag

SEQ ID NO: 755854 - RNA, 17 nt, Artificial Sequence
  Synthetic
aaaaagacaguauauag

SEQ ID NO: 755855 - RNA, 17 nt, Artificial Sequence
  Synthetic
ccuauuuauuuauauag

SEQ ID NO: 755856 - RNA, 17 nt, Artificial Sequence
  Synthetic
uacuuuuauuuauauag

SEQ ID NO: 755857 - RNA, 17 nt, Artificial Sequence
  Synthetic
agaaagaagaacuauag

SEQ ID NO: 755858 - RNA, 17 nt, Artificial Sequence
  Synthetic
auacaaaucaccuauag

SEQ ID NO: 755859 - RNA, 17 nt, Artificial Sequence
  Synthetic
ugccaaacauccuauag

SEQ ID NO: 755860 - RNA, 17 nt, Artificial Sequence
  Synthetic
aagguauuuagcuauag

SEQ ID NO: 755861 - RNA, 17 nt, Artificial Sequence
  Synthetic
agauaaaauaucuauag

SEQ ID NO: 755862 - RNA, 17 nt, Artificial Sequence
  Synthetic
ucucaccuccucuauag

SEQ ID NO: 755863 - RNA, 17 nt, Artificial Sequence
  Synthetic
caaacuguucucuauag

SEQ ID NO: 755864 - RNA, 17 nt, Artificial Sequence
  Synthetic
auggaugaguucuauag

SEQ ID NO: 755865 - RNA, 17 nt, Artificial Sequence
  Synthetic
ugaaggugaaaguauag

SEQ ID NO: 755866 - RNA, 17 nt, Artificial Sequence
  Synthetic
uauaucaaauaguauag

SEQ ID NO: 755867 - RNA, 17 nt, Artificial Sequence
  Synthetic
aagugccugccguauag

SEQ ID NO: 755868 - RNA, 17 nt, Artificial Sequence
  Synthetic
ucuguggaaagguauag

SEQ ID NO: 755869 - RNA, 17 nt, Artificial Sequence
  Synthetic
aaaaccugaaauuauag

SEQ ID NO: 755870 - RNA, 17 nt, Artificial Sequence
  Synthetic
acagcucucaauuauag

SEQ ID NO: 755871 - RNA, 17 nt, Artificial Sequence
  Synthetic
aacauagcuaauuauag

SEQ ID NO: 755872 - RNA, 17 nt, Artificial Sequence
  Synthetic
acauuauuacauuauag

SEQ ID NO: 755873 - RNA, 17 nt, Artificial Sequence
  Synthetic
ccucuuucccauuauag

SEQ ID NO: 755874 - RNA, 17 nt, Artificial Sequence
  Synthetic
aagaaccucuauuauag

SEQ ID NO: 755875 - RNA, 17 nt, Artificial Sequence
  Synthetic
uaaauaaucacuuauag

SEQ ID NO: 755876 - RNA, 17 nt, Artificial Sequence
  Synthetic
uuauguuuuucuuauag

SEQ ID NO: 755877 - RNA, 17 nt, Artificial Sequence
  Synthetic
ucauucagguguuauag

SEQ ID NO: 755878 - RNA, 17 nt, Artificial Sequence
  Synthetic
caagggugaauuuauag

SEQ ID NO: 755879 - RNA, 17 nt, Artificial Sequence
  Synthetic
aacauuuuaauuuauag

SEQ ID NO: 755880 - RNA, 17 nt, Artificial Sequence
  Synthetic
uaggaggaauuuuauag

SEQ ID NO: 755881 - RNA, 17 nt, Artificial Sequence
  Synthetic
cauauuuaauuuuauag

SEQ ID NO: 755882 - RNA, 17 nt, Artificial Sequence
  Synthetic
aaauuugcauuuuauag

SEQ ID NO: 755883 - RNA, 17 nt, Artificial Sequence
  Synthetic
augaauauauuuuauag

SEQ ID NO: 755884 - RNA, 17 nt, Artificial Sequence
  Synthetic
uucagaaaguuuuauag

SEQ ID NO: 755885 - RNA, 17 nt, Artificial Sequence
  Synthetic
agguccuuguuuuauag

SEQ ID NO: 755886 - RNA, 17 nt, Artificial Sequence
  Synthetic
uguugagagaaaacuag

SEQ ID NO: 755887 - RNA, 17 nt, Artificial Sequence
  Synthetic
ccauagguucaaacuag

SEQ ID NO: 755888 - RNA, 17 nt, Artificial Sequence
  Synthetic
aaaccaucagaaacuag

SEQ ID NO: 755889 - RNA, 17 nt, Artificial Sequence
  Synthetic
aaagagagugaaacuag

SEQ ID NO: 755890 - RNA, 17 nt, Artificial Sequence
  Synthetic
aaauguggugaaacuag

SEQ ID NO: 755891 - RNA, 17 nt, Artificial Sequence
  Synthetic
caccagggauaaacuag

SEQ ID NO: 755892 - RNA, 17 nt, Artificial Sequence
  Synthetic
aaggguugaagaacuag

SEQ ID NO: 755893 - RNA, 17 nt, Artificial Sequence
  Synthetic
aguaggggaauaacuag

SEQ ID NO: 755894 - RNA, 17 nt, Artificial Sequence
  Synthetic
auuaagauacuaacuag

SEQ ID NO: 755895 - RNA, 17 nt, Artificial Sequence
  Synthetic
uuuuucucuguaacuag

SEQ ID NO: 755896 - RNA, 17 nt, Artificial Sequence
  Synthetic
aucacagucaacacuag

SEQ ID NO: 755897 - RNA, 17 nt, Artificial Sequence
  Synthetic
auggcuagcuacacuag

SEQ ID NO: 755898 - RNA, 17 nt, Artificial Sequence
  Synthetic
cuaaaauuucccacuag

SEQ ID NO: 755899 - RNA, 17 nt, Artificial Sequence
  Synthetic
augguuugaagcacuag

SEQ ID NO: 755900 - RNA, 17 nt, Artificial Sequence
  Synthetic
uggcagaugagcacuag

SEQ ID NO: 755901 - RNA, 17 nt, Artificial Sequence
  Synthetic
cacguuagaaucacuag

SEQ ID NO: 755902 - RNA, 17 nt, Artificial Sequence
  Synthetic
uguguugaucucacuag

SEQ ID NO: 755903 - RNA, 17 nt, Artificial Sequence
  Synthetic
aauuugagagucacuag

SEQ ID NO: 755904 - RNA, 17 nt, Artificial Sequence
  Synthetic
caaaaggaaaagacuag

SEQ ID NO: 755905 - RNA, 17 nt, Artificial Sequence
  Synthetic
ccaaccccuaagacuag

SEQ ID NO: 755906 - RNA, 17 nt, Artificial Sequence
  Synthetic
agacugucacagacuag

SEQ ID NO: 755907 - RNA, 17 nt, Artificial Sequence
  Synthetic
accaacccugagacuag

SEQ ID NO: 755908 - RNA, 17 nt, Artificial Sequence
  Synthetic
auuaauugcaggacuag

SEQ ID NO: 755909 - RNA, 17 nt, Artificial Sequence
  Synthetic
uuauuucaagggacuag

SEQ ID NO: 755910 - RNA, 17 nt, Artificial Sequence
  Synthetic
caaauaacugggacuag

SEQ ID NO: 755911 - RNA, 17 nt, Artificial Sequence
  Synthetic
aggacaaaacugacuag

SEQ ID NO: 755912 - RNA, 17 nt, Artificial Sequence
  Synthetic
uugaguccuuauacuag

SEQ ID NO: 755913 - RNA, 17 nt, Artificial Sequence
  Synthetic
acccuggggacuacuag

SEQ ID NO: 755914 - RNA, 17 nt, Artificial Sequence
  Synthetic
uuuuaaauaccuacuag

SEQ ID NO: 755915 - RNA, 17 nt, Artificial Sequence
  Synthetic
ugcaucaaagcuacuag

SEQ ID NO: 755916 - RNA, 17 nt, Artificial Sequence
  Synthetic
aguccagaggcuacuag

SEQ ID NO: 755917 - RNA, 17 nt, Artificial Sequence
  Synthetic
uguguaguuauuacuag

SEQ ID NO: 755918 - RNA, 17 nt, Artificial Sequence
  Synthetic
uuuauuagucuuacuag

SEQ ID NO: 755919 - RNA, 17 nt, Artificial Sequence
  Synthetic
ucuugcagcaaaccuag

SEQ ID NO: 755920 - RNA, 17 nt, Artificial Sequence
  Synthetic
uuuaaaauuaaaccuag

SEQ ID NO: 755921 - RNA, 17 nt, Artificial Sequence
  Synthetic
ucuuucuuagaaccuag

SEQ ID NO: 755922 - RNA, 17 nt, Artificial Sequence
  Synthetic
uagccugaaacaccuag

SEQ ID NO: 755923 - RNA, 17 nt, Artificial Sequence
  Synthetic
augagggagacaccuag

SEQ ID NO: 755924 - RNA, 17 nt, Artificial Sequence
  Synthetic
ucaaaaugaucaccuag

SEQ ID NO: 755925 - RNA, 17 nt, Artificial Sequence
  Synthetic
acugaggagauaccuag

SEQ ID NO: 755926 - RNA, 17 nt, Artificial Sequence
  Synthetic
uugcucuagauaccuag

SEQ ID NO: 755927 - RNA, 17 nt, Artificial Sequence
  Synthetic
ugcaucaaauuaccuag

SEQ ID NO: 755928 - RNA, 17 nt, Artificial Sequence
  Synthetic
ucaucccaggacccuag

SEQ ID NO: 755929 - RNA, 17 nt, Artificial Sequence
  Synthetic
aguagccccuacccuag

SEQ ID NO: 755930 - RNA, 17 nt, Artificial Sequence
  Synthetic
ucaucauguugcccuag

SEQ ID NO: 755931 - RNA, 17 nt, Artificial Sequence
  Synthetic
auguugcuauucccuag

SEQ ID NO: 755932 - RNA, 17 nt, Artificial Sequence
  Synthetic
acuucacuccagccuag

SEQ ID NO: 755933 - RNA, 17 nt, Artificial Sequence
  Synthetic
aagguaauauagccuag

SEQ ID NO: 755934 - RNA, 17 nt, Artificial Sequence
  Synthetic
aaaacuagguagccuag

SEQ ID NO: 755935 - RNA, 17 nt, Artificial Sequence
  Synthetic
cccuugagaaggccuag

SEQ ID NO: 755936 - RNA, 17 nt, Artificial Sequence
  Synthetic
acuuuuaagaggccuag

SEQ ID NO: 755937 - RNA, 17 nt, Artificial Sequence
  Synthetic
uuuuuuagaaugccuag

SEQ ID NO: 755938 - RNA, 17 nt, Artificial Sequence
  Synthetic
acuggggcacugccuag

SEQ ID NO: 755939 - RNA, 17 nt, Artificial Sequence
  Synthetic
uaucaauaauugccuag

SEQ ID NO: 755940 - RNA, 17 nt, Artificial Sequence
  Synthetic
uguauuagccauccuag

SEQ ID NO: 755941 - RNA, 17 nt, Artificial Sequence
  Synthetic
ugccagcggcauccuag

SEQ ID NO: 755942 - RNA, 17 nt, Artificial Sequence
  Synthetic
cagguggggauuccuag

SEQ ID NO: 755943 - RNA, 17 nt, Artificial Sequence
  Synthetic
uauguacaaguuccuag

SEQ ID NO: 755944 - RNA, 17 nt, Artificial Sequence
  Synthetic
cuuaagugcuuuccuag

SEQ ID NO: 755945 - RNA, 17 nt, Artificial Sequence
  Synthetic
uaugccuaguuuccuag

SEQ ID NO: 755946 - RNA, 17 nt, Artificial Sequence
  Synthetic
ucuaugaauuuuccuag

SEQ ID NO: 755947 - RNA, 17 nt, Artificial Sequence
  Synthetic
aguggaagaaaagcuag

SEQ ID NO: 755948 - RNA, 17 nt, Artificial Sequence
  Synthetic
uuuaaaguggaagcuag

SEQ ID NO: 755949 - RNA, 17 nt, Artificial Sequence
  Synthetic
uuaauuccugaagcuag

SEQ ID NO: 755950 - RNA, 17 nt, Artificial Sequence
  Synthetic
caccuaaggccagcuag

SEQ ID NO: 755951 - RNA, 17 nt, Artificial Sequence
  Synthetic
aacauagaugcagcuag

SEQ ID NO: 755952 - RNA, 17 nt, Artificial Sequence
  Synthetic
caucuuugcucagcuag

SEQ ID NO: 755953 - RNA, 17 nt, Artificial Sequence
  Synthetic
auuaguaguucagcuag

SEQ ID NO: 755954 - RNA, 17 nt, Artificial Sequence
  Synthetic
ccugggcuaagagcuag

SEQ ID NO: 755955 - RNA, 17 nt, Artificial Sequence
  Synthetic
uuaggauuuggagcuag

SEQ ID NO: 755956 - RNA, 17 nt, Artificial Sequence
  Synthetic
aaaggggaaugagcuag

SEQ ID NO: 755957 - RNA, 17 nt, Artificial Sequence
  Synthetic
uuucaauaaugagcuag

SEQ ID NO: 755958 - RNA, 17 nt, Artificial Sequence
  Synthetic
cuugguuuaauagcuag

SEQ ID NO: 755959 - RNA, 17 nt, Artificial Sequence
  Synthetic
aauuuaaauuuagcuag

SEQ ID NO: 755960 - RNA, 17 nt, Artificial Sequence
  Synthetic
cucagggaagacgcuag

SEQ ID NO: 755961 - RNA, 17 nt, Artificial Sequence
  Synthetic
ugaccuaaucaggcuag

SEQ ID NO: 755962 - RNA, 17 nt, Artificial Sequence
  Synthetic
uggagacaggaggcuag

SEQ ID NO: 755963 - RNA, 17 nt, Artificial Sequence
  Synthetic
aagccgcaugcggcuag

SEQ ID NO: 755964 - RNA, 17 nt, Artificial Sequence
  Synthetic
aggggguggggggcuag

SEQ ID NO: 755965 - RNA, 17 nt, Artificial Sequence
  Synthetic
agugggacacuggcuag

SEQ ID NO: 755966 - RNA, 17 nt, Artificial Sequence
  Synthetic
uuuauuagucuggcuag

SEQ ID NO: 755967 - RNA, 17 nt, Artificial Sequence
  Synthetic
uggaggacgguggcuag

SEQ ID NO: 755968 - RNA, 17 nt, Artificial Sequence
  Synthetic
cggcuucuguuggcuag

SEQ ID NO: 755969 - RNA, 17 nt, Artificial Sequence
  Synthetic
uuucauuuguuggcuag

SEQ ID NO: 755970 - RNA, 17 nt, Artificial Sequence
  Synthetic
auaugauagaaugcuag

SEQ ID NO: 755971 - RNA, 17 nt, Artificial Sequence
  Synthetic
agcucccuugaugcuag

SEQ ID NO: 755972 - RNA, 17 nt, Artificial Sequence
  Synthetic
uacugaaaauaugcuag

SEQ ID NO: 755973 - RNA, 17 nt, Artificial Sequence
  Synthetic
cagacccugccugcuag

SEQ ID NO: 755974 - RNA, 17 nt, Artificial Sequence
  Synthetic
uaagagacuccugcuag

SEQ ID NO: 755975 - RNA, 17 nt, Artificial Sequence
  Synthetic
auccucacuucugcuag

SEQ ID NO: 755976 - RNA, 17 nt, Artificial Sequence
  Synthetic
uuuauuagucuugcuag

SEQ ID NO: 755977 - RNA, 17 nt, Artificial Sequence
  Synthetic
cuguaugucuuugcuag

SEQ ID NO: 755978 - RNA, 17 nt, Artificial Sequence
  Synthetic
caaauugaaaaaucuag

SEQ ID NO: 755979 - RNA, 17 nt, Artificial Sequence
  Synthetic
caaacuagaaaaucuag

SEQ ID NO: 755980 - RNA, 17 nt, Artificial Sequence
  Synthetic
uugaguuuaaaaucuag

SEQ ID NO: 755981 - RNA, 17 nt, Artificial Sequence
  Synthetic
agcaaccucaaaucuag

SEQ ID NO: 755982 - RNA, 17 nt, Artificial Sequence
  Synthetic
caacccuagcaaucuag

SEQ ID NO: 755983 - RNA, 17 nt, Artificial Sequence
  Synthetic
aauauuccagaaucuag

SEQ ID NO: 755984 - RNA, 17 nt, Artificial Sequence
  Synthetic
aguacugcugaaucuag

SEQ ID NO: 755985 - RNA, 17 nt, Artificial Sequence
  Synthetic
caguuagaggcaucuag

SEQ ID NO: 755986 - RNA, 17 nt, Artificial Sequence
  Synthetic
uagucauguguaucuag

SEQ ID NO: 755987 - RNA, 17 nt, Artificial Sequence
  Synthetic
aaugagugauuaucuag

SEQ ID NO: 755988 - RNA, 17 nt, Artificial Sequence
  Synthetic
ucacuugaaaacucuag

SEQ ID NO: 755989 - RNA, 17 nt, Artificial Sequence
  Synthetic
uuauuuuuaaacucuag

SEQ ID NO: 755990 - RNA, 17 nt, Artificial Sequence
  Synthetic
uaagaugauaacucuag

SEQ ID NO: 755991 - RNA, 17 nt, Artificial Sequence
  Synthetic
uuuauuuuaagcucuag

SEQ ID NO: 755992 - RNA, 17 nt, Artificial Sequence
  Synthetic
uacacucuaggcucuag

SEQ ID NO: 755993 - RNA, 17 nt, Artificial Sequence
  Synthetic
aacaauaugggcucuag

SEQ ID NO: 755994 - RNA, 17 nt, Artificial Sequence
  Synthetic
caaauaacuggcucuag

SEQ ID NO: 755995 - RNA, 17 nt, Artificial Sequence
  Synthetic
auuucucuucucucuag

SEQ ID NO: 755996 - RNA, 17 nt, Artificial Sequence
  Synthetic
auugugaaagucucuag

SEQ ID NO: 755997 - RNA, 17 nt, Artificial Sequence
  Synthetic
uggcauggcuucucuag

SEQ ID NO: 755998 - RNA, 17 nt, Artificial Sequence
  Synthetic
auacaacugaagucuag

SEQ ID NO: 755999 - RNA, 17 nt, Artificial Sequence
  Synthetic
aaaagccaauagucuag

SEQ ID NO: 756000 - RNA, 17 nt, Artificial Sequence
  Synthetic
aacugccacuggucuag

SEQ ID NO: 756001 - RNA, 17 nt, Artificial Sequence
  Synthetic
caaaacaucuggucuag

SEQ ID NO: 756002 - RNA, 17 nt, Artificial Sequence
  Synthetic
uauaccagaaugucuag

SEQ ID NO: 756003 - RNA, 17 nt, Artificial Sequence
  Synthetic
ugggagaaacugucuag

SEQ ID NO: 756004 - RNA, 17 nt, Artificial Sequence
  Synthetic
aauugagagcugucuag

SEQ ID NO: 756005 - RNA, 17 nt, Artificial Sequence
  Synthetic
auuuugaaagugucuag

SEQ ID NO: 756006 - RNA, 17 nt, Artificial Sequence
  Synthetic
uaugauagagugucuag

SEQ ID NO: 756007 - RNA, 17 nt, Artificial Sequence
  Synthetic
uagccauaugugucuag

SEQ ID NO: 756008 - RNA, 17 nt, Artificial Sequence
  Synthetic
uucugaaccaauucuag

SEQ ID NO: 756009 - RNA, 17 nt, Artificial Sequence
  Synthetic
cauugucuuaauucuag

SEQ ID NO: 756010 - RNA, 17 nt, Artificial Sequence
  Synthetic
auggauuuacauucuag

SEQ ID NO: 756011 - RNA, 17 nt, Artificial Sequence
  Synthetic
aaccauauucauucuag

SEQ ID NO: 756012 - RNA, 17 nt, Artificial Sequence
  Synthetic
aaaugaggagauucuag

SEQ ID NO: 756013 - RNA, 17 nt, Artificial Sequence
  Synthetic
aagaauauauauucuag

SEQ ID NO: 756014 - RNA, 17 nt, Artificial Sequence
  Synthetic
auugccuucuauucuag

SEQ ID NO: 756015 - RNA, 17 nt, Artificial Sequence
  Synthetic
aaaggcaugccuucuag

SEQ ID NO: 756016 - RNA, 17 nt, Artificial Sequence
  Synthetic
agaugaaaaaguucuag

SEQ ID NO: 756017 - RNA, 17 nt, Artificial Sequence
  Synthetic
aaaagugauaguucuag

SEQ ID NO: 756018 - RNA, 17 nt, Artificial Sequence
  Synthetic
uuuaguuuugguucuag

SEQ ID NO: 756019 - RNA, 17 nt, Artificial Sequence
  Synthetic
aaguacccucuuucuag

SEQ ID NO: 756020 - RNA, 17 nt, Artificial Sequence
  Synthetic
cgggcaguucuuucuag

SEQ ID NO: 756021 - RNA, 17 nt, Artificial Sequence
  Synthetic
ugggggcaucaaaguag

SEQ ID NO: 756022 - RNA, 17 nt, Artificial Sequence
  Synthetic
uugacagaucaaaguag

SEQ ID NO: 756023 - RNA, 17 nt, Artificial Sequence
  Synthetic
uuaagaucucaaaguag

SEQ ID NO: 756024 - RNA, 17 nt, Artificial Sequence
  Synthetic
agauggagagaaaguag

SEQ ID NO: 756025 - RNA, 17 nt, Artificial Sequence
  Synthetic
uuuuagauguaaaguag

SEQ ID NO: 756026 - RNA, 17 nt, Artificial Sequence
  Synthetic
aagaaugggggaaguag

SEQ ID NO: 756027 - RNA, 17 nt, Artificial Sequence
  Synthetic
acacagguuugaaguag

SEQ ID NO: 756028 - RNA, 17 nt, Artificial Sequence
  Synthetic
aaggauuacauaaguag

SEQ ID NO: 756029 - RNA, 17 nt, Artificial Sequence
  Synthetic
cuucagugacuaaguag

SEQ ID NO: 756030 - RNA, 17 nt, Artificial Sequence
  Synthetic
aaaaacuaauuaaguag

SEQ ID NO: 756031 - RNA, 17 nt, Artificial Sequence
  Synthetic
ucugugggauuaaguag

SEQ ID NO: 756032 - RNA, 17 nt, Artificial Sequence
  Synthetic
auaaugccuuuaaguag

SEQ ID NO: 756033 - RNA, 17 nt, Artificial Sequence
  Synthetic
uccaaaauaaacaguag

SEQ ID NO: 756034 - RNA, 17 nt, Artificial Sequence
  Synthetic
uaagacauuaacaguag

SEQ ID NO: 756035 - RNA, 17 nt, Artificial Sequence
  Synthetic
caaaacaucuacaguag

SEQ ID NO: 756036 - RNA, 17 nt, Artificial Sequence
  Synthetic
uuguaauuuuacaguag

SEQ ID NO: 756037 - RNA, 17 nt, Artificial Sequence
  Synthetic
uccagagcccccaguag

SEQ ID NO: 756038 - RNA, 17 nt, Artificial Sequence
  Synthetic
auaucauaguccaguag

SEQ ID NO: 756039 - RNA, 17 nt, Artificial Sequence
  Synthetic
uuccaugaaggcaguag

SEQ ID NO: 756040 - RNA, 17 nt, Artificial Sequence
  Synthetic
aaaaaauauugcaguag

SEQ ID NO: 756041 - RNA, 17 nt, Artificial Sequence
  Synthetic
cacauuugaaucaguag

SEQ ID NO: 756042 - RNA, 17 nt, Artificial Sequence
  Synthetic
ucuuuagaccucaguag

SEQ ID NO: 756043 - RNA, 17 nt, Artificial Sequence
  Synthetic
cacuuaugcaagaguag

SEQ ID NO: 756044 - RNA, 17 nt, Artificial Sequence
  Synthetic
uagaggaaauagaguag

SEQ ID NO: 756045 - RNA, 17 nt, Artificial Sequence
  Synthetic
agcaguuuuaggaguag

SEQ ID NO: 756046 - RNA, 17 nt, Artificial Sequence
  Synthetic
uucacugcugggaguag

SEQ ID NO: 756047 - RNA, 17 nt, Artificial Sequence
  Synthetic
caaaguguugggaguag

SEQ ID NO: 756048 - RNA, 17 nt, Artificial Sequence
  Synthetic
aaaagugcaaugaguag

SEQ ID NO: 756049 - RNA, 17 nt, Artificial Sequence
  Synthetic
ucugguucuaugaguag

SEQ ID NO: 756050 - RNA, 17 nt, Artificial Sequence
  Synthetic
cucugccuccugaguag

SEQ ID NO: 756051 - RNA, 17 nt, Artificial Sequence
  Synthetic
ucaucauugcugaguag

SEQ ID NO: 756052 - RNA, 17 nt, Artificial Sequence
  Synthetic
agaggcugucugaguag

SEQ ID NO: 756053 - RNA, 17 nt, Artificial Sequence
  Synthetic
cagugccuucugaguag

SEQ ID NO: 756054 - RNA, 17 nt, Artificial Sequence
  Synthetic
auaacaucagugaguag

SEQ ID NO: 756055 - RNA, 17 nt, Artificial Sequence
  Synthetic
agcucacaauugaguag

SEQ ID NO: 756056 - RNA, 17 nt, Artificial Sequence
  Synthetic
caauuuuugaauaguag

SEQ ID NO: 756057 - RNA, 17 nt, Artificial Sequence
  Synthetic
caguacaauaauaguag

SEQ ID NO: 756058 - RNA, 17 nt, Artificial Sequence
  Synthetic
agaccaaagcauaguag

SEQ ID NO: 756059 - RNA, 17 nt, Artificial Sequence
  Synthetic
caucacuuucauaguag

SEQ ID NO: 756060 - RNA, 17 nt, Artificial Sequence
  Synthetic
ucuggcauugauaguag

SEQ ID NO: 756061 - RNA, 17 nt, Artificial Sequence
  Synthetic
acauuguuuuauaguag

SEQ ID NO: 756062 - RNA, 17 nt, Artificial Sequence
  Synthetic
auacuggaaacuaguag

SEQ ID NO: 756063 - RNA, 17 nt, Artificial Sequence
  Synthetic
cugcacugaccuaguag

SEQ ID NO: 756064 - RNA, 17 nt, Artificial Sequence
  Synthetic
agcucacaaucuaguag

SEQ ID NO: 756065 - RNA, 17 nt, Artificial Sequence
  Synthetic
uucuaacacucuaguag

SEQ ID NO: 756066 - RNA, 17 nt, Artificial Sequence
  Synthetic
cauguuauaaguaguag

SEQ ID NO: 756067 - RNA, 17 nt, Artificial Sequence
  Synthetic
auuuguaguaguaguag

SEQ ID NO: 756068 - RNA, 17 nt, Artificial Sequence
  Synthetic
auauauuauuguaguag

SEQ ID NO: 756069 - RNA, 17 nt, Artificial Sequence
  Synthetic
uuuuguauuuguaguag

SEQ ID NO: 756070 - RNA, 17 nt, Artificial Sequence
  Synthetic
uuguguauuuuuaguag

SEQ ID NO: 756071 - RNA, 17 nt, Artificial Sequence
  Synthetic
aacacauggacacguag

SEQ ID NO: 756072 - RNA, 17 nt, Artificial Sequence
  Synthetic
aaaucagccgggcguag

SEQ ID NO: 756073 - RNA, 17 nt, Artificial Sequence
  Synthetic
agucuggccgggcguag

SEQ ID NO: 756074 - RNA, 17 nt, Artificial Sequence
  Synthetic
cuaguuuauuugcguag

SEQ ID NO: 756075 - RNA, 17 nt, Artificial Sequence
  Synthetic
uuucauagaaaagguag

SEQ ID NO: 756076 - RNA, 17 nt, Artificial Sequence
  Synthetic
agcuauuuucaagguag

SEQ ID NO: 756077 - RNA, 17 nt, Artificial Sequence
  Synthetic
uuccugaaugaagguag

SEQ ID NO: 756078 - RNA, 17 nt, Artificial Sequence
  Synthetic
acugaaugcacagguag

SEQ ID NO: 756079 - RNA, 17 nt, Artificial Sequence
  Synthetic
auggguuggucagguag

SEQ ID NO: 756080 - RNA, 17 nt, Artificial Sequence
  Synthetic
aagacacaacgagguag

SEQ ID NO: 756081 - RNA, 17 nt, Artificial Sequence
  Synthetic
agugaauauguagguag

SEQ ID NO: 756082 - RNA, 17 nt, Artificial Sequence
  Synthetic
uuucuguauuuagguag

SEQ ID NO: 756083 - RNA, 17 nt, Artificial Sequence
  Synthetic
aaaaugaguuuagguag

SEQ ID NO: 756084 - RNA, 17 nt, Artificial Sequence
  Synthetic
aaaaauauguacgguag

SEQ ID NO: 756085 - RNA, 17 nt, Artificial Sequence
  Synthetic
ucuauaaguagcgguag

SEQ ID NO: 756086 - RNA, 17 nt, Artificial Sequence
  Synthetic
ucccuuuaaaaggguag

SEQ ID NO: 756087 - RNA, 17 nt, Artificial Sequence
  Synthetic
uaugacucaaaggguag

SEQ ID NO: 756088 - RNA, 17 nt, Artificial Sequence
  Synthetic
caaauaaagaaggguag

SEQ ID NO: 756089 - RNA, 17 nt, Artificial Sequence
  Synthetic
acaacccucuaggguag

SEQ ID NO: 756090 - RNA, 17 nt, Artificial Sequence
  Synthetic
caaaggaaagcggguag

SEQ ID NO: 756091 - RNA, 17 nt, Artificial Sequence
  Synthetic
uuuacuaccugggguag

SEQ ID NO: 756092 - RNA, 17 nt, Artificial Sequence
  Synthetic
uucuucccuugggguag

SEQ ID NO: 756093 - RNA, 17 nt, Artificial Sequence
  Synthetic
auuucccaaauggguag

SEQ ID NO: 756094 - RNA, 17 nt, Artificial Sequence
  Synthetic
auuaugguuauggguag

SEQ ID NO: 756095 - RNA, 17 nt, Artificial Sequence
  Synthetic
ugaagucuaguggguag

SEQ ID NO: 756096 - RNA, 17 nt, Artificial Sequence
  Synthetic
aacagucugguggguag

SEQ ID NO: 756097 - RNA, 17 nt, Artificial Sequence
  Synthetic
ugauuggugguggguag

SEQ ID NO: 756098 - RNA, 17 nt, Artificial Sequence
  Synthetic
aauaucagagaugguag

SEQ ID NO: 756099 - RNA, 17 nt, Artificial Sequence
  Synthetic
aucaaguuagaugguag

SEQ ID NO: 756100 - RNA, 17 nt, Artificial Sequence
  Synthetic
cugagguauuaugguag

SEQ ID NO: 756101 - RNA, 17 nt, Artificial Sequence
  Synthetic
cucugucugccugguag

SEQ ID NO: 756102 - RNA, 17 nt, Artificial Sequence
  Synthetic
aaguuauuagcugguag

SEQ ID NO: 756103 - RNA, 17 nt, Artificial Sequence
  Synthetic
agaguaacaucugguag

SEQ ID NO: 756104 - RNA, 17 nt, Artificial Sequence
  Synthetic
aaagaucauucugguag

SEQ ID NO: 756105 - RNA, 17 nt, Artificial Sequence
  Synthetic
cuggagaucagugguag

SEQ ID NO: 756106 - RNA, 17 nt, Artificial Sequence
  Synthetic
cggugagugagugguag

SEQ ID NO: 756107 - RNA, 17 nt, Artificial Sequence
  Synthetic
uuagccuggcgugguag

SEQ ID NO: 756108 - RNA, 17 nt, Artificial Sequence
  Synthetic
uugaaccugggugguag

SEQ ID NO: 756109 - RNA, 17 nt, Artificial Sequence
  Synthetic
ucucauauuugugguag

SEQ ID NO: 756110 - RNA, 17 nt, Artificial Sequence
  Synthetic
cagugaugucuugguag

SEQ ID NO: 756111 - RNA, 17 nt, Artificial Sequence
  Synthetic
ucaugagaaguugguag

SEQ ID NO: 756112 - RNA, 17 nt, Artificial Sequence
  Synthetic
uuuuuuuuuuuugguag

SEQ ID NO: 756113 - RNA, 17 nt, Artificial Sequence
  Synthetic
auacuucucaaauguag

SEQ ID NO: 756114 - RNA, 17 nt, Artificial Sequence
  Synthetic
aauaaucauaaauguag

SEQ ID NO: 756115 - RNA, 17 nt, Artificial Sequence
  Synthetic
uauaaucucuaauguag

SEQ ID NO: 756116 - RNA, 17 nt, Artificial Sequence
  Synthetic
uuucaucacacauguag

SEQ ID NO: 756117 - RNA, 17 nt, Artificial Sequence
  Synthetic
agggaaaagucauguag

SEQ ID NO: 756118 - RNA, 17 nt, Artificial Sequence
  Synthetic
cccucuaagggauguag

SEQ ID NO: 756119 - RNA, 17 nt, Artificial Sequence
  Synthetic
augagaucgugauguag

SEQ ID NO: 756120 - RNA, 17 nt, Artificial Sequence
  Synthetic
ccagcucugugauguag

SEQ ID NO: 756121 - RNA, 17 nt, Artificial Sequence
  Synthetic
aacuaaugaauauguag

SEQ ID NO: 756122 - RNA, 17 nt, Artificial Sequence
  Synthetic
ucugaaagaguauguag

SEQ ID NO: 756123 - RNA, 17 nt, Artificial Sequence
  Synthetic
ugaaaggcuguauguag

SEQ ID NO: 756124 - RNA, 17 nt, Artificial Sequence
  Synthetic
aaauauaauuuauguag

SEQ ID NO: 756125 - RNA, 17 nt, Artificial Sequence
  Synthetic
aaucaugacaacuguag

SEQ ID NO: 756126 - RNA, 17 nt, Artificial Sequence
  Synthetic
cacccucagaacuguag

SEQ ID NO: 756127 - RNA, 17 nt, Artificial Sequence
  Synthetic
ugagaguagaacuguag

SEQ ID NO: 756128 - RNA, 17 nt, Artificial Sequence
  Synthetic
uaggauaaagacuguag

SEQ ID NO: 756129 - RNA, 17 nt, Artificial Sequence
  Synthetic
ccugcugaaaccuguag

SEQ ID NO: 756130 - RNA, 17 nt, Artificial Sequence
  Synthetic
caugucuaaaccuguag

SEQ ID NO: 756131 - RNA, 17 nt, Artificial Sequence
  Synthetic
aagcuggcaugcuguag

SEQ ID NO: 756132 - RNA, 17 nt, Artificial Sequence
  Synthetic
uuaccccuuaucuguag

SEQ ID NO: 756133 - RNA, 17 nt, Artificial Sequence
  Synthetic
caguaaaugcucuguag

SEQ ID NO: 756134 - RNA, 17 nt, Artificial Sequence
  Synthetic
ccagugccucucuguag

SEQ ID NO: 756135 - RNA, 17 nt, Artificial Sequence
  Synthetic
cccaggcuagaguguag

SEQ ID NO: 756136 - RNA, 17 nt, Artificial Sequence
  Synthetic
ccauggagucuguguag

SEQ ID NO: 756137 - RNA, 17 nt, Artificial Sequence
  Synthetic
uucaaagcaguguguag

SEQ ID NO: 756138 - RNA, 17 nt, Artificial Sequence
  Synthetic
cgcguguguguguguag

SEQ ID NO: 756139 - RNA, 17 nt, Artificial Sequence
  Synthetic
cuaguuuauuuguguag

SEQ ID NO: 756140 - RNA, 17 nt, Artificial Sequence
  Synthetic
uggagaugcaauuguag

SEQ ID NO: 756141 - RNA, 17 nt, Artificial Sequence
  Synthetic
uuuguucuucauuguag

SEQ ID NO: 756142 - RNA, 17 nt, Artificial Sequence
  Synthetic
acccuuggggguuguag

SEQ ID NO: 756143 - RNA, 17 nt, Artificial Sequence
  Synthetic
uauguucaugguuguag

SEQ ID NO: 756144 - RNA, 17 nt, Artificial Sequence
  Synthetic
uuuauuuaacuuuguag

SEQ ID NO: 756145 - RNA, 17 nt, Artificial Sequence
  Synthetic
uacuccuuacuuuguag

SEQ ID NO: 756146 - RNA, 17 nt, Artificial Sequence
  Synthetic
ccuuguauccuuuguag

SEQ ID NO: 756147 - RNA, 17 nt, Artificial Sequence
  Synthetic
caaggaaagcuuuguag

SEQ ID NO: 756148 - RNA, 17 nt, Artificial Sequence
  Synthetic
aaauacaaaaaaauuag

SEQ ID NO: 756149 - RNA, 17 nt, Artificial Sequence
  Synthetic
aucgaacccaaaauuag

SEQ ID NO: 756150 - RNA, 17 nt, Artificial Sequence
  Synthetic
uuugagaauaaaauuag

SEQ ID NO: 756151 - RNA, 17 nt, Artificial Sequence
  Synthetic
agauccuauaaaauuag

SEQ ID NO: 756152 - RNA, 17 nt, Artificial Sequence
  Synthetic
cauagauuucaaauuag

SEQ ID NO: 756153 - RNA, 17 nt, Artificial Sequence
  Synthetic
caucuaauagaaauuag

SEQ ID NO: 756154 - RNA, 17 nt, Artificial Sequence
  Synthetic
cagcaucuugaaauuag

SEQ ID NO: 756155 - RNA, 17 nt, Artificial Sequence
  Synthetic
uauaaagcauaaauuag

SEQ ID NO: 756156 - RNA, 17 nt, Artificial Sequence
  Synthetic
uauuuauuuuaaauuag

SEQ ID NO: 756157 - RNA, 17 nt, Artificial Sequence
  Synthetic
agauugcauacaauuag

SEQ ID NO: 756158 - RNA, 17 nt, Artificial Sequence
  Synthetic
agcauuuugccaauuag

SEQ ID NO: 756159 - RNA, 17 nt, Artificial Sequence
  Synthetic
uaauacauugcaauuag

SEQ ID NO: 756160 - RNA, 17 nt, Artificial Sequence
  Synthetic
acaauaaagucaauuag

SEQ ID NO: 756161 - RNA, 17 nt, Artificial Sequence
  Synthetic
auggcaauaagaauuag

SEQ ID NO: 756162 - RNA, 17 nt, Artificial Sequence
  Synthetic
uuuucuuauagaauuag

SEQ ID NO: 756163 - RNA, 17 nt, Artificial Sequence
  Synthetic
uaauauaaacgaauuag

SEQ ID NO: 756164 - RNA, 17 nt, Artificial Sequence
  Synthetic
ucuugauaaggaauuag

SEQ ID NO: 756165 - RNA, 17 nt, Artificial Sequence
  Synthetic
ucuuuaaaaugaauuag

SEQ ID NO: 756166 - RNA, 17 nt, Artificial Sequence
  Synthetic
uauuuuuggguaauuag

SEQ ID NO: 756167 - RNA, 17 nt, Artificial Sequence
  Synthetic
aaggugcauuuaauuag

SEQ ID NO: 756168 - RNA, 17 nt, Artificial Sequence
  Synthetic
acuuccagaaacauuag

SEQ ID NO: 756169 - RNA, 17 nt, Artificial Sequence
  Synthetic
agaggcaagaacauuag

SEQ ID NO: 756170 - RNA, 17 nt, Artificial Sequence
  Synthetic
auagucucuaacauuag

SEQ ID NO: 756171 - RNA, 17 nt, Artificial Sequence
  Synthetic
auugaaaaaaccauuag

SEQ ID NO: 756172 - RNA, 17 nt, Artificial Sequence
  Synthetic
agauauagaaccauuag

SEQ ID NO: 756173 - RNA, 17 nt, Artificial Sequence
  Synthetic
ugcacauuuagcauuag

SEQ ID NO: 756174 - RNA, 17 nt, Artificial Sequence
  Synthetic
caaacacuaugcauuag

SEQ ID NO: 756175 - RNA, 17 nt, Artificial Sequence
  Synthetic
agaagaguuaucauuag

SEQ ID NO: 756176 - RNA, 17 nt, Artificial Sequence
  Synthetic
auucaaaggcucauuag

SEQ ID NO: 756177 - RNA, 17 nt, Artificial Sequence
  Synthetic
auuuccucucucauuag

SEQ ID NO: 756178 - RNA, 17 nt, Artificial Sequence
  Synthetic
uuaucacuggucauuag

SEQ ID NO: 756179 - RNA, 17 nt, Artificial Sequence
  Synthetic
auagguggagagauuag

SEQ ID NO: 756180 - RNA, 17 nt, Artificial Sequence
  Synthetic
auacaaagggagauuag

SEQ ID NO: 756181 - RNA, 17 nt, Artificial Sequence
  Synthetic
uaagguacugagauuag

SEQ ID NO: 756182 - RNA, 17 nt, Artificial Sequence
  Synthetic
caagcagcugggauuag

SEQ ID NO: 756183 - RNA, 17 nt, Artificial Sequence
  Synthetic
caaguagcugggauuag

SEQ ID NO: 756184 - RNA, 17 nt, Artificial Sequence
  Synthetic
cgaguagcugggauuag

SEQ ID NO: 756185 - RNA, 17 nt, Artificial Sequence
  Synthetic
cuugauuucuggauuag

SEQ ID NO: 756186 - RNA, 17 nt, Artificial Sequence
  Synthetic
cucuuuuguaugauuag

SEQ ID NO: 756187 - RNA, 17 nt, Artificial Sequence
  Synthetic
auaaaguaccugauuag

SEQ ID NO: 756188 - RNA, 17 nt, Artificial Sequence
  Synthetic
uguguaucagugauuag

SEQ ID NO: 756189 - RNA, 17 nt, Artificial Sequence
  Synthetic
caauuccaaaauauuag

SEQ ID NO: 756190 - RNA, 17 nt, Artificial Sequence
  Synthetic
auaaugauaaauauuag

SEQ ID NO: 756191 - RNA, 17 nt, Artificial Sequence
  Synthetic
uaccaauguaauauuag

SEQ ID NO: 756192 - RNA, 17 nt, Artificial Sequence
  Synthetic
ucugcacuucauauuag

SEQ ID NO: 756193 - RNA, 17 nt, Artificial Sequence
  Synthetic
uagacacaagauauuag

SEQ ID NO: 756194 - RNA, 17 nt, Artificial Sequence
  Synthetic
aaauggauagauauuag

SEQ ID NO: 756195 - RNA, 17 nt, Artificial Sequence
  Synthetic
cucugaaauuauauuag

SEQ ID NO: 756196 - RNA, 17 nt, Artificial Sequence
  Synthetic
auaguuucaucuauuag

SEQ ID NO: 756197 - RNA, 17 nt, Artificial Sequence
  Synthetic
uauacucucaguauuag

SEQ ID NO: 756198 - RNA, 17 nt, Artificial Sequence
  Synthetic
ugcugacucauuauuag

SEQ ID NO: 756199 - RNA, 17 nt, Artificial Sequence
  Synthetic
auguucucacuuauuag

SEQ ID NO: 756200 - RNA, 17 nt, Artificial Sequence
  Synthetic
uuaacaauaaaacuuag

SEQ ID NO: 756201 - RNA, 17 nt, Artificial Sequence
  Synthetic
cauguugaagaacuuag

SEQ ID NO: 756202 - RNA, 17 nt, Artificial Sequence
  Synthetic
aaaucaacugaacuuag

SEQ ID NO: 756203 - RNA, 17 nt, Artificial Sequence
  Synthetic
cucuuuagugaacuuag

SEQ ID NO: 756204 - RNA, 17 nt, Artificial Sequence
  Synthetic
uucccaugaacacuuag

SEQ ID NO: 756205 - RNA, 17 nt, Artificial Sequence
  Synthetic
uccaauuguacacuuag

SEQ ID NO: 756206 - RNA, 17 nt, Artificial Sequence
  Synthetic
uacugcauuccacuuag

SEQ ID NO: 756207 - RNA, 17 nt, Artificial Sequence
  Synthetic
cucaucucagcacuuag

SEQ ID NO: 756208 - RNA, 17 nt, Artificial Sequence
  Synthetic
uuuguguaugcacuuag

SEQ ID NO: 756209 - RNA, 17 nt, Artificial Sequence
  Synthetic
cuucacaguucacuuag

SEQ ID NO: 756210 - RNA, 17 nt, Artificial Sequence
  Synthetic
cugcaguagauacuuag

SEQ ID NO: 756211 - RNA, 17 nt, Artificial Sequence
  Synthetic
ugaaaauggcuacuuag

SEQ ID NO: 756212 - RNA, 17 nt, Artificial Sequence
  Synthetic
aaauccuuaaaccuuag

SEQ ID NO: 756213 - RNA, 17 nt, Artificial Sequence
  Synthetic
auagauuugacccuuag

SEQ ID NO: 756214 - RNA, 17 nt, Artificial Sequence
  Synthetic
uccccuacaucccuuag

SEQ ID NO: 756215 - RNA, 17 nt, Artificial Sequence
  Synthetic
ugaaaucuaauccuuag

SEQ ID NO: 756216 - RNA, 17 nt, Artificial Sequence
  Synthetic
uuucccaaacuccuuag

SEQ ID NO: 756217 - RNA, 17 nt, Artificial Sequence
  Synthetic
ugucucuucaagcuuag

SEQ ID NO: 756218 - RNA, 17 nt, Artificial Sequence
  Synthetic
cuucugaagaagcuuag

SEQ ID NO: 756219 - RNA, 17 nt, Artificial Sequence
  Synthetic
ugaagacaagagcuuag

SEQ ID NO: 756220 - RNA, 17 nt, Artificial Sequence
  Synthetic
auauguggggagcuuag

SEQ ID NO: 756221 - RNA, 17 nt, Artificial Sequence
  Synthetic
uuuaaaugagggcuuag

SEQ ID NO: 756222 - RNA, 17 nt, Artificial Sequence
  Synthetic
uucauggaggggcuuag

SEQ ID NO: 756223 - RNA, 17 nt, Artificial Sequence
  Synthetic
acucuauuuuggcuuag

SEQ ID NO: 756224 - RNA, 17 nt, Artificial Sequence
  Synthetic
ugucugugaaugcuuag

SEQ ID NO: 756225 - RNA, 17 nt, Artificial Sequence
  Synthetic
cacaaaacgaugcuuag

SEQ ID NO: 756226 - RNA, 17 nt, Artificial Sequence
  Synthetic
acuugaaaugugcuuag

SEQ ID NO: 756227 - RNA, 17 nt, Artificial Sequence
  Synthetic
uaugcaagguugcuuag

SEQ ID NO: 756228 - RNA, 17 nt, Artificial Sequence
  Synthetic
uauuaauaaaaucuuag

SEQ ID NO: 756229 - RNA, 17 nt, Artificial Sequence
  Synthetic
agaguaacaaaucuuag

SEQ ID NO: 756230 - RNA, 17 nt, Artificial Sequence
  Synthetic
auaugggugaaucuuag

SEQ ID NO: 756231 - RNA, 17 nt, Artificial Sequence
  Synthetic
auuugcuuuaaucuuag

SEQ ID NO: 756232 - RNA, 17 nt, Artificial Sequence
  Synthetic
caaccauuagaucuuag

SEQ ID NO: 756233 - RNA, 17 nt, Artificial Sequence
  Synthetic
auucugcaugaucuuag

SEQ ID NO: 756234 - RNA, 17 nt, Artificial Sequence
  Synthetic
cuauuuccugaucuuag

SEQ ID NO: 756235 - RNA, 17 nt, Artificial Sequence
  Synthetic
caaucuccaacucuuag

SEQ ID NO: 756236 - RNA, 17 nt, Artificial Sequence
  Synthetic
agauguggaccucuuag

SEQ ID NO: 756237 - RNA, 17 nt, Artificial Sequence
  Synthetic
acaccuaagccucuuag

SEQ ID NO: 756238 - RNA, 17 nt, Artificial Sequence
  Synthetic
auuuugcucucucuuag

SEQ ID NO: 756239 - RNA, 17 nt, Artificial Sequence
  Synthetic
cugaggguuucucuuag

SEQ ID NO: 756240 - RNA, 17 nt, Artificial Sequence
  Synthetic
uauggagaaugucuuag

SEQ ID NO: 756241 - RNA, 17 nt, Artificial Sequence
  Synthetic
uacaaggaacuucuuag

SEQ ID NO: 756242 - RNA, 17 nt, Artificial Sequence
  Synthetic
caguuuugaguucuuag

SEQ ID NO: 756243 - RNA, 17 nt, Artificial Sequence
  Synthetic
uugaaguggguucuuag

SEQ ID NO: 756244 - RNA, 17 nt, Artificial Sequence
  Synthetic
aauccagaauuucuuag

SEQ ID NO: 756245 - RNA, 17 nt, Artificial Sequence
  Synthetic
aagaagaaaaaaguuag

SEQ ID NO: 756246 - RNA, 17 nt, Artificial Sequence
  Synthetic
caacuuaaaaaaguuag

SEQ ID NO: 756247 - RNA, 17 nt, Artificial Sequence
  Synthetic
ugcugacaggaaguuag

SEQ ID NO: 756248 - RNA, 17 nt, Artificial Sequence
  Synthetic
cuccugagggaaguuag

SEQ ID NO: 756249 - RNA, 17 nt, Artificial Sequence
  Synthetic
acggagccagcaguuag

SEQ ID NO: 756250 - RNA, 17 nt, Artificial Sequence
  Synthetic
cucuuacaaucaguuag

SEQ ID NO: 756251 - RNA, 17 nt, Artificial Sequence
  Synthetic
ugcuuaauuucaguuag

SEQ ID NO: 756252 - RNA, 17 nt, Artificial Sequence
  Synthetic
aaggagaggagaguuag

SEQ ID NO: 756253 - RNA, 17 nt, Artificial Sequence
  Synthetic
uuguaauagcuaguuag

SEQ ID NO: 756254 - RNA, 17 nt, Artificial Sequence
  Synthetic
uacuuguggcuaguuag

SEQ ID NO: 756255 - RNA, 17 nt, Artificial Sequence
  Synthetic
agauuacuuuuaguuag

SEQ ID NO: 756256 - RNA, 17 nt, Artificial Sequence
  Synthetic
augagagcaggcguuag

SEQ ID NO: 756257 - RNA, 17 nt, Artificial Sequence
  Synthetic
cuuaaaaaaaagguuag

SEQ ID NO: 756258 - RNA, 17 nt, Artificial Sequence
  Synthetic
aaauuauucaagguuag

SEQ ID NO: 756259 - RNA, 17 nt, Artificial Sequence
  Synthetic
caauuuuggaagguuag

SEQ ID NO: 756260 - RNA, 17 nt, Artificial Sequence
  Synthetic
cuggaagaagagguuag

SEQ ID NO: 756261 - RNA, 17 nt, Artificial Sequence
  Synthetic
uuaaaaaauuagguuag

SEQ ID NO: 756262 - RNA, 17 nt, Artificial Sequence
  Synthetic
ugaagugguuagguuag

SEQ ID NO: 756263 - RNA, 17 nt, Artificial Sequence
  Synthetic
cagcagaagaggguuag

SEQ ID NO: 756264 - RNA, 17 nt, Artificial Sequence
  Synthetic
aacaaugugaggguuag

SEQ ID NO: 756265 - RNA, 17 nt, Artificial Sequence
  Synthetic
aagcggguagggguuag

SEQ ID NO: 756266 - RNA, 17 nt, Artificial Sequence
  Synthetic
aggggaugggggguuag

SEQ ID NO: 756267 - RNA, 17 nt, Artificial Sequence
  Synthetic
cuagagaaauggguuag

SEQ ID NO: 756268 - RNA, 17 nt, Artificial Sequence
  Synthetic
uagcuacaugugguuag

SEQ ID NO: 756269 - RNA, 17 nt, Artificial Sequence
  Synthetic
ugcuggccugugguuag

SEQ ID NO: 756270 - RNA, 17 nt, Artificial Sequence
  Synthetic
auauaucccuugguuag

SEQ ID NO: 756271 - RNA, 17 nt, Artificial Sequence
  Synthetic
cuauagaauaauguuag

SEQ ID NO: 756272 - RNA, 17 nt, Artificial Sequence
  Synthetic
uuuaucaacuauguuag

SEQ ID NO: 756273 - RNA, 17 nt, Artificial Sequence
  Synthetic
uggaaauuuuauguuag

SEQ ID NO: 756274 - RNA, 17 nt, Artificial Sequence
  Synthetic
uaaaaaccuccuguuag

SEQ ID NO: 756275 - RNA, 17 nt, Artificial Sequence
  Synthetic
auucaacuucguguuag

SEQ ID NO: 756276 - RNA, 17 nt, Artificial Sequence
  Synthetic
uauuucauugguguuag

SEQ ID NO: 756277 - RNA, 17 nt, Artificial Sequence
  Synthetic
uuaaaaacauguguuag

SEQ ID NO: 756278 - RNA, 17 nt, Artificial Sequence
  Synthetic
uagguggggauuguuag

SEQ ID NO: 756279 - RNA, 17 nt, Artificial Sequence
  Synthetic
cuggucagauuuguuag

SEQ ID NO: 756280 - RNA, 17 nt, Artificial Sequence
  Synthetic
aauugcccaaaauuuag

SEQ ID NO: 756281 - RNA, 17 nt, Artificial Sequence
  Synthetic
ugacucuaagaauuuag

SEQ ID NO: 756282 - RNA, 17 nt, Artificial Sequence
  Synthetic
cauagaauauaauuuag

SEQ ID NO: 756283 - RNA, 17 nt, Artificial Sequence
  Synthetic
uucccuugaacauuuag

SEQ ID NO: 756284 - RNA, 17 nt, Artificial Sequence
  Synthetic
uaguuugauacauuuag

SEQ ID NO: 756285 - RNA, 17 nt, Artificial Sequence
  Synthetic
auccugguaccauuuag

SEQ ID NO: 756286 - RNA, 17 nt, Artificial Sequence
  Synthetic
aaaauuaaggcauuuag

SEQ ID NO: 756287 - RNA, 17 nt, Artificial Sequence
  Synthetic
auggaaggaucauuuag

SEQ ID NO: 756288 - RNA, 17 nt, Artificial Sequence
  Synthetic
agaggcuguggauuuag

SEQ ID NO: 756289 - RNA, 17 nt, Artificial Sequence
  Synthetic
agacuguaaauauuuag

SEQ ID NO: 756290 - RNA, 17 nt, Artificial Sequence
  Synthetic
auucgaaacauauuuag

SEQ ID NO: 756291 - RNA, 17 nt, Artificial Sequence
  Synthetic
aggaaagcuauauuuag

SEQ ID NO: 756292 - RNA, 17 nt, Artificial Sequence
  Synthetic
aucugaaagcuauuuag

SEQ ID NO: 756293 - RNA, 17 nt, Artificial Sequence
  Synthetic
uguuuugagcuauuuag

SEQ ID NO: 756294 - RNA, 17 nt, Artificial Sequence
  Synthetic
uaauuggcaguauuuag

SEQ ID NO: 756295 - RNA, 17 nt, Artificial Sequence
  Synthetic
cagagagauguauuuag

SEQ ID NO: 756296 - RNA, 17 nt, Artificial Sequence
  Synthetic
caugcugaauuauuuag

SEQ ID NO: 756297 - RNA, 17 nt, Artificial Sequence
  Synthetic
ugucuucuauuauuuag

SEQ ID NO: 756298 - RNA, 17 nt, Artificial Sequence
  Synthetic
aaaggaauuuuauuuag

SEQ ID NO: 756299 - RNA, 17 nt, Artificial Sequence
  Synthetic
aaauuugacaacuuuag

SEQ ID NO: 756300 - RNA, 17 nt, Artificial Sequence
  Synthetic
uucuaaauuaacuuuag

SEQ ID NO: 756301 - RNA, 17 nt, Artificial Sequence
  Synthetic
uaauuucagcacuuuag

SEQ ID NO: 756302 - RNA, 17 nt, Artificial Sequence
  Synthetic
ugccucagagacuuuag

SEQ ID NO: 756303 - RNA, 17 nt, Artificial Sequence
  Synthetic
uuacuuuaggacuuuag

SEQ ID NO: 756304 - RNA, 17 nt, Artificial Sequence
  Synthetic
aauuuuuuguacuuuag

SEQ ID NO: 756305 - RNA, 17 nt, Artificial Sequence
  Synthetic
uaacacagaaccuuuag

SEQ ID NO: 756306 - RNA, 17 nt, Artificial Sequence
  Synthetic
cauaaaauucccuuuag

SEQ ID NO: 756307 - RNA, 17 nt, Artificial Sequence
  Synthetic
ccauacaaagccuuuag

SEQ ID NO: 756308 - RNA, 17 nt, Artificial Sequence
  Synthetic
auaggaaaugccuuuag

SEQ ID NO: 756309 - RNA, 17 nt, Artificial Sequence
  Synthetic
ucacauagaagcuuuag

SEQ ID NO: 756310 - RNA, 17 nt, Artificial Sequence
  Synthetic
caucucccuggcuuuag

SEQ ID NO: 756311 - RNA, 17 nt, Artificial Sequence
  Synthetic
accuaguacaucuuuag

SEQ ID NO: 756312 - RNA, 17 nt, Artificial Sequence
  Synthetic
aauuuuuguaucuuuag

SEQ ID NO: 756313 - RNA, 17 nt, Artificial Sequence
  Synthetic
ugccucagccucuuuag

SEQ ID NO: 756314 - RNA, 17 nt, Artificial Sequence
  Synthetic
augaguaaguucuuuag

SEQ ID NO: 756315 - RNA, 17 nt, Artificial Sequence
  Synthetic
aaguaacuuuucuuuag

SEQ ID NO: 756316 - RNA, 17 nt, Artificial Sequence
  Synthetic
cugggaaaaaaguuuag

SEQ ID NO: 756317 - RNA, 17 nt, Artificial Sequence
  Synthetic
agaagcuuaaaguuuag

SEQ ID NO: 756318 - RNA, 17 nt, Artificial Sequence
  Synthetic
uauaauuaacaguuuag

SEQ ID NO: 756319 - RNA, 17 nt, Artificial Sequence
  Synthetic
aagaacggucaguuuag

SEQ ID NO: 756320 - RNA, 17 nt, Artificial Sequence
  Synthetic
uuugaucuguaguuuag

SEQ ID NO: 756321 - RNA, 17 nt, Artificial Sequence
  Synthetic
cagauaucagcguuuag

SEQ ID NO: 756322 - RNA, 17 nt, Artificial Sequence
  Synthetic
aggagccugagguuuag

SEQ ID NO: 756323 - RNA, 17 nt, Artificial Sequence
  Synthetic
uacaaagcuagguuuag

SEQ ID NO: 756324 - RNA, 17 nt, Artificial Sequence
  Synthetic
ucauaugguggguuuag

SEQ ID NO: 756325 - RNA, 17 nt, Artificial Sequence
  Synthetic
accagagacugguuuag

SEQ ID NO: 756326 - RNA, 17 nt, Artificial Sequence
  Synthetic
uggagcugaauguuuag

SEQ ID NO: 756327 - RNA, 17 nt, Artificial Sequence
  Synthetic
uauaaugcuauguuuag

SEQ ID NO: 756328 - RNA, 17 nt, Artificial Sequence
  Synthetic
cuugaccagcuguuuag

SEQ ID NO: 756329 - RNA, 17 nt, Artificial Sequence
  Synthetic
uaugauaagguguuuag

SEQ ID NO: 756330 - RNA, 17 nt, Artificial Sequence
  Synthetic
agaucccacaauuuuag

SEQ ID NO: 756331 - RNA, 17 nt, Artificial Sequence
  Synthetic
cuauguuuccauuuuag

SEQ ID NO: 756332 - RNA, 17 nt, Artificial Sequence
  Synthetic
aacccuagucauuuuag

SEQ ID NO: 756333 - RNA, 17 nt, Artificial Sequence
  Synthetic
aacuuuaaauauuuuag

SEQ ID NO: 756334 - RNA, 17 nt, Artificial Sequence
  Synthetic
uaugccaaguauuuuag

SEQ ID NO: 756335 - RNA, 17 nt, Artificial Sequence
  Synthetic
uacuauuauuauuuuag

SEQ ID NO: 756336 - RNA, 17 nt, Artificial Sequence
  Synthetic
uaauuagguuauuuuag

SEQ ID NO: 756337 - RNA, 17 nt, Artificial Sequence
  Synthetic
ucuucuaucacuuuuag

SEQ ID NO: 756338 - RNA, 17 nt, Artificial Sequence
  Synthetic
acucugguuacuuuuag

SEQ ID NO: 756339 - RNA, 17 nt, Artificial Sequence
  Synthetic
auuuaacuuucuuuuag

SEQ ID NO: 756340 - RNA, 17 nt, Artificial Sequence
  Synthetic
cauccauuuucuuuuag

SEQ ID NO: 756341 - RNA, 17 nt, Artificial Sequence
  Synthetic
cugaaacaaaguuuuag

SEQ ID NO: 756342 - RNA, 17 nt, Artificial Sequence
  Synthetic
ugaaugagcaguuuuag

SEQ ID NO: 756343 - RNA, 17 nt, Artificial Sequence
  Synthetic
ucagcucucaguuuuag

SEQ ID NO: 756344 - RNA, 17 nt, Artificial Sequence
  Synthetic
ugucagaauaguuuuag

SEQ ID NO: 756345 - RNA, 17 nt, Artificial Sequence
  Synthetic
aauuuuuguauuuuuag

SEQ ID NO: 756346 - RNA, 17 nt, Artificial Sequence
  Synthetic
cauuugauuauuuuuag

SEQ ID NO: 756347 - RNA, 17 nt, Artificial Sequence
  Synthetic
augacaucccuuuuuag

SEQ ID NO: 756348 - RNA, 17 nt, Artificial Sequence
  Synthetic
uauggcuuccuuuuuag

SEQ ID NO: 756349 - RNA, 17 nt, Artificial Sequence
  Synthetic
caggcaaggcuuuuuag

SEQ ID NO: 756350 - RNA, 17 nt, Artificial Sequence
  Synthetic
uaggcaaggcuuuuuag

SEQ ID NO: 756351 - RNA, 17 nt, Artificial Sequence
  Synthetic
uucaagagucuuuuuag

SEQ ID NO: 756352 - RNA, 17 nt, Artificial Sequence
  Synthetic
uauuuugagguuuuuag

SEQ ID NO: 756353 - RNA, 17 nt, Artificial Sequence
  Synthetic
aucacgcuuguuuuuag

SEQ ID NO: 756354 - RNA, 17 nt, Artificial Sequence
  Synthetic
uguagucaguuuuuuag

SEQ ID NO: 756355 - RNA, 17 nt, Artificial Sequence
  Synthetic
uuuguauaguuuuuuag

SEQ ID NO: 756356 - RNA, 17 nt, Artificial Sequence
  Synthetic
uucucuaauuuuuuuag

SEQ ID NO: 756357 - RNA, 17 nt, Artificial Sequence
  Synthetic
ugaaaaagcaaaaaacg

SEQ ID NO: 756358 - RNA, 17 nt, Artificial Sequence
  Synthetic
cuucuauuuuaaaaacg

SEQ ID NO: 756359 - RNA, 17 nt, Artificial Sequence
  Synthetic
aauggagaaacaaaacg

SEQ ID NO: 756360 - RNA, 17 nt, Artificial Sequence
  Synthetic
aauggauaaagaaaacg

SEQ ID NO: 756361 - RNA, 17 nt, Artificial Sequence
  Synthetic
acuggauaaagaaaacg

SEQ ID NO: 756362 - RNA, 17 nt, Artificial Sequence
  Synthetic
acagucucaggaaaacg

SEQ ID NO: 756363 - RNA, 17 nt, Artificial Sequence
  Synthetic
aguaaguucuuaaaacg

SEQ ID NO: 756364 - RNA, 17 nt, Artificial Sequence
  Synthetic
cagugcuucaacaaacg

SEQ ID NO: 756365 - RNA, 17 nt, Artificial Sequence
  Synthetic
uauuuuuuguccaaacg

SEQ ID NO: 756366 - RNA, 17 nt, Artificial Sequence
  Synthetic
uuugucaaaagcaaacg

SEQ ID NO: 756367 - RNA, 17 nt, Artificial Sequence
  Synthetic
cuuuauuuacagaaacg

SEQ ID NO: 756368 - RNA, 17 nt, Artificial Sequence
  Synthetic
acacuggaagagaaacg

SEQ ID NO: 756369 - RNA, 17 nt, Artificial Sequence
  Synthetic
agccacauggagaaacg

SEQ ID NO: 756370 - RNA, 17 nt, Artificial Sequence
  Synthetic
uauuuuugguagaaacg

SEQ ID NO: 756371 - RNA, 17 nt, Artificial Sequence
  Synthetic
uguaaugacaggaaacg

SEQ ID NO: 756372 - RNA, 17 nt, Artificial Sequence
  Synthetic
aacaucuacaugaaacg

SEQ ID NO: 756373 - RNA, 17 nt, Artificial Sequence
  Synthetic
cauuuaacaaauaaacg

SEQ ID NO: 756374 - RNA, 17 nt, Artificial Sequence
  Synthetic
auugaaugaaauaaacg

SEQ ID NO: 756375 - RNA, 17 nt, Artificial Sequence
  Synthetic
auugcuuuagauaaacg

SEQ ID NO: 756376 - RNA, 17 nt, Artificial Sequence
  Synthetic
aaugcaaagacacaacg

SEQ ID NO: 756377 - RNA, 17 nt, Artificial Sequence
  Synthetic
acaaagcuuccacaacg

SEQ ID NO: 756378 - RNA, 17 nt, Artificial Sequence
  Synthetic
uguuaacaaagacaacg

SEQ ID NO: 756379 - RNA, 17 nt, Artificial Sequence
  Synthetic
ugacaagaaugacaacg

SEQ ID NO: 756380 - RNA, 17 nt, Artificial Sequence
  Synthetic
agaaugagaaaccaacg

SEQ ID NO: 756381 - RNA, 17 nt, Artificial Sequence
  Synthetic
auaaaggucaaccaacg

SEQ ID NO: 756382 - RNA, 17 nt, Artificial Sequence
  Synthetic
aaacagagaacccaacg

SEQ ID NO: 756383 - RNA, 17 nt, Artificial Sequence
  Synthetic
aaacuuaauccccaacg

SEQ ID NO: 756384 - RNA, 17 nt, Artificial Sequence
  Synthetic
agagacauauuccaacg

SEQ ID NO: 756385 - RNA, 17 nt, Artificial Sequence
  Synthetic
uaggacugcuuccaacg

SEQ ID NO: 756386 - RNA, 17 nt, Artificial Sequence
  Synthetic
ugucauuugcagcaacg

SEQ ID NO: 756387 - RNA, 17 nt, Artificial Sequence
  Synthetic
agguguauaugucaacg

SEQ ID NO: 756388 - RNA, 17 nt, Artificial Sequence
  Synthetic
ucuacuuuuaaagaacg

SEQ ID NO: 756389 - RNA, 17 nt, Artificial Sequence
  Synthetic
aaauguaaucaagaacg

SEQ ID NO: 756390 - RNA, 17 nt, Artificial Sequence
  Synthetic
acagugaaaacagaacg

SEQ ID NO: 756391 - RNA, 17 nt, Artificial Sequence
  Synthetic
aacuguguuccagaacg

SEQ ID NO: 756392 - RNA, 17 nt, Artificial Sequence
  Synthetic
aauggcugaagagaacg

SEQ ID NO: 756393 - RNA, 17 nt, Artificial Sequence
  Synthetic
ucacaucauggagaacg

SEQ ID NO: 756394 - RNA, 17 nt, Artificial Sequence
  Synthetic
uaauuuauaaaggaacg

SEQ ID NO: 756395 - RNA, 17 nt, Artificial Sequence
  Synthetic
ccacauacugaggaacg

SEQ ID NO: 756396 - RNA, 17 nt, Artificial Sequence
  Synthetic
agauugugacuugaacg

SEQ ID NO: 756397 - RNA, 17 nt, Artificial Sequence
  Synthetic
caggaauaaaaauaacg

SEQ ID NO: 756398 - RNA, 17 nt, Artificial Sequence
  Synthetic
uaaggaaggaaauaacg

SEQ ID NO: 756399 - RNA, 17 nt, Artificial Sequence
  Synthetic
aucacaucaggauaacg

SEQ ID NO: 756400 - RNA, 17 nt, Artificial Sequence
  Synthetic
uguauaacuguauaacg

SEQ ID NO: 756401 - RNA, 17 nt, Artificial Sequence
  Synthetic
caagaucuuuuauaacg

SEQ ID NO: 756402 - RNA, 17 nt, Artificial Sequence
  Synthetic
aaaugacauauguaacg

SEQ ID NO: 756403 - RNA, 17 nt, Artificial Sequence
  Synthetic
aauuugcauauguaacg

SEQ ID NO: 756404 - RNA, 17 nt, Artificial Sequence
  Synthetic
uccuaccauguguaacg

SEQ ID NO: 756405 - RNA, 17 nt, Artificial Sequence
  Synthetic
caacauaugaauuaacg

SEQ ID NO: 756406 - RNA, 17 nt, Artificial Sequence
  Synthetic
ugaaacugggauuaacg

SEQ ID NO: 756407 - RNA, 17 nt, Artificial Sequence
  Synthetic
cuagcuauggcuuaacg

SEQ ID NO: 756408 - RNA, 17 nt, Artificial Sequence
  Synthetic
cuccacaugagaacacg

SEQ ID NO: 756409 - RNA, 17 nt, Artificial Sequence
  Synthetic
cucucccuugacacacg

SEQ ID NO: 756410 - RNA, 17 nt, Artificial Sequence
  Synthetic
ugugaacuguccacacg

SEQ ID NO: 756411 - RNA, 17 nt, Artificial Sequence
  Synthetic
ucaccagagcucacacg

SEQ ID NO: 756412 - RNA, 17 nt, Artificial Sequence
  Synthetic
ugccuucaggggacacg

SEQ ID NO: 756413 - RNA, 17 nt, Artificial Sequence
  Synthetic
uugcugagaaaaccacg

SEQ ID NO: 756414 - RNA, 17 nt, Artificial Sequence
  Synthetic
acagacucaacaccacg

SEQ ID NO: 756415 - RNA, 17 nt, Artificial Sequence
  Synthetic
ugggacagagcaccacg

SEQ ID NO: 756416 - RNA, 17 nt, Artificial Sequence
  Synthetic
agcccacugagaccacg

SEQ ID NO: 756417 - RNA, 17 nt, Artificial Sequence
  Synthetic
aaucgcuugaacccacg

SEQ ID NO: 756418 - RNA, 17 nt, Artificial Sequence
  Synthetic
uaaaauguuuacccacg

SEQ ID NO: 756419 - RNA, 17 nt, Artificial Sequence
  Synthetic
cucucccacaucccacg

SEQ ID NO: 756420 - RNA, 17 nt, Artificial Sequence
  Synthetic
uucaauuaccucccacg

SEQ ID NO: 756421 - RNA, 17 nt, Artificial Sequence
  Synthetic
cuuuggcaacugccacg

SEQ ID NO: 756422 - RNA, 17 nt, Artificial Sequence
  Synthetic
aaggcaggcauuccacg

SEQ ID NO: 756423 - RNA, 17 nt, Artificial Sequence
  Synthetic
aacaugugcaaggcacg

SEQ ID NO: 756424 - RNA, 17 nt, Artificial Sequence
  Synthetic
cagcuuuuccaggcacg

SEQ ID NO: 756425 - RNA, 17 nt, Artificial Sequence
  Synthetic
cccagucaggaggcacg

SEQ ID NO: 756426 - RNA, 17 nt, Artificial Sequence
  Synthetic
uaaaacacaggugcacg

SEQ ID NO: 756427 - RNA, 17 nt, Artificial Sequence
  Synthetic
acacacaguggugcacg

SEQ ID NO: 756428 - RNA, 17 nt, Artificial Sequence
  Synthetic
cccagaucagcaucacg

SEQ ID NO: 756429 - RNA, 17 nt, Artificial Sequence
  Synthetic
aagacaggcagaucacg

SEQ ID NO: 756430 - RNA, 17 nt, Artificial Sequence
  Synthetic
aaggcgggcagaucacg

SEQ ID NO: 756431 - RNA, 17 nt, Artificial Sequence
  Synthetic
aaggugggcagaucacg

SEQ ID NO: 756432 - RNA, 17 nt, Artificial Sequence
  Synthetic
aaggugggcggaucacg

SEQ ID NO: 756433 - RNA, 17 nt, Artificial Sequence
  Synthetic
aaggcggguggaucacg

SEQ ID NO: 756434 - RNA, 17 nt, Artificial Sequence
  Synthetic
aagguggguggaucacg

SEQ ID NO: 756435 - RNA, 17 nt, Artificial Sequence
  Synthetic
cucccuauuauaucacg

SEQ ID NO: 756436 - RNA, 17 nt, Artificial Sequence
  Synthetic
ugucaaagcaagucacg

SEQ ID NO: 756437 - RNA, 17 nt, Artificial Sequence
  Synthetic
auccaaaggaagucacg

SEQ ID NO: 756438 - RNA, 17 nt, Artificial Sequence
  Synthetic
accugccaaaggucacg

SEQ ID NO: 756439 - RNA, 17 nt, Artificial Sequence
  Synthetic
ugugcagauuugucacg

SEQ ID NO: 756440 - RNA, 17 nt, Artificial Sequence
  Synthetic
agaagggcuuugucacg

SEQ ID NO: 756441 - RNA, 17 nt, Artificial Sequence
  Synthetic
uaagucaggaauucacg

SEQ ID NO: 756442 - RNA, 17 nt, Artificial Sequence
  Synthetic
ucuccccuaauuucacg

SEQ ID NO: 756443 - RNA, 17 nt, Artificial Sequence
  Synthetic
uaguuuuaguaaagacg

SEQ ID NO: 756444 - RNA, 17 nt, Artificial Sequence
  Synthetic
uauuuuuaguaaagacg

SEQ ID NO: 756445 - RNA, 17 nt, Artificial Sequence
  Synthetic
uuccuaggguaaagacg

SEQ ID NO: 756446 - RNA, 17 nt, Artificial Sequence
  Synthetic
agaaacauuauaagacg

SEQ ID NO: 756447 - RNA, 17 nt, Artificial Sequence
  Synthetic
uguuuuuaguacagacg

SEQ ID NO: 756448 - RNA, 17 nt, Artificial Sequence
  Synthetic
caaaacuuagccagacg

SEQ ID NO: 756449 - RNA, 17 nt, Artificial Sequence
  Synthetic
uauuuuuagcagagacg

SEQ ID NO: 756450 - RNA, 17 nt, Artificial Sequence
  Synthetic
uauuuuaaguagagacg

SEQ ID NO: 756451 - RNA, 17 nt, Artificial Sequence
  Synthetic
uaucuuuaguagagacg

SEQ ID NO: 756452 - RNA, 17 nt, Artificial Sequence
  Synthetic
uaauuuuaguagagacg

SEQ ID NO: 756453 - RNA, 17 nt, Artificial Sequence
  Synthetic
uauuuuuaguagagacg

SEQ ID NO: 756454 - RNA, 17 nt, Artificial Sequence
  Synthetic
auuuuuuaguagagacg

SEQ ID NO: 756455 - RNA, 17 nt, Artificial Sequence
  Synthetic
auuuuuauguagagacg

SEQ ID NO: 756456 - RNA, 17 nt, Artificial Sequence
  Synthetic
uaucuuuaguggagacg

SEQ ID NO: 756457 - RNA, 17 nt, Artificial Sequence
  Synthetic
uauuuuuaguggagacg

SEQ ID NO: 756458 - RNA, 17 nt, Artificial Sequence
  Synthetic
caguugaaagauagacg

SEQ ID NO: 756459 - RNA, 17 nt, Artificial Sequence
  Synthetic
uuaaaaucauauagacg

SEQ ID NO: 756460 - RNA, 17 nt, Artificial Sequence
  Synthetic
uauuuuuaguguagacg

SEQ ID NO: 756461 - RNA, 17 nt, Artificial Sequence
  Synthetic
uuuaagcugaaaggacg

SEQ ID NO: 756462 - RNA, 17 nt, Artificial Sequence
  Synthetic
uuuuaaacaugaggacg

SEQ ID NO: 756463 - RNA, 17 nt, Artificial Sequence
  Synthetic
aaaaaauuacccggacg

SEQ ID NO: 756464 - RNA, 17 nt, Artificial Sequence
  Synthetic
ugccacaggaagggacg

SEQ ID NO: 756465 - RNA, 17 nt, Artificial Sequence
  Synthetic
uauuuuuaguagggacg

SEQ ID NO: 756466 - RNA, 17 nt, Artificial Sequence
  Synthetic
aguccuuuguagggacg

SEQ ID NO: 756467 - RNA, 17 nt, Artificial Sequence
  Synthetic
cguggggugaggggacg

SEQ ID NO: 756468 - RNA, 17 nt, Artificial Sequence
  Synthetic
acagguuuggggggacg

SEQ ID NO: 756469 - RNA, 17 nt, Artificial Sequence
  Synthetic
caccugaaccugggacg

SEQ ID NO: 756470 - RNA, 17 nt, Artificial Sequence
  Synthetic
ucugggggugugggacg

SEQ ID NO: 756471 - RNA, 17 nt, Artificial Sequence
  Synthetic
cugaagucugacugacg

SEQ ID NO: 756472 - RNA, 17 nt, Artificial Sequence
  Synthetic
agagggagaaaaauacg

SEQ ID NO: 756473 - RNA, 17 nt, Artificial Sequence
  Synthetic
uauaugguauaaauacg

SEQ ID NO: 756474 - RNA, 17 nt, Artificial Sequence
  Synthetic
cccugaacuggaauacg

SEQ ID NO: 756475 - RNA, 17 nt, Artificial Sequence
  Synthetic
cugagacaaauaauacg

SEQ ID NO: 756476 - RNA, 17 nt, Artificial Sequence
  Synthetic
aaaaacaugcuaauacg

SEQ ID NO: 756477 - RNA, 17 nt, Artificial Sequence
  Synthetic
aguugcaaacacauacg

SEQ ID NO: 756478 - RNA, 17 nt, Artificial Sequence
  Synthetic
auuuucaacaagauacg

SEQ ID NO: 756479 - RNA, 17 nt, Artificial Sequence
  Synthetic
uauuuuaaguagauacg

SEQ ID NO: 756480 - RNA, 17 nt, Artificial Sequence
  Synthetic
auguucucacugauacg

SEQ ID NO: 756481 - RNA, 17 nt, Artificial Sequence
  Synthetic
uuuauuuuuaauauacg

SEQ ID NO: 756482 - RNA, 17 nt, Artificial Sequence
  Synthetic
ucuuaauauagccuacg

SEQ ID NO: 756483 - RNA, 17 nt, Artificial Sequence
  Synthetic
acuuugggaggccuacg

SEQ ID NO: 756484 - RNA, 17 nt, Artificial Sequence
  Synthetic
uuuuccuuuugccuacg

SEQ ID NO: 756485 - RNA, 17 nt, Artificial Sequence
  Synthetic
cuguagucccagcuacg

SEQ ID NO: 756486 - RNA, 17 nt, Artificial Sequence
  Synthetic
ccuguggaacaucuacg

SEQ ID NO: 756487 - RNA, 17 nt, Artificial Sequence
  Synthetic
ucuuccaauugucuacg

SEQ ID NO: 756488 - RNA, 17 nt, Artificial Sequence
  Synthetic
augcagacucuucuacg

SEQ ID NO: 756489 - RNA, 17 nt, Artificial Sequence
  Synthetic
uucaggacacaaguacg

SEQ ID NO: 756490 - RNA, 17 nt, Artificial Sequence
  Synthetic
uuugacucugaaguacg

SEQ ID NO: 756491 - RNA, 17 nt, Artificial Sequence
  Synthetic
auuaauaauuaauuacg

SEQ ID NO: 756492 - RNA, 17 nt, Artificial Sequence
  Synthetic
acauauaauacauuacg

SEQ ID NO: 756493 - RNA, 17 nt, Artificial Sequence
  Synthetic
ugaauaaggagauuacg

SEQ ID NO: 756494 - RNA, 17 nt, Artificial Sequence
  Synthetic
uaucauacuuuauuacg

SEQ ID NO: 756495 - RNA, 17 nt, Artificial Sequence
  Synthetic
aaaauuuguggcuuacg

SEQ ID NO: 756496 - RNA, 17 nt, Artificial Sequence
  Synthetic
acgagucacaucuuacg

SEQ ID NO: 756497 - RNA, 17 nt, Artificial Sequence
  Synthetic
aaaagaagacauuuacg

SEQ ID NO: 756498 - RNA, 17 nt, Artificial Sequence
  Synthetic
aggugcauauauuuacg

SEQ ID NO: 756499 - RNA, 17 nt, Artificial Sequence
  Synthetic
agguauauauauuuacg

SEQ ID NO: 756500 - RNA, 17 nt, Artificial Sequence
  Synthetic
uuuuaggauacuuuacg

SEQ ID NO: 756501 - RNA, 17 nt, Artificial Sequence
  Synthetic
cuaaaagcauuuuuacg

SEQ ID NO: 756502 - RNA, 17 nt, Artificial Sequence
  Synthetic
uccuuuauguuuuuacg

SEQ ID NO: 756503 - RNA, 17 nt, Artificial Sequence
  Synthetic
ugaaaaaccagaaaccg

SEQ ID NO: 756504 - RNA, 17 nt, Artificial Sequence
  Synthetic
aaucauuuuagaaaccg

SEQ ID NO: 756505 - RNA, 17 nt, Artificial Sequence
  Synthetic
uuaucagagugaaaccg

SEQ ID NO: 756506 - RNA, 17 nt, Artificial Sequence
  Synthetic
acuucaucaguaaaccg

SEQ ID NO: 756507 - RNA, 17 nt, Artificial Sequence
  Synthetic
ugaccuguuaggaaccg

SEQ ID NO: 756508 - RNA, 17 nt, Artificial Sequence
  Synthetic
uaaaaauguguuaaccg

SEQ ID NO: 756509 - RNA, 17 nt, Artificial Sequence
  Synthetic
uaauuuaaauuuaaccg

SEQ ID NO: 756510 - RNA, 17 nt, Artificial Sequence
  Synthetic
auuuuauuucaccaccg

SEQ ID NO: 756511 - RNA, 17 nt, Artificial Sequence
  Synthetic
cuuuccagguuccaccg

SEQ ID NO: 756512 - RNA, 17 nt, Artificial Sequence
  Synthetic
cuaauucaacagcaccg

SEQ ID NO: 756513 - RNA, 17 nt, Artificial Sequence
  Synthetic
ucaauuauuuuucaccg

SEQ ID NO: 756514 - RNA, 17 nt, Artificial Sequence
  Synthetic
auuuggaagaaauaccg

SEQ ID NO: 756515 - RNA, 17 nt, Artificial Sequence
  Synthetic
ugugauguuccauaccg

SEQ ID NO: 756516 - RNA, 17 nt, Artificial Sequence
  Synthetic
uugagggcucaguaccg

SEQ ID NO: 756517 - RNA, 17 nt, Artificial Sequence
  Synthetic
uaagcaguucuuuaccg

SEQ ID NO: 756518 - RNA, 17 nt, Artificial Sequence
  Synthetic
cccaucuccccaccccg

SEQ ID NO: 756519 - RNA, 17 nt, Artificial Sequence
  Synthetic
agcugcagagcuccccg

SEQ ID NO: 756520 - RNA, 17 nt, Artificial Sequence
  Synthetic
cagcugccccuuccccg

SEQ ID NO: 756521 - RNA, 17 nt, Artificial Sequence
  Synthetic
uaccuccgcuuuccccg

SEQ ID NO: 756522 - RNA, 17 nt, Artificial Sequence
  Synthetic
uuaauuacagaagcccg

SEQ ID NO: 756523 - RNA, 17 nt, Artificial Sequence
  Synthetic
caaacucuuccagcccg

SEQ ID NO: 756524 - RNA, 17 nt, Artificial Sequence
  Synthetic
ugggcagauagagcccg

SEQ ID NO: 756525 - RNA, 17 nt, Artificial Sequence
  Synthetic
aucucuggauaugcccg

SEQ ID NO: 756526 - RNA, 17 nt, Artificial Sequence
  Synthetic
auguuuaguuaugcccg

SEQ ID NO: 756527 - RNA, 17 nt, Artificial Sequence
  Synthetic
ucuuucucuguugcccg

SEQ ID NO: 756528 - RNA, 17 nt, Artificial Sequence
  Synthetic
ugcauaucuaacucccg

SEQ ID NO: 756529 - RNA, 17 nt, Artificial Sequence
  Synthetic
acuucagaaggcucccg

SEQ ID NO: 756530 - RNA, 17 nt, Artificial Sequence
  Synthetic
cuucucuuauucucccg

SEQ ID NO: 756531 - RNA, 17 nt, Artificial Sequence
  Synthetic
auccauuguaugucccg

SEQ ID NO: 756532 - RNA, 17 nt, Artificial Sequence
  Synthetic
ccuuauggaaauucccg

SEQ ID NO: 756533 - RNA, 17 nt, Artificial Sequence
  Synthetic
auggaccuuucuucccg

SEQ ID NO: 756534 - RNA, 17 nt, Artificial Sequence
  Synthetic
acaugguguuuuucccg

SEQ ID NO: 756535 - RNA, 17 nt, Artificial Sequence
  Synthetic
aaaauaaauaaaagccg

SEQ ID NO: 756536 - RNA, 17 nt, Artificial Sequence
  Synthetic
uuuuuaaaaagaagccg

SEQ ID NO: 756537 - RNA, 17 nt, Artificial Sequence
  Synthetic
ccauugcacuccagccg

SEQ ID NO: 756538 - RNA, 17 nt, Artificial Sequence
  Synthetic
uuagcggccaggagccg

SEQ ID NO: 756539 - RNA, 17 nt, Artificial Sequence
  Synthetic
ccacacuguccuagccg

SEQ ID NO: 756540 - RNA, 17 nt, Artificial Sequence
  Synthetic
agcacuuuggaaggccg

SEQ ID NO: 756541 - RNA, 17 nt, Artificial Sequence
  Synthetic
agcaauuugagaggccg

SEQ ID NO: 756542 - RNA, 17 nt, Artificial Sequence
  Synthetic
agcacuuugcgaggccg

SEQ ID NO: 756543 - RNA, 17 nt, Artificial Sequence
  Synthetic
agauacucaggaggccg

SEQ ID NO: 756544 - RNA, 17 nt, Artificial Sequence
  Synthetic
agcgcuucaggaggccg

SEQ ID NO: 756545 - RNA, 17 nt, Artificial Sequence
  Synthetic
agcacuuggggaggccg

SEQ ID NO: 756546 - RNA, 17 nt, Artificial Sequence
  Synthetic
agcacucugggaggccg

SEQ ID NO: 756547 - RNA, 17 nt, Artificial Sequence
  Synthetic
agcugcuugggaggccg

SEQ ID NO: 756548 - RNA, 17 nt, Artificial Sequence
  Synthetic
agcaauuugggaggccg

SEQ ID NO: 756549 - RNA, 17 nt, Artificial Sequence
  Synthetic
agcacuuugggaggccg

SEQ ID NO: 756550 - RNA, 17 nt, Artificial Sequence
  Synthetic
aggacuuugggaggccg

SEQ ID NO: 756551 - RNA, 17 nt, Artificial Sequence
  Synthetic
aguacuuugggaggccg

SEQ ID NO: 756552 - RNA, 17 nt, Artificial Sequence
  Synthetic
agcguuuugggaggccg

SEQ ID NO: 756553 - RNA, 17 nt, Artificial Sequence
  Synthetic
agcucuuugugaggccg

SEQ ID NO: 756554 - RNA, 17 nt, Artificial Sequence
  Synthetic
uuagucauggccggccg

SEQ ID NO: 756555 - RNA, 17 nt, Artificial Sequence
  Synthetic
aacacuuuggggggccg

SEQ ID NO: 756556 - RNA, 17 nt, Artificial Sequence
  Synthetic
uauauuacaugaugccg

SEQ ID NO: 756557 - RNA, 17 nt, Artificial Sequence
  Synthetic
ugagggguuugcugccg

SEQ ID NO: 756558 - RNA, 17 nt, Artificial Sequence
  Synthetic
uacacgagaaguugccg

SEQ ID NO: 756559 - RNA, 17 nt, Artificial Sequence
  Synthetic
agaaagauaggaauccg

SEQ ID NO: 756560 - RNA, 17 nt, Artificial Sequence
  Synthetic
ugaagggaaauaauccg

SEQ ID NO: 756561 - RNA, 17 nt, Artificial Sequence
  Synthetic
ucuagaacuguaauccg

SEQ ID NO: 756562 - RNA, 17 nt, Artificial Sequence
  Synthetic
uguggauuugcuauccg

SEQ ID NO: 756563 - RNA, 17 nt, Artificial Sequence
  Synthetic
uaguuuuaguuuauccg

SEQ ID NO: 756564 - RNA, 17 nt, Artificial Sequence
  Synthetic
cuaaauccagaacuccg

SEQ ID NO: 756565 - RNA, 17 nt, Artificial Sequence
  Synthetic
cucuguucuccacuccg

SEQ ID NO: 756566 - RNA, 17 nt, Artificial Sequence
  Synthetic
ugacauaccuaccuccg

SEQ ID NO: 756567 - RNA, 17 nt, Artificial Sequence
  Synthetic
uuugacaguuuccuccg

SEQ ID NO: 756568 - RNA, 17 nt, Artificial Sequence
  Synthetic
caccauggacagcuccg

SEQ ID NO: 756569 - RNA, 17 nt, Artificial Sequence
  Synthetic
agugcugggaggcuccg

SEQ ID NO: 756570 - RNA, 17 nt, Artificial Sequence
  Synthetic
cuuuuauuaaaucuccg

SEQ ID NO: 756571 - RNA, 17 nt, Artificial Sequence
  Synthetic
agaaacuaccaucuccg

SEQ ID NO: 756572 - RNA, 17 nt, Artificial Sequence
  Synthetic
uucuuuucguuucuccg

SEQ ID NO: 756573 - RNA, 17 nt, Artificial Sequence
  Synthetic
cugcugcauuagguccg

SEQ ID NO: 756574 - RNA, 17 nt, Artificial Sequence
  Synthetic
auuugaaaaccauuccg

SEQ ID NO: 756575 - RNA, 17 nt, Artificial Sequence
  Synthetic
aaccacuauuccuuccg

SEQ ID NO: 756576 - RNA, 17 nt, Artificial Sequence
  Synthetic
aauaaacagcucuuccg

SEQ ID NO: 756577 - RNA, 17 nt, Artificial Sequence
  Synthetic
uuuuauuuuaaguuccg

SEQ ID NO: 756578 - RNA, 17 nt, Artificial Sequence
  Synthetic
uagguauacauguuccg

SEQ ID NO: 756579 - RNA, 17 nt, Artificial Sequence
  Synthetic
cagacccuuuguuuccg

SEQ ID NO: 756580 - RNA, 17 nt, Artificial Sequence
  Synthetic
cagcauuuuuuuuuccg

SEQ ID NO: 756581 - RNA, 17 nt, Artificial Sequence
  Synthetic
uuuuuuuuuuuuuuccg

SEQ ID NO: 756582 - RNA, 17 nt, Artificial Sequence
  Synthetic
cucugaccauaaaagcg

SEQ ID NO: 756583 - RNA, 17 nt, Artificial Sequence
  Synthetic
caguuaacuuaaaagcg

SEQ ID NO: 756584 - RNA, 17 nt, Artificial Sequence
  Synthetic
cacccaguaagaaagcg

SEQ ID NO: 756585 - RNA, 17 nt, Artificial Sequence
  Synthetic
cuuguugggagaaagcg

SEQ ID NO: 756586 - RNA, 17 nt, Artificial Sequence
  Synthetic
auagaaauaaagaagcg

SEQ ID NO: 756587 - RNA, 17 nt, Artificial Sequence
  Synthetic
acaucuaagcagaagcg

SEQ ID NO: 756588 - RNA, 17 nt, Artificial Sequence
  Synthetic
agagagagagagaagcg

SEQ ID NO: 756589 - RNA, 17 nt, Artificial Sequence
  Synthetic
aaaaugaaggggaagcg

SEQ ID NO: 756590 - RNA, 17 nt, Artificial Sequence
  Synthetic
caacacagagauaagcg

SEQ ID NO: 756591 - RNA, 17 nt, Artificial Sequence
  Synthetic
aguacaacuccacagcg

SEQ ID NO: 756592 - RNA, 17 nt, Artificial Sequence
  Synthetic
ucuaguuugggacagcg

SEQ ID NO: 756593 - RNA, 17 nt, Artificial Sequence
  Synthetic
uuuuguuuaugacagcg

SEQ ID NO: 756594 - RNA, 17 nt, Artificial Sequence
  Synthetic
ugcaugcaugcagagcg

SEQ ID NO: 756595 - RNA, 17 nt, Artificial Sequence
  Synthetic
ugagauuccagagagcg

SEQ ID NO: 756596 - RNA, 17 nt, Artificial Sequence
  Synthetic
uccccuaccaucgagcg

SEQ ID NO: 756597 - RNA, 17 nt, Artificial Sequence
  Synthetic
uaugucuuuugggagcg

SEQ ID NO: 756598 - RNA, 17 nt, Artificial Sequence
  Synthetic
caaaaauuagcugagcg

SEQ ID NO: 756599 - RNA, 17 nt, Artificial Sequence
  Synthetic
ccucagcaguuugagcg

SEQ ID NO: 756600 - RNA, 17 nt, Artificial Sequence
  Synthetic
aaaaguaaucacuagcg

SEQ ID NO: 756601 - RNA, 17 nt, Artificial Sequence
  Synthetic
aaauacaaaaaguagcg

SEQ ID NO: 756602 - RNA, 17 nt, Artificial Sequence
  Synthetic
auacaaaaaaauuagcg

SEQ ID NO: 756603 - RNA, 17 nt, Artificial Sequence
  Synthetic
ccaugccaaucuuagcg

SEQ ID NO: 756604 - RNA, 17 nt, Artificial Sequence
  Synthetic
agucaggaaauuuagcg

SEQ ID NO: 756605 - RNA, 17 nt, Artificial Sequence
  Synthetic
aaguaaaauauuuagcg

SEQ ID NO: 756606 - RNA, 17 nt, Artificial Sequence
  Synthetic
aaucgcuugaacccgcg

SEQ ID NO: 756607 - RNA, 17 nt, Artificial Sequence
  Synthetic
caccgaggccugucgcg

SEQ ID NO: 756608 - RNA, 17 nt, Artificial Sequence
  Synthetic
ucacaauagcaaaggcg

SEQ ID NO: 756609 - RNA, 17 nt, Artificial Sequence
  Synthetic
cuauaaucugaaaggcg

SEQ ID NO: 756610 - RNA, 17 nt, Artificial Sequence
  Synthetic
uggggucucggaaggcg

SEQ ID NO: 756611 - RNA, 17 nt, Artificial Sequence
  Synthetic
uaugaaacuguaaggcg

SEQ ID NO: 756612 - RNA, 17 nt, Artificial Sequence
  Synthetic
cucccauuuuacaggcg

SEQ ID NO: 756613 - RNA, 17 nt, Artificial Sequence
  Synthetic
auggauguaaccaggcg

SEQ ID NO: 756614 - RNA, 17 nt, Artificial Sequence
  Synthetic
aaucaauugaccaggcg

SEQ ID NO: 756615 - RNA, 17 nt, Artificial Sequence
  Synthetic
aaaaaauuagccaggcg

SEQ ID NO: 756616 - RNA, 17 nt, Artificial Sequence
  Synthetic
caaaaauuagccaggcg

SEQ ID NO: 756617 - RNA, 17 nt, Artificial Sequence
  Synthetic
acaaaauuagccaggcg

SEQ ID NO: 756618 - RNA, 17 nt, Artificial Sequence
  Synthetic
ugaaaauuagccaggcg

SEQ ID NO: 756619 - RNA, 17 nt, Artificial Sequence
  Synthetic
uaacuaggggccaggcg

SEQ ID NO: 756620 - RNA, 17 nt, Artificial Sequence
  Synthetic
aauaaaugggccaggcg

SEQ ID NO: 756621 - RNA, 17 nt, Artificial Sequence
  Synthetic
auaucaugggccaggcg

SEQ ID NO: 756622 - RNA, 17 nt, Artificial Sequence
  Synthetic
auuaucuuggccaggcg

SEQ ID NO: 756623 - RNA, 17 nt, Artificial Sequence
  Synthetic
aagaaguuggccaggcg

SEQ ID NO: 756624 - RNA, 17 nt, Artificial Sequence
  Synthetic
cacaccauuuccaggcg

SEQ ID NO: 756625 - RNA, 17 nt, Artificial Sequence
  Synthetic
uauuuuuaguagaggcg

SEQ ID NO: 756626 - RNA, 17 nt, Artificial Sequence
  Synthetic
caaacuccaaugaggcg

SEQ ID NO: 756627 - RNA, 17 nt, Artificial Sequence
  Synthetic
uuuuuuuucuugaggcg

SEQ ID NO: 756628 - RNA, 17 nt, Artificial Sequence
  Synthetic
cauucaggacauaggcg

SEQ ID NO: 756629 - RNA, 17 nt, Artificial Sequence
  Synthetic
acagagagagauaggcg

SEQ ID NO: 756630 - RNA, 17 nt, Artificial Sequence
  Synthetic
ccaaagggauuuaggcg

SEQ ID NO: 756631 - RNA, 17 nt, Artificial Sequence
  Synthetic
acaaauuuuagccggcg

SEQ ID NO: 756632 - RNA, 17 nt, Artificial Sequence
  Synthetic
cacauagacacagggcg

SEQ ID NO: 756633 - RNA, 17 nt, Artificial Sequence
  Synthetic
aaaaaauuagcagggcg

SEQ ID NO: 756634 - RNA, 17 nt, Artificial Sequence
  Synthetic
aaaauagcagccgggcg

SEQ ID NO: 756635 - RNA, 17 nt, Artificial Sequence
  Synthetic
agauagauagccgggcg

SEQ ID NO: 756636 - RNA, 17 nt, Artificial Sequence
  Synthetic
aaaaaauuagccgggcg

SEQ ID NO: 756637 - RNA, 17 nt, Artificial Sequence
  Synthetic
acaaaauuagccgggcg

SEQ ID NO: 756638 - RNA, 17 nt, Artificial Sequence
  Synthetic
aauguacaggccgggcg

SEQ ID NO: 756639 - RNA, 17 nt, Artificial Sequence
  Synthetic
aauggugaggccgggcg

SEQ ID NO: 756640 - RNA, 17 nt, Artificial Sequence
  Synthetic
ccauuuccggccgggcg

SEQ ID NO: 756641 - RNA, 17 nt, Artificial Sequence
  Synthetic
agcauugcggccgggcg

SEQ ID NO: 756642 - RNA, 17 nt, Artificial Sequence
  Synthetic
aacucaucggccgggcg

SEQ ID NO: 756643 - RNA, 17 nt, Artificial Sequence
  Synthetic
aguuacucggccgggcg

SEQ ID NO: 756644 - RNA, 17 nt, Artificial Sequence
  Synthetic
aucaucugggccgggcg

SEQ ID NO: 756645 - RNA, 17 nt, Artificial Sequence
  Synthetic
aaacucugggccgggcg

SEQ ID NO: 756646 - RNA, 17 nt, Artificial Sequence
  Synthetic
uaagagcuggccgggcg

SEQ ID NO: 756647 - RNA, 17 nt, Artificial Sequence
  Synthetic
aucacucuggccgggcg

SEQ ID NO: 756648 - RNA, 17 nt, Artificial Sequence
  Synthetic
auguuuuuggccgggcg

SEQ ID NO: 756649 - RNA, 17 nt, Artificial Sequence
  Synthetic
uucuuggcugccgggcg

SEQ ID NO: 756650 - RNA, 17 nt, Artificial Sequence
  Synthetic
caaaaauuauucgggcg

SEQ ID NO: 756651 - RNA, 17 nt, Artificial Sequence
  Synthetic
aaaaaauuagcggggcg

SEQ ID NO: 756652 - RNA, 17 nt, Artificial Sequence
  Synthetic
ucucaaaauggggggcg

SEQ ID NO: 756653 - RNA, 17 nt, Artificial Sequence
  Synthetic
uugucacauugggggcg

SEQ ID NO: 756654 - RNA, 17 nt, Artificial Sequence
  Synthetic
ugucgggggguggggcg

SEQ ID NO: 756655 - RNA, 17 nt, Artificial Sequence
  Synthetic
aaguuugcgacugggcg

SEQ ID NO: 756656 - RNA, 17 nt, Artificial Sequence
  Synthetic
caaaaaucagcugggcg

SEQ ID NO: 756657 - RNA, 17 nt, Artificial Sequence
  Synthetic
caaaaacuagcugggcg

SEQ ID NO: 756658 - RNA, 17 nt, Artificial Sequence
  Synthetic
aaaaaauuagcugggcg

SEQ ID NO: 756659 - RNA, 17 nt, Artificial Sequence
  Synthetic
caaaaauuagcugggcg

SEQ ID NO: 756660 - RNA, 17 nt, Artificial Sequence
  Synthetic
cugucucaggcugggcg

SEQ ID NO: 756661 - RNA, 17 nt, Artificial Sequence
  Synthetic
auuuuggaggcugggcg

SEQ ID NO: 756662 - RNA, 17 nt, Artificial Sequence
  Synthetic
auuauuuaggcugggcg

SEQ ID NO: 756663 - RNA, 17 nt, Artificial Sequence
  Synthetic
aauucacgggcugggcg

SEQ ID NO: 756664 - RNA, 17 nt, Artificial Sequence
  Synthetic
cuuuauugggcugggcg

SEQ ID NO: 756665 - RNA, 17 nt, Artificial Sequence
  Synthetic
uaguccuuggcugggcg

SEQ ID NO: 756666 - RNA, 17 nt, Artificial Sequence
  Synthetic
aacgcuuuggcugggcg

SEQ ID NO: 756667 - RNA, 17 nt, Artificial Sequence
  Synthetic
aagaguaucucugggcg

SEQ ID NO: 756668 - RNA, 17 nt, Artificial Sequence
  Synthetic
cgagaaauaguugggcg

SEQ ID NO: 756669 - RNA, 17 nt, Artificial Sequence
  Synthetic
aagaugagauuugggcg

SEQ ID NO: 756670 - RNA, 17 nt, Artificial Sequence
  Synthetic
caccauucuacauggcg

SEQ ID NO: 756671 - RNA, 17 nt, Artificial Sequence
  Synthetic
aaacaaauagccuggcg

SEQ ID NO: 756672 - RNA, 17 nt, Artificial Sequence
  Synthetic
caaaaacuagccuggcg

SEQ ID NO: 756673 - RNA, 17 nt, Artificial Sequence
  Synthetic
aaaaaauuagccuggcg

SEQ ID NO: 756674 - RNA, 17 nt, Artificial Sequence
  Synthetic
uccugguugggguggcg

SEQ ID NO: 756675 - RNA, 17 nt, Artificial Sequence
  Synthetic
uuuuccuuggcuuggcg

SEQ ID NO: 756676 - RNA, 17 nt, Artificial Sequence
  Synthetic
uauggacaucuuuggcg

SEQ ID NO: 756677 - RNA, 17 nt, Artificial Sequence
  Synthetic
ugucagucaaaaaugcg

SEQ ID NO: 756678 - RNA, 17 nt, Artificial Sequence
  Synthetic
ugaaaugaaacaaugcg

SEQ ID NO: 756679 - RNA, 17 nt, Artificial Sequence
  Synthetic
ucuaacaguuuaaugcg

SEQ ID NO: 756680 - RNA, 17 nt, Artificial Sequence
  Synthetic
aaaaaauuagccaugcg

SEQ ID NO: 756681 - RNA, 17 nt, Artificial Sequence
  Synthetic
aauaccuaaugcaugcg

SEQ ID NO: 756682 - RNA, 17 nt, Artificial Sequence
  Synthetic
uguuacauagguaugcg

SEQ ID NO: 756683 - RNA, 17 nt, Artificial Sequence
  Synthetic
agagagugccuacugcg

SEQ ID NO: 756684 - RNA, 17 nt, Artificial Sequence
  Synthetic
ugaauccagaugcugcg

SEQ ID NO: 756685 - RNA, 17 nt, Artificial Sequence
  Synthetic
aguugagcagugcugcg

SEQ ID NO: 756686 - RNA, 17 nt, Artificial Sequence
  Synthetic
cucacaaaagcucugcg

SEQ ID NO: 756687 - RNA, 17 nt, Artificial Sequence
  Synthetic
cuucuugccucucugcg

SEQ ID NO: 756688 - RNA, 17 nt, Artificial Sequence
  Synthetic
uaguuuuauauucugcg

SEQ ID NO: 756689 - RNA, 17 nt, Artificial Sequence
  Synthetic
cagccucccaaagugcg

SEQ ID NO: 756690 - RNA, 17 nt, Artificial Sequence
  Synthetic
uggccucccaaagugcg

SEQ ID NO: 756691 - RNA, 17 nt, Artificial Sequence
  Synthetic
cagccuccgaaagugcg

SEQ ID NO: 756692 - RNA, 17 nt, Artificial Sequence
  Synthetic
agcauuucuggagugcg

SEQ ID NO: 756693 - RNA, 17 nt, Artificial Sequence
  Synthetic
uuguggggagaggugcg

SEQ ID NO: 756694 - RNA, 17 nt, Artificial Sequence
  Synthetic
caaaaaugaccugugcg

SEQ ID NO: 756695 - RNA, 17 nt, Artificial Sequence
  Synthetic
aaugaaauuaucuugcg

SEQ ID NO: 756696 - RNA, 17 nt, Artificial Sequence
  Synthetic
cuuuuaaagguguugcg

SEQ ID NO: 756697 - RNA, 17 nt, Artificial Sequence
  Synthetic
aaucccagcacuuugcg

SEQ ID NO: 756698 - RNA, 17 nt, Artificial Sequence
  Synthetic
cauuuauagcaaaaucg

SEQ ID NO: 756699 - RNA, 17 nt, Artificial Sequence
  Synthetic
aacagagagccaaaucg

SEQ ID NO: 756700 - RNA, 17 nt, Artificial Sequence
  Synthetic
uuuaaaacuucaaaucg

SEQ ID NO: 756701 - RNA, 17 nt, Artificial Sequence
  Synthetic
uucuauaggauaaaucg

SEQ ID NO: 756702 - RNA, 17 nt, Artificial Sequence
  Synthetic
cuaaaaguagccaaucg

SEQ ID NO: 756703 - RNA, 17 nt, Artificial Sequence
  Synthetic
ugcaggaaaguuaaucg

SEQ ID NO: 756704 - RNA, 17 nt, Artificial Sequence
  Synthetic
caggaaacuuaccaucg

SEQ ID NO: 756705 - RNA, 17 nt, Artificial Sequence
  Synthetic
cugcaaccuccccaucg

SEQ ID NO: 756706 - RNA, 17 nt, Artificial Sequence
  Synthetic
auguguuuuuuccaucg

SEQ ID NO: 756707 - RNA, 17 nt, Artificial Sequence
  Synthetic
uuugguagaauucaucg

SEQ ID NO: 756708 - RNA, 17 nt, Artificial Sequence
  Synthetic
ugaggaaacugagaucg

SEQ ID NO: 756709 - RNA, 17 nt, Artificial Sequence
  Synthetic
uaaccugccugagaucg

SEQ ID NO: 756710 - RNA, 17 nt, Artificial Sequence
  Synthetic
uuuucuguuuaugaucg

SEQ ID NO: 756711 - RNA, 17 nt, Artificial Sequence
  Synthetic
uuuaauauuacauaucg

SEQ ID NO: 756712 - RNA, 17 nt, Artificial Sequence
  Synthetic
acugaacuuugaacucg

SEQ ID NO: 756713 - RNA, 17 nt, Artificial Sequence
  Synthetic
agugggcggaacacucg

SEQ ID NO: 756714 - RNA, 17 nt, Artificial Sequence
  Synthetic
agcuucacaaucacucg

SEQ ID NO: 756715 - RNA, 17 nt, Artificial Sequence
  Synthetic
uucaacaagacaccucg

SEQ ID NO: 756716 - RNA, 17 nt, Artificial Sequence
  Synthetic
uugugggaaggaccucg

SEQ ID NO: 756717 - RNA, 17 nt, Artificial Sequence
  Synthetic
uugaacuccugaccucg

SEQ ID NO: 756718 - RNA, 17 nt, Artificial Sequence
  Synthetic
cgugagaugguaccucg

SEQ ID NO: 756719 - RNA, 17 nt, Artificial Sequence
  Synthetic
cugcaaccuccgccucg

SEQ ID NO: 756720 - RNA, 17 nt, Artificial Sequence
  Synthetic
cugcaaucucugccucg

SEQ ID NO: 756721 - RNA, 17 nt, Artificial Sequence
  Synthetic
ccagcccccaauccucg

SEQ ID NO: 756722 - RNA, 17 nt, Artificial Sequence
  Synthetic
uuugagcaaaguccucg

SEQ ID NO: 756723 - RNA, 17 nt, Artificial Sequence
  Synthetic
cucaaggcaaguccucg

SEQ ID NO: 756724 - RNA, 17 nt, Artificial Sequence
  Synthetic
uccggggcucuuccucg

SEQ ID NO: 756725 - RNA, 17 nt, Artificial Sequence
  Synthetic
aagagaucuggagcucg

SEQ ID NO: 756726 - RNA, 17 nt, Artificial Sequence
  Synthetic
aaaacauuucaugcucg

SEQ ID NO: 756727 - RNA, 17 nt, Artificial Sequence
  Synthetic
uucacauauaaaucucg

SEQ ID NO: 756728 - RNA, 17 nt, Artificial Sequence
  Synthetic
caaccaaauggcucucg

SEQ ID NO: 756729 - RNA, 17 nt, Artificial Sequence
  Synthetic
uucuuucuggucucucg

SEQ ID NO: 756730 - RNA, 17 nt, Artificial Sequence
  Synthetic
uuuuacaacuggucucg

SEQ ID NO: 756731 - RNA, 17 nt, Artificial Sequence
  Synthetic
acacagaccuggucucg

SEQ ID NO: 756732 - RNA, 17 nt, Artificial Sequence
  Synthetic
uggaguugcucuucucg

SEQ ID NO: 756733 - RNA, 17 nt, Artificial Sequence
  Synthetic
uuucuuuaaguuucucg

SEQ ID NO: 756734 - RNA, 17 nt, Artificial Sequence
  Synthetic
uaaaaucuauaaagucg

SEQ ID NO: 756735 - RNA, 17 nt, Artificial Sequence
  Synthetic
agaagacauaccagucg

SEQ ID NO: 756736 - RNA, 17 nt, Artificial Sequence
  Synthetic
cgggaagcuuccagucg

SEQ ID NO: 756737 - RNA, 17 nt, Artificial Sequence
  Synthetic
aauugacagaagagucg

SEQ ID NO: 756738 - RNA, 17 nt, Artificial Sequence
  Synthetic
ugagucaggaagagucg

SEQ ID NO: 756739 - RNA, 17 nt, Artificial Sequence
  Synthetic
auuuuccaagggagucg

SEQ ID NO: 756740 - RNA, 17 nt, Artificial Sequence
  Synthetic
augggggccagacgucg

SEQ ID NO: 756741 - RNA, 17 nt, Artificial Sequence
  Synthetic
acagaccaggagggucg

SEQ ID NO: 756742 - RNA, 17 nt, Artificial Sequence
  Synthetic
uuagguaagaggggucg

SEQ ID NO: 756743 - RNA, 17 nt, Artificial Sequence
  Synthetic
agaaaacaacuaugucg

SEQ ID NO: 756744 - RNA, 17 nt, Artificial Sequence
  Synthetic
aagaagauucacugucg

SEQ ID NO: 756745 - RNA, 17 nt, Artificial Sequence
  Synthetic
cacacugaggccugucg

SEQ ID NO: 756746 - RNA, 17 nt, Artificial Sequence
  Synthetic
cacaccagggccugucg

SEQ ID NO: 756747 - RNA, 17 nt, Artificial Sequence
  Synthetic
cacaccggggccugucg

SEQ ID NO: 756748 - RNA, 17 nt, Artificial Sequence
  Synthetic
cacacuggggccugucg

SEQ ID NO: 756749 - RNA, 17 nt, Artificial Sequence
  Synthetic
aguagauuuuggugucg

SEQ ID NO: 756750 - RNA, 17 nt, Artificial Sequence
  Synthetic
acaccugccaugugucg

SEQ ID NO: 756751 - RNA, 17 nt, Artificial Sequence
  Synthetic
uuauuagaaugaauucg

SEQ ID NO: 756752 - RNA, 17 nt, Artificial Sequence
  Synthetic
ugaaguaaugugauucg

SEQ ID NO: 756753 - RNA, 17 nt, Artificial Sequence
  Synthetic
ugucauauaaauauucg

SEQ ID NO: 756754 - RNA, 17 nt, Artificial Sequence
  Synthetic
ugcacacaggcacuucg

SEQ ID NO: 756755 - RNA, 17 nt, Artificial Sequence
  Synthetic
ucagcuugagcccuucg

SEQ ID NO: 756756 - RNA, 17 nt, Artificial Sequence
  Synthetic
aacaaaacauugcuucg

SEQ ID NO: 756757 - RNA, 17 nt, Artificial Sequence
  Synthetic
ccauauucuuugcuucg

SEQ ID NO: 756758 - RNA, 17 nt, Artificial Sequence
  Synthetic
uaauuaauauaucuucg

SEQ ID NO: 756759 - RNA, 17 nt, Artificial Sequence
  Synthetic
auugaaaaguuucuucg

SEQ ID NO: 756760 - RNA, 17 nt, Artificial Sequence
  Synthetic
uagauuucuagaguucg

SEQ ID NO: 756761 - RNA, 17 nt, Artificial Sequence
  Synthetic
uugagcccaggaguucg

SEQ ID NO: 756762 - RNA, 17 nt, Artificial Sequence
  Synthetic
uugggcccaggaguucg

SEQ ID NO: 756763 - RNA, 17 nt, Artificial Sequence
  Synthetic
ucccgccgguggguucg

SEQ ID NO: 756764 - RNA, 17 nt, Artificial Sequence
  Synthetic
auccaccuuaugguucg

SEQ ID NO: 756765 - RNA, 17 nt, Artificial Sequence
  Synthetic
ccucaauaaaauguucg

SEQ ID NO: 756766 - RNA, 17 nt, Artificial Sequence
  Synthetic
auuaucugucauguucg

SEQ ID NO: 756767 - RNA, 17 nt, Artificial Sequence
  Synthetic
uaaauuauucauguucg

SEQ ID NO: 756768 - RNA, 17 nt, Artificial Sequence
  Synthetic
ccaccacuaccauuucg

SEQ ID NO: 756769 - RNA, 17 nt, Artificial Sequence
  Synthetic
cuuggcuucugauuucg

SEQ ID NO: 756770 - RNA, 17 nt, Artificial Sequence
  Synthetic
aauuuaaauuuauuucg

SEQ ID NO: 756771 - RNA, 17 nt, Artificial Sequence
  Synthetic
aaaauuguuaacuuucg

SEQ ID NO: 756772 - RNA, 17 nt, Artificial Sequence
  Synthetic
cuuuuagggaaguuucg

SEQ ID NO: 756773 - RNA, 17 nt, Artificial Sequence
  Synthetic
cccggggccagguuucg

SEQ ID NO: 756774 - RNA, 17 nt, Artificial Sequence
  Synthetic
aggcaaaaaugguuucg

SEQ ID NO: 756775 - RNA, 17 nt, Artificial Sequence
  Synthetic
aggaaucgauuguuucg

SEQ ID NO: 756776 - RNA, 17 nt, Artificial Sequence
  Synthetic
ugauuuucuucuuuucg

SEQ ID NO: 756777 - RNA, 17 nt, Artificial Sequence
  Synthetic
cuauuuuuaaguuuucg

SEQ ID NO: 756778 - RNA, 17 nt, Artificial Sequence
  Synthetic
aucaaaaccaguuuucg

SEQ ID NO: 756779 - RNA, 17 nt, Artificial Sequence
  Synthetic
ucugggaaauuuuuucg

SEQ ID NO: 756780 - RNA, 17 nt, Artificial Sequence
  Synthetic
agaagguccaaaaaagg

SEQ ID NO: 756781 - RNA, 17 nt, Artificial Sequence
  Synthetic
uguuucccccaaaaagg

SEQ ID NO: 756782 - RNA, 17 nt, Artificial Sequence
  Synthetic
aaaugggcucaaaaagg

SEQ ID NO: 756783 - RNA, 17 nt, Artificial Sequence
  Synthetic
aguauuauugaaaaagg

SEQ ID NO: 756784 - RNA, 17 nt, Artificial Sequence
  Synthetic
aauacuuuugaaaaagg

SEQ ID NO: 756785 - RNA, 17 nt, Artificial Sequence
  Synthetic
ugguaagccuaaaaagg

SEQ ID NO: 756786 - RNA, 17 nt, Artificial Sequence
  Synthetic
ccaaauagcuaaaaagg

SEQ ID NO: 756787 - RNA, 17 nt, Artificial Sequence
  Synthetic
accaagcucccaaaagg

SEQ ID NO: 756788 - RNA, 17 nt, Artificial Sequence
  Synthetic
agggaauauccaaaagg

SEQ ID NO: 756789 - RNA, 17 nt, Artificial Sequence
  Synthetic
uuuuugagagcaaaagg

SEQ ID NO: 756790 - RNA, 17 nt, Artificial Sequence
  Synthetic
caagaaagaucaaaagg

SEQ ID NO: 756791 - RNA, 17 nt, Artificial Sequence
  Synthetic
auacucaaaagaaaagg

SEQ ID NO: 756792 - RNA, 17 nt, Artificial Sequence
  Synthetic
acuggauaaagaaaagg

SEQ ID NO: 756793 - RNA, 17 nt, Artificial Sequence
  Synthetic
ugaagacacagaaaagg

SEQ ID NO: 756794 - RNA, 17 nt, Artificial Sequence
  Synthetic
cuuagauauagaaaagg

SEQ ID NO: 756795 - RNA, 17 nt, Artificial Sequence
  Synthetic
auuuugauuagaaaagg

SEQ ID NO: 756796 - RNA, 17 nt, Artificial Sequence
  Synthetic
agauaaaaaggaaaagg

SEQ ID NO: 756797 - RNA, 17 nt, Artificial Sequence
  Synthetic
aauaaagaaggaaaagg

SEQ ID NO: 756798 - RNA, 17 nt, Artificial Sequence
  Synthetic
aaaagaugaggaaaagg

SEQ ID NO: 756799 - RNA, 17 nt, Artificial Sequence
  Synthetic
aauguaugaggaaaagg

SEQ ID NO: 756800 - RNA, 17 nt, Artificial Sequence
  Synthetic
auuggagggggaaaagg

SEQ ID NO: 756801 - RNA, 17 nt, Artificial Sequence
  Synthetic
cuacauuggggaaaagg

SEQ ID NO: 756802 - RNA, 17 nt, Artificial Sequence
  Synthetic
aaaaacacuggaaaagg

SEQ ID NO: 756803 - RNA, 17 nt, Artificial Sequence
  Synthetic
aggucuuacugaaaagg

SEQ ID NO: 756804 - RNA, 17 nt, Artificial Sequence
  Synthetic
cacaaaaagugaaaagg

SEQ ID NO: 756805 - RNA, 17 nt, Artificial Sequence
  Synthetic
uuuuucuaaauaaaagg

SEQ ID NO: 756806 - RNA, 17 nt, Artificial Sequence
  Synthetic
agcaaggcaauaaaagg

SEQ ID NO: 756807 - RNA, 17 nt, Artificial Sequence
  Synthetic
auagaaauuuuaaaagg

SEQ ID NO: 756808 - RNA, 17 nt, Artificial Sequence
  Synthetic
uauagcagaaacaaagg

SEQ ID NO: 756809 - RNA, 17 nt, Artificial Sequence
  Synthetic
uucuuuuuaaacaaagg

SEQ ID NO: 756810 - RNA, 17 nt, Artificial Sequence
  Synthetic
ccacucucccacaaagg

SEQ ID NO: 756811 - RNA, 17 nt, Artificial Sequence
  Synthetic
ccuucucugcacaaagg

SEQ ID NO: 756812 - RNA, 17 nt, Artificial Sequence
  Synthetic
aaauaccuauacaaagg

SEQ ID NO: 756813 - RNA, 17 nt, Artificial Sequence
  Synthetic
auucauuugaccaaagg

SEQ ID NO: 756814 - RNA, 17 nt, Artificial Sequence
  Synthetic
uucccauuuagcaaagg

SEQ ID NO: 756815 - RNA, 17 nt, Artificial Sequence
  Synthetic
ucuccacagggcaaagg

SEQ ID NO: 756816 - RNA, 17 nt, Artificial Sequence
  Synthetic
cacaugcauggcaaagg

SEQ ID NO: 756817 - RNA, 17 nt, Artificial Sequence
  Synthetic
aguguagccugcaaagg

SEQ ID NO: 756818 - RNA, 17 nt, Artificial Sequence
  Synthetic
cugaggugcugcaaagg

SEQ ID NO: 756819 - RNA, 17 nt, Artificial Sequence
  Synthetic
uauaccuaaaucaaagg

SEQ ID NO: 756820 - RNA, 17 nt, Artificial Sequence
  Synthetic
acacuauugcucaaagg

SEQ ID NO: 756821 - RNA, 17 nt, Artificial Sequence
  Synthetic
aggauuagagucaaagg

SEQ ID NO: 756822 - RNA, 17 nt, Artificial Sequence
  Synthetic
aucuauaaauucaaagg

SEQ ID NO: 756823 - RNA, 17 nt, Artificial Sequence
  Synthetic
auuggcucauucaaagg

SEQ ID NO: 756824 - RNA, 17 nt, Artificial Sequence
  Synthetic
aaaacuauauucaaagg

SEQ ID NO: 756825 - RNA, 17 nt, Artificial Sequence
  Synthetic
uucagaaguuucaaagg

SEQ ID NO: 756826 - RNA, 17 nt, Artificial Sequence
  Synthetic
acuggcaaaaagaaagg

SEQ ID NO: 756827 - RNA, 17 nt, Artificial Sequence
  Synthetic
ugaugaaaagagaaagg

SEQ ID NO: 756828 - RNA, 17 nt, Artificial Sequence
  Synthetic
aaugggccugagaaagg

SEQ ID NO: 756829 - RNA, 17 nt, Artificial Sequence
  Synthetic
aaugcugcuuagaaagg

SEQ ID NO: 756830 - RNA, 17 nt, Artificial Sequence
  Synthetic
auagaaguuuagaaagg

SEQ ID NO: 756831 - RNA, 17 nt, Artificial Sequence
  Synthetic
agaggagugaggaaagg

SEQ ID NO: 756832 - RNA, 17 nt, Artificial Sequence
  Synthetic
agugguagggggaaagg

SEQ ID NO: 756833 - RNA, 17 nt, Artificial Sequence
  Synthetic
acuucuccauggaaagg

SEQ ID NO: 756834 - RNA, 17 nt, Artificial Sequence
  Synthetic
auuuaaaauaugaaagg

SEQ ID NO: 756835 - RNA, 17 nt, Artificial Sequence
  Synthetic
uucaaaucacugaaagg

SEQ ID NO: 756836 - RNA, 17 nt, Artificial Sequence
  Synthetic
aaguuuguccugaaagg

SEQ ID NO: 756837 - RNA, 17 nt, Artificial Sequence
  Synthetic
aaaccuaugcugaaagg

SEQ ID NO: 756838 - RNA, 17 nt, Artificial Sequence
  Synthetic
aacauaaaagugaaagg

SEQ ID NO: 756839 - RNA, 17 nt, Artificial Sequence
  Synthetic
cuucaucucgugaaagg

SEQ ID NO: 756840 - RNA, 17 nt, Artificial Sequence
  Synthetic
aucuaaguuaauaaagg

SEQ ID NO: 756841 - RNA, 17 nt, Artificial Sequence
  Synthetic
caacuggaucauaaagg

SEQ ID NO: 756842 - RNA, 17 nt, Artificial Sequence
  Synthetic
uaugauguucauaaagg

SEQ ID NO: 756843 - RNA, 17 nt, Artificial Sequence
  Synthetic
uaggaguuucauaaagg

SEQ ID NO: 756844 - RNA, 17 nt, Artificial Sequence
  Synthetic
agaaauaucgauaaagg

SEQ ID NO: 756845 - RNA, 17 nt, Artificial Sequence
  Synthetic
uaacaauuuuauaaagg

SEQ ID NO: 756846 - RNA, 17 nt, Artificial Sequence
  Synthetic
uccguuucaucuaaagg

SEQ ID NO: 756847 - RNA, 17 nt, Artificial Sequence
  Synthetic
uucucaacaaguaaagg

SEQ ID NO: 756848 - RNA, 17 nt, Artificial Sequence
  Synthetic
ucaaguuggaguaaagg

SEQ ID NO: 756849 - RNA, 17 nt, Artificial Sequence
  Synthetic
ugguagagggguaaagg

SEQ ID NO: 756850 - RNA, 17 nt, Artificial Sequence
  Synthetic
uugccaccuuguaaagg

SEQ ID NO: 756851 - RNA, 17 nt, Artificial Sequence
  Synthetic
acuuuuuuuuguaaagg

SEQ ID NO: 756852 - RNA, 17 nt, Artificial Sequence
  Synthetic
acacugaaguuuaaagg

SEQ ID NO: 756853 - RNA, 17 nt, Artificial Sequence
  Synthetic
uucaagcauuuuaaagg

SEQ ID NO: 756854 - RNA, 17 nt, Artificial Sequence
  Synthetic
uaaggagagaaacaagg

SEQ ID NO: 756855 - RNA, 17 nt, Artificial Sequence
  Synthetic
ccccccccccaacaagg

SEQ ID NO: 756856 - RNA, 17 nt, Artificial Sequence
  Synthetic
auaaaaagagaacaagg

SEQ ID NO: 756857 - RNA, 17 nt, Artificial Sequence
  Synthetic
auaguuuaugaacaagg

SEQ ID NO: 756858 - RNA, 17 nt, Artificial Sequence
  Synthetic
uuuuaauucacacaagg

SEQ ID NO: 756859 - RNA, 17 nt, Artificial Sequence
  Synthetic
ugagacuucccacaagg

SEQ ID NO: 756860 - RNA, 17 nt, Artificial Sequence
  Synthetic
aaggucagaagacaagg

SEQ ID NO: 756861 - RNA, 17 nt, Artificial Sequence
  Synthetic
ucgguauuuggacaagg

SEQ ID NO: 756862 - RNA, 17 nt, Artificial Sequence
  Synthetic
acccuaaauugacaagg

SEQ ID NO: 756863 - RNA, 17 nt, Artificial Sequence
  Synthetic
uauucuguaguacaagg

SEQ ID NO: 756864 - RNA, 17 nt, Artificial Sequence
  Synthetic
agaaagcacguacaagg

SEQ ID NO: 756865 - RNA, 17 nt, Artificial Sequence
  Synthetic
cuaccagagguacaagg

SEQ ID NO: 756866 - RNA, 17 nt, Artificial Sequence
  Synthetic
uguucugggaaccaagg

SEQ ID NO: 756867 - RNA, 17 nt, Artificial Sequence
  Synthetic
ugcaugcuacaccaagg

SEQ ID NO: 756868 - RNA, 17 nt, Artificial Sequence
  Synthetic
acuuugagagaccaagg

SEQ ID NO: 756869 - RNA, 17 nt, Artificial Sequence
  Synthetic
aaagaauucgaccaagg

SEQ ID NO: 756870 - RNA, 17 nt, Artificial Sequence
  Synthetic
uuggguaaaacccaagg

SEQ ID NO: 756871 - RNA, 17 nt, Artificial Sequence
  Synthetic
aauguauuuucccaagg

SEQ ID NO: 756872 - RNA, 17 nt, Artificial Sequence
  Synthetic
uuaguuaucagccaagg

SEQ ID NO: 756873 - RNA, 17 nt, Artificial Sequence
  Synthetic
acguugucaggccaagg

SEQ ID NO: 756874 - RNA, 17 nt, Artificial Sequence
  Synthetic
acuuagggaggccaagg

SEQ ID NO: 756875 - RNA, 17 nt, Artificial Sequence
  Synthetic
acuucgggaggccaagg

SEQ ID NO: 756876 - RNA, 17 nt, Artificial Sequence
  Synthetic
acugugggaggccaagg

SEQ ID NO: 756877 - RNA, 17 nt, Artificial Sequence
  Synthetic
acuuugggaggccaagg

SEQ ID NO: 756878 - RNA, 17 nt, Artificial Sequence
  Synthetic
auuuugggaggccaagg

SEQ ID NO: 756879 - RNA, 17 nt, Artificial Sequence
  Synthetic
auuuuuggaggccaagg

SEQ ID NO: 756880 - RNA, 17 nt, Artificial Sequence
  Synthetic
auggcaacuggccaagg

SEQ ID NO: 756881 - RNA, 17 nt, Artificial Sequence
  Synthetic
acugaauccugccaagg

SEQ ID NO: 756882 - RNA, 17 nt, Artificial Sequence
  Synthetic
aauuuuucuugccaagg

SEQ ID NO: 756883 - RNA, 17 nt, Artificial Sequence
  Synthetic
uugggaaugauccaagg

SEQ ID NO: 756884 - RNA, 17 nt, Artificial Sequence
  Synthetic
auacugagucuccaagg

SEQ ID NO: 756885 - RNA, 17 nt, Artificial Sequence
  Synthetic
acuuugggaguccaagg

SEQ ID NO: 756886 - RNA, 17 nt, Artificial Sequence
  Synthetic
ccaggaugaguccaagg

SEQ ID NO: 756887 - RNA, 17 nt, Artificial Sequence
  Synthetic
uagaagugguuccaagg

SEQ ID NO: 756888 - RNA, 17 nt, Artificial Sequence
  Synthetic
uuuuuuuuuuuccaagg

SEQ ID NO: 756889 - RNA, 17 nt, Artificial Sequence
  Synthetic
ucaccugauaagcaagg

SEQ ID NO: 756890 - RNA, 17 nt, Artificial Sequence
  Synthetic
agcuccacccagcaagg

SEQ ID NO: 756891 - RNA, 17 nt, Artificial Sequence
  Synthetic
aaauuuucaaggcaagg

SEQ ID NO: 756892 - RNA, 17 nt, Artificial Sequence
  Synthetic
cuuggcagaaggcaagg

SEQ ID NO: 756893 - RNA, 17 nt, Artificial Sequence
  Synthetic
uauggcaccaggcaagg

SEQ ID NO: 756894 - RNA, 17 nt, Artificial Sequence
  Synthetic
cacacagccaggcaagg

SEQ ID NO: 756895 - RNA, 17 nt, Artificial Sequence
  Synthetic
agaucugaagggcaagg

SEQ ID NO: 756896 - RNA, 17 nt, Artificial Sequence
  Synthetic
uuauauaguaugcaagg

SEQ ID NO: 756897 - RNA, 17 nt, Artificial Sequence
  Synthetic
uggauccaccugcaagg

SEQ ID NO: 756898 - RNA, 17 nt, Artificial Sequence
  Synthetic
uagaggauggugcaagg

SEQ ID NO: 756899 - RNA, 17 nt, Artificial Sequence
  Synthetic
caugaccuugugcaagg

SEQ ID NO: 756900 - RNA, 17 nt, Artificial Sequence
  Synthetic
aacuucccacaucaagg

SEQ ID NO: 756901 - RNA, 17 nt, Artificial Sequence
  Synthetic
ucucagugggcucaagg

SEQ ID NO: 756902 - RNA, 17 nt, Artificial Sequence
  Synthetic
uugauaauugcucaagg

SEQ ID NO: 756903 - RNA, 17 nt, Artificial Sequence
  Synthetic
aaacaggccagucaagg

SEQ ID NO: 756904 - RNA, 17 nt, Artificial Sequence
  Synthetic
uuuuccccaggucaagg

SEQ ID NO: 756905 - RNA, 17 nt, Artificial Sequence
  Synthetic
agcccaggaggucaagg

SEQ ID NO: 756906 - RNA, 17 nt, Artificial Sequence
  Synthetic
aagacagagugucaagg

SEQ ID NO: 756907 - RNA, 17 nt, Artificial Sequence
  Synthetic
uauucauugugucaagg

SEQ ID NO: 756908 - RNA, 17 nt, Artificial Sequence
  Synthetic
uaauagaucauucaagg

SEQ ID NO: 756909 - RNA, 17 nt, Artificial Sequence
  Synthetic
aacuuaauaguucaagg

SEQ ID NO: 756910 - RNA, 17 nt, Artificial Sequence
  Synthetic
aaauaguugguucaagg

SEQ ID NO: 756911 - RNA, 17 nt, Artificial Sequence
  Synthetic
uguggcuguguucaagg

SEQ ID NO: 756912 - RNA, 17 nt, Artificial Sequence
  Synthetic
uuccagaauuuucaagg

SEQ ID NO: 756913 - RNA, 17 nt, Artificial Sequence
  Synthetic
auguuuaauuuucaagg

SEQ ID NO: 756914 - RNA, 17 nt, Artificial Sequence
  Synthetic
acuuaaauuuuucaagg

SEQ ID NO: 756915 - RNA, 17 nt, Artificial Sequence
  Synthetic
ugugaaagaaaagaagg

SEQ ID NO: 756916 - RNA, 17 nt, Artificial Sequence
  Synthetic
ccaaggggagaagaagg

SEQ ID NO: 756917 - RNA, 17 nt, Artificial Sequence
  Synthetic
uagucaaaggaagaagg

SEQ ID NO: 756918 - RNA, 17 nt, Artificial Sequence
  Synthetic
cauggagaauaagaagg

SEQ ID NO: 756919 - RNA, 17 nt, Artificial Sequence
  Synthetic
uguuugacuuaagaagg

SEQ ID NO: 756920 - RNA, 17 nt, Artificial Sequence
  Synthetic
auccuaaaaacagaagg

SEQ ID NO: 756921 - RNA, 17 nt, Artificial Sequence
  Synthetic
acgaccuugacagaagg

SEQ ID NO: 756922 - RNA, 17 nt, Artificial Sequence
  Synthetic
acugugauuacagaagg

SEQ ID NO: 756923 - RNA, 17 nt, Artificial Sequence
  Synthetic
auaugggcaccagaagg

SEQ ID NO: 756924 - RNA, 17 nt, Artificial Sequence
  Synthetic
ugaaaaggggcagaagg

SEQ ID NO: 756925 - RNA, 17 nt, Artificial Sequence
  Synthetic
uugaaaacugcagaagg

SEQ ID NO: 756926 - RNA, 17 nt, Artificial Sequence
  Synthetic
aaguaggcuucagaagg

SEQ ID NO: 756927 - RNA, 17 nt, Artificial Sequence
  Synthetic
uaaaucugaagagaagg

SEQ ID NO: 756928 - RNA, 17 nt, Artificial Sequence
  Synthetic
uccaguguaagagaagg

SEQ ID NO: 756929 - RNA, 17 nt, Artificial Sequence
  Synthetic
ccuccuaagagagaagg

SEQ ID NO: 756930 - RNA, 17 nt, Artificial Sequence
  Synthetic
aagacagagagagaagg

SEQ ID NO: 756931 - RNA, 17 nt, Artificial Sequence
  Synthetic
ugaaagacuagagaagg

SEQ ID NO: 756932 - RNA, 17 nt, Artificial Sequence
  Synthetic
cagcuucacggagaagg

SEQ ID NO: 756933 - RNA, 17 nt, Artificial Sequence
  Synthetic
ugcuucaggggagaagg

SEQ ID NO: 756934 - RNA, 17 nt, Artificial Sequence
  Synthetic
cacgaccuuggagaagg

SEQ ID NO: 756935 - RNA, 17 nt, Artificial Sequence
  Synthetic
caaggcaaaugagaagg

SEQ ID NO: 756936 - RNA, 17 nt, Artificial Sequence
  Synthetic
aaugaaacaugagaagg

SEQ ID NO: 756937 - RNA, 17 nt, Artificial Sequence
  Synthetic
agcuggcacauagaagg

SEQ ID NO: 756938 - RNA, 17 nt, Artificial Sequence
  Synthetic
agaacaaccauagaagg

SEQ ID NO: 756939 - RNA, 17 nt, Artificial Sequence
  Synthetic
caagagacuauagaagg

SEQ ID NO: 756940 - RNA, 17 nt, Artificial Sequence
  Synthetic
uuaaaaaguauagaagg

SEQ ID NO: 756941 - RNA, 17 nt, Artificial Sequence
  Synthetic
uggggacuacuagaagg

SEQ ID NO: 756942 - RNA, 17 nt, Artificial Sequence
  Synthetic
aucaaaaaccuagaagg

SEQ ID NO: 756943 - RNA, 17 nt, Artificial Sequence
  Synthetic
cucucaguccuagaagg

SEQ ID NO: 756944 - RNA, 17 nt, Artificial Sequence
  Synthetic
uguauaguauuagaagg

SEQ ID NO: 756945 - RNA, 17 nt, Artificial Sequence
  Synthetic
caggggcugggcgaagg

SEQ ID NO: 756946 - RNA, 17 nt, Artificial Sequence
  Synthetic
uuaaaaaaaaaggaagg

SEQ ID NO: 756947 - RNA, 17 nt, Artificial Sequence
  Synthetic
aagaaagggaaggaagg

SEQ ID NO: 756948 - RNA, 17 nt, Artificial Sequence
  Synthetic
caguaagggaaggaagg

SEQ ID NO: 756949 - RNA, 17 nt, Artificial Sequence
  Synthetic
aagguggggaaggaagg

SEQ ID NO: 756950 - RNA, 17 nt, Artificial Sequence
  Synthetic
auagcugcacaggaagg

SEQ ID NO: 756951 - RNA, 17 nt, Artificial Sequence
  Synthetic
acauggcagcaggaagg

SEQ ID NO: 756952 - RNA, 17 nt, Artificial Sequence
  Synthetic
uuuguagugcaggaagg

SEQ ID NO: 756953 - RNA, 17 nt, Artificial Sequence
  Synthetic
ugggaggccgaggaagg

SEQ ID NO: 756954 - RNA, 17 nt, Artificial Sequence
  Synthetic
uagaugggggaggaagg

SEQ ID NO: 756955 - RNA, 17 nt, Artificial Sequence
  Synthetic
aagucccuugaggaagg

SEQ ID NO: 756956 - RNA, 17 nt, Artificial Sequence
  Synthetic
augaugcaauaggaagg

SEQ ID NO: 756957 - RNA, 17 nt, Artificial Sequence
  Synthetic
aauggggucucggaagg

SEQ ID NO: 756958 - RNA, 17 nt, Artificial Sequence
  Synthetic
caggggagaagggaagg

SEQ ID NO: 756959 - RNA, 17 nt, Artificial Sequence
  Synthetic
ugagugaggagggaagg

SEQ ID NO: 756960 - RNA, 17 nt, Artificial Sequence
  Synthetic
uauguauggagggaagg

SEQ ID NO: 756961 - RNA, 17 nt, Artificial Sequence
  Synthetic
aagagagugagggaagg

SEQ ID NO: 756962 - RNA, 17 nt, Artificial Sequence
  Synthetic
aagcaggauagggaagg

SEQ ID NO: 756963 - RNA, 17 nt, Artificial Sequence
  Synthetic
uagugagguagggaagg

SEQ ID NO: 756964 - RNA, 17 nt, Artificial Sequence
  Synthetic
uguggggugggggaagg

SEQ ID NO: 756965 - RNA, 17 nt, Artificial Sequence
  Synthetic
acacagaccugggaagg

SEQ ID NO: 756966 - RNA, 17 nt, Artificial Sequence
  Synthetic
uaguagaugugggaagg

SEQ ID NO: 756967 - RNA, 17 nt, Artificial Sequence
  Synthetic
accuuaguuugggaagg

SEQ ID NO: 756968 - RNA, 17 nt, Artificial Sequence
  Synthetic
uuugaaucaauggaagg

SEQ ID NO: 756969 - RNA, 17 nt, Artificial Sequence
  Synthetic
uacuugaaacuggaagg

SEQ ID NO: 756970 - RNA, 17 nt, Artificial Sequence
  Synthetic
augcugaaucuggaagg

SEQ ID NO: 756971 - RNA, 17 nt, Artificial Sequence
  Synthetic
aaaguacaucuggaagg

SEQ ID NO: 756972 - RNA, 17 nt, Artificial Sequence
  Synthetic
ucuucaccucuggaagg

SEQ ID NO: 756973 - RNA, 17 nt, Artificial Sequence
  Synthetic
cuuccuacaguggaagg

SEQ ID NO: 756974 - RNA, 17 nt, Artificial Sequence
  Synthetic
cucuaggaguuggaagg

SEQ ID NO: 756975 - RNA, 17 nt, Artificial Sequence
  Synthetic
ccuaucaauuuggaagg

SEQ ID NO: 756976 - RNA, 17 nt, Artificial Sequence
  Synthetic
aaguuguauuuggaagg

SEQ ID NO: 756977 - RNA, 17 nt, Artificial Sequence
  Synthetic
uggagaagacaugaagg

SEQ ID NO: 756978 - RNA, 17 nt, Artificial Sequence
  Synthetic
uuacauaaccaugaagg

SEQ ID NO: 756979 - RNA, 17 nt, Artificial Sequence
  Synthetic
cacucaacgcaugaagg

SEQ ID NO: 756980 - RNA, 17 nt, Artificial Sequence
  Synthetic
uuccuuucuuaugaagg

SEQ ID NO: 756981 - RNA, 17 nt, Artificial Sequence
  Synthetic
ccaguaaagacugaagg

SEQ ID NO: 756982 - RNA, 17 nt, Artificial Sequence
  Synthetic
cccugaaggacugaagg

SEQ ID NO: 756983 - RNA, 17 nt, Artificial Sequence
  Synthetic
acucaguaggcugaagg

SEQ ID NO: 756984 - RNA, 17 nt, Artificial Sequence
  Synthetic
uaaagaaaugcugaagg

SEQ ID NO: 756985 - RNA, 17 nt, Artificial Sequence
  Synthetic
agaaagaaaucugaagg

SEQ ID NO: 756986 - RNA, 17 nt, Artificial Sequence
  Synthetic
uuauaaggaagugaagg

SEQ ID NO: 756987 - RNA, 17 nt, Artificial Sequence
  Synthetic
ccacaaucuggugaagg

SEQ ID NO: 756988 - RNA, 17 nt, Artificial Sequence
  Synthetic
cuaaaagguggugaagg

SEQ ID NO: 756989 - RNA, 17 nt, Artificial Sequence
  Synthetic
aauucagaaugugaagg

SEQ ID NO: 756990 - RNA, 17 nt, Artificial Sequence
  Synthetic
ggggaggggugugaagg

SEQ ID NO: 756991 - RNA, 17 nt, Artificial Sequence
  Synthetic
aaguaagcacuugaagg

SEQ ID NO: 756992 - RNA, 17 nt, Artificial Sequence
  Synthetic
uuaaucuaccuugaagg

SEQ ID NO: 756993 - RNA, 17 nt, Artificial Sequence
  Synthetic
acuagcacuguugaagg

SEQ ID NO: 756994 - RNA, 17 nt, Artificial Sequence
  Synthetic
auugacuuuuuugaagg

SEQ ID NO: 756995 - RNA, 17 nt, Artificial Sequence
  Synthetic
acagaaaccaaauaagg

SEQ ID NO: 756996 - RNA, 17 nt, Artificial Sequence
  Synthetic
ucuaaguggaaauaagg

SEQ ID NO: 756997 - RNA, 17 nt, Artificial Sequence
  Synthetic
agcuuaaaggaauaagg

SEQ ID NO: 756998 - RNA, 17 nt, Artificial Sequence
  Synthetic
aaauguaaauaauaagg

SEQ ID NO: 756999 - RNA, 17 nt, Artificial Sequence
  Synthetic
caggcuauuacauaagg

SEQ ID NO: 757000 - RNA, 17 nt, Artificial Sequence
  Synthetic
cacuugaacccauaagg

SEQ ID NO: 757001 - RNA, 17 nt, Artificial Sequence
  Synthetic
aagucaggagcauaagg

SEQ ID NO: 757002 - RNA, 17 nt, Artificial Sequence
  Synthetic
acauuccacucauaagg

SEQ ID NO: 757003 - RNA, 17 nt, Artificial Sequence
  Synthetic
uguacuucaggauaagg

SEQ ID NO: 757004 - RNA, 17 nt, Artificial Sequence
  Synthetic
ucuauaaugauauaagg

SEQ ID NO: 757005 - RNA, 17 nt, Artificial Sequence
  Synthetic
uauauacuucuauaagg

SEQ ID NO: 757006 - RNA, 17 nt, Artificial Sequence
  Synthetic
aauguuuuucuauaagg

SEQ ID NO: 757007 - RNA, 17 nt, Artificial Sequence
  Synthetic
caaagcacauuauaagg

SEQ ID NO: 757008 - RNA, 17 nt, Artificial Sequence
  Synthetic
ucccacugucacuaagg

SEQ ID NO: 757009 - RNA, 17 nt, Artificial Sequence
  Synthetic
ccuuucaaugacuaagg

SEQ ID NO: 757010 - RNA, 17 nt, Artificial Sequence
  Synthetic
acuuuggaaggcuaagg

SEQ ID NO: 757011 - RNA, 17 nt, Artificial Sequence
  Synthetic
uuguagaauugcuaagg

SEQ ID NO: 757012 - RNA, 17 nt, Artificial Sequence
  Synthetic
uccuuaaaaaucuaagg

SEQ ID NO: 757013 - RNA, 17 nt, Artificial Sequence
  Synthetic
agccauauacucuaagg

SEQ ID NO: 757014 - RNA, 17 nt, Artificial Sequence
  Synthetic
aaaaauuaucaguaagg

SEQ ID NO: 757015 - RNA, 17 nt, Artificial Sequence
  Synthetic
aguauugggacguaagg

SEQ ID NO: 757016 - RNA, 17 nt, Artificial Sequence
  Synthetic
aaagcuaaagcguaagg

SEQ ID NO: 757017 - RNA, 17 nt, Artificial Sequence
  Synthetic
aauaaagcuagguaagg

SEQ ID NO: 757018 - RNA, 17 nt, Artificial Sequence
  Synthetic
auucaguggguguaagg

SEQ ID NO: 757019 - RNA, 17 nt, Artificial Sequence
  Synthetic
uuguauaugguguaagg

SEQ ID NO: 757020 - RNA, 17 nt, Artificial Sequence
  Synthetic
caauguauaaauuaagg

SEQ ID NO: 757021 - RNA, 17 nt, Artificial Sequence
  Synthetic
cuuucgggccauuaagg

SEQ ID NO: 757022 - RNA, 17 nt, Artificial Sequence
  Synthetic
aucauacuucauuaagg

SEQ ID NO: 757023 - RNA, 17 nt, Artificial Sequence
  Synthetic
uuuuucaauuauuaagg

SEQ ID NO: 757024 - RNA, 17 nt, Artificial Sequence
  Synthetic
agaacagauucuuaagg

SEQ ID NO: 757025 - RNA, 17 nt, Artificial Sequence
  Synthetic
aaacccccacuuuaagg

SEQ ID NO: 757026 - RNA, 17 nt, Artificial Sequence
  Synthetic
agaugaucacuuuaagg

SEQ ID NO: 757027 - RNA, 17 nt, Artificial Sequence
  Synthetic
aaauucagacuuuaagg

SEQ ID NO: 757028 - RNA, 17 nt, Artificial Sequence
  Synthetic
ugcacaguauuuuaagg

SEQ ID NO: 757029 - RNA, 17 nt, Artificial Sequence
  Synthetic
ucaacccacuuuuaagg

SEQ ID NO: 757030 - RNA, 17 nt, Artificial Sequence
  Synthetic
ucagcauacuuuuaagg

SEQ ID NO: 757031 - RNA, 17 nt, Artificial Sequence
  Synthetic
uccuuagauuuuuaagg

SEQ ID NO: 757032 - RNA, 17 nt, Artificial Sequence
  Synthetic
uuauuuacaaaaacagg

SEQ ID NO: 757033 - RNA, 17 nt, Artificial Sequence
  Synthetic
ccuucuuuccaaacagg

SEQ ID NO: 757034 - RNA, 17 nt, Artificial Sequence
  Synthetic
uauuggccuuaaacagg

SEQ ID NO: 757035 - RNA, 17 nt, Artificial Sequence
  Synthetic
uuugauagcacaacagg

SEQ ID NO: 757036 - RNA, 17 nt, Artificial Sequence
  Synthetic
uuugauagugcaacagg

SEQ ID NO: 757037 - RNA, 17 nt, Artificial Sequence
  Synthetic
ccggguagcugaacagg

SEQ ID NO: 757038 - RNA, 17 nt, Artificial Sequence
  Synthetic
uguaaauucauaacagg

SEQ ID NO: 757039 - RNA, 17 nt, Artificial Sequence
  Synthetic
ugggacccucuaacagg

SEQ ID NO: 757040 - RNA, 17 nt, Artificial Sequence
  Synthetic
ucacugccaguaacagg

SEQ ID NO: 757041 - RNA, 17 nt, Artificial Sequence
  Synthetic
aagguaauaaacacagg

SEQ ID NO: 757042 - RNA, 17 nt, Artificial Sequence
  Synthetic
caaaagggcaacacagg

SEQ ID NO: 757043 - RNA, 17 nt, Artificial Sequence
  Synthetic
aagugcaagaacacagg

SEQ ID NO: 757044 - RNA, 17 nt, Artificial Sequence
  Synthetic
agaaucuaacacacagg

SEQ ID NO: 757045 - RNA, 17 nt, Artificial Sequence
  Synthetic
aaacacagggacacagg

SEQ ID NO: 757046 - RNA, 17 nt, Artificial Sequence
  Synthetic
ugggaggcugacacagg

SEQ ID NO: 757047 - RNA, 17 nt, Artificial Sequence
  Synthetic
uggggaaccuacacagg

SEQ ID NO: 757048 - RNA, 17 nt, Artificial Sequence
  Synthetic
cauuaugaguacacagg

SEQ ID NO: 757049 - RNA, 17 nt, Artificial Sequence
  Synthetic
acagacacguacacagg

SEQ ID NO: 757050 - RNA, 17 nt, Artificial Sequence
  Synthetic
auucugccuaccacagg

SEQ ID NO: 757051 - RNA, 17 nt, Artificial Sequence
  Synthetic
uguucaauagccacagg

SEQ ID NO: 757052 - RNA, 17 nt, Artificial Sequence
  Synthetic
aagaauauagccacagg

SEQ ID NO: 757053 - RNA, 17 nt, Artificial Sequence
  Synthetic
aacauuaucuccacagg

SEQ ID NO: 757054 - RNA, 17 nt, Artificial Sequence
  Synthetic
aaucuagaaagcacagg

SEQ ID NO: 757055 - RNA, 17 nt, Artificial Sequence
  Synthetic
auugcggaaggcacagg

SEQ ID NO: 757056 - RNA, 17 nt, Artificial Sequence
  Synthetic
acucacuugaucacagg

SEQ ID NO: 757057 - RNA, 17 nt, Artificial Sequence
  Synthetic
auacucucacucacagg

SEQ ID NO: 757058 - RNA, 17 nt, Artificial Sequence
  Synthetic
auauucucacucacagg

SEQ ID NO: 757059 - RNA, 17 nt, Artificial Sequence
  Synthetic
auguucucacucacagg

SEQ ID NO: 757060 - RNA, 17 nt, Artificial Sequence
  Synthetic
auguucuuacucacagg

SEQ ID NO: 757061 - RNA, 17 nt, Artificial Sequence
  Synthetic
cauuuuuugcucacagg

SEQ ID NO: 757062 - RNA, 17 nt, Artificial Sequence
  Synthetic
auuugucuuuucacagg

SEQ ID NO: 757063 - RNA, 17 nt, Artificial Sequence
  Synthetic
cuaaaagaaaagacagg

SEQ ID NO: 757064 - RNA, 17 nt, Artificial Sequence
  Synthetic
aacagaauaaagacagg

SEQ ID NO: 757065 - RNA, 17 nt, Artificial Sequence
  Synthetic
ugauaaaacaagacagg

SEQ ID NO: 757066 - RNA, 17 nt, Artificial Sequence
  Synthetic
aggaaauugaagacagg

SEQ ID NO: 757067 - RNA, 17 nt, Artificial Sequence
  Synthetic
aagaauggagagacagg

SEQ ID NO: 757068 - RNA, 17 nt, Artificial Sequence
  Synthetic
uaacugcuggagacagg

SEQ ID NO: 757069 - RNA, 17 nt, Artificial Sequence
  Synthetic
uuugacuaugagacagg

SEQ ID NO: 757070 - RNA, 17 nt, Artificial Sequence
  Synthetic
cgggaggcugagacagg

SEQ ID NO: 757071 - RNA, 17 nt, Artificial Sequence
  Synthetic
aauuucaauuagacagg

SEQ ID NO: 757072 - RNA, 17 nt, Artificial Sequence
  Synthetic
aguuccaguuagacagg

SEQ ID NO: 757073 - RNA, 17 nt, Artificial Sequence
  Synthetic
aaggagacagcgacagg

SEQ ID NO: 757074 - RNA, 17 nt, Artificial Sequence
  Synthetic
uuaaaguuugggacagg

SEQ ID NO: 757075 - RNA, 17 nt, Artificial Sequence
  Synthetic
ccauuacaauggacagg

SEQ ID NO: 757076 - RNA, 17 nt, Artificial Sequence
  Synthetic
agauaaagcaugacagg

SEQ ID NO: 757077 - RNA, 17 nt, Artificial Sequence
  Synthetic
uuuuuaggcuugacagg

SEQ ID NO: 757078 - RNA, 17 nt, Artificial Sequence
  Synthetic
aauuucaguuugacagg

SEQ ID NO: 757079 - RNA, 17 nt, Artificial Sequence
  Synthetic
cugaugggaaauacagg

SEQ ID NO: 757080 - RNA, 17 nt, Artificial Sequence
  Synthetic
cagguaugaaauacagg

SEQ ID NO: 757081 - RNA, 17 nt, Artificial Sequence
  Synthetic
caaucuaugacuacagg

SEQ ID NO: 757082 - RNA, 17 nt, Artificial Sequence
  Synthetic
uguacuuuaaguacagg

SEQ ID NO: 757083 - RNA, 17 nt, Artificial Sequence
  Synthetic
aauuauugggguacagg

SEQ ID NO: 757084 - RNA, 17 nt, Artificial Sequence
  Synthetic
caauggaguauuacagg

SEQ ID NO: 757085 - RNA, 17 nt, Artificial Sequence
  Synthetic
cucuuacuuauuacagg

SEQ ID NO: 757086 - RNA, 17 nt, Artificial Sequence
  Synthetic
uuccuaauguuuacagg

SEQ ID NO: 757087 - RNA, 17 nt, Artificial Sequence
  Synthetic
ucaaguaauuuuacagg

SEQ ID NO: 757088 - RNA, 17 nt, Artificial Sequence
  Synthetic
ccuuuuaauuuuacagg

SEQ ID NO: 757089 - RNA, 17 nt, Artificial Sequence
  Synthetic
uauucuauuuuuacagg

SEQ ID NO: 757090 - RNA, 17 nt, Artificial Sequence
  Synthetic
auaguuaguaaaccagg

SEQ ID NO: 757091 - RNA, 17 nt, Artificial Sequence
  Synthetic
aaagcaaagcaaccagg

SEQ ID NO: 757092 - RNA, 17 nt, Artificial Sequence
  Synthetic
aggaacuaggaaccagg

SEQ ID NO: 757093 - RNA, 17 nt, Artificial Sequence
  Synthetic
cccaaaaacagaccagg

SEQ ID NO: 757094 - RNA, 17 nt, Artificial Sequence
  Synthetic
aaacaacccagaccagg

SEQ ID NO: 757095 - RNA, 17 nt, Artificial Sequence
  Synthetic
aagggagagagaccagg

SEQ ID NO: 757096 - RNA, 17 nt, Artificial Sequence
  Synthetic
ucaagggagagaccagg

SEQ ID NO: 757097 - RNA, 17 nt, Artificial Sequence
  Synthetic
aggaguuugagaccagg

SEQ ID NO: 757098 - RNA, 17 nt, Artificial Sequence
  Synthetic
augcagccaggaccagg

SEQ ID NO: 757099 - RNA, 17 nt, Artificial Sequence
  Synthetic
aaccgcuucaacccagg

SEQ ID NO: 757100 - RNA, 17 nt, Artificial Sequence
  Synthetic
aaucacuggaacccagg

SEQ ID NO: 757101 - RNA, 17 nt, Artificial Sequence
  Synthetic
aauggcgugaacccagg

SEQ ID NO: 757102 - RNA, 17 nt, Artificial Sequence
  Synthetic
aaucacuugaacccagg

SEQ ID NO: 757103 - RNA, 17 nt, Artificial Sequence
  Synthetic
aaucccuugaacccagg

SEQ ID NO: 757104 - RNA, 17 nt, Artificial Sequence
  Synthetic
aaucgcuugaacccagg

SEQ ID NO: 757105 - RNA, 17 nt, Artificial Sequence
  Synthetic
aauugcuugaacccagg

SEQ ID NO: 757106 - RNA, 17 nt, Artificial Sequence
  Synthetic
aaucucuugaacccagg

SEQ ID NO: 757107 - RNA, 17 nt, Artificial Sequence
  Synthetic
aaucauuugaacccagg

SEQ ID NO: 757108 - RNA, 17 nt, Artificial Sequence
  Synthetic
aaucguuugaacccagg

SEQ ID NO: 757109 - RNA, 17 nt, Artificial Sequence
  Synthetic
ucacucugucacccagg

SEQ ID NO: 757110 - RNA, 17 nt, Artificial Sequence
  Synthetic
ugugggagggacccagg

SEQ ID NO: 757111 - RNA, 17 nt, Artificial Sequence
  Synthetic
agucccagcuacccagg

SEQ ID NO: 757112 - RNA, 17 nt, Artificial Sequence
  Synthetic
uccuagccuuccccagg

SEQ ID NO: 757113 - RNA, 17 nt, Artificial Sequence
  Synthetic
aacugcuugagcccagg

SEQ ID NO: 757114 - RNA, 17 nt, Artificial Sequence
  Synthetic
acuuugggaggcccagg

SEQ ID NO: 757115 - RNA, 17 nt, Artificial Sequence
  Synthetic
ugcuagaucugcccagg

SEQ ID NO: 757116 - RNA, 17 nt, Artificial Sequence
  Synthetic
uccuugauugucccagg

SEQ ID NO: 757117 - RNA, 17 nt, Artificial Sequence
  Synthetic
ugggcugcauucccagg

SEQ ID NO: 757118 - RNA, 17 nt, Artificial Sequence
  Synthetic
ccagagcagaagccagg

SEQ ID NO: 757119 - RNA, 17 nt, Artificial Sequence
  Synthetic
ugaaacauucagccagg

SEQ ID NO: 757120 - RNA, 17 nt, Artificial Sequence
  Synthetic
uacuucacagagccagg

SEQ ID NO: 757121 - RNA, 17 nt, Artificial Sequence
  Synthetic
accuuuguugugccagg

SEQ ID NO: 757122 - RNA, 17 nt, Artificial Sequence
  Synthetic
cagugauccuugccagg

SEQ ID NO: 757123 - RNA, 17 nt, Artificial Sequence
  Synthetic
auaagguaagauccagg

SEQ ID NO: 757124 - RNA, 17 nt, Artificial Sequence
  Synthetic
auugccacagauccagg

SEQ ID NO: 757125 - RNA, 17 nt, Artificial Sequence
  Synthetic
ccuguagcauauccagg

SEQ ID NO: 757126 - RNA, 17 nt, Artificial Sequence
  Synthetic
agauaaaaaucuccagg

SEQ ID NO: 757127 - RNA, 17 nt, Artificial Sequence
  Synthetic
cugaaaaauauuccagg

SEQ ID NO: 757128 - RNA, 17 nt, Artificial Sequence
  Synthetic
uuuuuccaccuuccagg

SEQ ID NO: 757129 - RNA, 17 nt, Artificial Sequence
  Synthetic
aguggcacuguuccagg

SEQ ID NO: 757130 - RNA, 17 nt, Artificial Sequence
  Synthetic
uuaaguaacuuuccagg

SEQ ID NO: 757131 - RNA, 17 nt, Artificial Sequence
  Synthetic
uuuaacaauuuuccagg

SEQ ID NO: 757132 - RNA, 17 nt, Artificial Sequence
  Synthetic
aguuaugauuuuccagg

SEQ ID NO: 757133 - RNA, 17 nt, Artificial Sequence
  Synthetic
ugggaggccaaagcagg

SEQ ID NO: 757134 - RNA, 17 nt, Artificial Sequence
  Synthetic
ugggaggcuaaagcagg

SEQ ID NO: 757135 - RNA, 17 nt, Artificial Sequence
  Synthetic
uaguaaacagaagcagg

SEQ ID NO: 757136 - RNA, 17 nt, Artificial Sequence
  Synthetic
ugggaggcugaagcagg

SEQ ID NO: 757137 - RNA, 17 nt, Artificial Sequence
  Synthetic
uuguguuuauaagcagg

SEQ ID NO: 757138 - RNA, 17 nt, Artificial Sequence
  Synthetic
uguaggagcuaagcagg

SEQ ID NO: 757139 - RNA, 17 nt, Artificial Sequence
  Synthetic
aacaacgagacagcagg

SEQ ID NO: 757140 - RNA, 17 nt, Artificial Sequence
  Synthetic
cuccugaacccagcagg

SEQ ID NO: 757141 - RNA, 17 nt, Artificial Sequence
  Synthetic
agaaggcacccagcagg

SEQ ID NO: 757142 - RNA, 17 nt, Artificial Sequence
  Synthetic
auggacugaagagcagg

SEQ ID NO: 757143 - RNA, 17 nt, Artificial Sequence
  Synthetic
uaguuguuaagagcagg

SEQ ID NO: 757144 - RNA, 17 nt, Artificial Sequence
  Synthetic
uuuuggagaggagcagg

SEQ ID NO: 757145 - RNA, 17 nt, Artificial Sequence
  Synthetic
uccucaacuggagcagg

SEQ ID NO: 757146 - RNA, 17 nt, Artificial Sequence
  Synthetic
aggcugcacauagcagg

SEQ ID NO: 757147 - RNA, 17 nt, Artificial Sequence
  Synthetic
aaggagaugauagcagg

SEQ ID NO: 757148 - RNA, 17 nt, Artificial Sequence
  Synthetic
cagacugugguagcagg

SEQ ID NO: 757149 - RNA, 17 nt, Artificial Sequence
  Synthetic
ccaucaggggacgcagg

SEQ ID NO: 757150 - RNA, 17 nt, Artificial Sequence
  Synthetic
ugggaggccaaggcagg

SEQ ID NO: 757151 - RNA, 17 nt, Artificial Sequence
  Synthetic
ccucaucaacaggcagg

SEQ ID NO: 757152 - RNA, 17 nt, Artificial Sequence
  Synthetic
ugcgaggccgaggcagg

SEQ ID NO: 757153 - RNA, 17 nt, Artificial Sequence
  Synthetic
ugggaggccgaggcagg

SEQ ID NO: 757154 - RNA, 17 nt, Artificial Sequence
  Synthetic
ugggaagcugaggcagg

SEQ ID NO: 757155 - RNA, 17 nt, Artificial Sequence
  Synthetic
caggacgcugaggcagg

SEQ ID NO: 757156 - RNA, 17 nt, Artificial Sequence
  Synthetic
ugagaggcugaggcagg

SEQ ID NO: 757157 - RNA, 17 nt, Artificial Sequence
  Synthetic
caggaggcugaggcagg

SEQ ID NO: 757158 - RNA, 17 nt, Artificial Sequence
  Synthetic
agggaggcugaggcagg

SEQ ID NO: 757159 - RNA, 17 nt, Artificial Sequence
  Synthetic
ugggaggcugaggcagg

SEQ ID NO: 757160 - RNA, 17 nt, Artificial Sequence
  Synthetic
cuggaggcugaggcagg

SEQ ID NO: 757161 - RNA, 17 nt, Artificial Sequence
  Synthetic
ugggaugcugaggcagg

SEQ ID NO: 757162 - RNA, 17 nt, Artificial Sequence
  Synthetic
agagagauguaggcagg

SEQ ID NO: 757163 - RNA, 17 nt, Artificial Sequence
  Synthetic
cgaaaggcuggggcagg

SEQ ID NO: 757164 - RNA, 17 nt, Artificial Sequence
  Synthetic
aaagaguaaugggcagg

SEQ ID NO: 757165 - RNA, 17 nt, Artificial Sequence
  Synthetic
cagauggggugggcagg

SEQ ID NO: 757166 - RNA, 17 nt, Artificial Sequence
  Synthetic
uggagugcaguggcagg

SEQ ID NO: 757167 - RNA, 17 nt, Artificial Sequence
  Synthetic
cuucacaggguggcagg

SEQ ID NO: 757168 - RNA, 17 nt, Artificial Sequence
  Synthetic
aagcuguugguggcagg

SEQ ID NO: 757169 - RNA, 17 nt, Artificial Sequence
  Synthetic
cagcagcauguggcagg

SEQ ID NO: 757170 - RNA, 17 nt, Artificial Sequence
  Synthetic
uuauaagccuuggcagg

SEQ ID NO: 757171 - RNA, 17 nt, Artificial Sequence
  Synthetic
ucaggcaauuuggcagg

SEQ ID NO: 757172 - RNA, 17 nt, Artificial Sequence
  Synthetic
aaguuaagcaaugcagg

SEQ ID NO: 757173 - RNA, 17 nt, Artificial Sequence
  Synthetic
cugcuagauacugcagg

SEQ ID NO: 757174 - RNA, 17 nt, Artificial Sequence
  Synthetic
augucuccaccugcagg

SEQ ID NO: 757175 - RNA, 17 nt, Artificial Sequence
  Synthetic
uuaaaacaagcugcagg

SEQ ID NO: 757176 - RNA, 17 nt, Artificial Sequence
  Synthetic
aucagaauuucugcagg

SEQ ID NO: 757177 - RNA, 17 nt, Artificial Sequence
  Synthetic
cuugcccaccuugcagg

SEQ ID NO: 757178 - RNA, 17 nt, Artificial Sequence
  Synthetic
uuguggcucuuugcagg

SEQ ID NO: 757179 - RNA, 17 nt, Artificial Sequence
  Synthetic
aaaggagaaaaaucagg

SEQ ID NO: 757180 - RNA, 17 nt, Artificial Sequence
  Synthetic
agugaaguucaaucagg

SEQ ID NO: 757181 - RNA, 17 nt, Artificial Sequence
  Synthetic
uaagucugaacaucagg

SEQ ID NO: 757182 - RNA, 17 nt, Artificial Sequence
  Synthetic
uugagaaccacaucagg

SEQ ID NO: 757183 - RNA, 17 nt, Artificial Sequence
  Synthetic
cggggccccacaucagg

SEQ ID NO: 757184 - RNA, 17 nt, Artificial Sequence
  Synthetic
uauuacgucacaucagg

SEQ ID NO: 757185 - RNA, 17 nt, Artificial Sequence
  Synthetic
cuagagagaccaucagg

SEQ ID NO: 757186 - RNA, 17 nt, Artificial Sequence
  Synthetic
caucaucguccaucagg

SEQ ID NO: 757187 - RNA, 17 nt, Artificial Sequence
  Synthetic
auucuuccaucaucagg

SEQ ID NO: 757188 - RNA, 17 nt, Artificial Sequence
  Synthetic
cucauucaaagaucagg

SEQ ID NO: 757189 - RNA, 17 nt, Artificial Sequence
  Synthetic
aggcagcuaggaucagg

SEQ ID NO: 757190 - RNA, 17 nt, Artificial Sequence
  Synthetic
uccugggagggaucagg

SEQ ID NO: 757191 - RNA, 17 nt, Artificial Sequence
  Synthetic
ccaaaugguggaucagg

SEQ ID NO: 757192 - RNA, 17 nt, Artificial Sequence
  Synthetic
aaguacuagauaucagg

SEQ ID NO: 757193 - RNA, 17 nt, Artificial Sequence
  Synthetic
agucccagauacucagg

SEQ ID NO: 757194 - RNA, 17 nt, Artificial Sequence
  Synthetic
aaucccaacuacucagg

SEQ ID NO: 757195 - RNA, 17 nt, Artificial Sequence
  Synthetic
uagucccacuacucagg

SEQ ID NO: 757196 - RNA, 17 nt, Artificial Sequence
  Synthetic
aguaccagcuacucagg

SEQ ID NO: 757197 - RNA, 17 nt, Artificial Sequence
  Synthetic
aaccccagcuacucagg

SEQ ID NO: 757198 - RNA, 17 nt, Artificial Sequence
  Synthetic
agccccagcuacucagg

SEQ ID NO: 757199 - RNA, 17 nt, Artificial Sequence
  Synthetic
aaucccagcuacucagg

SEQ ID NO: 757200 - RNA, 17 nt, Artificial Sequence
  Synthetic
agucccagcuacucagg

SEQ ID NO: 757201 - RNA, 17 nt, Artificial Sequence
  Synthetic
agucucagcuacucagg

SEQ ID NO: 757202 - RNA, 17 nt, Artificial Sequence
  Synthetic
aauccuagcuacucagg

SEQ ID NO: 757203 - RNA, 17 nt, Artificial Sequence
  Synthetic
cugaguagcuacucagg

SEQ ID NO: 757204 - RNA, 17 nt, Artificial Sequence
  Synthetic
agccuuagcuacucagg

SEQ ID NO: 757205 - RNA, 17 nt, Artificial Sequence
  Synthetic
agucccaucuacucagg

SEQ ID NO: 757206 - RNA, 17 nt, Artificial Sequence
  Synthetic
caccuuaucuacucagg

SEQ ID NO: 757207 - RNA, 17 nt, Artificial Sequence
  Synthetic
agaucuccgaccucagg

SEQ ID NO: 757208 - RNA, 17 nt, Artificial Sequence
  Synthetic
ugggcucucuccucagg

SEQ ID NO: 757209 - RNA, 17 nt, Artificial Sequence
  Synthetic
agccuacucaucucagg

SEQ ID NO: 757210 - RNA, 17 nt, Artificial Sequence
  Synthetic
augcaucaagucucagg

SEQ ID NO: 757211 - RNA, 17 nt, Artificial Sequence
  Synthetic
agugauggucagucagg

SEQ ID NO: 757212 - RNA, 17 nt, Artificial Sequence
  Synthetic
uaaaaacuuuagucagg

SEQ ID NO: 757213 - RNA, 17 nt, Artificial Sequence
  Synthetic
cuaacauuuuagucagg

SEQ ID NO: 757214 - RNA, 17 nt, Artificial Sequence
  Synthetic
agacacauggggucagg

SEQ ID NO: 757215 - RNA, 17 nt, Artificial Sequence
  Synthetic
uccauuuagaugucagg

SEQ ID NO: 757216 - RNA, 17 nt, Artificial Sequence
  Synthetic
cacuggggccugucagg

SEQ ID NO: 757217 - RNA, 17 nt, Artificial Sequence
  Synthetic
uagacauaagugucagg

SEQ ID NO: 757218 - RNA, 17 nt, Artificial Sequence
  Synthetic
aauagaccagugucagg

SEQ ID NO: 757219 - RNA, 17 nt, Artificial Sequence
  Synthetic
uacaagcaaaauucagg

SEQ ID NO: 757220 - RNA, 17 nt, Artificial Sequence
  Synthetic
cagcaugacaauucagg

SEQ ID NO: 757221 - RNA, 17 nt, Artificial Sequence
  Synthetic
uuugauggacauucagg

SEQ ID NO: 757222 - RNA, 17 nt, Artificial Sequence
  Synthetic
caaagcauucauucagg

SEQ ID NO: 757223 - RNA, 17 nt, Artificial Sequence
  Synthetic
uacaagucauauucagg

SEQ ID NO: 757224 - RNA, 17 nt, Artificial Sequence
  Synthetic
aaucccagcuauucagg

SEQ ID NO: 757225 - RNA, 17 nt, Artificial Sequence
  Synthetic
accuugcucuauucagg

SEQ ID NO: 757226 - RNA, 17 nt, Artificial Sequence
  Synthetic
aagauuuuuuauucagg

SEQ ID NO: 757227 - RNA, 17 nt, Artificial Sequence
  Synthetic
cagcagugaacuucagg

SEQ ID NO: 757228 - RNA, 17 nt, Artificial Sequence
  Synthetic
acaguuucuacuucagg

SEQ ID NO: 757229 - RNA, 17 nt, Artificial Sequence
  Synthetic
ccaugaauuacuucagg

SEQ ID NO: 757230 - RNA, 17 nt, Artificial Sequence
  Synthetic
aaucucagcgcuucagg

SEQ ID NO: 757231 - RNA, 17 nt, Artificial Sequence
  Synthetic
uuauuacuugcuucagg

SEQ ID NO: 757232 - RNA, 17 nt, Artificial Sequence
  Synthetic
ugucuauuuuguucagg

SEQ ID NO: 757233 - RNA, 17 nt, Artificial Sequence
  Synthetic
agaauauggauuucagg

SEQ ID NO: 757234 - RNA, 17 nt, Artificial Sequence
  Synthetic
cuucucuauauuucagg

SEQ ID NO: 757235 - RNA, 17 nt, Artificial Sequence
  Synthetic
aacaggcuuauuucagg

SEQ ID NO: 757236 - RNA, 17 nt, Artificial Sequence
  Synthetic
aaagaaacauuuucagg

SEQ ID NO: 757237 - RNA, 17 nt, Artificial Sequence
  Synthetic
ccucaaacuuuuucagg

SEQ ID NO: 757238 - RNA, 17 nt, Artificial Sequence
  Synthetic
cauucagcuuuuucagg

SEQ ID NO: 757239 - RNA, 17 nt, Artificial Sequence
  Synthetic
agaagggcaaaaagagg

SEQ ID NO: 757240 - RNA, 17 nt, Artificial Sequence
  Synthetic
aacagccuaaaaagagg

SEQ ID NO: 757241 - RNA, 17 nt, Artificial Sequence
  Synthetic
aaacauuuaaaaagagg

SEQ ID NO: 757242 - RNA, 17 nt, Artificial Sequence
  Synthetic
cuuuccaucaaaagagg

SEQ ID NO: 757243 - RNA, 17 nt, Artificial Sequence
  Synthetic
uguggcaagaaaagagg

SEQ ID NO: 757244 - RNA, 17 nt, Artificial Sequence
  Synthetic
acggaaaauaaaagagg

SEQ ID NO: 757245 - RNA, 17 nt, Artificial Sequence
  Synthetic
aggcauuguaaaagagg

SEQ ID NO: 757246 - RNA, 17 nt, Artificial Sequence
  Synthetic
uuuagucaggaaagagg

SEQ ID NO: 757247 - RNA, 17 nt, Artificial Sequence
  Synthetic
agcaucuaggaaagagg

SEQ ID NO: 757248 - RNA, 17 nt, Artificial Sequence
  Synthetic
auaaagagggaaagagg

SEQ ID NO: 757249 - RNA, 17 nt, Artificial Sequence
  Synthetic
agaaggauuccaagagg

SEQ ID NO: 757250 - RNA, 17 nt, Artificial Sequence
  Synthetic
aacacugaugcaagagg

SEQ ID NO: 757251 - RNA, 17 nt, Artificial Sequence
  Synthetic
caugcugaugcaagagg

SEQ ID NO: 757252 - RNA, 17 nt, Artificial Sequence
  Synthetic
ccuuagaggucaagagg

SEQ ID NO: 757253 - RNA, 17 nt, Artificial Sequence
  Synthetic
uauuugaguucaagagg

SEQ ID NO: 757254 - RNA, 17 nt, Artificial Sequence
  Synthetic
caaguuuaaagaagagg

SEQ ID NO: 757255 - RNA, 17 nt, Artificial Sequence
  Synthetic
uagaguagaagaagagg

SEQ ID NO: 757256 - RNA, 17 nt, Artificial Sequence
  Synthetic
cacuugaaacuaagagg

SEQ ID NO: 757257 - RNA, 17 nt, Artificial Sequence
  Synthetic
cuuguccuucuaagagg

SEQ ID NO: 757258 - RNA, 17 nt, Artificial Sequence
  Synthetic
cuauaggagguaagagg

SEQ ID NO: 757259 - RNA, 17 nt, Artificial Sequence
  Synthetic
acucuaacauuaagagg

SEQ ID NO: 757260 - RNA, 17 nt, Artificial Sequence
  Synthetic
accccucuccacagagg

SEQ ID NO: 757261 - RNA, 17 nt, Artificial Sequence
  Synthetic
aaagagugagacagagg

SEQ ID NO: 757262 - RNA, 17 nt, Artificial Sequence
  Synthetic
agcacauaggacagagg

SEQ ID NO: 757263 - RNA, 17 nt, Artificial Sequence
  Synthetic
cccuaaagauacagagg

SEQ ID NO: 757264 - RNA, 17 nt, Artificial Sequence
  Synthetic
uccccaaucuacagagg

SEQ ID NO: 757265 - RNA, 17 nt, Artificial Sequence
  Synthetic
agaagacaaaccagagg

SEQ ID NO: 757266 - RNA, 17 nt, Artificial Sequence
  Synthetic
agggaaaaggccagagg

SEQ ID NO: 757267 - RNA, 17 nt, Artificial Sequence
  Synthetic
ucuagauguagcagagg

SEQ ID NO: 757268 - RNA, 17 nt, Artificial Sequence
  Synthetic
ugaaguccaggcagagg

SEQ ID NO: 757269 - RNA, 17 nt, Artificial Sequence
  Synthetic
aacccaagaggcagagg

SEQ ID NO: 757270 - RNA, 17 nt, Artificial Sequence
  Synthetic
acuuugggaggcagagg

SEQ ID NO: 757271 - RNA, 17 nt, Artificial Sequence
  Synthetic
cuaggggggugcagagg

SEQ ID NO: 757272 - RNA, 17 nt, Artificial Sequence
  Synthetic
agacacgauugcagagg

SEQ ID NO: 757273 - RNA, 17 nt, Artificial Sequence
  Synthetic
augguagaaaagagagg

SEQ ID NO: 757274 - RNA, 17 nt, Artificial Sequence
  Synthetic
agaguggugaagagagg

SEQ ID NO: 757275 - RNA, 17 nt, Artificial Sequence
  Synthetic
auggucucuaagagagg

SEQ ID NO: 757276 - RNA, 17 nt, Artificial Sequence
  Synthetic
aacaaauaacagagagg

SEQ ID NO: 757277 - RNA, 17 nt, Artificial Sequence
  Synthetic
cugcaagugcagagagg

SEQ ID NO: 757278 - RNA, 17 nt, Artificial Sequence
  Synthetic
cuucucacucagagagg

SEQ ID NO: 757279 - RNA, 17 nt, Artificial Sequence
  Synthetic
auuuuucaagagagagg

SEQ ID NO: 757280 - RNA, 17 nt, Artificial Sequence
  Synthetic
ccauuuacagagagagg

SEQ ID NO: 757281 - RNA, 17 nt, Artificial Sequence
  Synthetic
uaugggagggagagagg

SEQ ID NO: 757282 - RNA, 17 nt, Artificial Sequence
  Synthetic
uauguuggggagagagg

SEQ ID NO: 757283 - RNA, 17 nt, Artificial Sequence
  Synthetic
cgcuugaacccgagagg

SEQ ID NO: 757284 - RNA, 17 nt, Artificial Sequence
  Synthetic
aggcuaggaaggagagg

SEQ ID NO: 757285 - RNA, 17 nt, Artificial Sequence
  Synthetic
cucagguuucggagagg

SEQ ID NO: 757286 - RNA, 17 nt, Artificial Sequence
  Synthetic
uggcagaaagugagagg

SEQ ID NO: 757287 - RNA, 17 nt, Artificial Sequence
  Synthetic
augagcugggugagagg

SEQ ID NO: 757288 - RNA, 17 nt, Artificial Sequence
  Synthetic
ucgaauguauugagagg

SEQ ID NO: 757289 - RNA, 17 nt, Artificial Sequence
  Synthetic
agcagcuauuugagagg

SEQ ID NO: 757290 - RNA, 17 nt, Artificial Sequence
  Synthetic
aaaaacaagaauagagg

SEQ ID NO: 757291 - RNA, 17 nt, Artificial Sequence
  Synthetic
ccaaagccacauagagg

SEQ ID NO: 757292 - RNA, 17 nt, Artificial Sequence
  Synthetic
aguaaaccugauagagg

SEQ ID NO: 757293 - RNA, 17 nt, Artificial Sequence
  Synthetic
uguuauuccuauagagg

SEQ ID NO: 757294 - RNA, 17 nt, Artificial Sequence
  Synthetic
ugagagaaaacuagagg

SEQ ID NO: 757295 - RNA, 17 nt, Artificial Sequence
  Synthetic
aguccuuauacuagagg

SEQ ID NO: 757296 - RNA, 17 nt, Artificial Sequence
  Synthetic
uguauuuguaguagagg

SEQ ID NO: 757297 - RNA, 17 nt, Artificial Sequence
  Synthetic
uguauuuuuaguagagg

SEQ ID NO: 757298 - RNA, 17 nt, Artificial Sequence
  Synthetic
auaaguagcgguagagg

SEQ ID NO: 757299 - RNA, 17 nt, Artificial Sequence
  Synthetic
aaucucuaauguagagg

SEQ ID NO: 757300 - RNA, 17 nt, Artificial Sequence
  Synthetic
auuuugccaauuagagg

SEQ ID NO: 757301 - RNA, 17 nt, Artificial Sequence
  Synthetic
auaaagucaauuagagg

SEQ ID NO: 757302 - RNA, 17 nt, Artificial Sequence
  Synthetic
ccuagucauuuuagagg

SEQ ID NO: 757303 - RNA, 17 nt, Artificial Sequence
  Synthetic
uauuauuauuuuagagg

SEQ ID NO: 757304 - RNA, 17 nt, Artificial Sequence
  Synthetic
ugugcaagcaaacgagg

SEQ ID NO: 757305 - RNA, 17 nt, Artificial Sequence
  Synthetic
cgcuugaacccacgagg

SEQ ID NO: 757306 - RNA, 17 nt, Artificial Sequence
  Synthetic
acuuuggaaggccgagg

SEQ ID NO: 757307 - RNA, 17 nt, Artificial Sequence
  Synthetic
aauuugagaggccgagg

SEQ ID NO: 757308 - RNA, 17 nt, Artificial Sequence
  Synthetic
acuuggggaggccgagg

SEQ ID NO: 757309 - RNA, 17 nt, Artificial Sequence
  Synthetic
cuuuggggaggccgagg

SEQ ID NO: 757310 - RNA, 17 nt, Artificial Sequence
  Synthetic
acucugggaggccgagg

SEQ ID NO: 757311 - RNA, 17 nt, Artificial Sequence
  Synthetic
aauuugggaggccgagg

SEQ ID NO: 757312 - RNA, 17 nt, Artificial Sequence
  Synthetic
acuuugggaggccgagg

SEQ ID NO: 757313 - RNA, 17 nt, Artificial Sequence
  Synthetic
ucuuugugaggccgagg

SEQ ID NO: 757314 - RNA, 17 nt, Artificial Sequence
  Synthetic
acuuuggggggccgagg

SEQ ID NO: 757315 - RNA, 17 nt, Artificial Sequence
  Synthetic
uuuuuuuuuuuccgagg

SEQ ID NO: 757316 - RNA, 17 nt, Artificial Sequence
  Synthetic
cgaggccugucgcgagg

SEQ ID NO: 757317 - RNA, 17 nt, Artificial Sequence
  Synthetic
aaaucacugaaaggagg

SEQ ID NO: 757318 - RNA, 17 nt, Artificial Sequence
  Synthetic
ucaacaaguaaaggagg

SEQ ID NO: 757319 - RNA, 17 nt, Artificial Sequence
  Synthetic
auccaauguaaaggagg

SEQ ID NO: 757320 - RNA, 17 nt, Artificial Sequence
  Synthetic
augcuacaccaaggagg

SEQ ID NO: 757321 - RNA, 17 nt, Artificial Sequence
  Synthetic
uccccaggucaaggagg

SEQ ID NO: 757322 - RNA, 17 nt, Artificial Sequence
  Synthetic
cuaaaaacagaaggagg

SEQ ID NO: 757323 - RNA, 17 nt, Artificial Sequence
  Synthetic
aagacuagagaaggagg

SEQ ID NO: 757324 - RNA, 17 nt, Artificial Sequence
  Synthetic
aaagggaaggaaggagg

SEQ ID NO: 757325 - RNA, 17 nt, Artificial Sequence
  Synthetic
caguaggcugaaggagg

SEQ ID NO: 757326 - RNA, 17 nt, Artificial Sequence
  Synthetic
aaagcuagguaaggagg

SEQ ID NO: 757327 - RNA, 17 nt, Artificial Sequence
  Synthetic
uauaugguguaaggagg

SEQ ID NO: 757328 - RNA, 17 nt, Artificial Sequence
  Synthetic
ucacucgaaacaggagg

SEQ ID NO: 757329 - RNA, 17 nt, Artificial Sequence
  Synthetic
agaagacgaacaggagg

SEQ ID NO: 757330 - RNA, 17 nt, Artificial Sequence
  Synthetic
ccugcaaccacaggagg

SEQ ID NO: 757331 - RNA, 17 nt, Artificial Sequence
  Synthetic
cacuugaucacaggagg

SEQ ID NO: 757332 - RNA, 17 nt, Artificial Sequence
  Synthetic
uugcuugaaccaggagg

SEQ ID NO: 757333 - RNA, 17 nt, Artificial Sequence
  Synthetic
cacuggaacccaggagg

SEQ ID NO: 757334 - RNA, 17 nt, Artificial Sequence
  Synthetic
ggcgugaacccaggagg

SEQ ID NO: 757335 - RNA, 17 nt, Artificial Sequence
  Synthetic
cccuugaacccaggagg

SEQ ID NO: 757336 - RNA, 17 nt, Artificial Sequence
  Synthetic
cgcuugaacccaggagg

SEQ ID NO: 757337 - RNA, 17 nt, Artificial Sequence
  Synthetic
ugcuugaacccaggagg

SEQ ID NO: 757338 - RNA, 17 nt, Artificial Sequence
  Synthetic
cucuugaacccaggagg

SEQ ID NO: 757339 - RNA, 17 nt, Artificial Sequence
  Synthetic
cauuugaacccaggagg

SEQ ID NO: 757340 - RNA, 17 nt, Artificial Sequence
  Synthetic
cguuugaacccaggagg

SEQ ID NO: 757341 - RNA, 17 nt, Artificial Sequence
  Synthetic
cacccgagcccaggagg

SEQ ID NO: 757342 - RNA, 17 nt, Artificial Sequence
  Synthetic
ugcuugagcccaggagg

SEQ ID NO: 757343 - RNA, 17 nt, Artificial Sequence
  Synthetic
aggcacccagcaggagg

SEQ ID NO: 757344 - RNA, 17 nt, Artificial Sequence
  Synthetic
acugugguagcaggagg

SEQ ID NO: 757345 - RNA, 17 nt, Artificial Sequence
  Synthetic
cuuccaucaucaggagg

SEQ ID NO: 757346 - RNA, 17 nt, Artificial Sequence
  Synthetic
cucuauauuucaggagg

SEQ ID NO: 757347 - RNA, 17 nt, Artificial Sequence
  Synthetic
aagagggaaagaggagg

SEQ ID NO: 757348 - RNA, 17 nt, Artificial Sequence
  Synthetic
aggcuuuuuagaggagg

SEQ ID NO: 757349 - RNA, 17 nt, Artificial Sequence
  Synthetic
auguaggcaggaggagg

SEQ ID NO: 757350 - RNA, 17 nt, Artificial Sequence
  Synthetic
cuuuuuagaggaggagg

SEQ ID NO: 757351 - RNA, 17 nt, Artificial Sequence
  Synthetic
uggggauuuggaggagg

SEQ ID NO: 757352 - RNA, 17 nt, Artificial Sequence
  Synthetic
uaaguaggcugaggagg

SEQ ID NO: 757353 - RNA, 17 nt, Artificial Sequence
  Synthetic
aaucuucucugaggagg

SEQ ID NO: 757354 - RNA, 17 nt, Artificial Sequence
  Synthetic
uugauuaggugaggagg

SEQ ID NO: 757355 - RNA, 17 nt, Artificial Sequence
  Synthetic
acagaaguuauaggagg

SEQ ID NO: 757356 - RNA, 17 nt, Artificial Sequence
  Synthetic
cuuggaaggguaggagg

SEQ ID NO: 757357 - RNA, 17 nt, Artificial Sequence
  Synthetic
uauaaauuauuaggagg

SEQ ID NO: 757358 - RNA, 17 nt, Artificial Sequence
  Synthetic
uguuugagucacggagg

SEQ ID NO: 757359 - RNA, 17 nt, Artificial Sequence
  Synthetic
aggucaagaggcggagg

SEQ ID NO: 757360 - RNA, 17 nt, Artificial Sequence
  Synthetic
uauggggcaaagggagg

SEQ ID NO: 757361 - RNA, 17 nt, Artificial Sequence
  Synthetic
uugaauggaaagggagg

SEQ ID NO: 757362 - RNA, 17 nt, Artificial Sequence
  Synthetic
aucaauaauaagggagg

SEQ ID NO: 757363 - RNA, 17 nt, Artificial Sequence
  Synthetic
uggaggacacagggagg

SEQ ID NO: 757364 - RNA, 17 nt, Artificial Sequence
  Synthetic
ucuuaaucacagggagg

SEQ ID NO: 757365 - RNA, 17 nt, Artificial Sequence
  Synthetic
uaaagaagcgagggagg

SEQ ID NO: 757366 - RNA, 17 nt, Artificial Sequence
  Synthetic
ugggggugugagggagg

SEQ ID NO: 757367 - RNA, 17 nt, Artificial Sequence
  Synthetic
uaaguaaacccgggagg

SEQ ID NO: 757368 - RNA, 17 nt, Artificial Sequence
  Synthetic
ugcucgaacccgggagg

SEQ ID NO: 757369 - RNA, 17 nt, Artificial Sequence
  Synthetic
cacuugaacccgggagg

SEQ ID NO: 757370 - RNA, 17 nt, Artificial Sequence
  Synthetic
agcuugaacccgggagg

SEQ ID NO: 757371 - RNA, 17 nt, Artificial Sequence
  Synthetic
cgcuugaacccgggagg

SEQ ID NO: 757372 - RNA, 17 nt, Artificial Sequence
  Synthetic
ugcuugaacccgggagg

SEQ ID NO: 757373 - RNA, 17 nt, Artificial Sequence
  Synthetic
cacuugaagccgggagg

SEQ ID NO: 757374 - RNA, 17 nt, Artificial Sequence
  Synthetic
cacuugaacucgggagg

SEQ ID NO: 757375 - RNA, 17 nt, Artificial Sequence
  Synthetic
cccagcuacucgggagg

SEQ ID NO: 757376 - RNA, 17 nt, Artificial Sequence
  Synthetic
ucaugauugaggggagg

SEQ ID NO: 757377 - RNA, 17 nt, Artificial Sequence
  Synthetic
auuuuauuuaggggagg

SEQ ID NO: 757378 - RNA, 17 nt, Artificial Sequence
  Synthetic
uggaggagucggggagg

SEQ ID NO: 757379 - RNA, 17 nt, Artificial Sequence
  Synthetic
uucauuggucggggagg

SEQ ID NO: 757380 - RNA, 17 nt, Artificial Sequence
  Synthetic
uguggggucgggggagg

SEQ ID NO: 757381 - RNA, 17 nt, Artificial Sequence
  Synthetic
acagaccuggggggagg

SEQ ID NO: 757382 - RNA, 17 nt, Artificial Sequence
  Synthetic
cgugggguggggggagg

SEQ ID NO: 757383 - RNA, 17 nt, Artificial Sequence
  Synthetic
ugugggguggggggagg

SEQ ID NO: 757384 - RNA, 17 nt, Artificial Sequence
  Synthetic
agagaaagugggggagg

SEQ ID NO: 757385 - RNA, 17 nt, Artificial Sequence
  Synthetic
aacuuuuagaugggagg

SEQ ID NO: 757386 - RNA, 17 nt, Artificial Sequence
  Synthetic
ccaaaacuuaugggagg

SEQ ID NO: 757387 - RNA, 17 nt, Artificial Sequence
  Synthetic
cacuugaaccugggagg

SEQ ID NO: 757388 - RNA, 17 nt, Artificial Sequence
  Synthetic
cgcuugaaccugggagg

SEQ ID NO: 757389 - RNA, 17 nt, Artificial Sequence
  Synthetic
ugcuugaaccugggagg

SEQ ID NO: 757390 - RNA, 17 nt, Artificial Sequence
  Synthetic
uguuugaaccugggagg

SEQ ID NO: 757391 - RNA, 17 nt, Artificial Sequence
  Synthetic
ugauagcagcugggagg

SEQ ID NO: 757392 - RNA, 17 nt, Artificial Sequence
  Synthetic
agcuugaaucugggagg

SEQ ID NO: 757393 - RNA, 17 nt, Artificial Sequence
  Synthetic
acauaaaaugugggagg

SEQ ID NO: 757394 - RNA, 17 nt, Artificial Sequence
  Synthetic
agauagugugugggagg

SEQ ID NO: 757395 - RNA, 17 nt, Artificial Sequence
  Synthetic
ccuuaccuugugggagg

SEQ ID NO: 757396 - RNA, 17 nt, Artificial Sequence
  Synthetic
auauguuuugugggagg

SEQ ID NO: 757397 - RNA, 17 nt, Artificial Sequence
  Synthetic
cacuugaacuugggagg

SEQ ID NO: 757398 - RNA, 17 nt, Artificial Sequence
  Synthetic
cgcuugaacuugggagg

SEQ ID NO: 757399 - RNA, 17 nt, Artificial Sequence
  Synthetic
aacagaggcuugggagg

SEQ ID NO: 757400 - RNA, 17 nt, Artificial Sequence
  Synthetic
cccaguuauuugggagg

SEQ ID NO: 757401 - RNA, 17 nt, Artificial Sequence
  Synthetic
agaagauuuuugggagg

SEQ ID NO: 757402 - RNA, 17 nt, Artificial Sequence
  Synthetic
uaagaucagaauggagg

SEQ ID NO: 757403 - RNA, 17 nt, Artificial Sequence
  Synthetic
aauauaaugaauggagg

SEQ ID NO: 757404 - RNA, 17 nt, Artificial Sequence
  Synthetic
uauaaacuuaauggagg

SEQ ID NO: 757405 - RNA, 17 nt, Artificial Sequence
  Synthetic
agaguuggggauggagg

SEQ ID NO: 757406 - RNA, 17 nt, Artificial Sequence
  Synthetic
ucccuugaaccuggagg

SEQ ID NO: 757407 - RNA, 17 nt, Artificial Sequence
  Synthetic
cgaucugcuccuggagg

SEQ ID NO: 757408 - RNA, 17 nt, Artificial Sequence
  Synthetic
uugcuaagggcuggagg

SEQ ID NO: 757409 - RNA, 17 nt, Artificial Sequence
  Synthetic
aagauuaaugcuggagg

SEQ ID NO: 757410 - RNA, 17 nt, Artificial Sequence
  Synthetic
uuuggcuccucuggagg

SEQ ID NO: 757411 - RNA, 17 nt, Artificial Sequence
  Synthetic
uauagaaagucuggagg

SEQ ID NO: 757412 - RNA, 17 nt, Artificial Sequence
  Synthetic
cuggggaaaaguggagg

SEQ ID NO: 757413 - RNA, 17 nt, Artificial Sequence
  Synthetic
uugucauuuaguggagg

SEQ ID NO: 757414 - RNA, 17 nt, Artificial Sequence
  Synthetic
agggagaaagguggagg

SEQ ID NO: 757415 - RNA, 17 nt, Artificial Sequence
  Synthetic
ugucccggggguggagg

SEQ ID NO: 757416 - RNA, 17 nt, Artificial Sequence
  Synthetic
uuuguuguggguggagg

SEQ ID NO: 757417 - RNA, 17 nt, Artificial Sequence
  Synthetic
aggcagaucuguggagg

SEQ ID NO: 757418 - RNA, 17 nt, Artificial Sequence
  Synthetic
aauucaauuuguggagg

SEQ ID NO: 757419 - RNA, 17 nt, Artificial Sequence
  Synthetic
uggugcguuuguggagg

SEQ ID NO: 757420 - RNA, 17 nt, Artificial Sequence
  Synthetic
acuuggaagauuggagg

SEQ ID NO: 757421 - RNA, 17 nt, Artificial Sequence
  Synthetic
auccucaauauuggagg

SEQ ID NO: 757422 - RNA, 17 nt, Artificial Sequence
  Synthetic
ugguaaagacuuggagg

SEQ ID NO: 757423 - RNA, 17 nt, Artificial Sequence
  Synthetic
aaaaaacuucuuggagg

SEQ ID NO: 757424 - RNA, 17 nt, Artificial Sequence
  Synthetic
auccccaauguuggagg

SEQ ID NO: 757425 - RNA, 17 nt, Artificial Sequence
  Synthetic
auucccaguguuggagg

SEQ ID NO: 757426 - RNA, 17 nt, Artificial Sequence
  Synthetic
aggggcagauuuggagg

SEQ ID NO: 757427 - RNA, 17 nt, Artificial Sequence
  Synthetic
aguuggggauuuggagg

SEQ ID NO: 757428 - RNA, 17 nt, Artificial Sequence
  Synthetic
caauggauauuuggagg

SEQ ID NO: 757429 - RNA, 17 nt, Artificial Sequence
  Synthetic
aggccauaguuuggagg

SEQ ID NO: 757430 - RNA, 17 nt, Artificial Sequence
  Synthetic
uggaacguuaaaugagg

SEQ ID NO: 757431 - RNA, 17 nt, Artificial Sequence
  Synthetic
ucuugaugauaaugagg

SEQ ID NO: 757432 - RNA, 17 nt, Artificial Sequence
  Synthetic
agaaguaccuaaugagg

SEQ ID NO: 757433 - RNA, 17 nt, Artificial Sequence
  Synthetic
uaaagauuaacaugagg

SEQ ID NO: 757434 - RNA, 17 nt, Artificial Sequence
  Synthetic
ugucucugcacaugagg

SEQ ID NO: 757435 - RNA, 17 nt, Artificial Sequence
  Synthetic
auuuuaagaggaugagg

SEQ ID NO: 757436 - RNA, 17 nt, Artificial Sequence
  Synthetic
acuuugggaggaugagg

SEQ ID NO: 757437 - RNA, 17 nt, Artificial Sequence
  Synthetic
uucaaagugggaugagg

SEQ ID NO: 757438 - RNA, 17 nt, Artificial Sequence
  Synthetic
aaacaggagugaugagg

SEQ ID NO: 757439 - RNA, 17 nt, Artificial Sequence
  Synthetic
uugguuuuauuaugagg

SEQ ID NO: 757440 - RNA, 17 nt, Artificial Sequence
  Synthetic
auggacaacaacugagg

SEQ ID NO: 757441 - RNA, 17 nt, Artificial Sequence
  Synthetic
ucaaaucaucacugagg

SEQ ID NO: 757442 - RNA, 17 nt, Artificial Sequence
  Synthetic
ugugcuuuucacugagg

SEQ ID NO: 757443 - RNA, 17 nt, Artificial Sequence
  Synthetic
uaaaguccagacugagg

SEQ ID NO: 757444 - RNA, 17 nt, Artificial Sequence
  Synthetic
agauuuaucuacugagg

SEQ ID NO: 757445 - RNA, 17 nt, Artificial Sequence
  Synthetic
acuuugggagccugagg

SEQ ID NO: 757446 - RNA, 17 nt, Artificial Sequence
  Synthetic
augaagugcuccugagg

SEQ ID NO: 757447 - RNA, 17 nt, Artificial Sequence
  Synthetic
uacucgggaagcugagg

SEQ ID NO: 757448 - RNA, 17 nt, Artificial Sequence
  Synthetic
uucucagaaggcugagg

SEQ ID NO: 757449 - RNA, 17 nt, Artificial Sequence
  Synthetic
ugaaguccaggcugagg

SEQ ID NO: 757450 - RNA, 17 nt, Artificial Sequence
  Synthetic
uacucaagaggcugagg

SEQ ID NO: 757451 - RNA, 17 nt, Artificial Sequence
  Synthetic
uacucaggaggcugagg

SEQ ID NO: 757452 - RNA, 17 nt, Artificial Sequence
  Synthetic
uacuuaggaggcugagg

SEQ ID NO: 757453 - RNA, 17 nt, Artificial Sequence
  Synthetic
uacccgggaggcugagg

SEQ ID NO: 757454 - RNA, 17 nt, Artificial Sequence
  Synthetic
uacucgggaggcugagg

SEQ ID NO: 757455 - RNA, 17 nt, Artificial Sequence
  Synthetic
cacuugggaggcugagg

SEQ ID NO: 757456 - RNA, 17 nt, Artificial Sequence
  Synthetic
uacuugggaggcugagg

SEQ ID NO: 757457 - RNA, 17 nt, Artificial Sequence
  Synthetic
uauuugggaggcugagg

SEQ ID NO: 757458 - RNA, 17 nt, Artificial Sequence
  Synthetic
acuuugggaggcugagg

SEQ ID NO: 757459 - RNA, 17 nt, Artificial Sequence
  Synthetic
cguuaaguaggcugagg

SEQ ID NO: 757460 - RNA, 17 nt, Artificial Sequence
  Synthetic
acccuuagucucugagg

SEQ ID NO: 757461 - RNA, 17 nt, Artificial Sequence
  Synthetic
agcaaucuucucugagg

SEQ ID NO: 757462 - RNA, 17 nt, Artificial Sequence
  Synthetic
uacaugggagucugagg

SEQ ID NO: 757463 - RNA, 17 nt, Artificial Sequence
  Synthetic
acuuugggagucugagg

SEQ ID NO: 757464 - RNA, 17 nt, Artificial Sequence
  Synthetic
uaacuucuggucugagg

SEQ ID NO: 757465 - RNA, 17 nt, Artificial Sequence
  Synthetic
agagauugcuucugagg

SEQ ID NO: 757466 - RNA, 17 nt, Artificial Sequence
  Synthetic
aauucuuucuucugagg

SEQ ID NO: 757467 - RNA, 17 nt, Artificial Sequence
  Synthetic
uauaaaaaaaagugagg

SEQ ID NO: 757468 - RNA, 17 nt, Artificial Sequence
  Synthetic
uaagcuugaaagugagg

SEQ ID NO: 757469 - RNA, 17 nt, Artificial Sequence
  Synthetic
cccaggcuggagugagg

SEQ ID NO: 757470 - RNA, 17 nt, Artificial Sequence
  Synthetic
aaggagaaugagugagg

SEQ ID NO: 757471 - RNA, 17 nt, Artificial Sequence
  Synthetic
cuuggaguguagugagg

SEQ ID NO: 757472 - RNA, 17 nt, Artificial Sequence
  Synthetic
ucuuugauuaggugagg

SEQ ID NO: 757473 - RNA, 17 nt, Artificial Sequence
  Synthetic
uaccuugcugggugagg

SEQ ID NO: 757474 - RNA, 17 nt, Artificial Sequence
  Synthetic
uaugggauugggugagg

SEQ ID NO: 757475 - RNA, 17 nt, Artificial Sequence
  Synthetic
uuuuuauaaaugugagg

SEQ ID NO: 757476 - RNA, 17 nt, Artificial Sequence
  Synthetic
cuguucauaaugugagg

SEQ ID NO: 757477 - RNA, 17 nt, Artificial Sequence
  Synthetic
uuuauuggccugugagg

SEQ ID NO: 757478 - RNA, 17 nt, Artificial Sequence
  Synthetic
cauauuacucugugagg

SEQ ID NO: 757479 - RNA, 17 nt, Artificial Sequence
  Synthetic
agacgaucucugugagg

SEQ ID NO: 757480 - RNA, 17 nt, Artificial Sequence
  Synthetic
uuguguauggugugagg

SEQ ID NO: 757481 - RNA, 17 nt, Artificial Sequence
  Synthetic
uaaguaugugugugagg

SEQ ID NO: 757482 - RNA, 17 nt, Artificial Sequence
  Synthetic
aaaugaaaaaauugagg

SEQ ID NO: 757483 - RNA, 17 nt, Artificial Sequence
  Synthetic
cuugacugacauugagg

SEQ ID NO: 757484 - RNA, 17 nt, Artificial Sequence
  Synthetic
acagacaacacuugagg

SEQ ID NO: 757485 - RNA, 17 nt, Artificial Sequence
  Synthetic
uuccccagcccuugagg

SEQ ID NO: 757486 - RNA, 17 nt, Artificial Sequence
  Synthetic
ccuuucaggccuugagg

SEQ ID NO: 757487 - RNA, 17 nt, Artificial Sequence
  Synthetic
aggagcccagcuugagg

SEQ ID NO: 757488 - RNA, 17 nt, Artificial Sequence
  Synthetic
ucauauacuucuugagg

SEQ ID NO: 757489 - RNA, 17 nt, Artificial Sequence
  Synthetic
acuuuuuuuucuugagg

SEQ ID NO: 757490 - RNA, 17 nt, Artificial Sequence
  Synthetic
uguguaagaaguugagg

SEQ ID NO: 757491 - RNA, 17 nt, Artificial Sequence
  Synthetic
cuaagcagcaguugagg

SEQ ID NO: 757492 - RNA, 17 nt, Artificial Sequence
  Synthetic
ccagcuccuaguugagg

SEQ ID NO: 757493 - RNA, 17 nt, Artificial Sequence
  Synthetic
uaguggggggguugagg

SEQ ID NO: 757494 - RNA, 17 nt, Artificial Sequence
  Synthetic
aacauaggaauuugagg

SEQ ID NO: 757495 - RNA, 17 nt, Artificial Sequence
  Synthetic
cccuguuuacuuugagg

SEQ ID NO: 757496 - RNA, 17 nt, Artificial Sequence
  Synthetic
uuuuuuuuuuuuugagg

SEQ ID NO: 757497 - RNA, 17 nt, Artificial Sequence
  Synthetic
agagucugaaaaauagg

SEQ ID NO: 757498 - RNA, 17 nt, Artificial Sequence
  Synthetic
uugaguaacaaaauagg

SEQ ID NO: 757499 - RNA, 17 nt, Artificial Sequence
  Synthetic
uuauuucugaaaauagg

SEQ ID NO: 757500 - RNA, 17 nt, Artificial Sequence
  Synthetic
auaguaaaccgaauagg

SEQ ID NO: 757501 - RNA, 17 nt, Artificial Sequence
  Synthetic
cuugcuugcugaauagg

SEQ ID NO: 757502 - RNA, 17 nt, Artificial Sequence
  Synthetic
aucauccacauaauagg

SEQ ID NO: 757503 - RNA, 17 nt, Artificial Sequence
  Synthetic
uuuuuuuaacuaauagg

SEQ ID NO: 757504 - RNA, 17 nt, Artificial Sequence
  Synthetic
agugucuggcuaauagg

SEQ ID NO: 757505 - RNA, 17 nt, Artificial Sequence
  Synthetic
aaaggggucaacauagg

SEQ ID NO: 757506 - RNA, 17 nt, Artificial Sequence
  Synthetic
ccauggccucacauagg

SEQ ID NO: 757507 - RNA, 17 nt, Artificial Sequence
  Synthetic
acuuaagauuacauagg

SEQ ID NO: 757508 - RNA, 17 nt, Artificial Sequence
  Synthetic
cugcucuacuccauagg

SEQ ID NO: 757509 - RNA, 17 nt, Artificial Sequence
  Synthetic
ucuaggucuugcauagg

SEQ ID NO: 757510 - RNA, 17 nt, Artificial Sequence
  Synthetic
auguccucacucauagg

SEQ ID NO: 757511 - RNA, 17 nt, Artificial Sequence
  Synthetic
auauucucacucauagg

SEQ ID NO: 757512 - RNA, 17 nt, Artificial Sequence
  Synthetic
auguucucacucauagg

SEQ ID NO: 757513 - RNA, 17 nt, Artificial Sequence
  Synthetic
auguucucgcucauagg

SEQ ID NO: 757514 - RNA, 17 nt, Artificial Sequence
  Synthetic
auuuucaggcucauagg

SEQ ID NO: 757515 - RNA, 17 nt, Artificial Sequence
  Synthetic
auauucucauucauagg

SEQ ID NO: 757516 - RNA, 17 nt, Artificial Sequence
  Synthetic
ucuaugucauagauagg

SEQ ID NO: 757517 - RNA, 17 nt, Artificial Sequence
  Synthetic
agaaggagaacgauagg

SEQ ID NO: 757518 - RNA, 17 nt, Artificial Sequence
  Synthetic
uggagguaggggauagg

SEQ ID NO: 757519 - RNA, 17 nt, Artificial Sequence
  Synthetic
uaggguaaguggauagg

SEQ ID NO: 757520 - RNA, 17 nt, Artificial Sequence
  Synthetic
uucacugugcugauagg

SEQ ID NO: 757521 - RNA, 17 nt, Artificial Sequence
  Synthetic
aagaaugaacauauagg

SEQ ID NO: 757522 - RNA, 17 nt, Artificial Sequence
  Synthetic
caggccauacauauagg

SEQ ID NO: 757523 - RNA, 17 nt, Artificial Sequence
  Synthetic
aauauaaaucauauagg

SEQ ID NO: 757524 - RNA, 17 nt, Artificial Sequence
  Synthetic
agauacaaagauauagg

SEQ ID NO: 757525 - RNA, 17 nt, Artificial Sequence
  Synthetic
aaaauaagugcuauagg

SEQ ID NO: 757526 - RNA, 17 nt, Artificial Sequence
  Synthetic
ucaaagaacucuauagg

SEQ ID NO: 757527 - RNA, 17 nt, Artificial Sequence
  Synthetic
cuguggaaagguauagg

SEQ ID NO: 757528 - RNA, 17 nt, Artificial Sequence
  Synthetic
aguuuuggggguauagg

SEQ ID NO: 757529 - RNA, 17 nt, Artificial Sequence
  Synthetic
cagugugaaauuauagg

SEQ ID NO: 757530 - RNA, 17 nt, Artificial Sequence
  Synthetic
cauuacagaauuauagg

SEQ ID NO: 757531 - RNA, 17 nt, Artificial Sequence
  Synthetic
ugauuaaguauuauagg

SEQ ID NO: 757532 - RNA, 17 nt, Artificial Sequence
  Synthetic
agaaugaaaguuauagg

SEQ ID NO: 757533 - RNA, 17 nt, Artificial Sequence
  Synthetic
uuggcaccuguuauagg

SEQ ID NO: 757534 - RNA, 17 nt, Artificial Sequence
  Synthetic
ccaggaagauuuauagg

SEQ ID NO: 757535 - RNA, 17 nt, Artificial Sequence
  Synthetic
ugcuuuucuuuuauagg

SEQ ID NO: 757536 - RNA, 17 nt, Artificial Sequence
  Synthetic
agcaaaacaaaacuagg

SEQ ID NO: 757537 - RNA, 17 nt, Artificial Sequence
  Synthetic
aaaaagcagaaacuagg

SEQ ID NO: 757538 - RNA, 17 nt, Artificial Sequence
  Synthetic
ucuugauuuaaacuagg

SEQ ID NO: 757539 - RNA, 17 nt, Artificial Sequence
  Synthetic
uuuccuguuuaacuagg

SEQ ID NO: 757540 - RNA, 17 nt, Artificial Sequence
  Synthetic
uaaccccaugcacuagg

SEQ ID NO: 757541 - RNA, 17 nt, Artificial Sequence
  Synthetic
acguuagaaucacuagg

SEQ ID NO: 757542 - RNA, 17 nt, Artificial Sequence
  Synthetic
aaauaucccucacuagg

SEQ ID NO: 757543 - RNA, 17 nt, Artificial Sequence
  Synthetic
cacuuuuagcuacuagg

SEQ ID NO: 757544 - RNA, 17 nt, Artificial Sequence
  Synthetic
accuacacaaaccuagg

SEQ ID NO: 757545 - RNA, 17 nt, Artificial Sequence
  Synthetic
ccuuaaggcaaccuagg

SEQ ID NO: 757546 - RNA, 17 nt, Artificial Sequence
  Synthetic
aaucgcuugaaccuagg

SEQ ID NO: 757547 - RNA, 17 nt, Artificial Sequence
  Synthetic
ugagggagacaccuagg

SEQ ID NO: 757548 - RNA, 17 nt, Artificial Sequence
  Synthetic
uguuguucuacccuagg

SEQ ID NO: 757549 - RNA, 17 nt, Artificial Sequence
  Synthetic
uuagccucuggccuagg

SEQ ID NO: 757550 - RNA, 17 nt, Artificial Sequence
  Synthetic
uugugcuggguccuagg

SEQ ID NO: 757551 - RNA, 17 nt, Artificial Sequence
  Synthetic
ucaaugcaaaagcuagg

SEQ ID NO: 757552 - RNA, 17 nt, Artificial Sequence
  Synthetic
acauugcauaagcuagg

SEQ ID NO: 757553 - RNA, 17 nt, Artificial Sequence
  Synthetic
acuguaucucagcuagg

SEQ ID NO: 757554 - RNA, 17 nt, Artificial Sequence
  Synthetic
uaaauguugaggcuagg

SEQ ID NO: 757555 - RNA, 17 nt, Artificial Sequence
  Synthetic
uuacuuccugggcuagg

SEQ ID NO: 757556 - RNA, 17 nt, Artificial Sequence
  Synthetic
uugaauuuuaaucuagg

SEQ ID NO: 757557 - RNA, 17 nt, Artificial Sequence
  Synthetic
uugguuguacaucuagg

SEQ ID NO: 757558 - RNA, 17 nt, Artificial Sequence
  Synthetic
cuggagcagcaucuagg

SEQ ID NO: 757559 - RNA, 17 nt, Artificial Sequence
  Synthetic
cacuugaaaacucuagg

SEQ ID NO: 757560 - RNA, 17 nt, Artificial Sequence
  Synthetic
aauuuaacuacucuagg

SEQ ID NO: 757561 - RNA, 17 nt, Artificial Sequence
  Synthetic
uuauuugaaucucuagg

SEQ ID NO: 757562 - RNA, 17 nt, Artificial Sequence
  Synthetic
agacccagaggucuagg

SEQ ID NO: 757563 - RNA, 17 nt, Artificial Sequence
  Synthetic
aaaaucacuggucuagg

SEQ ID NO: 757564 - RNA, 17 nt, Artificial Sequence
  Synthetic
ucaccuucuauucuagg

SEQ ID NO: 757565 - RNA, 17 nt, Artificial Sequence
  Synthetic
uuaguuuugguucuagg

SEQ ID NO: 757566 - RNA, 17 nt, Artificial Sequence
  Synthetic
acauauugaaaaguagg

SEQ ID NO: 757567 - RNA, 17 nt, Artificial Sequence
  Synthetic
ugggaggccgaaguagg

SEQ ID NO: 757568 - RNA, 17 nt, Artificial Sequence
  Synthetic
uccaugaaggcaguagg

SEQ ID NO: 757569 - RNA, 17 nt, Artificial Sequence
  Synthetic
uugaaccagggaguagg

SEQ ID NO: 757570 - RNA, 17 nt, Artificial Sequence
  Synthetic
aagccucacugaguagg

SEQ ID NO: 757571 - RNA, 17 nt, Artificial Sequence
  Synthetic
ugcuagcaaauaguagg

SEQ ID NO: 757572 - RNA, 17 nt, Artificial Sequence
  Synthetic
aaucgcuugaacguagg

SEQ ID NO: 757573 - RNA, 17 nt, Artificial Sequence
  Synthetic
ucaaaaauaaagguagg

SEQ ID NO: 757574 - RNA, 17 nt, Artificial Sequence
  Synthetic
uggguuggucagguagg

SEQ ID NO: 757575 - RNA, 17 nt, Artificial Sequence
  Synthetic
ucuaacauucagguagg

SEQ ID NO: 757576 - RNA, 17 nt, Artificial Sequence
  Synthetic
agaggaagagagguagg

SEQ ID NO: 757577 - RNA, 17 nt, Artificial Sequence
  Synthetic
ugggaggccgagguagg

SEQ ID NO: 757578 - RNA, 17 nt, Artificial Sequence
  Synthetic
caggaagcugagguagg

SEQ ID NO: 757579 - RNA, 17 nt, Artificial Sequence
  Synthetic
auagcuuuuuagguagg

SEQ ID NO: 757580 - RNA, 17 nt, Artificial Sequence
  Synthetic
aaauaaagaaggguagg

SEQ ID NO: 757581 - RNA, 17 nt, Artificial Sequence
  Synthetic
augcugggaaggguagg

SEQ ID NO: 757582 - RNA, 17 nt, Artificial Sequence
  Synthetic
acacuuggaaggguagg

SEQ ID NO: 757583 - RNA, 17 nt, Artificial Sequence
  Synthetic
ucuucccuugggguagg

SEQ ID NO: 757584 - RNA, 17 nt, Artificial Sequence
  Synthetic
uuuggauuugggguagg

SEQ ID NO: 757585 - RNA, 17 nt, Artificial Sequence
  Synthetic
aauuaggcauggguagg

SEQ ID NO: 757586 - RNA, 17 nt, Artificial Sequence
  Synthetic
acagucugguggguagg

SEQ ID NO: 757587 - RNA, 17 nt, Artificial Sequence
  Synthetic
aagaguuuguggguagg

SEQ ID NO: 757588 - RNA, 17 nt, Artificial Sequence
  Synthetic
cgaaaacggaauguagg

SEQ ID NO: 757589 - RNA, 17 nt, Artificial Sequence
  Synthetic
ccuccagcgacuguagg

SEQ ID NO: 757590 - RNA, 17 nt, Artificial Sequence
  Synthetic
cuggguggcccuguagg

SEQ ID NO: 757591 - RNA, 17 nt, Artificial Sequence
  Synthetic
augcauguggguguagg

SEQ ID NO: 757592 - RNA, 17 nt, Artificial Sequence
  Synthetic
uaaaggagauuuguagg

SEQ ID NO: 757593 - RNA, 17 nt, Artificial Sequence
  Synthetic
aaaaaaaaaaaauuagg

SEQ ID NO: 757594 - RNA, 17 nt, Artificial Sequence
  Synthetic
uaggaugcaaaauuagg

SEQ ID NO: 757595 - RNA, 17 nt, Artificial Sequence
  Synthetic
agcaucuugaaauuagg

SEQ ID NO: 757596 - RNA, 17 nt, Artificial Sequence
  Synthetic
aaaauacaaacauuagg

SEQ ID NO: 757597 - RNA, 17 nt, Artificial Sequence
  Synthetic
caaugccugacauuagg

SEQ ID NO: 757598 - RNA, 17 nt, Artificial Sequence
  Synthetic
ucuagaaguccauuagg

SEQ ID NO: 757599 - RNA, 17 nt, Artificial Sequence
  Synthetic
aucuaaacuggauuagg

SEQ ID NO: 757600 - RNA, 17 nt, Artificial Sequence
  Synthetic
agccugucucuauuagg

SEQ ID NO: 757601 - RNA, 17 nt, Artificial Sequence
  Synthetic
uguuauaaauuauuagg

SEQ ID NO: 757602 - RNA, 17 nt, Artificial Sequence
  Synthetic
aauggugugaacuuagg

SEQ ID NO: 757603 - RNA, 17 nt, Artificial Sequence
  Synthetic
uuuaagacagacuuagg

SEQ ID NO: 757604 - RNA, 17 nt, Artificial Sequence
  Synthetic
cuguaacaggacuuagg

SEQ ID NO: 757605 - RNA, 17 nt, Artificial Sequence
  Synthetic
ucuuauaccuacuuagg

SEQ ID NO: 757606 - RNA, 17 nt, Artificial Sequence
  Synthetic
aauuccagcaccuuagg

SEQ ID NO: 757607 - RNA, 17 nt, Artificial Sequence
  Synthetic
uuaauuuacuccuuagg

SEQ ID NO: 757608 - RNA, 17 nt, Artificial Sequence
  Synthetic
uucugcaugaucuuagg

SEQ ID NO: 757609 - RNA, 17 nt, Artificial Sequence
  Synthetic
auguucucacucuuagg

SEQ ID NO: 757610 - RNA, 17 nt, Artificial Sequence
  Synthetic
ccuccuucucucuuagg

SEQ ID NO: 757611 - RNA, 17 nt, Artificial Sequence
  Synthetic
uauuacucccaguuagg

SEQ ID NO: 757612 - RNA, 17 nt, Artificial Sequence
  Synthetic
caaagcuaugaguuagg

SEQ ID NO: 757613 - RNA, 17 nt, Artificial Sequence
  Synthetic
ugguaauguagguuagg

SEQ ID NO: 757614 - RNA, 17 nt, Artificial Sequence
  Synthetic
agcagaagaggguuagg

SEQ ID NO: 757615 - RNA, 17 nt, Artificial Sequence
  Synthetic
aaaaaaaaaaauuuagg

SEQ ID NO: 757616 - RNA, 17 nt, Artificial Sequence
  Synthetic
auauacagcaauuuagg

SEQ ID NO: 757617 - RNA, 17 nt, Artificial Sequence
  Synthetic
agcucgggcaauuuagg

SEQ ID NO: 757618 - RNA, 17 nt, Artificial Sequence
  Synthetic
auacuuuggaauuuagg

SEQ ID NO: 757619 - RNA, 17 nt, Artificial Sequence
  Synthetic
aaagcugauaauuuagg

SEQ ID NO: 757620 - RNA, 17 nt, Artificial Sequence
  Synthetic
aaagaaacauauuuagg

SEQ ID NO: 757621 - RNA, 17 nt, Artificial Sequence
  Synthetic
uuugaguauuauuuagg

SEQ ID NO: 757622 - RNA, 17 nt, Artificial Sequence
  Synthetic
aaucccagcacuuuagg

SEQ ID NO: 757623 - RNA, 17 nt, Artificial Sequence
  Synthetic
uccuggaaaccuuuagg

SEQ ID NO: 757624 - RNA, 17 nt, Artificial Sequence
  Synthetic
auuugaaugccuuuagg

SEQ ID NO: 757625 - RNA, 17 nt, Artificial Sequence
  Synthetic
aggccucauucuuuagg

SEQ ID NO: 757626 - RNA, 17 nt, Artificial Sequence
  Synthetic
cagguuaagauuuuagg

SEQ ID NO: 757627 - RNA, 17 nt, Artificial Sequence
  Synthetic
auaggguauauuuuagg

SEQ ID NO: 757628 - RNA, 17 nt, Artificial Sequence
  Synthetic
ugaaacaaaguuuuagg

SEQ ID NO: 757629 - RNA, 17 nt, Artificial Sequence
  Synthetic
auaagauaauuuuuagg

SEQ ID NO: 757630 - RNA, 17 nt, Artificial Sequence
  Synthetic
ccugagugauuuuuagg

SEQ ID NO: 757631 - RNA, 17 nt, Artificial Sequence
  Synthetic
ugacaucccuuuuuagg

SEQ ID NO: 757632 - RNA, 17 nt, Artificial Sequence
  Synthetic
auuuugagguuuuuagg

SEQ ID NO: 757633 - RNA, 17 nt, Artificial Sequence
  Synthetic
aauguucuaagaaacgg

SEQ ID NO: 757634 - RNA, 17 nt, Artificial Sequence
  Synthetic
cucagauggagaaacgg

SEQ ID NO: 757635 - RNA, 17 nt, Artificial Sequence
  Synthetic
cacaucauggagaacgg

SEQ ID NO: 757636 - RNA, 17 nt, Artificial Sequence
  Synthetic
aaacucaccuagaacgg

SEQ ID NO: 757637 - RNA, 17 nt, Artificial Sequence
  Synthetic
agcaugcuugggaacgg

SEQ ID NO: 757638 - RNA, 17 nt, Artificial Sequence
  Synthetic
auaagaagguggaacgg

SEQ ID NO: 757639 - RNA, 17 nt, Artificial Sequence
  Synthetic
aaggaaggaaauaacgg

SEQ ID NO: 757640 - RNA, 17 nt, Artificial Sequence
  Synthetic
aaauuuguaaauaacgg

SEQ ID NO: 757641 - RNA, 17 nt, Artificial Sequence
  Synthetic
agcauugucaguaacgg

SEQ ID NO: 757642 - RNA, 17 nt, Artificial Sequence
  Synthetic
uuugcuggggaacacgg

SEQ ID NO: 757643 - RNA, 17 nt, Artificial Sequence
  Synthetic
cuguuccaugcacacgg

SEQ ID NO: 757644 - RNA, 17 nt, Artificial Sequence
  Synthetic
uagaggacugcacacgg

SEQ ID NO: 757645 - RNA, 17 nt, Artificial Sequence
  Synthetic
ucagacagguuccacgg

SEQ ID NO: 757646 - RNA, 17 nt, Artificial Sequence
  Synthetic
agggcgcagaagcacgg

SEQ ID NO: 757647 - RNA, 17 nt, Artificial Sequence
  Synthetic
ccagucaggaggcacgg

SEQ ID NO: 757648 - RNA, 17 nt, Artificial Sequence
  Synthetic
cugcaggcccggcacgg

SEQ ID NO: 757649 - RNA, 17 nt, Artificial Sequence
  Synthetic
uuggcagccgggcacgg

SEQ ID NO: 757650 - RNA, 17 nt, Artificial Sequence
  Synthetic
uuuguggccgggcacgg

SEQ ID NO: 757651 - RNA, 17 nt, Artificial Sequence
  Synthetic
cuauugccugggcacgg

SEQ ID NO: 757652 - RNA, 17 nt, Artificial Sequence
  Synthetic
aaauuagcugggcacgg

SEQ ID NO: 757653 - RNA, 17 nt, Artificial Sequence
  Synthetic
cucucggcugggcacgg

SEQ ID NO: 757654 - RNA, 17 nt, Artificial Sequence
  Synthetic
agucuugcugggcacgg

SEQ ID NO: 757655 - RNA, 17 nt, Artificial Sequence
  Synthetic
cacucuucugggcacgg

SEQ ID NO: 757656 - RNA, 17 nt, Artificial Sequence
  Synthetic
cagguggccuggcacgg

SEQ ID NO: 757657 - RNA, 17 nt, Artificial Sequence
  Synthetic
ucagugccugugcacgg

SEQ ID NO: 757658 - RNA, 17 nt, Artificial Sequence
  Synthetic
uagucauuuuugcacgg

SEQ ID NO: 757659 - RNA, 17 nt, Artificial Sequence
  Synthetic
agauaauugaaucacgg

SEQ ID NO: 757660 - RNA, 17 nt, Artificial Sequence
  Synthetic
agauguuugagucacgg

SEQ ID NO: 757661 - RNA, 17 nt, Artificial Sequence
  Synthetic
cucaccuccacagacgg

SEQ ID NO: 757662 - RNA, 17 nt, Artificial Sequence
  Synthetic
auuuuuaguagagacgg

SEQ ID NO: 757663 - RNA, 17 nt, Artificial Sequence
  Synthetic
caguaaaguggggacgg

SEQ ID NO: 757664 - RNA, 17 nt, Artificial Sequence
  Synthetic
ucuccucuguaauacgg

SEQ ID NO: 757665 - RNA, 17 nt, Artificial Sequence
  Synthetic
uuccauaacagauacgg

SEQ ID NO: 757666 - RNA, 17 nt, Artificial Sequence
  Synthetic
uguagucccagcuacgg

SEQ ID NO: 757667 - RNA, 17 nt, Artificial Sequence
  Synthetic
aagaaaccaauguacgg

SEQ ID NO: 757668 - RNA, 17 nt, Artificial Sequence
  Synthetic
acuucuuacaguuacgg

SEQ ID NO: 757669 - RNA, 17 nt, Artificial Sequence
  Synthetic
agugguggggguuacgg

SEQ ID NO: 757670 - RNA, 17 nt, Artificial Sequence
  Synthetic
uaaaauugaaugaccgg

SEQ ID NO: 757671 - RNA, 17 nt, Artificial Sequence
  Synthetic
ugaguaaaagcucccgg

SEQ ID NO: 757672 - RNA, 17 nt, Artificial Sequence
  Synthetic
uuuuauucauuucccgg

SEQ ID NO: 757673 - RNA, 17 nt, Artificial Sequence
  Synthetic
acuucaggacaagccgg

SEQ ID NO: 757674 - RNA, 17 nt, Artificial Sequence
  Synthetic
auacaaauuuuagccgg

SEQ ID NO: 757675 - RNA, 17 nt, Artificial Sequence
  Synthetic
uagaguaaggacuccgg

SEQ ID NO: 757676 - RNA, 17 nt, Artificial Sequence
  Synthetic
ugguuaggaaccuccgg

SEQ ID NO: 757677 - RNA, 17 nt, Artificial Sequence
  Synthetic
uugacaguuuccuccgg

SEQ ID NO: 757678 - RNA, 17 nt, Artificial Sequence
  Synthetic
uuugaaaaccauuccgg

SEQ ID NO: 757679 - RNA, 17 nt, Artificial Sequence
  Synthetic
accuuucccacuuccgg

SEQ ID NO: 757680 - RNA, 17 nt, Artificial Sequence
  Synthetic
ugauuguaaguuuccgg

SEQ ID NO: 757681 - RNA, 17 nt, Artificial Sequence
  Synthetic
auauauauuuuuuccgg

SEQ ID NO: 757682 - RNA, 17 nt, Artificial Sequence
  Synthetic
caccucggggaaagcgg

SEQ ID NO: 757683 - RNA, 17 nt, Artificial Sequence
  Synthetic
aaguggggaagaagcgg

SEQ ID NO: 757684 - RNA, 17 nt, Artificial Sequence
  Synthetic
uugaccccaggaagcgg

SEQ ID NO: 757685 - RNA, 17 nt, Artificial Sequence
  Synthetic
agaauguuuguaagcgg

SEQ ID NO: 757686 - RNA, 17 nt, Artificial Sequence
  Synthetic
aaucuggccgggagcgg

SEQ ID NO: 757687 - RNA, 17 nt, Artificial Sequence
  Synthetic
augucuuuugggagcgg

SEQ ID NO: 757688 - RNA, 17 nt, Artificial Sequence
  Synthetic
uuaacaccugugagcgg

SEQ ID NO: 757689 - RNA, 17 nt, Artificial Sequence
  Synthetic
cugaaccugggacgcgg

SEQ ID NO: 757690 - RNA, 17 nt, Artificial Sequence
  Synthetic
cuaggggccaggcgcgg

SEQ ID NO: 757691 - RNA, 17 nt, Artificial Sequence
  Synthetic
aaaugggccaggcgcgg

SEQ ID NO: 757692 - RNA, 17 nt, Artificial Sequence
  Synthetic
aaguuggccaggcgcgg

SEQ ID NO: 757693 - RNA, 17 nt, Artificial Sequence
  Synthetic
auagcagccgggcgcgg

SEQ ID NO: 757694 - RNA, 17 nt, Artificial Sequence
  Synthetic
auugcggccgggcgcgg

SEQ ID NO: 757695 - RNA, 17 nt, Artificial Sequence
  Synthetic
ucaucggccgggcgcgg

SEQ ID NO: 757696 - RNA, 17 nt, Artificial Sequence
  Synthetic
uacucggccgggcgcgg

SEQ ID NO: 757697 - RNA, 17 nt, Artificial Sequence
  Synthetic
aucugggccgggcgcgg

SEQ ID NO: 757698 - RNA, 17 nt, Artificial Sequence
  Synthetic
cucugggccgggcgcgg

SEQ ID NO: 757699 - RNA, 17 nt, Artificial Sequence
  Synthetic
acucuggccgggcgcgg

SEQ ID NO: 757700 - RNA, 17 nt, Artificial Sequence
  Synthetic
uuuuuggccgggcgcgg

SEQ ID NO: 757701 - RNA, 17 nt, Artificial Sequence
  Synthetic
uuggcugccgggcgcgg

SEQ ID NO: 757702 - RNA, 17 nt, Artificial Sequence
  Synthetic
uuugcgacugggcgcgg

SEQ ID NO: 757703 - RNA, 17 nt, Artificial Sequence
  Synthetic
ucucaggcugggcgcgg

SEQ ID NO: 757704 - RNA, 17 nt, Artificial Sequence
  Synthetic
uuggaggcugggcgcgg

SEQ ID NO: 757705 - RNA, 17 nt, Artificial Sequence
  Synthetic
auuuaggcugggcgcgg

SEQ ID NO: 757706 - RNA, 17 nt, Artificial Sequence
  Synthetic
ucacgggcugggcgcgg

SEQ ID NO: 757707 - RNA, 17 nt, Artificial Sequence
  Synthetic
cugaacccagcaggcgg

SEQ ID NO: 757708 - RNA, 17 nt, Artificial Sequence
  Synthetic
uagaggucaagaggcgg

SEQ ID NO: 757709 - RNA, 17 nt, Artificial Sequence
  Synthetic
uugaacccgagaggcgg

SEQ ID NO: 757710 - RNA, 17 nt, Artificial Sequence
  Synthetic
cuaggaaggagaggcgg

SEQ ID NO: 757711 - RNA, 17 nt, Artificial Sequence
  Synthetic
uugaacccacgaggcgg

SEQ ID NO: 757712 - RNA, 17 nt, Artificial Sequence
  Synthetic
cuugaaccaggaggcgg

SEQ ID NO: 757713 - RNA, 17 nt, Artificial Sequence
  Synthetic
uggaacccaggaggcgg

SEQ ID NO: 757714 - RNA, 17 nt, Artificial Sequence
  Synthetic
uugaacccaggaggcgg

SEQ ID NO: 757715 - RNA, 17 nt, Artificial Sequence
  Synthetic
ucgaacccgggaggcgg

SEQ ID NO: 757716 - RNA, 17 nt, Artificial Sequence
  Synthetic
uugaagccgggaggcgg

SEQ ID NO: 757717 - RNA, 17 nt, Artificial Sequence
  Synthetic
uugaaccugggaggcgg

SEQ ID NO: 757718 - RNA, 17 nt, Artificial Sequence
  Synthetic
uugaacuugggaggcgg

SEQ ID NO: 757719 - RNA, 17 nt, Artificial Sequence
  Synthetic
aguuauuugggaggcgg

SEQ ID NO: 757720 - RNA, 17 nt, Artificial Sequence
  Synthetic
cuugaaccuggaggcgg

SEQ ID NO: 757721 - RNA, 17 nt, Artificial Sequence
  Synthetic
caaauuuuagccggcgg

SEQ ID NO: 757722 - RNA, 17 nt, Artificial Sequence
  Synthetic
cucaaaauggggggcgg

SEQ ID NO: 757723 - RNA, 17 nt, Artificial Sequence
  Synthetic
accauucuacauggcgg

SEQ ID NO: 757724 - RNA, 17 nt, Artificial Sequence
  Synthetic
aguguuugcaguggcgg

SEQ ID NO: 757725 - RNA, 17 nt, Artificial Sequence
  Synthetic
uugaaccuagguggcgg

SEQ ID NO: 757726 - RNA, 17 nt, Artificial Sequence
  Synthetic
ccugguugggguggcgg

SEQ ID NO: 757727 - RNA, 17 nt, Artificial Sequence
  Synthetic
uucaccagguguggcgg

SEQ ID NO: 757728 - RNA, 17 nt, Artificial Sequence
  Synthetic
auggacaucuuuggcgg

SEQ ID NO: 757729 - RNA, 17 nt, Artificial Sequence
  Synthetic
ucugaugcagaaugcgg

SEQ ID NO: 757730 - RNA, 17 nt, Artificial Sequence
  Synthetic
aaaaaggccagaugcgg

SEQ ID NO: 757731 - RNA, 17 nt, Artificial Sequence
  Synthetic
uucccggccagaugcgg

SEQ ID NO: 757732 - RNA, 17 nt, Artificial Sequence
  Synthetic
ugauuguuucacugcgg

SEQ ID NO: 757733 - RNA, 17 nt, Artificial Sequence
  Synthetic
cccaggcuggagugcgg

SEQ ID NO: 757734 - RNA, 17 nt, Artificial Sequence
  Synthetic
aucucaaccaggugcgg

SEQ ID NO: 757735 - RNA, 17 nt, Artificial Sequence
  Synthetic
aucucagccaggugcgg

SEQ ID NO: 757736 - RNA, 17 nt, Artificial Sequence
  Synthetic
uucauggccaggugcgg

SEQ ID NO: 757737 - RNA, 17 nt, Artificial Sequence
  Synthetic
aaauuggccaggugcgg

SEQ ID NO: 757738 - RNA, 17 nt, Artificial Sequence
  Synthetic
uuccagggcaggugcgg

SEQ ID NO: 757739 - RNA, 17 nt, Artificial Sequence
  Synthetic
aaacaggccgggugcgg

SEQ ID NO: 757740 - RNA, 17 nt, Artificial Sequence
  Synthetic
uuuuuggccgggugcgg

SEQ ID NO: 757741 - RNA, 17 nt, Artificial Sequence
  Synthetic
auauaggcugggugcgg

SEQ ID NO: 757742 - RNA, 17 nt, Artificial Sequence
  Synthetic
uaugcggcugggugcgg

SEQ ID NO: 757743 - RNA, 17 nt, Artificial Sequence
  Synthetic
cagugggcugggugcgg

SEQ ID NO: 757744 - RNA, 17 nt, Artificial Sequence
  Synthetic
uaggaggcugguugcgg

SEQ ID NO: 757745 - RNA, 17 nt, Artificial Sequence
  Synthetic
uggucugcauguugcgg

SEQ ID NO: 757746 - RNA, 17 nt, Artificial Sequence
  Synthetic
acugugcaaguaaucgg

SEQ ID NO: 757747 - RNA, 17 nt, Artificial Sequence
  Synthetic
uugguagaauucaucgg

SEQ ID NO: 757748 - RNA, 17 nt, Artificial Sequence
  Synthetic
uauuucugugggaucgg

SEQ ID NO: 757749 - RNA, 17 nt, Artificial Sequence
  Synthetic
auugauggauggaucgg

SEQ ID NO: 757750 - RNA, 17 nt, Artificial Sequence
  Synthetic
caguggcucuguaucgg

SEQ ID NO: 757751 - RNA, 17 nt, Artificial Sequence
  Synthetic
uaaucccagcuacucgg

SEQ ID NO: 757752 - RNA, 17 nt, Artificial Sequence
  Synthetic
uuggcuuaauaccucgg

SEQ ID NO: 757753 - RNA, 17 nt, Artificial Sequence
  Synthetic
uguuccaaauuccucgg

SEQ ID NO: 757754 - RNA, 17 nt, Artificial Sequence
  Synthetic
uaauuggugaaucucgg

SEQ ID NO: 757755 - RNA, 17 nt, Artificial Sequence
  Synthetic
uaaacuuuuauucucgg

SEQ ID NO: 757756 - RNA, 17 nt, Artificial Sequence
  Synthetic
uugagccagggagucgg

SEQ ID NO: 757757 - RNA, 17 nt, Artificial Sequence
  Synthetic
acacugaggccugucgg

SEQ ID NO: 757758 - RNA, 17 nt, Artificial Sequence
  Synthetic
uauuucuguggugucgg

SEQ ID NO: 757759 - RNA, 17 nt, Artificial Sequence
  Synthetic
uucaauauaagauucgg

SEQ ID NO: 757760 - RNA, 17 nt, Artificial Sequence
  Synthetic
uaucccagguacuucgg

SEQ ID NO: 757761 - RNA, 17 nt, Artificial Sequence
  Synthetic
acaaaacauugcuucgg

SEQ ID NO: 757762 - RNA, 17 nt, Artificial Sequence
  Synthetic
ccagcauuuugcuucgg

SEQ ID NO: 757763 - RNA, 17 nt, Artificial Sequence
  Synthetic
aaauuauucauguucgg

SEQ ID NO: 757764 - RNA, 17 nt, Artificial Sequence
  Synthetic
aauccccgcacuuucgg

SEQ ID NO: 757765 - RNA, 17 nt, Artificial Sequence
  Synthetic
agaagaaagaaaaaggg

SEQ ID NO: 757766 - RNA, 17 nt, Artificial Sequence
  Synthetic
ugcuuaauuaaaaaggg

SEQ ID NO: 757767 - RNA, 17 nt, Artificial Sequence
  Synthetic
cacaaaagccaaaaggg

SEQ ID NO: 757768 - RNA, 17 nt, Artificial Sequence
  Synthetic
augcagaaagaaaaggg

SEQ ID NO: 757769 - RNA, 17 nt, Artificial Sequence
  Synthetic
caggagaaugaaaaggg

SEQ ID NO: 757770 - RNA, 17 nt, Artificial Sequence
  Synthetic
ugaucucuauaaaaggg

SEQ ID NO: 757771 - RNA, 17 nt, Artificial Sequence
  Synthetic
uaaaaccaagcaaaggg

SEQ ID NO: 757772 - RNA, 17 nt, Artificial Sequence
  Synthetic
ccugcuuaggcaaaggg

SEQ ID NO: 757773 - RNA, 17 nt, Artificial Sequence
  Synthetic
agguauggggcaaaggg

SEQ ID NO: 757774 - RNA, 17 nt, Artificial Sequence
  Synthetic
auaccuaaaucaaaggg

SEQ ID NO: 757775 - RNA, 17 nt, Artificial Sequence
  Synthetic
uaguaguucucaaaggg

SEQ ID NO: 757776 - RNA, 17 nt, Artificial Sequence
  Synthetic
aaggaaaagggaaaggg

SEQ ID NO: 757777 - RNA, 17 nt, Artificial Sequence
  Synthetic
aagcaggagggaaaggg

SEQ ID NO: 757778 - RNA, 17 nt, Artificial Sequence
  Synthetic
aaaaaaaggggaaaggg

SEQ ID NO: 757779 - RNA, 17 nt, Artificial Sequence
  Synthetic
acacugcugggaaaggg

SEQ ID NO: 757780 - RNA, 17 nt, Artificial Sequence
  Synthetic
uuguugaauggaaaggg

SEQ ID NO: 757781 - RNA, 17 nt, Artificial Sequence
  Synthetic
aggguauucugaaaggg

SEQ ID NO: 757782 - RNA, 17 nt, Artificial Sequence
  Synthetic
cagagucucuuaaaggg

SEQ ID NO: 757783 - RNA, 17 nt, Artificial Sequence
  Synthetic
caagacaaaaacaaggg

SEQ ID NO: 757784 - RNA, 17 nt, Artificial Sequence
  Synthetic
acuaaguuaaacaaggg

SEQ ID NO: 757785 - RNA, 17 nt, Artificial Sequence
  Synthetic
ucugaauugaacaaggg

SEQ ID NO: 757786 - RNA, 17 nt, Artificial Sequence
  Synthetic
uguggggaacacaaggg

SEQ ID NO: 757787 - RNA, 17 nt, Artificial Sequence
  Synthetic
ccaaauaguaccaaggg

SEQ ID NO: 757788 - RNA, 17 nt, Artificial Sequence
  Synthetic
agaaaaugaagcaaggg

SEQ ID NO: 757789 - RNA, 17 nt, Artificial Sequence
  Synthetic
aaaugaucuagcaaggg

SEQ ID NO: 757790 - RNA, 17 nt, Artificial Sequence
  Synthetic
agaggauggugcaaggg

SEQ ID NO: 757791 - RNA, 17 nt, Artificial Sequence
  Synthetic
aaccugggaaucaaggg

SEQ ID NO: 757792 - RNA, 17 nt, Artificial Sequence
  Synthetic
acuuccuggcucaaggg

SEQ ID NO: 757793 - RNA, 17 nt, Artificial Sequence
  Synthetic
uccccacaugucaaggg

SEQ ID NO: 757794 - RNA, 17 nt, Artificial Sequence
  Synthetic
ucauacaaaaagaaggg

SEQ ID NO: 757795 - RNA, 17 nt, Artificial Sequence
  Synthetic
uagaaugagaagaaggg

SEQ ID NO: 757796 - RNA, 17 nt, Artificial Sequence
  Synthetic
auaugacuggagaaggg

SEQ ID NO: 757797 - RNA, 17 nt, Artificial Sequence
  Synthetic
aaguguucauagaaggg

SEQ ID NO: 757798 - RNA, 17 nt, Artificial Sequence
  Synthetic
ccccugccuuagaaggg

SEQ ID NO: 757799 - RNA, 17 nt, Artificial Sequence
  Synthetic
uaaaaaaaaaggaaggg

SEQ ID NO: 757800 - RNA, 17 nt, Artificial Sequence
  Synthetic
uagaaagaaaggaaggg

SEQ ID NO: 757801 - RNA, 17 nt, Artificial Sequence
  Synthetic
aagaaaggaaggaaggg

SEQ ID NO: 757802 - RNA, 17 nt, Artificial Sequence
  Synthetic
agaaagaacaggaaggg

SEQ ID NO: 757803 - RNA, 17 nt, Artificial Sequence
  Synthetic
caagguuagaggaaggg

SEQ ID NO: 757804 - RNA, 17 nt, Artificial Sequence
  Synthetic
uuuaaauaagggaaggg

SEQ ID NO: 757805 - RNA, 17 nt, Artificial Sequence
  Synthetic
ccuguacuagggaaggg

SEQ ID NO: 757806 - RNA, 17 nt, Artificial Sequence
  Synthetic
uucacucaggggaaggg

SEQ ID NO: 757807 - RNA, 17 nt, Artificial Sequence
  Synthetic
ugugugugugggaaggg

SEQ ID NO: 757808 - RNA, 17 nt, Artificial Sequence
  Synthetic
uuccuacaguggaaggg

SEQ ID NO: 757809 - RNA, 17 nt, Artificial Sequence
  Synthetic
aaagugauaaugaaggg

SEQ ID NO: 757810 - RNA, 17 nt, Artificial Sequence
  Synthetic
uguuuggaccugaaggg

SEQ ID NO: 757811 - RNA, 17 nt, Artificial Sequence
  Synthetic
aggagcugguugaaggg

SEQ ID NO: 757812 - RNA, 17 nt, Artificial Sequence
  Synthetic
aaaagaguguugaaggg

SEQ ID NO: 757813 - RNA, 17 nt, Artificial Sequence
  Synthetic
ugcaucaauaauaaggg

SEQ ID NO: 757814 - RNA, 17 nt, Artificial Sequence
  Synthetic
ucccuuucuuauaaggg

SEQ ID NO: 757815 - RNA, 17 nt, Artificial Sequence
  Synthetic
uuaucucugaguaaggg

SEQ ID NO: 757816 - RNA, 17 nt, Artificial Sequence
  Synthetic
aauguuaauauuaaggg

SEQ ID NO: 757817 - RNA, 17 nt, Artificial Sequence
  Synthetic
uuuucaauuauuaaggg

SEQ ID NO: 757818 - RNA, 17 nt, Artificial Sequence
  Synthetic
aacacauagacacaggg

SEQ ID NO: 757819 - RNA, 17 nt, Artificial Sequence
  Synthetic
aacacauggacacaggg

SEQ ID NO: 757820 - RNA, 17 nt, Artificial Sequence
  Synthetic
aacauauggacacaggg

SEQ ID NO: 757821 - RNA, 17 nt, Artificial Sequence
  Synthetic
aacacuuggacacaggg

SEQ ID NO: 757822 - RNA, 17 nt, Artificial Sequence
  Synthetic
cugcuuuaagcacaggg

SEQ ID NO: 757823 - RNA, 17 nt, Artificial Sequence
  Synthetic
agauuggaugcacaggg

SEQ ID NO: 757824 - RNA, 17 nt, Artificial Sequence
  Synthetic
ucaucuuaaucacaggg

SEQ ID NO: 757825 - RNA, 17 nt, Artificial Sequence
  Synthetic
cuauuagcaagacaggg

SEQ ID NO: 757826 - RNA, 17 nt, Artificial Sequence
  Synthetic
ucuggauaaggacaggg

SEQ ID NO: 757827 - RNA, 17 nt, Artificial Sequence
  Synthetic
aucaucugagcccaggg

SEQ ID NO: 757828 - RNA, 17 nt, Artificial Sequence
  Synthetic
aaaucagggagccaggg

SEQ ID NO: 757829 - RNA, 17 nt, Artificial Sequence
  Synthetic
uuugccacccuccaggg

SEQ ID NO: 757830 - RNA, 17 nt, Artificial Sequence
  Synthetic
aaccuaugccuccaggg

SEQ ID NO: 757831 - RNA, 17 nt, Artificial Sequence
  Synthetic
agaguggcuuagcaggg

SEQ ID NO: 757832 - RNA, 17 nt, Artificial Sequence
  Synthetic
augucaauuaggcaggg

SEQ ID NO: 757833 - RNA, 17 nt, Artificial Sequence
  Synthetic
uuaugggccgggcaggg

SEQ ID NO: 757834 - RNA, 17 nt, Artificial Sequence
  Synthetic
aguuaagcaaugcaggg

SEQ ID NO: 757835 - RNA, 17 nt, Artificial Sequence
  Synthetic
ucaauuaaagugcaggg

SEQ ID NO: 757836 - RNA, 17 nt, Artificial Sequence
  Synthetic
cuuacuguccaucaggg

SEQ ID NO: 757837 - RNA, 17 nt, Artificial Sequence
  Synthetic
ugacuggaucaucaggg

SEQ ID NO: 757838 - RNA, 17 nt, Artificial Sequence
  Synthetic
caaaugguggaucaggg

SEQ ID NO: 757839 - RNA, 17 nt, Artificial Sequence
  Synthetic
cuucacaaugaucaggg

SEQ ID NO: 757840 - RNA, 17 nt, Artificial Sequence
  Synthetic
cugcugauugaucaggg

SEQ ID NO: 757841 - RNA, 17 nt, Artificial Sequence
  Synthetic
uauugcucuucucaggg

SEQ ID NO: 757842 - RNA, 17 nt, Artificial Sequence
  Synthetic
aaagaagaaagucaggg

SEQ ID NO: 757843 - RNA, 17 nt, Artificial Sequence
  Synthetic
cccuaccucagucaggg

SEQ ID NO: 757844 - RNA, 17 nt, Artificial Sequence
  Synthetic
aaacauagaugucaggg

SEQ ID NO: 757845 - RNA, 17 nt, Artificial Sequence
  Synthetic
uucauuucauuucaggg

SEQ ID NO: 757846 - RNA, 17 nt, Artificial Sequence
  Synthetic
ccauucuguuuucaggg

SEQ ID NO: 757847 - RNA, 17 nt, Artificial Sequence
  Synthetic
aaaaaaaagaaagaggg

SEQ ID NO: 757848 - RNA, 17 nt, Artificial Sequence
  Synthetic
ccaggcccacaagaggg

SEQ ID NO: 757849 - RNA, 17 nt, Artificial Sequence
  Synthetic
uuggaaguccaagaggg

SEQ ID NO: 757850 - RNA, 17 nt, Artificial Sequence
  Synthetic
aaaauuuauuaagaggg

SEQ ID NO: 757851 - RNA, 17 nt, Artificial Sequence
  Synthetic
uuauuagagacagaggg

SEQ ID NO: 757852 - RNA, 17 nt, Artificial Sequence
  Synthetic
auauaaacuccagaggg

SEQ ID NO: 757853 - RNA, 17 nt, Artificial Sequence
  Synthetic
uggggccuaucagaggg

SEQ ID NO: 757854 - RNA, 17 nt, Artificial Sequence
  Synthetic
aguuuuccaagagaggg

SEQ ID NO: 757855 - RNA, 17 nt, Artificial Sequence
  Synthetic
aguggagagagagaggg

SEQ ID NO: 757856 - RNA, 17 nt, Artificial Sequence
  Synthetic
acacagaugagagaggg

SEQ ID NO: 757857 - RNA, 17 nt, Artificial Sequence
  Synthetic
ucagaagggcgagaggg

SEQ ID NO: 757858 - RNA, 17 nt, Artificial Sequence
  Synthetic
agagaggcaggagaggg

SEQ ID NO: 757859 - RNA, 17 nt, Artificial Sequence
  Synthetic
ugagagaagggagaggg

SEQ ID NO: 757860 - RNA, 17 nt, Artificial Sequence
  Synthetic
uuaucuuugggagaggg

SEQ ID NO: 757861 - RNA, 17 nt, Artificial Sequence
  Synthetic
uaugcaccuugagaggg

SEQ ID NO: 757862 - RNA, 17 nt, Artificial Sequence
  Synthetic
cacuuggagauagaggg

SEQ ID NO: 757863 - RNA, 17 nt, Artificial Sequence
  Synthetic
uggggacuacuagaggg

SEQ ID NO: 757864 - RNA, 17 nt, Artificial Sequence
  Synthetic
uggggauuccuagaggg

SEQ ID NO: 757865 - RNA, 17 nt, Artificial Sequence
  Synthetic
aaauaaagaagcgaggg

SEQ ID NO: 757866 - RNA, 17 nt, Artificial Sequence
  Synthetic
uccaauguaaaggaggg

SEQ ID NO: 757867 - RNA, 17 nt, Artificial Sequence
  Synthetic
cuacagaggaaggaggg

SEQ ID NO: 757868 - RNA, 17 nt, Artificial Sequence
  Synthetic
agaugugggaaggaggg

SEQ ID NO: 757869 - RNA, 17 nt, Artificial Sequence
  Synthetic
auggaaagggaggaggg

SEQ ID NO: 757870 - RNA, 17 nt, Artificial Sequence
  Synthetic
uacuagagggaggaggg

SEQ ID NO: 757871 - RNA, 17 nt, Artificial Sequence
  Synthetic
ugggaagcugaggaggg

SEQ ID NO: 757872 - RNA, 17 nt, Artificial Sequence
  Synthetic
aaacaaaacuaggaggg

SEQ ID NO: 757873 - RNA, 17 nt, Artificial Sequence
  Synthetic
aaaggggaaagggaggg

SEQ ID NO: 757874 - RNA, 17 nt, Artificial Sequence
  Synthetic
aaggaaggaagggaggg

SEQ ID NO: 757875 - RNA, 17 nt, Artificial Sequence
  Synthetic
aagaaagucagggaggg

SEQ ID NO: 757876 - RNA, 17 nt, Artificial Sequence
  Synthetic
aaaagaaagagggaggg

SEQ ID NO: 757877 - RNA, 17 nt, Artificial Sequence
  Synthetic
agaguggagagggaggg

SEQ ID NO: 757878 - RNA, 17 nt, Artificial Sequence
  Synthetic
aagucagggagggaggg

SEQ ID NO: 757879 - RNA, 17 nt, Artificial Sequence
  Synthetic
aagggagggagggaggg

SEQ ID NO: 757880 - RNA, 17 nt, Artificial Sequence
  Synthetic
cagggagggagggaggg

SEQ ID NO: 757881 - RNA, 17 nt, Artificial Sequence
  Synthetic
aaaggaggaggggaggg

SEQ ID NO: 757882 - RNA, 17 nt, Artificial Sequence
  Synthetic
uccgggguaggggaggg

SEQ ID NO: 757883 - RNA, 17 nt, Artificial Sequence
  Synthetic
aggacagacggggaggg

SEQ ID NO: 757884 - RNA, 17 nt, Artificial Sequence
  Synthetic
gugggguggggggaggg

SEQ ID NO: 757885 - RNA, 17 nt, Artificial Sequence
  Synthetic
uacuagaguggggaggg

SEQ ID NO: 757886 - RNA, 17 nt, Artificial Sequence
  Synthetic
uacuggaguggggaggg

SEQ ID NO: 757887 - RNA, 17 nt, Artificial Sequence
  Synthetic
aggcugaggugggaggg

SEQ ID NO: 757888 - RNA, 17 nt, Artificial Sequence
  Synthetic
aagaucagaauggaggg

SEQ ID NO: 757889 - RNA, 17 nt, Artificial Sequence
  Synthetic
uggggccuacuggaggg

SEQ ID NO: 757890 - RNA, 17 nt, Artificial Sequence
  Synthetic
ucauuaguucuggaggg

SEQ ID NO: 757891 - RNA, 17 nt, Artificial Sequence
  Synthetic
uacucuaggguggaggg

SEQ ID NO: 757892 - RNA, 17 nt, Artificial Sequence
  Synthetic
uauuagaguguggaggg

SEQ ID NO: 757893 - RNA, 17 nt, Artificial Sequence
  Synthetic
aucgcucuguuggaggg

SEQ ID NO: 757894 - RNA, 17 nt, Artificial Sequence
  Synthetic
ccuucacucuaugaggg

SEQ ID NO: 757895 - RNA, 17 nt, Artificial Sequence
  Synthetic
ucccuuucuuaugaggg

SEQ ID NO: 757896 - RNA, 17 nt, Artificial Sequence
  Synthetic
uuccuuuuggcugaggg

SEQ ID NO: 757897 - RNA, 17 nt, Artificial Sequence
  Synthetic
cauuaggaugcugaggg

SEQ ID NO: 757898 - RNA, 17 nt, Artificial Sequence
  Synthetic
cacuacaguucugaggg

SEQ ID NO: 757899 - RNA, 17 nt, Artificial Sequence
  Synthetic
uuuugcuucagugaggg

SEQ ID NO: 757900 - RNA, 17 nt, Artificial Sequence
  Synthetic
aaacccacucgugaggg

SEQ ID NO: 757901 - RNA, 17 nt, Artificial Sequence
  Synthetic
uguuagugaggugaggg

SEQ ID NO: 757902 - RNA, 17 nt, Artificial Sequence
  Synthetic
cuguggcaaugugaggg

SEQ ID NO: 757903 - RNA, 17 nt, Artificial Sequence
  Synthetic
uagcuguuaugugaggg

SEQ ID NO: 757904 - RNA, 17 nt, Artificial Sequence
  Synthetic
caaaagaccugugaggg

SEQ ID NO: 757905 - RNA, 17 nt, Artificial Sequence
  Synthetic
ugcugggggugugaggg

SEQ ID NO: 757906 - RNA, 17 nt, Artificial Sequence
  Synthetic
auccuagaaauugaggg

SEQ ID NO: 757907 - RNA, 17 nt, Artificial Sequence
  Synthetic
caauuggaucuugaggg

SEQ ID NO: 757908 - RNA, 17 nt, Artificial Sequence
  Synthetic
acauaggaauuugaggg

SEQ ID NO: 757909 - RNA, 17 nt, Artificial Sequence
  Synthetic
aaucuuauuuuugaggg

SEQ ID NO: 757910 - RNA, 17 nt, Artificial Sequence
  Synthetic
ugugucucagaauaggg

SEQ ID NO: 757911 - RNA, 17 nt, Artificial Sequence
  Synthetic
ugucucagggaauaggg

SEQ ID NO: 757912 - RNA, 17 nt, Artificial Sequence
  Synthetic
cauuuucaaagauaggg

SEQ ID NO: 757913 - RNA, 17 nt, Artificial Sequence
  Synthetic
aaggauaacauauaggg

SEQ ID NO: 757914 - RNA, 17 nt, Artificial Sequence
  Synthetic
agacuugaaaacuaggg

SEQ ID NO: 757915 - RNA, 17 nt, Artificial Sequence
  Synthetic
aaucccagcuacuaggg

SEQ ID NO: 757916 - RNA, 17 nt, Artificial Sequence
  Synthetic
agucccagcuacuaggg

SEQ ID NO: 757917 - RNA, 17 nt, Artificial Sequence
  Synthetic
aaaugccuggccuaggg

SEQ ID NO: 757918 - RNA, 17 nt, Artificial Sequence
  Synthetic
cuguaucucagcuaggg

SEQ ID NO: 757919 - RNA, 17 nt, Artificial Sequence
  Synthetic
cuagggcaaaucuaggg

SEQ ID NO: 757920 - RNA, 17 nt, Artificial Sequence
  Synthetic
caggaucuacucuaggg

SEQ ID NO: 757921 - RNA, 17 nt, Artificial Sequence
  Synthetic
ugaguugagaaguaggg

SEQ ID NO: 757922 - RNA, 17 nt, Artificial Sequence
  Synthetic
agaauuauccaguaggg

SEQ ID NO: 757923 - RNA, 17 nt, Artificial Sequence
  Synthetic
agugggaaugaguaggg

SEQ ID NO: 757924 - RNA, 17 nt, Artificial Sequence
  Synthetic
cagucugguggguaggg

SEQ ID NO: 757925 - RNA, 17 nt, Artificial Sequence
  Synthetic
agcuauucaugguaggg

SEQ ID NO: 757926 - RNA, 17 nt, Artificial Sequence
  Synthetic
aagcccaaaaauuaggg

SEQ ID NO: 757927 - RNA, 17 nt, Artificial Sequence
  Synthetic
acccuuucccauuaggg

SEQ ID NO: 757928 - RNA, 17 nt, Artificial Sequence
  Synthetic
cuaucagacuauuaggg

SEQ ID NO: 757929 - RNA, 17 nt, Artificial Sequence
  Synthetic
aaucccagcacuuaggg

SEQ ID NO: 757930 - RNA, 17 nt, Artificial Sequence
  Synthetic
aacccuagcgcuuaggg

SEQ ID NO: 757931 - RNA, 17 nt, Artificial Sequence
  Synthetic
caacaucucucuuaggg

SEQ ID NO: 757932 - RNA, 17 nt, Artificial Sequence
  Synthetic
aggggaaaaaguuaggg

SEQ ID NO: 757933 - RNA, 17 nt, Artificial Sequence
  Synthetic
cauaaaaagaguuaggg

SEQ ID NO: 757934 - RNA, 17 nt, Artificial Sequence
  Synthetic
cauaaaaugaguuaggg

SEQ ID NO: 757935 - RNA, 17 nt, Artificial Sequence
  Synthetic
ucaccaugaauuuaggg

SEQ ID NO: 757936 - RNA, 17 nt, Artificial Sequence
  Synthetic
cauagaaugauuuaggg

SEQ ID NO: 757937 - RNA, 17 nt, Artificial Sequence
  Synthetic
auuuuucaacuuuaggg

SEQ ID NO: 757938 - RNA, 17 nt, Artificial Sequence
  Synthetic
agauggggccuuuaggg

SEQ ID NO: 757939 - RNA, 17 nt, Artificial Sequence
  Synthetic
uaccaacaaaaaacggg

SEQ ID NO: 757940 - RNA, 17 nt, Artificial Sequence
  Synthetic
agagagcauaaaacggg

SEQ ID NO: 757941 - RNA, 17 nt, Artificial Sequence
  Synthetic
aaaagaagacaaacggg

SEQ ID NO: 757942 - RNA, 17 nt, Artificial Sequence
  Synthetic
agucccagcuacacggg

SEQ ID NO: 757943 - RNA, 17 nt, Artificial Sequence
  Synthetic
ugggaggccgagacggg

SEQ ID NO: 757944 - RNA, 17 nt, Artificial Sequence
  Synthetic
agaaagagagggacggg

SEQ ID NO: 757945 - RNA, 17 nt, Artificial Sequence
  Synthetic
ccuuuuuauaauacggg

SEQ ID NO: 757946 - RNA, 17 nt, Artificial Sequence
  Synthetic
aauacugagaguacggg

SEQ ID NO: 757947 - RNA, 17 nt, Artificial Sequence
  Synthetic
cucugagggaaaccggg

SEQ ID NO: 757948 - RNA, 17 nt, Artificial Sequence
  Synthetic
aacacauggacaccggg

SEQ ID NO: 757949 - RNA, 17 nt, Artificial Sequence
  Synthetic
uaaucccagcuaccggg

SEQ ID NO: 757950 - RNA, 17 nt, Artificial Sequence
  Synthetic
aauggcguaaacccggg

SEQ ID NO: 757951 - RNA, 17 nt, Artificial Sequence
  Synthetic
aauugcucgaacccggg

SEQ ID NO: 757952 - RNA, 17 nt, Artificial Sequence
  Synthetic
aguugcucgaacccggg

SEQ ID NO: 757953 - RNA, 17 nt, Artificial Sequence
  Synthetic
aauggcaugaacccggg

SEQ ID NO: 757954 - RNA, 17 nt, Artificial Sequence
  Synthetic
aauggcgugaacccggg

SEQ ID NO: 757955 - RNA, 17 nt, Artificial Sequence
  Synthetic
aauggugugaacccggg

SEQ ID NO: 757956 - RNA, 17 nt, Artificial Sequence
  Synthetic
aaucacuugaacccggg

SEQ ID NO: 757957 - RNA, 17 nt, Artificial Sequence
  Synthetic
aaucgcuugaacccggg

SEQ ID NO: 757958 - RNA, 17 nt, Artificial Sequence
  Synthetic
aauugcuugaacccggg

SEQ ID NO: 757959 - RNA, 17 nt, Artificial Sequence
  Synthetic
aaucauuugaacccggg

SEQ ID NO: 757960 - RNA, 17 nt, Artificial Sequence
  Synthetic
aaucuuuugaacccggg

SEQ ID NO: 757961 - RNA, 17 nt, Artificial Sequence
  Synthetic
agccucagcuacccggg

SEQ ID NO: 757962 - RNA, 17 nt, Artificial Sequence
  Synthetic
aaucacuugaagccggg

SEQ ID NO: 757963 - RNA, 17 nt, Artificial Sequence
  Synthetic
uuaaaagagaugccggg

SEQ ID NO: 757964 - RNA, 17 nt, Artificial Sequence
  Synthetic
uugaaaaccauuccggg

SEQ ID NO: 757965 - RNA, 17 nt, Artificial Sequence
  Synthetic
ugggaggccaaagcggg

SEQ ID NO: 757966 - RNA, 17 nt, Artificial Sequence
  Synthetic
cugcucaggccagcggg

SEQ ID NO: 757967 - RNA, 17 nt, Artificial Sequence
  Synthetic
uuuacuguuucagcggg

SEQ ID NO: 757968 - RNA, 17 nt, Artificial Sequence
  Synthetic
agggaggccaaggcggg

SEQ ID NO: 757969 - RNA, 17 nt, Artificial Sequence
  Synthetic
ugggaggccaaggcggg

SEQ ID NO: 757970 - RNA, 17 nt, Artificial Sequence
  Synthetic
ugggaggcagaggcggg

SEQ ID NO: 757971 - RNA, 17 nt, Artificial Sequence
  Synthetic
uggaaggccgaggcggg

SEQ ID NO: 757972 - RNA, 17 nt, Artificial Sequence
  Synthetic
caggaggccgaggcggg

SEQ ID NO: 757973 - RNA, 17 nt, Artificial Sequence
  Synthetic
ugggaggccgaggcggg

SEQ ID NO: 757974 - RNA, 17 nt, Artificial Sequence
  Synthetic
uaagaggaugaggcggg

SEQ ID NO: 757975 - RNA, 17 nt, Artificial Sequence
  Synthetic
ugggaggaugaggcggg

SEQ ID NO: 757976 - RNA, 17 nt, Artificial Sequence
  Synthetic
ugggagccugaggcggg

SEQ ID NO: 757977 - RNA, 17 nt, Artificial Sequence
  Synthetic
ugggaggcugaggcggg

SEQ ID NO: 757978 - RNA, 17 nt, Artificial Sequence
  Synthetic
aauugaaucacggcggg

SEQ ID NO: 757979 - RNA, 17 nt, Artificial Sequence
  Synthetic
uuccaagagagggcggg

SEQ ID NO: 757980 - RNA, 17 nt, Artificial Sequence
  Synthetic
cauggaucaggggcggg

SEQ ID NO: 757981 - RNA, 17 nt, Artificial Sequence
  Synthetic
ugguggggccuggcggg

SEQ ID NO: 757982 - RNA, 17 nt, Artificial Sequence
  Synthetic
aaacaggaguuggcggg

SEQ ID NO: 757983 - RNA, 17 nt, Artificial Sequence
  Synthetic
aggggccuguuggcggg

SEQ ID NO: 757984 - RNA, 17 nt, Artificial Sequence
  Synthetic
aaucacuugaacucggg

SEQ ID NO: 757985 - RNA, 17 nt, Artificial Sequence
  Synthetic
aaucccagccacucggg

SEQ ID NO: 757986 - RNA, 17 nt, Artificial Sequence
  Synthetic
aaucccaacuacucggg

SEQ ID NO: 757987 - RNA, 17 nt, Artificial Sequence
  Synthetic
aguaccagcuacucggg

SEQ ID NO: 757988 - RNA, 17 nt, Artificial Sequence
  Synthetic
aaucccagcuacucggg

SEQ ID NO: 757989 - RNA, 17 nt, Artificial Sequence
  Synthetic
agucccagcuacucggg

SEQ ID NO: 757990 - RNA, 17 nt, Artificial Sequence
  Synthetic
aaucucagcuacucggg

SEQ ID NO: 757991 - RNA, 17 nt, Artificial Sequence
  Synthetic
aguuccugcuacucggg

SEQ ID NO: 757992 - RNA, 17 nt, Artificial Sequence
  Synthetic
aaucccaguuacucggg

SEQ ID NO: 757993 - RNA, 17 nt, Artificial Sequence
  Synthetic
aguccuagaugcucggg

SEQ ID NO: 757994 - RNA, 17 nt, Artificial Sequence
  Synthetic
agucccagcugcucggg

SEQ ID NO: 757995 - RNA, 17 nt, Artificial Sequence
  Synthetic
ugggaggcugagucggg

SEQ ID NO: 757996 - RNA, 17 nt, Artificial Sequence
  Synthetic
cacugaggccugucggg

SEQ ID NO: 757997 - RNA, 17 nt, Artificial Sequence
  Synthetic
aaucccagcacuucggg

SEQ ID NO: 757998 - RNA, 17 nt, Artificial Sequence
  Synthetic
ugacauacuucuucggg

SEQ ID NO: 757999 - RNA, 17 nt, Artificial Sequence
  Synthetic
uuuugauguauuucggg

SEQ ID NO: 758000 - RNA, 17 nt, Artificial Sequence
  Synthetic
uuucauugauuuucggg

SEQ ID NO: 758001 - RNA, 17 nt, Artificial Sequence
  Synthetic
ugaguaacucaaagggg

SEQ ID NO: 758002 - RNA, 17 nt, Artificial Sequence
  Synthetic
acuaaaaaagaaagggg

SEQ ID NO: 758003 - RNA, 17 nt, Artificial Sequence
  Synthetic
ugguagggggaaagggg

SEQ ID NO: 758004 - RNA, 17 nt, Artificial Sequence
  Synthetic
uuggccugcuaaagggg

SEQ ID NO: 758005 - RNA, 17 nt, Artificial Sequence
  Synthetic
uuuaaaccuuaaagggg

SEQ ID NO: 758006 - RNA, 17 nt, Artificial Sequence
  Synthetic
auaugcuaaacaagggg

SEQ ID NO: 758007 - RNA, 17 nt, Artificial Sequence
  Synthetic
aucucauggacaagggg

SEQ ID NO: 758008 - RNA, 17 nt, Artificial Sequence
  Synthetic
agguggggggcaagggg

SEQ ID NO: 758009 - RNA, 17 nt, Artificial Sequence
  Synthetic
cacagagccucaagggg

SEQ ID NO: 758010 - RNA, 17 nt, Artificial Sequence
  Synthetic
ugaccacucucaagggg

SEQ ID NO: 758011 - RNA, 17 nt, Artificial Sequence
  Synthetic
acgugaaggucaagggg

SEQ ID NO: 758012 - RNA, 17 nt, Artificial Sequence
  Synthetic
ugaguuaacagaagggg

SEQ ID NO: 758013 - RNA, 17 nt, Artificial Sequence
  Synthetic
cgauugggaggaagggg

SEQ ID NO: 758014 - RNA, 17 nt, Artificial Sequence
  Synthetic
agaaucuacugaagggg

SEQ ID NO: 758015 - RNA, 17 nt, Artificial Sequence
  Synthetic
ccaugaaagugaagggg

SEQ ID NO: 758016 - RNA, 17 nt, Artificial Sequence
  Synthetic
ccugaaaggcuaagggg

SEQ ID NO: 758017 - RNA, 17 nt, Artificial Sequence
  Synthetic
ccuuuuuauuuaagggg

SEQ ID NO: 758018 - RNA, 17 nt, Artificial Sequence
  Synthetic
cugcaaacccacagggg

SEQ ID NO: 758019 - RNA, 17 nt, Artificial Sequence
  Synthetic
uaauccacucacagggg

SEQ ID NO: 758020 - RNA, 17 nt, Artificial Sequence
  Synthetic
uaauugaauuacagggg

SEQ ID NO: 758021 - RNA, 17 nt, Artificial Sequence
  Synthetic
uuacauuuuagcagggg

SEQ ID NO: 758022 - RNA, 17 nt, Artificial Sequence
  Synthetic
uagaaacauggcagggg

SEQ ID NO: 758023 - RNA, 17 nt, Artificial Sequence
  Synthetic
uuuccauggaucagggg

SEQ ID NO: 758024 - RNA, 17 nt, Artificial Sequence
  Synthetic
ucccuuuugcucagggg

SEQ ID NO: 758025 - RNA, 17 nt, Artificial Sequence
  Synthetic
caaagagcucucagggg

SEQ ID NO: 758026 - RNA, 17 nt, Artificial Sequence
  Synthetic
ucaccaucagucagggg

SEQ ID NO: 758027 - RNA, 17 nt, Artificial Sequence
  Synthetic
aauauggauuucagggg

SEQ ID NO: 758028 - RNA, 17 nt, Artificial Sequence
  Synthetic
aaaaaagaaaagagggg

SEQ ID NO: 758029 - RNA, 17 nt, Artificial Sequence
  Synthetic
aaugugugagagagggg

SEQ ID NO: 758030 - RNA, 17 nt, Artificial Sequence
  Synthetic
cggggccugucgagggg

SEQ ID NO: 758031 - RNA, 17 nt, Artificial Sequence
  Synthetic
ccaauguaaaggagggg

SEQ ID NO: 758032 - RNA, 17 nt, Artificial Sequence
  Synthetic
uccgaaaggaggagggg

SEQ ID NO: 758033 - RNA, 17 nt, Artificial Sequence
  Synthetic
ugggguggggggagggg

SEQ ID NO: 758034 - RNA, 17 nt, Artificial Sequence
  Synthetic
aaauuaacugggagggg

SEQ ID NO: 758035 - RNA, 17 nt, Artificial Sequence
  Synthetic
agaucagaauggagggg

SEQ ID NO: 758036 - RNA, 17 nt, Artificial Sequence
  Synthetic
auagucacauggagggg

SEQ ID NO: 758037 - RNA, 17 nt, Artificial Sequence
  Synthetic
ucugggagcuggagggg

SEQ ID NO: 758038 - RNA, 17 nt, Artificial Sequence
  Synthetic
agaguagauuggagggg

SEQ ID NO: 758039 - RNA, 17 nt, Artificial Sequence
  Synthetic
agagccaugaugagggg

SEQ ID NO: 758040 - RNA, 17 nt, Artificial Sequence
  Synthetic
ccuauauuucugagggg

SEQ ID NO: 758041 - RNA, 17 nt, Artificial Sequence
  Synthetic
acagaaccauugagggg

SEQ ID NO: 758042 - RNA, 17 nt, Artificial Sequence
  Synthetic
aauucaugauugagggg

SEQ ID NO: 758043 - RNA, 17 nt, Artificial Sequence
  Synthetic
aagugauucuugagggg

SEQ ID NO: 758044 - RNA, 17 nt, Artificial Sequence
  Synthetic
caacaguauuugagggg

SEQ ID NO: 758045 - RNA, 17 nt, Artificial Sequence
  Synthetic
agaaaguuuuauagggg

SEQ ID NO: 758046 - RNA, 17 nt, Artificial Sequence
  Synthetic
cuucuguuggcuagggg

SEQ ID NO: 758047 - RNA, 17 nt, Artificial Sequence
  Synthetic
auaacuggcucuagggg

SEQ ID NO: 758048 - RNA, 17 nt, Artificial Sequence
  Synthetic
acugcugggaguagggg

SEQ ID NO: 758049 - RNA, 17 nt, Artificial Sequence
  Synthetic
aggcuccgggguagggg

SEQ ID NO: 758050 - RNA, 17 nt, Artificial Sequence
  Synthetic
caucacacauguagggg

SEQ ID NO: 758051 - RNA, 17 nt, Artificial Sequence
  Synthetic
ucuaagggauguagggg

SEQ ID NO: 758052 - RNA, 17 nt, Artificial Sequence
  Synthetic
caucuugaaauuagggg

SEQ ID NO: 758053 - RNA, 17 nt, Artificial Sequence
  Synthetic
auggaggggcuuagggg

SEQ ID NO: 758054 - RNA, 17 nt, Artificial Sequence
  Synthetic
aaggaacuucuuagggg

SEQ ID NO: 758055 - RNA, 17 nt, Artificial Sequence
  Synthetic
agagcaggcguuagggg

SEQ ID NO: 758056 - RNA, 17 nt, Artificial Sequence
  Synthetic
uuugagcuauuuagggg

SEQ ID NO: 758057 - RNA, 17 nt, Artificial Sequence
  Synthetic
uuucagcacuuuagggg

SEQ ID NO: 758058 - RNA, 17 nt, Artificial Sequence
  Synthetic
aaagcuagguuuagggg

SEQ ID NO: 758059 - RNA, 17 nt, Artificial Sequence
  Synthetic
aaaagcaaaaaacgggg

SEQ ID NO: 758060 - RNA, 17 nt, Artificial Sequence
  Synthetic
aauaguaacucacgggg

SEQ ID NO: 758061 - RNA, 17 nt, Artificial Sequence
  Synthetic
uucucuguugcccgggg

SEQ ID NO: 758062 - RNA, 17 nt, Artificial Sequence
  Synthetic
cagcaguuugagcgggg

SEQ ID NO: 758063 - RNA, 17 nt, Artificial Sequence
  Synthetic
cauucuacauggcgggg

SEQ ID NO: 758064 - RNA, 17 nt, Artificial Sequence
  Synthetic
cuauaacauccucgggg

SEQ ID NO: 758065 - RNA, 17 nt, Artificial Sequence
  Synthetic
uaguggaggagucgggg

SEQ ID NO: 758066 - RNA, 17 nt, Artificial Sequence
  Synthetic
agcuauaaagaaggggg

SEQ ID NO: 758067 - RNA, 17 nt, Artificial Sequence
  Synthetic
aauuuuggggaaggggg

SEQ ID NO: 758068 - RNA, 17 nt, Artificial Sequence
  Synthetic
uucacagagccaggggg

SEQ ID NO: 758069 - RNA, 17 nt, Artificial Sequence
  Synthetic
uggggccugucaggggg

SEQ ID NO: 758070 - RNA, 17 nt, Artificial Sequence
  Synthetic
auuaaugcuggaggggg

SEQ ID NO: 758071 - RNA, 17 nt, Artificial Sequence
  Synthetic
uggggggguugaggggg

SEQ ID NO: 758072 - RNA, 17 nt, Artificial Sequence
  Synthetic
aaggagaauauaggggg

SEQ ID NO: 758073 - RNA, 17 nt, Artificial Sequence
  Synthetic
aucacuggucuaggggg

SEQ ID NO: 758074 - RNA, 17 nt, Artificial Sequence
  Synthetic
ucuaagaauuuaggggg

SEQ ID NO: 758075 - RNA, 17 nt, Artificial Sequence
  Synthetic
acauggagaaacggggg

SEQ ID NO: 758076 - RNA, 17 nt, Artificial Sequence
  Synthetic
agucccagcuacggggg

SEQ ID NO: 758077 - RNA, 17 nt, Artificial Sequence
  Synthetic
auuguaugucccggggg

SEQ ID NO: 758078 - RNA, 17 nt, Artificial Sequence
  Synthetic
auucuacauggcggggg

SEQ ID NO: 758079 - RNA, 17 nt, Artificial Sequence
  Synthetic
ugugguggggucggggg

SEQ ID NO: 758080 - RNA, 17 nt, Artificial Sequence
  Synthetic
uguuguggggucggggg

SEQ ID NO: 758081 - RNA, 17 nt, Artificial Sequence
  Synthetic
uaagaaguugagggggg

SEQ ID NO: 758082 - RNA, 17 nt, Artificial Sequence
  Synthetic
uucuacauggcgggggg

SEQ ID NO: 758083 - RNA, 17 nt, Artificial Sequence
  Synthetic
ugaggccugucgggggg

SEQ ID NO: 758084 - RNA, 17 nt, Artificial Sequence
  Synthetic
cuuguuggggggggggg

SEQ ID NO: 758085 - RNA, 17 nt, Artificial Sequence
  Synthetic
ccuuguugggggggggg

SEQ ID NO: 758086 - RNA, 17 nt, Artificial Sequence
  Synthetic
uccuuguuggggggggg

SEQ ID NO: 758087 - RNA, 17 nt, Artificial Sequence
  Synthetic
cuccuuguugggggggg

SEQ ID NO: 758088 - RNA, 17 nt, Artificial Sequence
  Synthetic
uguguguguuggggggg

SEQ ID NO: 758089 - RNA, 17 nt, Artificial Sequence
  Synthetic
ccuccuuguuggggggg

SEQ ID NO: 758090 - RNA, 17 nt, Artificial Sequence
  Synthetic
aacugaaucaugggggg

SEQ ID NO: 758091 - RNA, 17 nt, Artificial Sequence
  Synthetic
uuuuuaaagaugggggg

SEQ ID NO: 758092 - RNA, 17 nt, Artificial Sequence
  Synthetic
uccacagaccugggggg

SEQ ID NO: 758093 - RNA, 17 nt, Artificial Sequence
  Synthetic
ugucguggggugggggg

SEQ ID NO: 758094 - RNA, 17 nt, Artificial Sequence
  Synthetic
ugugguggggugggggg

SEQ ID NO: 758095 - RNA, 17 nt, Artificial Sequence
  Synthetic
ugcuguggggugggggg

SEQ ID NO: 758096 - RNA, 17 nt, Artificial Sequence
  Synthetic
uguuguggggugggggg

SEQ ID NO: 758097 - RNA, 17 nt, Artificial Sequence
  Synthetic
uugacuuaauugggggg

SEQ ID NO: 758098 - RNA, 17 nt, Artificial Sequence
  Synthetic
cuuucuuuuuugggggg

SEQ ID NO: 758099 - RNA, 17 nt, Artificial Sequence
  Synthetic
cugcaagccaauggggg

SEQ ID NO: 758100 - RNA, 17 nt, Artificial Sequence
  Synthetic
uaacugaaucauggggg

SEQ ID NO: 758101 - RNA, 17 nt, Artificial Sequence
  Synthetic
cauuugaaucauggggg

SEQ ID NO: 758102 - RNA, 17 nt, Artificial Sequence
  Synthetic
ugauuggaucauggggg

SEQ ID NO: 758103 - RNA, 17 nt, Artificial Sequence
  Synthetic
acacauggagauggggg

SEQ ID NO: 758104 - RNA, 17 nt, Artificial Sequence
  Synthetic
auguguguagauggggg

SEQ ID NO: 758105 - RNA, 17 nt, Artificial Sequence
  Synthetic
ugaaaaggggauggggg

SEQ ID NO: 758106 - RNA, 17 nt, Artificial Sequence
  Synthetic
uuaacuugauauggggg

SEQ ID NO: 758107 - RNA, 17 nt, Artificial Sequence
  Synthetic
uuauuagauccuggggg

SEQ ID NO: 758108 - RNA, 17 nt, Artificial Sequence
  Synthetic
cuguaguuuaguggggg

SEQ ID NO: 758109 - RNA, 17 nt, Artificial Sequence
  Synthetic
ucguggggagguggggg

SEQ ID NO: 758110 - RNA, 17 nt, Artificial Sequence
  Synthetic
acugcuugagguggggg

SEQ ID NO: 758111 - RNA, 17 nt, Artificial Sequence
  Synthetic
agaguuggugguggggg

SEQ ID NO: 758112 - RNA, 17 nt, Artificial Sequence
  Synthetic
uuggggguugguggggg

SEQ ID NO: 758113 - RNA, 17 nt, Artificial Sequence
  Synthetic
aaaaaaaaauguggggg

SEQ ID NO: 758114 - RNA, 17 nt, Artificial Sequence
  Synthetic
uuagccagguguggggg

SEQ ID NO: 758115 - RNA, 17 nt, Artificial Sequence
  Synthetic
aaaaaaaaaauuggggg

SEQ ID NO: 758116 - RNA, 17 nt, Artificial Sequence
  Synthetic
acaagcugacuuggggg

SEQ ID NO: 758117 - RNA, 17 nt, Artificial Sequence
  Synthetic
cugggcuccguuggggg

SEQ ID NO: 758118 - RNA, 17 nt, Artificial Sequence
  Synthetic
ugcugggggguuggggg

SEQ ID NO: 758119 - RNA, 17 nt, Artificial Sequence
  Synthetic
aguggugggguuggggg

SEQ ID NO: 758120 - RNA, 17 nt, Artificial Sequence
  Synthetic
agcuauuugguuggggg

SEQ ID NO: 758121 - RNA, 17 nt, Artificial Sequence
  Synthetic
aaaccagauguuggggg

SEQ ID NO: 758122 - RNA, 17 nt, Artificial Sequence
  Synthetic
cuggugccuguuggggg

SEQ ID NO: 758123 - RNA, 17 nt, Artificial Sequence
  Synthetic
uguguguguguuggggg

SEQ ID NO: 758124 - RNA, 17 nt, Artificial Sequence
  Synthetic
uauuacuaauuuggggg

SEQ ID NO: 758125 - RNA, 17 nt, Artificial Sequence
  Synthetic
uuuuuguuuuuuggggg

SEQ ID NO: 758126 - RNA, 17 nt, Artificial Sequence
  Synthetic
uaaagcagagaaugggg

SEQ ID NO: 758127 - RNA, 17 nt, Artificial Sequence
  Synthetic
aauaucagagaaugggg

SEQ ID NO: 758128 - RNA, 17 nt, Artificial Sequence
  Synthetic
uggcuguaauaaugggg

SEQ ID NO: 758129 - RNA, 17 nt, Artificial Sequence
  Synthetic
uauaaauuauaaugggg

SEQ ID NO: 758130 - RNA, 17 nt, Artificial Sequence
  Synthetic
caaacacggccaugggg

SEQ ID NO: 758131 - RNA, 17 nt, Artificial Sequence
  Synthetic
aaguuugggccaugggg

SEQ ID NO: 758132 - RNA, 17 nt, Artificial Sequence
  Synthetic
acagaaagaagaugggg

SEQ ID NO: 758133 - RNA, 17 nt, Artificial Sequence
  Synthetic
uuuuauugaagaugggg

SEQ ID NO: 758134 - RNA, 17 nt, Artificial Sequence
  Synthetic
aaauuucacagaugggg

SEQ ID NO: 758135 - RNA, 17 nt, Artificial Sequence
  Synthetic
uugagcccacgaugggg

SEQ ID NO: 758136 - RNA, 17 nt, Artificial Sequence
  Synthetic
auaggcacaggaugggg

SEQ ID NO: 758137 - RNA, 17 nt, Artificial Sequence
  Synthetic
ccuaugcagauaugggg

SEQ ID NO: 758138 - RNA, 17 nt, Artificial Sequence
  Synthetic
uuauaggcuauaugggg

SEQ ID NO: 758139 - RNA, 17 nt, Artificial Sequence
  Synthetic
augaaugggguaugggg

SEQ ID NO: 758140 - RNA, 17 nt, Artificial Sequence
  Synthetic
cuaaaauugcacugggg

SEQ ID NO: 758141 - RNA, 17 nt, Artificial Sequence
  Synthetic
aguugaaaggacugggg

SEQ ID NO: 758142 - RNA, 17 nt, Artificial Sequence
  Synthetic
ugcugauguuacugggg

SEQ ID NO: 758143 - RNA, 17 nt, Artificial Sequence
  Synthetic
uugcuuggcuccugggg

SEQ ID NO: 758144 - RNA, 17 nt, Artificial Sequence
  Synthetic
aggccagucuccugggg

SEQ ID NO: 758145 - RNA, 17 nt, Artificial Sequence
  Synthetic
caggcuggaagcugggg

SEQ ID NO: 758146 - RNA, 17 nt, Artificial Sequence
  Synthetic
aaccgcuugagcugggg

SEQ ID NO: 758147 - RNA, 17 nt, Artificial Sequence
  Synthetic
uuagagagaggcugggg

SEQ ID NO: 758148 - RNA, 17 nt, Artificial Sequence
  Synthetic
auucugcauggcugggg

SEQ ID NO: 758149 - RNA, 17 nt, Artificial Sequence
  Synthetic
auuggggaggucugggg

SEQ ID NO: 758150 - RNA, 17 nt, Artificial Sequence
  Synthetic
agaaagaaugucugggg

SEQ ID NO: 758151 - RNA, 17 nt, Artificial Sequence
  Synthetic
cuacucagcuucugggg

SEQ ID NO: 758152 - RNA, 17 nt, Artificial Sequence
  Synthetic
aacaucuguuucugggg

SEQ ID NO: 758153 - RNA, 17 nt, Artificial Sequence
  Synthetic
accuguuaacagugggg

SEQ ID NO: 758154 - RNA, 17 nt, Artificial Sequence
  Synthetic
uuagagaaucagugggg

SEQ ID NO: 758155 - RNA, 17 nt, Artificial Sequence
  Synthetic
ucucccaaggagugggg

SEQ ID NO: 758156 - RNA, 17 nt, Artificial Sequence
  Synthetic
agccuacuggagugggg

SEQ ID NO: 758157 - RNA, 17 nt, Artificial Sequence
  Synthetic
ugugaaggguagugggg

SEQ ID NO: 758158 - RNA, 17 nt, Artificial Sequence
  Synthetic
aguagccaaucgugggg

SEQ ID NO: 758159 - RNA, 17 nt, Artificial Sequence
  Synthetic
ugggaagggucgugggg

SEQ ID NO: 758160 - RNA, 17 nt, Artificial Sequence
  Synthetic
cagggccugucgugggg

SEQ ID NO: 758161 - RNA, 17 nt, Artificial Sequence
  Synthetic
uggggccugucgugggg

SEQ ID NO: 758162 - RNA, 17 nt, Artificial Sequence
  Synthetic
acccagaccaggugggg

SEQ ID NO: 758163 - RNA, 17 nt, Artificial Sequence
  Synthetic
cucacucauaggugggg

SEQ ID NO: 758164 - RNA, 17 nt, Artificial Sequence
  Synthetic
cacaggauggggugggg

SEQ ID NO: 758165 - RNA, 17 nt, Artificial Sequence
  Synthetic
uuucagcuugggugggg

SEQ ID NO: 758166 - RNA, 17 nt, Artificial Sequence
  Synthetic
uuuguuguugggugggg

SEQ ID NO: 758167 - RNA, 17 nt, Artificial Sequence
  Synthetic
uggggacuguggugggg

SEQ ID NO: 758168 - RNA, 17 nt, Artificial Sequence
  Synthetic
auuggggguuggugggg

SEQ ID NO: 758169 - RNA, 17 nt, Artificial Sequence
  Synthetic
uggggacugcugugggg

SEQ ID NO: 758170 - RNA, 17 nt, Artificial Sequence
  Synthetic
uggggccugcugugggg

SEQ ID NO: 758171 - RNA, 17 nt, Artificial Sequence
  Synthetic
cugaaagcagugugggg

SEQ ID NO: 758172 - RNA, 17 nt, Artificial Sequence
  Synthetic
aggucccuagugugggg

SEQ ID NO: 758173 - RNA, 17 nt, Artificial Sequence
  Synthetic
ucaagcuuagugugggg

SEQ ID NO: 758174 - RNA, 17 nt, Artificial Sequence
  Synthetic
ugugugugugugugggg

SEQ ID NO: 758175 - RNA, 17 nt, Artificial Sequence
  Synthetic
acaaggagauugugggg

SEQ ID NO: 758176 - RNA, 17 nt, Artificial Sequence
  Synthetic
aagaugagauugugggg

SEQ ID NO: 758177 - RNA, 17 nt, Artificial Sequence
  Synthetic
ugggaacuguugugggg

SEQ ID NO: 758178 - RNA, 17 nt, Artificial Sequence
  Synthetic
uggggacuguugugggg

SEQ ID NO: 758179 - RNA, 17 nt, Artificial Sequence
  Synthetic
cggggccuguugugggg

SEQ ID NO: 758180 - RNA, 17 nt, Artificial Sequence
  Synthetic
cauauguauaauugggg

SEQ ID NO: 758181 - RNA, 17 nt, Artificial Sequence
  Synthetic
uaagcuucuaauugggg

SEQ ID NO: 758182 - RNA, 17 nt, Artificial Sequence
  Synthetic
uuagucuagcauugggg

SEQ ID NO: 758183 - RNA, 17 nt, Artificial Sequence
  Synthetic
aaauaugugcauugggg

SEQ ID NO: 758184 - RNA, 17 nt, Artificial Sequence
  Synthetic
aaucccagcacuugggg

SEQ ID NO: 758185 - RNA, 17 nt, Artificial Sequence
  Synthetic
auuuaguaggcuugggg

SEQ ID NO: 758186 - RNA, 17 nt, Artificial Sequence
  Synthetic
caaaaagaaaguugggg

SEQ ID NO: 758187 - RNA, 17 nt, Artificial Sequence
  Synthetic
uuucaaugcaguugggg

SEQ ID NO: 758188 - RNA, 17 nt, Artificial Sequence
  Synthetic
caguggugggguugggg

SEQ ID NO: 758189 - RNA, 17 nt, Artificial Sequence
  Synthetic
uuguguguguguugggg

SEQ ID NO: 758190 - RNA, 17 nt, Artificial Sequence
  Synthetic
uggccuccuuguugggg

SEQ ID NO: 758191 - RNA, 17 nt, Artificial Sequence
  Synthetic
auucuguugauuugggg

SEQ ID NO: 758192 - RNA, 17 nt, Artificial Sequence
  Synthetic
aucccagcacuuugggg

SEQ ID NO: 758193 - RNA, 17 nt, Artificial Sequence
  Synthetic
uauccaucccuuugggg

SEQ ID NO: 758194 - RNA, 17 nt, Artificial Sequence
  Synthetic
uccucuuagcuuugggg

SEQ ID NO: 758195 - RNA, 17 nt, Artificial Sequence
  Synthetic
uaagauuuucuuugggg

SEQ ID NO: 758196 - RNA, 17 nt, Artificial Sequence
  Synthetic
aagguggggguuugggg

SEQ ID NO: 758197 - RNA, 17 nt, Artificial Sequence
  Synthetic
auuuaacugguuugggg

SEQ ID NO: 758198 - RNA, 17 nt, Artificial Sequence
  Synthetic
aaucucuccuuuugggg

SEQ ID NO: 758199 - RNA, 17 nt, Artificial Sequence
  Synthetic
auuucuguguuuugggg

SEQ ID NO: 758200 - RNA, 17 nt, Artificial Sequence
  Synthetic
agggaguccaaaauggg

SEQ ID NO: 758201 - RNA, 17 nt, Artificial Sequence
  Synthetic
augguucucaaaauggg

SEQ ID NO: 758202 - RNA, 17 nt, Artificial Sequence
  Synthetic
agcacaccuaaaauggg

SEQ ID NO: 758203 - RNA, 17 nt, Artificial Sequence
  Synthetic
ugagaggccgaaauggg

SEQ ID NO: 758204 - RNA, 17 nt, Artificial Sequence
  Synthetic
cauguugcauaaauggg

SEQ ID NO: 758205 - RNA, 17 nt, Artificial Sequence
  Synthetic
uuccaggauacaauggg

SEQ ID NO: 758206 - RNA, 17 nt, Artificial Sequence
  Synthetic
caaccccagccaauggg

SEQ ID NO: 758207 - RNA, 17 nt, Artificial Sequence
  Synthetic
acaauuuuuauaauggg

SEQ ID NO: 758208 - RNA, 17 nt, Artificial Sequence
  Synthetic
uucagucagcuaauggg

SEQ ID NO: 758209 - RNA, 17 nt, Artificial Sequence
  Synthetic
ucuuccauucuaauggg

SEQ ID NO: 758210 - RNA, 17 nt, Artificial Sequence
  Synthetic
aauuagaagguaauggg

SEQ ID NO: 758211 - RNA, 17 nt, Artificial Sequence
  Synthetic
aaugacaaguuaauggg

SEQ ID NO: 758212 - RNA, 17 nt, Artificial Sequence
  Synthetic
cagaaauggaacauggg

SEQ ID NO: 758213 - RNA, 17 nt, Artificial Sequence
  Synthetic
aaaagcuugaacauggg

SEQ ID NO: 758214 - RNA, 17 nt, Artificial Sequence
  Synthetic
augagaaaccccauggg

SEQ ID NO: 758215 - RNA, 17 nt, Artificial Sequence
  Synthetic
agaggccagcccauggg

SEQ ID NO: 758216 - RNA, 17 nt, Artificial Sequence
  Synthetic
cugcgcccggccauggg

SEQ ID NO: 758217 - RNA, 17 nt, Artificial Sequence
  Synthetic
ugggguggggccauggg

SEQ ID NO: 758218 - RNA, 17 nt, Artificial Sequence
  Synthetic
cacgacaacagcauggg

SEQ ID NO: 758219 - RNA, 17 nt, Artificial Sequence
  Synthetic
ccugccagcugcauggg

SEQ ID NO: 758220 - RNA, 17 nt, Artificial Sequence
  Synthetic
uaauuagcaaucauggg

SEQ ID NO: 758221 - RNA, 17 nt, Artificial Sequence
  Synthetic
cagcaaaggcucauggg

SEQ ID NO: 758222 - RNA, 17 nt, Artificial Sequence
  Synthetic
uccccagaugucauggg

SEQ ID NO: 758223 - RNA, 17 nt, Artificial Sequence
  Synthetic
uccccaggugucauggg

SEQ ID NO: 758224 - RNA, 17 nt, Artificial Sequence
  Synthetic
uugaaauugcagauggg

SEQ ID NO: 758225 - RNA, 17 nt, Artificial Sequence
  Synthetic
ugggaggccgagauggg

SEQ ID NO: 758226 - RNA, 17 nt, Artificial Sequence
  Synthetic
agagauacggagauggg

SEQ ID NO: 758227 - RNA, 17 nt, Artificial Sequence
  Synthetic
uauucuggggagauggg

SEQ ID NO: 758228 - RNA, 17 nt, Artificial Sequence
  Synthetic
aauaacuuuuagauggg

SEQ ID NO: 758229 - RNA, 17 nt, Artificial Sequence
  Synthetic
agaacucucuggauggg

SEQ ID NO: 758230 - RNA, 17 nt, Artificial Sequence
  Synthetic
ugagguggguggauggg

SEQ ID NO: 758231 - RNA, 17 nt, Artificial Sequence
  Synthetic
auuauguggaugauggg

SEQ ID NO: 758232 - RNA, 17 nt, Artificial Sequence
  Synthetic
ucugguccuaugauggg

SEQ ID NO: 758233 - RNA, 17 nt, Artificial Sequence
  Synthetic
aaccuaugagugauggg

SEQ ID NO: 758234 - RNA, 17 nt, Artificial Sequence
  Synthetic
ucugggucugugauggg

SEQ ID NO: 758235 - RNA, 17 nt, Artificial Sequence
  Synthetic
ucugggcuugugauggg

SEQ ID NO: 758236 - RNA, 17 nt, Artificial Sequence
  Synthetic
aguaaugaaaauauggg

SEQ ID NO: 758237 - RNA, 17 nt, Artificial Sequence
  Synthetic
aaauuaaaagauauggg

SEQ ID NO: 758238 - RNA, 17 nt, Artificial Sequence
  Synthetic
uaggagggugauauggg

SEQ ID NO: 758239 - RNA, 17 nt, Artificial Sequence
  Synthetic
uuaacuacuuauauggg

SEQ ID NO: 758240 - RNA, 17 nt, Artificial Sequence
  Synthetic
aaucccagcacuauggg

SEQ ID NO: 758241 - RNA, 17 nt, Artificial Sequence
  Synthetic
auuuaugaaaguauggg

SEQ ID NO: 758242 - RNA, 17 nt, Artificial Sequence
  Synthetic
uauuucagagguauggg

SEQ ID NO: 758243 - RNA, 17 nt, Artificial Sequence
  Synthetic
aaguguguguguauggg

SEQ ID NO: 758244 - RNA, 17 nt, Artificial Sequence
  Synthetic
auaccaaaacuuauggg

SEQ ID NO: 758245 - RNA, 17 nt, Artificial Sequence
  Synthetic
ugcuuaaugcuuauggg

SEQ ID NO: 758246 - RNA, 17 nt, Artificial Sequence
  Synthetic
uucccauguguuauggg

SEQ ID NO: 758247 - RNA, 17 nt, Artificial Sequence
  Synthetic
aauuucuaauuuauggg

SEQ ID NO: 758248 - RNA, 17 nt, Artificial Sequence
  Synthetic
cuuugcgaagaacuggg

SEQ ID NO: 758249 - RNA, 17 nt, Artificial Sequence
  Synthetic
agaggcucauaacuggg

SEQ ID NO: 758250 - RNA, 17 nt, Artificial Sequence
  Synthetic
aagaaguucuaacuggg

SEQ ID NO: 758251 - RNA, 17 nt, Artificial Sequence
  Synthetic
acaaaaaauuaacuggg

SEQ ID NO: 758252 - RNA, 17 nt, Artificial Sequence
  Synthetic
aaugaauagccacuggg

SEQ ID NO: 758253 - RNA, 17 nt, Artificial Sequence
  Synthetic
agaggcaugagacuggg

SEQ ID NO: 758254 - RNA, 17 nt, Artificial Sequence
  Synthetic
uaaugccauagacuggg

SEQ ID NO: 758255 - RNA, 17 nt, Artificial Sequence
  Synthetic
aaguugaaaggacuggg

SEQ ID NO: 758256 - RNA, 17 nt, Artificial Sequence
  Synthetic
auuuaguagauacuggg

SEQ ID NO: 758257 - RNA, 17 nt, Artificial Sequence
  Synthetic
acugcugaguuacuggg

SEQ ID NO: 758258 - RNA, 17 nt, Artificial Sequence
  Synthetic
aauggcaugaaccuggg

SEQ ID NO: 758259 - RNA, 17 nt, Artificial Sequence
  Synthetic
aaaggcgugaaccuggg

SEQ ID NO: 758260 - RNA, 17 nt, Artificial Sequence
  Synthetic
aauggcgugaaccuggg

SEQ ID NO: 758261 - RNA, 17 nt, Artificial Sequence
  Synthetic
aaccacuugaaccuggg

SEQ ID NO: 758262 - RNA, 17 nt, Artificial Sequence
  Synthetic
aaucacuugaaccuggg

SEQ ID NO: 758263 - RNA, 17 nt, Artificial Sequence
  Synthetic
aagcgcuugaaccuggg

SEQ ID NO: 758264 - RNA, 17 nt, Artificial Sequence
  Synthetic
aaucgcuugaaccuggg

SEQ ID NO: 758265 - RNA, 17 nt, Artificial Sequence
  Synthetic
aauugcuugaaccuggg

SEQ ID NO: 758266 - RNA, 17 nt, Artificial Sequence
  Synthetic
aauuguuugaaccuggg

SEQ ID NO: 758267 - RNA, 17 nt, Artificial Sequence
  Synthetic
uauuccacagaccuggg

SEQ ID NO: 758268 - RNA, 17 nt, Artificial Sequence
  Synthetic
ucucucaaauaccuggg

SEQ ID NO: 758269 - RNA, 17 nt, Artificial Sequence
  Synthetic
agucccagcuaccuggg

SEQ ID NO: 758270 - RNA, 17 nt, Artificial Sequence
  Synthetic
caugcucgcuaccuggg

SEQ ID NO: 758271 - RNA, 17 nt, Artificial Sequence
  Synthetic
aauuagcuagcccuggg

SEQ ID NO: 758272 - RNA, 17 nt, Artificial Sequence
  Synthetic
uuggauaccagccuggg

SEQ ID NO: 758273 - RNA, 17 nt, Artificial Sequence
  Synthetic
cugcacucuagccuggg

SEQ ID NO: 758274 - RNA, 17 nt, Artificial Sequence
  Synthetic
agaaacaccggccuggg

SEQ ID NO: 758275 - RNA, 17 nt, Artificial Sequence
  Synthetic
uaagaaaaaugccuggg

SEQ ID NO: 758276 - RNA, 17 nt, Artificial Sequence
  Synthetic
ccuagaaucauccuggg

SEQ ID NO: 758277 - RNA, 17 nt, Artificial Sequence
  Synthetic
cccccacacguccuggg

SEQ ID NO: 758278 - RNA, 17 nt, Artificial Sequence
  Synthetic
aauuaccacaagcuggg

SEQ ID NO: 758279 - RNA, 17 nt, Artificial Sequence
  Synthetic
ccaugauagcagcuggg

SEQ ID NO: 758280 - RNA, 17 nt, Artificial Sequence
  Synthetic
uuuagaguacggcuggg

SEQ ID NO: 758281 - RNA, 17 nt, Artificial Sequence
  Synthetic
cugccaaauaugcuggg

SEQ ID NO: 758282 - RNA, 17 nt, Artificial Sequence
  Synthetic
ugucaaccccugcuggg

SEQ ID NO: 758283 - RNA, 17 nt, Artificial Sequence
  Synthetic
aacacagcagugcuggg

SEQ ID NO: 758284 - RNA, 17 nt, Artificial Sequence
  Synthetic
cugcccaccuugcuggg

SEQ ID NO: 758285 - RNA, 17 nt, Artificial Sequence
  Synthetic
cauuuuggguugcuggg

SEQ ID NO: 758286 - RNA, 17 nt, Artificial Sequence
  Synthetic
agagaaaaaaaucuggg

SEQ ID NO: 758287 - RNA, 17 nt, Artificial Sequence
  Synthetic
uuagaaaaaaaucuggg

SEQ ID NO: 758288 - RNA, 17 nt, Artificial Sequence
  Synthetic
acacacaaaaaucuggg

SEQ ID NO: 758289 - RNA, 17 nt, Artificial Sequence
  Synthetic
augaauuaaaaucuggg

SEQ ID NO: 758290 - RNA, 17 nt, Artificial Sequence
  Synthetic
aauagcuugaaucuggg

SEQ ID NO: 758291 - RNA, 17 nt, Artificial Sequence
  Synthetic
aaucgcuugaaucuggg

SEQ ID NO: 758292 - RNA, 17 nt, Artificial Sequence
  Synthetic
agauggucccaucuggg

SEQ ID NO: 758293 - RNA, 17 nt, Artificial Sequence
  Synthetic
agauuagcucaucuggg

SEQ ID NO: 758294 - RNA, 17 nt, Artificial Sequence
  Synthetic
cuucacucaacucuggg

SEQ ID NO: 758295 - RNA, 17 nt, Artificial Sequence
  Synthetic
aaucccagcacucuggg

SEQ ID NO: 758296 - RNA, 17 nt, Artificial Sequence
  Synthetic
aucacaucagcucuggg

SEQ ID NO: 758297 - RNA, 17 nt, Artificial Sequence
  Synthetic
uuacuuuuggcucuggg

SEQ ID NO: 758298 - RNA, 17 nt, Artificial Sequence
  Synthetic
cugacacuaucucuggg

SEQ ID NO: 758299 - RNA, 17 nt, Artificial Sequence
  Synthetic
aaucccaggucucuggg

SEQ ID NO: 758300 - RNA, 17 nt, Artificial Sequence
  Synthetic
aaaacagggagucuggg

SEQ ID NO: 758301 - RNA, 17 nt, Artificial Sequence
  Synthetic
agagauuugggucuggg

SEQ ID NO: 758302 - RNA, 17 nt, Artificial Sequence
  Synthetic
uaaugagccauucuggg

SEQ ID NO: 758303 - RNA, 17 nt, Artificial Sequence
  Synthetic
uugcucuuuauucuggg

SEQ ID NO: 758304 - RNA, 17 nt, Artificial Sequence
  Synthetic
auagaagcuaaaguggg

SEQ ID NO: 758305 - RNA, 17 nt, Artificial Sequence
  Synthetic
ugggaggcagaaguggg

SEQ ID NO: 758306 - RNA, 17 nt, Artificial Sequence
  Synthetic
ugggaggccgaaguggg

SEQ ID NO: 758307 - RNA, 17 nt, Artificial Sequence
  Synthetic
ugggaggcugaaguggg

SEQ ID NO: 758308 - RNA, 17 nt, Artificial Sequence
  Synthetic
uucuuauaauaaguggg

SEQ ID NO: 758309 - RNA, 17 nt, Artificial Sequence
  Synthetic
cgauuuaaaacaguggg

SEQ ID NO: 758310 - RNA, 17 nt, Artificial Sequence
  Synthetic
caggaacacacaguggg

SEQ ID NO: 758311 - RNA, 17 nt, Artificial Sequence
  Synthetic
cuuguccccacaguggg

SEQ ID NO: 758312 - RNA, 17 nt, Artificial Sequence
  Synthetic
uagauuuaaccaguggg

SEQ ID NO: 758313 - RNA, 17 nt, Artificial Sequence
  Synthetic
agcgugugagcaguggg

SEQ ID NO: 758314 - RNA, 17 nt, Artificial Sequence
  Synthetic
ugaguguguggaguggg

SEQ ID NO: 758315 - RNA, 17 nt, Artificial Sequence
  Synthetic
cuuuuauuuggaguggg

SEQ ID NO: 758316 - RNA, 17 nt, Artificial Sequence
  Synthetic
aggauauuaugaguggg

SEQ ID NO: 758317 - RNA, 17 nt, Artificial Sequence
  Synthetic
uugaagaggugaguggg

SEQ ID NO: 758318 - RNA, 17 nt, Artificial Sequence
  Synthetic
uaaauuuagcuaguggg

SEQ ID NO: 758319 - RNA, 17 nt, Artificial Sequence
  Synthetic
cugugaaggguaguggg

SEQ ID NO: 758320 - RNA, 17 nt, Artificial Sequence
  Synthetic
agagaacccaacguggg

SEQ ID NO: 758321 - RNA, 17 nt, Artificial Sequence
  Synthetic
ugggaggccuacguggg

SEQ ID NO: 758322 - RNA, 17 nt, Artificial Sequence
  Synthetic
uauuaaaucuccguggg

SEQ ID NO: 758323 - RNA, 17 nt, Artificial Sequence
  Synthetic
aaauacaugaucguggg

SEQ ID NO: 758324 - RNA, 17 nt, Artificial Sequence
  Synthetic
ugagagaccaagguggg

SEQ ID NO: 758325 - RNA, 17 nt, Artificial Sequence
  Synthetic
ugucaggccaagguggg

SEQ ID NO: 758326 - RNA, 17 nt, Artificial Sequence
  Synthetic
cgggaggccaagguggg

SEQ ID NO: 758327 - RNA, 17 nt, Artificial Sequence
  Synthetic
ugggaggccaagguggg

SEQ ID NO: 758328 - RNA, 17 nt, Artificial Sequence
  Synthetic
ugggaguccaagguggg

SEQ ID NO: 758329 - RNA, 17 nt, Artificial Sequence
  Synthetic
uggaaggcuaagguggg

SEQ ID NO: 758330 - RNA, 17 nt, Artificial Sequence
  Synthetic
aguagcuguaagguggg

SEQ ID NO: 758331 - RNA, 17 nt, Artificial Sequence
  Synthetic
uacacaaaucagguggg

SEQ ID NO: 758332 - RNA, 17 nt, Artificial Sequence
  Synthetic
aaagauacagagguggg

SEQ ID NO: 758333 - RNA, 17 nt, Artificial Sequence
  Synthetic
aauaacagagagguggg

SEQ ID NO: 758334 - RNA, 17 nt, Artificial Sequence
  Synthetic
ugggaggccgagguggg

SEQ ID NO: 758335 - RNA, 17 nt, Artificial Sequence
  Synthetic
ugugaggccgagguggg

SEQ ID NO: 758336 - RNA, 17 nt, Artificial Sequence
  Synthetic
uggggggccgagguggg

SEQ ID NO: 758337 - RNA, 17 nt, Artificial Sequence
  Synthetic
acuucucuggagguggg

SEQ ID NO: 758338 - RNA, 17 nt, Artificial Sequence
  Synthetic
cagaaggcugagguggg

SEQ ID NO: 758339 - RNA, 17 nt, Artificial Sequence
  Synthetic
caggaggcugagguggg

SEQ ID NO: 758340 - RNA, 17 nt, Artificial Sequence
  Synthetic
uaggaggcugagguggg

SEQ ID NO: 758341 - RNA, 17 nt, Artificial Sequence
  Synthetic
cgggaggcugagguggg

SEQ ID NO: 758342 - RNA, 17 nt, Artificial Sequence
  Synthetic
ugggaggcugagguggg

SEQ ID NO: 758343 - RNA, 17 nt, Artificial Sequence
  Synthetic
uuuaacuaauagguggg

SEQ ID NO: 758344 - RNA, 17 nt, Artificial Sequence
  Synthetic
uagcuuuagacgguggg

SEQ ID NO: 758345 - RNA, 17 nt, Artificial Sequence
  Synthetic
aaugaagcaaggguggg

SEQ ID NO: 758346 - RNA, 17 nt, Artificial Sequence
  Synthetic
agcccccagaggguggg

SEQ ID NO: 758347 - RNA, 17 nt, Artificial Sequence
  Synthetic
cuaggguggaggguggg

SEQ ID NO: 758348 - RNA, 17 nt, Artificial Sequence
  Synthetic
agaguguggaggguggg

SEQ ID NO: 758349 - RNA, 17 nt, Artificial Sequence
  Synthetic
aacuucuuagggguggg

SEQ ID NO: 758350 - RNA, 17 nt, Artificial Sequence
  Synthetic
uuggugguggggguggg

SEQ ID NO: 758351 - RNA, 17 nt, Artificial Sequence
  Synthetic
ugccuguuggggguggg

SEQ ID NO: 758352 - RNA, 17 nt, Artificial Sequence
  Synthetic
aagcagugugggguggg

SEQ ID NO: 758353 - RNA, 17 nt, Artificial Sequence
  Synthetic
aacuguugugggguggg

SEQ ID NO: 758354 - RNA, 17 nt, Artificial Sequence
  Synthetic
uuaaaacaguggguggg

SEQ ID NO: 758355 - RNA, 17 nt, Artificial Sequence
  Synthetic
ugugagcaguggguggg

SEQ ID NO: 758356 - RNA, 17 nt, Artificial Sequence
  Synthetic
cuuuguuguuggguggg

SEQ ID NO: 758357 - RNA, 17 nt, Artificial Sequence
  Synthetic
uguccuuacaugguggg

SEQ ID NO: 758358 - RNA, 17 nt, Artificial Sequence
  Synthetic
cucagaaucaugguggg

SEQ ID NO: 758359 - RNA, 17 nt, Artificial Sequence
  Synthetic
cacagccugaugguggg

SEQ ID NO: 758360 - RNA, 17 nt, Artificial Sequence
  Synthetic
cgggggaaccugguggg

SEQ ID NO: 758361 - RNA, 17 nt, Artificial Sequence
  Synthetic
agguggggccugguggg

SEQ ID NO: 758362 - RNA, 17 nt, Artificial Sequence
  Synthetic
aaagcugcagugguggg

SEQ ID NO: 758363 - RNA, 17 nt, Artificial Sequence
  Synthetic
aagacaagagugguggg

SEQ ID NO: 758364 - RNA, 17 nt, Artificial Sequence
  Synthetic
uuugggguggugguggg

SEQ ID NO: 758365 - RNA, 17 nt, Artificial Sequence
  Synthetic
acccuccacaauguggg

SEQ ID NO: 758366 - RNA, 17 nt, Artificial Sequence
  Synthetic
aaacuugaacauguggg

SEQ ID NO: 758367 - RNA, 17 nt, Artificial Sequence
  Synthetic
ugauuggaucauguggg

SEQ ID NO: 758368 - RNA, 17 nt, Artificial Sequence
  Synthetic
uaggagguagauguggg

SEQ ID NO: 758369 - RNA, 17 nt, Artificial Sequence
  Synthetic
agggaggccgauguggg

SEQ ID NO: 758370 - RNA, 17 nt, Artificial Sequence
  Synthetic
aggcguguggauguggg

SEQ ID NO: 758371 - RNA, 17 nt, Artificial Sequence
  Synthetic
ugggaggcugauguggg

SEQ ID NO: 758372 - RNA, 17 nt, Artificial Sequence
  Synthetic
aaucccagaacuguggg

SEQ ID NO: 758373 - RNA, 17 nt, Artificial Sequence
  Synthetic
aaucccagcacuguggg

SEQ ID NO: 758374 - RNA, 17 nt, Artificial Sequence
  Synthetic
uggaaucuggguguggg

SEQ ID NO: 758375 - RNA, 17 nt, Artificial Sequence
  Synthetic
uuaggggaugguguggg

SEQ ID NO: 758376 - RNA, 17 nt, Artificial Sequence
  Synthetic
uaaggagcuuguguggg

SEQ ID NO: 758377 - RNA, 17 nt, Artificial Sequence
  Synthetic
uccccacguguuguggg

SEQ ID NO: 758378 - RNA, 17 nt, Artificial Sequence
  Synthetic
uucccauguguuguggg

SEQ ID NO: 758379 - RNA, 17 nt, Artificial Sequence
  Synthetic
uuccuacuuguuguggg

SEQ ID NO: 758380 - RNA, 17 nt, Artificial Sequence
  Synthetic
uaauucuuuguuguggg

SEQ ID NO: 758381 - RNA, 17 nt, Artificial Sequence
  Synthetic
ucuguagaucaauuggg

SEQ ID NO: 758382 - RNA, 17 nt, Artificial Sequence
  Synthetic
augaggauagaauuggg

SEQ ID NO: 758383 - RNA, 17 nt, Artificial Sequence
  Synthetic
cugaguauggaauuggg

SEQ ID NO: 758384 - RNA, 17 nt, Artificial Sequence
  Synthetic
ccauauguauaauuggg

SEQ ID NO: 758385 - RNA, 17 nt, Artificial Sequence
  Synthetic
cuguugacuuaauuggg

SEQ ID NO: 758386 - RNA, 17 nt, Artificial Sequence
  Synthetic
aaucccagcacauuggg

SEQ ID NO: 758387 - RNA, 17 nt, Artificial Sequence
  Synthetic
uagucauucacauuggg

SEQ ID NO: 758388 - RNA, 17 nt, Artificial Sequence
  Synthetic
ccaguugggggauuggg

SEQ ID NO: 758389 - RNA, 17 nt, Artificial Sequence
  Synthetic
aagaaaaauggauuggg

SEQ ID NO: 758390 - RNA, 17 nt, Artificial Sequence
  Synthetic
aaaucaacacuauuggg

SEQ ID NO: 758391 - RNA, 17 nt, Artificial Sequence
  Synthetic
uccucaccauuauuggg

SEQ ID NO: 758392 - RNA, 17 nt, Artificial Sequence
  Synthetic
ugguaaugauuauuggg

SEQ ID NO: 758393 - RNA, 17 nt, Artificial Sequence
  Synthetic
aaucacuugaacuuggg

SEQ ID NO: 758394 - RNA, 17 nt, Artificial Sequence
  Synthetic
aaucgcuugaacuuggg

SEQ ID NO: 758395 - RNA, 17 nt, Artificial Sequence
  Synthetic
cauuuaaaacacuuggg

SEQ ID NO: 758396 - RNA, 17 nt, Artificial Sequence
  Synthetic
aaucccagccacuuggg

SEQ ID NO: 758397 - RNA, 17 nt, Artificial Sequence
  Synthetic
agucccagccacuuggg

SEQ ID NO: 758398 - RNA, 17 nt, Artificial Sequence
  Synthetic
caguucagggacuuggg

SEQ ID NO: 758399 - RNA, 17 nt, Artificial Sequence
  Synthetic
aaucacagcuacuuggg

SEQ ID NO: 758400 - RNA, 17 nt, Artificial Sequence
  Synthetic
aaucccagcuacuuggg

SEQ ID NO: 758401 - RNA, 17 nt, Artificial Sequence
  Synthetic
uaucccagcuacuuggg

SEQ ID NO: 758402 - RNA, 17 nt, Artificial Sequence
  Synthetic
agucccagcuacuuggg

SEQ ID NO: 758403 - RNA, 17 nt, Artificial Sequence
  Synthetic
aaucucagcuacuuggg

SEQ ID NO: 758404 - RNA, 17 nt, Artificial Sequence
  Synthetic
agucucagcuacuuggg

SEQ ID NO: 758405 - RNA, 17 nt, Artificial Sequence
  Synthetic
aauccuagcuacuuggg

SEQ ID NO: 758406 - RNA, 17 nt, Artificial Sequence
  Synthetic
agaccuggcuacuuggg

SEQ ID NO: 758407 - RNA, 17 nt, Artificial Sequence
  Synthetic
agucucugcuacuuggg

SEQ ID NO: 758408 - RNA, 17 nt, Artificial Sequence
  Synthetic
aaucccagguacuuggg

SEQ ID NO: 758409 - RNA, 17 nt, Artificial Sequence
  Synthetic
uagguucauuacuuggg

SEQ ID NO: 758410 - RNA, 17 nt, Artificial Sequence
  Synthetic
ucagaacucagcuuggg

SEQ ID NO: 758411 - RNA, 17 nt, Artificial Sequence
  Synthetic
ugaauuuucagcuuggg

SEQ ID NO: 758412 - RNA, 17 nt, Artificial Sequence
  Synthetic
cuaaacuggagcuuggg

SEQ ID NO: 758413 - RNA, 17 nt, Artificial Sequence
  Synthetic
accacacagggcuuggg

SEQ ID NO: 758414 - RNA, 17 nt, Artificial Sequence
  Synthetic
augcugauuggcuuggg

SEQ ID NO: 758415 - RNA, 17 nt, Artificial Sequence
  Synthetic
aaucccagcugcuuggg

SEQ ID NO: 758416 - RNA, 17 nt, Artificial Sequence
  Synthetic
caucugcaaaucuuggg

SEQ ID NO: 758417 - RNA, 17 nt, Artificial Sequence
  Synthetic
cuucuaaggaucuuggg

SEQ ID NO: 758418 - RNA, 17 nt, Artificial Sequence
  Synthetic
aaagugaaccucuuggg

SEQ ID NO: 758419 - RNA, 17 nt, Artificial Sequence
  Synthetic
aaucucagccucuuggg

SEQ ID NO: 758420 - RNA, 17 nt, Artificial Sequence
  Synthetic
aagccuggagucuuggg

SEQ ID NO: 758421 - RNA, 17 nt, Artificial Sequence
  Synthetic
ccugguuuagucuuggg

SEQ ID NO: 758422 - RNA, 17 nt, Artificial Sequence
  Synthetic
ccaugaguguucuuggg

SEQ ID NO: 758423 - RNA, 17 nt, Artificial Sequence
  Synthetic
ugcugugguuucuuggg

SEQ ID NO: 758424 - RNA, 17 nt, Artificial Sequence
  Synthetic
cagagauacaaguuggg

SEQ ID NO: 758425 - RNA, 17 nt, Artificial Sequence
  Synthetic
agguugaaacaguuggg

SEQ ID NO: 758426 - RNA, 17 nt, Artificial Sequence
  Synthetic
agaggguggagguuggg

SEQ ID NO: 758427 - RNA, 17 nt, Artificial Sequence
  Synthetic
acaguggugggguuggg

SEQ ID NO: 758428 - RNA, 17 nt, Artificial Sequence
  Synthetic
cuaucucauggguuggg

SEQ ID NO: 758429 - RNA, 17 nt, Artificial Sequence
  Synthetic
aucacuuaaugguuggg

SEQ ID NO: 758430 - RNA, 17 nt, Artificial Sequence
  Synthetic
agcuauuucugguuggg

SEQ ID NO: 758431 - RNA, 17 nt, Artificial Sequence
  Synthetic
auguauaugauguuggg

SEQ ID NO: 758432 - RNA, 17 nt, Artificial Sequence
  Synthetic
acuuagauuauguuggg

SEQ ID NO: 758433 - RNA, 17 nt, Artificial Sequence
  Synthetic
auucugcuacuguuggg

SEQ ID NO: 758434 - RNA, 17 nt, Artificial Sequence
  Synthetic
auuguguguguguuggg

SEQ ID NO: 758435 - RNA, 17 nt, Artificial Sequence
  Synthetic
uugguccuuguguuggg

SEQ ID NO: 758436 - RNA, 17 nt, Artificial Sequence
  Synthetic
acaaacauauuguuggg

SEQ ID NO: 758437 - RNA, 17 nt, Artificial Sequence
  Synthetic
auggccuccuuguuggg

SEQ ID NO: 758438 - RNA, 17 nt, Artificial Sequence
  Synthetic
cauccuuuguuguuggg

SEQ ID NO: 758439 - RNA, 17 nt, Artificial Sequence
  Synthetic
aaucccagcaauuuggg

SEQ ID NO: 758440 - RNA, 17 nt, Artificial Sequence
  Synthetic
aauaucagcaauuuggg

SEQ ID NO: 758441 - RNA, 17 nt, Artificial Sequence
  Synthetic
ccaguaacagauuuggg

SEQ ID NO: 758442 - RNA, 17 nt, Artificial Sequence
  Synthetic
ucaaaaugagauuuggg

SEQ ID NO: 758443 - RNA, 17 nt, Artificial Sequence
  Synthetic
ucagaaugagauuuggg

SEQ ID NO: 758444 - RNA, 17 nt, Artificial Sequence
  Synthetic
ucaacaugagauuuggg

SEQ ID NO: 758445 - RNA, 17 nt, Artificial Sequence
  Synthetic
augacaugagauuuggg

SEQ ID NO: 758446 - RNA, 17 nt, Artificial Sequence
  Synthetic
ucaagaugagauuuggg

SEQ ID NO: 758447 - RNA, 17 nt, Artificial Sequence
  Synthetic
uuaauaugagauuuggg

SEQ ID NO: 758448 - RNA, 17 nt, Artificial Sequence
  Synthetic
ucaaggugagauuuggg

SEQ ID NO: 758449 - RNA, 17 nt, Artificial Sequence
  Synthetic
ucaagacgggauuuggg

SEQ ID NO: 758450 - RNA, 17 nt, Artificial Sequence
  Synthetic
agaaacagugauuuggg

SEQ ID NO: 758451 - RNA, 17 nt, Artificial Sequence
  Synthetic
aaucccagcuauuuggg

SEQ ID NO: 758452 - RNA, 17 nt, Artificial Sequence
  Synthetic
agucccagcuauuuggg

SEQ ID NO: 758453 - RNA, 17 nt, Artificial Sequence
  Synthetic
agucccaguuauuuggg

SEQ ID NO: 758454 - RNA, 17 nt, Artificial Sequence
  Synthetic
caagugauuuauuuggg

SEQ ID NO: 758455 - RNA, 17 nt, Artificial Sequence
  Synthetic
aaucccaacacuuuggg

SEQ ID NO: 758456 - RNA, 17 nt, Artificial Sequence
  Synthetic
acucccaacacuuuggg

SEQ ID NO: 758457 - RNA, 17 nt, Artificial Sequence
  Synthetic
aaucucaacacuuuggg

SEQ ID NO: 758458 - RNA, 17 nt, Artificial Sequence
  Synthetic
aauccuaacacuuuggg

SEQ ID NO: 758459 - RNA, 17 nt, Artificial Sequence
  Synthetic
aaucccaccacuuuggg

SEQ ID NO: 758460 - RNA, 17 nt, Artificial Sequence
  Synthetic
cuguaauccacuuuggg

SEQ ID NO: 758461 - RNA, 17 nt, Artificial Sequence
  Synthetic
aauccaagcacuuuggg

SEQ ID NO: 758462 - RNA, 17 nt, Artificial Sequence
  Synthetic
aauaccagcacuuuggg

SEQ ID NO: 758463 - RNA, 17 nt, Artificial Sequence
  Synthetic
aaacccagcacuuuggg

SEQ ID NO: 758464 - RNA, 17 nt, Artificial Sequence
  Synthetic
aaccccagcacuuuggg

SEQ ID NO: 758465 - RNA, 17 nt, Artificial Sequence
  Synthetic
aaucccagcacuuuggg

SEQ ID NO: 758466 - RNA, 17 nt, Artificial Sequence
  Synthetic
uaucccagcacuuuggg

SEQ ID NO: 758467 - RNA, 17 nt, Artificial Sequence
  Synthetic
acucccagcacuuuggg

SEQ ID NO: 758468 - RNA, 17 nt, Artificial Sequence
  Synthetic
aauuccagcacuuuggg

SEQ ID NO: 758469 - RNA, 17 nt, Artificial Sequence
  Synthetic
aaucgcagcacuuuggg

SEQ ID NO: 758470 - RNA, 17 nt, Artificial Sequence
  Synthetic
uggcucagcacuuuggg

SEQ ID NO: 758471 - RNA, 17 nt, Artificial Sequence
  Synthetic
aaucucagcacuuuggg

SEQ ID NO: 758472 - RNA, 17 nt, Artificial Sequence
  Synthetic
aauccuagcacuuuggg

SEQ ID NO: 758473 - RNA, 17 nt, Artificial Sequence
  Synthetic
aauccccgcacuuuggg

SEQ ID NO: 758474 - RNA, 17 nt, Artificial Sequence
  Synthetic
aauuuugagacuuuggg

SEQ ID NO: 758475 - RNA, 17 nt, Artificial Sequence
  Synthetic
aaucccaggacuuuggg

SEQ ID NO: 758476 - RNA, 17 nt, Artificial Sequence
  Synthetic
aacccuaggacuuuggg

SEQ ID NO: 758477 - RNA, 17 nt, Artificial Sequence
  Synthetic
aaucccaguacuuuggg

SEQ ID NO: 758478 - RNA, 17 nt, Artificial Sequence
  Synthetic
aauccuaguacuuuggg

SEQ ID NO: 758479 - RNA, 17 nt, Artificial Sequence
  Synthetic
acucccagcgcuuuggg

SEQ ID NO: 758480 - RNA, 17 nt, Artificial Sequence
  Synthetic
aauuccagcgcuuuggg

SEQ ID NO: 758481 - RNA, 17 nt, Artificial Sequence
  Synthetic
aaucccagugcuuuggg

SEQ ID NO: 758482 - RNA, 17 nt, Artificial Sequence
  Synthetic
caucucagugcuuuggg

SEQ ID NO: 758483 - RNA, 17 nt, Artificial Sequence
  Synthetic
aauccuagugcuuuggg

SEQ ID NO: 758484 - RNA, 17 nt, Artificial Sequence
  Synthetic
aauccaggugcuuuggg

SEQ ID NO: 758485 - RNA, 17 nt, Artificial Sequence
  Synthetic
aaucccugugcuuuggg

SEQ ID NO: 758486 - RNA, 17 nt, Artificial Sequence
  Synthetic
agcagcacagguuuggg

SEQ ID NO: 758487 - RNA, 17 nt, Artificial Sequence
  Synthetic
uaccuuaacuguuuggg

SEQ ID NO: 758488 - RNA, 17 nt, Artificial Sequence
  Synthetic
auuuuuguuuguuuggg

SEQ ID NO: 758489 - RNA, 17 nt, Artificial Sequence
  Synthetic
cacaagagcauuuuggg

SEQ ID NO: 758490 - RNA, 17 nt, Artificial Sequence
  Synthetic
aaucucggcauuuuggg

SEQ ID NO: 758491 - RNA, 17 nt, Artificial Sequence
  Synthetic
uauguauuuauuuuggg

SEQ ID NO: 758492 - RNA, 17 nt, Artificial Sequence
  Synthetic
uggauuuuaguuuuggg

SEQ ID NO: 758493 - RNA, 17 nt, Artificial Sequence
  Synthetic
aaucucagcguuuuggg

SEQ ID NO: 758494 - RNA, 17 nt, Artificial Sequence
  Synthetic
auucccuuuguuuuggg

SEQ ID NO: 758495 - RNA, 17 nt, Artificial Sequence
  Synthetic
ucaagaagauuuuuggg

SEQ ID NO: 758496 - RNA, 17 nt, Artificial Sequence
  Synthetic
agcuacauauuuuuggg

SEQ ID NO: 758497 - RNA, 17 nt, Artificial Sequence
  Synthetic
uuucuuucuuuuuuggg

SEQ ID NO: 758498 - RNA, 17 nt, Artificial Sequence
  Synthetic
ucccuugaacaaaaugg

SEQ ID NO: 758499 - RNA, 17 nt, Artificial Sequence
  Synthetic
aauuagcuacaaaaugg

SEQ ID NO: 758500 - RNA, 17 nt, Artificial Sequence
  Synthetic
uugauauuacaaaaugg

SEQ ID NO: 758501 - RNA, 17 nt, Artificial Sequence
  Synthetic
uggggcuugcaaaaugg

SEQ ID NO: 758502 - RNA, 17 nt, Artificial Sequence
  Synthetic
aaugguucucaaaaugg

SEQ ID NO: 758503 - RNA, 17 nt, Artificial Sequence
  Synthetic
uacagaggagaaaaugg

SEQ ID NO: 758504 - RNA, 17 nt, Artificial Sequence
  Synthetic
uuaaacuuauaaaaugg

SEQ ID NO: 758505 - RNA, 17 nt, Artificial Sequence
  Synthetic
cgucaacuguaaaaugg

SEQ ID NO: 758506 - RNA, 17 nt, Artificial Sequence
  Synthetic
ucauccucuuaaaaugg

SEQ ID NO: 758507 - RNA, 17 nt, Artificial Sequence
  Synthetic
uggccuaggacaaaugg

SEQ ID NO: 758508 - RNA, 17 nt, Artificial Sequence
  Synthetic
agauuuccuccaaaugg

SEQ ID NO: 758509 - RNA, 17 nt, Artificial Sequence
  Synthetic
ugauacaaggcaaaugg

SEQ ID NO: 758510 - RNA, 17 nt, Artificial Sequence
  Synthetic
aacauacucucaaaugg

SEQ ID NO: 758511 - RNA, 17 nt, Artificial Sequence
  Synthetic
ccuggaucaagaaaugg

SEQ ID NO: 758512 - RNA, 17 nt, Artificial Sequence
  Synthetic
aacauggauggaaaugg

SEQ ID NO: 758513 - RNA, 17 nt, Artificial Sequence
  Synthetic
aacauuguuggaaaugg

SEQ ID NO: 758514 - RNA, 17 nt, Artificial Sequence
  Synthetic
ugcuuugauugaaaugg

SEQ ID NO: 758515 - RNA, 17 nt, Artificial Sequence
  Synthetic
uuggguucccuaaaugg

SEQ ID NO: 758516 - RNA, 17 nt, Artificial Sequence
  Synthetic
uuggaaaaaguaaaugg

SEQ ID NO: 758517 - RNA, 17 nt, Artificial Sequence
  Synthetic
uuuugcccuguaaaugg

SEQ ID NO: 758518 - RNA, 17 nt, Artificial Sequence
  Synthetic
acugucuuccacaaugg

SEQ ID NO: 758519 - RNA, 17 nt, Artificial Sequence
  Synthetic
ccauucagggacaaugg

SEQ ID NO: 758520 - RNA, 17 nt, Artificial Sequence
  Synthetic
cuuccaggauacaaugg

SEQ ID NO: 758521 - RNA, 17 nt, Artificial Sequence
  Synthetic
aacagaaaguacaaugg

SEQ ID NO: 758522 - RNA, 17 nt, Artificial Sequence
  Synthetic
cuuucuagguacaaugg

SEQ ID NO: 758523 - RNA, 17 nt, Artificial Sequence
  Synthetic
uaucugcaagccaaugg

SEQ ID NO: 758524 - RNA, 17 nt, Artificial Sequence
  Synthetic
ccaaccccagccaaugg

SEQ ID NO: 758525 - RNA, 17 nt, Artificial Sequence
  Synthetic
aauauaaagagcaaugg

SEQ ID NO: 758526 - RNA, 17 nt, Artificial Sequence
  Synthetic
ugcauguaaugcaaugg

SEQ ID NO: 758527 - RNA, 17 nt, Artificial Sequence
  Synthetic
ucauggcaaaucaaugg

SEQ ID NO: 758528 - RNA, 17 nt, Artificial Sequence
  Synthetic
uagaugaccaucaaugg

SEQ ID NO: 758529 - RNA, 17 nt, Artificial Sequence
  Synthetic
uaguaagugcucaaugg

SEQ ID NO: 758530 - RNA, 17 nt, Artificial Sequence
  Synthetic
uagaaucuucucaaugg

SEQ ID NO: 758531 - RNA, 17 nt, Artificial Sequence
  Synthetic
uucuuaaaugucaaugg

SEQ ID NO: 758532 - RNA, 17 nt, Artificial Sequence
  Synthetic
uggucaccaaagaaugg

SEQ ID NO: 758533 - RNA, 17 nt, Artificial Sequence
  Synthetic
acuguuucaaagaaugg

SEQ ID NO: 758534 - RNA, 17 nt, Artificial Sequence
  Synthetic
uuagaauggaagaaugg

SEQ ID NO: 758535 - RNA, 17 nt, Artificial Sequence
  Synthetic
cugugguuccagaaugg

SEQ ID NO: 758536 - RNA, 17 nt, Artificial Sequence
  Synthetic
acauaagaucagaaugg

SEQ ID NO: 758537 - RNA, 17 nt, Artificial Sequence
  Synthetic
uggagguaagagaaugg

SEQ ID NO: 758538 - RNA, 17 nt, Artificial Sequence
  Synthetic
uccaaagaguagaaugg

SEQ ID NO: 758539 - RNA, 17 nt, Artificial Sequence
  Synthetic
aguagagaguagaaugg

SEQ ID NO: 758540 - RNA, 17 nt, Artificial Sequence
  Synthetic
aaaggacaaacgaaugg

SEQ ID NO: 758541 - RNA, 17 nt, Artificial Sequence
  Synthetic
aagagaggaaggaaugg

SEQ ID NO: 758542 - RNA, 17 nt, Artificial Sequence
  Synthetic
uggggcauuaggaaugg

SEQ ID NO: 758543 - RNA, 17 nt, Artificial Sequence
  Synthetic
aggauuuuacggaaugg

SEQ ID NO: 758544 - RNA, 17 nt, Artificial Sequence
  Synthetic
uauauagcagggaaugg

SEQ ID NO: 758545 - RNA, 17 nt, Artificial Sequence
  Synthetic
ucucuggcagggaaugg

SEQ ID NO: 758546 - RNA, 17 nt, Artificial Sequence
  Synthetic
cugagacccgggaaugg

SEQ ID NO: 758547 - RNA, 17 nt, Artificial Sequence
  Synthetic
caacccuuggggaaugg

SEQ ID NO: 758548 - RNA, 17 nt, Artificial Sequence
  Synthetic
acuagggccuggaaugg

SEQ ID NO: 758549 - RNA, 17 nt, Artificial Sequence
  Synthetic
acauacaaaaugaaugg

SEQ ID NO: 758550 - RNA, 17 nt, Artificial Sequence
  Synthetic
cuaaauauaaugaaugg

SEQ ID NO: 758551 - RNA, 17 nt, Artificial Sequence
  Synthetic
uggaggguuuugaaugg

SEQ ID NO: 758552 - RNA, 17 nt, Artificial Sequence
  Synthetic
auuauaagaaauaaugg

SEQ ID NO: 758553 - RNA, 17 nt, Artificial Sequence
  Synthetic
ccuaugaacaauaaugg

SEQ ID NO: 758554 - RNA, 17 nt, Artificial Sequence
  Synthetic
caagguuacaauaaugg

SEQ ID NO: 758555 - RNA, 17 nt, Artificial Sequence
  Synthetic
ucacgagaagauaaugg

SEQ ID NO: 758556 - RNA, 17 nt, Artificial Sequence
  Synthetic
cuccuucaggauaaugg

SEQ ID NO: 758557 - RNA, 17 nt, Artificial Sequence
  Synthetic
aaauauaugacuaaugg

SEQ ID NO: 758558 - RNA, 17 nt, Artificial Sequence
  Synthetic
uacacuucaaguaaugg

SEQ ID NO: 758559 - RNA, 17 nt, Artificial Sequence
  Synthetic
ucccagagguguaaugg

SEQ ID NO: 758560 - RNA, 17 nt, Artificial Sequence
  Synthetic
uaggugcccauuaaugg

SEQ ID NO: 758561 - RNA, 17 nt, Artificial Sequence
  Synthetic
aaaauguucauuaaugg

SEQ ID NO: 758562 - RNA, 17 nt, Artificial Sequence
  Synthetic
cuauauaaacuuaaugg

SEQ ID NO: 758563 - RNA, 17 nt, Artificial Sequence
  Synthetic
uggauauuuguuaaugg

SEQ ID NO: 758564 - RNA, 17 nt, Artificial Sequence
  Synthetic
uauuagcuauuuaaugg

SEQ ID NO: 758565 - RNA, 17 nt, Artificial Sequence
  Synthetic
uucaauaaaaaacaugg

SEQ ID NO: 758566 - RNA, 17 nt, Artificial Sequence
  Synthetic
ugcuuuccaaaacaugg

SEQ ID NO: 758567 - RNA, 17 nt, Artificial Sequence
  Synthetic
cauauaguaaaacaugg

SEQ ID NO: 758568 - RNA, 17 nt, Artificial Sequence
  Synthetic
agaucaauuaaacaugg

SEQ ID NO: 758569 - RNA, 17 nt, Artificial Sequence
  Synthetic
uguaauauguaacaugg

SEQ ID NO: 758570 - RNA, 17 nt, Artificial Sequence
  Synthetic
aaauuagccagacaugg

SEQ ID NO: 758571 - RNA, 17 nt, Artificial Sequence
  Synthetic
aaauuagcuggacaugg

SEQ ID NO: 758572 - RNA, 17 nt, Artificial Sequence
  Synthetic
aaacaguuuggacaugg

SEQ ID NO: 758573 - RNA, 17 nt, Artificial Sequence
  Synthetic
uuccuuuucugacaugg

SEQ ID NO: 758574 - RNA, 17 nt, Artificial Sequence
  Synthetic
caguacaguauacaugg

SEQ ID NO: 758575 - RNA, 17 nt, Artificial Sequence
  Synthetic
aaccuaaaacuacaugg

SEQ ID NO: 758576 - RNA, 17 nt, Artificial Sequence
  Synthetic
cucaccauucuacaugg

SEQ ID NO: 758577 - RNA, 17 nt, Artificial Sequence
  Synthetic
aggcauggcuuacaugg

SEQ ID NO: 758578 - RNA, 17 nt, Artificial Sequence
  Synthetic
caauguugcuuacaugg

SEQ ID NO: 758579 - RNA, 17 nt, Artificial Sequence
  Synthetic
uuuacaaccaaccaugg

SEQ ID NO: 758580 - RNA, 17 nt, Artificial Sequence
  Synthetic
uguaagagauaccaugg

SEQ ID NO: 758581 - RNA, 17 nt, Artificial Sequence
  Synthetic
cucaaguagucccaugg

SEQ ID NO: 758582 - RNA, 17 nt, Artificial Sequence
  Synthetic
uuagaacucagccaugg

SEQ ID NO: 758583 - RNA, 17 nt, Artificial Sequence
  Synthetic
uaugugaaaugccaugg

SEQ ID NO: 758584 - RNA, 17 nt, Artificial Sequence
  Synthetic
uauaguuucugccaugg

SEQ ID NO: 758585 - RNA, 17 nt, Artificial Sequence
  Synthetic
ugguucuguugccaugg

SEQ ID NO: 758586 - RNA, 17 nt, Artificial Sequence
  Synthetic
ucccucaguauccaugg

SEQ ID NO: 758587 - RNA, 17 nt, Artificial Sequence
  Synthetic
auaaugcuuauccaugg

SEQ ID NO: 758588 - RNA, 17 nt, Artificial Sequence
  Synthetic
augaacauaguccaugg

SEQ ID NO: 758589 - RNA, 17 nt, Artificial Sequence
  Synthetic
ugcauaguauuccaugg

SEQ ID NO: 758590 - RNA, 17 nt, Artificial Sequence
  Synthetic
ugucacuucuuccaugg

SEQ ID NO: 758591 - RNA, 17 nt, Artificial Sequence
  Synthetic
cugucuuuuuuccaugg

SEQ ID NO: 758592 - RNA, 17 nt, Artificial Sequence
  Synthetic
cuccuggccaagcaugg

SEQ ID NO: 758593 - RNA, 17 nt, Artificial Sequence
  Synthetic
augggaaaacagcaugg

SEQ ID NO: 758594 - RNA, 17 nt, Artificial Sequence
  Synthetic
ucacgacaacagcaugg

SEQ ID NO: 758595 - RNA, 17 nt, Artificial Sequence
  Synthetic
ucaugagaacagcaugg

SEQ ID NO: 758596 - RNA, 17 nt, Artificial Sequence
  Synthetic
acauuauuucagcaugg

SEQ ID NO: 758597 - RNA, 17 nt, Artificial Sequence
  Synthetic
aaauuagcugagcaugg

SEQ ID NO: 758598 - RNA, 17 nt, Artificial Sequence
  Synthetic
ucaugagaauagcaugg

SEQ ID NO: 758599 - RNA, 17 nt, Artificial Sequence
  Synthetic
aagaucucuuagcaugg

SEQ ID NO: 758600 - RNA, 17 nt, Artificial Sequence
  Synthetic
agaguaccugcgcaugg

SEQ ID NO: 758601 - RNA, 17 nt, Artificial Sequence
  Synthetic
uuaagaauaaggcaugg

SEQ ID NO: 758602 - RNA, 17 nt, Artificial Sequence
  Synthetic
auccccaccaggcaugg

SEQ ID NO: 758603 - RNA, 17 nt, Artificial Sequence
  Synthetic
aaaucagccaggcaugg

SEQ ID NO: 758604 - RNA, 17 nt, Artificial Sequence
  Synthetic
ugaucagccaggcaugg

SEQ ID NO: 758605 - RNA, 17 nt, Artificial Sequence
  Synthetic
aaauuagccaggcaugg

SEQ ID NO: 758606 - RNA, 17 nt, Artificial Sequence
  Synthetic
uucagggccaggcaugg

SEQ ID NO: 758607 - RNA, 17 nt, Artificial Sequence
  Synthetic
aucuuggccaggcaugg

SEQ ID NO: 758608 - RNA, 17 nt, Artificial Sequence
  Synthetic
caguuggccaggcaugg

SEQ ID NO: 758609 - RNA, 17 nt, Artificial Sequence
  Synthetic
aaauuugccaggcaugg

SEQ ID NO: 758610 - RNA, 17 nt, Artificial Sequence
  Synthetic
aaauuagcagggcaugg

SEQ ID NO: 758611 - RNA, 17 nt, Artificial Sequence
  Synthetic
auuuaagccgggcaugg

SEQ ID NO: 758612 - RNA, 17 nt, Artificial Sequence
  Synthetic
aaauuagccgggcaugg

SEQ ID NO: 758613 - RNA, 17 nt, Artificial Sequence
  Synthetic
uuggaggccgggcaugg

SEQ ID NO: 758614 - RNA, 17 nt, Artificial Sequence
  Synthetic
aaauaggccgggcaugg

SEQ ID NO: 758615 - RNA, 17 nt, Artificial Sequence
  Synthetic
aaacuggccgggcaugg

SEQ ID NO: 758616 - RNA, 17 nt, Artificial Sequence
  Synthetic
aagcagguggggcaugg

SEQ ID NO: 758617 - RNA, 17 nt, Artificial Sequence
  Synthetic
aaauuaacugggcaugg

SEQ ID NO: 758618 - RNA, 17 nt, Artificial Sequence
  Synthetic
aaaauagcugggcaugg

SEQ ID NO: 758619 - RNA, 17 nt, Artificial Sequence
  Synthetic
aaauuagcugggcaugg

SEQ ID NO: 758620 - RNA, 17 nt, Artificial Sequence
  Synthetic
auuuaggcugggcaugg

SEQ ID NO: 758621 - RNA, 17 nt, Artificial Sequence
  Synthetic
auuucggcugggcaugg

SEQ ID NO: 758622 - RNA, 17 nt, Artificial Sequence
  Synthetic
agaggggcugggcaugg

SEQ ID NO: 758623 - RNA, 17 nt, Artificial Sequence
  Synthetic
aaguuggcugggcaugg

SEQ ID NO: 758624 - RNA, 17 nt, Artificial Sequence
  Synthetic
ugggguagugggcaugg

SEQ ID NO: 758625 - RNA, 17 nt, Artificial Sequence
  Synthetic
acauuaggugggcaugg

SEQ ID NO: 758626 - RNA, 17 nt, Artificial Sequence
  Synthetic
aaauuaguugggcaugg

SEQ ID NO: 758627 - RNA, 17 nt, Artificial Sequence
  Synthetic
ugcugggaucugcaugg

SEQ ID NO: 758628 - RNA, 17 nt, Artificial Sequence
  Synthetic
uggugacaggugcaugg

SEQ ID NO: 758629 - RNA, 17 nt, Artificial Sequence
  Synthetic
uagucauuuuugcaugg

SEQ ID NO: 758630 - RNA, 17 nt, Artificial Sequence
  Synthetic
agucuuuuaaaucaugg

SEQ ID NO: 758631 - RNA, 17 nt, Artificial Sequence
  Synthetic
aggccucacaaucaugg

SEQ ID NO: 758632 - RNA, 17 nt, Artificial Sequence
  Synthetic
aggccucagaaucaugg

SEQ ID NO: 758633 - RNA, 17 nt, Artificial Sequence
  Synthetic
agguaacugaaucaugg

SEQ ID NO: 758634 - RNA, 17 nt, Artificial Sequence
  Synthetic
agguaauugaaucaugg

SEQ ID NO: 758635 - RNA, 17 nt, Artificial Sequence
  Synthetic
agguaauuuaaucaugg

SEQ ID NO: 758636 - RNA, 17 nt, Artificial Sequence
  Synthetic
uguggucugcaucaugg

SEQ ID NO: 758637 - RNA, 17 nt, Artificial Sequence
  Synthetic
aggugauuggaucaugg

SEQ ID NO: 758638 - RNA, 17 nt, Artificial Sequence
  Synthetic
agcccacuugaucaugg

SEQ ID NO: 758639 - RNA, 17 nt, Artificial Sequence
  Synthetic
aacacauggacucaugg

SEQ ID NO: 758640 - RNA, 17 nt, Artificial Sequence
  Synthetic
aagcagaacccucaugg

SEQ ID NO: 758641 - RNA, 17 nt, Artificial Sequence
  Synthetic
uaauggccugcucaugg

SEQ ID NO: 758642 - RNA, 17 nt, Artificial Sequence
  Synthetic
ccugcauauucucaugg

SEQ ID NO: 758643 - RNA, 17 nt, Artificial Sequence
  Synthetic
cagaaagguucucaugg

SEQ ID NO: 758644 - RNA, 17 nt, Artificial Sequence
  Synthetic
ucugugaagugucaugg

SEQ ID NO: 758645 - RNA, 17 nt, Artificial Sequence
  Synthetic
aguuaccaaguucaugg

SEQ ID NO: 758646 - RNA, 17 nt, Artificial Sequence
  Synthetic
uaguaaaauguucaugg

SEQ ID NO: 758647 - RNA, 17 nt, Artificial Sequence
  Synthetic
auuuggucauuucaugg

SEQ ID NO: 758648 - RNA, 17 nt, Artificial Sequence
  Synthetic
uuggucuucuuucaugg

SEQ ID NO: 758649 - RNA, 17 nt, Artificial Sequence
  Synthetic
ugucucauuuuucaugg

SEQ ID NO: 758650 - RNA, 17 nt, Artificial Sequence
  Synthetic
uagcugagcaaagaugg

SEQ ID NO: 758651 - RNA, 17 nt, Artificial Sequence
  Synthetic
uggugccagaaagaugg

SEQ ID NO: 758652 - RNA, 17 nt, Artificial Sequence
  Synthetic
uaaaaagagaaagaugg

SEQ ID NO: 758653 - RNA, 17 nt, Artificial Sequence
  Synthetic
auuuggaggaaagaugg

SEQ ID NO: 758654 - RNA, 17 nt, Artificial Sequence
  Synthetic
ugauuuuuuaaagaugg

SEQ ID NO: 758655 - RNA, 17 nt, Artificial Sequence
  Synthetic
caaagggaacaagaugg

SEQ ID NO: 758656 - RNA, 17 nt, Artificial Sequence
  Synthetic
cuuagagaagaagaugg

SEQ ID NO: 758657 - RNA, 17 nt, Artificial Sequence
  Synthetic
cugugagcugaagaugg

SEQ ID NO: 758658 - RNA, 17 nt, Artificial Sequence
  Synthetic
ugcuuucuuuaagaugg

SEQ ID NO: 758659 - RNA, 17 nt, Artificial Sequence
  Synthetic
aggaaaaccacagaugg

SEQ ID NO: 758660 - RNA, 17 nt, Artificial Sequence
  Synthetic
cccaggccuccagaugg

SEQ ID NO: 758661 - RNA, 17 nt, Artificial Sequence
  Synthetic
uaucacauagcagaugg

SEQ ID NO: 758662 - RNA, 17 nt, Artificial Sequence
  Synthetic
auaaguguuucagaugg

SEQ ID NO: 758663 - RNA, 17 nt, Artificial Sequence
  Synthetic
auuuuuaguagagaugg

SEQ ID NO: 758664 - RNA, 17 nt, Artificial Sequence
  Synthetic
ugucaauguagagaugg

SEQ ID NO: 758665 - RNA, 17 nt, Artificial Sequence
  Synthetic
uacuuccagggagaugg

SEQ ID NO: 758666 - RNA, 17 nt, Artificial Sequence
  Synthetic
cuauucuggggagaugg

SEQ ID NO: 758667 - RNA, 17 nt, Artificial Sequence
  Synthetic
agaacacauggagaugg

SEQ ID NO: 758668 - RNA, 17 nt, Artificial Sequence
  Synthetic
cugaggaggugagaugg

SEQ ID NO: 758669 - RNA, 17 nt, Artificial Sequence
  Synthetic
aauaauuggguagaugg

SEQ ID NO: 758670 - RNA, 17 nt, Artificial Sequence
  Synthetic
aguauguguguagaugg

SEQ ID NO: 758671 - RNA, 17 nt, Artificial Sequence
  Synthetic
uacuggcuuuuagaugg

SEQ ID NO: 758672 - RNA, 17 nt, Artificial Sequence
  Synthetic
uuggcaagaagcgaugg

SEQ ID NO: 758673 - RNA, 17 nt, Artificial Sequence
  Synthetic
ucaaaauaaaaggaugg

SEQ ID NO: 758674 - RNA, 17 nt, Artificial Sequence
  Synthetic
aaaaagagccaggaugg

SEQ ID NO: 758675 - RNA, 17 nt, Artificial Sequence
  Synthetic
agaagaugccaggaugg

SEQ ID NO: 758676 - RNA, 17 nt, Artificial Sequence
  Synthetic
uaucagugccaggaugg

SEQ ID NO: 758677 - RNA, 17 nt, Artificial Sequence
  Synthetic
ucaccaagucaggaugg

SEQ ID NO: 758678 - RNA, 17 nt, Artificial Sequence
  Synthetic
ucccacaaggaggaugg

SEQ ID NO: 758679 - RNA, 17 nt, Artificial Sequence
  Synthetic
auccagagauaggaugg

SEQ ID NO: 758680 - RNA, 17 nt, Artificial Sequence
  Synthetic
ucaaagcaaagggaugg

SEQ ID NO: 758681 - RNA, 17 nt, Artificial Sequence
  Synthetic
aaauggaagagggaugg

SEQ ID NO: 758682 - RNA, 17 nt, Artificial Sequence
  Synthetic
ugguaggauagggaugg

SEQ ID NO: 758683 - RNA, 17 nt, Artificial Sequence
  Synthetic
agcugaaaaggggaugg

SEQ ID NO: 758684 - RNA, 17 nt, Artificial Sequence
  Synthetic
aauuuagcuggggaugg

SEQ ID NO: 758685 - RNA, 17 nt, Artificial Sequence
  Synthetic
cauagaguuggggaugg

SEQ ID NO: 758686 - RNA, 17 nt, Artificial Sequence
  Synthetic
aaaagaucgauggaugg

SEQ ID NO: 758687 - RNA, 17 nt, Artificial Sequence
  Synthetic
aagaacucucuggaugg

SEQ ID NO: 758688 - RNA, 17 nt, Artificial Sequence
  Synthetic
uucaacuaaguggaugg

SEQ ID NO: 758689 - RNA, 17 nt, Artificial Sequence
  Synthetic
cuugaauaguuggaugg

SEQ ID NO: 758690 - RNA, 17 nt, Artificial Sequence
  Synthetic
cacugaguaaaugaugg

SEQ ID NO: 758691 - RNA, 17 nt, Artificial Sequence
  Synthetic
aaagacacacaugaugg

SEQ ID NO: 758692 - RNA, 17 nt, Artificial Sequence
  Synthetic
uuagcugggcaugaugg

SEQ ID NO: 758693 - RNA, 17 nt, Artificial Sequence
  Synthetic
ugggguuuggaugaugg

SEQ ID NO: 758694 - RNA, 17 nt, Artificial Sequence
  Synthetic
auuuucuuugaugaugg

SEQ ID NO: 758695 - RNA, 17 nt, Artificial Sequence
  Synthetic
cuuuugaacuaugaugg

SEQ ID NO: 758696 - RNA, 17 nt, Artificial Sequence
  Synthetic
caggcacagccugaugg

SEQ ID NO: 758697 - RNA, 17 nt, Artificial Sequence
  Synthetic
aaucuuuuugcugaugg

SEQ ID NO: 758698 - RNA, 17 nt, Artificial Sequence
  Synthetic
cuaggagauucugaugg

SEQ ID NO: 758699 - RNA, 17 nt, Artificial Sequence
  Synthetic
uuagccaggcgugaugg

SEQ ID NO: 758700 - RNA, 17 nt, Artificial Sequence
  Synthetic
uuaaacaauggugaugg

SEQ ID NO: 758701 - RNA, 17 nt, Artificial Sequence
  Synthetic
uauccauugugugaugg

SEQ ID NO: 758702 - RNA, 17 nt, Artificial Sequence
  Synthetic
uuuucaacauuugaugg

SEQ ID NO: 758703 - RNA, 17 nt, Artificial Sequence
  Synthetic
agggagccauuugaugg

SEQ ID NO: 758704 - RNA, 17 nt, Artificial Sequence
  Synthetic
aauuauuacuuugaugg

SEQ ID NO: 758705 - RNA, 17 nt, Artificial Sequence
  Synthetic
agacucaauaaauaugg

SEQ ID NO: 758706 - RNA, 17 nt, Artificial Sequence
  Synthetic
agaaggaaucaauaugg

SEQ ID NO: 758707 - RNA, 17 nt, Artificial Sequence
  Synthetic
uguacaaagacauaugg

SEQ ID NO: 758708 - RNA, 17 nt, Artificial Sequence
  Synthetic
uaguggcugacauaugg

SEQ ID NO: 758709 - RNA, 17 nt, Artificial Sequence
  Synthetic
agaacuuaggcauaugg

SEQ ID NO: 758710 - RNA, 17 nt, Artificial Sequence
  Synthetic
cauccuucuucauaugg

SEQ ID NO: 758711 - RNA, 17 nt, Artificial Sequence
  Synthetic
uaaaggagcagauaugg

SEQ ID NO: 758712 - RNA, 17 nt, Artificial Sequence
  Synthetic
agauuaacuugauaugg

SEQ ID NO: 758713 - RNA, 17 nt, Artificial Sequence
  Synthetic
auucuuucaauauaugg

SEQ ID NO: 758714 - RNA, 17 nt, Artificial Sequence
  Synthetic
uccccaaggguauaugg

SEQ ID NO: 758715 - RNA, 17 nt, Artificial Sequence
  Synthetic
caguuguauguauaugg

SEQ ID NO: 758716 - RNA, 17 nt, Artificial Sequence
  Synthetic
uguauaucuguauaugg

SEQ ID NO: 758717 - RNA, 17 nt, Artificial Sequence
  Synthetic
ugucugcuuaacuaugg

SEQ ID NO: 758718 - RNA, 17 nt, Artificial Sequence
  Synthetic
augggguuucacuaugg

SEQ ID NO: 758719 - RNA, 17 nt, Artificial Sequence
  Synthetic
cuccuucauuccuaugg

SEQ ID NO: 758720 - RNA, 17 nt, Artificial Sequence
  Synthetic
acacagcugggcuaugg

SEQ ID NO: 758721 - RNA, 17 nt, Artificial Sequence
  Synthetic
aaauuaauaugcuaugg

SEQ ID NO: 758722 - RNA, 17 nt, Artificial Sequence
  Synthetic
aagaacaaaaucuaugg

SEQ ID NO: 758723 - RNA, 17 nt, Artificial Sequence
  Synthetic
ugaaucagaaucuaugg

SEQ ID NO: 758724 - RNA, 17 nt, Artificial Sequence
  Synthetic
acaggccugcucuaugg

SEQ ID NO: 758725 - RNA, 17 nt, Artificial Sequence
  Synthetic
uauuuaugaaaguaugg

SEQ ID NO: 758726 - RNA, 17 nt, Artificial Sequence
  Synthetic
ucaggagaacaguaugg

SEQ ID NO: 758727 - RNA, 17 nt, Artificial Sequence
  Synthetic
ccaugagaacaguaugg

SEQ ID NO: 758728 - RNA, 17 nt, Artificial Sequence
  Synthetic
ucaagguuccaguaugg

SEQ ID NO: 758729 - RNA, 17 nt, Artificial Sequence
  Synthetic
cuguauuuucaguaugg

SEQ ID NO: 758730 - RNA, 17 nt, Artificial Sequence
  Synthetic
uucaaacaugaguaugg

SEQ ID NO: 758731 - RNA, 17 nt, Artificial Sequence
  Synthetic
cucagaaccacguaugg

SEQ ID NO: 758732 - RNA, 17 nt, Artificial Sequence
  Synthetic
uauggaggacgguaugg

SEQ ID NO: 758733 - RNA, 17 nt, Artificial Sequence
  Synthetic
uggagugguggguaugg

SEQ ID NO: 758734 - RNA, 17 nt, Artificial Sequence
  Synthetic
cagacuuuuauguaugg

SEQ ID NO: 758735 - RNA, 17 nt, Artificial Sequence
  Synthetic
acaugagaaguguaugg

SEQ ID NO: 758736 - RNA, 17 nt, Artificial Sequence
  Synthetic
uuacaucuaguguaugg

SEQ ID NO: 758737 - RNA, 17 nt, Artificial Sequence
  Synthetic
cucccuggcuuguaugg

SEQ ID NO: 758738 - RNA, 17 nt, Artificial Sequence
  Synthetic
uaaauagauuuguaugg

SEQ ID NO: 758739 - RNA, 17 nt, Artificial Sequence
  Synthetic
cacuaauccaauuaugg

SEQ ID NO: 758740 - RNA, 17 nt, Artificial Sequence
  Synthetic
uucuuucucaauuaugg

SEQ ID NO: 758741 - RNA, 17 nt, Artificial Sequence
  Synthetic
uuuuauuguaauuaugg

SEQ ID NO: 758742 - RNA, 17 nt, Artificial Sequence
  Synthetic
acacguggggauuaugg

SEQ ID NO: 758743 - RNA, 17 nt, Artificial Sequence
  Synthetic
ucacuuccauauuaugg

SEQ ID NO: 758744 - RNA, 17 nt, Artificial Sequence
  Synthetic
aauggagaguauuaugg

SEQ ID NO: 758745 - RNA, 17 nt, Artificial Sequence
  Synthetic
agaaaaaaguguuaugg

SEQ ID NO: 758746 - RNA, 17 nt, Artificial Sequence
  Synthetic
ugauauguaauuuaugg

SEQ ID NO: 758747 - RNA, 17 nt, Artificial Sequence
  Synthetic
ucauacugucuuuaugg

SEQ ID NO: 758748 - RNA, 17 nt, Artificial Sequence
  Synthetic
ccagguagguuuuaugg

SEQ ID NO: 758749 - RNA, 17 nt, Artificial Sequence
  Synthetic
ccacaagauuuuuaugg

SEQ ID NO: 758750 - RNA, 17 nt, Artificial Sequence
  Synthetic
cguacauauuuuuaugg

SEQ ID NO: 758751 - RNA, 17 nt, Artificial Sequence
  Synthetic
uaaacucuauaaacugg

SEQ ID NO: 758752 - RNA, 17 nt, Artificial Sequence
  Synthetic
aacaugcaugcaacugg

SEQ ID NO: 758753 - RNA, 17 nt, Artificial Sequence
  Synthetic
aguugccuaagaacugg

SEQ ID NO: 758754 - RNA, 17 nt, Artificial Sequence
  Synthetic
uccagccccagaacugg

SEQ ID NO: 758755 - RNA, 17 nt, Artificial Sequence
  Synthetic
aaaagugggagaacugg

SEQ ID NO: 758756 - RNA, 17 nt, Artificial Sequence
  Synthetic
aacguggauagaacugg

SEQ ID NO: 758757 - RNA, 17 nt, Artificial Sequence
  Synthetic
uugaacccaggaacugg

SEQ ID NO: 758758 - RNA, 17 nt, Artificial Sequence
  Synthetic
aacauggauggaacugg

SEQ ID NO: 758759 - RNA, 17 nt, Artificial Sequence
  Synthetic
aucauggauggaacugg

SEQ ID NO: 758760 - RNA, 17 nt, Artificial Sequence
  Synthetic
aucuuggauggaacugg

SEQ ID NO: 758761 - RNA, 17 nt, Artificial Sequence
  Synthetic
ugagaggguugaacugg

SEQ ID NO: 758762 - RNA, 17 nt, Artificial Sequence
  Synthetic
cugucugcauuaacugg

SEQ ID NO: 758763 - RNA, 17 nt, Artificial Sequence
  Synthetic
aguaaucccaacacugg

SEQ ID NO: 758764 - RNA, 17 nt, Artificial Sequence
  Synthetic
ccaguugaacacacugg

SEQ ID NO: 758765 - RNA, 17 nt, Artificial Sequence
  Synthetic
agucccagacacacugg

SEQ ID NO: 758766 - RNA, 17 nt, Artificial Sequence
  Synthetic
auucaauccaccacugg

SEQ ID NO: 758767 - RNA, 17 nt, Artificial Sequence
  Synthetic
uggauuggagccacugg

SEQ ID NO: 758768 - RNA, 17 nt, Artificial Sequence
  Synthetic
aaaugaauagccacugg

SEQ ID NO: 758769 - RNA, 17 nt, Artificial Sequence
  Synthetic
cauuugucugccacugg

SEQ ID NO: 758770 - RNA, 17 nt, Artificial Sequence
  Synthetic
ccuugcuuaugcacugg

SEQ ID NO: 758771 - RNA, 17 nt, Artificial Sequence
  Synthetic
cucuccaucaucacugg

SEQ ID NO: 758772 - RNA, 17 nt, Artificial Sequence
  Synthetic
auccagucuaucacugg

SEQ ID NO: 758773 - RNA, 17 nt, Artificial Sequence
  Synthetic
ucucaacuccucacugg

SEQ ID NO: 758774 - RNA, 17 nt, Artificial Sequence
  Synthetic
ucuggcuauuucacugg

SEQ ID NO: 758775 - RNA, 17 nt, Artificial Sequence
  Synthetic
uuuagcaaagagacugg

SEQ ID NO: 758776 - RNA, 17 nt, Artificial Sequence
  Synthetic
cagcagguagagacugg

SEQ ID NO: 758777 - RNA, 17 nt, Artificial Sequence
  Synthetic
aaaguugaaaggacugg

SEQ ID NO: 758778 - RNA, 17 nt, Artificial Sequence
  Synthetic
cugggaguggggacugg

SEQ ID NO: 758779 - RNA, 17 nt, Artificial Sequence
  Synthetic
agacuuagauggacugg

SEQ ID NO: 758780 - RNA, 17 nt, Artificial Sequence
  Synthetic
aucaaagacuggacugg

SEQ ID NO: 758781 - RNA, 17 nt, Artificial Sequence
  Synthetic
cugauauaauugacugg

SEQ ID NO: 758782 - RNA, 17 nt, Artificial Sequence
  Synthetic
uaacuacuaaauacugg

SEQ ID NO: 758783 - RNA, 17 nt, Artificial Sequence
  Synthetic
cucccugccacuacugg

SEQ ID NO: 758784 - RNA, 17 nt, Artificial Sequence
  Synthetic
acacuggggccuacugg

SEQ ID NO: 758785 - RNA, 17 nt, Artificial Sequence
  Synthetic
caugaaauuaguacugg

SEQ ID NO: 758786 - RNA, 17 nt, Artificial Sequence
  Synthetic
aauuuucacauuacugg

SEQ ID NO: 758787 - RNA, 17 nt, Artificial Sequence
  Synthetic
uugcuuuagauuacugg

SEQ ID NO: 758788 - RNA, 17 nt, Artificial Sequence
  Synthetic
uggaaaggucuuacugg

SEQ ID NO: 758789 - RNA, 17 nt, Artificial Sequence
  Synthetic
ucuguuucaguuacugg

SEQ ID NO: 758790 - RNA, 17 nt, Artificial Sequence
  Synthetic
cccaaaucuguuacugg

SEQ ID NO: 758791 - RNA, 17 nt, Artificial Sequence
  Synthetic
auuauuguuguuacugg

SEQ ID NO: 758792 - RNA, 17 nt, Artificial Sequence
  Synthetic
aagaggacauuuacugg

SEQ ID NO: 758793 - RNA, 17 nt, Artificial Sequence
  Synthetic
uaugaaccauuuacugg

SEQ ID NO: 758794 - RNA, 17 nt, Artificial Sequence
  Synthetic
caaaguuuauuuacugg

SEQ ID NO: 758795 - RNA, 17 nt, Artificial Sequence
  Synthetic
ucuuuccuguuuacugg

SEQ ID NO: 758796 - RNA, 17 nt, Artificial Sequence
  Synthetic
aagacauauuuuacugg

SEQ ID NO: 758797 - RNA, 17 nt, Artificial Sequence
  Synthetic
auggggcuagaaccugg

SEQ ID NO: 758798 - RNA, 17 nt, Artificial Sequence
  Synthetic
aauccgggggaaccugg

SEQ ID NO: 758799 - RNA, 17 nt, Artificial Sequence
  Synthetic
uuauacauauaaccugg

SEQ ID NO: 758800 - RNA, 17 nt, Artificial Sequence
  Synthetic
acaucagaaucaccugg

SEQ ID NO: 758801 - RNA, 17 nt, Artificial Sequence
  Synthetic
agguaucuaagaccugg

SEQ ID NO: 758802 - RNA, 17 nt, Artificial Sequence
  Synthetic
uuauuccacagaccugg

SEQ ID NO: 758803 - RNA, 17 nt, Artificial Sequence
  Synthetic
aacauggauggaccugg

SEQ ID NO: 758804 - RNA, 17 nt, Artificial Sequence
  Synthetic
ucaugggagugaccugg

SEQ ID NO: 758805 - RNA, 17 nt, Artificial Sequence
  Synthetic
acauauuugcuaccugg

SEQ ID NO: 758806 - RNA, 17 nt, Artificial Sequence
  Synthetic
aauggcgcgaacccugg

SEQ ID NO: 758807 - RNA, 17 nt, Artificial Sequence
  Synthetic
aaacaagguaacccugg

SEQ ID NO: 758808 - RNA, 17 nt, Artificial Sequence
  Synthetic
uucaguugccacccugg

SEQ ID NO: 758809 - RNA, 17 nt, Artificial Sequence
  Synthetic
aaucucuuccacccugg

SEQ ID NO: 758810 - RNA, 17 nt, Artificial Sequence
  Synthetic
uaugaaaaagacccugg

SEQ ID NO: 758811 - RNA, 17 nt, Artificial Sequence
  Synthetic
ucccuuuguaccccugg

SEQ ID NO: 758812 - RNA, 17 nt, Artificial Sequence
  Synthetic
cacaugcauuccccugg

SEQ ID NO: 758813 - RNA, 17 nt, Artificial Sequence
  Synthetic
aauauuuuuuccccugg

SEQ ID NO: 758814 - RNA, 17 nt, Artificial Sequence
  Synthetic
augcaagcaggcccugg

SEQ ID NO: 758815 - RNA, 17 nt, Artificial Sequence
  Synthetic
auaagaguaugcccugg

SEQ ID NO: 758816 - RNA, 17 nt, Artificial Sequence
  Synthetic
uuuugaacacucccugg

SEQ ID NO: 758817 - RNA, 17 nt, Artificial Sequence
  Synthetic
ccagugugugucccugg

SEQ ID NO: 758818 - RNA, 17 nt, Artificial Sequence
  Synthetic
aauugcuugaagccugg

SEQ ID NO: 758819 - RNA, 17 nt, Artificial Sequence
  Synthetic
auugcacuccagccugg

SEQ ID NO: 758820 - RNA, 17 nt, Artificial Sequence
  Synthetic
aaauagacagagccugg

SEQ ID NO: 758821 - RNA, 17 nt, Artificial Sequence
  Synthetic
aauaaggaugagccugg

SEQ ID NO: 758822 - RNA, 17 nt, Artificial Sequence
  Synthetic
uuguaagccaggccugg

SEQ ID NO: 758823 - RNA, 17 nt, Artificial Sequence
  Synthetic
uuguaaggcaggccugg

SEQ ID NO: 758824 - RNA, 17 nt, Artificial Sequence
  Synthetic
uuuuagggcaggccugg

SEQ ID NO: 758825 - RNA, 17 nt, Artificial Sequence
  Synthetic
aacuuagcagggccugg

SEQ ID NO: 758826 - RNA, 17 nt, Artificial Sequence
  Synthetic
uuggagguggggccugg

SEQ ID NO: 758827 - RNA, 17 nt, Artificial Sequence
  Synthetic
uuggugguggggccugg

SEQ ID NO: 758828 - RNA, 17 nt, Artificial Sequence
  Synthetic
aaaucagcugggccugg

SEQ ID NO: 758829 - RNA, 17 nt, Artificial Sequence
  Synthetic
uccuugcuugggccugg

SEQ ID NO: 758830 - RNA, 17 nt, Artificial Sequence
  Synthetic
acgaggaacuggccugg

SEQ ID NO: 758831 - RNA, 17 nt, Artificial Sequence
  Synthetic
ugagccaccaugccugg

SEQ ID NO: 758832 - RNA, 17 nt, Artificial Sequence
  Synthetic
cagaugaggaugccugg

SEQ ID NO: 758833 - RNA, 17 nt, Artificial Sequence
  Synthetic
cacuggaaugugccugg

SEQ ID NO: 758834 - RNA, 17 nt, Artificial Sequence
  Synthetic
ugucuuucugugccugg

SEQ ID NO: 758835 - RNA, 17 nt, Artificial Sequence
  Synthetic
uccuaaaacaauccugg

SEQ ID NO: 758836 - RNA, 17 nt, Artificial Sequence
  Synthetic
ugguuauuagauccugg

SEQ ID NO: 758837 - RNA, 17 nt, Artificial Sequence
  Synthetic
uacccaaguuauccugg

SEQ ID NO: 758838 - RNA, 17 nt, Artificial Sequence
  Synthetic
uuuacaaacacuccugg

SEQ ID NO: 758839 - RNA, 17 nt, Artificial Sequence
  Synthetic
ccuuuaauggcuccugg

SEQ ID NO: 758840 - RNA, 17 nt, Artificial Sequence
  Synthetic
aagcgaucugcuccugg

SEQ ID NO: 758841 - RNA, 17 nt, Artificial Sequence
  Synthetic
auguuuaacucuccugg

SEQ ID NO: 758842 - RNA, 17 nt, Artificial Sequence
  Synthetic
uauuuauguucuccugg

SEQ ID NO: 758843 - RNA, 17 nt, Artificial Sequence
  Synthetic
cuguuaaggauuccugg

SEQ ID NO: 758844 - RNA, 17 nt, Artificial Sequence
  Synthetic
caaauccauauuccugg

SEQ ID NO: 758845 - RNA, 17 nt, Artificial Sequence
  Synthetic
uuagcaacuauuccugg

SEQ ID NO: 758846 - RNA, 17 nt, Artificial Sequence
  Synthetic
cuuaaugcccuuccugg

SEQ ID NO: 758847 - RNA, 17 nt, Artificial Sequence
  Synthetic
aggaugauccuuccugg

SEQ ID NO: 758848 - RNA, 17 nt, Artificial Sequence
  Synthetic
cuaauuuuucuuccugg

SEQ ID NO: 758849 - RNA, 17 nt, Artificial Sequence
  Synthetic
aauauuaaaguuccugg

SEQ ID NO: 758850 - RNA, 17 nt, Artificial Sequence
  Synthetic
caauggacaaaagcugg

SEQ ID NO: 758851 - RNA, 17 nt, Artificial Sequence
  Synthetic
aaaaagaacaaagcugg

SEQ ID NO: 758852 - RNA, 17 nt, Artificial Sequence
  Synthetic
caaaagaacaaagcugg

SEQ ID NO: 758853 - RNA, 17 nt, Artificial Sequence
  Synthetic
aaaaugaacaaagcugg

SEQ ID NO: 758854 - RNA, 17 nt, Artificial Sequence
  Synthetic
aagaauaacaaagcugg

SEQ ID NO: 758855 - RNA, 17 nt, Artificial Sequence
  Synthetic
uccuaauuauaagcugg

SEQ ID NO: 758856 - RNA, 17 nt, Artificial Sequence
  Synthetic
uaauucugagcagcugg

SEQ ID NO: 758857 - RNA, 17 nt, Artificial Sequence
  Synthetic
aacauggaugcagcugg

SEQ ID NO: 758858 - RNA, 17 nt, Artificial Sequence
  Synthetic
acaucagaaucagcugg

SEQ ID NO: 758859 - RNA, 17 nt, Artificial Sequence
  Synthetic
acgucagaaucagcugg

SEQ ID NO: 758860 - RNA, 17 nt, Artificial Sequence
  Synthetic
ucuugucuuucagcugg

SEQ ID NO: 758861 - RNA, 17 nt, Artificial Sequence
  Synthetic
cuguaagacagagcugg

SEQ ID NO: 758862 - RNA, 17 nt, Artificial Sequence
  Synthetic
uuaaguggcagagcugg

SEQ ID NO: 758863 - RNA, 17 nt, Artificial Sequence
  Synthetic
auguuaccaggagcugg

SEQ ID NO: 758864 - RNA, 17 nt, Artificial Sequence
  Synthetic
aaaaaaccgggagcugg

SEQ ID NO: 758865 - RNA, 17 nt, Artificial Sequence
  Synthetic
cugccucugggagcugg

SEQ ID NO: 758866 - RNA, 17 nt, Artificial Sequence
  Synthetic
aacauggauggagcugg

SEQ ID NO: 758867 - RNA, 17 nt, Artificial Sequence
  Synthetic
aaagagaagcuagcugg

SEQ ID NO: 758868 - RNA, 17 nt, Artificial Sequence
  Synthetic
ucauauaaguuagcugg

SEQ ID NO: 758869 - RNA, 17 nt, Artificial Sequence
  Synthetic
agauauaaguuagcugg

SEQ ID NO: 758870 - RNA, 17 nt, Artificial Sequence
  Synthetic
ccaccuacagucgcugg

SEQ ID NO: 758871 - RNA, 17 nt, Artificial Sequence
  Synthetic
aaacuuggaaaggcugg

SEQ ID NO: 758872 - RNA, 17 nt, Artificial Sequence
  Synthetic
augaauaaccaggcugg

SEQ ID NO: 758873 - RNA, 17 nt, Artificial Sequence
  Synthetic
ucuguugcccaggcugg

SEQ ID NO: 758874 - RNA, 17 nt, Artificial Sequence
  Synthetic
aaccagaaugaggcugg

SEQ ID NO: 758875 - RNA, 17 nt, Artificial Sequence
  Synthetic
ugguugcuaagggcugg

SEQ ID NO: 758876 - RNA, 17 nt, Artificial Sequence
  Synthetic
augaaggguagggcugg

SEQ ID NO: 758877 - RNA, 17 nt, Artificial Sequence
  Synthetic
uaaggauaaggggcugg

SEQ ID NO: 758878 - RNA, 17 nt, Artificial Sequence
  Synthetic
ugguuuccaggggcugg

SEQ ID NO: 758879 - RNA, 17 nt, Artificial Sequence
  Synthetic
agaaugagcugggcugg

SEQ ID NO: 758880 - RNA, 17 nt, Artificial Sequence
  Synthetic
uuaaaucucauggcugg

SEQ ID NO: 758881 - RNA, 17 nt, Artificial Sequence
  Synthetic
uccuuauuuauggcugg

SEQ ID NO: 758882 - RNA, 17 nt, Artificial Sequence
  Synthetic
ucugucauucuggcugg

SEQ ID NO: 758883 - RNA, 17 nt, Artificial Sequence
  Synthetic
cucuucuacguggcugg

SEQ ID NO: 758884 - RNA, 17 nt, Artificial Sequence
  Synthetic
uuaaucaacaaugcugg

SEQ ID NO: 758885 - RNA, 17 nt, Artificial Sequence
  Synthetic
ucaagugguaaugcugg

SEQ ID NO: 758886 - RNA, 17 nt, Artificial Sequence
  Synthetic
caaaagauuaaugcugg

SEQ ID NO: 758887 - RNA, 17 nt, Artificial Sequence
  Synthetic
ugaaaaagagaugcugg

SEQ ID NO: 758888 - RNA, 17 nt, Artificial Sequence
  Synthetic
agauugccugaugcugg

SEQ ID NO: 758889 - RNA, 17 nt, Artificial Sequence
  Synthetic
acugccaaauaugcugg

SEQ ID NO: 758890 - RNA, 17 nt, Artificial Sequence
  Synthetic
ucaaaauaauaugcugg

SEQ ID NO: 758891 - RNA, 17 nt, Artificial Sequence
  Synthetic
uugugauaauaugcugg

SEQ ID NO: 758892 - RNA, 17 nt, Artificial Sequence
  Synthetic
acuuaacacacugcugg

SEQ ID NO: 758893 - RNA, 17 nt, Artificial Sequence
  Synthetic
ccacuucuugcugcugg

SEQ ID NO: 758894 - RNA, 17 nt, Artificial Sequence
  Synthetic
ucaucauucucugcugg

SEQ ID NO: 758895 - RNA, 17 nt, Artificial Sequence
  Synthetic
agaagagauggugcugg

SEQ ID NO: 758896 - RNA, 17 nt, Artificial Sequence
  Synthetic
uuuagaagaugugcugg

SEQ ID NO: 758897 - RNA, 17 nt, Artificial Sequence
  Synthetic
cauucacauauugcugg

SEQ ID NO: 758898 - RNA, 17 nt, Artificial Sequence
  Synthetic
uuagcugcuauugcugg

SEQ ID NO: 758899 - RNA, 17 nt, Artificial Sequence
  Synthetic
cccuuugcccuugcugg

SEQ ID NO: 758900 - RNA, 17 nt, Artificial Sequence
  Synthetic
caguaugauguugcugg

SEQ ID NO: 758901 - RNA, 17 nt, Artificial Sequence
  Synthetic
cagugaaguguugcugg

SEQ ID NO: 758902 - RNA, 17 nt, Artificial Sequence
  Synthetic
cugcuggaauuugcugg

SEQ ID NO: 758903 - RNA, 17 nt, Artificial Sequence
  Synthetic
cacacacaaaaaucugg

SEQ ID NO: 758904 - RNA, 17 nt, Artificial Sequence
  Synthetic
uucuuggguaaaucugg

SEQ ID NO: 758905 - RNA, 17 nt, Artificial Sequence
  Synthetic
cucccuugggaaucugg

SEQ ID NO: 758906 - RNA, 17 nt, Artificial Sequence
  Synthetic
aacccagaugaaucugg

SEQ ID NO: 758907 - RNA, 17 nt, Artificial Sequence
  Synthetic
uagauggucccaucugg

SEQ ID NO: 758908 - RNA, 17 nt, Artificial Sequence
  Synthetic
ugauuuagggcaucugg

SEQ ID NO: 758909 - RNA, 17 nt, Artificial Sequence
  Synthetic
aagaacuaugcaucugg

SEQ ID NO: 758910 - RNA, 17 nt, Artificial Sequence
  Synthetic
uuuuuuuuuucaucugg

SEQ ID NO: 758911 - RNA, 17 nt, Artificial Sequence
  Synthetic
acuaauaaaagaucugg

SEQ ID NO: 758912 - RNA, 17 nt, Artificial Sequence
  Synthetic
uguugcuccagaucugg

SEQ ID NO: 758913 - RNA, 17 nt, Artificial Sequence
  Synthetic
aauggaucuggaucugg

SEQ ID NO: 758914 - RNA, 17 nt, Artificial Sequence
  Synthetic
aguuuuaaaauaucugg

SEQ ID NO: 758915 - RNA, 17 nt, Artificial Sequence
  Synthetic
cauuuagcaauaucugg

SEQ ID NO: 758916 - RNA, 17 nt, Artificial Sequence
  Synthetic
agaauuuacuuaucugg

SEQ ID NO: 758917 - RNA, 17 nt, Artificial Sequence
  Synthetic
aaucccagcaacucugg

SEQ ID NO: 758918 - RNA, 17 nt, Artificial Sequence
  Synthetic
acuucacucaacucugg

SEQ ID NO: 758919 - RNA, 17 nt, Artificial Sequence
  Synthetic
aaucccagccacucugg

SEQ ID NO: 758920 - RNA, 17 nt, Artificial Sequence
  Synthetic
agucccagcuacucugg

SEQ ID NO: 758921 - RNA, 17 nt, Artificial Sequence
  Synthetic
aaucucagcuacucugg

SEQ ID NO: 758922 - RNA, 17 nt, Artificial Sequence
  Synthetic
uggcugggcuacucugg

SEQ ID NO: 758923 - RNA, 17 nt, Artificial Sequence
  Synthetic
ugccucccacccucugg

SEQ ID NO: 758924 - RNA, 17 nt, Artificial Sequence
  Synthetic
ccgucuuuugccucugg

SEQ ID NO: 758925 - RNA, 17 nt, Artificial Sequence
  Synthetic
uuguuuggcuccucugg

SEQ ID NO: 758926 - RNA, 17 nt, Artificial Sequence
  Synthetic
cuuaucaucuccucugg

SEQ ID NO: 758927 - RNA, 17 nt, Artificial Sequence
  Synthetic
agucccagcugcucugg

SEQ ID NO: 758928 - RNA, 17 nt, Artificial Sequence
  Synthetic
uuauccacuaucucugg

SEQ ID NO: 758929 - RNA, 17 nt, Artificial Sequence
  Synthetic
uggucuacacucucugg

SEQ ID NO: 758930 - RNA, 17 nt, Artificial Sequence
  Synthetic
ugcuagugucucucugg

SEQ ID NO: 758931 - RNA, 17 nt, Artificial Sequence
  Synthetic
uaaauguaauucucugg

SEQ ID NO: 758932 - RNA, 17 nt, Artificial Sequence
  Synthetic
ccacagugauucucugg

SEQ ID NO: 758933 - RNA, 17 nt, Artificial Sequence
  Synthetic
ucagaagacuucucugg

SEQ ID NO: 758934 - RNA, 17 nt, Artificial Sequence
  Synthetic
aauuauagaaagucugg

SEQ ID NO: 758935 - RNA, 17 nt, Artificial Sequence
  Synthetic
uaggcagaacagucugg

SEQ ID NO: 758936 - RNA, 17 nt, Artificial Sequence
  Synthetic
aaagucauggagucugg

SEQ ID NO: 758937 - RNA, 17 nt, Artificial Sequence
  Synthetic
aguaaaugcuagucugg

SEQ ID NO: 758938 - RNA, 17 nt, Artificial Sequence
  Synthetic
aauuugaagucgucugg

SEQ ID NO: 758939 - RNA, 17 nt, Artificial Sequence
  Synthetic
auucccaagaggucugg

SEQ ID NO: 758940 - RNA, 17 nt, Artificial Sequence
  Synthetic
auaaaaguggggucugg

SEQ ID NO: 758941 - RNA, 17 nt, Artificial Sequence
  Synthetic
accauuguggggucugg

SEQ ID NO: 758942 - RNA, 17 nt, Artificial Sequence
  Synthetic
auucacagauggucugg

SEQ ID NO: 758943 - RNA, 17 nt, Artificial Sequence
  Synthetic
uaaauauucaugucugg

SEQ ID NO: 758944 - RNA, 17 nt, Artificial Sequence
  Synthetic
uuagcugauuugucugg

SEQ ID NO: 758945 - RNA, 17 nt, Artificial Sequence
  Synthetic
uauaauugcaauucugg

SEQ ID NO: 758946 - RNA, 17 nt, Artificial Sequence
  Synthetic
cauagaaaaacuucugg

SEQ ID NO: 758947 - RNA, 17 nt, Artificial Sequence
  Synthetic
caauuugacacuucugg

SEQ ID NO: 758948 - RNA, 17 nt, Artificial Sequence
  Synthetic
uugucucagacuucugg

SEQ ID NO: 758949 - RNA, 17 nt, Artificial Sequence
  Synthetic
ugcucaaaaucuucugg

SEQ ID NO: 758950 - RNA, 17 nt, Artificial Sequence
  Synthetic
agcccuuaaucuucugg

SEQ ID NO: 758951 - RNA, 17 nt, Artificial Sequence
  Synthetic
uucacucacaguucugg

SEQ ID NO: 758952 - RNA, 17 nt, Artificial Sequence
  Synthetic
auuucucacaguucugg

SEQ ID NO: 758953 - RNA, 17 nt, Artificial Sequence
  Synthetic
uugucuuacaguucugg

SEQ ID NO: 758954 - RNA, 17 nt, Artificial Sequence
  Synthetic
agaaguugcaguucugg

SEQ ID NO: 758955 - RNA, 17 nt, Artificial Sequence
  Synthetic
uuggcucauaguucugg

SEQ ID NO: 758956 - RNA, 17 nt, Artificial Sequence
  Synthetic
auugcuuauaguucugg

SEQ ID NO: 758957 - RNA, 17 nt, Artificial Sequence
  Synthetic
auauucauuaguucugg

SEQ ID NO: 758958 - RNA, 17 nt, Artificial Sequence
  Synthetic
auuucucaccguucugg

SEQ ID NO: 758959 - RNA, 17 nt, Artificial Sequence
  Synthetic
auuucucacuguucugg

SEQ ID NO: 758960 - RNA, 17 nt, Artificial Sequence
  Synthetic
auuacuguguguucugg

SEQ ID NO: 758961 - RNA, 17 nt, Artificial Sequence
  Synthetic
uuaaucaguauuucugg

SEQ ID NO: 758962 - RNA, 17 nt, Artificial Sequence
  Synthetic
cuaucucuuauuucugg

SEQ ID NO: 758963 - RNA, 17 nt, Artificial Sequence
  Synthetic
ugacuccaacuuucugg

SEQ ID NO: 758964 - RNA, 17 nt, Artificial Sequence
  Synthetic
caaaaguaaguuucugg

SEQ ID NO: 758965 - RNA, 17 nt, Artificial Sequence
  Synthetic
aguucaccaguuucugg

SEQ ID NO: 758966 - RNA, 17 nt, Artificial Sequence
  Synthetic
aauucuuguuuuucugg

SEQ ID NO: 758967 - RNA, 17 nt, Artificial Sequence
  Synthetic
accccaucaaaaagugg

SEQ ID NO: 758968 - RNA, 17 nt, Artificial Sequence
  Synthetic
uugcuggggaaaagugg

SEQ ID NO: 758969 - RNA, 17 nt, Artificial Sequence
  Synthetic
ucagccucccaaagugg

SEQ ID NO: 758970 - RNA, 17 nt, Artificial Sequence
  Synthetic
uauaggaaucaaagugg

SEQ ID NO: 758971 - RNA, 17 nt, Artificial Sequence
  Synthetic
uacaaagcucaaagugg

SEQ ID NO: 758972 - RNA, 17 nt, Artificial Sequence
  Synthetic
ucagugagagaaagugg

SEQ ID NO: 758973 - RNA, 17 nt, Artificial Sequence
  Synthetic
ccacagauagaaagugg

SEQ ID NO: 758974 - RNA, 17 nt, Artificial Sequence
  Synthetic
uuguuuucauaaagugg

SEQ ID NO: 758975 - RNA, 17 nt, Artificial Sequence
  Synthetic
aaugaaggauaaagugg

SEQ ID NO: 758976 - RNA, 17 nt, Artificial Sequence
  Synthetic
uuuaggggguaaagugg

SEQ ID NO: 758977 - RNA, 17 nt, Artificial Sequence
  Synthetic
ucuccaccuuaaagugg

SEQ ID NO: 758978 - RNA, 17 nt, Artificial Sequence
  Synthetic
uuuacaaaaacaagugg

SEQ ID NO: 758979 - RNA, 17 nt, Artificial Sequence
  Synthetic
uuaaccccugcaagugg

SEQ ID NO: 758980 - RNA, 17 nt, Artificial Sequence
  Synthetic
acgcaguccagaagugg

SEQ ID NO: 758981 - RNA, 17 nt, Artificial Sequence
  Synthetic
uuugacauaugaagugg

SEQ ID NO: 758982 - RNA, 17 nt, Artificial Sequence
  Synthetic
aagaauuaaauaagugg

SEQ ID NO: 758983 - RNA, 17 nt, Artificial Sequence
  Synthetic
aguauugguauaagugg

SEQ ID NO: 758984 - RNA, 17 nt, Artificial Sequence
  Synthetic
aguucuagauacagugg

SEQ ID NO: 758985 - RNA, 17 nt, Artificial Sequence
  Synthetic
uaagugaacaccagugg

SEQ ID NO: 758986 - RNA, 17 nt, Artificial Sequence
  Synthetic
uaggugcccaccagugg

SEQ ID NO: 758987 - RNA, 17 nt, Artificial Sequence
  Synthetic
ugaagaccuuccagugg

SEQ ID NO: 758988 - RNA, 17 nt, Artificial Sequence
  Synthetic
auauggagaagcagugg

SEQ ID NO: 758989 - RNA, 17 nt, Artificial Sequence
  Synthetic
aagaucucuggcagugg

SEQ ID NO: 758990 - RNA, 17 nt, Artificial Sequence
  Synthetic
aggcuggaaugcagugg

SEQ ID NO: 758991 - RNA, 17 nt, Artificial Sequence
  Synthetic
aucaaaagcugcagugg

SEQ ID NO: 758992 - RNA, 17 nt, Artificial Sequence
  Synthetic
aacgcacagugcagugg

SEQ ID NO: 758993 - RNA, 17 nt, Artificial Sequence
  Synthetic
aggcuggagugcagugg

SEQ ID NO: 758994 - RNA, 17 nt, Artificial Sequence
  Synthetic
uuagaggguuucagugg

SEQ ID NO: 758995 - RNA, 17 nt, Artificial Sequence
  Synthetic
aagccagaagagagugg

SEQ ID NO: 758996 - RNA, 17 nt, Artificial Sequence
  Synthetic
agugugaaugagagugg

SEQ ID NO: 758997 - RNA, 17 nt, Artificial Sequence
  Synthetic
auguugaauacgagugg

SEQ ID NO: 758998 - RNA, 17 nt, Artificial Sequence
  Synthetic
caaacaaacaggagugg

SEQ ID NO: 758999 - RNA, 17 nt, Artificial Sequence
  Synthetic
aaaauagcuaggagugg

SEQ ID NO: 759000 - RNA, 17 nt, Artificial Sequence
  Synthetic
cauuagaaagggagugg

SEQ ID NO: 759001 - RNA, 17 nt, Artificial Sequence
  Synthetic
uuucuuuaagggagugg

SEQ ID NO: 759002 - RNA, 17 nt, Artificial Sequence
  Synthetic
ucagggcuugggagugg

SEQ ID NO: 759003 - RNA, 17 nt, Artificial Sequence
  Synthetic
aacucagaauggagugg

SEQ ID NO: 759004 - RNA, 17 nt, Artificial Sequence
  Synthetic
agacuaggguggagugg

SEQ ID NO: 759005 - RNA, 17 nt, Artificial Sequence
  Synthetic
ugggcaggaaugagugg

SEQ ID NO: 759006 - RNA, 17 nt, Artificial Sequence
  Synthetic
cugucacaagugagugg

SEQ ID NO: 759007 - RNA, 17 nt, Artificial Sequence
  Synthetic
aggaauaaggugagugg

SEQ ID NO: 759008 - RNA, 17 nt, Artificial Sequence
  Synthetic
acuugagauuugagugg

SEQ ID NO: 759009 - RNA, 17 nt, Artificial Sequence
  Synthetic
caaugcaauaauagugg

SEQ ID NO: 759010 - RNA, 17 nt, Artificial Sequence
  Synthetic
agaggaauuaauagugg

SEQ ID NO: 759011 - RNA, 17 nt, Artificial Sequence
  Synthetic
acacuuccuuauagugg

SEQ ID NO: 759012 - RNA, 17 nt, Artificial Sequence
  Synthetic
acccugccugcuagugg

SEQ ID NO: 759013 - RNA, 17 nt, Artificial Sequence
  Synthetic
ugaggagauucuagugg

SEQ ID NO: 759014 - RNA, 17 nt, Artificial Sequence
  Synthetic
aaucaaccauguagugg

SEQ ID NO: 759015 - RNA, 17 nt, Artificial Sequence
  Synthetic
ucaacugaacuuagugg

SEQ ID NO: 759016 - RNA, 17 nt, Artificial Sequence
  Synthetic
uuccugaauguuagugg

SEQ ID NO: 759017 - RNA, 17 nt, Artificial Sequence
  Synthetic
acauugucauuuagugg

SEQ ID NO: 759018 - RNA, 17 nt, Artificial Sequence
  Synthetic
ugaaagcuauuuagugg

SEQ ID NO: 759019 - RNA, 17 nt, Artificial Sequence
  Synthetic
cagcauuuauuuagugg

SEQ ID NO: 759020 - RNA, 17 nt, Artificial Sequence
  Synthetic
agcugaauguuuagugg

SEQ ID NO: 759021 - RNA, 17 nt, Artificial Sequence
  Synthetic
uguuuccauuuuagugg

SEQ ID NO: 759022 - RNA, 17 nt, Artificial Sequence
  Synthetic
uuagguuauuuuagugg

SEQ ID NO: 759023 - RNA, 17 nt, Artificial Sequence
  Synthetic
uaacaaagacaacgugg

SEQ ID NO: 759024 - RNA, 17 nt, Artificial Sequence
  Synthetic
aaauuacccggacgugg

SEQ ID NO: 759025 - RNA, 17 nt, Artificial Sequence
  Synthetic
aaaugcaacuuacgugg

SEQ ID NO: 759026 - RNA, 17 nt, Artificial Sequence
  Synthetic
acuuugggaggccgugg

SEQ ID NO: 759027 - RNA, 17 nt, Artificial Sequence
  Synthetic
agggaaauaauccgugg

SEQ ID NO: 759028 - RNA, 17 nt, Artificial Sequence
  Synthetic
aaauuagcugagcgugg

SEQ ID NO: 759029 - RNA, 17 nt, Artificial Sequence
  Synthetic
caauugaccaggcgugg

SEQ ID NO: 759030 - RNA, 17 nt, Artificial Sequence
  Synthetic
aaauuagccaggcgugg

SEQ ID NO: 759031 - RNA, 17 nt, Artificial Sequence
  Synthetic
ucaugggccaggcgugg

SEQ ID NO: 759032 - RNA, 17 nt, Artificial Sequence
  Synthetic
aaauuagcagggcgugg

SEQ ID NO: 759033 - RNA, 17 nt, Artificial Sequence
  Synthetic
aaauuagccgggcgugg

SEQ ID NO: 759034 - RNA, 17 nt, Artificial Sequence
  Synthetic
uuuccggccgggcgugg

SEQ ID NO: 759035 - RNA, 17 nt, Artificial Sequence
  Synthetic
aaauuauucgggcgugg

SEQ ID NO: 759036 - RNA, 17 nt, Artificial Sequence
  Synthetic
aaaucagcugggcgugg

SEQ ID NO: 759037 - RNA, 17 nt, Artificial Sequence
  Synthetic
aaauuagcugggcgugg

SEQ ID NO: 759038 - RNA, 17 nt, Artificial Sequence
  Synthetic
aaaucggcugggcgugg

SEQ ID NO: 759039 - RNA, 17 nt, Artificial Sequence
  Synthetic
uauugggcugggcgugg

SEQ ID NO: 759040 - RNA, 17 nt, Artificial Sequence
  Synthetic
uccuuggcugggcgugg

SEQ ID NO: 759041 - RNA, 17 nt, Artificial Sequence
  Synthetic
aaauuagccaugcgugg

SEQ ID NO: 759042 - RNA, 17 nt, Artificial Sequence
  Synthetic
aaaugaccugugcgugg

SEQ ID NO: 759043 - RNA, 17 nt, Artificial Sequence
  Synthetic
acaaaagccuugcgugg

SEQ ID NO: 759044 - RNA, 17 nt, Artificial Sequence
  Synthetic
auuucuagaguucgugg

SEQ ID NO: 759045 - RNA, 17 nt, Artificial Sequence
  Synthetic
aggagggagaaaggugg

SEQ ID NO: 759046 - RNA, 17 nt, Artificial Sequence
  Synthetic
augguauuagaaggugg

SEQ ID NO: 759047 - RNA, 17 nt, Artificial Sequence
  Synthetic
uugaaacuggaaggugg

SEQ ID NO: 759048 - RNA, 17 nt, Artificial Sequence
  Synthetic
aacuaccgugaaggugg

SEQ ID NO: 759049 - RNA, 17 nt, Artificial Sequence
  Synthetic
uuaaaggaauaaggugg

SEQ ID NO: 759050 - RNA, 17 nt, Artificial Sequence
  Synthetic
uauuuuacauaaggugg

SEQ ID NO: 759051 - RNA, 17 nt, Artificial Sequence
  Synthetic
augggaaauacaggugg

SEQ ID NO: 759052 - RNA, 17 nt, Artificial Sequence
  Synthetic
acacuagguacaggugg

SEQ ID NO: 759053 - RNA, 17 nt, Artificial Sequence
  Synthetic
agggagagaccaggugg

SEQ ID NO: 759054 - RNA, 17 nt, Artificial Sequence
  Synthetic
ucuccaccugcaggugg

SEQ ID NO: 759055 - RNA, 17 nt, Artificial Sequence
  Synthetic
caaacuuuuucaggugg

SEQ ID NO: 759056 - RNA, 17 nt, Artificial Sequence
  Synthetic
uugaaacuaagaggugg

SEQ ID NO: 759057 - RNA, 17 nt, Artificial Sequence
  Synthetic
uauuauuuuagaggugg

SEQ ID NO: 759058 - RNA, 17 nt, Artificial Sequence
  Synthetic
uugggaggccgaggugg

SEQ ID NO: 759059 - RNA, 17 nt, Artificial Sequence
  Synthetic
cucgaaacaggaggugg

SEQ ID NO: 759060 - RNA, 17 nt, Artificial Sequence
  Synthetic
uugaucacaggaggugg

SEQ ID NO: 759061 - RNA, 17 nt, Artificial Sequence
  Synthetic
uugaacccaggaggugg

SEQ ID NO: 759062 - RNA, 17 nt, Artificial Sequence
  Synthetic
ccgagcccaggaggugg

SEQ ID NO: 759063 - RNA, 17 nt, Artificial Sequence
  Synthetic
uugagcccaggaggugg

SEQ ID NO: 759064 - RNA, 17 nt, Artificial Sequence
  Synthetic
uugaacccgggaggugg

SEQ ID NO: 759065 - RNA, 17 nt, Artificial Sequence
  Synthetic
uugaacucgggaggugg

SEQ ID NO: 759066 - RNA, 17 nt, Artificial Sequence
  Synthetic
uugaaccugggaggugg

SEQ ID NO: 759067 - RNA, 17 nt, Artificial Sequence
  Synthetic
uguuuugugggaggugg

SEQ ID NO: 759068 - RNA, 17 nt, Artificial Sequence
  Synthetic
uugaacuugggaggugg

SEQ ID NO: 759069 - RNA, 17 nt, Artificial Sequence
  Synthetic
cccggggguggaggugg

SEQ ID NO: 759070 - RNA, 17 nt, Artificial Sequence
  Synthetic
ucaagaggcugaggugg

SEQ ID NO: 759071 - RNA, 17 nt, Artificial Sequence
  Synthetic
auuggccugugaggugg

SEQ ID NO: 759072 - RNA, 17 nt, Artificial Sequence
  Synthetic
ugcacugcuugaggugg

SEQ ID NO: 759073 - RNA, 17 nt, Artificial Sequence
  Synthetic
uuucugaaaauaggugg

SEQ ID NO: 759074 - RNA, 17 nt, Artificial Sequence
  Synthetic
cgcuugaaccuaggugg

SEQ ID NO: 759075 - RNA, 17 nt, Artificial Sequence
  Synthetic
uuagcugggcacggugg

SEQ ID NO: 759076 - RNA, 17 nt, Artificial Sequence
  Synthetic
acugugcuaaagggugg

SEQ ID NO: 759077 - RNA, 17 nt, Artificial Sequence
  Synthetic
ugacuggagaagggugg

SEQ ID NO: 759078 - RNA, 17 nt, Artificial Sequence
  Synthetic
cugauugaucagggugg

SEQ ID NO: 759079 - RNA, 17 nt, Artificial Sequence
  Synthetic
ucuuugggagagggugg

SEQ ID NO: 759080 - RNA, 17 nt, Artificial Sequence
  Synthetic
acagaaaaggagggugg

SEQ ID NO: 759081 - RNA, 17 nt, Artificial Sequence
  Synthetic
uauucaugguagggugg

SEQ ID NO: 759082 - RNA, 17 nt, Artificial Sequence
  Synthetic
cagcacuuuaggggugg

SEQ ID NO: 759083 - RNA, 17 nt, Artificial Sequence
  Synthetic
ugggguggcgggggugg

SEQ ID NO: 759084 - RNA, 17 nt, Artificial Sequence
  Synthetic
agguaugguuggggugg

SEQ ID NO: 759085 - RNA, 17 nt, Artificial Sequence
  Synthetic
auuccugguuggggugg

SEQ ID NO: 759086 - RNA, 17 nt, Artificial Sequence
  Synthetic
cucuccuuuuggggugg

SEQ ID NO: 759087 - RNA, 17 nt, Artificial Sequence
  Synthetic
agguuuguugugggugg

SEQ ID NO: 759088 - RNA, 17 nt, Artificial Sequence
  Synthetic
ccuuuguuguugggugg

SEQ ID NO: 759089 - RNA, 17 nt, Artificial Sequence
  Synthetic
auaguaaaacauggugg

SEQ ID NO: 759090 - RNA, 17 nt, Artificial Sequence
  Synthetic
uuagccaggcauggugg

SEQ ID NO: 759091 - RNA, 17 nt, Artificial Sequence
  Synthetic
uuagcagggcauggugg

SEQ ID NO: 759092 - RNA, 17 nt, Artificial Sequence
  Synthetic
uuagccgggcauggugg

SEQ ID NO: 759093 - RNA, 17 nt, Artificial Sequence
  Synthetic
auagcugggcauggugg

SEQ ID NO: 759094 - RNA, 17 nt, Artificial Sequence
  Synthetic
uuagcugggcauggugg

SEQ ID NO: 759095 - RNA, 17 nt, Artificial Sequence
  Synthetic
ugccagaaagauggugg

SEQ ID NO: 759096 - RNA, 17 nt, Artificial Sequence
  Synthetic
uggcugacauauggugg

SEQ ID NO: 759097 - RNA, 17 nt, Artificial Sequence
  Synthetic
auaucuguauauggugg

SEQ ID NO: 759098 - RNA, 17 nt, Artificial Sequence
  Synthetic
agguuccaguauggugg

SEQ ID NO: 759099 - RNA, 17 nt, Artificial Sequence
  Synthetic
ucugcauuaacuggugg

SEQ ID NO: 759100 - RNA, 17 nt, Artificial Sequence
  Synthetic
ucacucgaaccuggugg

SEQ ID NO: 759101 - RNA, 17 nt, Artificial Sequence
  Synthetic
uuugcccuugcuggugg

SEQ ID NO: 759102 - RNA, 17 nt, Artificial Sequence
  Synthetic
ucuagauacaguggugg

SEQ ID NO: 759103 - RNA, 17 nt, Artificial Sequence
  Synthetic
acaaacaggaguggugg

SEQ ID NO: 759104 - RNA, 17 nt, Artificial Sequence
  Synthetic
auagcuaggaguggugg

SEQ ID NO: 759105 - RNA, 17 nt, Artificial Sequence
  Synthetic
cgaaaugguaguggugg

SEQ ID NO: 759106 - RNA, 17 nt, Artificial Sequence
  Synthetic
uuacccggacguggugg

SEQ ID NO: 759107 - RNA, 17 nt, Artificial Sequence
  Synthetic
uuagccaggcguggugg

SEQ ID NO: 759108 - RNA, 17 nt, Artificial Sequence
  Synthetic
uuagcagggcguggugg

SEQ ID NO: 759109 - RNA, 17 nt, Artificial Sequence
  Synthetic
uuagccgggcguggugg

SEQ ID NO: 759110 - RNA, 17 nt, Artificial Sequence
  Synthetic
uuagcugggcguggugg

SEQ ID NO: 759111 - RNA, 17 nt, Artificial Sequence
  Synthetic
uuagccaugcguggugg

SEQ ID NO: 759112 - RNA, 17 nt, Artificial Sequence
  Synthetic
uccuuuugggguggugg

SEQ ID NO: 759113 - RNA, 17 nt, Artificial Sequence
  Synthetic
uuuuggggugguggugg

SEQ ID NO: 759114 - RNA, 17 nt, Artificial Sequence
  Synthetic
auucugcuugguggugg

SEQ ID NO: 759115 - RNA, 17 nt, Artificial Sequence
  Synthetic
uauuacauauguggugg

SEQ ID NO: 759116 - RNA, 17 nt, Artificial Sequence
  Synthetic
uuagccagguguggugg

SEQ ID NO: 759117 - RNA, 17 nt, Artificial Sequence
  Synthetic
uuagccggguguggugg

SEQ ID NO: 759118 - RNA, 17 nt, Artificial Sequence
  Synthetic
uuagcuggguguggugg

SEQ ID NO: 759119 - RNA, 17 nt, Artificial Sequence
  Synthetic
uugauugauuguggugg

SEQ ID NO: 759120 - RNA, 17 nt, Artificial Sequence
  Synthetic
acaauacugauuggugg

SEQ ID NO: 759121 - RNA, 17 nt, Artificial Sequence
  Synthetic
uugugucaacuuggugg

SEQ ID NO: 759122 - RNA, 17 nt, Artificial Sequence
  Synthetic
aaauguccacuuggugg

SEQ ID NO: 759123 - RNA, 17 nt, Artificial Sequence
  Synthetic
uauauucugcuuggugg

SEQ ID NO: 759124 - RNA, 17 nt, Artificial Sequence
  Synthetic
agagagagaguuggugg

SEQ ID NO: 759125 - RNA, 17 nt, Artificial Sequence
  Synthetic
agauuggggguuggugg

SEQ ID NO: 759126 - RNA, 17 nt, Artificial Sequence
  Synthetic
auucccaauguuggugg

SEQ ID NO: 759127 - RNA, 17 nt, Artificial Sequence
  Synthetic
aacauuaacuuuggugg

SEQ ID NO: 759128 - RNA, 17 nt, Artificial Sequence
  Synthetic
ugcugaagcaaaugugg

SEQ ID NO: 759129 - RNA, 17 nt, Artificial Sequence
  Synthetic
uuguaaagacaaugugg

SEQ ID NO: 759130 - RNA, 17 nt, Artificial Sequence
  Synthetic
augagcaagcaaugugg

SEQ ID NO: 759131 - RNA, 17 nt, Artificial Sequence
  Synthetic
uacuggcagcaaugugg

SEQ ID NO: 759132 - RNA, 17 nt, Artificial Sequence
  Synthetic
cugacaauuccaugugg

SEQ ID NO: 759133 - RNA, 17 nt, Artificial Sequence
  Synthetic
uuucaagggggaugugg

SEQ ID NO: 759134 - RNA, 17 nt, Artificial Sequence
  Synthetic
ugugugaugggaugugg

SEQ ID NO: 759135 - RNA, 17 nt, Artificial Sequence
  Synthetic
aaaauaguuggaugugg

SEQ ID NO: 759136 - RNA, 17 nt, Artificial Sequence
  Synthetic
aaggagaggcuaugugg

SEQ ID NO: 759137 - RNA, 17 nt, Artificial Sequence
  Synthetic
agagagggaguaugugg

SEQ ID NO: 759138 - RNA, 17 nt, Artificial Sequence
  Synthetic
cacacguguguaugugg

SEQ ID NO: 759139 - RNA, 17 nt, Artificial Sequence
  Synthetic
uuggucuuucacugugg

SEQ ID NO: 759140 - RNA, 17 nt, Artificial Sequence
  Synthetic
cacucuggggacugugg

SEQ ID NO: 759141 - RNA, 17 nt, Artificial Sequence
  Synthetic
cuucucuuauccugugg

SEQ ID NO: 759142 - RNA, 17 nt, Artificial Sequence
  Synthetic
caaauucccagcugugg

SEQ ID NO: 759143 - RNA, 17 nt, Artificial Sequence
  Synthetic
aaaugagccagcugugg

SEQ ID NO: 759144 - RNA, 17 nt, Artificial Sequence
  Synthetic
uacauaauuugcugugg

SEQ ID NO: 759145 - RNA, 17 nt, Artificial Sequence
  Synthetic
cccucaaaaaucugugg

SEQ ID NO: 759146 - RNA, 17 nt, Artificial Sequence
  Synthetic
aaucagaaucucugugg

SEQ ID NO: 759147 - RNA, 17 nt, Artificial Sequence
  Synthetic
ccugccaccgucugugg

SEQ ID NO: 759148 - RNA, 17 nt, Artificial Sequence
  Synthetic
agcaucuccuucugugg

SEQ ID NO: 759149 - RNA, 17 nt, Artificial Sequence
  Synthetic
ugguuggccaagugugg

SEQ ID NO: 759150 - RNA, 17 nt, Artificial Sequence
  Synthetic
uggagacugaagugugg

SEQ ID NO: 759151 - RNA, 17 nt, Artificial Sequence
  Synthetic
auuucuuuucagugugg

SEQ ID NO: 759152 - RNA, 17 nt, Artificial Sequence
  Synthetic
uacaaaggguagugugg

SEQ ID NO: 759153 - RNA, 17 nt, Artificial Sequence
  Synthetic
ccucccaggacgugugg

SEQ ID NO: 759154 - RNA, 17 nt, Artificial Sequence
  Synthetic
aaugaauugccgugugg

SEQ ID NO: 759155 - RNA, 17 nt, Artificial Sequence
  Synthetic
uaagagagaaggugugg

SEQ ID NO: 759156 - RNA, 17 nt, Artificial Sequence
  Synthetic
aaaaguaacaggugugg

SEQ ID NO: 759157 - RNA, 17 nt, Artificial Sequence
  Synthetic
aaauuaaccaggugugg

SEQ ID NO: 759158 - RNA, 17 nt, Artificial Sequence
  Synthetic
acauucaccaggugugg

SEQ ID NO: 759159 - RNA, 17 nt, Artificial Sequence
  Synthetic
auacaagccaggugugg

SEQ ID NO: 759160 - RNA, 17 nt, Artificial Sequence
  Synthetic
aaauuagccaggugugg

SEQ ID NO: 759161 - RNA, 17 nt, Artificial Sequence
  Synthetic
acauuagccaggugugg

SEQ ID NO: 759162 - RNA, 17 nt, Artificial Sequence
  Synthetic
aucagggccaggugugg

SEQ ID NO: 759163 - RNA, 17 nt, Artificial Sequence
  Synthetic
ucaguggccaggugugg

SEQ ID NO: 759164 - RNA, 17 nt, Artificial Sequence
  Synthetic
uaaaauaugaggugugg

SEQ ID NO: 759165 - RNA, 17 nt, Artificial Sequence
  Synthetic
aaauuagcagggugugg

SEQ ID NO: 759166 - RNA, 17 nt, Artificial Sequence
  Synthetic
aaauuacccgggugugg

SEQ ID NO: 759167 - RNA, 17 nt, Artificial Sequence
  Synthetic
aaauuagccgggugugg

SEQ ID NO: 759168 - RNA, 17 nt, Artificial Sequence
  Synthetic
aaacgggccgggugugg

SEQ ID NO: 759169 - RNA, 17 nt, Artificial Sequence
  Synthetic
aaauuaaucgggugugg

SEQ ID NO: 759170 - RNA, 17 nt, Artificial Sequence
  Synthetic
aauagacaugggugugg

SEQ ID NO: 759171 - RNA, 17 nt, Artificial Sequence
  Synthetic
aaauuagcugggugugg

SEQ ID NO: 759172 - RNA, 17 nt, Artificial Sequence
  Synthetic
aacuuagcugggugugg

SEQ ID NO: 759173 - RNA, 17 nt, Artificial Sequence
  Synthetic
aauaaggcugggugugg

SEQ ID NO: 759174 - RNA, 17 nt, Artificial Sequence
  Synthetic
aaauuaucugggugugg

SEQ ID NO: 759175 - RNA, 17 nt, Artificial Sequence
  Synthetic
uuuaugagugggugugg

SEQ ID NO: 759176 - RNA, 17 nt, Artificial Sequence
  Synthetic
auuaaaauugggugugg

SEQ ID NO: 759177 - RNA, 17 nt, Artificial Sequence
  Synthetic
ccaaugauugggugugg

SEQ ID NO: 759178 - RNA, 17 nt, Artificial Sequence
  Synthetic
aaauuaguugggugugg

SEQ ID NO: 759179 - RNA, 17 nt, Artificial Sequence
  Synthetic
aaaauuagcuggugugg

SEQ ID NO: 759180 - RNA, 17 nt, Artificial Sequence
  Synthetic
cugugggcuuggugugg

SEQ ID NO: 759181 - RNA, 17 nt, Artificial Sequence
  Synthetic
cauauaauaaugugugg

SEQ ID NO: 759182 - RNA, 17 nt, Artificial Sequence
  Synthetic
cucugggccaugugugg

SEQ ID NO: 759183 - RNA, 17 nt, Artificial Sequence
  Synthetic
uuucugauucugugugg

SEQ ID NO: 759184 - RNA, 17 nt, Artificial Sequence
  Synthetic
ucacuaccugugugugg

SEQ ID NO: 759185 - RNA, 17 nt, Artificial Sequence
  Synthetic
auggugugugugugugg

SEQ ID NO: 759186 - RNA, 17 nt, Artificial Sequence
  Synthetic
ugugugugugugugugg

SEQ ID NO: 759187 - RNA, 17 nt, Artificial Sequence
  Synthetic
aauauggaauugugugg

SEQ ID NO: 759188 - RNA, 17 nt, Artificial Sequence
  Synthetic
ccauucuuuuugugugg

SEQ ID NO: 759189 - RNA, 17 nt, Artificial Sequence
  Synthetic
cuaaaaaacaauugugg

SEQ ID NO: 759190 - RNA, 17 nt, Artificial Sequence
  Synthetic
cguguuuugcauugugg

SEQ ID NO: 759191 - RNA, 17 nt, Artificial Sequence
  Synthetic
ugggaucaagauugugg

SEQ ID NO: 759192 - RNA, 17 nt, Artificial Sequence
  Synthetic
aaauugauugauugugg

SEQ ID NO: 759193 - RNA, 17 nt, Artificial Sequence
  Synthetic
aauacagggccuugugg

SEQ ID NO: 759194 - RNA, 17 nt, Artificial Sequence
  Synthetic
uaaauaauuccuugugg

SEQ ID NO: 759195 - RNA, 17 nt, Artificial Sequence
  Synthetic
uuaggguuugcuugugg

SEQ ID NO: 759196 - RNA, 17 nt, Artificial Sequence
  Synthetic
uuuauggagucuugugg

SEQ ID NO: 759197 - RNA, 17 nt, Artificial Sequence
  Synthetic
ucagccggguguugugg

SEQ ID NO: 759198 - RNA, 17 nt, Artificial Sequence
  Synthetic
auacaucuuuguugugg

SEQ ID NO: 759199 - RNA, 17 nt, Artificial Sequence
  Synthetic
auaauucuuuguugugg

SEQ ID NO: 759200 - RNA, 17 nt, Artificial Sequence
  Synthetic
aaugggaaaauuugugg

SEQ ID NO: 759201 - RNA, 17 nt, Artificial Sequence
  Synthetic
uaaaagucaauuugugg

SEQ ID NO: 759202 - RNA, 17 nt, Artificial Sequence
  Synthetic
cuuaauucaauuugugg

SEQ ID NO: 759203 - RNA, 17 nt, Artificial Sequence
  Synthetic
uacaucaauauuugugg

SEQ ID NO: 759204 - RNA, 17 nt, Artificial Sequence
  Synthetic
uucacauaacuuugugg

SEQ ID NO: 759205 - RNA, 17 nt, Artificial Sequence
  Synthetic
ugaacagggguuugugg

SEQ ID NO: 759206 - RNA, 17 nt, Artificial Sequence
  Synthetic
aacuggaauguuugugg

SEQ ID NO: 759207 - RNA, 17 nt, Artificial Sequence
  Synthetic
agaaaaaaaaaaauugg

SEQ ID NO: 759208 - RNA, 17 nt, Artificial Sequence
  Synthetic
cuguauugaaaaauugg

SEQ ID NO: 759209 - RNA, 17 nt, Artificial Sequence
  Synthetic
aaauauuguaaaauugg

SEQ ID NO: 759210 - RNA, 17 nt, Artificial Sequence
  Synthetic
aagucuggucaaauugg

SEQ ID NO: 759211 - RNA, 17 nt, Artificial Sequence
  Synthetic
uauagaagugaaauugg

SEQ ID NO: 759212 - RNA, 17 nt, Artificial Sequence
  Synthetic
cucaaggaauaaauugg

SEQ ID NO: 759213 - RNA, 17 nt, Artificial Sequence
  Synthetic
aacauggaugcaauugg

SEQ ID NO: 759214 - RNA, 17 nt, Artificial Sequence
  Synthetic
acuuccuagagaauugg

SEQ ID NO: 759215 - RNA, 17 nt, Artificial Sequence
  Synthetic
uaaagacgaggaauugg

SEQ ID NO: 759216 - RNA, 17 nt, Artificial Sequence
  Synthetic
aaaggcauuugaauugg

SEQ ID NO: 759217 - RNA, 17 nt, Artificial Sequence
  Synthetic
acuuagugauuaauugg

SEQ ID NO: 759218 - RNA, 17 nt, Artificial Sequence
  Synthetic
aaagagguaaacauugg

SEQ ID NO: 759219 - RNA, 17 nt, Artificial Sequence
  Synthetic
aaaaagaacaacauugg

SEQ ID NO: 759220 - RNA, 17 nt, Artificial Sequence
  Synthetic
cuugguugucacauugg

SEQ ID NO: 759221 - RNA, 17 nt, Artificial Sequence
  Synthetic
auguucacugacauugg

SEQ ID NO: 759222 - RNA, 17 nt, Artificial Sequence
  Synthetic
ucauuguuuuacauugg

SEQ ID NO: 759223 - RNA, 17 nt, Artificial Sequence
  Synthetic
aaaacucuuaccauugg

SEQ ID NO: 759224 - RNA, 17 nt, Artificial Sequence
  Synthetic
aggaguaaagccauugg

SEQ ID NO: 759225 - RNA, 17 nt, Artificial Sequence
  Synthetic
cuccaaauauccauugg

SEQ ID NO: 759226 - RNA, 17 nt, Artificial Sequence
  Synthetic
cuucucaaguccauugg

SEQ ID NO: 759227 - RNA, 17 nt, Artificial Sequence
  Synthetic
aauaccuaaugcauugg

SEQ ID NO: 759228 - RNA, 17 nt, Artificial Sequence
  Synthetic
uguggaacaugcauugg

SEQ ID NO: 759229 - RNA, 17 nt, Artificial Sequence
  Synthetic
acacaaucuugcauugg

SEQ ID NO: 759230 - RNA, 17 nt, Artificial Sequence
  Synthetic
cacuuguauaucauugg

SEQ ID NO: 759231 - RNA, 17 nt, Artificial Sequence
  Synthetic
acaugucuucucauugg

SEQ ID NO: 759232 - RNA, 17 nt, Artificial Sequence
  Synthetic
aauauauccuucauugg

SEQ ID NO: 759233 - RNA, 17 nt, Artificial Sequence
  Synthetic
uaucaucucaagauugg

SEQ ID NO: 759234 - RNA, 17 nt, Artificial Sequence
  Synthetic
ccugcuuucaagauugg

SEQ ID NO: 759235 - RNA, 17 nt, Artificial Sequence
  Synthetic
uauaaccagaagauugg

SEQ ID NO: 759236 - RNA, 17 nt, Artificial Sequence
  Synthetic
uagggguagcagauugg

SEQ ID NO: 759237 - RNA, 17 nt, Artificial Sequence
  Synthetic
ucagauuuagagauugg

SEQ ID NO: 759238 - RNA, 17 nt, Artificial Sequence
  Synthetic
auuggagaguagauugg

SEQ ID NO: 759239 - RNA, 17 nt, Artificial Sequence
  Synthetic
aaaaagaaggggauugg

SEQ ID NO: 759240 - RNA, 17 nt, Artificial Sequence
  Synthetic
accaguugggggauugg

SEQ ID NO: 759241 - RNA, 17 nt, Artificial Sequence
  Synthetic
ccauugaaugggauugg

SEQ ID NO: 759242 - RNA, 17 nt, Artificial Sequence
  Synthetic
aauagaauuuggauugg

SEQ ID NO: 759243 - RNA, 17 nt, Artificial Sequence
  Synthetic
cugacaauacugauugg

SEQ ID NO: 759244 - RNA, 17 nt, Artificial Sequence
  Synthetic
aaacuuucugugauugg

SEQ ID NO: 759245 - RNA, 17 nt, Artificial Sequence
  Synthetic
uugauccucaauauugg

SEQ ID NO: 759246 - RNA, 17 nt, Artificial Sequence
  Synthetic
auugucauuucuauugg

SEQ ID NO: 759247 - RNA, 17 nt, Artificial Sequence
  Synthetic
caaaugaucuguauugg

SEQ ID NO: 759248 - RNA, 17 nt, Artificial Sequence
  Synthetic
auuuuugaaauuauugg

SEQ ID NO: 759249 - RNA, 17 nt, Artificial Sequence
  Synthetic
uuaagauuaauuauugg

SEQ ID NO: 759250 - RNA, 17 nt, Artificial Sequence
  Synthetic
ucucagaagcuuauugg

SEQ ID NO: 759251 - RNA, 17 nt, Artificial Sequence
  Synthetic
aacacaaugguuauugg

SEQ ID NO: 759252 - RNA, 17 nt, Artificial Sequence
  Synthetic
agcaucaguuuuauugg

SEQ ID NO: 759253 - RNA, 17 nt, Artificial Sequence
  Synthetic
auuuugugucaacuugg

SEQ ID NO: 759254 - RNA, 17 nt, Artificial Sequence
  Synthetic
cuaauucuugaacuugg

SEQ ID NO: 759255 - RNA, 17 nt, Artificial Sequence
  Synthetic
aauuucucaacacuugg

SEQ ID NO: 759256 - RNA, 17 nt, Artificial Sequence
  Synthetic
agcugguaaagacuugg

SEQ ID NO: 759257 - RNA, 17 nt, Artificial Sequence
  Synthetic
aaauuuuccagacuugg

SEQ ID NO: 759258 - RNA, 17 nt, Artificial Sequence
  Synthetic
uuaaaauacugacuugg

SEQ ID NO: 759259 - RNA, 17 nt, Artificial Sequence
  Synthetic
accacaagcugacuugg

SEQ ID NO: 759260 - RNA, 17 nt, Artificial Sequence
  Synthetic
cucucgaaaguacuugg

SEQ ID NO: 759261 - RNA, 17 nt, Artificial Sequence
  Synthetic
acucaguaauuacuugg

SEQ ID NO: 759262 - RNA, 17 nt, Artificial Sequence
  Synthetic
uuagguucauuacuugg

SEQ ID NO: 759263 - RNA, 17 nt, Artificial Sequence
  Synthetic
cuaacuaguaaccuugg

SEQ ID NO: 759264 - RNA, 17 nt, Artificial Sequence
  Synthetic
ugcuuauaucaccuugg

SEQ ID NO: 759265 - RNA, 17 nt, Artificial Sequence
  Synthetic
cuucaauuucaccuugg

SEQ ID NO: 759266 - RNA, 17 nt, Artificial Sequence
  Synthetic
aguagacacuaccuugg

SEQ ID NO: 759267 - RNA, 17 nt, Artificial Sequence
  Synthetic
uuucacaugacccuugg

SEQ ID NO: 759268 - RNA, 17 nt, Artificial Sequence
  Synthetic
caaguuaccucccuugg

SEQ ID NO: 759269 - RNA, 17 nt, Artificial Sequence
  Synthetic
aagaauaacagccuugg

SEQ ID NO: 759270 - RNA, 17 nt, Artificial Sequence
  Synthetic
uccucacacagccuugg

SEQ ID NO: 759271 - RNA, 17 nt, Artificial Sequence
  Synthetic
ucauaugacugccuugg

SEQ ID NO: 759272 - RNA, 17 nt, Artificial Sequence
  Synthetic
uucagaaacauccuugg

SEQ ID NO: 759273 - RNA, 17 nt, Artificial Sequence
  Synthetic
uaaauuuucuuccuugg

SEQ ID NO: 759274 - RNA, 17 nt, Artificial Sequence
  Synthetic
uuuggaauuuuccuugg

SEQ ID NO: 759275 - RNA, 17 nt, Artificial Sequence
  Synthetic
uucuguguuuuccuugg

SEQ ID NO: 759276 - RNA, 17 nt, Artificial Sequence
  Synthetic
aagacacuggagcuugg

SEQ ID NO: 759277 - RNA, 17 nt, Artificial Sequence
  Synthetic
aaauuagccaggcuugg

SEQ ID NO: 759278 - RNA, 17 nt, Artificial Sequence
  Synthetic
aaauuagccgggcuugg

SEQ ID NO: 759279 - RNA, 17 nt, Artificial Sequence
  Synthetic
caugcugauuggcuugg

SEQ ID NO: 759280 - RNA, 17 nt, Artificial Sequence
  Synthetic
aaauauauucugcuugg

SEQ ID NO: 759281 - RNA, 17 nt, Artificial Sequence
  Synthetic
caguuucuucugcuugg

SEQ ID NO: 759282 - RNA, 17 nt, Artificial Sequence
  Synthetic
acagucugcuugcuugg

SEQ ID NO: 759283 - RNA, 17 nt, Artificial Sequence
  Synthetic
ccagguuuuuugcuugg

SEQ ID NO: 759284 - RNA, 17 nt, Artificial Sequence
  Synthetic
caguaacaaaaucuugg

SEQ ID NO: 759285 - RNA, 17 nt, Artificial Sequence
  Synthetic
aaucucccaaaucuugg

SEQ ID NO: 759286 - RNA, 17 nt, Artificial Sequence
  Synthetic
ugguaacaucaucuugg

SEQ ID NO: 759287 - RNA, 17 nt, Artificial Sequence
  Synthetic
uaaucucagccucuugg

SEQ ID NO: 759288 - RNA, 17 nt, Artificial Sequence
  Synthetic
uaacaagaggcucuugg

SEQ ID NO: 759289 - RNA, 17 nt, Artificial Sequence
  Synthetic
agacucuagggucuugg

SEQ ID NO: 759290 - RNA, 17 nt, Artificial Sequence
  Synthetic
uuaaaaaaacuucuugg

SEQ ID NO: 759291 - RNA, 17 nt, Artificial Sequence
  Synthetic
uguauucuucuucuugg

SEQ ID NO: 759292 - RNA, 17 nt, Artificial Sequence
  Synthetic
agucccauauuucuugg

SEQ ID NO: 759293 - RNA, 17 nt, Artificial Sequence
  Synthetic
uuuucuuuguuucuugg

SEQ ID NO: 759294 - RNA, 17 nt, Artificial Sequence
  Synthetic
uuuggaaaaaaaguugg

SEQ ID NO: 759295 - RNA, 17 nt, Artificial Sequence
  Synthetic
ucaagccacaaaguugg

SEQ ID NO: 759296 - RNA, 17 nt, Artificial Sequence
  Synthetic
aauuauuacaaaguugg

SEQ ID NO: 759297 - RNA, 17 nt, Artificial Sequence
  Synthetic
cauugaagucaaguugg

SEQ ID NO: 759298 - RNA, 17 nt, Artificial Sequence
  Synthetic
caggcuaaagaaguugg

SEQ ID NO: 759299 - RNA, 17 nt, Artificial Sequence
  Synthetic
agcagagaggaaguugg

SEQ ID NO: 759300 - RNA, 17 nt, Artificial Sequence
  Synthetic
cauguagaauaaguugg

SEQ ID NO: 759301 - RNA, 17 nt, Artificial Sequence
  Synthetic
aaauuuaucuaaguugg

SEQ ID NO: 759302 - RNA, 17 nt, Artificial Sequence
  Synthetic
aaacaaguaacaguugg

SEQ ID NO: 759303 - RNA, 17 nt, Artificial Sequence
  Synthetic
caucacacaccaguugg

SEQ ID NO: 759304 - RNA, 17 nt, Artificial Sequence
  Synthetic
agcacggaugcaguugg

SEQ ID NO: 759305 - RNA, 17 nt, Artificial Sequence
  Synthetic
cagagagagagaguugg

SEQ ID NO: 759306 - RNA, 17 nt, Artificial Sequence
  Synthetic
aggaaaacaggaguugg

SEQ ID NO: 759307 - RNA, 17 nt, Artificial Sequence
  Synthetic
uugagcccaggaguugg

SEQ ID NO: 759308 - RNA, 17 nt, Artificial Sequence
  Synthetic
cugagccuaggaguugg

SEQ ID NO: 759309 - RNA, 17 nt, Artificial Sequence
  Synthetic
ugcuuggugggaguugg

SEQ ID NO: 759310 - RNA, 17 nt, Artificial Sequence
  Synthetic
agucugaauugaguugg

SEQ ID NO: 759311 - RNA, 17 nt, Artificial Sequence
  Synthetic
aguguggcaauaguugg

SEQ ID NO: 759312 - RNA, 17 nt, Artificial Sequence
  Synthetic
uaagcuccccuaguugg

SEQ ID NO: 759313 - RNA, 17 nt, Artificial Sequence
  Synthetic
cuucacacaguaguugg

SEQ ID NO: 759314 - RNA, 17 nt, Artificial Sequence
  Synthetic
cacuuucacaccguugg

SEQ ID NO: 759315 - RNA, 17 nt, Artificial Sequence
  Synthetic
aauuuagcauccguugg

SEQ ID NO: 759316 - RNA, 17 nt, Artificial Sequence
  Synthetic
uggcugggcuccguugg

SEQ ID NO: 759317 - RNA, 17 nt, Artificial Sequence
  Synthetic
cuuuuuagccgcguugg

SEQ ID NO: 759318 - RNA, 17 nt, Artificial Sequence
  Synthetic
uaauuggucaucguugg

SEQ ID NO: 759319 - RNA, 17 nt, Artificial Sequence
  Synthetic
caggaggcugagguugg

SEQ ID NO: 759320 - RNA, 17 nt, Artificial Sequence
  Synthetic
ugggaggcugagguugg

SEQ ID NO: 759321 - RNA, 17 nt, Artificial Sequence
  Synthetic
ugguguaguuagguugg

SEQ ID NO: 759322 - RNA, 17 nt, Artificial Sequence
  Synthetic
uaaguuggcaggguugg

SEQ ID NO: 759323 - RNA, 17 nt, Artificial Sequence
  Synthetic
uugaagcugaggguugg

SEQ ID NO: 759324 - RNA, 17 nt, Artificial Sequence
  Synthetic
uccguggaccggguugg

SEQ ID NO: 759325 - RNA, 17 nt, Artificial Sequence
  Synthetic
aaaauaauagggguugg

SEQ ID NO: 759326 - RNA, 17 nt, Artificial Sequence
  Synthetic
auaugcugggggguugg

SEQ ID NO: 759327 - RNA, 17 nt, Artificial Sequence
  Synthetic
ucaagauuggggguugg

SEQ ID NO: 759328 - RNA, 17 nt, Artificial Sequence
  Synthetic
aaaguacaugggguugg

SEQ ID NO: 759329 - RNA, 17 nt, Artificial Sequence
  Synthetic
cacaguggugggguugg

SEQ ID NO: 759330 - RNA, 17 nt, Artificial Sequence
  Synthetic
uaugugugugggguugg

SEQ ID NO: 759331 - RNA, 17 nt, Artificial Sequence
  Synthetic
ucuggcaaguggguugg

SEQ ID NO: 759332 - RNA, 17 nt, Artificial Sequence
  Synthetic
uuuuuaccacugguugg

SEQ ID NO: 759333 - RNA, 17 nt, Artificial Sequence
  Synthetic
uauaugguggugguugg

SEQ ID NO: 759334 - RNA, 17 nt, Artificial Sequence
  Synthetic
aggugauuuuugguugg

SEQ ID NO: 759335 - RNA, 17 nt, Artificial Sequence
  Synthetic
auaauucccaauguugg

SEQ ID NO: 759336 - RNA, 17 nt, Artificial Sequence
  Synthetic
ccaagugaccauguugg

SEQ ID NO: 759337 - RNA, 17 nt, Artificial Sequence
  Synthetic
uuaaaaccagauguugg

SEQ ID NO: 759338 - RNA, 17 nt, Artificial Sequence
  Synthetic
uuagguguugauguugg

SEQ ID NO: 759339 - RNA, 17 nt, Artificial Sequence
  Synthetic
uauuuuguaacuguugg

SEQ ID NO: 759340 - RNA, 17 nt, Artificial Sequence
  Synthetic
cacuucuacacuguugg

SEQ ID NO: 759341 - RNA, 17 nt, Artificial Sequence
  Synthetic
cacucuuacacuguugg

SEQ ID NO: 759342 - RNA, 17 nt, Artificial Sequence
  Synthetic
cacuuuuacacuguugg

SEQ ID NO: 759343 - RNA, 17 nt, Artificial Sequence
  Synthetic
cgcuuuuacacuguugg

SEQ ID NO: 759344 - RNA, 17 nt, Artificial Sequence
  Synthetic
ugcuuuuacacuguugg

SEQ ID NO: 759345 - RNA, 17 nt, Artificial Sequence
  Synthetic
cucuuuuacacuguugg

SEQ ID NO: 759346 - RNA, 17 nt, Artificial Sequence
  Synthetic
cccuuaugcacuguugg

SEQ ID NO: 759347 - RNA, 17 nt, Artificial Sequence
  Synthetic
cccuuguauacuguugg

SEQ ID NO: 759348 - RNA, 17 nt, Artificial Sequence
  Synthetic
ugcuuauacccuguugg

SEQ ID NO: 759349 - RNA, 17 nt, Artificial Sequence
  Synthetic
ccgcaggggccuguugg

SEQ ID NO: 759350 - RNA, 17 nt, Artificial Sequence
  Synthetic
agaaagaugccuguugg

SEQ ID NO: 759351 - RNA, 17 nt, Artificial Sequence
  Synthetic
acacuggugccuguugg

SEQ ID NO: 759352 - RNA, 17 nt, Artificial Sequence
  Synthetic
cucaaauaagcuguugg

SEQ ID NO: 759353 - RNA, 17 nt, Artificial Sequence
  Synthetic
acauuauacgcuguugg

SEQ ID NO: 759354 - RNA, 17 nt, Artificial Sequence
  Synthetic
ugaacccuggcuguugg

SEQ ID NO: 759355 - RNA, 17 nt, Artificial Sequence
  Synthetic
uaguaacuugcuguugg

SEQ ID NO: 759356 - RNA, 17 nt, Artificial Sequence
  Synthetic
aggaauccaucuguugg

SEQ ID NO: 759357 - RNA, 17 nt, Artificial Sequence
  Synthetic
aguuauaacaguguugg

SEQ ID NO: 759358 - RNA, 17 nt, Artificial Sequence
  Synthetic
auuugcaaagguguugg

SEQ ID NO: 759359 - RNA, 17 nt, Artificial Sequence
  Synthetic
uauuguguguguguugg

SEQ ID NO: 759360 - RNA, 17 nt, Artificial Sequence
  Synthetic
cacuucugcauuguugg

SEQ ID NO: 759361 - RNA, 17 nt, Artificial Sequence
  Synthetic
cuacauuucauuguugg

SEQ ID NO: 759362 - RNA, 17 nt, Artificial Sequence
  Synthetic
cacaaacauauuguugg

SEQ ID NO: 759363 - RNA, 17 nt, Artificial Sequence
  Synthetic
uauggccuccuuguugg

SEQ ID NO: 759364 - RNA, 17 nt, Artificial Sequence
  Synthetic
ucaaguuuaguuguugg

SEQ ID NO: 759365 - RNA, 17 nt, Artificial Sequence
  Synthetic
agcugcaggguuguugg

SEQ ID NO: 759366 - RNA, 17 nt, Artificial Sequence
  Synthetic
aaacaacacaaauuugg

SEQ ID NO: 759367 - RNA, 17 nt, Artificial Sequence
  Synthetic
cuauaacucaaauuugg

SEQ ID NO: 759368 - RNA, 17 nt, Artificial Sequence
  Synthetic
caacacaugaaauuugg

SEQ ID NO: 759369 - RNA, 17 nt, Artificial Sequence
  Synthetic
cauguugcuaaauuugg

SEQ ID NO: 759370 - RNA, 17 nt, Artificial Sequence
  Synthetic
acauguaguaaauuugg

SEQ ID NO: 759371 - RNA, 17 nt, Artificial Sequence
  Synthetic
acuuuuggagaauuugg

SEQ ID NO: 759372 - RNA, 17 nt, Artificial Sequence
  Synthetic
uaaugucuagaauuugg

SEQ ID NO: 759373 - RNA, 17 nt, Artificial Sequence
  Synthetic
auauagaaauaauuugg

SEQ ID NO: 759374 - RNA, 17 nt, Artificial Sequence
  Synthetic
auguucagauaauuugg

SEQ ID NO: 759375 - RNA, 17 nt, Artificial Sequence
  Synthetic
ugguauuacuaauuugg

SEQ ID NO: 759376 - RNA, 17 nt, Artificial Sequence
  Synthetic
aauagucuguaauuugg

SEQ ID NO: 759377 - RNA, 17 nt, Artificial Sequence
  Synthetic
uauuauauuuaauuugg

SEQ ID NO: 759378 - RNA, 17 nt, Artificial Sequence
  Synthetic
auggaucuuacauuugg

SEQ ID NO: 759379 - RNA, 17 nt, Artificial Sequence
  Synthetic
ccugauccaccauuugg

SEQ ID NO: 759380 - RNA, 17 nt, Artificial Sequence
  Synthetic
cuucaaaagccauuugg

SEQ ID NO: 759381 - RNA, 17 nt, Artificial Sequence
  Synthetic
uuuaauaguccauuugg

SEQ ID NO: 759382 - RNA, 17 nt, Artificial Sequence
  Synthetic
uuuuuacuuccauuugg

SEQ ID NO: 759383 - RNA, 17 nt, Artificial Sequence
  Synthetic
aguuccuuugcauuugg

SEQ ID NO: 759384 - RNA, 17 nt, Artificial Sequence
  Synthetic
uuaguuugaucauuugg

SEQ ID NO: 759385 - RNA, 17 nt, Artificial Sequence
  Synthetic
auucugcuuucauuugg

SEQ ID NO: 759386 - RNA, 17 nt, Artificial Sequence
  Synthetic
agaaggggcagauuugg

SEQ ID NO: 759387 - RNA, 17 nt, Artificial Sequence
  Synthetic
uucaacaugagauuugg

SEQ ID NO: 759388 - RNA, 17 nt, Artificial Sequence
  Synthetic
uugauauauagauuugg

SEQ ID NO: 759389 - RNA, 17 nt, Artificial Sequence
  Synthetic
ucaaguuggggauuugg

SEQ ID NO: 759390 - RNA, 17 nt, Artificial Sequence
  Synthetic
aguguugauggauuugg

SEQ ID NO: 759391 - RNA, 17 nt, Artificial Sequence
  Synthetic
ccccaauggauauuugg

SEQ ID NO: 759392 - RNA, 17 nt, Artificial Sequence
  Synthetic
uaaaccaugauauuugg

SEQ ID NO: 759393 - RNA, 17 nt, Artificial Sequence
  Synthetic
aucgaagauauauuugg

SEQ ID NO: 759394 - RNA, 17 nt, Artificial Sequence
  Synthetic
cccuugguacuauuugg

SEQ ID NO: 759395 - RNA, 17 nt, Artificial Sequence
  Synthetic
cccugcugucuauuugg

SEQ ID NO: 759396 - RNA, 17 nt, Artificial Sequence
  Synthetic
acgucauuucuauuugg

SEQ ID NO: 759397 - RNA, 17 nt, Artificial Sequence
  Synthetic
uuucauaucuuauuugg

SEQ ID NO: 759398 - RNA, 17 nt, Artificial Sequence
  Synthetic
uaaucccaacacuuugg

SEQ ID NO: 759399 - RNA, 17 nt, Artificial Sequence
  Synthetic
uguggggaugacuuugg

SEQ ID NO: 759400 - RNA, 17 nt, Artificial Sequence
  Synthetic
agucuuagcuacuuugg

SEQ ID NO: 759401 - RNA, 17 nt, Artificial Sequence
  Synthetic
uuucacuuuaccuuugg

SEQ ID NO: 759402 - RNA, 17 nt, Artificial Sequence
  Synthetic
uuuuagggacccuuugg

SEQ ID NO: 759403 - RNA, 17 nt, Artificial Sequence
  Synthetic
aagacagcauccuuugg

SEQ ID NO: 759404 - RNA, 17 nt, Artificial Sequence
  Synthetic
aaacucugaagcuuugg

SEQ ID NO: 759405 - RNA, 17 nt, Artificial Sequence
  Synthetic
aggagucccggcuuugg

SEQ ID NO: 759406 - RNA, 17 nt, Artificial Sequence
  Synthetic
uuuggcaugggcuuugg

SEQ ID NO: 759407 - RNA, 17 nt, Artificial Sequence
  Synthetic
cugugguuuaucuuugg

SEQ ID NO: 759408 - RNA, 17 nt, Artificial Sequence
  Synthetic
aacuguuuuaucuuugg

SEQ ID NO: 759409 - RNA, 17 nt, Artificial Sequence
  Synthetic
uccauucuacucuuugg

SEQ ID NO: 759410 - RNA, 17 nt, Artificial Sequence
  Synthetic
uaaucccagcucuuugg

SEQ ID NO: 759411 - RNA, 17 nt, Artificial Sequence
  Synthetic
cugaggcuucucuuugg

SEQ ID NO: 759412 - RNA, 17 nt, Artificial Sequence
  Synthetic
uaaacuugguucuuugg

SEQ ID NO: 759413 - RNA, 17 nt, Artificial Sequence
  Synthetic
auaucuuaaaaguuugg

SEQ ID NO: 759414 - RNA, 17 nt, Artificial Sequence
  Synthetic
aaauguuaaaaguuugg

SEQ ID NO: 759415 - RNA, 17 nt, Artificial Sequence
  Synthetic
uauagagaacaguuugg

SEQ ID NO: 759416 - RNA, 17 nt, Artificial Sequence
  Synthetic
agguuggaacaguuugg

SEQ ID NO: 759417 - RNA, 17 nt, Artificial Sequence
  Synthetic
ugucuaacacaguuugg

SEQ ID NO: 759418 - RNA, 17 nt, Artificial Sequence
  Synthetic
aauacaccacaguuugg

SEQ ID NO: 759419 - RNA, 17 nt, Artificial Sequence
  Synthetic
agucugguacaguuugg

SEQ ID NO: 759420 - RNA, 17 nt, Artificial Sequence
  Synthetic
aauggagaauaguuugg

SEQ ID NO: 759421 - RNA, 17 nt, Artificial Sequence
  Synthetic
ugcaggccauaguuugg

SEQ ID NO: 759422 - RNA, 17 nt, Artificial Sequence
  Synthetic
auuacaacuuaguuugg

SEQ ID NO: 759423 - RNA, 17 nt, Artificial Sequence
  Synthetic
uauggagaaccguuugg

SEQ ID NO: 759424 - RNA, 17 nt, Artificial Sequence
  Synthetic
cagcagcacagguuugg

SEQ ID NO: 759425 - RNA, 17 nt, Artificial Sequence
  Synthetic
uaagaauacagguuugg

SEQ ID NO: 759426 - RNA, 17 nt, Artificial Sequence
  Synthetic
aaauuugccagguuugg

SEQ ID NO: 759427 - RNA, 17 nt, Artificial Sequence
  Synthetic
uguaaagugagguuugg

SEQ ID NO: 759428 - RNA, 17 nt, Artificial Sequence
  Synthetic
aaauuagccggguuugg

SEQ ID NO: 759429 - RNA, 17 nt, Artificial Sequence
  Synthetic
agaagguggggguuugg

SEQ ID NO: 759430 - RNA, 17 nt, Artificial Sequence
  Synthetic
uguuggcuaugguuugg

SEQ ID NO: 759431 - RNA, 17 nt, Artificial Sequence
  Synthetic
cauguaaacugguuugg

SEQ ID NO: 759432 - RNA, 17 nt, Artificial Sequence
  Synthetic
aaguaguacugguuugg

SEQ ID NO: 759433 - RNA, 17 nt, Artificial Sequence
  Synthetic
auaccuuaacuguuugg

SEQ ID NO: 759434 - RNA, 17 nt, Artificial Sequence
  Synthetic
ccaauagguuuguuugg

SEQ ID NO: 759435 - RNA, 17 nt, Artificial Sequence
  Synthetic
aauuuuuguuuguuugg

SEQ ID NO: 759436 - RNA, 17 nt, Artificial Sequence
  Synthetic
uaagagaaaaauuuugg

SEQ ID NO: 759437 - RNA, 17 nt, Artificial Sequence
  Synthetic
uggcccuuaaauuuugg

SEQ ID NO: 759438 - RNA, 17 nt, Artificial Sequence
  Synthetic
uuaucuuacaauuuugg

SEQ ID NO: 759439 - RNA, 17 nt, Artificial Sequence
  Synthetic
agcuccagcaauuuugg

SEQ ID NO: 759440 - RNA, 17 nt, Artificial Sequence
  Synthetic
aagcuuuugaauuuugg

SEQ ID NO: 759441 - RNA, 17 nt, Artificial Sequence
  Synthetic
caacauacacauuuugg

SEQ ID NO: 759442 - RNA, 17 nt, Artificial Sequence
  Synthetic
cucaacacgcauuuugg

SEQ ID NO: 759443 - RNA, 17 nt, Artificial Sequence
  Synthetic
caccauggugauuuugg

SEQ ID NO: 759444 - RNA, 17 nt, Artificial Sequence
  Synthetic
auagauggauauuuugg

SEQ ID NO: 759445 - RNA, 17 nt, Artificial Sequence
  Synthetic
auuuauuuauauuuugg

SEQ ID NO: 759446 - RNA, 17 nt, Artificial Sequence
  Synthetic
uaaaaaauguauuuugg

SEQ ID NO: 759447 - RNA, 17 nt, Artificial Sequence
  Synthetic
auuuaugcuuauuuugg

SEQ ID NO: 759448 - RNA, 17 nt, Artificial Sequence
  Synthetic
ugagaggaaacuuuugg

SEQ ID NO: 759449 - RNA, 17 nt, Artificial Sequence
  Synthetic
uaacaaauaacuuuugg

SEQ ID NO: 759450 - RNA, 17 nt, Artificial Sequence
  Synthetic
ccucaguuuacuuuugg

SEQ ID NO: 759451 - RNA, 17 nt, Artificial Sequence
  Synthetic
uaaauccaagcuuuugg

SEQ ID NO: 759452 - RNA, 17 nt, Artificial Sequence
  Synthetic
aaagagagagcuuuugg

SEQ ID NO: 759453 - RNA, 17 nt, Artificial Sequence
  Synthetic
aaggggaaaucuuuugg

SEQ ID NO: 759454 - RNA, 17 nt, Artificial Sequence
  Synthetic
aaugacuucucuuuugg

SEQ ID NO: 759455 - RNA, 17 nt, Artificial Sequence
  Synthetic
uacaaagacaguuuugg

SEQ ID NO: 759456 - RNA, 17 nt, Artificial Sequence
  Synthetic
uucaacaucaguuuugg

SEQ ID NO: 759457 - RNA, 17 nt, Artificial Sequence
  Synthetic
aauuucaguaguuuugg

SEQ ID NO: 759458 - RNA, 17 nt, Artificial Sequence
  Synthetic
uuggauuuuaguuuugg

SEQ ID NO: 759459 - RNA, 17 nt, Artificial Sequence
  Synthetic
uaguaguuacguuuugg

SEQ ID NO: 759460 - RNA, 17 nt, Artificial Sequence
  Synthetic
ccacuauuagguuuugg

SEQ ID NO: 759461 - RNA, 17 nt, Artificial Sequence
  Synthetic
caccagcuugguuuugg

SEQ ID NO: 759462 - RNA, 17 nt, Artificial Sequence
  Synthetic
cugcuucaauguuuugg

SEQ ID NO: 759463 - RNA, 17 nt, Artificial Sequence
  Synthetic
aaucccagcauuuuugg

SEQ ID NO: 759464 - RNA, 17 nt, Artificial Sequence
  Synthetic
ugccuauugauuuuugg

SEQ ID NO: 759465 - RNA, 17 nt, Artificial Sequence
  Synthetic
uaaaaaguuauuuuugg

SEQ ID NO: 759466 - RNA, 17 nt, Artificial Sequence
  Synthetic
uaaaauaauguuuuugg

SEQ ID NO: 759467 - RNA, 17 nt, Artificial Sequence
  Synthetic
uuuucuuucuuuuuugg

SEQ ID NO: 759468 - RNA, 17 nt, Artificial Sequence
  Synthetic
cuguuuuuguuuuuugg

SEQ ID NO: 759469 - RNA, 17 nt, Artificial Sequence
  Synthetic
uuuaagucuuuuuuugg

SEQ ID NO: 759470 - RNA, 17 nt, Artificial Sequence
  Synthetic
caaaaaaaaaaaaaaug

SEQ ID NO: 759471 - RNA, 17 nt, Artificial Sequence
  Synthetic
cauggcaaaaaaaaaug

SEQ ID NO: 759472 - RNA, 17 nt, Artificial Sequence
  Synthetic
agaaaggaaaaaaaaug

SEQ ID NO: 759473 - RNA, 17 nt, Artificial Sequence
  Synthetic
auuagggaaaaaaaaug

SEQ ID NO: 759474 - RNA, 17 nt, Artificial Sequence
  Synthetic
uaucggugaaaaaaaug

SEQ ID NO: 759475 - RNA, 17 nt, Artificial Sequence
  Synthetic
ucagugcuaaaaaaaug

SEQ ID NO: 759476 - RNA, 17 nt, Artificial Sequence
  Synthetic
aaaagagagaaaaaaug

SEQ ID NO: 759477 - RNA, 17 nt, Artificial Sequence
  Synthetic
aaaauccugaaaaaaug

SEQ ID NO: 759478 - RNA, 17 nt, Artificial Sequence
  Synthetic
uugaguucuaaaaaaug

SEQ ID NO: 759479 - RNA, 17 nt, Artificial Sequence
  Synthetic
auaugaaguaaaaaaug

SEQ ID NO: 759480 - RNA, 17 nt, Artificial Sequence
  Synthetic
aaacggauuaaaaaaug

SEQ ID NO: 759481 - RNA, 17 nt, Artificial Sequence
  Synthetic
uauuuuuuuaaaaaaug

SEQ ID NO: 759482 - RNA, 17 nt, Artificial Sequence
  Synthetic
uaacaaagacaaaaaug

SEQ ID NO: 759483 - RNA, 17 nt, Artificial Sequence
  Synthetic
accuguuaccaaaaaug

SEQ ID NO: 759484 - RNA, 17 nt, Artificial Sequence
  Synthetic
aaagaaacccaaaaaug

SEQ ID NO: 759485 - RNA, 17 nt, Artificial Sequence
  Synthetic
uagaucuuucaaaaaug

SEQ ID NO: 759486 - RNA, 17 nt, Artificial Sequence
  Synthetic
agcuaagaagaaaaaug

SEQ ID NO: 759487 - RNA, 17 nt, Artificial Sequence
  Synthetic
acuuuuucugaaaaaug

SEQ ID NO: 759488 - RNA, 17 nt, Artificial Sequence
  Synthetic
cauuguauugaaaaaug

SEQ ID NO: 759489 - RNA, 17 nt, Artificial Sequence
  Synthetic
aaaugauuugaaaaaug

SEQ ID NO: 759490 - RNA, 17 nt, Artificial Sequence
  Synthetic
auaaauaaauaaaaaug

SEQ ID NO: 759491 - RNA, 17 nt, Artificial Sequence
  Synthetic
ccuuccuaauaaaaaug

SEQ ID NO: 759492 - RNA, 17 nt, Artificial Sequence
  Synthetic
acauggugauaaaaaug

SEQ ID NO: 759493 - RNA, 17 nt, Artificial Sequence
  Synthetic
ugccuauuuuaaaaaug

SEQ ID NO: 759494 - RNA, 17 nt, Artificial Sequence
  Synthetic
uuuugcuuuuaaaaaug

SEQ ID NO: 759495 - RNA, 17 nt, Artificial Sequence
  Synthetic
aacuuuuuuuaaaaaug

SEQ ID NO: 759496 - RNA, 17 nt, Artificial Sequence
  Synthetic
aaaaacaaaacaaaaug

SEQ ID NO: 759497 - RNA, 17 nt, Artificial Sequence
  Synthetic
auugaaauuacaaaaug

SEQ ID NO: 759498 - RNA, 17 nt, Artificial Sequence
  Synthetic
uuugauauuacaaaaug

SEQ ID NO: 759499 - RNA, 17 nt, Artificial Sequence
  Synthetic
cugcagugaccaaaaug

SEQ ID NO: 759500 - RNA, 17 nt, Artificial Sequence
  Synthetic
cgcuguuucccaaaaug

SEQ ID NO: 759501 - RNA, 17 nt, Artificial Sequence
  Synthetic
uuuacuuugccaaaaug

SEQ ID NO: 759502 - RNA, 17 nt, Artificial Sequence
  Synthetic
uaucagccuccaaaaug

SEQ ID NO: 759503 - RNA, 17 nt, Artificial Sequence
  Synthetic
agcauaucugcaaaaug

SEQ ID NO: 759504 - RNA, 17 nt, Artificial Sequence
  Synthetic
uguguuagugcaaaaug

SEQ ID NO: 759505 - RNA, 17 nt, Artificial Sequence
  Synthetic
uugcaaugaucaaaaug

SEQ ID NO: 759506 - RNA, 17 nt, Artificial Sequence
  Synthetic
agcaaaagcucaaaaug

SEQ ID NO: 759507 - RNA, 17 nt, Artificial Sequence
  Synthetic
caaugguucucaaaaug

SEQ ID NO: 759508 - RNA, 17 nt, Artificial Sequence
  Synthetic
auggaaaagucaaaaug

SEQ ID NO: 759509 - RNA, 17 nt, Artificial Sequence
  Synthetic
acugaauaaagaaaaug

SEQ ID NO: 759510 - RNA, 17 nt, Artificial Sequence
  Synthetic
aauggauaaagaaaaug

SEQ ID NO: 759511 - RNA, 17 nt, Artificial Sequence
  Synthetic
cauggauaaagaaaaug

SEQ ID NO: 759512 - RNA, 17 nt, Artificial Sequence
  Synthetic
acuggauaaagaaaaug

SEQ ID NO: 759513 - RNA, 17 nt, Artificial Sequence
  Synthetic
aguggauaaagaaaaug

SEQ ID NO: 759514 - RNA, 17 nt, Artificial Sequence
  Synthetic
auuggauaaagaaaaug

SEQ ID NO: 759515 - RNA, 17 nt, Artificial Sequence
  Synthetic
acuggaugaagaaaaug

SEQ ID NO: 759516 - RNA, 17 nt, Artificial Sequence
  Synthetic
accggauuaagaaaaug

SEQ ID NO: 759517 - RNA, 17 nt, Artificial Sequence
  Synthetic
acuggauuaagaaaaug

SEQ ID NO: 759518 - RNA, 17 nt, Artificial Sequence
  Synthetic
aauggauacagaaaaug

SEQ ID NO: 759519 - RNA, 17 nt, Artificial Sequence
  Synthetic
acuggauacagaaaaug

SEQ ID NO: 759520 - RNA, 17 nt, Artificial Sequence
  Synthetic
acaccccucagaaaaug

SEQ ID NO: 759521 - RNA, 17 nt, Artificial Sequence
  Synthetic
aagcagaagagaaaaug

SEQ ID NO: 759522 - RNA, 17 nt, Artificial Sequence
  Synthetic
ucauugaagagaaaaug

SEQ ID NO: 759523 - RNA, 17 nt, Artificial Sequence
  Synthetic
uuaugagugagaaaaug

SEQ ID NO: 759524 - RNA, 17 nt, Artificial Sequence
  Synthetic
acuggauugagaaaaug

SEQ ID NO: 759525 - RNA, 17 nt, Artificial Sequence
  Synthetic
aucagauauagaaaaug

SEQ ID NO: 759526 - RNA, 17 nt, Artificial Sequence
  Synthetic
uuuguuucuagaaaaug

SEQ ID NO: 759527 - RNA, 17 nt, Artificial Sequence
  Synthetic
aaagacacccgaaaaug

SEQ ID NO: 759528 - RNA, 17 nt, Artificial Sequence
  Synthetic
cagaagaaaggaaaaug

SEQ ID NO: 759529 - RNA, 17 nt, Artificial Sequence
  Synthetic
agugcagaaggaaaaug

SEQ ID NO: 759530 - RNA, 17 nt, Artificial Sequence
  Synthetic
uugugggaaggaaaaug

SEQ ID NO: 759531 - RNA, 17 nt, Artificial Sequence
  Synthetic
aagaagacaggaaaaug

SEQ ID NO: 759532 - RNA, 17 nt, Artificial Sequence
  Synthetic
aagaugacaggaaaaug

SEQ ID NO: 759533 - RNA, 17 nt, Artificial Sequence
  Synthetic
uggaagaagggaaaaug

SEQ ID NO: 759534 - RNA, 17 nt, Artificial Sequence
  Synthetic
agcaucuagggaaaaug

SEQ ID NO: 759535 - RNA, 17 nt, Artificial Sequence
  Synthetic
uuuagggguggaaaaug

SEQ ID NO: 759536 - RNA, 17 nt, Artificial Sequence
  Synthetic
uuuucuaaaugaaaaug

SEQ ID NO: 759537 - RNA, 17 nt, Artificial Sequence
  Synthetic
aaauacacaugaaaaug

SEQ ID NO: 759538 - RNA, 17 nt, Artificial Sequence
  Synthetic
aaauauaccugaaaaug

SEQ ID NO: 759539 - RNA, 17 nt, Artificial Sequence
  Synthetic
uucaaccucugaaaaug

SEQ ID NO: 759540 - RNA, 17 nt, Artificial Sequence
  Synthetic
uuugaagagugaaaaug

SEQ ID NO: 759541 - RNA, 17 nt, Artificial Sequence
  Synthetic
aaaugacugugaaaaug

SEQ ID NO: 759542 - RNA, 17 nt, Artificial Sequence
  Synthetic
aaagauacuugaaaaug

SEQ ID NO: 759543 - RNA, 17 nt, Artificial Sequence
  Synthetic
ccuuuuaaaauaaaaug

SEQ ID NO: 759544 - RNA, 17 nt, Artificial Sequence
  Synthetic
aaaaaucaaauaaaaug

SEQ ID NO: 759545 - RNA, 17 nt, Artificial Sequence
  Synthetic
aauaucacaauaaaaug

SEQ ID NO: 759546 - RNA, 17 nt, Artificial Sequence
  Synthetic
auaaaaugcauaaaaug

SEQ ID NO: 759547 - RNA, 17 nt, Artificial Sequence
  Synthetic
uaucuagcuauaaaaug

SEQ ID NO: 759548 - RNA, 17 nt, Artificial Sequence
  Synthetic
uucucgucuauaaaaug

SEQ ID NO: 759549 - RNA, 17 nt, Artificial Sequence
  Synthetic
caaaacucaguaaaaug

SEQ ID NO: 759550 - RNA, 17 nt, Artificial Sequence
  Synthetic
uuuugggauguaaaaug

SEQ ID NO: 759551 - RNA, 17 nt, Artificial Sequence
  Synthetic
ucgucaacuguaaaaug

SEQ ID NO: 759552 - RNA, 17 nt, Artificial Sequence
  Synthetic
ugugaccguguaaaaug

SEQ ID NO: 759553 - RNA, 17 nt, Artificial Sequence
  Synthetic
uccucauuuguaaaaug

SEQ ID NO: 759554 - RNA, 17 nt, Artificial Sequence
  Synthetic
cauugaagauuaaaaug

SEQ ID NO: 759555 - RNA, 17 nt, Artificial Sequence
  Synthetic
aaaguuugauuaaaaug

SEQ ID NO: 759556 - RNA, 17 nt, Artificial Sequence
  Synthetic
auccuaauauuaaaaug

SEQ ID NO: 759557 - RNA, 17 nt, Artificial Sequence
  Synthetic
ucagcuauauuaaaaug

SEQ ID NO: 759558 - RNA, 17 nt, Artificial Sequence
  Synthetic
auaaucaacuuaaaaug

SEQ ID NO: 759559 - RNA, 17 nt, Artificial Sequence
  Synthetic
cacuuguccuuaaaaug

SEQ ID NO: 759560 - RNA, 17 nt, Artificial Sequence
  Synthetic
acugagcucuuaaaaug

SEQ ID NO: 759561 - RNA, 17 nt, Artificial Sequence
  Synthetic
cgauauuucuuaaaaug

SEQ ID NO: 759562 - RNA, 17 nt, Artificial Sequence
  Synthetic
aaagagacuuuaaaaug

SEQ ID NO: 759563 - RNA, 17 nt, Artificial Sequence
  Synthetic
aaaugcagaaacaaaug

SEQ ID NO: 759564 - RNA, 17 nt, Artificial Sequence
  Synthetic
uccucauuuaacaaaug

SEQ ID NO: 759565 - RNA, 17 nt, Artificial Sequence
  Synthetic
ucaagucuucacaaaug

SEQ ID NO: 759566 - RNA, 17 nt, Artificial Sequence
  Synthetic
ucuuaucuagacaaaug

SEQ ID NO: 759567 - RNA, 17 nt, Artificial Sequence
  Synthetic
ucacuguuggacaaaug

SEQ ID NO: 759568 - RNA, 17 nt, Artificial Sequence
  Synthetic
auuuaaaccuacaaaug

SEQ ID NO: 759569 - RNA, 17 nt, Artificial Sequence
  Synthetic
aucacagcuuacaaaug

SEQ ID NO: 759570 - RNA, 17 nt, Artificial Sequence
  Synthetic
cccacauuuuacaaaug

SEQ ID NO: 759571 - RNA, 17 nt, Artificial Sequence
  Synthetic
uuuucuuuuuccaaaug

SEQ ID NO: 759572 - RNA, 17 nt, Artificial Sequence
  Synthetic
aauacugaaagcaaaug

SEQ ID NO: 759573 - RNA, 17 nt, Artificial Sequence
  Synthetic
agcuuugaaagcaaaug

SEQ ID NO: 759574 - RNA, 17 nt, Artificial Sequence
  Synthetic
cagugcugaagcaaaug

SEQ ID NO: 759575 - RNA, 17 nt, Artificial Sequence
  Synthetic
aauuguauuagcaaaug

SEQ ID NO: 759576 - RNA, 17 nt, Artificial Sequence
  Synthetic
aggcugacuggcaaaug

SEQ ID NO: 759577 - RNA, 17 nt, Artificial Sequence
  Synthetic
aauuaacaaugcaaaug

SEQ ID NO: 759578 - RNA, 17 nt, Artificial Sequence
  Synthetic
acauuucguugcaaaug

SEQ ID NO: 759579 - RNA, 17 nt, Artificial Sequence
  Synthetic
auguuuuuuugcaaaug

SEQ ID NO: 759580 - RNA, 17 nt, Artificial Sequence
  Synthetic
caacaagagaucaaaug

SEQ ID NO: 759581 - RNA, 17 nt, Artificial Sequence
  Synthetic
cuuugaggaaagaaaug

SEQ ID NO: 759582 - RNA, 17 nt, Artificial Sequence
  Synthetic
acaaaaaacaagaaaug

SEQ ID NO: 759583 - RNA, 17 nt, Artificial Sequence
  Synthetic
cccuggaucaagaaaug

SEQ ID NO: 759584 - RNA, 17 nt, Artificial Sequence
  Synthetic
cacacugucaagaaaug

SEQ ID NO: 759585 - RNA, 17 nt, Artificial Sequence
  Synthetic
acauacaguaagaaaug

SEQ ID NO: 759586 - RNA, 17 nt, Artificial Sequence
  Synthetic
cuuggaauuaagaaaug

SEQ ID NO: 759587 - RNA, 17 nt, Artificial Sequence
  Synthetic
agaauuuggcagaaaug

SEQ ID NO: 759588 - RNA, 17 nt, Artificial Sequence
  Synthetic
ccuaagaaucagaaaug

SEQ ID NO: 759589 - RNA, 17 nt, Artificial Sequence
  Synthetic
agugcagaagagaaaug

SEQ ID NO: 759590 - RNA, 17 nt, Artificial Sequence
  Synthetic
cagcuggaagagaaaug

SEQ ID NO: 759591 - RNA, 17 nt, Artificial Sequence
  Synthetic
uaauuuauagagaaaug

SEQ ID NO: 759592 - RNA, 17 nt, Artificial Sequence
  Synthetic
uacacagaggagaaaug

SEQ ID NO: 759593 - RNA, 17 nt, Artificial Sequence
  Synthetic
cuucuauaugagaaaug

SEQ ID NO: 759594 - RNA, 17 nt, Artificial Sequence
  Synthetic
cuuaaaacugagaaaug

SEQ ID NO: 759595 - RNA, 17 nt, Artificial Sequence
  Synthetic
aaggaauuugagaaaug

SEQ ID NO: 759596 - RNA, 17 nt, Artificial Sequence
  Synthetic
aaccacugauagaaaug

SEQ ID NO: 759597 - RNA, 17 nt, Artificial Sequence
  Synthetic
aaacgugcaaggaaaug

SEQ ID NO: 759598 - RNA, 17 nt, Artificial Sequence
  Synthetic
uggugauauaggaaaug

SEQ ID NO: 759599 - RNA, 17 nt, Artificial Sequence
  Synthetic
aguguggaagggaaaug

SEQ ID NO: 759600 - RNA, 17 nt, Artificial Sequence
  Synthetic
agagauuaggggaaaug

SEQ ID NO: 759601 - RNA, 17 nt, Artificial Sequence
  Synthetic
caugugggugggaaaug

SEQ ID NO: 759602 - RNA, 17 nt, Artificial Sequence
  Synthetic
caccuauaguggaaaug

SEQ ID NO: 759603 - RNA, 17 nt, Artificial Sequence
  Synthetic
uuugagcauuggaaaug

SEQ ID NO: 759604 - RNA, 17 nt, Artificial Sequence
  Synthetic
uauaaaauuuggaaaug

SEQ ID NO: 759605 - RNA, 17 nt, Artificial Sequence
  Synthetic
uucugcuacaugaaaug

SEQ ID NO: 759606 - RNA, 17 nt, Artificial Sequence
  Synthetic
acugaucuuaugaaaug

SEQ ID NO: 759607 - RNA, 17 nt, Artificial Sequence
  Synthetic
ugauaugaacugaaaug

SEQ ID NO: 759608 - RNA, 17 nt, Artificial Sequence
  Synthetic
ugccauuuacugaaaug

SEQ ID NO: 759609 - RNA, 17 nt, Artificial Sequence
  Synthetic
ugaauagugcugaaaug

SEQ ID NO: 759610 - RNA, 17 nt, Artificial Sequence
  Synthetic
ugagauccucugaaaug

SEQ ID NO: 759611 - RNA, 17 nt, Artificial Sequence
  Synthetic
caucuucaagugaaaug

SEQ ID NO: 759612 - RNA, 17 nt, Artificial Sequence
  Synthetic
uauggguccgugaaaug

SEQ ID NO: 759613 - RNA, 17 nt, Artificial Sequence
  Synthetic
agaauugaggugaaaug

SEQ ID NO: 759614 - RNA, 17 nt, Artificial Sequence
  Synthetic
ucuuauuuggugaaaug

SEQ ID NO: 759615 - RNA, 17 nt, Artificial Sequence
  Synthetic
uuauccaaugugaaaug

SEQ ID NO: 759616 - RNA, 17 nt, Artificial Sequence
  Synthetic
acugagcacuugaaaug

SEQ ID NO: 759617 - RNA, 17 nt, Artificial Sequence
  Synthetic
agucuccuguugaaaug

SEQ ID NO: 759618 - RNA, 17 nt, Artificial Sequence
  Synthetic
auugagaaaaauaaaug

SEQ ID NO: 759619 - RNA, 17 nt, Artificial Sequence
  Synthetic
acaugaacaaauaaaug

SEQ ID NO: 759620 - RNA, 17 nt, Artificial Sequence
  Synthetic
aacaauaacaauaaaug

SEQ ID NO: 759621 - RNA, 17 nt, Artificial Sequence
  Synthetic
uugguucucaauaaaug

SEQ ID NO: 759622 - RNA, 17 nt, Artificial Sequence
  Synthetic
aauaaggagaauaaaug

SEQ ID NO: 759623 - RNA, 17 nt, Artificial Sequence
  Synthetic
cuuuccaugaauaaaug

SEQ ID NO: 759624 - RNA, 17 nt, Artificial Sequence
  Synthetic
uagcacuugaauaaaug

SEQ ID NO: 759625 - RNA, 17 nt, Artificial Sequence
  Synthetic
aaaaauuagcauaaaug

SEQ ID NO: 759626 - RNA, 17 nt, Artificial Sequence
  Synthetic
agaugaauagauaaaug

SEQ ID NO: 759627 - RNA, 17 nt, Artificial Sequence
  Synthetic
uggcugagggauaaaug

SEQ ID NO: 759628 - RNA, 17 nt, Artificial Sequence
  Synthetic
cauaagguggauaaaug

SEQ ID NO: 759629 - RNA, 17 nt, Artificial Sequence
  Synthetic
cuggugaaauauaaaug

SEQ ID NO: 759630 - RNA, 17 nt, Artificial Sequence
  Synthetic
ugcaaggcuuauaaaug

SEQ ID NO: 759631 - RNA, 17 nt, Artificial Sequence
  Synthetic
agguggaggacuaaaug

SEQ ID NO: 759632 - RNA, 17 nt, Artificial Sequence
  Synthetic
aaaacuacagcuaaaug

SEQ ID NO: 759633 - RNA, 17 nt, Artificial Sequence
  Synthetic
uuuuaaacugcuaaaug

SEQ ID NO: 759634 - RNA, 17 nt, Artificial Sequence
  Synthetic
uuccagauagguaaaug

SEQ ID NO: 759635 - RNA, 17 nt, Artificial Sequence
  Synthetic
aauaaaaaugguaaaug

SEQ ID NO: 759636 - RNA, 17 nt, Artificial Sequence
  Synthetic
uuucagggugguaaaug

SEQ ID NO: 759637 - RNA, 17 nt, Artificial Sequence
  Synthetic
aggcaaaauuguaaaug

SEQ ID NO: 759638 - RNA, 17 nt, Artificial Sequence
  Synthetic
cauguuauaauuaaaug

SEQ ID NO: 759639 - RNA, 17 nt, Artificial Sequence
  Synthetic
cauauauauauuaaaug

SEQ ID NO: 759640 - RNA, 17 nt, Artificial Sequence
  Synthetic
caguauuuccuuaaaug

SEQ ID NO: 759641 - RNA, 17 nt, Artificial Sequence
  Synthetic
uguaauuugcuuaaaug

SEQ ID NO: 759642 - RNA, 17 nt, Artificial Sequence
  Synthetic
cuuaagaaaguuaaaug

SEQ ID NO: 759643 - RNA, 17 nt, Artificial Sequence
  Synthetic
acaauggaaguuaaaug

SEQ ID NO: 759644 - RNA, 17 nt, Artificial Sequence
  Synthetic
agcuuuucaguuaaaug

SEQ ID NO: 759645 - RNA, 17 nt, Artificial Sequence
  Synthetic
uccucauuuguuaaaug

SEQ ID NO: 759646 - RNA, 17 nt, Artificial Sequence
  Synthetic
cagagugaauuuaaaug

SEQ ID NO: 759647 - RNA, 17 nt, Artificial Sequence
  Synthetic
aggaggaguuuuaaaug

SEQ ID NO: 759648 - RNA, 17 nt, Artificial Sequence
  Synthetic
cccaaguguuuuaaaug

SEQ ID NO: 759649 - RNA, 17 nt, Artificial Sequence
  Synthetic
ugccauaaaaaacaaug

SEQ ID NO: 759650 - RNA, 17 nt, Artificial Sequence
  Synthetic
aaagaaagaaaacaaug

SEQ ID NO: 759651 - RNA, 17 nt, Artificial Sequence
  Synthetic
uaugugaauaaacaaug

SEQ ID NO: 759652 - RNA, 17 nt, Artificial Sequence
  Synthetic
auuuagcugcaacaaug

SEQ ID NO: 759653 - RNA, 17 nt, Artificial Sequence
  Synthetic
acuagaaaucaacaaug

SEQ ID NO: 759654 - RNA, 17 nt, Artificial Sequence
  Synthetic
ccaaaaauagaacaaug

SEQ ID NO: 759655 - RNA, 17 nt, Artificial Sequence
  Synthetic
aucuuuuucuaacaaug

SEQ ID NO: 759656 - RNA, 17 nt, Artificial Sequence
  Synthetic
ucuuccauuccacaaug

SEQ ID NO: 759657 - RNA, 17 nt, Artificial Sequence
  Synthetic
ucuuugcuuccacaaug

SEQ ID NO: 759658 - RNA, 17 nt, Artificial Sequence
  Synthetic
uuuuuuuauucacaaug

SEQ ID NO: 759659 - RNA, 17 nt, Artificial Sequence
  Synthetic
agcuuguaaagacaaug

SEQ ID NO: 759660 - RNA, 17 nt, Artificial Sequence
  Synthetic
uaagcgccaagacaaug

SEQ ID NO: 759661 - RNA, 17 nt, Artificial Sequence
  Synthetic
uaauaggcaagacaaug

SEQ ID NO: 759662 - RNA, 17 nt, Artificial Sequence
  Synthetic
agaaugagaagacaaug

SEQ ID NO: 759663 - RNA, 17 nt, Artificial Sequence
  Synthetic
cuugugcuaagacaaug

SEQ ID NO: 759664 - RNA, 17 nt, Artificial Sequence
  Synthetic
uuugggcugagacaaug

SEQ ID NO: 759665 - RNA, 17 nt, Artificial Sequence
  Synthetic
uuccccuauugacaaug

SEQ ID NO: 759666 - RNA, 17 nt, Artificial Sequence
  Synthetic
uagcaggaaauacaaug

SEQ ID NO: 759667 - RNA, 17 nt, Artificial Sequence
  Synthetic
cccugucuaauacaaug

SEQ ID NO: 759668 - RNA, 17 nt, Artificial Sequence
  Synthetic
acuuccaggauacaaug

SEQ ID NO: 759669 - RNA, 17 nt, Artificial Sequence
  Synthetic
uuuggaaaccuacaaug

SEQ ID NO: 759670 - RNA, 17 nt, Artificial Sequence
  Synthetic
uaccauaugcuacaaug

SEQ ID NO: 759671 - RNA, 17 nt, Artificial Sequence
  Synthetic
aaacacauguaccaaug

SEQ ID NO: 759672 - RNA, 17 nt, Artificial Sequence
  Synthetic
uuaaugagaucccaaug

SEQ ID NO: 759673 - RNA, 17 nt, Artificial Sequence
  Synthetic
uacuuuauuucccaaug

SEQ ID NO: 759674 - RNA, 17 nt, Artificial Sequence
  Synthetic
cuaucugcaagccaaug

SEQ ID NO: 759675 - RNA, 17 nt, Artificial Sequence
  Synthetic
cccaaccccagccaaug

SEQ ID NO: 759676 - RNA, 17 nt, Artificial Sequence
  Synthetic
acuuucaugugccaaug

SEQ ID NO: 759677 - RNA, 17 nt, Artificial Sequence
  Synthetic
aucagugcucuccaaug

SEQ ID NO: 759678 - RNA, 17 nt, Artificial Sequence
  Synthetic
aucaguguuuuccaaug

SEQ ID NO: 759679 - RNA, 17 nt, Artificial Sequence
  Synthetic
aguuuuuacaagcaaug

SEQ ID NO: 759680 - RNA, 17 nt, Artificial Sequence
  Synthetic
uucaugagcaagcaaug

SEQ ID NO: 759681 - RNA, 17 nt, Artificial Sequence
  Synthetic
ccauacuggcagcaaug

SEQ ID NO: 759682 - RNA, 17 nt, Artificial Sequence
  Synthetic
uugauaaaggagcaaug

SEQ ID NO: 759683 - RNA, 17 nt, Artificial Sequence
  Synthetic
ucauucacugagcaaug

SEQ ID NO: 759684 - RNA, 17 nt, Artificial Sequence
  Synthetic
uucauuucugagcaaug

SEQ ID NO: 759685 - RNA, 17 nt, Artificial Sequence
  Synthetic
caggggagaaggcaaug

SEQ ID NO: 759686 - RNA, 17 nt, Artificial Sequence
  Synthetic
ucuugucagaggcaaug

SEQ ID NO: 759687 - RNA, 17 nt, Artificial Sequence
  Synthetic
agauuucuagggcaaug

SEQ ID NO: 759688 - RNA, 17 nt, Artificial Sequence
  Synthetic
uacuaccaucugcaaug

SEQ ID NO: 759689 - RNA, 17 nt, Artificial Sequence
  Synthetic
aaacuuugucugcaaug

SEQ ID NO: 759690 - RNA, 17 nt, Artificial Sequence
  Synthetic
aguucuugggugcaaug

SEQ ID NO: 759691 - RNA, 17 nt, Artificial Sequence
  Synthetic
ucaacuuuugugcaaug

SEQ ID NO: 759692 - RNA, 17 nt, Artificial Sequence
  Synthetic
ccacaaauauugcaaug

SEQ ID NO: 759693 - RNA, 17 nt, Artificial Sequence
  Synthetic
aggauacaaaaucaaug

SEQ ID NO: 759694 - RNA, 17 nt, Artificial Sequence
  Synthetic
uucauggcaaaucaaug

SEQ ID NO: 759695 - RNA, 17 nt, Artificial Sequence
  Synthetic
aaaccuucaaaucaaug

SEQ ID NO: 759696 - RNA, 17 nt, Artificial Sequence
  Synthetic
uacuggagauaucaaug

SEQ ID NO: 759697 - RNA, 17 nt, Artificial Sequence
  Synthetic
caauuauuaagucaaug

SEQ ID NO: 759698 - RNA, 17 nt, Artificial Sequence
  Synthetic
cuuggagagagucaaug

SEQ ID NO: 759699 - RNA, 17 nt, Artificial Sequence
  Synthetic
agaaaagggagucaaug

SEQ ID NO: 759700 - RNA, 17 nt, Artificial Sequence
  Synthetic
uaggagggaggucaaug

SEQ ID NO: 759701 - RNA, 17 nt, Artificial Sequence
  Synthetic
uuucuuaaaugucaaug

SEQ ID NO: 759702 - RNA, 17 nt, Artificial Sequence
  Synthetic
aacagaggaauucaaug

SEQ ID NO: 759703 - RNA, 17 nt, Artificial Sequence
  Synthetic
aaucuucggauucaaug

SEQ ID NO: 759704 - RNA, 17 nt, Artificial Sequence
  Synthetic
uugcucaagguucaaug

SEQ ID NO: 759705 - RNA, 17 nt, Artificial Sequence
  Synthetic
uugacagauuuucaaug

SEQ ID NO: 759706 - RNA, 17 nt, Artificial Sequence
  Synthetic
uuuaaaaaaaaagaaug

SEQ ID NO: 759707 - RNA, 17 nt, Artificial Sequence
  Synthetic
aaagaucucaaagaaug

SEQ ID NO: 759708 - RNA, 17 nt, Artificial Sequence
  Synthetic
uacuguuucaaagaaug

SEQ ID NO: 759709 - RNA, 17 nt, Artificial Sequence
  Synthetic
aaaccuccuaaagaaug

SEQ ID NO: 759710 - RNA, 17 nt, Artificial Sequence
  Synthetic
uguauuagacaagaaug

SEQ ID NO: 759711 - RNA, 17 nt, Artificial Sequence
  Synthetic
uccagaaaucaagaaug

SEQ ID NO: 759712 - RNA, 17 nt, Artificial Sequence
  Synthetic
agacacagucaagaaug

SEQ ID NO: 759713 - RNA, 17 nt, Artificial Sequence
  Synthetic
aagagcaaugaagaaug

SEQ ID NO: 759714 - RNA, 17 nt, Artificial Sequence
  Synthetic
auguggaaauaagaaug

SEQ ID NO: 759715 - RNA, 17 nt, Artificial Sequence
  Synthetic
ugcacagaauaagaaug

SEQ ID NO: 759716 - RNA, 17 nt, Artificial Sequence
  Synthetic
aaaaaaugauaagaaug

SEQ ID NO: 759717 - RNA, 17 nt, Artificial Sequence
  Synthetic
cuaucuuacuaagaaug

SEQ ID NO: 759718 - RNA, 17 nt, Artificial Sequence
  Synthetic
aauggguucuaagaaug

SEQ ID NO: 759719 - RNA, 17 nt, Artificial Sequence
  Synthetic
augcuuagaacagaaug

SEQ ID NO: 759720 - RNA, 17 nt, Artificial Sequence
  Synthetic
aaaaggaagacagaaug

SEQ ID NO: 759721 - RNA, 17 nt, Artificial Sequence
  Synthetic
uucucuuaaccagaaug

SEQ ID NO: 759722 - RNA, 17 nt, Artificial Sequence
  Synthetic
aaguguuggccagaaug

SEQ ID NO: 759723 - RNA, 17 nt, Artificial Sequence
  Synthetic
uaagaucaugcagaaug

SEQ ID NO: 759724 - RNA, 17 nt, Artificial Sequence
  Synthetic
cugucugaugcagaaug

SEQ ID NO: 759725 - RNA, 17 nt, Artificial Sequence
  Synthetic
ugggagucaucagaaug

SEQ ID NO: 759726 - RNA, 17 nt, Artificial Sequence
  Synthetic
uauugccccucagaaug

SEQ ID NO: 759727 - RNA, 17 nt, Artificial Sequence
  Synthetic
cuugaaguuucagaaug

SEQ ID NO: 759728 - RNA, 17 nt, Artificial Sequence
  Synthetic
aaucuggaaagagaaug

SEQ ID NO: 759729 - RNA, 17 nt, Artificial Sequence
  Synthetic
acagauagaagagaaug

SEQ ID NO: 759730 - RNA, 17 nt, Artificial Sequence
  Synthetic
cuggagguaagagaaug

SEQ ID NO: 759731 - RNA, 17 nt, Artificial Sequence
  Synthetic
auguaaagcagagaaug

SEQ ID NO: 759732 - RNA, 17 nt, Artificial Sequence
  Synthetic
agaaauaucagagaaug

SEQ ID NO: 759733 - RNA, 17 nt, Artificial Sequence
  Synthetic
uuuuucaggagagaaug

SEQ ID NO: 759734 - RNA, 17 nt, Artificial Sequence
  Synthetic
cugggcuggagagaaug

SEQ ID NO: 759735 - RNA, 17 nt, Artificial Sequence
  Synthetic
ccuggcaagggagaaug

SEQ ID NO: 759736 - RNA, 17 nt, Artificial Sequence
  Synthetic
ugaagcucuggagaaug

SEQ ID NO: 759737 - RNA, 17 nt, Artificial Sequence
  Synthetic
uuuuuuuucugagaaug

SEQ ID NO: 759738 - RNA, 17 nt, Artificial Sequence
  Synthetic
uauacuuucauagaaug

SEQ ID NO: 759739 - RNA, 17 nt, Artificial Sequence
  Synthetic
uuaagauagauagaaug

SEQ ID NO: 759740 - RNA, 17 nt, Artificial Sequence
  Synthetic
agacuauagauagaaug

SEQ ID NO: 759741 - RNA, 17 nt, Artificial Sequence
  Synthetic
aucagauuacuagaaug

SEQ ID NO: 759742 - RNA, 17 nt, Artificial Sequence
  Synthetic
uuuucacaauuagaaug

SEQ ID NO: 759743 - RNA, 17 nt, Artificial Sequence
  Synthetic
caguuuguuuuagaaug

SEQ ID NO: 759744 - RNA, 17 nt, Artificial Sequence
  Synthetic
uuaagcaugaccgaaug

SEQ ID NO: 759745 - RNA, 17 nt, Artificial Sequence
  Synthetic
aaaguacauuucgaaug

SEQ ID NO: 759746 - RNA, 17 nt, Artificial Sequence
  Synthetic
aguaaaccuaaggaaug

SEQ ID NO: 759747 - RNA, 17 nt, Artificial Sequence
  Synthetic
uauaauguuaaggaaug

SEQ ID NO: 759748 - RNA, 17 nt, Artificial Sequence
  Synthetic
aaaauauuacaggaaug

SEQ ID NO: 759749 - RNA, 17 nt, Artificial Sequence
  Synthetic
auagaaaaggaggaaug

SEQ ID NO: 759750 - RNA, 17 nt, Artificial Sequence
  Synthetic
ucugagagguaggaaug

SEQ ID NO: 759751 - RNA, 17 nt, Artificial Sequence
  Synthetic
ucacugggguaggaaug

SEQ ID NO: 759752 - RNA, 17 nt, Artificial Sequence
  Synthetic
uuuaagauaauggaaug

SEQ ID NO: 759753 - RNA, 17 nt, Artificial Sequence
  Synthetic
uaguuaugacuggaaug

SEQ ID NO: 759754 - RNA, 17 nt, Artificial Sequence
  Synthetic
aguuuuguacuggaaug

SEQ ID NO: 759755 - RNA, 17 nt, Artificial Sequence
  Synthetic
aacuagggccuggaaug

SEQ ID NO: 759756 - RNA, 17 nt, Artificial Sequence
  Synthetic
aagugagaucuggaaug

SEQ ID NO: 759757 - RNA, 17 nt, Artificial Sequence
  Synthetic
cuugagaggguggaaug

SEQ ID NO: 759758 - RNA, 17 nt, Artificial Sequence
  Synthetic
caaaaauucuuggaaug

SEQ ID NO: 759759 - RNA, 17 nt, Artificial Sequence
  Synthetic
acauccuucuuggaaug

SEQ ID NO: 759760 - RNA, 17 nt, Artificial Sequence
  Synthetic
uuuuauacaaaugaaug

SEQ ID NO: 759761 - RNA, 17 nt, Artificial Sequence
  Synthetic
agucagagaaaugaaug

SEQ ID NO: 759762 - RNA, 17 nt, Artificial Sequence
  Synthetic
ugcuuaaacaaugaaug

SEQ ID NO: 759763 - RNA, 17 nt, Artificial Sequence
  Synthetic
aaaaugagcaaugaaug

SEQ ID NO: 759764 - RNA, 17 nt, Artificial Sequence
  Synthetic
uuaccugggaaugaaug

SEQ ID NO: 759765 - RNA, 17 nt, Artificial Sequence
  Synthetic
aaaaggaaacaugaaug

SEQ ID NO: 759766 - RNA, 17 nt, Artificial Sequence
  Synthetic
agguuugcugaugaaug

SEQ ID NO: 759767 - RNA, 17 nt, Artificial Sequence
  Synthetic
acuucaacauaugaaug

SEQ ID NO: 759768 - RNA, 17 nt, Artificial Sequence
  Synthetic
uucaauaucuaugaaug

SEQ ID NO: 759769 - RNA, 17 nt, Artificial Sequence
  Synthetic
uucucaucuuaugaaug

SEQ ID NO: 759770 - RNA, 17 nt, Artificial Sequence
  Synthetic
agcaguaaaacugaaug

SEQ ID NO: 759771 - RNA, 17 nt, Artificial Sequence
  Synthetic
ucaucagucacugaaug

SEQ ID NO: 759772 - RNA, 17 nt, Artificial Sequence
  Synthetic
ccugaaaaagcugaaug

SEQ ID NO: 759773 - RNA, 17 nt, Artificial Sequence
  Synthetic
auaauaaaagcugaaug

SEQ ID NO: 759774 - RNA, 17 nt, Artificial Sequence
  Synthetic
uaaccaacaucugaaug

SEQ ID NO: 759775 - RNA, 17 nt, Artificial Sequence
  Synthetic
aaugggagaggugaaug

SEQ ID NO: 759776 - RNA, 17 nt, Artificial Sequence
  Synthetic
aagagaaucugugaaug

SEQ ID NO: 759777 - RNA, 17 nt, Artificial Sequence
  Synthetic
caguaguauugugaaug

SEQ ID NO: 759778 - RNA, 17 nt, Artificial Sequence
  Synthetic
ccagagguaauugaaug

SEQ ID NO: 759779 - RNA, 17 nt, Artificial Sequence
  Synthetic
uguagauucauugaaug

SEQ ID NO: 759780 - RNA, 17 nt, Artificial Sequence
  Synthetic
aaacacaagguugaaug

SEQ ID NO: 759781 - RNA, 17 nt, Artificial Sequence
  Synthetic
caauuucuuguugaaug

SEQ ID NO: 759782 - RNA, 17 nt, Artificial Sequence
  Synthetic
caggauggcuuugaaug

SEQ ID NO: 759783 - RNA, 17 nt, Artificial Sequence
  Synthetic
aacuacugcuuugaaug

SEQ ID NO: 759784 - RNA, 17 nt, Artificial Sequence
  Synthetic
aauaauuaaaaauaaug

SEQ ID NO: 759785 - RNA, 17 nt, Artificial Sequence
  Synthetic
uuugauugaaaauaaug

SEQ ID NO: 759786 - RNA, 17 nt, Artificial Sequence
  Synthetic
uuacauaagaaauaaug

SEQ ID NO: 759787 - RNA, 17 nt, Artificial Sequence
  Synthetic
cgugggcagaaauaaug

SEQ ID NO: 759788 - RNA, 17 nt, Artificial Sequence
  Synthetic
uaaauaaauaaauaaug

SEQ ID NO: 759789 - RNA, 17 nt, Artificial Sequence
  Synthetic
ccaguaaguaaauaaug

SEQ ID NO: 759790 - RNA, 17 nt, Artificial Sequence
  Synthetic
uggaacucucaauaaug

SEQ ID NO: 759791 - RNA, 17 nt, Artificial Sequence
  Synthetic
aggcagcaggaauaaug

SEQ ID NO: 759792 - RNA, 17 nt, Artificial Sequence
  Synthetic
aaaaacugcuaauaaug

SEQ ID NO: 759793 - RNA, 17 nt, Artificial Sequence
  Synthetic
uguuggcuguaauaaug

SEQ ID NO: 759794 - RNA, 17 nt, Artificial Sequence
  Synthetic
uugcauacuucauaaug

SEQ ID NO: 759795 - RNA, 17 nt, Artificial Sequence
  Synthetic
aauuaaaaaggauaaug

SEQ ID NO: 759796 - RNA, 17 nt, Artificial Sequence
  Synthetic
ucuccuucaggauaaug

SEQ ID NO: 759797 - RNA, 17 nt, Artificial Sequence
  Synthetic
aaauacaguggauaaug

SEQ ID NO: 759798 - RNA, 17 nt, Artificial Sequence
  Synthetic
ucuucuugaugauaaug

SEQ ID NO: 759799 - RNA, 17 nt, Artificial Sequence
  Synthetic
acaauguacugauaaug

SEQ ID NO: 759800 - RNA, 17 nt, Artificial Sequence
  Synthetic
ugcuugaaaauauaaug

SEQ ID NO: 759801 - RNA, 17 nt, Artificial Sequence
  Synthetic
agaaaugcaguauaaug

SEQ ID NO: 759802 - RNA, 17 nt, Artificial Sequence
  Synthetic
acugguucuguauaaug

SEQ ID NO: 759803 - RNA, 17 nt, Artificial Sequence
  Synthetic
augaaggguguauaaug

SEQ ID NO: 759804 - RNA, 17 nt, Artificial Sequence
  Synthetic
aauuauaaauuauaaug

SEQ ID NO: 759805 - RNA, 17 nt, Artificial Sequence
  Synthetic
uccauccccuuauaaug

SEQ ID NO: 759806 - RNA, 17 nt, Artificial Sequence
  Synthetic
agacaauuuuuauaaug

SEQ ID NO: 759807 - RNA, 17 nt, Artificial Sequence
  Synthetic
uaaaaaaaucacuaaug

SEQ ID NO: 759808 - RNA, 17 nt, Artificial Sequence
  Synthetic
augcaauaaaccuaaug

SEQ ID NO: 759809 - RNA, 17 nt, Artificial Sequence
  Synthetic
uacuucaguagcuaaug

SEQ ID NO: 759810 - RNA, 17 nt, Artificial Sequence
  Synthetic
acuuguuucggcuaaug

SEQ ID NO: 759811 - RNA, 17 nt, Artificial Sequence
  Synthetic
cucuagcauggcuaaug

SEQ ID NO: 759812 - RNA, 17 nt, Artificial Sequence
  Synthetic
caaccuuauggcuaaug

SEQ ID NO: 759813 - RNA, 17 nt, Artificial Sequence
  Synthetic
acucaacucugcuaaug

SEQ ID NO: 759814 - RNA, 17 nt, Artificial Sequence
  Synthetic
acuuaagcuaucuaaug

SEQ ID NO: 759815 - RNA, 17 nt, Artificial Sequence
  Synthetic
augugaauacucuaaug

SEQ ID NO: 759816 - RNA, 17 nt, Artificial Sequence
  Synthetic
caucuucuucucuaaug

SEQ ID NO: 759817 - RNA, 17 nt, Artificial Sequence
  Synthetic
ugugggagugucuaaug

SEQ ID NO: 759818 - RNA, 17 nt, Artificial Sequence
  Synthetic
uucagaucauucuaaug

SEQ ID NO: 759819 - RNA, 17 nt, Artificial Sequence
  Synthetic
auugaaucuuucuaaug

SEQ ID NO: 759820 - RNA, 17 nt, Artificial Sequence
  Synthetic
uaauuagaaaaguaaug

SEQ ID NO: 759821 - RNA, 17 nt, Artificial Sequence
  Synthetic
uagugaggcaaguaaug

SEQ ID NO: 759822 - RNA, 17 nt, Artificial Sequence
  Synthetic
uuacacuucaaguaaug

SEQ ID NO: 759823 - RNA, 17 nt, Artificial Sequence
  Synthetic
agaugauugcaguaaug

SEQ ID NO: 759824 - RNA, 17 nt, Artificial Sequence
  Synthetic
ucuggaacugaguaaug

SEQ ID NO: 759825 - RNA, 17 nt, Artificial Sequence
  Synthetic
uugaguagauaguaaug

SEQ ID NO: 759826 - RNA, 17 nt, Artificial Sequence
  Synthetic
uucauucccagguaaug

SEQ ID NO: 759827 - RNA, 17 nt, Artificial Sequence
  Synthetic
accuaagagauguaaug

SEQ ID NO: 759828 - RNA, 17 nt, Artificial Sequence
  Synthetic
uuuuuucuucuguaaug

SEQ ID NO: 759829 - RNA, 17 nt, Artificial Sequence
  Synthetic
ucaugcuauguguaaug

SEQ ID NO: 759830 - RNA, 17 nt, Artificial Sequence
  Synthetic
auuaagaccuuguaaug

SEQ ID NO: 759831 - RNA, 17 nt, Artificial Sequence
  Synthetic
cuaccuuccuuguaaug

SEQ ID NO: 759832 - RNA, 17 nt, Artificial Sequence
  Synthetic
ugugauuauuuguaaug

SEQ ID NO: 759833 - RNA, 17 nt, Artificial Sequence
  Synthetic
auaauaucuuuguaaug

SEQ ID NO: 759834 - RNA, 17 nt, Artificial Sequence
  Synthetic
aacuguaagaauuaaug

SEQ ID NO: 759835 - RNA, 17 nt, Artificial Sequence
  Synthetic
uauaaaguucauuaaug

SEQ ID NO: 759836 - RNA, 17 nt, Artificial Sequence
  Synthetic
aaaaauguucauuaaug

SEQ ID NO: 759837 - RNA, 17 nt, Artificial Sequence
  Synthetic
cuaucucuagauuaaug

SEQ ID NO: 759838 - RNA, 17 nt, Artificial Sequence
  Synthetic
ugugaaauauauuaaug

SEQ ID NO: 759839 - RNA, 17 nt, Artificial Sequence
  Synthetic
acacucucaacuuaaug

SEQ ID NO: 759840 - RNA, 17 nt, Artificial Sequence
  Synthetic
aaacaacacacuuaaug

SEQ ID NO: 759841 - RNA, 17 nt, Artificial Sequence
  Synthetic
cugucuaguacuuaaug

SEQ ID NO: 759842 - RNA, 17 nt, Artificial Sequence
  Synthetic
uuuucuugugcuuaaug

SEQ ID NO: 759843 - RNA, 17 nt, Artificial Sequence
  Synthetic
acuguuucuaguuaaug

SEQ ID NO: 759844 - RNA, 17 nt, Artificial Sequence
  Synthetic
auggauauuuguuaaug

SEQ ID NO: 759845 - RNA, 17 nt, Artificial Sequence
  Synthetic
aaugaauaaauuuaaug

SEQ ID NO: 759846 - RNA, 17 nt, Artificial Sequence
  Synthetic
ccuaugggaauuuaaug

SEQ ID NO: 759847 - RNA, 17 nt, Artificial Sequence
  Synthetic
cuccuauccauuuaaug

SEQ ID NO: 759848 - RNA, 17 nt, Artificial Sequence
  Synthetic
uuccuuuugguuuaaug

SEQ ID NO: 759849 - RNA, 17 nt, Artificial Sequence
  Synthetic
ucucucucauuuuaaug

SEQ ID NO: 759850 - RNA, 17 nt, Artificial Sequence
  Synthetic
auagaaauauuuuaaug

SEQ ID NO: 759851 - RNA, 17 nt, Artificial Sequence
  Synthetic
uuuuuacuauuuuaaug

SEQ ID NO: 759852 - RNA, 17 nt, Artificial Sequence
  Synthetic
uuauugauuuuuuaaug

SEQ ID NO: 759853 - RNA, 17 nt, Artificial Sequence
  Synthetic
uuucaauaaaaaacaug

SEQ ID NO: 759854 - RNA, 17 nt, Artificial Sequence
  Synthetic
cagaacauuaaaacaug

SEQ ID NO: 759855 - RNA, 17 nt, Artificial Sequence
  Synthetic
ugaggcuuagaaacaug

SEQ ID NO: 759856 - RNA, 17 nt, Artificial Sequence
  Synthetic
agggggaaggaaacaug

SEQ ID NO: 759857 - RNA, 17 nt, Artificial Sequence
  Synthetic
aaaugaauauaaacaug

SEQ ID NO: 759858 - RNA, 17 nt, Artificial Sequence
  Synthetic
aagcaguuuuaaacaug

SEQ ID NO: 759859 - RNA, 17 nt, Artificial Sequence
  Synthetic
uccuucuccccaacaug

SEQ ID NO: 759860 - RNA, 17 nt, Artificial Sequence
  Synthetic
ccaaauuuagcaacaug

SEQ ID NO: 759861 - RNA, 17 nt, Artificial Sequence
  Synthetic
cuccaucuugcaacaug

SEQ ID NO: 759862 - RNA, 17 nt, Artificial Sequence
  Synthetic
cagcaaaauucaacaug

SEQ ID NO: 759863 - RNA, 17 nt, Artificial Sequence
  Synthetic
aauggacaaagaacaug

SEQ ID NO: 759864 - RNA, 17 nt, Artificial Sequence
  Synthetic
cugugaguaagaacaug

SEQ ID NO: 759865 - RNA, 17 nt, Artificial Sequence
  Synthetic
cuaugagcgagaacaug

SEQ ID NO: 759866 - RNA, 17 nt, Artificial Sequence
  Synthetic
uuauaaaugagaacaug

SEQ ID NO: 759867 - RNA, 17 nt, Artificial Sequence
  Synthetic
uuauaagugagaacaug

SEQ ID NO: 759868 - RNA, 17 nt, Artificial Sequence
  Synthetic
uuacgagugagaacaug

SEQ ID NO: 759869 - RNA, 17 nt, Artificial Sequence
  Synthetic
cuaugagugagaacaug

SEQ ID NO: 759870 - RNA, 17 nt, Artificial Sequence
  Synthetic
uuaugagugagaacaug

SEQ ID NO: 759871 - RNA, 17 nt, Artificial Sequence
  Synthetic
cugugagugagaacaug

SEQ ID NO: 759872 - RNA, 17 nt, Artificial Sequence
  Synthetic
caauagaauagaacaug

SEQ ID NO: 759873 - RNA, 17 nt, Artificial Sequence
  Synthetic
auaaccauuaacacaug

SEQ ID NO: 759874 - RNA, 17 nt, Artificial Sequence
  Synthetic
aaucauauuaacacaug

SEQ ID NO: 759875 - RNA, 17 nt, Artificial Sequence
  Synthetic
auggugguuaacacaug

SEQ ID NO: 759876 - RNA, 17 nt, Artificial Sequence
  Synthetic
aaagaaacacacacaug

SEQ ID NO: 759877 - RNA, 17 nt, Artificial Sequence
  Synthetic
ugugguugucacacaug

SEQ ID NO: 759878 - RNA, 17 nt, Artificial Sequence
  Synthetic
ucuaugguagacacaug

SEQ ID NO: 759879 - RNA, 17 nt, Artificial Sequence
  Synthetic
cccucacaugacacaug

SEQ ID NO: 759880 - RNA, 17 nt, Artificial Sequence
  Synthetic
cacucccaugacacaug

SEQ ID NO: 759881 - RNA, 17 nt, Artificial Sequence
  Synthetic
ucauuuuuuuacacaug

SEQ ID NO: 759882 - RNA, 17 nt, Artificial Sequence
  Synthetic
uaguugaugaccacaug

SEQ ID NO: 759883 - RNA, 17 nt, Artificial Sequence
  Synthetic
ugauguucuaccacaug

SEQ ID NO: 759884 - RNA, 17 nt, Artificial Sequence
  Synthetic
auuuauauagccacaug

SEQ ID NO: 759885 - RNA, 17 nt, Artificial Sequence
  Synthetic
uagucauuagccacaug

SEQ ID NO: 759886 - RNA, 17 nt, Artificial Sequence
  Synthetic
cauaugaaugccacaug

SEQ ID NO: 759887 - RNA, 17 nt, Artificial Sequence
  Synthetic
cagugacaauccacaug

SEQ ID NO: 759888 - RNA, 17 nt, Artificial Sequence
  Synthetic
aagucagaauccacaug

SEQ ID NO: 759889 - RNA, 17 nt, Artificial Sequence
  Synthetic
auuacagaguccacaug

SEQ ID NO: 759890 - RNA, 17 nt, Artificial Sequence
  Synthetic
aaccuuggcagcacaug

SEQ ID NO: 759891 - RNA, 17 nt, Artificial Sequence
  Synthetic
acauaaacacucacaug

SEQ ID NO: 759892 - RNA, 17 nt, Artificial Sequence
  Synthetic
aaguguuuucucacaug

SEQ ID NO: 759893 - RNA, 17 nt, Artificial Sequence
  Synthetic
uaagcagaggucacaug

SEQ ID NO: 759894 - RNA, 17 nt, Artificial Sequence
  Synthetic
cugugacuugucacaug

SEQ ID NO: 759895 - RNA, 17 nt, Artificial Sequence
  Synthetic
uuuaucaaguucacaug

SEQ ID NO: 759896 - RNA, 17 nt, Artificial Sequence
  Synthetic
ucaaauaaaaagacaug

SEQ ID NO: 759897 - RNA, 17 nt, Artificial Sequence
  Synthetic
aauguuaagcagacaug

SEQ ID NO: 759898 - RNA, 17 nt, Artificial Sequence
  Synthetic
uuuaaauguuagacaug

SEQ ID NO: 759899 - RNA, 17 nt, Artificial Sequence
  Synthetic
cuaugagugaggacaug

SEQ ID NO: 759900 - RNA, 17 nt, Artificial Sequence
  Synthetic
uaaauaaacaugacaug

SEQ ID NO: 759901 - RNA, 17 nt, Artificial Sequence
  Synthetic
uaccuggacaugacaug

SEQ ID NO: 759902 - RNA, 17 nt, Artificial Sequence
  Synthetic
agagaccuuaugacaug

SEQ ID NO: 759903 - RNA, 17 nt, Artificial Sequence
  Synthetic
aauuucacacugacaug

SEQ ID NO: 759904 - RNA, 17 nt, Artificial Sequence
  Synthetic
cucucucccuugacaug

SEQ ID NO: 759905 - RNA, 17 nt, Artificial Sequence
  Synthetic
cuguggagcuugacaug

SEQ ID NO: 759906 - RNA, 17 nt, Artificial Sequence
  Synthetic
aauaucuaaaauacaug

SEQ ID NO: 759907 - RNA, 17 nt, Artificial Sequence
  Synthetic
uugaucugcaauacaug

SEQ ID NO: 759908 - RNA, 17 nt, Artificial Sequence
  Synthetic
acuucugugaauacaug

SEQ ID NO: 759909 - RNA, 17 nt, Artificial Sequence
  Synthetic
uugccuuuacauacaug

SEQ ID NO: 759910 - RNA, 17 nt, Artificial Sequence
  Synthetic
agcccuugaacuacaug

SEQ ID NO: 759911 - RNA, 17 nt, Artificial Sequence
  Synthetic
ugcucaauagcuacaug

SEQ ID NO: 759912 - RNA, 17 nt, Artificial Sequence
  Synthetic
augcaaggugcuacaug

SEQ ID NO: 759913 - RNA, 17 nt, Artificial Sequence
  Synthetic
agaacaaugucuacaug

SEQ ID NO: 759914 - RNA, 17 nt, Artificial Sequence
  Synthetic
auuucaaaaaguacaug

SEQ ID NO: 759915 - RNA, 17 nt, Artificial Sequence
  Synthetic
agccucugaaguacaug

SEQ ID NO: 759916 - RNA, 17 nt, Artificial Sequence
  Synthetic
uauuuacgggguacaug

SEQ ID NO: 759917 - RNA, 17 nt, Artificial Sequence
  Synthetic
ugugaucccuguacaug

SEQ ID NO: 759918 - RNA, 17 nt, Artificial Sequence
  Synthetic
ugcuauuuuauuacaug

SEQ ID NO: 759919 - RNA, 17 nt, Artificial Sequence
  Synthetic
acgcauccacuuacaug

SEQ ID NO: 759920 - RNA, 17 nt, Artificial Sequence
  Synthetic
ccuuaguggcuuacaug

SEQ ID NO: 759921 - RNA, 17 nt, Artificial Sequence
  Synthetic
cccucugcuguuacaug

SEQ ID NO: 759922 - RNA, 17 nt, Artificial Sequence
  Synthetic
ugcccacuuuuuacaug

SEQ ID NO: 759923 - RNA, 17 nt, Artificial Sequence
  Synthetic
aaaggggugaaaccaug

SEQ ID NO: 759924 - RNA, 17 nt, Artificial Sequence
  Synthetic
agaauaaaacaaccaug

SEQ ID NO: 759925 - RNA, 17 nt, Artificial Sequence
  Synthetic
auuaccucacaaccaug

SEQ ID NO: 759926 - RNA, 17 nt, Artificial Sequence
  Synthetic
uuaaaauaucaaccaug

SEQ ID NO: 759927 - RNA, 17 nt, Artificial Sequence
  Synthetic
cuauugagauaaccaug

SEQ ID NO: 759928 - RNA, 17 nt, Artificial Sequence
  Synthetic
uaacaaauauaaccaug

SEQ ID NO: 759929 - RNA, 17 nt, Artificial Sequence
  Synthetic
uggcccucaccaccaug

SEQ ID NO: 759930 - RNA, 17 nt, Artificial Sequence
  Synthetic
acaagaacagcaccaug

SEQ ID NO: 759931 - RNA, 17 nt, Artificial Sequence
  Synthetic
cuauuuuuaucaccaug

SEQ ID NO: 759932 - RNA, 17 nt, Artificial Sequence
  Synthetic
cuguuugggucaccaug

SEQ ID NO: 759933 - RNA, 17 nt, Artificial Sequence
  Synthetic
caaaaugcuucaccaug

SEQ ID NO: 759934 - RNA, 17 nt, Artificial Sequence
  Synthetic
uaagacgaaagaccaug

SEQ ID NO: 759935 - RNA, 17 nt, Artificial Sequence
  Synthetic
aauuauccaagaccaug

SEQ ID NO: 759936 - RNA, 17 nt, Artificial Sequence
  Synthetic
uaugcuucaagaccaug

SEQ ID NO: 759937 - RNA, 17 nt, Artificial Sequence
  Synthetic
uuuguugccagaccaug

SEQ ID NO: 759938 - RNA, 17 nt, Artificial Sequence
  Synthetic
uugugggagggaccaug

SEQ ID NO: 759939 - RNA, 17 nt, Artificial Sequence
  Synthetic
aaacuggauggaccaug

SEQ ID NO: 759940 - RNA, 17 nt, Artificial Sequence
  Synthetic
aaugcuuauggaccaug

SEQ ID NO: 759941 - RNA, 17 nt, Artificial Sequence
  Synthetic
uaggucacuggaccaug

SEQ ID NO: 759942 - RNA, 17 nt, Artificial Sequence
  Synthetic
uuuaaaugcauaccaug

SEQ ID NO: 759943 - RNA, 17 nt, Artificial Sequence
  Synthetic
cagguacaauuaccaug

SEQ ID NO: 759944 - RNA, 17 nt, Artificial Sequence
  Synthetic
uguggaaaccacccaug

SEQ ID NO: 759945 - RNA, 17 nt, Artificial Sequence
  Synthetic
aagagguuucacccaug

SEQ ID NO: 759946 - RNA, 17 nt, Artificial Sequence
  Synthetic
acucucuuggccccaug

SEQ ID NO: 759947 - RNA, 17 nt, Artificial Sequence
  Synthetic
aaucguuugagcccaug

SEQ ID NO: 759948 - RNA, 17 nt, Artificial Sequence
  Synthetic
ucuuaucuggucccaug

SEQ ID NO: 759949 - RNA, 17 nt, Artificial Sequence
  Synthetic
aucugggaauucccaug

SEQ ID NO: 759950 - RNA, 17 nt, Artificial Sequence
  Synthetic
uaaaccaugaagccaug

SEQ ID NO: 759951 - RNA, 17 nt, Artificial Sequence
  Synthetic
aggccucugaagccaug

SEQ ID NO: 759952 - RNA, 17 nt, Artificial Sequence
  Synthetic
aggccuacccagccaug

SEQ ID NO: 759953 - RNA, 17 nt, Artificial Sequence
  Synthetic
aggccuccccagccaug

SEQ ID NO: 759954 - RNA, 17 nt, Artificial Sequence
  Synthetic
aggccucuccagccaug

SEQ ID NO: 759955 - RNA, 17 nt, Artificial Sequence
  Synthetic
ugucuacaagagccaug

SEQ ID NO: 759956 - RNA, 17 nt, Artificial Sequence
  Synthetic
uaguguagcuagccaug

SEQ ID NO: 759957 - RNA, 17 nt, Artificial Sequence
  Synthetic
uuucaaacacggccaug

SEQ ID NO: 759958 - RNA, 17 nt, Artificial Sequence
  Synthetic
uacaaguuugggccaug

SEQ ID NO: 759959 - RNA, 17 nt, Artificial Sequence
  Synthetic
uacauaucuuggccaug

SEQ ID NO: 759960 - RNA, 17 nt, Artificial Sequence
  Synthetic
uuaaucuaaaugccaug

SEQ ID NO: 759961 - RNA, 17 nt, Artificial Sequence
  Synthetic
cauuuuuuuuugccaug

SEQ ID NO: 759962 - RNA, 17 nt, Artificial Sequence
  Synthetic
aauaagauaaauccaug

SEQ ID NO: 759963 - RNA, 17 nt, Artificial Sequence
  Synthetic
ugaucucugaauccaug

SEQ ID NO: 759964 - RNA, 17 nt, Artificial Sequence
  Synthetic
uuacaagauaauccaug

SEQ ID NO: 759965 - RNA, 17 nt, Artificial Sequence
  Synthetic
aauauauuuaauccaug

SEQ ID NO: 759966 - RNA, 17 nt, Artificial Sequence
  Synthetic
acuaugacacauccaug

SEQ ID NO: 759967 - RNA, 17 nt, Artificial Sequence
  Synthetic
aaccauucacauccaug

SEQ ID NO: 759968 - RNA, 17 nt, Artificial Sequence
  Synthetic
cuuuacuuacauccaug

SEQ ID NO: 759969 - RNA, 17 nt, Artificial Sequence
  Synthetic
caacaagugcauccaug

SEQ ID NO: 759970 - RNA, 17 nt, Artificial Sequence
  Synthetic
cuuucaugucauccaug

SEQ ID NO: 759971 - RNA, 17 nt, Artificial Sequence
  Synthetic
acuggucauuauccaug

SEQ ID NO: 759972 - RNA, 17 nt, Artificial Sequence
  Synthetic
ugagugacaacuccaug

SEQ ID NO: 759973 - RNA, 17 nt, Artificial Sequence
  Synthetic
uuauugugagcuccaug

SEQ ID NO: 759974 - RNA, 17 nt, Artificial Sequence
  Synthetic
acuaaaauaucuccaug

SEQ ID NO: 759975 - RNA, 17 nt, Artificial Sequence
  Synthetic
agccgagguucuccaug

SEQ ID NO: 759976 - RNA, 17 nt, Artificial Sequence
  Synthetic
ucccccguuucuccaug

SEQ ID NO: 759977 - RNA, 17 nt, Artificial Sequence
  Synthetic
cggauguaagguccaug

SEQ ID NO: 759978 - RNA, 17 nt, Artificial Sequence
  Synthetic
agcccuaaaauuccaug

SEQ ID NO: 759979 - RNA, 17 nt, Artificial Sequence
  Synthetic
acaauauaaauuccaug

SEQ ID NO: 759980 - RNA, 17 nt, Artificial Sequence
  Synthetic
agucugacaauuccaug

SEQ ID NO: 759981 - RNA, 17 nt, Artificial Sequence
  Synthetic
cuucagggaauuccaug

SEQ ID NO: 759982 - RNA, 17 nt, Artificial Sequence
  Synthetic
uuccuauugauuccaug

SEQ ID NO: 759983 - RNA, 17 nt, Artificial Sequence
  Synthetic
agauugcaacuuccaug

SEQ ID NO: 759984 - RNA, 17 nt, Artificial Sequence
  Synthetic
auuuggcagcuuccaug

SEQ ID NO: 759985 - RNA, 17 nt, Artificial Sequence
  Synthetic
uugucacuucuuccaug

SEQ ID NO: 759986 - RNA, 17 nt, Artificial Sequence
  Synthetic
uaaguuucaguuccaug

SEQ ID NO: 759987 - RNA, 17 nt, Artificial Sequence
  Synthetic
uacccauauuuuccaug

SEQ ID NO: 759988 - RNA, 17 nt, Artificial Sequence
  Synthetic
cagagagguuuuccaug

SEQ ID NO: 759989 - RNA, 17 nt, Artificial Sequence
  Synthetic
uugccuuugaaagcaug

SEQ ID NO: 759990 - RNA, 17 nt, Artificial Sequence
  Synthetic
uaggcaguuaaagcaug

SEQ ID NO: 759991 - RNA, 17 nt, Artificial Sequence
  Synthetic
uuccuuuuuaaagcaug

SEQ ID NO: 759992 - RNA, 17 nt, Artificial Sequence
  Synthetic
uuggaauacuaagcaug

SEQ ID NO: 759993 - RNA, 17 nt, Artificial Sequence
  Synthetic
uguugcauguaagcaug

SEQ ID NO: 759994 - RNA, 17 nt, Artificial Sequence
  Synthetic
caugggaaaacagcaug

SEQ ID NO: 759995 - RNA, 17 nt, Artificial Sequence
  Synthetic
aucacgacaacagcaug

SEQ ID NO: 759996 - RNA, 17 nt, Artificial Sequence
  Synthetic
aucaugagaacagcaug

SEQ ID NO: 759997 - RNA, 17 nt, Artificial Sequence
  Synthetic
cagugggggacagcaug

SEQ ID NO: 759998 - RNA, 17 nt, Artificial Sequence
  Synthetic
cuacaauguccagcaug

SEQ ID NO: 759999 - RNA, 17 nt, Artificial Sequence
  Synthetic
acauuuucagcagcaug

SEQ ID NO: 760000 - RNA, 17 nt, Artificial Sequence
  Synthetic
acagugggaggagcaug

SEQ ID NO: 760001 - RNA, 17 nt, Artificial Sequence
  Synthetic
uauccugaaugagcaug

SEQ ID NO: 760002 - RNA, 17 nt, Artificial Sequence
  Synthetic
aucaugagaauagcaug

SEQ ID NO: 760003 - RNA, 17 nt, Artificial Sequence
  Synthetic
ucggugagucuagcaug

SEQ ID NO: 760004 - RNA, 17 nt, Artificial Sequence
  Synthetic
ccauccugggacgcaug

SEQ ID NO: 760005 - RNA, 17 nt, Artificial Sequence
  Synthetic
auuucaaaagccgcaug

SEQ ID NO: 760006 - RNA, 17 nt, Artificial Sequence
  Synthetic
caaccacuagccgcaug

SEQ ID NO: 760007 - RNA, 17 nt, Artificial Sequence
  Synthetic
aaagagagagaggcaug

SEQ ID NO: 760008 - RNA, 17 nt, Artificial Sequence
  Synthetic
ucaaagaaugaggcaug

SEQ ID NO: 760009 - RNA, 17 nt, Artificial Sequence
  Synthetic
agauguugguaggcaug

SEQ ID NO: 760010 - RNA, 17 nt, Artificial Sequence
  Synthetic
cacugcacuccggcaug

SEQ ID NO: 760011 - RNA, 17 nt, Artificial Sequence
  Synthetic
uauuuuuaaagggcaug

SEQ ID NO: 760012 - RNA, 17 nt, Artificial Sequence
  Synthetic
augccuuucugggcaug

SEQ ID NO: 760013 - RNA, 17 nt, Artificial Sequence
  Synthetic
ccugauucaguggcaug

SEQ ID NO: 760014 - RNA, 17 nt, Artificial Sequence
  Synthetic
caaagggagguggcaug

SEQ ID NO: 760015 - RNA, 17 nt, Artificial Sequence
  Synthetic
cagccaggaaaugcaug

SEQ ID NO: 760016 - RNA, 17 nt, Artificial Sequence
  Synthetic
ugauguaauaaugcaug

SEQ ID NO: 760017 - RNA, 17 nt, Artificial Sequence
  Synthetic
caaauaccuaaugcaug

SEQ ID NO: 760018 - RNA, 17 nt, Artificial Sequence
  Synthetic
uucucugaacaugcaug

SEQ ID NO: 760019 - RNA, 17 nt, Artificial Sequence
  Synthetic
ucuagggacuaugcaug

SEQ ID NO: 760020 - RNA, 17 nt, Artificial Sequence
  Synthetic
auacaaaggucugcaug

SEQ ID NO: 760021 - RNA, 17 nt, Artificial Sequence
  Synthetic
ucucagcauucugcaug

SEQ ID NO: 760022 - RNA, 17 nt, Artificial Sequence
  Synthetic
aacaugcugagugcaug

SEQ ID NO: 760023 - RNA, 17 nt, Artificial Sequence
  Synthetic
aauuuguaccuugcaug

SEQ ID NO: 760024 - RNA, 17 nt, Artificial Sequence
  Synthetic
agcuaaaaucuugcaug

SEQ ID NO: 760025 - RNA, 17 nt, Artificial Sequence
  Synthetic
uaaccuauguuugcaug

SEQ ID NO: 760026 - RNA, 17 nt, Artificial Sequence
  Synthetic
ugggucucuuuugcaug

SEQ ID NO: 760027 - RNA, 17 nt, Artificial Sequence
  Synthetic
uuuaauauuuuugcaug

SEQ ID NO: 760028 - RNA, 17 nt, Artificial Sequence
  Synthetic
caaccuguuuuugcaug

SEQ ID NO: 760029 - RNA, 17 nt, Artificial Sequence
  Synthetic
aaugucuuaaaaucaug

SEQ ID NO: 760030 - RNA, 17 nt, Artificial Sequence
  Synthetic
ugacaccacaaaucaug

SEQ ID NO: 760031 - RNA, 17 nt, Artificial Sequence
  Synthetic
aaaacuuacaaaucaug

SEQ ID NO: 760032 - RNA, 17 nt, Artificial Sequence
  Synthetic
ugauuccauaaaucaug

SEQ ID NO: 760033 - RNA, 17 nt, Artificial Sequence
  Synthetic
uugagggaacaaucaug

SEQ ID NO: 760034 - RNA, 17 nt, Artificial Sequence
  Synthetic
uaauauauagaaucaug

SEQ ID NO: 760035 - RNA, 17 nt, Artificial Sequence
  Synthetic
uaaaugauggaaucaug

SEQ ID NO: 760036 - RNA, 17 nt, Artificial Sequence
  Synthetic
aggucauuugaaucaug

SEQ ID NO: 760037 - RNA, 17 nt, Artificial Sequence
  Synthetic
cuauugagauaaucaug

SEQ ID NO: 760038 - RNA, 17 nt, Artificial Sequence
  Synthetic
caggaaaacacaucaug

SEQ ID NO: 760039 - RNA, 17 nt, Artificial Sequence
  Synthetic
auuuaagugacaucaug

SEQ ID NO: 760040 - RNA, 17 nt, Artificial Sequence
  Synthetic
auauaauauacaucaug

SEQ ID NO: 760041 - RNA, 17 nt, Artificial Sequence
  Synthetic
agcuagaaaucaucaug

SEQ ID NO: 760042 - RNA, 17 nt, Artificial Sequence
  Synthetic
caucagccaucaucaug

SEQ ID NO: 760043 - RNA, 17 nt, Artificial Sequence
  Synthetic
acucacucaucaucaug

SEQ ID NO: 760044 - RNA, 17 nt, Artificial Sequence
  Synthetic
uauuacauuucaucaug

SEQ ID NO: 760045 - RNA, 17 nt, Artificial Sequence
  Synthetic
aaggcagguggaucaug

SEQ ID NO: 760046 - RNA, 17 nt, Artificial Sequence
  Synthetic
aaagcggguggaucaug

SEQ ID NO: 760047 - RNA, 17 nt, Artificial Sequence
  Synthetic
aagguggguggaucaug

SEQ ID NO: 760048 - RNA, 17 nt, Artificial Sequence
  Synthetic
uuauuaaacugaucaug

SEQ ID NO: 760049 - RNA, 17 nt, Artificial Sequence
  Synthetic
aaagaauucugaucaug

SEQ ID NO: 760050 - RNA, 17 nt, Artificial Sequence
  Synthetic
acucagcugcuaucaug

SEQ ID NO: 760051 - RNA, 17 nt, Artificial Sequence
  Synthetic
augaaaaaauuaucaug

SEQ ID NO: 760052 - RNA, 17 nt, Artificial Sequence
  Synthetic
caauaauucuuaucaug

SEQ ID NO: 760053 - RNA, 17 nt, Artificial Sequence
  Synthetic
cauaguucuuuaucaug

SEQ ID NO: 760054 - RNA, 17 nt, Artificial Sequence
  Synthetic
auacuacuguacucaug

SEQ ID NO: 760055 - RNA, 17 nt, Artificial Sequence
  Synthetic
ugcaaaaggaccucaug

SEQ ID NO: 760056 - RNA, 17 nt, Artificial Sequence
  Synthetic
ucuauuagagccucaug

SEQ ID NO: 760057 - RNA, 17 nt, Artificial Sequence
  Synthetic
ucuucauuggccucaug

SEQ ID NO: 760058 - RNA, 17 nt, Artificial Sequence
  Synthetic
cauugaccugccucaug

SEQ ID NO: 760059 - RNA, 17 nt, Artificial Sequence
  Synthetic
aaaaugugaagcucaug

SEQ ID NO: 760060 - RNA, 17 nt, Artificial Sequence
  Synthetic
caagacaguggcucaug

SEQ ID NO: 760061 - RNA, 17 nt, Artificial Sequence
  Synthetic
accaugucuaucucaug

SEQ ID NO: 760062 - RNA, 17 nt, Artificial Sequence
  Synthetic
cauuaguaugucucaug

SEQ ID NO: 760063 - RNA, 17 nt, Artificial Sequence
  Synthetic
ugugacccauucucaug

SEQ ID NO: 760064 - RNA, 17 nt, Artificial Sequence
  Synthetic
uucucauccuucucaug

SEQ ID NO: 760065 - RNA, 17 nt, Artificial Sequence
  Synthetic
uaccacguguucucaug

SEQ ID NO: 760066 - RNA, 17 nt, Artificial Sequence
  Synthetic
aggccuccccagucaug

SEQ ID NO: 760067 - RNA, 17 nt, Artificial Sequence
  Synthetic
ccguggauucagucaug

SEQ ID NO: 760068 - RNA, 17 nt, Artificial Sequence
  Synthetic
aaguaaacuuagucaug

SEQ ID NO: 760069 - RNA, 17 nt, Artificial Sequence
  Synthetic
aaacuuuuaccgucaug

SEQ ID NO: 760070 - RNA, 17 nt, Artificial Sequence
  Synthetic
auuucccacaggucaug

SEQ ID NO: 760071 - RNA, 17 nt, Artificial Sequence
  Synthetic
ugucucccuaggucaug

SEQ ID NO: 760072 - RNA, 17 nt, Artificial Sequence
  Synthetic
cugcuuuaugggucaug

SEQ ID NO: 760073 - RNA, 17 nt, Artificial Sequence
  Synthetic
aaaccggagaugucaug

SEQ ID NO: 760074 - RNA, 17 nt, Artificial Sequence
  Synthetic
uagcuuuugaugucaug

SEQ ID NO: 760075 - RNA, 17 nt, Artificial Sequence
  Synthetic
uucucucaucugucaug

SEQ ID NO: 760076 - RNA, 17 nt, Artificial Sequence
  Synthetic
auauaguuggugucaug

SEQ ID NO: 760077 - RNA, 17 nt, Artificial Sequence
  Synthetic
ugcaucucauugucaug

SEQ ID NO: 760078 - RNA, 17 nt, Artificial Sequence
  Synthetic
uaaaaaugauugucaug

SEQ ID NO: 760079 - RNA, 17 nt, Artificial Sequence
  Synthetic
accugaaguaauucaug

SEQ ID NO: 760080 - RNA, 17 nt, Artificial Sequence
  Synthetic
ccucauaggcauucaug

SEQ ID NO: 760081 - RNA, 17 nt, Artificial Sequence
  Synthetic
aaguuaacauauucaug

SEQ ID NO: 760082 - RNA, 17 nt, Artificial Sequence
  Synthetic
uuuucacccuauucaug

SEQ ID NO: 760083 - RNA, 17 nt, Artificial Sequence
  Synthetic
cccuuccuguauucaug

SEQ ID NO: 760084 - RNA, 17 nt, Artificial Sequence
  Synthetic
ucaguacagccuucaug

SEQ ID NO: 760085 - RNA, 17 nt, Artificial Sequence
  Synthetic
aaaccaaauccuucaug

SEQ ID NO: 760086 - RNA, 17 nt, Artificial Sequence
  Synthetic
agauuaaaagcuucaug

SEQ ID NO: 760087 - RNA, 17 nt, Artificial Sequence
  Synthetic
auacugccugcuucaug

SEQ ID NO: 760088 - RNA, 17 nt, Artificial Sequence
  Synthetic
accauauccucuucaug

SEQ ID NO: 760089 - RNA, 17 nt, Artificial Sequence
  Synthetic
aguuauuuagguucaug

SEQ ID NO: 760090 - RNA, 17 nt, Artificial Sequence
  Synthetic
uuugaaguuuguucaug

SEQ ID NO: 760091 - RNA, 17 nt, Artificial Sequence
  Synthetic
aauuacucaauuucaug

SEQ ID NO: 760092 - RNA, 17 nt, Artificial Sequence
  Synthetic
acucacucauuuucaug

SEQ ID NO: 760093 - RNA, 17 nt, Artificial Sequence
  Synthetic
accaaaauauuuucaug

SEQ ID NO: 760094 - RNA, 17 nt, Artificial Sequence
  Synthetic
uauuugaccuuuucaug

SEQ ID NO: 760095 - RNA, 17 nt, Artificial Sequence
  Synthetic
uuuuuuauaaaaagaug

SEQ ID NO: 760096 - RNA, 17 nt, Artificial Sequence
  Synthetic
uuagguaggaaaagaug

SEQ ID NO: 760097 - RNA, 17 nt, Artificial Sequence
  Synthetic
uuaguauggaaaagaug

SEQ ID NO: 760098 - RNA, 17 nt, Artificial Sequence
  Synthetic
uauuuggaggaaagaug

SEQ ID NO: 760099 - RNA, 17 nt, Artificial Sequence
  Synthetic
ugagcaacggaaagaug

SEQ ID NO: 760100 - RNA, 17 nt, Artificial Sequence
  Synthetic
uuuuggguguaaagaug

SEQ ID NO: 760101 - RNA, 17 nt, Artificial Sequence
  Synthetic
uugauuuuuuaaagaug

SEQ ID NO: 760102 - RNA, 17 nt, Artificial Sequence
  Synthetic
auuuacaagacaagaug

SEQ ID NO: 760103 - RNA, 17 nt, Artificial Sequence
  Synthetic
agcucugcuucaagaug

SEQ ID NO: 760104 - RNA, 17 nt, Artificial Sequence
  Synthetic
agaggaaaaagaagaug

SEQ ID NO: 760105 - RNA, 17 nt, Artificial Sequence
  Synthetic
uacacagaaagaagaug

SEQ ID NO: 760106 - RNA, 17 nt, Artificial Sequence
  Synthetic
ugaugcuggagaagaug

SEQ ID NO: 760107 - RNA, 17 nt, Artificial Sequence
  Synthetic
auaaauccacgaagaug

SEQ ID NO: 760108 - RNA, 17 nt, Artificial Sequence
  Synthetic
cagaagacaggaagaug

SEQ ID NO: 760109 - RNA, 17 nt, Artificial Sequence
  Synthetic
auuuugggaggaagaug

SEQ ID NO: 760110 - RNA, 17 nt, Artificial Sequence
  Synthetic
aagugucagggaagaug

SEQ ID NO: 760111 - RNA, 17 nt, Artificial Sequence
  Synthetic
auauugaggggaagaug

SEQ ID NO: 760112 - RNA, 17 nt, Artificial Sequence
  Synthetic
aagcuuaggggaagaug

SEQ ID NO: 760113 - RNA, 17 nt, Artificial Sequence
  Synthetic
aggugcuggggaagaug

SEQ ID NO: 760114 - RNA, 17 nt, Artificial Sequence
  Synthetic
uucuuuuauugaagaug

SEQ ID NO: 760115 - RNA, 17 nt, Artificial Sequence
  Synthetic
uaagagucuugaagaug

SEQ ID NO: 760116 - RNA, 17 nt, Artificial Sequence
  Synthetic
uaagugugaauaagaug

SEQ ID NO: 760117 - RNA, 17 nt, Artificial Sequence
  Synthetic
aagcccaucauaagaug

SEQ ID NO: 760118 - RNA, 17 nt, Artificial Sequence
  Synthetic
auucagaaacuaagaug

SEQ ID NO: 760119 - RNA, 17 nt, Artificial Sequence
  Synthetic
ugaccuggccuaagaug

SEQ ID NO: 760120 - RNA, 17 nt, Artificial Sequence
  Synthetic
uaagccagaguaagaug

SEQ ID NO: 760121 - RNA, 17 nt, Artificial Sequence
  Synthetic
uacccuuuauuaagaug

SEQ ID NO: 760122 - RNA, 17 nt, Artificial Sequence
  Synthetic
cuuuguauuaacagaug

SEQ ID NO: 760123 - RNA, 17 nt, Artificial Sequence
  Synthetic
auuacaagccacagaug

SEQ ID NO: 760124 - RNA, 17 nt, Artificial Sequence
  Synthetic
aaaaaauuucacagaug

SEQ ID NO: 760125 - RNA, 17 nt, Artificial Sequence
  Synthetic
aucuuauuucacagaug

SEQ ID NO: 760126 - RNA, 17 nt, Artificial Sequence
  Synthetic
acugauuaagacagaug

SEQ ID NO: 760127 - RNA, 17 nt, Artificial Sequence
  Synthetic
cauggugcugacagaug

SEQ ID NO: 760128 - RNA, 17 nt, Artificial Sequence
  Synthetic
agcuggguugacagaug

SEQ ID NO: 760129 - RNA, 17 nt, Artificial Sequence
  Synthetic
uuuguaacuuacagaug

SEQ ID NO: 760130 - RNA, 17 nt, Artificial Sequence
  Synthetic
uagaucucuuacagaug

SEQ ID NO: 760131 - RNA, 17 nt, Artificial Sequence
  Synthetic
auugacaguuacagaug

SEQ ID NO: 760132 - RNA, 17 nt, Artificial Sequence
  Synthetic
uguuuaaaaaccagaug

SEQ ID NO: 760133 - RNA, 17 nt, Artificial Sequence
  Synthetic
aaggcucugaccagaug

SEQ ID NO: 760134 - RNA, 17 nt, Artificial Sequence
  Synthetic
aaaaaaaaggccagaug

SEQ ID NO: 760135 - RNA, 17 nt, Artificial Sequence
  Synthetic
agauaaauauccagaug

SEQ ID NO: 760136 - RNA, 17 nt, Artificial Sequence
  Synthetic
aaauaaugcuccagaug

SEQ ID NO: 760137 - RNA, 17 nt, Artificial Sequence
  Synthetic
ccacagugguccagaug

SEQ ID NO: 760138 - RNA, 17 nt, Artificial Sequence
  Synthetic
aaaguuauuuccagaug

SEQ ID NO: 760139 - RNA, 17 nt, Artificial Sequence
  Synthetic
uauuuugggagcagaug

SEQ ID NO: 760140 - RNA, 17 nt, Artificial Sequence
  Synthetic
uaauggaagggcagaug

SEQ ID NO: 760141 - RNA, 17 nt, Artificial Sequence
  Synthetic
uacaaucauggcagaug

SEQ ID NO: 760142 - RNA, 17 nt, Artificial Sequence
  Synthetic
agaagucacugcagaug

SEQ ID NO: 760143 - RNA, 17 nt, Artificial Sequence
  Synthetic
aaguaaguuugcagaug

SEQ ID NO: 760144 - RNA, 17 nt, Artificial Sequence
  Synthetic
uauccauuuugcagaug

SEQ ID NO: 760145 - RNA, 17 nt, Artificial Sequence
  Synthetic
uaaacaucaaucagaug

SEQ ID NO: 760146 - RNA, 17 nt, Artificial Sequence
  Synthetic
auuuuuagcaucagaug

SEQ ID NO: 760147 - RNA, 17 nt, Artificial Sequence
  Synthetic
agcucugaucucagaug

SEQ ID NO: 760148 - RNA, 17 nt, Artificial Sequence
  Synthetic
cugugaucucucagaug

SEQ ID NO: 760149 - RNA, 17 nt, Artificial Sequence
  Synthetic
uucccgggucucagaug

SEQ ID NO: 760150 - RNA, 17 nt, Artificial Sequence
  Synthetic
agcuauaacuucagaug

SEQ ID NO: 760151 - RNA, 17 nt, Artificial Sequence
  Synthetic
uuggugaccuucagaug

SEQ ID NO: 760152 - RNA, 17 nt, Artificial Sequence
  Synthetic
uaaauagcuuucagaug

SEQ ID NO: 760153 - RNA, 17 nt, Artificial Sequence
  Synthetic
aaggguagaaagagaug

SEQ ID NO: 760154 - RNA, 17 nt, Artificial Sequence
  Synthetic
cccagauucaagagaug

SEQ ID NO: 760155 - RNA, 17 nt, Artificial Sequence
  Synthetic
agaucacagaagagaug

SEQ ID NO: 760156 - RNA, 17 nt, Artificial Sequence
  Synthetic
uauuuuuagaagagaug

SEQ ID NO: 760157 - RNA, 17 nt, Artificial Sequence
  Synthetic
uauuuuuagcagagaug

SEQ ID NO: 760158 - RNA, 17 nt, Artificial Sequence
  Synthetic
aguuugcugcagagaug

SEQ ID NO: 760159 - RNA, 17 nt, Artificial Sequence
  Synthetic
auuuuuuugcagagaug

SEQ ID NO: 760160 - RNA, 17 nt, Artificial Sequence
  Synthetic
cacggucuucagagaug

SEQ ID NO: 760161 - RNA, 17 nt, Artificial Sequence
  Synthetic
agaucagaagagagaug

SEQ ID NO: 760162 - RNA, 17 nt, Artificial Sequence
  Synthetic
cuagcaagcuagagaug

SEQ ID NO: 760163 - RNA, 17 nt, Artificial Sequence
  Synthetic
uauuuucaguagagaug

SEQ ID NO: 760164 - RNA, 17 nt, Artificial Sequence
  Synthetic
uaucuuuaguagagaug

SEQ ID NO: 760165 - RNA, 17 nt, Artificial Sequence
  Synthetic
cauuuuuaguagagaug

SEQ ID NO: 760166 - RNA, 17 nt, Artificial Sequence
  Synthetic
uauuuuuaguagagaug

SEQ ID NO: 760167 - RNA, 17 nt, Artificial Sequence
  Synthetic
uguuuuuaguagagaug

SEQ ID NO: 760168 - RNA, 17 nt, Artificial Sequence
  Synthetic
auuuuuuaguagagaug

SEQ ID NO: 760169 - RNA, 17 nt, Artificial Sequence
  Synthetic
aauucuuuguagagaug

SEQ ID NO: 760170 - RNA, 17 nt, Artificial Sequence
  Synthetic
ucuauuuuguagagaug

SEQ ID NO: 760171 - RNA, 17 nt, Artificial Sequence
  Synthetic
cauuuuuuguagagaug

SEQ ID NO: 760172 - RNA, 17 nt, Artificial Sequence
  Synthetic
agagaagauuagagaug

SEQ ID NO: 760173 - RNA, 17 nt, Artificial Sequence
  Synthetic
aaaguagggacgagaug

SEQ ID NO: 760174 - RNA, 17 nt, Artificial Sequence
  Synthetic
aucaaacucaggagaug

SEQ ID NO: 760175 - RNA, 17 nt, Artificial Sequence
  Synthetic
auuaaacucaggagaug

SEQ ID NO: 760176 - RNA, 17 nt, Artificial Sequence
  Synthetic
aagcuaaagaggagaug

SEQ ID NO: 760177 - RNA, 17 nt, Artificial Sequence
  Synthetic
aaugguauuaggagaug

SEQ ID NO: 760178 - RNA, 17 nt, Artificial Sequence
  Synthetic
cucgggguggggagaug

SEQ ID NO: 760179 - RNA, 17 nt, Artificial Sequence
  Synthetic
uugaugaaauggagaug

SEQ ID NO: 760180 - RNA, 17 nt, Artificial Sequence
  Synthetic
ugagauuccuggagaug

SEQ ID NO: 760181 - RNA, 17 nt, Artificial Sequence
  Synthetic
ucaaaagcaaugagaug

SEQ ID NO: 760182 - RNA, 17 nt, Artificial Sequence
  Synthetic
uuuccaggacugagaug

SEQ ID NO: 760183 - RNA, 17 nt, Artificial Sequence
  Synthetic
caucauuuacugagaug

SEQ ID NO: 760184 - RNA, 17 nt, Artificial Sequence
  Synthetic
caaagaaagcugagaug

SEQ ID NO: 760185 - RNA, 17 nt, Artificial Sequence
  Synthetic
ucuuaccagcugagaug

SEQ ID NO: 760186 - RNA, 17 nt, Artificial Sequence
  Synthetic
caagcaggucugagaug

SEQ ID NO: 760187 - RNA, 17 nt, Artificial Sequence
  Synthetic
ucugaggaggugagaug

SEQ ID NO: 760188 - RNA, 17 nt, Artificial Sequence
  Synthetic
ugauaccucuugagaug

SEQ ID NO: 760189 - RNA, 17 nt, Artificial Sequence
  Synthetic
caggugacuuugagaug

SEQ ID NO: 760190 - RNA, 17 nt, Artificial Sequence
  Synthetic
uauuuguuuuugagaug

SEQ ID NO: 760191 - RNA, 17 nt, Artificial Sequence
  Synthetic
cuuucuuuuuugagaug

SEQ ID NO: 760192 - RNA, 17 nt, Artificial Sequence
  Synthetic
cccuaauaaaauagaug

SEQ ID NO: 760193 - RNA, 17 nt, Artificial Sequence
  Synthetic
cuacugugaaauagaug

SEQ ID NO: 760194 - RNA, 17 nt, Artificial Sequence
  Synthetic
agcagaauuuauagaug

SEQ ID NO: 760195 - RNA, 17 nt, Artificial Sequence
  Synthetic
ugaacaguuuauagaug

SEQ ID NO: 760196 - RNA, 17 nt, Artificial Sequence
  Synthetic
aaggagauuacuagaug

SEQ ID NO: 760197 - RNA, 17 nt, Artificial Sequence
  Synthetic
cucuggaaaccuagaug

SEQ ID NO: 760198 - RNA, 17 nt, Artificial Sequence
  Synthetic
cuacuaaaugcuagaug

SEQ ID NO: 760199 - RNA, 17 nt, Artificial Sequence
  Synthetic
aagaaaacaaguagaug

SEQ ID NO: 760200 - RNA, 17 nt, Artificial Sequence
  Synthetic
caacuuuugaguagaug

SEQ ID NO: 760201 - RNA, 17 nt, Artificial Sequence
  Synthetic
ccgcggacuaguagaug

SEQ ID NO: 760202 - RNA, 17 nt, Artificial Sequence
  Synthetic
accuuaggagguagaug

SEQ ID NO: 760203 - RNA, 17 nt, Artificial Sequence
  Synthetic
aaguauguguguagaug

SEQ ID NO: 760204 - RNA, 17 nt, Artificial Sequence
  Synthetic
aaagacaugauuagaug

SEQ ID NO: 760205 - RNA, 17 nt, Artificial Sequence
  Synthetic
uucuguugccuuagaug

SEQ ID NO: 760206 - RNA, 17 nt, Artificial Sequence
  Synthetic
caacaugugcuuagaug

SEQ ID NO: 760207 - RNA, 17 nt, Artificial Sequence
  Synthetic
cagcaguuucuuagaug

SEQ ID NO: 760208 - RNA, 17 nt, Artificial Sequence
  Synthetic
auaauaaggguuagaug

SEQ ID NO: 760209 - RNA, 17 nt, Artificial Sequence
  Synthetic
agauguggaaaacgaug

SEQ ID NO: 760210 - RNA, 17 nt, Artificial Sequence
  Synthetic
aucuguuagaaacgaug

SEQ ID NO: 760211 - RNA, 17 nt, Artificial Sequence
  Synthetic
cuacacuuuacacgaug

SEQ ID NO: 760212 - RNA, 17 nt, Artificial Sequence
  Synthetic
cauuugagcccacgaug

SEQ ID NO: 760213 - RNA, 17 nt, Artificial Sequence
  Synthetic
uuugggcugagacgaug

SEQ ID NO: 760214 - RNA, 17 nt, Artificial Sequence
  Synthetic
uuuggguugagacgaug

SEQ ID NO: 760215 - RNA, 17 nt, Artificial Sequence
  Synthetic
uuuucuuaguagcgaug

SEQ ID NO: 760216 - RNA, 17 nt, Artificial Sequence
  Synthetic
ugacagcuccugcgaug

SEQ ID NO: 760217 - RNA, 17 nt, Artificial Sequence
  Synthetic
uuuuacugugugcgaug

SEQ ID NO: 760218 - RNA, 17 nt, Artificial Sequence
  Synthetic
agaaacugaauucgaug

SEQ ID NO: 760219 - RNA, 17 nt, Artificial Sequence
  Synthetic
ucugucugucuucgaug

SEQ ID NO: 760220 - RNA, 17 nt, Artificial Sequence
  Synthetic
uggccgacuuuucgaug

SEQ ID NO: 760221 - RNA, 17 nt, Artificial Sequence
  Synthetic
aagugagugaaaggaug

SEQ ID NO: 760222 - RNA, 17 nt, Artificial Sequence
  Synthetic
uauuaaggccaaggaug

SEQ ID NO: 760223 - RNA, 17 nt, Artificial Sequence
  Synthetic
agaugcuagcaaggaug

SEQ ID NO: 760224 - RNA, 17 nt, Artificial Sequence
  Synthetic
augugcuggcaaggaug

SEQ ID NO: 760225 - RNA, 17 nt, Artificial Sequence
  Synthetic
cugaaguggcaaggaug

SEQ ID NO: 760226 - RNA, 17 nt, Artificial Sequence
  Synthetic
uguauucugcaaggaug

SEQ ID NO: 760227 - RNA, 17 nt, Artificial Sequence
  Synthetic
aguuuuaaagaaggaug

SEQ ID NO: 760228 - RNA, 17 nt, Artificial Sequence
  Synthetic
caauaaagugaaggaug

SEQ ID NO: 760229 - RNA, 17 nt, Artificial Sequence
  Synthetic
aaacugaauuaaggaug

SEQ ID NO: 760230 - RNA, 17 nt, Artificial Sequence
  Synthetic
uuuauaggcacaggaug

SEQ ID NO: 760231 - RNA, 17 nt, Artificial Sequence
  Synthetic
uccacucucucaggaug

SEQ ID NO: 760232 - RNA, 17 nt, Artificial Sequence
  Synthetic
accauuuuaagaggaug

SEQ ID NO: 760233 - RNA, 17 nt, Artificial Sequence
  Synthetic
agaugcuggagaggaug

SEQ ID NO: 760234 - RNA, 17 nt, Artificial Sequence
  Synthetic
aggugcuggagaggaug

SEQ ID NO: 760235 - RNA, 17 nt, Artificial Sequence
  Synthetic
agcacuuugggaggaug

SEQ ID NO: 760236 - RNA, 17 nt, Artificial Sequence
  Synthetic
uauugugaaugaggaug

SEQ ID NO: 760237 - RNA, 17 nt, Artificial Sequence
  Synthetic
auccuggacugaggaug

SEQ ID NO: 760238 - RNA, 17 nt, Artificial Sequence
  Synthetic
uaaaagaccugaggaug

SEQ ID NO: 760239 - RNA, 17 nt, Artificial Sequence
  Synthetic
aggugcuggugaggaug

SEQ ID NO: 760240 - RNA, 17 nt, Artificial Sequence
  Synthetic
auagcauuuauaggaug

SEQ ID NO: 760241 - RNA, 17 nt, Artificial Sequence
  Synthetic
aucuguaaacuaggaug

SEQ ID NO: 760242 - RNA, 17 nt, Artificial Sequence
  Synthetic
ucagccacaguaggaug

SEQ ID NO: 760243 - RNA, 17 nt, Artificial Sequence
  Synthetic
uggcuauauguaggaug

SEQ ID NO: 760244 - RNA, 17 nt, Artificial Sequence
  Synthetic
aaaguucucuuaggaug

SEQ ID NO: 760245 - RNA, 17 nt, Artificial Sequence
  Synthetic
agcuaaacaaccggaug

SEQ ID NO: 760246 - RNA, 17 nt, Artificial Sequence
  Synthetic
ucuaggcccaagggaug

SEQ ID NO: 760247 - RNA, 17 nt, Artificial Sequence
  Synthetic
uguuucuagcagggaug

SEQ ID NO: 760248 - RNA, 17 nt, Artificial Sequence
  Synthetic
ugaacuuacgagggaug

SEQ ID NO: 760249 - RNA, 17 nt, Artificial Sequence
  Synthetic
cugguaggauagggaug

SEQ ID NO: 760250 - RNA, 17 nt, Artificial Sequence
  Synthetic
aauuuucaagggggaug

SEQ ID NO: 760251 - RNA, 17 nt, Artificial Sequence
  Synthetic
uuacuuugagggggaug

SEQ ID NO: 760252 - RNA, 17 nt, Artificial Sequence
  Synthetic
cagaaacucuggggaug

SEQ ID NO: 760253 - RNA, 17 nt, Artificial Sequence
  Synthetic
aguuucuucuggggaug

SEQ ID NO: 760254 - RNA, 17 nt, Artificial Sequence
  Synthetic
agcagggagaugggaug

SEQ ID NO: 760255 - RNA, 17 nt, Artificial Sequence
  Synthetic
uucugugugaugggaug

SEQ ID NO: 760256 - RNA, 17 nt, Artificial Sequence
  Synthetic
uaaaauaaucugggaug

SEQ ID NO: 760257 - RNA, 17 nt, Artificial Sequence
  Synthetic
ucaguagaucugggaug

SEQ ID NO: 760258 - RNA, 17 nt, Artificial Sequence
  Synthetic
ucaguuggucugggaug

SEQ ID NO: 760259 - RNA, 17 nt, Artificial Sequence
  Synthetic
ucauucaaagugggaug

SEQ ID NO: 760260 - RNA, 17 nt, Artificial Sequence
  Synthetic
cacaaccucgugggaug

SEQ ID NO: 760261 - RNA, 17 nt, Artificial Sequence
  Synthetic
aaaguuaaguugggaug

SEQ ID NO: 760262 - RNA, 17 nt, Artificial Sequence
  Synthetic
uaaggauagaauggaug

SEQ ID NO: 760263 - RNA, 17 nt, Artificial Sequence
  Synthetic
uuuguauuuaauggaug

SEQ ID NO: 760264 - RNA, 17 nt, Artificial Sequence
  Synthetic
aauuccacuuauggaug

SEQ ID NO: 760265 - RNA, 17 nt, Artificial Sequence
  Synthetic
aagucaugcacuggaug

SEQ ID NO: 760266 - RNA, 17 nt, Artificial Sequence
  Synthetic
aaaacagggccuggaug

SEQ ID NO: 760267 - RNA, 17 nt, Artificial Sequence
  Synthetic
uaagaacucucuggaug

SEQ ID NO: 760268 - RNA, 17 nt, Artificial Sequence
  Synthetic
caauuccuuucuggaug

SEQ ID NO: 760269 - RNA, 17 nt, Artificial Sequence
  Synthetic
aucuccucugguggaug

SEQ ID NO: 760270 - RNA, 17 nt, Artificial Sequence
  Synthetic
ucuuaaauauguggaug

SEQ ID NO: 760271 - RNA, 17 nt, Artificial Sequence
  Synthetic
agccaggcguguggaug

SEQ ID NO: 760272 - RNA, 17 nt, Artificial Sequence
  Synthetic
uaugugagguguggaug

SEQ ID NO: 760273 - RNA, 17 nt, Artificial Sequence
  Synthetic
cuaaguuauuguggaug

SEQ ID NO: 760274 - RNA, 17 nt, Artificial Sequence
  Synthetic
ugauguaacauuggaug

SEQ ID NO: 760275 - RNA, 17 nt, Artificial Sequence
  Synthetic
uuuuauaauauuggaug

SEQ ID NO: 760276 - RNA, 17 nt, Artificial Sequence
  Synthetic
auuucucugcuuggaug

SEQ ID NO: 760277 - RNA, 17 nt, Artificial Sequence
  Synthetic
uaaaaaauaguuggaug

SEQ ID NO: 760278 - RNA, 17 nt, Artificial Sequence
  Synthetic
uaacaauuaguuggaug

SEQ ID NO: 760279 - RNA, 17 nt, Artificial Sequence
  Synthetic
ucugauuuaguuggaug

SEQ ID NO: 760280 - RNA, 17 nt, Artificial Sequence
  Synthetic
aagaugagauuuggaug

SEQ ID NO: 760281 - RNA, 17 nt, Artificial Sequence
  Synthetic
caaagcaauuuuggaug

SEQ ID NO: 760282 - RNA, 17 nt, Artificial Sequence
  Synthetic
ucgcccacuuuuggaug

SEQ ID NO: 760283 - RNA, 17 nt, Artificial Sequence
  Synthetic
uaaaaaaaaaaaugaug

SEQ ID NO: 760284 - RNA, 17 nt, Artificial Sequence
  Synthetic
ucacugaguaaaugaug

SEQ ID NO: 760285 - RNA, 17 nt, Artificial Sequence
  Synthetic
auuuggagccaaugaug

SEQ ID NO: 760286 - RNA, 17 nt, Artificial Sequence
  Synthetic
accaauuaucaaugaug

SEQ ID NO: 760287 - RNA, 17 nt, Artificial Sequence
  Synthetic
ugauaaugggaaugaug

SEQ ID NO: 760288 - RNA, 17 nt, Artificial Sequence
  Synthetic
uaagugauugaaugaug

SEQ ID NO: 760289 - RNA, 17 nt, Artificial Sequence
  Synthetic
uuugcagagccaugaug

SEQ ID NO: 760290 - RNA, 17 nt, Artificial Sequence
  Synthetic
cagcaggugccaugaug

SEQ ID NO: 760291 - RNA, 17 nt, Artificial Sequence
  Synthetic
augaaauagagaugaug

SEQ ID NO: 760292 - RNA, 17 nt, Artificial Sequence
  Synthetic
cuacauucccgaugaug

SEQ ID NO: 760293 - RNA, 17 nt, Artificial Sequence
  Synthetic
aaguagaugggaugaug

SEQ ID NO: 760294 - RNA, 17 nt, Artificial Sequence
  Synthetic
uauagugcaugaugaug

SEQ ID NO: 760295 - RNA, 17 nt, Artificial Sequence
  Synthetic
aaugaccagugaugaug

SEQ ID NO: 760296 - RNA, 17 nt, Artificial Sequence
  Synthetic
ugaugauuuugaugaug

SEQ ID NO: 760297 - RNA, 17 nt, Artificial Sequence
  Synthetic
aguugugggauaugaug

SEQ ID NO: 760298 - RNA, 17 nt, Artificial Sequence
  Synthetic
uuuuaguuuauaugaug

SEQ ID NO: 760299 - RNA, 17 nt, Artificial Sequence
  Synthetic
accagagugguaugaug

SEQ ID NO: 760300 - RNA, 17 nt, Artificial Sequence
  Synthetic
auguuuuguguaugaug

SEQ ID NO: 760301 - RNA, 17 nt, Artificial Sequence
  Synthetic
cuugaauaauuaugaug

SEQ ID NO: 760302 - RNA, 17 nt, Artificial Sequence
  Synthetic
ugaguguucuuaugaug

SEQ ID NO: 760303 - RNA, 17 nt, Artificial Sequence
  Synthetic
augaaacuguuaugaug

SEQ ID NO: 760304 - RNA, 17 nt, Artificial Sequence
  Synthetic
aaaagaguacacugaug

SEQ ID NO: 760305 - RNA, 17 nt, Artificial Sequence
  Synthetic
augaaagcucacugaug

SEQ ID NO: 760306 - RNA, 17 nt, Artificial Sequence
  Synthetic
caccucagggacugaug

SEQ ID NO: 760307 - RNA, 17 nt, Artificial Sequence
  Synthetic
uuuaacaccaccugaug

SEQ ID NO: 760308 - RNA, 17 nt, Artificial Sequence
  Synthetic
cagcucaccuccugaug

SEQ ID NO: 760309 - RNA, 17 nt, Artificial Sequence
  Synthetic
uacuugggaggcugaug

SEQ ID NO: 760310 - RNA, 17 nt, Artificial Sequence
  Synthetic
acuuuuauaugcugaug

SEQ ID NO: 760311 - RNA, 17 nt, Artificial Sequence
  Synthetic
ccccugaaaaucugaug

SEQ ID NO: 760312 - RNA, 17 nt, Artificial Sequence
  Synthetic
acaaauggaaucugaug

SEQ ID NO: 760313 - RNA, 17 nt, Artificial Sequence
  Synthetic
cugaaccaccucugaug

SEQ ID NO: 760314 - RNA, 17 nt, Artificial Sequence
  Synthetic
uagaugacauucugaug

SEQ ID NO: 760315 - RNA, 17 nt, Artificial Sequence
  Synthetic
caucaaauguucugaug

SEQ ID NO: 760316 - RNA, 17 nt, Artificial Sequence
  Synthetic
uugcccacuuucugaug

SEQ ID NO: 760317 - RNA, 17 nt, Artificial Sequence
  Synthetic
uuuaagaaaaagugaug

SEQ ID NO: 760318 - RNA, 17 nt, Artificial Sequence
  Synthetic
uuggaaccaaagugaug

SEQ ID NO: 760319 - RNA, 17 nt, Artificial Sequence
  Synthetic
uguaccugaaagugaug

SEQ ID NO: 760320 - RNA, 17 nt, Artificial Sequence
  Synthetic
uagggugaacagugaug

SEQ ID NO: 760321 - RNA, 17 nt, Artificial Sequence
  Synthetic
cuaaaugcccagugaug

SEQ ID NO: 760322 - RNA, 17 nt, Artificial Sequence
  Synthetic
uacagaauucagugaug

SEQ ID NO: 760323 - RNA, 17 nt, Artificial Sequence
  Synthetic
aguaaacaggagugaug

SEQ ID NO: 760324 - RNA, 17 nt, Artificial Sequence
  Synthetic
ucuaaugaugagugaug

SEQ ID NO: 760325 - RNA, 17 nt, Artificial Sequence
  Synthetic
ucugauguugagugaug

SEQ ID NO: 760326 - RNA, 17 nt, Artificial Sequence
  Synthetic
ugaagacaggcgugaug

SEQ ID NO: 760327 - RNA, 17 nt, Artificial Sequence
  Synthetic
ucacugccugggugaug

SEQ ID NO: 760328 - RNA, 17 nt, Artificial Sequence
  Synthetic
aaaugccgauggugaug

SEQ ID NO: 760329 - RNA, 17 nt, Artificial Sequence
  Synthetic
aaaucaucuuggugaug

SEQ ID NO: 760330 - RNA, 17 nt, Artificial Sequence
  Synthetic
acaacaaaacugugaug

SEQ ID NO: 760331 - RNA, 17 nt, Artificial Sequence
  Synthetic
ccuuguccacugugaug

SEQ ID NO: 760332 - RNA, 17 nt, Artificial Sequence
  Synthetic
acauucugacugugaug

SEQ ID NO: 760333 - RNA, 17 nt, Artificial Sequence
  Synthetic
uguucuagucugugaug

SEQ ID NO: 760334 - RNA, 17 nt, Artificial Sequence
  Synthetic
uuauaauaagugugaug

SEQ ID NO: 760335 - RNA, 17 nt, Artificial Sequence
  Synthetic
uuccuugacuugugaug

SEQ ID NO: 760336 - RNA, 17 nt, Artificial Sequence
  Synthetic
ugaggaagaaauugaug

SEQ ID NO: 760337 - RNA, 17 nt, Artificial Sequence
  Synthetic
uugauauaggauugaug

SEQ ID NO: 760338 - RNA, 17 nt, Artificial Sequence
  Synthetic
agguguauauauugaug

SEQ ID NO: 760339 - RNA, 17 nt, Artificial Sequence
  Synthetic
auuucagcuuauugaug

SEQ ID NO: 760340 - RNA, 17 nt, Artificial Sequence
  Synthetic
auucucaucacuugaug

SEQ ID NO: 760341 - RNA, 17 nt, Artificial Sequence
  Synthetic
acuggcaggacuugaug

SEQ ID NO: 760342 - RNA, 17 nt, Artificial Sequence
  Synthetic
uuuuaaauagcuugaug

SEQ ID NO: 760343 - RNA, 17 nt, Artificial Sequence
  Synthetic
ucauugguagcuugaug

SEQ ID NO: 760344 - RNA, 17 nt, Artificial Sequence
  Synthetic
cucaugguuucuugaug

SEQ ID NO: 760345 - RNA, 17 nt, Artificial Sequence
  Synthetic
uguuuuguuucuugaug

SEQ ID NO: 760346 - RNA, 17 nt, Artificial Sequence
  Synthetic
uugcaagucgguugaug

SEQ ID NO: 760347 - RNA, 17 nt, Artificial Sequence
  Synthetic
aagggaguggguugaug

SEQ ID NO: 760348 - RNA, 17 nt, Artificial Sequence
  Synthetic
ccaccugccuguugaug

SEQ ID NO: 760349 - RNA, 17 nt, Artificial Sequence
  Synthetic
uaccagguaauuugaug

SEQ ID NO: 760350 - RNA, 17 nt, Artificial Sequence
  Synthetic
cacugaauacuuugaug

SEQ ID NO: 760351 - RNA, 17 nt, Artificial Sequence
  Synthetic
ucucacugauuuugaug

SEQ ID NO: 760352 - RNA, 17 nt, Artificial Sequence
  Synthetic
caaaauaucuuuugaug

SEQ ID NO: 760353 - RNA, 17 nt, Artificial Sequence
  Synthetic
ucacccacuuuuugaug

SEQ ID NO: 760354 - RNA, 17 nt, Artificial Sequence
  Synthetic
ucccccacuuuuugaug

SEQ ID NO: 760355 - RNA, 17 nt, Artificial Sequence
  Synthetic
ucgcccacuuuuugaug

SEQ ID NO: 760356 - RNA, 17 nt, Artificial Sequence
  Synthetic
ucgcucacuuuuugaug

SEQ ID NO: 760357 - RNA, 17 nt, Artificial Sequence
  Synthetic
aauauccaaaaaauaug

SEQ ID NO: 760358 - RNA, 17 nt, Artificial Sequence
  Synthetic
ucucagaagaaaauaug

SEQ ID NO: 760359 - RNA, 17 nt, Artificial Sequence
  Synthetic
uauuuaaugaaaauaug

SEQ ID NO: 760360 - RNA, 17 nt, Artificial Sequence
  Synthetic
cuuuuuauuaaaauaug

SEQ ID NO: 760361 - RNA, 17 nt, Artificial Sequence
  Synthetic
uacgaauuccaaauaug

SEQ ID NO: 760362 - RNA, 17 nt, Artificial Sequence
  Synthetic
uaaaauuaagaaauaug

SEQ ID NO: 760363 - RNA, 17 nt, Artificial Sequence
  Synthetic
auaggaaaggaaauaug

SEQ ID NO: 760364 - RNA, 17 nt, Artificial Sequence
  Synthetic
aucaaagaugaaauaug

SEQ ID NO: 760365 - RNA, 17 nt, Artificial Sequence
  Synthetic
ugcugauaauaaauaug

SEQ ID NO: 760366 - RNA, 17 nt, Artificial Sequence
  Synthetic
ccugucagauaaauaug

SEQ ID NO: 760367 - RNA, 17 nt, Artificial Sequence
  Synthetic
uuucuaaaguaaauaug

SEQ ID NO: 760368 - RNA, 17 nt, Artificial Sequence
  Synthetic
uauaaauauuaaauaug

SEQ ID NO: 760369 - RNA, 17 nt, Artificial Sequence
  Synthetic
cucuuuucuuaaauaug

SEQ ID NO: 760370 - RNA, 17 nt, Artificial Sequence
  Synthetic
agcaccuguacaauaug

SEQ ID NO: 760371 - RNA, 17 nt, Artificial Sequence
  Synthetic
uuagaauuuacaauaug

SEQ ID NO: 760372 - RNA, 17 nt, Artificial Sequence
  Synthetic
aguacuuacccaauaug

SEQ ID NO: 760373 - RNA, 17 nt, Artificial Sequence
  Synthetic
uucaccuacucaauaug

SEQ ID NO: 760374 - RNA, 17 nt, Artificial Sequence
  Synthetic
cuuaaauauucaauaug

SEQ ID NO: 760375 - RNA, 17 nt, Artificial Sequence
  Synthetic
auaaauaaaagaauaug

SEQ ID NO: 760376 - RNA, 17 nt, Artificial Sequence
  Synthetic
auuggauaaagaauaug

SEQ ID NO: 760377 - RNA, 17 nt, Artificial Sequence
  Synthetic
acuucuaccagaauaug

SEQ ID NO: 760378 - RNA, 17 nt, Artificial Sequence
  Synthetic
cuaugaaugagaauaug

SEQ ID NO: 760379 - RNA, 17 nt, Artificial Sequence
  Synthetic
cuaugagugagaauaug

SEQ ID NO: 760380 - RNA, 17 nt, Artificial Sequence
  Synthetic
cugugagugagaauaug

SEQ ID NO: 760381 - RNA, 17 nt, Artificial Sequence
  Synthetic
uuaugggugagaauaug

SEQ ID NO: 760382 - RNA, 17 nt, Artificial Sequence
  Synthetic
aaauuuaagggaauaug

SEQ ID NO: 760383 - RNA, 17 nt, Artificial Sequence
  Synthetic
uacucuugaugaauaug

SEQ ID NO: 760384 - RNA, 17 nt, Artificial Sequence
  Synthetic
uaaucauagugaauaug

SEQ ID NO: 760385 - RNA, 17 nt, Artificial Sequence
  Synthetic
uucccuuggugaauaug

SEQ ID NO: 760386 - RNA, 17 nt, Artificial Sequence
  Synthetic
uuugcggaaauaauaug

SEQ ID NO: 760387 - RNA, 17 nt, Artificial Sequence
  Synthetic
agguucugcauaauaug

SEQ ID NO: 760388 - RNA, 17 nt, Artificial Sequence
  Synthetic
cagaaaugacuaauaug

SEQ ID NO: 760389 - RNA, 17 nt, Artificial Sequence
  Synthetic
uuaguaguacuaauaug

SEQ ID NO: 760390 - RNA, 17 nt, Artificial Sequence
  Synthetic
ucuucaacuguaauaug

SEQ ID NO: 760391 - RNA, 17 nt, Artificial Sequence
  Synthetic
auugcacaaaacauaug

SEQ ID NO: 760392 - RNA, 17 nt, Artificial Sequence
  Synthetic
agggccagcaacauaug

SEQ ID NO: 760393 - RNA, 17 nt, Artificial Sequence
  Synthetic
uuuaucuaacacauaug

SEQ ID NO: 760394 - RNA, 17 nt, Artificial Sequence
  Synthetic
agaaauuaagacauaug

SEQ ID NO: 760395 - RNA, 17 nt, Artificial Sequence
  Synthetic
ugucaaagggacauaug

SEQ ID NO: 760396 - RNA, 17 nt, Artificial Sequence
  Synthetic
auauauauauacauaug

SEQ ID NO: 760397 - RNA, 17 nt, Artificial Sequence
  Synthetic
uuauuuuuauacauaug

SEQ ID NO: 760398 - RNA, 17 nt, Artificial Sequence
  Synthetic
ugaaaauuguacauaug

SEQ ID NO: 760399 - RNA, 17 nt, Artificial Sequence
  Synthetic
aauuuaaauuacauaug

SEQ ID NO: 760400 - RNA, 17 nt, Artificial Sequence
  Synthetic
aaggaauauuacauaug

SEQ ID NO: 760401 - RNA, 17 nt, Artificial Sequence
  Synthetic
cugagaauucccauaug

SEQ ID NO: 760402 - RNA, 17 nt, Artificial Sequence
  Synthetic
uguuguaugugcauaug

SEQ ID NO: 760403 - RNA, 17 nt, Artificial Sequence
  Synthetic
uucugcauagucauaug

SEQ ID NO: 760404 - RNA, 17 nt, Artificial Sequence
  Synthetic
cucgaguauuucauaug

SEQ ID NO: 760405 - RNA, 17 nt, Artificial Sequence
  Synthetic
uguagacuuuucauaug

SEQ ID NO: 760406 - RNA, 17 nt, Artificial Sequence
  Synthetic
ccaauccaaaagauaug

SEQ ID NO: 760407 - RNA, 17 nt, Artificial Sequence
  Synthetic
cuagcagagaagauaug

SEQ ID NO: 760408 - RNA, 17 nt, Artificial Sequence
  Synthetic
uuuuauccacagauaug

SEQ ID NO: 760409 - RNA, 17 nt, Artificial Sequence
  Synthetic
aacccuaugcagauaug

SEQ ID NO: 760410 - RNA, 17 nt, Artificial Sequence
  Synthetic
auuauaagauagauaug

SEQ ID NO: 760411 - RNA, 17 nt, Artificial Sequence
  Synthetic
uuugacaucuagauaug

SEQ ID NO: 760412 - RNA, 17 nt, Artificial Sequence
  Synthetic
ucgauaggguagauaug

SEQ ID NO: 760413 - RNA, 17 nt, Artificial Sequence
  Synthetic
agauagugguagauaug

SEQ ID NO: 760414 - RNA, 17 nt, Artificial Sequence
  Synthetic
agauaguuguagauaug

SEQ ID NO: 760415 - RNA, 17 nt, Artificial Sequence
  Synthetic
cauuaggguaggauaug

SEQ ID NO: 760416 - RNA, 17 nt, Artificial Sequence
  Synthetic
caugacaacgggauaug

SEQ ID NO: 760417 - RNA, 17 nt, Artificial Sequence
  Synthetic
agcauaacaaugauaug

SEQ ID NO: 760418 - RNA, 17 nt, Artificial Sequence
  Synthetic
aaaacccuucugauaug

SEQ ID NO: 760419 - RNA, 17 nt, Artificial Sequence
  Synthetic
uagauuaacuugauaug

SEQ ID NO: 760420 - RNA, 17 nt, Artificial Sequence
  Synthetic
ucaaguaaaaauauaug

SEQ ID NO: 760421 - RNA, 17 nt, Artificial Sequence
  Synthetic
ugccuaagaaauauaug

SEQ ID NO: 760422 - RNA, 17 nt, Artificial Sequence
  Synthetic
aucugacacaauauaug

SEQ ID NO: 760423 - RNA, 17 nt, Artificial Sequence
  Synthetic
acacacacacauauaug

SEQ ID NO: 760424 - RNA, 17 nt, Artificial Sequence
  Synthetic
aaggguguagauauaug

SEQ ID NO: 760425 - RNA, 17 nt, Artificial Sequence
  Synthetic
uccuugagugauauaug

SEQ ID NO: 760426 - RNA, 17 nt, Artificial Sequence
  Synthetic
ugcucauaauauauaug

SEQ ID NO: 760427 - RNA, 17 nt, Artificial Sequence
  Synthetic
auucauagauauauaug

SEQ ID NO: 760428 - RNA, 17 nt, Artificial Sequence
  Synthetic
guacauauauauauaug

SEQ ID NO: 760429 - RNA, 17 nt, Artificial Sequence
  Synthetic
ugggguauauauauaug

SEQ ID NO: 760430 - RNA, 17 nt, Artificial Sequence
  Synthetic
uacauaguguauauaug

SEQ ID NO: 760431 - RNA, 17 nt, Artificial Sequence
  Synthetic
auauauguguauauaug

SEQ ID NO: 760432 - RNA, 17 nt, Artificial Sequence
  Synthetic
ucucuugcuuauauaug

SEQ ID NO: 760433 - RNA, 17 nt, Artificial Sequence
  Synthetic
augacaccaacuauaug

SEQ ID NO: 760434 - RNA, 17 nt, Artificial Sequence
  Synthetic
uuaguucaugcuauaug

SEQ ID NO: 760435 - RNA, 17 nt, Artificial Sequence
  Synthetic
ccuucuuauucuauaug

SEQ ID NO: 760436 - RNA, 17 nt, Artificial Sequence
  Synthetic
uuuagauuuucuauaug

SEQ ID NO: 760437 - RNA, 17 nt, Artificial Sequence
  Synthetic
uuguucuucaguauaug

SEQ ID NO: 760438 - RNA, 17 nt, Artificial Sequence
  Synthetic
auguuguugaguauaug

SEQ ID NO: 760439 - RNA, 17 nt, Artificial Sequence
  Synthetic
acaguuguauguauaug

SEQ ID NO: 760440 - RNA, 17 nt, Artificial Sequence
  Synthetic
uaaucauauuguauaug

SEQ ID NO: 760441 - RNA, 17 nt, Artificial Sequence
  Synthetic
cucauaagaauuauaug

SEQ ID NO: 760442 - RNA, 17 nt, Artificial Sequence
  Synthetic
uuguaacuaauuauaug

SEQ ID NO: 760443 - RNA, 17 nt, Artificial Sequence
  Synthetic
aauguuuuaauuauaug

SEQ ID NO: 760444 - RNA, 17 nt, Artificial Sequence
  Synthetic
uacuccucuauuauaug

SEQ ID NO: 760445 - RNA, 17 nt, Artificial Sequence
  Synthetic
ucuacuauuauuauaug

SEQ ID NO: 760446 - RNA, 17 nt, Artificial Sequence
  Synthetic
uuuguauauguuauaug

SEQ ID NO: 760447 - RNA, 17 nt, Artificial Sequence
  Synthetic
ugauacaguguuauaug

SEQ ID NO: 760448 - RNA, 17 nt, Artificial Sequence
  Synthetic
augauuccauuuauaug

SEQ ID NO: 760449 - RNA, 17 nt, Artificial Sequence
  Synthetic
agaaguugaaaacuaug

SEQ ID NO: 760450 - RNA, 17 nt, Artificial Sequence
  Synthetic
aggaggcaccaacuaug

SEQ ID NO: 760451 - RNA, 17 nt, Artificial Sequence
  Synthetic
ccuggcuuucaacuaug

SEQ ID NO: 760452 - RNA, 17 nt, Artificial Sequence
  Synthetic
aauauuuaaacacuaug

SEQ ID NO: 760453 - RNA, 17 nt, Artificial Sequence
  Synthetic
ucauuacuaacacuaug

SEQ ID NO: 760454 - RNA, 17 nt, Artificial Sequence
  Synthetic
aaagggcauacacuaug

SEQ ID NO: 760455 - RNA, 17 nt, Artificial Sequence
  Synthetic
aaugaaucuacacuaug

SEQ ID NO: 760456 - RNA, 17 nt, Artificial Sequence
  Synthetic
acuguaaguacacuaug

SEQ ID NO: 760457 - RNA, 17 nt, Artificial Sequence
  Synthetic
agcauggugugacuaug

SEQ ID NO: 760458 - RNA, 17 nt, Artificial Sequence
  Synthetic
caccauggaauacuaug

SEQ ID NO: 760459 - RNA, 17 nt, Artificial Sequence
  Synthetic
uacuauuuaauacuaug

SEQ ID NO: 760460 - RNA, 17 nt, Artificial Sequence
  Synthetic
uaucccuuacuacuaug

SEQ ID NO: 760461 - RNA, 17 nt, Artificial Sequence
  Synthetic
agaaggaauuuacuaug

SEQ ID NO: 760462 - RNA, 17 nt, Artificial Sequence
  Synthetic
auaaagaugaaccuaug

SEQ ID NO: 760463 - RNA, 17 nt, Artificial Sequence
  Synthetic
acuaguuugaaccuaug

SEQ ID NO: 760464 - RNA, 17 nt, Artificial Sequence
  Synthetic
cuucauuucuaccuaug

SEQ ID NO: 760465 - RNA, 17 nt, Artificial Sequence
  Synthetic
acaagucuguaccuaug

SEQ ID NO: 760466 - RNA, 17 nt, Artificial Sequence
  Synthetic
accugccaaacccuaug

SEQ ID NO: 760467 - RNA, 17 nt, Artificial Sequence
  Synthetic
uuagaguaaacccuaug

SEQ ID NO: 760468 - RNA, 17 nt, Artificial Sequence
  Synthetic
cuaauaacaacccuaug

SEQ ID NO: 760469 - RNA, 17 nt, Artificial Sequence
  Synthetic
uguguauguggccuaug

SEQ ID NO: 760470 - RNA, 17 nt, Artificial Sequence
  Synthetic
ccucaugaaugccuaug

SEQ ID NO: 760471 - RNA, 17 nt, Artificial Sequence
  Synthetic
uacccaacaauccuaug

SEQ ID NO: 760472 - RNA, 17 nt, Artificial Sequence
  Synthetic
acuacccuaauccuaug

SEQ ID NO: 760473 - RNA, 17 nt, Artificial Sequence
  Synthetic
acacaggccauccuaug

SEQ ID NO: 760474 - RNA, 17 nt, Artificial Sequence
  Synthetic
ucuacuaucaagcuaug

SEQ ID NO: 760475 - RNA, 17 nt, Artificial Sequence
  Synthetic
auaagauucaagcuaug

SEQ ID NO: 760476 - RNA, 17 nt, Artificial Sequence
  Synthetic
ucuccccuuuagcuaug

SEQ ID NO: 760477 - RNA, 17 nt, Artificial Sequence
  Synthetic
aauuaucuuuagcuaug

SEQ ID NO: 760478 - RNA, 17 nt, Artificial Sequence
  Synthetic
augcaaaggacgcuaug

SEQ ID NO: 760479 - RNA, 17 nt, Artificial Sequence
  Synthetic
ucaaaggagaggcuaug

SEQ ID NO: 760480 - RNA, 17 nt, Artificial Sequence
  Synthetic
augucucuaaugcuaug

SEQ ID NO: 760481 - RNA, 17 nt, Artificial Sequence
  Synthetic
cucucagggaugcuaug

SEQ ID NO: 760482 - RNA, 17 nt, Artificial Sequence
  Synthetic
aaagaagaaaaucuaug

SEQ ID NO: 760483 - RNA, 17 nt, Artificial Sequence
  Synthetic
agauuuuuaaaucuaug

SEQ ID NO: 760484 - RNA, 17 nt, Artificial Sequence
  Synthetic
ucuuaccacaaucuaug

SEQ ID NO: 760485 - RNA, 17 nt, Artificial Sequence
  Synthetic
aauauccagaaucuaug

SEQ ID NO: 760486 - RNA, 17 nt, Artificial Sequence
  Synthetic
ccacuuacagaucuaug

SEQ ID NO: 760487 - RNA, 17 nt, Artificial Sequence
  Synthetic
cacagagaggaucuaug

SEQ ID NO: 760488 - RNA, 17 nt, Artificial Sequence
  Synthetic
cacauagucacucuaug

SEQ ID NO: 760489 - RNA, 17 nt, Artificial Sequence
  Synthetic
ccaguggggacucuaug

SEQ ID NO: 760490 - RNA, 17 nt, Artificial Sequence
  Synthetic
cugggcagaccucuaug

SEQ ID NO: 760491 - RNA, 17 nt, Artificial Sequence
  Synthetic
acuucucccccucuaug

SEQ ID NO: 760492 - RNA, 17 nt, Artificial Sequence
  Synthetic
cauaaacucugucuaug

SEQ ID NO: 760493 - RNA, 17 nt, Artificial Sequence
  Synthetic
cucccuuuaauucuaug

SEQ ID NO: 760494 - RNA, 17 nt, Artificial Sequence
  Synthetic
aagggacauauucuaug

SEQ ID NO: 760495 - RNA, 17 nt, Artificial Sequence
  Synthetic
cuaaauuauauucuaug

SEQ ID NO: 760496 - RNA, 17 nt, Artificial Sequence
  Synthetic
auuuuacuucuucuaug

SEQ ID NO: 760497 - RNA, 17 nt, Artificial Sequence
  Synthetic
auuauauuaguucuaug

SEQ ID NO: 760498 - RNA, 17 nt, Artificial Sequence
  Synthetic
uauaucagaaaaguaug

SEQ ID NO: 760499 - RNA, 17 nt, Artificial Sequence
  Synthetic
cuuuacuuccaaguaug

SEQ ID NO: 760500 - RNA, 17 nt, Artificial Sequence
  Synthetic
uuauucagagaaguaug

SEQ ID NO: 760501 - RNA, 17 nt, Artificial Sequence
  Synthetic
caauucaacuaaguaug

SEQ ID NO: 760502 - RNA, 17 nt, Artificial Sequence
  Synthetic
aaggauaaguaaguaug

SEQ ID NO: 760503 - RNA, 17 nt, Artificial Sequence
  Synthetic
aucaggagaacaguaug

SEQ ID NO: 760504 - RNA, 17 nt, Artificial Sequence
  Synthetic
accaugagaacaguaug

SEQ ID NO: 760505 - RNA, 17 nt, Artificial Sequence
  Synthetic
acuuguuagacaguaug

SEQ ID NO: 760506 - RNA, 17 nt, Artificial Sequence
  Synthetic
uccuggccgagaguaug

SEQ ID NO: 760507 - RNA, 17 nt, Artificial Sequence
  Synthetic
uuugauuugagaguaug

SEQ ID NO: 760508 - RNA, 17 nt, Artificial Sequence
  Synthetic
aagagagagggaguaug

SEQ ID NO: 760509 - RNA, 17 nt, Artificial Sequence
  Synthetic
uuucaaacaugaguaug

SEQ ID NO: 760510 - RNA, 17 nt, Artificial Sequence
  Synthetic
caaagaauguuaguaug

SEQ ID NO: 760511 - RNA, 17 nt, Artificial Sequence
  Synthetic
aaaagugaguagguaug

SEQ ID NO: 760512 - RNA, 17 nt, Artificial Sequence
  Synthetic
agauggcuguagguaug

SEQ ID NO: 760513 - RNA, 17 nt, Artificial Sequence
  Synthetic
agauaguuguagguaug

SEQ ID NO: 760514 - RNA, 17 nt, Artificial Sequence
  Synthetic
uaagagacuuagguaug

SEQ ID NO: 760515 - RNA, 17 nt, Artificial Sequence
  Synthetic
agcugugugacgguaug

SEQ ID NO: 760516 - RNA, 17 nt, Artificial Sequence
  Synthetic
cugaugaaugggguaug

SEQ ID NO: 760517 - RNA, 17 nt, Artificial Sequence
  Synthetic
auggagugguggguaug

SEQ ID NO: 760518 - RNA, 17 nt, Artificial Sequence
  Synthetic
uaguauugcaugguaug

SEQ ID NO: 760519 - RNA, 17 nt, Artificial Sequence
  Synthetic
cagaccaggaugguaug

SEQ ID NO: 760520 - RNA, 17 nt, Artificial Sequence
  Synthetic
ccacuuaauaugguaug

SEQ ID NO: 760521 - RNA, 17 nt, Artificial Sequence
  Synthetic
uuucuuuuacugguaug

SEQ ID NO: 760522 - RNA, 17 nt, Artificial Sequence
  Synthetic
aaucaguaccugguaug

SEQ ID NO: 760523 - RNA, 17 nt, Artificial Sequence
  Synthetic
ccagagauucugguaug

SEQ ID NO: 760524 - RNA, 17 nt, Artificial Sequence
  Synthetic
acuucucauuugguaug

SEQ ID NO: 760525 - RNA, 17 nt, Artificial Sequence
  Synthetic
ccauagguuuugguaug

SEQ ID NO: 760526 - RNA, 17 nt, Artificial Sequence
  Synthetic
uaaggaaaaaauguaug

SEQ ID NO: 760527 - RNA, 17 nt, Artificial Sequence
  Synthetic
agggaaagaaauguaug

SEQ ID NO: 760528 - RNA, 17 nt, Artificial Sequence
  Synthetic
ucuuuuguuaauguaug

SEQ ID NO: 760529 - RNA, 17 nt, Artificial Sequence
  Synthetic
cuggacaugcauguaug

SEQ ID NO: 760530 - RNA, 17 nt, Artificial Sequence
  Synthetic
aauuuuugugauguaug

SEQ ID NO: 760531 - RNA, 17 nt, Artificial Sequence
  Synthetic
augguuuuauauguaug

SEQ ID NO: 760532 - RNA, 17 nt, Artificial Sequence
  Synthetic
cagagcucuccuguaug

SEQ ID NO: 760533 - RNA, 17 nt, Artificial Sequence
  Synthetic
cugcuuguagcuguaug

SEQ ID NO: 760534 - RNA, 17 nt, Artificial Sequence
  Synthetic
uacaugagaaguguaug

SEQ ID NO: 760535 - RNA, 17 nt, Artificial Sequence
  Synthetic
uuuacaucuaguguaug

SEQ ID NO: 760536 - RNA, 17 nt, Artificial Sequence
  Synthetic
cugcuguuugguguaug

SEQ ID NO: 760537 - RNA, 17 nt, Artificial Sequence
  Synthetic
aauguuugcauuguaug

SEQ ID NO: 760538 - RNA, 17 nt, Artificial Sequence
  Synthetic
aaguaguagcuuguaug

SEQ ID NO: 760539 - RNA, 17 nt, Artificial Sequence
  Synthetic
ucucccuggcuuguaug

SEQ ID NO: 760540 - RNA, 17 nt, Artificial Sequence
  Synthetic
uaauuaaaauuuguaug

SEQ ID NO: 760541 - RNA, 17 nt, Artificial Sequence
  Synthetic
cuggggacauuuguaug

SEQ ID NO: 760542 - RNA, 17 nt, Artificial Sequence
  Synthetic
agaaggugcuuuguaug

SEQ ID NO: 760543 - RNA, 17 nt, Artificial Sequence
  Synthetic
uuaaaggcguuuguaug

SEQ ID NO: 760544 - RNA, 17 nt, Artificial Sequence
  Synthetic
cuguguguguuuguaug

SEQ ID NO: 760545 - RNA, 17 nt, Artificial Sequence
  Synthetic
auagcaaauaaauuaug

SEQ ID NO: 760546 - RNA, 17 nt, Artificial Sequence
  Synthetic
uugcugaauaaauuaug

SEQ ID NO: 760547 - RNA, 17 nt, Artificial Sequence
  Synthetic
cacauuuauaaauuaug

SEQ ID NO: 760548 - RNA, 17 nt, Artificial Sequence
  Synthetic
acuggggcuaaauuaug

SEQ ID NO: 760549 - RNA, 17 nt, Artificial Sequence
  Synthetic
uuuuacuuccaauuaug

SEQ ID NO: 760550 - RNA, 17 nt, Artificial Sequence
  Synthetic
uacaauucagaauuaug

SEQ ID NO: 760551 - RNA, 17 nt, Artificial Sequence
  Synthetic
augauuugagaauuaug

SEQ ID NO: 760552 - RNA, 17 nt, Artificial Sequence
  Synthetic
uggggcuaggaauuaug

SEQ ID NO: 760553 - RNA, 17 nt, Artificial Sequence
  Synthetic
auucuugaauaauuaug

SEQ ID NO: 760554 - RNA, 17 nt, Artificial Sequence
  Synthetic
cuuggaaaguaauuaug

SEQ ID NO: 760555 - RNA, 17 nt, Artificial Sequence
  Synthetic
cacauugagacauuaug

SEQ ID NO: 760556 - RNA, 17 nt, Artificial Sequence
  Synthetic
ucuuacuugacauuaug

SEQ ID NO: 760557 - RNA, 17 nt, Artificial Sequence
  Synthetic
caucuuacaccauuaug

SEQ ID NO: 760558 - RNA, 17 nt, Artificial Sequence
  Synthetic
aagcauaacccauuaug

SEQ ID NO: 760559 - RNA, 17 nt, Artificial Sequence
  Synthetic
agugagcuuucauuaug

SEQ ID NO: 760560 - RNA, 17 nt, Artificial Sequence
  Synthetic
uucagugcaagauuaug

SEQ ID NO: 760561 - RNA, 17 nt, Artificial Sequence
  Synthetic
cuaaagcacagauuaug

SEQ ID NO: 760562 - RNA, 17 nt, Artificial Sequence
  Synthetic
aucugauguagauuaug

SEQ ID NO: 760563 - RNA, 17 nt, Artificial Sequence
  Synthetic
uaugaauuaggauuaug

SEQ ID NO: 760564 - RNA, 17 nt, Artificial Sequence
  Synthetic
aaaaaauagggauuaug

SEQ ID NO: 760565 - RNA, 17 nt, Artificial Sequence
  Synthetic
aaagugcugggauuaug

SEQ ID NO: 760566 - RNA, 17 nt, Artificial Sequence
  Synthetic
auuucaaugugauuaug

SEQ ID NO: 760567 - RNA, 17 nt, Artificial Sequence
  Synthetic
ugguuaccuugauuaug

SEQ ID NO: 760568 - RNA, 17 nt, Artificial Sequence
  Synthetic
uuacagcuaauauuaug

SEQ ID NO: 760569 - RNA, 17 nt, Artificial Sequence
  Synthetic
ucgacaacuauauuaug

SEQ ID NO: 760570 - RNA, 17 nt, Artificial Sequence
  Synthetic
aaaauccaccuauuaug

SEQ ID NO: 760571 - RNA, 17 nt, Artificial Sequence
  Synthetic
ugcccaaaaguauuaug

SEQ ID NO: 760572 - RNA, 17 nt, Artificial Sequence
  Synthetic
auuuucaaauuauuaug

SEQ ID NO: 760573 - RNA, 17 nt, Artificial Sequence
  Synthetic
uucccuagauuauuaug

SEQ ID NO: 760574 - RNA, 17 nt, Artificial Sequence
  Synthetic
auuaaauauuuauuaug

SEQ ID NO: 760575 - RNA, 17 nt, Artificial Sequence
  Synthetic
auguugguuuuauuaug

SEQ ID NO: 760576 - RNA, 17 nt, Artificial Sequence
  Synthetic
aggauuuuccacuuaug

SEQ ID NO: 760577 - RNA, 17 nt, Artificial Sequence
  Synthetic
agccaaacucacuuaug

SEQ ID NO: 760578 - RNA, 17 nt, Artificial Sequence
  Synthetic
ucucaaguggacuuaug

SEQ ID NO: 760579 - RNA, 17 nt, Artificial Sequence
  Synthetic
auaaauuccuacuuaug

SEQ ID NO: 760580 - RNA, 17 nt, Artificial Sequence
  Synthetic
aguauccaaugcuuaug

SEQ ID NO: 760581 - RNA, 17 nt, Artificial Sequence
  Synthetic
accaucuaaugcuuaug

SEQ ID NO: 760582 - RNA, 17 nt, Artificial Sequence
  Synthetic
uuuucgcucugcuuaug

SEQ ID NO: 760583 - RNA, 17 nt, Artificial Sequence
  Synthetic
cacaacuguaucuuaug

SEQ ID NO: 760584 - RNA, 17 nt, Artificial Sequence
  Synthetic
cucauauaauucuuaug

SEQ ID NO: 760585 - RNA, 17 nt, Artificial Sequence
  Synthetic
uuuuucagauucuuaug

SEQ ID NO: 760586 - RNA, 17 nt, Artificial Sequence
  Synthetic
cuguucccuuucuuaug

SEQ ID NO: 760587 - RNA, 17 nt, Artificial Sequence
  Synthetic
uuacuuguaaaguuaug

SEQ ID NO: 760588 - RNA, 17 nt, Artificial Sequence
  Synthetic
augaaucuuaaguuaug

SEQ ID NO: 760589 - RNA, 17 nt, Artificial Sequence
  Synthetic
acauauaaagaguuaug

SEQ ID NO: 760590 - RNA, 17 nt, Artificial Sequence
  Synthetic
cccauuuaugaguuaug

SEQ ID NO: 760591 - RNA, 17 nt, Artificial Sequence
  Synthetic
aacuuagagagguuaug

SEQ ID NO: 760592 - RNA, 17 nt, Artificial Sequence
  Synthetic
acaaccagaugguuaug

SEQ ID NO: 760593 - RNA, 17 nt, Artificial Sequence
  Synthetic
auaaccagcauguuaug

SEQ ID NO: 760594 - RNA, 17 nt, Artificial Sequence
  Synthetic
aguggauaacuguuaug

SEQ ID NO: 760595 - RNA, 17 nt, Artificial Sequence
  Synthetic
uuuagaagaguguuaug

SEQ ID NO: 760596 - RNA, 17 nt, Artificial Sequence
  Synthetic
auagaguuguuguuaug

SEQ ID NO: 760597 - RNA, 17 nt, Artificial Sequence
  Synthetic
cucuuaaaaaauuuaug

SEQ ID NO: 760598 - RNA, 17 nt, Artificial Sequence
  Synthetic
auuuauauaaauuuaug

SEQ ID NO: 760599 - RNA, 17 nt, Artificial Sequence
  Synthetic
auuuuguguaauuuaug

SEQ ID NO: 760600 - RNA, 17 nt, Artificial Sequence
  Synthetic
uuuccucaacauuuaug

SEQ ID NO: 760601 - RNA, 17 nt, Artificial Sequence
  Synthetic
aaaagaagacauuuaug

SEQ ID NO: 760602 - RNA, 17 nt, Artificial Sequence
  Synthetic
aaaguaagacauuuaug

SEQ ID NO: 760603 - RNA, 17 nt, Artificial Sequence
  Synthetic
aauuauauacauuuaug

SEQ ID NO: 760604 - RNA, 17 nt, Artificial Sequence
  Synthetic
uuucuguuucauuuaug

SEQ ID NO: 760605 - RNA, 17 nt, Artificial Sequence
  Synthetic
aaguacauauauuuaug

SEQ ID NO: 760606 - RNA, 17 nt, Artificial Sequence
  Synthetic
auaaaauuauauuuaug

SEQ ID NO: 760607 - RNA, 17 nt, Artificial Sequence
  Synthetic
ucaggaaucuauuuaug

SEQ ID NO: 760608 - RNA, 17 nt, Artificial Sequence
  Synthetic
uugaagaaguauuuaug

SEQ ID NO: 760609 - RNA, 17 nt, Artificial Sequence
  Synthetic
uauuaacaguauuuaug

SEQ ID NO: 760610 - RNA, 17 nt, Artificial Sequence
  Synthetic
aacuauauguauuuaug

SEQ ID NO: 760611 - RNA, 17 nt, Artificial Sequence
  Synthetic
agguguauguauuuaug

SEQ ID NO: 760612 - RNA, 17 nt, Artificial Sequence
  Synthetic
aaacagaaaacuuuaug

SEQ ID NO: 760613 - RNA, 17 nt, Artificial Sequence
  Synthetic
uggucagugccuuuaug

SEQ ID NO: 760614 - RNA, 17 nt, Artificial Sequence
  Synthetic
agaauauaagcuuuaug

SEQ ID NO: 760615 - RNA, 17 nt, Artificial Sequence
  Synthetic
agcaguucugcuuuaug

SEQ ID NO: 760616 - RNA, 17 nt, Artificial Sequence
  Synthetic
uaugggugaucuuuaug

SEQ ID NO: 760617 - RNA, 17 nt, Artificial Sequence
  Synthetic
cucuuguuaucuuuaug

SEQ ID NO: 760618 - RNA, 17 nt, Artificial Sequence
  Synthetic
agggggaggucuuuaug

SEQ ID NO: 760619 - RNA, 17 nt, Artificial Sequence
  Synthetic
agaauaaaucguuuaug

SEQ ID NO: 760620 - RNA, 17 nt, Artificial Sequence
  Synthetic
ugaaaccaugguuuaug

SEQ ID NO: 760621 - RNA, 17 nt, Artificial Sequence
  Synthetic
ucaauuuucuguuuaug

SEQ ID NO: 760622 - RNA, 17 nt, Artificial Sequence
  Synthetic
uucuggguguguuuaug

SEQ ID NO: 760623 - RNA, 17 nt, Artificial Sequence
  Synthetic
cauuuguuaauuuuaug

SEQ ID NO: 760624 - RNA, 17 nt, Artificial Sequence
  Synthetic
cccuaacucauuuuaug

SEQ ID NO: 760625 - RNA, 17 nt, Artificial Sequence
  Synthetic
uuuacguauauuuuaug

SEQ ID NO: 760626 - RNA, 17 nt, Artificial Sequence
  Synthetic
cuguucuuccuuuuaug

SEQ ID NO: 760627 - RNA, 17 nt, Artificial Sequence
  Synthetic
uuauuauuucuuuuaug

SEQ ID NO: 760628 - RNA, 17 nt, Artificial Sequence
  Synthetic
caaauguuucuuuuaug

SEQ ID NO: 760629 - RNA, 17 nt, Artificial Sequence
  Synthetic
agaauguaaguuuuaug

SEQ ID NO: 760630 - RNA, 17 nt, Artificial Sequence
  Synthetic
agucauccuguuuuaug

SEQ ID NO: 760631 - RNA, 17 nt, Artificial Sequence
  Synthetic
cauaauuuuguuuuaug

SEQ ID NO: 760632 - RNA, 17 nt, Artificial Sequence
  Synthetic
cucaagugauuuuuaug

SEQ ID NO: 760633 - RNA, 17 nt, Artificial Sequence
  Synthetic
ugcugaugcuuuuuaug

SEQ ID NO: 760634 - RNA, 17 nt, Artificial Sequence
  Synthetic
cccuaacucuuuuuaug

SEQ ID NO: 760635 - RNA, 17 nt, Artificial Sequence
  Synthetic
cuuguucucuuuuuaug

SEQ ID NO: 760636 - RNA, 17 nt, Artificial Sequence
  Synthetic
cuugcagaaaaaaacug

SEQ ID NO: 760637 - RNA, 17 nt, Artificial Sequence
  Synthetic
aaacaaaaacaaaacug

SEQ ID NO: 760638 - RNA, 17 nt, Artificial Sequence
  Synthetic
ccaagcagacaaaacug

SEQ ID NO: 760639 - RNA, 17 nt, Artificial Sequence
  Synthetic
uggggaaagcaaaacug

SEQ ID NO: 760640 - RNA, 17 nt, Artificial Sequence
  Synthetic
uuacagaugcaaaacug

SEQ ID NO: 760641 - RNA, 17 nt, Artificial Sequence
  Synthetic
uuggcuaugcaaaacug

SEQ ID NO: 760642 - RNA, 17 nt, Artificial Sequence
  Synthetic
uagggccaagaaaacug

SEQ ID NO: 760643 - RNA, 17 nt, Artificial Sequence
  Synthetic
auccaaauagaaaacug

SEQ ID NO: 760644 - RNA, 17 nt, Artificial Sequence
  Synthetic
cacauuggauaaaacug

SEQ ID NO: 760645 - RNA, 17 nt, Artificial Sequence
  Synthetic
auagaaaauuaaaacug

SEQ ID NO: 760646 - RNA, 17 nt, Artificial Sequence
  Synthetic
auugucucuuaaaacug

SEQ ID NO: 760647 - RNA, 17 nt, Artificial Sequence
  Synthetic
cauuacaguuaaaacug

SEQ ID NO: 760648 - RNA, 17 nt, Artificial Sequence
  Synthetic
acaauggaaacaaacug

SEQ ID NO: 760649 - RNA, 17 nt, Artificial Sequence
  Synthetic
uuacacagcacaaacug

SEQ ID NO: 760650 - RNA, 17 nt, Artificial Sequence
  Synthetic
cagcugaagacaaacug

SEQ ID NO: 760651 - RNA, 17 nt, Artificial Sequence
  Synthetic
cugauaccuccaaacug

SEQ ID NO: 760652 - RNA, 17 nt, Artificial Sequence
  Synthetic
acaggugcugcaaacug

SEQ ID NO: 760653 - RNA, 17 nt, Artificial Sequence
  Synthetic
cagcaagaaucaaacug

SEQ ID NO: 760654 - RNA, 17 nt, Artificial Sequence
  Synthetic
cagugcuuuucaaacug

SEQ ID NO: 760655 - RNA, 17 nt, Artificial Sequence
  Synthetic
cggauacaaagaaacug

SEQ ID NO: 760656 - RNA, 17 nt, Artificial Sequence
  Synthetic
aguagauaaagaaacug

SEQ ID NO: 760657 - RNA, 17 nt, Artificial Sequence
  Synthetic
ccaagauggagaaacug

SEQ ID NO: 760658 - RNA, 17 nt, Artificial Sequence
  Synthetic
uuaagacgaggaaacug

SEQ ID NO: 760659 - RNA, 17 nt, Artificial Sequence
  Synthetic
agcaaaggaggaaacug

SEQ ID NO: 760660 - RNA, 17 nt, Artificial Sequence
  Synthetic
acuuuaugaggaaacug

SEQ ID NO: 760661 - RNA, 17 nt, Artificial Sequence
  Synthetic
aagucauauggaaacug

SEQ ID NO: 760662 - RNA, 17 nt, Artificial Sequence
  Synthetic
augggucacugaaacug

SEQ ID NO: 760663 - RNA, 17 nt, Artificial Sequence
  Synthetic
uuugcccucugaaacug

SEQ ID NO: 760664 - RNA, 17 nt, Artificial Sequence
  Synthetic
cagccaucaauaaacug

SEQ ID NO: 760665 - RNA, 17 nt, Artificial Sequence
  Synthetic
augaagggcauaaacug

SEQ ID NO: 760666 - RNA, 17 nt, Artificial Sequence
  Synthetic
aaaagcaagauaaacug

SEQ ID NO: 760667 - RNA, 17 nt, Artificial Sequence
  Synthetic
uucucuuuccuaaacug

SEQ ID NO: 760668 - RNA, 17 nt, Artificial Sequence
  Synthetic
uauggagaucuaaacug

SEQ ID NO: 760669 - RNA, 17 nt, Artificial Sequence
  Synthetic
ccuccaaaaguaaacug

SEQ ID NO: 760670 - RNA, 17 nt, Artificial Sequence
  Synthetic
auaaucuaguuaaacug

SEQ ID NO: 760671 - RNA, 17 nt, Artificial Sequence
  Synthetic
uguuacauaaacaacug

SEQ ID NO: 760672 - RNA, 17 nt, Artificial Sequence
  Synthetic
acagugaugaacaacug

SEQ ID NO: 760673 - RNA, 17 nt, Artificial Sequence
  Synthetic
aaguaauaauacaacug

SEQ ID NO: 760674 - RNA, 17 nt, Artificial Sequence
  Synthetic
uguaacuaauacaacug

SEQ ID NO: 760675 - RNA, 17 nt, Artificial Sequence
  Synthetic
augaguucuuccaacug

SEQ ID NO: 760676 - RNA, 17 nt, Artificial Sequence
  Synthetic
caugucuucagcaacug

SEQ ID NO: 760677 - RNA, 17 nt, Artificial Sequence
  Synthetic
ucagagauuagcaacug

SEQ ID NO: 760678 - RNA, 17 nt, Artificial Sequence
  Synthetic
cagaagagaggcaacug

SEQ ID NO: 760679 - RNA, 17 nt, Artificial Sequence
  Synthetic
agaguacuaugcaacug

SEQ ID NO: 760680 - RNA, 17 nt, Artificial Sequence
  Synthetic
aacacauucugcaacug

SEQ ID NO: 760681 - RNA, 17 nt, Artificial Sequence
  Synthetic
cacauaagaaucaacug

SEQ ID NO: 760682 - RNA, 17 nt, Artificial Sequence
  Synthetic
uguuacagcaucaacug

SEQ ID NO: 760683 - RNA, 17 nt, Artificial Sequence
  Synthetic
ugaaauuagaucaacug

SEQ ID NO: 760684 - RNA, 17 nt, Artificial Sequence
  Synthetic
uucaguuuccucaacug

SEQ ID NO: 760685 - RNA, 17 nt, Artificial Sequence
  Synthetic
uagaagucaaagaacug

SEQ ID NO: 760686 - RNA, 17 nt, Artificial Sequence
  Synthetic
cuguaaucccagaacug

SEQ ID NO: 760687 - RNA, 17 nt, Artificial Sequence
  Synthetic
auccaucuccagaacug

SEQ ID NO: 760688 - RNA, 17 nt, Artificial Sequence
  Synthetic
cgagggacagagaacug

SEQ ID NO: 760689 - RNA, 17 nt, Artificial Sequence
  Synthetic
agcaauuccuagaacug

SEQ ID NO: 760690 - RNA, 17 nt, Artificial Sequence
  Synthetic
uauuuuaauuagaacug

SEQ ID NO: 760691 - RNA, 17 nt, Artificial Sequence
  Synthetic
aggggaagaaggaacug

SEQ ID NO: 760692 - RNA, 17 nt, Artificial Sequence
  Synthetic
agacauauaaggaacug

SEQ ID NO: 760693 - RNA, 17 nt, Artificial Sequence
  Synthetic
uaaauugccaggaacug

SEQ ID NO: 760694 - RNA, 17 nt, Artificial Sequence
  Synthetic
acuaaucuggggaacug

SEQ ID NO: 760695 - RNA, 17 nt, Artificial Sequence
  Synthetic
aaugaccuguggaacug

SEQ ID NO: 760696 - RNA, 17 nt, Artificial Sequence
  Synthetic
aaggcagacaugaacug

SEQ ID NO: 760697 - RNA, 17 nt, Artificial Sequence
  Synthetic
acacuacuuaauaacug

SEQ ID NO: 760698 - RNA, 17 nt, Artificial Sequence
  Synthetic
ucacuaacucauaacug

SEQ ID NO: 760699 - RNA, 17 nt, Artificial Sequence
  Synthetic
aaaagaauucauaacug

SEQ ID NO: 760700 - RNA, 17 nt, Artificial Sequence
  Synthetic
ugauaaacagauaacug

SEQ ID NO: 760701 - RNA, 17 nt, Artificial Sequence
  Synthetic
cucaaaagguauaacug

SEQ ID NO: 760702 - RNA, 17 nt, Artificial Sequence
  Synthetic
uaaagaacuuauaacug

SEQ ID NO: 760703 - RNA, 17 nt, Artificial Sequence
  Synthetic
acggacaugacuaacug

SEQ ID NO: 760704 - RNA, 17 nt, Artificial Sequence
  Synthetic
uucagaaaaaguaacug

SEQ ID NO: 760705 - RNA, 17 nt, Artificial Sequence
  Synthetic
ugguuaauauguaacug

SEQ ID NO: 760706 - RNA, 17 nt, Artificial Sequence
  Synthetic
uagccuguauguaacug

SEQ ID NO: 760707 - RNA, 17 nt, Artificial Sequence
  Synthetic
ccagaauaaauuaacug

SEQ ID NO: 760708 - RNA, 17 nt, Artificial Sequence
  Synthetic
cacacucauauuaacug

SEQ ID NO: 760709 - RNA, 17 nt, Artificial Sequence
  Synthetic
cuugucuuuuuuaacug

SEQ ID NO: 760710 - RNA, 17 nt, Artificial Sequence
  Synthetic
ccagagugaaaacacug

SEQ ID NO: 760711 - RNA, 17 nt, Artificial Sequence
  Synthetic
uaguaaucccaacacug

SEQ ID NO: 760712 - RNA, 17 nt, Artificial Sequence
  Synthetic
auuuucuuucaacacug

SEQ ID NO: 760713 - RNA, 17 nt, Artificial Sequence
  Synthetic
uaccguagcgaacacug

SEQ ID NO: 760714 - RNA, 17 nt, Artificial Sequence
  Synthetic
uacuuuggguaacacug

SEQ ID NO: 760715 - RNA, 17 nt, Artificial Sequence
  Synthetic
cauuaccuaacacacug

SEQ ID NO: 760716 - RNA, 17 nt, Artificial Sequence
  Synthetic
ucaacagccacacacug

SEQ ID NO: 760717 - RNA, 17 nt, Artificial Sequence
  Synthetic
aauguucugccacacug

SEQ ID NO: 760718 - RNA, 17 nt, Artificial Sequence
  Synthetic
cuuaugccagcacacug

SEQ ID NO: 760719 - RNA, 17 nt, Artificial Sequence
  Synthetic
cagggcugagcacacug

SEQ ID NO: 760720 - RNA, 17 nt, Artificial Sequence
  Synthetic
agaaggggcucacacug

SEQ ID NO: 760721 - RNA, 17 nt, Artificial Sequence
  Synthetic
aguccauuuucacacug

SEQ ID NO: 760722 - RNA, 17 nt, Artificial Sequence
  Synthetic
cuauuagccagacacug

SEQ ID NO: 760723 - RNA, 17 nt, Artificial Sequence
  Synthetic
aggaacaauagacacug

SEQ ID NO: 760724 - RNA, 17 nt, Artificial Sequence
  Synthetic
ugcagaugaggacacug

SEQ ID NO: 760725 - RNA, 17 nt, Artificial Sequence
  Synthetic
uuaguguccugacacug

SEQ ID NO: 760726 - RNA, 17 nt, Artificial Sequence
  Synthetic
cauguguaaauacacug

SEQ ID NO: 760727 - RNA, 17 nt, Artificial Sequence
  Synthetic
acucacucacuacacug

SEQ ID NO: 760728 - RNA, 17 nt, Artificial Sequence
  Synthetic
acccagggaguacacug

SEQ ID NO: 760729 - RNA, 17 nt, Artificial Sequence
  Synthetic
ccaaauggauuacacug

SEQ ID NO: 760730 - RNA, 17 nt, Artificial Sequence
  Synthetic
acucaguuauuacacug

SEQ ID NO: 760731 - RNA, 17 nt, Artificial Sequence
  Synthetic
uaaggcugcaaccacug

SEQ ID NO: 760732 - RNA, 17 nt, Artificial Sequence
  Synthetic
acauguuguaaccacug

SEQ ID NO: 760733 - RNA, 17 nt, Artificial Sequence
  Synthetic
auuuuguuccaccacug

SEQ ID NO: 760734 - RNA, 17 nt, Artificial Sequence
  Synthetic
aggauggcucaccacug

SEQ ID NO: 760735 - RNA, 17 nt, Artificial Sequence
  Synthetic
aguaaaagucaccacug

SEQ ID NO: 760736 - RNA, 17 nt, Artificial Sequence
  Synthetic
ccacaucuggaccacug

SEQ ID NO: 760737 - RNA, 17 nt, Artificial Sequence
  Synthetic
cauuaguucacccacug

SEQ ID NO: 760738 - RNA, 17 nt, Artificial Sequence
  Synthetic
acacagaguccccacug

SEQ ID NO: 760739 - RNA, 17 nt, Artificial Sequence
  Synthetic
acauagaguccccacug

SEQ ID NO: 760740 - RNA, 17 nt, Artificial Sequence
  Synthetic
ucaugcuccucccacug

SEQ ID NO: 760741 - RNA, 17 nt, Artificial Sequence
  Synthetic
auuauguuaagccacug

SEQ ID NO: 760742 - RNA, 17 nt, Artificial Sequence
  Synthetic
aauuaguucagccacug

SEQ ID NO: 760743 - RNA, 17 nt, Artificial Sequence
  Synthetic
ccgauacagagccacug

SEQ ID NO: 760744 - RNA, 17 nt, Artificial Sequence
  Synthetic
uaaaugaauagccacug

SEQ ID NO: 760745 - RNA, 17 nt, Artificial Sequence
  Synthetic
auugcuuugggccacug

SEQ ID NO: 760746 - RNA, 17 nt, Artificial Sequence
  Synthetic
cgagagcuaugccacug

SEQ ID NO: 760747 - RNA, 17 nt, Artificial Sequence
  Synthetic
aaauaauauguccacug

SEQ ID NO: 760748 - RNA, 17 nt, Artificial Sequence
  Synthetic
uuaguuuuauuccacug

SEQ ID NO: 760749 - RNA, 17 nt, Artificial Sequence
  Synthetic
ccuuacacaaagcacug

SEQ ID NO: 760750 - RNA, 17 nt, Artificial Sequence
  Synthetic
auguaaucccagcacug

SEQ ID NO: 760751 - RNA, 17 nt, Artificial Sequence
  Synthetic
cuguaaucccagcacug

SEQ ID NO: 760752 - RNA, 17 nt, Artificial Sequence
  Synthetic
cccaauuaugagcacug

SEQ ID NO: 760753 - RNA, 17 nt, Artificial Sequence
  Synthetic
ccaaggacugagcacug

SEQ ID NO: 760754 - RNA, 17 nt, Artificial Sequence
  Synthetic
ugaggacaggcgcacug

SEQ ID NO: 760755 - RNA, 17 nt, Artificial Sequence
  Synthetic
uuacauugggcgcacug

SEQ ID NO: 760756 - RNA, 17 nt, Artificial Sequence
  Synthetic
acuauuuaaaggcacug

SEQ ID NO: 760757 - RNA, 17 nt, Artificial Sequence
  Synthetic
aaugaguuuaggcacug

SEQ ID NO: 760758 - RNA, 17 nt, Artificial Sequence
  Synthetic
aagagcagauggcacug

SEQ ID NO: 760759 - RNA, 17 nt, Artificial Sequence
  Synthetic
agcagggucuggcacug

SEQ ID NO: 760760 - RNA, 17 nt, Artificial Sequence
  Synthetic
ugaaauuauuggcacug

SEQ ID NO: 760761 - RNA, 17 nt, Artificial Sequence
  Synthetic
uaacauuuaaugcacug

SEQ ID NO: 760762 - RNA, 17 nt, Artificial Sequence
  Synthetic
accuugcuuaugcacug

SEQ ID NO: 760763 - RNA, 17 nt, Artificial Sequence
  Synthetic
cuaguuugauugcacug

SEQ ID NO: 760764 - RNA, 17 nt, Artificial Sequence
  Synthetic
aucacacacuugcacug

SEQ ID NO: 760765 - RNA, 17 nt, Artificial Sequence
  Synthetic
cuuguuuuaaaucacug

SEQ ID NO: 760766 - RNA, 17 nt, Artificial Sequence
  Synthetic
ccuccagagaaucacug

SEQ ID NO: 760767 - RNA, 17 nt, Artificial Sequence
  Synthetic
uaaucaaaucaucacug

SEQ ID NO: 760768 - RNA, 17 nt, Artificial Sequence
  Synthetic
cacaaucaucaucacug

SEQ ID NO: 760769 - RNA, 17 nt, Artificial Sequence
  Synthetic
uaguguagucaucacug

SEQ ID NO: 760770 - RNA, 17 nt, Artificial Sequence
  Synthetic
agcagccauccucacug

SEQ ID NO: 760771 - RNA, 17 nt, Artificial Sequence
  Synthetic
cuggauaguccucacug

SEQ ID NO: 760772 - RNA, 17 nt, Artificial Sequence
  Synthetic
aaaauuuguccucacug

SEQ ID NO: 760773 - RNA, 17 nt, Artificial Sequence
  Synthetic
aauacucagagucacug

SEQ ID NO: 760774 - RNA, 17 nt, Artificial Sequence
  Synthetic
aaaugugauauucacug

SEQ ID NO: 760775 - RNA, 17 nt, Artificial Sequence
  Synthetic
ucuucauuuauucacug

SEQ ID NO: 760776 - RNA, 17 nt, Artificial Sequence
  Synthetic
aauauagaaguucacug

SEQ ID NO: 760777 - RNA, 17 nt, Artificial Sequence
  Synthetic
uaaaacuaauuucacug

SEQ ID NO: 760778 - RNA, 17 nt, Artificial Sequence
  Synthetic
cagauuauauuucacug

SEQ ID NO: 760779 - RNA, 17 nt, Artificial Sequence
  Synthetic
agauuggucuuucacug

SEQ ID NO: 760780 - RNA, 17 nt, Artificial Sequence
  Synthetic
cuuacuauguuucacug

SEQ ID NO: 760781 - RNA, 17 nt, Artificial Sequence
  Synthetic
uucaaacuguuucacug

SEQ ID NO: 760782 - RNA, 17 nt, Artificial Sequence
  Synthetic
uauugauuguuucacug

SEQ ID NO: 760783 - RNA, 17 nt, Artificial Sequence
  Synthetic
ugauaucaaaaagacug

SEQ ID NO: 760784 - RNA, 17 nt, Artificial Sequence
  Synthetic
cuuugagaaaaagacug

SEQ ID NO: 760785 - RNA, 17 nt, Artificial Sequence
  Synthetic
agguuguagaaagacug

SEQ ID NO: 760786 - RNA, 17 nt, Artificial Sequence
  Synthetic
ugauaaggccaagacug

SEQ ID NO: 760787 - RNA, 17 nt, Artificial Sequence
  Synthetic
aaaauaaaagaagacug

SEQ ID NO: 760788 - RNA, 17 nt, Artificial Sequence
  Synthetic
uguguguauacagacug

SEQ ID NO: 760789 - RNA, 17 nt, Artificial Sequence
  Synthetic
ccuuuguugccagacug

SEQ ID NO: 760790 - RNA, 17 nt, Artificial Sequence
  Synthetic
caauaaaguccagacug

SEQ ID NO: 760791 - RNA, 17 nt, Artificial Sequence
  Synthetic
cuggcuuuuccagacug

SEQ ID NO: 760792 - RNA, 17 nt, Artificial Sequence
  Synthetic
ucccauacagcagacug

SEQ ID NO: 760793 - RNA, 17 nt, Artificial Sequence
  Synthetic
acuccggaggcagacug

SEQ ID NO: 760794 - RNA, 17 nt, Artificial Sequence
  Synthetic
agucauaaaagagacug

SEQ ID NO: 760795 - RNA, 17 nt, Artificial Sequence
  Synthetic
cauguuuucugagacug

SEQ ID NO: 760796 - RNA, 17 nt, Artificial Sequence
  Synthetic
agccuguccauagacug

SEQ ID NO: 760797 - RNA, 17 nt, Artificial Sequence
  Synthetic
agauacuauuuagacug

SEQ ID NO: 760798 - RNA, 17 nt, Artificial Sequence
  Synthetic
uaggaagguuuagacug

SEQ ID NO: 760799 - RNA, 17 nt, Artificial Sequence
  Synthetic
aaaaauguagccgacug

SEQ ID NO: 760800 - RNA, 17 nt, Artificial Sequence
  Synthetic
uugaauagagaggacug

SEQ ID NO: 760801 - RNA, 17 nt, Artificial Sequence
  Synthetic
caaagccacagggacug

SEQ ID NO: 760802 - RNA, 17 nt, Artificial Sequence
  Synthetic
ucacacucuggggacug

SEQ ID NO: 760803 - RNA, 17 nt, Artificial Sequence
  Synthetic
acaaaaagacuggacug

SEQ ID NO: 760804 - RNA, 17 nt, Artificial Sequence
  Synthetic
aguauaauccuggacug

SEQ ID NO: 760805 - RNA, 17 nt, Artificial Sequence
  Synthetic
cugucugcaaaugacug

SEQ ID NO: 760806 - RNA, 17 nt, Artificial Sequence
  Synthetic
auuugaguaaaugacug

SEQ ID NO: 760807 - RNA, 17 nt, Artificial Sequence
  Synthetic
aaagaacacaaugacug

SEQ ID NO: 760808 - RNA, 17 nt, Artificial Sequence
  Synthetic
auaguuccacaugacug

SEQ ID NO: 760809 - RNA, 17 nt, Artificial Sequence
  Synthetic
cagucaagagaugacug

SEQ ID NO: 760810 - RNA, 17 nt, Artificial Sequence
  Synthetic
cauguuggagaugacug

SEQ ID NO: 760811 - RNA, 17 nt, Artificial Sequence
  Synthetic
augagcagaacugacug

SEQ ID NO: 760812 - RNA, 17 nt, Artificial Sequence
  Synthetic
ugggucuuaacugacug

SEQ ID NO: 760813 - RNA, 17 nt, Artificial Sequence
  Synthetic
ugcacaggcacugacug

SEQ ID NO: 760814 - RNA, 17 nt, Artificial Sequence
  Synthetic
cuauaagccccugacug

SEQ ID NO: 760815 - RNA, 17 nt, Artificial Sequence
  Synthetic
aucugccucccugacug

SEQ ID NO: 760816 - RNA, 17 nt, Artificial Sequence
  Synthetic
aguaaggagucugacug

SEQ ID NO: 760817 - RNA, 17 nt, Artificial Sequence
  Synthetic
caccuagggggugacug

SEQ ID NO: 760818 - RNA, 17 nt, Artificial Sequence
  Synthetic
ucugauauaauugacug

SEQ ID NO: 760819 - RNA, 17 nt, Artificial Sequence
  Synthetic
auaugauggcuugacug

SEQ ID NO: 760820 - RNA, 17 nt, Artificial Sequence
  Synthetic
agugugggaguugacug

SEQ ID NO: 760821 - RNA, 17 nt, Artificial Sequence
  Synthetic
aagugggaaaaauacug

SEQ ID NO: 760822 - RNA, 17 nt, Artificial Sequence
  Synthetic
agaaacagaaaauacug

SEQ ID NO: 760823 - RNA, 17 nt, Artificial Sequence
  Synthetic
aaacggaacaaauacug

SEQ ID NO: 760824 - RNA, 17 nt, Artificial Sequence
  Synthetic
ucauucuacaaauacug

SEQ ID NO: 760825 - RNA, 17 nt, Artificial Sequence
  Synthetic
agacaauucaaauacug

SEQ ID NO: 760826 - RNA, 17 nt, Artificial Sequence
  Synthetic
aaugguggagaauacug

SEQ ID NO: 760827 - RNA, 17 nt, Artificial Sequence
  Synthetic
uacacucccacauacug

SEQ ID NO: 760828 - RNA, 17 nt, Artificial Sequence
  Synthetic
auuuugguaucauacug

SEQ ID NO: 760829 - RNA, 17 nt, Artificial Sequence
  Synthetic
uaaaauuagucauacug

SEQ ID NO: 760830 - RNA, 17 nt, Artificial Sequence
  Synthetic
cagagaaaaggauacug

SEQ ID NO: 760831 - RNA, 17 nt, Artificial Sequence
  Synthetic
aucccccauggauacug

SEQ ID NO: 760832 - RNA, 17 nt, Artificial Sequence
  Synthetic
ccuggcuuuggauacug

SEQ ID NO: 760833 - RNA, 17 nt, Artificial Sequence
  Synthetic
augaguuaaugauacug

SEQ ID NO: 760834 - RNA, 17 nt, Artificial Sequence
  Synthetic
uuuauugggugauacug

SEQ ID NO: 760835 - RNA, 17 nt, Artificial Sequence
  Synthetic
auugaaaaaauauacug

SEQ ID NO: 760836 - RNA, 17 nt, Artificial Sequence
  Synthetic
cacuugggaauauacug

SEQ ID NO: 760837 - RNA, 17 nt, Artificial Sequence
  Synthetic
uuucuucuucuauacug

SEQ ID NO: 760838 - RNA, 17 nt, Artificial Sequence
  Synthetic
uuguucagaguauacug

SEQ ID NO: 760839 - RNA, 17 nt, Artificial Sequence
  Synthetic
auacacaagguauacug

SEQ ID NO: 760840 - RNA, 17 nt, Artificial Sequence
  Synthetic
auuucccugguauacug

SEQ ID NO: 760841 - RNA, 17 nt, Artificial Sequence
  Synthetic
uguuccauauuauacug

SEQ ID NO: 760842 - RNA, 17 nt, Artificial Sequence
  Synthetic
cuuuuuccccacuacug

SEQ ID NO: 760843 - RNA, 17 nt, Artificial Sequence
  Synthetic
cagcaauuccacuacug

SEQ ID NO: 760844 - RNA, 17 nt, Artificial Sequence
  Synthetic
auucauagcaccuacug

SEQ ID NO: 760845 - RNA, 17 nt, Artificial Sequence
  Synthetic
caugccccauccuacug

SEQ ID NO: 760846 - RNA, 17 nt, Artificial Sequence
  Synthetic
cacugcaguugcuacug

SEQ ID NO: 760847 - RNA, 17 nt, Artificial Sequence
  Synthetic
ucucccaaaaucuacug

SEQ ID NO: 760848 - RNA, 17 nt, Artificial Sequence
  Synthetic
uuuugaaagaucuacug

SEQ ID NO: 760849 - RNA, 17 nt, Artificial Sequence
  Synthetic
cagagauuuaucuacug

SEQ ID NO: 760850 - RNA, 17 nt, Artificial Sequence
  Synthetic
uucacauaccucuacug

SEQ ID NO: 760851 - RNA, 17 nt, Artificial Sequence
  Synthetic
ucuaaaguggucuacug

SEQ ID NO: 760852 - RNA, 17 nt, Artificial Sequence
  Synthetic
aggaaggagaaguacug

SEQ ID NO: 760853 - RNA, 17 nt, Artificial Sequence
  Synthetic
cuauaugcuaaguacug

SEQ ID NO: 760854 - RNA, 17 nt, Artificial Sequence
  Synthetic
cuuucugguaaguacug

SEQ ID NO: 760855 - RNA, 17 nt, Artificial Sequence
  Synthetic
cuaggaaaggaguacug

SEQ ID NO: 760856 - RNA, 17 nt, Artificial Sequence
  Synthetic
aaugugagcugguacug

SEQ ID NO: 760857 - RNA, 17 nt, Artificial Sequence
  Synthetic
uaagaccagugguacug

SEQ ID NO: 760858 - RNA, 17 nt, Artificial Sequence
  Synthetic
uuaggaagcauguacug

SEQ ID NO: 760859 - RNA, 17 nt, Artificial Sequence
  Synthetic
cuaauuugauuguacug

SEQ ID NO: 760860 - RNA, 17 nt, Artificial Sequence
  Synthetic
aauaauacuaauuacug

SEQ ID NO: 760861 - RNA, 17 nt, Artificial Sequence
  Synthetic
uguucaugccauuacug

SEQ ID NO: 760862 - RNA, 17 nt, Artificial Sequence
  Synthetic
uuugcuuuagauuacug

SEQ ID NO: 760863 - RNA, 17 nt, Artificial Sequence
  Synthetic
aauaguauugauuacug

SEQ ID NO: 760864 - RNA, 17 nt, Artificial Sequence
  Synthetic
aucuuuacaacuuacug

SEQ ID NO: 760865 - RNA, 17 nt, Artificial Sequence
  Synthetic
acaaggaguccuuacug

SEQ ID NO: 760866 - RNA, 17 nt, Artificial Sequence
  Synthetic
agcugcccugcuuacug

SEQ ID NO: 760867 - RNA, 17 nt, Artificial Sequence
  Synthetic
uuuuuguauucuuacug

SEQ ID NO: 760868 - RNA, 17 nt, Artificial Sequence
  Synthetic
uaagacauagguuacug

SEQ ID NO: 760869 - RNA, 17 nt, Artificial Sequence
  Synthetic
ugaugcugauguuacug

SEQ ID NO: 760870 - RNA, 17 nt, Artificial Sequence
  Synthetic
cagaauagguguuacug

SEQ ID NO: 760871 - RNA, 17 nt, Artificial Sequence
  Synthetic
agucacuuuuguuacug

SEQ ID NO: 760872 - RNA, 17 nt, Artificial Sequence
  Synthetic
ucagaaaccauuuacug

SEQ ID NO: 760873 - RNA, 17 nt, Artificial Sequence
  Synthetic
uuaugaaccauuuacug

SEQ ID NO: 760874 - RNA, 17 nt, Artificial Sequence
  Synthetic
uucuuuuuucuuuacug

SEQ ID NO: 760875 - RNA, 17 nt, Artificial Sequence
  Synthetic
cccucucauguuuacug

SEQ ID NO: 760876 - RNA, 17 nt, Artificial Sequence
  Synthetic
aaucgagucuuuuacug

SEQ ID NO: 760877 - RNA, 17 nt, Artificial Sequence
  Synthetic
ucauucuuuuuuuacug

SEQ ID NO: 760878 - RNA, 17 nt, Artificial Sequence
  Synthetic
ucgugaaagaaaaccug

SEQ ID NO: 760879 - RNA, 17 nt, Artificial Sequence
  Synthetic
ucuuucuugcaaaccug

SEQ ID NO: 760880 - RNA, 17 nt, Artificial Sequence
  Synthetic
ucaauggaucaaaccug

SEQ ID NO: 760881 - RNA, 17 nt, Artificial Sequence
  Synthetic
uucugaagagaaaccug

SEQ ID NO: 760882 - RNA, 17 nt, Artificial Sequence
  Synthetic
ugucaggaauaaaccug

SEQ ID NO: 760883 - RNA, 17 nt, Artificial Sequence
  Synthetic
ucuggugacacaaccug

SEQ ID NO: 760884 - RNA, 17 nt, Artificial Sequence
  Synthetic
auuuucaccacaaccug

SEQ ID NO: 760885 - RNA, 17 nt, Artificial Sequence
  Synthetic
cccuuuacuccaaccug

SEQ ID NO: 760886 - RNA, 17 nt, Artificial Sequence
  Synthetic
ugcuuaacuucaaccug

SEQ ID NO: 760887 - RNA, 17 nt, Artificial Sequence
  Synthetic
auaaaaaggagaaccug

SEQ ID NO: 760888 - RNA, 17 nt, Artificial Sequence
  Synthetic
caacauggaugaaccug

SEQ ID NO: 760889 - RNA, 17 nt, Artificial Sequence
  Synthetic
aaaggauuuugaaccug

SEQ ID NO: 760890 - RNA, 17 nt, Artificial Sequence
  Synthetic
aggugguagaacaccug

SEQ ID NO: 760891 - RNA, 17 nt, Artificial Sequence
  Synthetic
aaaucaaggaacaccug

SEQ ID NO: 760892 - RNA, 17 nt, Artificial Sequence
  Synthetic
uuaauuauucacaccug

SEQ ID NO: 760893 - RNA, 17 nt, Artificial Sequence
  Synthetic
cccucccaugacaccug

SEQ ID NO: 760894 - RNA, 17 nt, Artificial Sequence
  Synthetic
cucuccuuugacaccug

SEQ ID NO: 760895 - RNA, 17 nt, Artificial Sequence
  Synthetic
auccauaacuacaccug

SEQ ID NO: 760896 - RNA, 17 nt, Artificial Sequence
  Synthetic
ccagaagcaaccaccug

SEQ ID NO: 760897 - RNA, 17 nt, Artificial Sequence
  Synthetic
uagccauuagccaccug

SEQ ID NO: 760898 - RNA, 17 nt, Artificial Sequence
  Synthetic
cgaaggcaggccaccug

SEQ ID NO: 760899 - RNA, 17 nt, Artificial Sequence
  Synthetic
uaagcuugaagcaccug

SEQ ID NO: 760900 - RNA, 17 nt, Artificial Sequence
  Synthetic
ccuugugggagcaccug

SEQ ID NO: 760901 - RNA, 17 nt, Artificial Sequence
  Synthetic
ugcaucagaaucaccug

SEQ ID NO: 760902 - RNA, 17 nt, Artificial Sequence
  Synthetic
cguaucugaaucaccug

SEQ ID NO: 760903 - RNA, 17 nt, Artificial Sequence
  Synthetic
aagcuauagaucaccug

SEQ ID NO: 760904 - RNA, 17 nt, Artificial Sequence
  Synthetic
aagcgauggaucaccug

SEQ ID NO: 760905 - RNA, 17 nt, Artificial Sequence
  Synthetic
aguggguggaucaccug

SEQ ID NO: 760906 - RNA, 17 nt, Artificial Sequence
  Synthetic
cguggguggaucaccug

SEQ ID NO: 760907 - RNA, 17 nt, Artificial Sequence
  Synthetic
ugcacaggauucaccug

SEQ ID NO: 760908 - RNA, 17 nt, Artificial Sequence
  Synthetic
aaauucuaaaagaccug

SEQ ID NO: 760909 - RNA, 17 nt, Artificial Sequence
  Synthetic
cagguaucuaagaccug

SEQ ID NO: 760910 - RNA, 17 nt, Artificial Sequence
  Synthetic
auuauuccacagaccug

SEQ ID NO: 760911 - RNA, 17 nt, Artificial Sequence
  Synthetic
acgugguucaggaccug

SEQ ID NO: 760912 - RNA, 17 nt, Artificial Sequence
  Synthetic
cucuugcauaggaccug

SEQ ID NO: 760913 - RNA, 17 nt, Artificial Sequence
  Synthetic
uuaauucauuggaccug

SEQ ID NO: 760914 - RNA, 17 nt, Artificial Sequence
  Synthetic
auaauugcaaugaccug

SEQ ID NO: 760915 - RNA, 17 nt, Artificial Sequence
  Synthetic
agcauccuaaugaccug

SEQ ID NO: 760916 - RNA, 17 nt, Artificial Sequence
  Synthetic
cuuugccacaugaccug

SEQ ID NO: 760917 - RNA, 17 nt, Artificial Sequence
  Synthetic
auauguauucugaccug

SEQ ID NO: 760918 - RNA, 17 nt, Artificial Sequence
  Synthetic
ucuuuauccuugaccug

SEQ ID NO: 760919 - RNA, 17 nt, Artificial Sequence
  Synthetic
accuccuccuugaccug

SEQ ID NO: 760920 - RNA, 17 nt, Artificial Sequence
  Synthetic
ugaguuagaaauaccug

SEQ ID NO: 760921 - RNA, 17 nt, Artificial Sequence
  Synthetic
agguccuuuacuaccug

SEQ ID NO: 760922 - RNA, 17 nt, Artificial Sequence
  Synthetic
auacccagugcuaccug

SEQ ID NO: 760923 - RNA, 17 nt, Artificial Sequence
  Synthetic
uuauauuuugguaccug

SEQ ID NO: 760924 - RNA, 17 nt, Artificial Sequence
  Synthetic
cagacuauaauuaccug

SEQ ID NO: 760925 - RNA, 17 nt, Artificial Sequence
  Synthetic
aauauaauaguuaccug

SEQ ID NO: 760926 - RNA, 17 nt, Artificial Sequence
  Synthetic
agaaggaugguuaccug

SEQ ID NO: 760927 - RNA, 17 nt, Artificial Sequence
  Synthetic
auacuguuuaaacccug

SEQ ID NO: 760928 - RNA, 17 nt, Artificial Sequence
  Synthetic
cacuuauaugaacccug

SEQ ID NO: 760929 - RNA, 17 nt, Artificial Sequence
  Synthetic
uuaagcuggucacccug

SEQ ID NO: 760930 - RNA, 17 nt, Artificial Sequence
  Synthetic
uugaacuccugacccug

SEQ ID NO: 760931 - RNA, 17 nt, Artificial Sequence
  Synthetic
aaugucucgguacccug

SEQ ID NO: 760932 - RNA, 17 nt, Artificial Sequence
  Synthetic
uauuaaauuucccccug

SEQ ID NO: 760933 - RNA, 17 nt, Artificial Sequence
  Synthetic
aguuuuauuucccccug

SEQ ID NO: 760934 - RNA, 17 nt, Artificial Sequence
  Synthetic
ccgccaacaggccccug

SEQ ID NO: 760935 - RNA, 17 nt, Artificial Sequence
  Synthetic
cuaguucuaggccccug

SEQ ID NO: 760936 - RNA, 17 nt, Artificial Sequence
  Synthetic
caagguaugcuccccug

SEQ ID NO: 760937 - RNA, 17 nt, Artificial Sequence
  Synthetic
accuacccaaagcccug

SEQ ID NO: 760938 - RNA, 17 nt, Artificial Sequence
  Synthetic
acuggaacacagcccug

SEQ ID NO: 760939 - RNA, 17 nt, Artificial Sequence
  Synthetic
aaggguccccagcccug

SEQ ID NO: 760940 - RNA, 17 nt, Artificial Sequence
  Synthetic
caagugcaaaggcccug

SEQ ID NO: 760941 - RNA, 17 nt, Artificial Sequence
  Synthetic
cacauuuuaaggcccug

SEQ ID NO: 760942 - RNA, 17 nt, Artificial Sequence
  Synthetic
uaugcaagcaggcccug

SEQ ID NO: 760943 - RNA, 17 nt, Artificial Sequence
  Synthetic
uauuuauuuaggcccug

SEQ ID NO: 760944 - RNA, 17 nt, Artificial Sequence
  Synthetic
aauugagcuuggcccug

SEQ ID NO: 760945 - RNA, 17 nt, Artificial Sequence
  Synthetic
aaagggcuucugcccug

SEQ ID NO: 760946 - RNA, 17 nt, Artificial Sequence
  Synthetic
ugagggacugugcccug

SEQ ID NO: 760947 - RNA, 17 nt, Artificial Sequence
  Synthetic
augccaccuuugcccug

SEQ ID NO: 760948 - RNA, 17 nt, Artificial Sequence
  Synthetic
ucuccagguuugcccug

SEQ ID NO: 760949 - RNA, 17 nt, Artificial Sequence
  Synthetic
caauggagaaaucccug

SEQ ID NO: 760950 - RNA, 17 nt, Artificial Sequence
  Synthetic
caagaacaagaucccug

SEQ ID NO: 760951 - RNA, 17 nt, Artificial Sequence
  Synthetic
cuaguucuagaucccug

SEQ ID NO: 760952 - RNA, 17 nt, Artificial Sequence
  Synthetic
ugagcaaaaacucccug

SEQ ID NO: 760953 - RNA, 17 nt, Artificial Sequence
  Synthetic
uaaacugugacucccug

SEQ ID NO: 760954 - RNA, 17 nt, Artificial Sequence
  Synthetic
ccugccuguacucccug

SEQ ID NO: 760955 - RNA, 17 nt, Artificial Sequence
  Synthetic
ugaguaaaagcucccug

SEQ ID NO: 760956 - RNA, 17 nt, Artificial Sequence
  Synthetic
agaggauccucucccug

SEQ ID NO: 760957 - RNA, 17 nt, Artificial Sequence
  Synthetic
auuuauauuucucccug

SEQ ID NO: 760958 - RNA, 17 nt, Artificial Sequence
  Synthetic
aauaaaaucagucccug

SEQ ID NO: 760959 - RNA, 17 nt, Artificial Sequence
  Synthetic
cuccccaucagucccug

SEQ ID NO: 760960 - RNA, 17 nt, Artificial Sequence
  Synthetic
accauccucagucccug

SEQ ID NO: 760961 - RNA, 17 nt, Artificial Sequence
  Synthetic
acacaagcaauucccug

SEQ ID NO: 760962 - RNA, 17 nt, Artificial Sequence
  Synthetic
auauaacauguucccug

SEQ ID NO: 760963 - RNA, 17 nt, Artificial Sequence
  Synthetic
ugaggaguauuucccug

SEQ ID NO: 760964 - RNA, 17 nt, Artificial Sequence
  Synthetic
cucaguuuauuucccug

SEQ ID NO: 760965 - RNA, 17 nt, Artificial Sequence
  Synthetic
uuuuaaagcaaagccug

SEQ ID NO: 760966 - RNA, 17 nt, Artificial Sequence
  Synthetic
ugaauggaagaagccug

SEQ ID NO: 760967 - RNA, 17 nt, Artificial Sequence
  Synthetic
ccuugaauuuaagccug

SEQ ID NO: 760968 - RNA, 17 nt, Artificial Sequence
  Synthetic
aaaggagaaacagccug

SEQ ID NO: 760969 - RNA, 17 nt, Artificial Sequence
  Synthetic
auuccgagaacagccug

SEQ ID NO: 760970 - RNA, 17 nt, Artificial Sequence
  Synthetic
cauugcacuccagccug

SEQ ID NO: 760971 - RNA, 17 nt, Artificial Sequence
  Synthetic
cacuguacuccagccug

SEQ ID NO: 760972 - RNA, 17 nt, Artificial Sequence
  Synthetic
aucucaacugcagccug

SEQ ID NO: 760973 - RNA, 17 nt, Artificial Sequence
  Synthetic
aggacauagucagccug

SEQ ID NO: 760974 - RNA, 17 nt, Artificial Sequence
  Synthetic
auucaggauucagccug

SEQ ID NO: 760975 - RNA, 17 nt, Artificial Sequence
  Synthetic
aaagauuaaggagccug

SEQ ID NO: 760976 - RNA, 17 nt, Artificial Sequence
  Synthetic
agcuacucaggagccug

SEQ ID NO: 760977 - RNA, 17 nt, Artificial Sequence
  Synthetic
agcuacucgggagccug

SEQ ID NO: 760978 - RNA, 17 nt, Artificial Sequence
  Synthetic
agcacuuugggagccug

SEQ ID NO: 760979 - RNA, 17 nt, Artificial Sequence
  Synthetic
augugguguugagccug

SEQ ID NO: 760980 - RNA, 17 nt, Artificial Sequence
  Synthetic
cuuugaauccuagccug

SEQ ID NO: 760981 - RNA, 17 nt, Artificial Sequence
  Synthetic
ucaucuuagguagccug

SEQ ID NO: 760982 - RNA, 17 nt, Artificial Sequence
  Synthetic
aagaggaaguuagccug

SEQ ID NO: 760983 - RNA, 17 nt, Artificial Sequence
  Synthetic
augguggcaggcgccug

SEQ ID NO: 760984 - RNA, 17 nt, Artificial Sequence
  Synthetic
accauagagcaggccug

SEQ ID NO: 760985 - RNA, 17 nt, Artificial Sequence
  Synthetic
uuguuggauuaggccug

SEQ ID NO: 760986 - RNA, 17 nt, Artificial Sequence
  Synthetic
acgccauuuuaggccug

SEQ ID NO: 760987 - RNA, 17 nt, Artificial Sequence
  Synthetic
uuggccuuuuaggccug

SEQ ID NO: 760988 - RNA, 17 nt, Artificial Sequence
  Synthetic
uugacaaugggggccug

SEQ ID NO: 760989 - RNA, 17 nt, Artificial Sequence
  Synthetic
ugguucaucugggccug

SEQ ID NO: 760990 - RNA, 17 nt, Artificial Sequence
  Synthetic
augugguguugggccug

SEQ ID NO: 760991 - RNA, 17 nt, Artificial Sequence
  Synthetic
uacucugcccuggccug

SEQ ID NO: 760992 - RNA, 17 nt, Artificial Sequence
  Synthetic
uacauccauguggccug

SEQ ID NO: 760993 - RNA, 17 nt, Artificial Sequence
  Synthetic
ugauguguauuggccug

SEQ ID NO: 760994 - RNA, 17 nt, Artificial Sequence
  Synthetic
cuuuucucagaugccug

SEQ ID NO: 760995 - RNA, 17 nt, Artificial Sequence
  Synthetic
cuaguucuagaugccug

SEQ ID NO: 760996 - RNA, 17 nt, Artificial Sequence
  Synthetic
agccaggggccugccug

SEQ ID NO: 760997 - RNA, 17 nt, Artificial Sequence
  Synthetic
ugaaugagggcugccug

SEQ ID NO: 760998 - RNA, 17 nt, Artificial Sequence
  Synthetic
auuauuccugcugccug

SEQ ID NO: 760999 - RNA, 17 nt, Artificial Sequence
  Synthetic
cguucucuuucugccug

SEQ ID NO: 761000 - RNA, 17 nt, Artificial Sequence
  Synthetic
uugucuuucugugccug

SEQ ID NO: 761001 - RNA, 17 nt, Artificial Sequence
  Synthetic
uugagaagcauugccug

SEQ ID NO: 761002 - RNA, 17 nt, Artificial Sequence
  Synthetic
cagcugcaccuugccug

SEQ ID NO: 761003 - RNA, 17 nt, Artificial Sequence
  Synthetic
uuuaaugaauuugccug

SEQ ID NO: 761004 - RNA, 17 nt, Artificial Sequence
  Synthetic
uauuuaauuuuugccug

SEQ ID NO: 761005 - RNA, 17 nt, Artificial Sequence
  Synthetic
uaaugcucaaaauccug

SEQ ID NO: 761006 - RNA, 17 nt, Artificial Sequence
  Synthetic
uaaaauuccaaauccug

SEQ ID NO: 761007 - RNA, 17 nt, Artificial Sequence
  Synthetic
uagccucuguaauccug

SEQ ID NO: 761008 - RNA, 17 nt, Artificial Sequence
  Synthetic
aauaggaacacauccug

SEQ ID NO: 761009 - RNA, 17 nt, Artificial Sequence
  Synthetic
uuuguucuugcauccug

SEQ ID NO: 761010 - RNA, 17 nt, Artificial Sequence
  Synthetic
cacuauacaagauccug

SEQ ID NO: 761011 - RNA, 17 nt, Artificial Sequence
  Synthetic
aucucagagagauccug

SEQ ID NO: 761012 - RNA, 17 nt, Artificial Sequence
  Synthetic
accaaacagugauccug

SEQ ID NO: 761013 - RNA, 17 nt, Artificial Sequence
  Synthetic
uuucuucucuuauccug

SEQ ID NO: 761014 - RNA, 17 nt, Artificial Sequence
  Synthetic
cuuuuucuuuuauccug

SEQ ID NO: 761015 - RNA, 17 nt, Artificial Sequence
  Synthetic
cuggucucaaacuccug

SEQ ID NO: 761016 - RNA, 17 nt, Artificial Sequence
  Synthetic
agccccagcuacuccug

SEQ ID NO: 761017 - RNA, 17 nt, Artificial Sequence
  Synthetic
uauuuuuguaccuccug

SEQ ID NO: 761018 - RNA, 17 nt, Artificial Sequence
  Synthetic
uuuagagcugccuccug

SEQ ID NO: 761019 - RNA, 17 nt, Artificial Sequence
  Synthetic
cuucagagauccuccug

SEQ ID NO: 761020 - RNA, 17 nt, Artificial Sequence
  Synthetic
caugagaggggcuccug

SEQ ID NO: 761021 - RNA, 17 nt, Artificial Sequence
  Synthetic
cauuugcuuggcuccug

SEQ ID NO: 761022 - RNA, 17 nt, Artificial Sequence
  Synthetic
ugagacagggucuccug

SEQ ID NO: 761023 - RNA, 17 nt, Artificial Sequence
  Synthetic
uuaccaaaugucuccug

SEQ ID NO: 761024 - RNA, 17 nt, Artificial Sequence
  Synthetic
auuacuaaauucuccug

SEQ ID NO: 761025 - RNA, 17 nt, Artificial Sequence
  Synthetic
ugagaagcuuucuccug

SEQ ID NO: 761026 - RNA, 17 nt, Artificial Sequence
  Synthetic
uuuccugcuuucuccug

SEQ ID NO: 761027 - RNA, 17 nt, Artificial Sequence
  Synthetic
uaucuugcuuucuccug

SEQ ID NO: 761028 - RNA, 17 nt, Artificial Sequence
  Synthetic
agcucucuuuucuccug

SEQ ID NO: 761029 - RNA, 17 nt, Artificial Sequence
  Synthetic
agcagguaccaguccug

SEQ ID NO: 761030 - RNA, 17 nt, Artificial Sequence
  Synthetic
uaauaaaaccuguccug

SEQ ID NO: 761031 - RNA, 17 nt, Artificial Sequence
  Synthetic
auagguugcuuguccug

SEQ ID NO: 761032 - RNA, 17 nt, Artificial Sequence
  Synthetic
agaaugaaagauuccug

SEQ ID NO: 761033 - RNA, 17 nt, Artificial Sequence
  Synthetic
ucaaauccauauuccug

SEQ ID NO: 761034 - RNA, 17 nt, Artificial Sequence
  Synthetic
ugguuguaaacuuccug

SEQ ID NO: 761035 - RNA, 17 nt, Artificial Sequence
  Synthetic
ugccucgucccuuccug

SEQ ID NO: 761036 - RNA, 17 nt, Artificial Sequence
  Synthetic
aagauguuuccuuccug

SEQ ID NO: 761037 - RNA, 17 nt, Artificial Sequence
  Synthetic
agauugaaagcuuccug

SEQ ID NO: 761038 - RNA, 17 nt, Artificial Sequence
  Synthetic
uguauaacaucuuccug

SEQ ID NO: 761039 - RNA, 17 nt, Artificial Sequence
  Synthetic
agggcuaagucuuccug

SEQ ID NO: 761040 - RNA, 17 nt, Artificial Sequence
  Synthetic
ucuggagaaaguuccug

SEQ ID NO: 761041 - RNA, 17 nt, Artificial Sequence
  Synthetic
ucaaugugaaguuccug

SEQ ID NO: 761042 - RNA, 17 nt, Artificial Sequence
  Synthetic
uuuuugacauguuccug

SEQ ID NO: 761043 - RNA, 17 nt, Artificial Sequence
  Synthetic
ugauuauaaguuuccug

SEQ ID NO: 761044 - RNA, 17 nt, Artificial Sequence
  Synthetic
cgaugguaaguuuccug

SEQ ID NO: 761045 - RNA, 17 nt, Artificial Sequence
  Synthetic
ugauuguaaguuuccug

SEQ ID NO: 761046 - RNA, 17 nt, Artificial Sequence
  Synthetic
ugauuuuaaguuuccug

SEQ ID NO: 761047 - RNA, 17 nt, Artificial Sequence
  Synthetic
cuuuuuguaguuuccug

SEQ ID NO: 761048 - RNA, 17 nt, Artificial Sequence
  Synthetic
aaaagugccuuuuccug

SEQ ID NO: 761049 - RNA, 17 nt, Artificial Sequence
  Synthetic
cuguucagcuuuuccug

SEQ ID NO: 761050 - RNA, 17 nt, Artificial Sequence
  Synthetic
caagacuuuuuuuccug

SEQ ID NO: 761051 - RNA, 17 nt, Artificial Sequence
  Synthetic
auuuggaaaaaaagcug

SEQ ID NO: 761052 - RNA, 17 nt, Artificial Sequence
  Synthetic
ccaauggacaaaagcug

SEQ ID NO: 761053 - RNA, 17 nt, Artificial Sequence
  Synthetic
uaaauaaagaaaagcug

SEQ ID NO: 761054 - RNA, 17 nt, Artificial Sequence
  Synthetic
ugauaacugaaaagcug

SEQ ID NO: 761055 - RNA, 17 nt, Artificial Sequence
  Synthetic
agguuuucacaaagcug

SEQ ID NO: 761056 - RNA, 17 nt, Artificial Sequence
  Synthetic
uacucagagcaaagcug

SEQ ID NO: 761057 - RNA, 17 nt, Artificial Sequence
  Synthetic
agauagcuucaaagcug

SEQ ID NO: 761058 - RNA, 17 nt, Artificial Sequence
  Synthetic
acuaaagaagaaagcug

SEQ ID NO: 761059 - RNA, 17 nt, Artificial Sequence
  Synthetic
caacugagcgaaagcug

SEQ ID NO: 761060 - RNA, 17 nt, Artificial Sequence
  Synthetic
acucaaccaccaagcug

SEQ ID NO: 761061 - RNA, 17 nt, Artificial Sequence
  Synthetic
uauuuagcaccaagcug

SEQ ID NO: 761062 - RNA, 17 nt, Artificial Sequence
  Synthetic
uuguaaaagucaagcug

SEQ ID NO: 761063 - RNA, 17 nt, Artificial Sequence
  Synthetic
uauagauguagaagcug

SEQ ID NO: 761064 - RNA, 17 nt, Artificial Sequence
  Synthetic
agcuacccaggaagcug

SEQ ID NO: 761065 - RNA, 17 nt, Artificial Sequence
  Synthetic
agcuacucgggaagcug

SEQ ID NO: 761066 - RNA, 17 nt, Artificial Sequence
  Synthetic
agcuacuugggaagcug

SEQ ID NO: 761067 - RNA, 17 nt, Artificial Sequence
  Synthetic
aaggauuugggaagcug

SEQ ID NO: 761068 - RNA, 17 nt, Artificial Sequence
  Synthetic
agcacuuugggaagcug

SEQ ID NO: 761069 - RNA, 17 nt, Artificial Sequence
  Synthetic
agugcuuugggaagcug

SEQ ID NO: 761070 - RNA, 17 nt, Artificial Sequence
  Synthetic
uaaacaguuugaagcug

SEQ ID NO: 761071 - RNA, 17 nt, Artificial Sequence
  Synthetic
uuccuaauuauaagcug

SEQ ID NO: 761072 - RNA, 17 nt, Artificial Sequence
  Synthetic
aauuuuuuucuaagcug

SEQ ID NO: 761073 - RNA, 17 nt, Artificial Sequence
  Synthetic
acaguuccacacagcug

SEQ ID NO: 761074 - RNA, 17 nt, Artificial Sequence
  Synthetic
uggaagaaucacagcug

SEQ ID NO: 761075 - RNA, 17 nt, Artificial Sequence
  Synthetic
uucggugaagacagcug

SEQ ID NO: 761076 - RNA, 17 nt, Artificial Sequence
  Synthetic
uuggcaaguuacagcug

SEQ ID NO: 761077 - RNA, 17 nt, Artificial Sequence
  Synthetic
auuccccuuuacagcug

SEQ ID NO: 761078 - RNA, 17 nt, Artificial Sequence
  Synthetic
cagcaaauucccagcug

SEQ ID NO: 761079 - RNA, 17 nt, Artificial Sequence
  Synthetic
uuucugagagccagcug

SEQ ID NO: 761080 - RNA, 17 nt, Artificial Sequence
  Synthetic
ugaaaaugagccagcug

SEQ ID NO: 761081 - RNA, 17 nt, Artificial Sequence
  Synthetic
ccauugcacuccagcug

SEQ ID NO: 761082 - RNA, 17 nt, Artificial Sequence
  Synthetic
agcacuaccagcagcug

SEQ ID NO: 761083 - RNA, 17 nt, Artificial Sequence
  Synthetic
uuaauucugagcagcug

SEQ ID NO: 761084 - RNA, 17 nt, Artificial Sequence
  Synthetic
agcacuccuagcagcug

SEQ ID NO: 761085 - RNA, 17 nt, Artificial Sequence
  Synthetic
cggggaaggggcagcug

SEQ ID NO: 761086 - RNA, 17 nt, Artificial Sequence
  Synthetic
aaugaacugugcagcug

SEQ ID NO: 761087 - RNA, 17 nt, Artificial Sequence
  Synthetic
ucuucaggucucagcug

SEQ ID NO: 761088 - RNA, 17 nt, Artificial Sequence
  Synthetic
cccugaacggucagcug

SEQ ID NO: 761089 - RNA, 17 nt, Artificial Sequence
  Synthetic
uaucaccaacagagcug

SEQ ID NO: 761090 - RNA, 17 nt, Artificial Sequence
  Synthetic
auuucacuggagagcug

SEQ ID NO: 761091 - RNA, 17 nt, Artificial Sequence
  Synthetic
ccucuugacaggagcug

SEQ ID NO: 761092 - RNA, 17 nt, Artificial Sequence
  Synthetic
acaaggugcaggagcug

SEQ ID NO: 761093 - RNA, 17 nt, Artificial Sequence
  Synthetic
ucaugguugaggagcug

SEQ ID NO: 761094 - RNA, 17 nt, Artificial Sequence
  Synthetic
aaggggcaagggagcug

SEQ ID NO: 761095 - RNA, 17 nt, Artificial Sequence
  Synthetic
acuuugaaacugagcug

SEQ ID NO: 761096 - RNA, 17 nt, Artificial Sequence
  Synthetic
uuaacuacccugagcug

SEQ ID NO: 761097 - RNA, 17 nt, Artificial Sequence
  Synthetic
aaggaacccuugagcug

SEQ ID NO: 761098 - RNA, 17 nt, Artificial Sequence
  Synthetic
aagaaccgcuugagcug

SEQ ID NO: 761099 - RNA, 17 nt, Artificial Sequence
  Synthetic
caaacagcuuugagcug

SEQ ID NO: 761100 - RNA, 17 nt, Artificial Sequence
  Synthetic
ugaauuguaaauagcug

SEQ ID NO: 761101 - RNA, 17 nt, Artificial Sequence
  Synthetic
agaaguaggcauagcug

SEQ ID NO: 761102 - RNA, 17 nt, Artificial Sequence
  Synthetic
agccucaggaguagcug

SEQ ID NO: 761103 - RNA, 17 nt, Artificial Sequence
  Synthetic
agccuccugaguagcug

SEQ ID NO: 761104 - RNA, 17 nt, Artificial Sequence
  Synthetic
acagcauuuaguagcug

SEQ ID NO: 761105 - RNA, 17 nt, Artificial Sequence
  Synthetic
uucugauaagguagcug

SEQ ID NO: 761106 - RNA, 17 nt, Artificial Sequence
  Synthetic
agccucccggguagcug

SEQ ID NO: 761107 - RNA, 17 nt, Artificial Sequence
  Synthetic
cuagcagcuuguagcug

SEQ ID NO: 761108 - RNA, 17 nt, Artificial Sequence
  Synthetic
cacaauaacauuagcug

SEQ ID NO: 761109 - RNA, 17 nt, Artificial Sequence
  Synthetic
caucugaagauuagcug

SEQ ID NO: 761110 - RNA, 17 nt, Artificial Sequence
  Synthetic
acuguauagcuuagcug

SEQ ID NO: 761111 - RNA, 17 nt, Artificial Sequence
  Synthetic
cauauuagaguuagcug

SEQ ID NO: 761112 - RNA, 17 nt, Artificial Sequence
  Synthetic
aagaaacaauuuagcug

SEQ ID NO: 761113 - RNA, 17 nt, Artificial Sequence
  Synthetic
uagaaacucuuuagcug

SEQ ID NO: 761114 - RNA, 17 nt, Artificial Sequence
  Synthetic
agcuacucaggacgcug

SEQ ID NO: 761115 - RNA, 17 nt, Artificial Sequence
  Synthetic
ugucugucuuuccgcug

SEQ ID NO: 761116 - RNA, 17 nt, Artificial Sequence
  Synthetic
uuauaagccaggcgcug

SEQ ID NO: 761117 - RNA, 17 nt, Artificial Sequence
  Synthetic
uuagauugaaaaggcug

SEQ ID NO: 761118 - RNA, 17 nt, Artificial Sequence
  Synthetic
agcuacccgaaaggcug

SEQ ID NO: 761119 - RNA, 17 nt, Artificial Sequence
  Synthetic
cuaugcugccaaggcug

SEQ ID NO: 761120 - RNA, 17 nt, Artificial Sequence
  Synthetic
aucuucucagaaggcug

SEQ ID NO: 761121 - RNA, 17 nt, Artificial Sequence
  Synthetic
aacaaauuggaaggcug

SEQ ID NO: 761122 - RNA, 17 nt, Artificial Sequence
  Synthetic
agcuacuuggaaggcug

SEQ ID NO: 761123 - RNA, 17 nt, Artificial Sequence
  Synthetic
ccuuuuugugaaggcug

SEQ ID NO: 761124 - RNA, 17 nt, Artificial Sequence
  Synthetic
aacgcuacguaaggcug

SEQ ID NO: 761125 - RNA, 17 nt, Artificial Sequence
  Synthetic
aaacaaaacacaggcug

SEQ ID NO: 761126 - RNA, 17 nt, Artificial Sequence
  Synthetic
cucugucacccaggcug

SEQ ID NO: 761127 - RNA, 17 nt, Artificial Sequence
  Synthetic
ucuuguugcccaggcug

SEQ ID NO: 761128 - RNA, 17 nt, Artificial Sequence
  Synthetic
cgaugaaguccaggcug

SEQ ID NO: 761129 - RNA, 17 nt, Artificial Sequence
  Synthetic
aagcuuuguccaggcug

SEQ ID NO: 761130 - RNA, 17 nt, Artificial Sequence
  Synthetic
agcuacuuagcaggcug

SEQ ID NO: 761131 - RNA, 17 nt, Artificial Sequence
  Synthetic
agccacuaaagaggcug

SEQ ID NO: 761132 - RNA, 17 nt, Artificial Sequence
  Synthetic
agcuacucaagaggcug

SEQ ID NO: 761133 - RNA, 17 nt, Artificial Sequence
  Synthetic
uauuauggaagaggcug

SEQ ID NO: 761134 - RNA, 17 nt, Artificial Sequence
  Synthetic
ugcaucuuaagaggcug

SEQ ID NO: 761135 - RNA, 17 nt, Artificial Sequence
  Synthetic
aagcuucucagaggcug

SEQ ID NO: 761136 - RNA, 17 nt, Artificial Sequence
  Synthetic
agcuacucgagaggcug

SEQ ID NO: 761137 - RNA, 17 nt, Artificial Sequence
  Synthetic
uucuguaugagaggcug

SEQ ID NO: 761138 - RNA, 17 nt, Artificial Sequence
  Synthetic
agcacuuugagaggcug

SEQ ID NO: 761139 - RNA, 17 nt, Artificial Sequence
  Synthetic
agcuacccaggaggcug

SEQ ID NO: 761140 - RNA, 17 nt, Artificial Sequence
  Synthetic
agauacucaggaggcug

SEQ ID NO: 761141 - RNA, 17 nt, Artificial Sequence
  Synthetic
aacuacucaggaggcug

SEQ ID NO: 761142 - RNA, 17 nt, Artificial Sequence
  Synthetic
agcuacucaggaggcug

SEQ ID NO: 761143 - RNA, 17 nt, Artificial Sequence
  Synthetic
aucuacucaggaggcug

SEQ ID NO: 761144 - RNA, 17 nt, Artificial Sequence
  Synthetic
agcuauucaggaggcug

SEQ ID NO: 761145 - RNA, 17 nt, Artificial Sequence
  Synthetic
uaggaaagaggaggcug

SEQ ID NO: 761146 - RNA, 17 nt, Artificial Sequence
  Synthetic
uacucgggaggaggcug

SEQ ID NO: 761147 - RNA, 17 nt, Artificial Sequence
  Synthetic
agcuacuuaggaggcug

SEQ ID NO: 761148 - RNA, 17 nt, Artificial Sequence
  Synthetic
agcacuuuaggaggcug

SEQ ID NO: 761149 - RNA, 17 nt, Artificial Sequence
  Synthetic
cagcuacucggaggcug

SEQ ID NO: 761150 - RNA, 17 nt, Artificial Sequence
  Synthetic
agguacuucggaggcug

SEQ ID NO: 761151 - RNA, 17 nt, Artificial Sequence
  Synthetic
cgcacuuucggaggcug

SEQ ID NO: 761152 - RNA, 17 nt, Artificial Sequence
  Synthetic
agcuacuagggaggcug

SEQ ID NO: 761153 - RNA, 17 nt, Artificial Sequence
  Synthetic
agcuacacgggaggcug

SEQ ID NO: 761154 - RNA, 17 nt, Artificial Sequence
  Synthetic
cagcuaccgggaggcug

SEQ ID NO: 761155 - RNA, 17 nt, Artificial Sequence
  Synthetic
agcuacccgggaggcug

SEQ ID NO: 761156 - RNA, 17 nt, Artificial Sequence
  Synthetic
agcuacucgggaggcug

SEQ ID NO: 761157 - RNA, 17 nt, Artificial Sequence
  Synthetic
aguuacucgggaggcug

SEQ ID NO: 761158 - RNA, 17 nt, Artificial Sequence
  Synthetic
agcugcucgggaggcug

SEQ ID NO: 761159 - RNA, 17 nt, Artificial Sequence
  Synthetic
agcuacgggggaggcug

SEQ ID NO: 761160 - RNA, 17 nt, Artificial Sequence
  Synthetic
agcacuaugggaggcug

SEQ ID NO: 761161 - RNA, 17 nt, Artificial Sequence
  Synthetic
agcuaccugggaggcug

SEQ ID NO: 761162 - RNA, 17 nt, Artificial Sequence
  Synthetic
agccacuugggaggcug

SEQ ID NO: 761163 - RNA, 17 nt, Artificial Sequence
  Synthetic
agcuacuugggaggcug

SEQ ID NO: 761164 - RNA, 17 nt, Artificial Sequence
  Synthetic
ugcuacuugggaggcug

SEQ ID NO: 761165 - RNA, 17 nt, Artificial Sequence
  Synthetic
agguacuugggaggcug

SEQ ID NO: 761166 - RNA, 17 nt, Artificial Sequence
  Synthetic
agcuauuugggaggcug

SEQ ID NO: 761167 - RNA, 17 nt, Artificial Sequence
  Synthetic
aacacuuugggaggcug

SEQ ID NO: 761168 - RNA, 17 nt, Artificial Sequence
  Synthetic
accacuuugggaggcug

SEQ ID NO: 761169 - RNA, 17 nt, Artificial Sequence
  Synthetic
agcacuuugggaggcug

SEQ ID NO: 761170 - RNA, 17 nt, Artificial Sequence
  Synthetic
cgcacuuugggaggcug

SEQ ID NO: 761171 - RNA, 17 nt, Artificial Sequence
  Synthetic
aguacuuugggaggcug

SEQ ID NO: 761172 - RNA, 17 nt, Artificial Sequence
  Synthetic
agcgcuuugggaggcug

SEQ ID NO: 761173 - RNA, 17 nt, Artificial Sequence
  Synthetic
agugcuuugggaggcug

SEQ ID NO: 761174 - RNA, 17 nt, Artificial Sequence
  Synthetic
ugugcuuugggaggcug

SEQ ID NO: 761175 - RNA, 17 nt, Artificial Sequence
  Synthetic
uuuguuuugggaggcug

SEQ ID NO: 761176 - RNA, 17 nt, Artificial Sequence
  Synthetic
agacacacuggaggcug

SEQ ID NO: 761177 - RNA, 17 nt, Artificial Sequence
  Synthetic
agccacucuggaggcug

SEQ ID NO: 761178 - RNA, 17 nt, Artificial Sequence
  Synthetic
agcuacucuggaggcug

SEQ ID NO: 761179 - RNA, 17 nt, Artificial Sequence
  Synthetic
agcugcucuggaggcug

SEQ ID NO: 761180 - RNA, 17 nt, Artificial Sequence
  Synthetic
uaaguuucuggaggcug

SEQ ID NO: 761181 - RNA, 17 nt, Artificial Sequence
  Synthetic
uucugaauaugaggcug

SEQ ID NO: 761182 - RNA, 17 nt, Artificial Sequence
  Synthetic
agcuacuccugaggcug

SEQ ID NO: 761183 - RNA, 17 nt, Artificial Sequence
  Synthetic
ucaguagagcuaggcug

SEQ ID NO: 761184 - RNA, 17 nt, Artificial Sequence
  Synthetic
ucacguuaaguaggcug

SEQ ID NO: 761185 - RNA, 17 nt, Artificial Sequence
  Synthetic
agcuacucgguaggcug

SEQ ID NO: 761186 - RNA, 17 nt, Artificial Sequence
  Synthetic
uaccaccucaagggcug

SEQ ID NO: 761187 - RNA, 17 nt, Artificial Sequence
  Synthetic
auggccacccagggcug

SEQ ID NO: 761188 - RNA, 17 nt, Artificial Sequence
  Synthetic
cuguggccccagggcug

SEQ ID NO: 761189 - RNA, 17 nt, Artificial Sequence
  Synthetic
aacauuaugaggggcug

SEQ ID NO: 761190 - RNA, 17 nt, Artificial Sequence
  Synthetic
agcuacucagggggcug

SEQ ID NO: 761191 - RNA, 17 nt, Artificial Sequence
  Synthetic
ccaacacuggggggcug

SEQ ID NO: 761192 - RNA, 17 nt, Artificial Sequence
  Synthetic
cgugggguggggggcug

SEQ ID NO: 761193 - RNA, 17 nt, Artificial Sequence
  Synthetic
ccgaggauugggggcug

SEQ ID NO: 761194 - RNA, 17 nt, Artificial Sequence
  Synthetic
uugucaguuuggggcug

SEQ ID NO: 761195 - RNA, 17 nt, Artificial Sequence
  Synthetic
aaccagaggcugggcug

SEQ ID NO: 761196 - RNA, 17 nt, Artificial Sequence
  Synthetic
aauacugcugugggcug

SEQ ID NO: 761197 - RNA, 17 nt, Artificial Sequence
  Synthetic
uuuaaaaucaauggcug

SEQ ID NO: 761198 - RNA, 17 nt, Artificial Sequence
  Synthetic
caguaugauaauggcug

SEQ ID NO: 761199 - RNA, 17 nt, Artificial Sequence
  Synthetic
acaguuccacauggcug

SEQ ID NO: 761200 - RNA, 17 nt, Artificial Sequence
  Synthetic
acaguucagcauggcug

SEQ ID NO: 761201 - RNA, 17 nt, Artificial Sequence
  Synthetic
auaguucagcauggcug

SEQ ID NO: 761202 - RNA, 17 nt, Artificial Sequence
  Synthetic
accauucugcauggcug

SEQ ID NO: 761203 - RNA, 17 nt, Artificial Sequence
  Synthetic
acugguuugcauggcug

SEQ ID NO: 761204 - RNA, 17 nt, Artificial Sequence
  Synthetic
agauaaaaucauggcug

SEQ ID NO: 761205 - RNA, 17 nt, Artificial Sequence
  Synthetic
cgcuagguucauggcug

SEQ ID NO: 761206 - RNA, 17 nt, Artificial Sequence
  Synthetic
agcuacucagauggcug

SEQ ID NO: 761207 - RNA, 17 nt, Artificial Sequence
  Synthetic
acaguucaauauggcug

SEQ ID NO: 761208 - RNA, 17 nt, Artificial Sequence
  Synthetic
cagcacaccacuggcug

SEQ ID NO: 761209 - RNA, 17 nt, Artificial Sequence
  Synthetic
caguaugauacuggcug

SEQ ID NO: 761210 - RNA, 17 nt, Artificial Sequence
  Synthetic
cgauucccuucuggcug

SEQ ID NO: 761211 - RNA, 17 nt, Artificial Sequence
  Synthetic
uaaauauuuucuggcug

SEQ ID NO: 761212 - RNA, 17 nt, Artificial Sequence
  Synthetic
ugaauuuauaguggcug

SEQ ID NO: 761213 - RNA, 17 nt, Artificial Sequence
  Synthetic
cauuguguuaguggcug

SEQ ID NO: 761214 - RNA, 17 nt, Artificial Sequence
  Synthetic
ucuuuguucgguggcug

SEQ ID NO: 761215 - RNA, 17 nt, Artificial Sequence
  Synthetic
acaguucuguguggcug

SEQ ID NO: 761216 - RNA, 17 nt, Artificial Sequence
  Synthetic
uuuccccccauuggcug

SEQ ID NO: 761217 - RNA, 17 nt, Artificial Sequence
  Synthetic
acugcugggauuggcug

SEQ ID NO: 761218 - RNA, 17 nt, Artificial Sequence
  Synthetic
caguaugauauuggcug

SEQ ID NO: 761219 - RNA, 17 nt, Artificial Sequence
  Synthetic
cugaaggaacuuggcug

SEQ ID NO: 761220 - RNA, 17 nt, Artificial Sequence
  Synthetic
acgguuccacuuggcug

SEQ ID NO: 761221 - RNA, 17 nt, Artificial Sequence
  Synthetic
uggcuuccuuuuggcug

SEQ ID NO: 761222 - RNA, 17 nt, Artificial Sequence
  Synthetic
ucuguagcaaaaugcug

SEQ ID NO: 761223 - RNA, 17 nt, Artificial Sequence
  Synthetic
auuucuaguaaaugcug

SEQ ID NO: 761224 - RNA, 17 nt, Artificial Sequence
  Synthetic
ugguacuuggaaugcug

SEQ ID NO: 761225 - RNA, 17 nt, Artificial Sequence
  Synthetic
cuguaauauacaugcug

SEQ ID NO: 761226 - RNA, 17 nt, Artificial Sequence
  Synthetic
ugccauucuucaugcug

SEQ ID NO: 761227 - RNA, 17 nt, Artificial Sequence
  Synthetic
cuaaguaaaagaugcug

SEQ ID NO: 761228 - RNA, 17 nt, Artificial Sequence
  Synthetic
uuaugaauaagaugcug

SEQ ID NO: 761229 - RNA, 17 nt, Artificial Sequence
  Synthetic
ugggauuauagaugcug

SEQ ID NO: 761230 - RNA, 17 nt, Artificial Sequence
  Synthetic
cuguguucuagaugcug

SEQ ID NO: 761231 - RNA, 17 nt, Artificial Sequence
  Synthetic
aggucauuaggaugcug

SEQ ID NO: 761232 - RNA, 17 nt, Artificial Sequence
  Synthetic
agcacuuucggaugcug

SEQ ID NO: 761233 - RNA, 17 nt, Artificial Sequence
  Synthetic
agcacuuugggaugcug

SEQ ID NO: 761234 - RNA, 17 nt, Artificial Sequence
  Synthetic
caggaauuuggaugcug

SEQ ID NO: 761235 - RNA, 17 nt, Artificial Sequence
  Synthetic
aauagcgcaugaugcug

SEQ ID NO: 761236 - RNA, 17 nt, Artificial Sequence
  Synthetic
aguauugcaugaugcug

SEQ ID NO: 761237 - RNA, 17 nt, Artificial Sequence
  Synthetic
uauauggcgugaugcug

SEQ ID NO: 761238 - RNA, 17 nt, Artificial Sequence
  Synthetic
uauacugcgugaugcug

SEQ ID NO: 761239 - RNA, 17 nt, Artificial Sequence
  Synthetic
aaaggaaaaauaugcug

SEQ ID NO: 761240 - RNA, 17 nt, Artificial Sequence
  Synthetic
cacugccaaauaugcug

SEQ ID NO: 761241 - RNA, 17 nt, Artificial Sequence
  Synthetic
ugaguuggaauaugcug

SEQ ID NO: 761242 - RNA, 17 nt, Artificial Sequence
  Synthetic
uuugugauaauaugcug

SEQ ID NO: 761243 - RNA, 17 nt, Artificial Sequence
  Synthetic
uuaauaucucuaugcug

SEQ ID NO: 761244 - RNA, 17 nt, Artificial Sequence
  Synthetic
uugaaaauauuaugcug

SEQ ID NO: 761245 - RNA, 17 nt, Artificial Sequence
  Synthetic
ccccgcucaaacugcug

SEQ ID NO: 761246 - RNA, 17 nt, Artificial Sequence
  Synthetic
accauuaagcacugcug

SEQ ID NO: 761247 - RNA, 17 nt, Artificial Sequence
  Synthetic
acaauugagcacugcug

SEQ ID NO: 761248 - RNA, 17 nt, Artificial Sequence
  Synthetic
auuagaaaagacugcug

SEQ ID NO: 761249 - RNA, 17 nt, Artificial Sequence
  Synthetic
cacucuggggacugcug

SEQ ID NO: 761250 - RNA, 17 nt, Artificial Sequence
  Synthetic
uaagugaaauacugcug

SEQ ID NO: 761251 - RNA, 17 nt, Artificial Sequence
  Synthetic
ugauuuaaauacugcug

SEQ ID NO: 761252 - RNA, 17 nt, Artificial Sequence
  Synthetic
uucacguauuacugcug

SEQ ID NO: 761253 - RNA, 17 nt, Artificial Sequence
  Synthetic
aaauuuuauuacugcug

SEQ ID NO: 761254 - RNA, 17 nt, Artificial Sequence
  Synthetic
cacacuggggccugcug

SEQ ID NO: 761255 - RNA, 17 nt, Artificial Sequence
  Synthetic
ugcagcuacuccugcug

SEQ ID NO: 761256 - RNA, 17 nt, Artificial Sequence
  Synthetic
ucuuccauaggcugcug

SEQ ID NO: 761257 - RNA, 17 nt, Artificial Sequence
  Synthetic
uagauucacugcugcug

SEQ ID NO: 761258 - RNA, 17 nt, Artificial Sequence
  Synthetic
uagaaccuucucugcug

SEQ ID NO: 761259 - RNA, 17 nt, Artificial Sequence
  Synthetic
aauauaacagucugcug

SEQ ID NO: 761260 - RNA, 17 nt, Artificial Sequence
  Synthetic
uugaaaagagucugcug

SEQ ID NO: 761261 - RNA, 17 nt, Artificial Sequence
  Synthetic
aaagugaagaagugcug

SEQ ID NO: 761262 - RNA, 17 nt, Artificial Sequence
  Synthetic
auagugguuaagugcug

SEQ ID NO: 761263 - RNA, 17 nt, Artificial Sequence
  Synthetic
ccaaggaaacagugcug

SEQ ID NO: 761264 - RNA, 17 nt, Artificial Sequence
  Synthetic
ucauauugccagugcug

SEQ ID NO: 761265 - RNA, 17 nt, Artificial Sequence
  Synthetic
cagcaaaagcagugcug

SEQ ID NO: 761266 - RNA, 17 nt, Artificial Sequence
  Synthetic
cuaguugagcagugcug

SEQ ID NO: 761267 - RNA, 17 nt, Artificial Sequence
  Synthetic
ccuaggcuuuagugcug

SEQ ID NO: 761268 - RNA, 17 nt, Artificial Sequence
  Synthetic
ccuaccccaaggugcug

SEQ ID NO: 761269 - RNA, 17 nt, Artificial Sequence
  Synthetic
ccuuguggugggugcug

SEQ ID NO: 761270 - RNA, 17 nt, Artificial Sequence
  Synthetic
cagaagagauggugcug

SEQ ID NO: 761271 - RNA, 17 nt, Artificial Sequence
  Synthetic
auaaagugguggugcug

SEQ ID NO: 761272 - RNA, 17 nt, Artificial Sequence
  Synthetic
uggaggcgauugugcug

SEQ ID NO: 761273 - RNA, 17 nt, Artificial Sequence
  Synthetic
ugaaacgcaaauugcug

SEQ ID NO: 761274 - RNA, 17 nt, Artificial Sequence
  Synthetic
uaagauuuucauugcug

SEQ ID NO: 761275 - RNA, 17 nt, Artificial Sequence
  Synthetic
aauacauacuauugcug

SEQ ID NO: 761276 - RNA, 17 nt, Artificial Sequence
  Synthetic
uuuagcugcuauugcug

SEQ ID NO: 761277 - RNA, 17 nt, Artificial Sequence
  Synthetic
agaaacaggccuugcug

SEQ ID NO: 761278 - RNA, 17 nt, Artificial Sequence
  Synthetic
agcuuuuaaucuugcug

SEQ ID NO: 761279 - RNA, 17 nt, Artificial Sequence
  Synthetic
caauuagaaauuugcug

SEQ ID NO: 761280 - RNA, 17 nt, Artificial Sequence
  Synthetic
cuauacauaauuugcug

SEQ ID NO: 761281 - RNA, 17 nt, Artificial Sequence
  Synthetic
uucuuuuacauuugcug

SEQ ID NO: 761282 - RNA, 17 nt, Artificial Sequence
  Synthetic
uuuuuuugcauuugcug

SEQ ID NO: 761283 - RNA, 17 nt, Artificial Sequence
  Synthetic
uauauagauauuugcug

SEQ ID NO: 761284 - RNA, 17 nt, Artificial Sequence
  Synthetic
uccaugggccuuugcug

SEQ ID NO: 761285 - RNA, 17 nt, Artificial Sequence
  Synthetic
uucuaaguucuuugcug

SEQ ID NO: 761286 - RNA, 17 nt, Artificial Sequence
  Synthetic
ccuguguuaguuugcug

SEQ ID NO: 761287 - RNA, 17 nt, Artificial Sequence
  Synthetic
uugguugagguuugcug

SEQ ID NO: 761288 - RNA, 17 nt, Artificial Sequence
  Synthetic
uuaaaagugguuugcug

SEQ ID NO: 761289 - RNA, 17 nt, Artificial Sequence
  Synthetic
cuugacaaauuuugcug

SEQ ID NO: 761290 - RNA, 17 nt, Artificial Sequence
  Synthetic
cauuuacaauuuugcug

SEQ ID NO: 761291 - RNA, 17 nt, Artificial Sequence
  Synthetic
cagcacugcuuuugcug

SEQ ID NO: 761292 - RNA, 17 nt, Artificial Sequence
  Synthetic
auacuaaaguuuugcug

SEQ ID NO: 761293 - RNA, 17 nt, Artificial Sequence
  Synthetic
aaagcucacaaaaucug

SEQ ID NO: 761294 - RNA, 17 nt, Artificial Sequence
  Synthetic
caacaguggcaaaucug

SEQ ID NO: 761295 - RNA, 17 nt, Artificial Sequence
  Synthetic
uuaaaaaaucaaaucug

SEQ ID NO: 761296 - RNA, 17 nt, Artificial Sequence
  Synthetic
caggucuuagaaaucug

SEQ ID NO: 761297 - RNA, 17 nt, Artificial Sequence
  Synthetic
ugccuagaugaaaucug

SEQ ID NO: 761298 - RNA, 17 nt, Artificial Sequence
  Synthetic
acaugguaauaaaucug

SEQ ID NO: 761299 - RNA, 17 nt, Artificial Sequence
  Synthetic
uagacuuaguaaaucug

SEQ ID NO: 761300 - RNA, 17 nt, Artificial Sequence
  Synthetic
aaugugauaacaaucug

SEQ ID NO: 761301 - RNA, 17 nt, Artificial Sequence
  Synthetic
uaucuucucccaaucug

SEQ ID NO: 761302 - RNA, 17 nt, Artificial Sequence
  Synthetic
uagacacacagaaucug

SEQ ID NO: 761303 - RNA, 17 nt, Artificial Sequence
  Synthetic
ucuaaggucagaaucug

SEQ ID NO: 761304 - RNA, 17 nt, Artificial Sequence
  Synthetic
ugcaagaggagaaucug

SEQ ID NO: 761305 - RNA, 17 nt, Artificial Sequence
  Synthetic
ugaaaggaaugaaucug

SEQ ID NO: 761306 - RNA, 17 nt, Artificial Sequence
  Synthetic
uaacccagaugaaucug

SEQ ID NO: 761307 - RNA, 17 nt, Artificial Sequence
  Synthetic
cagcacauaauaaucug

SEQ ID NO: 761308 - RNA, 17 nt, Artificial Sequence
  Synthetic
aguaacaauauaaucug

SEQ ID NO: 761309 - RNA, 17 nt, Artificial Sequence
  Synthetic
aguagauuacuaaucug

SEQ ID NO: 761310 - RNA, 17 nt, Artificial Sequence
  Synthetic
uucguauauuuaaucug

SEQ ID NO: 761311 - RNA, 17 nt, Artificial Sequence
  Synthetic
acacauguuuuaaucug

SEQ ID NO: 761312 - RNA, 17 nt, Artificial Sequence
  Synthetic
uaggcaaugaacaucug

SEQ ID NO: 761313 - RNA, 17 nt, Artificial Sequence
  Synthetic
aaugccugacacaucug

SEQ ID NO: 761314 - RNA, 17 nt, Artificial Sequence
  Synthetic
ucaaaaaaccacaucug

SEQ ID NO: 761315 - RNA, 17 nt, Artificial Sequence
  Synthetic
aaaaagagagacaucug

SEQ ID NO: 761316 - RNA, 17 nt, Artificial Sequence
  Synthetic
cccucccaugacaucug

SEQ ID NO: 761317 - RNA, 17 nt, Artificial Sequence
  Synthetic
cucuauauuuacaucug

SEQ ID NO: 761318 - RNA, 17 nt, Artificial Sequence
  Synthetic
aucauuaccaccaucug

SEQ ID NO: 761319 - RNA, 17 nt, Artificial Sequence
  Synthetic
uuguaaaugcccaucug

SEQ ID NO: 761320 - RNA, 17 nt, Artificial Sequence
  Synthetic
cuagauggucccaucug

SEQ ID NO: 761321 - RNA, 17 nt, Artificial Sequence
  Synthetic
uuccauaugggcaucug

SEQ ID NO: 761322 - RNA, 17 nt, Artificial Sequence
  Synthetic
cuuuaaccuggcaucug

SEQ ID NO: 761323 - RNA, 17 nt, Artificial Sequence
  Synthetic
uccccuggaaucaucug

SEQ ID NO: 761324 - RNA, 17 nt, Artificial Sequence
  Synthetic
aaguggugaaucaucug

SEQ ID NO: 761325 - RNA, 17 nt, Artificial Sequence
  Synthetic
agguguuuucucaucug

SEQ ID NO: 761326 - RNA, 17 nt, Artificial Sequence
  Synthetic
acuuccucugucaucug

SEQ ID NO: 761327 - RNA, 17 nt, Artificial Sequence
  Synthetic
aaauuugacuucaucug

SEQ ID NO: 761328 - RNA, 17 nt, Artificial Sequence
  Synthetic
uaaugccugaagaucug

SEQ ID NO: 761329 - RNA, 17 nt, Artificial Sequence
  Synthetic
cuagacaggcagaucug

SEQ ID NO: 761330 - RNA, 17 nt, Artificial Sequence
  Synthetic
cuaggccugcagaucug

SEQ ID NO: 761331 - RNA, 17 nt, Artificial Sequence
  Synthetic
ccuguccgagagaucug

SEQ ID NO: 761332 - RNA, 17 nt, Artificial Sequence
  Synthetic
ccugaccuagagaucug

SEQ ID NO: 761333 - RNA, 17 nt, Artificial Sequence
  Synthetic
ccuggccuagagaucug

SEQ ID NO: 761334 - RNA, 17 nt, Artificial Sequence
  Synthetic
agcuccaccuggaucug

SEQ ID NO: 761335 - RNA, 17 nt, Artificial Sequence
  Synthetic
cuauugaaaaugaucug

SEQ ID NO: 761336 - RNA, 17 nt, Artificial Sequence
  Synthetic
uacuucacaaauaucug

SEQ ID NO: 761337 - RNA, 17 nt, Artificial Sequence
  Synthetic
caguaccagaauaucug

SEQ ID NO: 761338 - RNA, 17 nt, Artificial Sequence
  Synthetic
uuuagaguuaauaucug

SEQ ID NO: 761339 - RNA, 17 nt, Artificial Sequence
  Synthetic
uaaaaaccacauaucug

SEQ ID NO: 761340 - RNA, 17 nt, Artificial Sequence
  Synthetic
uuugcaguucauaucug

SEQ ID NO: 761341 - RNA, 17 nt, Artificial Sequence
  Synthetic
cagaguugaacuaucug

SEQ ID NO: 761342 - RNA, 17 nt, Artificial Sequence
  Synthetic
aaaggaggugcuaucug

SEQ ID NO: 761343 - RNA, 17 nt, Artificial Sequence
  Synthetic
ucucauaugucuaucug

SEQ ID NO: 761344 - RNA, 17 nt, Artificial Sequence
  Synthetic
acuucugauucuaucug

SEQ ID NO: 761345 - RNA, 17 nt, Artificial Sequence
  Synthetic
ccaccacuuucuaucug

SEQ ID NO: 761346 - RNA, 17 nt, Artificial Sequence
  Synthetic
uucuaaauauguaucug

SEQ ID NO: 761347 - RNA, 17 nt, Artificial Sequence
  Synthetic
augcagaaguguaucug

SEQ ID NO: 761348 - RNA, 17 nt, Artificial Sequence
  Synthetic
auuucagcccuuaucug

SEQ ID NO: 761349 - RNA, 17 nt, Artificial Sequence
  Synthetic
uugauuguucuuaucug

SEQ ID NO: 761350 - RNA, 17 nt, Artificial Sequence
  Synthetic
acauuuuuaguuaucug

SEQ ID NO: 761351 - RNA, 17 nt, Artificial Sequence
  Synthetic
uauuagagcuuuaucug

SEQ ID NO: 761352 - RNA, 17 nt, Artificial Sequence
  Synthetic
caucuuuuaaaacucug

SEQ ID NO: 761353 - RNA, 17 nt, Artificial Sequence
  Synthetic
cugacacagaaacucug

SEQ ID NO: 761354 - RNA, 17 nt, Artificial Sequence
  Synthetic
ucuagauugaaacucug

SEQ ID NO: 761355 - RNA, 17 nt, Artificial Sequence
  Synthetic
uagcaaaaccaacucug

SEQ ID NO: 761356 - RNA, 17 nt, Artificial Sequence
  Synthetic
aucucaccccaacucug

SEQ ID NO: 761357 - RNA, 17 nt, Artificial Sequence
  Synthetic
aauucuaagcaacucug

SEQ ID NO: 761358 - RNA, 17 nt, Artificial Sequence
  Synthetic
ccaaaucugcaacucug

SEQ ID NO: 761359 - RNA, 17 nt, Artificial Sequence
  Synthetic
cacuucacucaacucug

SEQ ID NO: 761360 - RNA, 17 nt, Artificial Sequence
  Synthetic
uugaaucaggaacucug

SEQ ID NO: 761361 - RNA, 17 nt, Artificial Sequence
  Synthetic
ccaagcccugaacucug

SEQ ID NO: 761362 - RNA, 17 nt, Artificial Sequence
  Synthetic
cugagccuugaacucug

SEQ ID NO: 761363 - RNA, 17 nt, Artificial Sequence
  Synthetic
uaggggaaauaacucug

SEQ ID NO: 761364 - RNA, 17 nt, Artificial Sequence
  Synthetic
accucaauuuaacucug

SEQ ID NO: 761365 - RNA, 17 nt, Artificial Sequence
  Synthetic
caaaccuggccacucug

SEQ ID NO: 761366 - RNA, 17 nt, Artificial Sequence
  Synthetic
aagcaguuuccacucug

SEQ ID NO: 761367 - RNA, 17 nt, Artificial Sequence
  Synthetic
uugcuggcugcacucug

SEQ ID NO: 761368 - RNA, 17 nt, Artificial Sequence
  Synthetic
ccaaaauccucacucug

SEQ ID NO: 761369 - RNA, 17 nt, Artificial Sequence
  Synthetic
acccauuuuucacucug

SEQ ID NO: 761370 - RNA, 17 nt, Artificial Sequence
  Synthetic
acucauuuuucacucug

SEQ ID NO: 761371 - RNA, 17 nt, Artificial Sequence
  Synthetic
cugaaucagagacucug

SEQ ID NO: 761372 - RNA, 17 nt, Artificial Sequence
  Synthetic
uaauuuauccuacucug

SEQ ID NO: 761373 - RNA, 17 nt, Artificial Sequence
  Synthetic
cacuuccaucuacucug

SEQ ID NO: 761374 - RNA, 17 nt, Artificial Sequence
  Synthetic
uuaacccuucuacucug

SEQ ID NO: 761375 - RNA, 17 nt, Artificial Sequence
  Synthetic
aacucuggcguacucug

SEQ ID NO: 761376 - RNA, 17 nt, Artificial Sequence
  Synthetic
uuuacagugguacucug

SEQ ID NO: 761377 - RNA, 17 nt, Artificial Sequence
  Synthetic
cagauuccuguacucug

SEQ ID NO: 761378 - RNA, 17 nt, Artificial Sequence
  Synthetic
ucuuugggauuacucug

SEQ ID NO: 761379 - RNA, 17 nt, Artificial Sequence
  Synthetic
uaauuuuaucaccucug

SEQ ID NO: 761380 - RNA, 17 nt, Artificial Sequence
  Synthetic
cuguaaaucuaccucug

SEQ ID NO: 761381 - RNA, 17 nt, Artificial Sequence
  Synthetic
cuguaacacacccucug

SEQ ID NO: 761382 - RNA, 17 nt, Artificial Sequence
  Synthetic
uugccucccacccucug

SEQ ID NO: 761383 - RNA, 17 nt, Artificial Sequence
  Synthetic
ugcuucugcgcccucug

SEQ ID NO: 761384 - RNA, 17 nt, Artificial Sequence
  Synthetic
uaguauugcagccucug

SEQ ID NO: 761385 - RNA, 17 nt, Artificial Sequence
  Synthetic
uuagauaaaggccucug

SEQ ID NO: 761386 - RNA, 17 nt, Artificial Sequence
  Synthetic
ucucccuuuggccucug

SEQ ID NO: 761387 - RNA, 17 nt, Artificial Sequence
  Synthetic
acagcaugaauccucug

SEQ ID NO: 761388 - RNA, 17 nt, Artificial Sequence
  Synthetic
auaugaaaccuccucug

SEQ ID NO: 761389 - RNA, 17 nt, Artificial Sequence
  Synthetic
uggacaugaguccucug

SEQ ID NO: 761390 - RNA, 17 nt, Artificial Sequence
  Synthetic
cugauuuacuagcucug

SEQ ID NO: 761391 - RNA, 17 nt, Artificial Sequence
  Synthetic
uaagaagaaaggcucug

SEQ ID NO: 761392 - RNA, 17 nt, Artificial Sequence
  Synthetic
ucccucugaaggcucug

SEQ ID NO: 761393 - RNA, 17 nt, Artificial Sequence
  Synthetic
aucuugguuaggcucug

SEQ ID NO: 761394 - RNA, 17 nt, Artificial Sequence
  Synthetic
uucaaaugauggcucug

SEQ ID NO: 761395 - RNA, 17 nt, Artificial Sequence
  Synthetic
acgggucuguggcucug

SEQ ID NO: 761396 - RNA, 17 nt, Artificial Sequence
  Synthetic
cuguuggggaugcucug

SEQ ID NO: 761397 - RNA, 17 nt, Artificial Sequence
  Synthetic
uucuuguugaugcucug

SEQ ID NO: 761398 - RNA, 17 nt, Artificial Sequence
  Synthetic
ccauauuaacugcucug

SEQ ID NO: 761399 - RNA, 17 nt, Artificial Sequence
  Synthetic
ucuuugaugcugcucug

SEQ ID NO: 761400 - RNA, 17 nt, Artificial Sequence
  Synthetic
agaugaaaauugcucug

SEQ ID NO: 761401 - RNA, 17 nt, Artificial Sequence
  Synthetic
uugcuuuaauugcucug

SEQ ID NO: 761402 - RNA, 17 nt, Artificial Sequence
  Synthetic
cuaaaucagaaucucug

SEQ ID NO: 761403 - RNA, 17 nt, Artificial Sequence
  Synthetic
ucugaggagaaucucug

SEQ ID NO: 761404 - RNA, 17 nt, Artificial Sequence
  Synthetic
ccaaggaagcaucucug

SEQ ID NO: 761405 - RNA, 17 nt, Artificial Sequence
  Synthetic
cugaaucagcaucucug

SEQ ID NO: 761406 - RNA, 17 nt, Artificial Sequence
  Synthetic
aaauccuuucaucucug

SEQ ID NO: 761407 - RNA, 17 nt, Artificial Sequence
  Synthetic
uaaaggaaagaucucug

SEQ ID NO: 761408 - RNA, 17 nt, Artificial Sequence
  Synthetic
uuuuucagugaucucug

SEQ ID NO: 761409 - RNA, 17 nt, Artificial Sequence
  Synthetic
caguaucccacucucug

SEQ ID NO: 761410 - RNA, 17 nt, Artificial Sequence
  Synthetic
cucucucucacucucug

SEQ ID NO: 761411 - RNA, 17 nt, Artificial Sequence
  Synthetic
aacugacauacucucug

SEQ ID NO: 761412 - RNA, 17 nt, Artificial Sequence
  Synthetic
uguauguauacucucug

SEQ ID NO: 761413 - RNA, 17 nt, Artificial Sequence
  Synthetic
aacuucuugccucucug

SEQ ID NO: 761414 - RNA, 17 nt, Artificial Sequence
  Synthetic
caugugacagcucucug

SEQ ID NO: 761415 - RNA, 17 nt, Artificial Sequence
  Synthetic
uacccggcagcucucug

SEQ ID NO: 761416 - RNA, 17 nt, Artificial Sequence
  Synthetic
agcuagcuagcucucug

SEQ ID NO: 761417 - RNA, 17 nt, Artificial Sequence
  Synthetic
aaugccugggcucucug

SEQ ID NO: 761418 - RNA, 17 nt, Artificial Sequence
  Synthetic
ucaggagcugcucucug

SEQ ID NO: 761419 - RNA, 17 nt, Artificial Sequence
  Synthetic
uaucuugggucucucug

SEQ ID NO: 761420 - RNA, 17 nt, Artificial Sequence
  Synthetic
aguagagguucucucug

SEQ ID NO: 761421 - RNA, 17 nt, Artificial Sequence
  Synthetic
ugccacuaaagucucug

SEQ ID NO: 761422 - RNA, 17 nt, Artificial Sequence
  Synthetic
uuuaaucugagucucug

SEQ ID NO: 761423 - RNA, 17 nt, Artificial Sequence
  Synthetic
caggauaauagucucug

SEQ ID NO: 761424 - RNA, 17 nt, Artificial Sequence
  Synthetic
aauacccuuagucucug

SEQ ID NO: 761425 - RNA, 17 nt, Artificial Sequence
  Synthetic
aauuuuuaacgucucug

SEQ ID NO: 761426 - RNA, 17 nt, Artificial Sequence
  Synthetic
ccucugucccgucucug

SEQ ID NO: 761427 - RNA, 17 nt, Artificial Sequence
  Synthetic
cagugguagggucucug

SEQ ID NO: 761428 - RNA, 17 nt, Artificial Sequence
  Synthetic
caauuaaaaauucucug

SEQ ID NO: 761429 - RNA, 17 nt, Artificial Sequence
  Synthetic
cgaggcugaauucucug

SEQ ID NO: 761430 - RNA, 17 nt, Artificial Sequence
  Synthetic
cauuuuuacauucucug

SEQ ID NO: 761431 - RNA, 17 nt, Artificial Sequence
  Synthetic
uuaagcaaucuucucug

SEQ ID NO: 761432 - RNA, 17 nt, Artificial Sequence
  Synthetic
acaaaagaucuucucug

SEQ ID NO: 761433 - RNA, 17 nt, Artificial Sequence
  Synthetic
uucugaaagguucucug

SEQ ID NO: 761434 - RNA, 17 nt, Artificial Sequence
  Synthetic
cugucaaauguucucug

SEQ ID NO: 761435 - RNA, 17 nt, Artificial Sequence
  Synthetic
cugucuccuguucucug

SEQ ID NO: 761436 - RNA, 17 nt, Artificial Sequence
  Synthetic
cauuuauaauuucucug

SEQ ID NO: 761437 - RNA, 17 nt, Artificial Sequence
  Synthetic
caucgagccuuucucug

SEQ ID NO: 761438 - RNA, 17 nt, Artificial Sequence
  Synthetic
cuuuccuguuuucucug

SEQ ID NO: 761439 - RNA, 17 nt, Artificial Sequence
  Synthetic
uuguaucuuuuucucug

SEQ ID NO: 761440 - RNA, 17 nt, Artificial Sequence
  Synthetic
caagaggcaacagucug

SEQ ID NO: 761441 - RNA, 17 nt, Artificial Sequence
  Synthetic
uaauugcacacagucug

SEQ ID NO: 761442 - RNA, 17 nt, Artificial Sequence
  Synthetic
auaaauuacccagucug

SEQ ID NO: 761443 - RNA, 17 nt, Artificial Sequence
  Synthetic
agcuacuuggcagucug

SEQ ID NO: 761444 - RNA, 17 nt, Artificial Sequence
  Synthetic
uggaguuacagagucug

SEQ ID NO: 761445 - RNA, 17 nt, Artificial Sequence
  Synthetic
caugaagagagagucug

SEQ ID NO: 761446 - RNA, 17 nt, Artificial Sequence
  Synthetic
agcuacaugggagucug

SEQ ID NO: 761447 - RNA, 17 nt, Artificial Sequence
  Synthetic
agcacuuugggagucug

SEQ ID NO: 761448 - RNA, 17 nt, Artificial Sequence
  Synthetic
ucuaccagcugagucug

SEQ ID NO: 761449 - RNA, 17 nt, Artificial Sequence
  Synthetic
acgugguguugagucug

SEQ ID NO: 761450 - RNA, 17 nt, Artificial Sequence
  Synthetic
uauuucauaguagucug

SEQ ID NO: 761451 - RNA, 17 nt, Artificial Sequence
  Synthetic
auaccugccaccgucug

SEQ ID NO: 761452 - RNA, 17 nt, Artificial Sequence
  Synthetic
cccuccccccaggucug

SEQ ID NO: 761453 - RNA, 17 nt, Artificial Sequence
  Synthetic
cugauuuagcaggucug

SEQ ID NO: 761454 - RNA, 17 nt, Artificial Sequence
  Synthetic
uauucccaagaggucug

SEQ ID NO: 761455 - RNA, 17 nt, Artificial Sequence
  Synthetic
cuaauuggggaggucug

SEQ ID NO: 761456 - RNA, 17 nt, Artificial Sequence
  Synthetic
cugauucaguaggucug

SEQ ID NO: 761457 - RNA, 17 nt, Artificial Sequence
  Synthetic
cggaaacaaagggucug

SEQ ID NO: 761458 - RNA, 17 nt, Artificial Sequence
  Synthetic
aauaaaaguggggucug

SEQ ID NO: 761459 - RNA, 17 nt, Artificial Sequence
  Synthetic
ugaccuguacuggucug

SEQ ID NO: 761460 - RNA, 17 nt, Artificial Sequence
  Synthetic
cauuaacuucuggucug

SEQ ID NO: 761461 - RNA, 17 nt, Artificial Sequence
  Synthetic
cuguuauuucuggucug

SEQ ID NO: 761462 - RNA, 17 nt, Artificial Sequence
  Synthetic
uccuuaaauguggucug

SEQ ID NO: 761463 - RNA, 17 nt, Artificial Sequence
  Synthetic
ccugguuauuuggucug

SEQ ID NO: 761464 - RNA, 17 nt, Artificial Sequence
  Synthetic
cugauucaaaaugucug

SEQ ID NO: 761465 - RNA, 17 nt, Artificial Sequence
  Synthetic
uaauguuaaaaugucug

SEQ ID NO: 761466 - RNA, 17 nt, Artificial Sequence
  Synthetic
uguaucacaaaugucug

SEQ ID NO: 761467 - RNA, 17 nt, Artificial Sequence
  Synthetic
aaaagaaagaaugucug

SEQ ID NO: 761468 - RNA, 17 nt, Artificial Sequence
  Synthetic
aaaaauagccaugucug

SEQ ID NO: 761469 - RNA, 17 nt, Artificial Sequence
  Synthetic
acaauguaucaugucug

SEQ ID NO: 761470 - RNA, 17 nt, Artificial Sequence
  Synthetic
caguuauaagaugucug

SEQ ID NO: 761471 - RNA, 17 nt, Artificial Sequence
  Synthetic
uagcacagcuaugucug

SEQ ID NO: 761472 - RNA, 17 nt, Artificial Sequence
  Synthetic
cacucacuguaugucug

SEQ ID NO: 761473 - RNA, 17 nt, Artificial Sequence
  Synthetic
augauucuguaugucug

SEQ ID NO: 761474 - RNA, 17 nt, Artificial Sequence
  Synthetic
ucuagagcaacugucug

SEQ ID NO: 761475 - RNA, 17 nt, Artificial Sequence
  Synthetic
uccagagaugcugucug

SEQ ID NO: 761476 - RNA, 17 nt, Artificial Sequence
  Synthetic
cacaaaggaagugucug

SEQ ID NO: 761477 - RNA, 17 nt, Artificial Sequence
  Synthetic
ucauccuucagugucug

SEQ ID NO: 761478 - RNA, 17 nt, Artificial Sequence
  Synthetic
cuagcauugagugucug

SEQ ID NO: 761479 - RNA, 17 nt, Artificial Sequence
  Synthetic
ucauccuguggugucug

SEQ ID NO: 761480 - RNA, 17 nt, Artificial Sequence
  Synthetic
agcagauuuggugucug

SEQ ID NO: 761481 - RNA, 17 nt, Artificial Sequence
  Synthetic
aguuuaaugugugucug

SEQ ID NO: 761482 - RNA, 17 nt, Artificial Sequence
  Synthetic
uaaaaguccauugucug

SEQ ID NO: 761483 - RNA, 17 nt, Artificial Sequence
  Synthetic
uauuuagguauugucug

SEQ ID NO: 761484 - RNA, 17 nt, Artificial Sequence
  Synthetic
uuguugagacuugucug

SEQ ID NO: 761485 - RNA, 17 nt, Artificial Sequence
  Synthetic
ucauaucuacuugucug

SEQ ID NO: 761486 - RNA, 17 nt, Artificial Sequence
  Synthetic
uuucuauuacuugucug

SEQ ID NO: 761487 - RNA, 17 nt, Artificial Sequence
  Synthetic
uauuauuuacuugucug

SEQ ID NO: 761488 - RNA, 17 nt, Artificial Sequence
  Synthetic
cauaucugccuugucug

SEQ ID NO: 761489 - RNA, 17 nt, Artificial Sequence
  Synthetic
aaaaguggucuugucug

SEQ ID NO: 761490 - RNA, 17 nt, Artificial Sequence
  Synthetic
uuuagcugauuugucug

SEQ ID NO: 761491 - RNA, 17 nt, Artificial Sequence
  Synthetic
agucaaggaaaauucug

SEQ ID NO: 761492 - RNA, 17 nt, Artificial Sequence
  Synthetic
auuucugccaaauucug

SEQ ID NO: 761493 - RNA, 17 nt, Artificial Sequence
  Synthetic
aaugacugugaauucug

SEQ ID NO: 761494 - RNA, 17 nt, Artificial Sequence
  Synthetic
ucuucacaauaauucug

SEQ ID NO: 761495 - RNA, 17 nt, Artificial Sequence
  Synthetic
uacucagcauaauucug

SEQ ID NO: 761496 - RNA, 17 nt, Artificial Sequence
  Synthetic
ugaucagauuaauucug

SEQ ID NO: 761497 - RNA, 17 nt, Artificial Sequence
  Synthetic
ucauauuauuaauucug

SEQ ID NO: 761498 - RNA, 17 nt, Artificial Sequence
  Synthetic
cucccauuuuaauucug

SEQ ID NO: 761499 - RNA, 17 nt, Artificial Sequence
  Synthetic
uguaacaacacauucug

SEQ ID NO: 761500 - RNA, 17 nt, Artificial Sequence
  Synthetic
aauagggucacauucug

SEQ ID NO: 761501 - RNA, 17 nt, Artificial Sequence
  Synthetic
uauuuuuacccauucug

SEQ ID NO: 761502 - RNA, 17 nt, Artificial Sequence
  Synthetic
uuaucaucuccauucug

SEQ ID NO: 761503 - RNA, 17 nt, Artificial Sequence
  Synthetic
acuauaauagcauucug

SEQ ID NO: 761504 - RNA, 17 nt, Artificial Sequence
  Synthetic
ugucugacaucauucug

SEQ ID NO: 761505 - RNA, 17 nt, Artificial Sequence
  Synthetic
ucuuuauccucauucug

SEQ ID NO: 761506 - RNA, 17 nt, Artificial Sequence
  Synthetic
cuaugugucucauucug

SEQ ID NO: 761507 - RNA, 17 nt, Artificial Sequence
  Synthetic
aucaggaagucauucug

SEQ ID NO: 761508 - RNA, 17 nt, Artificial Sequence
  Synthetic
auugaauuuucauucug

SEQ ID NO: 761509 - RNA, 17 nt, Artificial Sequence
  Synthetic
aucaaauuaagauucug

SEQ ID NO: 761510 - RNA, 17 nt, Artificial Sequence
  Synthetic
aaaugaagccgauucug

SEQ ID NO: 761511 - RNA, 17 nt, Artificial Sequence
  Synthetic
agguaggagggauucug

SEQ ID NO: 761512 - RNA, 17 nt, Artificial Sequence
  Synthetic
ugaugucauggauucug

SEQ ID NO: 761513 - RNA, 17 nt, Artificial Sequence
  Synthetic
cugggaccuggauucug

SEQ ID NO: 761514 - RNA, 17 nt, Artificial Sequence
  Synthetic
cucccaccaugauucug

SEQ ID NO: 761515 - RNA, 17 nt, Artificial Sequence
  Synthetic
acccuacuaugauucug

SEQ ID NO: 761516 - RNA, 17 nt, Artificial Sequence
  Synthetic
aaaucucuaugauucug

SEQ ID NO: 761517 - RNA, 17 nt, Artificial Sequence
  Synthetic
uuuaaaucgugauucug

SEQ ID NO: 761518 - RNA, 17 nt, Artificial Sequence
  Synthetic
uguucugaaauauucug

SEQ ID NO: 761519 - RNA, 17 nt, Artificial Sequence
  Synthetic
cuuuucaucauauucug

SEQ ID NO: 761520 - RNA, 17 nt, Artificial Sequence
  Synthetic
cauuucugacuauucug

SEQ ID NO: 761521 - RNA, 17 nt, Artificial Sequence
  Synthetic
uuuguaaagcuauucug

SEQ ID NO: 761522 - RNA, 17 nt, Artificial Sequence
  Synthetic
acaaaagagcuauucug

SEQ ID NO: 761523 - RNA, 17 nt, Artificial Sequence
  Synthetic
ucagcuuuuguauucug

SEQ ID NO: 761524 - RNA, 17 nt, Artificial Sequence
  Synthetic
uuuaaaacauuauucug

SEQ ID NO: 761525 - RNA, 17 nt, Artificial Sequence
  Synthetic
aucugcuucuuauucug

SEQ ID NO: 761526 - RNA, 17 nt, Artificial Sequence
  Synthetic
cuguuuuaguuauucug

SEQ ID NO: 761527 - RNA, 17 nt, Artificial Sequence
  Synthetic
acauagaaaaacuucug

SEQ ID NO: 761528 - RNA, 17 nt, Artificial Sequence
  Synthetic
cauucucacaacuucug

SEQ ID NO: 761529 - RNA, 17 nt, Artificial Sequence
  Synthetic
uuccagcagaacuucug

SEQ ID NO: 761530 - RNA, 17 nt, Artificial Sequence
  Synthetic
agccuguauaacuucug

SEQ ID NO: 761531 - RNA, 17 nt, Artificial Sequence
  Synthetic
uggguacaugacuucug

SEQ ID NO: 761532 - RNA, 17 nt, Artificial Sequence
  Synthetic
agcuaugccuacuucug

SEQ ID NO: 761533 - RNA, 17 nt, Artificial Sequence
  Synthetic
cuuaauuucuacuucug

SEQ ID NO: 761534 - RNA, 17 nt, Artificial Sequence
  Synthetic
auaacagaguacuucug

SEQ ID NO: 761535 - RNA, 17 nt, Artificial Sequence
  Synthetic
augcggcguuacuucug

SEQ ID NO: 761536 - RNA, 17 nt, Artificial Sequence
  Synthetic
aaauguguuuacuucug

SEQ ID NO: 761537 - RNA, 17 nt, Artificial Sequence
  Synthetic
uucgcauuaaccuucug

SEQ ID NO: 761538 - RNA, 17 nt, Artificial Sequence
  Synthetic
uccuuauaccccuucug

SEQ ID NO: 761539 - RNA, 17 nt, Artificial Sequence
  Synthetic
auuugaaagcccuucug

SEQ ID NO: 761540 - RNA, 17 nt, Artificial Sequence
  Synthetic
agggacauggccuucug

SEQ ID NO: 761541 - RNA, 17 nt, Artificial Sequence
  Synthetic
aguuuacuugccuucug

SEQ ID NO: 761542 - RNA, 17 nt, Artificial Sequence
  Synthetic
aauuuacacuccuucug

SEQ ID NO: 761543 - RNA, 17 nt, Artificial Sequence
  Synthetic
agcagcaucuccuucug

SEQ ID NO: 761544 - RNA, 17 nt, Artificial Sequence
  Synthetic
aggguugguuccuucug

SEQ ID NO: 761545 - RNA, 17 nt, Artificial Sequence
  Synthetic
caucuacucagcuucug

SEQ ID NO: 761546 - RNA, 17 nt, Artificial Sequence
  Synthetic
ugaaaauaaugcuucug

SEQ ID NO: 761547 - RNA, 17 nt, Artificial Sequence
  Synthetic
aaaagagauugcuucug

SEQ ID NO: 761548 - RNA, 17 nt, Artificial Sequence
  Synthetic
ucaggugguugcuucug

SEQ ID NO: 761549 - RNA, 17 nt, Artificial Sequence
  Synthetic
uugauauguaucuucug

SEQ ID NO: 761550 - RNA, 17 nt, Artificial Sequence
  Synthetic
ucuagccugcucuucug

SEQ ID NO: 761551 - RNA, 17 nt, Artificial Sequence
  Synthetic
aggaaagugcucuucug

SEQ ID NO: 761552 - RNA, 17 nt, Artificial Sequence
  Synthetic
uuuuggaaauucuucug

SEQ ID NO: 761553 - RNA, 17 nt, Artificial Sequence
  Synthetic
augcauugcuucuucug

SEQ ID NO: 761554 - RNA, 17 nt, Artificial Sequence
  Synthetic
ucgaauucuuucuucug

SEQ ID NO: 761555 - RNA, 17 nt, Artificial Sequence
  Synthetic
aauagcaguuucuucug

SEQ ID NO: 761556 - RNA, 17 nt, Artificial Sequence
  Synthetic
ccuucuuguuucuucug

SEQ ID NO: 761557 - RNA, 17 nt, Artificial Sequence
  Synthetic
caugguguuuucuucug

SEQ ID NO: 761558 - RNA, 17 nt, Artificial Sequence
  Synthetic
ccaagccuuaaguucug

SEQ ID NO: 761559 - RNA, 17 nt, Artificial Sequence
  Synthetic
ucuccacuacaguucug

SEQ ID NO: 761560 - RNA, 17 nt, Artificial Sequence
  Synthetic
uuaagccuccaguucug

SEQ ID NO: 761561 - RNA, 17 nt, Artificial Sequence
  Synthetic
uggcuacaucaguucug

SEQ ID NO: 761562 - RNA, 17 nt, Artificial Sequence
  Synthetic
auaagaaccuaguucug

SEQ ID NO: 761563 - RNA, 17 nt, Artificial Sequence
  Synthetic
cauauucacagguucug

SEQ ID NO: 761564 - RNA, 17 nt, Artificial Sequence
  Synthetic
auuuaaacaggguucug

SEQ ID NO: 761565 - RNA, 17 nt, Artificial Sequence
  Synthetic
ccagucgagggguucug

SEQ ID NO: 761566 - RNA, 17 nt, Artificial Sequence
  Synthetic
uaaugcagaauguucug

SEQ ID NO: 761567 - RNA, 17 nt, Artificial Sequence
  Synthetic
uccaugaauauguucug

SEQ ID NO: 761568 - RNA, 17 nt, Artificial Sequence
  Synthetic
auuuuauugguguucug

SEQ ID NO: 761569 - RNA, 17 nt, Artificial Sequence
  Synthetic
cugaaucagaauuucug

SEQ ID NO: 761570 - RNA, 17 nt, Artificial Sequence
  Synthetic
uuuucuuuuaauuucug

SEQ ID NO: 761571 - RNA, 17 nt, Artificial Sequence
  Synthetic
aauuucaaucauuucug

SEQ ID NO: 761572 - RNA, 17 nt, Artificial Sequence
  Synthetic
cuuggaccucauuucug

SEQ ID NO: 761573 - RNA, 17 nt, Artificial Sequence
  Synthetic
auaaaacuucauuucug

SEQ ID NO: 761574 - RNA, 17 nt, Artificial Sequence
  Synthetic
uugaaaauagauuucug

SEQ ID NO: 761575 - RNA, 17 nt, Artificial Sequence
  Synthetic
uacauaaaauauuucug

SEQ ID NO: 761576 - RNA, 17 nt, Artificial Sequence
  Synthetic
ucucuccuauauuucug

SEQ ID NO: 761577 - RNA, 17 nt, Artificial Sequence
  Synthetic
augcggcauuauuucug

SEQ ID NO: 761578 - RNA, 17 nt, Artificial Sequence
  Synthetic
aggagaaguuauuucug

SEQ ID NO: 761579 - RNA, 17 nt, Artificial Sequence
  Synthetic
auguggcguuauuucug

SEQ ID NO: 761580 - RNA, 17 nt, Artificial Sequence
  Synthetic
caugaaaaagcuuucug

SEQ ID NO: 761581 - RNA, 17 nt, Artificial Sequence
  Synthetic
ugcuuagugaguuucug

SEQ ID NO: 761582 - RNA, 17 nt, Artificial Sequence
  Synthetic
ccuguuuuuaguuucug

SEQ ID NO: 761583 - RNA, 17 nt, Artificial Sequence
  Synthetic
agauaaggauguuucug

SEQ ID NO: 761584 - RNA, 17 nt, Artificial Sequence
  Synthetic
agcaacaucuguuucug

SEQ ID NO: 761585 - RNA, 17 nt, Artificial Sequence
  Synthetic
aguaaccucuguuucug

SEQ ID NO: 761586 - RNA, 17 nt, Artificial Sequence
  Synthetic
auuuuugaaauuuucug

SEQ ID NO: 761587 - RNA, 17 nt, Artificial Sequence
  Synthetic
aguguccacauuuucug

SEQ ID NO: 761588 - RNA, 17 nt, Artificial Sequence
  Synthetic
aaaaacgccauuuucug

SEQ ID NO: 761589 - RNA, 17 nt, Artificial Sequence
  Synthetic
aauguauauauuuucug

SEQ ID NO: 761590 - RNA, 17 nt, Artificial Sequence
  Synthetic
acuguuggacuuuucug

SEQ ID NO: 761591 - RNA, 17 nt, Artificial Sequence
  Synthetic
aauuccuuccuuuucug

SEQ ID NO: 761592 - RNA, 17 nt, Artificial Sequence
  Synthetic
cuuggacaaguuuucug

SEQ ID NO: 761593 - RNA, 17 nt, Artificial Sequence
  Synthetic
ucuuugacauuuuucug

SEQ ID NO: 761594 - RNA, 17 nt, Artificial Sequence
  Synthetic
cccaaaucauuuuucug

SEQ ID NO: 761595 - RNA, 17 nt, Artificial Sequence
  Synthetic
agaugacauuuuuucug

SEQ ID NO: 761596 - RNA, 17 nt, Artificial Sequence
  Synthetic
aguuuuacuuuuuucug

SEQ ID NO: 761597 - RNA, 17 nt, Artificial Sequence
  Synthetic
ugaaaacaaaaaaagug

SEQ ID NO: 761598 - RNA, 17 nt, Artificial Sequence
  Synthetic
aaccccaucaaaaagug

SEQ ID NO: 761599 - RNA, 17 nt, Artificial Sequence
  Synthetic
ccaagacaagaaaagug

SEQ ID NO: 761600 - RNA, 17 nt, Artificial Sequence
  Synthetic
uacaaggaauaaaagug

SEQ ID NO: 761601 - RNA, 17 nt, Artificial Sequence
  Synthetic
ucuggaacauaaaagug

SEQ ID NO: 761602 - RNA, 17 nt, Artificial Sequence
  Synthetic
ccauauacauaaaagug

SEQ ID NO: 761603 - RNA, 17 nt, Artificial Sequence
  Synthetic
uacagaagcccaaagug

SEQ ID NO: 761604 - RNA, 17 nt, Artificial Sequence
  Synthetic
ugucucugcccaaagug

SEQ ID NO: 761605 - RNA, 17 nt, Artificial Sequence
  Synthetic
cucagccucccaaagug

SEQ ID NO: 761606 - RNA, 17 nt, Artificial Sequence
  Synthetic
cuuggccucccaaagug

SEQ ID NO: 761607 - RNA, 17 nt, Artificial Sequence
  Synthetic
aaccaaaacucaaagug

SEQ ID NO: 761608 - RNA, 17 nt, Artificial Sequence
  Synthetic
ucuugcuacucaaagug

SEQ ID NO: 761609 - RNA, 17 nt, Artificial Sequence
  Synthetic
caguuguuuucaaagug

SEQ ID NO: 761610 - RNA, 17 nt, Artificial Sequence
  Synthetic
uacauuugaagaaagug

SEQ ID NO: 761611 - RNA, 17 nt, Artificial Sequence
  Synthetic
auuauaaagagaaagug

SEQ ID NO: 761612 - RNA, 17 nt, Artificial Sequence
  Synthetic
aucagugagagaaagug

SEQ ID NO: 761613 - RNA, 17 nt, Artificial Sequence
  Synthetic
uuuuggaggagaaagug

SEQ ID NO: 761614 - RNA, 17 nt, Artificial Sequence
  Synthetic
ugagaauugagaaagug

SEQ ID NO: 761615 - RNA, 17 nt, Artificial Sequence
  Synthetic
agauguuuuagaaagug

SEQ ID NO: 761616 - RNA, 17 nt, Artificial Sequence
  Synthetic
cucagccuccgaaagug

SEQ ID NO: 761617 - RNA, 17 nt, Artificial Sequence
  Synthetic
aaugggaaaugaaagug

SEQ ID NO: 761618 - RNA, 17 nt, Artificial Sequence
  Synthetic
aaaugaacuugaaagug

SEQ ID NO: 761619 - RNA, 17 nt, Artificial Sequence
  Synthetic
agcuaagcuugaaagug

SEQ ID NO: 761620 - RNA, 17 nt, Artificial Sequence
  Synthetic
ugaucccucauaaagug

SEQ ID NO: 761621 - RNA, 17 nt, Artificial Sequence
  Synthetic
aaaugaaggauaaagug

SEQ ID NO: 761622 - RNA, 17 nt, Artificial Sequence
  Synthetic
caguguuaccuaaagug

SEQ ID NO: 761623 - RNA, 17 nt, Artificial Sequence
  Synthetic
uucauaucaguaaagug

SEQ ID NO: 761624 - RNA, 17 nt, Artificial Sequence
  Synthetic
agacaggagguaaagug

SEQ ID NO: 761625 - RNA, 17 nt, Artificial Sequence
  Synthetic
uuuuaggggguaaagug

SEQ ID NO: 761626 - RNA, 17 nt, Artificial Sequence
  Synthetic
ucuccauuuguaaagug

SEQ ID NO: 761627 - RNA, 17 nt, Artificial Sequence
  Synthetic
uuggaagaauuaaagug

SEQ ID NO: 761628 - RNA, 17 nt, Artificial Sequence
  Synthetic
cucuccaccuuaaagug

SEQ ID NO: 761629 - RNA, 17 nt, Artificial Sequence
  Synthetic
ucaugguaguuaaagug

SEQ ID NO: 761630 - RNA, 17 nt, Artificial Sequence
  Synthetic
uauuacuuguuaaagug

SEQ ID NO: 761631 - RNA, 17 nt, Artificial Sequence
  Synthetic
uaggaagaugacaagug

SEQ ID NO: 761632 - RNA, 17 nt, Artificial Sequence
  Synthetic
agcacacuaaccaagug

SEQ ID NO: 761633 - RNA, 17 nt, Artificial Sequence
  Synthetic
uaguguuucaccaagug

SEQ ID NO: 761634 - RNA, 17 nt, Artificial Sequence
  Synthetic
auauaggagaccaagug

SEQ ID NO: 761635 - RNA, 17 nt, Artificial Sequence
  Synthetic
uuugaaaaauccaagug

SEQ ID NO: 761636 - RNA, 17 nt, Artificial Sequence
  Synthetic
aaaucaccuuccaagug

SEQ ID NO: 761637 - RNA, 17 nt, Artificial Sequence
  Synthetic
caucuaagcugcaagug

SEQ ID NO: 761638 - RNA, 17 nt, Artificial Sequence
  Synthetic
ucuaaaauuaucaagug

SEQ ID NO: 761639 - RNA, 17 nt, Artificial Sequence
  Synthetic
ugaugacuuuucaagug

SEQ ID NO: 761640 - RNA, 17 nt, Artificial Sequence
  Synthetic
ugaaaaaacaagaagug

SEQ ID NO: 761641 - RNA, 17 nt, Artificial Sequence
  Synthetic
agccacuagcagaagug

SEQ ID NO: 761642 - RNA, 17 nt, Artificial Sequence
  Synthetic
cuuugaucucagaagug

SEQ ID NO: 761643 - RNA, 17 nt, Artificial Sequence
  Synthetic
caccugagucagaagug

SEQ ID NO: 761644 - RNA, 17 nt, Artificial Sequence
  Synthetic
auggagucagagaagug

SEQ ID NO: 761645 - RNA, 17 nt, Artificial Sequence
  Synthetic
auuuuaguagagaagug

SEQ ID NO: 761646 - RNA, 17 nt, Artificial Sequence
  Synthetic
caugacaucgagaagug

SEQ ID NO: 761647 - RNA, 17 nt, Artificial Sequence
  Synthetic
aauggaaaugagaagug

SEQ ID NO: 761648 - RNA, 17 nt, Artificial Sequence
  Synthetic
uuuuuaccugagaagug

SEQ ID NO: 761649 - RNA, 17 nt, Artificial Sequence
  Synthetic
aacccaaaauagaagug

SEQ ID NO: 761650 - RNA, 17 nt, Artificial Sequence
  Synthetic
uuuuagcuguagaagug

SEQ ID NO: 761651 - RNA, 17 nt, Artificial Sequence
  Synthetic
cagauaagaaggaagug

SEQ ID NO: 761652 - RNA, 17 nt, Artificial Sequence
  Synthetic
aagaucugaaggaagug

SEQ ID NO: 761653 - RNA, 17 nt, Artificial Sequence
  Synthetic
aggcuguacaggaagug

SEQ ID NO: 761654 - RNA, 17 nt, Artificial Sequence
  Synthetic
uaugaauaagggaagug

SEQ ID NO: 761655 - RNA, 17 nt, Artificial Sequence
  Synthetic
accauaauauggaagug

SEQ ID NO: 761656 - RNA, 17 nt, Artificial Sequence
  Synthetic
ucuggaaaguggaagug

SEQ ID NO: 761657 - RNA, 17 nt, Artificial Sequence
  Synthetic
cauuggagacugaagug

SEQ ID NO: 761658 - RNA, 17 nt, Artificial Sequence
  Synthetic
cuucuuucgcugaagug

SEQ ID NO: 761659 - RNA, 17 nt, Artificial Sequence
  Synthetic
ucaacaguucugaagug

SEQ ID NO: 761660 - RNA, 17 nt, Artificial Sequence
  Synthetic
uccacgcauuugaagug

SEQ ID NO: 761661 - RNA, 17 nt, Artificial Sequence
  Synthetic
ucaacaguuuugaagug

SEQ ID NO: 761662 - RNA, 17 nt, Artificial Sequence
  Synthetic
acaaggaaaaauaagug

SEQ ID NO: 761663 - RNA, 17 nt, Artificial Sequence
  Synthetic
uuguaaaugcauaagug

SEQ ID NO: 761664 - RNA, 17 nt, Artificial Sequence
  Synthetic
uaaauaaccuauaagug

SEQ ID NO: 761665 - RNA, 17 nt, Artificial Sequence
  Synthetic
aacuguucuccuaagug

SEQ ID NO: 761666 - RNA, 17 nt, Artificial Sequence
  Synthetic
aucuuggaagcuaagug

SEQ ID NO: 761667 - RNA, 17 nt, Artificial Sequence
  Synthetic
uuuggggacucuaagug

SEQ ID NO: 761668 - RNA, 17 nt, Artificial Sequence
  Synthetic
ucaaacuugaguaagug

SEQ ID NO: 761669 - RNA, 17 nt, Artificial Sequence
  Synthetic
uucuaaagauguaagug

SEQ ID NO: 761670 - RNA, 17 nt, Artificial Sequence
  Synthetic
acagcaauguguaagug

SEQ ID NO: 761671 - RNA, 17 nt, Artificial Sequence
  Synthetic
uuauguauuuguaagug

SEQ ID NO: 761672 - RNA, 17 nt, Artificial Sequence
  Synthetic
uuaaaaguuauuaagug

SEQ ID NO: 761673 - RNA, 17 nt, Artificial Sequence
  Synthetic
ucuauuggauuuaagug

SEQ ID NO: 761674 - RNA, 17 nt, Artificial Sequence
  Synthetic
uugacagaguuuaagug

SEQ ID NO: 761675 - RNA, 17 nt, Artificial Sequence
  Synthetic
uagacaaacuaacagug

SEQ ID NO: 761676 - RNA, 17 nt, Artificial Sequence
  Synthetic
uagaccuguuaacagug

SEQ ID NO: 761677 - RNA, 17 nt, Artificial Sequence
  Synthetic
uggucauacacacagug

SEQ ID NO: 761678 - RNA, 17 nt, Artificial Sequence
  Synthetic
auuugcuacacacagug

SEQ ID NO: 761679 - RNA, 17 nt, Artificial Sequence
  Synthetic
accagggucacacagug

SEQ ID NO: 761680 - RNA, 17 nt, Artificial Sequence
  Synthetic
aauggucugacacagug

SEQ ID NO: 761681 - RNA, 17 nt, Artificial Sequence
  Synthetic
cauuguggaagacagug

SEQ ID NO: 761682 - RNA, 17 nt, Artificial Sequence
  Synthetic
caaugaugaagacagug

SEQ ID NO: 761683 - RNA, 17 nt, Artificial Sequence
  Synthetic
agcaagcugagacagug

SEQ ID NO: 761684 - RNA, 17 nt, Artificial Sequence
  Synthetic
cccaacagaggacagug

SEQ ID NO: 761685 - RNA, 17 nt, Artificial Sequence
  Synthetic
ccucggcuaggacagug

SEQ ID NO: 761686 - RNA, 17 nt, Artificial Sequence
  Synthetic
aaagaccacugacagug

SEQ ID NO: 761687 - RNA, 17 nt, Artificial Sequence
  Synthetic
cucauuucuugacagug

SEQ ID NO: 761688 - RNA, 17 nt, Artificial Sequence
  Synthetic
cauugugaaaaccagug

SEQ ID NO: 761689 - RNA, 17 nt, Artificial Sequence
  Synthetic
caccacuugcaccagug

SEQ ID NO: 761690 - RNA, 17 nt, Artificial Sequence
  Synthetic
uaggcagugccccagug

SEQ ID NO: 761691 - RNA, 17 nt, Artificial Sequence
  Synthetic
cuccucguagcccagug

SEQ ID NO: 761692 - RNA, 17 nt, Artificial Sequence
  Synthetic
ucaaaauuaucccagug

SEQ ID NO: 761693 - RNA, 17 nt, Artificial Sequence
  Synthetic
uguuguuuuagccagug

SEQ ID NO: 761694 - RNA, 17 nt, Artificial Sequence
  Synthetic
cuaacuagaugccagug

SEQ ID NO: 761695 - RNA, 17 nt, Artificial Sequence
  Synthetic
augaagaccuuccagug

SEQ ID NO: 761696 - RNA, 17 nt, Artificial Sequence
  Synthetic
caauucuucuuccagug

SEQ ID NO: 761697 - RNA, 17 nt, Artificial Sequence
  Synthetic
cuauccugaaagcagug

SEQ ID NO: 761698 - RNA, 17 nt, Artificial Sequence
  Synthetic
cgaagaaauaagcagug

SEQ ID NO: 761699 - RNA, 17 nt, Artificial Sequence
  Synthetic
uuugaaucucagcagug

SEQ ID NO: 761700 - RNA, 17 nt, Artificial Sequence
  Synthetic
cagaaaagugagcagug

SEQ ID NO: 761701 - RNA, 17 nt, Artificial Sequence
  Synthetic
ucuguaagaaggcagug

SEQ ID NO: 761702 - RNA, 17 nt, Artificial Sequence
  Synthetic
cauuguggaaggcagug

SEQ ID NO: 761703 - RNA, 17 nt, Artificial Sequence
  Synthetic
auggaaauuuggcagug

SEQ ID NO: 761704 - RNA, 17 nt, Artificial Sequence
  Synthetic
caauuggguaugcagug

SEQ ID NO: 761705 - RNA, 17 nt, Artificial Sequence
  Synthetic
aauguauuuaugcagug

SEQ ID NO: 761706 - RNA, 17 nt, Artificial Sequence
  Synthetic
caguagcaacugcagug

SEQ ID NO: 761707 - RNA, 17 nt, Artificial Sequence
  Synthetic
agauggcuucugcagug

SEQ ID NO: 761708 - RNA, 17 nt, Artificial Sequence
  Synthetic
uugguuuuucugcagug

SEQ ID NO: 761709 - RNA, 17 nt, Artificial Sequence
  Synthetic
aagguuaaugugcagug

SEQ ID NO: 761710 - RNA, 17 nt, Artificial Sequence
  Synthetic
auucaagcaaaucagug

SEQ ID NO: 761711 - RNA, 17 nt, Artificial Sequence
  Synthetic
ugauuagagaaucagug

SEQ ID NO: 761712 - RNA, 17 nt, Artificial Sequence
  Synthetic
agucaggaccaucagug

SEQ ID NO: 761713 - RNA, 17 nt, Artificial Sequence
  Synthetic
aaacauagccaucagug

SEQ ID NO: 761714 - RNA, 17 nt, Artificial Sequence
  Synthetic
cuaaaaguggaucagug

SEQ ID NO: 761715 - RNA, 17 nt, Artificial Sequence
  Synthetic
auuuguauguaucagug

SEQ ID NO: 761716 - RNA, 17 nt, Artificial Sequence
  Synthetic
auaccaccuacucagug

SEQ ID NO: 761717 - RNA, 17 nt, Artificial Sequence
  Synthetic
uuugucuuaccucagug

SEQ ID NO: 761718 - RNA, 17 nt, Artificial Sequence
  Synthetic
aggcucuugccucagug

SEQ ID NO: 761719 - RNA, 17 nt, Artificial Sequence
  Synthetic
cauuguggaagucagug

SEQ ID NO: 761720 - RNA, 17 nt, Artificial Sequence
  Synthetic
caaaggcuuagucagug

SEQ ID NO: 761721 - RNA, 17 nt, Artificial Sequence
  Synthetic
uuccauccaugucagug

SEQ ID NO: 761722 - RNA, 17 nt, Artificial Sequence
  Synthetic
aaacuaggaauucagug

SEQ ID NO: 761723 - RNA, 17 nt, Artificial Sequence
  Synthetic
uuuuuaaagauucagug

SEQ ID NO: 761724 - RNA, 17 nt, Artificial Sequence
  Synthetic
cugggcaguauucagug

SEQ ID NO: 761725 - RNA, 17 nt, Artificial Sequence
  Synthetic
uuuuuuuugcuucagug

SEQ ID NO: 761726 - RNA, 17 nt, Artificial Sequence
  Synthetic
uacagcacauuucagug

SEQ ID NO: 761727 - RNA, 17 nt, Artificial Sequence
  Synthetic
acauaguacuuucagug

SEQ ID NO: 761728 - RNA, 17 nt, Artificial Sequence
  Synthetic
aauuugauguuucagug

SEQ ID NO: 761729 - RNA, 17 nt, Artificial Sequence
  Synthetic
aggauuucuuuucagug

SEQ ID NO: 761730 - RNA, 17 nt, Artificial Sequence
  Synthetic
aaaacaguuuuucagug

SEQ ID NO: 761731 - RNA, 17 nt, Artificial Sequence
  Synthetic
agauaaagaaaagagug

SEQ ID NO: 761732 - RNA, 17 nt, Artificial Sequence
  Synthetic
ugucccugaaaagagug

SEQ ID NO: 761733 - RNA, 17 nt, Artificial Sequence
  Synthetic
caagguaguaaagagug

SEQ ID NO: 761734 - RNA, 17 nt, Artificial Sequence
  Synthetic
auuuucuuccaagagug

SEQ ID NO: 761735 - RNA, 17 nt, Artificial Sequence
  Synthetic
aacccauuucaagagug

SEQ ID NO: 761736 - RNA, 17 nt, Artificial Sequence
  Synthetic
uuguaaaaauaagagug

SEQ ID NO: 761737 - RNA, 17 nt, Artificial Sequence
  Synthetic
aauacacccacagagug

SEQ ID NO: 761738 - RNA, 17 nt, Artificial Sequence
  Synthetic
cacaugcgcacagagug

SEQ ID NO: 761739 - RNA, 17 nt, Artificial Sequence
  Synthetic
uaaaacacuucagagug

SEQ ID NO: 761740 - RNA, 17 nt, Artificial Sequence
  Synthetic
uagcuaaaaagagagug

SEQ ID NO: 761741 - RNA, 17 nt, Artificial Sequence
  Synthetic
aaggaagaaagagagug

SEQ ID NO: 761742 - RNA, 17 nt, Artificial Sequence
  Synthetic
caagccagaagagagug

SEQ ID NO: 761743 - RNA, 17 nt, Artificial Sequence
  Synthetic
augggccuaagagagug

SEQ ID NO: 761744 - RNA, 17 nt, Artificial Sequence
  Synthetic
ugguacugcagagagug

SEQ ID NO: 761745 - RNA, 17 nt, Artificial Sequence
  Synthetic
aagaaauagggagagug

SEQ ID NO: 761746 - RNA, 17 nt, Artificial Sequence
  Synthetic
acucauaugggagagug

SEQ ID NO: 761747 - RNA, 17 nt, Artificial Sequence
  Synthetic
auuuauucuggagagug

SEQ ID NO: 761748 - RNA, 17 nt, Artificial Sequence
  Synthetic
uuucugauuggagagug

SEQ ID NO: 761749 - RNA, 17 nt, Artificial Sequence
  Synthetic
uuaugaaucugagagug

SEQ ID NO: 761750 - RNA, 17 nt, Artificial Sequence
  Synthetic
uggcccuuuugagagug

SEQ ID NO: 761751 - RNA, 17 nt, Artificial Sequence
  Synthetic
uugguaccaguagagug

SEQ ID NO: 761752 - RNA, 17 nt, Artificial Sequence
  Synthetic
ucucagaugguagagug

SEQ ID NO: 761753 - RNA, 17 nt, Artificial Sequence
  Synthetic
uagggacuauuagagug

SEQ ID NO: 761754 - RNA, 17 nt, Artificial Sequence
  Synthetic
uccuauuacuuagagug

SEQ ID NO: 761755 - RNA, 17 nt, Artificial Sequence
  Synthetic
caugggcuuugcgagug

SEQ ID NO: 761756 - RNA, 17 nt, Artificial Sequence
  Synthetic
acuuucugggucgagug

SEQ ID NO: 761757 - RNA, 17 nt, Artificial Sequence
  Synthetic
aacucucccaaggagug

SEQ ID NO: 761758 - RNA, 17 nt, Artificial Sequence
  Synthetic
aggagggagaaggagug

SEQ ID NO: 761759 - RNA, 17 nt, Artificial Sequence
  Synthetic
auauauacccaggagug

SEQ ID NO: 761760 - RNA, 17 nt, Artificial Sequence
  Synthetic
aggacaaaagaggagug

SEQ ID NO: 761761 - RNA, 17 nt, Artificial Sequence
  Synthetic
cuguucacagaggagug

SEQ ID NO: 761762 - RNA, 17 nt, Artificial Sequence
  Synthetic
uaacccagaagggagug

SEQ ID NO: 761763 - RNA, 17 nt, Artificial Sequence
  Synthetic
ccauuuuaacgggagug

SEQ ID NO: 761764 - RNA, 17 nt, Artificial Sequence
  Synthetic
uugaaugaaggggagug

SEQ ID NO: 761765 - RNA, 17 nt, Artificial Sequence
  Synthetic
agccagaaaugggagug

SEQ ID NO: 761766 - RNA, 17 nt, Artificial Sequence
  Synthetic
ccaauuuacugggagug

SEQ ID NO: 761767 - RNA, 17 nt, Artificial Sequence
  Synthetic
ugaccaagcugggagug

SEQ ID NO: 761768 - RNA, 17 nt, Artificial Sequence
  Synthetic
aaauaucucugggagug

SEQ ID NO: 761769 - RNA, 17 nt, Artificial Sequence
  Synthetic
uggggagcuugggagug

SEQ ID NO: 761770 - RNA, 17 nt, Artificial Sequence
  Synthetic
uucagggcuugggagug

SEQ ID NO: 761771 - RNA, 17 nt, Artificial Sequence
  Synthetic
aguucagaaauggagug

SEQ ID NO: 761772 - RNA, 17 nt, Artificial Sequence
  Synthetic
aaaaauguaauggagug

SEQ ID NO: 761773 - RNA, 17 nt, Artificial Sequence
  Synthetic
ucgcccaggcuggagug

SEQ ID NO: 761774 - RNA, 17 nt, Artificial Sequence
  Synthetic
uugcccaggcuggagug

SEQ ID NO: 761775 - RNA, 17 nt, Artificial Sequence
  Synthetic
cuagacuuuuuggagug

SEQ ID NO: 761776 - RNA, 17 nt, Artificial Sequence
  Synthetic
aggaaaagaaaugagug

SEQ ID NO: 761777 - RNA, 17 nt, Artificial Sequence
  Synthetic
aagaaggagaaugagug

SEQ ID NO: 761778 - RNA, 17 nt, Artificial Sequence
  Synthetic
auucccaccuaugagug

SEQ ID NO: 761779 - RNA, 17 nt, Artificial Sequence
  Synthetic
uaauaaccuacugagug

SEQ ID NO: 761780 - RNA, 17 nt, Artificial Sequence
  Synthetic
uaaagaaaaucugagug

SEQ ID NO: 761781 - RNA, 17 nt, Artificial Sequence
  Synthetic
cagacauacagugagug

SEQ ID NO: 761782 - RNA, 17 nt, Artificial Sequence
  Synthetic
ugccagucaugugagug

SEQ ID NO: 761783 - RNA, 17 nt, Artificial Sequence
  Synthetic
uaagaauggguugagug

SEQ ID NO: 761784 - RNA, 17 nt, Artificial Sequence
  Synthetic
uaacauucauuugagug

SEQ ID NO: 761785 - RNA, 17 nt, Artificial Sequence
  Synthetic
aaaaugagauuugagug

SEQ ID NO: 761786 - RNA, 17 nt, Artificial Sequence
  Synthetic
uauagguggaaauagug

SEQ ID NO: 761787 - RNA, 17 nt, Artificial Sequence
  Synthetic
ucauuuccuuaauagug

SEQ ID NO: 761788 - RNA, 17 nt, Artificial Sequence
  Synthetic
aaagaggaagcauagug

SEQ ID NO: 761789 - RNA, 17 nt, Artificial Sequence
  Synthetic
aggagcaaaucauagug

SEQ ID NO: 761790 - RNA, 17 nt, Artificial Sequence
  Synthetic
uaacuugauucauagug

SEQ ID NO: 761791 - RNA, 17 nt, Artificial Sequence
  Synthetic
acuaaacauagauagug

SEQ ID NO: 761792 - RNA, 17 nt, Artificial Sequence
  Synthetic
ccugaucagggauagug

SEQ ID NO: 761793 - RNA, 17 nt, Artificial Sequence
  Synthetic
aaaaauacuugauagug

SEQ ID NO: 761794 - RNA, 17 nt, Artificial Sequence
  Synthetic
cagugaaaaauauagug

SEQ ID NO: 761795 - RNA, 17 nt, Artificial Sequence
  Synthetic
uauuauugucuauagug

SEQ ID NO: 761796 - RNA, 17 nt, Artificial Sequence
  Synthetic
uaaauuggaguauagug

SEQ ID NO: 761797 - RNA, 17 nt, Artificial Sequence
  Synthetic
acuaguuaaaacuagug

SEQ ID NO: 761798 - RNA, 17 nt, Artificial Sequence
  Synthetic
cuggagggcaacuagug

SEQ ID NO: 761799 - RNA, 17 nt, Artificial Sequence
  Synthetic
uggcuuguuuacuagug

SEQ ID NO: 761800 - RNA, 17 nt, Artificial Sequence
  Synthetic
auugggaagaccuagug

SEQ ID NO: 761801 - RNA, 17 nt, Artificial Sequence
  Synthetic
cuaggaggucccuagug

SEQ ID NO: 761802 - RNA, 17 nt, Artificial Sequence
  Synthetic
uccacaacauccuagug

SEQ ID NO: 761803 - RNA, 17 nt, Artificial Sequence
  Synthetic
uaaaugaccuccuagug

SEQ ID NO: 761804 - RNA, 17 nt, Artificial Sequence
  Synthetic
ucucccagcgucuagug

SEQ ID NO: 761805 - RNA, 17 nt, Artificial Sequence
  Synthetic
ugcaaguaggaguagug

SEQ ID NO: 761806 - RNA, 17 nt, Artificial Sequence
  Synthetic
aacaucagugaguagug

SEQ ID NO: 761807 - RNA, 17 nt, Artificial Sequence
  Synthetic
agagugggaagguagug

SEQ ID NO: 761808 - RNA, 17 nt, Artificial Sequence
  Synthetic
cuuuuugugagguagug

SEQ ID NO: 761809 - RNA, 17 nt, Artificial Sequence
  Synthetic
ucacacuuuugguagug

SEQ ID NO: 761810 - RNA, 17 nt, Artificial Sequence
  Synthetic
ugcaaauaaauguagug

SEQ ID NO: 761811 - RNA, 17 nt, Artificial Sequence
  Synthetic
uaaucauaaauguagug

SEQ ID NO: 761812 - RNA, 17 nt, Artificial Sequence
  Synthetic
agucuuggaguguagug

SEQ ID NO: 761813 - RNA, 17 nt, Artificial Sequence
  Synthetic
cuucugauaaauuagug

SEQ ID NO: 761814 - RNA, 17 nt, Artificial Sequence
  Synthetic
uucccugcugauuagug

SEQ ID NO: 761815 - RNA, 17 nt, Artificial Sequence
  Synthetic
uaacauguugcuuagug

SEQ ID NO: 761816 - RNA, 17 nt, Artificial Sequence
  Synthetic
aggagagaauguuagug

SEQ ID NO: 761817 - RNA, 17 nt, Artificial Sequence
  Synthetic
uuuccugaauguuagug

SEQ ID NO: 761818 - RNA, 17 nt, Artificial Sequence
  Synthetic
cuuugaaaaauuuagug

SEQ ID NO: 761819 - RNA, 17 nt, Artificial Sequence
  Synthetic
uuagggagcauuuagug

SEQ ID NO: 761820 - RNA, 17 nt, Artificial Sequence
  Synthetic
ucagcauuuauuuagug

SEQ ID NO: 761821 - RNA, 17 nt, Artificial Sequence
  Synthetic
ugaucuguaguuuagug

SEQ ID NO: 761822 - RNA, 17 nt, Artificial Sequence
  Synthetic
cuggcuacuguuuagug

SEQ ID NO: 761823 - RNA, 17 nt, Artificial Sequence
  Synthetic
ucaauaugguuuuagug

SEQ ID NO: 761824 - RNA, 17 nt, Artificial Sequence
  Synthetic
acuggagauuuuuagug

SEQ ID NO: 761825 - RNA, 17 nt, Artificial Sequence
  Synthetic
uuugguaguuuuuagug

SEQ ID NO: 761826 - RNA, 17 nt, Artificial Sequence
  Synthetic
cacaugugcacaacgug

SEQ ID NO: 761827 - RNA, 17 nt, Artificial Sequence
  Synthetic
agugaaaacagaacgug

SEQ ID NO: 761828 - RNA, 17 nt, Artificial Sequence
  Synthetic
cccucccacaacacgug

SEQ ID NO: 761829 - RNA, 17 nt, Artificial Sequence
  Synthetic
cucucccuugacacgug

SEQ ID NO: 761830 - RNA, 17 nt, Artificial Sequence
  Synthetic
agucaggaauucacgug

SEQ ID NO: 761831 - RNA, 17 nt, Artificial Sequence
  Synthetic
aucccucccaggacgug

SEQ ID NO: 761832 - RNA, 17 nt, Artificial Sequence
  Synthetic
ucuuuugcuacuacgug

SEQ ID NO: 761833 - RNA, 17 nt, Artificial Sequence
  Synthetic
uuacauuguguuacgug

SEQ ID NO: 761834 - RNA, 17 nt, Artificial Sequence
  Synthetic
cauuguggaagaccgug

SEQ ID NO: 761835 - RNA, 17 nt, Artificial Sequence
  Synthetic
agccaacagaagccgug

SEQ ID NO: 761836 - RNA, 17 nt, Artificial Sequence
  Synthetic
uggauuugcuauccgug

SEQ ID NO: 761837 - RNA, 17 nt, Artificial Sequence
  Synthetic
cugggauuacaggcgug

SEQ ID NO: 761838 - RNA, 17 nt, Artificial Sequence
  Synthetic
aacaguagccaggcgug

SEQ ID NO: 761839 - RNA, 17 nt, Artificial Sequence
  Synthetic
aauaaaauauuggcgug

SEQ ID NO: 761840 - RNA, 17 nt, Artificial Sequence
  Synthetic
aauccagaugcugcgug

SEQ ID NO: 761841 - RNA, 17 nt, Artificial Sequence
  Synthetic
aaaaguagccaaucgug

SEQ ID NO: 761842 - RNA, 17 nt, Artificial Sequence
  Synthetic
caggaaaguuaaucgug

SEQ ID NO: 761843 - RNA, 17 nt, Artificial Sequence
  Synthetic
aggcacaauucaucgug

SEQ ID NO: 761844 - RNA, 17 nt, Artificial Sequence
  Synthetic
aaccaaacccacucgug

SEQ ID NO: 761845 - RNA, 17 nt, Artificial Sequence
  Synthetic
aaccuagaucccucgug

SEQ ID NO: 761846 - RNA, 17 nt, Artificial Sequence
  Synthetic
auuugcaacuucucgug

SEQ ID NO: 761847 - RNA, 17 nt, Artificial Sequence
  Synthetic
caccagggccugucgug

SEQ ID NO: 761848 - RNA, 17 nt, Artificial Sequence
  Synthetic
caccggggccugucgug

SEQ ID NO: 761849 - RNA, 17 nt, Artificial Sequence
  Synthetic
cacuggggccugucgug

SEQ ID NO: 761850 - RNA, 17 nt, Artificial Sequence
  Synthetic
agauguaaacaaaggug

SEQ ID NO: 761851 - RNA, 17 nt, Artificial Sequence
  Synthetic
agcaagcaacaaaggug

SEQ ID NO: 761852 - RNA, 17 nt, Artificial Sequence
  Synthetic
ucauaaggagaaaggug

SEQ ID NO: 761853 - RNA, 17 nt, Artificial Sequence
  Synthetic
uugcuucaagcaaggug

SEQ ID NO: 761854 - RNA, 17 nt, Artificial Sequence
  Synthetic
uaauagauugcaaggug

SEQ ID NO: 761855 - RNA, 17 nt, Artificial Sequence
  Synthetic
uggcuguguucaaggug

SEQ ID NO: 761856 - RNA, 17 nt, Artificial Sequence
  Synthetic
caguguaagagaaggug

SEQ ID NO: 761857 - RNA, 17 nt, Artificial Sequence
  Synthetic
uuuuaagagagaaggug

SEQ ID NO: 761858 - RNA, 17 nt, Artificial Sequence
  Synthetic
aaucccauccuaaggug

SEQ ID NO: 761859 - RNA, 17 nt, Artificial Sequence
  Synthetic
cuaaccaaaguaaggug

SEQ ID NO: 761860 - RNA, 17 nt, Artificial Sequence
  Synthetic
aacccacuuuuaaggug

SEQ ID NO: 761861 - RNA, 17 nt, Artificial Sequence
  Synthetic
agagcaggaaacaggug

SEQ ID NO: 761862 - RNA, 17 nt, Artificial Sequence
  Synthetic
uaccuauuuuacaggug

SEQ ID NO: 761863 - RNA, 17 nt, Artificial Sequence
  Synthetic
acaaucucaaccaggug

SEQ ID NO: 761864 - RNA, 17 nt, Artificial Sequence
  Synthetic
caaaaauuaaccaggug

SEQ ID NO: 761865 - RNA, 17 nt, Artificial Sequence
  Synthetic
caaacauucaccaggug

SEQ ID NO: 761866 - RNA, 17 nt, Artificial Sequence
  Synthetic
acaacccagaccaggug

SEQ ID NO: 761867 - RNA, 17 nt, Artificial Sequence
  Synthetic
aaaaucucagccaggug

SEQ ID NO: 761868 - RNA, 17 nt, Artificial Sequence
  Synthetic
caaaaauuagccaggug

SEQ ID NO: 761869 - RNA, 17 nt, Artificial Sequence
  Synthetic
aaaacauuagccaggug

SEQ ID NO: 761870 - RNA, 17 nt, Artificial Sequence
  Synthetic
aaagaauaggccaggug

SEQ ID NO: 761871 - RNA, 17 nt, Artificial Sequence
  Synthetic
aaagagugggccaggug

SEQ ID NO: 761872 - RNA, 17 nt, Artificial Sequence
  Synthetic
agauucauggccaggug

SEQ ID NO: 761873 - RNA, 17 nt, Artificial Sequence
  Synthetic
cuugagauggccaggug

SEQ ID NO: 761874 - RNA, 17 nt, Artificial Sequence
  Synthetic
uaaucaguggccaggug

SEQ ID NO: 761875 - RNA, 17 nt, Artificial Sequence
  Synthetic
uuaaaauuggccaggug

SEQ ID NO: 761876 - RNA, 17 nt, Artificial Sequence
  Synthetic
aagguauuggccaggug

SEQ ID NO: 761877 - RNA, 17 nt, Artificial Sequence
  Synthetic
aaguuugcaagcaggug

SEQ ID NO: 761878 - RNA, 17 nt, Artificial Sequence
  Synthetic
aucaggggacgcaggug

SEQ ID NO: 761879 - RNA, 17 nt, Artificial Sequence
  Synthetic
accuuccagggcaggug

SEQ ID NO: 761880 - RNA, 17 nt, Artificial Sequence
  Synthetic
ccaugcuuugucaggug

SEQ ID NO: 761881 - RNA, 17 nt, Artificial Sequence
  Synthetic
cucauacuuuucaggug

SEQ ID NO: 761882 - RNA, 17 nt, Artificial Sequence
  Synthetic
aagggcaaaaagaggug

SEQ ID NO: 761883 - RNA, 17 nt, Artificial Sequence
  Synthetic
augggcauaaagaggug

SEQ ID NO: 761884 - RNA, 17 nt, Artificial Sequence
  Synthetic
aaugcuauugagaggug

SEQ ID NO: 761885 - RNA, 17 nt, Artificial Sequence
  Synthetic
uacugagauuagaggug

SEQ ID NO: 761886 - RNA, 17 nt, Artificial Sequence
  Synthetic
uuugggaggccgaggug

SEQ ID NO: 761887 - RNA, 17 nt, Artificial Sequence
  Synthetic
aggccugucgcgaggug

SEQ ID NO: 761888 - RNA, 17 nt, Artificial Sequence
  Synthetic
aaauguaguaggaggug

SEQ ID NO: 761889 - RNA, 17 nt, Artificial Sequence
  Synthetic
agggucguggggaggug

SEQ ID NO: 761890 - RNA, 17 nt, Artificial Sequence
  Synthetic
caccgucuguggaggug

SEQ ID NO: 761891 - RNA, 17 nt, Artificial Sequence
  Synthetic
ccucaauauuggaggug

SEQ ID NO: 761892 - RNA, 17 nt, Artificial Sequence
  Synthetic
ccccaauguuggaggug

SEQ ID NO: 761893 - RNA, 17 nt, Artificial Sequence
  Synthetic
ucccaguguuggaggug

SEQ ID NO: 761894 - RNA, 17 nt, Artificial Sequence
  Synthetic
auggauauuuggaggug

SEQ ID NO: 761895 - RNA, 17 nt, Artificial Sequence
  Synthetic
uauuaaaauaugaggug

SEQ ID NO: 761896 - RNA, 17 nt, Artificial Sequence
  Synthetic
cagugggaccugaggug

SEQ ID NO: 761897 - RNA, 17 nt, Artificial Sequence
  Synthetic
agaauguuagugaggug

SEQ ID NO: 761898 - RNA, 17 nt, Artificial Sequence
  Synthetic
uauuggccugugaggug

SEQ ID NO: 761899 - RNA, 17 nt, Artificial Sequence
  Synthetic
cugcacugcuugaggug

SEQ ID NO: 761900 - RNA, 17 nt, Artificial Sequence
  Synthetic
caauuuuggaauaggug

SEQ ID NO: 761901 - RNA, 17 nt, Artificial Sequence
  Synthetic
auucucacucauaggug

SEQ ID NO: 761902 - RNA, 17 nt, Artificial Sequence
  Synthetic
uagagccaugcuaggug

SEQ ID NO: 761903 - RNA, 17 nt, Artificial Sequence
  Synthetic
ccauaaaaaucuaggug

SEQ ID NO: 761904 - RNA, 17 nt, Artificial Sequence
  Synthetic
uuuugagagaguaggug

SEQ ID NO: 761905 - RNA, 17 nt, Artificial Sequence
  Synthetic
ucugauacauguaggug

SEQ ID NO: 761906 - RNA, 17 nt, Artificial Sequence
  Synthetic
uggaaacuuuguaggug

SEQ ID NO: 761907 - RNA, 17 nt, Artificial Sequence
  Synthetic
ucaucuuugauuaggug

SEQ ID NO: 761908 - RNA, 17 nt, Artificial Sequence
  Synthetic
ucuucaaaucuuaggug

SEQ ID NO: 761909 - RNA, 17 nt, Artificial Sequence
  Synthetic
uugaaugccuuuaggug

SEQ ID NO: 761910 - RNA, 17 nt, Artificial Sequence
  Synthetic
aucaugacuuuuaggug

SEQ ID NO: 761911 - RNA, 17 nt, Artificial Sequence
  Synthetic
cauuguggaagucggug

SEQ ID NO: 761912 - RNA, 17 nt, Artificial Sequence
  Synthetic
cacaacaggaaagggug

SEQ ID NO: 761913 - RNA, 17 nt, Artificial Sequence
  Synthetic
uaaguuaaacaagggug

SEQ ID NO: 761914 - RNA, 17 nt, Artificial Sequence
  Synthetic
uggggaacacaagggug

SEQ ID NO: 761915 - RNA, 17 nt, Artificial Sequence
  Synthetic
aaagauguucaagggug

SEQ ID NO: 761916 - RNA, 17 nt, Artificial Sequence
  Synthetic
uguacuagggaagggug

SEQ ID NO: 761917 - RNA, 17 nt, Artificial Sequence
  Synthetic
cacuuggacacagggug

SEQ ID NO: 761918 - RNA, 17 nt, Artificial Sequence
  Synthetic
aaaaaauuagcagggug

SEQ ID NO: 761919 - RNA, 17 nt, Artificial Sequence
  Synthetic
ucaucaccuugagggug

SEQ ID NO: 761920 - RNA, 17 nt, Artificial Sequence
  Synthetic
uuuuuggcuugagggug

SEQ ID NO: 761921 - RNA, 17 nt, Artificial Sequence
  Synthetic
aagagaugcauagggug

SEQ ID NO: 761922 - RNA, 17 nt, Artificial Sequence
  Synthetic
uaccaagcccuagggug

SEQ ID NO: 761923 - RNA, 17 nt, Artificial Sequence
  Synthetic
acagucaucuuagggug

SEQ ID NO: 761924 - RNA, 17 nt, Artificial Sequence
  Synthetic
caaaaauuacccgggug

SEQ ID NO: 761925 - RNA, 17 nt, Artificial Sequence
  Synthetic
aaaaaauuagccgggug

SEQ ID NO: 761926 - RNA, 17 nt, Artificial Sequence
  Synthetic
caaaaauuagccgggug

SEQ ID NO: 761927 - RNA, 17 nt, Artificial Sequence
  Synthetic
cauguugcggccgggug

SEQ ID NO: 761928 - RNA, 17 nt, Artificial Sequence
  Synthetic
agaaaacgggccgggug

SEQ ID NO: 761929 - RNA, 17 nt, Artificial Sequence
  Synthetic
aauuuuuuggccgggug

SEQ ID NO: 761930 - RNA, 17 nt, Artificial Sequence
  Synthetic
uggaucaggggcgggug

SEQ ID NO: 761931 - RNA, 17 nt, Artificial Sequence
  Synthetic
caaaaauuaaucgggug

SEQ ID NO: 761932 - RNA, 17 nt, Artificial Sequence
  Synthetic
agccaugaugaggggug

SEQ ID NO: 761933 - RNA, 17 nt, Artificial Sequence
  Synthetic
cuugugcuuccggggug

SEQ ID NO: 761934 - RNA, 17 nt, Artificial Sequence
  Synthetic
caaaaaguagcggggug

SEQ ID NO: 761935 - RNA, 17 nt, Artificial Sequence
  Synthetic
uuugaagugagggggug

SEQ ID NO: 761936 - RNA, 17 nt, Artificial Sequence
  Synthetic
uugggguggcgggggug

SEQ ID NO: 761937 - RNA, 17 nt, Artificial Sequence
  Synthetic
aggccugucggggggug

SEQ ID NO: 761938 - RNA, 17 nt, Artificial Sequence
  Synthetic
acugaaucaugggggug

SEQ ID NO: 761939 - RNA, 17 nt, Artificial Sequence
  Synthetic
ugguggguaugggggug

SEQ ID NO: 761940 - RNA, 17 nt, Artificial Sequence
  Synthetic
auuagauccugggggug

SEQ ID NO: 761941 - RNA, 17 nt, Artificial Sequence
  Synthetic
ugauuugucugggggug

SEQ ID NO: 761942 - RNA, 17 nt, Artificial Sequence
  Synthetic
aagacaaugugggggug

SEQ ID NO: 761943 - RNA, 17 nt, Artificial Sequence
  Synthetic
aaaaaaaauugggggug

SEQ ID NO: 761944 - RNA, 17 nt, Artificial Sequence
  Synthetic
cugggggguugggggug

SEQ ID NO: 761945 - RNA, 17 nt, Artificial Sequence
  Synthetic
cuauuugguugggggug

SEQ ID NO: 761946 - RNA, 17 nt, Artificial Sequence
  Synthetic
aggcacaggauggggug

SEQ ID NO: 761947 - RNA, 17 nt, Artificial Sequence
  Synthetic
cugauguuacuggggug

SEQ ID NO: 761948 - RNA, 17 nt, Artificial Sequence
  Synthetic
cagggucuccuggggug

SEQ ID NO: 761949 - RNA, 17 nt, Artificial Sequence
  Synthetic
uuccaggggcuggggug

SEQ ID NO: 761950 - RNA, 17 nt, Artificial Sequence
  Synthetic
agagaaucaguggggug

SEQ ID NO: 761951 - RNA, 17 nt, Artificial Sequence
  Synthetic
gggccugucguggggug

SEQ ID NO: 761952 - RNA, 17 nt, Artificial Sequence
  Synthetic
caggaugggguggggug

SEQ ID NO: 761953 - RNA, 17 nt, Artificial Sequence
  Synthetic
uuaguaggcuuggggug

SEQ ID NO: 761954 - RNA, 17 nt, Artificial Sequence
  Synthetic
ucuguugauuuggggug

SEQ ID NO: 761955 - RNA, 17 nt, Artificial Sequence
  Synthetic
uuuauucaucaugggug

SEQ ID NO: 761956 - RNA, 17 nt, Artificial Sequence
  Synthetic
ugacggguugaugggug

SEQ ID NO: 761957 - RNA, 17 nt, Artificial Sequence
  Synthetic
caaaaauuaacugggug

SEQ ID NO: 761958 - RNA, 17 nt, Artificial Sequence
  Synthetic
auacuccagacugggug

SEQ ID NO: 761959 - RNA, 17 nt, Artificial Sequence
  Synthetic
uaaugagcgccugggug

SEQ ID NO: 761960 - RNA, 17 nt, Artificial Sequence
  Synthetic
caaaaauuagcugggug

SEQ ID NO: 761961 - RNA, 17 nt, Artificial Sequence
  Synthetic
acaaaauuagcugggug

SEQ ID NO: 761962 - RNA, 17 nt, Artificial Sequence
  Synthetic
aaaaacuuagcugggug

SEQ ID NO: 761963 - RNA, 17 nt, Artificial Sequence
  Synthetic
ccuaauaaggcugggug

SEQ ID NO: 761964 - RNA, 17 nt, Artificial Sequence
  Synthetic
augauauaggcugggug

SEQ ID NO: 761965 - RNA, 17 nt, Artificial Sequence
  Synthetic
agcuaugcggcugggug

SEQ ID NO: 761966 - RNA, 17 nt, Artificial Sequence
  Synthetic
uuguaccgggcugggug

SEQ ID NO: 761967 - RNA, 17 nt, Artificial Sequence
  Synthetic
aagcagugggcugggug

SEQ ID NO: 761968 - RNA, 17 nt, Artificial Sequence
  Synthetic
cacuaccuugcugggug

SEQ ID NO: 761969 - RNA, 17 nt, Artificial Sequence
  Synthetic
augauggaaucugggug

SEQ ID NO: 761970 - RNA, 17 nt, Artificial Sequence
  Synthetic
uaaaaauuaucugggug

SEQ ID NO: 761971 - RNA, 17 nt, Artificial Sequence
  Synthetic
auguuuaugagugggug

SEQ ID NO: 761972 - RNA, 17 nt, Artificial Sequence
  Synthetic
aaagacaaaauugggug

SEQ ID NO: 761973 - RNA, 17 nt, Artificial Sequence
  Synthetic
cacccaaucauugggug

SEQ ID NO: 761974 - RNA, 17 nt, Artificial Sequence
  Synthetic
agauaugggauugggug

SEQ ID NO: 761975 - RNA, 17 nt, Artificial Sequence
  Synthetic
cacccaaugauugggug

SEQ ID NO: 761976 - RNA, 17 nt, Artificial Sequence
  Synthetic
aauuuucagcuugggug

SEQ ID NO: 761977 - RNA, 17 nt, Artificial Sequence
  Synthetic
caaaaauuaguugggug

SEQ ID NO: 761978 - RNA, 17 nt, Artificial Sequence
  Synthetic
uccuuuguuguugggug

SEQ ID NO: 761979 - RNA, 17 nt, Artificial Sequence
  Synthetic
aaaaugagauuugggug

SEQ ID NO: 761980 - RNA, 17 nt, Artificial Sequence
  Synthetic
agaaugagauuugggug

SEQ ID NO: 761981 - RNA, 17 nt, Artificial Sequence
  Synthetic
aagaugagauuugggug

SEQ ID NO: 761982 - RNA, 17 nt, Artificial Sequence
  Synthetic
uagaugagauuugggug

SEQ ID NO: 761983 - RNA, 17 nt, Artificial Sequence
  Synthetic
aauaugagauuugggug

SEQ ID NO: 761984 - RNA, 17 nt, Artificial Sequence
  Synthetic
aaggugagauuugggug

SEQ ID NO: 761985 - RNA, 17 nt, Artificial Sequence
  Synthetic
aagacgggauuugggug

SEQ ID NO: 761986 - RNA, 17 nt, Artificial Sequence
  Synthetic
cucuucaacaaauggug

SEQ ID NO: 761987 - RNA, 17 nt, Artificial Sequence
  Synthetic
auaaauuuuaaauggug

SEQ ID NO: 761988 - RNA, 17 nt, Artificial Sequence
  Synthetic
uuuggcccacaauggug

SEQ ID NO: 761989 - RNA, 17 nt, Artificial Sequence
  Synthetic
uuacaauagcaauggug

SEQ ID NO: 761990 - RNA, 17 nt, Artificial Sequence
  Synthetic
agaaaaaaagaauggug

SEQ ID NO: 761991 - RNA, 17 nt, Artificial Sequence
  Synthetic
auucuacuagaauggug

SEQ ID NO: 761992 - RNA, 17 nt, Artificial Sequence
  Synthetic
uggcaucuggaauggug

SEQ ID NO: 761993 - RNA, 17 nt, Artificial Sequence
  Synthetic
accucccaauaauggug

SEQ ID NO: 761994 - RNA, 17 nt, Artificial Sequence
  Synthetic
ugcuuaagauaauggug

SEQ ID NO: 761995 - RNA, 17 nt, Artificial Sequence
  Synthetic
ucucuugacuaauggug

SEQ ID NO: 761996 - RNA, 17 nt, Artificial Sequence
  Synthetic
aucuaaucuccauggug

SEQ ID NO: 761997 - RNA, 17 nt, Artificial Sequence
  Synthetic
acucucucuucauggug

SEQ ID NO: 761998 - RNA, 17 nt, Artificial Sequence
  Synthetic
aacaacagaugauggug

SEQ ID NO: 761999 - RNA, 17 nt, Artificial Sequence
  Synthetic
agcuggcugugauggug

SEQ ID NO: 762000 - RNA, 17 nt, Artificial Sequence
  Synthetic
aaacuuaaccuauggug

SEQ ID NO: 762001 - RNA, 17 nt, Artificial Sequence
  Synthetic
ucaggguuccuauggug

SEQ ID NO: 762002 - RNA, 17 nt, Artificial Sequence
  Synthetic
aagaaucaucuauggug

SEQ ID NO: 762003 - RNA, 17 nt, Artificial Sequence
  Synthetic
agaauaguaguauggug

SEQ ID NO: 762004 - RNA, 17 nt, Artificial Sequence
  Synthetic
uccgguauacacuggug

SEQ ID NO: 762005 - RNA, 17 nt, Artificial Sequence
  Synthetic
auuauuauugacuggug

SEQ ID NO: 762006 - RNA, 17 nt, Artificial Sequence
  Synthetic
uuggugauuuacuggug

SEQ ID NO: 762007 - RNA, 17 nt, Artificial Sequence
  Synthetic
aaaggguuuuacuggug

SEQ ID NO: 762008 - RNA, 17 nt, Artificial Sequence
  Synthetic
aucacucgaaccuggug

SEQ ID NO: 762009 - RNA, 17 nt, Artificial Sequence
  Synthetic
cuaguuuaucccuggug

SEQ ID NO: 762010 - RNA, 17 nt, Artificial Sequence
  Synthetic
aagaucagggccuggug

SEQ ID NO: 762011 - RNA, 17 nt, Artificial Sequence
  Synthetic
agccaccaugccuggug

SEQ ID NO: 762012 - RNA, 17 nt, Artificial Sequence
  Synthetic
aaaaaaauuagcuggug

SEQ ID NO: 762013 - RNA, 17 nt, Artificial Sequence
  Synthetic
uuuugaugccgcuggug

SEQ ID NO: 762014 - RNA, 17 nt, Artificial Sequence
  Synthetic
cuuauuuauggcuggug

SEQ ID NO: 762015 - RNA, 17 nt, Artificial Sequence
  Synthetic
aauaccagaugcuggug

SEQ ID NO: 762016 - RNA, 17 nt, Artificial Sequence
  Synthetic
aacaacaggugcuggug

SEQ ID NO: 762017 - RNA, 17 nt, Artificial Sequence
  Synthetic
aucauaccacucuggug

SEQ ID NO: 762018 - RNA, 17 nt, Artificial Sequence
  Synthetic
aauguaccacucuggug

SEQ ID NO: 762019 - RNA, 17 nt, Artificial Sequence
  Synthetic
cuagugucucucuggug

SEQ ID NO: 762020 - RNA, 17 nt, Artificial Sequence
  Synthetic
agauucauugucuggug

SEQ ID NO: 762021 - RNA, 17 nt, Artificial Sequence
  Synthetic
caauaggucuucuggug

SEQ ID NO: 762022 - RNA, 17 nt, Artificial Sequence
  Synthetic
ugguuugcuuucuggug

SEQ ID NO: 762023 - RNA, 17 nt, Artificial Sequence
  Synthetic
ugaugaucaaaguggug

SEQ ID NO: 762024 - RNA, 17 nt, Artificial Sequence
  Synthetic
ugccgcacacaguggug

SEQ ID NO: 762025 - RNA, 17 nt, Artificial Sequence
  Synthetic
uaaaucuagcaguggug

SEQ ID NO: 762026 - RNA, 17 nt, Artificial Sequence
  Synthetic
agaagacaagaguggug

SEQ ID NO: 762027 - RNA, 17 nt, Artificial Sequence
  Synthetic
acuaggguggaguggug

SEQ ID NO: 762028 - RNA, 17 nt, Artificial Sequence
  Synthetic
aucagaggugaguggug

SEQ ID NO: 762029 - RNA, 17 nt, Artificial Sequence
  Synthetic
aggaauuaauaguggug

SEQ ID NO: 762030 - RNA, 17 nt, Artificial Sequence
  Synthetic
ccgaaaugguaguggug

SEQ ID NO: 762031 - RNA, 17 nt, Artificial Sequence
  Synthetic
acuucauauuaguggug

SEQ ID NO: 762032 - RNA, 17 nt, Artificial Sequence
  Synthetic
uuuggggggacguggug

SEQ ID NO: 762033 - RNA, 17 nt, Artificial Sequence
  Synthetic
uaaucacuagcguggug

SEQ ID NO: 762034 - RNA, 17 nt, Artificial Sequence
  Synthetic
aguuugggaagguggug

SEQ ID NO: 762035 - RNA, 17 nt, Artificial Sequence
  Synthetic
aauguuuacagguggug

SEQ ID NO: 762036 - RNA, 17 nt, Artificial Sequence
  Synthetic
cuuuuggggugguggug

SEQ ID NO: 762037 - RNA, 17 nt, Artificial Sequence
  Synthetic
aauaaugugugguggug

SEQ ID NO: 762038 - RNA, 17 nt, Artificial Sequence
  Synthetic
agagagaguugguggug

SEQ ID NO: 762039 - RNA, 17 nt, Artificial Sequence
  Synthetic
ucccaauguugguggug

SEQ ID NO: 762040 - RNA, 17 nt, Artificial Sequence
  Synthetic
uguagauauauguggug

SEQ ID NO: 762041 - RNA, 17 nt, Artificial Sequence
  Synthetic
cucuggggacuguggug

SEQ ID NO: 762042 - RNA, 17 nt, Artificial Sequence
  Synthetic
uuggaauagguguggug

SEQ ID NO: 762043 - RNA, 17 nt, Artificial Sequence
  Synthetic
aaaugucaguuguggug

SEQ ID NO: 762044 - RNA, 17 nt, Artificial Sequence
  Synthetic
uccuaguauuuguggug

SEQ ID NO: 762045 - RNA, 17 nt, Artificial Sequence
  Synthetic
aaugauuaagauuggug

SEQ ID NO: 762046 - RNA, 17 nt, Artificial Sequence
  Synthetic
ccuucauaaccuuggug

SEQ ID NO: 762047 - RNA, 17 nt, Artificial Sequence
  Synthetic
caagcaucagcuuggug

SEQ ID NO: 762048 - RNA, 17 nt, Artificial Sequence
  Synthetic
auacugugggcuuggug

SEQ ID NO: 762049 - RNA, 17 nt, Artificial Sequence
  Synthetic
aagauuggggguuggug

SEQ ID NO: 762050 - RNA, 17 nt, Artificial Sequence
  Synthetic
cacaauagauguuggug

SEQ ID NO: 762051 - RNA, 17 nt, Artificial Sequence
  Synthetic
aguuuggacauuuggug

SEQ ID NO: 762052 - RNA, 17 nt, Artificial Sequence
  Synthetic
uuaucuuguauuuggug

SEQ ID NO: 762053 - RNA, 17 nt, Artificial Sequence
  Synthetic
uaacauuaacuuuggug

SEQ ID NO: 762054 - RNA, 17 nt, Artificial Sequence
  Synthetic
auugauugacuuuggug

SEQ ID NO: 762055 - RNA, 17 nt, Artificial Sequence
  Synthetic
ucugccauccuuuggug

SEQ ID NO: 762056 - RNA, 17 nt, Artificial Sequence
  Synthetic
aaauggcugcuuuggug

SEQ ID NO: 762057 - RNA, 17 nt, Artificial Sequence
  Synthetic
auggcaugauuuuggug

SEQ ID NO: 762058 - RNA, 17 nt, Artificial Sequence
  Synthetic
uggcaaaaaaaaaugug

SEQ ID NO: 762059 - RNA, 17 nt, Artificial Sequence
  Synthetic
ugcagaaggaaaaugug

SEQ ID NO: 762060 - RNA, 17 nt, Artificial Sequence
  Synthetic
auacuuagacaaaugug

SEQ ID NO: 762061 - RNA, 17 nt, Artificial Sequence
  Synthetic
acuucaaggcaaaugug

SEQ ID NO: 762062 - RNA, 17 nt, Artificial Sequence
  Synthetic
uuagaaucagaaaugug

SEQ ID NO: 762063 - RNA, 17 nt, Artificial Sequence
  Synthetic
ugcagaagagaaaugug

SEQ ID NO: 762064 - RNA, 17 nt, Artificial Sequence
  Synthetic
uguggaagggaaaugug

SEQ ID NO: 762065 - RNA, 17 nt, Artificial Sequence
  Synthetic
uuauuuuuauaaaugug

SEQ ID NO: 762066 - RNA, 17 nt, Artificial Sequence
  Synthetic
uuuuuuuuuuaaaugug

SEQ ID NO: 762067 - RNA, 17 nt, Artificial Sequence
  Synthetic
auaaaaaucacaaugug

SEQ ID NO: 762068 - RNA, 17 nt, Artificial Sequence
  Synthetic
cuuguaaagacaaugug

SEQ ID NO: 762069 - RNA, 17 nt, Artificial Sequence
  Synthetic
auugaugggacaaugug

SEQ ID NO: 762070 - RNA, 17 nt, Artificial Sequence
  Synthetic
augagucuuucaaugug

SEQ ID NO: 762071 - RNA, 17 nt, Artificial Sequence
  Synthetic
aaaaugauaagaaugug

SEQ ID NO: 762072 - RNA, 17 nt, Artificial Sequence
  Synthetic
acaaagacuggaaugug

SEQ ID NO: 762073 - RNA, 17 nt, Artificial Sequence
  Synthetic
aucacaucuggaaugug

SEQ ID NO: 762074 - RNA, 17 nt, Artificial Sequence
  Synthetic
ugccaaauuggaaugug

SEQ ID NO: 762075 - RNA, 17 nt, Artificial Sequence
  Synthetic
aggcagagaugaaugug

SEQ ID NO: 762076 - RNA, 17 nt, Artificial Sequence
  Synthetic
uagcauauaauaaugug

SEQ ID NO: 762077 - RNA, 17 nt, Artificial Sequence
  Synthetic
ucccuguucauaaugug

SEQ ID NO: 762078 - RNA, 17 nt, Artificial Sequence
  Synthetic
cuuauauggguaaugug

SEQ ID NO: 762079 - RNA, 17 nt, Artificial Sequence
  Synthetic
acaugugaauuaaugug

SEQ ID NO: 762080 - RNA, 17 nt, Artificial Sequence
  Synthetic
cucccauuauuaaugug

SEQ ID NO: 762081 - RNA, 17 nt, Artificial Sequence
  Synthetic
ugcauggauuuaaugug

SEQ ID NO: 762082 - RNA, 17 nt, Artificial Sequence
  Synthetic
uaaaugcucaacaugug

SEQ ID NO: 762083 - RNA, 17 nt, Artificial Sequence
  Synthetic
uuauuuugucacaugug

SEQ ID NO: 762084 - RNA, 17 nt, Artificial Sequence
  Synthetic
acaguuugggacaugug

SEQ ID NO: 762085 - RNA, 17 nt, Artificial Sequence
  Synthetic
uccacccuugacaugug

SEQ ID NO: 762086 - RNA, 17 nt, Artificial Sequence
  Synthetic
cucucccuugacaugug

SEQ ID NO: 762087 - RNA, 17 nt, Artificial Sequence
  Synthetic
uuaucuggucccaugug

SEQ ID NO: 762088 - RNA, 17 nt, Artificial Sequence
  Synthetic
auuggcuaggccaugug

SEQ ID NO: 762089 - RNA, 17 nt, Artificial Sequence
  Synthetic
cagcucugggccaugug

SEQ ID NO: 762090 - RNA, 17 nt, Artificial Sequence
  Synthetic
auaacaaaauccaugug

SEQ ID NO: 762091 - RNA, 17 nt, Artificial Sequence
  Synthetic
ugauuuuuguccaugug

SEQ ID NO: 762092 - RNA, 17 nt, Artificial Sequence
  Synthetic
aauaccuaaugcaugug

SEQ ID NO: 762093 - RNA, 17 nt, Artificial Sequence
  Synthetic
ugucaaagcugcaugug

SEQ ID NO: 762094 - RNA, 17 nt, Artificial Sequence
  Synthetic
caaauaaauaucaugug

SEQ ID NO: 762095 - RNA, 17 nt, Artificial Sequence
  Synthetic
cucucaucugucaugug

SEQ ID NO: 762096 - RNA, 17 nt, Artificial Sequence
  Synthetic
uccccaugugucaugug

SEQ ID NO: 762097 - RNA, 17 nt, Artificial Sequence
  Synthetic
aaucauauaaagaugug

SEQ ID NO: 762098 - RNA, 17 nt, Artificial Sequence
  Synthetic
uuuacaauuaagaugug

SEQ ID NO: 762099 - RNA, 17 nt, Artificial Sequence
  Synthetic
caaacucaggagaugug

SEQ ID NO: 762100 - RNA, 17 nt, Artificial Sequence
  Synthetic
uaaacucaggagaugug

SEQ ID NO: 762101 - RNA, 17 nt, Artificial Sequence
  Synthetic
uacaucuaggagaugug

SEQ ID NO: 762102 - RNA, 17 nt, Artificial Sequence
  Synthetic
agauaguuguagaugug

SEQ ID NO: 762103 - RNA, 17 nt, Artificial Sequence
  Synthetic
agaugguuguagaugug

SEQ ID NO: 762104 - RNA, 17 nt, Artificial Sequence
  Synthetic
ucagaaaaggcgaugug

SEQ ID NO: 762105 - RNA, 17 nt, Artificial Sequence
  Synthetic
auguuguugaggaugug

SEQ ID NO: 762106 - RNA, 17 nt, Artificial Sequence
  Synthetic
cuacauggauggaugug

SEQ ID NO: 762107 - RNA, 17 nt, Artificial Sequence
  Synthetic
agccucuuauggaugug

SEQ ID NO: 762108 - RNA, 17 nt, Artificial Sequence
  Synthetic
aaugcuacaaugaugug

SEQ ID NO: 762109 - RNA, 17 nt, Artificial Sequence
  Synthetic
uagugaaauuugaugug

SEQ ID NO: 762110 - RNA, 17 nt, Artificial Sequence
  Synthetic
auauggauuuugaugug

SEQ ID NO: 762111 - RNA, 17 nt, Artificial Sequence
  Synthetic
uuaaugcuaaauaugug

SEQ ID NO: 762112 - RNA, 17 nt, Artificial Sequence
  Synthetic
uauugugucaauaugug

SEQ ID NO: 762113 - RNA, 17 nt, Artificial Sequence
  Synthetic
cugacacaauauaugug

SEQ ID NO: 762114 - RNA, 17 nt, Artificial Sequence
  Synthetic
acauauauauauaugug

SEQ ID NO: 762115 - RNA, 17 nt, Artificial Sequence
  Synthetic
cauaguguauauaugug

SEQ ID NO: 762116 - RNA, 17 nt, Artificial Sequence
  Synthetic
auauguguauauaugug

SEQ ID NO: 762117 - RNA, 17 nt, Artificial Sequence
  Synthetic
aucauauuguauaugug

SEQ ID NO: 762118 - RNA, 17 nt, Artificial Sequence
  Synthetic
aaauaaccuuauaugug

SEQ ID NO: 762119 - RNA, 17 nt, Artificial Sequence
  Synthetic
uauuuaaacacuaugug

SEQ ID NO: 762120 - RNA, 17 nt, Artificial Sequence
  Synthetic
uacuuuccaccuaugug

SEQ ID NO: 762121 - RNA, 17 nt, Artificial Sequence
  Synthetic
auugauauagcuaugug

SEQ ID NO: 762122 - RNA, 17 nt, Artificial Sequence
  Synthetic
aguggggacucuaugug

SEQ ID NO: 762123 - RNA, 17 nt, Artificial Sequence
  Synthetic
aauuuacacaguaugug

SEQ ID NO: 762124 - RNA, 17 nt, Artificial Sequence
  Synthetic
agcauugucaguaugug

SEQ ID NO: 762125 - RNA, 17 nt, Artificial Sequence
  Synthetic
caaaaaaauaguaugug

SEQ ID NO: 762126 - RNA, 17 nt, Artificial Sequence
  Synthetic
ucuaccauuaguaugug

SEQ ID NO: 762127 - RNA, 17 nt, Artificial Sequence
  Synthetic
cuggagagugguaugug

SEQ ID NO: 762128 - RNA, 17 nt, Artificial Sequence
  Synthetic
uccagaugauguaugug

SEQ ID NO: 762129 - RNA, 17 nt, Artificial Sequence
  Synthetic
caaauaaaguguaugug

SEQ ID NO: 762130 - RNA, 17 nt, Artificial Sequence
  Synthetic
augaaaauguguaugug

SEQ ID NO: 762131 - RNA, 17 nt, Artificial Sequence
  Synthetic
acacacguguguaugug

SEQ ID NO: 762132 - RNA, 17 nt, Artificial Sequence
  Synthetic
cgugucccucuuaugug

SEQ ID NO: 762133 - RNA, 17 nt, Artificial Sequence
  Synthetic
aagaagaggguuaugug

SEQ ID NO: 762134 - RNA, 17 nt, Artificial Sequence
  Synthetic
augccugccuuuaugug

SEQ ID NO: 762135 - RNA, 17 nt, Artificial Sequence
  Synthetic
uuuuaaaauuuuaugug

SEQ ID NO: 762136 - RNA, 17 nt, Artificial Sequence
  Synthetic
uuaguguauuuuaugug

SEQ ID NO: 762137 - RNA, 17 nt, Artificial Sequence
  Synthetic
ucauguucaaaacugug

SEQ ID NO: 762138 - RNA, 17 nt, Artificial Sequence
  Synthetic
aauguaaccaaacugug

SEQ ID NO: 762139 - RNA, 17 nt, Artificial Sequence
  Synthetic
uggggagagaaacugug

SEQ ID NO: 762140 - RNA, 17 nt, Artificial Sequence
  Synthetic
aacagccacacacugug

SEQ ID NO: 762141 - RNA, 17 nt, Artificial Sequence
  Synthetic
aaggggcucacacugug

SEQ ID NO: 762142 - RNA, 17 nt, Artificial Sequence
  Synthetic
augaugauaccacugug

SEQ ID NO: 762143 - RNA, 17 nt, Artificial Sequence
  Synthetic
augcuccucccacugug

SEQ ID NO: 762144 - RNA, 17 nt, Artificial Sequence
  Synthetic
cagguuacuccacugug

SEQ ID NO: 762145 - RNA, 17 nt, Artificial Sequence
  Synthetic
cuccauccugcacugug

SEQ ID NO: 762146 - RNA, 17 nt, Artificial Sequence
  Synthetic
auuggucuuucacugug

SEQ ID NO: 762147 - RNA, 17 nt, Artificial Sequence
  Synthetic
agacagaagggacugug

SEQ ID NO: 762148 - RNA, 17 nt, Artificial Sequence
  Synthetic
aauucugagggacugug

SEQ ID NO: 762149 - RNA, 17 nt, Artificial Sequence
  Synthetic
uuuugugaccuacugug

SEQ ID NO: 762150 - RNA, 17 nt, Artificial Sequence
  Synthetic
cuuacaacauuacugug

SEQ ID NO: 762151 - RNA, 17 nt, Artificial Sequence
  Synthetic
accuaguuauuacugug

SEQ ID NO: 762152 - RNA, 17 nt, Artificial Sequence
  Synthetic
acugcaaaagaccugug

SEQ ID NO: 762153 - RNA, 17 nt, Artificial Sequence
  Synthetic
aaaaugauguaccugug

SEQ ID NO: 762154 - RNA, 17 nt, Artificial Sequence
  Synthetic
cagagcaagacccugug

SEQ ID NO: 762155 - RNA, 17 nt, Artificial Sequence
  Synthetic
uuauaauuaagccugug

SEQ ID NO: 762156 - RNA, 17 nt, Artificial Sequence
  Synthetic
auuaacuugagccugug

SEQ ID NO: 762157 - RNA, 17 nt, Artificial Sequence
  Synthetic
uauuuuauuggccugug

SEQ ID NO: 762158 - RNA, 17 nt, Artificial Sequence
  Synthetic
ucagcaagaauccugug

SEQ ID NO: 762159 - RNA, 17 nt, Artificial Sequence
  Synthetic
uccugcuuucuccugug

SEQ ID NO: 762160 - RNA, 17 nt, Artificial Sequence
  Synthetic
uggucugcauuccugug

SEQ ID NO: 762161 - RNA, 17 nt, Artificial Sequence
  Synthetic
acucucuuuuuccugug

SEQ ID NO: 762162 - RNA, 17 nt, Artificial Sequence
  Synthetic
caaggcagaaagcugug

SEQ ID NO: 762163 - RNA, 17 nt, Artificial Sequence
  Synthetic
ucaaccaccaagcugug

SEQ ID NO: 762164 - RNA, 17 nt, Artificial Sequence
  Synthetic
aggccuccccagcugug

SEQ ID NO: 762165 - RNA, 17 nt, Artificial Sequence
  Synthetic
cuugcuuucuagcugug

SEQ ID NO: 762166 - RNA, 17 nt, Artificial Sequence
  Synthetic
cugauaagguagcugug

SEQ ID NO: 762167 - RNA, 17 nt, Artificial Sequence
  Synthetic
auaacuauuuagcugug

SEQ ID NO: 762168 - RNA, 17 nt, Artificial Sequence
  Synthetic
cucuggggacugcugug

SEQ ID NO: 762169 - RNA, 17 nt, Artificial Sequence
  Synthetic
cacuggggccugcugug

SEQ ID NO: 762170 - RNA, 17 nt, Artificial Sequence
  Synthetic
cucuaucaggugcugug

SEQ ID NO: 762171 - RNA, 17 nt, Artificial Sequence
  Synthetic
auaucuaaugugcugug

SEQ ID NO: 762172 - RNA, 17 nt, Artificial Sequence
  Synthetic
aaaucucugaaucugug

SEQ ID NO: 762173 - RNA, 17 nt, Artificial Sequence
  Synthetic
uuugagagucaucugug

SEQ ID NO: 762174 - RNA, 17 nt, Artificial Sequence
  Synthetic
aaacuaagauaucugug

SEQ ID NO: 762175 - RNA, 17 nt, Artificial Sequence
  Synthetic
accacuuucuaucugug

SEQ ID NO: 762176 - RNA, 17 nt, Artificial Sequence
  Synthetic
aaagggaguuaucugug

SEQ ID NO: 762177 - RNA, 17 nt, Artificial Sequence
  Synthetic
uugugcagaacucugug

SEQ ID NO: 762178 - RNA, 17 nt, Artificial Sequence
  Synthetic
ccaguggggacucugug

SEQ ID NO: 762179 - RNA, 17 nt, Artificial Sequence
  Synthetic
uaucauauuacucugug

SEQ ID NO: 762180 - RNA, 17 nt, Artificial Sequence
  Synthetic
cuugguuaggcucugug

SEQ ID NO: 762181 - RNA, 17 nt, Artificial Sequence
  Synthetic
uaaagacgaucucugug

SEQ ID NO: 762182 - RNA, 17 nt, Artificial Sequence
  Synthetic
cuaaccaugucucugug

SEQ ID NO: 762183 - RNA, 17 nt, Artificial Sequence
  Synthetic
uuucuuuuuucucugug

SEQ ID NO: 762184 - RNA, 17 nt, Artificial Sequence
  Synthetic
auugcacacagucugug

SEQ ID NO: 762185 - RNA, 17 nt, Artificial Sequence
  Synthetic
auccuucagugucugug

SEQ ID NO: 762186 - RNA, 17 nt, Artificial Sequence
  Synthetic
agggaaaacauucugug

SEQ ID NO: 762187 - RNA, 17 nt, Artificial Sequence
  Synthetic
cucuuucugauucugug

SEQ ID NO: 762188 - RNA, 17 nt, Artificial Sequence
  Synthetic
uucaggagacuucugug

SEQ ID NO: 762189 - RNA, 17 nt, Artificial Sequence
  Synthetic
ugacucacaguucugug

SEQ ID NO: 762190 - RNA, 17 nt, Artificial Sequence
  Synthetic
uugcuaaggguucugug

SEQ ID NO: 762191 - RNA, 17 nt, Artificial Sequence
  Synthetic
caugcagugguucugug

SEQ ID NO: 762192 - RNA, 17 nt, Artificial Sequence
  Synthetic
uagcaggcauuucugug

SEQ ID NO: 762193 - RNA, 17 nt, Artificial Sequence
  Synthetic
cuuuuguacuuucugug

SEQ ID NO: 762194 - RNA, 17 nt, Artificial Sequence
  Synthetic
agaaaaacaaaagugug

SEQ ID NO: 762195 - RNA, 17 nt, Artificial Sequence
  Synthetic
uuuuuuuuuaaagugug

SEQ ID NO: 762196 - RNA, 17 nt, Artificial Sequence
  Synthetic
uuggagacugaagugug

SEQ ID NO: 762197 - RNA, 17 nt, Artificial Sequence
  Synthetic
auugcauacuaagugug

SEQ ID NO: 762198 - RNA, 17 nt, Artificial Sequence
  Synthetic
uauaguucuuaagugug

SEQ ID NO: 762199 - RNA, 17 nt, Artificial Sequence
  Synthetic
uguuuccccacagugug

SEQ ID NO: 762200 - RNA, 17 nt, Artificial Sequence
  Synthetic
agaagcaucccagugug

SEQ ID NO: 762201 - RNA, 17 nt, Artificial Sequence
  Synthetic
auccugaaagcagugug

SEQ ID NO: 762202 - RNA, 17 nt, Artificial Sequence
  Synthetic
aggaaaacgugagugug

SEQ ID NO: 762203 - RNA, 17 nt, Artificial Sequence
  Synthetic
cccaguaguugagugug

SEQ ID NO: 762204 - RNA, 17 nt, Artificial Sequence
  Synthetic
agaggaagcauagugug

SEQ ID NO: 762205 - RNA, 17 nt, Artificial Sequence
  Synthetic
aaauagaagauagugug

SEQ ID NO: 762206 - RNA, 17 nt, Artificial Sequence
  Synthetic
uugggauuacuagugug

SEQ ID NO: 762207 - RNA, 17 nt, Artificial Sequence
  Synthetic
aggaggucccuagugug

SEQ ID NO: 762208 - RNA, 17 nt, Artificial Sequence
  Synthetic
uacucaagcuuagugug

SEQ ID NO: 762209 - RNA, 17 nt, Artificial Sequence
  Synthetic
ccuggcuugcacgugug

SEQ ID NO: 762210 - RNA, 17 nt, Artificial Sequence
  Synthetic
cccucccaggacgugug

SEQ ID NO: 762211 - RNA, 17 nt, Artificial Sequence
  Synthetic
agucaaaaguccgugug

SEQ ID NO: 762212 - RNA, 17 nt, Artificial Sequence
  Synthetic
aagugcuaacgcgugug

SEQ ID NO: 762213 - RNA, 17 nt, Artificial Sequence
  Synthetic
uaacagaaaaaggugug

SEQ ID NO: 762214 - RNA, 17 nt, Artificial Sequence
  Synthetic
uaguuaaaccaggugug

SEQ ID NO: 762215 - RNA, 17 nt, Artificial Sequence
  Synthetic
aaaauuagccaggugug

SEQ ID NO: 762216 - RNA, 17 nt, Artificial Sequence
  Synthetic
aguuaacuguaggugug

SEQ ID NO: 762217 - RNA, 17 nt, Artificial Sequence
  Synthetic
cauaucuguagggugug

SEQ ID NO: 762218 - RNA, 17 nt, Artificial Sequence
  Synthetic
aauaugcugggggugug

SEQ ID NO: 762219 - RNA, 17 nt, Artificial Sequence
  Synthetic
uuuucccauugggugug

SEQ ID NO: 762220 - RNA, 17 nt, Artificial Sequence
  Synthetic
uuuuuguguauggugug

SEQ ID NO: 762221 - RNA, 17 nt, Artificial Sequence
  Synthetic
aagcuuugacuggugug

SEQ ID NO: 762222 - RNA, 17 nt, Artificial Sequence
  Synthetic
auggcugcuuuggugug

SEQ ID NO: 762223 - RNA, 17 nt, Artificial Sequence
  Synthetic
uuguuaagaaaugugug

SEQ ID NO: 762224 - RNA, 17 nt, Artificial Sequence
  Synthetic
augcaugcccaugugug

SEQ ID NO: 762225 - RNA, 17 nt, Artificial Sequence
  Synthetic
ugacuggaucaugugug

SEQ ID NO: 762226 - RNA, 17 nt, Artificial Sequence
  Synthetic
acauggauggaugugug

SEQ ID NO: 762227 - RNA, 17 nt, Artificial Sequence
  Synthetic
aaaaaaauguaugugug

SEQ ID NO: 762228 - RNA, 17 nt, Artificial Sequence
  Synthetic
aaccccaccacugugug

SEQ ID NO: 762229 - RNA, 17 nt, Artificial Sequence
  Synthetic
aacaacugaccugugug

SEQ ID NO: 762230 - RNA, 17 nt, Artificial Sequence
  Synthetic
ugcucacuaccugugug

SEQ ID NO: 762231 - RNA, 17 nt, Artificial Sequence
  Synthetic
auuuaugucccugugug

SEQ ID NO: 762232 - RNA, 17 nt, Artificial Sequence
  Synthetic
ugacuuuucccugugug

SEQ ID NO: 762233 - RNA, 17 nt, Artificial Sequence
  Synthetic
agaaacucuucugugug

SEQ ID NO: 762234 - RNA, 17 nt, Artificial Sequence
  Synthetic
ugauuuuuuucugugug

SEQ ID NO: 762235 - RNA, 17 nt, Artificial Sequence
  Synthetic
aagcuugacagugugug

SEQ ID NO: 762236 - RNA, 17 nt, Artificial Sequence
  Synthetic
ccuaaggugagugugug

SEQ ID NO: 762237 - RNA, 17 nt, Artificial Sequence
  Synthetic
aaaaauguaugugugug

SEQ ID NO: 762238 - RNA, 17 nt, Artificial Sequence
  Synthetic
uugcgacugugugugug

SEQ ID NO: 762239 - RNA, 17 nt, Artificial Sequence
  Synthetic
accauggugugugugug

SEQ ID NO: 762240 - RNA, 17 nt, Artificial Sequence
  Synthetic
gugugugugugugugug

SEQ ID NO: 762241 - RNA, 17 nt, Artificial Sequence
  Synthetic
auugaucauugugugug

SEQ ID NO: 762242 - RNA, 17 nt, Artificial Sequence
  Synthetic
aaauugaucauugugug

SEQ ID NO: 762243 - RNA, 17 nt, Artificial Sequence
  Synthetic
aucacagggauugugug

SEQ ID NO: 762244 - RNA, 17 nt, Artificial Sequence
  Synthetic
auguaugaccuugugug

SEQ ID NO: 762245 - RNA, 17 nt, Artificial Sequence
  Synthetic
uguuuccugcuugugug

SEQ ID NO: 762246 - RNA, 17 nt, Artificial Sequence
  Synthetic
uacauguuauuugugug

SEQ ID NO: 762247 - RNA, 17 nt, Artificial Sequence
  Synthetic
uuacuccucuuugugug

SEQ ID NO: 762248 - RNA, 17 nt, Artificial Sequence
  Synthetic
accauucuuuuugugug

SEQ ID NO: 762249 - RNA, 17 nt, Artificial Sequence
  Synthetic
ccccuuaaaaaauugug

SEQ ID NO: 762250 - RNA, 17 nt, Artificial Sequence
  Synthetic
auacaacagaaauugug

SEQ ID NO: 762251 - RNA, 17 nt, Artificial Sequence
  Synthetic
auaaacuauaaauugug

SEQ ID NO: 762252 - RNA, 17 nt, Artificial Sequence
  Synthetic
uuaauucuuaaauugug

SEQ ID NO: 762253 - RNA, 17 nt, Artificial Sequence
  Synthetic
acaggaagucaauugug

SEQ ID NO: 762254 - RNA, 17 nt, Artificial Sequence
  Synthetic
aucauauaauaauugug

SEQ ID NO: 762255 - RNA, 17 nt, Artificial Sequence
  Synthetic
aaaaacuguuaauugug

SEQ ID NO: 762256 - RNA, 17 nt, Artificial Sequence
  Synthetic
auauugcacacauugug

SEQ ID NO: 762257 - RNA, 17 nt, Artificial Sequence
  Synthetic
ugguauuaagcauugug

SEQ ID NO: 762258 - RNA, 17 nt, Artificial Sequence
  Synthetic
uuuguugcugcauugug

SEQ ID NO: 762259 - RNA, 17 nt, Artificial Sequence
  Synthetic
auguuugggucauugug

SEQ ID NO: 762260 - RNA, 17 nt, Artificial Sequence
  Synthetic
uuaauagguucauugug

SEQ ID NO: 762261 - RNA, 17 nt, Artificial Sequence
  Synthetic
cuucugccaagauugug

SEQ ID NO: 762262 - RNA, 17 nt, Artificial Sequence
  Synthetic
uuuacaaggagauugug

SEQ ID NO: 762263 - RNA, 17 nt, Artificial Sequence
  Synthetic
uuuaagaugagauugug

SEQ ID NO: 762264 - RNA, 17 nt, Artificial Sequence
  Synthetic
aaucauacaggauugug

SEQ ID NO: 762265 - RNA, 17 nt, Artificial Sequence
  Synthetic
cuuccaccaugauugug

SEQ ID NO: 762266 - RNA, 17 nt, Artificial Sequence
  Synthetic
cuucugccaugauugug

SEQ ID NO: 762267 - RNA, 17 nt, Artificial Sequence
  Synthetic
cuucuuuagauauugug

SEQ ID NO: 762268 - RNA, 17 nt, Artificial Sequence
  Synthetic
acuucucugauauugug

SEQ ID NO: 762269 - RNA, 17 nt, Artificial Sequence
  Synthetic
augccuaaccuauugug

SEQ ID NO: 762270 - RNA, 17 nt, Artificial Sequence
  Synthetic
uucucugaagacuugug

SEQ ID NO: 762271 - RNA, 17 nt, Artificial Sequence
  Synthetic
ccgaaaacagacuugug

SEQ ID NO: 762272 - RNA, 17 nt, Artificial Sequence
  Synthetic
uuuauauuguacuugug

SEQ ID NO: 762273 - RNA, 17 nt, Artificial Sequence
  Synthetic
ugaauaccuuacuugug

SEQ ID NO: 762274 - RNA, 17 nt, Artificial Sequence
  Synthetic
uuauguaugaccuugug

SEQ ID NO: 762275 - RNA, 17 nt, Artificial Sequence
  Synthetic
uuugugauugccuugug

SEQ ID NO: 762276 - RNA, 17 nt, Artificial Sequence
  Synthetic
cauggaacauccuugug

SEQ ID NO: 762277 - RNA, 17 nt, Artificial Sequence
  Synthetic
ucuauaaggagcuugug

SEQ ID NO: 762278 - RNA, 17 nt, Artificial Sequence
  Synthetic
acagggaauugcuugug

SEQ ID NO: 762279 - RNA, 17 nt, Artificial Sequence
  Synthetic
auauugaagcucuugug

SEQ ID NO: 762280 - RNA, 17 nt, Artificial Sequence
  Synthetic
aguuuggagcucuugug

SEQ ID NO: 762281 - RNA, 17 nt, Artificial Sequence
  Synthetic
ucuuuucggcucuugug

SEQ ID NO: 762282 - RNA, 17 nt, Artificial Sequence
  Synthetic
cucuuuuuucucuugug

SEQ ID NO: 762283 - RNA, 17 nt, Artificial Sequence
  Synthetic
agaccuuuggucuugug

SEQ ID NO: 762284 - RNA, 17 nt, Artificial Sequence
  Synthetic
cacuggaaugucuugug

SEQ ID NO: 762285 - RNA, 17 nt, Artificial Sequence
  Synthetic
aggcugacugucuugug

SEQ ID NO: 762286 - RNA, 17 nt, Artificial Sequence
  Synthetic
uugaugggagaguugug

SEQ ID NO: 762287 - RNA, 17 nt, Artificial Sequence
  Synthetic
cuggugccauaguugug

SEQ ID NO: 762288 - RNA, 17 nt, Artificial Sequence
  Synthetic
aaacauagaucguugug

SEQ ID NO: 762289 - RNA, 17 nt, Artificial Sequence
  Synthetic
uucacugggagguugug

SEQ ID NO: 762290 - RNA, 17 nt, Artificial Sequence
  Synthetic
caggguuggggguugug

SEQ ID NO: 762291 - RNA, 17 nt, Artificial Sequence
  Synthetic
ucauccucaugguugug

SEQ ID NO: 762292 - RNA, 17 nt, Artificial Sequence
  Synthetic
cccugggaacuguugug

SEQ ID NO: 762293 - RNA, 17 nt, Artificial Sequence
  Synthetic
cucuggggacuguugug

SEQ ID NO: 762294 - RNA, 17 nt, Artificial Sequence
  Synthetic
caccagggccuguugug

SEQ ID NO: 762295 - RNA, 17 nt, Artificial Sequence
  Synthetic
caccggggccuguugug

SEQ ID NO: 762296 - RNA, 17 nt, Artificial Sequence
  Synthetic
ucaguaggucuguugug

SEQ ID NO: 762297 - RNA, 17 nt, Artificial Sequence
  Synthetic
cacuggacaguguugug

SEQ ID NO: 762298 - RNA, 17 nt, Artificial Sequence
  Synthetic
cauuuuagaguguugug

SEQ ID NO: 762299 - RNA, 17 nt, Artificial Sequence
  Synthetic
cucuucagguuguugug

SEQ ID NO: 762300 - RNA, 17 nt, Artificial Sequence
  Synthetic
aauaauucuuuguugug

SEQ ID NO: 762301 - RNA, 17 nt, Artificial Sequence
  Synthetic
uuuucuucaaauuugug

SEQ ID NO: 762302 - RNA, 17 nt, Artificial Sequence
  Synthetic
aggccuuuaaauuugug

SEQ ID NO: 762303 - RNA, 17 nt, Artificial Sequence
  Synthetic
uucugaaaugauuugug

SEQ ID NO: 762304 - RNA, 17 nt, Artificial Sequence
  Synthetic
ucauugcaauauuugug

SEQ ID NO: 762305 - RNA, 17 nt, Artificial Sequence
  Synthetic
agauggcaaacuuugug

SEQ ID NO: 762306 - RNA, 17 nt, Artificial Sequence
  Synthetic
aauggcaaagcuuugug

SEQ ID NO: 762307 - RNA, 17 nt, Artificial Sequence
  Synthetic
agaucuuaagcuuugug

SEQ ID NO: 762308 - RNA, 17 nt, Artificial Sequence
  Synthetic
aaaaaaauggcuuugug

SEQ ID NO: 762309 - RNA, 17 nt, Artificial Sequence
  Synthetic
ugugcuugugcuuugug

SEQ ID NO: 762310 - RNA, 17 nt, Artificial Sequence
  Synthetic
uuuuacuccucuuugug

SEQ ID NO: 762311 - RNA, 17 nt, Artificial Sequence
  Synthetic
aaucccagcucuuugug

SEQ ID NO: 762312 - RNA, 17 nt, Artificial Sequence
  Synthetic
aggcauugcaguuugug

SEQ ID NO: 762313 - RNA, 17 nt, Artificial Sequence
  Synthetic
uuuauuuuagguuugug

SEQ ID NO: 762314 - RNA, 17 nt, Artificial Sequence
  Synthetic
cugcuugaaauuuugug

SEQ ID NO: 762315 - RNA, 17 nt, Artificial Sequence
  Synthetic
uguacauaaauuuugug

SEQ ID NO: 762316 - RNA, 17 nt, Artificial Sequence
  Synthetic
aacuaaaucauuuugug

SEQ ID NO: 762317 - RNA, 17 nt, Artificial Sequence
  Synthetic
acaauacuuauuuugug

SEQ ID NO: 762318 - RNA, 17 nt, Artificial Sequence
  Synthetic
cagcuauuuauuuugug

SEQ ID NO: 762319 - RNA, 17 nt, Artificial Sequence
  Synthetic
cucgcagagcuuuugug

SEQ ID NO: 762320 - RNA, 17 nt, Artificial Sequence
  Synthetic
aacaucugucuuuugug

SEQ ID NO: 762321 - RNA, 17 nt, Artificial Sequence
  Synthetic
caaucacuaguuuugug

SEQ ID NO: 762322 - RNA, 17 nt, Artificial Sequence
  Synthetic
acugcccagguuuugug

SEQ ID NO: 762323 - RNA, 17 nt, Artificial Sequence
  Synthetic
acaaagcguguuuugug

SEQ ID NO: 762324 - RNA, 17 nt, Artificial Sequence
  Synthetic
cagaugggguuuuugug

SEQ ID NO: 762325 - RNA, 17 nt, Artificial Sequence
  Synthetic
aagaaaaaaaaaaauug

SEQ ID NO: 762326 - RNA, 17 nt, Artificial Sequence
  Synthetic
aaaaggaaaaaaaauug

SEQ ID NO: 762327 - RNA, 17 nt, Artificial Sequence
  Synthetic
auuuaugcaaaaaauug

SEQ ID NO: 762328 - RNA, 17 nt, Artificial Sequence
  Synthetic
uuuaaaugaaaaaauug

SEQ ID NO: 762329 - RNA, 17 nt, Artificial Sequence
  Synthetic
uaauacugaaaaaauug

SEQ ID NO: 762330 - RNA, 17 nt, Artificial Sequence
  Synthetic
aacuccaugaaaaauug

SEQ ID NO: 762331 - RNA, 17 nt, Artificial Sequence
  Synthetic
cucauggguaaaaauug

SEQ ID NO: 762332 - RNA, 17 nt, Artificial Sequence
  Synthetic
agacuuacagaaaauug

SEQ ID NO: 762333 - RNA, 17 nt, Artificial Sequence
  Synthetic
auauaaucagaaaauug

SEQ ID NO: 762334 - RNA, 17 nt, Artificial Sequence
  Synthetic
uacuuaugagaaaauug

SEQ ID NO: 762335 - RNA, 17 nt, Artificial Sequence
  Synthetic
aauccaacggaaaauug

SEQ ID NO: 762336 - RNA, 17 nt, Artificial Sequence
  Synthetic
cguacaguugaaaauug

SEQ ID NO: 762337 - RNA, 17 nt, Artificial Sequence
  Synthetic
uuaagccacuaaaauug

SEQ ID NO: 762338 - RNA, 17 nt, Artificial Sequence
  Synthetic
ugacucuacuaaaauug

SEQ ID NO: 762339 - RNA, 17 nt, Artificial Sequence
  Synthetic
aaagauggcuaaaauug

SEQ ID NO: 762340 - RNA, 17 nt, Artificial Sequence
  Synthetic
uaguauccuuaaaauug

SEQ ID NO: 762341 - RNA, 17 nt, Artificial Sequence
  Synthetic
aaaaaauugacaaauug

SEQ ID NO: 762342 - RNA, 17 nt, Artificial Sequence
  Synthetic
cucuauacuacaaauug

SEQ ID NO: 762343 - RNA, 17 nt, Artificial Sequence
  Synthetic
uugagaauuacaaauug

SEQ ID NO: 762344 - RNA, 17 nt, Artificial Sequence
  Synthetic
cuaaaccuuacaaauug

SEQ ID NO: 762345 - RNA, 17 nt, Artificial Sequence
  Synthetic
agaguucuaccaaauug

SEQ ID NO: 762346 - RNA, 17 nt, Artificial Sequence
  Synthetic
aggguaucugcaaauug

SEQ ID NO: 762347 - RNA, 17 nt, Artificial Sequence
  Synthetic
caagucuggucaaauug

SEQ ID NO: 762348 - RNA, 17 nt, Artificial Sequence
  Synthetic
uugcuuaguucaaauug

SEQ ID NO: 762349 - RNA, 17 nt, Artificial Sequence
  Synthetic
aacgguuaaagaaauug

SEQ ID NO: 762350 - RNA, 17 nt, Artificial Sequence
  Synthetic
cauucaacaagaaauug

SEQ ID NO: 762351 - RNA, 17 nt, Artificial Sequence
  Synthetic
uuaaacucaagaaauug

SEQ ID NO: 762352 - RNA, 17 nt, Artificial Sequence
  Synthetic
auccccugcagaaauug

SEQ ID NO: 762353 - RNA, 17 nt, Artificial Sequence
  Synthetic
aggcauccuagaaauug

SEQ ID NO: 762354 - RNA, 17 nt, Artificial Sequence
  Synthetic
uaucacucaugaaauug

SEQ ID NO: 762355 - RNA, 17 nt, Artificial Sequence
  Synthetic
aacaggagcugaaauug

SEQ ID NO: 762356 - RNA, 17 nt, Artificial Sequence
  Synthetic
aacaggcucugaaauug

SEQ ID NO: 762357 - RNA, 17 nt, Artificial Sequence
  Synthetic
aacaaguucugaaauug

SEQ ID NO: 762358 - RNA, 17 nt, Artificial Sequence
  Synthetic
aacgaguucugaaauug

SEQ ID NO: 762359 - RNA, 17 nt, Artificial Sequence
  Synthetic
aucucugcuugaaauug

SEQ ID NO: 762360 - RNA, 17 nt, Artificial Sequence
  Synthetic
ucuuuuauuugaaauug

SEQ ID NO: 762361 - RNA, 17 nt, Artificial Sequence
  Synthetic
aauagauaaauaaauug

SEQ ID NO: 762362 - RNA, 17 nt, Artificial Sequence
  Synthetic
uugcuauauauaaauug

SEQ ID NO: 762363 - RNA, 17 nt, Artificial Sequence
  Synthetic
cuagaaagaguaaauug

SEQ ID NO: 762364 - RNA, 17 nt, Artificial Sequence
  Synthetic
ucucaaaguguaaauug

SEQ ID NO: 762365 - RNA, 17 nt, Artificial Sequence
  Synthetic
uaaugugguguaaauug

SEQ ID NO: 762366 - RNA, 17 nt, Artificial Sequence
  Synthetic
cauauugcauuaaauug

SEQ ID NO: 762367 - RNA, 17 nt, Artificial Sequence
  Synthetic
aaugaucuauuaaauug

SEQ ID NO: 762368 - RNA, 17 nt, Artificial Sequence
  Synthetic
uccacagaguuaaauug

SEQ ID NO: 762369 - RNA, 17 nt, Artificial Sequence
  Synthetic
aaucuaaaaaacaauug

SEQ ID NO: 762370 - RNA, 17 nt, Artificial Sequence
  Synthetic
uaagguagcuacaauug

SEQ ID NO: 762371 - RNA, 17 nt, Artificial Sequence
  Synthetic
aaaaaaguauccaauug

SEQ ID NO: 762372 - RNA, 17 nt, Artificial Sequence
  Synthetic
agacucaggggcaauug

SEQ ID NO: 762373 - RNA, 17 nt, Artificial Sequence
  Synthetic
ucugauccaaucaauug

SEQ ID NO: 762374 - RNA, 17 nt, Artificial Sequence
  Synthetic
agucuguagaucaauug

SEQ ID NO: 762375 - RNA, 17 nt, Artificial Sequence
  Synthetic
acagcagugcucaauug

SEQ ID NO: 762376 - RNA, 17 nt, Artificial Sequence
  Synthetic
acaaaccuuuucaauug

SEQ ID NO: 762377 - RNA, 17 nt, Artificial Sequence
  Synthetic
uugggagcaaagaauug

SEQ ID NO: 762378 - RNA, 17 nt, Artificial Sequence
  Synthetic
uaaaaaagaaagaauug

SEQ ID NO: 762379 - RNA, 17 nt, Artificial Sequence
  Synthetic
acagaagucaagaauug

SEQ ID NO: 762380 - RNA, 17 nt, Artificial Sequence
  Synthetic
ccccaagggaagaauug

SEQ ID NO: 762381 - RNA, 17 nt, Artificial Sequence
  Synthetic
auaugaauacagaauug

SEQ ID NO: 762382 - RNA, 17 nt, Artificial Sequence
  Synthetic
aaaagauaagagaauug

SEQ ID NO: 762383 - RNA, 17 nt, Artificial Sequence
  Synthetic
cagaaggauaggaauug

SEQ ID NO: 762384 - RNA, 17 nt, Artificial Sequence
  Synthetic
uauggauguaggaauug

SEQ ID NO: 762385 - RNA, 17 nt, Artificial Sequence
  Synthetic
ucuuggauuaggaauug

SEQ ID NO: 762386 - RNA, 17 nt, Artificial Sequence
  Synthetic
ugcauuguggggaauug

SEQ ID NO: 762387 - RNA, 17 nt, Artificial Sequence
  Synthetic
ucuuuucugcugaauug

SEQ ID NO: 762388 - RNA, 17 nt, Artificial Sequence
  Synthetic
aaagaccauuugaauug

SEQ ID NO: 762389 - RNA, 17 nt, Artificial Sequence
  Synthetic
auggaaaaccauaauug

SEQ ID NO: 762390 - RNA, 17 nt, Artificial Sequence
  Synthetic
cuuuuacaaccuaauug

SEQ ID NO: 762391 - RNA, 17 nt, Artificial Sequence
  Synthetic
ucuuacaagucuaauug

SEQ ID NO: 762392 - RNA, 17 nt, Artificial Sequence
  Synthetic
ccuuaagcuucuaauug

SEQ ID NO: 762393 - RNA, 17 nt, Artificial Sequence
  Synthetic
ccauccucuucuaauug

SEQ ID NO: 762394 - RNA, 17 nt, Artificial Sequence
  Synthetic
aaaaaaaucaguaauug

SEQ ID NO: 762395 - RNA, 17 nt, Artificial Sequence
  Synthetic
uuggcaccgaguaauug

SEQ ID NO: 762396 - RNA, 17 nt, Artificial Sequence
  Synthetic
aauaaauauaguaauug

SEQ ID NO: 762397 - RNA, 17 nt, Artificial Sequence
  Synthetic
uacaggugagguaauug

SEQ ID NO: 762398 - RNA, 17 nt, Artificial Sequence
  Synthetic
agaggcgugauuaauug

SEQ ID NO: 762399 - RNA, 17 nt, Artificial Sequence
  Synthetic
aaacacacuauuaauug

SEQ ID NO: 762400 - RNA, 17 nt, Artificial Sequence
  Synthetic
agcuguugacuuaauug

SEQ ID NO: 762401 - RNA, 17 nt, Artificial Sequence
  Synthetic
uuuuuauuucuuaauug

SEQ ID NO: 762402 - RNA, 17 nt, Artificial Sequence
  Synthetic
ccuccuaagguuaauug

SEQ ID NO: 762403 - RNA, 17 nt, Artificial Sequence
  Synthetic
agaaaaacuguuaauug

SEQ ID NO: 762404 - RNA, 17 nt, Artificial Sequence
  Synthetic
aaauuuuauuuuaauug

SEQ ID NO: 762405 - RNA, 17 nt, Artificial Sequence
  Synthetic
ucugugucuuuuaauug

SEQ ID NO: 762406 - RNA, 17 nt, Artificial Sequence
  Synthetic
auaugucguuuuaauug

SEQ ID NO: 762407 - RNA, 17 nt, Artificial Sequence
  Synthetic
aaacuauuuuuuaauug

SEQ ID NO: 762408 - RNA, 17 nt, Artificial Sequence
  Synthetic
uugugaaauaaacauug

SEQ ID NO: 762409 - RNA, 17 nt, Artificial Sequence
  Synthetic
agcuccuuuaaacauug

SEQ ID NO: 762410 - RNA, 17 nt, Artificial Sequence
  Synthetic
ccccaccuccaacauug

SEQ ID NO: 762411 - RNA, 17 nt, Artificial Sequence
  Synthetic
caaaaguuucaacauug

SEQ ID NO: 762412 - RNA, 17 nt, Artificial Sequence
  Synthetic
aaauauugcacacauug

SEQ ID NO: 762413 - RNA, 17 nt, Artificial Sequence
  Synthetic
aaggcccacccacauug

SEQ ID NO: 762414 - RNA, 17 nt, Artificial Sequence
  Synthetic
ucuugguugucacauug

SEQ ID NO: 762415 - RNA, 17 nt, Artificial Sequence
  Synthetic
auauggcuaagacauug

SEQ ID NO: 762416 - RNA, 17 nt, Artificial Sequence
  Synthetic
ucuacaaauagacauug

SEQ ID NO: 762417 - RNA, 17 nt, Artificial Sequence
  Synthetic
aacaaucauauacauug

SEQ ID NO: 762418 - RNA, 17 nt, Artificial Sequence
  Synthetic
uccauauauauacauug

SEQ ID NO: 762419 - RNA, 17 nt, Artificial Sequence
  Synthetic
cacaaaucacuacauug

SEQ ID NO: 762420 - RNA, 17 nt, Artificial Sequence
  Synthetic
caaccuuuauuacauug

SEQ ID NO: 762421 - RNA, 17 nt, Artificial Sequence
  Synthetic
uuuugccuuuuacauug

SEQ ID NO: 762422 - RNA, 17 nt, Artificial Sequence
  Synthetic
caaauggcaaaccauug

SEQ ID NO: 762423 - RNA, 17 nt, Artificial Sequence
  Synthetic
aauuacuucaaccauug

SEQ ID NO: 762424 - RNA, 17 nt, Artificial Sequence
  Synthetic
aacuaguucaaccauug

SEQ ID NO: 762425 - RNA, 17 nt, Artificial Sequence
  Synthetic
aauuaguucaaccauug

SEQ ID NO: 762426 - RNA, 17 nt, Artificial Sequence
  Synthetic
ugagcaaagaaccauug

SEQ ID NO: 762427 - RNA, 17 nt, Artificial Sequence
  Synthetic
uaaguacagaaccauug

SEQ ID NO: 762428 - RNA, 17 nt, Artificial Sequence
  Synthetic
aauuaguuccaccauug

SEQ ID NO: 762429 - RNA, 17 nt, Artificial Sequence
  Synthetic
auagagaaauaccauug

SEQ ID NO: 762430 - RNA, 17 nt, Artificial Sequence
  Synthetic
uaaaauaguuaccauug

SEQ ID NO: 762431 - RNA, 17 nt, Artificial Sequence
  Synthetic
uaggaguaaagccauug

SEQ ID NO: 762432 - RNA, 17 nt, Artificial Sequence
  Synthetic
uaaauguuaagccauug

SEQ ID NO: 762433 - RNA, 17 nt, Artificial Sequence
  Synthetic
ccuccaaauauccauug

SEQ ID NO: 762434 - RNA, 17 nt, Artificial Sequence
  Synthetic
caauauucacuccauug

SEQ ID NO: 762435 - RNA, 17 nt, Artificial Sequence
  Synthetic
augccucuucuccauug

SEQ ID NO: 762436 - RNA, 17 nt, Artificial Sequence
  Synthetic
cuagucucauuccauug

SEQ ID NO: 762437 - RNA, 17 nt, Artificial Sequence
  Synthetic
aauucauaguuccauug

SEQ ID NO: 762438 - RNA, 17 nt, Artificial Sequence
  Synthetic
aauuuccauuuccauug

SEQ ID NO: 762439 - RNA, 17 nt, Artificial Sequence
  Synthetic
cuguuaaugaagcauug

SEQ ID NO: 762440 - RNA, 17 nt, Artificial Sequence
  Synthetic
aguugaaaagagcauug

SEQ ID NO: 762441 - RNA, 17 nt, Artificial Sequence
  Synthetic
uaaauggccaggcauug

SEQ ID NO: 762442 - RNA, 17 nt, Artificial Sequence
  Synthetic
ugcuaaaagaggcauug

SEQ ID NO: 762443 - RNA, 17 nt, Artificial Sequence
  Synthetic
aucagauuggggcauug

SEQ ID NO: 762444 - RNA, 17 nt, Artificial Sequence
  Synthetic
cuccuuuaaaugcauug

SEQ ID NO: 762445 - RNA, 17 nt, Artificial Sequence
  Synthetic
aaauaccuaaugcauug

SEQ ID NO: 762446 - RNA, 17 nt, Artificial Sequence
  Synthetic
acaacaaauaugcauug

SEQ ID NO: 762447 - RNA, 17 nt, Artificial Sequence
  Synthetic
aguuuguugcugcauug

SEQ ID NO: 762448 - RNA, 17 nt, Artificial Sequence
  Synthetic
uugaaauaugugcauug

SEQ ID NO: 762449 - RNA, 17 nt, Artificial Sequence
  Synthetic
auucguguuuugcauug

SEQ ID NO: 762450 - RNA, 17 nt, Artificial Sequence
  Synthetic
aacaucacuaaucauug

SEQ ID NO: 762451 - RNA, 17 nt, Artificial Sequence
  Synthetic
cagcuaauagaucauug

SEQ ID NO: 762452 - RNA, 17 nt, Artificial Sequence
  Synthetic
auuaugcuugaucauug

SEQ ID NO: 762453 - RNA, 17 nt, Artificial Sequence
  Synthetic
aaguaugcuuaucauug

SEQ ID NO: 762454 - RNA, 17 nt, Artificial Sequence
  Synthetic
uaugagcuaccucauug

SEQ ID NO: 762455 - RNA, 17 nt, Artificial Sequence
  Synthetic
gagaugguaucucauug

SEQ ID NO: 762456 - RNA, 17 nt, Artificial Sequence
  Synthetic
cuguugggaagucauug

SEQ ID NO: 762457 - RNA, 17 nt, Artificial Sequence
  Synthetic
auaacuuguggucauug

SEQ ID NO: 762458 - RNA, 17 nt, Artificial Sequence
  Synthetic
uagaauacaauucauug

SEQ ID NO: 762459 - RNA, 17 nt, Artificial Sequence
  Synthetic
aaagguuauauucauug

SEQ ID NO: 762460 - RNA, 17 nt, Artificial Sequence
  Synthetic
cuguagcaacuucauug

SEQ ID NO: 762461 - RNA, 17 nt, Artificial Sequence
  Synthetic
auaaaagcuguucauug

SEQ ID NO: 762462 - RNA, 17 nt, Artificial Sequence
  Synthetic
uggaaacaauuucauug

SEQ ID NO: 762463 - RNA, 17 nt, Artificial Sequence
  Synthetic
ugguauggguuucauug

SEQ ID NO: 762464 - RNA, 17 nt, Artificial Sequence
  Synthetic
uggaugagcaaagauug

SEQ ID NO: 762465 - RNA, 17 nt, Artificial Sequence
  Synthetic
ugaauagagaaagauug

SEQ ID NO: 762466 - RNA, 17 nt, Artificial Sequence
  Synthetic
uucugggaucaagauug

SEQ ID NO: 762467 - RNA, 17 nt, Artificial Sequence
  Synthetic
uccugcuuucaagauug

SEQ ID NO: 762468 - RNA, 17 nt, Artificial Sequence
  Synthetic
ugucgauuuuaagauug

SEQ ID NO: 762469 - RNA, 17 nt, Artificial Sequence
  Synthetic
uguacaaaaccagauug

SEQ ID NO: 762470 - RNA, 17 nt, Artificial Sequence
  Synthetic
ccuccuucaccagauug

SEQ ID NO: 762471 - RNA, 17 nt, Artificial Sequence
  Synthetic
aacugaagaccagauug

SEQ ID NO: 762472 - RNA, 17 nt, Artificial Sequence
  Synthetic
ugugaguguccagauug

SEQ ID NO: 762473 - RNA, 17 nt, Artificial Sequence
  Synthetic
aagaccuuuccagauug

SEQ ID NO: 762474 - RNA, 17 nt, Artificial Sequence
  Synthetic
agaagacuagcagauug

SEQ ID NO: 762475 - RNA, 17 nt, Artificial Sequence
  Synthetic
aaucguaaaucagauug

SEQ ID NO: 762476 - RNA, 17 nt, Artificial Sequence
  Synthetic
uaggauaaaagagauug

SEQ ID NO: 762477 - RNA, 17 nt, Artificial Sequence
  Synthetic
cuuuuacaaggagauug

SEQ ID NO: 762478 - RNA, 17 nt, Artificial Sequence
  Synthetic
aauuuaagaugagauug

SEQ ID NO: 762479 - RNA, 17 nt, Artificial Sequence
  Synthetic
agcauacccugagauug

SEQ ID NO: 762480 - RNA, 17 nt, Artificial Sequence
  Synthetic
aaauaccucugagauug

SEQ ID NO: 762481 - RNA, 17 nt, Artificial Sequence
  Synthetic
ucagaucccauagauug

SEQ ID NO: 762482 - RNA, 17 nt, Artificial Sequence
  Synthetic
aguaaccucauagauug

SEQ ID NO: 762483 - RNA, 17 nt, Artificial Sequence
  Synthetic
ccugccuuacuagauug

SEQ ID NO: 762484 - RNA, 17 nt, Artificial Sequence
  Synthetic
augccucuucuagauug

SEQ ID NO: 762485 - RNA, 17 nt, Artificial Sequence
  Synthetic
uaaaaaugcaaggauug

SEQ ID NO: 762486 - RNA, 17 nt, Artificial Sequence
  Synthetic
uaaaggcagcaggauug

SEQ ID NO: 762487 - RNA, 17 nt, Artificial Sequence
  Synthetic
aguggguaucaggauug

SEQ ID NO: 762488 - RNA, 17 nt, Artificial Sequence
  Synthetic
caguaauuuuaggauug

SEQ ID NO: 762489 - RNA, 17 nt, Artificial Sequence
  Synthetic
uuucuguuuuaggauug

SEQ ID NO: 762490 - RNA, 17 nt, Artificial Sequence
  Synthetic
caccaguugggggauug

SEQ ID NO: 762491 - RNA, 17 nt, Artificial Sequence
  Synthetic
uugacauguggggauug

SEQ ID NO: 762492 - RNA, 17 nt, Artificial Sequence
  Synthetic
uagauggcaugggauug

SEQ ID NO: 762493 - RNA, 17 nt, Artificial Sequence
  Synthetic
agccacuucauggauug

SEQ ID NO: 762494 - RNA, 17 nt, Artificial Sequence
  Synthetic
uugcuuuugaaugauug

SEQ ID NO: 762495 - RNA, 17 nt, Artificial Sequence
  Synthetic
aucauugcuaaugauug

SEQ ID NO: 762496 - RNA, 17 nt, Artificial Sequence
  Synthetic
aagaaaauucaugauug

SEQ ID NO: 762497 - RNA, 17 nt, Artificial Sequence
  Synthetic
auaaaaauagaugauug

SEQ ID NO: 762498 - RNA, 17 nt, Artificial Sequence
  Synthetic
uuugcaaaugaugauug

SEQ ID NO: 762499 - RNA, 17 nt, Artificial Sequence
  Synthetic
auuaacucauaugauug

SEQ ID NO: 762500 - RNA, 17 nt, Artificial Sequence
  Synthetic
auguauauuacugauug

SEQ ID NO: 762501 - RNA, 17 nt, Artificial Sequence
  Synthetic
caauugcaaccugauug

SEQ ID NO: 762502 - RNA, 17 nt, Artificial Sequence
  Synthetic
uucuuuuacccugauug

SEQ ID NO: 762503 - RNA, 17 nt, Artificial Sequence
  Synthetic
uuugugcuuucugauug

SEQ ID NO: 762504 - RNA, 17 nt, Artificial Sequence
  Synthetic
cuuuucauaagugauug

SEQ ID NO: 762505 - RNA, 17 nt, Artificial Sequence
  Synthetic
uguuggaugagugauug

SEQ ID NO: 762506 - RNA, 17 nt, Artificial Sequence
  Synthetic
uuagccacgcgugauug

SEQ ID NO: 762507 - RNA, 17 nt, Artificial Sequence
  Synthetic
auuaaauugauugauug

SEQ ID NO: 762508 - RNA, 17 nt, Artificial Sequence
  Synthetic
aauauagguauugauug

SEQ ID NO: 762509 - RNA, 17 nt, Artificial Sequence
  Synthetic
cagcaggaacuugauug

SEQ ID NO: 762510 - RNA, 17 nt, Artificial Sequence
  Synthetic
auucuauuucuugauug

SEQ ID NO: 762511 - RNA, 17 nt, Artificial Sequence
  Synthetic
auuaauuaauuugauug

SEQ ID NO: 762512 - RNA, 17 nt, Artificial Sequence
  Synthetic
ugacaaacaaaauauug

SEQ ID NO: 762513 - RNA, 17 nt, Artificial Sequence
  Synthetic
aggccaugcaaauauug

SEQ ID NO: 762514 - RNA, 17 nt, Artificial Sequence
  Synthetic
aagggauggaaauauug

SEQ ID NO: 762515 - RNA, 17 nt, Artificial Sequence
  Synthetic
aaacuuaauaaauauug

SEQ ID NO: 762516 - RNA, 17 nt, Artificial Sequence
  Synthetic
uggccauguaaauauug

SEQ ID NO: 762517 - RNA, 17 nt, Artificial Sequence
  Synthetic
ccccaccuccaauauug

SEQ ID NO: 762518 - RNA, 17 nt, Artificial Sequence
  Synthetic
cuuucucugcaauauug

SEQ ID NO: 762519 - RNA, 17 nt, Artificial Sequence
  Synthetic
uaaaaaugugaauauug

SEQ ID NO: 762520 - RNA, 17 nt, Artificial Sequence
  Synthetic
aagaacagcuaauauug

SEQ ID NO: 762521 - RNA, 17 nt, Artificial Sequence
  Synthetic
cuuuuuagcuaauauug

SEQ ID NO: 762522 - RNA, 17 nt, Artificial Sequence
  Synthetic
uuugugggcacauauug

SEQ ID NO: 762523 - RNA, 17 nt, Artificial Sequence
  Synthetic
accaagcugccauauug

SEQ ID NO: 762524 - RNA, 17 nt, Artificial Sequence
  Synthetic
cagugauauccauauug

SEQ ID NO: 762525 - RNA, 17 nt, Artificial Sequence
  Synthetic
aagggguaugcauauug

SEQ ID NO: 762526 - RNA, 17 nt, Artificial Sequence
  Synthetic
aagcagaugauauauug

SEQ ID NO: 762527 - RNA, 17 nt, Artificial Sequence
  Synthetic
uaauugaguauauauug

SEQ ID NO: 762528 - RNA, 17 nt, Artificial Sequence
  Synthetic
agaaagccauuauauug

SEQ ID NO: 762529 - RNA, 17 nt, Artificial Sequence
  Synthetic
aagacuggcuuauauug

SEQ ID NO: 762530 - RNA, 17 nt, Artificial Sequence
  Synthetic
uuucuaauuuuauauug

SEQ ID NO: 762531 - RNA, 17 nt, Artificial Sequence
  Synthetic
cagacugucaacuauug

SEQ ID NO: 762532 - RNA, 17 nt, Artificial Sequence
  Synthetic
ccauuuuagaacuauug

SEQ ID NO: 762533 - RNA, 17 nt, Artificial Sequence
  Synthetic
uguccuguguacuauug

SEQ ID NO: 762534 - RNA, 17 nt, Artificial Sequence
  Synthetic
agaauaggugccuauug

SEQ ID NO: 762535 - RNA, 17 nt, Artificial Sequence
  Synthetic
caucuuccauccuauug

SEQ ID NO: 762536 - RNA, 17 nt, Artificial Sequence
  Synthetic
auucacuuaagcuauug

SEQ ID NO: 762537 - RNA, 17 nt, Artificial Sequence
  Synthetic
caauaaaguagcuauug

SEQ ID NO: 762538 - RNA, 17 nt, Artificial Sequence
  Synthetic
acuuaacaccgcuauug

SEQ ID NO: 762539 - RNA, 17 nt, Artificial Sequence
  Synthetic
uaaauggggugcuauug

SEQ ID NO: 762540 - RNA, 17 nt, Artificial Sequence
  Synthetic
aagccauaaaucuauug

SEQ ID NO: 762541 - RNA, 17 nt, Artificial Sequence
  Synthetic
uuaauuauaaucuauug

SEQ ID NO: 762542 - RNA, 17 nt, Artificial Sequence
  Synthetic
acaggguggaucuauug

SEQ ID NO: 762543 - RNA, 17 nt, Artificial Sequence
  Synthetic
uugaagaguaucuauug

SEQ ID NO: 762544 - RNA, 17 nt, Artificial Sequence
  Synthetic
ucaguugguaucuauug

SEQ ID NO: 762545 - RNA, 17 nt, Artificial Sequence
  Synthetic
caaagagaggucuauug

SEQ ID NO: 762546 - RNA, 17 nt, Artificial Sequence
  Synthetic
cauguucuauucuauug

SEQ ID NO: 762547 - RNA, 17 nt, Artificial Sequence
  Synthetic
uuuuuucaaaaguauug

SEQ ID NO: 762548 - RNA, 17 nt, Artificial Sequence
  Synthetic
uuuuuauggcaguauug

SEQ ID NO: 762549 - RNA, 17 nt, Artificial Sequence
  Synthetic
cagugugcaagguauug

SEQ ID NO: 762550 - RNA, 17 nt, Artificial Sequence
  Synthetic
auaauaaggagguauug

SEQ ID NO: 762551 - RNA, 17 nt, Artificial Sequence
  Synthetic
aaugucauuugguauug

SEQ ID NO: 762552 - RNA, 17 nt, Artificial Sequence
  Synthetic
uuaauaaaaauguauug

SEQ ID NO: 762553 - RNA, 17 nt, Artificial Sequence
  Synthetic
auaaaaugcauguauug

SEQ ID NO: 762554 - RNA, 17 nt, Artificial Sequence
  Synthetic
acaugcagccuguauug

SEQ ID NO: 762555 - RNA, 17 nt, Artificial Sequence
  Synthetic
acaaaugaucuguauug

SEQ ID NO: 762556 - RNA, 17 nt, Artificial Sequence
  Synthetic
cugcuguuauuguauug

SEQ ID NO: 762557 - RNA, 17 nt, Artificial Sequence
  Synthetic
uccccauuuuuguauug

SEQ ID NO: 762558 - RNA, 17 nt, Artificial Sequence
  Synthetic
uuuucuguaaauuauug

SEQ ID NO: 762559 - RNA, 17 nt, Artificial Sequence
  Synthetic
aauuaguauaauuauug

SEQ ID NO: 762560 - RNA, 17 nt, Artificial Sequence
  Synthetic
cuuaagauuaauuauug

SEQ ID NO: 762561 - RNA, 17 nt, Artificial Sequence
  Synthetic
uaaaauuaugauuauug

SEQ ID NO: 762562 - RNA, 17 nt, Artificial Sequence
  Synthetic
ugcugugucacuuauug

SEQ ID NO: 762563 - RNA, 17 nt, Artificial Sequence
  Synthetic
aucucccugacuuauug

SEQ ID NO: 762564 - RNA, 17 nt, Artificial Sequence
  Synthetic
cauuucucugcuuauug

SEQ ID NO: 762565 - RNA, 17 nt, Artificial Sequence
  Synthetic
aacacauucaguuauug

SEQ ID NO: 762566 - RNA, 17 nt, Artificial Sequence
  Synthetic
acuucacagaguuauug

SEQ ID NO: 762567 - RNA, 17 nt, Artificial Sequence
  Synthetic
uaaacaagcauuuauug

SEQ ID NO: 762568 - RNA, 17 nt, Artificial Sequence
  Synthetic
uuuaaacuacuuuauug

SEQ ID NO: 762569 - RNA, 17 nt, Artificial Sequence
  Synthetic
uauccaugaguuuauug

SEQ ID NO: 762570 - RNA, 17 nt, Artificial Sequence
  Synthetic
cacacauauguuuauug

SEQ ID NO: 762571 - RNA, 17 nt, Artificial Sequence
  Synthetic
cacacguauguuuauug

SEQ ID NO: 762572 - RNA, 17 nt, Artificial Sequence
  Synthetic
cacauguauguuuauug

SEQ ID NO: 762573 - RNA, 17 nt, Artificial Sequence
  Synthetic
uaaauuuaauuuuauug

SEQ ID NO: 762574 - RNA, 17 nt, Artificial Sequence
  Synthetic
ccucgaacauuuuauug

SEQ ID NO: 762575 - RNA, 17 nt, Artificial Sequence
  Synthetic
aaagagauauuuuauug

SEQ ID NO: 762576 - RNA, 17 nt, Artificial Sequence
  Synthetic
augccaguauuuuauug

SEQ ID NO: 762577 - RNA, 17 nt, Artificial Sequence
  Synthetic
uugccaguauuuuauug

SEQ ID NO: 762578 - RNA, 17 nt, Artificial Sequence
  Synthetic
aaauuuuuauuuuauug

SEQ ID NO: 762579 - RNA, 17 nt, Artificial Sequence
  Synthetic
acaugccacuuuuauug

SEQ ID NO: 762580 - RNA, 17 nt, Artificial Sequence
  Synthetic
uccuuuuuguuuuauug

SEQ ID NO: 762581 - RNA, 17 nt, Artificial Sequence
  Synthetic
uuuuaaauuuuuuauug

SEQ ID NO: 762582 - RNA, 17 nt, Artificial Sequence
  Synthetic
aagcaaggacaaacuug

SEQ ID NO: 762583 - RNA, 17 nt, Artificial Sequence
  Synthetic
uuguccauccaaacuug

SEQ ID NO: 762584 - RNA, 17 nt, Artificial Sequence
  Synthetic
ugaaacauggaaacuug

SEQ ID NO: 762585 - RNA, 17 nt, Artificial Sequence
  Synthetic
agaauuuucuaaacuug

SEQ ID NO: 762586 - RNA, 17 nt, Artificial Sequence
  Synthetic
aguuuaauuucaacuug

SEQ ID NO: 762587 - RNA, 17 nt, Artificial Sequence
  Synthetic
ccugggcagagaacuug

SEQ ID NO: 762588 - RNA, 17 nt, Artificial Sequence
  Synthetic
uccagaaggagaacuug

SEQ ID NO: 762589 - RNA, 17 nt, Artificial Sequence
  Synthetic
uaauaucugagaacuug

SEQ ID NO: 762590 - RNA, 17 nt, Artificial Sequence
  Synthetic
agccuugacauaacuug

SEQ ID NO: 762591 - RNA, 17 nt, Artificial Sequence
  Synthetic
uagaucaguauaacuug

SEQ ID NO: 762592 - RNA, 17 nt, Artificial Sequence
  Synthetic
uacccaagucuaacuug

SEQ ID NO: 762593 - RNA, 17 nt, Artificial Sequence
  Synthetic
uaaaguuauuuaacuug

SEQ ID NO: 762594 - RNA, 17 nt, Artificial Sequence
  Synthetic
uucacagacaacacuug

SEQ ID NO: 762595 - RNA, 17 nt, Artificial Sequence
  Synthetic
aucccuuccaacacuug

SEQ ID NO: 762596 - RNA, 17 nt, Artificial Sequence
  Synthetic
acucaagauaacacuug

SEQ ID NO: 762597 - RNA, 17 nt, Artificial Sequence
  Synthetic
uuuuguauucacacuug

SEQ ID NO: 762598 - RNA, 17 nt, Artificial Sequence
  Synthetic
aaaauauuucacacuug

SEQ ID NO: 762599 - RNA, 17 nt, Artificial Sequence
  Synthetic
uguugagggcccacuug

SEQ ID NO: 762600 - RNA, 17 nt, Artificial Sequence
  Synthetic
uguaaucccagcacuug

SEQ ID NO: 762601 - RNA, 17 nt, Artificial Sequence
  Synthetic
agcgggcagaucacuug

SEQ ID NO: 762602 - RNA, 17 nt, Artificial Sequence
  Synthetic
ugugggcggaucacuug

SEQ ID NO: 762603 - RNA, 17 nt, Artificial Sequence
  Synthetic
aguagguggaucacuug

SEQ ID NO: 762604 - RNA, 17 nt, Artificial Sequence
  Synthetic
aauggguggaucacuug

SEQ ID NO: 762605 - RNA, 17 nt, Artificial Sequence
  Synthetic
uaucaaaauaucacuug

SEQ ID NO: 762606 - RNA, 17 nt, Artificial Sequence
  Synthetic
uguccaguccucacuug

SEQ ID NO: 762607 - RNA, 17 nt, Artificial Sequence
  Synthetic
uuucuaaaucucacuug

SEQ ID NO: 762608 - RNA, 17 nt, Artificial Sequence
  Synthetic
uuucacaaaaagacuug

SEQ ID NO: 762609 - RNA, 17 nt, Artificial Sequence
  Synthetic
uugcagaacaagacuug

SEQ ID NO: 762610 - RNA, 17 nt, Artificial Sequence
  Synthetic
cuuucucugaagacuug

SEQ ID NO: 762611 - RNA, 17 nt, Artificial Sequence
  Synthetic
aggcaugaacagacuug

SEQ ID NO: 762612 - RNA, 17 nt, Artificial Sequence
  Synthetic
aaguaauuagagacuug

SEQ ID NO: 762613 - RNA, 17 nt, Artificial Sequence
  Synthetic
ugggcuuuggagacuug

SEQ ID NO: 762614 - RNA, 17 nt, Artificial Sequence
  Synthetic
cauuugggugagacuug

SEQ ID NO: 762615 - RNA, 17 nt, Artificial Sequence
  Synthetic
acaacuguuuagacuug

SEQ ID NO: 762616 - RNA, 17 nt, Artificial Sequence
  Synthetic
acacacaugaggacuug

SEQ ID NO: 762617 - RNA, 17 nt, Artificial Sequence
  Synthetic
ucuggggaugggacuug

SEQ ID NO: 762618 - RNA, 17 nt, Artificial Sequence
  Synthetic
cugggaacuuggacuug

SEQ ID NO: 762619 - RNA, 17 nt, Artificial Sequence
  Synthetic
acaaagaacaugacuug

SEQ ID NO: 762620 - RNA, 17 nt, Artificial Sequence
  Synthetic
aaaaugugaaauacuug

SEQ ID NO: 762621 - RNA, 17 nt, Artificial Sequence
  Synthetic
ugcccagaccauacuug

SEQ ID NO: 762622 - RNA, 17 nt, Artificial Sequence
  Synthetic
uauggagaugauacuug

SEQ ID NO: 762623 - RNA, 17 nt, Artificial Sequence
  Synthetic
acuaaaauauauacuug

SEQ ID NO: 762624 - RNA, 17 nt, Artificial Sequence
  Synthetic
ucaacuuagccuacuug

SEQ ID NO: 762625 - RNA, 17 nt, Artificial Sequence
  Synthetic
auagagccugguacuug

SEQ ID NO: 762626 - RNA, 17 nt, Artificial Sequence
  Synthetic
aagaauuguuguacuug

SEQ ID NO: 762627 - RNA, 17 nt, Artificial Sequence
  Synthetic
cuuagguucauuacuug

SEQ ID NO: 762628 - RNA, 17 nt, Artificial Sequence
  Synthetic
aaaauuguuauuacuug

SEQ ID NO: 762629 - RNA, 17 nt, Artificial Sequence
  Synthetic
uuguuauggcuuacuug

SEQ ID NO: 762630 - RNA, 17 nt, Artificial Sequence
  Synthetic
uuaauuguucaaccuug

SEQ ID NO: 762631 - RNA, 17 nt, Artificial Sequence
  Synthetic
aaggucugauaaccuug

SEQ ID NO: 762632 - RNA, 17 nt, Artificial Sequence
  Synthetic
cacacacacacaccuug

SEQ ID NO: 762633 - RNA, 17 nt, Artificial Sequence
  Synthetic
uacuccacagcaccuug

SEQ ID NO: 762634 - RNA, 17 nt, Artificial Sequence
  Synthetic
cuaaugucaucaccuug

SEQ ID NO: 762635 - RNA, 17 nt, Artificial Sequence
  Synthetic
acggggguuucaccuug

SEQ ID NO: 762636 - RNA, 17 nt, Artificial Sequence
  Synthetic
cuacccugcugaccuug

SEQ ID NO: 762637 - RNA, 17 nt, Artificial Sequence
  Synthetic
uaaaccaaacuaccuug

SEQ ID NO: 762638 - RNA, 17 nt, Artificial Sequence
  Synthetic
uuaagaagccuaccuug

SEQ ID NO: 762639 - RNA, 17 nt, Artificial Sequence
  Synthetic
uuaucagacaacccuug

SEQ ID NO: 762640 - RNA, 17 nt, Artificial Sequence
  Synthetic
aguuucaguaacccuug

SEQ ID NO: 762641 - RNA, 17 nt, Artificial Sequence
  Synthetic
ccuaaaugauacccuug

SEQ ID NO: 762642 - RNA, 17 nt, Artificial Sequence
  Synthetic
cccaccauauacccuug

SEQ ID NO: 762643 - RNA, 17 nt, Artificial Sequence
  Synthetic
acuuuguccaccccuug

SEQ ID NO: 762644 - RNA, 17 nt, Artificial Sequence
  Synthetic
uugccuuuacccccuug

SEQ ID NO: 762645 - RNA, 17 nt, Artificial Sequence
  Synthetic
cuugcugaguccccuug

SEQ ID NO: 762646 - RNA, 17 nt, Artificial Sequence
  Synthetic
cgguuccccagcccuug

SEQ ID NO: 762647 - RNA, 17 nt, Artificial Sequence
  Synthetic
uauuauucaugcccuug

SEQ ID NO: 762648 - RNA, 17 nt, Artificial Sequence
  Synthetic
ugcgugcagaucccuug

SEQ ID NO: 762649 - RNA, 17 nt, Artificial Sequence
  Synthetic
aauuuuccuaucccuug

SEQ ID NO: 762650 - RNA, 17 nt, Artificial Sequence
  Synthetic
aaauuuucacucccuug

SEQ ID NO: 762651 - RNA, 17 nt, Artificial Sequence
  Synthetic
aucacaaaagucccuug

SEQ ID NO: 762652 - RNA, 17 nt, Artificial Sequence
  Synthetic
uuuccaaaugucccuug

SEQ ID NO: 762653 - RNA, 17 nt, Artificial Sequence
  Synthetic
uauagauuugucccuug

SEQ ID NO: 762654 - RNA, 17 nt, Artificial Sequence
  Synthetic
aaaguuaaauucccuug

SEQ ID NO: 762655 - RNA, 17 nt, Artificial Sequence
  Synthetic
ccccaauucuucccuug

SEQ ID NO: 762656 - RNA, 17 nt, Artificial Sequence
  Synthetic
uuucucauguucccuug

SEQ ID NO: 762657 - RNA, 17 nt, Artificial Sequence
  Synthetic
cuaccagcuuucccuug

SEQ ID NO: 762658 - RNA, 17 nt, Artificial Sequence
  Synthetic
acuuggcuugagccuug

SEQ ID NO: 762659 - RNA, 17 nt, Artificial Sequence
  Synthetic
caaguacaaaggccuug

SEQ ID NO: 762660 - RNA, 17 nt, Artificial Sequence
  Synthetic
uagccuuucaggccuug

SEQ ID NO: 762661 - RNA, 17 nt, Artificial Sequence
  Synthetic
aaaaauacagggccuug

SEQ ID NO: 762662 - RNA, 17 nt, Artificial Sequence
  Synthetic
agaaaugaugggccuug

SEQ ID NO: 762663 - RNA, 17 nt, Artificial Sequence
  Synthetic
ccuguuuaaaugccuug

SEQ ID NO: 762664 - RNA, 17 nt, Artificial Sequence
  Synthetic
cugugugcagugccuug

SEQ ID NO: 762665 - RNA, 17 nt, Artificial Sequence
  Synthetic
uaacuucuguugccuug

SEQ ID NO: 762666 - RNA, 17 nt, Artificial Sequence
  Synthetic
aacauggaacauccuug

SEQ ID NO: 762667 - RNA, 17 nt, Artificial Sequence
  Synthetic
cuaguucuagauccuug

SEQ ID NO: 762668 - RNA, 17 nt, Artificial Sequence
  Synthetic
cugguucuagauccuug

SEQ ID NO: 762669 - RNA, 17 nt, Artificial Sequence
  Synthetic
cugguuguagauccuug

SEQ ID NO: 762670 - RNA, 17 nt, Artificial Sequence
  Synthetic
cugguucuguauccuug

SEQ ID NO: 762671 - RNA, 17 nt, Artificial Sequence
  Synthetic
ccaauccaaacuccuug

SEQ ID NO: 762672 - RNA, 17 nt, Artificial Sequence
  Synthetic
cuccuccauccuccuug

SEQ ID NO: 762673 - RNA, 17 nt, Artificial Sequence
  Synthetic
aaaguacuaucuccuug

SEQ ID NO: 762674 - RNA, 17 nt, Artificial Sequence
  Synthetic
uuuuuauuagguccuug

SEQ ID NO: 762675 - RNA, 17 nt, Artificial Sequence
  Synthetic
auuuuggcugguccuug

SEQ ID NO: 762676 - RNA, 17 nt, Artificial Sequence
  Synthetic
aggcuccuguguccuug

SEQ ID NO: 762677 - RNA, 17 nt, Artificial Sequence
  Synthetic
ugcucuucucuuccuug

SEQ ID NO: 762678 - RNA, 17 nt, Artificial Sequence
  Synthetic
aauuuauuauuuccuug

SEQ ID NO: 762679 - RNA, 17 nt, Artificial Sequence
  Synthetic
aacucaguaaaagcuug

SEQ ID NO: 762680 - RNA, 17 nt, Artificial Sequence
  Synthetic
aagcaagucuaagcuug

SEQ ID NO: 762681 - RNA, 17 nt, Artificial Sequence
  Synthetic
ugccugcauacagcuug

SEQ ID NO: 762682 - RNA, 17 nt, Artificial Sequence
  Synthetic
uuaagccacccagcuug

SEQ ID NO: 762683 - RNA, 17 nt, Artificial Sequence
  Synthetic
agaugucuuccagcuug

SEQ ID NO: 762684 - RNA, 17 nt, Artificial Sequence
  Synthetic
ucaggcccagcagcuug

SEQ ID NO: 762685 - RNA, 17 nt, Artificial Sequence
  Synthetic
aacaaagccgcagcuug

SEQ ID NO: 762686 - RNA, 17 nt, Artificial Sequence
  Synthetic
ucccccaagucagcuug

SEQ ID NO: 762687 - RNA, 17 nt, Artificial Sequence
  Synthetic
uaugaaacuagagcuug

SEQ ID NO: 762688 - RNA, 17 nt, Artificial Sequence
  Synthetic
aaguaaauuagagcuug

SEQ ID NO: 762689 - RNA, 17 nt, Artificial Sequence
  Synthetic
ccaggagguggagcuug

SEQ ID NO: 762690 - RNA, 17 nt, Artificial Sequence
  Synthetic
ccgggagguggagcuug

SEQ ID NO: 762691 - RNA, 17 nt, Artificial Sequence
  Synthetic
aaucugaaaaaggcuug

SEQ ID NO: 762692 - RNA, 17 nt, Artificial Sequence
  Synthetic
ucagaacuuaaggcuug

SEQ ID NO: 762693 - RNA, 17 nt, Artificial Sequence
  Synthetic
cugauuuaguaggcuug

SEQ ID NO: 762694 - RNA, 17 nt, Artificial Sequence
  Synthetic
aucaguauaagggcuug

SEQ ID NO: 762695 - RNA, 17 nt, Artificial Sequence
  Synthetic
aauagugguggggcuug

SEQ ID NO: 762696 - RNA, 17 nt, Artificial Sequence
  Synthetic
cgaugcuuaguggcuug

SEQ ID NO: 762697 - RNA, 17 nt, Artificial Sequence
  Synthetic
cugauaucauuggcuug

SEQ ID NO: 762698 - RNA, 17 nt, Artificial Sequence
  Synthetic
acaugcugauuggcuug

SEQ ID NO: 762699 - RNA, 17 nt, Artificial Sequence
  Synthetic
agugcuuauuuggcuug

SEQ ID NO: 762700 - RNA, 17 nt, Artificial Sequence
  Synthetic
ucaggcuuuuuggcuug

SEQ ID NO: 762701 - RNA, 17 nt, Artificial Sequence
  Synthetic
cucccauaaaaugcuug

SEQ ID NO: 762702 - RNA, 17 nt, Artificial Sequence
  Synthetic
uaaagaauaaaugcuug

SEQ ID NO: 762703 - RNA, 17 nt, Artificial Sequence
  Synthetic
uuuucauuacaugcuug

SEQ ID NO: 762704 - RNA, 17 nt, Artificial Sequence
  Synthetic
auucuugauucugcuug

SEQ ID NO: 762705 - RNA, 17 nt, Artificial Sequence
  Synthetic
ccuuuuucuucugcuug

SEQ ID NO: 762706 - RNA, 17 nt, Artificial Sequence
  Synthetic
aaguggaaaagugcuug

SEQ ID NO: 762707 - RNA, 17 nt, Artificial Sequence
  Synthetic
aauauuagaagugcuug

SEQ ID NO: 762708 - RNA, 17 nt, Artificial Sequence
  Synthetic
uacguucauggugcuug

SEQ ID NO: 762709 - RNA, 17 nt, Artificial Sequence
  Synthetic
caacagaaaugugcuug

SEQ ID NO: 762710 - RNA, 17 nt, Artificial Sequence
  Synthetic
auuuucugaugugcuug

SEQ ID NO: 762711 - RNA, 17 nt, Artificial Sequence
  Synthetic
auguaaaugugugcuug

SEQ ID NO: 762712 - RNA, 17 nt, Artificial Sequence
  Synthetic
caaagaauaauugcuug

SEQ ID NO: 762713 - RNA, 17 nt, Artificial Sequence
  Synthetic
uacagucugcuugcuug

SEQ ID NO: 762714 - RNA, 17 nt, Artificial Sequence
  Synthetic
uugcaucucuuugcuug

SEQ ID NO: 762715 - RNA, 17 nt, Artificial Sequence
  Synthetic
cacuuaggguuugcuug

SEQ ID NO: 762716 - RNA, 17 nt, Artificial Sequence
  Synthetic
uccagguuuuuugcuug

SEQ ID NO: 762717 - RNA, 17 nt, Artificial Sequence
  Synthetic
ccaccauaaaaaucuug

SEQ ID NO: 762718 - RNA, 17 nt, Artificial Sequence
  Synthetic
ccaguaacaaaaucuug

SEQ ID NO: 762719 - RNA, 17 nt, Artificial Sequence
  Synthetic
uaugaugugaaaucuug

SEQ ID NO: 762720 - RNA, 17 nt, Artificial Sequence
  Synthetic
cugccuaauaaaucuug

SEQ ID NO: 762721 - RNA, 17 nt, Artificial Sequence
  Synthetic
cagcagauucaaucuug

SEQ ID NO: 762722 - RNA, 17 nt, Artificial Sequence
  Synthetic
cccagauaagcaucuug

SEQ ID NO: 762723 - RNA, 17 nt, Artificial Sequence
  Synthetic
uuguguagagcaucuug

SEQ ID NO: 762724 - RNA, 17 nt, Artificial Sequence
  Synthetic
acauuggaggcaucuug

SEQ ID NO: 762725 - RNA, 17 nt, Artificial Sequence
  Synthetic
ccaaagguggcaucuug

SEQ ID NO: 762726 - RNA, 17 nt, Artificial Sequence
  Synthetic
uauuuucucucaucuug

SEQ ID NO: 762727 - RNA, 17 nt, Artificial Sequence
  Synthetic
aaauugcuuucaucuug

SEQ ID NO: 762728 - RNA, 17 nt, Artificial Sequence
  Synthetic
ccuugucuuucaucuug

SEQ ID NO: 762729 - RNA, 17 nt, Artificial Sequence
  Synthetic
uuucaaagaagaucuug

SEQ ID NO: 762730 - RNA, 17 nt, Artificial Sequence
  Synthetic
auuguauauuuaucuug

SEQ ID NO: 762731 - RNA, 17 nt, Artificial Sequence
  Synthetic
ucuguuaauuacucuug

SEQ ID NO: 762732 - RNA, 17 nt, Artificial Sequence
  Synthetic
aaaucaagaaccucuug

SEQ ID NO: 762733 - RNA, 17 nt, Artificial Sequence
  Synthetic
cauuuguguaccucuug

SEQ ID NO: 762734 - RNA, 17 nt, Artificial Sequence
  Synthetic
auccugccucccucuug

SEQ ID NO: 762735 - RNA, 17 nt, Artificial Sequence
  Synthetic
uguaaauauggcucuug

SEQ ID NO: 762736 - RNA, 17 nt, Artificial Sequence
  Synthetic
agugccaucugcucuug

SEQ ID NO: 762737 - RNA, 17 nt, Artificial Sequence
  Synthetic
aagcaucacaucucuug

SEQ ID NO: 762738 - RNA, 17 nt, Artificial Sequence
  Synthetic
uacucaguacucucuug

SEQ ID NO: 762739 - RNA, 17 nt, Artificial Sequence
  Synthetic
ucauccccucucucuug

SEQ ID NO: 762740 - RNA, 17 nt, Artificial Sequence
  Synthetic
acuaagacagucucuug

SEQ ID NO: 762741 - RNA, 17 nt, Artificial Sequence
  Synthetic
acauccaucuucucuug

SEQ ID NO: 762742 - RNA, 17 nt, Artificial Sequence
  Synthetic
caggaaaaacagucuug

SEQ ID NO: 762743 - RNA, 17 nt, Artificial Sequence
  Synthetic
uagccaaaacagucuug

SEQ ID NO: 762744 - RNA, 17 nt, Artificial Sequence
  Synthetic
uaguuuauggagucuug

SEQ ID NO: 762745 - RNA, 17 nt, Artificial Sequence
  Synthetic
auuugaucagggucuug

SEQ ID NO: 762746 - RNA, 17 nt, Artificial Sequence
  Synthetic
aacaagaaaaugucuug

SEQ ID NO: 762747 - RNA, 17 nt, Artificial Sequence
  Synthetic
agacaaaacaugucuug

SEQ ID NO: 762748 - RNA, 17 nt, Artificial Sequence
  Synthetic
uguuaguugaugucuug

SEQ ID NO: 762749 - RNA, 17 nt, Artificial Sequence
  Synthetic
auagacucuaugucuug

SEQ ID NO: 762750 - RNA, 17 nt, Artificial Sequence
  Synthetic
uuauauaccuugucuug

SEQ ID NO: 762751 - RNA, 17 nt, Artificial Sequence
  Synthetic
ucuuaucuaaauucuug

SEQ ID NO: 762752 - RNA, 17 nt, Artificial Sequence
  Synthetic
auuuaacaacauucuug

SEQ ID NO: 762753 - RNA, 17 nt, Artificial Sequence
  Synthetic
uucuaagcucauucuug

SEQ ID NO: 762754 - RNA, 17 nt, Artificial Sequence
  Synthetic
ugcccucuggauucuug

SEQ ID NO: 762755 - RNA, 17 nt, Artificial Sequence
  Synthetic
cauuuuacugauucuug

SEQ ID NO: 762756 - RNA, 17 nt, Artificial Sequence
  Synthetic
aaggaaagugauucuug

SEQ ID NO: 762757 - RNA, 17 nt, Artificial Sequence
  Synthetic
cuucaaagaacuucuug

SEQ ID NO: 762758 - RNA, 17 nt, Artificial Sequence
  Synthetic
aaugggaccacuucuug

SEQ ID NO: 762759 - RNA, 17 nt, Artificial Sequence
  Synthetic
uauucauauacuucuug

SEQ ID NO: 762760 - RNA, 17 nt, Artificial Sequence
  Synthetic
uuuuucuuaccuucuug

SEQ ID NO: 762761 - RNA, 17 nt, Artificial Sequence
  Synthetic
caauugugagcuucuug

SEQ ID NO: 762762 - RNA, 17 nt, Artificial Sequence
  Synthetic
aaacuacucucuucuug

SEQ ID NO: 762763 - RNA, 17 nt, Artificial Sequence
  Synthetic
accagggauucuucuug

SEQ ID NO: 762764 - RNA, 17 nt, Artificial Sequence
  Synthetic
auguauucuucuucuug

SEQ ID NO: 762765 - RNA, 17 nt, Artificial Sequence
  Synthetic
auaaauauuucuucuug

SEQ ID NO: 762766 - RNA, 17 nt, Artificial Sequence
  Synthetic
caaaacuaaaguucuug

SEQ ID NO: 762767 - RNA, 17 nt, Artificial Sequence
  Synthetic
ccucugacauguucuug

SEQ ID NO: 762768 - RNA, 17 nt, Artificial Sequence
  Synthetic
auuuaggaguguucuug

SEQ ID NO: 762769 - RNA, 17 nt, Artificial Sequence
  Synthetic
auucacuaaauuucuug

SEQ ID NO: 762770 - RNA, 17 nt, Artificial Sequence
  Synthetic
uaauacuucauuucuug

SEQ ID NO: 762771 - RNA, 17 nt, Artificial Sequence
  Synthetic
uuucugauuauuucuug

SEQ ID NO: 762772 - RNA, 17 nt, Artificial Sequence
  Synthetic
acuacuuuuuuuucuug

SEQ ID NO: 762773 - RNA, 17 nt, Artificial Sequence
  Synthetic
cuuuggaaaaaaaguug

SEQ ID NO: 762774 - RNA, 17 nt, Artificial Sequence
  Synthetic
uaauuauuacaaaguug

SEQ ID NO: 762775 - RNA, 17 nt, Artificial Sequence
  Synthetic
aaguguuaaacaaguug

SEQ ID NO: 762776 - RNA, 17 nt, Artificial Sequence
  Synthetic
aucuauagaacaaguug

SEQ ID NO: 762777 - RNA, 17 nt, Artificial Sequence
  Synthetic
aagaaacagacaaguug

SEQ ID NO: 762778 - RNA, 17 nt, Artificial Sequence
  Synthetic
acauugaagucaaguug

SEQ ID NO: 762779 - RNA, 17 nt, Artificial Sequence
  Synthetic
uuagacaggucaaguug

SEQ ID NO: 762780 - RNA, 17 nt, Artificial Sequence
  Synthetic
ccaugggcuucaaguug

SEQ ID NO: 762781 - RNA, 17 nt, Artificial Sequence
  Synthetic
agauguguaagaaguug

SEQ ID NO: 762782 - RNA, 17 nt, Artificial Sequence
  Synthetic
uauuacuugggaaguug

SEQ ID NO: 762783 - RNA, 17 nt, Artificial Sequence
  Synthetic
auguccuagugaaguug

SEQ ID NO: 762784 - RNA, 17 nt, Artificial Sequence
  Synthetic
aggaauucuugaaguug

SEQ ID NO: 762785 - RNA, 17 nt, Artificial Sequence
  Synthetic
agcacaaagauaaguug

SEQ ID NO: 762786 - RNA, 17 nt, Artificial Sequence
  Synthetic
uaauuuacaguaaguug

SEQ ID NO: 762787 - RNA, 17 nt, Artificial Sequence
  Synthetic
uagaccuuaguaaguug

SEQ ID NO: 762788 - RNA, 17 nt, Artificial Sequence
  Synthetic
cagauuaggguaaguug

SEQ ID NO: 762789 - RNA, 17 nt, Artificial Sequence
  Synthetic
aaguugcaguuaaguug

SEQ ID NO: 762790 - RNA, 17 nt, Artificial Sequence
  Synthetic
ugcgugcuaaacaguug

SEQ ID NO: 762791 - RNA, 17 nt, Artificial Sequence
  Synthetic
aaauguaugcacaguug

SEQ ID NO: 762792 - RNA, 17 nt, Artificial Sequence
  Synthetic
ucuccaagucacaguug

SEQ ID NO: 762793 - RNA, 17 nt, Artificial Sequence
  Synthetic
cccauaagauacaguug

SEQ ID NO: 762794 - RNA, 17 nt, Artificial Sequence
  Synthetic
acaucacacaccaguug

SEQ ID NO: 762795 - RNA, 17 nt, Artificial Sequence
  Synthetic
auuguuucuuccaguug

SEQ ID NO: 762796 - RNA, 17 nt, Artificial Sequence
  Synthetic
uggcuaguuggcaguug

SEQ ID NO: 762797 - RNA, 17 nt, Artificial Sequence
  Synthetic
aacuuucaaugcaguug

SEQ ID NO: 762798 - RNA, 17 nt, Artificial Sequence
  Synthetic
acuugauucugcaguug

SEQ ID NO: 762799 - RNA, 17 nt, Artificial Sequence
  Synthetic
uucuaucugugcaguug

SEQ ID NO: 762800 - RNA, 17 nt, Artificial Sequence
  Synthetic
uugagggaaaucaguug

SEQ ID NO: 762801 - RNA, 17 nt, Artificial Sequence
  Synthetic
ucaguugauaucaguug

SEQ ID NO: 762802 - RNA, 17 nt, Artificial Sequence
  Synthetic
aauacacuagucaguug

SEQ ID NO: 762803 - RNA, 17 nt, Artificial Sequence
  Synthetic
aguucgauggucaguug

SEQ ID NO: 762804 - RNA, 17 nt, Artificial Sequence
  Synthetic
caaacuuuuuucaguug

SEQ ID NO: 762805 - RNA, 17 nt, Artificial Sequence
  Synthetic
aaaaguccucagaguug

SEQ ID NO: 762806 - RNA, 17 nt, Artificial Sequence
  Synthetic
aagggaagugagaguug

SEQ ID NO: 762807 - RNA, 17 nt, Artificial Sequence
  Synthetic
uauuuuuaguagaguug

SEQ ID NO: 762808 - RNA, 17 nt, Artificial Sequence
  Synthetic
agguguucaaggaguug

SEQ ID NO: 762809 - RNA, 17 nt, Artificial Sequence
  Synthetic
auuugcccagggaguug

SEQ ID NO: 762810 - RNA, 17 nt, Artificial Sequence
  Synthetic
cugcuuggugggaguug

SEQ ID NO: 762811 - RNA, 17 nt, Artificial Sequence
  Synthetic
uuugagcuugggaguug

SEQ ID NO: 762812 - RNA, 17 nt, Artificial Sequence
  Synthetic
uuucaguuugggaguug

SEQ ID NO: 762813 - RNA, 17 nt, Artificial Sequence
  Synthetic
aaguaacccuggaguug

SEQ ID NO: 762814 - RNA, 17 nt, Artificial Sequence
  Synthetic
uauuagcccaugaguug

SEQ ID NO: 762815 - RNA, 17 nt, Artificial Sequence
  Synthetic
uuaauaugacugaguug

SEQ ID NO: 762816 - RNA, 17 nt, Artificial Sequence
  Synthetic
aagucugaauugaguug

SEQ ID NO: 762817 - RNA, 17 nt, Artificial Sequence
  Synthetic
auaaugcucaauaguug

SEQ ID NO: 762818 - RNA, 17 nt, Artificial Sequence
  Synthetic
caaccagcuccuaguug

SEQ ID NO: 762819 - RNA, 17 nt, Artificial Sequence
  Synthetic
cuucauccugcuaguug

SEQ ID NO: 762820 - RNA, 17 nt, Artificial Sequence
  Synthetic
aucuuuaaaucuaguug

SEQ ID NO: 762821 - RNA, 17 nt, Artificial Sequence
  Synthetic
uuaauuaucaguaguug

SEQ ID NO: 762822 - RNA, 17 nt, Artificial Sequence
  Synthetic
agauugcagaguaguug

SEQ ID NO: 762823 - RNA, 17 nt, Artificial Sequence
  Synthetic
aacagcuuucguaguug

SEQ ID NO: 762824 - RNA, 17 nt, Artificial Sequence
  Synthetic
auuauuguauguaguug

SEQ ID NO: 762825 - RNA, 17 nt, Artificial Sequence
  Synthetic
agccuagaguguaguug

SEQ ID NO: 762826 - RNA, 17 nt, Artificial Sequence
  Synthetic
ccauuuccuuguaguug

SEQ ID NO: 762827 - RNA, 17 nt, Artificial Sequence
  Synthetic
cuguucuuccuuaguug

SEQ ID NO: 762828 - RNA, 17 nt, Artificial Sequence
  Synthetic
auuuugccuguuaguug

SEQ ID NO: 762829 - RNA, 17 nt, Artificial Sequence
  Synthetic
aaagaaauuuuuaguug

SEQ ID NO: 762830 - RNA, 17 nt, Artificial Sequence
  Synthetic
caugggugaugacguug

SEQ ID NO: 762831 - RNA, 17 nt, Artificial Sequence
  Synthetic
aaucccauuguacguug

SEQ ID NO: 762832 - RNA, 17 nt, Artificial Sequence
  Synthetic
cuggcugggcuccguug

SEQ ID NO: 762833 - RNA, 17 nt, Artificial Sequence
  Synthetic
aaguuagcugggcguug

SEQ ID NO: 762834 - RNA, 17 nt, Artificial Sequence
  Synthetic
aagccugcagugcguug

SEQ ID NO: 762835 - RNA, 17 nt, Artificial Sequence
  Synthetic
ugaaacauagaucguug

SEQ ID NO: 762836 - RNA, 17 nt, Artificial Sequence
  Synthetic
agaauaagaauucguug

SEQ ID NO: 762837 - RNA, 17 nt, Artificial Sequence
  Synthetic
uggugccgaaaagguug

SEQ ID NO: 762838 - RNA, 17 nt, Artificial Sequence
  Synthetic
ugagaaguccaagguug

SEQ ID NO: 762839 - RNA, 17 nt, Artificial Sequence
  Synthetic
uuuggaauuuaagguug

SEQ ID NO: 762840 - RNA, 17 nt, Artificial Sequence
  Synthetic
uaauaugguacagguug

SEQ ID NO: 762841 - RNA, 17 nt, Artificial Sequence
  Synthetic
caaauguaggcagguug

SEQ ID NO: 762842 - RNA, 17 nt, Artificial Sequence
  Synthetic
ugccuuuuaucagguug

SEQ ID NO: 762843 - RNA, 17 nt, Artificial Sequence
  Synthetic
auuaagagaagagguug

SEQ ID NO: 762844 - RNA, 17 nt, Artificial Sequence
  Synthetic
uagagagggagagguug

SEQ ID NO: 762845 - RNA, 17 nt, Artificial Sequence
  Synthetic
cugggugguagagguug

SEQ ID NO: 762846 - RNA, 17 nt, Artificial Sequence
  Synthetic
uugagcacaggagguug

SEQ ID NO: 762847 - RNA, 17 nt, Artificial Sequence
  Synthetic
agcaacucuggagguug

SEQ ID NO: 762848 - RNA, 17 nt, Artificial Sequence
  Synthetic
ccaggagguggagguug

SEQ ID NO: 762849 - RNA, 17 nt, Artificial Sequence
  Synthetic
uugggaggcugagguug

SEQ ID NO: 762850 - RNA, 17 nt, Artificial Sequence
  Synthetic
ugauggcucugagguug

SEQ ID NO: 762851 - RNA, 17 nt, Artificial Sequence
  Synthetic
ugacuaaagcuagguug

SEQ ID NO: 762852 - RNA, 17 nt, Artificial Sequence
  Synthetic
ccugucuugcuagguug

SEQ ID NO: 762853 - RNA, 17 nt, Artificial Sequence
  Synthetic
aaacaaucaguagguug

SEQ ID NO: 762854 - RNA, 17 nt, Artificial Sequence
  Synthetic
cugggagguguagguug

SEQ ID NO: 762855 - RNA, 17 nt, Artificial Sequence
  Synthetic
uguuggaaucaggguug

SEQ ID NO: 762856 - RNA, 17 nt, Artificial Sequence
  Synthetic
uauuugacucaggguug

SEQ ID NO: 762857 - RNA, 17 nt, Artificial Sequence
  Synthetic
uuugaagcugaggguug

SEQ ID NO: 762858 - RNA, 17 nt, Artificial Sequence
  Synthetic
ugggaaguugaggguug

SEQ ID NO: 762859 - RNA, 17 nt, Artificial Sequence
  Synthetic
aauaugcugggggguug

SEQ ID NO: 762860 - RNA, 17 nt, Artificial Sequence
  Synthetic
acauaugaaugggguug

SEQ ID NO: 762861 - RNA, 17 nt, Artificial Sequence
  Synthetic
aaaaguacaugggguug

SEQ ID NO: 762862 - RNA, 17 nt, Artificial Sequence
  Synthetic
cuguggcucugggguug

SEQ ID NO: 762863 - RNA, 17 nt, Artificial Sequence
  Synthetic
cagcaucucugggguug

SEQ ID NO: 762864 - RNA, 17 nt, Artificial Sequence
  Synthetic
aggggcgggugggguug

SEQ ID NO: 762865 - RNA, 17 nt, Artificial Sequence
  Synthetic
acacaguggugggguug

SEQ ID NO: 762866 - RNA, 17 nt, Artificial Sequence
  Synthetic
cauuugacaauggguug

SEQ ID NO: 762867 - RNA, 17 nt, Artificial Sequence
  Synthetic
uaaaacagcauggguug

SEQ ID NO: 762868 - RNA, 17 nt, Artificial Sequence
  Synthetic
uaccuauaccuggguug

SEQ ID NO: 762869 - RNA, 17 nt, Artificial Sequence
  Synthetic
uacauauuaaaugguug

SEQ ID NO: 762870 - RNA, 17 nt, Artificial Sequence
  Synthetic
ugauaaaauaaugguug

SEQ ID NO: 762871 - RNA, 17 nt, Artificial Sequence
  Synthetic
cugagccuggaugguug

SEQ ID NO: 762872 - RNA, 17 nt, Artificial Sequence
  Synthetic
agggugagguaugguug

SEQ ID NO: 762873 - RNA, 17 nt, Artificial Sequence
  Synthetic
ccugacauuccugguug

SEQ ID NO: 762874 - RNA, 17 nt, Artificial Sequence
  Synthetic
cauuucuuuccugguug

SEQ ID NO: 762875 - RNA, 17 nt, Artificial Sequence
  Synthetic
uuuuaggaggcugguug

SEQ ID NO: 762876 - RNA, 17 nt, Artificial Sequence
  Synthetic
auuuaacuaucugguug

SEQ ID NO: 762877 - RNA, 17 nt, Artificial Sequence
  Synthetic
cuuagcugaagugguug

SEQ ID NO: 762878 - RNA, 17 nt, Artificial Sequence
  Synthetic
auagccuggcgugguug

SEQ ID NO: 762879 - RNA, 17 nt, Artificial Sequence
  Synthetic
aacacuugaggugguug

SEQ ID NO: 762880 - RNA, 17 nt, Artificial Sequence
  Synthetic
aaagagagaauugguug

SEQ ID NO: 762881 - RNA, 17 nt, Artificial Sequence
  Synthetic
uuauuuguuauugguug

SEQ ID NO: 762882 - RNA, 17 nt, Artificial Sequence
  Synthetic
caugcauugcuugguug

SEQ ID NO: 762883 - RNA, 17 nt, Artificial Sequence
  Synthetic
ugaguaauucuugguug

SEQ ID NO: 762884 - RNA, 17 nt, Artificial Sequence
  Synthetic
aaugauaaaguugguug

SEQ ID NO: 762885 - RNA, 17 nt, Artificial Sequence
  Synthetic
ugaaagcuauuugguug

SEQ ID NO: 762886 - RNA, 17 nt, Artificial Sequence
  Synthetic
aagccacauaaauguug

SEQ ID NO: 762887 - RNA, 17 nt, Artificial Sequence
  Synthetic
aguguuuguaaauguug

SEQ ID NO: 762888 - RNA, 17 nt, Artificial Sequence
  Synthetic
aaagaaaaacaauguug

SEQ ID NO: 762889 - RNA, 17 nt, Artificial Sequence
  Synthetic
ugaauuccuacauguug

SEQ ID NO: 762890 - RNA, 17 nt, Artificial Sequence
  Synthetic
uccaagugaccauguug

SEQ ID NO: 762891 - RNA, 17 nt, Artificial Sequence
  Synthetic
cuccaagugccauguug

SEQ ID NO: 762892 - RNA, 17 nt, Artificial Sequence
  Synthetic
auuaaaacagcauguug

SEQ ID NO: 762893 - RNA, 17 nt, Artificial Sequence
  Synthetic
uccuggucugcauguug

SEQ ID NO: 762894 - RNA, 17 nt, Artificial Sequence
  Synthetic
uacugcugugcauguug

SEQ ID NO: 762895 - RNA, 17 nt, Artificial Sequence
  Synthetic
aauuaagaaagauguug

SEQ ID NO: 762896 - RNA, 17 nt, Artificial Sequence
  Synthetic
uuuaaaaccagauguug

SEQ ID NO: 762897 - RNA, 17 nt, Artificial Sequence
  Synthetic
acucccaagagauguug

SEQ ID NO: 762898 - RNA, 17 nt, Artificial Sequence
  Synthetic
cccuaagagagauguug

SEQ ID NO: 762899 - RNA, 17 nt, Artificial Sequence
  Synthetic
accucacuaggauguug

SEQ ID NO: 762900 - RNA, 17 nt, Artificial Sequence
  Synthetic
uaauacuucugauguug

SEQ ID NO: 762901 - RNA, 17 nt, Artificial Sequence
  Synthetic
uaguugucaauauguug

SEQ ID NO: 762902 - RNA, 17 nt, Artificial Sequence
  Synthetic
cuuucaagcauauguug

SEQ ID NO: 762903 - RNA, 17 nt, Artificial Sequence
  Synthetic
ucagagaaucuauguug

SEQ ID NO: 762904 - RNA, 17 nt, Artificial Sequence
  Synthetic
uguauccucguauguug

SEQ ID NO: 762905 - RNA, 17 nt, Artificial Sequence
  Synthetic
uauuuuccuguauguug

SEQ ID NO: 762906 - RNA, 17 nt, Artificial Sequence
  Synthetic
cgguuuuuauuauguug

SEQ ID NO: 762907 - RNA, 17 nt, Artificial Sequence
  Synthetic
cacccugggaacuguug

SEQ ID NO: 762908 - RNA, 17 nt, Artificial Sequence
  Synthetic
cacucuggggacuguug

SEQ ID NO: 762909 - RNA, 17 nt, Artificial Sequence
  Synthetic
cuacuacucuacuguug

SEQ ID NO: 762910 - RNA, 17 nt, Artificial Sequence
  Synthetic
auuguguuuuacuguug

SEQ ID NO: 762911 - RNA, 17 nt, Artificial Sequence
  Synthetic
auuacuucucccuguug

SEQ ID NO: 762912 - RNA, 17 nt, Artificial Sequence
  Synthetic
ucagugguagccuguug

SEQ ID NO: 762913 - RNA, 17 nt, Artificial Sequence
  Synthetic
cacaccagggccuguug

SEQ ID NO: 762914 - RNA, 17 nt, Artificial Sequence
  Synthetic
cacaccggggccuguug

SEQ ID NO: 762915 - RNA, 17 nt, Artificial Sequence
  Synthetic
aagaaagaugccuguug

SEQ ID NO: 762916 - RNA, 17 nt, Artificial Sequence
  Synthetic
cacacuggugccuguug

SEQ ID NO: 762917 - RNA, 17 nt, Artificial Sequence
  Synthetic
cacacccuuuccuguug

SEQ ID NO: 762918 - RNA, 17 nt, Artificial Sequence
  Synthetic
ucauacauaggcuguug

SEQ ID NO: 762919 - RNA, 17 nt, Artificial Sequence
  Synthetic
cugaacccuggcuguug

SEQ ID NO: 762920 - RNA, 17 nt, Artificial Sequence
  Synthetic
ugugggugaugcuguug

SEQ ID NO: 762921 - RNA, 17 nt, Artificial Sequence
  Synthetic
caagccagcugcuguug

SEQ ID NO: 762922 - RNA, 17 nt, Artificial Sequence
  Synthetic
auacuauuuuucuguug

SEQ ID NO: 762923 - RNA, 17 nt, Artificial Sequence
  Synthetic
uguuuauucaaguguug

SEQ ID NO: 762924 - RNA, 17 nt, Artificial Sequence
  Synthetic
augagggugaaguguug

SEQ ID NO: 762925 - RNA, 17 nt, Artificial Sequence
  Synthetic
auaauccccacguguug

SEQ ID NO: 762926 - RNA, 17 nt, Artificial Sequence
  Synthetic
aaaucagccggguguug

SEQ ID NO: 762927 - RNA, 17 nt, Artificial Sequence
  Synthetic
cacuguuuuggguguug

SEQ ID NO: 762928 - RNA, 17 nt, Artificial Sequence
  Synthetic
uagaaggguugguguug

SEQ ID NO: 762929 - RNA, 17 nt, Artificial Sequence
  Synthetic
ucuaauucaauguguug

SEQ ID NO: 762930 - RNA, 17 nt, Artificial Sequence
  Synthetic
aaaaggcacauguguug

SEQ ID NO: 762931 - RNA, 17 nt, Artificial Sequence
  Synthetic
agaacacauguguguug

SEQ ID NO: 762932 - RNA, 17 nt, Artificial Sequence
  Synthetic
uuucuagauguguguug

SEQ ID NO: 762933 - RNA, 17 nt, Artificial Sequence
  Synthetic
ugccuguguguguguug

SEQ ID NO: 762934 - RNA, 17 nt, Artificial Sequence
  Synthetic
uguguguguguguguug

SEQ ID NO: 762935 - RNA, 17 nt, Artificial Sequence
  Synthetic
cuauuguguguguguug

SEQ ID NO: 762936 - RNA, 17 nt, Artificial Sequence
  Synthetic
ucacaaacauauuguug

SEQ ID NO: 762937 - RNA, 17 nt, Artificial Sequence
  Synthetic
auguagguauauuguug

SEQ ID NO: 762938 - RNA, 17 nt, Artificial Sequence
  Synthetic
auaauuccuacuuguug

SEQ ID NO: 762939 - RNA, 17 nt, Artificial Sequence
  Synthetic
ccuugucacccuuguug

SEQ ID NO: 762940 - RNA, 17 nt, Artificial Sequence
  Synthetic
acuguacuuucuuguug

SEQ ID NO: 762941 - RNA, 17 nt, Artificial Sequence
  Synthetic
aagcugcaggguuguug

SEQ ID NO: 762942 - RNA, 17 nt, Artificial Sequence
  Synthetic
cuucucuaccuuuguug

SEQ ID NO: 762943 - RNA, 17 nt, Artificial Sequence
  Synthetic
caaauacaucuuuguug

SEQ ID NO: 762944 - RNA, 17 nt, Artificial Sequence
  Synthetic
caaauaauucuuuguug

SEQ ID NO: 762945 - RNA, 17 nt, Artificial Sequence
  Synthetic
uggaggaagguuuguug

SEQ ID NO: 762946 - RNA, 17 nt, Artificial Sequence
  Synthetic
auccaucaauuuuguug

SEQ ID NO: 762947 - RNA, 17 nt, Artificial Sequence
  Synthetic
caauugucaaaaauuug

SEQ ID NO: 762948 - RNA, 17 nt, Artificial Sequence
  Synthetic
cugaaaaacaaaauuug

SEQ ID NO: 762949 - RNA, 17 nt, Artificial Sequence
  Synthetic
agggcaaagaaaauuug

SEQ ID NO: 762950 - RNA, 17 nt, Artificial Sequence
  Synthetic
cccaaugggaaaauuug

SEQ ID NO: 762951 - RNA, 17 nt, Artificial Sequence
  Synthetic
uaaacaacacaaauuug

SEQ ID NO: 762952 - RNA, 17 nt, Artificial Sequence
  Synthetic
uuuuaugaccaaauuug

SEQ ID NO: 762953 - RNA, 17 nt, Artificial Sequence
  Synthetic
uauuuucuucaaauuug

SEQ ID NO: 762954 - RNA, 17 nt, Artificial Sequence
  Synthetic
ccaacacaugaaauuug

SEQ ID NO: 762955 - RNA, 17 nt, Artificial Sequence
  Synthetic
auaacaugcuaaauuug

SEQ ID NO: 762956 - RNA, 17 nt, Artificial Sequence
  Synthetic
aacauguaguaaauuug

SEQ ID NO: 762957 - RNA, 17 nt, Artificial Sequence
  Synthetic
uguauugauacaauuug

SEQ ID NO: 762958 - RNA, 17 nt, Artificial Sequence
  Synthetic
agguuuuuaagaauuug

SEQ ID NO: 762959 - RNA, 17 nt, Artificial Sequence
  Synthetic
aggaacaucagaauuug

SEQ ID NO: 762960 - RNA, 17 nt, Artificial Sequence
  Synthetic
aaugaaguuagaauuug

SEQ ID NO: 762961 - RNA, 17 nt, Artificial Sequence
  Synthetic
agcuaguaaggaauuug

SEQ ID NO: 762962 - RNA, 17 nt, Artificial Sequence
  Synthetic
uucaacauaggaauuug

SEQ ID NO: 762963 - RNA, 17 nt, Artificial Sequence
  Synthetic
auuuagaaaugaauuug

SEQ ID NO: 762964 - RNA, 17 nt, Artificial Sequence
  Synthetic
ugaacaauaugaauuug

SEQ ID NO: 762965 - RNA, 17 nt, Artificial Sequence
  Synthetic
ugaaacuucugaauuug

SEQ ID NO: 762966 - RNA, 17 nt, Artificial Sequence
  Synthetic
uugcagaguugaauuug

SEQ ID NO: 762967 - RNA, 17 nt, Artificial Sequence
  Synthetic
acaaacauuugaauuug

SEQ ID NO: 762968 - RNA, 17 nt, Artificial Sequence
  Synthetic
aauauagaaauaauuug

SEQ ID NO: 762969 - RNA, 17 nt, Artificial Sequence
  Synthetic
uuuuuuuccauaauuug

SEQ ID NO: 762970 - RNA, 17 nt, Artificial Sequence
  Synthetic
uugaguucacuaauuug

SEQ ID NO: 762971 - RNA, 17 nt, Artificial Sequence
  Synthetic
uugguauuacuaauuug

SEQ ID NO: 762972 - RNA, 17 nt, Artificial Sequence
  Synthetic
uaauagucuguaauuug

SEQ ID NO: 762973 - RNA, 17 nt, Artificial Sequence
  Synthetic
aaacaagaguuaauuug

SEQ ID NO: 762974 - RNA, 17 nt, Artificial Sequence
  Synthetic
ugucacuugaacauuug

SEQ ID NO: 762975 - RNA, 17 nt, Artificial Sequence
  Synthetic
cauggguuccacauuug

SEQ ID NO: 762976 - RNA, 17 nt, Artificial Sequence
  Synthetic
uucauaucucacauuug

SEQ ID NO: 762977 - RNA, 17 nt, Artificial Sequence
  Synthetic
aaauccuaagacauuug

SEQ ID NO: 762978 - RNA, 17 nt, Artificial Sequence
  Synthetic
aguaugauugacauuug

SEQ ID NO: 762979 - RNA, 17 nt, Artificial Sequence
  Synthetic
agcuccugauacauuug

SEQ ID NO: 762980 - RNA, 17 nt, Artificial Sequence
  Synthetic
uuaagucucuacauuug

SEQ ID NO: 762981 - RNA, 17 nt, Artificial Sequence
  Synthetic
uuucacucuuacauuug

SEQ ID NO: 762982 - RNA, 17 nt, Artificial Sequence
  Synthetic
cuuacagacaccauuug

SEQ ID NO: 762983 - RNA, 17 nt, Artificial Sequence
  Synthetic
ucuaaccagcccauuug

SEQ ID NO: 762984 - RNA, 17 nt, Artificial Sequence
  Synthetic
ugagcuaaagccauuug

SEQ ID NO: 762985 - RNA, 17 nt, Artificial Sequence
  Synthetic
uuaagauaaagcauuug

SEQ ID NO: 762986 - RNA, 17 nt, Artificial Sequence
  Synthetic
uccaucugaagcauuug

SEQ ID NO: 762987 - RNA, 17 nt, Artificial Sequence
  Synthetic
aaacacuuaggcauuug

SEQ ID NO: 762988 - RNA, 17 nt, Artificial Sequence
  Synthetic
ugcuuccacugcauuug

SEQ ID NO: 762989 - RNA, 17 nt, Artificial Sequence
  Synthetic
uuuuuagacugcauuug

SEQ ID NO: 762990 - RNA, 17 nt, Artificial Sequence
  Synthetic
aauaaaaggugcauuug

SEQ ID NO: 762991 - RNA, 17 nt, Artificial Sequence
  Synthetic
auggauauuugcauuug

SEQ ID NO: 762992 - RNA, 17 nt, Artificial Sequence
  Synthetic
uuaguagaaaucauuug

SEQ ID NO: 762993 - RNA, 17 nt, Artificial Sequence
  Synthetic
cuaaguaaacucauuug

SEQ ID NO: 762994 - RNA, 17 nt, Artificial Sequence
  Synthetic
uacacaugucucauuug

SEQ ID NO: 762995 - RNA, 17 nt, Artificial Sequence
  Synthetic
ccauuuuaauucauuug

SEQ ID NO: 762996 - RNA, 17 nt, Artificial Sequence
  Synthetic
acaacuguauucauuug

SEQ ID NO: 762997 - RNA, 17 nt, Artificial Sequence
  Synthetic
acauccacaaagauuug

SEQ ID NO: 762998 - RNA, 17 nt, Artificial Sequence
  Synthetic
aaauggcagaagauuug

SEQ ID NO: 762999 - RNA, 17 nt, Artificial Sequence
  Synthetic
ugagacagugagauuug

SEQ ID NO: 763000 - RNA, 17 nt, Artificial Sequence
  Synthetic
uaauagcaauagauuug

SEQ ID NO: 763001 - RNA, 17 nt, Artificial Sequence
  Synthetic
uuucaagccuagauuug

SEQ ID NO: 763002 - RNA, 17 nt, Artificial Sequence
  Synthetic
uuaagccucuagauuug

SEQ ID NO: 763003 - RNA, 17 nt, Artificial Sequence
  Synthetic
uuggaagacacgauuug

SEQ ID NO: 763004 - RNA, 17 nt, Artificial Sequence
  Synthetic
caaaaugacccgauuug

SEQ ID NO: 763005 - RNA, 17 nt, Artificial Sequence
  Synthetic
augagcuuugggauuug

SEQ ID NO: 763006 - RNA, 17 nt, Artificial Sequence
  Synthetic
aucuccauuuggauuug

SEQ ID NO: 763007 - RNA, 17 nt, Artificial Sequence
  Synthetic
caagguacuaugauuug

SEQ ID NO: 763008 - RNA, 17 nt, Artificial Sequence
  Synthetic
uuuuaugcucugauuug

SEQ ID NO: 763009 - RNA, 17 nt, Artificial Sequence
  Synthetic
uauauucuguugauuug

SEQ ID NO: 763010 - RNA, 17 nt, Artificial Sequence
  Synthetic
ccucauugcaauauuug

SEQ ID NO: 763011 - RNA, 17 nt, Artificial Sequence
  Synthetic
aaccauuagaauauuug

SEQ ID NO: 763012 - RNA, 17 nt, Artificial Sequence
  Synthetic
cuccacagacauauuug

SEQ ID NO: 763013 - RNA, 17 nt, Artificial Sequence
  Synthetic
acgcauguacauauuug

SEQ ID NO: 763014 - RNA, 17 nt, Artificial Sequence
  Synthetic
auaauuguacauauuug

SEQ ID NO: 763015 - RNA, 17 nt, Artificial Sequence
  Synthetic
auccauuuacauauuug

SEQ ID NO: 763016 - RNA, 17 nt, Artificial Sequence
  Synthetic
aauuuaucucauauuug

SEQ ID NO: 763017 - RNA, 17 nt, Artificial Sequence
  Synthetic
aagcagacagauauuug

SEQ ID NO: 763018 - RNA, 17 nt, Artificial Sequence
  Synthetic
auugcuggagauauuug

SEQ ID NO: 763019 - RNA, 17 nt, Artificial Sequence
  Synthetic
auggcaguagauauuug

SEQ ID NO: 763020 - RNA, 17 nt, Artificial Sequence
  Synthetic
uuuuuacacgauauuug

SEQ ID NO: 763021 - RNA, 17 nt, Artificial Sequence
  Synthetic
ugcauagcauauauuug

SEQ ID NO: 763022 - RNA, 17 nt, Artificial Sequence
  Synthetic
uugaguagguauauuug

SEQ ID NO: 763023 - RNA, 17 nt, Artificial Sequence
  Synthetic
caucaaaaaacuauuug

SEQ ID NO: 763024 - RNA, 17 nt, Artificial Sequence
  Synthetic
ugaaauguaacuauuug

SEQ ID NO: 763025 - RNA, 17 nt, Artificial Sequence
  Synthetic
uggauauccacuauuug

SEQ ID NO: 763026 - RNA, 17 nt, Artificial Sequence
  Synthetic
ucacccaacccuauuug

SEQ ID NO: 763027 - RNA, 17 nt, Artificial Sequence
  Synthetic
aggucucauucuauuug

SEQ ID NO: 763028 - RNA, 17 nt, Artificial Sequence
  Synthetic
cguguuuauucuauuug

SEQ ID NO: 763029 - RNA, 17 nt, Artificial Sequence
  Synthetic
aaaauuauuucuauuug

SEQ ID NO: 763030 - RNA, 17 nt, Artificial Sequence
  Synthetic
aaaaugagaaguauuug

SEQ ID NO: 763031 - RNA, 17 nt, Artificial Sequence
  Synthetic
uaauaagauaguauuug

SEQ ID NO: 763032 - RNA, 17 nt, Artificial Sequence
  Synthetic
aggaaauauaguauuug

SEQ ID NO: 763033 - RNA, 17 nt, Artificial Sequence
  Synthetic
auuauuccuaguauuug

SEQ ID NO: 763034 - RNA, 17 nt, Artificial Sequence
  Synthetic
aauagaguuaguauuug

SEQ ID NO: 763035 - RNA, 17 nt, Artificial Sequence
  Synthetic
aaaacuguugguauuug

SEQ ID NO: 763036 - RNA, 17 nt, Artificial Sequence
  Synthetic
auauaaagauguauuug

SEQ ID NO: 763037 - RNA, 17 nt, Artificial Sequence
  Synthetic
uuacuguaaauuauuug

SEQ ID NO: 763038 - RNA, 17 nt, Artificial Sequence
  Synthetic
acauaagcaauuauuug

SEQ ID NO: 763039 - RNA, 17 nt, Artificial Sequence
  Synthetic
auguucucacuuauuug

SEQ ID NO: 763040 - RNA, 17 nt, Artificial Sequence
  Synthetic
acucacaaccuuauuug

SEQ ID NO: 763041 - RNA, 17 nt, Artificial Sequence
  Synthetic
auguauucccuuauuug

SEQ ID NO: 763042 - RNA, 17 nt, Artificial Sequence
  Synthetic
caccaacagcuuauuug

SEQ ID NO: 763043 - RNA, 17 nt, Artificial Sequence
  Synthetic
uaauaacuuguuauuug

SEQ ID NO: 763044 - RNA, 17 nt, Artificial Sequence
  Synthetic
cauuuaccauuuauuug

SEQ ID NO: 763045 - RNA, 17 nt, Artificial Sequence
  Synthetic
acguucucauuuauuug

SEQ ID NO: 763046 - RNA, 17 nt, Artificial Sequence
  Synthetic
agcaagugauuuauuug

SEQ ID NO: 763047 - RNA, 17 nt, Artificial Sequence
  Synthetic
cacaugauauuuauuug

SEQ ID NO: 763048 - RNA, 17 nt, Artificial Sequence
  Synthetic
aaucuuauauuuauuug

SEQ ID NO: 763049 - RNA, 17 nt, Artificial Sequence
  Synthetic
cacauacacuuuauuug

SEQ ID NO: 763050 - RNA, 17 nt, Artificial Sequence
  Synthetic
ugaauguacuuuauuug

SEQ ID NO: 763051 - RNA, 17 nt, Artificial Sequence
  Synthetic
ugagcccuuuuuauuug

SEQ ID NO: 763052 - RNA, 17 nt, Artificial Sequence
  Synthetic
ugagauggcaaacuuug

SEQ ID NO: 763053 - RNA, 17 nt, Artificial Sequence
  Synthetic
uguucugagaaacuuug

SEQ ID NO: 763054 - RNA, 17 nt, Artificial Sequence
  Synthetic
ugugguugacaacuuug

SEQ ID NO: 763055 - RNA, 17 nt, Artificial Sequence
  Synthetic
auuucccaccaacuuug

SEQ ID NO: 763056 - RNA, 17 nt, Artificial Sequence
  Synthetic
uggcaaaaggaacuuug

SEQ ID NO: 763057 - RNA, 17 nt, Artificial Sequence
  Synthetic
uuuguuuuugaacuuug

SEQ ID NO: 763058 - RNA, 17 nt, Artificial Sequence
  Synthetic
acuuccuaauaacuuug

SEQ ID NO: 763059 - RNA, 17 nt, Artificial Sequence
  Synthetic
aacuucacauaacuuug

SEQ ID NO: 763060 - RNA, 17 nt, Artificial Sequence
  Synthetic
agcucaaguuaacuuug

SEQ ID NO: 763061 - RNA, 17 nt, Artificial Sequence
  Synthetic
cucuagcuuuaacuuug

SEQ ID NO: 763062 - RNA, 17 nt, Artificial Sequence
  Synthetic
uaaaugauuacacuuug

SEQ ID NO: 763063 - RNA, 17 nt, Artificial Sequence
  Synthetic
auaacauccccacuuug

SEQ ID NO: 763064 - RNA, 17 nt, Artificial Sequence
  Synthetic
uguaguuuaucacuuug

SEQ ID NO: 763065 - RNA, 17 nt, Artificial Sequence
  Synthetic
aauuuauuaagacuuug

SEQ ID NO: 763066 - RNA, 17 nt, Artificial Sequence
  Synthetic
aaaggacugagacuuug

SEQ ID NO: 763067 - RNA, 17 nt, Artificial Sequence
  Synthetic
aaauauuuuagacuuug

SEQ ID NO: 763068 - RNA, 17 nt, Artificial Sequence
  Synthetic
ugauacaauggacuuug

SEQ ID NO: 763069 - RNA, 17 nt, Artificial Sequence
  Synthetic
uaauacauuggacuuug

SEQ ID NO: 763070 - RNA, 17 nt, Artificial Sequence
  Synthetic
acucaucaaugacuuug

SEQ ID NO: 763071 - RNA, 17 nt, Artificial Sequence
  Synthetic
aaaguuuugugacuuug

SEQ ID NO: 763072 - RNA, 17 nt, Artificial Sequence
  Synthetic
uaauaaaucuuacuuug

SEQ ID NO: 763073 - RNA, 17 nt, Artificial Sequence
  Synthetic
uccuuuaaguuacuuug

SEQ ID NO: 763074 - RNA, 17 nt, Artificial Sequence
  Synthetic
cuucccuguuuacuuug

SEQ ID NO: 763075 - RNA, 17 nt, Artificial Sequence
  Synthetic
auauuggauaaccuuug

SEQ ID NO: 763076 - RNA, 17 nt, Artificial Sequence
  Synthetic
uuauuaaaauaccuuug

SEQ ID NO: 763077 - RNA, 17 nt, Artificial Sequence
  Synthetic
auaaaaaauuaccuuug

SEQ ID NO: 763078 - RNA, 17 nt, Artificial Sequence
  Synthetic
ugucuucuuuaccuuug

SEQ ID NO: 763079 - RNA, 17 nt, Artificial Sequence
  Synthetic
uuucccugaccccuuug

SEQ ID NO: 763080 - RNA, 17 nt, Artificial Sequence
  Synthetic
aaaagagcuccccuuug

SEQ ID NO: 763081 - RNA, 17 nt, Artificial Sequence
  Synthetic
cauuauccaucccuuug

SEQ ID NO: 763082 - RNA, 17 nt, Artificial Sequence
  Synthetic
cuaauucccucccuuug

SEQ ID NO: 763083 - RNA, 17 nt, Artificial Sequence
  Synthetic
uuaagaaugucccuuug

SEQ ID NO: 763084 - RNA, 17 nt, Artificial Sequence
  Synthetic
ugaugggcuucccuuug

SEQ ID NO: 763085 - RNA, 17 nt, Artificial Sequence
  Synthetic
auucugaaaagccuuug

SEQ ID NO: 763086 - RNA, 17 nt, Artificial Sequence
  Synthetic
auacccuacagccuuug

SEQ ID NO: 763087 - RNA, 17 nt, Artificial Sequence
  Synthetic
auuguggagggccuuug

SEQ ID NO: 763088 - RNA, 17 nt, Artificial Sequence
  Synthetic
uucuguccuugccuuug

SEQ ID NO: 763089 - RNA, 17 nt, Artificial Sequence
  Synthetic
uaugucuuccuccuuug

SEQ ID NO: 763090 - RNA, 17 nt, Artificial Sequence
  Synthetic
aaauuaucucuccuuug

SEQ ID NO: 763091 - RNA, 17 nt, Artificial Sequence
  Synthetic
agugagagaguccuuug

SEQ ID NO: 763092 - RNA, 17 nt, Artificial Sequence
  Synthetic
ugaaaucauguccuuug

SEQ ID NO: 763093 - RNA, 17 nt, Artificial Sequence
  Synthetic
aaacuagaauuccuuug

SEQ ID NO: 763094 - RNA, 17 nt, Artificial Sequence
  Synthetic
acccuuacguuccuuug

SEQ ID NO: 763095 - RNA, 17 nt, Artificial Sequence
  Synthetic
ugaaaauauuuccuuug

SEQ ID NO: 763096 - RNA, 17 nt, Artificial Sequence
  Synthetic
ugaugggcuuuccuuug

SEQ ID NO: 763097 - RNA, 17 nt, Artificial Sequence
  Synthetic
uaaaaacuuuuccuuug

SEQ ID NO: 763098 - RNA, 17 nt, Artificial Sequence
  Synthetic
aauacugucaagcuuug

SEQ ID NO: 763099 - RNA, 17 nt, Artificial Sequence
  Synthetic
agggguaguaagcuuug

SEQ ID NO: 763100 - RNA, 17 nt, Artificial Sequence
  Synthetic
cuaaucaaacagcuuug

SEQ ID NO: 763101 - RNA, 17 nt, Artificial Sequence
  Synthetic
auuucuagugagcuuug

SEQ ID NO: 763102 - RNA, 17 nt, Artificial Sequence
  Synthetic
auguccucuuagcuuug

SEQ ID NO: 763103 - RNA, 17 nt, Artificial Sequence
  Synthetic
agcugagguuagcuuug

SEQ ID NO: 763104 - RNA, 17 nt, Artificial Sequence
  Synthetic
acuaucuguucgcuuug

SEQ ID NO: 763105 - RNA, 17 nt, Artificial Sequence
  Synthetic
ucaaaggacaggcuuug

SEQ ID NO: 763106 - RNA, 17 nt, Artificial Sequence
  Synthetic
aaauauuucaggcuuug

SEQ ID NO: 763107 - RNA, 17 nt, Artificial Sequence
  Synthetic
aaauauuauaggcuuug

SEQ ID NO: 763108 - RNA, 17 nt, Artificial Sequence
  Synthetic
agauuuuuggggcuuug

SEQ ID NO: 763109 - RNA, 17 nt, Artificial Sequence
  Synthetic
uaagugugugggcuuug

SEQ ID NO: 763110 - RNA, 17 nt, Artificial Sequence
  Synthetic
uuaaaaaaauggcuuug

SEQ ID NO: 763111 - RNA, 17 nt, Artificial Sequence
  Synthetic
uugaacugguggcuuug

SEQ ID NO: 763112 - RNA, 17 nt, Artificial Sequence
  Synthetic
aaaugccuuuggcuuug

SEQ ID NO: 763113 - RNA, 17 nt, Artificial Sequence
  Synthetic
aacaaaaaaaugcuuug

SEQ ID NO: 763114 - RNA, 17 nt, Artificial Sequence
  Synthetic
uaaaaucagaugcuuug

SEQ ID NO: 763115 - RNA, 17 nt, Artificial Sequence
  Synthetic
uauuucucccugcuuug

SEQ ID NO: 763116 - RNA, 17 nt, Artificial Sequence
  Synthetic
agaauauuccugcuuug

SEQ ID NO: 763117 - RNA, 17 nt, Artificial Sequence
  Synthetic
agggccgugcugcuuug

SEQ ID NO: 763118 - RNA, 17 nt, Artificial Sequence
  Synthetic
uaugugcuugugcuuug

SEQ ID NO: 763119 - RNA, 17 nt, Artificial Sequence
  Synthetic
uauaaguuugugcuuug

SEQ ID NO: 763120 - RNA, 17 nt, Artificial Sequence
  Synthetic
aauuagaccuugcuuug

SEQ ID NO: 763121 - RNA, 17 nt, Artificial Sequence
  Synthetic
aucaggacaaaucuuug

SEQ ID NO: 763122 - RNA, 17 nt, Artificial Sequence
  Synthetic
uuugccccaaaucuuug

SEQ ID NO: 763123 - RNA, 17 nt, Artificial Sequence
  Synthetic
aauacuagaaaucuuug

SEQ ID NO: 763124 - RNA, 17 nt, Artificial Sequence
  Synthetic
uugacauaacaucuuug

SEQ ID NO: 763125 - RNA, 17 nt, Artificial Sequence
  Synthetic
aucaaaucucaucuuug

SEQ ID NO: 763126 - RNA, 17 nt, Artificial Sequence
  Synthetic
cugguucuagaucuuug

SEQ ID NO: 763127 - RNA, 17 nt, Artificial Sequence
  Synthetic
uccaaaccauaucuuug

SEQ ID NO: 763128 - RNA, 17 nt, Artificial Sequence
  Synthetic
cauagucccuaucuuug

SEQ ID NO: 763129 - RNA, 17 nt, Artificial Sequence
  Synthetic
ugcauaaaguaucuuug

SEQ ID NO: 763130 - RNA, 17 nt, Artificial Sequence
  Synthetic
cucaaggaguaucuuug

SEQ ID NO: 763131 - RNA, 17 nt, Artificial Sequence
  Synthetic
cucgaggaguaucuuug

SEQ ID NO: 763132 - RNA, 17 nt, Artificial Sequence
  Synthetic
auguuucuuccucuuug

SEQ ID NO: 763133 - RNA, 17 nt, Artificial Sequence
  Synthetic
cuaagaucagcucuuug

SEQ ID NO: 763134 - RNA, 17 nt, Artificial Sequence
  Synthetic
caggccuccucucuuug

SEQ ID NO: 763135 - RNA, 17 nt, Artificial Sequence
  Synthetic
agauuuuuuucucuuug

SEQ ID NO: 763136 - RNA, 17 nt, Artificial Sequence
  Synthetic
aaggcauaaagucuuug

SEQ ID NO: 763137 - RNA, 17 nt, Artificial Sequence
  Synthetic
cuuuuucuaagucuuug

SEQ ID NO: 763138 - RNA, 17 nt, Artificial Sequence
  Synthetic
uggguagaaggucuuug

SEQ ID NO: 763139 - RNA, 17 nt, Artificial Sequence
  Synthetic
acugucaguggucuuug

SEQ ID NO: 763140 - RNA, 17 nt, Artificial Sequence
  Synthetic
aauugcuguggucuuug

SEQ ID NO: 763141 - RNA, 17 nt, Artificial Sequence
  Synthetic
auggauggaugucuuug

SEQ ID NO: 763142 - RNA, 17 nt, Artificial Sequence
  Synthetic
auaucauaaauucuuug

SEQ ID NO: 763143 - RNA, 17 nt, Artificial Sequence
  Synthetic
cagcucuaaauucuuug

SEQ ID NO: 763144 - RNA, 17 nt, Artificial Sequence
  Synthetic
ccacuguaaauucuuug

SEQ ID NO: 763145 - RNA, 17 nt, Artificial Sequence
  Synthetic
uccuauagaguucuuug

SEQ ID NO: 763146 - RNA, 17 nt, Artificial Sequence
  Synthetic
uuaaacuugguucuuug

SEQ ID NO: 763147 - RNA, 17 nt, Artificial Sequence
  Synthetic
auuuaagauuuucuuug

SEQ ID NO: 763148 - RNA, 17 nt, Artificial Sequence
  Synthetic
cuucuuuauuuucuuug

SEQ ID NO: 763149 - RNA, 17 nt, Artificial Sequence
  Synthetic
cuuugcucuuuucuuug

SEQ ID NO: 763150 - RNA, 17 nt, Artificial Sequence
  Synthetic
ccaccugaaaaaguuug

SEQ ID NO: 763151 - RNA, 17 nt, Artificial Sequence
  Synthetic
aaaaauggcaaaguuug

SEQ ID NO: 763152 - RNA, 17 nt, Artificial Sequence
  Synthetic
uguaaauugaaaguuug

SEQ ID NO: 763153 - RNA, 17 nt, Artificial Sequence
  Synthetic
uuacccauagaaguuug

SEQ ID NO: 763154 - RNA, 17 nt, Artificial Sequence
  Synthetic
uggcagccauaaguuug

SEQ ID NO: 763155 - RNA, 17 nt, Artificial Sequence
  Synthetic
uuaggacacuaaguuug

SEQ ID NO: 763156 - RNA, 17 nt, Artificial Sequence
  Synthetic
cugucuaacacaguuug

SEQ ID NO: 763157 - RNA, 17 nt, Artificial Sequence
  Synthetic
uauuugccuacaguuug

SEQ ID NO: 763158 - RNA, 17 nt, Artificial Sequence
  Synthetic
uuaagucauccaguuug

SEQ ID NO: 763159 - RNA, 17 nt, Artificial Sequence
  Synthetic
cuguggaaagcaguuug

SEQ ID NO: 763160 - RNA, 17 nt, Artificial Sequence
  Synthetic
uuuuaaaaaucaguuug

SEQ ID NO: 763161 - RNA, 17 nt, Artificial Sequence
  Synthetic
aucauaaacucaguuug

SEQ ID NO: 763162 - RNA, 17 nt, Artificial Sequence
  Synthetic
uguuguuugucaguuug

SEQ ID NO: 763163 - RNA, 17 nt, Artificial Sequence
  Synthetic
auuuagugaagaguuug

SEQ ID NO: 763164 - RNA, 17 nt, Artificial Sequence
  Synthetic
caaugcuagcgaguuug

SEQ ID NO: 763165 - RNA, 17 nt, Artificial Sequence
  Synthetic
aguugcaaaggaguuug

SEQ ID NO: 763166 - RNA, 17 nt, Artificial Sequence
  Synthetic
uugagcccaggaguuug

SEQ ID NO: 763167 - RNA, 17 nt, Artificial Sequence
  Synthetic
uugagcucaggaguuug

SEQ ID NO: 763168 - RNA, 17 nt, Artificial Sequence
  Synthetic
agauacuugggaguuug

SEQ ID NO: 763169 - RNA, 17 nt, Artificial Sequence
  Synthetic
auggaaauuugaguuug

SEQ ID NO: 763170 - RNA, 17 nt, Artificial Sequence
  Synthetic
uauggacucauaguuug

SEQ ID NO: 763171 - RNA, 17 nt, Artificial Sequence
  Synthetic
uuggacaugcuaguuug

SEQ ID NO: 763172 - RNA, 17 nt, Artificial Sequence
  Synthetic
cccacacuaguaguuug

SEQ ID NO: 763173 - RNA, 17 nt, Artificial Sequence
  Synthetic
auacaaggcuuaguuug

SEQ ID NO: 763174 - RNA, 17 nt, Artificial Sequence
  Synthetic
aguaguuucuuaguuug

SEQ ID NO: 763175 - RNA, 17 nt, Artificial Sequence
  Synthetic
aauuacucucacguuug

SEQ ID NO: 763176 - RNA, 17 nt, Artificial Sequence
  Synthetic
cuaagauuucacguuug

SEQ ID NO: 763177 - RNA, 17 nt, Artificial Sequence
  Synthetic
agaaauauuugcguuug

SEQ ID NO: 763178 - RNA, 17 nt, Artificial Sequence
  Synthetic
cuauuuggagucguuug

SEQ ID NO: 763179 - RNA, 17 nt, Artificial Sequence
  Synthetic
acaccuugugucguuug

SEQ ID NO: 763180 - RNA, 17 nt, Artificial Sequence
  Synthetic
caaggugaaaagguuug

SEQ ID NO: 763181 - RNA, 17 nt, Artificial Sequence
  Synthetic
uccuuuuuaaagguuug

SEQ ID NO: 763182 - RNA, 17 nt, Artificial Sequence
  Synthetic
uaccuaaagaagguuug

SEQ ID NO: 763183 - RNA, 17 nt, Artificial Sequence
  Synthetic
acagcagcacagguuug

SEQ ID NO: 763184 - RNA, 17 nt, Artificial Sequence
  Synthetic
caguugauccagguuug

SEQ ID NO: 763185 - RNA, 17 nt, Artificial Sequence
  Synthetic
aaggacuggcagguuug

SEQ ID NO: 763186 - RNA, 17 nt, Artificial Sequence
  Synthetic
uaaaaauugcagguuug

SEQ ID NO: 763187 - RNA, 17 nt, Artificial Sequence
  Synthetic
caugaugcugagguuug

SEQ ID NO: 763188 - RNA, 17 nt, Artificial Sequence
  Synthetic
auaaauucugagguuug

SEQ ID NO: 763189 - RNA, 17 nt, Artificial Sequence
  Synthetic
uuguaaagugagguuug

SEQ ID NO: 763190 - RNA, 17 nt, Artificial Sequence
  Synthetic
cuuucagcauagguuug

SEQ ID NO: 763191 - RNA, 17 nt, Artificial Sequence
  Synthetic
cuuuuauuuuagguuug

SEQ ID NO: 763192 - RNA, 17 nt, Artificial Sequence
  Synthetic
aggcggccaaggguuug

SEQ ID NO: 763193 - RNA, 17 nt, Artificial Sequence
  Synthetic
aaacugccuaggguuug

SEQ ID NO: 763194 - RNA, 17 nt, Artificial Sequence
  Synthetic
agcugaacagggguuug

SEQ ID NO: 763195 - RNA, 17 nt, Artificial Sequence
  Synthetic
uuuguuugggggguuug

SEQ ID NO: 763196 - RNA, 17 nt, Artificial Sequence
  Synthetic
uagaagguggggguuug

SEQ ID NO: 763197 - RNA, 17 nt, Artificial Sequence
  Synthetic
agauuagcugggguuug

SEQ ID NO: 763198 - RNA, 17 nt, Artificial Sequence
  Synthetic
aguaguuucaugguuug

SEQ ID NO: 763199 - RNA, 17 nt, Artificial Sequence
  Synthetic
ugggaggcgaugguuug

SEQ ID NO: 763200 - RNA, 17 nt, Artificial Sequence
  Synthetic
uuguuggcuaugguuug

SEQ ID NO: 763201 - RNA, 17 nt, Artificial Sequence
  Synthetic
cugauuuaacugguuug

SEQ ID NO: 763202 - RNA, 17 nt, Artificial Sequence
  Synthetic
auuacaugcuugguuug

SEQ ID NO: 763203 - RNA, 17 nt, Artificial Sequence
  Synthetic
auauauuuguugguuug

SEQ ID NO: 763204 - RNA, 17 nt, Artificial Sequence
  Synthetic
cagagacaaaauguuug

SEQ ID NO: 763205 - RNA, 17 nt, Artificial Sequence
  Synthetic
uaaaugguaaauguuug

SEQ ID NO: 763206 - RNA, 17 nt, Artificial Sequence
  Synthetic
uccaacuggaauguuug

SEQ ID NO: 763207 - RNA, 17 nt, Artificial Sequence
  Synthetic
ccaagaaguaauguuug

SEQ ID NO: 763208 - RNA, 17 nt, Artificial Sequence
  Synthetic
ugucuacuacauguuug

SEQ ID NO: 763209 - RNA, 17 nt, Artificial Sequence
  Synthetic
uuucacgcagauguuug

SEQ ID NO: 763210 - RNA, 17 nt, Artificial Sequence
  Synthetic
uuuaauaaugauguuug

SEQ ID NO: 763211 - RNA, 17 nt, Artificial Sequence
  Synthetic
aauguauuauauguuug

SEQ ID NO: 763212 - RNA, 17 nt, Artificial Sequence
  Synthetic
aauaccuuaacuguuug

SEQ ID NO: 763213 - RNA, 17 nt, Artificial Sequence
  Synthetic
uauaugggcacuguuug

SEQ ID NO: 763214 - RNA, 17 nt, Artificial Sequence
  Synthetic
uuuuuauaaccuguuug

SEQ ID NO: 763215 - RNA, 17 nt, Artificial Sequence
  Synthetic
ucaaacacaccuguuug

SEQ ID NO: 763216 - RNA, 17 nt, Artificial Sequence
  Synthetic
caagcagguaguguuug

SEQ ID NO: 763217 - RNA, 17 nt, Artificial Sequence
  Synthetic
ugcuuuugauguguuug

SEQ ID NO: 763218 - RNA, 17 nt, Artificial Sequence
  Synthetic
uguguugauuguguuug

SEQ ID NO: 763219 - RNA, 17 nt, Artificial Sequence
  Synthetic
augcacccaauuguuug

SEQ ID NO: 763220 - RNA, 17 nt, Artificial Sequence
  Synthetic
cugcuaaacauuguuug

SEQ ID NO: 763221 - RNA, 17 nt, Artificial Sequence
  Synthetic
aacccucacauuguuug

SEQ ID NO: 763222 - RNA, 17 nt, Artificial Sequence
  Synthetic
uuaugcuuuauuguuug

SEQ ID NO: 763223 - RNA, 17 nt, Artificial Sequence
  Synthetic
agcgaugauguuguuug

SEQ ID NO: 763224 - RNA, 17 nt, Artificial Sequence
  Synthetic
ucugaaagcuuuguuug

SEQ ID NO: 763225 - RNA, 17 nt, Artificial Sequence
  Synthetic
uuccauggcuuuguuug

SEQ ID NO: 763226 - RNA, 17 nt, Artificial Sequence
  Synthetic
accaauagguuuguuug

SEQ ID NO: 763227 - RNA, 17 nt, Artificial Sequence
  Synthetic
uuuuguuuguuuguuug

SEQ ID NO: 763228 - RNA, 17 nt, Artificial Sequence
  Synthetic
aaauuuuuguuuguuug

SEQ ID NO: 763229 - RNA, 17 nt, Artificial Sequence
  Synthetic
agaaggacuuuuguuug

SEQ ID NO: 763230 - RNA, 17 nt, Artificial Sequence
  Synthetic
uguucuuguuuuguuug

SEQ ID NO: 763231 - RNA, 17 nt, Artificial Sequence
  Synthetic
uccccuugcaaauuuug

SEQ ID NO: 763232 - RNA, 17 nt, Artificial Sequence
  Synthetic
uaucacauuaaauuuug

SEQ ID NO: 763233 - RNA, 17 nt, Artificial Sequence
  Synthetic
acacugguacaauuuug

SEQ ID NO: 763234 - RNA, 17 nt, Artificial Sequence
  Synthetic
uuggguccugaauuuug

SEQ ID NO: 763235 - RNA, 17 nt, Artificial Sequence
  Synthetic
uccaauuuugaauuuug

SEQ ID NO: 763236 - RNA, 17 nt, Artificial Sequence
  Synthetic
aguaacucauaauuuug

SEQ ID NO: 763237 - RNA, 17 nt, Artificial Sequence
  Synthetic
aaugugcuuuaauuuug

SEQ ID NO: 763238 - RNA, 17 nt, Artificial Sequence
  Synthetic
uucucaacaacauuuug

SEQ ID NO: 763239 - RNA, 17 nt, Artificial Sequence
  Synthetic
aaguauuucacauuuug

SEQ ID NO: 763240 - RNA, 17 nt, Artificial Sequence
  Synthetic
aauaaauguacauuuug

SEQ ID NO: 763241 - RNA, 17 nt, Artificial Sequence
  Synthetic
aauacauuuacauuuug

SEQ ID NO: 763242 - RNA, 17 nt, Artificial Sequence
  Synthetic
aaaaguuuuacauuuug

SEQ ID NO: 763243 - RNA, 17 nt, Artificial Sequence
  Synthetic
cauauuguuccauuuug

SEQ ID NO: 763244 - RNA, 17 nt, Artificial Sequence
  Synthetic
agcacaagagcauuuug

SEQ ID NO: 763245 - RNA, 17 nt, Artificial Sequence
  Synthetic
uuaaaguacgcauuuug

SEQ ID NO: 763246 - RNA, 17 nt, Artificial Sequence
  Synthetic
aggugaacugcauuuug

SEQ ID NO: 763247 - RNA, 17 nt, Artificial Sequence
  Synthetic
ccuagguuugcauuuug

SEQ ID NO: 763248 - RNA, 17 nt, Artificial Sequence
  Synthetic
auauuacaaucauuuug

SEQ ID NO: 763249 - RNA, 17 nt, Artificial Sequence
  Synthetic
aaaauaguaucauuuug

SEQ ID NO: 763250 - RNA, 17 nt, Artificial Sequence
  Synthetic
uguuaggacucauuuug

SEQ ID NO: 763251 - RNA, 17 nt, Artificial Sequence
  Synthetic
cagugguugagauuuug

SEQ ID NO: 763252 - RNA, 17 nt, Artificial Sequence
  Synthetic
cuugggucuagauuuug

SEQ ID NO: 763253 - RNA, 17 nt, Artificial Sequence
  Synthetic
acuggcuuuagauuuug

SEQ ID NO: 763254 - RNA, 17 nt, Artificial Sequence
  Synthetic
accaggaacugauuuug

SEQ ID NO: 763255 - RNA, 17 nt, Artificial Sequence
  Synthetic
uauauaaaaauauuuug

SEQ ID NO: 763256 - RNA, 17 nt, Artificial Sequence
  Synthetic
ugauaucagauauuuug

SEQ ID NO: 763257 - RNA, 17 nt, Artificial Sequence
  Synthetic
aauuuguugauauuuug

SEQ ID NO: 763258 - RNA, 17 nt, Artificial Sequence
  Synthetic
uugucucauauauuuug

SEQ ID NO: 763259 - RNA, 17 nt, Artificial Sequence
  Synthetic
aagcuugaaguauuuug

SEQ ID NO: 763260 - RNA, 17 nt, Artificial Sequence
  Synthetic
ugcgugggaguauuuug

SEQ ID NO: 763261 - RNA, 17 nt, Artificial Sequence
  Synthetic
agaguaguaguauuuug

SEQ ID NO: 763262 - RNA, 17 nt, Artificial Sequence
  Synthetic
cucuggaagguauuuug

SEQ ID NO: 763263 - RNA, 17 nt, Artificial Sequence
  Synthetic
cuaaaaaauguauuuug

SEQ ID NO: 763264 - RNA, 17 nt, Artificial Sequence
  Synthetic
agugaacuauuauuuug

SEQ ID NO: 763265 - RNA, 17 nt, Artificial Sequence
  Synthetic
aucuagcaguuauuuug

SEQ ID NO: 763266 - RNA, 17 nt, Artificial Sequence
  Synthetic
ucuuugcaguuauuuug

SEQ ID NO: 763267 - RNA, 17 nt, Artificial Sequence
  Synthetic
acaggugaaaacuuuug

SEQ ID NO: 763268 - RNA, 17 nt, Artificial Sequence
  Synthetic
cacugagaccacuuuug

SEQ ID NO: 763269 - RNA, 17 nt, Artificial Sequence
  Synthetic
augauaucagacuuuug

SEQ ID NO: 763270 - RNA, 17 nt, Artificial Sequence
  Synthetic
aaucaucacuacuuuug

SEQ ID NO: 763271 - RNA, 17 nt, Artificial Sequence
  Synthetic
cacaauguguacuuuug

SEQ ID NO: 763272 - RNA, 17 nt, Artificial Sequence
  Synthetic
auuuuucguaccuuuug

SEQ ID NO: 763273 - RNA, 17 nt, Artificial Sequence
  Synthetic
uuagauugacccuuuug

SEQ ID NO: 763274 - RNA, 17 nt, Artificial Sequence
  Synthetic
uucaggaaagccuuuug

SEQ ID NO: 763275 - RNA, 17 nt, Artificial Sequence
  Synthetic
auucccuaauccuuuug

SEQ ID NO: 763276 - RNA, 17 nt, Artificial Sequence
  Synthetic
uuaaaucucuccuuuug

SEQ ID NO: 763277 - RNA, 17 nt, Artificial Sequence
  Synthetic
agacugguguccuuuug

SEQ ID NO: 763278 - RNA, 17 nt, Artificial Sequence
  Synthetic
uuucuucuuuccuuuug

SEQ ID NO: 763279 - RNA, 17 nt, Artificial Sequence
  Synthetic
uugauguuuuccuuuug

SEQ ID NO: 763280 - RNA, 17 nt, Artificial Sequence
  Synthetic
aaauugugcagcuuuug

SEQ ID NO: 763281 - RNA, 17 nt, Artificial Sequence
  Synthetic
uauuaaauuagcuuuug

SEQ ID NO: 763282 - RNA, 17 nt, Artificial Sequence
  Synthetic
ucaaauguuagcuuuug

SEQ ID NO: 763283 - RNA, 17 nt, Artificial Sequence
  Synthetic
agggcacuucgcuuuug

SEQ ID NO: 763284 - RNA, 17 nt, Artificial Sequence
  Synthetic
uugagcaaaggcuuuug

SEQ ID NO: 763285 - RNA, 17 nt, Artificial Sequence
  Synthetic
ucauaguuaggcuuuug

SEQ ID NO: 763286 - RNA, 17 nt, Artificial Sequence
  Synthetic
cagacauagggcuuuug

SEQ ID NO: 763287 - RNA, 17 nt, Artificial Sequence
  Synthetic
aaauuagcuggcuuuug

SEQ ID NO: 763288 - RNA, 17 nt, Artificial Sequence
  Synthetic
uguuauaauugcuuuug

SEQ ID NO: 763289 - RNA, 17 nt, Artificial Sequence
  Synthetic
ugcagguaaaucuuuug

SEQ ID NO: 763290 - RNA, 17 nt, Artificial Sequence
  Synthetic
ugcaugcagaucuuuug

SEQ ID NO: 763291 - RNA, 17 nt, Artificial Sequence
  Synthetic
ucugggcugaucuuuug

SEQ ID NO: 763292 - RNA, 17 nt, Artificial Sequence
  Synthetic
aaagcucuuaucuuuug

SEQ ID NO: 763293 - RNA, 17 nt, Artificial Sequence
  Synthetic
uauuaauuccucuuuug

SEQ ID NO: 763294 - RNA, 17 nt, Artificial Sequence
  Synthetic
caaaccuugcucuuuug

SEQ ID NO: 763295 - RNA, 17 nt, Artificial Sequence
  Synthetic
aggcugacucucuuuug

SEQ ID NO: 763296 - RNA, 17 nt, Artificial Sequence
  Synthetic
uaaugacuucucuuuug

SEQ ID NO: 763297 - RNA, 17 nt, Artificial Sequence
  Synthetic
caaagagaagucuuuug

SEQ ID NO: 763298 - RNA, 17 nt, Artificial Sequence
  Synthetic
cuauccagggucuuuug

SEQ ID NO: 763299 - RNA, 17 nt, Artificial Sequence
  Synthetic
augagggccuucuuuug

SEQ ID NO: 763300 - RNA, 17 nt, Artificial Sequence
  Synthetic
ugcuuauuguucuuuug

SEQ ID NO: 763301 - RNA, 17 nt, Artificial Sequence
  Synthetic
uguagguuguucuuuug

SEQ ID NO: 763302 - RNA, 17 nt, Artificial Sequence
  Synthetic
aacacuuuuuucuuuug

SEQ ID NO: 763303 - RNA, 17 nt, Artificial Sequence
  Synthetic
uauauuugcaaguuuug

SEQ ID NO: 763304 - RNA, 17 nt, Artificial Sequence
  Synthetic
aacucacagaaguuuug

SEQ ID NO: 763305 - RNA, 17 nt, Artificial Sequence
  Synthetic
ugaacuguuaaguuuug

SEQ ID NO: 763306 - RNA, 17 nt, Artificial Sequence
  Synthetic
aaauauuuuaaguuuug

SEQ ID NO: 763307 - RNA, 17 nt, Artificial Sequence
  Synthetic
aucagacuacaguuuug

SEQ ID NO: 763308 - RNA, 17 nt, Artificial Sequence
  Synthetic
uauuggucucaguuuug

SEQ ID NO: 763309 - RNA, 17 nt, Artificial Sequence
  Synthetic
uaagcuacugaguuuug

SEQ ID NO: 763310 - RNA, 17 nt, Artificial Sequence
  Synthetic
ccaaaaagauaguuuug

SEQ ID NO: 763311 - RNA, 17 nt, Artificial Sequence
  Synthetic
uacaaucacuaguuuug

SEQ ID NO: 763312 - RNA, 17 nt, Artificial Sequence
  Synthetic
uaauuucaguaguuuug

SEQ ID NO: 763313 - RNA, 17 nt, Artificial Sequence
  Synthetic
uuuggauuuuaguuuug

SEQ ID NO: 763314 - RNA, 17 nt, Artificial Sequence
  Synthetic
uuaguaguuacguuuug

SEQ ID NO: 763315 - RNA, 17 nt, Artificial Sequence
  Synthetic
augccauucccguuuug

SEQ ID NO: 763316 - RNA, 17 nt, Artificial Sequence
  Synthetic
agaaguuacagguuuug

SEQ ID NO: 763317 - RNA, 17 nt, Artificial Sequence
  Synthetic
ugguggcgaugguuuug

SEQ ID NO: 763318 - RNA, 17 nt, Artificial Sequence
  Synthetic
caguuguucugguuuug

SEQ ID NO: 763319 - RNA, 17 nt, Artificial Sequence
  Synthetic
uuauauaaaauguuuug

SEQ ID NO: 763320 - RNA, 17 nt, Artificial Sequence
  Synthetic
cuauuuuuaauguuuug

SEQ ID NO: 763321 - RNA, 17 nt, Artificial Sequence
  Synthetic
cacugucauauguuuug

SEQ ID NO: 763322 - RNA, 17 nt, Artificial Sequence
  Synthetic
ucuauuuuuauguuuug

SEQ ID NO: 763323 - RNA, 17 nt, Artificial Sequence
  Synthetic
uccuguauacuguuuug

SEQ ID NO: 763324 - RNA, 17 nt, Artificial Sequence
  Synthetic
aacuauccucuguuuug

SEQ ID NO: 763325 - RNA, 17 nt, Artificial Sequence
  Synthetic
cauuuccaaguguuuug

SEQ ID NO: 763326 - RNA, 17 nt, Artificial Sequence
  Synthetic
uacaucaagguguuuug

SEQ ID NO: 763327 - RNA, 17 nt, Artificial Sequence
  Synthetic
uagauuucuguguuuug

SEQ ID NO: 763328 - RNA, 17 nt, Artificial Sequence
  Synthetic
uguauugaauuguuuug

SEQ ID NO: 763329 - RNA, 17 nt, Artificial Sequence
  Synthetic
acuucaagguuguuuug

SEQ ID NO: 763330 - RNA, 17 nt, Artificial Sequence
  Synthetic
aguguaggguuguuuug

SEQ ID NO: 763331 - RNA, 17 nt, Artificial Sequence
  Synthetic
cuuccacuguuguuuug

SEQ ID NO: 763332 - RNA, 17 nt, Artificial Sequence
  Synthetic
cauaagauuuuguuuug

SEQ ID NO: 763333 - RNA, 17 nt, Artificial Sequence
  Synthetic
auuuuuuuaaauuuuug

SEQ ID NO: 763334 - RNA, 17 nt, Artificial Sequence
  Synthetic
uuuuauuuuaauuuuug

SEQ ID NO: 763335 - RNA, 17 nt, Artificial Sequence
  Synthetic
uuaauuuuuaauuuuug

SEQ ID NO: 763336 - RNA, 17 nt, Artificial Sequence
  Synthetic
cgugaugaacauuuuug

SEQ ID NO: 763337 - RNA, 17 nt, Artificial Sequence
  Synthetic
aauacuucucauuuuug

SEQ ID NO: 763338 - RNA, 17 nt, Artificial Sequence
  Synthetic
cugaaauaagauuuuug

SEQ ID NO: 763339 - RNA, 17 nt, Artificial Sequence
  Synthetic
acccccacagauuuuug

SEQ ID NO: 763340 - RNA, 17 nt, Artificial Sequence
  Synthetic
ugagcuacauauuuuug

SEQ ID NO: 763341 - RNA, 17 nt, Artificial Sequence
  Synthetic
cacuuagcauauuuuug

SEQ ID NO: 763342 - RNA, 17 nt, Artificial Sequence
  Synthetic
auugaauaguauuuuug

SEQ ID NO: 763343 - RNA, 17 nt, Artificial Sequence
  Synthetic
aucuauacuuauuuuug

SEQ ID NO: 763344 - RNA, 17 nt, Artificial Sequence
  Synthetic
agggaaucuuauuuuug

SEQ ID NO: 763345 - RNA, 17 nt, Artificial Sequence
  Synthetic
aaaaauccaacuuuuug

SEQ ID NO: 763346 - RNA, 17 nt, Artificial Sequence
  Synthetic
ugacaguaaccuuuuug

SEQ ID NO: 763347 - RNA, 17 nt, Artificial Sequence
  Synthetic
cgucucccuccuuuuug

SEQ ID NO: 763348 - RNA, 17 nt, Artificial Sequence
  Synthetic
uaagcauguccuuuuug

SEQ ID NO: 763349 - RNA, 17 nt, Artificial Sequence
  Synthetic
acgcuuucugcuuuuug

SEQ ID NO: 763350 - RNA, 17 nt, Artificial Sequence
  Synthetic
cuauuucucucuuuuug

SEQ ID NO: 763351 - RNA, 17 nt, Artificial Sequence
  Synthetic
auuucagucaguuuuug

SEQ ID NO: 763352 - RNA, 17 nt, Artificial Sequence
  Synthetic
uagaacgucaguuuuug

SEQ ID NO: 763353 - RNA, 17 nt, Artificial Sequence
  Synthetic
auuucugcagguuuuug

SEQ ID NO: 763354 - RNA, 17 nt, Artificial Sequence
  Synthetic
cuaaaauaauguuuuug

SEQ ID NO: 763355 - RNA, 17 nt, Artificial Sequence
  Synthetic
uaauguagauguuuuug

SEQ ID NO: 763356 - RNA, 17 nt, Artificial Sequence
  Synthetic
agggggcuauguuuuug

SEQ ID NO: 763357 - RNA, 17 nt, Artificial Sequence
  Synthetic
accacuguguguuuuug

SEQ ID NO: 763358 - RNA, 17 nt, Artificial Sequence
  Synthetic
auuucgaaaauuuuuug

SEQ ID NO: 763359 - RNA, 17 nt, Artificial Sequence
  Synthetic
uuauuuuuaauuuuuug

SEQ ID NO: 763360 - RNA, 17 nt, Artificial Sequence
  Synthetic
agaugagacauuuuuug

SEQ ID NO: 763361 - RNA, 17 nt, Artificial Sequence
  Synthetic
aauaccuccauuuuuug

SEQ ID NO: 763362 - RNA, 17 nt, Artificial Sequence
  Synthetic
auacuuauuauuuuuug

SEQ ID NO: 763363 - RNA, 17 nt, Artificial Sequence
  Synthetic
agauauuuuauuuuuug

SEQ ID NO: 763364 - RNA, 17 nt, Artificial Sequence
  Synthetic
ucuauuuuuauuuuuug

SEQ ID NO: 763365 - RNA, 17 nt, Artificial Sequence
  Synthetic
cuauuuuuacuuuuuug

SEQ ID NO: 763366 - RNA, 17 nt, Artificial Sequence
  Synthetic
aaucucauucuuuuuug

SEQ ID NO: 763367 - RNA, 17 nt, Artificial Sequence
  Synthetic
auuuucuuucuuuuuug

SEQ ID NO: 763368 - RNA, 17 nt, Artificial Sequence
  Synthetic
uaauucucaguuuuuug

SEQ ID NO: 763369 - RNA, 17 nt, Artificial Sequence
  Synthetic
cuguuuucaguuuuuug

SEQ ID NO: 763370 - RNA, 17 nt, Artificial Sequence
  Synthetic
cuauuuuuaguuuuuug

SEQ ID NO: 763371 - RNA, 17 nt, Artificial Sequence
  Synthetic
ucuauuuguguuuuuug

SEQ ID NO: 763372 - RNA, 17 nt, Artificial Sequence
  Synthetic
cuuaaauuuguuuuuug

SEQ ID NO: 763373 - RNA, 17 nt, Artificial Sequence
  Synthetic
ucuguuuuuguuuuuug

SEQ ID NO: 763374 - RNA, 17 nt, Artificial Sequence
  Synthetic
uuuuuaaaauuuuuuug

SEQ ID NO: 763375 - RNA, 17 nt, Artificial Sequence
  Synthetic
caauuuacauuuuuuug

SEQ ID NO: 763376 - RNA, 17 nt, Artificial Sequence
  Synthetic
cacauacuauuuuuuug

SEQ ID NO: 763377 - RNA, 17 nt, Artificial Sequence
  Synthetic
uauuuuuuauuuuuuug

SEQ ID NO: 763378 - RNA, 17 nt, Artificial Sequence
  Synthetic
auuuccuucuuuuuuug

SEQ ID NO: 763379 - RNA, 17 nt, Artificial Sequence
  Synthetic
caggguuaguuuuuuug

SEQ ID NO: 763380 - RNA, 17 nt, Artificial Sequence
  Synthetic
uauuguuaguuuuuuug

SEQ ID NO: 763381 - RNA, 17 nt, Artificial Sequence
  Synthetic
acacuaaguuuuuuuug

SEQ ID NO: 763382 - RNA, 17 nt, Artificial Sequence
  Synthetic
uuuuuuuuuuuuuuuug

SEQ ID NO: 763383 - RNA, 17 nt, Artificial Sequence
  Synthetic
aaaagaaaaaaaaaaau

SEQ ID NO: 763384 - RNA, 17 nt, Artificial Sequence
  Synthetic
aaugagaaaaaaaaaau

SEQ ID NO: 763385 - RNA, 17 nt, Artificial Sequence
  Synthetic
cucaauuaaaaaaaaau

SEQ ID NO: 763386 - RNA, 17 nt, Artificial Sequence
  Synthetic
accccaucaaaaaaaau

SEQ ID NO: 763387 - RNA, 17 nt, Artificial Sequence
  Synthetic
agaaaguacaaaaaaau

SEQ ID NO: 763388 - RNA, 17 nt, Artificial Sequence
  Synthetic
auucuuuagaaaaaaau

SEQ ID NO: 763389 - RNA, 17 nt, Artificial Sequence
  Synthetic
agggccuugaaaaaaau

SEQ ID NO: 763390 - RNA, 17 nt, Artificial Sequence
  Synthetic
aguuccuugaaaaaaau

SEQ ID NO: 763391 - RNA, 17 nt, Artificial Sequence
  Synthetic
uucaaguugaaaaaaau

SEQ ID NO: 763392 - RNA, 17 nt, Artificial Sequence
  Synthetic
aacccuaauaaaaaaau

SEQ ID NO: 763393 - RNA, 17 nt, Artificial Sequence
  Synthetic
uucucagguaaaaaaau

SEQ ID NO: 763394 - RNA, 17 nt, Artificial Sequence
  Synthetic
uguaaucuuaaaaaaau

SEQ ID NO: 763395 - RNA, 17 nt, Artificial Sequence
  Synthetic
uccaaaguccaaaaaau

SEQ ID NO: 763396 - RNA, 17 nt, Artificial Sequence
  Synthetic
cuuuuuacagaaaaaau

SEQ ID NO: 763397 - RNA, 17 nt, Artificial Sequence
  Synthetic
caaaagagagaaaaaau

SEQ ID NO: 763398 - RNA, 17 nt, Artificial Sequence
  Synthetic
uaagaaguagaaaaaau

SEQ ID NO: 763399 - RNA, 17 nt, Artificial Sequence
  Synthetic
uuucugguagaaaaaau

SEQ ID NO: 763400 - RNA, 17 nt, Artificial Sequence
  Synthetic
caaaauccugaaaaaau

SEQ ID NO: 763401 - RNA, 17 nt, Artificial Sequence
  Synthetic
uguaggaaauaaaaaau

SEQ ID NO: 763402 - RNA, 17 nt, Artificial Sequence
  Synthetic
aacaucauuuaaaaaau

SEQ ID NO: 763403 - RNA, 17 nt, Artificial Sequence
  Synthetic
acaaucaacacaaaaau

SEQ ID NO: 763404 - RNA, 17 nt, Artificial Sequence
  Synthetic
ugccacaauacaaaaau

SEQ ID NO: 763405 - RNA, 17 nt, Artificial Sequence
  Synthetic
aaaaccuaaucaaaaau

SEQ ID NO: 763406 - RNA, 17 nt, Artificial Sequence
  Synthetic
augauuaccagaaaaau

SEQ ID NO: 763407 - RNA, 17 nt, Artificial Sequence
  Synthetic
ugguuagucagaaaaau

SEQ ID NO: 763408 - RNA, 17 nt, Artificial Sequence
  Synthetic
acuaacuggagaaaaau

SEQ ID NO: 763409 - RNA, 17 nt, Artificial Sequence
  Synthetic
uaauccaauagaaaaau

SEQ ID NO: 763410 - RNA, 17 nt, Artificial Sequence
  Synthetic
auagaaaguagaaaaau

SEQ ID NO: 763411 - RNA, 17 nt, Artificial Sequence
  Synthetic
uaaaacauuagaaaaau

SEQ ID NO: 763412 - RNA, 17 nt, Artificial Sequence
  Synthetic
augucaauaggaaaaau

SEQ ID NO: 763413 - RNA, 17 nt, Artificial Sequence
  Synthetic
ugauauacuggaaaaau

SEQ ID NO: 763414 - RNA, 17 nt, Artificial Sequence
  Synthetic
uugcugaguggaaaaau

SEQ ID NO: 763415 - RNA, 17 nt, Artificial Sequence
  Synthetic
agaaguuaaugaaaaau

SEQ ID NO: 763416 - RNA, 17 nt, Artificial Sequence
  Synthetic
ugcagaacaugaaaaau

SEQ ID NO: 763417 - RNA, 17 nt, Artificial Sequence
  Synthetic
aaugguccaugaaaaau

SEQ ID NO: 763418 - RNA, 17 nt, Artificial Sequence
  Synthetic
auaaaaguaugaaaaau

SEQ ID NO: 763419 - RNA, 17 nt, Artificial Sequence
  Synthetic
auuagauacugaaaaau

SEQ ID NO: 763420 - RNA, 17 nt, Artificial Sequence
  Synthetic
uccagagucugaaaaau

SEQ ID NO: 763421 - RNA, 17 nt, Artificial Sequence
  Synthetic
uauuuaaauugaaaaau

SEQ ID NO: 763422 - RNA, 17 nt, Artificial Sequence
  Synthetic
ucucuguauugaaaaau

SEQ ID NO: 763423 - RNA, 17 nt, Artificial Sequence
  Synthetic
uaaaugauuugaaaaau

SEQ ID NO: 763424 - RNA, 17 nt, Artificial Sequence
  Synthetic
uacauaaaaauaaaaau

SEQ ID NO: 763425 - RNA, 17 nt, Artificial Sequence
  Synthetic
cucaugaaaauaaaaau

SEQ ID NO: 763426 - RNA, 17 nt, Artificial Sequence
  Synthetic
cauuuuuaaauaaaaau

SEQ ID NO: 763427 - RNA, 17 nt, Artificial Sequence
  Synthetic
uaacaucuaauaaaaau

SEQ ID NO: 763428 - RNA, 17 nt, Artificial Sequence
  Synthetic
ucaaaagacauaaaaau

SEQ ID NO: 763429 - RNA, 17 nt, Artificial Sequence
  Synthetic
cacauggugauaaaaau

SEQ ID NO: 763430 - RNA, 17 nt, Artificial Sequence
  Synthetic
cucagcaauauaaaaau

SEQ ID NO: 763431 - RNA, 17 nt, Artificial Sequence
  Synthetic
ucuuaucauauaaaaau

SEQ ID NO: 763432 - RNA, 17 nt, Artificial Sequence
  Synthetic
aauagauauauaaaaau

SEQ ID NO: 763433 - RNA, 17 nt, Artificial Sequence
  Synthetic
auaucugguauaaaaau

SEQ ID NO: 763434 - RNA, 17 nt, Artificial Sequence
  Synthetic
uuucuugaacuaaaaau

SEQ ID NO: 763435 - RNA, 17 nt, Artificial Sequence
  Synthetic
ccucugauucuaaaaau

SEQ ID NO: 763436 - RNA, 17 nt, Artificial Sequence
  Synthetic
ccaucuuuaguaaaaau

SEQ ID NO: 763437 - RNA, 17 nt, Artificial Sequence
  Synthetic
uuucuggcauuaaaaau

SEQ ID NO: 763438 - RNA, 17 nt, Artificial Sequence
  Synthetic
auccuacuauuaaaaau

SEQ ID NO: 763439 - RNA, 17 nt, Artificial Sequence
  Synthetic
aaagagcucuuaaaaau

SEQ ID NO: 763440 - RNA, 17 nt, Artificial Sequence
  Synthetic
uuguucacuuuaaaaau

SEQ ID NO: 763441 - RNA, 17 nt, Artificial Sequence
  Synthetic
aauaguucuuuaaaaau

SEQ ID NO: 763442 - RNA, 17 nt, Artificial Sequence
  Synthetic
ugcugaauuuuaaaaau

SEQ ID NO: 763443 - RNA, 17 nt, Artificial Sequence
  Synthetic
acuaaguaaaacaaaau

SEQ ID NO: 763444 - RNA, 17 nt, Artificial Sequence
  Synthetic
caaguuuaaaacaaaau

SEQ ID NO: 763445 - RNA, 17 nt, Artificial Sequence
  Synthetic
ucucuaaugaacaaaau

SEQ ID NO: 763446 - RNA, 17 nt, Artificial Sequence
  Synthetic
aaauugaguaacaaaau

SEQ ID NO: 763447 - RNA, 17 nt, Artificial Sequence
  Synthetic
cuugcuacacacaaaau

SEQ ID NO: 763448 - RNA, 17 nt, Artificial Sequence
  Synthetic
aaagggcagcacaaaau

SEQ ID NO: 763449 - RNA, 17 nt, Artificial Sequence
  Synthetic
aagauuuggcacaaaau

SEQ ID NO: 763450 - RNA, 17 nt, Artificial Sequence
  Synthetic
aggaaaaaucacaaaau

SEQ ID NO: 763451 - RNA, 17 nt, Artificial Sequence
  Synthetic
ucauauaaagacaaaau

SEQ ID NO: 763452 - RNA, 17 nt, Artificial Sequence
  Synthetic
auaacuuaagacaaaau

SEQ ID NO: 763453 - RNA, 17 nt, Artificial Sequence
  Synthetic
cuuauaucagacaaaau

SEQ ID NO: 763454 - RNA, 17 nt, Artificial Sequence
  Synthetic
cuucuauuagacaaaau

SEQ ID NO: 763455 - RNA, 17 nt, Artificial Sequence
  Synthetic
aaauucauauacaaaau

SEQ ID NO: 763456 - RNA, 17 nt, Artificial Sequence
  Synthetic
aaagaauacuacaaaau

SEQ ID NO: 763457 - RNA, 17 nt, Artificial Sequence
  Synthetic
caggcaaccuacaaaau

SEQ ID NO: 763458 - RNA, 17 nt, Artificial Sequence
  Synthetic
uuuugauauuacaaaau

SEQ ID NO: 763459 - RNA, 17 nt, Artificial Sequence
  Synthetic
uaaugcauaaccaaaau

SEQ ID NO: 763460 - RNA, 17 nt, Artificial Sequence
  Synthetic
auacugaguaccaaaau

SEQ ID NO: 763461 - RNA, 17 nt, Artificial Sequence
  Synthetic
ccagauucugccaaaau

SEQ ID NO: 763462 - RNA, 17 nt, Artificial Sequence
  Synthetic
auauguaaauccaaaau

SEQ ID NO: 763463 - RNA, 17 nt, Artificial Sequence
  Synthetic
acaagggaguccaaaau

SEQ ID NO: 763464 - RNA, 17 nt, Artificial Sequence
  Synthetic
agaaauacuuccaaaau

SEQ ID NO: 763465 - RNA, 17 nt, Artificial Sequence
  Synthetic
uuagaaaauggcaaaau

SEQ ID NO: 763466 - RNA, 17 nt, Artificial Sequence
  Synthetic
agugagcagaucaaaau

SEQ ID NO: 763467 - RNA, 17 nt, Artificial Sequence
  Synthetic
cuaagcauacucaaaau

SEQ ID NO: 763468 - RNA, 17 nt, Artificial Sequence
  Synthetic
uggauagaucucaaaau

SEQ ID NO: 763469 - RNA, 17 nt, Artificial Sequence
  Synthetic
agcuuugaagucaaaau

SEQ ID NO: 763470 - RNA, 17 nt, Artificial Sequence
  Synthetic
cuauuuucagucaaaau

SEQ ID NO: 763471 - RNA, 17 nt, Artificial Sequence
  Synthetic
ugucucauagucaaaau

SEQ ID NO: 763472 - RNA, 17 nt, Artificial Sequence
  Synthetic
caucucuuugucaaaau

SEQ ID NO: 763473 - RNA, 17 nt, Artificial Sequence
  Synthetic
accccaaaauucaaaau

SEQ ID NO: 763474 - RNA, 17 nt, Artificial Sequence
  Synthetic
uaagaucacuucaaaau

SEQ ID NO: 763475 - RNA, 17 nt, Artificial Sequence
  Synthetic
cuugauuaguucaaaau

SEQ ID NO: 763476 - RNA, 17 nt, Artificial Sequence
  Synthetic
uuuuucuuuuucaaaau

SEQ ID NO: 763477 - RNA, 17 nt, Artificial Sequence
  Synthetic
acaacccaaaagaaaau

SEQ ID NO: 763478 - RNA, 17 nt, Artificial Sequence
  Synthetic
aaagugggcaagaaaau

SEQ ID NO: 763479 - RNA, 17 nt, Artificial Sequence
  Synthetic
aauauggggaagaaaau

SEQ ID NO: 763480 - RNA, 17 nt, Artificial Sequence
  Synthetic
caauaacauaagaaaau

SEQ ID NO: 763481 - RNA, 17 nt, Artificial Sequence
  Synthetic
ugcaagacacagaaaau

SEQ ID NO: 763482 - RNA, 17 nt, Artificial Sequence
  Synthetic
cagccucuccagaaaau

SEQ ID NO: 763483 - RNA, 17 nt, Artificial Sequence
  Synthetic
uguauuucucagaaaau

SEQ ID NO: 763484 - RNA, 17 nt, Artificial Sequence
  Synthetic
caaaauguucagaaaau

SEQ ID NO: 763485 - RNA, 17 nt, Artificial Sequence
  Synthetic
agagagagagagaaaau

SEQ ID NO: 763486 - RNA, 17 nt, Artificial Sequence
  Synthetic
ucaaauugagagaaaau

SEQ ID NO: 763487 - RNA, 17 nt, Artificial Sequence
  Synthetic
agagugugggagaaaau

SEQ ID NO: 763488 - RNA, 17 nt, Artificial Sequence
  Synthetic
aaaggaaaugagaaaau

SEQ ID NO: 763489 - RNA, 17 nt, Artificial Sequence
  Synthetic
auauugcaugagaaaau

SEQ ID NO: 763490 - RNA, 17 nt, Artificial Sequence
  Synthetic
aaaguaauugagaaaau

SEQ ID NO: 763491 - RNA, 17 nt, Artificial Sequence
  Synthetic
uuucacaucuagaaaau

SEQ ID NO: 763492 - RNA, 17 nt, Artificial Sequence
  Synthetic
cauaaaaauuagaaaau

SEQ ID NO: 763493 - RNA, 17 nt, Artificial Sequence
  Synthetic
uguaaaauuuagaaaau

SEQ ID NO: 763494 - RNA, 17 nt, Artificial Sequence
  Synthetic
ucauguacaaggaaaau

SEQ ID NO: 763495 - RNA, 17 nt, Artificial Sequence
  Synthetic
uaagaagcaaggaaaau

SEQ ID NO: 763496 - RNA, 17 nt, Artificial Sequence
  Synthetic
auaguggcaaggaaaau

SEQ ID NO: 763497 - RNA, 17 nt, Artificial Sequence
  Synthetic
uaugggauaaggaaaau

SEQ ID NO: 763498 - RNA, 17 nt, Artificial Sequence
  Synthetic
cacuaacacaggaaaau

SEQ ID NO: 763499 - RNA, 17 nt, Artificial Sequence
  Synthetic
aauaguuucaggaaaau

SEQ ID NO: 763500 - RNA, 17 nt, Artificial Sequence
  Synthetic
ugaagguguaggaaaau

SEQ ID NO: 763501 - RNA, 17 nt, Artificial Sequence
  Synthetic
acaauccaacggaaaau

SEQ ID NO: 763502 - RNA, 17 nt, Artificial Sequence
  Synthetic
auggaagaagggaaaau

SEQ ID NO: 763503 - RNA, 17 nt, Artificial Sequence
  Synthetic
acacugacagggaaaau

SEQ ID NO: 763504 - RNA, 17 nt, Artificial Sequence
  Synthetic
aaaaucugagggaaaau

SEQ ID NO: 763505 - RNA, 17 nt, Artificial Sequence
  Synthetic
caagaccuggggaaaau

SEQ ID NO: 763506 - RNA, 17 nt, Artificial Sequence
  Synthetic
aacggugcugggaaaau

SEQ ID NO: 763507 - RNA, 17 nt, Artificial Sequence
  Synthetic
uuucuccaauggaaaau

SEQ ID NO: 763508 - RNA, 17 nt, Artificial Sequence
  Synthetic
ccaaaagcauggaaaau

SEQ ID NO: 763509 - RNA, 17 nt, Artificial Sequence
  Synthetic
caaguaucauggaaaau

SEQ ID NO: 763510 - RNA, 17 nt, Artificial Sequence
  Synthetic
ucacaugccuggaaaau

SEQ ID NO: 763511 - RNA, 17 nt, Artificial Sequence
  Synthetic
uucuuugccuggaaaau

SEQ ID NO: 763512 - RNA, 17 nt, Artificial Sequence
  Synthetic
auuaugugcuggaaaau

SEQ ID NO: 763513 - RNA, 17 nt, Artificial Sequence
  Synthetic
auuuagggguggaaaau

SEQ ID NO: 763514 - RNA, 17 nt, Artificial Sequence
  Synthetic
cuucucauuuggaaaau

SEQ ID NO: 763515 - RNA, 17 nt, Artificial Sequence
  Synthetic
aacugaauaaugaaaau

SEQ ID NO: 763516 - RNA, 17 nt, Artificial Sequence
  Synthetic
caauuuugacugaaaau

SEQ ID NO: 763517 - RNA, 17 nt, Artificial Sequence
  Synthetic
auucauuuacugaaaau

SEQ ID NO: 763518 - RNA, 17 nt, Artificial Sequence
  Synthetic
acagaauaccugaaaau

SEQ ID NO: 763519 - RNA, 17 nt, Artificial Sequence
  Synthetic
aacugcugucugaaaau

SEQ ID NO: 763520 - RNA, 17 nt, Artificial Sequence
  Synthetic
ucuuuauuucugaaaau

SEQ ID NO: 763521 - RNA, 17 nt, Artificial Sequence
  Synthetic
uuuugaagagugaaaau

SEQ ID NO: 763522 - RNA, 17 nt, Artificial Sequence
  Synthetic
auucaaaaugugaaaau

SEQ ID NO: 763523 - RNA, 17 nt, Artificial Sequence
  Synthetic
auuaaaucauugaaaau

SEQ ID NO: 763524 - RNA, 17 nt, Artificial Sequence
  Synthetic
ucagcaaacuugaaaau

SEQ ID NO: 763525 - RNA, 17 nt, Artificial Sequence
  Synthetic
uaguuaaccuugaaaau

SEQ ID NO: 763526 - RNA, 17 nt, Artificial Sequence
  Synthetic
uaauaaugcuugaaaau

SEQ ID NO: 763527 - RNA, 17 nt, Artificial Sequence
  Synthetic
ucugucuuguugaaaau

SEQ ID NO: 763528 - RNA, 17 nt, Artificial Sequence
  Synthetic
ucaguguuguugaaaau

SEQ ID NO: 763529 - RNA, 17 nt, Artificial Sequence
  Synthetic
aguuugcuuuugaaaau

SEQ ID NO: 763530 - RNA, 17 nt, Artificial Sequence
  Synthetic
aaacaagcaaauaaaau

SEQ ID NO: 763531 - RNA, 17 nt, Artificial Sequence
  Synthetic
auagcagucaauaaaau

SEQ ID NO: 763532 - RNA, 17 nt, Artificial Sequence
  Synthetic
acuaaaaagaauaaaau

SEQ ID NO: 763533 - RNA, 17 nt, Artificial Sequence
  Synthetic
uuugagaagaauaaaau

SEQ ID NO: 763534 - RNA, 17 nt, Artificial Sequence
  Synthetic
uuaguaaggaauaaaau

SEQ ID NO: 763535 - RNA, 17 nt, Artificial Sequence
  Synthetic
uacaauaggaauaaaau

SEQ ID NO: 763536 - RNA, 17 nt, Artificial Sequence
  Synthetic
uauuuuaggaauaaaau

SEQ ID NO: 763537 - RNA, 17 nt, Artificial Sequence
  Synthetic
aacaccuuuaauaaaau

SEQ ID NO: 763538 - RNA, 17 nt, Artificial Sequence
  Synthetic
uaauggaaacauaaaau

SEQ ID NO: 763539 - RNA, 17 nt, Artificial Sequence
  Synthetic
auauguacacauaaaau

SEQ ID NO: 763540 - RNA, 17 nt, Artificial Sequence
  Synthetic
auuuuuucacauaaaau

SEQ ID NO: 763541 - RNA, 17 nt, Artificial Sequence
  Synthetic
auaauaugccauaaaau

SEQ ID NO: 763542 - RNA, 17 nt, Artificial Sequence
  Synthetic
uaaaacaagcauaaaau

SEQ ID NO: 763543 - RNA, 17 nt, Artificial Sequence
  Synthetic
uuuuaaugucauaaaau

SEQ ID NO: 763544 - RNA, 17 nt, Artificial Sequence
  Synthetic
cccagacaggauaaaau

SEQ ID NO: 763545 - RNA, 17 nt, Artificial Sequence
  Synthetic
uuuagaagauauaaaau

SEQ ID NO: 763546 - RNA, 17 nt, Artificial Sequence
  Synthetic
uagauuagauauaaaau

SEQ ID NO: 763547 - RNA, 17 nt, Artificial Sequence
  Synthetic
acacuuuacuauaaaau

SEQ ID NO: 763548 - RNA, 17 nt, Artificial Sequence
  Synthetic
uuaucuagcuauaaaau

SEQ ID NO: 763549 - RNA, 17 nt, Artificial Sequence
  Synthetic
uuugaaaucuauaaaau

SEQ ID NO: 763550 - RNA, 17 nt, Artificial Sequence
  Synthetic
uaucucaucuauaaaau

SEQ ID NO: 763551 - RNA, 17 nt, Artificial Sequence
  Synthetic
uuucucgucuauaaaau

SEQ ID NO: 763552 - RNA, 17 nt, Artificial Sequence
  Synthetic
cugacaagguauaaaau

SEQ ID NO: 763553 - RNA, 17 nt, Artificial Sequence
  Synthetic
uuucugauguauaaaau

SEQ ID NO: 763554 - RNA, 17 nt, Artificial Sequence
  Synthetic
cuucaaaguuauaaaau

SEQ ID NO: 763555 - RNA, 17 nt, Artificial Sequence
  Synthetic
aaaccaagaacuaaaau

SEQ ID NO: 763556 - RNA, 17 nt, Artificial Sequence
  Synthetic
aaaaaacgaacuaaaau

SEQ ID NO: 763557 - RNA, 17 nt, Artificial Sequence
  Synthetic
cacacauagccuaaaau

SEQ ID NO: 763558 - RNA, 17 nt, Artificial Sequence
  Synthetic
cugucacauccuaaaau

SEQ ID NO: 763559 - RNA, 17 nt, Artificial Sequence
  Synthetic
aauaaaauagcuaaaau

SEQ ID NO: 763560 - RNA, 17 nt, Artificial Sequence
  Synthetic
ugaaagauggcuaaaau

SEQ ID NO: 763561 - RNA, 17 nt, Artificial Sequence
  Synthetic
uuauuggucucuaaaau

SEQ ID NO: 763562 - RNA, 17 nt, Artificial Sequence
  Synthetic
uuuucugucucuaaaau

SEQ ID NO: 763563 - RNA, 17 nt, Artificial Sequence
  Synthetic
aaagcugggucuaaaau

SEQ ID NO: 763564 - RNA, 17 nt, Artificial Sequence
  Synthetic
ccaauauggucuaaaau

SEQ ID NO: 763565 - RNA, 17 nt, Artificial Sequence
  Synthetic
uuugaguauucuaaaau

SEQ ID NO: 763566 - RNA, 17 nt, Artificial Sequence
  Synthetic
auuuauauuucuaaaau

SEQ ID NO: 763567 - RNA, 17 nt, Artificial Sequence
  Synthetic
uuauucuuuucuaaaau

SEQ ID NO: 763568 - RNA, 17 nt, Artificial Sequence
  Synthetic
acuuauaaaaguaaaau

SEQ ID NO: 763569 - RNA, 17 nt, Artificial Sequence
  Synthetic
uaaucugaaaguaaaau

SEQ ID NO: 763570 - RNA, 17 nt, Artificial Sequence
  Synthetic
uuucucauaaguaaaau

SEQ ID NO: 763571 - RNA, 17 nt, Artificial Sequence
  Synthetic
uuaaaagacaguaaaau

SEQ ID NO: 763572 - RNA, 17 nt, Artificial Sequence
  Synthetic
aagauuagcaguaaaau

SEQ ID NO: 763573 - RNA, 17 nt, Artificial Sequence
  Synthetic
ccaagaaucaguaaaau

SEQ ID NO: 763574 - RNA, 17 nt, Artificial Sequence
  Synthetic
uuauaaaagaguaaaau

SEQ ID NO: 763575 - RNA, 17 nt, Artificial Sequence
  Synthetic
ucuaaagagaguaaaau

SEQ ID NO: 763576 - RNA, 17 nt, Artificial Sequence
  Synthetic
accagccugaguaaaau

SEQ ID NO: 763577 - RNA, 17 nt, Artificial Sequence
  Synthetic
uucuuuacuaguaaaau

SEQ ID NO: 763578 - RNA, 17 nt, Artificial Sequence
  Synthetic
aguaauuaucguaaaau

SEQ ID NO: 763579 - RNA, 17 nt, Artificial Sequence
  Synthetic
agcacaucauguaaaau

SEQ ID NO: 763580 - RNA, 17 nt, Artificial Sequence
  Synthetic
cuuuugggauguaaaau

SEQ ID NO: 763581 - RNA, 17 nt, Artificial Sequence
  Synthetic
uucgucaacuguaaaau

SEQ ID NO: 763582 - RNA, 17 nt, Artificial Sequence
  Synthetic
uaccucaccuguaaaau

SEQ ID NO: 763583 - RNA, 17 nt, Artificial Sequence
  Synthetic
uuucucagcuguaaaau

SEQ ID NO: 763584 - RNA, 17 nt, Artificial Sequence
  Synthetic
ugucucaucuguaaaau

SEQ ID NO: 763585 - RNA, 17 nt, Artificial Sequence
  Synthetic
uuccuucucuguaaaau

SEQ ID NO: 763586 - RNA, 17 nt, Artificial Sequence
  Synthetic
auaaguuucuguaaaau

SEQ ID NO: 763587 - RNA, 17 nt, Artificial Sequence
  Synthetic
acuuuacuguguaaaau

SEQ ID NO: 763588 - RNA, 17 nt, Artificial Sequence
  Synthetic
cuaugacaaauuaaaau

SEQ ID NO: 763589 - RNA, 17 nt, Artificial Sequence
  Synthetic
aaccacagaauuaaaau

SEQ ID NO: 763590 - RNA, 17 nt, Artificial Sequence
  Synthetic
ugauugcuaauuaaaau

SEQ ID NO: 763591 - RNA, 17 nt, Artificial Sequence
  Synthetic
aaaugauacauuaaaau

SEQ ID NO: 763592 - RNA, 17 nt, Artificial Sequence
  Synthetic
aucugagccauuaaaau

SEQ ID NO: 763593 - RNA, 17 nt, Artificial Sequence
  Synthetic
aauaaucugauuaaaau

SEQ ID NO: 763594 - RNA, 17 nt, Artificial Sequence
  Synthetic
uauccuaauauuaaaau

SEQ ID NO: 763595 - RNA, 17 nt, Artificial Sequence
  Synthetic
cucagcuauauuaaaau

SEQ ID NO: 763596 - RNA, 17 nt, Artificial Sequence
  Synthetic
uaauauguuauuaaaau

SEQ ID NO: 763597 - RNA, 17 nt, Artificial Sequence
  Synthetic
aauuacacacuuaaaau

SEQ ID NO: 763598 - RNA, 17 nt, Artificial Sequence
  Synthetic
aauccaggucuuaaaau

SEQ ID NO: 763599 - RNA, 17 nt, Artificial Sequence
  Synthetic
uguuucauucuuaaaau

SEQ ID NO: 763600 - RNA, 17 nt, Artificial Sequence
  Synthetic
ucaagaacaguuaaaau

SEQ ID NO: 763601 - RNA, 17 nt, Artificial Sequence
  Synthetic
cuuaauauuguuaaaau

SEQ ID NO: 763602 - RNA, 17 nt, Artificial Sequence
  Synthetic
uaggagguuguuaaaau

SEQ ID NO: 763603 - RNA, 17 nt, Artificial Sequence
  Synthetic
uaagaggaauuuaaaau

SEQ ID NO: 763604 - RNA, 17 nt, Artificial Sequence
  Synthetic
uuuuauuaauuuaaaau

SEQ ID NO: 763605 - RNA, 17 nt, Artificial Sequence
  Synthetic
aguaagacauuuaaaau

SEQ ID NO: 763606 - RNA, 17 nt, Artificial Sequence
  Synthetic
uuauguagauuuaaaau

SEQ ID NO: 763607 - RNA, 17 nt, Artificial Sequence
  Synthetic
uaaagagacuuuaaaau

SEQ ID NO: 763608 - RNA, 17 nt, Artificial Sequence
  Synthetic
aaauuguuguuuaaaau

SEQ ID NO: 763609 - RNA, 17 nt, Artificial Sequence
  Synthetic
uaaccugauuuuaaaau

SEQ ID NO: 763610 - RNA, 17 nt, Artificial Sequence
  Synthetic
ccuuaauauuuuaaaau

SEQ ID NO: 763611 - RNA, 17 nt, Artificial Sequence
  Synthetic
uuuugcgcuuuuaaaau

SEQ ID NO: 763612 - RNA, 17 nt, Artificial Sequence
  Synthetic
uuccucauuuuuaaaau

SEQ ID NO: 763613 - RNA, 17 nt, Artificial Sequence
  Synthetic
uugcaaagaaaacaaau

SEQ ID NO: 763614 - RNA, 17 nt, Artificial Sequence
  Synthetic
uugaucaccaaacaaau

SEQ ID NO: 763615 - RNA, 17 nt, Artificial Sequence
  Synthetic
agaggagccaaacaaau

SEQ ID NO: 763616 - RNA, 17 nt, Artificial Sequence
  Synthetic
aaugccuuuaaacaaau

SEQ ID NO: 763617 - RNA, 17 nt, Artificial Sequence
  Synthetic
ucuuucucagaacaaau

SEQ ID NO: 763618 - RNA, 17 nt, Artificial Sequence
  Synthetic
aaauuaugagaacaaau

SEQ ID NO: 763619 - RNA, 17 nt, Artificial Sequence
  Synthetic
auagaaaaggaacaaau

SEQ ID NO: 763620 - RNA, 17 nt, Artificial Sequence
  Synthetic
auaugacaauaacaaau

SEQ ID NO: 763621 - RNA, 17 nt, Artificial Sequence
  Synthetic
aauauuauauaacaaau

SEQ ID NO: 763622 - RNA, 17 nt, Artificial Sequence
  Synthetic
agcaauuacuaacaaau

SEQ ID NO: 763623 - RNA, 17 nt, Artificial Sequence
  Synthetic
uacuaucucuaacaaau

SEQ ID NO: 763624 - RNA, 17 nt, Artificial Sequence
  Synthetic
aaucacaaaccacaaau

SEQ ID NO: 763625 - RNA, 17 nt, Artificial Sequence
  Synthetic
uuuuuaagugcacaaau

SEQ ID NO: 763626 - RNA, 17 nt, Artificial Sequence
  Synthetic
auuauugaaagacaaau

SEQ ID NO: 763627 - RNA, 17 nt, Artificial Sequence
  Synthetic
uaguuggggagacaaau

SEQ ID NO: 763628 - RNA, 17 nt, Artificial Sequence
  Synthetic
uugggguugagacaaau

SEQ ID NO: 763629 - RNA, 17 nt, Artificial Sequence
  Synthetic
agccaaaacggacaaau

SEQ ID NO: 763630 - RNA, 17 nt, Artificial Sequence
  Synthetic
agccaaaauugacaaau

SEQ ID NO: 763631 - RNA, 17 nt, Artificial Sequence
  Synthetic
agccagaauugacaaau

SEQ ID NO: 763632 - RNA, 17 nt, Artificial Sequence
  Synthetic
aaaguauaauuacaaau

SEQ ID NO: 763633 - RNA, 17 nt, Artificial Sequence
  Synthetic
auauacccauuacaaau

SEQ ID NO: 763634 - RNA, 17 nt, Artificial Sequence
  Synthetic
acagacaaacaccaaau

SEQ ID NO: 763635 - RNA, 17 nt, Artificial Sequence
  Synthetic
cuuuacacagaccaaau

SEQ ID NO: 763636 - RNA, 17 nt, Artificial Sequence
  Synthetic
augguaauuuaccaaau

SEQ ID NO: 763637 - RNA, 17 nt, Artificial Sequence
  Synthetic
uuugauuuaacccaaau

SEQ ID NO: 763638 - RNA, 17 nt, Artificial Sequence
  Synthetic
uucaguaugacccaaau

SEQ ID NO: 763639 - RNA, 17 nt, Artificial Sequence
  Synthetic
aauguuuuugcccaaau

SEQ ID NO: 763640 - RNA, 17 nt, Artificial Sequence
  Synthetic
caauuuauuucccaaau

SEQ ID NO: 763641 - RNA, 17 nt, Artificial Sequence
  Synthetic
accgagaucugccaaau

SEQ ID NO: 763642 - RNA, 17 nt, Artificial Sequence
  Synthetic
auagggcucugccaaau

SEQ ID NO: 763643 - RNA, 17 nt, Artificial Sequence
  Synthetic
auauugaucauccaaau

SEQ ID NO: 763644 - RNA, 17 nt, Artificial Sequence
  Synthetic
ugacccuaucuccaaau

SEQ ID NO: 763645 - RNA, 17 nt, Artificial Sequence
  Synthetic
cuuacugaauuccaaau

SEQ ID NO: 763646 - RNA, 17 nt, Artificial Sequence
  Synthetic
auaugucuauuccaaau

SEQ ID NO: 763647 - RNA, 17 nt, Artificial Sequence
  Synthetic
agaacuggcuuccaaau

SEQ ID NO: 763648 - RNA, 17 nt, Artificial Sequence
  Synthetic
aauagucaaaagcaaau

SEQ ID NO: 763649 - RNA, 17 nt, Artificial Sequence
  Synthetic
caaauauuaaagcaaau

SEQ ID NO: 763650 - RNA, 17 nt, Artificial Sequence
  Synthetic
cagcauuugaagcaaau

SEQ ID NO: 763651 - RNA, 17 nt, Artificial Sequence
  Synthetic
auguggaugcagcaaau

SEQ ID NO: 763652 - RNA, 17 nt, Artificial Sequence
  Synthetic
aaaacacaugagcaaau

SEQ ID NO: 763653 - RNA, 17 nt, Artificial Sequence
  Synthetic
auauacagauagcaaau

SEQ ID NO: 763654 - RNA, 17 nt, Artificial Sequence
  Synthetic
aaaggaauaccgcaaau

SEQ ID NO: 763655 - RNA, 17 nt, Artificial Sequence
  Synthetic
cauuggagaaggcaaau

SEQ ID NO: 763656 - RNA, 17 nt, Artificial Sequence
  Synthetic
agauaaaagaggcaaau

SEQ ID NO: 763657 - RNA, 17 nt, Artificial Sequence
  Synthetic
accaaauugaggcaaau

SEQ ID NO: 763658 - RNA, 17 nt, Artificial Sequence
  Synthetic
cugauuaguuggcaaau

SEQ ID NO: 763659 - RNA, 17 nt, Artificial Sequence
  Synthetic
agauacuccaugcaaau

SEQ ID NO: 763660 - RNA, 17 nt, Artificial Sequence
  Synthetic
acugucaccuugcaaau

SEQ ID NO: 763661 - RNA, 17 nt, Artificial Sequence
  Synthetic
uuaaauuguuugcaaau

SEQ ID NO: 763662 - RNA, 17 nt, Artificial Sequence
  Synthetic
aacucaagcaaucaaau

SEQ ID NO: 763663 - RNA, 17 nt, Artificial Sequence
  Synthetic
uauugaaacuaucaaau

SEQ ID NO: 763664 - RNA, 17 nt, Artificial Sequence
  Synthetic
cagccuuaguaucaaau

SEQ ID NO: 763665 - RNA, 17 nt, Artificial Sequence
  Synthetic
uuauaugccacucaaau

SEQ ID NO: 763666 - RNA, 17 nt, Artificial Sequence
  Synthetic
aaaauaaagccucaaau

SEQ ID NO: 763667 - RNA, 17 nt, Artificial Sequence
  Synthetic
cccuuauacucucaaau

SEQ ID NO: 763668 - RNA, 17 nt, Artificial Sequence
  Synthetic
augcacaaaagucaaau

SEQ ID NO: 763669 - RNA, 17 nt, Artificial Sequence
  Synthetic
uucaagucuggucaaau

SEQ ID NO: 763670 - RNA, 17 nt, Artificial Sequence
  Synthetic
ucuucugacugucaaau

SEQ ID NO: 763671 - RNA, 17 nt, Artificial Sequence
  Synthetic
aguaguaucugucaaau

SEQ ID NO: 763672 - RNA, 17 nt, Artificial Sequence
  Synthetic
cuccagaagugucaaau

SEQ ID NO: 763673 - RNA, 17 nt, Artificial Sequence
  Synthetic
aaugauugaauucaaau

SEQ ID NO: 763674 - RNA, 17 nt, Artificial Sequence
  Synthetic
augaagaagauucaaau

SEQ ID NO: 763675 - RNA, 17 nt, Artificial Sequence
  Synthetic
uucaauaugauucaaau

SEQ ID NO: 763676 - RNA, 17 nt, Artificial Sequence
  Synthetic
aagaaagauauucaaau

SEQ ID NO: 763677 - RNA, 17 nt, Artificial Sequence
  Synthetic
auaaaggguauucaaau

SEQ ID NO: 763678 - RNA, 17 nt, Artificial Sequence
  Synthetic
aaaaaucuuauucaaau

SEQ ID NO: 763679 - RNA, 17 nt, Artificial Sequence
  Synthetic
acuccuauucuucaaau

SEQ ID NO: 763680 - RNA, 17 nt, Artificial Sequence
  Synthetic
uucuauacuguucaaau

SEQ ID NO: 763681 - RNA, 17 nt, Artificial Sequence
  Synthetic
agcucauuauuucaaau

SEQ ID NO: 763682 - RNA, 17 nt, Artificial Sequence
  Synthetic
ugaaaagaaaaagaaau

SEQ ID NO: 763683 - RNA, 17 nt, Artificial Sequence
  Synthetic
uauacuaacaaagaaau

SEQ ID NO: 763684 - RNA, 17 nt, Artificial Sequence
  Synthetic
uuucaggagaaagaaau

SEQ ID NO: 763685 - RNA, 17 nt, Artificial Sequence
  Synthetic
aagaaagauaaagaaau

SEQ ID NO: 763686 - RNA, 17 nt, Artificial Sequence
  Synthetic
ugacaaaaacaagaaau

SEQ ID NO: 763687 - RNA, 17 nt, Artificial Sequence
  Synthetic
aauguaagacaagaaau

SEQ ID NO: 763688 - RNA, 17 nt, Artificial Sequence
  Synthetic
auuauauaccaagaaau

SEQ ID NO: 763689 - RNA, 17 nt, Artificial Sequence
  Synthetic
uaugucguucaagaaau

SEQ ID NO: 763690 - RNA, 17 nt, Artificial Sequence
  Synthetic
aguucuuuucaagaaau

SEQ ID NO: 763691 - RNA, 17 nt, Artificial Sequence
  Synthetic
ucuacaaaagaagaaau

SEQ ID NO: 763692 - RNA, 17 nt, Artificial Sequence
  Synthetic
ucaucugaggaagaaau

SEQ ID NO: 763693 - RNA, 17 nt, Artificial Sequence
  Synthetic
aauccauaggaagaaau

SEQ ID NO: 763694 - RNA, 17 nt, Artificial Sequence
  Synthetic
aggagaguggaagaaau

SEQ ID NO: 763695 - RNA, 17 nt, Artificial Sequence
  Synthetic
uguaugugguaagaaau

SEQ ID NO: 763696 - RNA, 17 nt, Artificial Sequence
  Synthetic
uaagaaguaacagaaau

SEQ ID NO: 763697 - RNA, 17 nt, Artificial Sequence
  Synthetic
acuuacaccacagaaau

SEQ ID NO: 763698 - RNA, 17 nt, Artificial Sequence
  Synthetic
auuuacaccacagaaau

SEQ ID NO: 763699 - RNA, 17 nt, Artificial Sequence
  Synthetic
cugauuuugacagaaau

SEQ ID NO: 763700 - RNA, 17 nt, Artificial Sequence
  Synthetic
aacuuuuacccagaaau

SEQ ID NO: 763701 - RNA, 17 nt, Artificial Sequence
  Synthetic
aggggaaagccagaaau

SEQ ID NO: 763702 - RNA, 17 nt, Artificial Sequence
  Synthetic
aaugguccugcagaaau

SEQ ID NO: 763703 - RNA, 17 nt, Artificial Sequence
  Synthetic
uaccagagaucagaaau

SEQ ID NO: 763704 - RNA, 17 nt, Artificial Sequence
  Synthetic
cuguaucacucagaaau

SEQ ID NO: 763705 - RNA, 17 nt, Artificial Sequence
  Synthetic
uucucccaaagagaaau

SEQ ID NO: 763706 - RNA, 17 nt, Artificial Sequence
  Synthetic
uguugguuaagagaaau

SEQ ID NO: 763707 - RNA, 17 nt, Artificial Sequence
  Synthetic
caggcagacagagaaau

SEQ ID NO: 763708 - RNA, 17 nt, Artificial Sequence
  Synthetic
uaggcauggagagaaau

SEQ ID NO: 763709 - RNA, 17 nt, Artificial Sequence
  Synthetic
ugagaguugagagaaau

SEQ ID NO: 763710 - RNA, 17 nt, Artificial Sequence
  Synthetic
cauaaggcuagagaaau

SEQ ID NO: 763711 - RNA, 17 nt, Artificial Sequence
  Synthetic
aaauccaagggagaaau

SEQ ID NO: 763712 - RNA, 17 nt, Artificial Sequence
  Synthetic
agaggauggggagaaau

SEQ ID NO: 763713 - RNA, 17 nt, Artificial Sequence
  Synthetic
uuccgaaugggagaaau

SEQ ID NO: 763714 - RNA, 17 nt, Artificial Sequence
  Synthetic
uuccagaugggagaaau

SEQ ID NO: 763715 - RNA, 17 nt, Artificial Sequence
  Synthetic
augggauugggagaaau

SEQ ID NO: 763716 - RNA, 17 nt, Artificial Sequence
  Synthetic
agaagauguggagaaau

SEQ ID NO: 763717 - RNA, 17 nt, Artificial Sequence
  Synthetic
agaggauguggagaaau

SEQ ID NO: 763718 - RNA, 17 nt, Artificial Sequence
  Synthetic
auaauagccugagaaau

SEQ ID NO: 763719 - RNA, 17 nt, Artificial Sequence
  Synthetic
acuccuuuccuagaaau

SEQ ID NO: 763720 - RNA, 17 nt, Artificial Sequence
  Synthetic
uuuaagauauuagaaau

SEQ ID NO: 763721 - RNA, 17 nt, Artificial Sequence
  Synthetic
uaaauccuuuuagaaau

SEQ ID NO: 763722 - RNA, 17 nt, Artificial Sequence
  Synthetic
uaauugcaugacgaaau

SEQ ID NO: 763723 - RNA, 17 nt, Artificial Sequence
  Synthetic
cuuugagaggccgaaau

SEQ ID NO: 763724 - RNA, 17 nt, Artificial Sequence
  Synthetic
uggggauagggcgaaau

SEQ ID NO: 763725 - RNA, 17 nt, Artificial Sequence
  Synthetic
auaauuucaaaggaaau

SEQ ID NO: 763726 - RNA, 17 nt, Artificial Sequence
  Synthetic
caauaaauaaaggaaau

SEQ ID NO: 763727 - RNA, 17 nt, Artificial Sequence
  Synthetic
cgcaacuacaaggaaau

SEQ ID NO: 763728 - RNA, 17 nt, Artificial Sequence
  Synthetic
aaaauaaggaaggaaau

SEQ ID NO: 763729 - RNA, 17 nt, Artificial Sequence
  Synthetic
cuguaauaugaggaaau

SEQ ID NO: 763730 - RNA, 17 nt, Artificial Sequence
  Synthetic
ugaggaugugaggaaau

SEQ ID NO: 763731 - RNA, 17 nt, Artificial Sequence
  Synthetic
uuggugauauaggaaau

SEQ ID NO: 763732 - RNA, 17 nt, Artificial Sequence
  Synthetic
ugaguggaguaggaaau

SEQ ID NO: 763733 - RNA, 17 nt, Artificial Sequence
  Synthetic
caaugcaauuaggaaau

SEQ ID NO: 763734 - RNA, 17 nt, Artificial Sequence
  Synthetic
ucagggauuagggaaau

SEQ ID NO: 763735 - RNA, 17 nt, Artificial Sequence
  Synthetic
ccuuuuuagggggaaau

SEQ ID NO: 763736 - RNA, 17 nt, Artificial Sequence
  Synthetic
uacaggaauggggaaau

SEQ ID NO: 763737 - RNA, 17 nt, Artificial Sequence
  Synthetic
augaaaaccugggaaau

SEQ ID NO: 763738 - RNA, 17 nt, Artificial Sequence
  Synthetic
acaugugggugggaaau

SEQ ID NO: 763739 - RNA, 17 nt, Artificial Sequence
  Synthetic
acaauggaaauggaaau

SEQ ID NO: 763740 - RNA, 17 nt, Artificial Sequence
  Synthetic
cucuguugccuggaaau

SEQ ID NO: 763741 - RNA, 17 nt, Artificial Sequence
  Synthetic
ucaccuauaguggaaau

SEQ ID NO: 763742 - RNA, 17 nt, Artificial Sequence
  Synthetic
ccagagucauuggaaau

SEQ ID NO: 763743 - RNA, 17 nt, Artificial Sequence
  Synthetic
ucaccagauuuggaaau

SEQ ID NO: 763744 - RNA, 17 nt, Artificial Sequence
  Synthetic
acuuucucuuuggaaau

SEQ ID NO: 763745 - RNA, 17 nt, Artificial Sequence
  Synthetic
uuguuuguuuuggaaau

SEQ ID NO: 763746 - RNA, 17 nt, Artificial Sequence
  Synthetic
uuccuacaaaaugaaau

SEQ ID NO: 763747 - RNA, 17 nt, Artificial Sequence
  Synthetic
aggccauaaaaugaaau

SEQ ID NO: 763748 - RNA, 17 nt, Artificial Sequence
  Synthetic
ucaaagggaaaugaaau

SEQ ID NO: 763749 - RNA, 17 nt, Artificial Sequence
  Synthetic
ugauauggaaaugaaau

SEQ ID NO: 763750 - RNA, 17 nt, Artificial Sequence
  Synthetic
aaagaggcacaugaaau

SEQ ID NO: 763751 - RNA, 17 nt, Artificial Sequence
  Synthetic
acuuaauagcaugaaau

SEQ ID NO: 763752 - RNA, 17 nt, Artificial Sequence
  Synthetic
uauggaauagaugaaau

SEQ ID NO: 763753 - RNA, 17 nt, Artificial Sequence
  Synthetic
caucucuuagaugaaau

SEQ ID NO: 763754 - RNA, 17 nt, Artificial Sequence
  Synthetic
agagacauggaugaaau

SEQ ID NO: 763755 - RNA, 17 nt, Artificial Sequence
  Synthetic
agggacauggaugaaau

SEQ ID NO: 763756 - RNA, 17 nt, Artificial Sequence
  Synthetic
aauaaugaugaugaaau

SEQ ID NO: 763757 - RNA, 17 nt, Artificial Sequence
  Synthetic
aaauuauuugaugaaau

SEQ ID NO: 763758 - RNA, 17 nt, Artificial Sequence
  Synthetic
uguucuuacuaugaaau

SEQ ID NO: 763759 - RNA, 17 nt, Artificial Sequence
  Synthetic
uagcaacccuaugaaau

SEQ ID NO: 763760 - RNA, 17 nt, Artificial Sequence
  Synthetic
caccaacucuaugaaau

SEQ ID NO: 763761 - RNA, 17 nt, Artificial Sequence
  Synthetic
cagcagccuuaugaaau

SEQ ID NO: 763762 - RNA, 17 nt, Artificial Sequence
  Synthetic
aacugaucuuaugaaau

SEQ ID NO: 763763 - RNA, 17 nt, Artificial Sequence
  Synthetic
aaacaacuaacugaaau

SEQ ID NO: 763764 - RNA, 17 nt, Artificial Sequence
  Synthetic
ucagugacuacugaaau

SEQ ID NO: 763765 - RNA, 17 nt, Artificial Sequence
  Synthetic
auaaaaacaccugaaau

SEQ ID NO: 763766 - RNA, 17 nt, Artificial Sequence
  Synthetic
uaagucaucccugaaau

SEQ ID NO: 763767 - RNA, 17 nt, Artificial Sequence
  Synthetic
augauacuugcugaaau

SEQ ID NO: 763768 - RNA, 17 nt, Artificial Sequence
  Synthetic
uugagauccucugaaau

SEQ ID NO: 763769 - RNA, 17 nt, Artificial Sequence
  Synthetic
auauauagaagugaaau

SEQ ID NO: 763770 - RNA, 17 nt, Artificial Sequence
  Synthetic
uauuuauuaagugaaau

SEQ ID NO: 763771 - RNA, 17 nt, Artificial Sequence
  Synthetic
aaaaagaguagugaaau

SEQ ID NO: 763772 - RNA, 17 nt, Artificial Sequence
  Synthetic
cagugugcaggugaaau

SEQ ID NO: 763773 - RNA, 17 nt, Artificial Sequence
  Synthetic
aggcacaugggugaaau

SEQ ID NO: 763774 - RNA, 17 nt, Artificial Sequence
  Synthetic
uuuauccaaugugaaau

SEQ ID NO: 763775 - RNA, 17 nt, Artificial Sequence
  Synthetic
uuccuucucugugaaau

SEQ ID NO: 763776 - RNA, 17 nt, Artificial Sequence
  Synthetic
uaaguaaauauugaaau

SEQ ID NO: 763777 - RNA, 17 nt, Artificial Sequence
  Synthetic
uauuuugauauugaaau

SEQ ID NO: 763778 - RNA, 17 nt, Artificial Sequence
  Synthetic
cuuauuguuauugaaau

SEQ ID NO: 763779 - RNA, 17 nt, Artificial Sequence
  Synthetic
cacugguagcuugaaau

SEQ ID NO: 763780 - RNA, 17 nt, Artificial Sequence
  Synthetic
cuguucuugcuugaaau

SEQ ID NO: 763781 - RNA, 17 nt, Artificial Sequence
  Synthetic
acccacacucuugaaau

SEQ ID NO: 763782 - RNA, 17 nt, Artificial Sequence
  Synthetic
caaucuaugguugaaau

SEQ ID NO: 763783 - RNA, 17 nt, Artificial Sequence
  Synthetic
aagucuccuguugaaau

SEQ ID NO: 763784 - RNA, 17 nt, Artificial Sequence
  Synthetic
uugucuguauuugaaau

SEQ ID NO: 763785 - RNA, 17 nt, Artificial Sequence
  Synthetic
agucagaaguuugaaau

SEQ ID NO: 763786 - RNA, 17 nt, Artificial Sequence
  Synthetic
uaaauuuuguuugaaau

SEQ ID NO: 763787 - RNA, 17 nt, Artificial Sequence
  Synthetic
auguaggcuuuugaaau

SEQ ID NO: 763788 - RNA, 17 nt, Artificial Sequence
  Synthetic
uaucauucuuuugaaau

SEQ ID NO: 763789 - RNA, 17 nt, Artificial Sequence
  Synthetic
cauuaaugaaaauaaau

SEQ ID NO: 763790 - RNA, 17 nt, Artificial Sequence
  Synthetic
uagauaaggaaauaaau

SEQ ID NO: 763791 - RNA, 17 nt, Artificial Sequence
  Synthetic
auaaauuggaaauaaau

SEQ ID NO: 763792 - RNA, 17 nt, Artificial Sequence
  Synthetic
auaauacugaaauaaau

SEQ ID NO: 763793 - RNA, 17 nt, Artificial Sequence
  Synthetic
ccccuauauaaauaaau

SEQ ID NO: 763794 - RNA, 17 nt, Artificial Sequence
  Synthetic
uaaaaaucuaaauaaau

SEQ ID NO: 763795 - RNA, 17 nt, Artificial Sequence
  Synthetic
agguaauguaaauaaau

SEQ ID NO: 763796 - RNA, 17 nt, Artificial Sequence
  Synthetic
uuugguuuuaaauaaau

SEQ ID NO: 763797 - RNA, 17 nt, Artificial Sequence
  Synthetic
uuugauguacaauaaau

SEQ ID NO: 763798 - RNA, 17 nt, Artificial Sequence
  Synthetic
cuauaugcccaauaaau

SEQ ID NO: 763799 - RNA, 17 nt, Artificial Sequence
  Synthetic
uaaucucuucaauaaau

SEQ ID NO: 763800 - RNA, 17 nt, Artificial Sequence
  Synthetic
aaauaaggagaauaaau

SEQ ID NO: 763801 - RNA, 17 nt, Artificial Sequence
  Synthetic
acacucaaggaauaaau

SEQ ID NO: 763802 - RNA, 17 nt, Artificial Sequence
  Synthetic
aauaaauaggaauaaau

SEQ ID NO: 763803 - RNA, 17 nt, Artificial Sequence
  Synthetic
acuuuccaugaauaaau

SEQ ID NO: 763804 - RNA, 17 nt, Artificial Sequence
  Synthetic
uaguaccuugaauaaau

SEQ ID NO: 763805 - RNA, 17 nt, Artificial Sequence
  Synthetic
auuuuaaaguaauaaau

SEQ ID NO: 763806 - RNA, 17 nt, Artificial Sequence
  Synthetic
uucucuuauuaauaaau

SEQ ID NO: 763807 - RNA, 17 nt, Artificial Sequence
  Synthetic
uaagaguauacauaaau

SEQ ID NO: 763808 - RNA, 17 nt, Artificial Sequence
  Synthetic
uuauuguauacauaaau

SEQ ID NO: 763809 - RNA, 17 nt, Artificial Sequence
  Synthetic
auagaaaugccauaaau

SEQ ID NO: 763810 - RNA, 17 nt, Artificial Sequence
  Synthetic
ucuucucaagcauaaau

SEQ ID NO: 763811 - RNA, 17 nt, Artificial Sequence
  Synthetic
caaccuuaggcauaaau

SEQ ID NO: 763812 - RNA, 17 nt, Artificial Sequence
  Synthetic
caacauguugcauaaau

SEQ ID NO: 763813 - RNA, 17 nt, Artificial Sequence
  Synthetic
ccucauaacucauaaau

SEQ ID NO: 763814 - RNA, 17 nt, Artificial Sequence
  Synthetic
uuucuguguucauaaau

SEQ ID NO: 763815 - RNA, 17 nt, Artificial Sequence
  Synthetic
ucuaauauuucauaaau

SEQ ID NO: 763816 - RNA, 17 nt, Artificial Sequence
  Synthetic
cuagaugcaagauaaau

SEQ ID NO: 763817 - RNA, 17 nt, Artificial Sequence
  Synthetic
aauaaaauaagauaaau

SEQ ID NO: 763818 - RNA, 17 nt, Artificial Sequence
  Synthetic
uaaccuguaagauaaau

SEQ ID NO: 763819 - RNA, 17 nt, Artificial Sequence
  Synthetic
aaaauggcaggauaaau

SEQ ID NO: 763820 - RNA, 17 nt, Artificial Sequence
  Synthetic
uuugaaguaggauaaau

SEQ ID NO: 763821 - RNA, 17 nt, Artificial Sequence
  Synthetic
cacgcugagggauaaau

SEQ ID NO: 763822 - RNA, 17 nt, Artificial Sequence
  Synthetic
uucugcaggggauaaau

SEQ ID NO: 763823 - RNA, 17 nt, Artificial Sequence
  Synthetic
cuuuuuuuuggauaaau

SEQ ID NO: 763824 - RNA, 17 nt, Artificial Sequence
  Synthetic
auagaauaaauauaaau

SEQ ID NO: 763825 - RNA, 17 nt, Artificial Sequence
  Synthetic
agauuuccaauauaaau

SEQ ID NO: 763826 - RNA, 17 nt, Artificial Sequence
  Synthetic
uuaaagauaauauaaau

SEQ ID NO: 763827 - RNA, 17 nt, Artificial Sequence
  Synthetic
uagcuuaucauauaaau

SEQ ID NO: 763828 - RNA, 17 nt, Artificial Sequence
  Synthetic
acuugacucauauaaau

SEQ ID NO: 763829 - RNA, 17 nt, Artificial Sequence
  Synthetic
aaaggagauauauaaau

SEQ ID NO: 763830 - RNA, 17 nt, Artificial Sequence
  Synthetic
ugcuuugaacuauaaau

SEQ ID NO: 763831 - RNA, 17 nt, Artificial Sequence
  Synthetic
uuaucuauccuauaaau

SEQ ID NO: 763832 - RNA, 17 nt, Artificial Sequence
  Synthetic
acugaugagcuauaaau

SEQ ID NO: 763833 - RNA, 17 nt, Artificial Sequence
  Synthetic
uauguguguguauaaau

SEQ ID NO: 763834 - RNA, 17 nt, Artificial Sequence
  Synthetic
cagucuuaguuauaaau

SEQ ID NO: 763835 - RNA, 17 nt, Artificial Sequence
  Synthetic
cuagagaguuuauaaau

SEQ ID NO: 763836 - RNA, 17 nt, Artificial Sequence
  Synthetic
uaauuggaacacuaaau

SEQ ID NO: 763837 - RNA, 17 nt, Artificial Sequence
  Synthetic
accgaaaagcacuaaau

SEQ ID NO: 763838 - RNA, 17 nt, Artificial Sequence
  Synthetic
cuuggcuguuacuaaau

SEQ ID NO: 763839 - RNA, 17 nt, Artificial Sequence
  Synthetic
agucucauguccuaaau

SEQ ID NO: 763840 - RNA, 17 nt, Artificial Sequence
  Synthetic
augcuuuauggcuaaau

SEQ ID NO: 763841 - RNA, 17 nt, Artificial Sequence
  Synthetic
cucaacuuuggcuaaau

SEQ ID NO: 763842 - RNA, 17 nt, Artificial Sequence
  Synthetic
uuucaaaaaugcuaaau

SEQ ID NO: 763843 - RNA, 17 nt, Artificial Sequence
  Synthetic
auuuuaguaugcuaaau

SEQ ID NO: 763844 - RNA, 17 nt, Artificial Sequence
  Synthetic
cuuuuaaacugcuaaau

SEQ ID NO: 763845 - RNA, 17 nt, Artificial Sequence
  Synthetic
uuccuccuuugcuaaau

SEQ ID NO: 763846 - RNA, 17 nt, Artificial Sequence
  Synthetic
aaaaucuaaaucuaaau

SEQ ID NO: 763847 - RNA, 17 nt, Artificial Sequence
  Synthetic
auuucccauaucuaaau

SEQ ID NO: 763848 - RNA, 17 nt, Artificial Sequence
  Synthetic
uaaauuacacucuaaau

SEQ ID NO: 763849 - RNA, 17 nt, Artificial Sequence
  Synthetic
aggaggcagcucuaaau

SEQ ID NO: 763850 - RNA, 17 nt, Artificial Sequence
  Synthetic
uuauuacauuucuaaau

SEQ ID NO: 763851 - RNA, 17 nt, Artificial Sequence
  Synthetic
aaaaugcauuucuaaau

SEQ ID NO: 763852 - RNA, 17 nt, Artificial Sequence
  Synthetic
acauuuauuuucuaaau

SEQ ID NO: 763853 - RNA, 17 nt, Artificial Sequence
  Synthetic
ugaugucccaaguaaau

SEQ ID NO: 763854 - RNA, 17 nt, Artificial Sequence
  Synthetic
agacuaauacaguaaau

SEQ ID NO: 763855 - RNA, 17 nt, Artificial Sequence
  Synthetic
ccacacucccaguaaau

SEQ ID NO: 763856 - RNA, 17 nt, Artificial Sequence
  Synthetic
caaauacuucaguaaau

SEQ ID NO: 763857 - RNA, 17 nt, Artificial Sequence
  Synthetic
uuguugucugaguaaau

SEQ ID NO: 763858 - RNA, 17 nt, Artificial Sequence
  Synthetic
caauaguuauaguaaau

SEQ ID NO: 763859 - RNA, 17 nt, Artificial Sequence
  Synthetic
ucaaugagguaguaaau

SEQ ID NO: 763860 - RNA, 17 nt, Artificial Sequence
  Synthetic
auuauaggggcguaaau

SEQ ID NO: 763861 - RNA, 17 nt, Artificial Sequence
  Synthetic
cauuuaaaaagguaaau

SEQ ID NO: 763862 - RNA, 17 nt, Artificial Sequence
  Synthetic
caauuuugaagguaaau

SEQ ID NO: 763863 - RNA, 17 nt, Artificial Sequence
  Synthetic
cuugaaaauagguaaau

SEQ ID NO: 763864 - RNA, 17 nt, Artificial Sequence
  Synthetic
uguguaacaugguaaau

SEQ ID NO: 763865 - RNA, 17 nt, Artificial Sequence
  Synthetic
ucaaacuuaugguaaau

SEQ ID NO: 763866 - RNA, 17 nt, Artificial Sequence
  Synthetic
uaacuuuaaauguaaau

SEQ ID NO: 763867 - RNA, 17 nt, Artificial Sequence
  Synthetic
caccugugccuguaaau

SEQ ID NO: 763868 - RNA, 17 nt, Artificial Sequence
  Synthetic
aaauuaaugcuguaaau

SEQ ID NO: 763869 - RNA, 17 nt, Artificial Sequence
  Synthetic
caccucucucuguaaau

SEQ ID NO: 763870 - RNA, 17 nt, Artificial Sequence
  Synthetic
aggaaaacaguguaaau

SEQ ID NO: 763871 - RNA, 17 nt, Artificial Sequence
  Synthetic
uugggcauaguguaaau

SEQ ID NO: 763872 - RNA, 17 nt, Artificial Sequence
  Synthetic
uucugagcuguguaaau

SEQ ID NO: 763873 - RNA, 17 nt, Artificial Sequence
  Synthetic
cauuauaaaaauuaaau

SEQ ID NO: 763874 - RNA, 17 nt, Artificial Sequence
  Synthetic
auucauugaaauuaaau

SEQ ID NO: 763875 - RNA, 17 nt, Artificial Sequence
  Synthetic
uggaaaggcaauuaaau

SEQ ID NO: 763876 - RNA, 17 nt, Artificial Sequence
  Synthetic
auaugucagaauuaaau

SEQ ID NO: 763877 - RNA, 17 nt, Artificial Sequence
  Synthetic
acugauuauaauuaaau

SEQ ID NO: 763878 - RNA, 17 nt, Artificial Sequence
  Synthetic
uguuuuauuaauuaaau

SEQ ID NO: 763879 - RNA, 17 nt, Artificial Sequence
  Synthetic
augauauuuaauuaaau

SEQ ID NO: 763880 - RNA, 17 nt, Artificial Sequence
  Synthetic
ugaaaaaaacauuaaau

SEQ ID NO: 763881 - RNA, 17 nt, Artificial Sequence
  Synthetic
cucauauugcauuaaau

SEQ ID NO: 763882 - RNA, 17 nt, Artificial Sequence
  Synthetic
ugggguuaagauuaaau

SEQ ID NO: 763883 - RNA, 17 nt, Artificial Sequence
  Synthetic
aacuaaagugauuaaau

SEQ ID NO: 763884 - RNA, 17 nt, Artificial Sequence
  Synthetic
cuaauuagauauuaaau

SEQ ID NO: 763885 - RNA, 17 nt, Artificial Sequence
  Synthetic
aaaaauguguauuaaau

SEQ ID NO: 763886 - RNA, 17 nt, Artificial Sequence
  Synthetic
aacaccauuuauuaaau

SEQ ID NO: 763887 - RNA, 17 nt, Artificial Sequence
  Synthetic
agcaccauuuauuaaau

SEQ ID NO: 763888 - RNA, 17 nt, Artificial Sequence
  Synthetic
augaugcuuuauuaaau

SEQ ID NO: 763889 - RNA, 17 nt, Artificial Sequence
  Synthetic
agcaccguuuauuaaau

SEQ ID NO: 763890 - RNA, 17 nt, Artificial Sequence
  Synthetic
aguaauaucucuuaaau

SEQ ID NO: 763891 - RNA, 17 nt, Artificial Sequence
  Synthetic
acuuaagaaaguuaaau

SEQ ID NO: 763892 - RNA, 17 nt, Artificial Sequence
  Synthetic
auaaccuaaaguuaaau

SEQ ID NO: 763893 - RNA, 17 nt, Artificial Sequence
  Synthetic
ugcaggagaaguuaaau

SEQ ID NO: 763894 - RNA, 17 nt, Artificial Sequence
  Synthetic
ucacaggucaguuaaau

SEQ ID NO: 763895 - RNA, 17 nt, Artificial Sequence
  Synthetic
aauuuuacauguuaaau

SEQ ID NO: 763896 - RNA, 17 nt, Artificial Sequence
  Synthetic
uuauccauauguuaaau

SEQ ID NO: 763897 - RNA, 17 nt, Artificial Sequence
  Synthetic
cauuuucucuguuaaau

SEQ ID NO: 763898 - RNA, 17 nt, Artificial Sequence
  Synthetic
aaaaauuauuguuaaau

SEQ ID NO: 763899 - RNA, 17 nt, Artificial Sequence
  Synthetic
aagaauauuuguuaaau

SEQ ID NO: 763900 - RNA, 17 nt, Artificial Sequence
  Synthetic
auaauggaaauuuaaau

SEQ ID NO: 763901 - RNA, 17 nt, Artificial Sequence
  Synthetic
agguccuaaauuuaaau

SEQ ID NO: 763902 - RNA, 17 nt, Artificial Sequence
  Synthetic
ugacuuuccauuuaaau

SEQ ID NO: 763903 - RNA, 17 nt, Artificial Sequence
  Synthetic
aaauaguggauuuaaau

SEQ ID NO: 763904 - RNA, 17 nt, Artificial Sequence
  Synthetic
auaguguauauuuaaau

SEQ ID NO: 763905 - RNA, 17 nt, Artificial Sequence
  Synthetic
acuuaaaguauuuaaau

SEQ ID NO: 763906 - RNA, 17 nt, Artificial Sequence
  Synthetic
ucuauauuuauuuaaau

SEQ ID NO: 763907 - RNA, 17 nt, Artificial Sequence
  Synthetic
aaacaguuacuuuaaau

SEQ ID NO: 763908 - RNA, 17 nt, Artificial Sequence
  Synthetic
cuacaaacucuuuaaau

SEQ ID NO: 763909 - RNA, 17 nt, Artificial Sequence
  Synthetic
ugaguggaaguuuaaau

SEQ ID NO: 763910 - RNA, 17 nt, Artificial Sequence
  Synthetic
acauuccaauuuuaaau

SEQ ID NO: 763911 - RNA, 17 nt, Artificial Sequence
  Synthetic
uaauguagauuuuaaau

SEQ ID NO: 763912 - RNA, 17 nt, Artificial Sequence
  Synthetic
aggcucaucuuuuaaau

SEQ ID NO: 763913 - RNA, 17 nt, Artificial Sequence
  Synthetic
uauuguauuuuuuaaau

SEQ ID NO: 763914 - RNA, 17 nt, Artificial Sequence
  Synthetic
uuuagaaagaaaacaau

SEQ ID NO: 763915 - RNA, 17 nt, Artificial Sequence
  Synthetic
aucgcucaccaaacaau

SEQ ID NO: 763916 - RNA, 17 nt, Artificial Sequence
  Synthetic
cugaagcuccaaacaau

SEQ ID NO: 763917 - RNA, 17 nt, Artificial Sequence
  Synthetic
acauuguacuaaacaau

SEQ ID NO: 763918 - RNA, 17 nt, Artificial Sequence
  Synthetic
aaacuauucuaaacaau

SEQ ID NO: 763919 - RNA, 17 nt, Artificial Sequence
  Synthetic
caaucuaugacaacaau

SEQ ID NO: 763920 - RNA, 17 nt, Artificial Sequence
  Synthetic
uguaauauaccaacaau

SEQ ID NO: 763921 - RNA, 17 nt, Artificial Sequence
  Synthetic
aagauuugaagaacaau

SEQ ID NO: 763922 - RNA, 17 nt, Artificial Sequence
  Synthetic
acacaagggagaacaau

SEQ ID NO: 763923 - RNA, 17 nt, Artificial Sequence
  Synthetic
cucacaauuagaacaau

SEQ ID NO: 763924 - RNA, 17 nt, Artificial Sequence
  Synthetic
aucaacauaugaacaau

SEQ ID NO: 763925 - RNA, 17 nt, Artificial Sequence
  Synthetic
cuugagaguugaacaau

SEQ ID NO: 763926 - RNA, 17 nt, Artificial Sequence
  Synthetic
agauuuuuaauaacaau

SEQ ID NO: 763927 - RNA, 17 nt, Artificial Sequence
  Synthetic
aaugaaaaguuaacaau

SEQ ID NO: 763928 - RNA, 17 nt, Artificial Sequence
  Synthetic
caguggcuuaacacaau

SEQ ID NO: 763929 - RNA, 17 nt, Artificial Sequence
  Synthetic
uagcaagaacacacaau

SEQ ID NO: 763930 - RNA, 17 nt, Artificial Sequence
  Synthetic
acacacgcacacacaau

SEQ ID NO: 763931 - RNA, 17 nt, Artificial Sequence
  Synthetic
aguuaaaaucacacaau

SEQ ID NO: 763932 - RNA, 17 nt, Artificial Sequence
  Synthetic
uguccaagauacacaau

SEQ ID NO: 763933 - RNA, 17 nt, Artificial Sequence
  Synthetic
agggaaaacuacacaau

SEQ ID NO: 763934 - RNA, 17 nt, Artificial Sequence
  Synthetic
uaagcauaguacacaau

SEQ ID NO: 763935 - RNA, 17 nt, Artificial Sequence
  Synthetic
agauccugguacacaau

SEQ ID NO: 763936 - RNA, 17 nt, Artificial Sequence
  Synthetic
uucaggauaaccacaau

SEQ ID NO: 763937 - RNA, 17 nt, Artificial Sequence
  Synthetic
caaucucauuccacaau

SEQ ID NO: 763938 - RNA, 17 nt, Artificial Sequence
  Synthetic
cuguuucauagcacaau

SEQ ID NO: 763939 - RNA, 17 nt, Artificial Sequence
  Synthetic
uaaugaaaccucacaau

SEQ ID NO: 763940 - RNA, 17 nt, Artificial Sequence
  Synthetic
agggcuuacuucacaau

SEQ ID NO: 763941 - RNA, 17 nt, Artificial Sequence
  Synthetic
uguggacaguucacaau

SEQ ID NO: 763942 - RNA, 17 nt, Artificial Sequence
  Synthetic
caugaguaguucacaau

SEQ ID NO: 763943 - RNA, 17 nt, Artificial Sequence
  Synthetic
cuucccuaaaagacaau

SEQ ID NO: 763944 - RNA, 17 nt, Artificial Sequence
  Synthetic
uuaagcgccaagacaau

SEQ ID NO: 763945 - RNA, 17 nt, Artificial Sequence
  Synthetic
uucaaguccaagacaau

SEQ ID NO: 763946 - RNA, 17 nt, Artificial Sequence
  Synthetic
uuaauaggcaagacaau

SEQ ID NO: 763947 - RNA, 17 nt, Artificial Sequence
  Synthetic
uagaaugagaagacaau

SEQ ID NO: 763948 - RNA, 17 nt, Artificial Sequence
  Synthetic
agaaacuugaagacaau

SEQ ID NO: 763949 - RNA, 17 nt, Artificial Sequence
  Synthetic
uuuugggcugagacaau

SEQ ID NO: 763950 - RNA, 17 nt, Artificial Sequence
  Synthetic
uuagccacguagacaau

SEQ ID NO: 763951 - RNA, 17 nt, Artificial Sequence
  Synthetic
ucaauaauuuagacaau

SEQ ID NO: 763952 - RNA, 17 nt, Artificial Sequence
  Synthetic
uaggaugaggugacaau

SEQ ID NO: 763953 - RNA, 17 nt, Artificial Sequence
  Synthetic
uuugacauggugacaau

SEQ ID NO: 763954 - RNA, 17 nt, Artificial Sequence
  Synthetic
uaaaaugcauugacaau

SEQ ID NO: 763955 - RNA, 17 nt, Artificial Sequence
  Synthetic
cucaaucauuugacaau

SEQ ID NO: 763956 - RNA, 17 nt, Artificial Sequence
  Synthetic
uuguguaauaauacaau

SEQ ID NO: 763957 - RNA, 17 nt, Artificial Sequence
  Synthetic
acuuauagacauacaau

SEQ ID NO: 763958 - RNA, 17 nt, Artificial Sequence
  Synthetic
acauuucuucauacaau

SEQ ID NO: 763959 - RNA, 17 nt, Artificial Sequence
  Synthetic
caaagaguagauacaau

SEQ ID NO: 763960 - RNA, 17 nt, Artificial Sequence
  Synthetic
uacuuccaggauacaau

SEQ ID NO: 763961 - RNA, 17 nt, Artificial Sequence
  Synthetic
cauaagaaugauacaau

SEQ ID NO: 763962 - RNA, 17 nt, Artificial Sequence
  Synthetic
auauguccauauacaau

SEQ ID NO: 763963 - RNA, 17 nt, Artificial Sequence
  Synthetic
uucuucucuuauacaau

SEQ ID NO: 763964 - RNA, 17 nt, Artificial Sequence
  Synthetic
caauauaaaccuacaau

SEQ ID NO: 763965 - RNA, 17 nt, Artificial Sequence
  Synthetic
aaucucaaugcuacaau

SEQ ID NO: 763966 - RNA, 17 nt, Artificial Sequence
  Synthetic
uuguaaaauucuacaau

SEQ ID NO: 763967 - RNA, 17 nt, Artificial Sequence
  Synthetic
uaaauuaauucuacaau

SEQ ID NO: 763968 - RNA, 17 nt, Artificial Sequence
  Synthetic
uuucuguauucuacaau

SEQ ID NO: 763969 - RNA, 17 nt, Artificial Sequence
  Synthetic
aauugaaaagguacaau

SEQ ID NO: 763970 - RNA, 17 nt, Artificial Sequence
  Synthetic
ccuaauaaauguacaau

SEQ ID NO: 763971 - RNA, 17 nt, Artificial Sequence
  Synthetic
uauccauguuguacaau

SEQ ID NO: 763972 - RNA, 17 nt, Artificial Sequence
  Synthetic
ucuucugcaauuacaau

SEQ ID NO: 763973 - RNA, 17 nt, Artificial Sequence
  Synthetic
cacaaaagaauuacaau

SEQ ID NO: 763974 - RNA, 17 nt, Artificial Sequence
  Synthetic
ccaacaauuauuacaau

SEQ ID NO: 763975 - RNA, 17 nt, Artificial Sequence
  Synthetic
aauucucaacuuacaau

SEQ ID NO: 763976 - RNA, 17 nt, Artificial Sequence
  Synthetic
aagucaaugcuuacaau

SEQ ID NO: 763977 - RNA, 17 nt, Artificial Sequence
  Synthetic
uagauauaucuuacaau

SEQ ID NO: 763978 - RNA, 17 nt, Artificial Sequence
  Synthetic
aucauuuaaguuacaau

SEQ ID NO: 763979 - RNA, 17 nt, Artificial Sequence
  Synthetic
auguaauuguuuacaau

SEQ ID NO: 763980 - RNA, 17 nt, Artificial Sequence
  Synthetic
caacaccaucaaccaau

SEQ ID NO: 763981 - RNA, 17 nt, Artificial Sequence
  Synthetic
cacuccacacacccaau

SEQ ID NO: 763982 - RNA, 17 nt, Artificial Sequence
  Synthetic
ccacccaauuacccaau

SEQ ID NO: 763983 - RNA, 17 nt, Artificial Sequence
  Synthetic
caauucccagccccaau

SEQ ID NO: 763984 - RNA, 17 nt, Artificial Sequence
  Synthetic
cuccccuuccucccaau

SEQ ID NO: 763985 - RNA, 17 nt, Artificial Sequence
  Synthetic
uuacuuuauuucccaau

SEQ ID NO: 763986 - RNA, 17 nt, Artificial Sequence
  Synthetic
uugcucaguuucccaau

SEQ ID NO: 763987 - RNA, 17 nt, Artificial Sequence
  Synthetic
acccaaccccagccaau

SEQ ID NO: 763988 - RNA, 17 nt, Artificial Sequence
  Synthetic
ugcugggcccagccaau

SEQ ID NO: 763989 - RNA, 17 nt, Artificial Sequence
  Synthetic
acucuuaaauagccaau

SEQ ID NO: 763990 - RNA, 17 nt, Artificial Sequence
  Synthetic
aggcuuugcaggccaau

SEQ ID NO: 763991 - RNA, 17 nt, Artificial Sequence
  Synthetic
ugaugauucaggccaau

SEQ ID NO: 763992 - RNA, 17 nt, Artificial Sequence
  Synthetic
agaagcauuuggccaau

SEQ ID NO: 763993 - RNA, 17 nt, Artificial Sequence
  Synthetic
ucuauucaucugccaau

SEQ ID NO: 763994 - RNA, 17 nt, Artificial Sequence
  Synthetic
aacauccuagugccaau

SEQ ID NO: 763995 - RNA, 17 nt, Artificial Sequence
  Synthetic
ucaaaaucuuugccaau

SEQ ID NO: 763996 - RNA, 17 nt, Artificial Sequence
  Synthetic
caagucuuaaauccaau

SEQ ID NO: 763997 - RNA, 17 nt, Artificial Sequence
  Synthetic
uuaacauaugcuccaau

SEQ ID NO: 763998 - RNA, 17 nt, Artificial Sequence
  Synthetic
aaacagggcuuuccaau

SEQ ID NO: 763999 - RNA, 17 nt, Artificial Sequence
  Synthetic
aaacagugaaaagcaau

SEQ ID NO: 764000 - RNA, 17 nt, Artificial Sequence
  Synthetic
ugagaaaaacaagcaau

SEQ ID NO: 764001 - RNA, 17 nt, Artificial Sequence
  Synthetic
ugaggaaaacaagcaau

SEQ ID NO: 764002 - RNA, 17 nt, Artificial Sequence
  Synthetic
caguuuuuacaagcaau

SEQ ID NO: 764003 - RNA, 17 nt, Artificial Sequence
  Synthetic
cuuaaacaagaagcaau

SEQ ID NO: 764004 - RNA, 17 nt, Artificial Sequence
  Synthetic
auugucacagaagcaau

SEQ ID NO: 764005 - RNA, 17 nt, Artificial Sequence
  Synthetic
ugggggcaggaagcaau

SEQ ID NO: 764006 - RNA, 17 nt, Artificial Sequence
  Synthetic
aguauaaaggcagcaau

SEQ ID NO: 764007 - RNA, 17 nt, Artificial Sequence
  Synthetic
uauagaaacagagcaau

SEQ ID NO: 764008 - RNA, 17 nt, Artificial Sequence
  Synthetic
cuaagugauagagcaau

SEQ ID NO: 764009 - RNA, 17 nt, Artificial Sequence
  Synthetic
cuugauaaaggagcaau

SEQ ID NO: 764010 - RNA, 17 nt, Artificial Sequence
  Synthetic
uauagccuaggagcaau

SEQ ID NO: 764011 - RNA, 17 nt, Artificial Sequence
  Synthetic
uucauucacugagcaau

SEQ ID NO: 764012 - RNA, 17 nt, Artificial Sequence
  Synthetic
ucauuuccaauagcaau

SEQ ID NO: 764013 - RNA, 17 nt, Artificial Sequence
  Synthetic
uaacagaaaguagcaau

SEQ ID NO: 764014 - RNA, 17 nt, Artificial Sequence
  Synthetic
cacuauugauuagcaau

SEQ ID NO: 764015 - RNA, 17 nt, Artificial Sequence
  Synthetic
auaaaugaaaaggcaau

SEQ ID NO: 764016 - RNA, 17 nt, Artificial Sequence
  Synthetic
uuaaucaccaaggcaau

SEQ ID NO: 764017 - RNA, 17 nt, Artificial Sequence
  Synthetic
agauagacacaggcaau

SEQ ID NO: 764018 - RNA, 17 nt, Artificial Sequence
  Synthetic
ugacacaggcaggcaau

SEQ ID NO: 764019 - RNA, 17 nt, Artificial Sequence
  Synthetic
ugaauacuucaggcaau

SEQ ID NO: 764020 - RNA, 17 nt, Artificial Sequence
  Synthetic
aaagaggcugaggcaau

SEQ ID NO: 764021 - RNA, 17 nt, Artificial Sequence
  Synthetic
cuuauuaccuaggcaau

SEQ ID NO: 764022 - RNA, 17 nt, Artificial Sequence
  Synthetic
uucaugcuguaggcaau

SEQ ID NO: 764023 - RNA, 17 nt, Artificial Sequence
  Synthetic
ugggcuucuuaggcaau

SEQ ID NO: 764024 - RNA, 17 nt, Artificial Sequence
  Synthetic
agggcaaccucggcaau

SEQ ID NO: 764025 - RNA, 17 nt, Artificial Sequence
  Synthetic
uuuacaaaaauggcaau

SEQ ID NO: 764026 - RNA, 17 nt, Artificial Sequence
  Synthetic
caaauaaaaauggcaau

SEQ ID NO: 764027 - RNA, 17 nt, Artificial Sequence
  Synthetic
cagucccaaauggcaau

SEQ ID NO: 764028 - RNA, 17 nt, Artificial Sequence
  Synthetic
aacaacauggaugcaau

SEQ ID NO: 764029 - RNA, 17 nt, Artificial Sequence
  Synthetic
uuuuuagaugaugcaau

SEQ ID NO: 764030 - RNA, 17 nt, Artificial Sequence
  Synthetic
uugcauauauaugcaau

SEQ ID NO: 764031 - RNA, 17 nt, Artificial Sequence
  Synthetic
ucguuuaauuaugcaau

SEQ ID NO: 764032 - RNA, 17 nt, Artificial Sequence
  Synthetic
caaugccaaacugcaau

SEQ ID NO: 764033 - RNA, 17 nt, Artificial Sequence
  Synthetic
uuugucuuaacugcaau

SEQ ID NO: 764034 - RNA, 17 nt, Artificial Sequence
  Synthetic
ucugaggacacugcaau

SEQ ID NO: 764035 - RNA, 17 nt, Artificial Sequence
  Synthetic
uucaaccucagugcaau

SEQ ID NO: 764036 - RNA, 17 nt, Artificial Sequence
  Synthetic
uuuuucuucugugcaau

SEQ ID NO: 764037 - RNA, 17 nt, Artificial Sequence
  Synthetic
ugcucugauugugcaau

SEQ ID NO: 764038 - RNA, 17 nt, Artificial Sequence
  Synthetic
uuuucuccccuugcaau

SEQ ID NO: 764039 - RNA, 17 nt, Artificial Sequence
  Synthetic
cucaaucagguugcaau

SEQ ID NO: 764040 - RNA, 17 nt, Artificial Sequence
  Synthetic
uaucaguuguuugcaau

SEQ ID NO: 764041 - RNA, 17 nt, Artificial Sequence
  Synthetic
ucccuccaaaaaucaau

SEQ ID NO: 764042 - RNA, 17 nt, Artificial Sequence
  Synthetic
aauucaguaaaaucaau

SEQ ID NO: 764043 - RNA, 17 nt, Artificial Sequence
  Synthetic
auucauggcaaaucaau

SEQ ID NO: 764044 - RNA, 17 nt, Artificial Sequence
  Synthetic
aucuuuguuaaaucaau

SEQ ID NO: 764045 - RNA, 17 nt, Artificial Sequence
  Synthetic
cacacagcagaaucaau

SEQ ID NO: 764046 - RNA, 17 nt, Artificial Sequence
  Synthetic
auucacauggaaucaau

SEQ ID NO: 764047 - RNA, 17 nt, Artificial Sequence
  Synthetic
uaccucauggaaucaau

SEQ ID NO: 764048 - RNA, 17 nt, Artificial Sequence
  Synthetic
aacacagaguaaucaau

SEQ ID NO: 764049 - RNA, 17 nt, Artificial Sequence
  Synthetic
cuuucaaaaacaucaau

SEQ ID NO: 764050 - RNA, 17 nt, Artificial Sequence
  Synthetic
aaauuuguaccaucaau

SEQ ID NO: 764051 - RNA, 17 nt, Artificial Sequence
  Synthetic
uacuaauauccaucaau

SEQ ID NO: 764052 - RNA, 17 nt, Artificial Sequence
  Synthetic
agaugugaagcaucaau

SEQ ID NO: 764053 - RNA, 17 nt, Artificial Sequence
  Synthetic
auauuuagaagaucaau

SEQ ID NO: 764054 - RNA, 17 nt, Artificial Sequence
  Synthetic
cugguucucagaucaau

SEQ ID NO: 764055 - RNA, 17 nt, Artificial Sequence
  Synthetic
agagucuguagaucaau

SEQ ID NO: 764056 - RNA, 17 nt, Artificial Sequence
  Synthetic
aaaauguagauaucaau

SEQ ID NO: 764057 - RNA, 17 nt, Artificial Sequence
  Synthetic
auacuaucucuaucaau

SEQ ID NO: 764058 - RNA, 17 nt, Artificial Sequence
  Synthetic
uaagaaaaacacucaau

SEQ ID NO: 764059 - RNA, 17 nt, Artificial Sequence
  Synthetic
aguaucugggacucaau

SEQ ID NO: 764060 - RNA, 17 nt, Artificial Sequence
  Synthetic
cuaggagucaccucaau

SEQ ID NO: 764061 - RNA, 17 nt, Artificial Sequence
  Synthetic
aaacuuuuccccucaau

SEQ ID NO: 764062 - RNA, 17 nt, Artificial Sequence
  Synthetic
ccuagccucugcucaau

SEQ ID NO: 764063 - RNA, 17 nt, Artificial Sequence
  Synthetic
uauugguuuugcucaau

SEQ ID NO: 764064 - RNA, 17 nt, Artificial Sequence
  Synthetic
cgaugauuggucucaau

SEQ ID NO: 764065 - RNA, 17 nt, Artificial Sequence
  Synthetic
aaagcagaaaagucaau

SEQ ID NO: 764066 - RNA, 17 nt, Artificial Sequence
  Synthetic
ucaagcccaaagucaau

SEQ ID NO: 764067 - RNA, 17 nt, Artificial Sequence
  Synthetic
uauauuaaagagucaau

SEQ ID NO: 764068 - RNA, 17 nt, Artificial Sequence
  Synthetic
uagaaaagggagucaau

SEQ ID NO: 764069 - RNA, 17 nt, Artificial Sequence
  Synthetic
aaagaggguucgucaau

SEQ ID NO: 764070 - RNA, 17 nt, Artificial Sequence
  Synthetic
agccuggagaggucaau

SEQ ID NO: 764071 - RNA, 17 nt, Artificial Sequence
  Synthetic
ccauauguuuggucaau

SEQ ID NO: 764072 - RNA, 17 nt, Artificial Sequence
  Synthetic
ccugaauaaaugucaau

SEQ ID NO: 764073 - RNA, 17 nt, Artificial Sequence
  Synthetic
auuucuuaaaugucaau

SEQ ID NO: 764074 - RNA, 17 nt, Artificial Sequence
  Synthetic
uacagauugaugucaau

SEQ ID NO: 764075 - RNA, 17 nt, Artificial Sequence
  Synthetic
uauguacaagugucaau

SEQ ID NO: 764076 - RNA, 17 nt, Artificial Sequence
  Synthetic
cgcaugacugugucaau

SEQ ID NO: 764077 - RNA, 17 nt, Artificial Sequence
  Synthetic
acauguucaaauucaau

SEQ ID NO: 764078 - RNA, 17 nt, Artificial Sequence
  Synthetic
caauuucacaauucaau

SEQ ID NO: 764079 - RNA, 17 nt, Artificial Sequence
  Synthetic
aauacaaauaauucaau

SEQ ID NO: 764080 - RNA, 17 nt, Artificial Sequence
  Synthetic
ucccacucacauucaau

SEQ ID NO: 764081 - RNA, 17 nt, Artificial Sequence
  Synthetic
acagacacugauucaau

SEQ ID NO: 764082 - RNA, 17 nt, Artificial Sequence
  Synthetic
auagauucugauucaau

SEQ ID NO: 764083 - RNA, 17 nt, Artificial Sequence
  Synthetic
agcccuuccuauucaau

SEQ ID NO: 764084 - RNA, 17 nt, Artificial Sequence
  Synthetic
agacagaguuauucaau

SEQ ID NO: 764085 - RNA, 17 nt, Artificial Sequence
  Synthetic
acucccucugcuucaau

SEQ ID NO: 764086 - RNA, 17 nt, Artificial Sequence
  Synthetic
ugucuggcaucuucaau

SEQ ID NO: 764087 - RNA, 17 nt, Artificial Sequence
  Synthetic
ccauuccugaguucaau

SEQ ID NO: 764088 - RNA, 17 nt, Artificial Sequence
  Synthetic
uuugcucaagguucaau

SEQ ID NO: 764089 - RNA, 17 nt, Artificial Sequence
  Synthetic
agauagugguguucaau

SEQ ID NO: 764090 - RNA, 17 nt, Artificial Sequence
  Synthetic
cuacaguucauuucaau

SEQ ID NO: 764091 - RNA, 17 nt, Artificial Sequence
  Synthetic
aaguuuuuucuuucaau

SEQ ID NO: 764092 - RNA, 17 nt, Artificial Sequence
  Synthetic
aggaugaaauuuucaau

SEQ ID NO: 764093 - RNA, 17 nt, Artificial Sequence
  Synthetic
cucagaucauuuucaau

SEQ ID NO: 764094 - RNA, 17 nt, Artificial Sequence
  Synthetic
uuccuaaguuuuucaau

SEQ ID NO: 764095 - RNA, 17 nt, Artificial Sequence
  Synthetic
auaaaacaaaaaagaau

SEQ ID NO: 764096 - RNA, 17 nt, Artificial Sequence
  Synthetic
cuuuagaacaaaagaau

SEQ ID NO: 764097 - RNA, 17 nt, Artificial Sequence
  Synthetic
aaaaaaaugaaaagaau

SEQ ID NO: 764098 - RNA, 17 nt, Artificial Sequence
  Synthetic
acagcauuccaaagaau

SEQ ID NO: 764099 - RNA, 17 nt, Artificial Sequence
  Synthetic
uuacuguuucaaagaau

SEQ ID NO: 764100 - RNA, 17 nt, Artificial Sequence
  Synthetic
uuuaaaaaagaaagaau

SEQ ID NO: 764101 - RNA, 17 nt, Artificial Sequence
  Synthetic
uguaagagugaaagaau

SEQ ID NO: 764102 - RNA, 17 nt, Artificial Sequence
  Synthetic
auguauuuugaaagaau

SEQ ID NO: 764103 - RNA, 17 nt, Artificial Sequence
  Synthetic
uugcucuuauaaagaau

SEQ ID NO: 764104 - RNA, 17 nt, Artificial Sequence
  Synthetic
agggagagguaaagaau

SEQ ID NO: 764105 - RNA, 17 nt, Artificial Sequence
  Synthetic
uguaaaguguaaagaau

SEQ ID NO: 764106 - RNA, 17 nt, Artificial Sequence
  Synthetic
uuuuggauuuaaagaau

SEQ ID NO: 764107 - RNA, 17 nt, Artificial Sequence
  Synthetic
uuauucaugacaagaau

SEQ ID NO: 764108 - RNA, 17 nt, Artificial Sequence
  Synthetic
auccagaaaucaagaau

SEQ ID NO: 764109 - RNA, 17 nt, Artificial Sequence
  Synthetic
uugugaggcucaagaau

SEQ ID NO: 764110 - RNA, 17 nt, Artificial Sequence
  Synthetic
uaacuagccagaagaau

SEQ ID NO: 764111 - RNA, 17 nt, Artificial Sequence
  Synthetic
auauaaaucagaagaau

SEQ ID NO: 764112 - RNA, 17 nt, Artificial Sequence
  Synthetic
uugucacagagaagaau

SEQ ID NO: 764113 - RNA, 17 nt, Artificial Sequence
  Synthetic
uaauaccugagaagaau

SEQ ID NO: 764114 - RNA, 17 nt, Artificial Sequence
  Synthetic
uaccccaagggaagaau

SEQ ID NO: 764115 - RNA, 17 nt, Artificial Sequence
  Synthetic
uacaacuggggaagaau

SEQ ID NO: 764116 - RNA, 17 nt, Artificial Sequence
  Synthetic
auccugaaaugaagaau

SEQ ID NO: 764117 - RNA, 17 nt, Artificial Sequence
  Synthetic
aagcauggaugaagaau

SEQ ID NO: 764118 - RNA, 17 nt, Artificial Sequence
  Synthetic
uacucuggcugaagaau

SEQ ID NO: 764119 - RNA, 17 nt, Artificial Sequence
  Synthetic
aggagagucugaagaau

SEQ ID NO: 764120 - RNA, 17 nt, Artificial Sequence
  Synthetic
uuaccuauuugaagaau

SEQ ID NO: 764121 - RNA, 17 nt, Artificial Sequence
  Synthetic
aaugucuaacuaagaau

SEQ ID NO: 764122 - RNA, 17 nt, Artificial Sequence
  Synthetic
uuucaugcucuaagaau

SEQ ID NO: 764123 - RNA, 17 nt, Artificial Sequence
  Synthetic
uuuuuuccaguaagaau

SEQ ID NO: 764124 - RNA, 17 nt, Artificial Sequence
  Synthetic
uuauaggugguaagaau

SEQ ID NO: 764125 - RNA, 17 nt, Artificial Sequence
  Synthetic
agcaacauuuuaagaau

SEQ ID NO: 764126 - RNA, 17 nt, Artificial Sequence
  Synthetic
ugugugauacacagaau

SEQ ID NO: 764127 - RNA, 17 nt, Artificial Sequence
  Synthetic
uuagugagucacagaau

SEQ ID NO: 764128 - RNA, 17 nt, Artificial Sequence
  Synthetic
aagauaguagacagaau

SEQ ID NO: 764129 - RNA, 17 nt, Artificial Sequence
  Synthetic
caagcaaccuacagaau

SEQ ID NO: 764130 - RNA, 17 nt, Artificial Sequence
  Synthetic
caggcagccuacagaau

SEQ ID NO: 764131 - RNA, 17 nt, Artificial Sequence
  Synthetic
uuacuguaguacagaau

SEQ ID NO: 764132 - RNA, 17 nt, Artificial Sequence
  Synthetic
uuuuguaaaaccagaau

SEQ ID NO: 764133 - RNA, 17 nt, Artificial Sequence
  Synthetic
uauguagagcccagaau

SEQ ID NO: 764134 - RNA, 17 nt, Artificial Sequence
  Synthetic
ugugaucaaagcagaau

SEQ ID NO: 764135 - RNA, 17 nt, Artificial Sequence
  Synthetic
uuuuaguauagcagaau

SEQ ID NO: 764136 - RNA, 17 nt, Artificial Sequence
  Synthetic
agagggacacgcagaau

SEQ ID NO: 764137 - RNA, 17 nt, Artificial Sequence
  Synthetic
ugagauauaugcagaau

SEQ ID NO: 764138 - RNA, 17 nt, Artificial Sequence
  Synthetic
ugaaaauauugcagaau

SEQ ID NO: 764139 - RNA, 17 nt, Artificial Sequence
  Synthetic
aauguggaaaucagaau

SEQ ID NO: 764140 - RNA, 17 nt, Artificial Sequence
  Synthetic
uugggagucaucagaau

SEQ ID NO: 764141 - RNA, 17 nt, Artificial Sequence
  Synthetic
ugcucuguacucagaau

SEQ ID NO: 764142 - RNA, 17 nt, Artificial Sequence
  Synthetic
aagacaauccucagaau

SEQ ID NO: 764143 - RNA, 17 nt, Artificial Sequence
  Synthetic
uccauauuccucagaau

SEQ ID NO: 764144 - RNA, 17 nt, Artificial Sequence
  Synthetic
uuguugugucucagaau

SEQ ID NO: 764145 - RNA, 17 nt, Artificial Sequence
  Synthetic
auuuaaaaagucagaau

SEQ ID NO: 764146 - RNA, 17 nt, Artificial Sequence
  Synthetic
ucuaaacucuucagaau

SEQ ID NO: 764147 - RNA, 17 nt, Artificial Sequence
  Synthetic
aguuacccaaagagaau

SEQ ID NO: 764148 - RNA, 17 nt, Artificial Sequence
  Synthetic
cuagagccaaagagaau

SEQ ID NO: 764149 - RNA, 17 nt, Artificial Sequence
  Synthetic
ucccagucaaagagaau

SEQ ID NO: 764150 - RNA, 17 nt, Artificial Sequence
  Synthetic
ucuagaaucaagagaau

SEQ ID NO: 764151 - RNA, 17 nt, Artificial Sequence
  Synthetic
aauguaaagcagagaau

SEQ ID NO: 764152 - RNA, 17 nt, Artificial Sequence
  Synthetic
uuuuaaaaagagagaau

SEQ ID NO: 764153 - RNA, 17 nt, Artificial Sequence
  Synthetic
aggggaaaagcgagaau

SEQ ID NO: 764154 - RNA, 17 nt, Artificial Sequence
  Synthetic
uauuaauucaggagaau

SEQ ID NO: 764155 - RNA, 17 nt, Artificial Sequence
  Synthetic
aaggacagagggagaau

SEQ ID NO: 764156 - RNA, 17 nt, Artificial Sequence
  Synthetic
uaaauggucuggagaau

SEQ ID NO: 764157 - RNA, 17 nt, Artificial Sequence
  Synthetic
uucacuaaaaugagaau

SEQ ID NO: 764158 - RNA, 17 nt, Artificial Sequence
  Synthetic
cuuuuccccaugagaau

SEQ ID NO: 764159 - RNA, 17 nt, Artificial Sequence
  Synthetic
cacaaauuccugagaau

SEQ ID NO: 764160 - RNA, 17 nt, Artificial Sequence
  Synthetic
acagaaguugugagaau

SEQ ID NO: 764161 - RNA, 17 nt, Artificial Sequence
  Synthetic
agcuguugcuugagaau

SEQ ID NO: 764162 - RNA, 17 nt, Artificial Sequence
  Synthetic
cucaggcucuugagaau

SEQ ID NO: 764163 - RNA, 17 nt, Artificial Sequence
  Synthetic
auagaaauguugagaau

SEQ ID NO: 764164 - RNA, 17 nt, Artificial Sequence
  Synthetic
uagugauuuuugagaau

SEQ ID NO: 764165 - RNA, 17 nt, Artificial Sequence
  Synthetic
auagcaauaaauagaau

SEQ ID NO: 764166 - RNA, 17 nt, Artificial Sequence
  Synthetic
uaucuaugacauagaau

SEQ ID NO: 764167 - RNA, 17 nt, Artificial Sequence
  Synthetic
aagacuauagauagaau

SEQ ID NO: 764168 - RNA, 17 nt, Artificial Sequence
  Synthetic
ugaaaugaggauagaau

SEQ ID NO: 764169 - RNA, 17 nt, Artificial Sequence
  Synthetic
ucuuuaauugauagaau

SEQ ID NO: 764170 - RNA, 17 nt, Artificial Sequence
  Synthetic
aaagaaggagcuagaau

SEQ ID NO: 764171 - RNA, 17 nt, Artificial Sequence
  Synthetic
uguauaaccucuagaau

SEQ ID NO: 764172 - RNA, 17 nt, Artificial Sequence
  Synthetic
aaugaaaauucuagaau

SEQ ID NO: 764173 - RNA, 17 nt, Artificial Sequence
  Synthetic
uauuuaaauucuagaau

SEQ ID NO: 764174 - RNA, 17 nt, Artificial Sequence
  Synthetic
aaagaaaauaguagaau

SEQ ID NO: 764175 - RNA, 17 nt, Artificial Sequence
  Synthetic
aaugagugagguagaau

SEQ ID NO: 764176 - RNA, 17 nt, Artificial Sequence
  Synthetic
uauaugaagauuagaau

SEQ ID NO: 764177 - RNA, 17 nt, Artificial Sequence
  Synthetic
uucauggaucuuagaau

SEQ ID NO: 764178 - RNA, 17 nt, Artificial Sequence
  Synthetic
cuguaauauuuuagaau

SEQ ID NO: 764179 - RNA, 17 nt, Artificial Sequence
  Synthetic
acuacacauaaacgaau

SEQ ID NO: 764180 - RNA, 17 nt, Artificial Sequence
  Synthetic
uaacacuaucaacgaau

SEQ ID NO: 764181 - RNA, 17 nt, Artificial Sequence
  Synthetic
cugugcuuuauacgaau

SEQ ID NO: 764182 - RNA, 17 nt, Artificial Sequence
  Synthetic
aaaauaguaaaccgaau

SEQ ID NO: 764183 - RNA, 17 nt, Artificial Sequence
  Synthetic
auacaccuguuccgaau

SEQ ID NO: 764184 - RNA, 17 nt, Artificial Sequence
  Synthetic
ccuacugcuuugcgaau

SEQ ID NO: 764185 - RNA, 17 nt, Artificial Sequence
  Synthetic
uuaaugacauaucgaau

SEQ ID NO: 764186 - RNA, 17 nt, Artificial Sequence
  Synthetic
agacaaaagauucgaau

SEQ ID NO: 764187 - RNA, 17 nt, Artificial Sequence
  Synthetic
auuauuuuuauucgaau

SEQ ID NO: 764188 - RNA, 17 nt, Artificial Sequence
  Synthetic
auaaaacaaaaaggaau

SEQ ID NO: 764189 - RNA, 17 nt, Artificial Sequence
  Synthetic
uauauagggaaaggaau

SEQ ID NO: 764190 - RNA, 17 nt, Artificial Sequence
  Synthetic
ucagcagcagaaggaau

SEQ ID NO: 764191 - RNA, 17 nt, Artificial Sequence
  Synthetic
agcaacauuuaaggaau

SEQ ID NO: 764192 - RNA, 17 nt, Artificial Sequence
  Synthetic
uaaauggacacaggaau

SEQ ID NO: 764193 - RNA, 17 nt, Artificial Sequence
  Synthetic
cacauggacacaggaau

SEQ ID NO: 764194 - RNA, 17 nt, Artificial Sequence
  Synthetic
uaaaauauuacaggaau

SEQ ID NO: 764195 - RNA, 17 nt, Artificial Sequence
  Synthetic
auuagaaaaccaggaau

SEQ ID NO: 764196 - RNA, 17 nt, Artificial Sequence
  Synthetic
uugaguaaaccaggaau

SEQ ID NO: 764197 - RNA, 17 nt, Artificial Sequence
  Synthetic
uuaucugggucaggaau

SEQ ID NO: 764198 - RNA, 17 nt, Artificial Sequence
  Synthetic
uuucuaaauagaggaau

SEQ ID NO: 764199 - RNA, 17 nt, Artificial Sequence
  Synthetic
ugcuuuguaugaggaau

SEQ ID NO: 764200 - RNA, 17 nt, Artificial Sequence
  Synthetic
cagagucacugaggaau

SEQ ID NO: 764201 - RNA, 17 nt, Artificial Sequence
  Synthetic
uucauucacugaggaau

SEQ ID NO: 764202 - RNA, 17 nt, Artificial Sequence
  Synthetic
aaauuuccuugaggaau

SEQ ID NO: 764203 - RNA, 17 nt, Artificial Sequence
  Synthetic
ucccuauagauaggaau

SEQ ID NO: 764204 - RNA, 17 nt, Artificial Sequence
  Synthetic
ugacauucuauaggaau

SEQ ID NO: 764205 - RNA, 17 nt, Artificial Sequence
  Synthetic
caaugcagacuaggaau

SEQ ID NO: 764206 - RNA, 17 nt, Artificial Sequence
  Synthetic
ucagauaaaguaggaau

SEQ ID NO: 764207 - RNA, 17 nt, Artificial Sequence
  Synthetic
uguuggagaguaggaau

SEQ ID NO: 764208 - RNA, 17 nt, Artificial Sequence
  Synthetic
uucacugggguaggaau

SEQ ID NO: 764209 - RNA, 17 nt, Artificial Sequence
  Synthetic
ugacuaauuguaggaau

SEQ ID NO: 764210 - RNA, 17 nt, Artificial Sequence
  Synthetic
aaacucacauuaggaau

SEQ ID NO: 764211 - RNA, 17 nt, Artificial Sequence
  Synthetic
ccuugugccuuaggaau

SEQ ID NO: 764212 - RNA, 17 nt, Artificial Sequence
  Synthetic
ucccuuuguuuaggaau

SEQ ID NO: 764213 - RNA, 17 nt, Artificial Sequence
  Synthetic
uuuucuaauuagggaau

SEQ ID NO: 764214 - RNA, 17 nt, Artificial Sequence
  Synthetic
ugcaauuacccgggaau

SEQ ID NO: 764215 - RNA, 17 nt, Artificial Sequence
  Synthetic
uuauaauacaggggaau

SEQ ID NO: 764216 - RNA, 17 nt, Artificial Sequence
  Synthetic
cuaucacguaggggaau

SEQ ID NO: 764217 - RNA, 17 nt, Artificial Sequence
  Synthetic
cuggcuguugggggaau

SEQ ID NO: 764218 - RNA, 17 nt, Artificial Sequence
  Synthetic
agaagacaauggggaau

SEQ ID NO: 764219 - RNA, 17 nt, Artificial Sequence
  Synthetic
uccuuguaauggggaau

SEQ ID NO: 764220 - RNA, 17 nt, Artificial Sequence
  Synthetic
agguuuggagugggaau

SEQ ID NO: 764221 - RNA, 17 nt, Artificial Sequence
  Synthetic
uuuugcauguugggaau

SEQ ID NO: 764222 - RNA, 17 nt, Artificial Sequence
  Synthetic
aaauuaaauuugggaau

SEQ ID NO: 764223 - RNA, 17 nt, Artificial Sequence
  Synthetic
ucucuaauaaauggaau

SEQ ID NO: 764224 - RNA, 17 nt, Artificial Sequence
  Synthetic
aagcccguaaauggaau

SEQ ID NO: 764225 - RNA, 17 nt, Artificial Sequence
  Synthetic
auugcaaagaauggaau

SEQ ID NO: 764226 - RNA, 17 nt, Artificial Sequence
  Synthetic
aacaguggccauggaau

SEQ ID NO: 764227 - RNA, 17 nt, Artificial Sequence
  Synthetic
cucucaaggcauggaau

SEQ ID NO: 764228 - RNA, 17 nt, Artificial Sequence
  Synthetic
uuuuauuccuauggaau

SEQ ID NO: 764229 - RNA, 17 nt, Artificial Sequence
  Synthetic
uuucucccaucuggaau

SEQ ID NO: 764230 - RNA, 17 nt, Artificial Sequence
  Synthetic
caagugagaucuggaau

SEQ ID NO: 764231 - RNA, 17 nt, Artificial Sequence
  Synthetic
cagaucuacaguggaau

SEQ ID NO: 764232 - RNA, 17 nt, Artificial Sequence
  Synthetic
aggacugaagguggaau

SEQ ID NO: 764233 - RNA, 17 nt, Artificial Sequence
  Synthetic
aucuccguggguggaau

SEQ ID NO: 764234 - RNA, 17 nt, Artificial Sequence
  Synthetic
aggauauuaauuggaau

SEQ ID NO: 764235 - RNA, 17 nt, Artificial Sequence
  Synthetic
uuuuuacuuauuggaau

SEQ ID NO: 764236 - RNA, 17 nt, Artificial Sequence
  Synthetic
uuugaaaauguuggaau

SEQ ID NO: 764237 - RNA, 17 nt, Artificial Sequence
  Synthetic
aagauaugguuuggaau

SEQ ID NO: 764238 - RNA, 17 nt, Artificial Sequence
  Synthetic
ccuaaauauuuuggaau

SEQ ID NO: 764239 - RNA, 17 nt, Artificial Sequence
  Synthetic
ccacuugcaaaaugaau

SEQ ID NO: 764240 - RNA, 17 nt, Artificial Sequence
  Synthetic
acaaugaauaaaugaau

SEQ ID NO: 764241 - RNA, 17 nt, Artificial Sequence
  Synthetic
caaaaauuccaaugaau

SEQ ID NO: 764242 - RNA, 17 nt, Artificial Sequence
  Synthetic
ugguuaggagaaugaau

SEQ ID NO: 764243 - RNA, 17 nt, Artificial Sequence
  Synthetic
aagacaaaugaaugaau

SEQ ID NO: 764244 - RNA, 17 nt, Artificial Sequence
  Synthetic
ucacaaguugaaugaau

SEQ ID NO: 764245 - RNA, 17 nt, Artificial Sequence
  Synthetic
caaaagcacccaugaau

SEQ ID NO: 764246 - RNA, 17 nt, Artificial Sequence
  Synthetic
aacuuagccccaugaau

SEQ ID NO: 764247 - RNA, 17 nt, Artificial Sequence
  Synthetic
auauccucuccaugaau

SEQ ID NO: 764248 - RNA, 17 nt, Artificial Sequence
  Synthetic
auggaaagcucaugaau

SEQ ID NO: 764249 - RNA, 17 nt, Artificial Sequence
  Synthetic
auuuauacuucaugaau

SEQ ID NO: 764250 - RNA, 17 nt, Artificial Sequence
  Synthetic
auuccauguucaugaau

SEQ ID NO: 764251 - RNA, 17 nt, Artificial Sequence
  Synthetic
uaaaaagaaagaugaau

SEQ ID NO: 764252 - RNA, 17 nt, Artificial Sequence
  Synthetic
cuaacuuuaagaugaau

SEQ ID NO: 764253 - RNA, 17 nt, Artificial Sequence
  Synthetic
acuggagagggaugaau

SEQ ID NO: 764254 - RNA, 17 nt, Artificial Sequence
  Synthetic
aaagacaugggaugaau

SEQ ID NO: 764255 - RNA, 17 nt, Artificial Sequence
  Synthetic
aggauuucuggaugaau

SEQ ID NO: 764256 - RNA, 17 nt, Artificial Sequence
  Synthetic
cagguuugcugaugaau

SEQ ID NO: 764257 - RNA, 17 nt, Artificial Sequence
  Synthetic
uauacaaugugaugaau

SEQ ID NO: 764258 - RNA, 17 nt, Artificial Sequence
  Synthetic
uaauccuuuugaugaau

SEQ ID NO: 764259 - RNA, 17 nt, Artificial Sequence
  Synthetic
aaugaguuuugaugaau

SEQ ID NO: 764260 - RNA, 17 nt, Artificial Sequence
  Synthetic
aagaaaaaaauaugaau

SEQ ID NO: 764261 - RNA, 17 nt, Artificial Sequence
  Synthetic
aacuucaacauaugaau

SEQ ID NO: 764262 - RNA, 17 nt, Artificial Sequence
  Synthetic
aaauggaggguaugaau

SEQ ID NO: 764263 - RNA, 17 nt, Artificial Sequence
  Synthetic
uuuugaauacacugaau

SEQ ID NO: 764264 - RNA, 17 nt, Artificial Sequence
  Synthetic
uugaaugaauacugaau

SEQ ID NO: 764265 - RNA, 17 nt, Artificial Sequence
  Synthetic
ccaauaucauacugaau

SEQ ID NO: 764266 - RNA, 17 nt, Artificial Sequence
  Synthetic
ccaguaucauacugaau

SEQ ID NO: 764267 - RNA, 17 nt, Artificial Sequence
  Synthetic
ccauuaucauacugaau

SEQ ID NO: 764268 - RNA, 17 nt, Artificial Sequence
  Synthetic
agcaccauuuacugaau

SEQ ID NO: 764269 - RNA, 17 nt, Artificial Sequence
  Synthetic
caccauugucccugaau

SEQ ID NO: 764270 - RNA, 17 nt, Artificial Sequence
  Synthetic
ccuggacuagccugaau

SEQ ID NO: 764271 - RNA, 17 nt, Artificial Sequence
  Synthetic
ugcaggauuuccugaau

SEQ ID NO: 764272 - RNA, 17 nt, Artificial Sequence
  Synthetic
ucuucacaaagcugaau

SEQ ID NO: 764273 - RNA, 17 nt, Artificial Sequence
  Synthetic
uggcaagauggcugaau

SEQ ID NO: 764274 - RNA, 17 nt, Artificial Sequence
  Synthetic
ucaguuucuggcugaau

SEQ ID NO: 764275 - RNA, 17 nt, Artificial Sequence
  Synthetic
ugaauacuuggcugaau

SEQ ID NO: 764276 - RNA, 17 nt, Artificial Sequence
  Synthetic
ucucuugcuugcugaau

SEQ ID NO: 764277 - RNA, 17 nt, Artificial Sequence
  Synthetic
aagaguaggaucugaau

SEQ ID NO: 764278 - RNA, 17 nt, Artificial Sequence
  Synthetic
uaaggucauaucugaau

SEQ ID NO: 764279 - RNA, 17 nt, Artificial Sequence
  Synthetic
uauagauuccucugaau

SEQ ID NO: 764280 - RNA, 17 nt, Artificial Sequence
  Synthetic
aaaaguugucucugaau

SEQ ID NO: 764281 - RNA, 17 nt, Artificial Sequence
  Synthetic
agacaaaugaagugaau

SEQ ID NO: 764282 - RNA, 17 nt, Artificial Sequence
  Synthetic
agaaaaagacagugaau

SEQ ID NO: 764283 - RNA, 17 nt, Artificial Sequence
  Synthetic
acaaccucccagugaau

SEQ ID NO: 764284 - RNA, 17 nt, Artificial Sequence
  Synthetic
aaaaaucuccagugaau

SEQ ID NO: 764285 - RNA, 17 nt, Artificial Sequence
  Synthetic
uggugaaagcagugaau

SEQ ID NO: 764286 - RNA, 17 nt, Artificial Sequence
  Synthetic
agagagaaagagugaau

SEQ ID NO: 764287 - RNA, 17 nt, Artificial Sequence
  Synthetic
uuacuaagugagugaau

SEQ ID NO: 764288 - RNA, 17 nt, Artificial Sequence
  Synthetic
aucuccagcaggugaau

SEQ ID NO: 764289 - RNA, 17 nt, Artificial Sequence
  Synthetic
cacacagaggggugaau

SEQ ID NO: 764290 - RNA, 17 nt, Artificial Sequence
  Synthetic
auaaaaauugggugaau

SEQ ID NO: 764291 - RNA, 17 nt, Artificial Sequence
  Synthetic
uuaaucuuugggugaau

SEQ ID NO: 764292 - RNA, 17 nt, Artificial Sequence
  Synthetic
uuggauuauaugugaau

SEQ ID NO: 764293 - RNA, 17 nt, Artificial Sequence
  Synthetic
aaaauaauuaugugaau

SEQ ID NO: 764294 - RNA, 17 nt, Artificial Sequence
  Synthetic
acagaaaugcugugaau

SEQ ID NO: 764295 - RNA, 17 nt, Artificial Sequence
  Synthetic
auuucuguucugugaau

SEQ ID NO: 764296 - RNA, 17 nt, Artificial Sequence
  Synthetic
uugaagcaauugugaau

SEQ ID NO: 764297 - RNA, 17 nt, Artificial Sequence
  Synthetic
uuguagcaauugugaau

SEQ ID NO: 764298 - RNA, 17 nt, Artificial Sequence
  Synthetic
auguaaauuuugugaau

SEQ ID NO: 764299 - RNA, 17 nt, Artificial Sequence
  Synthetic
ccuaauauuuugugaau

SEQ ID NO: 764300 - RNA, 17 nt, Artificial Sequence
  Synthetic
auaacaagaaauugaau

SEQ ID NO: 764301 - RNA, 17 nt, Artificial Sequence
  Synthetic
uauauucguaauugaau

SEQ ID NO: 764302 - RNA, 17 nt, Artificial Sequence
  Synthetic
uaugcauuccauugaau

SEQ ID NO: 764303 - RNA, 17 nt, Artificial Sequence
  Synthetic
caccagauauauugaau

SEQ ID NO: 764304 - RNA, 17 nt, Artificial Sequence
  Synthetic
aaagaaugguauugaau

SEQ ID NO: 764305 - RNA, 17 nt, Artificial Sequence
  Synthetic
caauagauguauugaau

SEQ ID NO: 764306 - RNA, 17 nt, Artificial Sequence
  Synthetic
uucuuuaauuauugaau

SEQ ID NO: 764307 - RNA, 17 nt, Artificial Sequence
  Synthetic
uuaaaauagacuugaau

SEQ ID NO: 764308 - RNA, 17 nt, Artificial Sequence
  Synthetic
agaguuauuacuugaau

SEQ ID NO: 764309 - RNA, 17 nt, Artificial Sequence
  Synthetic
uguuuuguuacuugaau

SEQ ID NO: 764310 - RNA, 17 nt, Artificial Sequence
  Synthetic
uuaaaauucccuugaau

SEQ ID NO: 764311 - RNA, 17 nt, Artificial Sequence
  Synthetic
auauauuuuccuugaau

SEQ ID NO: 764312 - RNA, 17 nt, Artificial Sequence
  Synthetic
ccaaggcaaucuugaau

SEQ ID NO: 764313 - RNA, 17 nt, Artificial Sequence
  Synthetic
acaacuccaucuugaau

SEQ ID NO: 764314 - RNA, 17 nt, Artificial Sequence
  Synthetic
cuguuguuaaguugaau

SEQ ID NO: 764315 - RNA, 17 nt, Artificial Sequence
  Synthetic
ucugcgcccaguugaau

SEQ ID NO: 764316 - RNA, 17 nt, Artificial Sequence
  Synthetic
aaaacacaagguugaau

SEQ ID NO: 764317 - RNA, 17 nt, Artificial Sequence
  Synthetic
ccaacacuauguugaau

SEQ ID NO: 764318 - RNA, 17 nt, Artificial Sequence
  Synthetic
ccaauacuauguugaau

SEQ ID NO: 764319 - RNA, 17 nt, Artificial Sequence
  Synthetic
uuaaaaaacuguugaau

SEQ ID NO: 764320 - RNA, 17 nt, Artificial Sequence
  Synthetic
auauugaauuguugaau

SEQ ID NO: 764321 - RNA, 17 nt, Artificial Sequence
  Synthetic
acucaugcuuguugaau

SEQ ID NO: 764322 - RNA, 17 nt, Artificial Sequence
  Synthetic
aaaacacgcauuugaau

SEQ ID NO: 764323 - RNA, 17 nt, Artificial Sequence
  Synthetic
uguaaaggcauuugaau

SEQ ID NO: 764324 - RNA, 17 nt, Artificial Sequence
  Synthetic
ucaaaacauauuugaau

SEQ ID NO: 764325 - RNA, 17 nt, Artificial Sequence
  Synthetic
caacuacugcuuugaau

SEQ ID NO: 764326 - RNA, 17 nt, Artificial Sequence
  Synthetic
cuacauauucuuugaau

SEQ ID NO: 764327 - RNA, 17 nt, Artificial Sequence
  Synthetic
uugauaaaaguuugaau

SEQ ID NO: 764328 - RNA, 17 nt, Artificial Sequence
  Synthetic
ccuugaaacuuuugaau

SEQ ID NO: 764329 - RNA, 17 nt, Artificial Sequence
  Synthetic
acucugcacuuuugaau

SEQ ID NO: 764330 - RNA, 17 nt, Artificial Sequence
  Synthetic
caucaacaguuuugaau

SEQ ID NO: 764331 - RNA, 17 nt, Artificial Sequence
  Synthetic
ugugcauaguuuugaau

SEQ ID NO: 764332 - RNA, 17 nt, Artificial Sequence
  Synthetic
uuuguagauuuuugaau

SEQ ID NO: 764333 - RNA, 17 nt, Artificial Sequence
  Synthetic
acuuuugaaaaaauaau

SEQ ID NO: 764334 - RNA, 17 nt, Artificial Sequence
  Synthetic
ucugcaugaaaaauaau

SEQ ID NO: 764335 - RNA, 17 nt, Artificial Sequence
  Synthetic
ucaacaauaaaaauaau

SEQ ID NO: 764336 - RNA, 17 nt, Artificial Sequence
  Synthetic
cuggguaacaaaauaau

SEQ ID NO: 764337 - RNA, 17 nt, Artificial Sequence
  Synthetic
ugaauuaucaaaauaau

SEQ ID NO: 764338 - RNA, 17 nt, Artificial Sequence
  Synthetic
cggcuagugaaaauaau

SEQ ID NO: 764339 - RNA, 17 nt, Artificial Sequence
  Synthetic
uaguaaaauaaaauaau

SEQ ID NO: 764340 - RNA, 17 nt, Artificial Sequence
  Synthetic
uaagaaaguaaaauaau

SEQ ID NO: 764341 - RNA, 17 nt, Artificial Sequence
  Synthetic
aaguauauuaaaauaau

SEQ ID NO: 764342 - RNA, 17 nt, Artificial Sequence
  Synthetic
auuuuaauacaaauaau

SEQ ID NO: 764343 - RNA, 17 nt, Artificial Sequence
  Synthetic
uaacuugaucaaauaau

SEQ ID NO: 764344 - RNA, 17 nt, Artificial Sequence
  Synthetic
acaaacaaagaaauaau

SEQ ID NO: 764345 - RNA, 17 nt, Artificial Sequence
  Synthetic
uaauguaaagaaauaau

SEQ ID NO: 764346 - RNA, 17 nt, Artificial Sequence
  Synthetic
auuauuuaagaaauaau

SEQ ID NO: 764347 - RNA, 17 nt, Artificial Sequence
  Synthetic
agcaagggagaaauaau

SEQ ID NO: 764348 - RNA, 17 nt, Artificial Sequence
  Synthetic
uuacaaaaggaaauaau

SEQ ID NO: 764349 - RNA, 17 nt, Artificial Sequence
  Synthetic
augaaaauggaaauaau

SEQ ID NO: 764350 - RNA, 17 nt, Artificial Sequence
  Synthetic
aaucauuaugaaauaau

SEQ ID NO: 764351 - RNA, 17 nt, Artificial Sequence
  Synthetic
aaguaacuugaaauaau

SEQ ID NO: 764352 - RNA, 17 nt, Artificial Sequence
  Synthetic
uuucuagcuuaaauaau

SEQ ID NO: 764353 - RNA, 17 nt, Artificial Sequence
  Synthetic
aagggaaguuaaauaau

SEQ ID NO: 764354 - RNA, 17 nt, Artificial Sequence
  Synthetic
cuuauagcuacaauaau

SEQ ID NO: 764355 - RNA, 17 nt, Artificial Sequence
  Synthetic
ucccaaugcccaauaau

SEQ ID NO: 764356 - RNA, 17 nt, Artificial Sequence
  Synthetic
acuagguuaagaauaau

SEQ ID NO: 764357 - RNA, 17 nt, Artificial Sequence
  Synthetic
agccaguaccgaauaau

SEQ ID NO: 764358 - RNA, 17 nt, Artificial Sequence
  Synthetic
aguacuuucugaauaau

SEQ ID NO: 764359 - RNA, 17 nt, Artificial Sequence
  Synthetic
cgugccucuugaauaau

SEQ ID NO: 764360 - RNA, 17 nt, Artificial Sequence
  Synthetic
caugccuuuugaauaau

SEQ ID NO: 764361 - RNA, 17 nt, Artificial Sequence
  Synthetic
agauuaaaaauaauaau

SEQ ID NO: 764362 - RNA, 17 nt, Artificial Sequence
  Synthetic
aaaaaaauaauaauaau

SEQ ID NO: 764363 - RNA, 17 nt, Artificial Sequence
  Synthetic
ccaagacacauaauaau

SEQ ID NO: 764364 - RNA, 17 nt, Artificial Sequence
  Synthetic
auggcauuacuaauaau

SEQ ID NO: 764365 - RNA, 17 nt, Artificial Sequence
  Synthetic
cuguuggcuguaauaau

SEQ ID NO: 764366 - RNA, 17 nt, Artificial Sequence
  Synthetic
ucccacacauuaauaau

SEQ ID NO: 764367 - RNA, 17 nt, Artificial Sequence
  Synthetic
uugguaugguuaauaau

SEQ ID NO: 764368 - RNA, 17 nt, Artificial Sequence
  Synthetic
uuacaaguguuaauaau

SEQ ID NO: 764369 - RNA, 17 nt, Artificial Sequence
  Synthetic
uucaacacuuuaauaau

SEQ ID NO: 764370 - RNA, 17 nt, Artificial Sequence
  Synthetic
uucuuuuaaaacauaau

SEQ ID NO: 764371 - RNA, 17 nt, Artificial Sequence
  Synthetic
ccaauuaagaacauaau

SEQ ID NO: 764372 - RNA, 17 nt, Artificial Sequence
  Synthetic
uaucgcuagaacauaau

SEQ ID NO: 764373 - RNA, 17 nt, Artificial Sequence
  Synthetic
agugcuuggaacauaau

SEQ ID NO: 764374 - RNA, 17 nt, Artificial Sequence
  Synthetic
aaagagauacacauaau

SEQ ID NO: 764375 - RNA, 17 nt, Artificial Sequence
  Synthetic
aaaauugaccacauaau

SEQ ID NO: 764376 - RNA, 17 nt, Artificial Sequence
  Synthetic
cccaucauccacauaau

SEQ ID NO: 764377 - RNA, 17 nt, Artificial Sequence
  Synthetic
uacagcaugcacauaau

SEQ ID NO: 764378 - RNA, 17 nt, Artificial Sequence
  Synthetic
aauuuacgagacauaau

SEQ ID NO: 764379 - RNA, 17 nt, Artificial Sequence
  Synthetic
agaaauucugacauaau

SEQ ID NO: 764380 - RNA, 17 nt, Artificial Sequence
  Synthetic
auuguaugauacauaau

SEQ ID NO: 764381 - RNA, 17 nt, Artificial Sequence
  Synthetic
caagcaaccuacauaau

SEQ ID NO: 764382 - RNA, 17 nt, Artificial Sequence
  Synthetic
uuaucuuccuacauaau

SEQ ID NO: 764383 - RNA, 17 nt, Artificial Sequence
  Synthetic
uccucuagguacauaau

SEQ ID NO: 764384 - RNA, 17 nt, Artificial Sequence
  Synthetic
uuagugauuuacauaau

SEQ ID NO: 764385 - RNA, 17 nt, Artificial Sequence
  Synthetic
uguaagcacaccauaau

SEQ ID NO: 764386 - RNA, 17 nt, Artificial Sequence
  Synthetic
ugcaguagcagcauaau

SEQ ID NO: 764387 - RNA, 17 nt, Artificial Sequence
  Synthetic
cagggguugagcauaau

SEQ ID NO: 764388 - RNA, 17 nt, Artificial Sequence
  Synthetic
auuuucucacucauaau

SEQ ID NO: 764389 - RNA, 17 nt, Artificial Sequence
  Synthetic
auccauuaccucauaau

SEQ ID NO: 764390 - RNA, 17 nt, Artificial Sequence
  Synthetic
uugagaggugucauaau

SEQ ID NO: 764391 - RNA, 17 nt, Artificial Sequence
  Synthetic
aauacauuugucauaau

SEQ ID NO: 764392 - RNA, 17 nt, Artificial Sequence
  Synthetic
auuuuauguuucauaau

SEQ ID NO: 764393 - RNA, 17 nt, Artificial Sequence
  Synthetic
cagaauauaaagauaau

SEQ ID NO: 764394 - RNA, 17 nt, Artificial Sequence
  Synthetic
uccaggcccaagauaau

SEQ ID NO: 764395 - RNA, 17 nt, Artificial Sequence
  Synthetic
aaaacauucaagauaau

SEQ ID NO: 764396 - RNA, 17 nt, Artificial Sequence
  Synthetic
ucccuuaagaagauaau

SEQ ID NO: 764397 - RNA, 17 nt, Artificial Sequence
  Synthetic
uauaaaaugaagauaau

SEQ ID NO: 764398 - RNA, 17 nt, Artificial Sequence
  Synthetic
aucugagauuagauaau

SEQ ID NO: 764399 - RNA, 17 nt, Artificial Sequence
  Synthetic
cuaauaugaaggauaau

SEQ ID NO: 764400 - RNA, 17 nt, Artificial Sequence
  Synthetic
uucuccuucaggauaau

SEQ ID NO: 764401 - RNA, 17 nt, Artificial Sequence
  Synthetic
cauggccuacggauaau

SEQ ID NO: 764402 - RNA, 17 nt, Artificial Sequence
  Synthetic
auguucucacugauaau

SEQ ID NO: 764403 - RNA, 17 nt, Artificial Sequence
  Synthetic
uacaauguacugauaau

SEQ ID NO: 764404 - RNA, 17 nt, Artificial Sequence
  Synthetic
uuauuucuucugauaau

SEQ ID NO: 764405 - RNA, 17 nt, Artificial Sequence
  Synthetic
uaucuagaugugauaau

SEQ ID NO: 764406 - RNA, 17 nt, Artificial Sequence
  Synthetic
cccacaucauugauaau

SEQ ID NO: 764407 - RNA, 17 nt, Artificial Sequence
  Synthetic
uauuauucauugauaau

SEQ ID NO: 764408 - RNA, 17 nt, Artificial Sequence
  Synthetic
auuuguugguugauaau

SEQ ID NO: 764409 - RNA, 17 nt, Artificial Sequence
  Synthetic
uuugaguuuuugauaau

SEQ ID NO: 764410 - RNA, 17 nt, Artificial Sequence
  Synthetic
uuucucuaaaauauaau

SEQ ID NO: 764411 - RNA, 17 nt, Artificial Sequence
  Synthetic
uuucccuagaauauaau

SEQ ID NO: 764412 - RNA, 17 nt, Artificial Sequence
  Synthetic
agaagagcuaauauaau

SEQ ID NO: 764413 - RNA, 17 nt, Artificial Sequence
  Synthetic
auauauggacauauaau

SEQ ID NO: 764414 - RNA, 17 nt, Artificial Sequence
  Synthetic
auucccuggcauauaau

SEQ ID NO: 764415 - RNA, 17 nt, Artificial Sequence
  Synthetic
auaaggacugauauaau

SEQ ID NO: 764416 - RNA, 17 nt, Artificial Sequence
  Synthetic
aguccugcugauauaau

SEQ ID NO: 764417 - RNA, 17 nt, Artificial Sequence
  Synthetic
agagugggugauauaau

SEQ ID NO: 764418 - RNA, 17 nt, Artificial Sequence
  Synthetic
cacaaaacauauauaau

SEQ ID NO: 764419 - RNA, 17 nt, Artificial Sequence
  Synthetic
uuccauucauauauaau

SEQ ID NO: 764420 - RNA, 17 nt, Artificial Sequence
  Synthetic
uagaucuuuuauauaau

SEQ ID NO: 764421 - RNA, 17 nt, Artificial Sequence
  Synthetic
aaaucucugccuauaau

SEQ ID NO: 764422 - RNA, 17 nt, Artificial Sequence
  Synthetic
aauuaaaagaguauaau

SEQ ID NO: 764423 - RNA, 17 nt, Artificial Sequence
  Synthetic
auaaauaagaguauaau

SEQ ID NO: 764424 - RNA, 17 nt, Artificial Sequence
  Synthetic
caaaacuuuaguauaau

SEQ ID NO: 764425 - RNA, 17 nt, Artificial Sequence
  Synthetic
ucuccuagauguauaau

SEQ ID NO: 764426 - RNA, 17 nt, Artificial Sequence
  Synthetic
ugggccauauguauaau

SEQ ID NO: 764427 - RNA, 17 nt, Artificial Sequence
  Synthetic
cuugcaaaguguauaau

SEQ ID NO: 764428 - RNA, 17 nt, Artificial Sequence
  Synthetic
aaguauacuuguauaau

SEQ ID NO: 764429 - RNA, 17 nt, Artificial Sequence
  Synthetic
aaauuauaaauuauaau

SEQ ID NO: 764430 - RNA, 17 nt, Artificial Sequence
  Synthetic
uccuggacaauuauaau

SEQ ID NO: 764431 - RNA, 17 nt, Artificial Sequence
  Synthetic
ugaaaugcaauuauaau

SEQ ID NO: 764432 - RNA, 17 nt, Artificial Sequence
  Synthetic
ucuagaaacauuauaau

SEQ ID NO: 764433 - RNA, 17 nt, Artificial Sequence
  Synthetic
aauaguuucauuauaau

SEQ ID NO: 764434 - RNA, 17 nt, Artificial Sequence
  Synthetic
ucagccaguauuauaau

SEQ ID NO: 764435 - RNA, 17 nt, Artificial Sequence
  Synthetic
ucaagugaguuuauaau

SEQ ID NO: 764436 - RNA, 17 nt, Artificial Sequence
  Synthetic
aagacaauuuuuauaau

SEQ ID NO: 764437 - RNA, 17 nt, Artificial Sequence
  Synthetic
uauuuauuaaaacuaau

SEQ ID NO: 764438 - RNA, 17 nt, Artificial Sequence
  Synthetic
cagaaaaaauaacuaau

SEQ ID NO: 764439 - RNA, 17 nt, Artificial Sequence
  Synthetic
cauuuuuuuuaacuaau

SEQ ID NO: 764440 - RNA, 17 nt, Artificial Sequence
  Synthetic
auuuaucauacacuaau

SEQ ID NO: 764441 - RNA, 17 nt, Artificial Sequence
  Synthetic
uuaaaaaaaucacuaau

SEQ ID NO: 764442 - RNA, 17 nt, Artificial Sequence
  Synthetic
acuaaaggcucacuaau

SEQ ID NO: 764443 - RNA, 17 nt, Artificial Sequence
  Synthetic
cauuacugcucacuaau

SEQ ID NO: 764444 - RNA, 17 nt, Artificial Sequence
  Synthetic
uggcacucaagacuaau

SEQ ID NO: 764445 - RNA, 17 nt, Artificial Sequence
  Synthetic
caugccuagggacuaau

SEQ ID NO: 764446 - RNA, 17 nt, Artificial Sequence
  Synthetic
uguguauuuggacuaau

SEQ ID NO: 764447 - RNA, 17 nt, Artificial Sequence
  Synthetic
ugcacuaggauacuaau

SEQ ID NO: 764448 - RNA, 17 nt, Artificial Sequence
  Synthetic
aaaacguaacuacuaau

SEQ ID NO: 764449 - RNA, 17 nt, Artificial Sequence
  Synthetic
aggcauguacuacuaau

SEQ ID NO: 764450 - RNA, 17 nt, Artificial Sequence
  Synthetic
auuuucuuacuacuaau

SEQ ID NO: 764451 - RNA, 17 nt, Artificial Sequence
  Synthetic
ugcaauagccuacuaau

SEQ ID NO: 764452 - RNA, 17 nt, Artificial Sequence
  Synthetic
uuaaguauucuacuaau

SEQ ID NO: 764453 - RNA, 17 nt, Artificial Sequence
  Synthetic
augaugcaauuacuaau

SEQ ID NO: 764454 - RNA, 17 nt, Artificial Sequence
  Synthetic
ucacaacaguuacuaau

SEQ ID NO: 764455 - RNA, 17 nt, Artificial Sequence
  Synthetic
acuaugaauaaccuaau

SEQ ID NO: 764456 - RNA, 17 nt, Artificial Sequence
  Synthetic
ugaaggcagcaccuaau

SEQ ID NO: 764457 - RNA, 17 nt, Artificial Sequence
  Synthetic
ucauugaaagaccuaau

SEQ ID NO: 764458 - RNA, 17 nt, Artificial Sequence
  Synthetic
auuuaauaagaccuaau

SEQ ID NO: 764459 - RNA, 17 nt, Artificial Sequence
  Synthetic
auuaauaaugaccuaau

SEQ ID NO: 764460 - RNA, 17 nt, Artificial Sequence
  Synthetic
uaaaagcaauaccuaau

SEQ ID NO: 764461 - RNA, 17 nt, Artificial Sequence
  Synthetic
cuaacuuuguaccuaau

SEQ ID NO: 764462 - RNA, 17 nt, Artificial Sequence
  Synthetic
acauauccuacccuaau

SEQ ID NO: 764463 - RNA, 17 nt, Artificial Sequence
  Synthetic
auauuggccucccuaau

SEQ ID NO: 764464 - RNA, 17 nt, Artificial Sequence
  Synthetic
aucuuauguagccuaau

SEQ ID NO: 764465 - RNA, 17 nt, Artificial Sequence
  Synthetic
ucuggcuaauuccuaau

SEQ ID NO: 764466 - RNA, 17 nt, Artificial Sequence
  Synthetic
agguugaaaaagcuaau

SEQ ID NO: 764467 - RNA, 17 nt, Artificial Sequence
  Synthetic
aagaauuugcagcuaau

SEQ ID NO: 764468 - RNA, 17 nt, Artificial Sequence
  Synthetic
auuuucagucagcuaau

SEQ ID NO: 764469 - RNA, 17 nt, Artificial Sequence
  Synthetic
ugcaauuuucagcuaau

SEQ ID NO: 764470 - RNA, 17 nt, Artificial Sequence
  Synthetic
cuaaaugaugagcuaau

SEQ ID NO: 764471 - RNA, 17 nt, Artificial Sequence
  Synthetic
agggggggauggcuaau

SEQ ID NO: 764472 - RNA, 17 nt, Artificial Sequence
  Synthetic
agcguuguauggcuaau

SEQ ID NO: 764473 - RNA, 17 nt, Artificial Sequence
  Synthetic
cacagugucuggcuaau

SEQ ID NO: 764474 - RNA, 17 nt, Artificial Sequence
  Synthetic
aagaaggcaaugcuaau

SEQ ID NO: 764475 - RNA, 17 nt, Artificial Sequence
  Synthetic
cugugcuggcugcuaau

SEQ ID NO: 764476 - RNA, 17 nt, Artificial Sequence
  Synthetic
aaagaauugcugcuaau

SEQ ID NO: 764477 - RNA, 17 nt, Artificial Sequence
  Synthetic
caauacuacuugcuaau

SEQ ID NO: 764478 - RNA, 17 nt, Artificial Sequence
  Synthetic
uuagucauguugcuaau

SEQ ID NO: 764479 - RNA, 17 nt, Artificial Sequence
  Synthetic
ucaguaauuuugcuaau

SEQ ID NO: 764480 - RNA, 17 nt, Artificial Sequence
  Synthetic
uacuauuggcaucuaau

SEQ ID NO: 764481 - RNA, 17 nt, Artificial Sequence
  Synthetic
uuuuucugucaucuaau

SEQ ID NO: 764482 - RNA, 17 nt, Artificial Sequence
  Synthetic
agggcgacagaucuaau

SEQ ID NO: 764483 - RNA, 17 nt, Artificial Sequence
  Synthetic
ugcaaaaaugaucuaau

SEQ ID NO: 764484 - RNA, 17 nt, Artificial Sequence
  Synthetic
uacacuggugaucuaau

SEQ ID NO: 764485 - RNA, 17 nt, Artificial Sequence
  Synthetic
aauaauggaacucuaau

SEQ ID NO: 764486 - RNA, 17 nt, Artificial Sequence
  Synthetic
uuguuuccuccucuaau

SEQ ID NO: 764487 - RNA, 17 nt, Artificial Sequence
  Synthetic
agucuuacaagucuaau

SEQ ID NO: 764488 - RNA, 17 nt, Artificial Sequence
  Synthetic
uaaguugucagucuaau

SEQ ID NO: 764489 - RNA, 17 nt, Artificial Sequence
  Synthetic
cuauuuuucugucuaau

SEQ ID NO: 764490 - RNA, 17 nt, Artificial Sequence
  Synthetic
cauguacuuugucuaau

SEQ ID NO: 764491 - RNA, 17 nt, Artificial Sequence
  Synthetic
cauucuuccauucuaau

SEQ ID NO: 764492 - RNA, 17 nt, Artificial Sequence
  Synthetic
uuucagaucauucuaau

SEQ ID NO: 764493 - RNA, 17 nt, Artificial Sequence
  Synthetic
cuguaacuucuucuaau

SEQ ID NO: 764494 - RNA, 17 nt, Artificial Sequence
  Synthetic
uuaauuagaaaaguaau

SEQ ID NO: 764495 - RNA, 17 nt, Artificial Sequence
  Synthetic
cacaauagcaaaguaau

SEQ ID NO: 764496 - RNA, 17 nt, Artificial Sequence
  Synthetic
aaacaguagaaaguaau

SEQ ID NO: 764497 - RNA, 17 nt, Artificial Sequence
  Synthetic
ccccugaauaaaguaau

SEQ ID NO: 764498 - RNA, 17 nt, Artificial Sequence
  Synthetic
cuuacacuucaaguaau

SEQ ID NO: 764499 - RNA, 17 nt, Artificial Sequence
  Synthetic
uuaugaaaauaaguaau

SEQ ID NO: 764500 - RNA, 17 nt, Artificial Sequence
  Synthetic
cccucacucuaaguaau

SEQ ID NO: 764501 - RNA, 17 nt, Artificial Sequence
  Synthetic
cacaacacguaaguaau

SEQ ID NO: 764502 - RNA, 17 nt, Artificial Sequence
  Synthetic
uuauuuaauacaguaau

SEQ ID NO: 764503 - RNA, 17 nt, Artificial Sequence
  Synthetic
ccaaaccaugcaguaau

SEQ ID NO: 764504 - RNA, 17 nt, Artificial Sequence
  Synthetic
cuaggaggaucaguaau

SEQ ID NO: 764505 - RNA, 17 nt, Artificial Sequence
  Synthetic
agugccuagucaguaau

SEQ ID NO: 764506 - RNA, 17 nt, Artificial Sequence
  Synthetic
acuaaauauucaguaau

SEQ ID NO: 764507 - RNA, 17 nt, Artificial Sequence
  Synthetic
uucauuuaaagaguaau

SEQ ID NO: 764508 - RNA, 17 nt, Artificial Sequence
  Synthetic
agucaauguagaguaau

SEQ ID NO: 764509 - RNA, 17 nt, Artificial Sequence
  Synthetic
acugcauagggaguaau

SEQ ID NO: 764510 - RNA, 17 nt, Artificial Sequence
  Synthetic
uuaagaaguggaguaau

SEQ ID NO: 764511 - RNA, 17 nt, Artificial Sequence
  Synthetic
aggaguuacugaguaau

SEQ ID NO: 764512 - RNA, 17 nt, Artificial Sequence
  Synthetic
uuugaguagauaguaau

SEQ ID NO: 764513 - RNA, 17 nt, Artificial Sequence
  Synthetic
auuauccauauaguaau

SEQ ID NO: 764514 - RNA, 17 nt, Artificial Sequence
  Synthetic
agaacacagguaguaau

SEQ ID NO: 764515 - RNA, 17 nt, Artificial Sequence
  Synthetic
cauccuuauuuaguaau

SEQ ID NO: 764516 - RNA, 17 nt, Artificial Sequence
  Synthetic
aaugaggcagccguaau

SEQ ID NO: 764517 - RNA, 17 nt, Artificial Sequence
  Synthetic
cuaaguaguuucguaau

SEQ ID NO: 764518 - RNA, 17 nt, Artificial Sequence
  Synthetic
auucauucccagguaau

SEQ ID NO: 764519 - RNA, 17 nt, Artificial Sequence
  Synthetic
ugacaucacuagguaau

SEQ ID NO: 764520 - RNA, 17 nt, Artificial Sequence
  Synthetic
uguauuaauuagguaau

SEQ ID NO: 764521 - RNA, 17 nt, Artificial Sequence
  Synthetic
uagaaggacacgguaau

SEQ ID NO: 764522 - RNA, 17 nt, Artificial Sequence
  Synthetic
cuuuagaacuggguaau

SEQ ID NO: 764523 - RNA, 17 nt, Artificial Sequence
  Synthetic
agggcugcccugguaau

SEQ ID NO: 764524 - RNA, 17 nt, Artificial Sequence
  Synthetic
uuaauuucugugguaau

SEQ ID NO: 764525 - RNA, 17 nt, Artificial Sequence
  Synthetic
agugagagauugguaau

SEQ ID NO: 764526 - RNA, 17 nt, Artificial Sequence
  Synthetic
uaaugaauuuugguaau

SEQ ID NO: 764527 - RNA, 17 nt, Artificial Sequence
  Synthetic
uuuguacuaaauguaau

SEQ ID NO: 764528 - RNA, 17 nt, Artificial Sequence
  Synthetic
aaauuucuaaauguaau

SEQ ID NO: 764529 - RNA, 17 nt, Artificial Sequence
  Synthetic
agagaaauuaauguaau

SEQ ID NO: 764530 - RNA, 17 nt, Artificial Sequence
  Synthetic
acgaaagaacauguaau

SEQ ID NO: 764531 - RNA, 17 nt, Artificial Sequence
  Synthetic
accaacacacauguaau

SEQ ID NO: 764532 - RNA, 17 nt, Artificial Sequence
  Synthetic
uaaaacuuccauguaau

SEQ ID NO: 764533 - RNA, 17 nt, Artificial Sequence
  Synthetic
acuguggucacuguaau

SEQ ID NO: 764534 - RNA, 17 nt, Artificial Sequence
  Synthetic
auugcacguccuguaau

SEQ ID NO: 764535 - RNA, 17 nt, Artificial Sequence
  Synthetic
uauaacagaucuguaau

SEQ ID NO: 764536 - RNA, 17 nt, Artificial Sequence
  Synthetic
caagaguuaucuguaau

SEQ ID NO: 764537 - RNA, 17 nt, Artificial Sequence
  Synthetic
aacaaugccucuguaau

SEQ ID NO: 764538 - RNA, 17 nt, Artificial Sequence
  Synthetic
uuccaucauucuguaau

SEQ ID NO: 764539 - RNA, 17 nt, Artificial Sequence
  Synthetic
auuuuuucuucuguaau

SEQ ID NO: 764540 - RNA, 17 nt, Artificial Sequence
  Synthetic
acagaaaacaguguaau

SEQ ID NO: 764541 - RNA, 17 nt, Artificial Sequence
  Synthetic
auauuuuucaguguaau

SEQ ID NO: 764542 - RNA, 17 nt, Artificial Sequence
  Synthetic
uagagagugaguguaau

SEQ ID NO: 764543 - RNA, 17 nt, Artificial Sequence
  Synthetic
ucacuuaccuguguaau

SEQ ID NO: 764544 - RNA, 17 nt, Artificial Sequence
  Synthetic
ccuuccaaaauuguaau

SEQ ID NO: 764545 - RNA, 17 nt, Artificial Sequence
  Synthetic
agcagaguaauuguaau

SEQ ID NO: 764546 - RNA, 17 nt, Artificial Sequence
  Synthetic
uuuacugcuauuguaau

SEQ ID NO: 764547 - RNA, 17 nt, Artificial Sequence
  Synthetic
ucuaccuuccuuguaau

SEQ ID NO: 764548 - RNA, 17 nt, Artificial Sequence
  Synthetic
caucuguggcuuguaau

SEQ ID NO: 764549 - RNA, 17 nt, Artificial Sequence
  Synthetic
uuucucccauuuguaau

SEQ ID NO: 764550 - RNA, 17 nt, Artificial Sequence
  Synthetic
aaugcuucauuuguaau

SEQ ID NO: 764551 - RNA, 17 nt, Artificial Sequence
  Synthetic
augugauuauuuguaau

SEQ ID NO: 764552 - RNA, 17 nt, Artificial Sequence
  Synthetic
uuuuuaugaaaauuaau

SEQ ID NO: 764553 - RNA, 17 nt, Artificial Sequence
  Synthetic
uccauucauaaauuaau

SEQ ID NO: 764554 - RNA, 17 nt, Artificial Sequence
  Synthetic
cuuguugcuaaauuaau

SEQ ID NO: 764555 - RNA, 17 nt, Artificial Sequence
  Synthetic
acuuaguagcaauuaau

SEQ ID NO: 764556 - RNA, 17 nt, Artificial Sequence
  Synthetic
uaaaauaaugaauuaau

SEQ ID NO: 764557 - RNA, 17 nt, Artificial Sequence
  Synthetic
aaacguauauaauuaau

SEQ ID NO: 764558 - RNA, 17 nt, Artificial Sequence
  Synthetic
auuuucuguuaauuaau

SEQ ID NO: 764559 - RNA, 17 nt, Artificial Sequence
  Synthetic
aucauguuuuaauuaau

SEQ ID NO: 764560 - RNA, 17 nt, Artificial Sequence
  Synthetic
uauauacaaacauuaau

SEQ ID NO: 764561 - RNA, 17 nt, Artificial Sequence
  Synthetic
aggcuguuaacauuaau

SEQ ID NO: 764562 - RNA, 17 nt, Artificial Sequence
  Synthetic
ugacuauggacauuaau

SEQ ID NO: 764563 - RNA, 17 nt, Artificial Sequence
  Synthetic
cuaaagcugacauuaau

SEQ ID NO: 764564 - RNA, 17 nt, Artificial Sequence
  Synthetic
aaacugaauacauuaau

SEQ ID NO: 764565 - RNA, 17 nt, Artificial Sequence
  Synthetic
uccuguccaccauuaau

SEQ ID NO: 764566 - RNA, 17 nt, Artificial Sequence
  Synthetic
uuguuaagaucauuaau

SEQ ID NO: 764567 - RNA, 17 nt, Artificial Sequence
  Synthetic
cuauaaaguucauuaau

SEQ ID NO: 764568 - RNA, 17 nt, Artificial Sequence
  Synthetic
aaaaaauguucauuaau

SEQ ID NO: 764569 - RNA, 17 nt, Artificial Sequence
  Synthetic
uagccaucaugauuaau

SEQ ID NO: 764570 - RNA, 17 nt, Artificial Sequence
  Synthetic
acuccugacugauuaau

SEQ ID NO: 764571 - RNA, 17 nt, Artificial Sequence
  Synthetic
aaaacuuagugauuaau

SEQ ID NO: 764572 - RNA, 17 nt, Artificial Sequence
  Synthetic
auauucuaaauauuaau

SEQ ID NO: 764573 - RNA, 17 nt, Artificial Sequence
  Synthetic
aaguuauuaauauuaau

SEQ ID NO: 764574 - RNA, 17 nt, Artificial Sequence
  Synthetic
agacaacucauauuaau

SEQ ID NO: 764575 - RNA, 17 nt, Artificial Sequence
  Synthetic
auaauuaggauauuaau

SEQ ID NO: 764576 - RNA, 17 nt, Artificial Sequence
  Synthetic
uagauauaauuauuaau

SEQ ID NO: 764577 - RNA, 17 nt, Artificial Sequence
  Synthetic
aacacucucaacuuaau

SEQ ID NO: 764578 - RNA, 17 nt, Artificial Sequence
  Synthetic
uuagcuguugacuuaau

SEQ ID NO: 764579 - RNA, 17 nt, Artificial Sequence
  Synthetic
ugguuuaacuacuuaau

SEQ ID NO: 764580 - RNA, 17 nt, Artificial Sequence
  Synthetic
aaggacaucuacuuaau

SEQ ID NO: 764581 - RNA, 17 nt, Artificial Sequence
  Synthetic
agacuucaccccuuaau

SEQ ID NO: 764582 - RNA, 17 nt, Artificial Sequence
  Synthetic
uaaaucagagccuuaau

SEQ ID NO: 764583 - RNA, 17 nt, Artificial Sequence
  Synthetic
aacucuucuuccuuaau

SEQ ID NO: 764584 - RNA, 17 nt, Artificial Sequence
  Synthetic
agucaacaaggcuuaau

SEQ ID NO: 764585 - RNA, 17 nt, Artificial Sequence
  Synthetic
augcagauuggcuuaau

SEQ ID NO: 764586 - RNA, 17 nt, Artificial Sequence
  Synthetic
acuuaucauugcuuaau

SEQ ID NO: 764587 - RNA, 17 nt, Artificial Sequence
  Synthetic
agacuauggcucuuaau

SEQ ID NO: 764588 - RNA, 17 nt, Artificial Sequence
  Synthetic
uuuaauaaucucuuaau

SEQ ID NO: 764589 - RNA, 17 nt, Artificial Sequence
  Synthetic
uagguugccuucuuaau

SEQ ID NO: 764590 - RNA, 17 nt, Artificial Sequence
  Synthetic
ccaauuauguucuuaau

SEQ ID NO: 764591 - RNA, 17 nt, Artificial Sequence
  Synthetic
uuaauuaauuucuuaau

SEQ ID NO: 764592 - RNA, 17 nt, Artificial Sequence
  Synthetic
ucaauggcaaaguuaau

SEQ ID NO: 764593 - RNA, 17 nt, Artificial Sequence
  Synthetic
cuuuuaaggaaguuaau

SEQ ID NO: 764594 - RNA, 17 nt, Artificial Sequence
  Synthetic
uuuucagugaaguuaau

SEQ ID NO: 764595 - RNA, 17 nt, Artificial Sequence
  Synthetic
cuaaaugaccaguuaau

SEQ ID NO: 764596 - RNA, 17 nt, Artificial Sequence
  Synthetic
uuaaaugaagaguuaau

SEQ ID NO: 764597 - RNA, 17 nt, Artificial Sequence
  Synthetic
aacucuccagaguuaau

SEQ ID NO: 764598 - RNA, 17 nt, Artificial Sequence
  Synthetic
cuaaaugacgaguuaau

SEQ ID NO: 764599 - RNA, 17 nt, Artificial Sequence
  Synthetic
uucaaugacgaguuaau

SEQ ID NO: 764600 - RNA, 17 nt, Artificial Sequence
  Synthetic
uaaauuaauagguuaau

SEQ ID NO: 764601 - RNA, 17 nt, Artificial Sequence
  Synthetic
cccuaacaaggguuaau

SEQ ID NO: 764602 - RNA, 17 nt, Artificial Sequence
  Synthetic
cuaggugauggguuaau

SEQ ID NO: 764603 - RNA, 17 nt, Artificial Sequence
  Synthetic
cuuacuaccugguuaau

SEQ ID NO: 764604 - RNA, 17 nt, Artificial Sequence
  Synthetic
aaaauauuuugguuaau

SEQ ID NO: 764605 - RNA, 17 nt, Artificial Sequence
  Synthetic
caagaagaaauguuaau

SEQ ID NO: 764606 - RNA, 17 nt, Artificial Sequence
  Synthetic
aggagcccaauguuaau

SEQ ID NO: 764607 - RNA, 17 nt, Artificial Sequence
  Synthetic
uuaugguuuauguuaau

SEQ ID NO: 764608 - RNA, 17 nt, Artificial Sequence
  Synthetic
agaaagggacuguuaau

SEQ ID NO: 764609 - RNA, 17 nt, Artificial Sequence
  Synthetic
aauggauauuuguuaau

SEQ ID NO: 764610 - RNA, 17 nt, Artificial Sequence
  Synthetic
uagucugaaaauuuaau

SEQ ID NO: 764611 - RNA, 17 nt, Artificial Sequence
  Synthetic
cagaauacaaauuuaau

SEQ ID NO: 764612 - RNA, 17 nt, Artificial Sequence
  Synthetic
uuaucuauaaauuuaau

SEQ ID NO: 764613 - RNA, 17 nt, Artificial Sequence
  Synthetic
uacuguuauaauuuaau

SEQ ID NO: 764614 - RNA, 17 nt, Artificial Sequence
  Synthetic
uuuuuuguuaauuuaau

SEQ ID NO: 764615 - RNA, 17 nt, Artificial Sequence
  Synthetic
uaugaaauccauuuaau

SEQ ID NO: 764616 - RNA, 17 nt, Artificial Sequence
  Synthetic
acuccuauccauuuaau

SEQ ID NO: 764617 - RNA, 17 nt, Artificial Sequence
  Synthetic
acucauaugcauuuaau

SEQ ID NO: 764618 - RNA, 17 nt, Artificial Sequence
  Synthetic
caacuuaucuauuuaau

SEQ ID NO: 764619 - RNA, 17 nt, Artificial Sequence
  Synthetic
acuuuucaguauuuaau

SEQ ID NO: 764620 - RNA, 17 nt, Artificial Sequence
  Synthetic
uugauaauguauuuaau

SEQ ID NO: 764621 - RNA, 17 nt, Artificial Sequence
  Synthetic
uacaugaauuauuuaau

SEQ ID NO: 764622 - RNA, 17 nt, Artificial Sequence
  Synthetic
acuuuagguuauuuaau

SEQ ID NO: 764623 - RNA, 17 nt, Artificial Sequence
  Synthetic
uaguuuuaaucuuuaau

SEQ ID NO: 764624 - RNA, 17 nt, Artificial Sequence
  Synthetic
aaucuacugucuuuaau

SEQ ID NO: 764625 - RNA, 17 nt, Artificial Sequence
  Synthetic
uuucuugugucuuuaau

SEQ ID NO: 764626 - RNA, 17 nt, Artificial Sequence
  Synthetic
aaacuauuuucuuuaau

SEQ ID NO: 764627 - RNA, 17 nt, Artificial Sequence
  Synthetic
aagaaaaaaaguuuaau

SEQ ID NO: 764628 - RNA, 17 nt, Artificial Sequence
  Synthetic
acauaucaaaguuuaau

SEQ ID NO: 764629 - RNA, 17 nt, Artificial Sequence
  Synthetic
agagguacaaguuuaau

SEQ ID NO: 764630 - RNA, 17 nt, Artificial Sequence
  Synthetic
aaguaaagagguuuaau

SEQ ID NO: 764631 - RNA, 17 nt, Artificial Sequence
  Synthetic
caaaauagauguuuaau

SEQ ID NO: 764632 - RNA, 17 nt, Artificial Sequence
  Synthetic
acaguacauuguuuaau

SEQ ID NO: 764633 - RNA, 17 nt, Artificial Sequence
  Synthetic
agucaaacaauuuuaau

SEQ ID NO: 764634 - RNA, 17 nt, Artificial Sequence
  Synthetic
acuauugacauuuuaau

SEQ ID NO: 764635 - RNA, 17 nt, Artificial Sequence
  Synthetic
cuauuuaauauuuuaau

SEQ ID NO: 764636 - RNA, 17 nt, Artificial Sequence
  Synthetic
agcauuucuauuuuaau

SEQ ID NO: 764637 - RNA, 17 nt, Artificial Sequence
  Synthetic
uagcaauuuauuuuaau

SEQ ID NO: 764638 - RNA, 17 nt, Artificial Sequence
  Synthetic
ccaaaaaaacuuuuaau

SEQ ID NO: 764639 - RNA, 17 nt, Artificial Sequence
  Synthetic
acagaguaccuuuuaau

SEQ ID NO: 764640 - RNA, 17 nt, Artificial Sequence
  Synthetic
agucugugucuuuuaau

SEQ ID NO: 764641 - RNA, 17 nt, Artificial Sequence
  Synthetic
aguugggaaguuuuaau

SEQ ID NO: 764642 - RNA, 17 nt, Artificial Sequence
  Synthetic
uuguagcaauuuuuaau

SEQ ID NO: 764643 - RNA, 17 nt, Artificial Sequence
  Synthetic
uuuuguucauuuuuaau

SEQ ID NO: 764644 - RNA, 17 nt, Artificial Sequence
  Synthetic
uagaauggauuuuuaau

SEQ ID NO: 764645 - RNA, 17 nt, Artificial Sequence
  Synthetic
caacuauuauuuuuaau

SEQ ID NO: 764646 - RNA, 17 nt, Artificial Sequence
  Synthetic
aaucuccgguuuuuaau

SEQ ID NO: 764647 - RNA, 17 nt, Artificial Sequence
  Synthetic
uuucagauuuuuuuaau

SEQ ID NO: 764648 - RNA, 17 nt, Artificial Sequence
  Synthetic
uagguuuuuuuuuuaau

SEQ ID NO: 764649 - RNA, 17 nt, Artificial Sequence
  Synthetic
uuuuuuuuuuuuuuaau

SEQ ID NO: 764650 - RNA, 17 nt, Artificial Sequence
  Synthetic
uugcagaaaaaaaacau

SEQ ID NO: 764651 - RNA, 17 nt, Artificial Sequence
  Synthetic
uuuucaauaaaaaacau

SEQ ID NO: 764652 - RNA, 17 nt, Artificial Sequence
  Synthetic
uaaacaugcaaaaacau

SEQ ID NO: 764653 - RNA, 17 nt, Artificial Sequence
  Synthetic
aauucauaagaaaacau

SEQ ID NO: 764654 - RNA, 17 nt, Artificial Sequence
  Synthetic
auuaaaaaauaaaacau

SEQ ID NO: 764655 - RNA, 17 nt, Artificial Sequence
  Synthetic
uuaaagaaauaaaacau

SEQ ID NO: 764656 - RNA, 17 nt, Artificial Sequence
  Synthetic
uuuugguaauaaaacau

SEQ ID NO: 764657 - RNA, 17 nt, Artificial Sequence
  Synthetic
accacagcauaaaacau

SEQ ID NO: 764658 - RNA, 17 nt, Artificial Sequence
  Synthetic
auggggucauaaaacau

SEQ ID NO: 764659 - RNA, 17 nt, Artificial Sequence
  Synthetic
aauaccuaguaaaacau

SEQ ID NO: 764660 - RNA, 17 nt, Artificial Sequence
  Synthetic
aauaaguuuuaaaacau

SEQ ID NO: 764661 - RNA, 17 nt, Artificial Sequence
  Synthetic
uucaggucaacaaacau

SEQ ID NO: 764662 - RNA, 17 nt, Artificial Sequence
  Synthetic
uuauuucaggcaaacau

SEQ ID NO: 764663 - RNA, 17 nt, Artificial Sequence
  Synthetic
auuccacaugcaaacau

SEQ ID NO: 764664 - RNA, 17 nt, Artificial Sequence
  Synthetic
uccauuaucucaaacau

SEQ ID NO: 764665 - RNA, 17 nt, Artificial Sequence
  Synthetic
ugcuugaucagaaacau

SEQ ID NO: 764666 - RNA, 17 nt, Artificial Sequence
  Synthetic
aaagcccuuagaaacau

SEQ ID NO: 764667 - RNA, 17 nt, Artificial Sequence
  Synthetic
cuacuacaaggaaacau

SEQ ID NO: 764668 - RNA, 17 nt, Artificial Sequence
  Synthetic
aaggaaagaggaaacau

SEQ ID NO: 764669 - RNA, 17 nt, Artificial Sequence
  Synthetic
uaccacucuggaaacau

SEQ ID NO: 764670 - RNA, 17 nt, Artificial Sequence
  Synthetic
aaugcuacaauaaacau

SEQ ID NO: 764671 - RNA, 17 nt, Artificial Sequence
  Synthetic
agagcugcaauaaacau

SEQ ID NO: 764672 - RNA, 17 nt, Artificial Sequence
  Synthetic
agcgcugcaauaaacau

SEQ ID NO: 764673 - RNA, 17 nt, Artificial Sequence
  Synthetic
aaugcugcaauaaacau

SEQ ID NO: 764674 - RNA, 17 nt, Artificial Sequence
  Synthetic
cuaguugagauaaacau

SEQ ID NO: 764675 - RNA, 17 nt, Artificial Sequence
  Synthetic
uaauguuuuauaaacau

SEQ ID NO: 764676 - RNA, 17 nt, Artificial Sequence
  Synthetic
uaagugggccuaaacau

SEQ ID NO: 764677 - RNA, 17 nt, Artificial Sequence
  Synthetic
aguuagaagcuaaacau

SEQ ID NO: 764678 - RNA, 17 nt, Artificial Sequence
  Synthetic
agugcugcaguaaacau

SEQ ID NO: 764679 - RNA, 17 nt, Artificial Sequence
  Synthetic
uagaaagagguaaacau

SEQ ID NO: 764680 - RNA, 17 nt, Artificial Sequence
  Synthetic
ugaaaaaagaacaacau

SEQ ID NO: 764681 - RNA, 17 nt, Artificial Sequence
  Synthetic
uccuuuauccacaacau

SEQ ID NO: 764682 - RNA, 17 nt, Artificial Sequence
  Synthetic
aucuuuugugacaacau

SEQ ID NO: 764683 - RNA, 17 nt, Artificial Sequence
  Synthetic
caggcaaccuacaacau

SEQ ID NO: 764684 - RNA, 17 nt, Artificial Sequence
  Synthetic
cagggaaccuacaacau

SEQ ID NO: 764685 - RNA, 17 nt, Artificial Sequence
  Synthetic
uuccuaugcuacaacau

SEQ ID NO: 764686 - RNA, 17 nt, Artificial Sequence
  Synthetic
auauaugcacccaacau

SEQ ID NO: 764687 - RNA, 17 nt, Artificial Sequence
  Synthetic
ugugauccuuccaacau

SEQ ID NO: 764688 - RNA, 17 nt, Artificial Sequence
  Synthetic
cuccauguaagcaacau

SEQ ID NO: 764689 - RNA, 17 nt, Artificial Sequence
  Synthetic
uacaagaaaggcaacau

SEQ ID NO: 764690 - RNA, 17 nt, Artificial Sequence
  Synthetic
aagacugaaaucaacau

SEQ ID NO: 764691 - RNA, 17 nt, Artificial Sequence
  Synthetic
augauagcaaucaacau

SEQ ID NO: 764692 - RNA, 17 nt, Artificial Sequence
  Synthetic
aguaaugggaucaacau

SEQ ID NO: 764693 - RNA, 17 nt, Artificial Sequence
  Synthetic
cuuuugucccucaacau

SEQ ID NO: 764694 - RNA, 17 nt, Artificial Sequence
  Synthetic
agcaaaggggucaacau

SEQ ID NO: 764695 - RNA, 17 nt, Artificial Sequence
  Synthetic
cacauacuugucaacau

SEQ ID NO: 764696 - RNA, 17 nt, Artificial Sequence
  Synthetic
uuuuaggauuucaacau

SEQ ID NO: 764697 - RNA, 17 nt, Artificial Sequence
  Synthetic
aaccccacuuucaacau

SEQ ID NO: 764698 - RNA, 17 nt, Artificial Sequence
  Synthetic
aaaugaccuuucaacau

SEQ ID NO: 764699 - RNA, 17 nt, Artificial Sequence
  Synthetic
acaaauggaaagaacau

SEQ ID NO: 764700 - RNA, 17 nt, Artificial Sequence
  Synthetic
uuuuauuauaagaacau

SEQ ID NO: 764701 - RNA, 17 nt, Artificial Sequence
  Synthetic
aacccaaaagagaacau

SEQ ID NO: 764702 - RNA, 17 nt, Artificial Sequence
  Synthetic
cuuauaaaugagaacau

SEQ ID NO: 764703 - RNA, 17 nt, Artificial Sequence
  Synthetic
cuuauaagugagaacau

SEQ ID NO: 764704 - RNA, 17 nt, Artificial Sequence
  Synthetic
uguggggaaaggaacau

SEQ ID NO: 764705 - RNA, 17 nt, Artificial Sequence
  Synthetic
aguauauaaaggaacau

SEQ ID NO: 764706 - RNA, 17 nt, Artificial Sequence
  Synthetic
uaaggaaaacggaacau

SEQ ID NO: 764707 - RNA, 17 nt, Artificial Sequence
  Synthetic
aaaaucugaaugaacau

SEQ ID NO: 764708 - RNA, 17 nt, Artificial Sequence
  Synthetic
aauaguuugaugaacau

SEQ ID NO: 764709 - RNA, 17 nt, Artificial Sequence
  Synthetic
agaaacuauaugaacau

SEQ ID NO: 764710 - RNA, 17 nt, Artificial Sequence
  Synthetic
uaauagaguaugaacau

SEQ ID NO: 764711 - RNA, 17 nt, Artificial Sequence
  Synthetic
acagaaguuaugaacau

SEQ ID NO: 764712 - RNA, 17 nt, Artificial Sequence
  Synthetic
aucaauagauugaacau

SEQ ID NO: 764713 - RNA, 17 nt, Artificial Sequence
  Synthetic
ccuaggugaaauaacau

SEQ ID NO: 764714 - RNA, 17 nt, Artificial Sequence
  Synthetic
aucauuuuucauaacau

SEQ ID NO: 764715 - RNA, 17 nt, Artificial Sequence
  Synthetic
ccaauaaaugauaacau

SEQ ID NO: 764716 - RNA, 17 nt, Artificial Sequence
  Synthetic
cauuuaccauauaacau

SEQ ID NO: 764717 - RNA, 17 nt, Artificial Sequence
  Synthetic
agcuuuuauuauaacau

SEQ ID NO: 764718 - RNA, 17 nt, Artificial Sequence
  Synthetic
auuuucuugaguaacau

SEQ ID NO: 764719 - RNA, 17 nt, Artificial Sequence
  Synthetic
aaccaaaguaguaacau

SEQ ID NO: 764720 - RNA, 17 nt, Artificial Sequence
  Synthetic
auauuaauuaguaacau

SEQ ID NO: 764721 - RNA, 17 nt, Artificial Sequence
  Synthetic
uuagcaagggguaacau

SEQ ID NO: 764722 - RNA, 17 nt, Artificial Sequence
  Synthetic
agagugcuuuguaacau

SEQ ID NO: 764723 - RNA, 17 nt, Artificial Sequence
  Synthetic
uguauauauauuaacau

SEQ ID NO: 764724 - RNA, 17 nt, Artificial Sequence
  Synthetic
ucaacgucuauuaacau

SEQ ID NO: 764725 - RNA, 17 nt, Artificial Sequence
  Synthetic
aaggggauucuuaacau

SEQ ID NO: 764726 - RNA, 17 nt, Artificial Sequence
  Synthetic
caacuguagguuaacau

SEQ ID NO: 764727 - RNA, 17 nt, Artificial Sequence
  Synthetic
ugugagcaguuuaacau

SEQ ID NO: 764728 - RNA, 17 nt, Artificial Sequence
  Synthetic
ucccucccacaacacau

SEQ ID NO: 764729 - RNA, 17 nt, Artificial Sequence
  Synthetic
ucccucccauaacacau

SEQ ID NO: 764730 - RNA, 17 nt, Artificial Sequence
  Synthetic
aaaucauauuaacacau

SEQ ID NO: 764731 - RNA, 17 nt, Artificial Sequence
  Synthetic
cucaagggaacacacau

SEQ ID NO: 764732 - RNA, 17 nt, Artificial Sequence
  Synthetic
caugcaaacacacacau

SEQ ID NO: 764733 - RNA, 17 nt, Artificial Sequence
  Synthetic
cauauacccacacacau

SEQ ID NO: 764734 - RNA, 17 nt, Artificial Sequence
  Synthetic
cgugcagagacacacau

SEQ ID NO: 764735 - RNA, 17 nt, Artificial Sequence
  Synthetic
ugugcagagacacacau

SEQ ID NO: 764736 - RNA, 17 nt, Artificial Sequence
  Synthetic
uugugguugucacacau

SEQ ID NO: 764737 - RNA, 17 nt, Artificial Sequence
  Synthetic
aucuaugguagacacau

SEQ ID NO: 764738 - RNA, 17 nt, Artificial Sequence
  Synthetic
ucccucacaugacacau

SEQ ID NO: 764739 - RNA, 17 nt, Artificial Sequence
  Synthetic
ucacucccaugacacau

SEQ ID NO: 764740 - RNA, 17 nt, Artificial Sequence
  Synthetic
cucucaauuugacacau

SEQ ID NO: 764741 - RNA, 17 nt, Artificial Sequence
  Synthetic
auauuuuauauacacau

SEQ ID NO: 764742 - RNA, 17 nt, Artificial Sequence
  Synthetic
aaacaaaauguacacau

SEQ ID NO: 764743 - RNA, 17 nt, Artificial Sequence
  Synthetic
uauugcuccuuacacau

SEQ ID NO: 764744 - RNA, 17 nt, Artificial Sequence
  Synthetic
ccagaaauuaaccacau

SEQ ID NO: 764745 - RNA, 17 nt, Artificial Sequence
  Synthetic
ucaucccaaccccacau

SEQ ID NO: 764746 - RNA, 17 nt, Artificial Sequence
  Synthetic
aaaagaaaagcccacau

SEQ ID NO: 764747 - RNA, 17 nt, Artificial Sequence
  Synthetic
aagugauccgcccacau

SEQ ID NO: 764748 - RNA, 17 nt, Artificial Sequence
  Synthetic
cacagcaucgcccacau

SEQ ID NO: 764749 - RNA, 17 nt, Artificial Sequence
  Synthetic
cuacuuucaugccacau

SEQ ID NO: 764750 - RNA, 17 nt, Artificial Sequence
  Synthetic
ccuucuucaauccacau

SEQ ID NO: 764751 - RNA, 17 nt, Artificial Sequence
  Synthetic
ucucaagggauccacau

SEQ ID NO: 764752 - RNA, 17 nt, Artificial Sequence
  Synthetic
auuauaaguauccacau

SEQ ID NO: 764753 - RNA, 17 nt, Artificial Sequence
  Synthetic
aagucagggcuccacau

SEQ ID NO: 764754 - RNA, 17 nt, Artificial Sequence
  Synthetic
cugcagcaauuccacau

SEQ ID NO: 764755 - RNA, 17 nt, Artificial Sequence
  Synthetic
acaaagcacaagcacau

SEQ ID NO: 764756 - RNA, 17 nt, Artificial Sequence
  Synthetic
uguuaagacaagcacau

SEQ ID NO: 764757 - RNA, 17 nt, Artificial Sequence
  Synthetic
uguagcuauaagcacau

SEQ ID NO: 764758 - RNA, 17 nt, Artificial Sequence
  Synthetic
cugcaaucccagcacau

SEQ ID NO: 764759 - RNA, 17 nt, Artificial Sequence
  Synthetic
aaaccuuggcagcacau

SEQ ID NO: 764760 - RNA, 17 nt, Artificial Sequence
  Synthetic
ugcaauaucuagcacau

SEQ ID NO: 764761 - RNA, 17 nt, Artificial Sequence
  Synthetic
aaugagaguuagcacau

SEQ ID NO: 764762 - RNA, 17 nt, Artificial Sequence
  Synthetic
cagcaauuugggcacau

SEQ ID NO: 764763 - RNA, 17 nt, Artificial Sequence
  Synthetic
acccaugccuggcacau

SEQ ID NO: 764764 - RNA, 17 nt, Artificial Sequence
  Synthetic
ugaaagucacugcacau

SEQ ID NO: 764765 - RNA, 17 nt, Artificial Sequence
  Synthetic
ugcuagauauugcacau

SEQ ID NO: 764766 - RNA, 17 nt, Artificial Sequence
  Synthetic
uaaacacuuuugcacau

SEQ ID NO: 764767 - RNA, 17 nt, Artificial Sequence
  Synthetic
uaaaaacuaaaucacau

SEQ ID NO: 764768 - RNA, 17 nt, Artificial Sequence
  Synthetic
auucaggccaaucacau

SEQ ID NO: 764769 - RNA, 17 nt, Artificial Sequence
  Synthetic
cucacucacuaucacau

SEQ ID NO: 764770 - RNA, 17 nt, Artificial Sequence
  Synthetic
cacauaaacacucacau

SEQ ID NO: 764771 - RNA, 17 nt, Artificial Sequence
  Synthetic
cagccauggccucacau

SEQ ID NO: 764772 - RNA, 17 nt, Artificial Sequence
  Synthetic
aaauaaccuccucacau

SEQ ID NO: 764773 - RNA, 17 nt, Artificial Sequence
  Synthetic
agagguagagcucacau

SEQ ID NO: 764774 - RNA, 17 nt, Artificial Sequence
  Synthetic
cauauggauucucacau

SEQ ID NO: 764775 - RNA, 17 nt, Artificial Sequence
  Synthetic
aaaguguuuucucacau

SEQ ID NO: 764776 - RNA, 17 nt, Artificial Sequence
  Synthetic
auguguaacagucacau

SEQ ID NO: 764777 - RNA, 17 nt, Artificial Sequence
  Synthetic
cagugucccugucacau

SEQ ID NO: 764778 - RNA, 17 nt, Artificial Sequence
  Synthetic
auucuugguugucacau

SEQ ID NO: 764779 - RNA, 17 nt, Artificial Sequence
  Synthetic
auuacuuaaauucacau

SEQ ID NO: 764780 - RNA, 17 nt, Artificial Sequence
  Synthetic
aauuuagucauucacau

SEQ ID NO: 764781 - RNA, 17 nt, Artificial Sequence
  Synthetic
ucuuuuaauguucacau

SEQ ID NO: 764782 - RNA, 17 nt, Artificial Sequence
  Synthetic
auuuacacauuucacau

SEQ ID NO: 764783 - RNA, 17 nt, Artificial Sequence
  Synthetic
ccagccccauuucacau

SEQ ID NO: 764784 - RNA, 17 nt, Artificial Sequence
  Synthetic
uccauggcauuucacau

SEQ ID NO: 764785 - RNA, 17 nt, Artificial Sequence
  Synthetic
cucaaauaaaaagacau

SEQ ID NO: 764786 - RNA, 17 nt, Artificial Sequence
  Synthetic
caaguuucaaaagacau

SEQ ID NO: 764787 - RNA, 17 nt, Artificial Sequence
  Synthetic
aaacaaagaaaagacau

SEQ ID NO: 764788 - RNA, 17 nt, Artificial Sequence
  Synthetic
augguuuuuaaagacau

SEQ ID NO: 764789 - RNA, 17 nt, Artificial Sequence
  Synthetic
acaaaggaggaagacau

SEQ ID NO: 764790 - RNA, 17 nt, Artificial Sequence
  Synthetic
acggagauugaagacau

SEQ ID NO: 764791 - RNA, 17 nt, Artificial Sequence
  Synthetic
auaucacucuaagacau

SEQ ID NO: 764792 - RNA, 17 nt, Artificial Sequence
  Synthetic
uaaagucaaacagacau

SEQ ID NO: 764793 - RNA, 17 nt, Artificial Sequence
  Synthetic
aaaugugggacagacau

SEQ ID NO: 764794 - RNA, 17 nt, Artificial Sequence
  Synthetic
aaauguuaagcagacau

SEQ ID NO: 764795 - RNA, 17 nt, Artificial Sequence
  Synthetic
cacggggcugcagacau

SEQ ID NO: 764796 - RNA, 17 nt, Artificial Sequence
  Synthetic
ucuaaaaagggagacau

SEQ ID NO: 764797 - RNA, 17 nt, Artificial Sequence
  Synthetic
ccuuccuugggagacau

SEQ ID NO: 764798 - RNA, 17 nt, Artificial Sequence
  Synthetic
auggaagaaauagacau

SEQ ID NO: 764799 - RNA, 17 nt, Artificial Sequence
  Synthetic
ugcaguuaaauagacau

SEQ ID NO: 764800 - RNA, 17 nt, Artificial Sequence
  Synthetic
ugauaauugguagacau

SEQ ID NO: 764801 - RNA, 17 nt, Artificial Sequence
  Synthetic
cuuuaaauguuagacau

SEQ ID NO: 764802 - RNA, 17 nt, Artificial Sequence
  Synthetic
auuaccauucaggacau

SEQ ID NO: 764803 - RNA, 17 nt, Artificial Sequence
  Synthetic
agcaauguggaggacau

SEQ ID NO: 764804 - RNA, 17 nt, Artificial Sequence
  Synthetic
uuauguuuauaggacau

SEQ ID NO: 764805 - RNA, 17 nt, Artificial Sequence
  Synthetic
uuucuuggaagggacau

SEQ ID NO: 764806 - RNA, 17 nt, Artificial Sequence
  Synthetic
ccuucaaacugggacau

SEQ ID NO: 764807 - RNA, 17 nt, Artificial Sequence
  Synthetic
ugcuaaucaauggacau

SEQ ID NO: 764808 - RNA, 17 nt, Artificial Sequence
  Synthetic
aauaccauucuggacau

SEQ ID NO: 764809 - RNA, 17 nt, Artificial Sequence
  Synthetic
agcuaggaaacugacau

SEQ ID NO: 764810 - RNA, 17 nt, Artificial Sequence
  Synthetic
acccaauaaacugacau

SEQ ID NO: 764811 - RNA, 17 nt, Artificial Sequence
  Synthetic
auaucaugcagugacau

SEQ ID NO: 764812 - RNA, 17 nt, Artificial Sequence
  Synthetic
aaguaaguuggugacau

SEQ ID NO: 764813 - RNA, 17 nt, Artificial Sequence
  Synthetic
uuaaauagaugugacau

SEQ ID NO: 764814 - RNA, 17 nt, Artificial Sequence
  Synthetic
cuggucaucugugacau

SEQ ID NO: 764815 - RNA, 17 nt, Artificial Sequence
  Synthetic
uugggagcuugugacau

SEQ ID NO: 764816 - RNA, 17 nt, Artificial Sequence
  Synthetic
agccauucccuugacau

SEQ ID NO: 764817 - RNA, 17 nt, Artificial Sequence
  Synthetic
aaauaaacguuugacau

SEQ ID NO: 764818 - RNA, 17 nt, Artificial Sequence
  Synthetic
uuauaagaaaaauacau

SEQ ID NO: 764819 - RNA, 17 nt, Artificial Sequence
  Synthetic
aauaaauaaaaauacau

SEQ ID NO: 764820 - RNA, 17 nt, Artificial Sequence
  Synthetic
cagaaaacaaaauacau

SEQ ID NO: 764821 - RNA, 17 nt, Artificial Sequence
  Synthetic
auuugaucaaaauacau

SEQ ID NO: 764822 - RNA, 17 nt, Artificial Sequence
  Synthetic
uaaugauuaaaauacau

SEQ ID NO: 764823 - RNA, 17 nt, Artificial Sequence
  Synthetic
agugacuucaaauacau

SEQ ID NO: 764824 - RNA, 17 nt, Artificial Sequence
  Synthetic
caagaagaagaauacau

SEQ ID NO: 764825 - RNA, 17 nt, Artificial Sequence
  Synthetic
uagaaaucugaauacau

SEQ ID NO: 764826 - RNA, 17 nt, Artificial Sequence
  Synthetic
acugugagugaauacau

SEQ ID NO: 764827 - RNA, 17 nt, Artificial Sequence
  Synthetic
aauaauuuugaauacau

SEQ ID NO: 764828 - RNA, 17 nt, Artificial Sequence
  Synthetic
aaaaugaacuaauacau

SEQ ID NO: 764829 - RNA, 17 nt, Artificial Sequence
  Synthetic
cuguaagucuaauacau

SEQ ID NO: 764830 - RNA, 17 nt, Artificial Sequence
  Synthetic
cugguuauaucauacau

SEQ ID NO: 764831 - RNA, 17 nt, Artificial Sequence
  Synthetic
caagaagucucauacau

SEQ ID NO: 764832 - RNA, 17 nt, Artificial Sequence
  Synthetic
aaaacuuucagauacau

SEQ ID NO: 764833 - RNA, 17 nt, Artificial Sequence
  Synthetic
aagucucuaggauacau

SEQ ID NO: 764834 - RNA, 17 nt, Artificial Sequence
  Synthetic
uguuauuuaggauacau

SEQ ID NO: 764835 - RNA, 17 nt, Artificial Sequence
  Synthetic
ugggaaaacugauacau

SEQ ID NO: 764836 - RNA, 17 nt, Artificial Sequence
  Synthetic
agacauuugugauacau

SEQ ID NO: 764837 - RNA, 17 nt, Artificial Sequence
  Synthetic
uuuuauaguguauacau

SEQ ID NO: 764838 - RNA, 17 nt, Artificial Sequence
  Synthetic
accugggaguuauacau

SEQ ID NO: 764839 - RNA, 17 nt, Artificial Sequence
  Synthetic
acaagaauuaacuacau

SEQ ID NO: 764840 - RNA, 17 nt, Artificial Sequence
  Synthetic
uacacaaaucacuacau

SEQ ID NO: 764841 - RNA, 17 nt, Artificial Sequence
  Synthetic
uugucagaagacuacau

SEQ ID NO: 764842 - RNA, 17 nt, Artificial Sequence
  Synthetic
ccuucuugugacuacau

SEQ ID NO: 764843 - RNA, 17 nt, Artificial Sequence
  Synthetic
auagcaaaauacuacau

SEQ ID NO: 764844 - RNA, 17 nt, Artificial Sequence
  Synthetic
aaaaauauauacuacau

SEQ ID NO: 764845 - RNA, 17 nt, Artificial Sequence
  Synthetic
uauucuuacaccuacau

SEQ ID NO: 764846 - RNA, 17 nt, Artificial Sequence
  Synthetic
ugagccuaggccuacau

SEQ ID NO: 764847 - RNA, 17 nt, Artificial Sequence
  Synthetic
aacauauuuuccuacau

SEQ ID NO: 764848 - RNA, 17 nt, Artificial Sequence
  Synthetic
aggaugaaaagcuacau

SEQ ID NO: 764849 - RNA, 17 nt, Artificial Sequence
  Synthetic
uguagucccagcuacau

SEQ ID NO: 764850 - RNA, 17 nt, Artificial Sequence
  Synthetic
uuuaucuuuagcuacau

SEQ ID NO: 764851 - RNA, 17 nt, Artificial Sequence
  Synthetic
aacauucccugcuacau

SEQ ID NO: 764852 - RNA, 17 nt, Artificial Sequence
  Synthetic
aaauaaauauucuacau

SEQ ID NO: 764853 - RNA, 17 nt, Artificial Sequence
  Synthetic
uauuucaaaaaguacau

SEQ ID NO: 764854 - RNA, 17 nt, Artificial Sequence
  Synthetic
acagguggaaaguacau

SEQ ID NO: 764855 - RNA, 17 nt, Artificial Sequence
  Synthetic
caaauaguuaaguacau

SEQ ID NO: 764856 - RNA, 17 nt, Artificial Sequence
  Synthetic
ugcucugcaugguacau

SEQ ID NO: 764857 - RNA, 17 nt, Artificial Sequence
  Synthetic
uaagauucaugguacau

SEQ ID NO: 764858 - RNA, 17 nt, Artificial Sequence
  Synthetic
agcagaacgauguacau

SEQ ID NO: 764859 - RNA, 17 nt, Artificial Sequence
  Synthetic
aaaaaaaauguguacau

SEQ ID NO: 764860 - RNA, 17 nt, Artificial Sequence
  Synthetic
ucaugggaauuguacau

SEQ ID NO: 764861 - RNA, 17 nt, Artificial Sequence
  Synthetic
ugcuagauauuguacau

SEQ ID NO: 764862 - RNA, 17 nt, Artificial Sequence
  Synthetic
cauucauaaaauuacau

SEQ ID NO: 764863 - RNA, 17 nt, Artificial Sequence
  Synthetic
caaugcuaaaauuacau

SEQ ID NO: 764864 - RNA, 17 nt, Artificial Sequence
  Synthetic
uuuugcacgcauuacau

SEQ ID NO: 764865 - RNA, 17 nt, Artificial Sequence
  Synthetic
aauacuuaagauuacau

SEQ ID NO: 764866 - RNA, 17 nt, Artificial Sequence
  Synthetic
ccaauaaaugauuacau

SEQ ID NO: 764867 - RNA, 17 nt, Artificial Sequence
  Synthetic
cuccacuaauauuacau

SEQ ID NO: 764868 - RNA, 17 nt, Artificial Sequence
  Synthetic
auccuguauuauuacau

SEQ ID NO: 764869 - RNA, 17 nt, Artificial Sequence
  Synthetic
uauuauuauuauuacau

SEQ ID NO: 764870 - RNA, 17 nt, Artificial Sequence
  Synthetic
uacaaccuuuauuacau

SEQ ID NO: 764871 - RNA, 17 nt, Artificial Sequence
  Synthetic
cugugcagaccuuacau

SEQ ID NO: 764872 - RNA, 17 nt, Artificial Sequence
  Synthetic
cacaaccacucuuacau

SEQ ID NO: 764873 - RNA, 17 nt, Artificial Sequence
  Synthetic
uagcacugcaguuacau

SEQ ID NO: 764874 - RNA, 17 nt, Artificial Sequence
  Synthetic
aguggauauaguuacau

SEQ ID NO: 764875 - RNA, 17 nt, Artificial Sequence
  Synthetic
ugggggagggguuacau

SEQ ID NO: 764876 - RNA, 17 nt, Artificial Sequence
  Synthetic
acagacauggguuacau

SEQ ID NO: 764877 - RNA, 17 nt, Artificial Sequence
  Synthetic
ugucaucuugguuacau

SEQ ID NO: 764878 - RNA, 17 nt, Artificial Sequence
  Synthetic
augcaggauuguuacau

SEQ ID NO: 764879 - RNA, 17 nt, Artificial Sequence
  Synthetic
gugcagguuuguuacau

SEQ ID NO: 764880 - RNA, 17 nt, Artificial Sequence
  Synthetic
auauauguuuguuacau

SEQ ID NO: 764881 - RNA, 17 nt, Artificial Sequence
  Synthetic
aggucuucaauuuacau

SEQ ID NO: 764882 - RNA, 17 nt, Artificial Sequence
  Synthetic
aauaauuccauuuacau

SEQ ID NO: 764883 - RNA, 17 nt, Artificial Sequence
  Synthetic
cccccccuccuuuacau

SEQ ID NO: 764884 - RNA, 17 nt, Artificial Sequence
  Synthetic
aaaugucccuuuuacau

SEQ ID NO: 764885 - RNA, 17 nt, Artificial Sequence
  Synthetic
aacucauuguuuuacau

SEQ ID NO: 764886 - RNA, 17 nt, Artificial Sequence
  Synthetic
uugcccacuuuuuacau

SEQ ID NO: 764887 - RNA, 17 nt, Artificial Sequence
  Synthetic
cccaaacagaaaaccau

SEQ ID NO: 764888 - RNA, 17 nt, Artificial Sequence
  Synthetic
agccaagagaaaaccau

SEQ ID NO: 764889 - RNA, 17 nt, Artificial Sequence
  Synthetic
uauguugauaaaaccau

SEQ ID NO: 764890 - RNA, 17 nt, Artificial Sequence
  Synthetic
acacaaagccaaaccau

SEQ ID NO: 764891 - RNA, 17 nt, Artificial Sequence
  Synthetic
cccucaagggaaaccau

SEQ ID NO: 764892 - RNA, 17 nt, Artificial Sequence
  Synthetic
ucagauucauaaaccau

SEQ ID NO: 764893 - RNA, 17 nt, Artificial Sequence
  Synthetic
acggcacuuucaaccau

SEQ ID NO: 764894 - RNA, 17 nt, Artificial Sequence
  Synthetic
ccagaaaccagaaccau

SEQ ID NO: 764895 - RNA, 17 nt, Artificial Sequence
  Synthetic
agucuuaccagaaccau

SEQ ID NO: 764896 - RNA, 17 nt, Artificial Sequence
  Synthetic
uaauauaucagaaccau

SEQ ID NO: 764897 - RNA, 17 nt, Artificial Sequence
  Synthetic
ugcacuuaaaacaccau

SEQ ID NO: 764898 - RNA, 17 nt, Artificial Sequence
  Synthetic
uaaauaaucaacaccau

SEQ ID NO: 764899 - RNA, 17 nt, Artificial Sequence
  Synthetic
cacagaaaccacaccau

SEQ ID NO: 764900 - RNA, 17 nt, Artificial Sequence
  Synthetic
ugacacauauacaccau

SEQ ID NO: 764901 - RNA, 17 nt, Artificial Sequence
  Synthetic
cacaagaacagcaccau

SEQ ID NO: 764902 - RNA, 17 nt, Artificial Sequence
  Synthetic
aguuuucccagcaccau

SEQ ID NO: 764903 - RNA, 17 nt, Artificial Sequence
  Synthetic
uuuuguuaaugcaccau

SEQ ID NO: 764904 - RNA, 17 nt, Artificial Sequence
  Synthetic
auauauauaugcaccau

SEQ ID NO: 764905 - RNA, 17 nt, Artificial Sequence
  Synthetic
aucguccacaucaccau

SEQ ID NO: 764906 - RNA, 17 nt, Artificial Sequence
  Synthetic
ugggugauggucaccau

SEQ ID NO: 764907 - RNA, 17 nt, Artificial Sequence
  Synthetic
aggaauauauucaccau

SEQ ID NO: 764908 - RNA, 17 nt, Artificial Sequence
  Synthetic
uuuuguugccagaccau

SEQ ID NO: 764909 - RNA, 17 nt, Artificial Sequence
  Synthetic
acaaaagaauagaccau

SEQ ID NO: 764910 - RNA, 17 nt, Artificial Sequence
  Synthetic
auucaacauuagaccau

SEQ ID NO: 764911 - RNA, 17 nt, Artificial Sequence
  Synthetic
uaaugcuuauggaccau

SEQ ID NO: 764912 - RNA, 17 nt, Artificial Sequence
  Synthetic
auuaggaaaaugaccau

SEQ ID NO: 764913 - RNA, 17 nt, Artificial Sequence
  Synthetic
aauacuuuagugaccau

SEQ ID NO: 764914 - RNA, 17 nt, Artificial Sequence
  Synthetic
agacagcaguugaccau

SEQ ID NO: 764915 - RNA, 17 nt, Artificial Sequence
  Synthetic
aaaacguaaaauaccau

SEQ ID NO: 764916 - RNA, 17 nt, Artificial Sequence
  Synthetic
aaggucaguaauaccau

SEQ ID NO: 764917 - RNA, 17 nt, Artificial Sequence
  Synthetic
uuuuaaaugcauaccau

SEQ ID NO: 764918 - RNA, 17 nt, Artificial Sequence
  Synthetic
cuucgagauuauaccau

SEQ ID NO: 764919 - RNA, 17 nt, Artificial Sequence
  Synthetic
aggacaauaucuaccau

SEQ ID NO: 764920 - RNA, 17 nt, Artificial Sequence
  Synthetic
aucuuaaccauuaccau

SEQ ID NO: 764921 - RNA, 17 nt, Artificial Sequence
  Synthetic
augaauuauauuaccau

SEQ ID NO: 764922 - RNA, 17 nt, Artificial Sequence
  Synthetic
aagaaaacucuuaccau

SEQ ID NO: 764923 - RNA, 17 nt, Artificial Sequence
  Synthetic
aaaccuguucuuaccau

SEQ ID NO: 764924 - RNA, 17 nt, Artificial Sequence
  Synthetic
augguugcuuuuaccau

SEQ ID NO: 764925 - RNA, 17 nt, Artificial Sequence
  Synthetic
aaagagaugacacccau

SEQ ID NO: 764926 - RNA, 17 nt, Artificial Sequence
  Synthetic
cuguggaaaccacccau

SEQ ID NO: 764927 - RNA, 17 nt, Artificial Sequence
  Synthetic
ugauaaauaccacccau

SEQ ID NO: 764928 - RNA, 17 nt, Artificial Sequence
  Synthetic
ccaucuuugagacccau

SEQ ID NO: 764929 - RNA, 17 nt, Artificial Sequence
  Synthetic
uugagaaggggacccau

SEQ ID NO: 764930 - RNA, 17 nt, Artificial Sequence
  Synthetic
uggaacuucugacccau

SEQ ID NO: 764931 - RNA, 17 nt, Artificial Sequence
  Synthetic
ugccuuagcauacccau

SEQ ID NO: 764932 - RNA, 17 nt, Artificial Sequence
  Synthetic
uuaaaacuuauacccau

SEQ ID NO: 764933 - RNA, 17 nt, Artificial Sequence
  Synthetic
ccaacaauucuacccau

SEQ ID NO: 764934 - RNA, 17 nt, Artificial Sequence
  Synthetic
ccuguucucuuacccau

SEQ ID NO: 764935 - RNA, 17 nt, Artificial Sequence
  Synthetic
ucauuuacuuuacccau

SEQ ID NO: 764936 - RNA, 17 nt, Artificial Sequence
  Synthetic
uagaugagaaaccccau

SEQ ID NO: 764937 - RNA, 17 nt, Artificial Sequence
  Synthetic
ucuucauugaaccccau

SEQ ID NO: 764938 - RNA, 17 nt, Artificial Sequence
  Synthetic
ugucuuuuucuccccau

SEQ ID NO: 764939 - RNA, 17 nt, Artificial Sequence
  Synthetic
accagccacuuccccau

SEQ ID NO: 764940 - RNA, 17 nt, Artificial Sequence
  Synthetic
ccacucgcaaagcccau

SEQ ID NO: 764941 - RNA, 17 nt, Artificial Sequence
  Synthetic
cccaacuugaagcccau

SEQ ID NO: 764942 - RNA, 17 nt, Artificial Sequence
  Synthetic
uuaagaggccagcccau

SEQ ID NO: 764943 - RNA, 17 nt, Artificial Sequence
  Synthetic
aauuuuguccagcccau

SEQ ID NO: 764944 - RNA, 17 nt, Artificial Sequence
  Synthetic
auaguuagauagcccau

SEQ ID NO: 764945 - RNA, 17 nt, Artificial Sequence
  Synthetic
aggagauuuuagcccau

SEQ ID NO: 764946 - RNA, 17 nt, Artificial Sequence
  Synthetic
acaaccuaaaugcccau

SEQ ID NO: 764947 - RNA, 17 nt, Artificial Sequence
  Synthetic
uaaaauuauaugcccau

SEQ ID NO: 764948 - RNA, 17 nt, Artificial Sequence
  Synthetic
aauaaucuccugcccau

SEQ ID NO: 764949 - RNA, 17 nt, Artificial Sequence
  Synthetic
cuugagcaucugcccau

SEQ ID NO: 764950 - RNA, 17 nt, Artificial Sequence
  Synthetic
aacucugcucugcccau

SEQ ID NO: 764951 - RNA, 17 nt, Artificial Sequence
  Synthetic
auuguucuuuugcccau

SEQ ID NO: 764952 - RNA, 17 nt, Artificial Sequence
  Synthetic
acuugcuacuaucccau

SEQ ID NO: 764953 - RNA, 17 nt, Artificial Sequence
  Synthetic
uucuucaugccucccau

SEQ ID NO: 764954 - RNA, 17 nt, Artificial Sequence
  Synthetic
auauacugaucucccau

SEQ ID NO: 764955 - RNA, 17 nt, Artificial Sequence
  Synthetic
uauagucuuucucccau

SEQ ID NO: 764956 - RNA, 17 nt, Artificial Sequence
  Synthetic
uuucuucuuugucccau

SEQ ID NO: 764957 - RNA, 17 nt, Artificial Sequence
  Synthetic
ccacauuaaauucccau

SEQ ID NO: 764958 - RNA, 17 nt, Artificial Sequence
  Synthetic
auggggucuguucccau

SEQ ID NO: 764959 - RNA, 17 nt, Artificial Sequence
  Synthetic
agucugcucuuucccau

SEQ ID NO: 764960 - RNA, 17 nt, Artificial Sequence
  Synthetic
acagacuucuuucccau

SEQ ID NO: 764961 - RNA, 17 nt, Artificial Sequence
  Synthetic
uccacaaauuuucccau

SEQ ID NO: 764962 - RNA, 17 nt, Artificial Sequence
  Synthetic
uguuaacuuuuucccau

SEQ ID NO: 764963 - RNA, 17 nt, Artificial Sequence
  Synthetic
cauaggaguaaagccau

SEQ ID NO: 764964 - RNA, 17 nt, Artificial Sequence
  Synthetic
aucgaguguaaagccau

SEQ ID NO: 764965 - RNA, 17 nt, Artificial Sequence
  Synthetic
auucuaucacaagccau

SEQ ID NO: 764966 - RNA, 17 nt, Artificial Sequence
  Synthetic
cagaauuccuaagccau

SEQ ID NO: 764967 - RNA, 17 nt, Artificial Sequence
  Synthetic
auuaaauguuaagccau

SEQ ID NO: 764968 - RNA, 17 nt, Artificial Sequence
  Synthetic
cugauccagccagccau

SEQ ID NO: 764969 - RNA, 17 nt, Artificial Sequence
  Synthetic
aggugcaaagcagccau

SEQ ID NO: 764970 - RNA, 17 nt, Artificial Sequence
  Synthetic
uucagcagugcagccau

SEQ ID NO: 764971 - RNA, 17 nt, Artificial Sequence
  Synthetic
agagugcuauuagccau

SEQ ID NO: 764972 - RNA, 17 nt, Artificial Sequence
  Synthetic
ucuaaaaacaaggccau

SEQ ID NO: 764973 - RNA, 17 nt, Artificial Sequence
  Synthetic
aucauguugaaggccau

SEQ ID NO: 764974 - RNA, 17 nt, Artificial Sequence
  Synthetic
ccaugagaguaggccau

SEQ ID NO: 764975 - RNA, 17 nt, Artificial Sequence
  Synthetic
ccacugcgcccggccau

SEQ ID NO: 764976 - RNA, 17 nt, Artificial Sequence
  Synthetic
cuacaaguuugggccau

SEQ ID NO: 764977 - RNA, 17 nt, Artificial Sequence
  Synthetic
cuucacaauauggccau

SEQ ID NO: 764978 - RNA, 17 nt, Artificial Sequence
  Synthetic
uaauguugccaugccau

SEQ ID NO: 764979 - RNA, 17 nt, Artificial Sequence
  Synthetic
augacuaaauaugccau

SEQ ID NO: 764980 - RNA, 17 nt, Artificial Sequence
  Synthetic
caaaaauaguaugccau

SEQ ID NO: 764981 - RNA, 17 nt, Artificial Sequence
  Synthetic
aaguuucacucugccau

SEQ ID NO: 764982 - RNA, 17 nt, Artificial Sequence
  Synthetic
auuggaauccuugccau

SEQ ID NO: 764983 - RNA, 17 nt, Artificial Sequence
  Synthetic
uuggcuuuuguugccau

SEQ ID NO: 764984 - RNA, 17 nt, Artificial Sequence
  Synthetic
auuaaauaauuugccau

SEQ ID NO: 764985 - RNA, 17 nt, Artificial Sequence
  Synthetic
uuauguaucuuugccau

SEQ ID NO: 764986 - RNA, 17 nt, Artificial Sequence
  Synthetic
acauuuuuuuuugccau

SEQ ID NO: 764987 - RNA, 17 nt, Artificial Sequence
  Synthetic
ugcuccaagaaauccau

SEQ ID NO: 764988 - RNA, 17 nt, Artificial Sequence
  Synthetic
acaacuucuaaauccau

SEQ ID NO: 764989 - RNA, 17 nt, Artificial Sequence
  Synthetic
aaaucaucccaauccau

SEQ ID NO: 764990 - RNA, 17 nt, Artificial Sequence
  Synthetic
uuucgagaagaauccau

SEQ ID NO: 764991 - RNA, 17 nt, Artificial Sequence
  Synthetic
auuaauugggaauccau

SEQ ID NO: 764992 - RNA, 17 nt, Artificial Sequence
  Synthetic
aaaaucuaaacauccau

SEQ ID NO: 764993 - RNA, 17 nt, Artificial Sequence
  Synthetic
uacuaugacacauccau

SEQ ID NO: 764994 - RNA, 17 nt, Artificial Sequence
  Synthetic
augcauacuccauccau

SEQ ID NO: 764995 - RNA, 17 nt, Artificial Sequence
  Synthetic
uuaauucaggcauccau

SEQ ID NO: 764996 - RNA, 17 nt, Artificial Sequence
  Synthetic
aguucuacuucauccau

SEQ ID NO: 764997 - RNA, 17 nt, Artificial Sequence
  Synthetic
cuugcagguggauccau

SEQ ID NO: 764998 - RNA, 17 nt, Artificial Sequence
  Synthetic
caccuccaaauauccau

SEQ ID NO: 764999 - RNA, 17 nt, Artificial Sequence
  Synthetic
aagugcuguauauccau

SEQ ID NO: 765000 - RNA, 17 nt, Artificial Sequence
  Synthetic
augccaaaaguauccau

SEQ ID NO: 765001 - RNA, 17 nt, Artificial Sequence
  Synthetic
ugucccucaguauccau

SEQ ID NO: 765002 - RNA, 17 nt, Artificial Sequence
  Synthetic
uggcccucuguauccau

SEQ ID NO: 765003 - RNA, 17 nt, Artificial Sequence
  Synthetic
cgauaaugcuuauccau

SEQ ID NO: 765004 - RNA, 17 nt, Artificial Sequence
  Synthetic
uuuugcucacacuccau

SEQ ID NO: 765005 - RNA, 17 nt, Artificial Sequence
  Synthetic
aacaauauucacuccau

SEQ ID NO: 765006 - RNA, 17 nt, Artificial Sequence
  Synthetic
caacugcucuacuccau

SEQ ID NO: 765007 - RNA, 17 nt, Artificial Sequence
  Synthetic
aggacuggcuccuccau

SEQ ID NO: 765008 - RNA, 17 nt, Artificial Sequence
  Synthetic
ugggcucccaucuccau

SEQ ID NO: 765009 - RNA, 17 nt, Artificial Sequence
  Synthetic
aaaauggcuaucuccau

SEQ ID NO: 765010 - RNA, 17 nt, Artificial Sequence
  Synthetic
acaagacaucucuccau

SEQ ID NO: 765011 - RNA, 17 nt, Artificial Sequence
  Synthetic
accugaccugucuccau

SEQ ID NO: 765012 - RNA, 17 nt, Artificial Sequence
  Synthetic
cuagaacauuucuccau

SEQ ID NO: 765013 - RNA, 17 nt, Artificial Sequence
  Synthetic
ugagacuauuucuccau

SEQ ID NO: 765014 - RNA, 17 nt, Artificial Sequence
  Synthetic
aaaccaccuuucuccau

SEQ ID NO: 765015 - RNA, 17 nt, Artificial Sequence
  Synthetic
ugaauguuuuucuccau

SEQ ID NO: 765016 - RNA, 17 nt, Artificial Sequence
  Synthetic
auucuucucaaguccau

SEQ ID NO: 765017 - RNA, 17 nt, Artificial Sequence
  Synthetic
cauccagagaaguccau

SEQ ID NO: 765018 - RNA, 17 nt, Artificial Sequence
  Synthetic
cuagaccucugguccau

SEQ ID NO: 765019 - RNA, 17 nt, Artificial Sequence
  Synthetic
aauauguauugguccau

SEQ ID NO: 765020 - RNA, 17 nt, Artificial Sequence
  Synthetic
uacgcuuucauguccau

SEQ ID NO: 765021 - RNA, 17 nt, Artificial Sequence
  Synthetic
aagaaauuacuguccau

SEQ ID NO: 765022 - RNA, 17 nt, Artificial Sequence
  Synthetic
cccgucccuguguccau

SEQ ID NO: 765023 - RNA, 17 nt, Artificial Sequence
  Synthetic
agaaauuuuguguccau

SEQ ID NO: 765024 - RNA, 17 nt, Artificial Sequence
  Synthetic
ccccagcuuuuguccau

SEQ ID NO: 765025 - RNA, 17 nt, Artificial Sequence
  Synthetic
acugauauaaauuccau

SEQ ID NO: 765026 - RNA, 17 nt, Artificial Sequence
  Synthetic
aacuucaccaauuccau

SEQ ID NO: 765027 - RNA, 17 nt, Artificial Sequence
  Synthetic
aaccagaaagauuccau

SEQ ID NO: 765028 - RNA, 17 nt, Artificial Sequence
  Synthetic
uucccuuuguauuccau

SEQ ID NO: 765029 - RNA, 17 nt, Artificial Sequence
  Synthetic
ucuuugucuuauuccau

SEQ ID NO: 765030 - RNA, 17 nt, Artificial Sequence
  Synthetic
ccaaacauagcuuccau

SEQ ID NO: 765031 - RNA, 17 nt, Artificial Sequence
  Synthetic
cuugucacuucuuccau

SEQ ID NO: 765032 - RNA, 17 nt, Artificial Sequence
  Synthetic
aaugauauuucuuccau

SEQ ID NO: 765033 - RNA, 17 nt, Artificial Sequence
  Synthetic
ugaggccucuguuccau

SEQ ID NO: 765034 - RNA, 17 nt, Artificial Sequence
  Synthetic
ucucuauucuguuccau

SEQ ID NO: 765035 - RNA, 17 nt, Artificial Sequence
  Synthetic
cuuccguucuguuccau

SEQ ID NO: 765036 - RNA, 17 nt, Artificial Sequence
  Synthetic
ccucuguucuguuccau

SEQ ID NO: 765037 - RNA, 17 nt, Artificial Sequence
  Synthetic
ucacauuauauuuccau

SEQ ID NO: 765038 - RNA, 17 nt, Artificial Sequence
  Synthetic
acuccaacacuuuccau

SEQ ID NO: 765039 - RNA, 17 nt, Artificial Sequence
  Synthetic
aacuuaaaucuuuccau

SEQ ID NO: 765040 - RNA, 17 nt, Artificial Sequence
  Synthetic
uguuucucaguuuccau

SEQ ID NO: 765041 - RNA, 17 nt, Artificial Sequence
  Synthetic
ugucagugaguuuccau

SEQ ID NO: 765042 - RNA, 17 nt, Artificial Sequence
  Synthetic
uauguuuggguuuccau

SEQ ID NO: 765043 - RNA, 17 nt, Artificial Sequence
  Synthetic
uagcuggaauuuuccau

SEQ ID NO: 765044 - RNA, 17 nt, Artificial Sequence
  Synthetic
uuauucccauuuuccau

SEQ ID NO: 765045 - RNA, 17 nt, Artificial Sequence
  Synthetic
ucucuagucuuuuccau

SEQ ID NO: 765046 - RNA, 17 nt, Artificial Sequence
  Synthetic
ccugaaucuuuuuccau

SEQ ID NO: 765047 - RNA, 17 nt, Artificial Sequence
  Synthetic
cuaaaaauaaaaagcau

SEQ ID NO: 765048 - RNA, 17 nt, Artificial Sequence
  Synthetic
aauuugugcaaaagcau

SEQ ID NO: 765049 - RNA, 17 nt, Artificial Sequence
  Synthetic
auuauaaugaaaagcau

SEQ ID NO: 765050 - RNA, 17 nt, Artificial Sequence
  Synthetic
cgcaccugacaaagcau

SEQ ID NO: 765051 - RNA, 17 nt, Artificial Sequence
  Synthetic
aguaguucucaaagcau

SEQ ID NO: 765052 - RNA, 17 nt, Artificial Sequence
  Synthetic
accuauguggaaagcau

SEQ ID NO: 765053 - RNA, 17 nt, Artificial Sequence
  Synthetic
uuugccuuugaaagcau

SEQ ID NO: 765054 - RNA, 17 nt, Artificial Sequence
  Synthetic
aguuuuuuaacaagcau

SEQ ID NO: 765055 - RNA, 17 nt, Artificial Sequence
  Synthetic
aaucagauaccaagcau

SEQ ID NO: 765056 - RNA, 17 nt, Artificial Sequence
  Synthetic
uccaggaauccaagcau

SEQ ID NO: 765057 - RNA, 17 nt, Artificial Sequence
  Synthetic
caagagguaucaagcau

SEQ ID NO: 765058 - RNA, 17 nt, Artificial Sequence
  Synthetic
ccacuugccagaagcau

SEQ ID NO: 765059 - RNA, 17 nt, Artificial Sequence
  Synthetic
uauucgaaaggaagcau

SEQ ID NO: 765060 - RNA, 17 nt, Artificial Sequence
  Synthetic
aacaaaaaaauaagcau

SEQ ID NO: 765061 - RNA, 17 nt, Artificial Sequence
  Synthetic
auuuuccacauaagcau

SEQ ID NO: 765062 - RNA, 17 nt, Artificial Sequence
  Synthetic
uguguagugauaagcau

SEQ ID NO: 765063 - RNA, 17 nt, Artificial Sequence
  Synthetic
ccucauaagguaagcau

SEQ ID NO: 765064 - RNA, 17 nt, Artificial Sequence
  Synthetic
aaaaaaaaaaacagcau

SEQ ID NO: 765065 - RNA, 17 nt, Artificial Sequence
  Synthetic
acaugggaaaacagcau

SEQ ID NO: 765066 - RNA, 17 nt, Artificial Sequence
  Synthetic
cuuacauaaaacagcau

SEQ ID NO: 765067 - RNA, 17 nt, Artificial Sequence
  Synthetic
uaucacgacaacagcau

SEQ ID NO: 765068 - RNA, 17 nt, Artificial Sequence
  Synthetic
uaucacgagaacagcau

SEQ ID NO: 765069 - RNA, 17 nt, Artificial Sequence
  Synthetic
uaucaggagaacagcau

SEQ ID NO: 765070 - RNA, 17 nt, Artificial Sequence
  Synthetic
uaucaugagaacagcau

SEQ ID NO: 765071 - RNA, 17 nt, Artificial Sequence
  Synthetic
aauggagguaccagcau

SEQ ID NO: 765072 - RNA, 17 nt, Artificial Sequence
  Synthetic
ugcggccuugccagcau

SEQ ID NO: 765073 - RNA, 17 nt, Artificial Sequence
  Synthetic
ccuacaauguccagcau

SEQ ID NO: 765074 - RNA, 17 nt, Artificial Sequence
  Synthetic
ccucugacuggcagcau

SEQ ID NO: 765075 - RNA, 17 nt, Artificial Sequence
  Synthetic
accuaaaugugcagcau

SEQ ID NO: 765076 - RNA, 17 nt, Artificial Sequence
  Synthetic
ucuaaugaacucagcau

SEQ ID NO: 765077 - RNA, 17 nt, Artificial Sequence
  Synthetic
auuuuaaaguucagcau

SEQ ID NO: 765078 - RNA, 17 nt, Artificial Sequence
  Synthetic
uagccuccuuucagcau

SEQ ID NO: 765079 - RNA, 17 nt, Artificial Sequence
  Synthetic
uuugauuuacagagcau

SEQ ID NO: 765080 - RNA, 17 nt, Artificial Sequence
  Synthetic
augcaagaugagagcau

SEQ ID NO: 765081 - RNA, 17 nt, Artificial Sequence
  Synthetic
uucccuuuauagagcau

SEQ ID NO: 765082 - RNA, 17 nt, Artificial Sequence
  Synthetic
uucuuaugguagagcau

SEQ ID NO: 765083 - RNA, 17 nt, Artificial Sequence
  Synthetic
auccauauuuagagcau

SEQ ID NO: 765084 - RNA, 17 nt, Artificial Sequence
  Synthetic
ucaucccuaaggagcau

SEQ ID NO: 765085 - RNA, 17 nt, Artificial Sequence
  Synthetic
aaugucuagaggagcau

SEQ ID NO: 765086 - RNA, 17 nt, Artificial Sequence
  Synthetic
agcagugaagggagcau

SEQ ID NO: 765087 - RNA, 17 nt, Artificial Sequence
  Synthetic
agggggauggggagcau

SEQ ID NO: 765088 - RNA, 17 nt, Artificial Sequence
  Synthetic
auggaggacaugagcau

SEQ ID NO: 765089 - RNA, 17 nt, Artificial Sequence
  Synthetic
auguggguuuugagcau

SEQ ID NO: 765090 - RNA, 17 nt, Artificial Sequence
  Synthetic
aaaggaaacaauagcau

SEQ ID NO: 765091 - RNA, 17 nt, Artificial Sequence
  Synthetic
uaucaugagaauagcau

SEQ ID NO: 765092 - RNA, 17 nt, Artificial Sequence
  Synthetic
auagaauaagauagcau

SEQ ID NO: 765093 - RNA, 17 nt, Artificial Sequence
  Synthetic
agggggagggauagcau

SEQ ID NO: 765094 - RNA, 17 nt, Artificial Sequence
  Synthetic
cgggggagggauagcau

SEQ ID NO: 765095 - RNA, 17 nt, Artificial Sequence
  Synthetic
auggagggugauagcau

SEQ ID NO: 765096 - RNA, 17 nt, Artificial Sequence
  Synthetic
aacuugucaucuagcau

SEQ ID NO: 765097 - RNA, 17 nt, Artificial Sequence
  Synthetic
aucuauuaaaguagcau

SEQ ID NO: 765098 - RNA, 17 nt, Artificial Sequence
  Synthetic
caauauggcaguagcau

SEQ ID NO: 765099 - RNA, 17 nt, Artificial Sequence
  Synthetic
uagcaggaagguagcau

SEQ ID NO: 765100 - RNA, 17 nt, Artificial Sequence
  Synthetic
cacccauguuguagcau

SEQ ID NO: 765101 - RNA, 17 nt, Artificial Sequence
  Synthetic
uaaaguuaucuuagcau

SEQ ID NO: 765102 - RNA, 17 nt, Artificial Sequence
  Synthetic
auccugagucuuagcau

SEQ ID NO: 765103 - RNA, 17 nt, Artificial Sequence
  Synthetic
cacuucucauuuagcau

SEQ ID NO: 765104 - RNA, 17 nt, Artificial Sequence
  Synthetic
cuagaaaggaaacgcau

SEQ ID NO: 765105 - RNA, 17 nt, Artificial Sequence
  Synthetic
auguaguuagaacgcau

SEQ ID NO: 765106 - RNA, 17 nt, Artificial Sequence
  Synthetic
uuuuggagguaacgcau

SEQ ID NO: 765107 - RNA, 17 nt, Artificial Sequence
  Synthetic
cuuccaguugaucgcau

SEQ ID NO: 765108 - RNA, 17 nt, Artificial Sequence
  Synthetic
aauuagcacaaaggcau

SEQ ID NO: 765109 - RNA, 17 nt, Artificial Sequence
  Synthetic
auucaggacaaaggcau

SEQ ID NO: 765110 - RNA, 17 nt, Artificial Sequence
  Synthetic
ucugugaagaaaggcau

SEQ ID NO: 765111 - RNA, 17 nt, Artificial Sequence
  Synthetic
acuauguuacaaggcau

SEQ ID NO: 765112 - RNA, 17 nt, Artificial Sequence
  Synthetic
ucacauaaucaaggcau

SEQ ID NO: 765113 - RNA, 17 nt, Artificial Sequence
  Synthetic
cauugcauuuaaggcau

SEQ ID NO: 765114 - RNA, 17 nt, Artificial Sequence
  Synthetic
auucaggauacaggcau

SEQ ID NO: 765115 - RNA, 17 nt, Artificial Sequence
  Synthetic
augggggguacaggcau

SEQ ID NO: 765116 - RNA, 17 nt, Artificial Sequence
  Synthetic
accuaugugccaggcau

SEQ ID NO: 765117 - RNA, 17 nt, Artificial Sequence
  Synthetic
caccuaaugucaggcau

SEQ ID NO: 765118 - RNA, 17 nt, Artificial Sequence
  Synthetic
caaucuagaagaggcau

SEQ ID NO: 765119 - RNA, 17 nt, Artificial Sequence
  Synthetic
aagugaggcagaggcau

SEQ ID NO: 765120 - RNA, 17 nt, Artificial Sequence
  Synthetic
uuccacccuggaggcau

SEQ ID NO: 765121 - RNA, 17 nt, Artificial Sequence
  Synthetic
cucaaagaaugaggcau

SEQ ID NO: 765122 - RNA, 17 nt, Artificial Sequence
  Synthetic
uuuguuuuaugaggcau

SEQ ID NO: 765123 - RNA, 17 nt, Artificial Sequence
  Synthetic
aaguggaagugaggcau

SEQ ID NO: 765124 - RNA, 17 nt, Artificial Sequence
  Synthetic
auucaggacauaggcau

SEQ ID NO: 765125 - RNA, 17 nt, Artificial Sequence
  Synthetic
aaucuuuccauaggcau

SEQ ID NO: 765126 - RNA, 17 nt, Artificial Sequence
  Synthetic
auucaggauauaggcau

SEQ ID NO: 765127 - RNA, 17 nt, Artificial Sequence
  Synthetic
uguaaaacucuaggcau

SEQ ID NO: 765128 - RNA, 17 nt, Artificial Sequence
  Synthetic
auucaggacguaggcau

SEQ ID NO: 765129 - RNA, 17 nt, Artificial Sequence
  Synthetic
uuuuacaguuuaggcau

SEQ ID NO: 765130 - RNA, 17 nt, Artificial Sequence
  Synthetic
ccacugcacuccggcau

SEQ ID NO: 765131 - RNA, 17 nt, Artificial Sequence
  Synthetic
uggaagccaaagggcau

SEQ ID NO: 765132 - RNA, 17 nt, Artificial Sequence
  Synthetic
ucucaguaagagggcau

SEQ ID NO: 765133 - RNA, 17 nt, Artificial Sequence
  Synthetic
aaauaaaaugagggcau

SEQ ID NO: 765134 - RNA, 17 nt, Artificial Sequence
  Synthetic
agaaaaccauagggcau

SEQ ID NO: 765135 - RNA, 17 nt, Artificial Sequence
  Synthetic
aauuggauaaggggcau

SEQ ID NO: 765136 - RNA, 17 nt, Artificial Sequence
  Synthetic
aauaccaugaggggcau

SEQ ID NO: 765137 - RNA, 17 nt, Artificial Sequence
  Synthetic
acaguaggauggggcau

SEQ ID NO: 765138 - RNA, 17 nt, Artificial Sequence
  Synthetic
uucuaucuguggggcau

SEQ ID NO: 765139 - RNA, 17 nt, Artificial Sequence
  Synthetic
ucaguuuuacugggcau

SEQ ID NO: 765140 - RNA, 17 nt, Artificial Sequence
  Synthetic
aggagaacucugggcau

SEQ ID NO: 765141 - RNA, 17 nt, Artificial Sequence
  Synthetic
agugaaagagugggcau

SEQ ID NO: 765142 - RNA, 17 nt, Artificial Sequence
  Synthetic
cucccauuauugggcau

SEQ ID NO: 765143 - RNA, 17 nt, Artificial Sequence
  Synthetic
uggaggcaggauggcau

SEQ ID NO: 765144 - RNA, 17 nt, Artificial Sequence
  Synthetic
uguggguaaaguggcau

SEQ ID NO: 765145 - RNA, 17 nt, Artificial Sequence
  Synthetic
aggcagugcaguggcau

SEQ ID NO: 765146 - RNA, 17 nt, Artificial Sequence
  Synthetic
uucugcaguuguggcau

SEQ ID NO: 765147 - RNA, 17 nt, Artificial Sequence
  Synthetic
uagagggauauuggcau

SEQ ID NO: 765148 - RNA, 17 nt, Artificial Sequence
  Synthetic
agauaugaccuuggcau

SEQ ID NO: 765149 - RNA, 17 nt, Artificial Sequence
  Synthetic
uugguuaggcuuggcau

SEQ ID NO: 765150 - RNA, 17 nt, Artificial Sequence
  Synthetic
ucgggaagaguuggcau

SEQ ID NO: 765151 - RNA, 17 nt, Artificial Sequence
  Synthetic
aauuauaauuuuggcau

SEQ ID NO: 765152 - RNA, 17 nt, Artificial Sequence
  Synthetic
auggauacuuuuggcau

SEQ ID NO: 765153 - RNA, 17 nt, Artificial Sequence
  Synthetic
acuuuuaaaaaaugcau

SEQ ID NO: 765154 - RNA, 17 nt, Artificial Sequence
  Synthetic
aauauccuacaaugcau

SEQ ID NO: 765155 - RNA, 17 nt, Artificial Sequence
  Synthetic
aaucaauaagaaugcau

SEQ ID NO: 765156 - RNA, 17 nt, Artificial Sequence
  Synthetic
acaaauaccuaaugcau

SEQ ID NO: 765157 - RNA, 17 nt, Artificial Sequence
  Synthetic
cacaggacuuaaugcau

SEQ ID NO: 765158 - RNA, 17 nt, Artificial Sequence
  Synthetic
uaguguggaacaugcau

SEQ ID NO: 765159 - RNA, 17 nt, Artificial Sequence
  Synthetic
ugauucagaucaugcau

SEQ ID NO: 765160 - RNA, 17 nt, Artificial Sequence
  Synthetic
caccuuguaucaugcau

SEQ ID NO: 765161 - RNA, 17 nt, Artificial Sequence
  Synthetic
acacagcuaagaugcau

SEQ ID NO: 765162 - RNA, 17 nt, Artificial Sequence
  Synthetic
cagaugaagagaugcau

SEQ ID NO: 765163 - RNA, 17 nt, Artificial Sequence
  Synthetic
uuuuggaggugaugcau

SEQ ID NO: 765164 - RNA, 17 nt, Artificial Sequence
  Synthetic
cuguaagagcuaugcau

SEQ ID NO: 765165 - RNA, 17 nt, Artificial Sequence
  Synthetic
uccucaaguuuaugcau

SEQ ID NO: 765166 - RNA, 17 nt, Artificial Sequence
  Synthetic
ucacagaaccacugcau

SEQ ID NO: 765167 - RNA, 17 nt, Artificial Sequence
  Synthetic
ccuaaauaugacugcau

SEQ ID NO: 765168 - RNA, 17 nt, Artificial Sequence
  Synthetic
auuaaauguuacugcau

SEQ ID NO: 765169 - RNA, 17 nt, Artificial Sequence
  Synthetic
aacuguugucccugcau

SEQ ID NO: 765170 - RNA, 17 nt, Artificial Sequence
  Synthetic
aauucugcugccugcau

SEQ ID NO: 765171 - RNA, 17 nt, Artificial Sequence
  Synthetic
auguaacaauccugcau

SEQ ID NO: 765172 - RNA, 17 nt, Artificial Sequence
  Synthetic
uaacugaaaagcugcau

SEQ ID NO: 765173 - RNA, 17 nt, Artificial Sequence
  Synthetic
agcccugccagcugcau

SEQ ID NO: 765174 - RNA, 17 nt, Artificial Sequence
  Synthetic
uacaucugaggcugcau

SEQ ID NO: 765175 - RNA, 17 nt, Artificial Sequence
  Synthetic
cuauuuauuggcugcau

SEQ ID NO: 765176 - RNA, 17 nt, Artificial Sequence
  Synthetic
ccuccccauaucugcau

SEQ ID NO: 765177 - RNA, 17 nt, Artificial Sequence
  Synthetic
aggacaauccucugcau

SEQ ID NO: 765178 - RNA, 17 nt, Artificial Sequence
  Synthetic
uuagucauuuucugcau

SEQ ID NO: 765179 - RNA, 17 nt, Artificial Sequence
  Synthetic
ucuggauaucagugcau

SEQ ID NO: 765180 - RNA, 17 nt, Artificial Sequence
  Synthetic
aguauuccauugugcau

SEQ ID NO: 765181 - RNA, 17 nt, Artificial Sequence
  Synthetic
uaaccuuugaauugcau

SEQ ID NO: 765182 - RNA, 17 nt, Artificial Sequence
  Synthetic
agaugacaucauugcau

SEQ ID NO: 765183 - RNA, 17 nt, Artificial Sequence
  Synthetic
auuuucuguuauugcau

SEQ ID NO: 765184 - RNA, 17 nt, Artificial Sequence
  Synthetic
auaucaaagacuugcau

SEQ ID NO: 765185 - RNA, 17 nt, Artificial Sequence
  Synthetic
ucuuagcuuccuugcau

SEQ ID NO: 765186 - RNA, 17 nt, Artificial Sequence
  Synthetic
cagcuaaaaucuugcau

SEQ ID NO: 765187 - RNA, 17 nt, Artificial Sequence
  Synthetic
uuuucugugucuugcau

SEQ ID NO: 765188 - RNA, 17 nt, Artificial Sequence
  Synthetic
caaauauguuguugcau

SEQ ID NO: 765189 - RNA, 17 nt, Artificial Sequence
  Synthetic
aauauaauuauuugcau

SEQ ID NO: 765190 - RNA, 17 nt, Artificial Sequence
  Synthetic
auucuaucacuuugcau

SEQ ID NO: 765191 - RNA, 17 nt, Artificial Sequence
  Synthetic
uagacaggacuuugcau

SEQ ID NO: 765192 - RNA, 17 nt, Artificial Sequence
  Synthetic
ccuuuuguucuuugcau

SEQ ID NO: 765193 - RNA, 17 nt, Artificial Sequence
  Synthetic
caccuagaauuuugcau

SEQ ID NO: 765194 - RNA, 17 nt, Artificial Sequence
  Synthetic
cucuaaucauuuugcau

SEQ ID NO: 765195 - RNA, 17 nt, Artificial Sequence
  Synthetic
cugggaccuuuuugcau

SEQ ID NO: 765196 - RNA, 17 nt, Artificial Sequence
  Synthetic
auggaaaaaaaaaucau

SEQ ID NO: 765197 - RNA, 17 nt, Artificial Sequence
  Synthetic
uuaaagaauaaaaucau

SEQ ID NO: 765198 - RNA, 17 nt, Artificial Sequence
  Synthetic
aaaaauguucaaaucau

SEQ ID NO: 765199 - RNA, 17 nt, Artificial Sequence
  Synthetic
ugcuacaaagaaaucau

SEQ ID NO: 765200 - RNA, 17 nt, Artificial Sequence
  Synthetic
uuucuugaauaaaucau

SEQ ID NO: 765201 - RNA, 17 nt, Artificial Sequence
  Synthetic
cugauuccauaaaucau

SEQ ID NO: 765202 - RNA, 17 nt, Artificial Sequence
  Synthetic
uuuauggaguaaaucau

SEQ ID NO: 765203 - RNA, 17 nt, Artificial Sequence
  Synthetic
ccaccacacccaaucau

SEQ ID NO: 765204 - RNA, 17 nt, Artificial Sequence
  Synthetic
caccuuuaagcaaucau

SEQ ID NO: 765205 - RNA, 17 nt, Artificial Sequence
  Synthetic
cccuaauuagcaaucau

SEQ ID NO: 765206 - RNA, 17 nt, Artificial Sequence
  Synthetic
ucaacaucgucaaucau

SEQ ID NO: 765207 - RNA, 17 nt, Artificial Sequence
  Synthetic
uuuuuuaauucaaucau

SEQ ID NO: 765208 - RNA, 17 nt, Artificial Sequence
  Synthetic
aauuguacaagaaucau

SEQ ID NO: 765209 - RNA, 17 nt, Artificial Sequence
  Synthetic
auauuucuaagaaucau

SEQ ID NO: 765210 - RNA, 17 nt, Artificial Sequence
  Synthetic
uguaaaagaugaaucau

SEQ ID NO: 765211 - RNA, 17 nt, Artificial Sequence
  Synthetic
ucaacaucacuaaucau

SEQ ID NO: 765212 - RNA, 17 nt, Artificial Sequence
  Synthetic
auuaguugucuaaucau

SEQ ID NO: 765213 - RNA, 17 nt, Artificial Sequence
  Synthetic
aacuuauaaaacaucau

SEQ ID NO: 765214 - RNA, 17 nt, Artificial Sequence
  Synthetic
aaauguugccacaucau

SEQ ID NO: 765215 - RNA, 17 nt, Artificial Sequence
  Synthetic
aaugaaacugacaucau

SEQ ID NO: 765216 - RNA, 17 nt, Artificial Sequence
  Synthetic
auuuaauuagccaucau

SEQ ID NO: 765217 - RNA, 17 nt, Artificial Sequence
  Synthetic
aauacaaaugccaucau

SEQ ID NO: 765218 - RNA, 17 nt, Artificial Sequence
  Synthetic
caacucuuauccaucau

SEQ ID NO: 765219 - RNA, 17 nt, Artificial Sequence
  Synthetic
uguuugaaaagcaucau

SEQ ID NO: 765220 - RNA, 17 nt, Artificial Sequence
  Synthetic
agauaugggagcaucau

SEQ ID NO: 765221 - RNA, 17 nt, Artificial Sequence
  Synthetic
auuugaaaaaucaucau

SEQ ID NO: 765222 - RNA, 17 nt, Artificial Sequence
  Synthetic
uaaagauggaucaucau

SEQ ID NO: 765223 - RNA, 17 nt, Artificial Sequence
  Synthetic
ccaacagugaucaucau

SEQ ID NO: 765224 - RNA, 17 nt, Artificial Sequence
  Synthetic
aaguuaucccucaucau

SEQ ID NO: 765225 - RNA, 17 nt, Artificial Sequence
  Synthetic
cugaccucugucaucau

SEQ ID NO: 765226 - RNA, 17 nt, Artificial Sequence
  Synthetic
agcuguuuauucaucau

SEQ ID NO: 765227 - RNA, 17 nt, Artificial Sequence
  Synthetic
agacaagcuuucaucau

SEQ ID NO: 765228 - RNA, 17 nt, Artificial Sequence
  Synthetic
uuuuguguuuucaucau

SEQ ID NO: 765229 - RNA, 17 nt, Artificial Sequence
  Synthetic
ucugaaugccagaucau

SEQ ID NO: 765230 - RNA, 17 nt, Artificial Sequence
  Synthetic
cacagcuaauagaucau

SEQ ID NO: 765231 - RNA, 17 nt, Artificial Sequence
  Synthetic
uaauagaccuagaucau

SEQ ID NO: 765232 - RNA, 17 nt, Artificial Sequence
  Synthetic
agguaauugaggaucau

SEQ ID NO: 765233 - RNA, 17 nt, Artificial Sequence
  Synthetic
caaagugcuaggaucau

SEQ ID NO: 765234 - RNA, 17 nt, Artificial Sequence
  Synthetic
ugggauugcuggaucau

SEQ ID NO: 765235 - RNA, 17 nt, Artificial Sequence
  Synthetic
ucaacaucacugaucau

SEQ ID NO: 765236 - RNA, 17 nt, Artificial Sequence
  Synthetic
uuaugauaccugaucau

SEQ ID NO: 765237 - RNA, 17 nt, Artificial Sequence
  Synthetic
uucuccuaaaauaucau

SEQ ID NO: 765238 - RNA, 17 nt, Artificial Sequence
  Synthetic
aaauauguuaauaucau

SEQ ID NO: 765239 - RNA, 17 nt, Artificial Sequence
  Synthetic
cagccaaaccauaucau

SEQ ID NO: 765240 - RNA, 17 nt, Artificial Sequence
  Synthetic
cauaaaauucauaucau

SEQ ID NO: 765241 - RNA, 17 nt, Artificial Sequence
  Synthetic
caaaagucugauaucau

SEQ ID NO: 765242 - RNA, 17 nt, Artificial Sequence
  Synthetic
uaacacuuguauaucau

SEQ ID NO: 765243 - RNA, 17 nt, Artificial Sequence
  Synthetic
aaauaaaaaccuaucau

SEQ ID NO: 765244 - RNA, 17 nt, Artificial Sequence
  Synthetic
auuuaaaaugcuaucau

SEQ ID NO: 765245 - RNA, 17 nt, Artificial Sequence
  Synthetic
auauguuuugcuaucau

SEQ ID NO: 765246 - RNA, 17 nt, Artificial Sequence
  Synthetic
cguauaaugaguaucau

SEQ ID NO: 765247 - RNA, 17 nt, Artificial Sequence
  Synthetic
uuuaggucccuuaucau

SEQ ID NO: 765248 - RNA, 17 nt, Artificial Sequence
  Synthetic
ucaauuauccuuaucau

SEQ ID NO: 765249 - RNA, 17 nt, Artificial Sequence
  Synthetic
aggagcauucuuaucau

SEQ ID NO: 765250 - RNA, 17 nt, Artificial Sequence
  Synthetic
agcagcaacuuuaucau

SEQ ID NO: 765251 - RNA, 17 nt, Artificial Sequence
  Synthetic
cagaggaaguuuaucau

SEQ ID NO: 765252 - RNA, 17 nt, Artificial Sequence
  Synthetic
cagcaguaguuuaucau

SEQ ID NO: 765253 - RNA, 17 nt, Artificial Sequence
  Synthetic
cuuuucucuuuuaucau

SEQ ID NO: 765254 - RNA, 17 nt, Artificial Sequence
  Synthetic
agggggacaaaacucau

SEQ ID NO: 765255 - RNA, 17 nt, Artificial Sequence
  Synthetic
cucagggcaaaacucau

SEQ ID NO: 765256 - RNA, 17 nt, Artificial Sequence
  Synthetic
cagugcugaaaacucau

SEQ ID NO: 765257 - RNA, 17 nt, Artificial Sequence
  Synthetic
caguagaacaaacucau

SEQ ID NO: 765258 - RNA, 17 nt, Artificial Sequence
  Synthetic
uauauauaauaacucau

SEQ ID NO: 765259 - RNA, 17 nt, Artificial Sequence
  Synthetic
uuucuuuauccacucau

SEQ ID NO: 765260 - RNA, 17 nt, Artificial Sequence
  Synthetic
aaaaaaaaaucacucau

SEQ ID NO: 765261 - RNA, 17 nt, Artificial Sequence
  Synthetic
agccacccaucacucau

SEQ ID NO: 765262 - RNA, 17 nt, Artificial Sequence
  Synthetic
cauuuauuaucacucau

SEQ ID NO: 765263 - RNA, 17 nt, Artificial Sequence
  Synthetic
cgcauguccucacucau

SEQ ID NO: 765264 - RNA, 17 nt, Artificial Sequence
  Synthetic
cgcauauucucacucau

SEQ ID NO: 765265 - RNA, 17 nt, Artificial Sequence
  Synthetic
ugcauauucucacucau

SEQ ID NO: 765266 - RNA, 17 nt, Artificial Sequence
  Synthetic
cgcauguucucacucau

SEQ ID NO: 765267 - RNA, 17 nt, Artificial Sequence
  Synthetic
cucagacagcaccucau

SEQ ID NO: 765268 - RNA, 17 nt, Artificial Sequence
  Synthetic
aagauuaaugaccucau

SEQ ID NO: 765269 - RNA, 17 nt, Artificial Sequence
  Synthetic
cauagacuugaccucau

SEQ ID NO: 765270 - RNA, 17 nt, Artificial Sequence
  Synthetic
aauuaacuuucccucau

SEQ ID NO: 765271 - RNA, 17 nt, Artificial Sequence
  Synthetic
uuuucuuauagccucau

SEQ ID NO: 765272 - RNA, 17 nt, Artificial Sequence
  Synthetic
ccaacuacuggccucau

SEQ ID NO: 765273 - RNA, 17 nt, Artificial Sequence
  Synthetic
uuuaauuacugccucau

SEQ ID NO: 765274 - RNA, 17 nt, Artificial Sequence
  Synthetic
agauauaucauccucau

SEQ ID NO: 765275 - RNA, 17 nt, Artificial Sequence
  Synthetic
uuuauacauuuccucau

SEQ ID NO: 765276 - RNA, 17 nt, Artificial Sequence
  Synthetic
caaaaugugaagcucau

SEQ ID NO: 765277 - RNA, 17 nt, Artificial Sequence
  Synthetic
auuucuagugagcucau

SEQ ID NO: 765278 - RNA, 17 nt, Artificial Sequence
  Synthetic
aauggauauuagcucau

SEQ ID NO: 765279 - RNA, 17 nt, Artificial Sequence
  Synthetic
cgcauguucucgcucau

SEQ ID NO: 765280 - RNA, 17 nt, Artificial Sequence
  Synthetic
uggauuuucaggcucau

SEQ ID NO: 765281 - RNA, 17 nt, Artificial Sequence
  Synthetic
ucaaaguaaaugcucau

SEQ ID NO: 765282 - RNA, 17 nt, Artificial Sequence
  Synthetic
uaccacaauaugcucau

SEQ ID NO: 765283 - RNA, 17 nt, Artificial Sequence
  Synthetic
ucaauagucuugcucau

SEQ ID NO: 765284 - RNA, 17 nt, Artificial Sequence
  Synthetic
agagccuuuuugcucau

SEQ ID NO: 765285 - RNA, 17 nt, Artificial Sequence
  Synthetic
cuccauuguaaucucau

SEQ ID NO: 765286 - RNA, 17 nt, Artificial Sequence
  Synthetic
acuagagcacaucucau

SEQ ID NO: 765287 - RNA, 17 nt, Artificial Sequence
  Synthetic
ugaaacuaucaucucau

SEQ ID NO: 765288 - RNA, 17 nt, Artificial Sequence
  Synthetic
acagcacuggaucucau

SEQ ID NO: 765289 - RNA, 17 nt, Artificial Sequence
  Synthetic
aaaauaaaauaucucau

SEQ ID NO: 765290 - RNA, 17 nt, Artificial Sequence
  Synthetic
acuuauaacuaucucau

SEQ ID NO: 765291 - RNA, 17 nt, Artificial Sequence
  Synthetic
aaccaugucuaucucau

SEQ ID NO: 765292 - RNA, 17 nt, Artificial Sequence
  Synthetic
uuacacauguaucucau

SEQ ID NO: 765293 - RNA, 17 nt, Artificial Sequence
  Synthetic
uuacaugauacucucau

SEQ ID NO: 765294 - RNA, 17 nt, Artificial Sequence
  Synthetic
ccuugccaagcucucau

SEQ ID NO: 765295 - RNA, 17 nt, Artificial Sequence
  Synthetic
auggcaucaucucucau

SEQ ID NO: 765296 - RNA, 17 nt, Artificial Sequence
  Synthetic
uaauaaucgucucucau

SEQ ID NO: 765297 - RNA, 17 nt, Artificial Sequence
  Synthetic
cuaccaucgucucucau

SEQ ID NO: 765298 - RNA, 17 nt, Artificial Sequence
  Synthetic
aaacagauacgucucau

SEQ ID NO: 765299 - RNA, 17 nt, Artificial Sequence
  Synthetic
cugugacccauucucau

SEQ ID NO: 765300 - RNA, 17 nt, Artificial Sequence
  Synthetic
cgguauuagauucucau

SEQ ID NO: 765301 - RNA, 17 nt, Artificial Sequence
  Synthetic
uguguauuuauucucau

SEQ ID NO: 765302 - RNA, 17 nt, Artificial Sequence
  Synthetic
auuuuuucucuucucau

SEQ ID NO: 765303 - RNA, 17 nt, Artificial Sequence
  Synthetic
agaacaugucuucucau

SEQ ID NO: 765304 - RNA, 17 nt, Artificial Sequence
  Synthetic
auuguacuaaaagucau

SEQ ID NO: 765305 - RNA, 17 nt, Artificial Sequence
  Synthetic
ucugugaagaaagucau

SEQ ID NO: 765306 - RNA, 17 nt, Artificial Sequence
  Synthetic
cuguaaggggaagucau

SEQ ID NO: 765307 - RNA, 17 nt, Artificial Sequence
  Synthetic
cacaagucugaagucau

SEQ ID NO: 765308 - RNA, 17 nt, Artificial Sequence
  Synthetic
caggccugugaagucau

SEQ ID NO: 765309 - RNA, 17 nt, Artificial Sequence
  Synthetic
aagaaaccuuaagucau

SEQ ID NO: 765310 - RNA, 17 nt, Artificial Sequence
  Synthetic
aauaauguggcagucau

SEQ ID NO: 765311 - RNA, 17 nt, Artificial Sequence
  Synthetic
uucacuauugcagucau

SEQ ID NO: 765312 - RNA, 17 nt, Artificial Sequence
  Synthetic
cugcauuaaucagucau

SEQ ID NO: 765313 - RNA, 17 nt, Artificial Sequence
  Synthetic
ugaugugacagagucau

SEQ ID NO: 765314 - RNA, 17 nt, Artificial Sequence
  Synthetic
aaacgugccagagucau

SEQ ID NO: 765315 - RNA, 17 nt, Artificial Sequence
  Synthetic
ugcaagugcagagucau

SEQ ID NO: 765316 - RNA, 17 nt, Artificial Sequence
  Synthetic
augagaaguugagucau

SEQ ID NO: 765317 - RNA, 17 nt, Artificial Sequence
  Synthetic
uugacccucauagucau

SEQ ID NO: 765318 - RNA, 17 nt, Artificial Sequence
  Synthetic
agagaauugauagucau

SEQ ID NO: 765319 - RNA, 17 nt, Artificial Sequence
  Synthetic
aaaauccugcuagucau

SEQ ID NO: 765320 - RNA, 17 nt, Artificial Sequence
  Synthetic
aauaauuuuuuagucau

SEQ ID NO: 765321 - RNA, 17 nt, Artificial Sequence
  Synthetic
cuggaacuuaacgucau

SEQ ID NO: 765322 - RNA, 17 nt, Artificial Sequence
  Synthetic
uaguauugucaggucau

SEQ ID NO: 765323 - RNA, 17 nt, Artificial Sequence
  Synthetic
cccaaagagagggucau

SEQ ID NO: 765324 - RNA, 17 nt, Artificial Sequence
  Synthetic
caaaaauuuggggucau

SEQ ID NO: 765325 - RNA, 17 nt, Artificial Sequence
  Synthetic
aucauauauuuggucau

SEQ ID NO: 765326 - RNA, 17 nt, Artificial Sequence
  Synthetic
cucccaggcaaugucau

SEQ ID NO: 765327 - RNA, 17 nt, Artificial Sequence
  Synthetic
aaugauaagaaugucau

SEQ ID NO: 765328 - RNA, 17 nt, Artificial Sequence
  Synthetic
auuuggaaccaugucau

SEQ ID NO: 765329 - RNA, 17 nt, Artificial Sequence
  Synthetic
agguaaacucaugucau

SEQ ID NO: 765330 - RNA, 17 nt, Artificial Sequence
  Synthetic
uaauccccagaugucau

SEQ ID NO: 765331 - RNA, 17 nt, Artificial Sequence
  Synthetic
uuuaugauauaugucau

SEQ ID NO: 765332 - RNA, 17 nt, Artificial Sequence
  Synthetic
uuuagcuuguaugucau

SEQ ID NO: 765333 - RNA, 17 nt, Artificial Sequence
  Synthetic
uuuuuuauaacugucau

SEQ ID NO: 765334 - RNA, 17 nt, Artificial Sequence
  Synthetic
uccugggagucugucau

SEQ ID NO: 765335 - RNA, 17 nt, Artificial Sequence
  Synthetic
aaauccccaggugucau

SEQ ID NO: 765336 - RNA, 17 nt, Artificial Sequence
  Synthetic
augauuuguggugucau

SEQ ID NO: 765337 - RNA, 17 nt, Artificial Sequence
  Synthetic
uuacauacaugugucau

SEQ ID NO: 765338 - RNA, 17 nt, Artificial Sequence
  Synthetic
uaauccccaugugucau

SEQ ID NO: 765339 - RNA, 17 nt, Artificial Sequence
  Synthetic
uaggauauaugugucau

SEQ ID NO: 765340 - RNA, 17 nt, Artificial Sequence
  Synthetic
uguuuuaauugugucau

SEQ ID NO: 765341 - RNA, 17 nt, Artificial Sequence
  Synthetic
agguaaacuugugucau

SEQ ID NO: 765342 - RNA, 17 nt, Artificial Sequence
  Synthetic
agcaguucuugugucau

SEQ ID NO: 765343 - RNA, 17 nt, Artificial Sequence
  Synthetic
ugaacuguaauugucau

SEQ ID NO: 765344 - RNA, 17 nt, Artificial Sequence
  Synthetic
uugaacauucuugucau

SEQ ID NO: 765345 - RNA, 17 nt, Artificial Sequence
  Synthetic
cauuucacauuugucau

SEQ ID NO: 765346 - RNA, 17 nt, Artificial Sequence
  Synthetic
aauguaguuuuugucau

SEQ ID NO: 765347 - RNA, 17 nt, Artificial Sequence
  Synthetic
caugugguuuuugucau

SEQ ID NO: 765348 - RNA, 17 nt, Artificial Sequence
  Synthetic
auuauacuaaaauucau

SEQ ID NO: 765349 - RNA, 17 nt, Artificial Sequence
  Synthetic
caggaauacaaauucau

SEQ ID NO: 765350 - RNA, 17 nt, Artificial Sequence
  Synthetic
aucuaaagcaaauucau

SEQ ID NO: 765351 - RNA, 17 nt, Artificial Sequence
  Synthetic
cauaugacacaauucau

SEQ ID NO: 765352 - RNA, 17 nt, Artificial Sequence
  Synthetic
auuagaauacaauucau

SEQ ID NO: 765353 - RNA, 17 nt, Artificial Sequence
  Synthetic
ugaaguggucaauucau

SEQ ID NO: 765354 - RNA, 17 nt, Artificial Sequence
  Synthetic
uguuugguagaauucau

SEQ ID NO: 765355 - RNA, 17 nt, Artificial Sequence
  Synthetic
cuguuaaaguaauucau

SEQ ID NO: 765356 - RNA, 17 nt, Artificial Sequence
  Synthetic
caccugaaguaauucau

SEQ ID NO: 765357 - RNA, 17 nt, Artificial Sequence
  Synthetic
aaggauauguaauucau

SEQ ID NO: 765358 - RNA, 17 nt, Artificial Sequence
  Synthetic
aagauaucuuaauucau

SEQ ID NO: 765359 - RNA, 17 nt, Artificial Sequence
  Synthetic
agcagaguuuaauucau

SEQ ID NO: 765360 - RNA, 17 nt, Artificial Sequence
  Synthetic
uuucuuuauccauucau

SEQ ID NO: 765361 - RNA, 17 nt, Artificial Sequence
  Synthetic
aagcauauuccauucau

SEQ ID NO: 765362 - RNA, 17 nt, Artificial Sequence
  Synthetic
cgcauauucucauucau

SEQ ID NO: 765363 - RNA, 17 nt, Artificial Sequence
  Synthetic
ccauuugcuucauucau

SEQ ID NO: 765364 - RNA, 17 nt, Artificial Sequence
  Synthetic
cugaacaauagauucau

SEQ ID NO: 765365 - RNA, 17 nt, Artificial Sequence
  Synthetic
cuggacaauagauucau

SEQ ID NO: 765366 - RNA, 17 nt, Artificial Sequence
  Synthetic
uauguuuuuagauucau

SEQ ID NO: 765367 - RNA, 17 nt, Artificial Sequence
  Synthetic
agccauggccgauucau

SEQ ID NO: 765368 - RNA, 17 nt, Artificial Sequence
  Synthetic
ccagcuccuggauucau

SEQ ID NO: 765369 - RNA, 17 nt, Artificial Sequence
  Synthetic
caaguuaacauauucau

SEQ ID NO: 765370 - RNA, 17 nt, Artificial Sequence
  Synthetic
acuuacgauauauucau

SEQ ID NO: 765371 - RNA, 17 nt, Artificial Sequence
  Synthetic
cuauauauacuauucau

SEQ ID NO: 765372 - RNA, 17 nt, Artificial Sequence
  Synthetic
auuuucacccuauucau

SEQ ID NO: 765373 - RNA, 17 nt, Artificial Sequence
  Synthetic
aaaaauauaguauucau

SEQ ID NO: 765374 - RNA, 17 nt, Artificial Sequence
  Synthetic
uaacaagauuuauucau

SEQ ID NO: 765375 - RNA, 17 nt, Artificial Sequence
  Synthetic
ugauuaagcaacuucau

SEQ ID NO: 765376 - RNA, 17 nt, Artificial Sequence
  Synthetic
cauaucugugacuucau

SEQ ID NO: 765377 - RNA, 17 nt, Artificial Sequence
  Synthetic
aauguuauguacuucau

SEQ ID NO: 765378 - RNA, 17 nt, Artificial Sequence
  Synthetic
aauucucuuuacuucau

SEQ ID NO: 765379 - RNA, 17 nt, Artificial Sequence
  Synthetic
uucauaaguaccuucau

SEQ ID NO: 765380 - RNA, 17 nt, Artificial Sequence
  Synthetic
cugaauauauccuucau

SEQ ID NO: 765381 - RNA, 17 nt, Artificial Sequence
  Synthetic
aguuuuugaggcuucau

SEQ ID NO: 765382 - RNA, 17 nt, Artificial Sequence
  Synthetic
agaccagauggcuucau

SEQ ID NO: 765383 - RNA, 17 nt, Artificial Sequence
  Synthetic
agaugugcuggcuucau

SEQ ID NO: 765384 - RNA, 17 nt, Artificial Sequence
  Synthetic
uuuccugggugcuucau

SEQ ID NO: 765385 - RNA, 17 nt, Artificial Sequence
  Synthetic
cuuuauuaaaucuucau

SEQ ID NO: 765386 - RNA, 17 nt, Artificial Sequence
  Synthetic
caucucuucaucuucau

SEQ ID NO: 765387 - RNA, 17 nt, Artificial Sequence
  Synthetic
aauauauuccucuucau

SEQ ID NO: 765388 - RNA, 17 nt, Artificial Sequence
  Synthetic
cacuggaaggucuucau

SEQ ID NO: 765389 - RNA, 17 nt, Artificial Sequence
  Synthetic
accaaaauauucuucau

SEQ ID NO: 765390 - RNA, 17 nt, Artificial Sequence
  Synthetic
cauuuuaauuucuucau

SEQ ID NO: 765391 - RNA, 17 nt, Artificial Sequence
  Synthetic
ugaggcaguuucuucau

SEQ ID NO: 765392 - RNA, 17 nt, Artificial Sequence
  Synthetic
acagagauuuucuucau

SEQ ID NO: 765393 - RNA, 17 nt, Artificial Sequence
  Synthetic
uuucagguuuucuucau

SEQ ID NO: 765394 - RNA, 17 nt, Artificial Sequence
  Synthetic
auuuuccuucaguucau

SEQ ID NO: 765395 - RNA, 17 nt, Artificial Sequence
  Synthetic
cucaacugauaguucau

SEQ ID NO: 765396 - RNA, 17 nt, Artificial Sequence
  Synthetic
cuaaaugacggguucau

SEQ ID NO: 765397 - RNA, 17 nt, Artificial Sequence
  Synthetic
acaaaagaaauguucau

SEQ ID NO: 765398 - RNA, 17 nt, Artificial Sequence
  Synthetic
cuaaaagcaauguucau

SEQ ID NO: 765399 - RNA, 17 nt, Artificial Sequence
  Synthetic
ccaccauuauuguucau

SEQ ID NO: 765400 - RNA, 17 nt, Artificial Sequence
  Synthetic
uggagguggaauuucau

SEQ ID NO: 765401 - RNA, 17 nt, Artificial Sequence
  Synthetic
augugguuacauuucau

SEQ ID NO: 765402 - RNA, 17 nt, Artificial Sequence
  Synthetic
uuaacuuccuauuucau

SEQ ID NO: 765403 - RNA, 17 nt, Artificial Sequence
  Synthetic
cggacauuguauuucau

SEQ ID NO: 765404 - RNA, 17 nt, Artificial Sequence
  Synthetic
acuuauguuuauuucau

SEQ ID NO: 765405 - RNA, 17 nt, Artificial Sequence
  Synthetic
acuuucagaacuuucau

SEQ ID NO: 765406 - RNA, 17 nt, Artificial Sequence
  Synthetic
cugagagccacuuucau

SEQ ID NO: 765407 - RNA, 17 nt, Artificial Sequence
  Synthetic
acaguuucaaguuucau

SEQ ID NO: 765408 - RNA, 17 nt, Artificial Sequence
  Synthetic
agacaagaacguuucau

SEQ ID NO: 765409 - RNA, 17 nt, Artificial Sequence
  Synthetic
auugguauggguuucau

SEQ ID NO: 765410 - RNA, 17 nt, Artificial Sequence
  Synthetic
cauuuggaugguuucau

SEQ ID NO: 765411 - RNA, 17 nt, Artificial Sequence
  Synthetic
uuacuucuguguuucau

SEQ ID NO: 765412 - RNA, 17 nt, Artificial Sequence
  Synthetic
uccuagaguuguuucau

SEQ ID NO: 765413 - RNA, 17 nt, Artificial Sequence
  Synthetic
agaaaauagauuuucau

SEQ ID NO: 765414 - RNA, 17 nt, Artificial Sequence
  Synthetic
uaggaucuccuuuucau

SEQ ID NO: 765415 - RNA, 17 nt, Artificial Sequence
  Synthetic
uguaguuuucuuuucau

SEQ ID NO: 765416 - RNA, 17 nt, Artificial Sequence
  Synthetic
uguccuuacuuuuucau

SEQ ID NO: 765417 - RNA, 17 nt, Artificial Sequence
  Synthetic
accagggucuuuuucau

SEQ ID NO: 765418 - RNA, 17 nt, Artificial Sequence
  Synthetic
uaacuugauuuuuucau

SEQ ID NO: 765419 - RNA, 17 nt, Artificial Sequence
  Synthetic
uuccuggaaaaaaagau

SEQ ID NO: 765420 - RNA, 17 nt, Artificial Sequence
  Synthetic
uuugucuacaaaaagau

SEQ ID NO: 765421 - RNA, 17 nt, Artificial Sequence
  Synthetic
uagcguauuaaaaagau

SEQ ID NO: 765422 - RNA, 17 nt, Artificial Sequence
  Synthetic
cuggggugacaaaagau

SEQ ID NO: 765423 - RNA, 17 nt, Artificial Sequence
  Synthetic
cagggaagccaaaagau

SEQ ID NO: 765424 - RNA, 17 nt, Artificial Sequence
  Synthetic
auuccuggagaaaagau

SEQ ID NO: 765425 - RNA, 17 nt, Artificial Sequence
  Synthetic
caaaggcaggaaaagau

SEQ ID NO: 765426 - RNA, 17 nt, Artificial Sequence
  Synthetic
cccuucggggaaaagau

SEQ ID NO: 765427 - RNA, 17 nt, Artificial Sequence
  Synthetic
agaaaaacauaaaagau

SEQ ID NO: 765428 - RNA, 17 nt, Artificial Sequence
  Synthetic
uaauaauuauaaaagau

SEQ ID NO: 765429 - RNA, 17 nt, Artificial Sequence
  Synthetic
aagaugggcuaaaagau

SEQ ID NO: 765430 - RNA, 17 nt, Artificial Sequence
  Synthetic
ucaaaagguuaaaagau

SEQ ID NO: 765431 - RNA, 17 nt, Artificial Sequence
  Synthetic
uaaccaaccacaaagau

SEQ ID NO: 765432 - RNA, 17 nt, Artificial Sequence
  Synthetic
acaauuacuacaaagau

SEQ ID NO: 765433 - RNA, 17 nt, Artificial Sequence
  Synthetic
aggagggaagcaaagau

SEQ ID NO: 765434 - RNA, 17 nt, Artificial Sequence
  Synthetic
caguuacuggcaaagau

SEQ ID NO: 765435 - RNA, 17 nt, Artificial Sequence
  Synthetic
uuuauuaguucaaagau

SEQ ID NO: 765436 - RNA, 17 nt, Artificial Sequence
  Synthetic
auagcauuuucaaagau

SEQ ID NO: 765437 - RNA, 17 nt, Artificial Sequence
  Synthetic
uuccauuaaagaaagau

SEQ ID NO: 765438 - RNA, 17 nt, Artificial Sequence
  Synthetic
ugggcuggcagaaagau

SEQ ID NO: 765439 - RNA, 17 nt, Artificial Sequence
  Synthetic
agguccaggagaaagau

SEQ ID NO: 765440 - RNA, 17 nt, Artificial Sequence
  Synthetic
cuauuuggaggaaagau

SEQ ID NO: 765441 - RNA, 17 nt, Artificial Sequence
  Synthetic
cugagcaacggaaagau

SEQ ID NO: 765442 - RNA, 17 nt, Artificial Sequence
  Synthetic
uuacugaguggaaagau

SEQ ID NO: 765443 - RNA, 17 nt, Artificial Sequence
  Synthetic
aacaggguuggaaagau

SEQ ID NO: 765444 - RNA, 17 nt, Artificial Sequence
  Synthetic
aacuugaagugaaagau

SEQ ID NO: 765445 - RNA, 17 nt, Artificial Sequence
  Synthetic
aaagcuacucuaaagau

SEQ ID NO: 765446 - RNA, 17 nt, Artificial Sequence
  Synthetic
ucuagaauaguaaagau

SEQ ID NO: 765447 - RNA, 17 nt, Artificial Sequence
  Synthetic
caaaaguuuuuaaagau

SEQ ID NO: 765448 - RNA, 17 nt, Artificial Sequence
  Synthetic
auugauuuuuuaaagau

SEQ ID NO: 765449 - RNA, 17 nt, Artificial Sequence
  Synthetic
aagcaacaaaacaagau

SEQ ID NO: 765450 - RNA, 17 nt, Artificial Sequence
  Synthetic
caaaggcaaaacaagau

SEQ ID NO: 765451 - RNA, 17 nt, Artificial Sequence
  Synthetic
agagaaacuaacaagau

SEQ ID NO: 765452 - RNA, 17 nt, Artificial Sequence
  Synthetic
ugcuuuuauuacaagau

SEQ ID NO: 765453 - RNA, 17 nt, Artificial Sequence
  Synthetic
uucuuguaacccaagau

SEQ ID NO: 765454 - RNA, 17 nt, Artificial Sequence
  Synthetic
uuauaguaucccaagau

SEQ ID NO: 765455 - RNA, 17 nt, Artificial Sequence
  Synthetic
cauugggaggccaagau

SEQ ID NO: 765456 - RNA, 17 nt, Artificial Sequence
  Synthetic
ccaugccuggccaagau

SEQ ID NO: 765457 - RNA, 17 nt, Artificial Sequence
  Synthetic
aauacucccagcaagau

SEQ ID NO: 765458 - RNA, 17 nt, Artificial Sequence
  Synthetic
ccagggagcugcaagau

SEQ ID NO: 765459 - RNA, 17 nt, Artificial Sequence
  Synthetic
auccuugguaucaagau

SEQ ID NO: 765460 - RNA, 17 nt, Artificial Sequence
  Synthetic
aacagauuacucaagau

SEQ ID NO: 765461 - RNA, 17 nt, Artificial Sequence
  Synthetic
aguuaaaaucucaagau

SEQ ID NO: 765462 - RNA, 17 nt, Artificial Sequence
  Synthetic
uuagaggacgucaagau

SEQ ID NO: 765463 - RNA, 17 nt, Artificial Sequence
  Synthetic
ucuuuuauggucaagau

SEQ ID NO: 765464 - RNA, 17 nt, Artificial Sequence
  Synthetic
cuaugcagugucaagau

SEQ ID NO: 765465 - RNA, 17 nt, Artificial Sequence
  Synthetic
caacaagucuucaagau

SEQ ID NO: 765466 - RNA, 17 nt, Artificial Sequence
  Synthetic
auuccugcuuucaagau

SEQ ID NO: 765467 - RNA, 17 nt, Artificial Sequence
  Synthetic
cuacacagaaagaagau

SEQ ID NO: 765468 - RNA, 17 nt, Artificial Sequence
  Synthetic
uaauauaaccagaagau

SEQ ID NO: 765469 - RNA, 17 nt, Artificial Sequence
  Synthetic
cuuauucaucagaagau

SEQ ID NO: 765470 - RNA, 17 nt, Artificial Sequence
  Synthetic
cagccuucugagaagau

SEQ ID NO: 765471 - RNA, 17 nt, Artificial Sequence
  Synthetic
ucuuccaaagggaagau

SEQ ID NO: 765472 - RNA, 17 nt, Artificial Sequence
  Synthetic
aaagugucagggaagau

SEQ ID NO: 765473 - RNA, 17 nt, Artificial Sequence
  Synthetic
aaaaguuucgggaagau

SEQ ID NO: 765474 - RNA, 17 nt, Artificial Sequence
  Synthetic
aauauugaggggaagau

SEQ ID NO: 765475 - RNA, 17 nt, Artificial Sequence
  Synthetic
uuccaacaugggaagau

SEQ ID NO: 765476 - RNA, 17 nt, Artificial Sequence
  Synthetic
aacacaggugggaagau

SEQ ID NO: 765477 - RNA, 17 nt, Artificial Sequence
  Synthetic
uacugaucaaugaagau

SEQ ID NO: 765478 - RNA, 17 nt, Artificial Sequence
  Synthetic
accuacugcaugaagau

SEQ ID NO: 765479 - RNA, 17 nt, Artificial Sequence
  Synthetic
caaaaaaucaugaagau

SEQ ID NO: 765480 - RNA, 17 nt, Artificial Sequence
  Synthetic
uauucauuucugaagau

SEQ ID NO: 765481 - RNA, 17 nt, Artificial Sequence
  Synthetic
cuucuuuuauugaagau

SEQ ID NO: 765482 - RNA, 17 nt, Artificial Sequence
  Synthetic
auauguaaaaauaagau

SEQ ID NO: 765483 - RNA, 17 nt, Artificial Sequence
  Synthetic
aaacauccaaauaagau

SEQ ID NO: 765484 - RNA, 17 nt, Artificial Sequence
  Synthetic
aaaauaagaaauaagau

SEQ ID NO: 765485 - RNA, 17 nt, Artificial Sequence
  Synthetic
auuaggcuacauaagau

SEQ ID NO: 765486 - RNA, 17 nt, Artificial Sequence
  Synthetic
uagcaauccuauaagau

SEQ ID NO: 765487 - RNA, 17 nt, Artificial Sequence
  Synthetic
agaauguucuauaagau

SEQ ID NO: 765488 - RNA, 17 nt, Artificial Sequence
  Synthetic
uaaggcaaaacuaagau

SEQ ID NO: 765489 - RNA, 17 nt, Artificial Sequence
  Synthetic
cuuaaacucccuaagau

SEQ ID NO: 765490 - RNA, 17 nt, Artificial Sequence
  Synthetic
ucuauaauagcuaagau

SEQ ID NO: 765491 - RNA, 17 nt, Artificial Sequence
  Synthetic
uuagccuaugguaagau

SEQ ID NO: 765492 - RNA, 17 nt, Artificial Sequence
  Synthetic
uuacucaguuguaagau

SEQ ID NO: 765493 - RNA, 17 nt, Artificial Sequence
  Synthetic
ucagaaaugauuaagau

SEQ ID NO: 765494 - RNA, 17 nt, Artificial Sequence
  Synthetic
uauaauauuguuaagau

SEQ ID NO: 765495 - RNA, 17 nt, Artificial Sequence
  Synthetic
ugugcuuucuuuaagau

SEQ ID NO: 765496 - RNA, 17 nt, Artificial Sequence
  Synthetic
agacaacuguuuaagau

SEQ ID NO: 765497 - RNA, 17 nt, Artificial Sequence
  Synthetic
cccuaggcuuuuaagau

SEQ ID NO: 765498 - RNA, 17 nt, Artificial Sequence
  Synthetic
aagaaugaagaacagau

SEQ ID NO: 765499 - RNA, 17 nt, Artificial Sequence
  Synthetic
agagacaacccacagau

SEQ ID NO: 765500 - RNA, 17 nt, Artificial Sequence
  Synthetic
caaaaaauuucacagau

SEQ ID NO: 765501 - RNA, 17 nt, Artificial Sequence
  Synthetic
auuguacaaugacagau

SEQ ID NO: 765502 - RNA, 17 nt, Artificial Sequence
  Synthetic
cacauacaaauacagau

SEQ ID NO: 765503 - RNA, 17 nt, Artificial Sequence
  Synthetic
acaggcaaacuacagau

SEQ ID NO: 765504 - RNA, 17 nt, Artificial Sequence
  Synthetic
uaacagaggguacagau

SEQ ID NO: 765505 - RNA, 17 nt, Artificial Sequence
  Synthetic
uacauucaguuacagau

SEQ ID NO: 765506 - RNA, 17 nt, Artificial Sequence
  Synthetic
cauguacaaaaccagau

SEQ ID NO: 765507 - RNA, 17 nt, Artificial Sequence
  Synthetic
ucugagaaagaccagau

SEQ ID NO: 765508 - RNA, 17 nt, Artificial Sequence
  Synthetic
cccaucaccccccagau

SEQ ID NO: 765509 - RNA, 17 nt, Artificial Sequence
  Synthetic
cagguagacagccagau

SEQ ID NO: 765510 - RNA, 17 nt, Artificial Sequence
  Synthetic
uaucaucuuguccagau

SEQ ID NO: 765511 - RNA, 17 nt, Artificial Sequence
  Synthetic
uuauccuuuguccagau

SEQ ID NO: 765512 - RNA, 17 nt, Artificial Sequence
  Synthetic
auacacccauuccagau

SEQ ID NO: 765513 - RNA, 17 nt, Artificial Sequence
  Synthetic
cacucuuauuuccagau

SEQ ID NO: 765514 - RNA, 17 nt, Artificial Sequence
  Synthetic
ugucaaggaaagcagau

SEQ ID NO: 765515 - RNA, 17 nt, Artificial Sequence
  Synthetic
ucuauauuaaagcagau

SEQ ID NO: 765516 - RNA, 17 nt, Artificial Sequence
  Synthetic
cauuaucaggagcagau

SEQ ID NO: 765517 - RNA, 17 nt, Artificial Sequence
  Synthetic
acagaagacuagcagau

SEQ ID NO: 765518 - RNA, 17 nt, Artificial Sequence
  Synthetic
ugguagggguagcagau

SEQ ID NO: 765519 - RNA, 17 nt, Artificial Sequence
  Synthetic
uuugcuuuuaggcagau

SEQ ID NO: 765520 - RNA, 17 nt, Artificial Sequence
  Synthetic
uaacucuagcggcagau

SEQ ID NO: 765521 - RNA, 17 nt, Artificial Sequence
  Synthetic
uuacaaucauggcagau

SEQ ID NO: 765522 - RNA, 17 nt, Artificial Sequence
  Synthetic
aagagaaauaugcagau

SEQ ID NO: 765523 - RNA, 17 nt, Artificial Sequence
  Synthetic
auguuaacacugcagau

SEQ ID NO: 765524 - RNA, 17 nt, Artificial Sequence
  Synthetic
ugguugaaauugcagau

SEQ ID NO: 765525 - RNA, 17 nt, Artificial Sequence
  Synthetic
agcacuuauuugcagau

SEQ ID NO: 765526 - RNA, 17 nt, Artificial Sequence
  Synthetic
aaaagcuguuugcagau

SEQ ID NO: 765527 - RNA, 17 nt, Artificial Sequence
  Synthetic
uaggagguugaucagau

SEQ ID NO: 765528 - RNA, 17 nt, Artificial Sequence
  Synthetic
agcuacaggacucagau

SEQ ID NO: 765529 - RNA, 17 nt, Artificial Sequence
  Synthetic
cucuuccugacucagau

SEQ ID NO: 765530 - RNA, 17 nt, Artificial Sequence
  Synthetic
uuaauaaaaccucagau

SEQ ID NO: 765531 - RNA, 17 nt, Artificial Sequence
  Synthetic
uuuuuuuaaucucagau

SEQ ID NO: 765532 - RNA, 17 nt, Artificial Sequence
  Synthetic
acagcgucuagucagau

SEQ ID NO: 765533 - RNA, 17 nt, Artificial Sequence
  Synthetic
uuagcccuuugucagau

SEQ ID NO: 765534 - RNA, 17 nt, Artificial Sequence
  Synthetic
accucugacauucagau

SEQ ID NO: 765535 - RNA, 17 nt, Artificial Sequence
  Synthetic
caaucugugauucagau

SEQ ID NO: 765536 - RNA, 17 nt, Artificial Sequence
  Synthetic
uuauggacuauucagau

SEQ ID NO: 765537 - RNA, 17 nt, Artificial Sequence
  Synthetic
agaaauuagcuucagau

SEQ ID NO: 765538 - RNA, 17 nt, Artificial Sequence
  Synthetic
cauuuggagaaagagau

SEQ ID NO: 765539 - RNA, 17 nt, Artificial Sequence
  Synthetic
cauggcugacaagagau

SEQ ID NO: 765540 - RNA, 17 nt, Artificial Sequence
  Synthetic
acacucucccaagagau

SEQ ID NO: 765541 - RNA, 17 nt, Artificial Sequence
  Synthetic
auggagaccuaagagau

SEQ ID NO: 765542 - RNA, 17 nt, Artificial Sequence
  Synthetic
auggcuaugacagagau

SEQ ID NO: 765543 - RNA, 17 nt, Artificial Sequence
  Synthetic
aggagaacuacagagau

SEQ ID NO: 765544 - RNA, 17 nt, Artificial Sequence
  Synthetic
uaugcaaauccagagau

SEQ ID NO: 765545 - RNA, 17 nt, Artificial Sequence
  Synthetic
aaguuugcugcagagau

SEQ ID NO: 765546 - RNA, 17 nt, Artificial Sequence
  Synthetic
uauuuuuuugcagagau

SEQ ID NO: 765547 - RNA, 17 nt, Artificial Sequence
  Synthetic
cucuagggaucagagau

SEQ ID NO: 765548 - RNA, 17 nt, Artificial Sequence
  Synthetic
cagaguaaaagagagau

SEQ ID NO: 765549 - RNA, 17 nt, Artificial Sequence
  Synthetic
aaugggugaagagagau

SEQ ID NO: 765550 - RNA, 17 nt, Artificial Sequence
  Synthetic
auuucugauagagagau

SEQ ID NO: 765551 - RNA, 17 nt, Artificial Sequence
  Synthetic
aggccaaagggagagau

SEQ ID NO: 765552 - RNA, 17 nt, Artificial Sequence
  Synthetic
cuacauuacugagagau

SEQ ID NO: 765553 - RNA, 17 nt, Artificial Sequence
  Synthetic
augggauucugagagau

SEQ ID NO: 765554 - RNA, 17 nt, Artificial Sequence
  Synthetic
uguauauggugagagau

SEQ ID NO: 765555 - RNA, 17 nt, Artificial Sequence
  Synthetic
auuuauaagcuagagau

SEQ ID NO: 765556 - RNA, 17 nt, Artificial Sequence
  Synthetic
uuauuuucaguagagau

SEQ ID NO: 765557 - RNA, 17 nt, Artificial Sequence
  Synthetic
auauuuuuaguagagau

SEQ ID NO: 765558 - RNA, 17 nt, Artificial Sequence
  Synthetic
cuauuuuuaguagagau

SEQ ID NO: 765559 - RNA, 17 nt, Artificial Sequence
  Synthetic
guauuuuuaguagagau

SEQ ID NO: 765560 - RNA, 17 nt, Artificial Sequence
  Synthetic
uuauuuuuaguagagau

SEQ ID NO: 765561 - RNA, 17 nt, Artificial Sequence
  Synthetic
uauuuuuuaguagagau

SEQ ID NO: 765562 - RNA, 17 nt, Artificial Sequence
  Synthetic
uuguuuucuguagagau

SEQ ID NO: 765563 - RNA, 17 nt, Artificial Sequence
  Synthetic
uuuuuuuuuguagagau

SEQ ID NO: 765564 - RNA, 17 nt, Artificial Sequence
  Synthetic
cagagaagauuagagau

SEQ ID NO: 765565 - RNA, 17 nt, Artificial Sequence
  Synthetic
aacaacagguuagagau

SEQ ID NO: 765566 - RNA, 17 nt, Artificial Sequence
  Synthetic
aagucagauuuagagau

SEQ ID NO: 765567 - RNA, 17 nt, Artificial Sequence
  Synthetic
aaagaacugcccgagau

SEQ ID NO: 765568 - RNA, 17 nt, Artificial Sequence
  Synthetic
cuuugggaggccgagau

SEQ ID NO: 765569 - RNA, 17 nt, Artificial Sequence
  Synthetic
uuuuuuuuuugcgagau

SEQ ID NO: 765570 - RNA, 17 nt, Artificial Sequence
  Synthetic
ucauggaaaaaggagau

SEQ ID NO: 765571 - RNA, 17 nt, Artificial Sequence
  Synthetic
ugaggguuuaaggagau

SEQ ID NO: 765572 - RNA, 17 nt, Artificial Sequence
  Synthetic
aggcguuggcaggagau

SEQ ID NO: 765573 - RNA, 17 nt, Artificial Sequence
  Synthetic
ucacaaggucaggagau

SEQ ID NO: 765574 - RNA, 17 nt, Artificial Sequence
  Synthetic
caagcuaaagaggagau

SEQ ID NO: 765575 - RNA, 17 nt, Artificial Sequence
  Synthetic
cggaguacagaggagau

SEQ ID NO: 765576 - RNA, 17 nt, Artificial Sequence
  Synthetic
caaugguauuaggagau

SEQ ID NO: 765577 - RNA, 17 nt, Artificial Sequence
  Synthetic
aauuaaaaaccggagau

SEQ ID NO: 765578 - RNA, 17 nt, Artificial Sequence
  Synthetic
cucugucccagggagau

SEQ ID NO: 765579 - RNA, 17 nt, Artificial Sequence
  Synthetic
caacuaagcagggagau

SEQ ID NO: 765580 - RNA, 17 nt, Artificial Sequence
  Synthetic
acagagaugggggagau

SEQ ID NO: 765581 - RNA, 17 nt, Artificial Sequence
  Synthetic
auugguaauggggagau

SEQ ID NO: 765582 - RNA, 17 nt, Artificial Sequence
  Synthetic
agcuauucuggggagau

SEQ ID NO: 765583 - RNA, 17 nt, Artificial Sequence
  Synthetic
ccucgggguggggagau

SEQ ID NO: 765584 - RNA, 17 nt, Artificial Sequence
  Synthetic
acuagacgcugggagau

SEQ ID NO: 765585 - RNA, 17 nt, Artificial Sequence
  Synthetic
ucaaaauucugggagau

SEQ ID NO: 765586 - RNA, 17 nt, Artificial Sequence
  Synthetic
uacaguuugugggagau

SEQ ID NO: 765587 - RNA, 17 nt, Artificial Sequence
  Synthetic
cuucaaccaauggagau

SEQ ID NO: 765588 - RNA, 17 nt, Artificial Sequence
  Synthetic
ugagaacacauggagau

SEQ ID NO: 765589 - RNA, 17 nt, Artificial Sequence
  Synthetic
cagagagaacuggagau

SEQ ID NO: 765590 - RNA, 17 nt, Artificial Sequence
  Synthetic
uuuggcuuccuggagau

SEQ ID NO: 765591 - RNA, 17 nt, Artificial Sequence
  Synthetic
ccuaauaucuuggagau

SEQ ID NO: 765592 - RNA, 17 nt, Artificial Sequence
  Synthetic
ugacccuauuuggagau

SEQ ID NO: 765593 - RNA, 17 nt, Artificial Sequence
  Synthetic
uccuuggaaaaugagau

SEQ ID NO: 765594 - RNA, 17 nt, Artificial Sequence
  Synthetic
ccauuguggaaugagau

SEQ ID NO: 765595 - RNA, 17 nt, Artificial Sequence
  Synthetic
uuuaaucugaaugagau

SEQ ID NO: 765596 - RNA, 17 nt, Artificial Sequence
  Synthetic
ucaucauuuacugagau

SEQ ID NO: 765597 - RNA, 17 nt, Artificial Sequence
  Synthetic
acucaggaggcugagau

SEQ ID NO: 765598 - RNA, 17 nt, Artificial Sequence
  Synthetic
uuuuuugaugcugagau

SEQ ID NO: 765599 - RNA, 17 nt, Artificial Sequence
  Synthetic
uuccuaguaagugagau

SEQ ID NO: 765600 - RNA, 17 nt, Artificial Sequence
  Synthetic
uucugaggaggugagau

SEQ ID NO: 765601 - RNA, 17 nt, Artificial Sequence
  Synthetic
agugagguaggugagau

SEQ ID NO: 765602 - RNA, 17 nt, Artificial Sequence
  Synthetic
uggggugggggugagau

SEQ ID NO: 765603 - RNA, 17 nt, Artificial Sequence
  Synthetic
uauguacagugugagau

SEQ ID NO: 765604 - RNA, 17 nt, Artificial Sequence
  Synthetic
uaggaauugugugagau

SEQ ID NO: 765605 - RNA, 17 nt, Artificial Sequence
  Synthetic
uuaaucccuugugagau

SEQ ID NO: 765606 - RNA, 17 nt, Artificial Sequence
  Synthetic
uguaauuucauugagau

SEQ ID NO: 765607 - RNA, 17 nt, Artificial Sequence
  Synthetic
uuuuuccuucuugagau

SEQ ID NO: 765608 - RNA, 17 nt, Artificial Sequence
  Synthetic
uuauuuguuuuugagau

SEQ ID NO: 765609 - RNA, 17 nt, Artificial Sequence
  Synthetic
acuuucuuuuuugagau

SEQ ID NO: 765610 - RNA, 17 nt, Artificial Sequence
  Synthetic
uucacuuaaaaauagau

SEQ ID NO: 765611 - RNA, 17 nt, Artificial Sequence
  Synthetic
aggguguagaaauagau

SEQ ID NO: 765612 - RNA, 17 nt, Artificial Sequence
  Synthetic
uuuguguagaaauagau

SEQ ID NO: 765613 - RNA, 17 nt, Artificial Sequence
  Synthetic
uaaauugcucaauagau

SEQ ID NO: 765614 - RNA, 17 nt, Artificial Sequence
  Synthetic
ucuguacuucaauagau

SEQ ID NO: 765615 - RNA, 17 nt, Artificial Sequence
  Synthetic
aggaucccagaauagau

SEQ ID NO: 765616 - RNA, 17 nt, Artificial Sequence
  Synthetic
auuugcaacuaauagau

SEQ ID NO: 765617 - RNA, 17 nt, Artificial Sequence
  Synthetic
ccauuucaaccauagau

SEQ ID NO: 765618 - RNA, 17 nt, Artificial Sequence
  Synthetic
ucugugacagcauagau

SEQ ID NO: 765619 - RNA, 17 nt, Artificial Sequence
  Synthetic
cagcaugagucauagau

SEQ ID NO: 765620 - RNA, 17 nt, Artificial Sequence
  Synthetic
uauucuaugucauagau

SEQ ID NO: 765621 - RNA, 17 nt, Artificial Sequence
  Synthetic
acugacgacagauagau

SEQ ID NO: 765622 - RNA, 17 nt, Artificial Sequence
  Synthetic
agcaaaggaggauagau

SEQ ID NO: 765623 - RNA, 17 nt, Artificial Sequence
  Synthetic
agacaacaaauauagau

SEQ ID NO: 765624 - RNA, 17 nt, Artificial Sequence
  Synthetic
uauaaagaaauauagau

SEQ ID NO: 765625 - RNA, 17 nt, Artificial Sequence
  Synthetic
aaagcuuaacuauagau

SEQ ID NO: 765626 - RNA, 17 nt, Artificial Sequence
  Synthetic
aaucagucccuauagau

SEQ ID NO: 765627 - RNA, 17 nt, Artificial Sequence
  Synthetic
cagcuggaauuauagau

SEQ ID NO: 765628 - RNA, 17 nt, Artificial Sequence
  Synthetic
auaacugcuaccuagau

SEQ ID NO: 765629 - RNA, 17 nt, Artificial Sequence
  Synthetic
uuugauaaacccuagau

SEQ ID NO: 765630 - RNA, 17 nt, Artificial Sequence
  Synthetic
caaaucauacccuagau

SEQ ID NO: 765631 - RNA, 17 nt, Artificial Sequence
  Synthetic
uuuuuaaauagcuagau

SEQ ID NO: 765632 - RNA, 17 nt, Artificial Sequence
  Synthetic
auaaauuauagcuagau

SEQ ID NO: 765633 - RNA, 17 nt, Artificial Sequence
  Synthetic
cacagcaacaucuagau

SEQ ID NO: 765634 - RNA, 17 nt, Artificial Sequence
  Synthetic
uauaaaaaucucuagau

SEQ ID NO: 765635 - RNA, 17 nt, Artificial Sequence
  Synthetic
uggggaagucucuagau

SEQ ID NO: 765636 - RNA, 17 nt, Artificial Sequence
  Synthetic
caccaagaaaaguagau

SEQ ID NO: 765637 - RNA, 17 nt, Artificial Sequence
  Synthetic
uacaugugucaguagau

SEQ ID NO: 765638 - RNA, 17 nt, Artificial Sequence
  Synthetic
uuugcaguucaguagau

SEQ ID NO: 765639 - RNA, 17 nt, Artificial Sequence
  Synthetic
aauaagggagaguagau

SEQ ID NO: 765640 - RNA, 17 nt, Artificial Sequence
  Synthetic
cuaauuggagaguagau

SEQ ID NO: 765641 - RNA, 17 nt, Artificial Sequence
  Synthetic
ucugagagggaguagau

SEQ ID NO: 765642 - RNA, 17 nt, Artificial Sequence
  Synthetic
cagccuccugaguagau

SEQ ID NO: 765643 - RNA, 17 nt, Artificial Sequence
  Synthetic
uaaaaauuauaguagau

SEQ ID NO: 765644 - RNA, 17 nt, Artificial Sequence
  Synthetic
uuuccugccuaguagau

SEQ ID NO: 765645 - RNA, 17 nt, Artificial Sequence
  Synthetic
ugccaauuaacguagau

SEQ ID NO: 765646 - RNA, 17 nt, Artificial Sequence
  Synthetic
ugauacuaccuguagau

SEQ ID NO: 765647 - RNA, 17 nt, Artificial Sequence
  Synthetic
augccuccucuguagau

SEQ ID NO: 765648 - RNA, 17 nt, Artificial Sequence
  Synthetic
aaaguauguguguagau

SEQ ID NO: 765649 - RNA, 17 nt, Artificial Sequence
  Synthetic
aaauacaaaaauuagau

SEQ ID NO: 765650 - RNA, 17 nt, Artificial Sequence
  Synthetic
acacaauuccauuagau

SEQ ID NO: 765651 - RNA, 17 nt, Artificial Sequence
  Synthetic
aaaccuguggauuagau

SEQ ID NO: 765652 - RNA, 17 nt, Artificial Sequence
  Synthetic
uuaguauaauauuagau

SEQ ID NO: 765653 - RNA, 17 nt, Artificial Sequence
  Synthetic
agguuguuaucuuagau

SEQ ID NO: 765654 - RNA, 17 nt, Artificial Sequence
  Synthetic
caaaauuucaguuagau

SEQ ID NO: 765655 - RNA, 17 nt, Artificial Sequence
  Synthetic
uagguggauaguuagau

SEQ ID NO: 765656 - RNA, 17 nt, Artificial Sequence
  Synthetic
acagugagugguuagau

SEQ ID NO: 765657 - RNA, 17 nt, Artificial Sequence
  Synthetic
aaaaauagguguuagau

SEQ ID NO: 765658 - RNA, 17 nt, Artificial Sequence
  Synthetic
uggagacuguguuagau

SEQ ID NO: 765659 - RNA, 17 nt, Artificial Sequence
  Synthetic
augauaaauuguuagau

SEQ ID NO: 765660 - RNA, 17 nt, Artificial Sequence
  Synthetic
ucaaagcaaauuuagau

SEQ ID NO: 765661 - RNA, 17 nt, Artificial Sequence
  Synthetic
ugcuaagaaauuuagau

SEQ ID NO: 765662 - RNA, 17 nt, Artificial Sequence
  Synthetic
aagaggaccauuuagau

SEQ ID NO: 765663 - RNA, 17 nt, Artificial Sequence
  Synthetic
ccuuagcucauuuagau

SEQ ID NO: 765664 - RNA, 17 nt, Artificial Sequence
  Synthetic
ucacuaaaauuuuagau

SEQ ID NO: 765665 - RNA, 17 nt, Artificial Sequence
  Synthetic
auagugacauuuuagau

SEQ ID NO: 765666 - RNA, 17 nt, Artificial Sequence
  Synthetic
cuuaauaacuuuuagau

SEQ ID NO: 765667 - RNA, 17 nt, Artificial Sequence
  Synthetic
ucaaaacauuuuuagau

SEQ ID NO: 765668 - RNA, 17 nt, Artificial Sequence
  Synthetic
auuugauuuuuuuagau

SEQ ID NO: 765669 - RNA, 17 nt, Artificial Sequence
  Synthetic
caucuguuagaaacgau

SEQ ID NO: 765670 - RNA, 17 nt, Artificial Sequence
  Synthetic
aggagaaggagaacgau

SEQ ID NO: 765671 - RNA, 17 nt, Artificial Sequence
  Synthetic
cagaaaagauacacgau

SEQ ID NO: 765672 - RNA, 17 nt, Artificial Sequence
  Synthetic
ucuacacuuuacacgau

SEQ ID NO: 765673 - RNA, 17 nt, Artificial Sequence
  Synthetic
ucaauccuccccacgau

SEQ ID NO: 765674 - RNA, 17 nt, Artificial Sequence
  Synthetic
ucauuugagcccacgau

SEQ ID NO: 765675 - RNA, 17 nt, Artificial Sequence
  Synthetic
uuuugggcugagacgau

SEQ ID NO: 765676 - RNA, 17 nt, Artificial Sequence
  Synthetic
uuuuggguugagacgau

SEQ ID NO: 765677 - RNA, 17 nt, Artificial Sequence
  Synthetic
ugagcauaguacccgau

SEQ ID NO: 765678 - RNA, 17 nt, Artificial Sequence
  Synthetic
uccucagcugucccgau

SEQ ID NO: 765679 - RNA, 17 nt, Artificial Sequence
  Synthetic
aauuccaauacuccgau

SEQ ID NO: 765680 - RNA, 17 nt, Artificial Sequence
  Synthetic
ucuguaaaaaaugcgau

SEQ ID NO: 765681 - RNA, 17 nt, Artificial Sequence
  Synthetic
aaugaccuggaugcgau

SEQ ID NO: 765682 - RNA, 17 nt, Artificial Sequence
  Synthetic
agacuuuuggcugcgau

SEQ ID NO: 765683 - RNA, 17 nt, Artificial Sequence
  Synthetic
uuuuuacugugugcgau

SEQ ID NO: 765684 - RNA, 17 nt, Artificial Sequence
  Synthetic
uuaggucuucaaucgau

SEQ ID NO: 765685 - RNA, 17 nt, Artificial Sequence
  Synthetic
aaguuugcugcaucgau

SEQ ID NO: 765686 - RNA, 17 nt, Artificial Sequence
  Synthetic
auaaaugccaucucgau

SEQ ID NO: 765687 - RNA, 17 nt, Artificial Sequence
  Synthetic
uacacuuuauucucgau

SEQ ID NO: 765688 - RNA, 17 nt, Artificial Sequence
  Synthetic
auauguuuuaaaaggau

SEQ ID NO: 765689 - RNA, 17 nt, Artificial Sequence
  Synthetic
aacaagaucgaaaggau

SEQ ID NO: 765690 - RNA, 17 nt, Artificial Sequence
  Synthetic
aaagugagugaaaggau

SEQ ID NO: 765691 - RNA, 17 nt, Artificial Sequence
  Synthetic
aaaagucggccaaggau

SEQ ID NO: 765692 - RNA, 17 nt, Artificial Sequence
  Synthetic
ucccaucacagaaggau

SEQ ID NO: 765693 - RNA, 17 nt, Artificial Sequence
  Synthetic
uuugugcagagaaggau

SEQ ID NO: 765694 - RNA, 17 nt, Artificial Sequence
  Synthetic
cacucauugagaaggau

SEQ ID NO: 765695 - RNA, 17 nt, Artificial Sequence
  Synthetic
aagaauuugagaaggau

SEQ ID NO: 765696 - RNA, 17 nt, Artificial Sequence
  Synthetic
uaacuuccuagaaggau

SEQ ID NO: 765697 - RNA, 17 nt, Artificial Sequence
  Synthetic
cccaaaacaugaaggau

SEQ ID NO: 765698 - RNA, 17 nt, Artificial Sequence
  Synthetic
uauuucaugauaaggau

SEQ ID NO: 765699 - RNA, 17 nt, Artificial Sequence
  Synthetic
auccuagcaaacaggau

SEQ ID NO: 765700 - RNA, 17 nt, Artificial Sequence
  Synthetic
acagugguuaacaggau

SEQ ID NO: 765701 - RNA, 17 nt, Artificial Sequence
  Synthetic
uagagaagacacaggau

SEQ ID NO: 765702 - RNA, 17 nt, Artificial Sequence
  Synthetic
uuuaauugacacaggau

SEQ ID NO: 765703 - RNA, 17 nt, Artificial Sequence
  Synthetic
uuuuauaggcacaggau

SEQ ID NO: 765704 - RNA, 17 nt, Artificial Sequence
  Synthetic
aagaaauuauacaggau

SEQ ID NO: 765705 - RNA, 17 nt, Artificial Sequence
  Synthetic
ucauacauguacaggau

SEQ ID NO: 765706 - RNA, 17 nt, Artificial Sequence
  Synthetic
agaguguagaccaggau

SEQ ID NO: 765707 - RNA, 17 nt, Artificial Sequence
  Synthetic
auuuuaacucccaggau

SEQ ID NO: 765708 - RNA, 17 nt, Artificial Sequence
  Synthetic
aaauaaagagccaggau

SEQ ID NO: 765709 - RNA, 17 nt, Artificial Sequence
  Synthetic
cuuugggaggccaggau

SEQ ID NO: 765710 - RNA, 17 nt, Artificial Sequence
  Synthetic
cucugaguugccaggau

SEQ ID NO: 765711 - RNA, 17 nt, Artificial Sequence
  Synthetic
aagaaugaaagcaggau

SEQ ID NO: 765712 - RNA, 17 nt, Artificial Sequence
  Synthetic
aggaaagggagcaggau

SEQ ID NO: 765713 - RNA, 17 nt, Artificial Sequence
  Synthetic
uucucugcuagcaggau

SEQ ID NO: 765714 - RNA, 17 nt, Artificial Sequence
  Synthetic
ugaguggguaucaggau

SEQ ID NO: 765715 - RNA, 17 nt, Artificial Sequence
  Synthetic
aggcuguuagucaggau

SEQ ID NO: 765716 - RNA, 17 nt, Artificial Sequence
  Synthetic
aacagaaauaagaggau

SEQ ID NO: 765717 - RNA, 17 nt, Artificial Sequence
  Synthetic
auuagagcacagaggau

SEQ ID NO: 765718 - RNA, 17 nt, Artificial Sequence
  Synthetic
caggugcuggagaggau

SEQ ID NO: 765719 - RNA, 17 nt, Artificial Sequence
  Synthetic
cugggugagaggaggau

SEQ ID NO: 765720 - RNA, 17 nt, Artificial Sequence
  Synthetic
uggggauggaggaggau

SEQ ID NO: 765721 - RNA, 17 nt, Artificial Sequence
  Synthetic
auagcugcugggaggau

SEQ ID NO: 765722 - RNA, 17 nt, Artificial Sequence
  Synthetic
ucuucuguugggaggau

SEQ ID NO: 765723 - RNA, 17 nt, Artificial Sequence
  Synthetic
uaugcaaaacugaggau

SEQ ID NO: 765724 - RNA, 17 nt, Artificial Sequence
  Synthetic
aauccuggacugaggau

SEQ ID NO: 765725 - RNA, 17 nt, Artificial Sequence
  Synthetic
ugcuaaguacugaggau

SEQ ID NO: 765726 - RNA, 17 nt, Artificial Sequence
  Synthetic
auauacaugcugaggau

SEQ ID NO: 765727 - RNA, 17 nt, Artificial Sequence
  Synthetic
aucaaauucaauaggau

SEQ ID NO: 765728 - RNA, 17 nt, Artificial Sequence
  Synthetic
aaugacagggauaggau

SEQ ID NO: 765729 - RNA, 17 nt, Artificial Sequence
  Synthetic
caucuguaaacuaggau

SEQ ID NO: 765730 - RNA, 17 nt, Artificial Sequence
  Synthetic
ucaauucaugcuaggau

SEQ ID NO: 765731 - RNA, 17 nt, Artificial Sequence
  Synthetic
ucauagauugcuaggau

SEQ ID NO: 765732 - RNA, 17 nt, Artificial Sequence
  Synthetic
uucagugggucuaggau

SEQ ID NO: 765733 - RNA, 17 nt, Artificial Sequence
  Synthetic
cucagccacaguaggau

SEQ ID NO: 765734 - RNA, 17 nt, Artificial Sequence
  Synthetic
cuuagucacaguaggau

SEQ ID NO: 765735 - RNA, 17 nt, Artificial Sequence
  Synthetic
aaaagaucuuguaggau

SEQ ID NO: 765736 - RNA, 17 nt, Artificial Sequence
  Synthetic
aaggugguuauuaggau

SEQ ID NO: 765737 - RNA, 17 nt, Artificial Sequence
  Synthetic
cauauaaaucuuaggau

SEQ ID NO: 765738 - RNA, 17 nt, Artificial Sequence
  Synthetic
uuggcuaagaaacggau

SEQ ID NO: 765739 - RNA, 17 nt, Artificial Sequence
  Synthetic
ccuaacaggcaacggau

SEQ ID NO: 765740 - RNA, 17 nt, Artificial Sequence
  Synthetic
caacuuauauuacggau

SEQ ID NO: 765741 - RNA, 17 nt, Artificial Sequence
  Synthetic
agaggcuacuagcggau

SEQ ID NO: 765742 - RNA, 17 nt, Artificial Sequence
  Synthetic
caggcucauaggcggau

SEQ ID NO: 765743 - RNA, 17 nt, Artificial Sequence
  Synthetic
aagaaaggguaucggau

SEQ ID NO: 765744 - RNA, 17 nt, Artificial Sequence
  Synthetic
aaaaauuaaaaagggau

SEQ ID NO: 765745 - RNA, 17 nt, Artificial Sequence
  Synthetic
accaggccucaagggau

SEQ ID NO: 765746 - RNA, 17 nt, Artificial Sequence
  Synthetic
agguagggggaagggau

SEQ ID NO: 765747 - RNA, 17 nt, Artificial Sequence
  Synthetic
caaaacaacccagggau

SEQ ID NO: 765748 - RNA, 17 nt, Artificial Sequence
  Synthetic
uuuuaguaagcagggau

SEQ ID NO: 765749 - RNA, 17 nt, Artificial Sequence
  Synthetic
auguuucuagcagggau

SEQ ID NO: 765750 - RNA, 17 nt, Artificial Sequence
  Synthetic
uauauccuuucagggau

SEQ ID NO: 765751 - RNA, 17 nt, Artificial Sequence
  Synthetic
uuaaauugaagagggau

SEQ ID NO: 765752 - RNA, 17 nt, Artificial Sequence
  Synthetic
aagaaauaaggagggau

SEQ ID NO: 765753 - RNA, 17 nt, Artificial Sequence
  Synthetic
ucccuuguaggagggau

SEQ ID NO: 765754 - RNA, 17 nt, Artificial Sequence
  Synthetic
ugcuugaggugagggau

SEQ ID NO: 765755 - RNA, 17 nt, Artificial Sequence
  Synthetic
acugguaggauagggau

SEQ ID NO: 765756 - RNA, 17 nt, Artificial Sequence
  Synthetic
auauuaagggaggggau

SEQ ID NO: 765757 - RNA, 17 nt, Artificial Sequence
  Synthetic
uuuacuuugagggggau

SEQ ID NO: 765758 - RNA, 17 nt, Artificial Sequence
  Synthetic
caguauccaugggggau

SEQ ID NO: 765759 - RNA, 17 nt, Artificial Sequence
  Synthetic
cacaccaguugggggau

SEQ ID NO: 765760 - RNA, 17 nt, Artificial Sequence
  Synthetic
ugccaggggcuggggau

SEQ ID NO: 765761 - RNA, 17 nt, Artificial Sequence
  Synthetic
acagaaacucuggggau

SEQ ID NO: 765762 - RNA, 17 nt, Artificial Sequence
  Synthetic
ucagaaucucuggggau

SEQ ID NO: 765763 - RNA, 17 nt, Artificial Sequence
  Synthetic
agaagcucucuggggau

SEQ ID NO: 765764 - RNA, 17 nt, Artificial Sequence
  Synthetic
caguuucuucuggggau

SEQ ID NO: 765765 - RNA, 17 nt, Artificial Sequence
  Synthetic
auagcaggaaaugggau

SEQ ID NO: 765766 - RNA, 17 nt, Artificial Sequence
  Synthetic
auuccauugaaugggau

SEQ ID NO: 765767 - RNA, 17 nt, Artificial Sequence
  Synthetic
agagcagaagaugggau

SEQ ID NO: 765768 - RNA, 17 nt, Artificial Sequence
  Synthetic
aaaucuagauaugggau

SEQ ID NO: 765769 - RNA, 17 nt, Artificial Sequence
  Synthetic
uuaaugauguaugggau

SEQ ID NO: 765770 - RNA, 17 nt, Artificial Sequence
  Synthetic
cacccuuuuacugggau

SEQ ID NO: 765771 - RNA, 17 nt, Artificial Sequence
  Synthetic
cuuugggaggcugggau

SEQ ID NO: 765772 - RNA, 17 nt, Artificial Sequence
  Synthetic
aacuugacugcugggau

SEQ ID NO: 765773 - RNA, 17 nt, Artificial Sequence
  Synthetic
agacagaaaucugggau

SEQ ID NO: 765774 - RNA, 17 nt, Artificial Sequence
  Synthetic
aauucuaaaucugggau

SEQ ID NO: 765775 - RNA, 17 nt, Artificial Sequence
  Synthetic
uucaguagaucugggau

SEQ ID NO: 765776 - RNA, 17 nt, Artificial Sequence
  Synthetic
caaugcaccagugggau

SEQ ID NO: 765777 - RNA, 17 nt, Artificial Sequence
  Synthetic
uuugaaaaaggugggau

SEQ ID NO: 765778 - RNA, 17 nt, Artificial Sequence
  Synthetic
auagcagauggugggau

SEQ ID NO: 765779 - RNA, 17 nt, Artificial Sequence
  Synthetic
uuguauuucugugggau

SEQ ID NO: 765780 - RNA, 17 nt, Artificial Sequence
  Synthetic
uccaaaaugcuugggau

SEQ ID NO: 765781 - RNA, 17 nt, Artificial Sequence
  Synthetic
uugcaguaucuugggau

SEQ ID NO: 765782 - RNA, 17 nt, Artificial Sequence
  Synthetic
caaaaucaguuugggau

SEQ ID NO: 765783 - RNA, 17 nt, Artificial Sequence
  Synthetic
aaauaauaaaaauggau

SEQ ID NO: 765784 - RNA, 17 nt, Artificial Sequence
  Synthetic
aggguguagaaauggau

SEQ ID NO: 765785 - RNA, 17 nt, Artificial Sequence
  Synthetic
caguauuauaaauggau

SEQ ID NO: 765786 - RNA, 17 nt, Artificial Sequence
  Synthetic
cuccccauuaaauggau

SEQ ID NO: 765787 - RNA, 17 nt, Artificial Sequence
  Synthetic
uccaucacacaauggau

SEQ ID NO: 765788 - RNA, 17 nt, Artificial Sequence
  Synthetic
uggcagcaagaauggau

SEQ ID NO: 765789 - RNA, 17 nt, Artificial Sequence
  Synthetic
aaagagccagaauggau

SEQ ID NO: 765790 - RNA, 17 nt, Artificial Sequence
  Synthetic
cuggaggaugaauggau

SEQ ID NO: 765791 - RNA, 17 nt, Artificial Sequence
  Synthetic
cuuuguauuuaauggau

SEQ ID NO: 765792 - RNA, 17 nt, Artificial Sequence
  Synthetic
auauauaacccauggau

SEQ ID NO: 765793 - RNA, 17 nt, Artificial Sequence
  Synthetic
ucugcuggaucauggau

SEQ ID NO: 765794 - RNA, 17 nt, Artificial Sequence
  Synthetic
auuccaugcucauggau

SEQ ID NO: 765795 - RNA, 17 nt, Artificial Sequence
  Synthetic
cuucugaaaagauggau

SEQ ID NO: 765796 - RNA, 17 nt, Artificial Sequence
  Synthetic
cucuuaauaagauggau

SEQ ID NO: 765797 - RNA, 17 nt, Artificial Sequence
  Synthetic
ucuauuaugagauggau

SEQ ID NO: 765798 - RNA, 17 nt, Artificial Sequence
  Synthetic
aaacaucauagauggau

SEQ ID NO: 765799 - RNA, 17 nt, Artificial Sequence
  Synthetic
ucuaucuaucgauggau

SEQ ID NO: 765800 - RNA, 17 nt, Artificial Sequence
  Synthetic
uugauugauggauggau

SEQ ID NO: 765801 - RNA, 17 nt, Artificial Sequence
  Synthetic
uaacugaguggauggau

SEQ ID NO: 765802 - RNA, 17 nt, Artificial Sequence
  Synthetic
ucaaaauaaugauggau

SEQ ID NO: 765803 - RNA, 17 nt, Artificial Sequence
  Synthetic
acuccuugaauauggau

SEQ ID NO: 765804 - RNA, 17 nt, Artificial Sequence
  Synthetic
aucagucuauuauggau

SEQ ID NO: 765805 - RNA, 17 nt, Artificial Sequence
  Synthetic
auugugaagaacuggau

SEQ ID NO: 765806 - RNA, 17 nt, Artificial Sequence
  Synthetic
aauguaaagcacuggau

SEQ ID NO: 765807 - RNA, 17 nt, Artificial Sequence
  Synthetic
uuaaaagaucacuggau

SEQ ID NO: 765808 - RNA, 17 nt, Artificial Sequence
  Synthetic
aauuauuauuacuggau

SEQ ID NO: 765809 - RNA, 17 nt, Artificial Sequence
  Synthetic
agagugaccagcuggau

SEQ ID NO: 765810 - RNA, 17 nt, Artificial Sequence
  Synthetic
auaagaacucucuggau

SEQ ID NO: 765811 - RNA, 17 nt, Artificial Sequence
  Synthetic
ccuaagaaauucuggau

SEQ ID NO: 765812 - RNA, 17 nt, Artificial Sequence
  Synthetic
aguaggagauucuggau

SEQ ID NO: 765813 - RNA, 17 nt, Artificial Sequence
  Synthetic
uguaccaggaaguggau

SEQ ID NO: 765814 - RNA, 17 nt, Artificial Sequence
  Synthetic
ucacaucuuacguggau

SEQ ID NO: 765815 - RNA, 17 nt, Artificial Sequence
  Synthetic
aaaacugugauguggau

SEQ ID NO: 765816 - RNA, 17 nt, Artificial Sequence
  Synthetic
accuggcaucuguggau

SEQ ID NO: 765817 - RNA, 17 nt, Artificial Sequence
  Synthetic
accacucugguguggau

SEQ ID NO: 765818 - RNA, 17 nt, Artificial Sequence
  Synthetic
agaaugggagauuggau

SEQ ID NO: 765819 - RNA, 17 nt, Artificial Sequence
  Synthetic
cugguuaguacuuggau

SEQ ID NO: 765820 - RNA, 17 nt, Artificial Sequence
  Synthetic
aaucagauuucuuggau

SEQ ID NO: 765821 - RNA, 17 nt, Artificial Sequence
  Synthetic
aaaucugcaaguuggau

SEQ ID NO: 765822 - RNA, 17 nt, Artificial Sequence
  Synthetic
uucugauuuaguuggau

SEQ ID NO: 765823 - RNA, 17 nt, Artificial Sequence
  Synthetic
uaaaauagaauuuggau

SEQ ID NO: 765824 - RNA, 17 nt, Artificial Sequence
  Synthetic
uugauggacauuuggau

SEQ ID NO: 765825 - RNA, 17 nt, Artificial Sequence
  Synthetic
caagaugagauuuggau

SEQ ID NO: 765826 - RNA, 17 nt, Artificial Sequence
  Synthetic
uguuucaugauuuggau

SEQ ID NO: 765827 - RNA, 17 nt, Artificial Sequence
  Synthetic
cucugcauucuuuggau

SEQ ID NO: 765828 - RNA, 17 nt, Artificial Sequence
  Synthetic
cuuucuuuucuuuggau

SEQ ID NO: 765829 - RNA, 17 nt, Artificial Sequence
  Synthetic
ugggggaugguuuggau

SEQ ID NO: 765830 - RNA, 17 nt, Artificial Sequence
  Synthetic
uucgcccacuuuuggau

SEQ ID NO: 765831 - RNA, 17 nt, Artificial Sequence
  Synthetic
ccucauaucuuuuggau

SEQ ID NO: 765832 - RNA, 17 nt, Artificial Sequence
  Synthetic
uuaaaaaaaaaaaugau

SEQ ID NO: 765833 - RNA, 17 nt, Artificial Sequence
  Synthetic
aauuguuugaaaaugau

SEQ ID NO: 765834 - RNA, 17 nt, Artificial Sequence
  Synthetic
auuagaaauaaaaugau

SEQ ID NO: 765835 - RNA, 17 nt, Artificial Sequence
  Synthetic
aauauauuagaaaugau

SEQ ID NO: 765836 - RNA, 17 nt, Artificial Sequence
  Synthetic
acuagaguggaaaugau

SEQ ID NO: 765837 - RNA, 17 nt, Artificial Sequence
  Synthetic
aucacugaguaaaugau

SEQ ID NO: 765838 - RNA, 17 nt, Artificial Sequence
  Synthetic
auauaagauuaaaugau

SEQ ID NO: 765839 - RNA, 17 nt, Artificial Sequence
  Synthetic
cauacugaaacaaugau

SEQ ID NO: 765840 - RNA, 17 nt, Artificial Sequence
  Synthetic
cccuaaauaacaaugau

SEQ ID NO: 765841 - RNA, 17 nt, Artificial Sequence
  Synthetic
ucuccucacccaaugau

SEQ ID NO: 765842 - RNA, 17 nt, Artificial Sequence
  Synthetic
uugccuuaugcaaugau

SEQ ID NO: 765843 - RNA, 17 nt, Artificial Sequence
  Synthetic
uacugauuuagaaugau

SEQ ID NO: 765844 - RNA, 17 nt, Artificial Sequence
  Synthetic
uugcagcaaugaaugau

SEQ ID NO: 765845 - RNA, 17 nt, Artificial Sequence
  Synthetic
aaauuugccugaaugau

SEQ ID NO: 765846 - RNA, 17 nt, Artificial Sequence
  Synthetic
caccccucaauaaugau

SEQ ID NO: 765847 - RNA, 17 nt, Artificial Sequence
  Synthetic
uaaucauugcuaaugau

SEQ ID NO: 765848 - RNA, 17 nt, Artificial Sequence
  Synthetic
ccauaaaaauuaaugau

SEQ ID NO: 765849 - RNA, 17 nt, Artificial Sequence
  Synthetic
uacaauagguuaaugau

SEQ ID NO: 765850 - RNA, 17 nt, Artificial Sequence
  Synthetic
uugaaaaguaacaugau

SEQ ID NO: 765851 - RNA, 17 nt, Artificial Sequence
  Synthetic
uuuaauacauacaugau

SEQ ID NO: 765852 - RNA, 17 nt, Artificial Sequence
  Synthetic
ccauuuccagccaugau

SEQ ID NO: 765853 - RNA, 17 nt, Artificial Sequence
  Synthetic
uguugucaaggcaugau

SEQ ID NO: 765854 - RNA, 17 nt, Artificial Sequence
  Synthetic
uacaucauuugcaugau

SEQ ID NO: 765855 - RNA, 17 nt, Artificial Sequence
  Synthetic
cuguugacucucaugau

SEQ ID NO: 765856 - RNA, 17 nt, Artificial Sequence
  Synthetic
caacuucaagucaugau

SEQ ID NO: 765857 - RNA, 17 nt, Artificial Sequence
  Synthetic
aacauucauuucaugau

SEQ ID NO: 765858 - RNA, 17 nt, Artificial Sequence
  Synthetic
cauaguaagaagaugau

SEQ ID NO: 765859 - RNA, 17 nt, Artificial Sequence
  Synthetic
aaagacauuaagaugau

SEQ ID NO: 765860 - RNA, 17 nt, Artificial Sequence
  Synthetic
auuuaaaaacagaugau

SEQ ID NO: 765861 - RNA, 17 nt, Artificial Sequence
  Synthetic
aggguagagcagaugau

SEQ ID NO: 765862 - RNA, 17 nt, Artificial Sequence
  Synthetic
aaagaaagucagaugau

SEQ ID NO: 765863 - RNA, 17 nt, Artificial Sequence
  Synthetic
ccugagcaagagaugau

SEQ ID NO: 765864 - RNA, 17 nt, Artificial Sequence
  Synthetic
uuugccuaguagaugau

SEQ ID NO: 765865 - RNA, 17 nt, Artificial Sequence
  Synthetic
uaccuaauguagaugau

SEQ ID NO: 765866 - RNA, 17 nt, Artificial Sequence
  Synthetic
uuuuuccaguggaugau

SEQ ID NO: 765867 - RNA, 17 nt, Artificial Sequence
  Synthetic
ccuauuauguggaugau

SEQ ID NO: 765868 - RNA, 17 nt, Artificial Sequence
  Synthetic
aagugucuugugaugau

SEQ ID NO: 765869 - RNA, 17 nt, Artificial Sequence
  Synthetic
ugauuuucuuugaugau

SEQ ID NO: 765870 - RNA, 17 nt, Artificial Sequence
  Synthetic
cuagcaaagcauaugau

SEQ ID NO: 765871 - RNA, 17 nt, Artificial Sequence
  Synthetic
uugaaaauggcuaugau

SEQ ID NO: 765872 - RNA, 17 nt, Artificial Sequence
  Synthetic
uucuucuacucuaugau

SEQ ID NO: 765873 - RNA, 17 nt, Artificial Sequence
  Synthetic
cauuuucauucuaugau

SEQ ID NO: 765874 - RNA, 17 nt, Artificial Sequence
  Synthetic
uguuuucaacguaugau

SEQ ID NO: 765875 - RNA, 17 nt, Artificial Sequence
  Synthetic
uuugguggggguaugau

SEQ ID NO: 765876 - RNA, 17 nt, Artificial Sequence
  Synthetic
cuauuaaaaauuaugau

SEQ ID NO: 765877 - RNA, 17 nt, Artificial Sequence
  Synthetic
uacuaauacauuaugau

SEQ ID NO: 765878 - RNA, 17 nt, Artificial Sequence
  Synthetic
uauuuucaacuuaugau

SEQ ID NO: 765879 - RNA, 17 nt, Artificial Sequence
  Synthetic
uguuuucaacuuaugau

SEQ ID NO: 765880 - RNA, 17 nt, Artificial Sequence
  Synthetic
cauuuucaauuuaugau

SEQ ID NO: 765881 - RNA, 17 nt, Artificial Sequence
  Synthetic
uuuaaaagauuuaugau

SEQ ID NO: 765882 - RNA, 17 nt, Artificial Sequence
  Synthetic
auauuuuuauuuaugau

SEQ ID NO: 765883 - RNA, 17 nt, Artificial Sequence
  Synthetic
uuuuuugacuuuaugau

SEQ ID NO: 765884 - RNA, 17 nt, Artificial Sequence
  Synthetic
uuauuauaaaaacugau

SEQ ID NO: 765885 - RNA, 17 nt, Artificial Sequence
  Synthetic
acgugguuaaaacugau

SEQ ID NO: 765886 - RNA, 17 nt, Artificial Sequence
  Synthetic
ugagcauaguaacugau

SEQ ID NO: 765887 - RNA, 17 nt, Artificial Sequence
  Synthetic
aagaauagguaacugau

SEQ ID NO: 765888 - RNA, 17 nt, Artificial Sequence
  Synthetic
aggcccugguaacugau

SEQ ID NO: 765889 - RNA, 17 nt, Artificial Sequence
  Synthetic
cccuggaaaccacugau

SEQ ID NO: 765890 - RNA, 17 nt, Artificial Sequence
  Synthetic
uccagucugccacugau

SEQ ID NO: 765891 - RNA, 17 nt, Artificial Sequence
  Synthetic
aguuucagagcacugau

SEQ ID NO: 765892 - RNA, 17 nt, Artificial Sequence
  Synthetic
uccaguccaucacugau

SEQ ID NO: 765893 - RNA, 17 nt, Artificial Sequence
  Synthetic
uccagucuaucacugau

SEQ ID NO: 765894 - RNA, 17 nt, Artificial Sequence
  Synthetic
ugguguaaaagacugau

SEQ ID NO: 765895 - RNA, 17 nt, Artificial Sequence
  Synthetic
ucaccucagggacugau

SEQ ID NO: 765896 - RNA, 17 nt, Artificial Sequence
  Synthetic
uuucucaaaauacugau

SEQ ID NO: 765897 - RNA, 17 nt, Artificial Sequence
  Synthetic
cagcugacaauacugau

SEQ ID NO: 765898 - RNA, 17 nt, Artificial Sequence
  Synthetic
uuuagaauccuacugau

SEQ ID NO: 765899 - RNA, 17 nt, Artificial Sequence
  Synthetic
ugacaggcuuuacugau

SEQ ID NO: 765900 - RNA, 17 nt, Artificial Sequence
  Synthetic
uaagcaugguaccugau

SEQ ID NO: 765901 - RNA, 17 nt, Artificial Sequence
  Synthetic
auuuuccauacccugau

SEQ ID NO: 765902 - RNA, 17 nt, Artificial Sequence
  Synthetic
cauucuuuuacccugau

SEQ ID NO: 765903 - RNA, 17 nt, Artificial Sequence
  Synthetic
auuuuuuuuccccugau

SEQ ID NO: 765904 - RNA, 17 nt, Artificial Sequence
  Synthetic
ugaaauccagcccugau

SEQ ID NO: 765905 - RNA, 17 nt, Artificial Sequence
  Synthetic
aaggcacaugcccugau

SEQ ID NO: 765906 - RNA, 17 nt, Artificial Sequence
  Synthetic
agcugaugaauccugau

SEQ ID NO: 765907 - RNA, 17 nt, Artificial Sequence
  Synthetic
accugcuuugagcugau

SEQ ID NO: 765908 - RNA, 17 nt, Artificial Sequence
  Synthetic
uaccuaccauagcugau

SEQ ID NO: 765909 - RNA, 17 nt, Artificial Sequence
  Synthetic
acaaaguuuuagcugau

SEQ ID NO: 765910 - RNA, 17 nt, Artificial Sequence
  Synthetic
uuuuacagagcgcugau

SEQ ID NO: 765911 - RNA, 17 nt, Artificial Sequence
  Synthetic
ugggaaaucaggcugau

SEQ ID NO: 765912 - RNA, 17 nt, Artificial Sequence
  Synthetic
uguggacagaggcugau

SEQ ID NO: 765913 - RNA, 17 nt, Artificial Sequence
  Synthetic
acuuaugaugggcugau

SEQ ID NO: 765914 - RNA, 17 nt, Artificial Sequence
  Synthetic
ccagcaucuuggcugau

SEQ ID NO: 765915 - RNA, 17 nt, Artificial Sequence
  Synthetic
cacucuagaaugcugau

SEQ ID NO: 765916 - RNA, 17 nt, Artificial Sequence
  Synthetic
acugacuacaugcugau

SEQ ID NO: 765917 - RNA, 17 nt, Artificial Sequence
  Synthetic
aacuuuuauaugcugau

SEQ ID NO: 765918 - RNA, 17 nt, Artificial Sequence
  Synthetic
aauuucacugugcugau

SEQ ID NO: 765919 - RNA, 17 nt, Artificial Sequence
  Synthetic
aggcuggaauugcugau

SEQ ID NO: 765920 - RNA, 17 nt, Artificial Sequence
  Synthetic
caucuguguuugcugau

SEQ ID NO: 765921 - RNA, 17 nt, Artificial Sequence
  Synthetic
agaaauuucaaucugau

SEQ ID NO: 765922 - RNA, 17 nt, Artificial Sequence
  Synthetic
uacaaauggaaucugau

SEQ ID NO: 765923 - RNA, 17 nt, Artificial Sequence
  Synthetic
aaauacuggaaucugau

SEQ ID NO: 765924 - RNA, 17 nt, Artificial Sequence
  Synthetic
uauauuugacaucugau

SEQ ID NO: 765925 - RNA, 17 nt, Artificial Sequence
  Synthetic
cuuagcccugaucugau

SEQ ID NO: 765926 - RNA, 17 nt, Artificial Sequence
  Synthetic
aaaaagggcacucugau

SEQ ID NO: 765927 - RNA, 17 nt, Artificial Sequence
  Synthetic
uaaauaaauacucugau

SEQ ID NO: 765928 - RNA, 17 nt, Artificial Sequence
  Synthetic
aaccuccacccucugau

SEQ ID NO: 765929 - RNA, 17 nt, Artificial Sequence
  Synthetic
uuucauccugcucugau

SEQ ID NO: 765930 - RNA, 17 nt, Artificial Sequence
  Synthetic
uccacuguuagucugau

SEQ ID NO: 765931 - RNA, 17 nt, Artificial Sequence
  Synthetic
uccgcuguuagucugau

SEQ ID NO: 765932 - RNA, 17 nt, Artificial Sequence
  Synthetic
ccaaaucuacgucugau

SEQ ID NO: 765933 - RNA, 17 nt, Artificial Sequence
  Synthetic
uccauggauauucugau

SEQ ID NO: 765934 - RNA, 17 nt, Artificial Sequence
  Synthetic
acuaagguucuucugau

SEQ ID NO: 765935 - RNA, 17 nt, Artificial Sequence
  Synthetic
ccaagcugaguucugau

SEQ ID NO: 765936 - RNA, 17 nt, Artificial Sequence
  Synthetic
uuuaaguagguucugau

SEQ ID NO: 765937 - RNA, 17 nt, Artificial Sequence
  Synthetic
uuagcccacuuucugau

SEQ ID NO: 765938 - RNA, 17 nt, Artificial Sequence
  Synthetic
uuugcccacuuucugau

SEQ ID NO: 765939 - RNA, 17 nt, Artificial Sequence
  Synthetic
aguguuagcaaagugau

SEQ ID NO: 765940 - RNA, 17 nt, Artificial Sequence
  Synthetic
ugauagacgaaagugau

SEQ ID NO: 765941 - RNA, 17 nt, Artificial Sequence
  Synthetic
uaggagaguaaagugau

SEQ ID NO: 765942 - RNA, 17 nt, Artificial Sequence
  Synthetic
uuaugguggcaagugau

SEQ ID NO: 765943 - RNA, 17 nt, Artificial Sequence
  Synthetic
aguauaguucaagugau

SEQ ID NO: 765944 - RNA, 17 nt, Artificial Sequence
  Synthetic
ugaguaacagaagugau

SEQ ID NO: 765945 - RNA, 17 nt, Artificial Sequence
  Synthetic
uauuuuauggaagugau

SEQ ID NO: 765946 - RNA, 17 nt, Artificial Sequence
  Synthetic
agagauucugaagugau

SEQ ID NO: 765947 - RNA, 17 nt, Artificial Sequence
  Synthetic
auagggugaacagugau

SEQ ID NO: 765948 - RNA, 17 nt, Artificial Sequence
  Synthetic
ugugaaacagcagugau

SEQ ID NO: 765949 - RNA, 17 nt, Artificial Sequence
  Synthetic
aucuuaaaggcagugau

SEQ ID NO: 765950 - RNA, 17 nt, Artificial Sequence
  Synthetic
uaccgaauacuagugau

SEQ ID NO: 765951 - RNA, 17 nt, Artificial Sequence
  Synthetic
caucaaaaugucgugau

SEQ ID NO: 765952 - RNA, 17 nt, Artificial Sequence
  Synthetic
uguuuuucagaggugau

SEQ ID NO: 765953 - RNA, 17 nt, Artificial Sequence
  Synthetic
accuggugggaggugau

SEQ ID NO: 765954 - RNA, 17 nt, Artificial Sequence
  Synthetic
auaguauuugaggugau

SEQ ID NO: 765955 - RNA, 17 nt, Artificial Sequence
  Synthetic
cuuaauaucuaggugau

SEQ ID NO: 765956 - RNA, 17 nt, Artificial Sequence
  Synthetic
auauaucucuaggugau

SEQ ID NO: 765957 - RNA, 17 nt, Artificial Sequence
  Synthetic
ccuuuucacagggugau

SEQ ID NO: 765958 - RNA, 17 nt, Artificial Sequence
  Synthetic
cuaaaauucagggugau

SEQ ID NO: 765959 - RNA, 17 nt, Artificial Sequence
  Synthetic
cccaucuggggggugau

SEQ ID NO: 765960 - RNA, 17 nt, Artificial Sequence
  Synthetic
cucacugccugggugau

SEQ ID NO: 765961 - RNA, 17 nt, Artificial Sequence
  Synthetic
auaacuguuauggugau

SEQ ID NO: 765962 - RNA, 17 nt, Artificial Sequence
  Synthetic
cuaugugauuuggugau

SEQ ID NO: 765963 - RNA, 17 nt, Artificial Sequence
  Synthetic
auauuccucuaugugau

SEQ ID NO: 765964 - RNA, 17 nt, Artificial Sequence
  Synthetic
auuccuggggcugugau

SEQ ID NO: 765965 - RNA, 17 nt, Artificial Sequence
  Synthetic
uuguucuagucugugau

SEQ ID NO: 765966 - RNA, 17 nt, Artificial Sequence
  Synthetic
accucugggucugugau

SEQ ID NO: 765967 - RNA, 17 nt, Artificial Sequence
  Synthetic
uccuauccuucugugau

SEQ ID NO: 765968 - RNA, 17 nt, Artificial Sequence
  Synthetic
aacuaaaggagugugau

SEQ ID NO: 765969 - RNA, 17 nt, Artificial Sequence
  Synthetic
uauacuacucgugugau

SEQ ID NO: 765970 - RNA, 17 nt, Artificial Sequence
  Synthetic
aacaaguucugugugau

SEQ ID NO: 765971 - RNA, 17 nt, Artificial Sequence
  Synthetic
aaucgucaucuugugau

SEQ ID NO: 765972 - RNA, 17 nt, Artificial Sequence
  Synthetic
aauuuaguguuugugau

SEQ ID NO: 765973 - RNA, 17 nt, Artificial Sequence
  Synthetic
caucauaaaaaauugau

SEQ ID NO: 765974 - RNA, 17 nt, Artificial Sequence
  Synthetic
uauguuccaaaauugau

SEQ ID NO: 765975 - RNA, 17 nt, Artificial Sequence
  Synthetic
aggacuucaaaauugau

SEQ ID NO: 765976 - RNA, 17 nt, Artificial Sequence
  Synthetic
ccuccuuccaaauugau

SEQ ID NO: 765977 - RNA, 17 nt, Artificial Sequence
  Synthetic
cucaauaggaaauugau

SEQ ID NO: 765978 - RNA, 17 nt, Artificial Sequence
  Synthetic
ugugauaggaaauugau

SEQ ID NO: 765979 - RNA, 17 nt, Artificial Sequence
  Synthetic
cugauaacuaaauugau

SEQ ID NO: 765980 - RNA, 17 nt, Artificial Sequence
  Synthetic
uuagguccucaauugau

SEQ ID NO: 765981 - RNA, 17 nt, Artificial Sequence
  Synthetic
agagagcucuaauugau

SEQ ID NO: 765982 - RNA, 17 nt, Artificial Sequence
  Synthetic
ucugaucuaccauugau

SEQ ID NO: 765983 - RNA, 17 nt, Artificial Sequence
  Synthetic
uccaguauaucauugau

SEQ ID NO: 765984 - RNA, 17 nt, Artificial Sequence
  Synthetic
uccagucuaucauugau

SEQ ID NO: 765985 - RNA, 17 nt, Artificial Sequence
  Synthetic
ucagucuguucauugau

SEQ ID NO: 765986 - RNA, 17 nt, Artificial Sequence
  Synthetic
cugaaucacagauugau

SEQ ID NO: 765987 - RNA, 17 nt, Artificial Sequence
  Synthetic
ucuacuugucgauugau

SEQ ID NO: 765988 - RNA, 17 nt, Artificial Sequence
  Synthetic
ucaguaaugggauugau

SEQ ID NO: 765989 - RNA, 17 nt, Artificial Sequence
  Synthetic
aauacuuacugauugau

SEQ ID NO: 765990 - RNA, 17 nt, Artificial Sequence
  Synthetic
ucaaaguaaauauugau

SEQ ID NO: 765991 - RNA, 17 nt, Artificial Sequence
  Synthetic
caaaaaacaauauugau

SEQ ID NO: 765992 - RNA, 17 nt, Artificial Sequence
  Synthetic
aagguguauauauugau

SEQ ID NO: 765993 - RNA, 17 nt, Artificial Sequence
  Synthetic
acucuuugacuauugau

SEQ ID NO: 765994 - RNA, 17 nt, Artificial Sequence
  Synthetic
uauuuuguucuauugau

SEQ ID NO: 765995 - RNA, 17 nt, Artificial Sequence
  Synthetic
ccucuuuuucuauugau

SEQ ID NO: 765996 - RNA, 17 nt, Artificial Sequence
  Synthetic
ugaauauagguauugau

SEQ ID NO: 765997 - RNA, 17 nt, Artificial Sequence
  Synthetic
auaaauuagguauugau

SEQ ID NO: 765998 - RNA, 17 nt, Artificial Sequence
  Synthetic
auaaacuaguuauugau

SEQ ID NO: 765999 - RNA, 17 nt, Artificial Sequence
  Synthetic
ucaauuuuuuuauugau

SEQ ID NO: 766000 - RNA, 17 nt, Artificial Sequence
  Synthetic
ugcagcaggaacuugau

SEQ ID NO: 766001 - RNA, 17 nt, Artificial Sequence
  Synthetic
ugaaagauacacuugau

SEQ ID NO: 766002 - RNA, 17 nt, Artificial Sequence
  Synthetic
cuucuuaucuacuugau

SEQ ID NO: 766003 - RNA, 17 nt, Artificial Sequence
  Synthetic
aaaaaucugcccuugau

SEQ ID NO: 766004 - RNA, 17 nt, Artificial Sequence
  Synthetic
uuacguguagccuugau

SEQ ID NO: 766005 - RNA, 17 nt, Artificial Sequence
  Synthetic
auuuaaauuagcuugau

SEQ ID NO: 766006 - RNA, 17 nt, Artificial Sequence
  Synthetic
uagcaaaucaucuugau

SEQ ID NO: 766007 - RNA, 17 nt, Artificial Sequence
  Synthetic
cuuagggauaucuugau

SEQ ID NO: 766008 - RNA, 17 nt, Artificial Sequence
  Synthetic
acuguaucucucuugau

SEQ ID NO: 766009 - RNA, 17 nt, Artificial Sequence
  Synthetic
aaaguugcagucuugau

SEQ ID NO: 766010 - RNA, 17 nt, Artificial Sequence
  Synthetic
acaauacuauucuugau

SEQ ID NO: 766011 - RNA, 17 nt, Artificial Sequence
  Synthetic
acaaaccauuucuugau

SEQ ID NO: 766012 - RNA, 17 nt, Artificial Sequence
  Synthetic
auauauaucaaguugau

SEQ ID NO: 766013 - RNA, 17 nt, Artificial Sequence
  Synthetic
uuuguugaagaguugau

SEQ ID NO: 766014 - RNA, 17 nt, Artificial Sequence
  Synthetic
acugguuaaucguugau

SEQ ID NO: 766015 - RNA, 17 nt, Artificial Sequence
  Synthetic
ucauguugcagguugau

SEQ ID NO: 766016 - RNA, 17 nt, Artificial Sequence
  Synthetic
cuagaugacggguugau

SEQ ID NO: 766017 - RNA, 17 nt, Artificial Sequence
  Synthetic
ugcacguauugguugau

SEQ ID NO: 766018 - RNA, 17 nt, Artificial Sequence
  Synthetic
ccuuguacaauguugau

SEQ ID NO: 766019 - RNA, 17 nt, Artificial Sequence
  Synthetic
aacacacaucuguugau

SEQ ID NO: 766020 - RNA, 17 nt, Artificial Sequence
  Synthetic
aaagucuaucuguugau

SEQ ID NO: 766021 - RNA, 17 nt, Artificial Sequence
  Synthetic
augauaauacauuugau

SEQ ID NO: 766022 - RNA, 17 nt, Artificial Sequence
  Synthetic
ccaaaccuacauuugau

SEQ ID NO: 766023 - RNA, 17 nt, Artificial Sequence
  Synthetic
uuucugauucauuugau

SEQ ID NO: 766024 - RNA, 17 nt, Artificial Sequence
  Synthetic
aaaaagaaagauuugau

SEQ ID NO: 766025 - RNA, 17 nt, Artificial Sequence
  Synthetic
uucacaaaggauuugau

SEQ ID NO: 766026 - RNA, 17 nt, Artificial Sequence
  Synthetic
caggggauggcuuugau

SEQ ID NO: 766027 - RNA, 17 nt, Artificial Sequence
  Synthetic
ucacccauaaguuugau

SEQ ID NO: 766028 - RNA, 17 nt, Artificial Sequence
  Synthetic
auaaaauacuguuugau

SEQ ID NO: 766029 - RNA, 17 nt, Artificial Sequence
  Synthetic
uuuauguacuguuugau

SEQ ID NO: 766030 - RNA, 17 nt, Artificial Sequence
  Synthetic
auuuguucuuguuugau

SEQ ID NO: 766031 - RNA, 17 nt, Artificial Sequence
  Synthetic
aaucacgacauuuugau

SEQ ID NO: 766032 - RNA, 17 nt, Artificial Sequence
  Synthetic
ccuuuuuaccuuuugau

SEQ ID NO: 766033 - RNA, 17 nt, Artificial Sequence
  Synthetic
uuuuucucccuuuugau

SEQ ID NO: 766034 - RNA, 17 nt, Artificial Sequence
  Synthetic
acucuaugccuuuugau

SEQ ID NO: 766035 - RNA, 17 nt, Artificial Sequence
  Synthetic
ucaugaaugcuuuugau

SEQ ID NO: 766036 - RNA, 17 nt, Artificial Sequence
  Synthetic
uucacccacuuuuugau

SEQ ID NO: 766037 - RNA, 17 nt, Artificial Sequence
  Synthetic
uucccccacuuuuugau

SEQ ID NO: 766038 - RNA, 17 nt, Artificial Sequence
  Synthetic
uucgcccacuuuuugau

SEQ ID NO: 766039 - RNA, 17 nt, Artificial Sequence
  Synthetic
uucgcucacuuuuugau

SEQ ID NO: 766040 - RNA, 17 nt, Artificial Sequence
  Synthetic
ccuucuagguuuuugau

SEQ ID NO: 766041 - RNA, 17 nt, Artificial Sequence
  Synthetic
ugcccauuuuuuuugau

SEQ ID NO: 766042 - RNA, 17 nt, Artificial Sequence
  Synthetic
ucuuauuuuuuuuugau

SEQ ID NO: 766043 - RNA, 17 nt, Artificial Sequence
  Synthetic
caaauggcaaaaaauau

SEQ ID NO: 766044 - RNA, 17 nt, Artificial Sequence
  Synthetic
auuuagggaaaaaauau

SEQ ID NO: 766045 - RNA, 17 nt, Artificial Sequence
  Synthetic
ugagauggaaaaaauau

SEQ ID NO: 766046 - RNA, 17 nt, Artificial Sequence
  Synthetic
auuuuauucaaaaauau

SEQ ID NO: 766047 - RNA, 17 nt, Artificial Sequence
  Synthetic
cuauccuucaaaaauau

SEQ ID NO: 766048 - RNA, 17 nt, Artificial Sequence
  Synthetic
agaaucuagaaaaauau

SEQ ID NO: 766049 - RNA, 17 nt, Artificial Sequence
  Synthetic
uagaauuugaaaaauau

SEQ ID NO: 766050 - RNA, 17 nt, Artificial Sequence
  Synthetic
acuguaauuaaaaauau

SEQ ID NO: 766051 - RNA, 17 nt, Artificial Sequence
  Synthetic
auccaaaaccaaaauau

SEQ ID NO: 766052 - RNA, 17 nt, Artificial Sequence
  Synthetic
uuucagacagaaaauau

SEQ ID NO: 766053 - RNA, 17 nt, Artificial Sequence
  Synthetic
uugggaguagaaaauau

SEQ ID NO: 766054 - RNA, 17 nt, Artificial Sequence
  Synthetic
cuccacauggaaaauau

SEQ ID NO: 766055 - RNA, 17 nt, Artificial Sequence
  Synthetic
aaaaguaaugaaaauau

SEQ ID NO: 766056 - RNA, 17 nt, Artificial Sequence
  Synthetic
cagugccaugaaaauau

SEQ ID NO: 766057 - RNA, 17 nt, Artificial Sequence
  Synthetic
uuacagagugaaaauau

SEQ ID NO: 766058 - RNA, 17 nt, Artificial Sequence
  Synthetic
uucuugggugaaaauau

SEQ ID NO: 766059 - RNA, 17 nt, Artificial Sequence
  Synthetic
aaaaagaaauaaaauau

SEQ ID NO: 766060 - RNA, 17 nt, Artificial Sequence
  Synthetic
ccaaggcccuaaaauau

SEQ ID NO: 766061 - RNA, 17 nt, Artificial Sequence
  Synthetic
uuguuauguuaaaauau

SEQ ID NO: 766062 - RNA, 17 nt, Artificial Sequence
  Synthetic
ucaucuacagcaaauau

SEQ ID NO: 766063 - RNA, 17 nt, Artificial Sequence
  Synthetic
aacccugagucaaauau

SEQ ID NO: 766064 - RNA, 17 nt, Artificial Sequence
  Synthetic
aagccuccaagaaauau

SEQ ID NO: 766065 - RNA, 17 nt, Artificial Sequence
  Synthetic
aagccuucaagaaauau

SEQ ID NO: 766066 - RNA, 17 nt, Artificial Sequence
  Synthetic
caacacuacagaaauau

SEQ ID NO: 766067 - RNA, 17 nt, Artificial Sequence
  Synthetic
acaaaaagcagaaauau

SEQ ID NO: 766068 - RNA, 17 nt, Artificial Sequence
  Synthetic
ccaccccucagaaauau

SEQ ID NO: 766069 - RNA, 17 nt, Artificial Sequence
  Synthetic
auauuuuucagaaauau

SEQ ID NO: 766070 - RNA, 17 nt, Artificial Sequence
  Synthetic
uagggugggggaaauau

SEQ ID NO: 766071 - RNA, 17 nt, Artificial Sequence
  Synthetic
uaauacaggugaaauau

SEQ ID NO: 766072 - RNA, 17 nt, Artificial Sequence
  Synthetic
caauaauggugaaauau

SEQ ID NO: 766073 - RNA, 17 nt, Artificial Sequence
  Synthetic
aacuaugcuugaaauau

SEQ ID NO: 766074 - RNA, 17 nt, Artificial Sequence
  Synthetic
cuugaagauauaaauau

SEQ ID NO: 766075 - RNA, 17 nt, Artificial Sequence
  Synthetic
cugagauugcuaaauau

SEQ ID NO: 766076 - RNA, 17 nt, Artificial Sequence
  Synthetic
aauggccauguaaauau

SEQ ID NO: 766077 - RNA, 17 nt, Artificial Sequence
  Synthetic
agaucgucuuuaaauau

SEQ ID NO: 766078 - RNA, 17 nt, Artificial Sequence
  Synthetic
ucaaaagguuuaaauau

SEQ ID NO: 766079 - RNA, 17 nt, Artificial Sequence
  Synthetic
aucauuauuuuaaauau

SEQ ID NO: 766080 - RNA, 17 nt, Artificial Sequence
  Synthetic
auguuacuuuuaaauau

SEQ ID NO: 766081 - RNA, 17 nt, Artificial Sequence
  Synthetic
uuuuccuuuuuaaauau

SEQ ID NO: 766082 - RNA, 17 nt, Artificial Sequence
  Synthetic
uauuucacaaacaauau

SEQ ID NO: 766083 - RNA, 17 nt, Artificial Sequence
  Synthetic
aaggaagagaacaauau

SEQ ID NO: 766084 - RNA, 17 nt, Artificial Sequence
  Synthetic
uguaaaucuaacaauau

SEQ ID NO: 766085 - RNA, 17 nt, Artificial Sequence
  Synthetic
aauauacagcacaauau

SEQ ID NO: 766086 - RNA, 17 nt, Artificial Sequence
  Synthetic
aaauaagcauacaauau

SEQ ID NO: 766087 - RNA, 17 nt, Artificial Sequence
  Synthetic
aguaaauuauacaauau

SEQ ID NO: 766088 - RNA, 17 nt, Artificial Sequence
  Synthetic
auauaugcacccaauau

SEQ ID NO: 766089 - RNA, 17 nt, Artificial Sequence
  Synthetic
augaaacacagcaauau

SEQ ID NO: 766090 - RNA, 17 nt, Artificial Sequence
  Synthetic
auagacuugcgcaauau

SEQ ID NO: 766091 - RNA, 17 nt, Artificial Sequence
  Synthetic
uucaugaaaggcaauau

SEQ ID NO: 766092 - RNA, 17 nt, Artificial Sequence
  Synthetic
uaugcacuuggcaauau

SEQ ID NO: 766093 - RNA, 17 nt, Artificial Sequence
  Synthetic
agcaccuguaucaauau

SEQ ID NO: 766094 - RNA, 17 nt, Artificial Sequence
  Synthetic
aauuugauccucaauau

SEQ ID NO: 766095 - RNA, 17 nt, Artificial Sequence
  Synthetic
auucaacaauucaauau

SEQ ID NO: 766096 - RNA, 17 nt, Artificial Sequence
  Synthetic
ucuucaagauucaauau

SEQ ID NO: 766097 - RNA, 17 nt, Artificial Sequence
  Synthetic
uuuucaaauuucaauau

SEQ ID NO: 766098 - RNA, 17 nt, Artificial Sequence
  Synthetic
aaaaaaaaaaagaauau

SEQ ID NO: 766099 - RNA, 17 nt, Artificial Sequence
  Synthetic
uagcuagagaagaauau

SEQ ID NO: 766100 - RNA, 17 nt, Artificial Sequence
  Synthetic
uuagagaaggagaauau

SEQ ID NO: 766101 - RNA, 17 nt, Artificial Sequence
  Synthetic
auugacaaauagaauau

SEQ ID NO: 766102 - RNA, 17 nt, Artificial Sequence
  Synthetic
aaaugcucauagaauau

SEQ ID NO: 766103 - RNA, 17 nt, Artificial Sequence
  Synthetic
aggaauuacuagaauau

SEQ ID NO: 766104 - RNA, 17 nt, Artificial Sequence
  Synthetic
acguucauuuagaauau

SEQ ID NO: 766105 - RNA, 17 nt, Artificial Sequence
  Synthetic
uugaauguuuagaauau

SEQ ID NO: 766106 - RNA, 17 nt, Artificial Sequence
  Synthetic
aacucuuuaacgaauau

SEQ ID NO: 766107 - RNA, 17 nt, Artificial Sequence
  Synthetic
uaaccuuggaggaauau

SEQ ID NO: 766108 - RNA, 17 nt, Artificial Sequence
  Synthetic
cuauuuaauaggaauau

SEQ ID NO: 766109 - RNA, 17 nt, Artificial Sequence
  Synthetic
cuggaugcuaggaauau

SEQ ID NO: 766110 - RNA, 17 nt, Artificial Sequence
  Synthetic
uacagguuggggaauau

SEQ ID NO: 766111 - RNA, 17 nt, Artificial Sequence
  Synthetic
aucguagaaaugaauau

SEQ ID NO: 766112 - RNA, 17 nt, Artificial Sequence
  Synthetic
aggugccucaugaauau

SEQ ID NO: 766113 - RNA, 17 nt, Artificial Sequence
  Synthetic
aacuugaguaugaauau

SEQ ID NO: 766114 - RNA, 17 nt, Artificial Sequence
  Synthetic
uucaaaucacugaauau

SEQ ID NO: 766115 - RNA, 17 nt, Artificial Sequence
  Synthetic
aaauguccccugaauau

SEQ ID NO: 766116 - RNA, 17 nt, Artificial Sequence
  Synthetic
cccuaaucccugaauau

SEQ ID NO: 766117 - RNA, 17 nt, Artificial Sequence
  Synthetic
uucuucaggcugaauau

SEQ ID NO: 766118 - RNA, 17 nt, Artificial Sequence
  Synthetic
caugaaggcuugaauau

SEQ ID NO: 766119 - RNA, 17 nt, Artificial Sequence
  Synthetic
auuuuaagguugaauau

SEQ ID NO: 766120 - RNA, 17 nt, Artificial Sequence
  Synthetic
uuaagaauguugaauau

SEQ ID NO: 766121 - RNA, 17 nt, Artificial Sequence
  Synthetic
ugaagaguguugaauau

SEQ ID NO: 766122 - RNA, 17 nt, Artificial Sequence
  Synthetic
uaaucauguuugaauau

SEQ ID NO: 766123 - RNA, 17 nt, Artificial Sequence
  Synthetic
cacuuagaaaauaauau

SEQ ID NO: 766124 - RNA, 17 nt, Artificial Sequence
  Synthetic
uagaaaauaaauaauau

SEQ ID NO: 766125 - RNA, 17 nt, Artificial Sequence
  Synthetic
aauacuaggaauaauau

SEQ ID NO: 766126 - RNA, 17 nt, Artificial Sequence
  Synthetic
ugaaacaugaauaauau

SEQ ID NO: 766127 - RNA, 17 nt, Artificial Sequence
  Synthetic
uaucucaguaauaauau

SEQ ID NO: 766128 - RNA, 17 nt, Artificial Sequence
  Synthetic
agguauuuuaauaauau

SEQ ID NO: 766129 - RNA, 17 nt, Artificial Sequence
  Synthetic
cguauucaacauaauau

SEQ ID NO: 766130 - RNA, 17 nt, Artificial Sequence
  Synthetic
auuguuagccauaauau

SEQ ID NO: 766131 - RNA, 17 nt, Artificial Sequence
  Synthetic
cuaugcuuccauaauau

SEQ ID NO: 766132 - RNA, 17 nt, Artificial Sequence
  Synthetic
uugaacacagauaauau

SEQ ID NO: 766133 - RNA, 17 nt, Artificial Sequence
  Synthetic
auaguaugauauaauau

SEQ ID NO: 766134 - RNA, 17 nt, Artificial Sequence
  Synthetic
agaaaaugguauaauau

SEQ ID NO: 766135 - RNA, 17 nt, Artificial Sequence
  Synthetic
ucacuguguuauaauau

SEQ ID NO: 766136 - RNA, 17 nt, Artificial Sequence
  Synthetic
aaguucuuuuauaauau

SEQ ID NO: 766137 - RNA, 17 nt, Artificial Sequence
  Synthetic
aaaagaugagcuaauau

SEQ ID NO: 766138 - RNA, 17 nt, Artificial Sequence
  Synthetic
auugcuugaaguaauau

SEQ ID NO: 766139 - RNA, 17 nt, Artificial Sequence
  Synthetic
uauaaaacuaguaauau

SEQ ID NO: 766140 - RNA, 17 nt, Artificial Sequence
  Synthetic
cauuuuaaaauuaauau

SEQ ID NO: 766141 - RNA, 17 nt, Artificial Sequence
  Synthetic
aauauguuaauuaauau

SEQ ID NO: 766142 - RNA, 17 nt, Artificial Sequence
  Synthetic
uaggagauuauuaauau

SEQ ID NO: 766143 - RNA, 17 nt, Artificial Sequence
  Synthetic
cuuuugccacuuaauau

SEQ ID NO: 766144 - RNA, 17 nt, Artificial Sequence
  Synthetic
uuguuuugccuuaauau

SEQ ID NO: 766145 - RNA, 17 nt, Artificial Sequence
  Synthetic
aauuaccaucuuaauau

SEQ ID NO: 766146 - RNA, 17 nt, Artificial Sequence
  Synthetic
caauuaacuguuaauau

SEQ ID NO: 766147 - RNA, 17 nt, Artificial Sequence
  Synthetic
uaacaaaccuuuaauau

SEQ ID NO: 766148 - RNA, 17 nt, Artificial Sequence
  Synthetic
uacagcaaguuuaauau

SEQ ID NO: 766149 - RNA, 17 nt, Artificial Sequence
  Synthetic
uuccugguuuuuaauau

SEQ ID NO: 766150 - RNA, 17 nt, Artificial Sequence
  Synthetic
caauugaccaaacauau

SEQ ID NO: 766151 - RNA, 17 nt, Artificial Sequence
  Synthetic
auuaaguucaaacauau

SEQ ID NO: 766152 - RNA, 17 nt, Artificial Sequence
  Synthetic
acaaagaaugaacauau

SEQ ID NO: 766153 - RNA, 17 nt, Artificial Sequence
  Synthetic
agacggccauaacauau

SEQ ID NO: 766154 - RNA, 17 nt, Artificial Sequence
  Synthetic
augcaaggauaacauau

SEQ ID NO: 766155 - RNA, 17 nt, Artificial Sequence
  Synthetic
aggaaaugaccacauau

SEQ ID NO: 766156 - RNA, 17 nt, Artificial Sequence
  Synthetic
aucacacauccacauau

SEQ ID NO: 766157 - RNA, 17 nt, Artificial Sequence
  Synthetic
ucuaucucagcacauau

SEQ ID NO: 766158 - RNA, 17 nt, Artificial Sequence
  Synthetic
uuuaagugugcacauau

SEQ ID NO: 766159 - RNA, 17 nt, Artificial Sequence
  Synthetic
aaagccauugcacauau

SEQ ID NO: 766160 - RNA, 17 nt, Artificial Sequence
  Synthetic
ccaggacauucacauau

SEQ ID NO: 766161 - RNA, 17 nt, Artificial Sequence
  Synthetic
aaaauguuuggacauau

SEQ ID NO: 766162 - RNA, 17 nt, Artificial Sequence
  Synthetic
uggcacuacugacauau

SEQ ID NO: 766163 - RNA, 17 nt, Artificial Sequence
  Synthetic
acucucuucugacauau

SEQ ID NO: 766164 - RNA, 17 nt, Artificial Sequence
  Synthetic
aggucucagugacauau

SEQ ID NO: 766165 - RNA, 17 nt, Artificial Sequence
  Synthetic
ugcuguaaaauacauau

SEQ ID NO: 766166 - RNA, 17 nt, Artificial Sequence
  Synthetic
aaaagaccaauacauau

SEQ ID NO: 766167 - RNA, 17 nt, Artificial Sequence
  Synthetic
aguaucaggauacauau

SEQ ID NO: 766168 - RNA, 17 nt, Artificial Sequence
  Synthetic
acuuuaaauauacauau

SEQ ID NO: 766169 - RNA, 17 nt, Artificial Sequence
  Synthetic
cuaguaaucuuacauau

SEQ ID NO: 766170 - RNA, 17 nt, Artificial Sequence
  Synthetic
ucacaaaauuuacauau

SEQ ID NO: 766171 - RNA, 17 nt, Artificial Sequence
  Synthetic
aucaccuaaaaccauau

SEQ ID NO: 766172 - RNA, 17 nt, Artificial Sequence
  Synthetic
uguagaugaaaccauau

SEQ ID NO: 766173 - RNA, 17 nt, Artificial Sequence
  Synthetic
acaggguuucaccauau

SEQ ID NO: 766174 - RNA, 17 nt, Artificial Sequence
  Synthetic
augggguuucaccauau

SEQ ID NO: 766175 - RNA, 17 nt, Artificial Sequence
  Synthetic
cccauuuuagaccauau

SEQ ID NO: 766176 - RNA, 17 nt, Artificial Sequence
  Synthetic
uuaacauuauaccauau

SEQ ID NO: 766177 - RNA, 17 nt, Artificial Sequence
  Synthetic
acaaacagugcccauau

SEQ ID NO: 766178 - RNA, 17 nt, Artificial Sequence
  Synthetic
auucauguuucccauau

SEQ ID NO: 766179 - RNA, 17 nt, Artificial Sequence
  Synthetic
auuaguuugagccauau

SEQ ID NO: 766180 - RNA, 17 nt, Artificial Sequence
  Synthetic
caaugucuuagccauau

SEQ ID NO: 766181 - RNA, 17 nt, Artificial Sequence
  Synthetic
agccacagaugccauau

SEQ ID NO: 766182 - RNA, 17 nt, Artificial Sequence
  Synthetic
caaugcuacugccauau

SEQ ID NO: 766183 - RNA, 17 nt, Artificial Sequence
  Synthetic
ccuuucucaauccauau

SEQ ID NO: 766184 - RNA, 17 nt, Artificial Sequence
  Synthetic
cagauagugauccauau

SEQ ID NO: 766185 - RNA, 17 nt, Artificial Sequence
  Synthetic
acaucaaagcuccauau

SEQ ID NO: 766186 - RNA, 17 nt, Artificial Sequence
  Synthetic
cauuauuccuuccauau

SEQ ID NO: 766187 - RNA, 17 nt, Artificial Sequence
  Synthetic
acuucaguuuuccauau

SEQ ID NO: 766188 - RNA, 17 nt, Artificial Sequence
  Synthetic
aaagagugaaagcauau

SEQ ID NO: 766189 - RNA, 17 nt, Artificial Sequence
  Synthetic
ucugacuacaagcauau

SEQ ID NO: 766190 - RNA, 17 nt, Artificial Sequence
  Synthetic
aaugagucuaagcauau

SEQ ID NO: 766191 - RNA, 17 nt, Artificial Sequence
  Synthetic
uagauagcauagcauau

SEQ ID NO: 766192 - RNA, 17 nt, Artificial Sequence
  Synthetic
acuuuuguauggcauau

SEQ ID NO: 766193 - RNA, 17 nt, Artificial Sequence
  Synthetic
aaugugaacaugcauau

SEQ ID NO: 766194 - RNA, 17 nt, Artificial Sequence
  Synthetic
caaagggguaugcauau

SEQ ID NO: 766195 - RNA, 17 nt, Artificial Sequence
  Synthetic
caggcaaaccugcauau

SEQ ID NO: 766196 - RNA, 17 nt, Artificial Sequence
  Synthetic
auuuuaaaccugcauau

SEQ ID NO: 766197 - RNA, 17 nt, Artificial Sequence
  Synthetic
ccugguugucugcauau

SEQ ID NO: 766198 - RNA, 17 nt, Artificial Sequence
  Synthetic
uucacacacgugcauau

SEQ ID NO: 766199 - RNA, 17 nt, Artificial Sequence
  Synthetic
uuguuguaugugcauau

SEQ ID NO: 766200 - RNA, 17 nt, Artificial Sequence
  Synthetic
uauguaucugugcauau

SEQ ID NO: 766201 - RNA, 17 nt, Artificial Sequence
  Synthetic
cuugugaauuugcauau

SEQ ID NO: 766202 - RNA, 17 nt, Artificial Sequence
  Synthetic
ucacuauguuugcauau

SEQ ID NO: 766203 - RNA, 17 nt, Artificial Sequence
  Synthetic
auggacaaaaaucauau

SEQ ID NO: 766204 - RNA, 17 nt, Artificial Sequence
  Synthetic
ucaaauauaaaucauau

SEQ ID NO: 766205 - RNA, 17 nt, Artificial Sequence
  Synthetic
agaaccuaacaucauau

SEQ ID NO: 766206 - RNA, 17 nt, Artificial Sequence
  Synthetic
ucaaucacucaucauau

SEQ ID NO: 766207 - RNA, 17 nt, Artificial Sequence
  Synthetic
auauauauauaucauau

SEQ ID NO: 766208 - RNA, 17 nt, Artificial Sequence
  Synthetic
acaggcucuuaucauau

SEQ ID NO: 766209 - RNA, 17 nt, Artificial Sequence
  Synthetic
aagaauuuuuaucauau

SEQ ID NO: 766210 - RNA, 17 nt, Artificial Sequence
  Synthetic
aggguacauacucauau

SEQ ID NO: 766211 - RNA, 17 nt, Artificial Sequence
  Synthetic
uaaggacagagucauau

SEQ ID NO: 766212 - RNA, 17 nt, Artificial Sequence
  Synthetic
auuggauauggucauau

SEQ ID NO: 766213 - RNA, 17 nt, Artificial Sequence
  Synthetic
uauauaacaugucauau

SEQ ID NO: 766214 - RNA, 17 nt, Artificial Sequence
  Synthetic
cuaucuuaaauucauau

SEQ ID NO: 766215 - RNA, 17 nt, Artificial Sequence
  Synthetic
ugaacauaauuucauau

SEQ ID NO: 766216 - RNA, 17 nt, Artificial Sequence
  Synthetic
ucuuuuucauuucauau

SEQ ID NO: 766217 - RNA, 17 nt, Artificial Sequence
  Synthetic
cauaaauuaaaagauau

SEQ ID NO: 766218 - RNA, 17 nt, Artificial Sequence
  Synthetic
aaaagauacaaagauau

SEQ ID NO: 766219 - RNA, 17 nt, Artificial Sequence
  Synthetic
aaugaagguaaagauau

SEQ ID NO: 766220 - RNA, 17 nt, Artificial Sequence
  Synthetic
aauuauaaagaagauau

SEQ ID NO: 766221 - RNA, 17 nt, Artificial Sequence
  Synthetic
auaauucaagaagauau

SEQ ID NO: 766222 - RNA, 17 nt, Artificial Sequence
  Synthetic
uuucugauuuaagauau

SEQ ID NO: 766223 - RNA, 17 nt, Artificial Sequence
  Synthetic
cuacuguccacagauau

SEQ ID NO: 766224 - RNA, 17 nt, Artificial Sequence
  Synthetic
acucugaagacagauau

SEQ ID NO: 766225 - RNA, 17 nt, Artificial Sequence
  Synthetic
agcaaugugacagauau

SEQ ID NO: 766226 - RNA, 17 nt, Artificial Sequence
  Synthetic
uaaguuuguacagauau

SEQ ID NO: 766227 - RNA, 17 nt, Artificial Sequence
  Synthetic
cuugaagaaccagauau

SEQ ID NO: 766228 - RNA, 17 nt, Artificial Sequence
  Synthetic
cuauaacacucagauau

SEQ ID NO: 766229 - RNA, 17 nt, Artificial Sequence
  Synthetic
auaaauaauucagauau

SEQ ID NO: 766230 - RNA, 17 nt, Artificial Sequence
  Synthetic
ccuaagcacagagauau

SEQ ID NO: 766231 - RNA, 17 nt, Artificial Sequence
  Synthetic
uuuuuuuggugagauau

SEQ ID NO: 766232 - RNA, 17 nt, Artificial Sequence
  Synthetic
ugucacccacuagauau

SEQ ID NO: 766233 - RNA, 17 nt, Artificial Sequence
  Synthetic
ccuggaaaucuagauau

SEQ ID NO: 766234 - RNA, 17 nt, Artificial Sequence
  Synthetic
uaauauaaauuagauau

SEQ ID NO: 766235 - RNA, 17 nt, Artificial Sequence
  Synthetic
ugaacuuaguuagauau

SEQ ID NO: 766236 - RNA, 17 nt, Artificial Sequence
  Synthetic
cuguccuauuuagauau

SEQ ID NO: 766237 - RNA, 17 nt, Artificial Sequence
  Synthetic
auuaauaguuuagauau

SEQ ID NO: 766238 - RNA, 17 nt, Artificial Sequence
  Synthetic
auguucaucaaggauau

SEQ ID NO: 766239 - RNA, 17 nt, Artificial Sequence
  Synthetic
caaugagagaaggauau

SEQ ID NO: 766240 - RNA, 17 nt, Artificial Sequence
  Synthetic
aauaccauucaggauau

SEQ ID NO: 766241 - RNA, 17 nt, Artificial Sequence
  Synthetic
ucuggagaagaggauau

SEQ ID NO: 766242 - RNA, 17 nt, Artificial Sequence
  Synthetic
cuggaaaaggaggauau

SEQ ID NO: 766243 - RNA, 17 nt, Artificial Sequence
  Synthetic
cagacuugugaggauau

SEQ ID NO: 766244 - RNA, 17 nt, Artificial Sequence
  Synthetic
aagugcuaaagggauau

SEQ ID NO: 766245 - RNA, 17 nt, Artificial Sequence
  Synthetic
caccacagaagggauau

SEQ ID NO: 766246 - RNA, 17 nt, Artificial Sequence
  Synthetic
auguucaucagggauau

SEQ ID NO: 766247 - RNA, 17 nt, Artificial Sequence
  Synthetic
ucaagguagagggauau

SEQ ID NO: 766248 - RNA, 17 nt, Artificial Sequence
  Synthetic
aucuguuaaggggauau

SEQ ID NO: 766249 - RNA, 17 nt, Artificial Sequence
  Synthetic
auggggaaaugggauau

SEQ ID NO: 766250 - RNA, 17 nt, Artificial Sequence
  Synthetic
auugagauacuggauau

SEQ ID NO: 766251 - RNA, 17 nt, Artificial Sequence
  Synthetic
uuguauccuuuggauau

SEQ ID NO: 766252 - RNA, 17 nt, Artificial Sequence
  Synthetic
ugucuugguuuggauau

SEQ ID NO: 766253 - RNA, 17 nt, Artificial Sequence
  Synthetic
ccaagcauuuuggauau

SEQ ID NO: 766254 - RNA, 17 nt, Artificial Sequence
  Synthetic
auacaaagaaaugauau

SEQ ID NO: 766255 - RNA, 17 nt, Artificial Sequence
  Synthetic
aguaauaacaaugauau

SEQ ID NO: 766256 - RNA, 17 nt, Artificial Sequence
  Synthetic
auaguauuuaaugauau

SEQ ID NO: 766257 - RNA, 17 nt, Artificial Sequence
  Synthetic
ucuuuccaacaugauau

SEQ ID NO: 766258 - RNA, 17 nt, Artificial Sequence
  Synthetic
aacaaaaggcaugauau

SEQ ID NO: 766259 - RNA, 17 nt, Artificial Sequence
  Synthetic
aacgcugggcaugauau

SEQ ID NO: 766260 - RNA, 17 nt, Artificial Sequence
  Synthetic
augucacugcaugauau

SEQ ID NO: 766261 - RNA, 17 nt, Artificial Sequence
  Synthetic
agggguagugaugauau

SEQ ID NO: 766262 - RNA, 17 nt, Artificial Sequence
  Synthetic
cccauucaguaugauau

SEQ ID NO: 766263 - RNA, 17 nt, Artificial Sequence
  Synthetic
aacaauauuacugauau

SEQ ID NO: 766264 - RNA, 17 nt, Artificial Sequence
  Synthetic
aaaagucacccugauau

SEQ ID NO: 766265 - RNA, 17 nt, Artificial Sequence
  Synthetic
acuuuucucccugauau

SEQ ID NO: 766266 - RNA, 17 nt, Artificial Sequence
  Synthetic
augaaccaaagugauau

SEQ ID NO: 766267 - RNA, 17 nt, Artificial Sequence
  Synthetic
aauuucauucgugauau

SEQ ID NO: 766268 - RNA, 17 nt, Artificial Sequence
  Synthetic
agguaggagggugauau

SEQ ID NO: 766269 - RNA, 17 nt, Artificial Sequence
  Synthetic
ugccuuaucugugauau

SEQ ID NO: 766270 - RNA, 17 nt, Artificial Sequence
  Synthetic
aaacaucgcauugauau

SEQ ID NO: 766271 - RNA, 17 nt, Artificial Sequence
  Synthetic
auagauuaacuugauau

SEQ ID NO: 766272 - RNA, 17 nt, Artificial Sequence
  Synthetic
aguuauuagcuugauau

SEQ ID NO: 766273 - RNA, 17 nt, Artificial Sequence
  Synthetic
ccuauacuauuugauau

SEQ ID NO: 766274 - RNA, 17 nt, Artificial Sequence
  Synthetic
aggaaauauuuugauau

SEQ ID NO: 766275 - RNA, 17 nt, Artificial Sequence
  Synthetic
augagauauuuugauau

SEQ ID NO: 766276 - RNA, 17 nt, Artificial Sequence
  Synthetic
augagauguuuugauau

SEQ ID NO: 766277 - RNA, 17 nt, Artificial Sequence
  Synthetic
augagguguuuugauau

SEQ ID NO: 766278 - RNA, 17 nt, Artificial Sequence
  Synthetic
aaaaagaaaaaauauau

SEQ ID NO: 766279 - RNA, 17 nt, Artificial Sequence
  Synthetic
caaauuguaaaauauau

SEQ ID NO: 766280 - RNA, 17 nt, Artificial Sequence
  Synthetic
ucagcacccaaauauau

SEQ ID NO: 766281 - RNA, 17 nt, Artificial Sequence
  Synthetic
ucaauaucuaaauauau

SEQ ID NO: 766282 - RNA, 17 nt, Artificial Sequence
  Synthetic
uaggaagguaaauauau

SEQ ID NO: 766283 - RNA, 17 nt, Artificial Sequence
  Synthetic
aaauauucacaauauau

SEQ ID NO: 766284 - RNA, 17 nt, Artificial Sequence
  Synthetic
acagcacaggaauauau

SEQ ID NO: 766285 - RNA, 17 nt, Artificial Sequence
  Synthetic
cuauuccaguaauauau

SEQ ID NO: 766286 - RNA, 17 nt, Artificial Sequence
  Synthetic
uguauucauuaauauau

SEQ ID NO: 766287 - RNA, 17 nt, Artificial Sequence
  Synthetic
auuaaucgcacauauau

SEQ ID NO: 766288 - RNA, 17 nt, Artificial Sequence
  Synthetic
caagcuuuagcauauau

SEQ ID NO: 766289 - RNA, 17 nt, Artificial Sequence
  Synthetic
cuguaucucucauauau

SEQ ID NO: 766290 - RNA, 17 nt, Artificial Sequence
  Synthetic
uaguccucuucauauau

SEQ ID NO: 766291 - RNA, 17 nt, Artificial Sequence
  Synthetic
cuaguaauaagauauau

SEQ ID NO: 766292 - RNA, 17 nt, Artificial Sequence
  Synthetic
uuacuuaacugauauau

SEQ ID NO: 766293 - RNA, 17 nt, Artificial Sequence
  Synthetic
uaauuaaaaauauauau

SEQ ID NO: 766294 - RNA, 17 nt, Artificial Sequence
  Synthetic
uaugaguccauauauau

SEQ ID NO: 766295 - RNA, 17 nt, Artificial Sequence
  Synthetic
ugacuuuauauauauau

SEQ ID NO: 766296 - RNA, 17 nt, Artificial Sequence
  Synthetic
agucacuuuauauauau

SEQ ID NO: 766297 - RNA, 17 nt, Artificial Sequence
  Synthetic
aaucugaaacuauauau

SEQ ID NO: 766298 - RNA, 17 nt, Artificial Sequence
  Synthetic
agauccuaguuauauau

SEQ ID NO: 766299 - RNA, 17 nt, Artificial Sequence
  Synthetic
caugacaccaacuauau

SEQ ID NO: 766300 - RNA, 17 nt, Artificial Sequence
  Synthetic
aagagcauauacuauau

SEQ ID NO: 766301 - RNA, 17 nt, Artificial Sequence
  Synthetic
auuauauuuuacuauau

SEQ ID NO: 766302 - RNA, 17 nt, Artificial Sequence
  Synthetic
ugauucuaucccuauau

SEQ ID NO: 766303 - RNA, 17 nt, Artificial Sequence
  Synthetic
aguuugccauccuauau

SEQ ID NO: 766304 - RNA, 17 nt, Artificial Sequence
  Synthetic
uccgggugcuccuauau

SEQ ID NO: 766305 - RNA, 17 nt, Artificial Sequence
  Synthetic
uuuuuuaaaggcuauau

SEQ ID NO: 766306 - RNA, 17 nt, Artificial Sequence
  Synthetic
agauuuauaggcuauau

SEQ ID NO: 766307 - RNA, 17 nt, Artificial Sequence
  Synthetic
aguaagaagggcuauau

SEQ ID NO: 766308 - RNA, 17 nt, Artificial Sequence
  Synthetic
auauucaggugcuauau

SEQ ID NO: 766309 - RNA, 17 nt, Artificial Sequence
  Synthetic
uuagagaugcucuauau

SEQ ID NO: 766310 - RNA, 17 nt, Artificial Sequence
  Synthetic
uucuugguauucuauau

SEQ ID NO: 766311 - RNA, 17 nt, Artificial Sequence
  Synthetic
uuuaaugauuucuauau

SEQ ID NO: 766312 - RNA, 17 nt, Artificial Sequence
  Synthetic
ccaaauuauuucuauau

SEQ ID NO: 766313 - RNA, 17 nt, Artificial Sequence
  Synthetic
cuuuuaacuuucuauau

SEQ ID NO: 766314 - RNA, 17 nt, Artificial Sequence
  Synthetic
cugcuaaguuucuauau

SEQ ID NO: 766315 - RNA, 17 nt, Artificial Sequence
  Synthetic
aauagcuaugaguauau

SEQ ID NO: 766316 - RNA, 17 nt, Artificial Sequence
  Synthetic
uggagauucuaguauau

SEQ ID NO: 766317 - RNA, 17 nt, Artificial Sequence
  Synthetic
augauaaguagguauau

SEQ ID NO: 766318 - RNA, 17 nt, Artificial Sequence
  Synthetic
caauguuuuggguauau

SEQ ID NO: 766319 - RNA, 17 nt, Artificial Sequence
  Synthetic
ugacagauaauguauau

SEQ ID NO: 766320 - RNA, 17 nt, Artificial Sequence
  Synthetic
agguauuuaauguauau

SEQ ID NO: 766321 - RNA, 17 nt, Artificial Sequence
  Synthetic
uauaguaccauguauau

SEQ ID NO: 766322 - RNA, 17 nt, Artificial Sequence
  Synthetic
aacaguuguauguauau

SEQ ID NO: 766323 - RNA, 17 nt, Artificial Sequence
  Synthetic
acuuuucaaaauuauau

SEQ ID NO: 766324 - RNA, 17 nt, Artificial Sequence
  Synthetic
acugcauaaaauuauau

SEQ ID NO: 766325 - RNA, 17 nt, Artificial Sequence
  Synthetic
aaaaacaaucauuauau

SEQ ID NO: 766326 - RNA, 17 nt, Artificial Sequence
  Synthetic
ugauuggaucauuauau

SEQ ID NO: 766327 - RNA, 17 nt, Artificial Sequence
  Synthetic
cuggcaucugauuauau

SEQ ID NO: 766328 - RNA, 17 nt, Artificial Sequence
  Synthetic
uuacuccucuauuauau

SEQ ID NO: 766329 - RNA, 17 nt, Artificial Sequence
  Synthetic
uuaaaacauuauuauau

SEQ ID NO: 766330 - RNA, 17 nt, Artificial Sequence
  Synthetic
aauuuaacuacuuauau

SEQ ID NO: 766331 - RNA, 17 nt, Artificial Sequence
  Synthetic
cuauucuuuccuuauau

SEQ ID NO: 766332 - RNA, 17 nt, Artificial Sequence
  Synthetic
uauccuuuuccuuauau

SEQ ID NO: 766333 - RNA, 17 nt, Artificial Sequence
  Synthetic
aacuucuacucuuauau

SEQ ID NO: 766334 - RNA, 17 nt, Artificial Sequence
  Synthetic
uuggcuuggucuuauau

SEQ ID NO: 766335 - RNA, 17 nt, Artificial Sequence
  Synthetic
uaguaucauucuuauau

SEQ ID NO: 766336 - RNA, 17 nt, Artificial Sequence
  Synthetic
aucacacaaaguuauau

SEQ ID NO: 766337 - RNA, 17 nt, Artificial Sequence
  Synthetic
cuucugcuaaguuauau

SEQ ID NO: 766338 - RNA, 17 nt, Artificial Sequence
  Synthetic
agggagauuaguuauau

SEQ ID NO: 766339 - RNA, 17 nt, Artificial Sequence
  Synthetic
auaauaugugguuauau

SEQ ID NO: 766340 - RNA, 17 nt, Artificial Sequence
  Synthetic
uuauuuccaauuuauau

SEQ ID NO: 766341 - RNA, 17 nt, Artificial Sequence
  Synthetic
uaaaucagaauuuauau

SEQ ID NO: 766342 - RNA, 17 nt, Artificial Sequence
  Synthetic
aagaauuagauuuauau

SEQ ID NO: 766343 - RNA, 17 nt, Artificial Sequence
  Synthetic
uaucacuugauuuauau

SEQ ID NO: 766344 - RNA, 17 nt, Artificial Sequence
  Synthetic
ugaauauauauuuauau

SEQ ID NO: 766345 - RNA, 17 nt, Artificial Sequence
  Synthetic
cuccauuaaguuuauau

SEQ ID NO: 766346 - RNA, 17 nt, Artificial Sequence
  Synthetic
auagaacaauuuuauau

SEQ ID NO: 766347 - RNA, 17 nt, Artificial Sequence
  Synthetic
cuauauaguuuuuauau

SEQ ID NO: 766348 - RNA, 17 nt, Artificial Sequence
  Synthetic
caaggaaagaaaacuau

SEQ ID NO: 766349 - RNA, 17 nt, Artificial Sequence
  Synthetic
agaguggugaaaacuau

SEQ ID NO: 766350 - RNA, 17 nt, Artificial Sequence
  Synthetic
cuacucaaccaaacuau

SEQ ID NO: 766351 - RNA, 17 nt, Artificial Sequence
  Synthetic
uuugagguagaaacuau

SEQ ID NO: 766352 - RNA, 17 nt, Artificial Sequence
  Synthetic
uaauuacuguaaacuau

SEQ ID NO: 766353 - RNA, 17 nt, Artificial Sequence
  Synthetic
uaucaacuaucaacuau

SEQ ID NO: 766354 - RNA, 17 nt, Artificial Sequence
  Synthetic
uuuggacaaugaacuau

SEQ ID NO: 766355 - RNA, 17 nt, Artificial Sequence
  Synthetic
uuucuuaaaauaacuau

SEQ ID NO: 766356 - RNA, 17 nt, Artificial Sequence
  Synthetic
cuuuguaaauuaacuau

SEQ ID NO: 766357 - RNA, 17 nt, Artificial Sequence
  Synthetic
acaguaucguuaacuau

SEQ ID NO: 766358 - RNA, 17 nt, Artificial Sequence
  Synthetic
ucgguauuguuaacuau

SEQ ID NO: 766359 - RNA, 17 nt, Artificial Sequence
  Synthetic
aauuuuuaaaacacuau

SEQ ID NO: 766360 - RNA, 17 nt, Artificial Sequence
  Synthetic
aaauaaaucaacacuau

SEQ ID NO: 766361 - RNA, 17 nt, Artificial Sequence
  Synthetic
uucauuacuaacacuau

SEQ ID NO: 766362 - RNA, 17 nt, Artificial Sequence
  Synthetic
caguuugcacacacuau

SEQ ID NO: 766363 - RNA, 17 nt, Artificial Sequence
  Synthetic
uucuuuuaauacacuau

SEQ ID NO: 766364 - RNA, 17 nt, Artificial Sequence
  Synthetic
ucuucugucuacacuau

SEQ ID NO: 766365 - RNA, 17 nt, Artificial Sequence
  Synthetic
ugcaaauuuuacacuau

SEQ ID NO: 766366 - RNA, 17 nt, Artificial Sequence
  Synthetic
ccuggacugaccacuau

SEQ ID NO: 766367 - RNA, 17 nt, Artificial Sequence
  Synthetic
acugcccuguccacuau

SEQ ID NO: 766368 - RNA, 17 nt, Artificial Sequence
  Synthetic
auccccauuuccacuau

SEQ ID NO: 766369 - RNA, 17 nt, Artificial Sequence
  Synthetic
uguaaucccagcacuau

SEQ ID NO: 766370 - RNA, 17 nt, Artificial Sequence
  Synthetic
uaauagagaaucacuau

SEQ ID NO: 766371 - RNA, 17 nt, Artificial Sequence
  Synthetic
agaacaaaagucacuau

SEQ ID NO: 766372 - RNA, 17 nt, Artificial Sequence
  Synthetic
uaugggagaaagacuau

SEQ ID NO: 766373 - RNA, 17 nt, Artificial Sequence
  Synthetic
ccagagaggcagacuau

SEQ ID NO: 766374 - RNA, 17 nt, Artificial Sequence
  Synthetic
caaguagcugggacuau

SEQ ID NO: 766375 - RNA, 17 nt, Artificial Sequence
  Synthetic
cgaguagcugggacuau

SEQ ID NO: 766376 - RNA, 17 nt, Artificial Sequence
  Synthetic
caacuauuuuggacuau

SEQ ID NO: 766377 - RNA, 17 nt, Artificial Sequence
  Synthetic
aaaagauaagugacuau

SEQ ID NO: 766378 - RNA, 17 nt, Artificial Sequence
  Synthetic
caaccagcugugacuau

SEQ ID NO: 766379 - RNA, 17 nt, Artificial Sequence
  Synthetic
auuagcacuaauacuau

SEQ ID NO: 766380 - RNA, 17 nt, Artificial Sequence
  Synthetic
uuacuauuuaauacuau

SEQ ID NO: 766381 - RNA, 17 nt, Artificial Sequence
  Synthetic
uccaaaguuuauacuau

SEQ ID NO: 766382 - RNA, 17 nt, Artificial Sequence
  Synthetic
uuuccucuuccuacuau

SEQ ID NO: 766383 - RNA, 17 nt, Artificial Sequence
  Synthetic
uuugcuuuugcuacuau

SEQ ID NO: 766384 - RNA, 17 nt, Artificial Sequence
  Synthetic
uuuuguauaucuacuau

SEQ ID NO: 766385 - RNA, 17 nt, Artificial Sequence
  Synthetic
agaaggaaaaguacuau

SEQ ID NO: 766386 - RNA, 17 nt, Artificial Sequence
  Synthetic
aaagaagagaguacuau

SEQ ID NO: 766387 - RNA, 17 nt, Artificial Sequence
  Synthetic
ugaugauaauguacuau

SEQ ID NO: 766388 - RNA, 17 nt, Artificial Sequence
  Synthetic
uaauaguauauuacuau

SEQ ID NO: 766389 - RNA, 17 nt, Artificial Sequence
  Synthetic
auuugcacacuuacuau

SEQ ID NO: 766390 - RNA, 17 nt, Artificial Sequence
  Synthetic
cauugagcacuuacuau

SEQ ID NO: 766391 - RNA, 17 nt, Artificial Sequence
  Synthetic
uuuuuuccuuuuacuau

SEQ ID NO: 766392 - RNA, 17 nt, Artificial Sequence
  Synthetic
cacauaccaaaaccuau

SEQ ID NO: 766393 - RNA, 17 nt, Artificial Sequence
  Synthetic
cccccaaacaaaccuau

SEQ ID NO: 766394 - RNA, 17 nt, Artificial Sequence
  Synthetic
uuaagaaggcaaccuau

SEQ ID NO: 766395 - RNA, 17 nt, Artificial Sequence
  Synthetic
uuguucaacgaaccuau

SEQ ID NO: 766396 - RNA, 17 nt, Artificial Sequence
  Synthetic
cacuaguuugaaccuau

SEQ ID NO: 766397 - RNA, 17 nt, Artificial Sequence
  Synthetic
cuauuaguauaaccuau

SEQ ID NO: 766398 - RNA, 17 nt, Artificial Sequence
  Synthetic
uuaugcuuuucaccuau

SEQ ID NO: 766399 - RNA, 17 nt, Artificial Sequence
  Synthetic
uuauaaaauauaccuau

SEQ ID NO: 766400 - RNA, 17 nt, Artificial Sequence
  Synthetic
ucauuacaauuaccuau

SEQ ID NO: 766401 - RNA, 17 nt, Artificial Sequence
  Synthetic
uuuagaguaaacccuau

SEQ ID NO: 766402 - RNA, 17 nt, Artificial Sequence
  Synthetic
auacuuacuuccccuau

SEQ ID NO: 766403 - RNA, 17 nt, Artificial Sequence
  Synthetic
auuuggcagagcccuau

SEQ ID NO: 766404 - RNA, 17 nt, Artificial Sequence
  Synthetic
uguaaugacugcccuau

SEQ ID NO: 766405 - RNA, 17 nt, Artificial Sequence
  Synthetic
uacaaccuagucccuau

SEQ ID NO: 766406 - RNA, 17 nt, Artificial Sequence
  Synthetic
caaauucaggucccuau

SEQ ID NO: 766407 - RNA, 17 nt, Artificial Sequence
  Synthetic
agaauauauuucccuau

SEQ ID NO: 766408 - RNA, 17 nt, Artificial Sequence
  Synthetic
augcucuugaagccuau

SEQ ID NO: 766409 - RNA, 17 nt, Artificial Sequence
  Synthetic
aaagcagagcagccuau

SEQ ID NO: 766410 - RNA, 17 nt, Artificial Sequence
  Synthetic
ugcaacuuugagccuau

SEQ ID NO: 766411 - RNA, 17 nt, Artificial Sequence
  Synthetic
auucugucauagccuau

SEQ ID NO: 766412 - RNA, 17 nt, Artificial Sequence
  Synthetic
ugcagagaaaugccuau

SEQ ID NO: 766413 - RNA, 17 nt, Artificial Sequence
  Synthetic
ucaaguagaaugccuau

SEQ ID NO: 766414 - RNA, 17 nt, Artificial Sequence
  Synthetic
cacaggugugugccuau

SEQ ID NO: 766415 - RNA, 17 nt, Artificial Sequence
  Synthetic
uuuuuuuuuuugccuau

SEQ ID NO: 766416 - RNA, 17 nt, Artificial Sequence
  Synthetic
cuucaauuagauccuau

SEQ ID NO: 766417 - RNA, 17 nt, Artificial Sequence
  Synthetic
aauagcauugauccuau

SEQ ID NO: 766418 - RNA, 17 nt, Artificial Sequence
  Synthetic
aguuauaguuauccuau

SEQ ID NO: 766419 - RNA, 17 nt, Artificial Sequence
  Synthetic
aaauucugaccuccuau

SEQ ID NO: 766420 - RNA, 17 nt, Artificial Sequence
  Synthetic
aggguuugugcuccuau

SEQ ID NO: 766421 - RNA, 17 nt, Artificial Sequence
  Synthetic
uccaucucaauuccuau

SEQ ID NO: 766422 - RNA, 17 nt, Artificial Sequence
  Synthetic
uaauauugucuuccuau

SEQ ID NO: 766423 - RNA, 17 nt, Artificial Sequence
  Synthetic
uuuuacauguuuccuau

SEQ ID NO: 766424 - RNA, 17 nt, Artificial Sequence
  Synthetic
uauagugugaaagcuau

SEQ ID NO: 766425 - RNA, 17 nt, Artificial Sequence
  Synthetic
aacucagcuaaagcuau

SEQ ID NO: 766426 - RNA, 17 nt, Artificial Sequence
  Synthetic
agggcauauagagcuau

SEQ ID NO: 766427 - RNA, 17 nt, Artificial Sequence
  Synthetic
agucugacaauagcuau

SEQ ID NO: 766428 - RNA, 17 nt, Artificial Sequence
  Synthetic
uuuuuaaguguagcuau

SEQ ID NO: 766429 - RNA, 17 nt, Artificial Sequence
  Synthetic
acagcauuauuagcuau

SEQ ID NO: 766430 - RNA, 17 nt, Artificial Sequence
  Synthetic
auugguuucuuagcuau

SEQ ID NO: 766431 - RNA, 17 nt, Artificial Sequence
  Synthetic
uaauuaucuuuagcuau

SEQ ID NO: 766432 - RNA, 17 nt, Artificial Sequence
  Synthetic
ugcuuuagcuacgcuau

SEQ ID NO: 766433 - RNA, 17 nt, Artificial Sequence
  Synthetic
ucaaggguaaaggcuau

SEQ ID NO: 766434 - RNA, 17 nt, Artificial Sequence
  Synthetic
cuuuuucagaaggcuau

SEQ ID NO: 766435 - RNA, 17 nt, Artificial Sequence
  Synthetic
aagaaguuggaggcuau

SEQ ID NO: 766436 - RNA, 17 nt, Artificial Sequence
  Synthetic
aaaaaaacugaggcuau

SEQ ID NO: 766437 - RNA, 17 nt, Artificial Sequence
  Synthetic
acuguaacaagggcuau

SEQ ID NO: 766438 - RNA, 17 nt, Artificial Sequence
  Synthetic
ugaaauuggugggcuau

SEQ ID NO: 766439 - RNA, 17 nt, Artificial Sequence
  Synthetic
auuuuauugacugcuau

SEQ ID NO: 766440 - RNA, 17 nt, Artificial Sequence
  Synthetic
uaucuuucuacugcuau

SEQ ID NO: 766441 - RNA, 17 nt, Artificial Sequence
  Synthetic
uuggggauugcugcuau

SEQ ID NO: 766442 - RNA, 17 nt, Artificial Sequence
  Synthetic
uaucuuuucucugcuau

SEQ ID NO: 766443 - RNA, 17 nt, Artificial Sequence
  Synthetic
ucuuugcuuucugcuau

SEQ ID NO: 766444 - RNA, 17 nt, Artificial Sequence
  Synthetic
ugaaaaauaagugcuau

SEQ ID NO: 766445 - RNA, 17 nt, Artificial Sequence
  Synthetic
aguaugauaagugcuau

SEQ ID NO: 766446 - RNA, 17 nt, Artificial Sequence
  Synthetic
auaauguauauugcuau

SEQ ID NO: 766447 - RNA, 17 nt, Artificial Sequence
  Synthetic
aaaaacccuauugcuau

SEQ ID NO: 766448 - RNA, 17 nt, Artificial Sequence
  Synthetic
uuggaggggcuugcuau

SEQ ID NO: 766449 - RNA, 17 nt, Artificial Sequence
  Synthetic
agaucuggaaaaucuau

SEQ ID NO: 766450 - RNA, 17 nt, Artificial Sequence
  Synthetic
ugaguuuggaaaucuau

SEQ ID NO: 766451 - RNA, 17 nt, Artificial Sequence
  Synthetic
agaagccauaaaucuau

SEQ ID NO: 766452 - RNA, 17 nt, Artificial Sequence
  Synthetic
cguuuuuaucaaucuau

SEQ ID NO: 766453 - RNA, 17 nt, Artificial Sequence
  Synthetic
cugagcccucaaucuau

SEQ ID NO: 766454 - RNA, 17 nt, Artificial Sequence
  Synthetic
uaauauucagaaucuau

SEQ ID NO: 766455 - RNA, 17 nt, Artificial Sequence
  Synthetic
aggaggaaggaaucuau

SEQ ID NO: 766456 - RNA, 17 nt, Artificial Sequence
  Synthetic
acuucagcugaaucuau

SEQ ID NO: 766457 - RNA, 17 nt, Artificial Sequence
  Synthetic
uaauauccauaaucuau

SEQ ID NO: 766458 - RNA, 17 nt, Artificial Sequence
  Synthetic
uuuuaauuauaaucuau

SEQ ID NO: 766459 - RNA, 17 nt, Artificial Sequence
  Synthetic
auacccuuaccaucuau

SEQ ID NO: 766460 - RNA, 17 nt, Artificial Sequence
  Synthetic
augcacacuccaucuau

SEQ ID NO: 766461 - RNA, 17 nt, Artificial Sequence
  Synthetic
uuugguuuagcaucuau

SEQ ID NO: 766462 - RNA, 17 nt, Artificial Sequence
  Synthetic
uauuuuuaaugaucuau

SEQ ID NO: 766463 - RNA, 17 nt, Artificial Sequence
  Synthetic
cuuaacugaauaucuau

SEQ ID NO: 766464 - RNA, 17 nt, Artificial Sequence
  Synthetic
uaccaauuccuaucuau

SEQ ID NO: 766465 - RNA, 17 nt, Artificial Sequence
  Synthetic
aacuuuccuguaucuau

SEQ ID NO: 766466 - RNA, 17 nt, Artificial Sequence
  Synthetic
aaaccuguauuaucuau

SEQ ID NO: 766467 - RNA, 17 nt, Artificial Sequence
  Synthetic
cagguguuuuuaucuau

SEQ ID NO: 766468 - RNA, 17 nt, Artificial Sequence
  Synthetic
aguuaaaacaacucuau

SEQ ID NO: 766469 - RNA, 17 nt, Artificial Sequence
  Synthetic
uagaaaagacacucuau

SEQ ID NO: 766470 - RNA, 17 nt, Artificial Sequence
  Synthetic
accagugauuacucuau

SEQ ID NO: 766471 - RNA, 17 nt, Artificial Sequence
  Synthetic
aauaguggucccucuau

SEQ ID NO: 766472 - RNA, 17 nt, Artificial Sequence
  Synthetic
cuuuacuccuccucuau

SEQ ID NO: 766473 - RNA, 17 nt, Artificial Sequence
  Synthetic
augaaaauguccucuau

SEQ ID NO: 766474 - RNA, 17 nt, Artificial Sequence
  Synthetic
aauuuuaucuucucuau

SEQ ID NO: 766475 - RNA, 17 nt, Artificial Sequence
  Synthetic
agaauauguuagucuau

SEQ ID NO: 766476 - RNA, 17 nt, Artificial Sequence
  Synthetic
ugacuuaaugcgucuau

SEQ ID NO: 766477 - RNA, 17 nt, Artificial Sequence
  Synthetic
ugggcuugcuugucuau

SEQ ID NO: 766478 - RNA, 17 nt, Artificial Sequence
  Synthetic
uuccauugacauucuau

SEQ ID NO: 766479 - RNA, 17 nt, Artificial Sequence
  Synthetic
cuuuucucucauucuau

SEQ ID NO: 766480 - RNA, 17 nt, Artificial Sequence
  Synthetic
augcagaaugauucuau

SEQ ID NO: 766481 - RNA, 17 nt, Artificial Sequence
  Synthetic
cucagaauauauucuau

SEQ ID NO: 766482 - RNA, 17 nt, Artificial Sequence
  Synthetic
agaccccaaacuucuau

SEQ ID NO: 766483 - RNA, 17 nt, Artificial Sequence
  Synthetic
ucacaggaaacuucuau

SEQ ID NO: 766484 - RNA, 17 nt, Artificial Sequence
  Synthetic
uuucuuucaacuucuau

SEQ ID NO: 766485 - RNA, 17 nt, Artificial Sequence
  Synthetic
acgaaacagccuucuau

SEQ ID NO: 766486 - RNA, 17 nt, Artificial Sequence
  Synthetic
auaauucaaucuucuau

SEQ ID NO: 766487 - RNA, 17 nt, Artificial Sequence
  Synthetic
augaagcagucuucuau

SEQ ID NO: 766488 - RNA, 17 nt, Artificial Sequence
  Synthetic
auaagcuuuucuucuau

SEQ ID NO: 766489 - RNA, 17 nt, Artificial Sequence
  Synthetic
aucucagaaaguucuau

SEQ ID NO: 766490 - RNA, 17 nt, Artificial Sequence
  Synthetic
aaaagggauaguucuau

SEQ ID NO: 766491 - RNA, 17 nt, Artificial Sequence
  Synthetic
uucaguaaauguucuau

SEQ ID NO: 766492 - RNA, 17 nt, Artificial Sequence
  Synthetic
ucucuauucuguucuau

SEQ ID NO: 766493 - RNA, 17 nt, Artificial Sequence
  Synthetic
aaccuuuuaauuucuau

SEQ ID NO: 766494 - RNA, 17 nt, Artificial Sequence
  Synthetic
ucgauugucauuucuau

SEQ ID NO: 766495 - RNA, 17 nt, Artificial Sequence
  Synthetic
cuacaucagauuucuau

SEQ ID NO: 766496 - RNA, 17 nt, Artificial Sequence
  Synthetic
uucuuuccucuuucuau

SEQ ID NO: 766497 - RNA, 17 nt, Artificial Sequence
  Synthetic
uuaauugcauuuucuau

SEQ ID NO: 766498 - RNA, 17 nt, Artificial Sequence
  Synthetic
auuuucaucuuuucuau

SEQ ID NO: 766499 - RNA, 17 nt, Artificial Sequence
  Synthetic
uuuucccauuuuucuau

SEQ ID NO: 766500 - RNA, 17 nt, Artificial Sequence
  Synthetic
cuaggaaauaaaaguau

SEQ ID NO: 766501 - RNA, 17 nt, Artificial Sequence
  Synthetic
aacuauaagcaaaguau

SEQ ID NO: 766502 - RNA, 17 nt, Artificial Sequence
  Synthetic
uuucaauggcaaaguau

SEQ ID NO: 766503 - RNA, 17 nt, Artificial Sequence
  Synthetic
agaaaacaggaaaguau

SEQ ID NO: 766504 - RNA, 17 nt, Artificial Sequence
  Synthetic
agaagacaggaaaguau

SEQ ID NO: 766505 - RNA, 17 nt, Artificial Sequence
  Synthetic
uaugcccuggaaaguau

SEQ ID NO: 766506 - RNA, 17 nt, Artificial Sequence
  Synthetic
caguuggaugaaaguau

SEQ ID NO: 766507 - RNA, 17 nt, Artificial Sequence
  Synthetic
uguauuuaugaaaguau

SEQ ID NO: 766508 - RNA, 17 nt, Artificial Sequence
  Synthetic
uuucuaacauaaaguau

SEQ ID NO: 766509 - RNA, 17 nt, Artificial Sequence
  Synthetic
aagagaagguaaaguau

SEQ ID NO: 766510 - RNA, 17 nt, Artificial Sequence
  Synthetic
aaaaacuauuaaaguau

SEQ ID NO: 766511 - RNA, 17 nt, Artificial Sequence
  Synthetic
ccagguuugccaaguau

SEQ ID NO: 766512 - RNA, 17 nt, Artificial Sequence
  Synthetic
augauaaaaagaaguau

SEQ ID NO: 766513 - RNA, 17 nt, Artificial Sequence
  Synthetic
aaacaaccuugaaguau

SEQ ID NO: 766514 - RNA, 17 nt, Artificial Sequence
  Synthetic
uuugcauacauaaguau

SEQ ID NO: 766515 - RNA, 17 nt, Artificial Sequence
  Synthetic
aauucauauauaaguau

SEQ ID NO: 766516 - RNA, 17 nt, Artificial Sequence
  Synthetic
aaaaggaagguaaguau

SEQ ID NO: 766517 - RNA, 17 nt, Artificial Sequence
  Synthetic
aucucugaaaacaguau

SEQ ID NO: 766518 - RNA, 17 nt, Artificial Sequence
  Synthetic
uaucaggagaacaguau

SEQ ID NO: 766519 - RNA, 17 nt, Artificial Sequence
  Synthetic
uaccaugagaacaguau

SEQ ID NO: 766520 - RNA, 17 nt, Artificial Sequence
  Synthetic
uuaggaaagcacaguau

SEQ ID NO: 766521 - RNA, 17 nt, Artificial Sequence
  Synthetic
ugagagaaguacaguau

SEQ ID NO: 766522 - RNA, 17 nt, Artificial Sequence
  Synthetic
agauaucuuuacaguau

SEQ ID NO: 766523 - RNA, 17 nt, Artificial Sequence
  Synthetic
uucucacugcccaguau

SEQ ID NO: 766524 - RNA, 17 nt, Artificial Sequence
  Synthetic
uccuggaccagcaguau

SEQ ID NO: 766525 - RNA, 17 nt, Artificial Sequence
  Synthetic
cucuggacuagcaguau

SEQ ID NO: 766526 - RNA, 17 nt, Artificial Sequence
  Synthetic
agugaaggaggcaguau

SEQ ID NO: 766527 - RNA, 17 nt, Artificial Sequence
  Synthetic
aguauuuguugcaguau

SEQ ID NO: 766528 - RNA, 17 nt, Artificial Sequence
  Synthetic
caaguaaaucucaguau

SEQ ID NO: 766529 - RNA, 17 nt, Artificial Sequence
  Synthetic
uguaggguuuucaguau

SEQ ID NO: 766530 - RNA, 17 nt, Artificial Sequence
  Synthetic
uuacuggugaagaguau

SEQ ID NO: 766531 - RNA, 17 nt, Artificial Sequence
  Synthetic
agauaguaagagaguau

SEQ ID NO: 766532 - RNA, 17 nt, Artificial Sequence
  Synthetic
uaaaauauaucgaguau

SEQ ID NO: 766533 - RNA, 17 nt, Artificial Sequence
  Synthetic
uaucucagugggaguau

SEQ ID NO: 766534 - RNA, 17 nt, Artificial Sequence
  Synthetic
cacauguccuggaguau

SEQ ID NO: 766535 - RNA, 17 nt, Artificial Sequence
  Synthetic
cuguaaagcuggaguau

SEQ ID NO: 766536 - RNA, 17 nt, Artificial Sequence
  Synthetic
auuucaaacaugaguau

SEQ ID NO: 766537 - RNA, 17 nt, Artificial Sequence
  Synthetic
uuucuccaucugaguau

SEQ ID NO: 766538 - RNA, 17 nt, Artificial Sequence
  Synthetic
uuucuauaaaauaguau

SEQ ID NO: 766539 - RNA, 17 nt, Artificial Sequence
  Synthetic
uuggcugcaaauaguau

SEQ ID NO: 766540 - RNA, 17 nt, Artificial Sequence
  Synthetic
ccuauaucaaauaguau

SEQ ID NO: 766541 - RNA, 17 nt, Artificial Sequence
  Synthetic
ccuauucaacauaguau

SEQ ID NO: 766542 - RNA, 17 nt, Artificial Sequence
  Synthetic
uguucuaugcauaguau

SEQ ID NO: 766543 - RNA, 17 nt, Artificial Sequence
  Synthetic
caaggaagggauaguau

SEQ ID NO: 766544 - RNA, 17 nt, Artificial Sequence
  Synthetic
cagaaaauaucuaguau

SEQ ID NO: 766545 - RNA, 17 nt, Artificial Sequence
  Synthetic
ugauuuaauuguaguau

SEQ ID NO: 766546 - RNA, 17 nt, Artificial Sequence
  Synthetic
acuuuuaaaauuaguau

SEQ ID NO: 766547 - RNA, 17 nt, Artificial Sequence
  Synthetic
ugaggcauuauuaguau

SEQ ID NO: 766548 - RNA, 17 nt, Artificial Sequence
  Synthetic
ugguagaagguuaguau

SEQ ID NO: 766549 - RNA, 17 nt, Artificial Sequence
  Synthetic
aaauuuuugguuaguau

SEQ ID NO: 766550 - RNA, 17 nt, Artificial Sequence
  Synthetic
aauucuguguuuaguau

SEQ ID NO: 766551 - RNA, 17 nt, Artificial Sequence
  Synthetic
aauuuaacacaacguau

SEQ ID NO: 766552 - RNA, 17 nt, Artificial Sequence
  Synthetic
uaagaucaagcacguau

SEQ ID NO: 766553 - RNA, 17 nt, Artificial Sequence
  Synthetic
uaauacuaaugacguau

SEQ ID NO: 766554 - RNA, 17 nt, Artificial Sequence
  Synthetic
caacacuuuuuacguau

SEQ ID NO: 766555 - RNA, 17 nt, Artificial Sequence
  Synthetic
auaucauaagagcguau

SEQ ID NO: 766556 - RNA, 17 nt, Artificial Sequence
  Synthetic
auuagcaugccucguau

SEQ ID NO: 766557 - RNA, 17 nt, Artificial Sequence
  Synthetic
auguucuacauucguau

SEQ ID NO: 766558 - RNA, 17 nt, Artificial Sequence
  Synthetic
caaagaacaaaagguau

SEQ ID NO: 766559 - RNA, 17 nt, Artificial Sequence
  Synthetic
aaucuguggaaagguau

SEQ ID NO: 766560 - RNA, 17 nt, Artificial Sequence
  Synthetic
aaaugucuccaagguau

SEQ ID NO: 766561 - RNA, 17 nt, Artificial Sequence
  Synthetic
uacagugugcaagguau

SEQ ID NO: 766562 - RNA, 17 nt, Artificial Sequence
  Synthetic
ugaagaauagaagguau

SEQ ID NO: 766563 - RNA, 17 nt, Artificial Sequence
  Synthetic
auagcuguagaagguau

SEQ ID NO: 766564 - RNA, 17 nt, Artificial Sequence
  Synthetic
uuccacaacccagguau

SEQ ID NO: 766565 - RNA, 17 nt, Artificial Sequence
  Synthetic
ugaauuggcccagguau

SEQ ID NO: 766566 - RNA, 17 nt, Artificial Sequence
  Synthetic
acaucuacagcagguau

SEQ ID NO: 766567 - RNA, 17 nt, Artificial Sequence
  Synthetic
auuuauauuucagguau

SEQ ID NO: 766568 - RNA, 17 nt, Artificial Sequence
  Synthetic
uuuuauuucagagguau

SEQ ID NO: 766569 - RNA, 17 nt, Artificial Sequence
  Synthetic
uuaaacucuagagguau

SEQ ID NO: 766570 - RNA, 17 nt, Artificial Sequence
  Synthetic
auaagagacuuagguau

SEQ ID NO: 766571 - RNA, 17 nt, Artificial Sequence
  Synthetic
aaggaaagaaaggguau

SEQ ID NO: 766572 - RNA, 17 nt, Artificial Sequence
  Synthetic
ccugagagugaggguau

SEQ ID NO: 766573 - RNA, 17 nt, Artificial Sequence
  Synthetic
uucaauaauuaggguau

SEQ ID NO: 766574 - RNA, 17 nt, Artificial Sequence
  Synthetic
ugagugggcacggguau

SEQ ID NO: 766575 - RNA, 17 nt, Artificial Sequence
  Synthetic
aguaguuuuggggguau

SEQ ID NO: 766576 - RNA, 17 nt, Artificial Sequence
  Synthetic
cagacuucucuggguau

SEQ ID NO: 766577 - RNA, 17 nt, Artificial Sequence
  Synthetic
uaugaguggguggguau

SEQ ID NO: 766578 - RNA, 17 nt, Artificial Sequence
  Synthetic
aauggagugguggguau

SEQ ID NO: 766579 - RNA, 17 nt, Artificial Sequence
  Synthetic
ucuucaauaaaugguau

SEQ ID NO: 766580 - RNA, 17 nt, Artificial Sequence
  Synthetic
cucaagagccaugguau

SEQ ID NO: 766581 - RNA, 17 nt, Artificial Sequence
  Synthetic
uaaaucauccaugguau

SEQ ID NO: 766582 - RNA, 17 nt, Artificial Sequence
  Synthetic
ccaaaacaguaugguau

SEQ ID NO: 766583 - RNA, 17 nt, Artificial Sequence
  Synthetic
cugccuuucccugguau

SEQ ID NO: 766584 - RNA, 17 nt, Artificial Sequence
  Synthetic
auuaaaaaaugugguau

SEQ ID NO: 766585 - RNA, 17 nt, Artificial Sequence
  Synthetic
aaguugggaugugguau

SEQ ID NO: 766586 - RNA, 17 nt, Artificial Sequence
  Synthetic
acaaaagguauugguau

SEQ ID NO: 766587 - RNA, 17 nt, Artificial Sequence
  Synthetic
uuugcagugcuugguau

SEQ ID NO: 766588 - RNA, 17 nt, Artificial Sequence
  Synthetic
aauaacuaauuugguau

SEQ ID NO: 766589 - RNA, 17 nt, Artificial Sequence
  Synthetic
uacuucucauuugguau

SEQ ID NO: 766590 - RNA, 17 nt, Artificial Sequence
  Synthetic
uuccaugucuuugguau

SEQ ID NO: 766591 - RNA, 17 nt, Artificial Sequence
  Synthetic
aaugaacaaaaauguau

SEQ ID NO: 766592 - RNA, 17 nt, Artificial Sequence
  Synthetic
uagcauggcaaauguau

SEQ ID NO: 766593 - RNA, 17 nt, Artificial Sequence
  Synthetic
agauaguagaaauguau

SEQ ID NO: 766594 - RNA, 17 nt, Artificial Sequence
  Synthetic
cgaauucugaaauguau

SEQ ID NO: 766595 - RNA, 17 nt, Artificial Sequence
  Synthetic
auaaaugauaaauguau

SEQ ID NO: 766596 - RNA, 17 nt, Artificial Sequence
  Synthetic
cacucacaauaauguau

SEQ ID NO: 766597 - RNA, 17 nt, Artificial Sequence
  Synthetic
ucuguggaauaauguau

SEQ ID NO: 766598 - RNA, 17 nt, Artificial Sequence
  Synthetic
caaaugagcuaauguau

SEQ ID NO: 766599 - RNA, 17 nt, Artificial Sequence
  Synthetic
uaauucugggcauguau

SEQ ID NO: 766600 - RNA, 17 nt, Artificial Sequence
  Synthetic
aaaaauuaaugauguau

SEQ ID NO: 766601 - RNA, 17 nt, Artificial Sequence
  Synthetic
uauaaccaaauauguau

SEQ ID NO: 766602 - RNA, 17 nt, Artificial Sequence
  Synthetic
uagauagaaauauguau

SEQ ID NO: 766603 - RNA, 17 nt, Artificial Sequence
  Synthetic
cucucuugaauauguau

SEQ ID NO: 766604 - RNA, 17 nt, Artificial Sequence
  Synthetic
auaacugaccuauguau

SEQ ID NO: 766605 - RNA, 17 nt, Artificial Sequence
  Synthetic
ugcaguaugguauguau

SEQ ID NO: 766606 - RNA, 17 nt, Artificial Sequence
  Synthetic
uucauauaauuauguau

SEQ ID NO: 766607 - RNA, 17 nt, Artificial Sequence
  Synthetic
uuaaaauauuuauguau

SEQ ID NO: 766608 - RNA, 17 nt, Artificial Sequence
  Synthetic
ugcuaaagaaacuguau

SEQ ID NO: 766609 - RNA, 17 nt, Artificial Sequence
  Synthetic
uggaaagaagacuguau

SEQ ID NO: 766610 - RNA, 17 nt, Artificial Sequence
  Synthetic
aacagaaucuacuguau

SEQ ID NO: 766611 - RNA, 17 nt, Artificial Sequence
  Synthetic
uuagcaaaguacuguau

SEQ ID NO: 766612 - RNA, 17 nt, Artificial Sequence
  Synthetic
acucucaaaaccuguau

SEQ ID NO: 766613 - RNA, 17 nt, Artificial Sequence
  Synthetic
ugcccugggcccuguau

SEQ ID NO: 766614 - RNA, 17 nt, Artificial Sequence
  Synthetic
ucaggagaagccuguau

SEQ ID NO: 766615 - RNA, 17 nt, Artificial Sequence
  Synthetic
ucugggugcuccuguau

SEQ ID NO: 766616 - RNA, 17 nt, Artificial Sequence
  Synthetic
uaccaaaugagcuguau

SEQ ID NO: 766617 - RNA, 17 nt, Artificial Sequence
  Synthetic
accucagucugcuguau

SEQ ID NO: 766618 - RNA, 17 nt, Artificial Sequence
  Synthetic
aaugguauuugcuguau

SEQ ID NO: 766619 - RNA, 17 nt, Artificial Sequence
  Synthetic
uuuuggguaaucuguau

SEQ ID NO: 766620 - RNA, 17 nt, Artificial Sequence
  Synthetic
auacaaaugaucuguau

SEQ ID NO: 766621 - RNA, 17 nt, Artificial Sequence
  Synthetic
ccccaguggcucuguau

SEQ ID NO: 766622 - RNA, 17 nt, Artificial Sequence
  Synthetic
ccugcuguuugguguau

SEQ ID NO: 766623 - RNA, 17 nt, Artificial Sequence
  Synthetic
aauuaacaaauguguau

SEQ ID NO: 766624 - RNA, 17 nt, Artificial Sequence
  Synthetic
aguaauaugauguguau

SEQ ID NO: 766625 - RNA, 17 nt, Artificial Sequence
  Synthetic
aacuuuuauguguguau

SEQ ID NO: 766626 - RNA, 17 nt, Artificial Sequence
  Synthetic
acaaaguguguguguau

SEQ ID NO: 766627 - RNA, 17 nt, Artificial Sequence
  Synthetic
uguguguguguguguau

SEQ ID NO: 766628 - RNA, 17 nt, Artificial Sequence
  Synthetic
cuaagguuauuguguau

SEQ ID NO: 766629 - RNA, 17 nt, Artificial Sequence
  Synthetic
agaaagcccuuguguau

SEQ ID NO: 766630 - RNA, 17 nt, Artificial Sequence
  Synthetic
aguuuauuuuuguguau

SEQ ID NO: 766631 - RNA, 17 nt, Artificial Sequence
  Synthetic
cuucauaaaaauuguau

SEQ ID NO: 766632 - RNA, 17 nt, Artificial Sequence
  Synthetic
uagcauuuacauuguau

SEQ ID NO: 766633 - RNA, 17 nt, Artificial Sequence
  Synthetic
agaaucuaccauuguau

SEQ ID NO: 766634 - RNA, 17 nt, Artificial Sequence
  Synthetic
aggcaaaaauauuguau

SEQ ID NO: 766635 - RNA, 17 nt, Artificial Sequence
  Synthetic
uuucuugcauauuguau

SEQ ID NO: 766636 - RNA, 17 nt, Artificial Sequence
  Synthetic
ucccacuauuauuguau

SEQ ID NO: 766637 - RNA, 17 nt, Artificial Sequence
  Synthetic
aucucccuggcuuguau

SEQ ID NO: 766638 - RNA, 17 nt, Artificial Sequence
  Synthetic
auacuguuaaguuguau

SEQ ID NO: 766639 - RNA, 17 nt, Artificial Sequence
  Synthetic
cuagguuauaguuguau

SEQ ID NO: 766640 - RNA, 17 nt, Artificial Sequence
  Synthetic
uuaucaacagguuguau

SEQ ID NO: 766641 - RNA, 17 nt, Artificial Sequence
  Synthetic
ucuaguggcuguuguau

SEQ ID NO: 766642 - RNA, 17 nt, Artificial Sequence
  Synthetic
aaguaggauuguuguau

SEQ ID NO: 766643 - RNA, 17 nt, Artificial Sequence
  Synthetic
ucuggggacauuuguau

SEQ ID NO: 766644 - RNA, 17 nt, Artificial Sequence
  Synthetic
aguuuuuagauuuguau

SEQ ID NO: 766645 - RNA, 17 nt, Artificial Sequence
  Synthetic
caguaaguauuuuguau

SEQ ID NO: 766646 - RNA, 17 nt, Artificial Sequence
  Synthetic
uguuuuacuuuuuguau

SEQ ID NO: 766647 - RNA, 17 nt, Artificial Sequence
  Synthetic
uccuaauaaaaaauuau

SEQ ID NO: 766648 - RNA, 17 nt, Artificial Sequence
  Synthetic
auugguggcaaaauuau

SEQ ID NO: 766649 - RNA, 17 nt, Artificial Sequence
  Synthetic
acauccuucaaaauuau

SEQ ID NO: 766650 - RNA, 17 nt, Artificial Sequence
  Synthetic
cuuucuuucaaaauuau

SEQ ID NO: 766651 - RNA, 17 nt, Artificial Sequence
  Synthetic
agggauaggaaaauuau

SEQ ID NO: 766652 - RNA, 17 nt, Artificial Sequence
  Synthetic
auacuuaauaaaauuau

SEQ ID NO: 766653 - RNA, 17 nt, Artificial Sequence
  Synthetic
agaggugauaaaauuau

SEQ ID NO: 766654 - RNA, 17 nt, Artificial Sequence
  Synthetic
aacauauauaaaauuau

SEQ ID NO: 766655 - RNA, 17 nt, Artificial Sequence
  Synthetic
uuaaaaaugcaaauuau

SEQ ID NO: 766656 - RNA, 17 nt, Artificial Sequence
  Synthetic
acaaugacagaaauuau

SEQ ID NO: 766657 - RNA, 17 nt, Artificial Sequence
  Synthetic
uauaguaaugaaauuau

SEQ ID NO: 766658 - RNA, 17 nt, Artificial Sequence
  Synthetic
ugucagugugaaauuau

SEQ ID NO: 766659 - RNA, 17 nt, Artificial Sequence
  Synthetic
auugcugaauaaauuau

SEQ ID NO: 766660 - RNA, 17 nt, Artificial Sequence
  Synthetic
auuuuucuguaaauuau

SEQ ID NO: 766661 - RNA, 17 nt, Artificial Sequence
  Synthetic
ugcuccuaaacaauuau

SEQ ID NO: 766662 - RNA, 17 nt, Artificial Sequence
  Synthetic
aauaagauaacaauuau

SEQ ID NO: 766663 - RNA, 17 nt, Artificial Sequence
  Synthetic
uuuacauuuacaauuau

SEQ ID NO: 766664 - RNA, 17 nt, Artificial Sequence
  Synthetic
cuaagcauuccaauuau

SEQ ID NO: 766665 - RNA, 17 nt, Artificial Sequence
  Synthetic
agacagcucucaauuau

SEQ ID NO: 766666 - RNA, 17 nt, Artificial Sequence
  Synthetic
uuuauaaagucaauuau

SEQ ID NO: 766667 - RNA, 17 nt, Artificial Sequence
  Synthetic
uuuccacugucaauuau

SEQ ID NO: 766668 - RNA, 17 nt, Artificial Sequence
  Synthetic
ucacauuacagaauuau

SEQ ID NO: 766669 - RNA, 17 nt, Artificial Sequence
  Synthetic
uaugaaaagagaauuau

SEQ ID NO: 766670 - RNA, 17 nt, Artificial Sequence
  Synthetic
aaugauuugagaauuau

SEQ ID NO: 766671 - RNA, 17 nt, Artificial Sequence
  Synthetic
caacaaguaggaauuau

SEQ ID NO: 766672 - RNA, 17 nt, Artificial Sequence
  Synthetic
uauguaaauggaauuau

SEQ ID NO: 766673 - RNA, 17 nt, Artificial Sequence
  Synthetic
cccagaaguggaauuau

SEQ ID NO: 766674 - RNA, 17 nt, Artificial Sequence
  Synthetic
auagaagauugaauuau

SEQ ID NO: 766675 - RNA, 17 nt, Artificial Sequence
  Synthetic
caaagaucuugaauuau

SEQ ID NO: 766676 - RNA, 17 nt, Artificial Sequence
  Synthetic
ucaggaaaaauaauuau

SEQ ID NO: 766677 - RNA, 17 nt, Artificial Sequence
  Synthetic
aaccaagaaauaauuau

SEQ ID NO: 766678 - RNA, 17 nt, Artificial Sequence
  Synthetic
auucgucuaauaauuau

SEQ ID NO: 766679 - RNA, 17 nt, Artificial Sequence
  Synthetic
acuugcuuuauaauuau

SEQ ID NO: 766680 - RNA, 17 nt, Artificial Sequence
  Synthetic
auguagccaguaauuau

SEQ ID NO: 766681 - RNA, 17 nt, Artificial Sequence
  Synthetic
accuuaagauuaauuau

SEQ ID NO: 766682 - RNA, 17 nt, Artificial Sequence
  Synthetic
auaacuggcuuaauuau

SEQ ID NO: 766683 - RNA, 17 nt, Artificial Sequence
  Synthetic
uuacuggagaacauuau

SEQ ID NO: 766684 - RNA, 17 nt, Artificial Sequence
  Synthetic
acacuauuucacauuau

SEQ ID NO: 766685 - RNA, 17 nt, Artificial Sequence
  Synthetic
uguggauuugacauuau

SEQ ID NO: 766686 - RNA, 17 nt, Artificial Sequence
  Synthetic
agauuuucauacauuau

SEQ ID NO: 766687 - RNA, 17 nt, Artificial Sequence
  Synthetic
cgagcuguuuacauuau

SEQ ID NO: 766688 - RNA, 17 nt, Artificial Sequence
  Synthetic
ugcauccucaccauuau

SEQ ID NO: 766689 - RNA, 17 nt, Artificial Sequence
  Synthetic
cccagcaaucccauuau

SEQ ID NO: 766690 - RNA, 17 nt, Artificial Sequence
  Synthetic
aauuauucucccauuau

SEQ ID NO: 766691 - RNA, 17 nt, Artificial Sequence
  Synthetic
uaucuacuugccauuau

SEQ ID NO: 766692 - RNA, 17 nt, Artificial Sequence
  Synthetic
uccuaguguuccauuau

SEQ ID NO: 766693 - RNA, 17 nt, Artificial Sequence
  Synthetic
auaacugagagcauuau

SEQ ID NO: 766694 - RNA, 17 nt, Artificial Sequence
  Synthetic
uacaauuaaaucauuau

SEQ ID NO: 766695 - RNA, 17 nt, Artificial Sequence
  Synthetic
aguauaauaaucauuau

SEQ ID NO: 766696 - RNA, 17 nt, Artificial Sequence
  Synthetic
uuaauauuagagauuau

SEQ ID NO: 766697 - RNA, 17 nt, Artificial Sequence
  Synthetic
ugaguagcuaggauuau

SEQ ID NO: 766698 - RNA, 17 nt, Artificial Sequence
  Synthetic
caaagugcuaggauuau

SEQ ID NO: 766699 - RNA, 17 nt, Artificial Sequence
  Synthetic
auaugaauuaggauuau

SEQ ID NO: 766700 - RNA, 17 nt, Artificial Sequence
  Synthetic
aaaaaaauagggauuau

SEQ ID NO: 766701 - RNA, 17 nt, Artificial Sequence
  Synthetic
acuugaauggggauuau

SEQ ID NO: 766702 - RNA, 17 nt, Artificial Sequence
  Synthetic
ugacacauggggauuau

SEQ ID NO: 766703 - RNA, 17 nt, Artificial Sequence
  Synthetic
ugacaccuggggauuau

SEQ ID NO: 766704 - RNA, 17 nt, Artificial Sequence
  Synthetic
ugacaucuggggauuau

SEQ ID NO: 766705 - RNA, 17 nt, Artificial Sequence
  Synthetic
caacacguggggauuau

SEQ ID NO: 766706 - RNA, 17 nt, Artificial Sequence
  Synthetic
cuaguagcugggauuau

SEQ ID NO: 766707 - RNA, 17 nt, Artificial Sequence
  Synthetic
caaagugcugggauuau

SEQ ID NO: 766708 - RNA, 17 nt, Artificial Sequence
  Synthetic
ugaguaguugggauuau

SEQ ID NO: 766709 - RNA, 17 nt, Artificial Sequence
  Synthetic
caaaguguugggauuau

SEQ ID NO: 766710 - RNA, 17 nt, Artificial Sequence
  Synthetic
aguuggcacuggauuau

SEQ ID NO: 766711 - RNA, 17 nt, Artificial Sequence
  Synthetic
aaauauucuuggauuau

SEQ ID NO: 766712 - RNA, 17 nt, Artificial Sequence
  Synthetic
uaggaugcaaugauuau

SEQ ID NO: 766713 - RNA, 17 nt, Artificial Sequence
  Synthetic
uguaacagaaugauuau

SEQ ID NO: 766714 - RNA, 17 nt, Artificial Sequence
  Synthetic
caucugguaaugauuau

SEQ ID NO: 766715 - RNA, 17 nt, Artificial Sequence
  Synthetic
auuuacaacaugauuau

SEQ ID NO: 766716 - RNA, 17 nt, Artificial Sequence
  Synthetic
cagagcacuaugauuau

SEQ ID NO: 766717 - RNA, 17 nt, Artificial Sequence
  Synthetic
aagauagguaugauuau

SEQ ID NO: 766718 - RNA, 17 nt, Artificial Sequence
  Synthetic
auuaccuuuaugauuau

SEQ ID NO: 766719 - RNA, 17 nt, Artificial Sequence
  Synthetic
aaacaguaugugauuau

SEQ ID NO: 766720 - RNA, 17 nt, Artificial Sequence
  Synthetic
uugguuaccuugauuau

SEQ ID NO: 766721 - RNA, 17 nt, Artificial Sequence
  Synthetic
aagauaguaaauauuau

SEQ ID NO: 766722 - RNA, 17 nt, Artificial Sequence
  Synthetic
uuuagcacgcauauuau

SEQ ID NO: 766723 - RNA, 17 nt, Artificial Sequence
  Synthetic
caggauuggcauauuau

SEQ ID NO: 766724 - RNA, 17 nt, Artificial Sequence
  Synthetic
aauaauuucgauauuau

SEQ ID NO: 766725 - RNA, 17 nt, Artificial Sequence
  Synthetic
uuuggugaauauauuau

SEQ ID NO: 766726 - RNA, 17 nt, Artificial Sequence
  Synthetic
agaggauaguauauuau

SEQ ID NO: 766727 - RNA, 17 nt, Artificial Sequence
  Synthetic
auuccaaaaacuauuau

SEQ ID NO: 766728 - RNA, 17 nt, Artificial Sequence
  Synthetic
cucucuuugucuauuau

SEQ ID NO: 766729 - RNA, 17 nt, Artificial Sequence
  Synthetic
cuuguugauucuauuau

SEQ ID NO: 766730 - RNA, 17 nt, Artificial Sequence
  Synthetic
ugcaggccuucuauuau

SEQ ID NO: 766731 - RNA, 17 nt, Artificial Sequence
  Synthetic
auauugucuucuauuau

SEQ ID NO: 766732 - RNA, 17 nt, Artificial Sequence
  Synthetic
uuaugauuaaguauuau

SEQ ID NO: 766733 - RNA, 17 nt, Artificial Sequence
  Synthetic
uaaaagguagguauuau

SEQ ID NO: 766734 - RNA, 17 nt, Artificial Sequence
  Synthetic
aguuuucuggguauuau

SEQ ID NO: 766735 - RNA, 17 nt, Artificial Sequence
  Synthetic
caaaguccauguauuau

SEQ ID NO: 766736 - RNA, 17 nt, Artificial Sequence
  Synthetic
aauucaacaauuauuau

SEQ ID NO: 766737 - RNA, 17 nt, Artificial Sequence
  Synthetic
agaggaaagauuauuau

SEQ ID NO: 766738 - RNA, 17 nt, Artificial Sequence
  Synthetic
uuucccuagauuauuau

SEQ ID NO: 766739 - RNA, 17 nt, Artificial Sequence
  Synthetic
ugacauaauauuauuau

SEQ ID NO: 766740 - RNA, 17 nt, Artificial Sequence
  Synthetic
acucucauuauuauuau

SEQ ID NO: 766741 - RNA, 17 nt, Artificial Sequence
  Synthetic
cauuuucaacuuauuau

SEQ ID NO: 766742 - RNA, 17 nt, Artificial Sequence
  Synthetic
aggaauuuaguuauuau

SEQ ID NO: 766743 - RNA, 17 nt, Artificial Sequence
  Synthetic
cuuuugauuguuauuau

SEQ ID NO: 766744 - RNA, 17 nt, Artificial Sequence
  Synthetic
uaacucucauuuauuau

SEQ ID NO: 766745 - RNA, 17 nt, Artificial Sequence
  Synthetic
aaaaucagauuuauuau

SEQ ID NO: 766746 - RNA, 17 nt, Artificial Sequence
  Synthetic
aauauaccaaaacuuau

SEQ ID NO: 766747 - RNA, 17 nt, Artificial Sequence
  Synthetic
accaggaucaaacuuau

SEQ ID NO: 766748 - RNA, 17 nt, Artificial Sequence
  Synthetic
ucuauaguuaaacuuau

SEQ ID NO: 766749 - RNA, 17 nt, Artificial Sequence
  Synthetic
uaaccaagcacacuuau

SEQ ID NO: 766750 - RNA, 17 nt, Artificial Sequence
  Synthetic
ucucuucccgcacuuau

SEQ ID NO: 766751 - RNA, 17 nt, Artificial Sequence
  Synthetic
aaagucaaaucacuuau

SEQ ID NO: 766752 - RNA, 17 nt, Artificial Sequence
  Synthetic
uuccauagaucacuuau

SEQ ID NO: 766753 - RNA, 17 nt, Artificial Sequence
  Synthetic
uaccuaaucagacuuau

SEQ ID NO: 766754 - RNA, 17 nt, Artificial Sequence
  Synthetic
augaacuaaugacuuau

SEQ ID NO: 766755 - RNA, 17 nt, Artificial Sequence
  Synthetic
cuaucucccugacuuau

SEQ ID NO: 766756 - RNA, 17 nt, Artificial Sequence
  Synthetic
accaagaacauacuuau

SEQ ID NO: 766757 - RNA, 17 nt, Artificial Sequence
  Synthetic
uaaacaauuauacuuau

SEQ ID NO: 766758 - RNA, 17 nt, Artificial Sequence
  Synthetic
uguaaauuauuacuuau

SEQ ID NO: 766759 - RNA, 17 nt, Artificial Sequence
  Synthetic
ucacuauaguuacuuau

SEQ ID NO: 766760 - RNA, 17 nt, Artificial Sequence
  Synthetic
cauuuauuuuuacuuau

SEQ ID NO: 766761 - RNA, 17 nt, Artificial Sequence
  Synthetic
ugaaaauggaaccuuau

SEQ ID NO: 766762 - RNA, 17 nt, Artificial Sequence
  Synthetic
aaacaaauugaccuuau

SEQ ID NO: 766763 - RNA, 17 nt, Artificial Sequence
  Synthetic
caucuacucucccuuau

SEQ ID NO: 766764 - RNA, 17 nt, Artificial Sequence
  Synthetic
uauucugugagccuuau

SEQ ID NO: 766765 - RNA, 17 nt, Artificial Sequence
  Synthetic
uguaauuuccgccuuau

SEQ ID NO: 766766 - RNA, 17 nt, Artificial Sequence
  Synthetic
cguucccucugccuuau

SEQ ID NO: 766767 - RNA, 17 nt, Artificial Sequence
  Synthetic
acugaguuuugccuuau

SEQ ID NO: 766768 - RNA, 17 nt, Artificial Sequence
  Synthetic
uagcgucauuuccuuau

SEQ ID NO: 766769 - RNA, 17 nt, Artificial Sequence
  Synthetic
auuucucagaagcuuau

SEQ ID NO: 766770 - RNA, 17 nt, Artificial Sequence
  Synthetic
cuauaaaugaagcuuau

SEQ ID NO: 766771 - RNA, 17 nt, Artificial Sequence
  Synthetic
accacuugggagcuuau

SEQ ID NO: 766772 - RNA, 17 nt, Artificial Sequence
  Synthetic
agcaaacuauggcuuau

SEQ ID NO: 766773 - RNA, 17 nt, Artificial Sequence
  Synthetic
acuugcuuaaugcuuau

SEQ ID NO: 766774 - RNA, 17 nt, Artificial Sequence
  Synthetic
ugauuuauuaugcuuau

SEQ ID NO: 766775 - RNA, 17 nt, Artificial Sequence
  Synthetic
ucuucgaaucugcuuau

SEQ ID NO: 766776 - RNA, 17 nt, Artificial Sequence
  Synthetic
augugaccucugcuuau

SEQ ID NO: 766777 - RNA, 17 nt, Artificial Sequence
  Synthetic
cuguagguggugcuuau

SEQ ID NO: 766778 - RNA, 17 nt, Artificial Sequence
  Synthetic
uuguugccugugcuuau

SEQ ID NO: 766779 - RNA, 17 nt, Artificial Sequence
  Synthetic
ccuuagaaauugcuuau

SEQ ID NO: 766780 - RNA, 17 nt, Artificial Sequence
  Synthetic
uauuaaagaaaucuuau

SEQ ID NO: 766781 - RNA, 17 nt, Artificial Sequence
  Synthetic
aaauauuauaaucuuau

SEQ ID NO: 766782 - RNA, 17 nt, Artificial Sequence
  Synthetic
aacuccugcgaucuuau

SEQ ID NO: 766783 - RNA, 17 nt, Artificial Sequence
  Synthetic
aagaguaccuaucuuau

SEQ ID NO: 766784 - RNA, 17 nt, Artificial Sequence
  Synthetic
ccacaacuguaucuuau

SEQ ID NO: 766785 - RNA, 17 nt, Artificial Sequence
  Synthetic
cuuugcuggacucuuau

SEQ ID NO: 766786 - RNA, 17 nt, Artificial Sequence
  Synthetic
cagcuauuaucucuuau

SEQ ID NO: 766787 - RNA, 17 nt, Artificial Sequence
  Synthetic
ugacgugagucucuuau

SEQ ID NO: 766788 - RNA, 17 nt, Artificial Sequence
  Synthetic
aauagucagugucuuau

SEQ ID NO: 766789 - RNA, 17 nt, Artificial Sequence
  Synthetic
auuucagaaauucuuau

SEQ ID NO: 766790 - RNA, 17 nt, Artificial Sequence
  Synthetic
uuaucugaaauucuuau

SEQ ID NO: 766791 - RNA, 17 nt, Artificial Sequence
  Synthetic
cuuuuucagauucuuau

SEQ ID NO: 766792 - RNA, 17 nt, Artificial Sequence
  Synthetic
ugccagaagcuucuuau

SEQ ID NO: 766793 - RNA, 17 nt, Artificial Sequence
  Synthetic
uuccuaggcuuucuuau

SEQ ID NO: 766794 - RNA, 17 nt, Artificial Sequence
  Synthetic
agaugguaguuucuuau

SEQ ID NO: 766795 - RNA, 17 nt, Artificial Sequence
  Synthetic
ucauuacacaaaguuau

SEQ ID NO: 766796 - RNA, 17 nt, Artificial Sequence
  Synthetic
auucuagacaaaguuau

SEQ ID NO: 766797 - RNA, 17 nt, Artificial Sequence
  Synthetic
aaagguaaccaaguuau

SEQ ID NO: 766798 - RNA, 17 nt, Artificial Sequence
  Synthetic
ugagucacagaaguuau

SEQ ID NO: 766799 - RNA, 17 nt, Artificial Sequence
  Synthetic
cuuacaaaauaaguuau

SEQ ID NO: 766800 - RNA, 17 nt, Artificial Sequence
  Synthetic
uaauuggauuaaguuau

SEQ ID NO: 766801 - RNA, 17 nt, Artificial Sequence
  Synthetic
uaugaaucuuaaguuau

SEQ ID NO: 766802 - RNA, 17 nt, Artificial Sequence
  Synthetic
aaagggaaaacaguuau

SEQ ID NO: 766803 - RNA, 17 nt, Artificial Sequence
  Synthetic
uagaaagaaacaguuau

SEQ ID NO: 766804 - RNA, 17 nt, Artificial Sequence
  Synthetic
uucaaaaagacaguuau

SEQ ID NO: 766805 - RNA, 17 nt, Artificial Sequence
  Synthetic
cagaaauaaagaguuau

SEQ ID NO: 766806 - RNA, 17 nt, Artificial Sequence
  Synthetic
uaguugcuaagaguuau

SEQ ID NO: 766807 - RNA, 17 nt, Artificial Sequence
  Synthetic
uggagagcgggaguuau

SEQ ID NO: 766808 - RNA, 17 nt, Artificial Sequence
  Synthetic
aaacagaggggaguuau

SEQ ID NO: 766809 - RNA, 17 nt, Artificial Sequence
  Synthetic
aaugagaugggaguuau

SEQ ID NO: 766810 - RNA, 17 nt, Artificial Sequence
  Synthetic
cauggacauggaguuau

SEQ ID NO: 766811 - RNA, 17 nt, Artificial Sequence
  Synthetic
auuucagaacucguuau

SEQ ID NO: 766812 - RNA, 17 nt, Artificial Sequence
  Synthetic
uauguaguuaagguuau

SEQ ID NO: 766813 - RNA, 17 nt, Artificial Sequence
  Synthetic
acuaagucacagguuau

SEQ ID NO: 766814 - RNA, 17 nt, Artificial Sequence
  Synthetic
aacacuaugcagguuau

SEQ ID NO: 766815 - RNA, 17 nt, Artificial Sequence
  Synthetic
cuggauuauaggguuau

SEQ ID NO: 766816 - RNA, 17 nt, Artificial Sequence
  Synthetic
uaauuuuuuaggguuau

SEQ ID NO: 766817 - RNA, 17 nt, Artificial Sequence
  Synthetic
aguuccauguggguuau

SEQ ID NO: 766818 - RNA, 17 nt, Artificial Sequence
  Synthetic
ugcccugauuggguuau

SEQ ID NO: 766819 - RNA, 17 nt, Artificial Sequence
  Synthetic
uaaaacacaaugguuau

SEQ ID NO: 766820 - RNA, 17 nt, Artificial Sequence
  Synthetic
ucucacacaaugguuau

SEQ ID NO: 766821 - RNA, 17 nt, Artificial Sequence
  Synthetic
uaagauacaaugguuau

SEQ ID NO: 766822 - RNA, 17 nt, Artificial Sequence
  Synthetic
ucacuaucaaugguuau

SEQ ID NO: 766823 - RNA, 17 nt, Artificial Sequence
  Synthetic
uaugaaauuaugguuau

SEQ ID NO: 766824 - RNA, 17 nt, Artificial Sequence
  Synthetic
aaucagaaucugguuau

SEQ ID NO: 766825 - RNA, 17 nt, Artificial Sequence
  Synthetic
uaugugguggugguuau

SEQ ID NO: 766826 - RNA, 17 nt, Artificial Sequence
  Synthetic
ccuggguguaauguuau

SEQ ID NO: 766827 - RNA, 17 nt, Artificial Sequence
  Synthetic
aggaaaguucauguuau

SEQ ID NO: 766828 - RNA, 17 nt, Artificial Sequence
  Synthetic
uuuccuuuucauguuau

SEQ ID NO: 766829 - RNA, 17 nt, Artificial Sequence
  Synthetic
ugcuauuauuauguuau

SEQ ID NO: 766830 - RNA, 17 nt, Artificial Sequence
  Synthetic
uauuauauuuauguuau

SEQ ID NO: 766831 - RNA, 17 nt, Artificial Sequence
  Synthetic
uaauaaacaacuguuau

SEQ ID NO: 766832 - RNA, 17 nt, Artificial Sequence
  Synthetic
caguggauaacuguuau

SEQ ID NO: 766833 - RNA, 17 nt, Artificial Sequence
  Synthetic
aaagaacagacuguuau

SEQ ID NO: 766834 - RNA, 17 nt, Artificial Sequence
  Synthetic
uuuuuggcaccuguuau

SEQ ID NO: 766835 - RNA, 17 nt, Artificial Sequence
  Synthetic
auuucagagccuguuau

SEQ ID NO: 766836 - RNA, 17 nt, Artificial Sequence
  Synthetic
auuucagcuccuguuau

SEQ ID NO: 766837 - RNA, 17 nt, Artificial Sequence
  Synthetic
aacacuaaggcuguuau

SEQ ID NO: 766838 - RNA, 17 nt, Artificial Sequence
  Synthetic
aucuuguuaucuguuau

SEQ ID NO: 766839 - RNA, 17 nt, Artificial Sequence
  Synthetic
cagaaguacucuguuau

SEQ ID NO: 766840 - RNA, 17 nt, Artificial Sequence
  Synthetic
cucuguuugucuguuau

SEQ ID NO: 766841 - RNA, 17 nt, Artificial Sequence
  Synthetic
ucuuaacaaaguguuau

SEQ ID NO: 766842 - RNA, 17 nt, Artificial Sequence
  Synthetic
acuuauucugguguuau

SEQ ID NO: 766843 - RNA, 17 nt, Artificial Sequence
  Synthetic
acuaguaaauguguuau

SEQ ID NO: 766844 - RNA, 17 nt, Artificial Sequence
  Synthetic
ucuuagauauguguuau

SEQ ID NO: 766845 - RNA, 17 nt, Artificial Sequence
  Synthetic
auuaauaaaauuguuau

SEQ ID NO: 766846 - RNA, 17 nt, Artificial Sequence
  Synthetic
uugguuauuauuguuau

SEQ ID NO: 766847 - RNA, 17 nt, Artificial Sequence
  Synthetic
auuucagaacuuguuau

SEQ ID NO: 766848 - RNA, 17 nt, Artificial Sequence
  Synthetic
auucaauuucuuguuau

SEQ ID NO: 766849 - RNA, 17 nt, Artificial Sequence
  Synthetic
auaaaucauguuguuau

SEQ ID NO: 766850 - RNA, 17 nt, Artificial Sequence
  Synthetic
caaaaguuauuuguuau

SEQ ID NO: 766851 - RNA, 17 nt, Artificial Sequence
  Synthetic
uggauuuauuuuguuau

SEQ ID NO: 766852 - RNA, 17 nt, Artificial Sequence
  Synthetic
uaacaucaaaaauuuau

SEQ ID NO: 766853 - RNA, 17 nt, Artificial Sequence
  Synthetic
caccauuuaaaauuuau

SEQ ID NO: 766854 - RNA, 17 nt, Artificial Sequence
  Synthetic
auaagucacaaauuuau

SEQ ID NO: 766855 - RNA, 17 nt, Artificial Sequence
  Synthetic
uguaucuacaaauuuau

SEQ ID NO: 766856 - RNA, 17 nt, Artificial Sequence
  Synthetic
uaauuguauaaauuuau

SEQ ID NO: 766857 - RNA, 17 nt, Artificial Sequence
  Synthetic
uuauggauuaaauuuau

SEQ ID NO: 766858 - RNA, 17 nt, Artificial Sequence
  Synthetic
auguauucccaauuuau

SEQ ID NO: 766859 - RNA, 17 nt, Artificial Sequence
  Synthetic
agauuccuagaauuuau

SEQ ID NO: 766860 - RNA, 17 nt, Artificial Sequence
  Synthetic
aggaauuucuaauuuau

SEQ ID NO: 766861 - RNA, 17 nt, Artificial Sequence
  Synthetic
uuuauaggguaauuuau

SEQ ID NO: 766862 - RNA, 17 nt, Artificial Sequence
  Synthetic
uucauauauuaauuuau

SEQ ID NO: 766863 - RNA, 17 nt, Artificial Sequence
  Synthetic
cuuaucuauuaauuuau

SEQ ID NO: 766864 - RNA, 17 nt, Artificial Sequence
  Synthetic
uacaccauuuaauuuau

SEQ ID NO: 766865 - RNA, 17 nt, Artificial Sequence
  Synthetic
aacaauuuuuaauuuau

SEQ ID NO: 766866 - RNA, 17 nt, Artificial Sequence
  Synthetic
accuaacuaacauuuau

SEQ ID NO: 766867 - RNA, 17 nt, Artificial Sequence
  Synthetic
auuucuaauacauuuau

SEQ ID NO: 766868 - RNA, 17 nt, Artificial Sequence
  Synthetic
uaauuauauacauuuau

SEQ ID NO: 766869 - RNA, 17 nt, Artificial Sequence
  Synthetic
cuuaccauuccauuuau

SEQ ID NO: 766870 - RNA, 17 nt, Artificial Sequence
  Synthetic
cagguaauagcauuuau

SEQ ID NO: 766871 - RNA, 17 nt, Artificial Sequence
  Synthetic
ccuauguaaucauuuau

SEQ ID NO: 766872 - RNA, 17 nt, Artificial Sequence
  Synthetic
auggaacuaucauuuau

SEQ ID NO: 766873 - RNA, 17 nt, Artificial Sequence
  Synthetic
ccuauguuaucauuuau

SEQ ID NO: 766874 - RNA, 17 nt, Artificial Sequence
  Synthetic
uugcuucauucauuuau

SEQ ID NO: 766875 - RNA, 17 nt, Artificial Sequence
  Synthetic
caauaagcuucauuuau

SEQ ID NO: 766876 - RNA, 17 nt, Artificial Sequence
  Synthetic
aacaugucaagauuuau

SEQ ID NO: 766877 - RNA, 17 nt, Artificial Sequence
  Synthetic
aggcaucagagauuuau

SEQ ID NO: 766878 - RNA, 17 nt, Artificial Sequence
  Synthetic
ucuuuucauggauuuau

SEQ ID NO: 766879 - RNA, 17 nt, Artificial Sequence
  Synthetic
caucaugauggauuuau

SEQ ID NO: 766880 - RNA, 17 nt, Artificial Sequence
  Synthetic
cuguacugaugauuuau

SEQ ID NO: 766881 - RNA, 17 nt, Artificial Sequence
  Synthetic
uugauuagcugauuuau

SEQ ID NO: 766882 - RNA, 17 nt, Artificial Sequence
  Synthetic
cacugacucugauuuau

SEQ ID NO: 766883 - RNA, 17 nt, Artificial Sequence
  Synthetic
acgaauuauugauuuau

SEQ ID NO: 766884 - RNA, 17 nt, Artificial Sequence
  Synthetic
uaauuaaaaauauuuau

SEQ ID NO: 766885 - RNA, 17 nt, Artificial Sequence
  Synthetic
uauuuuaucauauuuau

SEQ ID NO: 766886 - RNA, 17 nt, Artificial Sequence
  Synthetic
uagguauauauauuuau

SEQ ID NO: 766887 - RNA, 17 nt, Artificial Sequence
  Synthetic
uacauuuauauauuuau

SEQ ID NO: 766888 - RNA, 17 nt, Artificial Sequence
  Synthetic
auucuuuauauauuuau

SEQ ID NO: 766889 - RNA, 17 nt, Artificial Sequence
  Synthetic
auuauacaacuauuuau

SEQ ID NO: 766890 - RNA, 17 nt, Artificial Sequence
  Synthetic
uuuuuggaacuauuuau

SEQ ID NO: 766891 - RNA, 17 nt, Artificial Sequence
  Synthetic
auuauacagcuauuuau

SEQ ID NO: 766892 - RNA, 17 nt, Artificial Sequence
  Synthetic
uaaacaccaguauuuau

SEQ ID NO: 766893 - RNA, 17 nt, Artificial Sequence
  Synthetic
uaacuauauguauuuau

SEQ ID NO: 766894 - RNA, 17 nt, Artificial Sequence
  Synthetic
uagguguauguauuuau

SEQ ID NO: 766895 - RNA, 17 nt, Artificial Sequence
  Synthetic
aaaaguuaauuauuuau

SEQ ID NO: 766896 - RNA, 17 nt, Artificial Sequence
  Synthetic
cauaacuuucacuuuau

SEQ ID NO: 766897 - RNA, 17 nt, Artificial Sequence
  Synthetic
ucaagcugggacuuuau

SEQ ID NO: 766898 - RNA, 17 nt, Artificial Sequence
  Synthetic
auaagauuugacuuuau

SEQ ID NO: 766899 - RNA, 17 nt, Artificial Sequence
  Synthetic
cucaauagcuacuuuau

SEQ ID NO: 766900 - RNA, 17 nt, Artificial Sequence
  Synthetic
uaauuaucuagcuuuau

SEQ ID NO: 766901 - RNA, 17 nt, Artificial Sequence
  Synthetic
ucuguguguagcuuuau

SEQ ID NO: 766902 - RNA, 17 nt, Artificial Sequence
  Synthetic
uuaaccuuaugcuuuau

SEQ ID NO: 766903 - RNA, 17 nt, Artificial Sequence
  Synthetic
uucaagaguugcuuuau

SEQ ID NO: 766904 - RNA, 17 nt, Artificial Sequence
  Synthetic
uauuuuuacaucuuuau

SEQ ID NO: 766905 - RNA, 17 nt, Artificial Sequence
  Synthetic
auaugggugaucuuuau

SEQ ID NO: 766906 - RNA, 17 nt, Artificial Sequence
  Synthetic
uccuuuuugaucuuuau

SEQ ID NO: 766907 - RNA, 17 nt, Artificial Sequence
  Synthetic
acaaagauuaucuuuau

SEQ ID NO: 766908 - RNA, 17 nt, Artificial Sequence
  Synthetic
ucucuuguuaucuuuau

SEQ ID NO: 766909 - RNA, 17 nt, Artificial Sequence
  Synthetic
uaaaacaagcucuuuau

SEQ ID NO: 766910 - RNA, 17 nt, Artificial Sequence
  Synthetic
auuguauugcucuuuau

SEQ ID NO: 766911 - RNA, 17 nt, Artificial Sequence
  Synthetic
ugugcaugugucuuuau

SEQ ID NO: 766912 - RNA, 17 nt, Artificial Sequence
  Synthetic
aauuuucacuucuuuau

SEQ ID NO: 766913 - RNA, 17 nt, Artificial Sequence
  Synthetic
aauccagaguucuuuau

SEQ ID NO: 766914 - RNA, 17 nt, Artificial Sequence
  Synthetic
cuaaagcuaaaguuuau

SEQ ID NO: 766915 - RNA, 17 nt, Artificial Sequence
  Synthetic
ugccaaugucaguuuau

SEQ ID NO: 766916 - RNA, 17 nt, Artificial Sequence
  Synthetic
uguauccaugaguuuau

SEQ ID NO: 766917 - RNA, 17 nt, Artificial Sequence
  Synthetic
uuaaaugaugaguuuau

SEQ ID NO: 766918 - RNA, 17 nt, Artificial Sequence
  Synthetic
uucuaucacagguuuau

SEQ ID NO: 766919 - RNA, 17 nt, Artificial Sequence
  Synthetic
cuucucugaggguuuau

SEQ ID NO: 766920 - RNA, 17 nt, Artificial Sequence
  Synthetic
uugaaaccaugguuuau

SEQ ID NO: 766921 - RNA, 17 nt, Artificial Sequence
  Synthetic
cugcaacugugguuuau

SEQ ID NO: 766922 - RNA, 17 nt, Artificial Sequence
  Synthetic
auacucuacauguuuau

SEQ ID NO: 766923 - RNA, 17 nt, Artificial Sequence
  Synthetic
auauuagcuauguuuau

SEQ ID NO: 766924 - RNA, 17 nt, Artificial Sequence
  Synthetic
ccaagguagcuguuuau

SEQ ID NO: 766925 - RNA, 17 nt, Artificial Sequence
  Synthetic
uugcugaauuuguuuau

SEQ ID NO: 766926 - RNA, 17 nt, Artificial Sequence
  Synthetic
aagcuuggaaauuuuau

SEQ ID NO: 766927 - RNA, 17 nt, Artificial Sequence
  Synthetic
ucucauuauaauuuuau

SEQ ID NO: 766928 - RNA, 17 nt, Artificial Sequence
  Synthetic
aguaugacuaauuuuau

SEQ ID NO: 766929 - RNA, 17 nt, Artificial Sequence
  Synthetic
cuguccccuaauuuuau

SEQ ID NO: 766930 - RNA, 17 nt, Artificial Sequence
  Synthetic
ccauuuguuaauuuuau

SEQ ID NO: 766931 - RNA, 17 nt, Artificial Sequence
  Synthetic
ugcucugaacauuuuau

SEQ ID NO: 766932 - RNA, 17 nt, Artificial Sequence
  Synthetic
cuccccaagcauuuuau

SEQ ID NO: 766933 - RNA, 17 nt, Artificial Sequence
  Synthetic
auaaauuugcauuuuau

SEQ ID NO: 766934 - RNA, 17 nt, Artificial Sequence
  Synthetic
uuaaacaaucauuuuau

SEQ ID NO: 766935 - RNA, 17 nt, Artificial Sequence
  Synthetic
auauauaaucauuuuau

SEQ ID NO: 766936 - RNA, 17 nt, Artificial Sequence
  Synthetic
uuaacaccagauuuuau

SEQ ID NO: 766937 - RNA, 17 nt, Artificial Sequence
  Synthetic
ucauuuggagauuuuau

SEQ ID NO: 766938 - RNA, 17 nt, Artificial Sequence
  Synthetic
ucuaaaauggauuuuau

SEQ ID NO: 766939 - RNA, 17 nt, Artificial Sequence
  Synthetic
uuuaaaaaauauuuuau

SEQ ID NO: 766940 - RNA, 17 nt, Artificial Sequence
  Synthetic
aggcuucaguauuuuau

SEQ ID NO: 766941 - RNA, 17 nt, Artificial Sequence
  Synthetic
aauaauaauuauuuuau

SEQ ID NO: 766942 - RNA, 17 nt, Artificial Sequence
  Synthetic
ugagaguuuuauuuuau

SEQ ID NO: 766943 - RNA, 17 nt, Artificial Sequence
  Synthetic
ucucagcaaacuuuuau

SEQ ID NO: 766944 - RNA, 17 nt, Artificial Sequence
  Synthetic
ugcaaacacacuuuuau

SEQ ID NO: 766945 - RNA, 17 nt, Artificial Sequence
  Synthetic
acugucuugccuuuuau

SEQ ID NO: 766946 - RNA, 17 nt, Artificial Sequence
  Synthetic
aaauuauaagcuuuuau

SEQ ID NO: 766947 - RNA, 17 nt, Artificial Sequence
  Synthetic
ccaaauguuucuuuuau

SEQ ID NO: 766948 - RNA, 17 nt, Artificial Sequence
  Synthetic
uuuugcuuuucuuuuau

SEQ ID NO: 766949 - RNA, 17 nt, Artificial Sequence
  Synthetic
aauucagaaaguuuuau

SEQ ID NO: 766950 - RNA, 17 nt, Artificial Sequence
  Synthetic
uaaaaauaaaguuuuau

SEQ ID NO: 766951 - RNA, 17 nt, Artificial Sequence
  Synthetic
uguaaauaaaguuuuau

SEQ ID NO: 766952 - RNA, 17 nt, Artificial Sequence
  Synthetic
uugaauggaaguuuuau

SEQ ID NO: 766953 - RNA, 17 nt, Artificial Sequence
  Synthetic
ugcuuuguaaguuuuau

SEQ ID NO: 766954 - RNA, 17 nt, Artificial Sequence
  Synthetic
aacccaaacaguuuuau

SEQ ID NO: 766955 - RNA, 17 nt, Artificial Sequence
  Synthetic
acccuaggcaguuuuau

SEQ ID NO: 766956 - RNA, 17 nt, Artificial Sequence
  Synthetic
ugcguaucucguuuuau

SEQ ID NO: 766957 - RNA, 17 nt, Artificial Sequence
  Synthetic
ccauaaagagguuuuau

SEQ ID NO: 766958 - RNA, 17 nt, Artificial Sequence
  Synthetic
agggaccacuguuuuau

SEQ ID NO: 766959 - RNA, 17 nt, Artificial Sequence
  Synthetic
cuuuuuauuuguuuuau

SEQ ID NO: 766960 - RNA, 17 nt, Artificial Sequence
  Synthetic
acccuccucauuuuuau

SEQ ID NO: 766961 - RNA, 17 nt, Artificial Sequence
  Synthetic
aaacaauucauuuuuau

SEQ ID NO: 766962 - RNA, 17 nt, Artificial Sequence
  Synthetic
cauuugaagauuuuuau

SEQ ID NO: 766963 - RNA, 17 nt, Artificial Sequence
  Synthetic
ucauuuuauauuuuuau

SEQ ID NO: 766964 - RNA, 17 nt, Artificial Sequence
  Synthetic
aaacauuuuauuuuuau

SEQ ID NO: 766965 - RNA, 17 nt, Artificial Sequence
  Synthetic
uaaaaccuacuuuuuau

SEQ ID NO: 766966 - RNA, 17 nt, Artificial Sequence
  Synthetic
agaaauuagcuuuuuau

SEQ ID NO: 766967 - RNA, 17 nt, Artificial Sequence
  Synthetic
uugcugaugcuuuuuau

SEQ ID NO: 766968 - RNA, 17 nt, Artificial Sequence
  Synthetic
caccagucucuuuuuau

SEQ ID NO: 766969 - RNA, 17 nt, Artificial Sequence
  Synthetic
aauguaauuguuuuuau

SEQ ID NO: 766970 - RNA, 17 nt, Artificial Sequence
  Synthetic
ccauacuaauuuuuuau

SEQ ID NO: 766971 - RNA, 17 nt, Artificial Sequence
  Synthetic
aaaauaaucuuuuuuau

SEQ ID NO: 766972 - RNA, 17 nt, Artificial Sequence
  Synthetic
uguuuuuuguuuuuuau

SEQ ID NO: 766973 - RNA, 17 nt, Artificial Sequence
  Synthetic
cuuuaaauuuuuuuuau

SEQ ID NO: 766974 - RNA, 17 nt, Artificial Sequence
  Synthetic
aggcaaaaaaaaaaacu

SEQ ID NO: 766975 - RNA, 17 nt, Artificial Sequence
  Synthetic
caguacuuaaaaaaacu

SEQ ID NO: 766976 - RNA, 17 nt, Artificial Sequence
  Synthetic
aaggugaucaaaaaacu

SEQ ID NO: 766977 - RNA, 17 nt, Artificial Sequence
  Synthetic
accuuugugaaaaaacu

SEQ ID NO: 766978 - RNA, 17 nt, Artificial Sequence
  Synthetic
uucuaucaacaaaaacu

SEQ ID NO: 766979 - RNA, 17 nt, Artificial Sequence
  Synthetic
uuauuugaacaaaaacu

SEQ ID NO: 766980 - RNA, 17 nt, Artificial Sequence
  Synthetic
cugauucaccaaaaacu

SEQ ID NO: 766981 - RNA, 17 nt, Artificial Sequence
  Synthetic
ugucucugccaaaaacu

SEQ ID NO: 766982 - RNA, 17 nt, Artificial Sequence
  Synthetic
agcaaaaagcaaaaacu

SEQ ID NO: 766983 - RNA, 17 nt, Artificial Sequence
  Synthetic
uaaagccugcaaaaacu

SEQ ID NO: 766984 - RNA, 17 nt, Artificial Sequence
  Synthetic
auuguuauuuaaaaacu

SEQ ID NO: 766985 - RNA, 17 nt, Artificial Sequence
  Synthetic
aaaacaaaaacaaaacu

SEQ ID NO: 766986 - RNA, 17 nt, Artificial Sequence
  Synthetic
auaagcaaaacaaaacu

SEQ ID NO: 766987 - RNA, 17 nt, Artificial Sequence
  Synthetic
agcucuccaacaaaacu

SEQ ID NO: 766988 - RNA, 17 nt, Artificial Sequence
  Synthetic
uccugauggacaaaacu

SEQ ID NO: 766989 - RNA, 17 nt, Artificial Sequence
  Synthetic
uuacagaugacaaaacu

SEQ ID NO: 766990 - RNA, 17 nt, Artificial Sequence
  Synthetic
auccaaacuacaaaacu

SEQ ID NO: 766991 - RNA, 17 nt, Artificial Sequence
  Synthetic
uuccauagcagaaaacu

SEQ ID NO: 766992 - RNA, 17 nt, Artificial Sequence
  Synthetic
auuuuauagagaaaacu

SEQ ID NO: 766993 - RNA, 17 nt, Artificial Sequence
  Synthetic
aaaacuaugagaaaacu

SEQ ID NO: 766994 - RNA, 17 nt, Artificial Sequence
  Synthetic
auucgagcaggaaaacu

SEQ ID NO: 766995 - RNA, 17 nt, Artificial Sequence
  Synthetic
aaaaauaaaugaaaacu

SEQ ID NO: 766996 - RNA, 17 nt, Artificial Sequence
  Synthetic
agagaaacgugaaaacu

SEQ ID NO: 766997 - RNA, 17 nt, Artificial Sequence
  Synthetic
ugacaaagaauaaaacu

SEQ ID NO: 766998 - RNA, 17 nt, Artificial Sequence
  Synthetic
aucuaaauaauaaaacu

SEQ ID NO: 766999 - RNA, 17 nt, Artificial Sequence
  Synthetic
accaagagcauaaaacu

SEQ ID NO: 767000 - RNA, 17 nt, Artificial Sequence
  Synthetic
auaacauagauaaaacu

SEQ ID NO: 767001 - RNA, 17 nt, Artificial Sequence
  Synthetic
uuuggugauauaaaacu

SEQ ID NO: 767002 - RNA, 17 nt, Artificial Sequence
  Synthetic
ugguuuagacuaaaacu

SEQ ID NO: 767003 - RNA, 17 nt, Artificial Sequence
  Synthetic
uguucaacuguaaaacu

SEQ ID NO: 767004 - RNA, 17 nt, Artificial Sequence
  Synthetic
uucucaucuguaaaacu

SEQ ID NO: 767005 - RNA, 17 nt, Artificial Sequence
  Synthetic
uuauauauuuuaaaacu

SEQ ID NO: 767006 - RNA, 17 nt, Artificial Sequence
  Synthetic
aaaacacacaacaaacu

SEQ ID NO: 767007 - RNA, 17 nt, Artificial Sequence
  Synthetic
ccucuauggcacaaacu

SEQ ID NO: 767008 - RNA, 17 nt, Artificial Sequence
  Synthetic
aaaagcaaggacaaacu

SEQ ID NO: 767009 - RNA, 17 nt, Artificial Sequence
  Synthetic
cuuuauaaugacaaacu

SEQ ID NO: 767010 - RNA, 17 nt, Artificial Sequence
  Synthetic
agcugggacuacaaacu

SEQ ID NO: 767011 - RNA, 17 nt, Artificial Sequence
  Synthetic
aauugaaucuacaaacu

SEQ ID NO: 767012 - RNA, 17 nt, Artificial Sequence
  Synthetic
uccuuaccucccaaacu

SEQ ID NO: 767013 - RNA, 17 nt, Artificial Sequence
  Synthetic
ccauagaaauccaaacu

SEQ ID NO: 767014 - RNA, 17 nt, Artificial Sequence
  Synthetic
uaagauugguccaaacu

SEQ ID NO: 767015 - RNA, 17 nt, Artificial Sequence
  Synthetic
acauuuuguggcaaacu

SEQ ID NO: 767016 - RNA, 17 nt, Artificial Sequence
  Synthetic
uuuuuaaaucucaaacu

SEQ ID NO: 767017 - RNA, 17 nt, Artificial Sequence
  Synthetic
ccgacugccuucaaacu

SEQ ID NO: 767018 - RNA, 17 nt, Artificial Sequence
  Synthetic
auuaaggauuucaaacu

SEQ ID NO: 767019 - RNA, 17 nt, Artificial Sequence
  Synthetic
cuuagacuuuucaaacu

SEQ ID NO: 767020 - RNA, 17 nt, Artificial Sequence
  Synthetic
cuggaaguuuucaaacu

SEQ ID NO: 767021 - RNA, 17 nt, Artificial Sequence
  Synthetic
acaaucguuuucaaacu

SEQ ID NO: 767022 - RNA, 17 nt, Artificial Sequence
  Synthetic
cauaugugaaagaaacu

SEQ ID NO: 767023 - RNA, 17 nt, Artificial Sequence
  Synthetic
cuggaugagaagaaacu

SEQ ID NO: 767024 - RNA, 17 nt, Artificial Sequence
  Synthetic
uccagagauaagaaacu

SEQ ID NO: 767025 - RNA, 17 nt, Artificial Sequence
  Synthetic
cuacaaaaacagaaacu

SEQ ID NO: 767026 - RNA, 17 nt, Artificial Sequence
  Synthetic
cacaaaaagcagaaacu

SEQ ID NO: 767027 - RNA, 17 nt, Artificial Sequence
  Synthetic
acaaaccaucagaaacu

SEQ ID NO: 767028 - RNA, 17 nt, Artificial Sequence
  Synthetic
cacacauaucagaaacu

SEQ ID NO: 767029 - RNA, 17 nt, Artificial Sequence
  Synthetic
uuguucuaucagaaacu

SEQ ID NO: 767030 - RNA, 17 nt, Artificial Sequence
  Synthetic
uccugaauagagaaacu

SEQ ID NO: 767031 - RNA, 17 nt, Artificial Sequence
  Synthetic
ucuccugaauagaaacu

SEQ ID NO: 767032 - RNA, 17 nt, Artificial Sequence
  Synthetic
uggcaacaguagaaacu

SEQ ID NO: 767033 - RNA, 17 nt, Artificial Sequence
  Synthetic
cuguugguuuagaaacu

SEQ ID NO: 767034 - RNA, 17 nt, Artificial Sequence
  Synthetic
uaaaccugagcgaaacu

SEQ ID NO: 767035 - RNA, 17 nt, Artificial Sequence
  Synthetic
aaagcaucaaggaaacu

SEQ ID NO: 767036 - RNA, 17 nt, Artificial Sequence
  Synthetic
caucagaugaggaaacu

SEQ ID NO: 767037 - RNA, 17 nt, Artificial Sequence
  Synthetic
cuuaccucuaggaaacu

SEQ ID NO: 767038 - RNA, 17 nt, Artificial Sequence
  Synthetic
agaacagaagggaaacu

SEQ ID NO: 767039 - RNA, 17 nt, Artificial Sequence
  Synthetic
ugucaaugggggaaacu

SEQ ID NO: 767040 - RNA, 17 nt, Artificial Sequence
  Synthetic
uuugaaacauggaaacu

SEQ ID NO: 767041 - RNA, 17 nt, Artificial Sequence
  Synthetic
ccuaacaucuggaaacu

SEQ ID NO: 767042 - RNA, 17 nt, Artificial Sequence
  Synthetic
ugaaucacuuggaaacu

SEQ ID NO: 767043 - RNA, 17 nt, Artificial Sequence
  Synthetic
auauaauaaaugaaacu

SEQ ID NO: 767044 - RNA, 17 nt, Artificial Sequence
  Synthetic
augaaagagaugaaacu

SEQ ID NO: 767045 - RNA, 17 nt, Artificial Sequence
  Synthetic
caugggucacugaaacu

SEQ ID NO: 767046 - RNA, 17 nt, Artificial Sequence
  Synthetic
aagaaauaccugaaacu

SEQ ID NO: 767047 - RNA, 17 nt, Artificial Sequence
  Synthetic
uagaucuuccugaaacu

SEQ ID NO: 767048 - RNA, 17 nt, Artificial Sequence
  Synthetic
aaacuucuugugaaacu

SEQ ID NO: 767049 - RNA, 17 nt, Artificial Sequence
  Synthetic
ucagaggaauugaaacu

SEQ ID NO: 767050 - RNA, 17 nt, Artificial Sequence
  Synthetic
cagaaaauguugaaacu

SEQ ID NO: 767051 - RNA, 17 nt, Artificial Sequence
  Synthetic
uaaauugcaaauaaacu

SEQ ID NO: 767052 - RNA, 17 nt, Artificial Sequence
  Synthetic
acucauagaaauaaacu

SEQ ID NO: 767053 - RNA, 17 nt, Artificial Sequence
  Synthetic
uuauagcuagauaaacu

SEQ ID NO: 767054 - RNA, 17 nt, Artificial Sequence
  Synthetic
aauaacagggauaaacu

SEQ ID NO: 767055 - RNA, 17 nt, Artificial Sequence
  Synthetic
ugaagagcagcuaaacu

SEQ ID NO: 767056 - RNA, 17 nt, Artificial Sequence
  Synthetic
auaaaaccugcuaaacu

SEQ ID NO: 767057 - RNA, 17 nt, Artificial Sequence
  Synthetic
auccuguuugcuaaacu

SEQ ID NO: 767058 - RNA, 17 nt, Artificial Sequence
  Synthetic
ccugcuaaaucuaaacu

SEQ ID NO: 767059 - RNA, 17 nt, Artificial Sequence
  Synthetic
caaucauacaguaaacu

SEQ ID NO: 767060 - RNA, 17 nt, Artificial Sequence
  Synthetic
ugaccaaucaguaaacu

SEQ ID NO: 767061 - RNA, 17 nt, Artificial Sequence
  Synthetic
caguagaagaguaaacu

SEQ ID NO: 767062 - RNA, 17 nt, Artificial Sequence
  Synthetic
uuugucaucuguaaacu

SEQ ID NO: 767063 - RNA, 17 nt, Artificial Sequence
  Synthetic
acacccuuuauuaaacu

SEQ ID NO: 767064 - RNA, 17 nt, Artificial Sequence
  Synthetic
uuugcagcacuuaaacu

SEQ ID NO: 767065 - RNA, 17 nt, Artificial Sequence
  Synthetic
ucuucuugauuuaaacu

SEQ ID NO: 767066 - RNA, 17 nt, Artificial Sequence
  Synthetic
acaaaacuuuuuaaacu

SEQ ID NO: 767067 - RNA, 17 nt, Artificial Sequence
  Synthetic
uguuugaccaaacaacu

SEQ ID NO: 767068 - RNA, 17 nt, Artificial Sequence
  Synthetic
aaaagugcuuaacaacu

SEQ ID NO: 767069 - RNA, 17 nt, Artificial Sequence
  Synthetic
aauauaaauccacaacu

SEQ ID NO: 767070 - RNA, 17 nt, Artificial Sequence
  Synthetic
agguggugagcacaacu

SEQ ID NO: 767071 - RNA, 17 nt, Artificial Sequence
  Synthetic
ccuuugcauucacaacu

SEQ ID NO: 767072 - RNA, 17 nt, Artificial Sequence
  Synthetic
uuaucacaaggacaacu

SEQ ID NO: 767073 - RNA, 17 nt, Artificial Sequence
  Synthetic
agaguggaaggacaacu

SEQ ID NO: 767074 - RNA, 17 nt, Artificial Sequence
  Synthetic
uuaucugcaggacaacu

SEQ ID NO: 767075 - RNA, 17 nt, Artificial Sequence
  Synthetic
uaaaacaaaugacaacu

SEQ ID NO: 767076 - RNA, 17 nt, Artificial Sequence
  Synthetic
auaggcuuaugacaacu

SEQ ID NO: 767077 - RNA, 17 nt, Artificial Sequence
  Synthetic
auauugaccugacaacu

SEQ ID NO: 767078 - RNA, 17 nt, Artificial Sequence
  Synthetic
uaaguaauaauacaacu

SEQ ID NO: 767079 - RNA, 17 nt, Artificial Sequence
  Synthetic
ucugaugacucccaacu

SEQ ID NO: 767080 - RNA, 17 nt, Artificial Sequence
  Synthetic
caaauguuuagccaacu

SEQ ID NO: 767081 - RNA, 17 nt, Artificial Sequence
  Synthetic
uggcuuacacuccaacu

SEQ ID NO: 767082 - RNA, 17 nt, Artificial Sequence
  Synthetic
uucaauuaccuccaacu

SEQ ID NO: 767083 - RNA, 17 nt, Artificial Sequence
  Synthetic
ugcucuugucuccaacu

SEQ ID NO: 767084 - RNA, 17 nt, Artificial Sequence
  Synthetic
aagaguguuuuccaacu

SEQ ID NO: 767085 - RNA, 17 nt, Artificial Sequence
  Synthetic
cagaguguuuuccaacu

SEQ ID NO: 767086 - RNA, 17 nt, Artificial Sequence
  Synthetic
uuagagaaaaagcaacu

SEQ ID NO: 767087 - RNA, 17 nt, Artificial Sequence
  Synthetic
aguauagaaaagcaacu

SEQ ID NO: 767088 - RNA, 17 nt, Artificial Sequence
  Synthetic
uaacaaucccagcaacu

SEQ ID NO: 767089 - RNA, 17 nt, Artificial Sequence
  Synthetic
uuuauguaauggcaacu

SEQ ID NO: 767090 - RNA, 17 nt, Artificial Sequence
  Synthetic
uugcaucuaaaucaacu

SEQ ID NO: 767091 - RNA, 17 nt, Artificial Sequence
  Synthetic
auuuuaccuaaucaacu

SEQ ID NO: 767092 - RNA, 17 nt, Artificial Sequence
  Synthetic
auuugauagcaucaacu

SEQ ID NO: 767093 - RNA, 17 nt, Artificial Sequence
  Synthetic
augaaauuagaucaacu

SEQ ID NO: 767094 - RNA, 17 nt, Artificial Sequence
  Synthetic
augaugugggaucaacu

SEQ ID NO: 767095 - RNA, 17 nt, Artificial Sequence
  Synthetic
uuuuuccccacucaacu

SEQ ID NO: 767096 - RNA, 17 nt, Artificial Sequence
  Synthetic
uaaaauccagcucaacu

SEQ ID NO: 767097 - RNA, 17 nt, Artificial Sequence
  Synthetic
acauacagagcucaacu

SEQ ID NO: 767098 - RNA, 17 nt, Artificial Sequence
  Synthetic
uauucucauucucaacu

SEQ ID NO: 767099 - RNA, 17 nt, Artificial Sequence
  Synthetic
aauuucaugugucaacu

SEQ ID NO: 767100 - RNA, 17 nt, Artificial Sequence
  Synthetic
ugaauuuugugucaacu

SEQ ID NO: 767101 - RNA, 17 nt, Artificial Sequence
  Synthetic
acucuucauauucaacu

SEQ ID NO: 767102 - RNA, 17 nt, Artificial Sequence
  Synthetic
aauuaaccacuucaacu

SEQ ID NO: 767103 - RNA, 17 nt, Artificial Sequence
  Synthetic
caccaguguguucaacu

SEQ ID NO: 767104 - RNA, 17 nt, Artificial Sequence
  Synthetic
uuugguaaauuucaacu

SEQ ID NO: 767105 - RNA, 17 nt, Artificial Sequence
  Synthetic
uuuccuucauuucaacu

SEQ ID NO: 767106 - RNA, 17 nt, Artificial Sequence
  Synthetic
accagugauuuucaacu

SEQ ID NO: 767107 - RNA, 17 nt, Artificial Sequence
  Synthetic
auuuuauuuuuucaacu

SEQ ID NO: 767108 - RNA, 17 nt, Artificial Sequence
  Synthetic
uuuuuuuuuuuucaacu

SEQ ID NO: 767109 - RNA, 17 nt, Artificial Sequence
  Synthetic
uaacagguaaaagaacu

SEQ ID NO: 767110 - RNA, 17 nt, Artificial Sequence
  Synthetic
uagcauuaacaagaacu

SEQ ID NO: 767111 - RNA, 17 nt, Artificial Sequence
  Synthetic
aaugcacuccaagaacu

SEQ ID NO: 767112 - RNA, 17 nt, Artificial Sequence
  Synthetic
uguuacuaucaagaacu

SEQ ID NO: 767113 - RNA, 17 nt, Artificial Sequence
  Synthetic
ugagaguaagaagaacu

SEQ ID NO: 767114 - RNA, 17 nt, Artificial Sequence
  Synthetic
auacuuugcgaagaacu

SEQ ID NO: 767115 - RNA, 17 nt, Artificial Sequence
  Synthetic
aggcagagggaagaacu

SEQ ID NO: 767116 - RNA, 17 nt, Artificial Sequence
  Synthetic
uagcaaagauaagaacu

SEQ ID NO: 767117 - RNA, 17 nt, Artificial Sequence
  Synthetic
ccauuaugauaagaacu

SEQ ID NO: 767118 - RNA, 17 nt, Artificial Sequence
  Synthetic
acuuuuaucuaagaacu

SEQ ID NO: 767119 - RNA, 17 nt, Artificial Sequence
  Synthetic
acuaagcucuaagaacu

SEQ ID NO: 767120 - RNA, 17 nt, Artificial Sequence
  Synthetic
augucuucuacagaacu

SEQ ID NO: 767121 - RNA, 17 nt, Artificial Sequence
  Synthetic
aaaagguuuacagaacu

SEQ ID NO: 767122 - RNA, 17 nt, Artificial Sequence
  Synthetic
ugcgcccggccagaacu

SEQ ID NO: 767123 - RNA, 17 nt, Artificial Sequence
  Synthetic
acuuggagaucagaacu

SEQ ID NO: 767124 - RNA, 17 nt, Artificial Sequence
  Synthetic
uggaaucaaagagaacu

SEQ ID NO: 767125 - RNA, 17 nt, Artificial Sequence
  Synthetic
ugaaugcugagagaacu

SEQ ID NO: 767126 - RNA, 17 nt, Artificial Sequence
  Synthetic
uacacugcaugagaacu

SEQ ID NO: 767127 - RNA, 17 nt, Artificial Sequence
  Synthetic
acaccacugugagaacu

SEQ ID NO: 767128 - RNA, 17 nt, Artificial Sequence
  Synthetic
agacaccagcuagaacu

SEQ ID NO: 767129 - RNA, 17 nt, Artificial Sequence
  Synthetic
uccaaguacuuagaacu

SEQ ID NO: 767130 - RNA, 17 nt, Artificial Sequence
  Synthetic
uuuccuugcuuagaacu

SEQ ID NO: 767131 - RNA, 17 nt, Artificial Sequence
  Synthetic
ugauaaguguuagaacu

SEQ ID NO: 767132 - RNA, 17 nt, Artificial Sequence
  Synthetic
aggcagaacaaggaacu

SEQ ID NO: 767133 - RNA, 17 nt, Artificial Sequence
  Synthetic
uaggggaagaaggaacu

SEQ ID NO: 767134 - RNA, 17 nt, Artificial Sequence
  Synthetic
aaugcuauccaggaacu

SEQ ID NO: 767135 - RNA, 17 nt, Artificial Sequence
  Synthetic
cuuuguaaauaggaacu

SEQ ID NO: 767136 - RNA, 17 nt, Artificial Sequence
  Synthetic
ugggcgaagggggaacu

SEQ ID NO: 767137 - RNA, 17 nt, Artificial Sequence
  Synthetic
uacuaaucuggggaacu

SEQ ID NO: 767138 - RNA, 17 nt, Artificial Sequence
  Synthetic
cagaugcccugggaacu

SEQ ID NO: 767139 - RNA, 17 nt, Artificial Sequence
  Synthetic
uucugcaggugggaacu

SEQ ID NO: 767140 - RNA, 17 nt, Artificial Sequence
  Synthetic
augaacacuugggaacu

SEQ ID NO: 767141 - RNA, 17 nt, Artificial Sequence
  Synthetic
aggagaacaaaugaacu

SEQ ID NO: 767142 - RNA, 17 nt, Artificial Sequence
  Synthetic
uucaaaggccaugaacu

SEQ ID NO: 767143 - RNA, 17 nt, Artificial Sequence
  Synthetic
aagccccuccaugaacu

SEQ ID NO: 767144 - RNA, 17 nt, Artificial Sequence
  Synthetic
cacauaauucaugaacu

SEQ ID NO: 767145 - RNA, 17 nt, Artificial Sequence
  Synthetic
auaugcugcuaugaacu

SEQ ID NO: 767146 - RNA, 17 nt, Artificial Sequence
  Synthetic
aagggaaaaacugaacu

SEQ ID NO: 767147 - RNA, 17 nt, Artificial Sequence
  Synthetic
aguccagccacugaacu

SEQ ID NO: 767148 - RNA, 17 nt, Artificial Sequence
  Synthetic
aaagaggugccugaacu

SEQ ID NO: 767149 - RNA, 17 nt, Artificial Sequence
  Synthetic
uccuacaguccugaacu

SEQ ID NO: 767150 - RNA, 17 nt, Artificial Sequence
  Synthetic
cauuuugauucugaacu

SEQ ID NO: 767151 - RNA, 17 nt, Artificial Sequence
  Synthetic
aaugucauuucugaacu

SEQ ID NO: 767152 - RNA, 17 nt, Artificial Sequence
  Synthetic
aaggcuuuccgugaacu

SEQ ID NO: 767153 - RNA, 17 nt, Artificial Sequence
  Synthetic
agucccugaggugaacu

SEQ ID NO: 767154 - RNA, 17 nt, Artificial Sequence
  Synthetic
ugauuuaauggugaacu

SEQ ID NO: 767155 - RNA, 17 nt, Artificial Sequence
  Synthetic
cgagaaucacuugaacu

SEQ ID NO: 767156 - RNA, 17 nt, Artificial Sequence
  Synthetic
ggagaaucacuugaacu

SEQ ID NO: 767157 - RNA, 17 nt, Artificial Sequence
  Synthetic
ccagaaucgcuugaacu

SEQ ID NO: 767158 - RNA, 17 nt, Artificial Sequence
  Synthetic
ccgccucccaaauaacu

SEQ ID NO: 767159 - RNA, 17 nt, Artificial Sequence
  Synthetic
uaugcauagaaauaacu

SEQ ID NO: 767160 - RNA, 17 nt, Artificial Sequence
  Synthetic
aacugagaccaauaacu

SEQ ID NO: 767161 - RNA, 17 nt, Artificial Sequence
  Synthetic
aauaauaaucaauaacu

SEQ ID NO: 767162 - RNA, 17 nt, Artificial Sequence
  Synthetic
auuuuuauucaauaacu

SEQ ID NO: 767163 - RNA, 17 nt, Artificial Sequence
  Synthetic
aauuaucaagaauaacu

SEQ ID NO: 767164 - RNA, 17 nt, Artificial Sequence
  Synthetic
uccacacaguaauaacu

SEQ ID NO: 767165 - RNA, 17 nt, Artificial Sequence
  Synthetic
acauuccagucauaacu

SEQ ID NO: 767166 - RNA, 17 nt, Artificial Sequence
  Synthetic
aguugauguucauaacu

SEQ ID NO: 767167 - RNA, 17 nt, Artificial Sequence
  Synthetic
uugauaaacagauaacu

SEQ ID NO: 767168 - RNA, 17 nt, Artificial Sequence
  Synthetic
aguuacaacagauaacu

SEQ ID NO: 767169 - RNA, 17 nt, Artificial Sequence
  Synthetic
aauccuccaggauaacu

SEQ ID NO: 767170 - RNA, 17 nt, Artificial Sequence
  Synthetic
aaagaaaggggauaacu

SEQ ID NO: 767171 - RNA, 17 nt, Artificial Sequence
  Synthetic
uuacagcacugauaacu

SEQ ID NO: 767172 - RNA, 17 nt, Artificial Sequence
  Synthetic
uagcaaaugauauaacu

SEQ ID NO: 767173 - RNA, 17 nt, Artificial Sequence
  Synthetic
aaugcccauauauaacu

SEQ ID NO: 767174 - RNA, 17 nt, Artificial Sequence
  Synthetic
cagccuuucguauaacu

SEQ ID NO: 767175 - RNA, 17 nt, Artificial Sequence
  Synthetic
uuaaugccuguauaacu

SEQ ID NO: 767176 - RNA, 17 nt, Artificial Sequence
  Synthetic
ccuacuccuguauaacu

SEQ ID NO: 767177 - RNA, 17 nt, Artificial Sequence
  Synthetic
uuuaaaucauuauaacu

SEQ ID NO: 767178 - RNA, 17 nt, Artificial Sequence
  Synthetic
ucauacauauuauaacu

SEQ ID NO: 767179 - RNA, 17 nt, Artificial Sequence
  Synthetic
uauaauauguuauaacu

SEQ ID NO: 767180 - RNA, 17 nt, Artificial Sequence
  Synthetic
uauugcuauuuauaacu

SEQ ID NO: 767181 - RNA, 17 nt, Artificial Sequence
  Synthetic
accaagauuuuauaacu

SEQ ID NO: 767182 - RNA, 17 nt, Artificial Sequence
  Synthetic
agcaugguuuuauaacu

SEQ ID NO: 767183 - RNA, 17 nt, Artificial Sequence
  Synthetic
aauagcagaaacuaacu

SEQ ID NO: 767184 - RNA, 17 nt, Artificial Sequence
  Synthetic
acuuuuguugacuaacu
